United States Patent Application Publication US 2007/0042381 A1 - sequence listing, part 5

SEQ ID NO: 176277 - RNA, 22 nt, Human
uaaaaggcacuuggaugcugag

SEQ ID NO: 176278 - RNA, 22 nt, Human
cugaggagcugaaggcccucca

SEQ ID NO: 176279 - RNA, 22 nt, Human
aacuaguuuuagcucuagcaac

SEQ ID NO: 176280 - RNA, 22 nt, Human
augcuuuacaguuuuccaaaca

SEQ ID NO: 176281 - RNA, 22 nt, Human
caggaaacauucuugguaagga

SEQ ID NO: 176282 - RNA, 22 nt, Human
uuagccauuaauguccugugca

SEQ ID NO: 176283 - RNA, 21 nt, Human
ucauuuuuauugcuaccuugc

SEQ ID NO: 176284 - RNA, 20 nt, Human
cauggcugugagcccacagg

SEQ ID NO: 176285 - RNA, 22 nt, Human
ccagcucucagcgggagacuca

SEQ ID NO: 176286 - RNA, 22 nt, Human
cuuuacagauggauaauuguuu

SEQ ID NO: 176287 - RNA, 22 nt, Human
acaugacagggaaugaggugaa

SEQ ID NO: 176288 - RNA, 22 nt, Human
gcugucuguggugucagcugac

SEQ ID NO: 176289 - RNA, 22 nt, Human
uguggcugugguuuucauaaau

SEQ ID NO: 176290 - RNA, 22 nt, Human
caauacuuccuuguuagaggca

SEQ ID NO: 176291 - RNA, 22 nt, Human
aaucugagggaacuugaacucc

SEQ ID NO: 176292 - RNA, 22 nt, Human
caaauacuaaacauaagauuuu

SEQ ID NO: 176293 - RNA, 23 nt, Human
auugauucccucuuggaagggau

SEQ ID NO: 176294 - RNA, 22 nt, Human
aacacaguuuuccaaaauagag

SEQ ID NO: 176295 - RNA, 21 nt, Human
ugcuugggggcuucaggagcu

SEQ ID NO: 176296 - RNA, 22 nt, Human
acauguguguauacguauuuau

SEQ ID NO: 176297 - RNA, 22 nt, Human
acugugcugcucuccgcagccc

SEQ ID NO: 176298 - RNA, 22 nt, Human
uggagcugggguuugaaucugg

SEQ ID NO: 176299 - RNA, 20 nt, Human
aggaaggaaguuugcaugga

SEQ ID NO: 176300 - RNA, 22 nt, Human
ggguccagaaugagaaugggcu

SEQ ID NO: 176301 - RNA, 22 nt, Human
cauggcagaaaccugagcugcu

SEQ ID NO: 176302 - RNA, 22 nt, Human
ucagaguuucugauuuaguagg

SEQ ID NO: 176303 - RNA, 22 nt, Human
aggcccaguagucgacggcgcu

SEQ ID NO: 176304 - RNA, 22 nt, Human
auucaguggauaucuucacuuu

SEQ ID NO: 176305 - RNA, 22 nt, Human
cuggcccaguucugcguuuugc

SEQ ID NO: 176306 - RNA, 22 nt, Human
accaugugaucaaaacaaaucc

SEQ ID NO: 176307 - RNA, 22 nt, Human
uggucagcguuugucagagcag

SEQ ID NO: 176308 - RNA, 21 nt, Human
acaaauuguuuauauaggaag

SEQ ID NO: 176309 - RNA, 22 nt, Human
ucauaggaguagcagugagagg

SEQ ID NO: 176310 - RNA, 22 nt, Human
gcugccucacuccagcccaaua

SEQ ID NO: 176311 - RNA, 22 nt, Human
ggcuguggacacugagcucaga

SEQ ID NO: 176312 - RNA, 22 nt, Human
gcuuuaaugcaauuucaccuca

SEQ ID NO: 176313 - RNA, 22 nt, Human
cucaggauuuacuaauuucaag

SEQ ID NO: 176314 - RNA, 22 nt, Human
cugcggugggcugggcuguccc

SEQ ID NO: 176315 - RNA, 22 nt, Human
uagggagaggaagcaggccgcu

SEQ ID NO: 176316 - RNA, 22 nt, Human
uucagaacaaccaugguuagau

SEQ ID NO: 176317 - RNA, 22 nt, Human
uaacauuucggugacaguggga

SEQ ID NO: 176318 - RNA, 22 nt, Human
uacacagugaguccucucugcc

SEQ ID NO: 176319 - RNA, 22 nt, Human
agaaucagaugaagacuccugc

SEQ ID NO: 176320 - RNA, 20 nt, Human
aacacugaggccuacucuuc

SEQ ID NO: 176321 - RNA, 22 nt, Human
cgcuucucuacucccagccagu

SEQ ID NO: 176322 - RNA, 22 nt, Human
gagagcuggguucaaguagcug

SEQ ID NO: 176323 - RNA, 22 nt, Human
agaugguccaucuauuuucuau

SEQ ID NO: 176324 - RNA, 22 nt, Human
ccaagcagucugcuaggaguuu

SEQ ID NO: 176325 - RNA, 22 nt, Human
ugauucaagagaguugggguau

SEQ ID NO: 176326 - RNA, 22 nt, Human
ggagagaaucugaaccugcucc

SEQ ID NO: 176327 - RNA, 22 nt, Human
gagcacagauccuggagccaca

SEQ ID NO: 176328 - RNA, 22 nt, Human
gccaggcauucuagaaguagug

SEQ ID NO: 176329 - RNA, 22 nt, Human
augucagaagcuggaugacagc

SEQ ID NO: 176330 - RNA, 22 nt, Human
uuucaacaggaugauaauaggc

SEQ ID NO: 176331 - RNA, 16 nt, Human
aaggagggaagagaau

SEQ ID NO: 176332 - RNA, 22 nt, Human
auuugcucuagcugcagugaau

SEQ ID NO: 176333 - RNA, 22 nt, Human
cugaggccguuggugggccuua

SEQ ID NO: 176334 - RNA, 22 nt, Human
ucucuguaagagaggcuuucau

SEQ ID NO: 176335 - RNA, 22 nt, Human
cucuggagaugguucucaauug

SEQ ID NO: 176336 - RNA, 22 nt, Human
acaagaaccaaagaaggauauu

SEQ ID NO: 176337 - RNA, 22 nt, Human
uucuuuuaauuucugucugcag

SEQ ID NO: 176338 - RNA, 22 nt, Human
gagcuggaggaccaggacuggg

SEQ ID NO: 176339 - RNA, 22 nt, Human
uagaggcacccuggaggagacu

SEQ ID NO: 176340 - RNA, 22 nt, Human
ucugaaauuuuaguuauagaaa

SEQ ID NO: 176341 - RNA, 18 nt, Human
cccagcuggugggucagu

SEQ ID NO: 176342 - RNA, 21 nt, Human
acacaaaccuccucagccugg

SEQ ID NO: 176343 - RNA, 18 nt, Human
uaggaggauacugagaug

SEQ ID NO: 176344 - RNA, 22 nt, Human
cagggagaggcaucauagggaa

SEQ ID NO: 176345 - RNA, 22 nt, Human
cuggcaggcaaauuggugggag

SEQ ID NO: 176346 - RNA, 22 nt, Human
agggcuguuuuuggcaccuggg

SEQ ID NO: 176347 - RNA, 22 nt, Human
auucagaaaguugucauauuug

SEQ ID NO: 176348 - RNA, 22 nt, Human
uugcucauuugccuuuagguuu

SEQ ID NO: 176349 - RNA, 22 nt, Human
cuggcucuaucuccaaggcugg

SEQ ID NO: 176350 - RNA, 22 nt, Human
aaagugcuuuaggauauuugga

SEQ ID NO: 176351 - RNA, 22 nt, Human
uauucucugcagcugaauguuu

SEQ ID NO: 176352 - RNA, 22 nt, Human
uccagaggggcagcccugugcu

SEQ ID NO: 176353 - RNA, 22 nt, Human
uacacauaggucugaauaaaaa

SEQ ID NO: 176354 - RNA, 22 nt, Human
ggugggcaggcgaggcccaggu

SEQ ID NO: 176355 - RNA, 19 nt, Human
gaucagagugucagcuugu

SEQ ID NO: 176356 - RNA, 22 nt, Human
acuuuugaagaauuaugcaaaa

SEQ ID NO: 176357 - RNA, 22 nt, Human
gugggccuccccuuuacgagcc

SEQ ID NO: 176358 - RNA, 20 nt, Human
uggcuucucuucacuccugu

SEQ ID NO: 176359 - RNA, 22 nt, Human
uggaaugaaaaguacuucagaa

SEQ ID NO: 176360 - RNA, 22 nt, Human
uggcccaggucucucugagccc

SEQ ID NO: 176361 - RNA, 22 nt, Human
acuggcagaacgugaugcgggu

SEQ ID NO: 176362 - RNA, 21 nt, Human
ggcaagaaacacaaucaagua

SEQ ID NO: 176363 - RNA, 22 nt, Human
acagacacaggcguggagucgc

SEQ ID NO: 176364 - RNA, 22 nt, Human
ggagggaguuucauuccugccc

SEQ ID NO: 176365 - RNA, 22 nt, Human
gggaggaaagagaaguggucca

SEQ ID NO: 176366 - RNA, 22 nt, Human
uggcccuuugguuuaugacuga

SEQ ID NO: 176367 - RNA, 22 nt, Human
cauucacaauggauugcuucaa

SEQ ID NO: 176368 - RNA, 22 nt, Human
uagcccagaugauugaaccaug

SEQ ID NO: 176369 - RNA, 20 nt, Human
uuugcgaggccaaggcgggc

SEQ ID NO: 176370 - RNA, 22 nt, Human
uuuucaguaaugucuacauaau

SEQ ID NO: 176371 - RNA, 20 nt, Human
ucaagaugaggucauacugg

SEQ ID NO: 176372 - RNA, 22 nt, Human
uggguucuuaaagggcuagguu

SEQ ID NO: 176373 - RNA, 20 nt, Human
auagaaucacaaguccugaa

SEQ ID NO: 176374 - RNA, 22 nt, Human
auugauucucauaggaccaucu

SEQ ID NO: 176375 - RNA, 21 nt, Human
augucaaaugcuuuauuuuau

SEQ ID NO: 176376 - RNA, 22 nt, Human
gguggggcuaggaccucaggau

SEQ ID NO: 176377 - RNA, 22 nt, Human
uaucuuuaacuugcaguauuua

SEQ ID NO: 176378 - RNA, 22 nt, Human
cuggaaggggcagucuuugggc

SEQ ID NO: 176379 - RNA, 22 nt, Human
agcuccuacucuaugccagaca

SEQ ID NO: 176380 - RNA, 22 nt, Human
uuacauguggugugaagaagag

SEQ ID NO: 176381 - RNA, 22 nt, Human
agcaggcagcaugggacccucc

SEQ ID NO: 176382 - RNA, 22 nt, Human
agaaggcucacuaagagugacu

SEQ ID NO: 176383 - RNA, 22 nt, Human
ggcuuuauuugcagccauuguu

SEQ ID NO: 176384 - RNA, 22 nt, Human
ccuaggcuggcugucuucaggu

SEQ ID NO: 176385 - RNA, 22 nt, Human
cuguuaaaagcacugccauccu

SEQ ID NO: 176386 - RNA, 22 nt, Human
uucccucucuagcuuuccccaa

SEQ ID NO: 176387 - RNA, 18 nt, Human
caaauagcaugauguccu

SEQ ID NO: 176388 - RNA, 22 nt, Human
auauaaguuaguggucauguuu

SEQ ID NO: 176389 - RNA, 22 nt, Human
uccugggacucugccucaggcu

SEQ ID NO: 176390 - RNA, 22 nt, Human
ccagugcauaaucaauacagcc

SEQ ID NO: 176391 - RNA, 20 nt, Human
aacugagaguucaggaggag

SEQ ID NO: 176392 - RNA, 22 nt, Human
cagguccuuuaguguccagaac

SEQ ID NO: 176393 - RNA, 22 nt, Human
agccuucacugggaccuuggau

SEQ ID NO: 176394 - RNA, 22 nt, Human
gugcauuaacaacccagaacuc

SEQ ID NO: 176395 - RNA, 22 nt, Human
ucugaaaugcaggcaauuugcu

SEQ ID NO: 176396 - RNA, 22 nt, Human
caucuguugcuuccuaacaagu

SEQ ID NO: 176397 - RNA, 19 nt, Human
ugcagaggguaggaaggcc

SEQ ID NO: 176398 - RNA, 22 nt, Human
cuggggaauagagcuggagacc

SEQ ID NO: 176399 - RNA, 22 nt, Human
acagugaaugcccaagaaaagu

SEQ ID NO: 176400 - RNA, 22 nt, Human
ccagagcuugacgugcaacgga

SEQ ID NO: 176401 - RNA, 22 nt, Human
ggcaaaaaguucccaucagugu

SEQ ID NO: 176402 - RNA, 22 nt, Human
aggcugccucuuuugagagggu

SEQ ID NO: 176403 - RNA, 22 nt, Human
agaaagggucacugaaagagga

SEQ ID NO: 176404 - RNA, 22 nt, Human
agucuguguauauucacugccc

SEQ ID NO: 176405 - RNA, 22 nt, Human
ugcauggaggaagaugaaugca

SEQ ID NO: 176406 - RNA, 22 nt, Human
gggcucuggggugcccuggcau

SEQ ID NO: 176407 - RNA, 22 nt, Human
uuuaugaacuacagauauaacu

SEQ ID NO: 176408 - RNA, 22 nt, Human
guggauuacaagacaguugaga

SEQ ID NO: 176409 - RNA, 22 nt, Human
guauucaguuugauugucuaca

SEQ ID NO: 176410 - RNA, 22 nt, Human
agucagaaucugcauuuuaacc

SEQ ID NO: 176411 - RNA, 22 nt, Human
augggacagggcuggcuggucc

SEQ ID NO: 176412 - RNA, 22 nt, Human
aaaguggggucuagagggccug

SEQ ID NO: 176413 - RNA, 22 nt, Human
agucacaugaggaaggggaagg

SEQ ID NO: 176414 - RNA, 22 nt, Human
cauggcaggcuucuucagccuu

SEQ ID NO: 176415 - RNA, 17 nt, Human
gacaagacagaauucau

SEQ ID NO: 176416 - RNA, 22 nt, Human
cuggaggaggaagucuacaaug

SEQ ID NO: 176417 - RNA, 22 nt, Human
ucuuauugucuagauugagaug

SEQ ID NO: 176418 - RNA, 22 nt, Human
aaagaccauguuuacagcuagg

SEQ ID NO: 176419 - RNA, 22 nt, Human
agaagccaaaggggccagauau

SEQ ID NO: 176420 - RNA, 22 nt, Human
auauucuuccaaaacaucauuu

SEQ ID NO: 176421 - RNA, 22 nt, Human
ccucuguacaggucagcaucua

SEQ ID NO: 176422 - RNA, 22 nt, Human
auuuccaugucgguauuuuaua

SEQ ID NO: 176423 - RNA, 22 nt, Human
agcccagggaguugauuagcau

SEQ ID NO: 176424 - RNA, 22 nt, Human
ucaaaugccagugguguggauc

SEQ ID NO: 176425 - RNA, 22 nt, Human
ggcuucucagcacacuguccac

SEQ ID NO: 176426 - RNA, 22 nt, Human
ucaggccugugcuggaggagau

SEQ ID NO: 176427 - RNA, 22 nt, Human
uguuggaauaagugcuugaagg

SEQ ID NO: 176428 - RNA, 19 nt, Human
gucuagaacauuguaggug

SEQ ID NO: 176429 - RNA, 22 nt, Human
cggcugcugccugagucgcugu

SEQ ID NO: 176430 - RNA, 22 nt, Human
aacugcauucagaaagcucacu

SEQ ID NO: 176431 - RNA, 22 nt, Human
agaggggcaaguaaagagucuu

SEQ ID NO: 176432 - RNA, 22 nt, Human
gcccagccuccaagcuccaagg

SEQ ID NO: 176433 - RNA, 22 nt, Human
ugcauuuaguuuuaauaaagga

SEQ ID NO: 176434 - RNA, 22 nt, Human
uauacacauuacaguuucagga

SEQ ID NO: 176435 - RNA, 22 nt, Human
acagggcagcaacuuugugccu

SEQ ID NO: 176436 - RNA, 22 nt, Human
auccugagguacugcagggccg

SEQ ID NO: 176437 - RNA, 22 nt, Human
ugcaauuagcauuguauucuua

SEQ ID NO: 176438 - RNA, 22 nt, Human
cucucagggucccugcggagga

SEQ ID NO: 176439 - RNA, 22 nt, Human
uuccucaacaacuucccuacag

SEQ ID NO: 176440 - RNA, 22 nt, Human
uuuccucuuugugacacagcug

SEQ ID NO: 176441 - RNA, 22 nt, Human
ugcagggcacggugcgcguggg

SEQ ID NO: 176442 - RNA, 22 nt, Human
uguccuggaaaaauggagaguu

SEQ ID NO: 176443 - RNA, 22 nt, Human
uggugcagacaggagccccgcu

SEQ ID NO: 176444 - RNA, 22 nt, Human
aaggcagcuucaccacagcauu

SEQ ID NO: 176445 - RNA, 22 nt, Human
ccuggcaugaggagcaugaggu

SEQ ID NO: 176446 - RNA, 22 nt, Human
ugucucuggcccaugagcagag

SEQ ID NO: 176447 - RNA, 22 nt, Human
ccucacuggccagccaggggug

SEQ ID NO: 176448 - RNA, 22 nt, Human
agccuucucugaaauucuguuu

SEQ ID NO: 176449 - RNA, 23 nt, Human
uguuuguuucuaugagagauagc

SEQ ID NO: 176450 - RNA, 22 nt, Human
uuaauuagagcugauguucaua

SEQ ID NO: 176451 - RNA, 18 nt, Human
gagucuuuguuacugcug

SEQ ID NO: 176452 - RNA, 22 nt, Human
aaggucuguggccaccucuggg

SEQ ID NO: 176453 - RNA, 22 nt, Human
uuugucaaaucaaaccacauuc

SEQ ID NO: 176454 - RNA, 22 nt, Human
cccaggcuuuuaaguuagacag

SEQ ID NO: 176455 - RNA, 22 nt, Human
gcuguacaaauuccacaagaga

SEQ ID NO: 176456 - RNA, 22 nt, Human
caggcccuuuccugggcauagg

SEQ ID NO: 176457 - RNA, 22 nt, Human
aaacuguaagagaauaaacuac

SEQ ID NO: 176458 - RNA, 22 nt, Human
cugaaacuuuaguucugcaaca

SEQ ID NO: 176459 - RNA, 21 nt, Human
gcucuggccuacuguucccuc

SEQ ID NO: 176460 - RNA, 22 nt, Human
ggcagcagcaagguuggagcug

SEQ ID NO: 176461 - RNA, 22 nt, Human
uuuuuccuuagggguuacucac

SEQ ID NO: 176462 - RNA, 22 nt, Human
caggaccaggcguucugggcug

SEQ ID NO: 176463 - RNA, 22 nt, Human
cagcugguugaagaggagcugg

SEQ ID NO: 176464 - RNA, 21 nt, Human
acaugagacacacauauaugu

SEQ ID NO: 176465 - RNA, 22 nt, Human
agagccuugccuggggcccugu

SEQ ID NO: 176466 - RNA, 22 nt, Human
uggucugauucuugcuccccaa

SEQ ID NO: 176467 - RNA, 22 nt, Human
cugcacaggggaugagggcagu

SEQ ID NO: 176468 - RNA, 22 nt, Human
gcagaggugagaagggccuccc

SEQ ID NO: 176469 - RNA, 22 nt, Human
aaucacagaguccagcagauga

SEQ ID NO: 176470 - RNA, 22 nt, Human
ucagcugcaguuucacaagcac

SEQ ID NO: 176471 - RNA, 22 nt, Human
cuccuggcuucugaaaucgugg

SEQ ID NO: 176472 - RNA, 22 nt, Human
ccucagagucuaguaaauaaua

SEQ ID NO: 176473 - RNA, 22 nt, Human
uacauuccuucguuuagagauu

SEQ ID NO: 176474 - RNA, 22 nt, Human
ggcaaaaguauuaucucuuuaa

SEQ ID NO: 176475 - RNA, 22 nt, Human
ugcagguggauucaauguggga

SEQ ID NO: 176476 - RNA, 22 nt, Human
ucauucaugaggugcuagugcu

SEQ ID NO: 176477 - RNA, 22 nt, Human
uugggggaagaggauagacagu

SEQ ID NO: 176478 - RNA, 22 nt, Human
uacaggagcauggggaagggau

SEQ ID NO: 176479 - RNA, 22 nt, Human
uguggaugaauaaagugcagac

SEQ ID NO: 176480 - RNA, 17 nt, Human
uuuagaauacaauguuu

SEQ ID NO: 176481 - RNA, 22 nt, Human
cuguccugaguucuuggagguc

SEQ ID NO: 176482 - RNA, 22 nt, Human
ccagagccugcugagccccauu

SEQ ID NO: 176483 - RNA, 22 nt, Human
cuccauauguucaguuaugcag

SEQ ID NO: 176484 - RNA, 22 nt, Human
aaaacacugcaaagcugauugg

SEQ ID NO: 176485 - RNA, 22 nt, Human
gagaggggcgcgcagcucgcga

SEQ ID NO: 176486 - RNA, 22 nt, Human
ugcacuacugugauacacagcc

SEQ ID NO: 176487 - RNA, 22 nt, Human
auggggagagccucugucccca

SEQ ID NO: 176488 - RNA, 22 nt, Human
aauaagaugugcuugaguuugg

SEQ ID NO: 176489 - RNA, 22 nt, Human
gcugagaaaugcagacaugcug

SEQ ID NO: 176490 - RNA, 22 nt, Human
agagagaggggcgagcaaacac

SEQ ID NO: 176491 - RNA, 22 nt, Human
aguucgagaucugcugaugaga

SEQ ID NO: 176492 - RNA, 22 nt, Human
ucucucagaggaagaggcagug

SEQ ID NO: 176493 - RNA, 23 nt, Human
ugcccucccaaugcuucggucac

SEQ ID NO: 176494 - RNA, 22 nt, Human
ugccucagagugggcuugcuau

SEQ ID NO: 176495 - RNA, 22 nt, Human
aauugcuugucuucuucccuac

SEQ ID NO: 176496 - RNA, 21 nt, Human
agcugcagcccaaaggccugu

SEQ ID NO: 176497 - RNA, 22 nt, Human
ugcuggaggagaagguugcuca

SEQ ID NO: 176498 - RNA, 22 nt, Human
uguccucaucuuuuccagaaau

SEQ ID NO: 176499 - RNA, 22 nt, Human
gaaguugauagaguacaugauu

SEQ ID NO: 176500 - RNA, 22 nt, Human
augcuaaagggguaggccuccu

SEQ ID NO: 176501 - RNA, 22 nt, Human
uucccuggcccuggcacgcucu

SEQ ID NO: 176502 - RNA, 22 nt, Human
aacagauaauuucuaaguuacu

SEQ ID NO: 176503 - RNA, 22 nt, Human
auagaagcaagaacagaaugga

SEQ ID NO: 176504 - RNA, 22 nt, Human
agggcugagcccaggcauguag

SEQ ID NO: 176505 - RNA, 22 nt, Human
ggcugugguggcaucccugagc

SEQ ID NO: 176506 - RNA, 22 nt, Human
uggaggcaacugaagauguagu

SEQ ID NO: 176507 - RNA, 19 nt, Human
ccagagcccgccagauggg

SEQ ID NO: 176508 - RNA, 22 nt, Human
agacagacauagaaauuaguaa

SEQ ID NO: 176509 - RNA, 22 nt, Human
auuuguuaauuaugaggcauac

SEQ ID NO: 176510 - RNA, 22 nt, Human
uccugggguguguuuugcugcu

SEQ ID NO: 176511 - RNA, 22 nt, Human
ugacaggugcugggggcagugu

SEQ ID NO: 176512 - RNA, 22 nt, Human
aaucuucauaaaaaucuaguag

SEQ ID NO: 176513 - RNA, 22 nt, Human
cugcagggcagaagggcauaga

SEQ ID NO: 176514 - RNA, 22 nt, Human
gggcagagguucaacuucaaca

SEQ ID NO: 176515 - RNA, 22 nt, Human
ucuccagugaaucuccuccugg

SEQ ID NO: 176516 - RNA, 22 nt, Human
augcauguuuauagggugcuuc

SEQ ID NO: 176517 - RNA, 22 nt, Human
uggcugcugcagacagacagga

SEQ ID NO: 176518 - RNA, 22 nt, Human
uucuccagacaacagaggguga

SEQ ID NO: 176519 - RNA, 22 nt, Human
ugaagccaaucugccaggcaga

SEQ ID NO: 176520 - RNA, 22 nt, Human
agcuagaaguccuagauaaagg

SEQ ID NO: 176521 - RNA, 22 nt, Human
cagacaucuuuuaucuucagga

SEQ ID NO: 176522 - RNA, 22 nt, Human
aggaaacuaacuuaucuuuaua

SEQ ID NO: 176523 - RNA, 22 nt, Human
agagcggggauaguuaauauuc

SEQ ID NO: 176524 - RNA, 22 nt, Human
uuaaauuauugagggauuguca

SEQ ID NO: 176525 - RNA, 22 nt, Human
agagcugguuuacucaggaauu

SEQ ID NO: 176526 - RNA, 22 nt, Human
uacuuuaucagcgucaaaggua

SEQ ID NO: 176527 - RNA, 22 nt, Human
auuuccuaauuuagggauagac

SEQ ID NO: 176528 - RNA, 22 nt, Human
uguuuggaaacacuggcagaaa

SEQ ID NO: 176529 - RNA, 22 nt, Human
gcaaucaaugauuuauauuugu

SEQ ID NO: 176530 - RNA, 22 nt, Human
gucuccacagcccagcugccac

SEQ ID NO: 176531 - RNA, 22 nt, Human
gacaucauagggugggaggaaa

SEQ ID NO: 176532 - RNA, 22 nt, Human
cuuaacauccugcauuuuucuu

SEQ ID NO: 176533 - RNA, 22 nt, Human
gggcaaagugguggaggcaguu

SEQ ID NO: 176534 - RNA, 22 nt, Human
ucuugagaagcggcugucucag

SEQ ID NO: 176535 - RNA, 22 nt, Human
uaaagcugcaggcucagaaaac

SEQ ID NO: 176536 - RNA, 22 nt, Human
caaaguauauuucauagucuca

SEQ ID NO: 176537 - RNA, 22 nt, Human
cuggcuguaacauuuugccaua

SEQ ID NO: 176538 - RNA, 21 nt, Human
aauaaccacuaauauaguggc

SEQ ID NO: 176539 - RNA, 22 nt, Human
uguuucuaggucaauaauuuuu

SEQ ID NO: 176540 - RNA, 22 nt, Human
aaaggcagagugcucagcuggc

SEQ ID NO: 176541 - RNA, 22 nt, Human
uggcugugggauaugugacuga

SEQ ID NO: 176542 - RNA, 22 nt, Human
gagcucagggcauugagcaaga

SEQ ID NO: 176543 - RNA, 21 nt, Human
uuugagaauuggucagagugc

SEQ ID NO: 176544 - RNA, 22 nt, Human
gcccucuguuauugcauccuua

SEQ ID NO: 176545 - RNA, 22 nt, Human
uuucacauguggaaugccaggu

SEQ ID NO: 176546 - RNA, 22 nt, Human
aaguggaggccgaguucacgca

SEQ ID NO: 176547 - RNA, 22 nt, Human
cucugggcugaauggcugaacc

SEQ ID NO: 176548 - RNA, 22 nt, Human
uucuuuauuaguuuagugagcu

SEQ ID NO: 176549 - RNA, 22 nt, Human
ucuuauugugaugaugaagaac

SEQ ID NO: 176550 - RNA, 22 nt, Human
uucucuggggacugucucuauu

SEQ ID NO: 176551 - RNA, 22 nt, Human
cuucacaggcaagucuguuuuu

SEQ ID NO: 176552 - RNA, 18 nt, Human
ggagcccagaggugaguu

SEQ ID NO: 176553 - RNA, 22 nt, Human
ucagugcaaaaaaugggcuaga

SEQ ID NO: 176554 - RNA, 22 nt, Human
uucagagcccaaauggagauua

SEQ ID NO: 176555 - RNA, 22 nt, Human
acauaucuuuacucaucaucuc

SEQ ID NO: 176556 - RNA, 19 nt, Human
agcaggccacagggccagc

SEQ ID NO: 176557 - RNA, 22 nt, Human
ccaggucuaucaaguugggcuc

SEQ ID NO: 176558 - RNA, 22 nt, Human
uucagcacaagacuagacaggu

SEQ ID NO: 176559 - RNA, 22 nt, Human
acugucuccucaucaugccugg

SEQ ID NO: 176560 - RNA, 22 nt, Human
agggaugaucaggguagaggcu

SEQ ID NO: 176561 - RNA, 22 nt, Human
cugguguccgcaacgggcagcg

SEQ ID NO: 176562 - RNA, 20 nt, Human
cuguuugcuaucaugagcug

SEQ ID NO: 176563 - RNA, 22 nt, Human
aagucagaaauaucugccauca

SEQ ID NO: 176564 - RNA, 22 nt, Human
auuuaauuuauagauguggaua

SEQ ID NO: 176565 - RNA, 22 nt, Human
uguggcagauuuuauaaauugc

SEQ ID NO: 176566 - RNA, 22 nt, Human
ucaagucacuggcagggaugcu

SEQ ID NO: 176567 - RNA, 22 nt, Human
acauaauggacaauaaugcauc

SEQ ID NO: 176568 - RNA, 22 nt, Human
uucuagaagcucuaggggagaa

SEQ ID NO: 176569 - RNA, 22 nt, Human
uaaggcuacugucagcuucagg

SEQ ID NO: 176570 - RNA, 22 nt, Human
ggcuggcuaucugugguugccu

SEQ ID NO: 176571 - RNA, 23 nt, Human
aggccagcgcagacaccgagcac

SEQ ID NO: 176572 - RNA, 22 nt, Human
aaacaauguugucuccaagagg

SEQ ID NO: 176573 - RNA, 22 nt, Human
ccucaggcuucgucuuccaccc

SEQ ID NO: 176574 - RNA, 22 nt, Human
aaguuacagucagagguuaaca

SEQ ID NO: 176575 - RNA, 22 nt, Human
ucagggcaucucuuaaguggug

SEQ ID NO: 176576 - RNA, 22 nt, Human
agcugaaacccaggccucagcu

SEQ ID NO: 176577 - RNA, 22 nt, Human
ucucagguggcccccaugagug

SEQ ID NO: 176578 - RNA, 22 nt, Human
auaacagauacucucugugagg

SEQ ID NO: 176579 - RNA, 22 nt, Human
uacaaugcaaaauacugucugc

SEQ ID NO: 176580 - RNA, 22 nt, Human
cuccuucuccucgggaggccag

SEQ ID NO: 176581 - RNA, 21 nt, Human
uuggaaucuuaggaguguggg

SEQ ID NO: 176582 - RNA, 22 nt, Human
uggcaacaccuggaagacaugg

SEQ ID NO: 176583 - RNA, 22 nt, Human
ugaggccugcauugaacuagaa

SEQ ID NO: 176584 - RNA, 22 nt, Human
uggcaaaggaaccuauuuuaaa

SEQ ID NO: 176585 - RNA, 22 nt, Human
caucugaauuugccuuaguuuc

SEQ ID NO: 176586 - RNA, 22 nt, Human
gggcuucuggcuacuguaugag

SEQ ID NO: 176587 - RNA, 22 nt, Human
agcuaucaguaggaccauguuc

SEQ ID NO: 176588 - RNA, 22 nt, Human
uuagccauuaaauuacaaggug

SEQ ID NO: 176589 - RNA, 22 nt, Human
aagcaagcuguuggcaauaggg

SEQ ID NO: 176590 - RNA, 22 nt, Human
agguggcagaggacuccuccug

SEQ ID NO: 176591 - RNA, 22 nt, Human
uucuggguaacaaggcaagaau

SEQ ID NO: 176592 - RNA, 22 nt, Human
ucucuacauaaccucaauacuc

SEQ ID NO: 176593 - RNA, 22 nt, Human
cccaguggcuuuugcccagguu

SEQ ID NO: 176594 - RNA, 22 nt, Human
uucgcagggagacaggcucucu

SEQ ID NO: 176595 - RNA, 22 nt, Human
acacccagagcgccagugccga

SEQ ID NO: 176596 - RNA, 22 nt, Human
agaagcagcuuucaaggugauu

SEQ ID NO: 176597 - RNA, 22 nt, Human
agaguggggaagguguugagaa

SEQ ID NO: 176598 - RNA, 22 nt, Human
gacccagaaggagugcccuaga

SEQ ID NO: 176599 - RNA, 22 nt, Human
uaaaaggauuagcaggaugggc

SEQ ID NO: 176600 - RNA, 22 nt, Human
agcagcaggagccgugggguga

SEQ ID NO: 176601 - RNA, 19 nt, Human
guccaggcauuggguuggu

SEQ ID NO: 176602 - RNA, 23 nt, Human
cauaaaauauuaguaugguagca

SEQ ID NO: 176603 - RNA, 22 nt, Human
ggcuucucucuucacauggcuu

SEQ ID NO: 176604 - RNA, 23 nt, Human
ugguggcagaaguagcagaugac

SEQ ID NO: 176605 - RNA, 22 nt, Human
uccagcaugacuaguuccccau

SEQ ID NO: 176606 - RNA, 22 nt, Human
aacaaugcacuaucguaagugg

SEQ ID NO: 176607 - RNA, 22 nt, Human
guggcuggaguaugaggaaagg

SEQ ID NO: 176608 - RNA, 22 nt, Human
aucauuuuuaagagacucuucu

SEQ ID NO: 176609 - RNA, 22 nt, Human
ccuuccagaggcgugacacccu

SEQ ID NO: 176610 - RNA, 22 nt, Human
uuccaugcaagaaguauggcuc

SEQ ID NO: 176611 - RNA, 22 nt, Human
ugcccaggaucuggcgaugcuc

SEQ ID NO: 176612 - RNA, 22 nt, Human
ugauuacacagcaguaauuuca

SEQ ID NO: 176613 - RNA, 22 nt, Human
aaucacaauuacuuuugcacca

SEQ ID NO: 176614 - RNA, 22 nt, Human
ggcuuccugggcauguguucua

SEQ ID NO: 176615 - RNA, 22 nt, Human
uugagaaaccuggcaguagaga

SEQ ID NO: 176616 - RNA, 22 nt, Human
uuaucaguuguguguauacacg

SEQ ID NO: 176617 - RNA, 22 nt, Human
uguggcucuccuccugcugccc

SEQ ID NO: 176618 - RNA, 20 nt, Human
auguccagugacuggaccau

SEQ ID NO: 176619 - RNA, 22 nt, Human
aagaauguucuuguagucauga

SEQ ID NO: 176620 - RNA, 22 nt, Human
ugucucaguauacgaaacacuu

SEQ ID NO: 176621 - RNA, 22 nt, Human
auucuuaauugccaugcuguau

SEQ ID NO: 176622 - RNA, 22 nt, Human
uucaggaucaaguugccaguag

SEQ ID NO: 176623 - RNA, 22 nt, Human
augcacagaacaauuuuaagag

SEQ ID NO: 176624 - RNA, 22 nt, Human
ugguccaguaaggguggagaga

SEQ ID NO: 176625 - RNA, 22 nt, Human
aaagagcuuuccacacuaguca

SEQ ID NO: 176626 - RNA, 22 nt, Human
agccagcaucccuucagucucc

SEQ ID NO: 176627 - RNA, 22 nt, Human
aauccugaccugggcaugcuug

SEQ ID NO: 176628 - RNA, 22 nt, Human
ugcuuagaugaggcagcaggag

SEQ ID NO: 176629 - RNA, 22 nt, Human
gugagagaauuugaguuaaauu

SEQ ID NO: 176630 - RNA, 22 nt, Human
uggcccugcuaugauccugcaa

SEQ ID NO: 176631 - RNA, 22 nt, Human
cggagcuggcgucuguguggac

SEQ ID NO: 176632 - RNA, 22 nt, Human
uagaacaguauaggcuaaacau

SEQ ID NO: 176633 - RNA, 22 nt, Human
uuucuaagaugugguuucaagg

SEQ ID NO: 176634 - RNA, 22 nt, Human
gcugccuuaacuucuucgcugu

SEQ ID NO: 176635 - RNA, 22 nt, Human
uuucucaaguucagauauuuga

SEQ ID NO: 176636 - RNA, 22 nt, Human
uauguacauaacaugaaaugca

SEQ ID NO: 176637 - RNA, 22 nt, Human
guauaugagaaccauggaggug

SEQ ID NO: 176638 - RNA, 22 nt, Human
guguuuuaucagacaaaguaua

SEQ ID NO: 176639 - RNA, 22 nt, Human
agcccagauaaaguacaaccau

SEQ ID NO: 176640 - RNA, 22 nt, Human
cccuuccuugugacuggugggg

SEQ ID NO: 176641 - RNA, 22 nt, Human
gccaggacugagaaugggagca

SEQ ID NO: 176642 - RNA, 22 nt, Human
ucugaaauucacaguugaguca

SEQ ID NO: 176643 - RNA, 22 nt, Human
aaugggaagucacuacuguuac

SEQ ID NO: 176644 - RNA, 22 nt, Human
uccuguguguggccuuucccag

SEQ ID NO: 176645 - RNA, 22 nt, Human
agggaaggagguuagaacccac

SEQ ID NO: 176646 - RNA, 22 nt, Human
guacaaauuaggaagcuuugug

SEQ ID NO: 176647 - RNA, 23 nt, Human
uugauuuagcugggauugcaugc

SEQ ID NO: 176648 - RNA, 22 nt, Human
ggcuggguuauuuauggccaag

SEQ ID NO: 176649 - RNA, 22 nt, Human
cuggcagguggauggggacucc

SEQ ID NO: 176650 - RNA, 20 nt, Human
aggagcucugugcugggaag

SEQ ID NO: 176651 - RNA, 22 nt, Human
uggcaugaauuuagcuuuccau

SEQ ID NO: 176652 - RNA, 22 nt, Human
uccauacacauugaauuuuagu

SEQ ID NO: 176653 - RNA, 22 nt, Human
ugaaugauaugugaaaaggaac

SEQ ID NO: 176654 - RNA, 22 nt, Human
ggaaggcucgaggaugcuucug

SEQ ID NO: 176655 - RNA, 22 nt, Human
ugccucuguggaaauggugguc

SEQ ID NO: 176656 - RNA, 20 nt, Human
ugggcugaggaucaggugcc

SEQ ID NO: 176657 - RNA, 22 nt, Human
ggaagaaaucugguuaagagau

SEQ ID NO: 176658 - RNA, 23 nt, Human
ugugaaauuugaggucagugcuu

SEQ ID NO: 176659 - RNA, 22 nt, Human
uggcagguuaacuuacaacugu

SEQ ID NO: 176660 - RNA, 22 nt, Human
gcaggggaguggaugauggauu

SEQ ID NO: 176661 - RNA, 22 nt, Human
ucaguguccuucguucuuguug

SEQ ID NO: 176662 - RNA, 22 nt, Human
ucuguagcaagugagaggcauu

SEQ ID NO: 176663 - RNA, 22 nt, Human
uucagugugcuucaggacguua

SEQ ID NO: 176664 - RNA, 22 nt, Human
guuauugacucucuuguggcuu

SEQ ID NO: 176665 - RNA, 22 nt, Human
guccagagccggaagagugaca

SEQ ID NO: 176666 - RNA, 22 nt, Human
caguagcaugcuuaucuuuuga

SEQ ID NO: 176667 - RNA, 22 nt, Human
uguucauuaguggaaguaaguu

SEQ ID NO: 176668 - RNA, 22 nt, Human
agaucugguuggaguccugaca

SEQ ID NO: 176669 - RNA, 22 nt, Human
agcaggccugccaccucggggu

SEQ ID NO: 176670 - RNA, 22 nt, Human
gcagggcagcucacugugguuc

SEQ ID NO: 176671 - RNA, 22 nt, Human
cagagccuuaguucuccuagaa

SEQ ID NO: 176672 - RNA, 22 nt, Human
ugggcucuggagggccuaggau

SEQ ID NO: 176673 - RNA, 22 nt, Human
gugugcucaagggcaggaaccu

SEQ ID NO: 176674 - RNA, 22 nt, Human
gacaagacagcuugcagacaac

SEQ ID NO: 176675 - RNA, 22 nt, Human
cucugucacuucuccagcugag

SEQ ID NO: 176676 - RNA, 22 nt, Human
augauuacauguguuaauauac

SEQ ID NO: 176677 - RNA, 22 nt, Human
aaacacagggauauauauucca

SEQ ID NO: 176678 - RNA, 22 nt, Human
ggcugagaguuuccucuggggc

SEQ ID NO: 176679 - RNA, 22 nt, Human
aucugcuggcaucucuagccca

SEQ ID NO: 176680 - RNA, 22 nt, Human
acauguaaaaggaacaugcaug

SEQ ID NO: 176681 - RNA, 22 nt, Human
acuuggauauguucacuagacc

SEQ ID NO: 176682 - RNA, 22 nt, Human
uucugggcuuggcuguuuccau

SEQ ID NO: 176683 - RNA, 22 nt, Human
aaagauguuaugaaauaacuau

SEQ ID NO: 176684 - RNA, 22 nt, Human
augaggcucucaacaccuugag

SEQ ID NO: 176685 - RNA, 23 nt, Human
ucugagagaacaaugccuccuau

SEQ ID NO: 176686 - RNA, 22 nt, Human
ugaagcaaacgcuucuguuccu

SEQ ID NO: 176687 - RNA, 22 nt, Human
gcugggaggcagcaccuuuagc

SEQ ID NO: 176688 - RNA, 22 nt, Human
cacuaaauguuucaauguggga

SEQ ID NO: 176689 - RNA, 22 nt, Human
auuucagagugagagugcucaa

SEQ ID NO: 176690 - RNA, 22 nt, Human
caguguucccugaacauauguu

SEQ ID NO: 176691 - RNA, 22 nt, Human
uccucaguggggcauucauuau

SEQ ID NO: 176692 - RNA, 22 nt, Human
aaauuauuacaagcuaguuggc

SEQ ID NO: 176693 - RNA, 19 nt, Human
aagucacuugagggcagga

SEQ ID NO: 176694 - RNA, 22 nt, Human
uuuauugaguaucuacuaugug

SEQ ID NO: 176695 - RNA, 22 nt, Human
auggaaugugaacaugauggca

SEQ ID NO: 176696 - RNA, 22 nt, Human
gaagagcuccaaaaacagugag

SEQ ID NO: 176697 - RNA, 22 nt, Human
augcagcuauuugagcauguca

SEQ ID NO: 176698 - RNA, 22 nt, Human
gguguccuucguccgcuggcau

SEQ ID NO: 176699 - RNA, 22 nt, Human
cacagcugcacagaggaggugc

SEQ ID NO: 176700 - RNA, 22 nt, Human
uaagagcacugaagucuucuua

SEQ ID NO: 176701 - RNA, 22 nt, Human
cccaggagauaacguucccaag

SEQ ID NO: 176702 - RNA, 23 nt, Human
uccaggagaauuccagggcccgg

SEQ ID NO: 176703 - RNA, 22 nt, Human
aucuaucaccuuuagguuuguu

SEQ ID NO: 176704 - RNA, 20 nt, Human
acauuugaguaucaucuacu

SEQ ID NO: 176705 - RNA, 22 nt, Human
guccuuauuucacuuaaacgua

SEQ ID NO: 176706 - RNA, 22 nt, Human
ucagaggaaaggucagauggcu

SEQ ID NO: 176707 - RNA, 22 nt, Human
gguccugucugacaucacugcu

SEQ ID NO: 176708 - RNA, 22 nt, Human
cacugaaauauuaauaucuuau

SEQ ID NO: 176709 - RNA, 22 nt, Human
caaggcugucuccagcuuccaa

SEQ ID NO: 176710 - RNA, 22 nt, Human
caguuucuucaucaguuaagca

SEQ ID NO: 176711 - RNA, 22 nt, Human
agggaccucuucuugcagcuga

SEQ ID NO: 176712 - RNA, 22 nt, Human
uucuccagacacaaaaucuaag

SEQ ID NO: 176713 - RNA, 22 nt, Human
ugcaaacaucaauggccugagc

SEQ ID NO: 176714 - RNA, 22 nt, Human
uucagaaagguuaaucuggauu

SEQ ID NO: 176715 - RNA, 22 nt, Human
cucacugucuguacuagcugau

SEQ ID NO: 176716 - RNA, 20 nt, Human
cuucuucauuaacccuacug

SEQ ID NO: 176717 - RNA, 22 nt, Human
ggcugccugaggcagugagaga

SEQ ID NO: 176718 - RNA, 22 nt, Human
uucuuuuaaugucuggcuuuca

SEQ ID NO: 176719 - RNA, 22 nt, Human
cugagaucuuuauacgaggcac

SEQ ID NO: 176720 - RNA, 22 nt, Human
gugccaaaagcuauaauuuggu

SEQ ID NO: 176721 - RNA, 22 nt, Human
acuguacucuucuagccaucug

SEQ ID NO: 176722 - RNA, 22 nt, Human
ugcagggaaucuguggcuggac

SEQ ID NO: 176723 - RNA, 21 nt, Human
gccagcugcagggcuuccuug

SEQ ID NO: 176724 - RNA, 22 nt, Human
aauuugauucccugcaccuguu

SEQ ID NO: 176725 - RNA, 22 nt, Human
gcucagagagaggcucaccauu

SEQ ID NO: 176726 - RNA, 22 nt, Human
aggaaucagaauucuuagaauu

SEQ ID NO: 176727 - RNA, 22 nt, Human
gguuccugugccucuagcuggc

SEQ ID NO: 176728 - RNA, 22 nt, Human
caaauagacucuagaauuuauu

SEQ ID NO: 176729 - RNA, 22 nt, Human
aguccaggacuguuucagcuga

SEQ ID NO: 176730 - RNA, 22 nt, Human
ggacggggagcuggaaagggga

SEQ ID NO: 176731 - RNA, 22 nt, Human
cguuuauuuugaagauuccacu

SEQ ID NO: 176732 - RNA, 20 nt, Human
aacauugaaagucuagaaga

SEQ ID NO: 176733 - RNA, 22 nt, Human
uuugcaguuucauugcugaaau

SEQ ID NO: 176734 - RNA, 22 nt, Human
ugcuauuuggaaaagcauuugg

SEQ ID NO: 176735 - RNA, 22 nt, Human
ugagaaucauccagaggcuucu

SEQ ID NO: 176736 - RNA, 22 nt, Human
ugccugggugcuggcuggucac

SEQ ID NO: 176737 - RNA, 22 nt, Human
acuucugagaaauuuaaggaca

SEQ ID NO: 176738 - RNA, 23 nt, Human
ggaagcucacguaguccugcacu

SEQ ID NO: 176739 - RNA, 23 nt, Human
ucauuccacaaauacuuaucuag

SEQ ID NO: 176740 - RNA, 22 nt, Human
aguccaaggagagacagcauuu

SEQ ID NO: 176741 - RNA, 22 nt, Human
acugaauaauggucugugaucu

SEQ ID NO: 176742 - RNA, 22 nt, Human
uuucccacacaguccacugcag

SEQ ID NO: 176743 - RNA, 22 nt, Human
uggaaaaaacccagacucuaga

SEQ ID NO: 176744 - RNA, 22 nt, Human
aucuuucuauuucuaaaaacua

SEQ ID NO: 176745 - RNA, 22 nt, Human
guggcacaaggcuuacacagca

SEQ ID NO: 176746 - RNA, 22 nt, Human
ucacccagcgggcgcacacucg

SEQ ID NO: 176747 - RNA, 22 nt, Human
gccugcugggagacacccccag

SEQ ID NO: 176748 - RNA, 22 nt, Human
gguggggcccaggcaucugaug

SEQ ID NO: 176749 - RNA, 22 nt, Human
agguuauucucuaucucauccc

SEQ ID NO: 176750 - RNA, 22 nt, Human
ccagcagcucccucaggguccg

SEQ ID NO: 176751 - RNA, 22 nt, Human
aacugucuaaggagaauaugaa

SEQ ID NO: 176752 - RNA, 22 nt, Human
agaaggcuuuaaguacuggcau

SEQ ID NO: 176753 - RNA, 22 nt, Human
uauggcuucuuuugcaacuacu

SEQ ID NO: 176754 - RNA, 22 nt, Human
caguaucuugcuuauagacaca

SEQ ID NO: 176755 - RNA, 22 nt, Human
augauacaagcaaaacuaauca

SEQ ID NO: 176756 - RNA, 22 nt, Human
cuccagugagcgcggggcaugg

SEQ ID NO: 176757 - RNA, 22 nt, Human
gcaggaguguauuugcauguaa

SEQ ID NO: 176758 - RNA, 20 nt, Human
ggcugaaaguagaaaguauu

SEQ ID NO: 176759 - RNA, 22 nt, Human
gcugccuccgccggcuccacag

SEQ ID NO: 176760 - RNA, 22 nt, Human
uacccaggaggaaacugaggcu

SEQ ID NO: 176761 - RNA, 22 nt, Human
cacuauaucucuuucaucuuuu

SEQ ID NO: 176762 - RNA, 22 nt, Human
ugugacccccgucacggcugcu

SEQ ID NO: 176763 - RNA, 22 nt, Human
auacaucaugcuccauauauuu

SEQ ID NO: 176764 - RNA, 22 nt, Human
ggcucagagaccugcgaucuga

SEQ ID NO: 176765 - RNA, 22 nt, Human
auucucuguuuccaagaugaaa

SEQ ID NO: 176766 - RNA, 22 nt, Human
auucugggucugggugugauca

SEQ ID NO: 176767 - RNA, 19 nt, Human
aaaugugaugguacaauuc

SEQ ID NO: 176768 - RNA, 18 nt, Human
ucugagguggacgaggag

SEQ ID NO: 176769 - RNA, 22 nt, Human
cucuggaaauggccauagucau

SEQ ID NO: 176770 - RNA, 22 nt, Human
cuggaguguaaagagcauagaa

SEQ ID NO: 176771 - RNA, 22 nt, Human
cauuugaauggcauuucacuuu

SEQ ID NO: 176772 - RNA, 22 nt, Human
cuuagaguuauggaaauguuga

SEQ ID NO: 176773 - RNA, 22 nt, Human
ucagccuuguggcccugcucca

SEQ ID NO: 176774 - RNA, 22 nt, Human
ugguggcagcugggacagaggu

SEQ ID NO: 176775 - RNA, 22 nt, Human
gcucagagcaucccagugaaug

SEQ ID NO: 176776 - RNA, 22 nt, Human
guuuuucuagaaaucuccuccu

SEQ ID NO: 176777 - RNA, 22 nt, Human
ucuguucaguugauuagacaga

SEQ ID NO: 176778 - RNA, 22 nt, Human
cagcugaagcccaggcagaacc

SEQ ID NO: 176779 - RNA, 22 nt, Human
uccauaaaugaaauagaacgcu

SEQ ID NO: 176780 - RNA, 21 nt, Human
ugagagccuccaaccggcuac

SEQ ID NO: 176781 - RNA, 22 nt, Human
uuauucacucauuuaacauuau

SEQ ID NO: 176782 - RNA, 22 nt, Human
agccuuagauaaaugcuagcuc

SEQ ID NO: 176783 - RNA, 22 nt, Human
ugaauuaaaggaauucgaauuc

SEQ ID NO: 176784 - RNA, 22 nt, Human
agaugcuggggccccucggaug

SEQ ID NO: 176785 - RNA, 22 nt, Human
gccaggcuccccggaucccugg

SEQ ID NO: 176786 - RNA, 22 nt, Human
aaacucagaagguacagaaggg

SEQ ID NO: 176787 - RNA, 20 nt, Human
cugcugugugugccucagcc

SEQ ID NO: 176788 - RNA, 22 nt, Human
cagagagaggggcugccuggcc

SEQ ID NO: 176789 - RNA, 22 nt, Human
ccaggagguggcaggacuugcc

SEQ ID NO: 176790 - RNA, 23 nt, Human
ucuguggccccuucgccccacuc

SEQ ID NO: 176791 - RNA, 22 nt, Human
gaggcugagaguuuguucuacu

SEQ ID NO: 176792 - RNA, 22 nt, Human
uccaggccucuagccccuaucu

SEQ ID NO: 176793 - RNA, 22 nt, Human
ucagaaguuaauacgaggagaa

SEQ ID NO: 176794 - RNA, 18 nt, Human
auguggcuagugcuacug

SEQ ID NO: 176795 - RNA, 22 nt, Human
cacagaggcucaaagccaggug

SEQ ID NO: 176796 - RNA, 22 nt, Human
ccaggaggaaagaccagcccau

SEQ ID NO: 176797 - RNA, 22 nt, Human
ugaggccucauuuagggagagg

SEQ ID NO: 176798 - RNA, 22 nt, Human
ggcuggagaagggugguugaca

SEQ ID NO: 176799 - RNA, 22 nt, Human
agaggccuaaccaagauguccu

SEQ ID NO: 176800 - RNA, 22 nt, Human
uggugaggccaaagccaugaca

SEQ ID NO: 176801 - RNA, 18 nt, Human
aggcagcagcaucuucuc

SEQ ID NO: 176802 - RNA, 22 nt, Human
uuccacagccaucacuguugcu

SEQ ID NO: 176803 - RNA, 19 nt, Human
ucagggcaguccggucccc

SEQ ID NO: 176804 - RNA, 22 nt, Human
ggagucugaguccucauagaca

SEQ ID NO: 176805 - RNA, 22 nt, Human
gccagcaaggaggggaaaaaug

SEQ ID NO: 176806 - RNA, 22 nt, Human
agggcgacaauggagagcguuu

SEQ ID NO: 176807 - RNA, 22 nt, Human
aggucaaaaugcuuuucagguc

SEQ ID NO: 176808 - RNA, 22 nt, Human
aacaucuucagagaagcuaagu

SEQ ID NO: 176809 - RNA, 22 nt, Human
gaucuugagcaaguuguguaac

SEQ ID NO: 176810 - RNA, 22 nt, Human
aaagggcuuuauaucagugugu

SEQ ID NO: 176811 - RNA, 22 nt, Human
cucagaauuuagggcucugagg

SEQ ID NO: 176812 - RNA, 22 nt, Human
guggucaggcagugggagagaa

SEQ ID NO: 176813 - RNA, 22 nt, Human
auccaggcauucugacuucaag

SEQ ID NO: 176814 - RNA, 22 nt, Human
gugcacagagcccagggccgcg

SEQ ID NO: 176815 - RNA, 20 nt, Human
uaggcagagcugugcagccu

SEQ ID NO: 176816 - RNA, 22 nt, Human
ggagaugcuauguaguuugguu

SEQ ID NO: 176817 - RNA, 22 nt, Human
uuuccaggcagaggaguuguga

SEQ ID NO: 176818 - RNA, 22 nt, Human
uagucucuggagacucuagggg

SEQ ID NO: 176819 - RNA, 22 nt, Human
uucacaaaacacuauuuucugg

SEQ ID NO: 176820 - RNA, 22 nt, Human
uucucugugagggugcuggauu

SEQ ID NO: 176821 - RNA, 22 nt, Human
uccaguaugacugauguccuuc

SEQ ID NO: 176822 - RNA, 20 nt, Human
gucuacacgggcaguguaga

SEQ ID NO: 176823 - RNA, 22 nt, Human
gcuucugaggaaggcucagccu

SEQ ID NO: 176824 - RNA, 22 nt, Human
cucaggaaccgcggcagcagcc

SEQ ID NO: 176825 - RNA, 22 nt, Human
augcaagauguauagaagacuu

SEQ ID NO: 176826 - RNA, 22 nt, Human
auuucuagcagggcaggaaaga

SEQ ID NO: 176827 - RNA, 22 nt, Human
uucucuggacagugaagagagg

SEQ ID NO: 176828 - RNA, 22 nt, Human
aggcuucuggggcaccgagcga

SEQ ID NO: 176829 - RNA, 22 nt, Human
augucuuuuauggagaugucau

SEQ ID NO: 176830 - RNA, 22 nt, Human
cagcucuuagagggagacagac

SEQ ID NO: 176831 - RNA, 22 nt, Human
agcugucuuucugccuccugau

SEQ ID NO: 176832 - RNA, 22 nt, Human
auacagaaaaguggauagccag

SEQ ID NO: 176833 - RNA, 22 nt, Human
acacauuuagcaccagguuuau

SEQ ID NO: 176834 - RNA, 22 nt, Human
gaggugggagggcagucccuaa

SEQ ID NO: 176835 - RNA, 22 nt, Human
uauauuaucauaaaaccauuca

SEQ ID NO: 176836 - RNA, 22 nt, Human
acuuaaaaccagacagcgucau

SEQ ID NO: 176837 - RNA, 22 nt, Human
gacagccaugcacuucugcugu

SEQ ID NO: 176838 - RNA, 22 nt, Human
ccugggcucgcgcacuucaccc

SEQ ID NO: 176839 - RNA, 22 nt, Human
ucaggugucugccucuuugagu

SEQ ID NO: 176840 - RNA, 21 nt, Human
uuggccuuugucucagacacu

SEQ ID NO: 176841 - RNA, 22 nt, Human
uccucagcuuuuauuucacuug

SEQ ID NO: 176842 - RNA, 22 nt, Human
ccagagcuucggggcggcugua

SEQ ID NO: 176843 - RNA, 22 nt, Human
gaguucaguaguuauagucuag

SEQ ID NO: 176844 - RNA, 22 nt, Human
gguuacauggaagaaauauaau

SEQ ID NO: 176845 - RNA, 22 nt, Human
cagccugacaccagcuuugggc

SEQ ID NO: 176846 - RNA, 22 nt, Human
aaggccagggaugccagcucgg

SEQ ID NO: 176847 - RNA, 22 nt, Human
agagccagcaacucuagcccug

SEQ ID NO: 176848 - RNA, 22 nt, Human
auucucuggucauugaguauaa

SEQ ID NO: 176849 - RNA, 22 nt, Human
cuggcccauggugagcucuggg

SEQ ID NO: 176850 - RNA, 22 nt, Human
uucugagaugugaaucugucaa

SEQ ID NO: 176851 - RNA, 18 nt, Human
cagcugaggaccaaacug

SEQ ID NO: 176852 - RNA, 22 nt, Human
cccucccuauguagaugauguu

SEQ ID NO: 176853 - RNA, 22 nt, Human
ugcucuggguucuugcuguuac

SEQ ID NO: 176854 - RNA, 22 nt, Human
auucuuaauuccaaagacugag

SEQ ID NO: 176855 - RNA, 22 nt, Human
acacagaugauguuccaggaac

SEQ ID NO: 176856 - RNA, 22 nt, Human
cugacucuccugagauggggag

SEQ ID NO: 176857 - RNA, 22 nt, Human
ggcagcuccucucagcaaaaga

SEQ ID NO: 176858 - RNA, 22 nt, Human
uagaaaauguuccacugccauu

SEQ ID NO: 176859 - RNA, 22 nt, Human
aacaguuacccuuaagaucuuu

SEQ ID NO: 176860 - RNA, 22 nt, Human
aagaggaggauugaugugggag

SEQ ID NO: 176861 - RNA, 22 nt, Human
aagaaucauuguaaaguucugu

SEQ ID NO: 176862 - RNA, 18 nt, Human
uuauuggugcugcuguuc

SEQ ID NO: 176863 - RNA, 22 nt, Human
uuguugaauggauaaauaaauu

SEQ ID NO: 176864 - RNA, 22 nt, Human
ucucugggccucccuuuccaag

SEQ ID NO: 176865 - RNA, 22 nt, Human
ugcauagaggauccaguguggu

SEQ ID NO: 176866 - RNA, 20 nt, Human
cuugcccagggucuccugcc

SEQ ID NO: 176867 - RNA, 22 nt, Human
auugacaaucuacuauguucug

SEQ ID NO: 176868 - RNA, 18 nt, Human
ggccagagggaggguccc

SEQ ID NO: 176869 - RNA, 22 nt, Human
uaaaaaucuuaugaauggcaag

SEQ ID NO: 176870 - RNA, 22 nt, Human
uaguuaacucuugguaauaggu

SEQ ID NO: 176871 - RNA, 22 nt, Human
ucaggaaagaguuagaugauua

SEQ ID NO: 176872 - RNA, 22 nt, Human
agaaugcaguuugaaauaaggu

SEQ ID NO: 176873 - RNA, 22 nt, Human
ugagagugaaaugucacauguc

SEQ ID NO: 176874 - RNA, 22 nt, Human
uaaaaugccagaccaguucacg

SEQ ID NO: 176875 - RNA, 22 nt, Human
ugauggcuuaguggcagggcga

SEQ ID NO: 176876 - RNA, 22 nt, Human
caucuuuguucuguaaacuuuu

SEQ ID NO: 176877 - RNA, 22 nt, Human
aaggaagggaaauagugauguc

SEQ ID NO: 176878 - RNA, 22 nt, Human
aguacaaauuauagcgcuugga

SEQ ID NO: 176879 - RNA, 22 nt, Human
gcaggcugagaguccaagaagg

SEQ ID NO: 176880 - RNA, 22 nt, Human
ucuccugguauguaugcaccug

SEQ ID NO: 176881 - RNA, 22 nt, Human
ugaguucuuuccguuagguaug

SEQ ID NO: 176882 - RNA, 22 nt, Human
ggaauguuuuccagaccuagau

SEQ ID NO: 176883 - RNA, 22 nt, Human
uuggcuucauugaucucacuuu

SEQ ID NO: 176884 - RNA, 22 nt, Human
ugaggccugggcacauaaccuc

SEQ ID NO: 176885 - RNA, 22 nt, Human
gaggagccauagauagugcugc

SEQ ID NO: 176886 - RNA, 23 nt, Human
cucaccaagcgccgccgcugugu

SEQ ID NO: 176887 - RNA, 22 nt, Human
gcuggccugggcucaagaccag

SEQ ID NO: 176888 - RNA, 20 nt, Human
gccaacgcgcuggggcugcc

SEQ ID NO: 176889 - RNA, 22 nt, Human
uuauuauugauucgcucucaaa

SEQ ID NO: 176890 - RNA, 19 nt, Human
acagggcagcaauaggaua

SEQ ID NO: 176891 - RNA, 22 nt, Human
gcaugcugcagggaaugcuugu

SEQ ID NO: 176892 - RNA, 22 nt, Human
cuucucccgaagccgguucugc

SEQ ID NO: 176893 - RNA, 22 nt, Human
uauguacacuuaaguuugagaa

SEQ ID NO: 176894 - RNA, 22 nt, Human
agggagagaaguuauacaagau

SEQ ID NO: 176895 - RNA, 22 nt, Human
acaugacacaggccuggccaau

SEQ ID NO: 176896 - RNA, 22 nt, Human
aaguaguugucccugaggaacg

SEQ ID NO: 176897 - RNA, 22 nt, Human
ucuagaccuggcacugcccugu

SEQ ID NO: 176898 - RNA, 22 nt, Human
gaaauauuucucuugagccccu

SEQ ID NO: 176899 - RNA, 22 nt, Human
ucaaaugaggcugaugaaugug

SEQ ID NO: 176900 - RNA, 22 nt, Human
gaaaggcucagaaguuuguauu

SEQ ID NO: 176901 - RNA, 22 nt, Human
ucccccucauuaccucauucaa

SEQ ID NO: 176902 - RNA, 22 nt, Human
gacaacaauaauguggagcuga

SEQ ID NO: 176903 - RNA, 22 nt, Human
uccagaggcaaaaagguaugga

SEQ ID NO: 176904 - RNA, 22 nt, Human
augaaauuaaucaacacauaca

SEQ ID NO: 176905 - RNA, 22 nt, Human
uggaaacuaggauggaagaaau

SEQ ID NO: 176906 - RNA, 22 nt, Human
aagaaaccuagucuggagcagc

SEQ ID NO: 176907 - RNA, 22 nt, Human
uaacacauagauauuuuaacuu

SEQ ID NO: 176908 - RNA, 22 nt, Human
ugguccugcuacaggggauuag

SEQ ID NO: 176909 - RNA, 22 nt, Human
augggugugaaaauggucaucu

SEQ ID NO: 176910 - RNA, 20 nt, Human
guguggccaggagcugcgcu

SEQ ID NO: 176911 - RNA, 22 nt, Human
cggcagagacggcgcuuugaac

SEQ ID NO: 176912 - RNA, 22 nt, Human
auuugccuuucgaaucaacagg

SEQ ID NO: 176913 - RNA, 20 nt, Human
ugcacagacaaugagcccag

SEQ ID NO: 176914 - RNA, 22 nt, Human
agaagaguaguaacagaaauua

SEQ ID NO: 176915 - RNA, 22 nt, Human
ggaguguggagaggacaugggu

SEQ ID NO: 176916 - RNA, 20 nt, Human
agagguucagucuggagaag

SEQ ID NO: 176917 - RNA, 19 nt, Human
cccacaggaggacauaugg

SEQ ID NO: 176918 - RNA, 22 nt, Human
caacugggauaaagagcuaaag

SEQ ID NO: 176919 - RNA, 22 nt, Human
ucuccugcuucaacugauggac

SEQ ID NO: 176920 - RNA, 22 nt, Human
caggagguuguaagagcaggcc

SEQ ID NO: 176921 - RNA, 22 nt, Human
aaggccagcccuaaugaugcuc

SEQ ID NO: 176922 - RNA, 19 nt, Human
caguggagauuggaggagg

SEQ ID NO: 176923 - RNA, 22 nt, Human
gaaauacaauuuugucccagcu

SEQ ID NO: 176924 - RNA, 22 nt, Human
ggcccagagacgugcaauguac

SEQ ID NO: 176925 - RNA, 15 nt, Human
cuccaugauuuugca

SEQ ID NO: 176926 - RNA, 22 nt, Human
aguaaucaauuuuucgguggau

SEQ ID NO: 176927 - RNA, 22 nt, Human
uagaaacagauguuuuugaaga

SEQ ID NO: 176928 - RNA, 22 nt, Human
agacccagaaagcagcugcauu

SEQ ID NO: 176929 - RNA, 22 nt, Human
agugcuuugagcguuugaaaag

SEQ ID NO: 176930 - RNA, 22 nt, Human
cuggaguuagaguagacacuga

SEQ ID NO: 176931 - RNA, 22 nt, Human
uuggaauaucaugcagaauaaa

SEQ ID NO: 176932 - RNA, 20 nt, Human
cuguggaauuuuaccaugcg

SEQ ID NO: 176933 - RNA, 22 nt, Human
cagggacagcacuaaacucuug

SEQ ID NO: 176934 - RNA, 22 nt, Human
uuuacuguucaacuugcaagua

SEQ ID NO: 176935 - RNA, 22 nt, Human
gcuuccuguaggcagguccaag

SEQ ID NO: 176936 - RNA, 22 nt, Human
cuggccucagagggucauggug

SEQ ID NO: 176937 - RNA, 22 nt, Human
ugaaggcuguuggauggggaag

SEQ ID NO: 176938 - RNA, 22 nt, Human
uggaggcauugugacugcugaa

SEQ ID NO: 176939 - RNA, 22 nt, Human
gccugcagugagugcagaaggu

SEQ ID NO: 176940 - RNA, 22 nt, Human
ccagugcucauucaaguccuua

SEQ ID NO: 176941 - RNA, 23 nt, Human
uugauuucaaaugcagagaacac

SEQ ID NO: 176942 - RNA, 19 nt, Human
ggcucaagcauccagguag

SEQ ID NO: 176943 - RNA, 21 nt, Human
agggaaagaaaaugagcuaau

SEQ ID NO: 176944 - RNA, 22 nt, Human
gccuggaguuguggugaagcca

SEQ ID NO: 176945 - RNA, 22 nt, Human
accagccaagacugccuggaau

SEQ ID NO: 176946 - RNA, 22 nt, Human
cuguguccuuuaaaaaagacac

SEQ ID NO: 176947 - RNA, 22 nt, Human
cuuagauacaguagaaagacuc

SEQ ID NO: 176948 - RNA, 22 nt, Human
gacaggugagaugaggaacacc

SEQ ID NO: 176949 - RNA, 22 nt, Human
uuuacugucucagagagacaaa

SEQ ID NO: 176950 - RNA, 22 nt, Human
agguggggaggagugucucuuu

SEQ ID NO: 176951 - RNA, 22 nt, Human
guccucaggaaggcuuucugac

SEQ ID NO: 176952 - RNA, 21 nt, Human
agcaggcaaaggugaagucuu

SEQ ID NO: 176953 - RNA, 22 nt, Human
agggaaagguagugaggucaca

SEQ ID NO: 176954 - RNA, 22 nt, Human
uccucuccagcaaacuggcuau

SEQ ID NO: 176955 - RNA, 22 nt, Human
caggcugcggucggcucugguc

SEQ ID NO: 176956 - RNA, 22 nt, Human
ccugggucaccaggcccaggca

SEQ ID NO: 176957 - RNA, 22 nt, Human
acuugaauuaggccuugagaga

SEQ ID NO: 176958 - RNA, 22 nt, Human
agcuucucucaggguaucuuuc

SEQ ID NO: 176959 - RNA, 22 nt, Human
ugcaggccuaugguggggcccc

SEQ ID NO: 176960 - RNA, 22 nt, Human
cuucccuuucuggugacuucuc

SEQ ID NO: 176961 - RNA, 22 nt, Human
uuuuacaggucauagguauagu

SEQ ID NO: 176962 - RNA, 22 nt, Human
acaauuccacauggcaugcagg

SEQ ID NO: 176963 - RNA, 22 nt, Human
ucaggagguguaacgaauacag

SEQ ID NO: 176964 - RNA, 22 nt, Human
cuguuuacuuauugguaaagag

SEQ ID NO: 176965 - RNA, 22 nt, Human
aggcccugcuuuccagagcuca

SEQ ID NO: 176966 - RNA, 22 nt, Human
cuccugacacaguccacacuug

SEQ ID NO: 176967 - RNA, 20 nt, Human
uuacaaguuucuaauaacca

SEQ ID NO: 176968 - RNA, 22 nt, Human
uuccagaaaacucugccuggua

SEQ ID NO: 176969 - RNA, 22 nt, Human
caggauggcagagaaaagggug

SEQ ID NO: 176970 - RNA, 22 nt, Human
acccaggcugcuucucaguggc

SEQ ID NO: 176971 - RNA, 22 nt, Human
caucagugagccccuugaugag

SEQ ID NO: 176972 - RNA, 20 nt, Human
ugaggcucagagagguugag

SEQ ID NO: 176973 - RNA, 22 nt, Human
accuucaaguaugugggcugaa

SEQ ID NO: 176974 - RNA, 22 nt, Human
agcacccuucagcccagccugg

SEQ ID NO: 176975 - RNA, 22 nt, Human
ccagggcaauuauuuggagggu

SEQ ID NO: 176976 - RNA, 22 nt, Human
gggcucugugguugugcuuugu

SEQ ID NO: 176977 - RNA, 21 nt, Human
uaaaagaugacaagacagcuc

SEQ ID NO: 176978 - RNA, 22 nt, Human
gagcucagacucgggccugggg

SEQ ID NO: 176979 - RNA, 22 nt, Human
cccaggcuggaauuccaggccu

SEQ ID NO: 176980 - RNA, 22 nt, Human
ccuuucagguacaccagggaug

SEQ ID NO: 176981 - RNA, 19 nt, Human
aucuacaauuauucucagu

SEQ ID NO: 176982 - RNA, 22 nt, Human
ucuggaauuaaacucaggagac

SEQ ID NO: 176983 - RNA, 23 nt, Human
ucacacagcuggucagguacaga

SEQ ID NO: 176984 - RNA, 22 nt, Human
ucugggcaguaccccucuccua

SEQ ID NO: 176985 - RNA, 22 nt, Human
uaugauuuguagacauuugauu

SEQ ID NO: 176986 - RNA, 22 nt, Human
gccacagguacuaugggagaga

SEQ ID NO: 176987 - RNA, 22 nt, Human
uccaguuuccuguggcugccua

SEQ ID NO: 176988 - RNA, 22 nt, Human
cuuuacauccuguuucccguuu

SEQ ID NO: 176989 - RNA, 22 nt, Human
caagauuugggggcacggaauc

SEQ ID NO: 176990 - RNA, 22 nt, Human
cuggcuuugaaaugcauuucag

SEQ ID NO: 176991 - RNA, 22 nt, Human
guguggcugauugacaugguca

SEQ ID NO: 176992 - RNA, 22 nt, Human
agacuccaaaugaaagaggggg

SEQ ID NO: 176993 - RNA, 22 nt, Human
cuauuauuagauaaucuacuug

SEQ ID NO: 176994 - RNA, 22 nt, Human
gaaaaggcagaguuccggggaa

SEQ ID NO: 176995 - RNA, 22 nt, Human
gugcagcugccgaucagauagg

SEQ ID NO: 176996 - RNA, 22 nt, Human
aaagcuaccuuuguguucauag

SEQ ID NO: 176997 - RNA, 22 nt, Human
uuuauccauaucauuaaaaucu

SEQ ID NO: 176998 - RNA, 22 nt, Human
gcuucucuuucuccccuggcgg

SEQ ID NO: 176999 - RNA, 19 nt, Human
uuccaccaucacucuguuu

SEQ ID NO: 177000 - RNA, 22 nt, Human
caggaaugaguucuggugcucu

SEQ ID NO: 177001 - RNA, 22 nt, Human
gauccacuguguuuguguugag

SEQ ID NO: 177002 - RNA, 22 nt, Human
gccaaagugcugcucuuuacca

SEQ ID NO: 177003 - RNA, 19 nt, Human
cacagggagaccacauguc

SEQ ID NO: 177004 - RNA, 20 nt, Human
uugaagaggauauaucgcuc

SEQ ID NO: 177005 - RNA, 22 nt, Human
gacauuuauuggauuuuacgag

SEQ ID NO: 177006 - RNA, 22 nt, Human
uuugaacuaccucuccuuagca

SEQ ID NO: 177007 - RNA, 22 nt, Human
acaugccaugguuguuugcugc

SEQ ID NO: 177008 - RNA, 19 nt, Human
ugggcagguucaguaaugg

SEQ ID NO: 177009 - RNA, 22 nt, Human
aauucacaguucugcaccuuac

SEQ ID NO: 177010 - RNA, 22 nt, Human
gaauguaaaauugccuacaaga

SEQ ID NO: 177011 - RNA, 22 nt, Human
ucucuguucauggcacuauguc

SEQ ID NO: 177012 - RNA, 22 nt, Human
auguccagggggcuugacuggu

SEQ ID NO: 177013 - RNA, 22 nt, Human
cagcauggccauuucucgcugc

SEQ ID NO: 177014 - RNA, 22 nt, Human
uucuacacaccucugaggacau

SEQ ID NO: 177015 - RNA, 21 nt, Human
ucuccuggguccaacccaugc

SEQ ID NO: 177016 - RNA, 22 nt, Human
ugaugaggcuucuuggugaaca

SEQ ID NO: 177017 - RNA, 22 nt, Human
cauacauuuauacacaucuaug

SEQ ID NO: 177018 - RNA, 22 nt, Human
ucagagucauugcaaguagaag

SEQ ID NO: 177019 - RNA, 23 nt, Human
uguugaaguaacuguuacauaga

SEQ ID NO: 177020 - RNA, 22 nt, Human
agaucagaaauguaauggcagu

SEQ ID NO: 177021 - RNA, 22 nt, Human
gaagucugccugccuucucugu

SEQ ID NO: 177022 - RNA, 22 nt, Human
agucuagaaacaagguagagcu

SEQ ID NO: 177023 - RNA, 22 nt, Human
caggagagcccggguccgggcu

SEQ ID NO: 177024 - RNA, 22 nt, Human
uacuuucuagcucuccccaguu

SEQ ID NO: 177025 - RNA, 22 nt, Human
ucacaguaaaagcauggaagag

SEQ ID NO: 177026 - RNA, 22 nt, Human
caaugaaaauuuaaguugcagc

SEQ ID NO: 177027 - RNA, 17 nt, Human
ggagacagggucuuuaa

SEQ ID NO: 177028 - RNA, 22 nt, Human
gaaugauauauuagcagauuuu

SEQ ID NO: 177029 - RNA, 22 nt, Human
aaauaugugaucagugaauaaa

SEQ ID NO: 177030 - RNA, 22 nt, Human
aagugcuugaucauaguucuca

SEQ ID NO: 177031 - RNA, 22 nt, Human
ggaggcaaagcacuuugcuugg

SEQ ID NO: 177032 - RNA, 22 nt, Human
cucaggcuaagaaggccaagug

SEQ ID NO: 177033 - RNA, 22 nt, Human
uuguguuucuggccaagaugga

SEQ ID NO: 177034 - RNA, 22 nt, Human
ggcuuugcuuaacgugcuucua

SEQ ID NO: 177035 - RNA, 22 nt, Human
ggacccugcguguauccacacu

SEQ ID NO: 177036 - RNA, 22 nt, Human
gucccagcuucccacuagcagc

SEQ ID NO: 177037 - RNA, 22 nt, Human
uucuucaaacaaaaguggcaug

SEQ ID NO: 177038 - RNA, 19 nt, Human
agacacacuugauaugugu

SEQ ID NO: 177039 - RNA, 22 nt, Human
agcucugccuugacaccuucuc

SEQ ID NO: 177040 - RNA, 22 nt, Human
ucugugcaagaccaacuuucaa

SEQ ID NO: 177041 - RNA, 22 nt, Human
ccuggcuccagcugccuguccu

SEQ ID NO: 177042 - RNA, 22 nt, Human
uucuucugccucccaccugaua

SEQ ID NO: 177043 - RNA, 22 nt, Human
uaaugucaaggucauucuagag

SEQ ID NO: 177044 - RNA, 22 nt, Human
ugcugagaucugccaguagaug

SEQ ID NO: 177045 - RNA, 22 nt, Human
uguauuuucugaggagcauuag

SEQ ID NO: 177046 - RNA, 22 nt, Human
ucucugaauucugaugcaagug

SEQ ID NO: 177047 - RNA, 22 nt, Human
aaggugguaggcuauaucagua

SEQ ID NO: 177048 - RNA, 22 nt, Human
gggaucugaguaggcagaagcu

SEQ ID NO: 177049 - RNA, 21 nt, Human
uagcuuuaauauucccacauu

SEQ ID NO: 177050 - RNA, 22 nt, Human
aauaucagcucugucacuuacu

SEQ ID NO: 177051 - RNA, 22 nt, Human
aacugugggaugcauuaauuca

SEQ ID NO: 177052 - RNA, 22 nt, Human
ccuagggagccugagagcagug

SEQ ID NO: 177053 - RNA, 22 nt, Human
uuuuacaaaugaggagcuggag

SEQ ID NO: 177054 - RNA, 22 nt, Human
auuaguaaaacauuguauaugu

SEQ ID NO: 177055 - RNA, 22 nt, Human
uugagcacaggugaacagcauc

SEQ ID NO: 177056 - RNA, 22 nt, Human
ggcucuggucagugaggggccu

SEQ ID NO: 177057 - RNA, 22 nt, Human
agucuuagaacuacagugccua

SEQ ID NO: 177058 - RNA, 22 nt, Human
uuucaaagaguuguaaauuacu

SEQ ID NO: 177059 - RNA, 22 nt, Human
agaguuucuugugagcacugac

SEQ ID NO: 177060 - RNA, 22 nt, Human
ugcacacacucugcauauacuu

SEQ ID NO: 177061 - RNA, 22 nt, Human
acuucagaguuaguuauagacc

SEQ ID NO: 177062 - RNA, 22 nt, Human
uuggcccagggucagcggcgcu

SEQ ID NO: 177063 - RNA, 19 nt, Human
ccaggagagcuuggagaag

SEQ ID NO: 177064 - RNA, 22 nt, Human
ccuuccuuugcaucauuucuag

SEQ ID NO: 177065 - RNA, 22 nt, Human
cagaggcuaagaugagugggug

SEQ ID NO: 177066 - RNA, 22 nt, Human
guauuagucaauuacagugggg

SEQ ID NO: 177067 - RNA, 22 nt, Human
auuacaaguuucaguguuuugc

SEQ ID NO: 177068 - RNA, 22 nt, Human
uccaaauauagaugaguuguaa

SEQ ID NO: 177069 - RNA, 22 nt, Human
agcccaggucuggcccagccug

SEQ ID NO: 177070 - RNA, 22 nt, Human
guccugagggcccaggcauucu

SEQ ID NO: 177071 - RNA, 21 nt, Human
cuacuuaaguaggggauuagg

SEQ ID NO: 177072 - RNA, 22 nt, Human
gcuggccauauauuuugcuguu

SEQ ID NO: 177073 - RNA, 22 nt, Human
gaggccuggguuggaggugcau

SEQ ID NO: 177074 - RNA, 22 nt, Human
cccuuagagauucugucagagu

SEQ ID NO: 177075 - RNA, 21 nt, Human
agacuucuagaagugagauag

SEQ ID NO: 177076 - RNA, 22 nt, Human
aaacauguaauucugcuuaaga

SEQ ID NO: 177077 - RNA, 22 nt, Human
gaggcugcagcuaucagacauu

SEQ ID NO: 177078 - RNA, 22 nt, Human
gguggagagcuggaugagaggu

SEQ ID NO: 177079 - RNA, 22 nt, Human
acauucuuaacaguuaaaaacu

SEQ ID NO: 177080 - RNA, 21 nt, Human
uggcucugaaagagugcugca

SEQ ID NO: 177081 - RNA, 22 nt, Human
agucuagaaugugcaccaagcu

SEQ ID NO: 177082 - RNA, 22 nt, Human
gaacacugagaaagucagcuuu

SEQ ID NO: 177083 - RNA, 22 nt, Human
caacauuugaguaaagaaaugg

SEQ ID NO: 177084 - RNA, 22 nt, Human
uagaaaacuaauacaugcuuga

SEQ ID NO: 177085 - RNA, 22 nt, Human
gggcagguggcagggucucugg

SEQ ID NO: 177086 - RNA, 22 nt, Human
uggcagcuguguccagguagaa

SEQ ID NO: 177087 - RNA, 22 nt, Human
gcucaggccuggcccaugggac

SEQ ID NO: 177088 - RNA, 22 nt, Human
auccugaaaacuuacgaagugg

SEQ ID NO: 177089 - RNA, 20 nt, Human
uucuaguuuggaguuauuaa

SEQ ID NO: 177090 - RNA, 22 nt, Human
acauuugucuuccuccucagug

SEQ ID NO: 177091 - RNA, 22 nt, Human
agaaacucuggaagaacuuuua

SEQ ID NO: 177092 - RNA, 22 nt, Human
auaaaugugaauuagagcuuug

SEQ ID NO: 177093 - RNA, 22 nt, Human
ucagagaaucucuccuuaguuu

SEQ ID NO: 177094 - RNA, 22 nt, Human
acucuguacuuucuuguugugu

SEQ ID NO: 177095 - RNA, 22 nt, Human
uguccaugggcgucaggcagga

SEQ ID NO: 177096 - RNA, 21 nt, Human
accucaagcaacaaccaaggu

SEQ ID NO: 177097 - RNA, 22 nt, Human
aguggcagagcaggugcuggaa

SEQ ID NO: 177098 - RNA, 22 nt, Human
aaggcuuguugaguaucuacug

SEQ ID NO: 177099 - RNA, 22 nt, Human
uaaacagccuccccuuucacuc

SEQ ID NO: 177100 - RNA, 22 nt, Human
ucucaguguggugcuuaggaua

SEQ ID NO: 177101 - RNA, 22 nt, Human
uccuagaacuccaggacagucc

SEQ ID NO: 177102 - RNA, 22 nt, Human
uagcaucuguucuuucauuaaa

SEQ ID NO: 177103 - RNA, 22 nt, Human
ucucugugcccaguaguucucu

SEQ ID NO: 177104 - RNA, 22 nt, Human
uaauauacuucccauaguuuga

SEQ ID NO: 177105 - RNA, 22 nt, Human
agauacaaaggccuacagagca

SEQ ID NO: 177106 - RNA, 22 nt, Human
cagcugagucugagguucuuug

SEQ ID NO: 177107 - RNA, 22 nt, Human
ggggaggaccuuuccaaggcuu

SEQ ID NO: 177108 - RNA, 22 nt, Human
uguguccugugaucucuagggu

SEQ ID NO: 177109 - RNA, 22 nt, Human
uaacuguaccuagauaacgaac

SEQ ID NO: 177110 - RNA, 22 nt, Human
uccuggagauaauugcagugaa

SEQ ID NO: 177111 - RNA, 20 nt, Human
uuacaaagaggcaucgcuuu

SEQ ID NO: 177112 - RNA, 22 nt, Human
agaagugccgaaaggaagacag

SEQ ID NO: 177113 - RNA, 22 nt, Human
aacacagguugcugggccucac

SEQ ID NO: 177114 - RNA, 22 nt, Human
acagauggaauguguuauggga

SEQ ID NO: 177115 - RNA, 22 nt, Human
uauuacaaauuauaaugggaga

SEQ ID NO: 177116 - RNA, 22 nt, Human
ugcaauuagcguauuaguuuau

SEQ ID NO: 177117 - RNA, 22 nt, Human
uuagauaacaguagaauaucaa

SEQ ID NO: 177118 - RNA, 22 nt, Human
agcacagauucugaagaguccu

SEQ ID NO: 177119 - RNA, 22 nt, Human
ugaggcagucacccccuccugc

SEQ ID NO: 177120 - RNA, 22 nt, Human
agguggggccaaaugcuacagu

SEQ ID NO: 177121 - RNA, 22 nt, Human
cugagcuguuuaaucccagaua

SEQ ID NO: 177122 - RNA, 22 nt, Human
gcucaggauuucauccaugugu

SEQ ID NO: 177123 - RNA, 22 nt, Human
gaagugaagagauuagaaauca

SEQ ID NO: 177124 - RNA, 22 nt, Human
acccggagucggagguugcagu

SEQ ID NO: 177125 - RNA, 22 nt, Human
uccccaggaaggcccuuccugg

SEQ ID NO: 177126 - RNA, 21 nt, Human
uugggaucugagaagugaaaa

SEQ ID NO: 177127 - RNA, 22 nt, Human
ggcccagucuggggcccuguga

SEQ ID NO: 177128 - RNA, 22 nt, Human
gagccuggccuccugccucagc

SEQ ID NO: 177129 - RNA, 20 nt, Human
uacaggcucugagagaugau

SEQ ID NO: 177130 - RNA, 23 nt, Human
ucugucuuguuuaggccacuguu

SEQ ID NO: 177131 - RNA, 22 nt, Human
uuagaaagaacuuuagauauca

SEQ ID NO: 177132 - RNA, 22 nt, Human
gccuguuugagaauagucaggg

SEQ ID NO: 177133 - RNA, 19 nt, Human
ucaaaacacaaaugguuga

SEQ ID NO: 177134 - RNA, 22 nt, Human
aaagucugagcagaauuucuca

SEQ ID NO: 177135 - RNA, 22 nt, Human
gggaagggagggaccucagucu

SEQ ID NO: 177136 - RNA, 22 nt, Human
aaauuucuugaggcucucuagc

SEQ ID NO: 177137 - RNA, 18 nt, Human
ggcugcuuaaggagaucc

SEQ ID NO: 177138 - RNA, 20 nt, Human
uggggaaagccaucgaugag

SEQ ID NO: 177139 - RNA, 20 nt, Human
cccagcccgggccgcgcucg

SEQ ID NO: 177140 - RNA, 22 nt, Human
uucaguguacagugaagggauu

SEQ ID NO: 177141 - RNA, 22 nt, Human
gcccaggagguggaggugcagu

SEQ ID NO: 177142 - RNA, 22 nt, Human
gcugggaguuacugucuccuuu

SEQ ID NO: 177143 - RNA, 22 nt, Human
gacagauggucaguguugaagu

SEQ ID NO: 177144 - RNA, 22 nt, Human
ccugucaggguuugccucagaa

SEQ ID NO: 177145 - RNA, 22 nt, Human
agagccaguuacaacuguggag

SEQ ID NO: 177146 - RNA, 22 nt, Human
uauugguauaggcauugaaacu

SEQ ID NO: 177147 - RNA, 22 nt, Human
gccuguuucuaaucucauuucu

SEQ ID NO: 177148 - RNA, 22 nt, Human
cccaggucucccugcagcccug

SEQ ID NO: 177149 - RNA, 21 nt, Human
uguucagaccaacuuggacug

SEQ ID NO: 177150 - RNA, 22 nt, Human
cucuuucucgccgcccgcaguc

SEQ ID NO: 177151 - RNA, 22 nt, Human
ccucagagcgcguggcauuauu

SEQ ID NO: 177152 - RNA, 22 nt, Human
cucagcaagauuaagcagcuug

SEQ ID NO: 177153 - RNA, 22 nt, Human
gcuccuggugcuguagagauuu

SEQ ID NO: 177154 - RNA, 22 nt, Human
ugaguccugcugagcagagagg

SEQ ID NO: 177155 - RNA, 22 nt, Human
aacaaauguaaaaugcagaugc

SEQ ID NO: 177156 - RNA, 22 nt, Human
ggcucagcuuaucugggcaggc

SEQ ID NO: 177157 - RNA, 18 nt, Human
ugccauccccagucaagu

SEQ ID NO: 177158 - RNA, 18 nt, Human
gccugccuagagcuugcc

SEQ ID NO: 177159 - RNA, 22 nt, Human
cagcacagcuggcucuggaagc

SEQ ID NO: 177160 - RNA, 22 nt, Human
uucugcugcgacccaggaguua

SEQ ID NO: 177161 - RNA, 22 nt, Human
uaggccagcccuuaguccuguc

SEQ ID NO: 177162 - RNA, 18 nt, Human
aaggcuucaaagaguaga

SEQ ID NO: 177163 - RNA, 21 nt, Human
ccuggcuucagggugcacugg

SEQ ID NO: 177164 - RNA, 22 nt, Human
aggguagcuacccaacuccaga

SEQ ID NO: 177165 - RNA, 22 nt, Human
uaacacugcuucauuuuggaga

SEQ ID NO: 177166 - RNA, 22 nt, Human
cccucucucaggcugacagccu

SEQ ID NO: 177167 - RNA, 22 nt, Human
cuccccacauuucucccugucu

SEQ ID NO: 177168 - RNA, 22 nt, Human
cccagcuugucugauucagccu

SEQ ID NO: 177169 - RNA, 22 nt, Human
aaauuauuuucagaauggagaa

SEQ ID NO: 177170 - RNA, 22 nt, Human
auguucuaaucccugcuaugua

SEQ ID NO: 177171 - RNA, 22 nt, Human
cuuuaguucuagaaagugaaac

SEQ ID NO: 177172 - RNA, 22 nt, Human
ucuguggaccaggguauaagga

SEQ ID NO: 177173 - RNA, 23 nt, Human
agcagggccagaauacuugcugu

SEQ ID NO: 177174 - RNA, 22 nt, Human
ucuagagcuggaguagaaugug

SEQ ID NO: 177175 - RNA, 22 nt, Human
ucauauaaguuuaaaacuaucu

SEQ ID NO: 177176 - RNA, 22 nt, Human
ugaacuuacaaauuaaaagacu

SEQ ID NO: 177177 - RNA, 22 nt, Human
ugccugaacaugaauaguuuau

SEQ ID NO: 177178 - RNA, 21 nt, Human
aguucuguuaugcuggacuca

SEQ ID NO: 177179 - RNA, 22 nt, Human
cuuccuggaugaagcccagcau

SEQ ID NO: 177180 - RNA, 22 nt, Human
uccugcagccaagggucaucga

SEQ ID NO: 177181 - RNA, 22 nt, Human
ccuucagaaugaaauucuaaug

SEQ ID NO: 177182 - RNA, 22 nt, Human
cuccuccuggacacaggcugug

SEQ ID NO: 177183 - RNA, 22 nt, Human
ucugagcuagaaaguaugcccu

SEQ ID NO: 177184 - RNA, 22 nt, Human
cuccugucaauaggcuccuggc

SEQ ID NO: 177185 - RNA, 22 nt, Human
acaagauuuuaugacucuuuuu

SEQ ID NO: 177186 - RNA, 22 nt, Human
agcugggguugcacacauuuug

SEQ ID NO: 177187 - RNA, 22 nt, Human
aagcaugguggaugauacagug

SEQ ID NO: 177188 - RNA, 22 nt, Human
uucuuucccaguagaugugaaa

SEQ ID NO: 177189 - RNA, 22 nt, Human
aggcugggaagguaaaguugua

SEQ ID NO: 177190 - RNA, 22 nt, Human
uuuuagaaguucaugugggauu

SEQ ID NO: 177191 - RNA, 23 nt, Human
ucucaugucuuuccuacaagcau

SEQ ID NO: 177192 - RNA, 22 nt, Human
ugaugaaacugagguuccaaga

SEQ ID NO: 177193 - RNA, 22 nt, Human
caguuaaacagauugaguguua

SEQ ID NO: 177194 - RNA, 22 nt, Human
cacugucugggacauguggucu

SEQ ID NO: 177195 - RNA, 22 nt, Human
uuucauaaugucacagucaaaa

SEQ ID NO: 177196 - RNA, 22 nt, Human
uauuuauucuuuguacugccuu

SEQ ID NO: 177197 - RNA, 22 nt, Human
ugggagaaacugucucucccac

SEQ ID NO: 177198 - RNA, 22 nt, Human
uucuucaguguagcaacuguau

SEQ ID NO: 177199 - RNA, 22 nt, Human
uugaaauagaugcgucagagau

SEQ ID NO: 177200 - RNA, 22 nt, Human
aagggcuccaagagguagcugg

SEQ ID NO: 177201 - RNA, 22 nt, Human
gcauacagagaggauguggcau

SEQ ID NO: 177202 - RNA, 22 nt, Human
agggcagugggaaagccugcuc

SEQ ID NO: 177203 - RNA, 22 nt, Human
uccacagaauguaagauccaca

SEQ ID NO: 177204 - RNA, 22 nt, Human
ucagccacuucccucuggucag

SEQ ID NO: 177205 - RNA, 22 nt, Human
aggcucagcccaagguggagag

SEQ ID NO: 177206 - RNA, 22 nt, Human
gucaggcugccagucuuuauug

SEQ ID NO: 177207 - RNA, 23 nt, Human
ugugcacaucugacgggugaagg

SEQ ID NO: 177208 - RNA, 22 nt, Human
uccagagguauguagagaguau

SEQ ID NO: 177209 - RNA, 22 nt, Human
cuuggugcccagcagguggcug

SEQ ID NO: 177210 - RNA, 22 nt, Human
acugucugcuggccccugguua

SEQ ID NO: 177211 - RNA, 22 nt, Human
cagucuggcucagcacaaaggg

SEQ ID NO: 177212 - RNA, 22 nt, Human
aaugauaccgccaauauuacca

SEQ ID NO: 177213 - RNA, 22 nt, Human
caggcuacauuugcucugagaa

SEQ ID NO: 177214 - RNA, 22 nt, Human
ucaggcuguaaauggugugggu

SEQ ID NO: 177215 - RNA, 22 nt, Human
augaaaauugacagcggaagua

SEQ ID NO: 177216 - RNA, 22 nt, Human
cagcaggcuggacuucaguccc

SEQ ID NO: 177217 - RNA, 22 nt, Human
aaugguuuguaccuguccuugg

SEQ ID NO: 177218 - RNA, 22 nt, Human
ucacaggcuggucuccgaggac

SEQ ID NO: 177219 - RNA, 22 nt, Human
ucagaaguauuaugcuaaagga

SEQ ID NO: 177220 - RNA, 22 nt, Human
gauggaaugaauggcagauaca

SEQ ID NO: 177221 - RNA, 22 nt, Human
auuacacauagacauucguuca

SEQ ID NO: 177222 - RNA, 22 nt, Human
aagcccugaccugagaguccgu

SEQ ID NO: 177223 - RNA, 22 nt, Human
acauacuuaugcuaaaaauaua

SEQ ID NO: 177224 - RNA, 22 nt, Human
uuuagaaauucaucuauggccu

SEQ ID NO: 177225 - RNA, 22 nt, Human
auauuaaaacuaugguuuucag

SEQ ID NO: 177226 - RNA, 19 nt, Human
cucuccaccuaacagguau

SEQ ID NO: 177227 - RNA, 21 nt, Human
ugaauuucgguauggcuauaa

SEQ ID NO: 177228 - RNA, 22 nt, Human
ccucuggccaucccccauuaag

SEQ ID NO: 177229 - RNA, 22 nt, Human
cuuagcaguggguaccagggcu

SEQ ID NO: 177230 - RNA, 22 nt, Human
cauguguccuagcuauucuccu

SEQ ID NO: 177231 - RNA, 22 nt, Human
aacauuguuuucccuauaucca

SEQ ID NO: 177232 - RNA, 22 nt, Human
uccuggccauaggcuauuucag

SEQ ID NO: 177233 - RNA, 17 nt, Human
aggcuccuccuaagguc

SEQ ID NO: 177234 - RNA, 22 nt, Human
uugacagcuacggagcagcugu

SEQ ID NO: 177235 - RNA, 22 nt, Human
acagguggacacagcagcaguc

SEQ ID NO: 177236 - RNA, 22 nt, Human
guuaguguauauugccuucaaa

SEQ ID NO: 177237 - RNA, 22 nt, Human
ccaccucucaggguuuccuaau

SEQ ID NO: 177238 - RNA, 22 nt, Human
cccugugccagagaggcaggag

SEQ ID NO: 177239 - RNA, 22 nt, Human
uagugucaaacagggauuagaa

SEQ ID NO: 177240 - RNA, 22 nt, Human
uacaccagguguuauggucaau

SEQ ID NO: 177241 - RNA, 22 nt, Human
uuuaccacaauuuuaaacaaug

SEQ ID NO: 177242 - RNA, 22 nt, Human
uagcacaguucacuaugauaca

SEQ ID NO: 177243 - RNA, 22 nt, Human
gugcaugaagacucagaaaguc

SEQ ID NO: 177244 - RNA, 22 nt, Human
aucacacuguuauuuuaguuaa

SEQ ID NO: 177245 - RNA, 22 nt, Human
ugcaauaacccaugagauagaa

SEQ ID NO: 177246 - RNA, 22 nt, Human
gaggagcacaugaggcugaggg

SEQ ID NO: 177247 - RNA, 22 nt, Human
ccauuagaagauguaauagaga

SEQ ID NO: 177248 - RNA, 22 nt, Human
ugggggcugaguaagaugagau

SEQ ID NO: 177249 - RNA, 22 nt, Human
ggggaccuuuccauuucugaga

SEQ ID NO: 177250 - RNA, 22 nt, Human
auccaagucagggauaguuuga

SEQ ID NO: 177251 - RNA, 22 nt, Human
uggcuucucccuccccaucuag

SEQ ID NO: 177252 - RNA, 22 nt, Human
ugccgcagugcggggagggccc

SEQ ID NO: 177253 - RNA, 22 nt, Human
augaggcaguacacacaaagcc

SEQ ID NO: 177254 - RNA, 21 nt, Human
aucuggaagaacugguaagug

SEQ ID NO: 177255 - RNA, 22 nt, Human
guuuuacacaccuaugaaagac

SEQ ID NO: 177256 - RNA, 22 nt, Human
aguggcuggcauaggaacagac

SEQ ID NO: 177257 - RNA, 22 nt, Human
cgcaggcugcagccaagaagag

SEQ ID NO: 177258 - RNA, 22 nt, Human
uaaaguagcaaguuuagacuga

SEQ ID NO: 177259 - RNA, 22 nt, Human
uuggaggaaauugcuuuugugg

SEQ ID NO: 177260 - RNA, 22 nt, Human
ggcugugggccagcuagacccu

SEQ ID NO: 177261 - RNA, 22 nt, Human
cuguuaaucugcuugcaugaug

SEQ ID NO: 177262 - RNA, 22 nt, Human
uggaggagaccauuccacucag

SEQ ID NO: 177263 - RNA, 22 nt, Human
caggauccuggcugcauggacg

SEQ ID NO: 177264 - RNA, 22 nt, Human
cuacagcuguguguuuaugugc

SEQ ID NO: 177265 - RNA, 22 nt, Human
gcuggcagucccaucagcuggg

SEQ ID NO: 177266 - RNA, 22 nt, Human
agcagcuguuuguugaauuggu

SEQ ID NO: 177267 - RNA, 22 nt, Human
uuguagauggcuuauuucugug

SEQ ID NO: 177268 - RNA, 17 nt, Human
ugugcauagaauaauga

SEQ ID NO: 177269 - RNA, 22 nt, Human
uuggcagagaguaugcugaaga

SEQ ID NO: 177270 - RNA, 22 nt, Human
accugcaggggugcucucuggg

SEQ ID NO: 177271 - RNA, 22 nt, Human
aacuguggacuugagacugaug

SEQ ID NO: 177272 - RNA, 22 nt, Human
aauuggaaaaugcuacauauca

SEQ ID NO: 177273 - RNA, 22 nt, Human
uggaggcaggagacagggcaaa

SEQ ID NO: 177274 - RNA, 21 nt, Human
augggcagaggcagagaggcu

SEQ ID NO: 177275 - RNA, 20 nt, Human
acucuggggcucauuagggg

SEQ ID NO: 177276 - RNA, 22 nt, Human
uguaggucaaguccauugugcu

SEQ ID NO: 177277 - RNA, 22 nt, Human
augacauaaagcuaugcuaggu

SEQ ID NO: 177278 - RNA, 22 nt, Human
uuuaaaaggcagcuucuuuugu

SEQ ID NO: 177279 - RNA, 18 nt, Human
uccugcagcuucuaugua

SEQ ID NO: 177280 - RNA, 22 nt, Human
cuauuuucauucuuacauuguc

SEQ ID NO: 177281 - RNA, 18 nt, Human
gaaagccaugcagcagug

SEQ ID NO: 177282 - RNA, 22 nt, Human
agacaagacuaggcaguuguug

SEQ ID NO: 177283 - RNA, 22 nt, Human
gaucuagaaggcaaauauagug

SEQ ID NO: 177284 - RNA, 22 nt, Human
uccuguuuccaauuuguugggu

SEQ ID NO: 177285 - RNA, 22 nt, Human
ugaaccaucuggcuccagaaga

SEQ ID NO: 177286 - RNA, 21 nt, Human
gcucagagaggguaauuaacc

SEQ ID NO: 177287 - RNA, 22 nt, Human
acuggugguuucuccccagaga

SEQ ID NO: 177288 - RNA, 22 nt, Human
cuggaggccacuguacagauug

SEQ ID NO: 177289 - RNA, 22 nt, Human
ggcagaggugacagugucuuuu

SEQ ID NO: 177290 - RNA, 17 nt, Human
ggccuguguggcugcag

SEQ ID NO: 177291 - RNA, 22 nt, Human
uccuaaaggcugcuuuuauauu

SEQ ID NO: 177292 - RNA, 22 nt, Human
aacuccauuucccugccuccug

SEQ ID NO: 177293 - RNA, 22 nt, Human
cugaggagagguggccuguguu

SEQ ID NO: 177294 - RNA, 22 nt, Human
agccaugggagacugugggaga

SEQ ID NO: 177295 - RNA, 22 nt, Human
cugacuuuuccaaauaauacuu

SEQ ID NO: 177296 - RNA, 22 nt, Human
ugucacauuauaugugaggaua

SEQ ID NO: 177297 - RNA, 22 nt, Human
uugauuuauagaauguucaagc

SEQ ID NO: 177298 - RNA, 22 nt, Human
uuacaguggucauuugggaaaa

SEQ ID NO: 177299 - RNA, 22 nt, Human
ccucuggggguccucagagucu

SEQ ID NO: 177300 - RNA, 22 nt, Human
uagcccagcuuggccuauuucu

SEQ ID NO: 177301 - RNA, 20 nt, Human
acauguacagacagguuucu

SEQ ID NO: 177302 - RNA, 22 nt, Human
aggcugcuauaaacauucccgu

SEQ ID NO: 177303 - RNA, 21 nt, Human
gaggaaugguuugcaaagcac

SEQ ID NO: 177304 - RNA, 22 nt, Human
agugccuugugugugggcagcc

SEQ ID NO: 177305 - RNA, 19 nt, Human
agagaggcugugugaggga

SEQ ID NO: 177306 - RNA, 22 nt, Human
agugauucuuuaaagugguauu

SEQ ID NO: 177307 - RNA, 22 nt, Human
cucaguguuaaauauaagguau

SEQ ID NO: 177308 - RNA, 22 nt, Human
cugggcacuugcucacagcucu

SEQ ID NO: 177309 - RNA, 22 nt, Human
aggcugugaugagccucaugga

SEQ ID NO: 177310 - RNA, 19 nt, Human
gcugggugggguccacagc

SEQ ID NO: 177311 - RNA, 22 nt, Human
uucagagccacuucaagucuaa

SEQ ID NO: 177312 - RNA, 22 nt, Human
ugcccucccuguacugucagga

SEQ ID NO: 177313 - RNA, 22 nt, Human
uuuuauauggcacauugguugg

SEQ ID NO: 177314 - RNA, 22 nt, Human
cuggguguagcccaguaugagg

SEQ ID NO: 177315 - RNA, 22 nt, Human
agcaggcuuuccacagaaggag

SEQ ID NO: 177316 - RNA, 20 nt, Human
gucaaacuacuggcagugcc

SEQ ID NO: 177317 - RNA, 22 nt, Human
agccaccaccacugaaagguua

SEQ ID NO: 177318 - RNA, 22 nt, Human
uagaggagaacacaaauuauag

SEQ ID NO: 177319 - RNA, 17 nt, Human
uggcucugaggcugaau

SEQ ID NO: 177320 - RNA, 20 nt, Human
uggaggcagagccagaggga

SEQ ID NO: 177321 - RNA, 22 nt, Human
gagaggcccuguggucccagcu

SEQ ID NO: 177322 - RNA, 22 nt, Human
auggcagggcccuuggcuccca

SEQ ID NO: 177323 - RNA, 22 nt, Human
uuuaugcacaauuagucuuaua

SEQ ID NO: 177324 - RNA, 22 nt, Human
cacaguggcaaaggggcuuggg

SEQ ID NO: 177325 - RNA, 17 nt, Human
ccaggucuccuugcuuu

SEQ ID NO: 177326 - RNA, 22 nt, Human
uccugcagcugauaaauacagu

SEQ ID NO: 177327 - RNA, 22 nt, Human
gcuggcagagcucugggcuggg

SEQ ID NO: 177328 - RNA, 23 nt, Human
uuauaaauauuuucagguguguu

SEQ ID NO: 177329 - RNA, 22 nt, Human
auguggaucacagggguguguc

SEQ ID NO: 177330 - RNA, 22 nt, Human
cauuuccacucugggagucaga

SEQ ID NO: 177331 - RNA, 23 nt, Human
aggguggcuugcuuugcuuccuu

SEQ ID NO: 177332 - RNA, 22 nt, Human
agcugcaauacccuucuuccuu

SEQ ID NO: 177333 - RNA, 22 nt, Human
gagaagucauuugaccaccuag

SEQ ID NO: 177334 - RNA, 18 nt, Human
uauauuucacacauauuc

SEQ ID NO: 177335 - RNA, 23 nt, Human
gccaggcuccggucuguggccac

SEQ ID NO: 177336 - RNA, 22 nt, Human
caggcuccaagcccucugaugu

SEQ ID NO: 177337 - RNA, 22 nt, Human
aucuuagacccuugguagaaaa

SEQ ID NO: 177338 - RNA, 21 nt, Human
agaugcaguuugcaggugggu

SEQ ID NO: 177339 - RNA, 22 nt, Human
aguccuggacuuggagucaggg

SEQ ID NO: 177340 - RNA, 22 nt, Human
ggcuugcuucuuguccaggaau

SEQ ID NO: 177341 - RNA, 18 nt, Human
cccaggcuuugugggucu

SEQ ID NO: 177342 - RNA, 22 nt, Human
ccaggagcgggaaaaggaagaa

SEQ ID NO: 177343 - RNA, 22 nt, Human
caggagcaugcugaugccagaa

SEQ ID NO: 177344 - RNA, 20 nt, Human
gauuacaaaaugaaaugcau

SEQ ID NO: 177345 - RNA, 22 nt, Human
acuugguucuaacuaguguaua

SEQ ID NO: 177346 - RNA, 22 nt, Human
caagauguggugggcugaguuu

SEQ ID NO: 177347 - RNA, 22 nt, Human
gcuguggccuccagcacucccc

SEQ ID NO: 177348 - RNA, 22 nt, Human
uuauaggaaaaguucuagaaaa

SEQ ID NO: 177349 - RNA, 22 nt, Human
ugcauucaucauuugaaagccc

SEQ ID NO: 177350 - RNA, 22 nt, Human
aaagugcagcuugugaucccua

SEQ ID NO: 177351 - RNA, 22 nt, Human
gccugcagccucagagaauuuu

SEQ ID NO: 177352 - RNA, 20 nt, Human
aggcaugggaugcccagauu

SEQ ID NO: 177353 - RNA, 22 nt, Human
uaaggcuucagcauucaaaaca

SEQ ID NO: 177354 - RNA, 22 nt, Human
agggcugacaguaaaaguauga

SEQ ID NO: 177355 - RNA, 19 nt, Human
ugguggaggccccauguuc

SEQ ID NO: 177356 - RNA, 22 nt, Human
cacauucagggaacauuggagg

SEQ ID NO: 177357 - RNA, 22 nt, Human
aaugaugaacucagagggaacc

SEQ ID NO: 177358 - RNA, 22 nt, Human
gaggcuccauggaggaguaugg

SEQ ID NO: 177359 - RNA, 22 nt, Human
caugcucacaaaagauggcaaa

SEQ ID NO: 177360 - RNA, 22 nt, Human
agcaggcaccagggcucguccu

SEQ ID NO: 177361 - RNA, 22 nt, Human
agaggcugggcaggacccacag

SEQ ID NO: 177362 - RNA, 22 nt, Human
gagggcugaaguguuuuaugag

SEQ ID NO: 177363 - RNA, 22 nt, Human
cuguugcugggaacgcauguca

SEQ ID NO: 177364 - RNA, 22 nt, Human
cugcugaggccuucccuguccu

SEQ ID NO: 177365 - RNA, 22 nt, Human
caagugucuauaucagugcuug

SEQ ID NO: 177366 - RNA, 22 nt, Human
acaguauacauugauuaggacc

SEQ ID NO: 177367 - RNA, 22 nt, Human
aagaaaagauguuugguuuuca

SEQ ID NO: 177368 - RNA, 22 nt, Human
acacaugcgauagagagguagg

SEQ ID NO: 177369 - RNA, 20 nt, Human
uagauacccaaugcucauca

SEQ ID NO: 177370 - RNA, 22 nt, Human
ucucuggguaaaguucucucau

SEQ ID NO: 177371 - RNA, 22 nt, Human
aaaugugaguuauagcaauaga

SEQ ID NO: 177372 - RNA, 22 nt, Human
gacagcagccacagggagaggg

SEQ ID NO: 177373 - RNA, 22 nt, Human
gcagggcuguaauuugagccug

SEQ ID NO: 177374 - RNA, 22 nt, Human
gagggaguaacguacuacagug

SEQ ID NO: 177375 - RNA, 22 nt, Human
uucuagacuucaggcauucucc

SEQ ID NO: 177376 - RNA, 17 nt, Human
uuuaaacuacuacaagg

SEQ ID NO: 177377 - RNA, 19 nt, Human
uaucacugggcacugagga

SEQ ID NO: 177378 - RNA, 18 nt, Human
cagagcaguaugaauguu

SEQ ID NO: 177379 - RNA, 22 nt, Human
ucuguucauacagaguauagua

SEQ ID NO: 177380 - RNA, 22 nt, Human
ugcucaggccagccggacagag

SEQ ID NO: 177381 - RNA, 22 nt, Human
uccugcagcucugagaagcauc

SEQ ID NO: 177382 - RNA, 22 nt, Human
uggcuucuugggaugggucauu

SEQ ID NO: 177383 - RNA, 22 nt, Human
ugcagacaagugcaucuaaccc

SEQ ID NO: 177384 - RNA, 22 nt, Human
ugcuggaagaauuccaugcugg

SEQ ID NO: 177385 - RNA, 19 nt, Human
aggcacagguugucuggac

SEQ ID NO: 177386 - RNA, 21 nt, Human
uaucuacuggugucuuucaga

SEQ ID NO: 177387 - RNA, 22 nt, Human
ccucagcagacacgcuucucac

SEQ ID NO: 177388 - RNA, 22 nt, Human
agauguuuuggagacacuaacc

SEQ ID NO: 177389 - RNA, 22 nt, Human
uuuauauaacagagacugcuau

SEQ ID NO: 177390 - RNA, 22 nt, Human
uuauggcauauuccucauugua

SEQ ID NO: 177391 - RNA, 22 nt, Human
gucccuggggguuuaggacuca

SEQ ID NO: 177392 - RNA, 22 nt, Human
uggaaacuauagucacaauaga

SEQ ID NO: 177393 - RNA, 22 nt, Human
aagcaucuuaaaaaguaucaga

SEQ ID NO: 177394 - RNA, 22 nt, Human
ggugggcagcucuuggcaggca

SEQ ID NO: 177395 - RNA, 22 nt, Human
ucccagggacaccaagcuguuu

SEQ ID NO: 177396 - RNA, 22 nt, Human
cuggcucaggguggucuggguc

SEQ ID NO: 177397 - RNA, 22 nt, Human
acauacagaccugcagggcagc

SEQ ID NO: 177398 - RNA, 22 nt, Human
uguaaaugaaguaugcuuuacu

SEQ ID NO: 177399 - RNA, 22 nt, Human
gcaggugucuucauggaacucu

SEQ ID NO: 177400 - RNA, 23 nt, Human
auugagaaggauacauuguucuc

SEQ ID NO: 177401 - RNA, 18 nt, Human
ucuuccaacacugacacc

SEQ ID NO: 177402 - RNA, 19 nt, Human
uagacucuaauguuaagcu

SEQ ID NO: 177403 - RNA, 22 nt, Human
ugucacaugacacaaauaucua

SEQ ID NO: 177404 - RNA, 22 nt, Human
uccaggcucuaggcugcucucc

SEQ ID NO: 177405 - RNA, 22 nt, Human
cugggaggacaacuuggagcuc

SEQ ID NO: 177406 - RNA, 22 nt, Human
ugacauacuuuuagauagaugg

SEQ ID NO: 177407 - RNA, 22 nt, Human
uuuuugaaggcugaugugauua

SEQ ID NO: 177408 - RNA, 22 nt, Human
guugaaagagcauggacuugaa

SEQ ID NO: 177409 - RNA, 21 nt, Human
ugggggagaauugguugcuuu

SEQ ID NO: 177410 - RNA, 22 nt, Human
auauggcauucuuuuuaagggu

SEQ ID NO: 177411 - RNA, 22 nt, Human
ucuggggugugaccugagcaug

SEQ ID NO: 177412 - RNA, 22 nt, Human
cuccuucacgcaggcugccaug

SEQ ID NO: 177413 - RNA, 23 nt, Human
ugaguucucaucuuggcuucuau

SEQ ID NO: 177414 - RNA, 22 nt, Human
uagaacuagaacaaggauuuga

SEQ ID NO: 177415 - RNA, 22 nt, Human
gcaaagcaagauucagauguag

SEQ ID NO: 177416 - RNA, 22 nt, Human
gucauucuuaacaacucaguag

SEQ ID NO: 177417 - RNA, 22 nt, Human
gaggcauaaguagaagagauug

SEQ ID NO: 177418 - RNA, 22 nt, Human
augccuuucccaacaggguggg

SEQ ID NO: 177419 - RNA, 22 nt, Human
gcagauaggguauuaggaguaa

SEQ ID NO: 177420 - RNA, 22 nt, Human
uccaaggaggagcuggagauug

SEQ ID NO: 177421 - RNA, 22 nt, Human
uuggaauugaggauuuacauag

SEQ ID NO: 177422 - RNA, 22 nt, Human
uuuuggaaucauuuacagagca

SEQ ID NO: 177423 - RNA, 22 nt, Human
cagcagaagcaacauucaggcu

SEQ ID NO: 177424 - RNA, 22 nt, Human
cugagcaggauauucacagcag

SEQ ID NO: 177425 - RNA, 22 nt, Human
ucugaagggcugaguggaggag

SEQ ID NO: 177426 - RNA, 23 nt, Human
ccagggagguugauugguuaccc

SEQ ID NO: 177427 - RNA, 22 nt, Human
ugacagacauggaagccagagu

SEQ ID NO: 177428 - RNA, 22 nt, Human
gcucaggcaggagugcaguggc

SEQ ID NO: 177429 - RNA, 22 nt, Human
aggcucugaaggagaaccuguu

SEQ ID NO: 177430 - RNA, 22 nt, Human
ucagcagccgcagcugacucag

SEQ ID NO: 177431 - RNA, 22 nt, Human
ucugcgcccugucgccugcucc

SEQ ID NO: 177432 - RNA, 22 nt, Human
ugaucaaagccaaaguugagau

SEQ ID NO: 177433 - RNA, 21 nt, Human
ugcuggguuugcccaucaggc

SEQ ID NO: 177434 - RNA, 22 nt, Human
ccagcugggucccugcuggggc

SEQ ID NO: 177435 - RNA, 22 nt, Human
caggugucuaauucucaccccc

SEQ ID NO: 177436 - RNA, 22 nt, Human
agcccagcugcuauguaccugg

SEQ ID NO: 177437 - RNA, 22 nt, Human
uacaaagaguuuggucucuaga

SEQ ID NO: 177438 - RNA, 22 nt, Human
gcucacagccggcuggcagggg

SEQ ID NO: 177439 - RNA, 22 nt, Human
cagaccaucuugaagcaaacug

SEQ ID NO: 177440 - RNA, 22 nt, Human
ccuuaauuucuguccuucagau

SEQ ID NO: 177441 - RNA, 20 nt, Human
uccaguggccugaaucugga

SEQ ID NO: 177442 - RNA, 22 nt, Human
gcugcccugcaucugugccuuc

SEQ ID NO: 177443 - RNA, 22 nt, Human
agaguuacugcagagaugaaua

SEQ ID NO: 177444 - RNA, 22 nt, Human
ugcaggaaacagaggcucaaau

SEQ ID NO: 177445 - RNA, 21 nt, Human
gugaauuaauuauaugccuua

SEQ ID NO: 177446 - RNA, 22 nt, Human
aacaaacaaacauuuugucauc

SEQ ID NO: 177447 - RNA, 22 nt, Human
aacauugcagcuuaauugcagg

SEQ ID NO: 177448 - RNA, 22 nt, Human
agguguguauaaacauacauau

SEQ ID NO: 177449 - RNA, 22 nt, Human
uuguguccugauuugacacaau

SEQ ID NO: 177450 - RNA, 22 nt, Human
uaauacaaggcaggaagcagua

SEQ ID NO: 177451 - RNA, 19 nt, Human
ugcauacauguuaacaugu

SEQ ID NO: 177452 - RNA, 22 nt, Human
aguauggggcugugugugcaca

SEQ ID NO: 177453 - RNA, 22 nt, Human
uugguacauguuaaggaagagu

SEQ ID NO: 177454 - RNA, 22 nt, Human
auccagugagugcagcuguugu

SEQ ID NO: 177455 - RNA, 22 nt, Human
acacugagcaucucuagaggca

SEQ ID NO: 177456 - RNA, 22 nt, Human
guuuugugaggcacccacaggu

SEQ ID NO: 177457 - RNA, 22 nt, Human
ugucucugaggugagggucagc

SEQ ID NO: 177458 - RNA, 22 nt, Human
gcaggcaccacggcucaggucu

SEQ ID NO: 177459 - RNA, 22 nt, Human
caugaaggaauaauuguuuaga

SEQ ID NO: 177460 - RNA, 22 nt, Human
gcugccuggcuuuaguccacuu

SEQ ID NO: 177461 - RNA, 19 nt, Human
ugccugucaguagaucuca

SEQ ID NO: 177462 - RNA, 22 nt, Human
cacaggagaacccacagauucu

SEQ ID NO: 177463 - RNA, 22 nt, Human
ucccugagacucuggaguguaa

SEQ ID NO: 177464 - RNA, 22 nt, Human
gucugggcaagggagauggcgc

SEQ ID NO: 177465 - RNA, 22 nt, Human
uuucuacauucaaaaacuacca

SEQ ID NO: 177466 - RNA, 22 nt, Human
uagaacauaagucauucauuug

SEQ ID NO: 177467 - RNA, 22 nt, Human
cccugggaguccacugauguca

SEQ ID NO: 177468 - RNA, 22 nt, Human
ucuuuauuucugaaucccccau

SEQ ID NO: 177469 - RNA, 22 nt, Human
ucuggcagaggaaggaggccug

SEQ ID NO: 177470 - RNA, 22 nt, Human
ccugggaagucagccaaggacg

SEQ ID NO: 177471 - RNA, 22 nt, Human
accauucuuuacacuuauuucu

SEQ ID NO: 177472 - RNA, 22 nt, Human
uacauggugguggcacuugacu

SEQ ID NO: 177473 - RNA, 22 nt, Human
uuccauauguauauagcuguua

SEQ ID NO: 177474 - RNA, 22 nt, Human
gggccucagcucugcucugcaa

SEQ ID NO: 177475 - RNA, 22 nt, Human
gcugucugggaugucacugcug

SEQ ID NO: 177476 - RNA, 22 nt, Human
cugcagguuaggagcacuccuu

SEQ ID NO: 177477 - RNA, 22 nt, Human
uggccaguggacuaaguucuga

SEQ ID NO: 177478 - RNA, 22 nt, Human
acucagaggaaacccuccuagg

SEQ ID NO: 177479 - RNA, 19 nt, Human
ucccagagucuagagguug

SEQ ID NO: 177480 - RNA, 22 nt, Human
gagacacaagacgcaacucugu

SEQ ID NO: 177481 - RNA, 22 nt, Human
gcucagggucccuuggugcugg

SEQ ID NO: 177482 - RNA, 22 nt, Human
ucuucucuccugcuuggcagaa

SEQ ID NO: 177483 - RNA, 22 nt, Human
agucaauucuuuucaacucaag

SEQ ID NO: 177484 - RNA, 22 nt, Human
aaaugaguagcgaugcacauua

SEQ ID NO: 177485 - RNA, 19 nt, Human
agagaaggauccuaugguu

SEQ ID NO: 177486 - RNA, 22 nt, Human
acaauuucugaucagugaauuu

SEQ ID NO: 177487 - RNA, 22 nt, Human
uuugcuuucuguugaacagagu

SEQ ID NO: 177488 - RNA, 23 nt, Human
agggugagcaagcuauggagacc

SEQ ID NO: 177489 - RNA, 22 nt, Human
cuucacagcaugagcuuuggag

SEQ ID NO: 177490 - RNA, 22 nt, Human
cuucauguucugccuguggaag

SEQ ID NO: 177491 - RNA, 22 nt, Human
agucucuccacauuguuauaaa

SEQ ID NO: 177492 - RNA, 22 nt, Human
acagcugcauucuuaacaggaa

SEQ ID NO: 177493 - RNA, 22 nt, Human
agguuuguuaaaccagauugcu

SEQ ID NO: 177494 - RNA, 20 nt, Human
acaugaaaggaaacaggaaa

SEQ ID NO: 177495 - RNA, 22 nt, Human
cuguaacagcugucagagcagg

SEQ ID NO: 177496 - RNA, 22 nt, Human
agaagcagaaggaagcagggcc

SEQ ID NO: 177497 - RNA, 22 nt, Human
augcagggcagaguacguuagc

SEQ ID NO: 177498 - RNA, 22 nt, Human
ugggggcacuucgaggucgccu

SEQ ID NO: 177499 - RNA, 20 nt, Human
gccagaguuaugaugagagg

SEQ ID NO: 177500 - RNA, 22 nt, Human
cuggguucuuggcacagcagga

SEQ ID NO: 177501 - RNA, 22 nt, Human
uuuuaucauuacccagcugaaa

SEQ ID NO: 177502 - RNA, 23 nt, Human
gcaguuaguccacuuugcagaga

SEQ ID NO: 177503 - RNA, 22 nt, Human
uccaggagaaggccauccagcg

SEQ ID NO: 177504 - RNA, 22 nt, Human
uucuacagaauaaauguuuaca

SEQ ID NO: 177505 - RNA, 22 nt, Human
uagcagaguaauacuuuggagc

SEQ ID NO: 177506 - RNA, 20 nt, Human
agagcagcaguuggugaggu

SEQ ID NO: 177507 - RNA, 22 nt, Human
uuguuuaucgcuugcucacaua

SEQ ID NO: 177508 - RNA, 22 nt, Human
uuucauguuggggaguugagug

SEQ ID NO: 177509 - RNA, 22 nt, Human
agucacuguucugucaugucaa

SEQ ID NO: 177510 - RNA, 22 nt, Human
ucuguguuuaaaagauaugucc

SEQ ID NO: 177511 - RNA, 20 nt, Human
uggggucuaguuggccuggg

SEQ ID NO: 177512 - RNA, 22 nt, Human
aguacaaguagaaugcuacaag

SEQ ID NO: 177513 - RNA, 22 nt, Human
agugcuguccaguuucacaggu

SEQ ID NO: 177514 - RNA, 22 nt, Human
uccugcagagacagaggccuca

SEQ ID NO: 177515 - RNA, 23 nt, Human
agugacaaugggccagagguggc

SEQ ID NO: 177516 - RNA, 22 nt, Human
uuccaugagcucugaguucaca

SEQ ID NO: 177517 - RNA, 22 nt, Human
cugagggaagggguacauggcu

SEQ ID NO: 177518 - RNA, 22 nt, Human
uucaguauuucaugacuuucuu

SEQ ID NO: 177519 - RNA, 20 nt, Human
acuggcagccugccugcugu

SEQ ID NO: 177520 - RNA, 22 nt, Human
caauauauaaugaguacuuucc

SEQ ID NO: 177521 - RNA, 22 nt, Human
uugccaugcagccaggaaggag

SEQ ID NO: 177522 - RNA, 22 nt, Human
acaucucuuauaaacucucuga

SEQ ID NO: 177523 - RNA, 22 nt, Human
uguuuagaggaacuggaaucag

SEQ ID NO: 177524 - RNA, 22 nt, Human
gagaaagauuguccuucagggg

SEQ ID NO: 177525 - RNA, 22 nt, Human
ccagggcugguggcugcagagg

SEQ ID NO: 177526 - RNA, 22 nt, Human
uauuugaaggcauacauuuuga

SEQ ID NO: 177527 - RNA, 22 nt, Human
aagcagccacuggccaguuaua

SEQ ID NO: 177528 - RNA, 22 nt, Human
aagcugcagacccccugucuca

SEQ ID NO: 177529 - RNA, 22 nt, Human
ucacagaacaagccugguggag

SEQ ID NO: 177530 - RNA, 22 nt, Human
uuugaacaugcugcaugauaau

SEQ ID NO: 177531 - RNA, 22 nt, Human
gagugguaaugagcagauuagg

SEQ ID NO: 177532 - RNA, 22 nt, Human
aagucagaaaacagagcaauua

SEQ ID NO: 177533 - RNA, 22 nt, Human
agaaucugcauuucuaauaagc

SEQ ID NO: 177534 - RNA, 18 nt, Human
aucaaggaggggaagguc

SEQ ID NO: 177535 - RNA, 22 nt, Human
gugcaggggaucagguugcagc

SEQ ID NO: 177536 - RNA, 22 nt, Human
uucuaccuacccucugcauaca

SEQ ID NO: 177537 - RNA, 22 nt, Human
ucuguggcuuccuauuucuugg

SEQ ID NO: 177538 - RNA, 22 nt, Human
gcaguucuacuuauccauagac

SEQ ID NO: 177539 - RNA, 22 nt, Human
aaggcuuccacuuuguuggguc

SEQ ID NO: 177540 - RNA, 22 nt, Human
ucuguggcugguaauugcaugu

SEQ ID NO: 177541 - RNA, 22 nt, Human
agaggcaaggcaggauucuucu

SEQ ID NO: 177542 - RNA, 22 nt, Human
gaggugucuggccuuuguagga

SEQ ID NO: 177543 - RNA, 22 nt, Human
uuuaccuggauucuuacuuccu

SEQ ID NO: 177544 - RNA, 22 nt, Human
aaaacauucugugaacucucaa

SEQ ID NO: 177545 - RNA, 22 nt, Human
caaauguauucucacuucaggg

SEQ ID NO: 177546 - RNA, 22 nt, Human
gcagggucuugagaggcagcca

SEQ ID NO: 177547 - RNA, 22 nt, Human
agcaguguuuugauucugggag

SEQ ID NO: 177548 - RNA, 18 nt, Human
uggcagagugucuguucu

SEQ ID NO: 177549 - RNA, 22 nt, Human
augguauuccuuuauguagaag

SEQ ID NO: 177550 - RNA, 22 nt, Human
uuauuguuaggcuuuuggaauu

SEQ ID NO: 177551 - RNA, 22 nt, Human
ucugugcagacauggggaagcc

SEQ ID NO: 177552 - RNA, 22 nt, Human
gaucuucuagcagaaguaauuu

SEQ ID NO: 177553 - RNA, 22 nt, Human
ccuggcugcccauggacccucu

SEQ ID NO: 177554 - RNA, 22 nt, Human
ugguccaggcacccuucuagag

SEQ ID NO: 177555 - RNA, 22 nt, Human
ugcuuugcaaauaauagaaugu

SEQ ID NO: 177556 - RNA, 22 nt, Human
uacaacgugggacuuuguuucu

SEQ ID NO: 177557 - RNA, 22 nt, Human
ucagagcaaauuccugugagcc

SEQ ID NO: 177558 - RNA, 22 nt, Human
caggcuuggguucucugaguua

SEQ ID NO: 177559 - RNA, 22 nt, Human
uuaaauuagucaagcuucucug

SEQ ID NO: 177560 - RNA, 22 nt, Human
ugaauaaauugagagcgaaugu

SEQ ID NO: 177561 - RNA, 22 nt, Human
gaaugacauugaaaagacauug

SEQ ID NO: 177562 - RNA, 22 nt, Human
ucaggagguaggacauacuggu

SEQ ID NO: 177563 - RNA, 22 nt, Human
gcaaagcugggugugaaugcac

SEQ ID NO: 177564 - RNA, 22 nt, Human
gagaccccagcucagccuccag

SEQ ID NO: 177565 - RNA, 22 nt, Human
caaagaguuuuuucauauaaug

SEQ ID NO: 177566 - RNA, 22 nt, Human
uaauguauaacaaauacucauc

SEQ ID NO: 177567 - RNA, 22 nt, Human
aggcuuuccugucacucaugcu

SEQ ID NO: 177568 - RNA, 22 nt, Human
cagucucuaaaucaaucugaau

SEQ ID NO: 177569 - RNA, 22 nt, Human
gggcaauucacaggguuguuau

SEQ ID NO: 177570 - RNA, 22 nt, Human
uagcagagaggggacaguggca

SEQ ID NO: 177571 - RNA, 22 nt, Human
cccuccuggaggcggaugccca

SEQ ID NO: 177572 - RNA, 21 nt, Human
acucaggagacuaacuauguc

SEQ ID NO: 177573 - RNA, 20 nt, Human
aggcccugccagggacggag

SEQ ID NO: 177574 - RNA, 22 nt, Human
gcccaggggaguagucaauuua

SEQ ID NO: 177575 - RNA, 22 nt, Human
ucagaaguacugugcuacaaua

SEQ ID NO: 177576 - RNA, 22 nt, Human
aaugacaagacauagucucuga

SEQ ID NO: 177577 - RNA, 21 nt, Human
uucucagagucuauuacaguu

SEQ ID NO: 177578 - RNA, 22 nt, Human
ggcuggcugcaugcccccuccu

SEQ ID NO: 177579 - RNA, 23 nt, Human
cugugucuaugcagccauaucca

SEQ ID NO: 177580 - RNA, 22 nt, Human
ggaagagccuggggugucaggc

SEQ ID NO: 177581 - RNA, 22 nt, Human
uaaggacaauuugucgcuugca

SEQ ID NO: 177582 - RNA, 22 nt, Human
gugcaggggccuccccuugcug

SEQ ID NO: 177583 - RNA, 22 nt, Human
uaauaauuggcaauguugagca

SEQ ID NO: 177584 - RNA, 22 nt, Human
agaugaaaagauaagcagcaau

SEQ ID NO: 177585 - RNA, 22 nt, Human
acauacauguaaaggaaauuau

SEQ ID NO: 177586 - RNA, 22 nt, Human
ucugagcugcuagguaugcauu

SEQ ID NO: 177587 - RNA, 22 nt, Human
agagaauuaauuaggagcacug

SEQ ID NO: 177588 - RNA, 22 nt, Human
aauccauuuaccuuugcuugaa

SEQ ID NO: 177589 - RNA, 22 nt, Human
agccuuguuggucugaguuugg

SEQ ID NO: 177590 - RNA, 22 nt, Human
acuucauguaguccaucagguu

SEQ ID NO: 177591 - RNA, 22 nt, Human
auacagguguacacacaugcaa

SEQ ID NO: 177592 - RNA, 22 nt, Human
acacaugaaagacauuaaggug

SEQ ID NO: 177593 - RNA, 22 nt, Human
gagaaggauguggcucauagcu

SEQ ID NO: 177594 - RNA, 22 nt, Human
uuaguuuauaauucauuucugu

SEQ ID NO: 177595 - RNA, 22 nt, Human
uuucagugcuucuguuuaccgg

SEQ ID NO: 177596 - RNA, 23 nt, Human
agagcuuuccaguuucuugguga

SEQ ID NO: 177597 - RNA, 22 nt, Human
uacuuaaaaauuaucaaagugg

SEQ ID NO: 177598 - RNA, 22 nt, Human
agagucuuggcugagaacaaga

SEQ ID NO: 177599 - RNA, 22 nt, Human
cugccagcagaggccagcgcug

SEQ ID NO: 177600 - RNA, 22 nt, Human
caggaaaaaugccaggagucag

SEQ ID NO: 177601 - RNA, 22 nt, Human
cagggccucugugggcucucuc

SEQ ID NO: 177602 - RNA, 22 nt, Human
aaguuuuauuggaacauagcca

SEQ ID NO: 177603 - RNA, 22 nt, Human
gaggccucaggcgugggaaggg

SEQ ID NO: 177604 - RNA, 19 nt, Human
ucucuugaauaggucaaac

SEQ ID NO: 177605 - RNA, 22 nt, Human
ugaagcuuuaggauggguucau

SEQ ID NO: 177606 - RNA, 22 nt, Human
uuuagggaauagaagaucugaa

SEQ ID NO: 177607 - RNA, 22 nt, Human
auucaacuuauaagauauuaau

SEQ ID NO: 177608 - RNA, 22 nt, Human
uuuuauugggaguccucuacug

SEQ ID NO: 177609 - RNA, 22 nt, Human
ucugcaggcuguacaggaagca

SEQ ID NO: 177610 - RNA, 22 nt, Human
gcugcccaggguggagccggcu

SEQ ID NO: 177611 - RNA, 22 nt, Human
ucagacagagaaguacaaugag

SEQ ID NO: 177612 - RNA, 22 nt, Human
acagcuccuggggcuuuaaugg

SEQ ID NO: 177613 - RNA, 22 nt, Human
ggccugagucacaucaggagag

SEQ ID NO: 177614 - RNA, 22 nt, Human
uucuguuaccuuugugaguuuc

SEQ ID NO: 177615 - RNA, 22 nt, Human
aagggcuggagaggaaagguug

SEQ ID NO: 177616 - RNA, 23 nt, Human
uugcaaaaugcaauugaguuaga

SEQ ID NO: 177617 - RNA, 22 nt, Human
agggaagugaaugacagauauc

SEQ ID NO: 177618 - RNA, 22 nt, Human
aauauccagguagaugucuucu

SEQ ID NO: 177619 - RNA, 22 nt, Human
caguuacauuaauaaugcacau

SEQ ID NO: 177620 - RNA, 22 nt, Human
ucuacccugcggucuuggggca

SEQ ID NO: 177621 - RNA, 22 nt, Human
gcagagcugggucuguauccaa

SEQ ID NO: 177622 - RNA, 22 nt, Human
ucuccauacuugccuuuggccu

SEQ ID NO: 177623 - RNA, 22 nt, Human
cccaagggagugccuggucaac

SEQ ID NO: 177624 - RNA, 22 nt, Human
uccuggggaggucgaggcugag

SEQ ID NO: 177625 - RNA, 22 nt, Human
aagugaagaaauacaugagaau

SEQ ID NO: 177626 - RNA, 22 nt, Human
caggcccagaggccucuuccca

SEQ ID NO: 177627 - RNA, 22 nt, Human
cuugccaguguugcagaagcuc

SEQ ID NO: 177628 - RNA, 22 nt, Human
ugcaggcugcuggcaguagcuu

SEQ ID NO: 177629 - RNA, 22 nt, Human
uccaggccugacuauaaaugua

SEQ ID NO: 177630 - RNA, 22 nt, Human
aaacugcaauuauguuugcaga

SEQ ID NO: 177631 - RNA, 22 nt, Human
ugcucagcagucaaggucauag

SEQ ID NO: 177632 - RNA, 22 nt, Human
guguguucagcaagagguaagg

SEQ ID NO: 177633 - RNA, 22 nt, Human
guggcagugaaggucauagcau

SEQ ID NO: 177634 - RNA, 22 nt, Human
ugcccugcagacccugcagugu

SEQ ID NO: 177635 - RNA, 22 nt, Human
ugcuuuauaggggauugcaggc

SEQ ID NO: 177636 - RNA, 22 nt, Human
uacauguaagacaugagacucu

SEQ ID NO: 177637 - RNA, 22 nt, Human
ugcuccugaauuacacuacuac

SEQ ID NO: 177638 - RNA, 22 nt, Human
aaauauccauaagcacaucuau

SEQ ID NO: 177639 - RNA, 22 nt, Human
agcuggcagagcauuuguggcc

SEQ ID NO: 177640 - RNA, 22 nt, Human
ucccuucuggcagcagugugag

SEQ ID NO: 177641 - RNA, 22 nt, Human
acugggccuguacagagaaaac

SEQ ID NO: 177642 - RNA, 22 nt, Human
aaaguccuguuaacuguuaaca

SEQ ID NO: 177643 - RNA, 22 nt, Human
aagucauuaucucuucuaaucu

SEQ ID NO: 177644 - RNA, 22 nt, Human
uggcuguagaacaguggauauu

SEQ ID NO: 177645 - RNA, 22 nt, Human
caaagcuggacugcucaguuca

SEQ ID NO: 177646 - RNA, 22 nt, Human
aaugagaucagagauaacucaa

SEQ ID NO: 177647 - RNA, 22 nt, Human
ccuuccuggcuguccgccugau

SEQ ID NO: 177648 - RNA, 22 nt, Human
ucagaaucucuggaggcuuggc

SEQ ID NO: 177649 - RNA, 22 nt, Human
acaugacaaaaugcacaggauu

SEQ ID NO: 177650 - RNA, 22 nt, Human
cugggcagcuguaucagggagu

SEQ ID NO: 177651 - RNA, 22 nt, Human
gggcuucucugaucaauauuuc

SEQ ID NO: 177652 - RNA, 22 nt, Human
cugcucuucccacucacuccca

SEQ ID NO: 177653 - RNA, 22 nt, Human
uucuucuuuaucucaguauccu

SEQ ID NO: 177654 - RNA, 21 nt, Human
ggcuguggagccaugacucac

SEQ ID NO: 177655 - RNA, 20 nt, Human
agcuacaaugcgaagcuggc

SEQ ID NO: 177656 - RNA, 22 nt, Human
uagagcuggaauuugcagcaag

SEQ ID NO: 177657 - RNA, 22 nt, Human
aaagcaagacaggaguuucaga

SEQ ID NO: 177658 - RNA, 22 nt, Human
aggaccuguagggccugcaucc

SEQ ID NO: 177659 - RNA, 22 nt, Human
uuccuggccuaagguaggugac

SEQ ID NO: 177660 - RNA, 22 nt, Human
ggcacagcacuguaggccuggg

SEQ ID NO: 177661 - RNA, 17 nt, Human
agcaggcugcagaggcc

SEQ ID NO: 177662 - RNA, 22 nt, Human
gucaacagagacagagacacug

SEQ ID NO: 177663 - RNA, 22 nt, Human
aacauuuccggccuuuuguucu

SEQ ID NO: 177664 - RNA, 22 nt, Human
uuuuaguuuggauuucuaaagc

SEQ ID NO: 177665 - RNA, 22 nt, Human
uccugggacucuuuaucagaga

SEQ ID NO: 177666 - RNA, 22 nt, Human
ggggcagcucccgagggcagga

SEQ ID NO: 177667 - RNA, 22 nt, Human
cagggcugguuugucgaagaaa

SEQ ID NO: 177668 - RNA, 22 nt, Human
guccuggcugucuuauguugaa

SEQ ID NO: 177669 - RNA, 22 nt, Human
gcuccagguauuugcccuuuua

SEQ ID NO: 177670 - RNA, 22 nt, Human
aaacagacugaagaguugaagc

SEQ ID NO: 177671 - RNA, 22 nt, Human
uugacagggccaagaauggacc

SEQ ID NO: 177672 - RNA, 22 nt, Human
ugagcuuauacaugugaaguca

SEQ ID NO: 177673 - RNA, 22 nt, Human
uauaggaaauuuaucuccuggg

SEQ ID NO: 177674 - RNA, 19 nt, Human
auuguacauugaguuuggc

SEQ ID NO: 177675 - RNA, 22 nt, Human
acugcagccuugaacucugggc

SEQ ID NO: 177676 - RNA, 22 nt, Human
aggucucugcccacacaggcuu

SEQ ID NO: 177677 - RNA, 22 nt, Human
uggcagcauuuuuuccagaaca

SEQ ID NO: 177678 - RNA, 22 nt, Human
gaugaauugaaaucauugggca

SEQ ID NO: 177679 - RNA, 23 nt, Human
uggcagagacccagaaucuacau

SEQ ID NO: 177680 - RNA, 22 nt, Human
cucagcacuuuggaaggcugau

SEQ ID NO: 177681 - RNA, 22 nt, Human
aggucugccucacucacuucug

SEQ ID NO: 177682 - RNA, 22 nt, Human
cuccuggcucucuguuuagugu

SEQ ID NO: 177683 - RNA, 22 nt, Human
ucagcaggcgguuccuuguggg

SEQ ID NO: 177684 - RNA, 22 nt, Human
aacagugcuguuauaaauguac

SEQ ID NO: 177685 - RNA, 22 nt, Human
gguggggagucaggcauucuug

SEQ ID NO: 177686 - RNA, 22 nt, Human
cugggagcaagucaggaaaggu

SEQ ID NO: 177687 - RNA, 22 nt, Human
aaugagaaccuugaaaggaacu

SEQ ID NO: 177688 - RNA, 22 nt, Human
ugacucacuuaauuuacaaguc

SEQ ID NO: 177689 - RNA, 19 nt, Human
uucacaauuaugaaauuag

SEQ ID NO: 177690 - RNA, 22 nt, Human
uugugucccccuuugagagcca

SEQ ID NO: 177691 - RNA, 22 nt, Human
aucuuuggucuugagugcaucu

SEQ ID NO: 177692 - RNA, 20 nt, Human
ccacccugcuaagaauacac

SEQ ID NO: 177693 - RNA, 22 nt, Human
gccucaugagggaucugcccuc

SEQ ID NO: 177694 - RNA, 22 nt, Human
ucuagaauuugcguagguuaga

SEQ ID NO: 177695 - RNA, 19 nt, Human
uuaaagugcgagaagucuu

SEQ ID NO: 177696 - RNA, 22 nt, Human
cuuccauacagacaaugcaaug

SEQ ID NO: 177697 - RNA, 22 nt, Human
augggcagagcuggugggaggc

SEQ ID NO: 177698 - RNA, 22 nt, Human
uaccagccucuguugggggugg

SEQ ID NO: 177699 - RNA, 22 nt, Human
agccuugaguucaagugcuggc

SEQ ID NO: 177700 - RNA, 22 nt, Human
uauuuuacuuuaaagcgagaga

SEQ ID NO: 177701 - RNA, 22 nt, Human
gcauuaauguaagacccacucc

SEQ ID NO: 177702 - RNA, 17 nt, Human
caggaaaauaugaguga

SEQ ID NO: 177703 - RNA, 22 nt, Human
cccagcaucuccaggcauggcc

SEQ ID NO: 177704 - RNA, 22 nt, Human
agaaaacugggaggagagcuuc

SEQ ID NO: 177705 - RNA, 22 nt, Human
cugggcucaagaagucuucccu

SEQ ID NO: 177706 - RNA, 22 nt, Human
uccuggcaggucagcaggagca

SEQ ID NO: 177707 - RNA, 22 nt, Human
ggccccagguagaagauauaga

SEQ ID NO: 177708 - RNA, 22 nt, Human
ugaaagggguugaguuacagcu

SEQ ID NO: 177709 - RNA, 22 nt, Human
uaacuuuaggaauagguaaucu

SEQ ID NO: 177710 - RNA, 22 nt, Human
ucugcugcuacagacucucuag

SEQ ID NO: 177711 - RNA, 22 nt, Human
uagggcaggggaggaaucugaa

SEQ ID NO: 177712 - RNA, 22 nt, Human
cucugguucagggcucccuggc

SEQ ID NO: 177713 - RNA, 22 nt, Human
auggcccaggcaggcugguacu

SEQ ID NO: 177714 - RNA, 22 nt, Human
aggcacaggaggugguaagaag

SEQ ID NO: 177715 - RNA, 22 nt, Human
guaaucucagcuacuugggagg

SEQ ID NO: 177716 - RNA, 22 nt, Human
aaguaccuagaaauauuuuuga

SEQ ID NO: 177717 - RNA, 22 nt, Human
aagcuguuagggagugguaggu

SEQ ID NO: 177718 - RNA, 22 nt, Human
ggagccuggcccggcccuuggc

SEQ ID NO: 177719 - RNA, 22 nt, Human
uuguuuauuagcaauuauccug

SEQ ID NO: 177720 - RNA, 22 nt, Human
ugauacagucagcucacaauug

SEQ ID NO: 177721 - RNA, 22 nt, Human
caggccagcagggccuccgugg

SEQ ID NO: 177722 - RNA, 22 nt, Human
agacacaguauaagcacaacaa

SEQ ID NO: 177723 - RNA, 22 nt, Human
auuagagauuaugaauuccuag

SEQ ID NO: 177724 - RNA, 22 nt, Human
augaggcaugggaucaaaauga

SEQ ID NO: 177725 - RNA, 21 nt, Human
gccaaggggguagcuauuccu

SEQ ID NO: 177726 - RNA, 21 nt, Human
ugaaguucgcgggcaagauua

SEQ ID NO: 177727 - RNA, 22 nt, Human
ucaucccucugccaggcccagg

SEQ ID NO: 177728 - RNA, 22 nt, Human
acagguuugcagcuuguuaccu

SEQ ID NO: 177729 - RNA, 22 nt, Human
gcacagaaccagacaugaggca

SEQ ID NO: 177730 - RNA, 22 nt, Human
cacaugaugguggaagccauag

SEQ ID NO: 177731 - RNA, 22 nt, Human
ggugggucuuguggggcagcuu

SEQ ID NO: 177732 - RNA, 22 nt, Human
agagccucugucauggagagaa

SEQ ID NO: 177733 - RNA, 22 nt, Human
gaggggcacaguaaaggguccc

SEQ ID NO: 177734 - RNA, 22 nt, Human
uuauuccagcuaagaguccugg

SEQ ID NO: 177735 - RNA, 21 nt, Human
cugcccauuugugaugucccc

SEQ ID NO: 177736 - RNA, 22 nt, Human
cuuauucuacuccacaagcucu

SEQ ID NO: 177737 - RNA, 22 nt, Human
uuucuuuaucauagcaucuuug

SEQ ID NO: 177738 - RNA, 22 nt, Human
uuuguagcagcaugauuuauaa

SEQ ID NO: 177739 - RNA, 22 nt, Human
cucauuuacacuaugggaacua

SEQ ID NO: 177740 - RNA, 22 nt, Human
uaaauuauguuccauguccuuu

SEQ ID NO: 177741 - RNA, 22 nt, Human
ucuggagaggaggauguggaca

SEQ ID NO: 177742 - RNA, 22 nt, Human
ggagcugggguuggcaucuucc

SEQ ID NO: 177743 - RNA, 21 nt, Human
ccccugggagcccugucagua

SEQ ID NO: 177744 - RNA, 22 nt, Human
ggaaagccaggugcucuggugu

SEQ ID NO: 177745 - RNA, 22 nt, Human
gcccaggaagugacucagaugu

SEQ ID NO: 177746 - RNA, 19 nt, Human
ugcccugcacgcuguccug

SEQ ID NO: 177747 - RNA, 22 nt, Human
uuaaaaucuaaagcaguugucu

SEQ ID NO: 177748 - RNA, 22 nt, Human
ucuggguaugaccuauuuuucc

SEQ ID NO: 177749 - RNA, 22 nt, Human
cugcacagcccucaagagccug

SEQ ID NO: 177750 - RNA, 22 nt, Human
caguccuggggaccaggcugag

SEQ ID NO: 177751 - RNA, 22 nt, Human
aggcuuguggggaaucugugug

SEQ ID NO: 177752 - RNA, 22 nt, Human
ucagaaccagcccagcagauga

SEQ ID NO: 177753 - RNA, 22 nt, Human
accaguaggaguuggagaggaa

SEQ ID NO: 177754 - RNA, 20 nt, Human
ucugggagggacaagucucc

SEQ ID NO: 177755 - RNA, 22 nt, Human
acauucccuuggcuugaagcag

SEQ ID NO: 177756 - RNA, 22 nt, Human
cuggggcugcagcgaucuucau

SEQ ID NO: 177757 - RNA, 22 nt, Human
cauggugaggggugaagggcag

SEQ ID NO: 177758 - RNA, 18 nt, Human
gccaguggguccaggugc

SEQ ID NO: 177759 - RNA, 22 nt, Human
gcagggugccgacuucagggau

SEQ ID NO: 177760 - RNA, 21 nt, Human
cugcaaauaccuaguuaucug

SEQ ID NO: 177761 - RNA, 22 nt, Human
uggcaggaaggagacucagccc

SEQ ID NO: 177762 - RNA, 22 nt, Human
agggagguaggagcuucuagcu

SEQ ID NO: 177763 - RNA, 22 nt, Human
uucuugauguaccaacuuggga

SEQ ID NO: 177764 - RNA, 22 nt, Human
aguucaguaguccuucauugua

SEQ ID NO: 177765 - RNA, 17 nt, Human
acugucuuuuacacccu

SEQ ID NO: 177766 - RNA, 22 nt, Human
caggagcaaggagcagugggau

SEQ ID NO: 177767 - RNA, 22 nt, Human
ccauaaucauguaaguaaauuc

SEQ ID NO: 177768 - RNA, 19 nt, Human
uccuagaaugaggguguug

SEQ ID NO: 177769 - RNA, 22 nt, Human
gcuggcuggaguaaggagggag

SEQ ID NO: 177770 - RNA, 22 nt, Human
accagugucuuauugaccaucu

SEQ ID NO: 177771 - RNA, 22 nt, Human
gccugggagugcacagugaggu

SEQ ID NO: 177772 - RNA, 22 nt, Human
ccagccaggcuggcuguggagg

SEQ ID NO: 177773 - RNA, 22 nt, Human
auucucugaagucaauggaaau

SEQ ID NO: 177774 - RNA, 22 nt, Human
uucaucaggcaucaugcucaag

SEQ ID NO: 177775 - RNA, 22 nt, Human
cagggccuggagcugggccugc

SEQ ID NO: 177776 - RNA, 22 nt, Human
ccaggucuuugacuaauaugcu

SEQ ID NO: 177777 - RNA, 22 nt, Human
gcaggucuaucaggcugcaggu

SEQ ID NO: 177778 - RNA, 22 nt, Human
agguggcuguauucagcuguaa

SEQ ID NO: 177779 - RNA, 22 nt, Human
cugcaggagugaaagcaggccu

SEQ ID NO: 177780 - RNA, 22 nt, Human
auaaugaggauuugcauauuag

SEQ ID NO: 177781 - RNA, 22 nt, Human
agccugggcaacaacacagcga

SEQ ID NO: 177782 - RNA, 22 nt, Human
ucugggcccuaaaccagcucua

SEQ ID NO: 177783 - RNA, 23 nt, Human
agggccucaggagggcugcaugg

SEQ ID NO: 177784 - RNA, 20 nt, Human
aacacugagggcuacucuuc

SEQ ID NO: 177785 - RNA, 21 nt, Human
ggcaucucuuaguaucaccau

SEQ ID NO: 177786 - RNA, 22 nt, Human
gccucucucuacccaguaugau

SEQ ID NO: 177787 - RNA, 22 nt, Human
aggggagcuaacaccagagccc

SEQ ID NO: 177788 - RNA, 22 nt, Human
aaggugucaccagauuggcagg

SEQ ID NO: 177789 - RNA, 22 nt, Human
gcugccuguugaagggucugug

SEQ ID NO: 177790 - RNA, 22 nt, Human
uggaaacacccacgcaugcaua

SEQ ID NO: 177791 - RNA, 22 nt, Human
cuucaguucuaaaguagaaugu

SEQ ID NO: 177792 - RNA, 22 nt, Human
uggcaugaguauaggcuucuca

SEQ ID NO: 177793 - RNA, 21 nt, Human
ccaaaggcuauguaucuucug

SEQ ID NO: 177794 - RNA, 22 nt, Human
caggguggaagcuguagagugg

SEQ ID NO: 177795 - RNA, 22 nt, Human
ucaaauaaggagucaugaccau

SEQ ID NO: 177796 - RNA, 22 nt, Human
ucacagcauugucacaaggcug

SEQ ID NO: 177797 - RNA, 22 nt, Human
ucacaguuauagucuguagaau

SEQ ID NO: 177798 - RNA, 22 nt, Human
agcaggauuuugaagugcaagu

SEQ ID NO: 177799 - RNA, 22 nt, Human
cuguacucaagguaaaccagga

SEQ ID NO: 177800 - RNA, 22 nt, Human
ugcacagaugggcuuguucaua

SEQ ID NO: 177801 - RNA, 22 nt, Human
aaaaauagcuucucuugucccu

SEQ ID NO: 177802 - RNA, 22 nt, Human
aagcucaggaaagagucugguu

SEQ ID NO: 177803 - RNA, 22 nt, Human
agugaaaacacuaguucuugcc

SEQ ID NO: 177804 - RNA, 22 nt, Human
ccagaggaggggggucuuucug

SEQ ID NO: 177805 - RNA, 22 nt, Human
aucacaaaggucucagagcaca

SEQ ID NO: 177806 - RNA, 22 nt, Human
aagauguucuauuuucacuuuu

SEQ ID NO: 177807 - RNA, 22 nt, Human
ccacugaggcaggcaguaucua

SEQ ID NO: 177808 - RNA, 22 nt, Human
acuggccaggcagcaguagcuu

SEQ ID NO: 177809 - RNA, 22 nt, Human
gcagggcuggggcugcuccuga

SEQ ID NO: 177810 - RNA, 22 nt, Human
auuucuguaacuuaugaaaguu

SEQ ID NO: 177811 - RNA, 22 nt, Human
auguuacugugaucaugauacu

SEQ ID NO: 177812 - RNA, 22 nt, Human
caagaugugccuaaucagaccu

SEQ ID NO: 177813 - RNA, 22 nt, Human
uggcccugacacgugguacugg

SEQ ID NO: 177814 - RNA, 22 nt, Human
ccucagaagaaguggaauugau

SEQ ID NO: 177815 - RNA, 22 nt, Human
cuccauggaaaaggcuguuguu

SEQ ID NO: 177816 - RNA, 22 nt, Human
aggcaguuucugggacagcaua

SEQ ID NO: 177817 - RNA, 22 nt, Human
guggggcaugcacgcugcuccu

SEQ ID NO: 177818 - RNA, 22 nt, Human
aguagcacaauuuugucccuaa

SEQ ID NO: 177819 - RNA, 22 nt, Human
uugaggaguacaaagcaugcuu

SEQ ID NO: 177820 - RNA, 22 nt, Human
aggccagaaauuuggaguaugu

SEQ ID NO: 177821 - RNA, 22 nt, Human
auuuauuauugugguuacuucu

SEQ ID NO: 177822 - RNA, 22 nt, Human
cuuguuuuggcuaguaugaugu

SEQ ID NO: 177823 - RNA, 22 nt, Human
uggcaguggcgggacucagggc

SEQ ID NO: 177824 - RNA, 20 nt, Human
gccugagcuauugccaggau

SEQ ID NO: 177825 - RNA, 22 nt, Human
caaguuuacaauguguaugugu

SEQ ID NO: 177826 - RNA, 22 nt, Human
ucccauugccauagauaggaca

SEQ ID NO: 177827 - RNA, 21 nt, Human
uuuucuggaguaugucuccuc

SEQ ID NO: 177828 - RNA, 22 nt, Human
gagcugguucuguccagggaau

SEQ ID NO: 177829 - RNA, 22 nt, Human
auguuucuacagcguccacuga

SEQ ID NO: 177830 - RNA, 22 nt, Human
agggaaauaaucuauucugagg

SEQ ID NO: 177831 - RNA, 22 nt, Human
gaggaggcuguuucucugcauu

SEQ ID NO: 177832 - RNA, 22 nt, Human
acuaagugauucuaagcaucuu

SEQ ID NO: 177833 - RNA, 22 nt, Human
ucuuuacacaagacaagaauaa

SEQ ID NO: 177834 - RNA, 22 nt, Human
ggcuguccuuggccaaggcacu

SEQ ID NO: 177835 - RNA, 22 nt, Human
ucagagaguuggaaagaauuaa

SEQ ID NO: 177836 - RNA, 22 nt, Human
acacuguaaacaucucaagcac

SEQ ID NO: 177837 - RNA, 19 nt, Human
gggcucuggccucaguggg

SEQ ID NO: 177838 - RNA, 22 nt, Human
cugugggagaagcuagcacagg

SEQ ID NO: 177839 - RNA, 22 nt, Human
ucagauggaggcaauguuaccu

SEQ ID NO: 177840 - RNA, 22 nt, Human
ugcucccaaaccugacaggcuc

SEQ ID NO: 177841 - RNA, 22 nt, Human
aaguccagcucuaaauaucuga

SEQ ID NO: 177842 - RNA, 18 nt, Human
ugcccaccagaagaggga

SEQ ID NO: 177843 - RNA, 22 nt, Human
agggagcaugggugaagcaggc

SEQ ID NO: 177844 - RNA, 22 nt, Human
caggucucuuuugucacaccac

SEQ ID NO: 177845 - RNA, 22 nt, Human
acaaaguguuuucugaaggccu

SEQ ID NO: 177846 - RNA, 22 nt, Human
uucucaugaaacucgcuuccuc

SEQ ID NO: 177847 - RNA, 22 nt, Human
ucccuccuggugagcaggggcu

SEQ ID NO: 177848 - RNA, 22 nt, Human
uguggggcugugguguucuucu

SEQ ID NO: 177849 - RNA, 22 nt, Human
caccaccaggcaggacaccgaa

SEQ ID NO: 177850 - RNA, 22 nt, Human
gagcuggugugugcccgagcac

SEQ ID NO: 177851 - RNA, 22 nt, Human
uccugaggacuaacaggaagga

SEQ ID NO: 177852 - RNA, 22 nt, Human
cccagguggguuggccucuguc

SEQ ID NO: 177853 - RNA, 22 nt, Human
gaaggccacggaauggagcugg

SEQ ID NO: 177854 - RNA, 22 nt, Human
cauuugucaucacugagcugcc

SEQ ID NO: 177855 - RNA, 22 nt, Human
gggaagcccugugcuugccugg

SEQ ID NO: 177856 - RNA, 22 nt, Human
aguagugaacagccacaggauu

SEQ ID NO: 177857 - RNA, 22 nt, Human
gccaccuggacagcugugcccu

SEQ ID NO: 177858 - RNA, 22 nt, Human
gaagaggaugacaggagccggu

SEQ ID NO: 177859 - RNA, 21 nt, Human
ccuuuagauuucuaugcaguu

SEQ ID NO: 177860 - RNA, 22 nt, Human
cuauucaguugugggcaacaau

SEQ ID NO: 177861 - RNA, 22 nt, Human
cagcaugccugggcugccugcc

SEQ ID NO: 177862 - RNA, 22 nt, Human
gaucagaguggcuagagccuug

SEQ ID NO: 177863 - RNA, 22 nt, Human
uuuugagauggagucuugcucu

SEQ ID NO: 177864 - RNA, 22 nt, Human
agaaaguuaaacagugauaaga

SEQ ID NO: 177865 - RNA, 22 nt, Human
aggaauguuuagaaugucagaa

SEQ ID NO: 177866 - RNA, 22 nt, Human
ggcacugauuccauucaugaag

SEQ ID NO: 177867 - RNA, 22 nt, Human
ucugaaauggcgauggccguug

SEQ ID NO: 177868 - RNA, 22 nt, Human
uucugcagugugcagggccugu

SEQ ID NO: 177869 - RNA, 22 nt, Human
auuugucucugcacuuuacuca

SEQ ID NO: 177870 - RNA, 20 nt, Human
agcacagcgcgguguuccuu

SEQ ID NO: 177871 - RNA, 22 nt, Human
uacauuuauaaggcuucucugu

SEQ ID NO: 177872 - RNA, 22 nt, Human
gggcagguacaagaugcuucuu

SEQ ID NO: 177873 - RNA, 22 nt, Human
guuuccucugcugguuuucauu

SEQ ID NO: 177874 - RNA, 21 nt, Human
ucagaacaauuccaugccucc

SEQ ID NO: 177875 - RNA, 22 nt, Human
agaugagugagagcaucaacuu

SEQ ID NO: 177876 - RNA, 22 nt, Human
aaauggcacuuugacagccugc

SEQ ID NO: 177877 - RNA, 22 nt, Human
cuacugaugcuauacuucucag

SEQ ID NO: 177878 - RNA, 22 nt, Human
gugaggcuacucagcuguccga

SEQ ID NO: 177879 - RNA, 22 nt, Human
ugcaggugcagcgauacuguga

SEQ ID NO: 177880 - RNA, 22 nt, Human
gggcgccgugggaaacagccgg

SEQ ID NO: 177881 - RNA, 17 nt, Human
agcagcuggcacaggag

SEQ ID NO: 177882 - RNA, 22 nt, Human
aaaacauaaacugacagcccau

SEQ ID NO: 177883 - RNA, 22 nt, Human
uggcaaagacgcuagcuaagau

SEQ ID NO: 177884 - RNA, 22 nt, Human
agaagccacugcucccagugag

SEQ ID NO: 177885 - RNA, 22 nt, Human
ucacagaaauaagauaguuauu

SEQ ID NO: 177886 - RNA, 22 nt, Human
uaaucacagaaacagacuguuu

SEQ ID NO: 177887 - RNA, 22 nt, Human
uucuggaaaugcacaacuaauu

SEQ ID NO: 177888 - RNA, 22 nt, Human
agccagcugccuuucacaucug

SEQ ID NO: 177889 - RNA, 22 nt, Human
aagucucugauguguguuaggu

SEQ ID NO: 177890 - RNA, 22 nt, Human
aucuaauuuucacucauuugcu

SEQ ID NO: 177891 - RNA, 22 nt, Human
gccaccugcgggccguggugga

SEQ ID NO: 177892 - RNA, 22 nt, Human
gggcacaccuugucugagcaca

SEQ ID NO: 177893 - RNA, 23 nt, Human
agcuuccuagugaccuggagucu

SEQ ID NO: 177894 - RNA, 22 nt, Human
cuccuccagcucucccuggggg

SEQ ID NO: 177895 - RNA, 22 nt, Human
agucucugcugguugugccuau

SEQ ID NO: 177896 - RNA, 22 nt, Human
uuagggacagcucuguagguga

SEQ ID NO: 177897 - RNA, 22 nt, Human
aagagggcagcacagguggguc

SEQ ID NO: 177898 - RNA, 22 nt, Human
ugguccugaucaccgcugggca

SEQ ID NO: 177899 - RNA, 22 nt, Human
ccagagggaagaggaagcgcug

SEQ ID NO: 177900 - RNA, 22 nt, Human
ccucugagugcuuugagggaga

SEQ ID NO: 177901 - RNA, 20 nt, Human
auugaaauuuuucugagauu

SEQ ID NO: 177902 - RNA, 22 nt, Human
cuagagaaacgccgugggagga

SEQ ID NO: 177903 - RNA, 22 nt, Human
ggcaggcaucauguggucauua

SEQ ID NO: 177904 - RNA, 22 nt, Human
gauccacagcccgcuugggccc

SEQ ID NO: 177905 - RNA, 22 nt, Human
ugacaugugucuccuuccgucu

SEQ ID NO: 177906 - RNA, 22 nt, Human
gagccuggauagccuuguucca

SEQ ID NO: 177907 - RNA, 22 nt, Human
agugugaccuuauuuggaaaca

SEQ ID NO: 177908 - RNA, 17 nt, Human
cccguucucuucgcugg

SEQ ID NO: 177909 - RNA, 22 nt, Human
cggggcuguagcacagcugagc

SEQ ID NO: 177910 - RNA, 22 nt, Human
acacuuuaucaauauucaaaaa

SEQ ID NO: 177911 - RNA, 22 nt, Human
gugcaaaagcaauugcaguuuu

SEQ ID NO: 177912 - RNA, 22 nt, Human
agcuuguuagaaauguagacuc

SEQ ID NO: 177913 - RNA, 22 nt, Human
acuuggaaaauucaaaauggca

SEQ ID NO: 177914 - RNA, 22 nt, Human
ugaaagcuguacaugugguaca

SEQ ID NO: 177915 - RNA, 22 nt, Human
aagcacuggggccacagacacg

SEQ ID NO: 177916 - RNA, 22 nt, Human
ccugagggucaaggagcccuag

SEQ ID NO: 177917 - RNA, 22 nt, Human
gcuggcuggaggagggagguug

SEQ ID NO: 177918 - RNA, 20 nt, Human
gggcuagguagccauuuggc

SEQ ID NO: 177919 - RNA, 22 nt, Human
ccucugagugacagccuccucu

SEQ ID NO: 177920 - RNA, 22 nt, Human
aggaggaauacaauccagcagc

SEQ ID NO: 177921 - RNA, 22 nt, Human
aggcuccaaauuaccaagcucu

SEQ ID NO: 177922 - RNA, 22 nt, Human
aggaaccagagguugagcaacu

SEQ ID NO: 177923 - RNA, 21 nt, Human
cagcccagagcaguggggcca

SEQ ID NO: 177924 - RNA, 22 nt, Human
cugcaaggcugaauucagcuga

SEQ ID NO: 177925 - RNA, 22 nt, Human
ggcacagcugaugcagacacac

SEQ ID NO: 177926 - RNA, 22 nt, Human
cuucuucuggacaggcagcucc

SEQ ID NO: 177927 - RNA, 22 nt, Human
ggauguugauugaauggccauu

SEQ ID NO: 177928 - RNA, 22 nt, Human
augaugucaugaauauauuagu

SEQ ID NO: 177929 - RNA, 22 nt, Human
aaauacauacacuguacguggc

SEQ ID NO: 177930 - RNA, 22 nt, Human
cccaggcugaguuagagguguc

SEQ ID NO: 177931 - RNA, 22 nt, Human
uacaaguccguaaagggcagau

SEQ ID NO: 177932 - RNA, 19 nt, Human
ggaccagguccugggcagc

SEQ ID NO: 177933 - RNA, 22 nt, Human
cuuuuagcugcaaguguucaca

SEQ ID NO: 177934 - RNA, 22 nt, Human
cucagcaguauacucugaagau

SEQ ID NO: 177935 - RNA, 22 nt, Human
ugggaggcagaaguugacugga

SEQ ID NO: 177936 - RNA, 22 nt, Human
ugucucaguucccuucucugga

SEQ ID NO: 177937 - RNA, 22 nt, Human
agaauuuuugauuaucuacucg

SEQ ID NO: 177938 - RNA, 22 nt, Human
ccuguggcucucuuuggagguc

SEQ ID NO: 177939 - RNA, 22 nt, Human
uucacauugugcagauuauggu

SEQ ID NO: 177940 - RNA, 22 nt, Human
agcaggucuugcucucaacagg

SEQ ID NO: 177941 - RNA, 22 nt, Human
gaaaaucugcuuauauuauuuu

SEQ ID NO: 177942 - RNA, 23 nt, Human
auuuacagguuaaaugaaaucag

SEQ ID NO: 177943 - RNA, 22 nt, Human
guagccuagaggucacgucuuc

SEQ ID NO: 177944 - RNA, 22 nt, Human
ugacacaguagaaagaugauga

SEQ ID NO: 177945 - RNA, 22 nt, Human
caucuuuugguaggagccgggc

SEQ ID NO: 177946 - RNA, 22 nt, Human
cagcaagaacagccugaugugc

SEQ ID NO: 177947 - RNA, 22 nt, Human
uggggacaggagacuuacagcu

SEQ ID NO: 177948 - RNA, 22 nt, Human
uuucaguuuccagcuuugucau

SEQ ID NO: 177949 - RNA, 22 nt, Human
ggccuuggugcucuguguugca

SEQ ID NO: 177950 - RNA, 22 nt, Human
uuuccucagaagugucuacuau

SEQ ID NO: 177951 - RNA, 22 nt, Human
uucagaaugcuauuucugaaau

SEQ ID NO: 177952 - RNA, 22 nt, Human
ucaugcagagccagucaggaua

SEQ ID NO: 177953 - RNA, 22 nt, Human
aggcuguggugcugaaggaggg

SEQ ID NO: 177954 - RNA, 22 nt, Human
gccaggguucgaauccguaugg

SEQ ID NO: 177955 - RNA, 22 nt, Human
gagaggccauggcugugcagug

SEQ ID NO: 177956 - RNA, 22 nt, Human
uugaaugaauaguugcuagaag

SEQ ID NO: 177957 - RNA, 22 nt, Human
gagggccaaagagcaagagccu

SEQ ID NO: 177958 - RNA, 22 nt, Human
cagcuggccugaucccuguggc

SEQ ID NO: 177959 - RNA, 22 nt, Human
cugcugugcacccaggaaggcu

SEQ ID NO: 177960 - RNA, 22 nt, Human
ucuagauguacugcugaagagu

SEQ ID NO: 177961 - RNA, 22 nt, Human
agcagggggaguuagacuagau

SEQ ID NO: 177962 - RNA, 22 nt, Human
cagcccaguaccaagcaguugg

SEQ ID NO: 177963 - RNA, 22 nt, Human
acaggcuuacaggcugcaagua

SEQ ID NO: 177964 - RNA, 22 nt, Human
ucagugcagggugggagagaga

SEQ ID NO: 177965 - RNA, 22 nt, Human
auuccacagaggacuccgauug

SEQ ID NO: 177966 - RNA, 22 nt, Human
agugucacagacccaaucagga

SEQ ID NO: 177967 - RNA, 22 nt, Human
ugcacgugugagcauucacaug

SEQ ID NO: 177968 - RNA, 22 nt, Human
uucaucugcuucuugauuuugc

SEQ ID NO: 177969 - RNA, 22 nt, Human
cagcuuuaccaauauuuggaaa

SEQ ID NO: 177970 - RNA, 22 nt, Human
cuuucugauuuuaagcucuaau

SEQ ID NO: 177971 - RNA, 22 nt, Human
gccaaaucuggauuuagcaaga

SEQ ID NO: 177972 - RNA, 22 nt, Human
uggcaggagccugcggggaggu

SEQ ID NO: 177973 - RNA, 22 nt, Human
aaauagcauaaaauaggaagcu

SEQ ID NO: 177974 - RNA, 18 nt, Human
ccagugccaagaguggca

SEQ ID NO: 177975 - RNA, 21 nt, Human
uugaaggaucacuucuguacc

SEQ ID NO: 177976 - RNA, 22 nt, Human
gcuguucucuguaacaugcauu

SEQ ID NO: 177977 - RNA, 22 nt, Human
gcacaugucuuauucacuguua

SEQ ID NO: 177978 - RNA, 22 nt, Human
gccuguguuuuuaacucuagga

SEQ ID NO: 177979 - RNA, 22 nt, Human
agcauccacucacugggagagg

SEQ ID NO: 177980 - RNA, 22 nt, Human
gcuggccacacugcugauggag

SEQ ID NO: 177981 - RNA, 22 nt, Human
ugacauguaguuagaaaauagg

SEQ ID NO: 177982 - RNA, 22 nt, Human
gcaucuuuagccucuccguggc

SEQ ID NO: 177983 - RNA, 22 nt, Human
cugggccuccucugcccaagcu

SEQ ID NO: 177984 - RNA, 22 nt, Human
acaguguguuggaggagacugu

SEQ ID NO: 177985 - RNA, 22 nt, Human
agugaaauccuggucaacaggu

SEQ ID NO: 177986 - RNA, 21 nt, Human
acagcauguuuguguguuugc

SEQ ID NO: 177987 - RNA, 22 nt, Human
ucucccacagucucccauggcu

SEQ ID NO: 177988 - RNA, 23 nt, Human
ucugggcugagcucgaguguaga

SEQ ID NO: 177989 - RNA, 22 nt, Human
auguuuucuagaguuuaaaauc

SEQ ID NO: 177990 - RNA, 22 nt, Human
uccugugauggcuugcgaugug

SEQ ID NO: 177991 - RNA, 22 nt, Human
agggaggaaggauguuccaaag

SEQ ID NO: 177992 - RNA, 22 nt, Human
aggaaaaaccuguuaaugguag

SEQ ID NO: 177993 - RNA, 22 nt, Human
cuuggggcuuuguguguaggau

SEQ ID NO: 177994 - RNA, 22 nt, Human
aaggcuucuggagcuugcuggc

SEQ ID NO: 177995 - RNA, 22 nt, Human
cuuaaauuggaugaguuaaguu

SEQ ID NO: 177996 - RNA, 22 nt, Human
ugcugccauggucgcugguguc

SEQ ID NO: 177997 - RNA, 22 nt, Human
ucuccccucccuggaccagugc

SEQ ID NO: 177998 - RNA, 22 nt, Human
guggcuugagcaggggcagagg

SEQ ID NO: 177999 - RNA, 22 nt, Human
guuaacaagaauuacucuggaa

SEQ ID NO: 178000 - RNA, 22 nt, Human
ugucugaugauagugucucucc

SEQ ID NO: 178001 - RNA, 22 nt, Human
aagggcagaauagagaagaugg

SEQ ID NO: 178002 - RNA, 22 nt, Human
cuguggcagggaagaggccaug

SEQ ID NO: 178003 - RNA, 22 nt, Human
uagaaucugaauguagagcuga

SEQ ID NO: 178004 - RNA, 22 nt, Human
uggcagaaugaagacuggggcc

SEQ ID NO: 178005 - RNA, 22 nt, Human
ucuggcugaaauuagaagguuc

SEQ ID NO: 178006 - RNA, 20 nt, Human
acucuguacugucaauguug

SEQ ID NO: 178007 - RNA, 22 nt, Human
uacugaaaguggucaacagugg

SEQ ID NO: 178008 - RNA, 22 nt, Human
uuuagaaauugcagagugggug

SEQ ID NO: 178009 - RNA, 22 nt, Human
uuugaagauaaauauggagaaa

SEQ ID NO: 178010 - RNA, 22 nt, Human
ucugggcuuuaagaacucuguu

SEQ ID NO: 178011 - RNA, 22 nt, Human
gcucaggacccaggugugaccu

SEQ ID NO: 178012 - RNA, 22 nt, Human
cuagaaggaagcccagcacuuc

SEQ ID NO: 178013 - RNA, 22 nt, Human
ucucuguggguuucaccagcgc

SEQ ID NO: 178014 - RNA, 22 nt, Human
gguguagcucugugucccacug

SEQ ID NO: 178015 - RNA, 22 nt, Human
ugcaauuacugggagguuuuau

SEQ ID NO: 178016 - RNA, 22 nt, Human
cgugagggcauggcagugagga

SEQ ID NO: 178017 - RNA, 22 nt, Human
agacacagaugguaccugagcc

SEQ ID NO: 178018 - RNA, 20 nt, Human
cuccagccccugcccugguc

SEQ ID NO: 178019 - RNA, 22 nt, Human
acaguaacaaauggccugagga

SEQ ID NO: 178020 - RNA, 22 nt, Human
acagacaugggccgcucuugag

SEQ ID NO: 178021 - RNA, 22 nt, Human
acaggcugcccgcuccccaccu

SEQ ID NO: 178022 - RNA, 22 nt, Human
uauuccuaagucccaacuacau

SEQ ID NO: 178023 - RNA, 22 nt, Human
aaauauuguuuugguaagcuuc

SEQ ID NO: 178024 - RNA, 22 nt, Human
augagguuuuacugccauuuuc

SEQ ID NO: 178025 - RNA, 22 nt, Human
agcaccaggcuguuggaagccc

SEQ ID NO: 178026 - RNA, 22 nt, Human
auagacauggucuuuugucauu

SEQ ID NO: 178027 - RNA, 22 nt, Human
gagcugggcuggcuuccucccu

SEQ ID NO: 178028 - RNA, 22 nt, Human
ugauaggcuuaauuuuccuguc

SEQ ID NO: 178029 - RNA, 22 nt, Human
agcuguuccaggccucauugcu

SEQ ID NO: 178030 - RNA, 22 nt, Human
gcuccucucccagagcugcagg

SEQ ID NO: 178031 - RNA, 22 nt, Human
uugcuaauuuaacuaccuuguu

SEQ ID NO: 178032 - RNA, 22 nt, Human
cauuuuguagcaaugacuguug

SEQ ID NO: 178033 - RNA, 22 nt, Human
ggcuucugagugcucugcuguu

SEQ ID NO: 178034 - RNA, 22 nt, Human
gugacguuuaauagugacaugg

SEQ ID NO: 178035 - RNA, 22 nt, Human
cugccaccaugccccagcagag

SEQ ID NO: 178036 - RNA, 22 nt, Human
uggagaggagcaccauggccau

SEQ ID NO: 178037 - RNA, 22 nt, Human
caaaagauacuugcaucuaacu

SEQ ID NO: 178038 - RNA, 22 nt, Human
gcugagcugggacaguccuggg

SEQ ID NO: 178039 - RNA, 22 nt, Human
guaggucuucugaaaaccaaaa

SEQ ID NO: 178040 - RNA, 22 nt, Human
accuuggaaaugcccauugccu

SEQ ID NO: 178041 - RNA, 22 nt, Human
uccuccaagccuuugugaagug

SEQ ID NO: 178042 - RNA, 21 nt, Human
gaugauggcaggcagcacugg

SEQ ID NO: 178043 - RNA, 18 nt, Human
cuguucuagaacuccugu

SEQ ID NO: 178044 - RNA, 22 nt, Human
gcugugugcuaggauauguuuu

SEQ ID NO: 178045 - RNA, 19 nt, Human
gguccucagcagagcaugc

SEQ ID NO: 178046 - RNA, 22 nt, Human
cugagaauaaagccagcaggag

SEQ ID NO: 178047 - RNA, 22 nt, Human
cuuuuacugugaaaagaaacug

SEQ ID NO: 178048 - RNA, 22 nt, Human
gccugggagcacaucggggucc

SEQ ID NO: 178049 - RNA, 22 nt, Human
agucaguugcaaacaucaggca

SEQ ID NO: 178050 - RNA, 22 nt, Human
cuguggcuucuagguccccgau

SEQ ID NO: 178051 - RNA, 22 nt, Human
caguggcucaugccuauaaucc

SEQ ID NO: 178052 - RNA, 22 nt, Human
gacagacagggguucuccugga

SEQ ID NO: 178053 - RNA, 22 nt, Human
agacugggccauuuccccagcu

SEQ ID NO: 178054 - RNA, 22 nt, Human
agggcucugggguggcagagau

SEQ ID NO: 178055 - RNA, 22 nt, Human
aagcugaagaugccagugggag

SEQ ID NO: 178056 - RNA, 22 nt, Human
gaaugcuaagcaugugggaguu

SEQ ID NO: 178057 - RNA, 22 nt, Human
aucuggaacaaagcuuaggaau

SEQ ID NO: 178058 - RNA, 22 nt, Human
ucacagacaccuuggccacagu

SEQ ID NO: 178059 - RNA, 23 nt, Human
cucccuggcccuugggagaccug

SEQ ID NO: 178060 - RNA, 21 nt, Human
ugugugcauaugcauguacau

SEQ ID NO: 178061 - RNA, 22 nt, Human
aggcucugaguagagcugccag

SEQ ID NO: 178062 - RNA, 22 nt, Human
uuuuucuugugcuggaucuaau

SEQ ID NO: 178063 - RNA, 22 nt, Human
gagcuacaagggagacuuuuuu

SEQ ID NO: 178064 - RNA, 22 nt, Human
cacuuuuaaauggguccguguu

SEQ ID NO: 178065 - RNA, 22 nt, Human
cuacuguuauuauuaauaguaa

SEQ ID NO: 178066 - RNA, 17 nt, Human
uaugaggcaguuuguga

SEQ ID NO: 178067 - RNA, 22 nt, Human
cagugcagcugccccgcuggua

SEQ ID NO: 178068 - RNA, 22 nt, Human
uccacccccagacagcugguga

SEQ ID NO: 178069 - RNA, 22 nt, Human
cucccaggccaugcucuagcca

SEQ ID NO: 178070 - RNA, 20 nt, Human
ugcugggugggcagcuguaa

SEQ ID NO: 178071 - RNA, 22 nt, Human
gagcagcugagcuggaaugaga

SEQ ID NO: 178072 - RNA, 23 nt, Human
cggggccagggucaggaccgguc

SEQ ID NO: 178073 - RNA, 22 nt, Human
uuggcugcauuuuggguucguu

SEQ ID NO: 178074 - RNA, 22 nt, Human
gcaguggauccaaugguaucuu

SEQ ID NO: 178075 - RNA, 17 nt, Human
cugaaauauuaugauaa

SEQ ID NO: 178076 - RNA, 22 nt, Human
uaagugaugucuugguuaauga

SEQ ID NO: 178077 - RNA, 22 nt, Human
agcugcugcaaguggugcuaac

SEQ ID NO: 178078 - RNA, 22 nt, Human
ugcucaucaacaugaugaucau

SEQ ID NO: 178079 - RNA, 22 nt, Human
agucugcaggaccgcgucacau

SEQ ID NO: 178080 - RNA, 22 nt, Human
cugucaauuuauguugacaugc

SEQ ID NO: 178081 - RNA, 22 nt, Human
cugacuguugcuguugaugagg

SEQ ID NO: 178082 - RNA, 22 nt, Human
gccuggcccagggcucuuguug

SEQ ID NO: 178083 - RNA, 22 nt, Human
agaaccuucagauuaggaggug

SEQ ID NO: 178084 - RNA, 22 nt, Human
ucuuuggacuuuccaauuuguu

SEQ ID NO: 178085 - RNA, 22 nt, Human
agagcuauaacagcacuguaca

SEQ ID NO: 178086 - RNA, 22 nt, Human
ugaggcaaggcugaaugaaggc

SEQ ID NO: 178087 - RNA, 22 nt, Human
ucuccaaaucaaucaauaugaa

SEQ ID NO: 178088 - RNA, 22 nt, Human
gaggugucugcuguguucaaag

SEQ ID NO: 178089 - RNA, 18 nt, Human
gcuuugcagaaauacaga

SEQ ID NO: 178090 - RNA, 22 nt, Human
ucaguuuagaguuauuuaaucu

SEQ ID NO: 178091 - RNA, 22 nt, Human
cacaaugugguuugucaucuuu

SEQ ID NO: 178092 - RNA, 22 nt, Human
uuuggcuaauuaggugcugauu

SEQ ID NO: 178093 - RNA, 22 nt, Human
agacauaggauuccacauagca

SEQ ID NO: 178094 - RNA, 22 nt, Human
ugcaacaguggggcaugcugaa

SEQ ID NO: 178095 - RNA, 22 nt, Human
auacacaucuauuuaagagaca

SEQ ID NO: 178096 - RNA, 22 nt, Human
uacauuuucuaggggaccaaga

SEQ ID NO: 178097 - RNA, 22 nt, Human
acaguuaaggaaauggagguuc

SEQ ID NO: 178098 - RNA, 22 nt, Human
acacaggcaaugugagugggag

SEQ ID NO: 178099 - RNA, 22 nt, Human
auugucuucugucuuauaguuc

SEQ ID NO: 178100 - RNA, 23 nt, Human
auuuccuacuauaaaagagguaa

SEQ ID NO: 178101 - RNA, 22 nt, Human
aagauaauauucauuaacuaga

SEQ ID NO: 178102 - RNA, 22 nt, Human
caggagggcccgagacucuucc

SEQ ID NO: 178103 - RNA, 22 nt, Human
ucuagaaaaaaacugcugugga

SEQ ID NO: 178104 - RNA, 22 nt, Human
ucuuggcaguggaauaccagga

SEQ ID NO: 178105 - RNA, 22 nt, Human
ugaaacaaaccaguaauuuugu

SEQ ID NO: 178106 - RNA, 22 nt, Human
agggagaacaguugcagcagac

SEQ ID NO: 178107 - RNA, 22 nt, Human
gcccagcacaucuggccuugaa

SEQ ID NO: 178108 - RNA, 22 nt, Human
gcuuaggaaaaugguggaguug

SEQ ID NO: 178109 - RNA, 22 nt, Human
uacaggagagauuuaguaauca

SEQ ID NO: 178110 - RNA, 22 nt, Human
gcagggggucauucacgcuggc

SEQ ID NO: 178111 - RNA, 22 nt, Human
cuguacaggagacgucugugca

SEQ ID NO: 178112 - RNA, 22 nt, Human
cuggcucauagagcagcuccaa

SEQ ID NO: 178113 - RNA, 22 nt, Human
uuuaaacauaucuguugaggga

SEQ ID NO: 178114 - RNA, 22 nt, Human
aguggcuguaggcuaugagaga

SEQ ID NO: 178115 - RNA, 22 nt, Human
uggcaggagagcgucagaucag

SEQ ID NO: 178116 - RNA, 17 nt, Human
cuccuggccaccccucu

SEQ ID NO: 178117 - RNA, 22 nt, Human
gguccuugggucuccuguguuu

SEQ ID NO: 178118 - RNA, 22 nt, Human
cagacacaccaggcccauucug

SEQ ID NO: 178119 - RNA, 21 nt, Human
uugcuguuuucccaaugcagu

SEQ ID NO: 178120 - RNA, 22 nt, Human
uuccuggcacauaguuagugcu

SEQ ID NO: 178121 - RNA, 22 nt, Human
gggaaggguguugucuuaucuu

SEQ ID NO: 178122 - RNA, 22 nt, Human
aaagauuauggaacacacauga

SEQ ID NO: 178123 - RNA, 22 nt, Human
uaagauguggaaucacagcuuc

SEQ ID NO: 178124 - RNA, 22 nt, Human
gucuggcauaugcaaagugcau

SEQ ID NO: 178125 - RNA, 18 nt, Human
auuuugaacugggaauau

SEQ ID NO: 178126 - RNA, 22 nt, Human
cuccuggugcuggggcugccgc

SEQ ID NO: 178127 - RNA, 22 nt, Human
ggucaacagagguaaugguaac

SEQ ID NO: 178128 - RNA, 22 nt, Human
ccagggcagcgccccuccacgc

SEQ ID NO: 178129 - RNA, 22 nt, Human
cuggcugcuuguagacucgacu

SEQ ID NO: 178130 - RNA, 22 nt, Human
gccuuggacucggguggacuca

SEQ ID NO: 178131 - RNA, 22 nt, Human
acauuucucauaggagagccac

SEQ ID NO: 178132 - RNA, 22 nt, Human
aagucuaggacaggaagucuau

SEQ ID NO: 178133 - RNA, 22 nt, Human
ucaggcuguauaucuugcacuc

SEQ ID NO: 178134 - RNA, 22 nt, Human
uagugcaggguuuuaagcacug

SEQ ID NO: 178135 - RNA, 22 nt, Human
cagcugagaaaggcaggcucac

SEQ ID NO: 178136 - RNA, 19 nt, Human
agggcuaggcacauagggc

SEQ ID NO: 178137 - RNA, 22 nt, Human
aaaugccucuggguuauucuag

SEQ ID NO: 178138 - RNA, 22 nt, Human
agcaaucagcuucuuuguguuu

SEQ ID NO: 178139 - RNA, 22 nt, Human
caggucagaggcgcagccccca

SEQ ID NO: 178140 - RNA, 21 nt, Human
gccagccaugcuugccuaggc

SEQ ID NO: 178141 - RNA, 22 nt, Human
guuauauuggcagaagagaaga

SEQ ID NO: 178142 - RNA, 22 nt, Human
aauaacagaaacuugagcauca

SEQ ID NO: 178143 - RNA, 22 nt, Human
cagcuguugugcugggcaguua

SEQ ID NO: 178144 - RNA, 22 nt, Human
gguccaucucuugagcccacau

SEQ ID NO: 178145 - RNA, 22 nt, Human
gccaggaguucagaugcauguu

SEQ ID NO: 178146 - RNA, 22 nt, Human
ggggaaggauugaguugaccca

SEQ ID NO: 178147 - RNA, 23 nt, Human
aggugcagcccuggaccugcccc

SEQ ID NO: 178148 - RNA, 22 nt, Human
ggguccaggcacuaugcuaagu

SEQ ID NO: 178149 - RNA, 22 nt, Human
cagagacaccccagaaaauaag

SEQ ID NO: 178150 - RNA, 22 nt, Human
aggcaagcauugggaacagggc

SEQ ID NO: 178151 - RNA, 22 nt, Human
uuugaaaaaggccuuugguaug

SEQ ID NO: 178152 - RNA, 22 nt, Human
guuucucugucuguuacauugg

SEQ ID NO: 178153 - RNA, 22 nt, Human
ucccaggcgccugguggggagc

SEQ ID NO: 178154 - RNA, 22 nt, Human
aaaguguugggauuacaggcau

SEQ ID NO: 178155 - RNA, 22 nt, Human
cucucccuggccagcugugcag

SEQ ID NO: 178156 - RNA, 22 nt, Human
uugaggagguccuggguuuacu

SEQ ID NO: 178157 - RNA, 16 nt, Human
ccuggaggucacuuca

SEQ ID NO: 178158 - RNA, 22 nt, Human
uaguccacagacucuacagcau

SEQ ID NO: 178159 - RNA, 22 nt, Human
cugccuagcgccaucugccucu

SEQ ID NO: 178160 - RNA, 22 nt, Human
ucuguaaaauuaguauaauugu

SEQ ID NO: 178161 - RNA, 22 nt, Human
gggggaagaggcaugaaguccu

SEQ ID NO: 178162 - RNA, 19 nt, Human
accugcaguaauaauuccu

SEQ ID NO: 178163 - RNA, 22 nt, Human
auguacaggauggugcucaucu

SEQ ID NO: 178164 - RNA, 22 nt, Human
auauauuuuuugagacagaguc

SEQ ID NO: 178165 - RNA, 22 nt, Human
aauguaaaguugggcacaaaug

SEQ ID NO: 178166 - RNA, 22 nt, Human
uguggcugcuccugggugguca

SEQ ID NO: 178167 - RNA, 21 nt, Human
aagcuuccaaacugcuggacu

SEQ ID NO: 178168 - RNA, 22 nt, Human
ugccugcccacgacuacagcag

SEQ ID NO: 178169 - RNA, 22 nt, Human
ucaggugggaguagaaugcuag

SEQ ID NO: 178170 - RNA, 22 nt, Human
cucugugcuuaugcuccauggg

SEQ ID NO: 178171 - RNA, 22 nt, Human
gaaggaggcuccccaaagucug

SEQ ID NO: 178172 - RNA, 22 nt, Human
ugggcucucagucagacuggca

SEQ ID NO: 178173 - RNA, 22 nt, Human
gaggcugugugucccucuggac

SEQ ID NO: 178174 - RNA, 22 nt, Human
ccugugcagcccuugccaguuu

SEQ ID NO: 178175 - RNA, 23 nt, Human
gaaucaguggcuaacaaggaaac

SEQ ID NO: 178176 - RNA, 22 nt, Human
agucugguguaugaaagugaau

SEQ ID NO: 178177 - RNA, 22 nt, Human
ccuucucuacuccugaugcaug

SEQ ID NO: 178178 - RNA, 22 nt, Human
ugcuggagcccaggcggccuuu

SEQ ID NO: 178179 - RNA, 22 nt, Human
acagagcuguacuacuuacuga

SEQ ID NO: 178180 - RNA, 22 nt, Human
uuuugagauggugucucgcucc

SEQ ID NO: 178181 - RNA, 22 nt, Human
aaaucccacucacgaguuuugc

SEQ ID NO: 178182 - RNA, 22 nt, Human
agcaggagcauuuccaugauuc

SEQ ID NO: 178183 - RNA, 22 nt, Human
acaaggcaauggcaggauuuca

SEQ ID NO: 178184 - RNA, 22 nt, Human
cuggcugaucucaaucauggcu

SEQ ID NO: 178185 - RNA, 22 nt, Human
aagcccagaugugagaacugag

SEQ ID NO: 178186 - RNA, 22 nt, Human
gaggagcugggacccugucauc

SEQ ID NO: 178187 - RNA, 23 nt, Human
auuagaaaggcuuucuggugaaa

SEQ ID NO: 178188 - RNA, 22 nt, Human
gguucucuuccuccugacugag

SEQ ID NO: 178189 - RNA, 19 nt, Human
ugcuauuuagaacgccugg

SEQ ID NO: 178190 - RNA, 23 nt, Human
gugcacagucaagcccagcuuag

SEQ ID NO: 178191 - RNA, 22 nt, Human
cuguggaguuuguggcgcugac

SEQ ID NO: 178192 - RNA, 22 nt, Human
gaaccuguaaguauagaugugg

SEQ ID NO: 178193 - RNA, 22 nt, Human
augaggcauauccuccuauggu

SEQ ID NO: 178194 - RNA, 22 nt, Human
agauguuuguguuaucuccauu

SEQ ID NO: 178195 - RNA, 22 nt, Human
agucacaguuucccugagagag

SEQ ID NO: 178196 - RNA, 22 nt, Human
uggggagugaugccucggauaa

SEQ ID NO: 178197 - RNA, 22 nt, Human
ucucuuugacccuuuagcucca

SEQ ID NO: 178198 - RNA, 22 nt, Human
aaggcagagggcuggaucagag

SEQ ID NO: 178199 - RNA, 22 nt, Human
ugguggcacaagggagagaauc

SEQ ID NO: 178200 - RNA, 22 nt, Human
gauaauaucugguuuauucacc

SEQ ID NO: 178201 - RNA, 22 nt, Human
accccaggucuccaggcucugg

SEQ ID NO: 178202 - RNA, 22 nt, Human
guuuccugaaguuauuucaucc

SEQ ID NO: 178203 - RNA, 18 nt, Human
uccuggccacacuaccuu

SEQ ID NO: 178204 - RNA, 18 nt, Human
ucuugccugcacccucuc

SEQ ID NO: 178205 - RNA, 19 nt, Human
ucacagacagagcaaucac

SEQ ID NO: 178206 - RNA, 22 nt, Human
agcagcugggcucagagcuggg

SEQ ID NO: 178207 - RNA, 22 nt, Human
uucaagugaggcugucuuuaga

SEQ ID NO: 178208 - RNA, 22 nt, Human
gaguggguccacagaggugaca

SEQ ID NO: 178209 - RNA, 22 nt, Human
ucaggugguccuaagugccauc

SEQ ID NO: 178210 - RNA, 22 nt, Human
uggcugagggcacuaugaagcc

SEQ ID NO: 178211 - RNA, 23 nt, Human
ccauucccacugugccuucccug

SEQ ID NO: 178212 - RNA, 22 nt, Human
gaggcagagacuccaccuucag

SEQ ID NO: 178213 - RNA, 23 nt, Human
cuggaagugcuuuuauagcuuug

SEQ ID NO: 178214 - RNA, 22 nt, Human
cccaugccuucugacucacagg

SEQ ID NO: 178215 - RNA, 22 nt, Human
auauuacucugauuuaguaaau

SEQ ID NO: 178216 - RNA, 22 nt, Human
gagcaggaugggagcuggggcc

SEQ ID NO: 178217 - RNA, 22 nt, Human
aaugcuuauaacguuagaaugu

SEQ ID NO: 178218 - RNA, 22 nt, Human
aacacagaagugccaagagcca

SEQ ID NO: 178219 - RNA, 22 nt, Human
uugaggaggaaaaggggguacc

SEQ ID NO: 178220 - RNA, 22 nt, Human
gacauaaaccuugagauauuaa

SEQ ID NO: 178221 - RNA, 22 nt, Human
uccaccagcagccugucagccu

SEQ ID NO: 178222 - RNA, 22 nt, Human
auuugucauguauguaaaguug

SEQ ID NO: 178223 - RNA, 19 nt, Human
agaggcagucuccaacagg

SEQ ID NO: 178224 - RNA, 18 nt, Human
ucagggaagagaauauga

SEQ ID NO: 178225 - RNA, 22 nt, Human
uuauuuugccacaggugaccuu

SEQ ID NO: 178226 - RNA, 22 nt, Human
cugagguggcgccucucuuuaa

SEQ ID NO: 178227 - RNA, 22 nt, Human
gugcacaucgugcagguuuguu

SEQ ID NO: 178228 - RNA, 22 nt, Human
accaggacuuuguauucagcuu

SEQ ID NO: 178229 - RNA, 22 nt, Human
aacuuucaggcaaugaauauuu

SEQ ID NO: 178230 - RNA, 22 nt, Human
aaaggcugccagguaaaauauu

SEQ ID NO: 178231 - RNA, 22 nt, Human
uaaaugaaaggguuuaauuuau

SEQ ID NO: 178232 - RNA, 19 nt, Human
aaaaagaggcuauaauauu

SEQ ID NO: 178233 - RNA, 22 nt, Human
uucuuuugggaauuacguaugc

SEQ ID NO: 178234 - RNA, 20 nt, Human
agacuuaggcaauuuaggcu

SEQ ID NO: 178235 - RNA, 22 nt, Human
gggggaagacugggcuagugau

SEQ ID NO: 178236 - RNA, 22 nt, Human
aagcauggagcaauagaaugac

SEQ ID NO: 178237 - RNA, 22 nt, Human
auccuggcuuuaggucagaggc

SEQ ID NO: 178238 - RNA, 22 nt, Human
cuuauuagugucugucugaguu

SEQ ID NO: 178239 - RNA, 22 nt, Human
uacgaauccuguggaugaaugu

SEQ ID NO: 178240 - RNA, 22 nt, Human
gcagaauauuauggaaaaagua

SEQ ID NO: 178241 - RNA, 22 nt, Human
gaccauuuccaccaugggcaca

SEQ ID NO: 178242 - RNA, 22 nt, Human
aagacaucagugaugacauuug

SEQ ID NO: 178243 - RNA, 22 nt, Human
uggucaggcugcucugcggcgu

SEQ ID NO: 178244 - RNA, 22 nt, Human
uucuccauuuaacuuccuuaug

SEQ ID NO: 178245 - RNA, 22 nt, Human
accuguuuuagucuuuaaucau

SEQ ID NO: 178246 - RNA, 21 nt, Human
aguugcauaggccagccaucc

SEQ ID NO: 178247 - RNA, 22 nt, Human
guuaauuuaguagaguccagau

SEQ ID NO: 178248 - RNA, 22 nt, Human
aauguuuuagauuacugcuggg

SEQ ID NO: 178249 - RNA, 22 nt, Human
uuggcuucuucgcacagcagua

SEQ ID NO: 178250 - RNA, 22 nt, Human
agacaaguucugugggucaccu

SEQ ID NO: 178251 - RNA, 22 nt, Human
ucuggaggccauagggaaggau

SEQ ID NO: 178252 - RNA, 22 nt, Human
aguguuuggggugauuguaacc

SEQ ID NO: 178253 - RNA, 22 nt, Human
aaauauuugucugaggcgguug

SEQ ID NO: 178254 - RNA, 22 nt, Human
acagaaauugcuaauagcucau

SEQ ID NO: 178255 - RNA, 20 nt, Human
cauauauaccuagaagugga

SEQ ID NO: 178256 - RNA, 22 nt, Human
aucucccaaacucauuucuuca

SEQ ID NO: 178257 - RNA, 22 nt, Human
uauauccagaaaaucaguucau

SEQ ID NO: 178258 - RNA, 22 nt, Human
uacuguacugcaguucugcaaa

SEQ ID NO: 178259 - RNA, 22 nt, Human
gggagccagccauccagaaccu

SEQ ID NO: 178260 - RNA, 22 nt, Human
aucaaugcucuguacccagaau

SEQ ID NO: 178261 - RNA, 22 nt, Human
acaguggaguugggguagcccu

SEQ ID NO: 178262 - RNA, 22 nt, Human
acagguggggcacuuggagccu

SEQ ID NO: 178263 - RNA, 22 nt, Human
uagagcuuggacugcauuuucg

SEQ ID NO: 178264 - RNA, 22 nt, Human
agaaauuccuaagguacacaag

SEQ ID NO: 178265 - RNA, 22 nt, Human
ugaccacacgucuggaauugug

SEQ ID NO: 178266 - RNA, 22 nt, Human
cccaggaggucgaagcugcagu

SEQ ID NO: 178267 - RNA, 22 nt, Human
aaguccuuuaauaucacauagu

SEQ ID NO: 178268 - RNA, 16 nt, Human
uucucugggguugugc

SEQ ID NO: 178269 - RNA, 22 nt, Human
acaggugugagaacaugccuug

SEQ ID NO: 178270 - RNA, 22 nt, Human
cuguccugugcauugucagaug

SEQ ID NO: 178271 - RNA, 22 nt, Human
uaggaacaguccuagaaaucug

SEQ ID NO: 178272 - RNA, 22 nt, Human
gaagcaugcuaaggauucucag

SEQ ID NO: 178273 - RNA, 22 nt, Human
agacccucuccucauggacaug

SEQ ID NO: 178274 - RNA, 22 nt, Human
cacauucuuucacaguucugaa

SEQ ID NO: 178275 - RNA, 22 nt, Human
agcccaagaagagcuuucuugc

SEQ ID NO: 178276 - RNA, 22 nt, Human
ugaaguuugguggaaauuuccu

SEQ ID NO: 178277 - RNA, 22 nt, Human
gaacagggaguacggcacauuu

SEQ ID NO: 178278 - RNA, 22 nt, Human
uaggcuuccgagucuugguauc

SEQ ID NO: 178279 - RNA, 22 nt, Human
ucaggagcuuagaugcuuugac

SEQ ID NO: 178280 - RNA, 22 nt, Human
gaucccugcccucagccuggac

SEQ ID NO: 178281 - RNA, 21 nt, Human
ugucacauguggaugguauuu

SEQ ID NO: 178282 - RNA, 22 nt, Human
gauacaagacuaauaggaaaca

SEQ ID NO: 178283 - RNA, 22 nt, Human
cucuccagccuuuagcccacgc

SEQ ID NO: 178284 - RNA, 22 nt, Human
uguaaaguuacuuuugaaagga

SEQ ID NO: 178285 - RNA, 20 nt, Human
acagaugaggaaaaugaagu

SEQ ID NO: 178286 - RNA, 22 nt, Human
ucaugcaguuacuguuaugcaa

SEQ ID NO: 178287 - RNA, 22 nt, Human
acaguaauugugaacuuaacgu

SEQ ID NO: 178288 - RNA, 22 nt, Human
agugugcauuccucuccucagg

SEQ ID NO: 178289 - RNA, 22 nt, Human
ucacaggagucaaggaauagua

SEQ ID NO: 178290 - RNA, 22 nt, Human
agggugggcuagacucuucccc

SEQ ID NO: 178291 - RNA, 23 nt, Human
agaguuuguuucuaaugagugag

SEQ ID NO: 178292 - RNA, 22 nt, Human
ucucugggauaaacugggccag

SEQ ID NO: 178293 - RNA, 22 nt, Human
ccugcccacagagagggugcau

SEQ ID NO: 178294 - RNA, 22 nt, Human
uggcuucuuguuugguuuaaga

SEQ ID NO: 178295 - RNA, 22 nt, Human
uacaguuuguuacauuguuagu

SEQ ID NO: 178296 - RNA, 22 nt, Human
uccuuugguuguagacaggaau

SEQ ID NO: 178297 - RNA, 23 nt, Human
ucucaggguggcugggcccaucc

SEQ ID NO: 178298 - RNA, 22 nt, Human
ggcagguggccaagugucuaag

SEQ ID NO: 178299 - RNA, 22 nt, Human
uagacagauuuaaaggaaugga

SEQ ID NO: 178300 - RNA, 18 nt, Human
caaauucagugcuggaag

SEQ ID NO: 178301 - RNA, 22 nt, Human
uccugggaccaggcaccuacug

SEQ ID NO: 178302 - RNA, 22 nt, Human
uaaaagaccacaaggugguaau

SEQ ID NO: 178303 - RNA, 22 nt, Human
ugauuacaaaagauuguuugaa

SEQ ID NO: 178304 - RNA, 22 nt, Human
agagcuuuuacuuacauucuau

SEQ ID NO: 178305 - RNA, 22 nt, Human
ggcagggacuuugcaaaucuuu

SEQ ID NO: 178306 - RNA, 22 nt, Human
gccagccccagacauccuaucg

SEQ ID NO: 178307 - RNA, 22 nt, Human
guucuucaucauuaacacucug

SEQ ID NO: 178308 - RNA, 22 nt, Human
cuggcucccggggaucgagcac

SEQ ID NO: 178309 - RNA, 22 nt, Human
ggacauuuuucuuccuacaaug

SEQ ID NO: 178310 - RNA, 22 nt, Human
ucucaggcucuuggaaccuguu

SEQ ID NO: 178311 - RNA, 22 nt, Human
aaaagccaugcauaccuaagag

SEQ ID NO: 178312 - RNA, 22 nt, Human
ccuggcucugguucccucagcu

SEQ ID NO: 178313 - RNA, 22 nt, Human
uucuuugggcucagagagggag

SEQ ID NO: 178314 - RNA, 19 nt, Human
acugccugaggcucacagg

SEQ ID NO: 178315 - RNA, 22 nt, Human
gggagcugaauggcaauggaga

SEQ ID NO: 178316 - RNA, 22 nt, Human
uuucacauaucaacucuauccu

SEQ ID NO: 178317 - RNA, 22 nt, Human
aaaaaugcuuggacuuaauaaa

SEQ ID NO: 178318 - RNA, 22 nt, Human
aagaaugagcucaaagaucuua

SEQ ID NO: 178319 - RNA, 22 nt, Human
uaguuugucaaccacugucaca

SEQ ID NO: 178320 - RNA, 19 nt, Human
ggccagccaccucgccugg

SEQ ID NO: 178321 - RNA, 22 nt, Human
uuaguguuuaaagguuucagag

SEQ ID NO: 178322 - RNA, 22 nt, Human
aucauacagaaccugagcacuu

SEQ ID NO: 178323 - RNA, 22 nt, Human
aggcaaggugcuacagacagug

SEQ ID NO: 178324 - RNA, 22 nt, Human
cagaggcugcucuggguggcau

SEQ ID NO: 178325 - RNA, 22 nt, Human
agcuguauuugugaauauuuaa

SEQ ID NO: 178326 - RNA, 22 nt, Human
ucccaggaauugaagccagugu

SEQ ID NO: 178327 - RNA, 22 nt, Human
acugggcuguuccuuauuucua

SEQ ID NO: 178328 - RNA, 22 nt, Human
gagccuuucuagauaauccagg

SEQ ID NO: 178329 - RNA, 22 nt, Human
aacaaaggccguuaauaaccac

SEQ ID NO: 178330 - RNA, 22 nt, Human
ggcugugcagggcagagucuca

SEQ ID NO: 178331 - RNA, 22 nt, Human
aggcugcugccuuggagagugu

SEQ ID NO: 178332 - RNA, 22 nt, Human
gauggggaugagaagugagcag

SEQ ID NO: 178333 - RNA, 22 nt, Human
uuugaagugggcauuagaaccu

SEQ ID NO: 178334 - RNA, 22 nt, Human
cacagaggugauaguggucaag

SEQ ID NO: 178335 - RNA, 22 nt, Human
ucuguagcauucaccagcccug

SEQ ID NO: 178336 - RNA, 22 nt, Human
uuccugaacauuucuaaguuga

SEQ ID NO: 178337 - RNA, 18 nt, Human
ucugaaggaaugauucca

SEQ ID NO: 178338 - RNA, 20 nt, Human
uauaaauucagagcuuuggu

SEQ ID NO: 178339 - RNA, 22 nt, Human
cagaggcuagacugugcuuccu

SEQ ID NO: 178340 - RNA, 22 nt, Human
uccaggcauaaugcccaguggu

SEQ ID NO: 178341 - RNA, 22 nt, Human
ugaaagcagugauuucuccuuc

SEQ ID NO: 178342 - RNA, 22 nt, Human
uacaaaaaauugauacugacga

SEQ ID NO: 178343 - RNA, 22 nt, Human
gcccagggucuacaaaaauauu

SEQ ID NO: 178344 - RNA, 18 nt, Human
aggacacauucuucccuc

SEQ ID NO: 178345 - RNA, 22 nt, Human
uuuuucauugcagccucucucc

SEQ ID NO: 178346 - RNA, 22 nt, Human
uuagauaaagugauguaggcua

SEQ ID NO: 178347 - RNA, 22 nt, Human
ugaggccugaagccugaaguga

SEQ ID NO: 178348 - RNA, 22 nt, Human
gcacaugacuuugaggaaacca

SEQ ID NO: 178349 - RNA, 22 nt, Human
uacugucugcuucuuauagcuu

SEQ ID NO: 178350 - RNA, 22 nt, Human
ucuccuaggcuggagugcagug

SEQ ID NO: 178351 - RNA, 22 nt, Human
ugauuuuuggaucugagcugca

SEQ ID NO: 178352 - RNA, 22 nt, Human
ucaguggagcuaagcaugagau

SEQ ID NO: 178353 - RNA, 22 nt, Human
acaggaaguuuggaaagccuca

SEQ ID NO: 178354 - RNA, 22 nt, Human
ugguuccaaucgcacuggcuca

SEQ ID NO: 178355 - RNA, 22 nt, Human
agguccugggaguucuagugug

SEQ ID NO: 178356 - RNA, 22 nt, Human
agcauaauuccugacacacaag

SEQ ID NO: 178357 - RNA, 22 nt, Human
ugauguucuguauaucauauag

SEQ ID NO: 178358 - RNA, 22 nt, Human
gggcugaaaggccgccucagau

SEQ ID NO: 178359 - RNA, 22 nt, Human
ggcaugcucuggggguccuccg

SEQ ID NO: 178360 - RNA, 22 nt, Human
cucucugcuguauccuuaggcu

SEQ ID NO: 178361 - RNA, 22 nt, Human
aguauacaaauaaauguguaau

SEQ ID NO: 178362 - RNA, 22 nt, Human
cugggucuggccacaggaagua

SEQ ID NO: 178363 - RNA, 22 nt, Human
ggcagcugugaagugccucaca

SEQ ID NO: 178364 - RNA, 22 nt, Human
cagaaagcaagccauucacugu

SEQ ID NO: 178365 - RNA, 22 nt, Human
aaaauaugaaguugucaguaug

SEQ ID NO: 178366 - RNA, 22 nt, Human
aagagaaagcagacuuugucau

SEQ ID NO: 178367 - RNA, 19 nt, Human
ccauuguaaagaaaaaugu

SEQ ID NO: 178368 - RNA, 22 nt, Human
auccauaucuggacucuacccc

SEQ ID NO: 178369 - RNA, 18 nt, Human
uguggcaggggugggaga

SEQ ID NO: 178370 - RNA, 22 nt, Human
uucuuuuaauagagauccugug

SEQ ID NO: 178371 - RNA, 22 nt, Human
cuggucugcaaggccauauaga

SEQ ID NO: 178372 - RNA, 19 nt, Human
gcagguggauguggucagc

SEQ ID NO: 178373 - RNA, 22 nt, Human
ucagagguaguagcagaguuga

SEQ ID NO: 178374 - RNA, 22 nt, Human
agcccugcuucaccauuuacuu

SEQ ID NO: 178375 - RNA, 22 nt, Human
cagccagugugaccgaggagga

SEQ ID NO: 178376 - RNA, 22 nt, Human
aaagcuaagguagcauuggaga

SEQ ID NO: 178377 - RNA, 22 nt, Human
uuuggacauguugagucugaua

SEQ ID NO: 178378 - RNA, 22 nt, Human
guucacaagaguuacagacaga

SEQ ID NO: 178379 - RNA, 22 nt, Human
gccagccaggaagaaaguaaga

SEQ ID NO: 178380 - RNA, 22 nt, Human
uuauuggaaaagggcuguaauu

SEQ ID NO: 178381 - RNA, 22 nt, Human
caauaacugcuaaauucccugu

SEQ ID NO: 178382 - RNA, 22 nt, Human
agcuugggugugccugcgagcu

SEQ ID NO: 178383 - RNA, 18 nt, Human
agcuguuguugacucugu

SEQ ID NO: 178384 - RNA, 22 nt, Human
uggccugacugucaggcuguau

SEQ ID NO: 178385 - RNA, 22 nt, Human
gagcaguggucugaucuucuaa

SEQ ID NO: 178386 - RNA, 22 nt, Human
cuggcagcccaaccuagagucu

SEQ ID NO: 178387 - RNA, 22 nt, Human
auccacagucagaacgggccua

SEQ ID NO: 178388 - RNA, 21 nt, Human
acacguguguguaaacacaca

SEQ ID NO: 178389 - RNA, 22 nt, Human
aaagcaguaugaaaggcaauaa

SEQ ID NO: 178390 - RNA, 22 nt, Human
auagugggaauuacgauauacu

SEQ ID NO: 178391 - RNA, 22 nt, Human
uccuggccaugcaagaugagga

SEQ ID NO: 178392 - RNA, 22 nt, Human
uaggcuggaacuuaggcagagg

SEQ ID NO: 178393 - RNA, 22 nt, Human
gaggcacaauacaugucucaag

SEQ ID NO: 178394 - RNA, 22 nt, Human
auauuucuggggguguguuucu

SEQ ID NO: 178395 - RNA, 22 nt, Human
agagaugcaucucuuaaaauug

SEQ ID NO: 178396 - RNA, 22 nt, Human
uauuuguugaguuguuaugucu

SEQ ID NO: 178397 - RNA, 22 nt, Human
gcaguaggaguuuccagggugg

SEQ ID NO: 178398 - RNA, 22 nt, Human
uucaugaaaguguaucuugugg

SEQ ID NO: 178399 - RNA, 22 nt, Human
ggcaggcaaggcagccugguga

SEQ ID NO: 178400 - RNA, 22 nt, Human
aagggcucugugugccucccca

SEQ ID NO: 178401 - RNA, 22 nt, Human
agaggcuccgucaucccucuuu

SEQ ID NO: 178402 - RNA, 22 nt, Human
aauucacaggagguauuugucc

SEQ ID NO: 178403 - RNA, 21 nt, Human
agcuuacauuaccauuguugc

SEQ ID NO: 178404 - RNA, 22 nt, Human
aguuguacauugugaacauuca

SEQ ID NO: 178405 - RNA, 20 nt, Human
cugacagaaaauauuucauc

SEQ ID NO: 178406 - RNA, 22 nt, Human
aaucuuacaccgaauuuaaacu

SEQ ID NO: 178407 - RNA, 22 nt, Human
uaagaugaucaccaaaugcugg

SEQ ID NO: 178408 - RNA, 22 nt, Human
aaggacagguuggggcuucagg

SEQ ID NO: 178409 - RNA, 22 nt, Human
ccaggccucuggcugcuuaguc

SEQ ID NO: 178410 - RNA, 22 nt, Human
ggagcccuccaucccuugcggc

SEQ ID NO: 178411 - RNA, 22 nt, Human
caagaaguugacagccagguga

SEQ ID NO: 178412 - RNA, 22 nt, Human
aauccagaugagcaaucauacu

SEQ ID NO: 178413 - RNA, 22 nt, Human
gaagcagugugaacccauguaa

SEQ ID NO: 178414 - RNA, 22 nt, Human
agcaguuaccaaggaaccuggu

SEQ ID NO: 178415 - RNA, 20 nt, Human
uucaaguugggucucuggcu

SEQ ID NO: 178416 - RNA, 22 nt, Human
agcauccuccuucccagagaug

SEQ ID NO: 178417 - RNA, 22 nt, Human
uauuacaagaaagggcaugaau

SEQ ID NO: 178418 - RNA, 20 nt, Human
accccagccccucuaucuga

SEQ ID NO: 178419 - RNA, 20 nt, Human
gaagccagaggggaaaggag

SEQ ID NO: 178420 - RNA, 22 nt, Human
auguucauuugacaaguaguga

SEQ ID NO: 178421 - RNA, 22 nt, Human
uccccagauucaugucugcugu

SEQ ID NO: 178422 - RNA, 22 nt, Human
cugcaggggccucgagcacagg

SEQ ID NO: 178423 - RNA, 22 nt, Human
uguugagacugagggagucagc

SEQ ID NO: 178424 - RNA, 22 nt, Human
cagcacaguacaaggcacggau

SEQ ID NO: 178425 - RNA, 22 nt, Human
gaaauagacacuuucuaugaau

SEQ ID NO: 178426 - RNA, 22 nt, Human
uucugcauucaaauuaugugag

SEQ ID NO: 178427 - RNA, 22 nt, Human
aagaacuagucuuacagccuca

SEQ ID NO: 178428 - RNA, 22 nt, Human
ggcagcugguucuuuccauuaa

SEQ ID NO: 178429 - RNA, 22 nt, Human
augcaaaaguaguugcaguuuu

SEQ ID NO: 178430 - RNA, 19 nt, Human
uggcagaggcaguuuguac

SEQ ID NO: 178431 - RNA, 17 nt, Human
uccuggccuggugugug

SEQ ID NO: 178432 - RNA, 22 nt, Human
cuggcuccaucacugggugaug

SEQ ID NO: 178433 - RNA, 22 nt, Human
acagccagaagucaggguggga

SEQ ID NO: 178434 - RNA, 22 nt, Human
uuccaggcugaugggccacagg

SEQ ID NO: 178435 - RNA, 22 nt, Human
uuuaggauauuaauguucagag

SEQ ID NO: 178436 - RNA, 22 nt, Human
agggacaucucacaaacaacuu

SEQ ID NO: 178437 - RNA, 22 nt, Human
uccuuauaguugucuuugaacc

SEQ ID NO: 178438 - RNA, 22 nt, Human
gaggaaggaaugcaguguaugc

SEQ ID NO: 178439 - RNA, 22 nt, Human
aauuacugucuccugcuggugu

SEQ ID NO: 178440 - RNA, 22 nt, Human
gacccugguguccagguccugc

SEQ ID NO: 178441 - RNA, 22 nt, Human
gccaguggcuugccaggcagga

SEQ ID NO: 178442 - RNA, 18 nt, Human
aacaggauccuccacuuc

SEQ ID NO: 178443 - RNA, 22 nt, Human
uucuuguucuccucauuuagag

SEQ ID NO: 178444 - RNA, 22 nt, Human
gagagccagcaguaaagacauu

SEQ ID NO: 178445 - RNA, 23 nt, Human
augcccugugcagaaauguggaa

SEQ ID NO: 178446 - RNA, 19 nt, Human
cagcacaugcuucucugag

SEQ ID NO: 178447 - RNA, 22 nt, Human
uuggagauaucacaccuucaca

SEQ ID NO: 178448 - RNA, 22 nt, Human
uucagaaaggauaauuggaagg

SEQ ID NO: 178449 - RNA, 22 nt, Human
aaauggaucuguggaauacauu

SEQ ID NO: 178450 - RNA, 22 nt, Human
cagcaucuggauuuccuccacu

SEQ ID NO: 178451 - RNA, 22 nt, Human
cuccccagcauucugacuuccu

SEQ ID NO: 178452 - RNA, 22 nt, Human
ugcaggcugcagucucaggugg

SEQ ID NO: 178453 - RNA, 22 nt, Human
gcaguccauugacagaggucuu

SEQ ID NO: 178454 - RNA, 23 nt, Human
ucucugaguuguacuuucccuug

SEQ ID NO: 178455 - RNA, 22 nt, Human
auccaugauuaguaggauaaag

SEQ ID NO: 178456 - RNA, 20 nt, Human
agaggcuuccuugggaggag

SEQ ID NO: 178457 - RNA, 17 nt, Human
gagcagggaugcgguuc

SEQ ID NO: 178458 - RNA, 22 nt, Human
ugagacagucaccaggcaggcc

SEQ ID NO: 178459 - RNA, 22 nt, Human
aaacauucaaagcaggaugugu

SEQ ID NO: 178460 - RNA, 22 nt, Human
caccuacuuugugcagauuuua

SEQ ID NO: 178461 - RNA, 22 nt, Human
aucccugugacgagcaucccua

SEQ ID NO: 178462 - RNA, 22 nt, Human
guggcagagggugagcuggacu

SEQ ID NO: 178463 - RNA, 22 nt, Human
aaaggcuugcgauuccuuguaa

SEQ ID NO: 178464 - RNA, 22 nt, Human
ccaggccucccuuuuccagcca

SEQ ID NO: 178465 - RNA, 22 nt, Human
ugugucauauuaguauugagag

SEQ ID NO: 178466 - RNA, 22 nt, Human
ugccagugcuugugucugagca

SEQ ID NO: 178467 - RNA, 22 nt, Human
caaugacacucugcacagugcu

SEQ ID NO: 178468 - RNA, 22 nt, Human
agggacaguuacaucaucagac

SEQ ID NO: 178469 - RNA, 22 nt, Human
cccagagccucauucuguuggg

SEQ ID NO: 178470 - RNA, 17 nt, Human
uaagugauuaucucaua

SEQ ID NO: 178471 - RNA, 22 nt, Human
aaggcugaauucaaggguaggc

SEQ ID NO: 178472 - RNA, 22 nt, Human
aggaaaacacaguauugaugga

SEQ ID NO: 178473 - RNA, 22 nt, Human
ggcuuuugcuguguuuuccaga

SEQ ID NO: 178474 - RNA, 22 nt, Human
gcagggcuauuggaaggagaug

SEQ ID NO: 178475 - RNA, 22 nt, Human
uagggcugugucuccaggacca

SEQ ID NO: 178476 - RNA, 22 nt, Human
agccucugguccucccucagcu

SEQ ID NO: 178477 - RNA, 22 nt, Human
uucuacaauaugaauaaugaag

SEQ ID NO: 178478 - RNA, 23 nt, Human
uugaaagauugcuaaguaaaaau

SEQ ID NO: 178479 - RNA, 22 nt, Human
ugaagagugcuugagauuuuaa

SEQ ID NO: 178480 - RNA, 22 nt, Human
gaagugacaagaugcuaggauc

SEQ ID NO: 178481 - RNA, 22 nt, Human
caguagucuuuuuccuccuaga

SEQ ID NO: 178482 - RNA, 22 nt, Human
aucuccaggcauuucaagagac

SEQ ID NO: 178483 - RNA, 22 nt, Human
gacacagaauuuacucccgaua

SEQ ID NO: 178484 - RNA, 22 nt, Human
aggcacaggaaugucauccagu

SEQ ID NO: 178485 - RNA, 22 nt, Human
aggaaacuaaagcccagagagg

SEQ ID NO: 178486 - RNA, 22 nt, Human
gccacauccagguggaucaaau

SEQ ID NO: 178487 - RNA, 18 nt, Human
augcccuguugacuucag

SEQ ID NO: 178488 - RNA, 22 nt, Human
cuggcucauccagguguugcuc

SEQ ID NO: 178489 - RNA, 22 nt, Human
ccagaugagaccacacugcugg

SEQ ID NO: 178490 - RNA, 22 nt, Human
agcaccagcgugggggccguug

SEQ ID NO: 178491 - RNA, 22 nt, Human
acuugaauuauauuucuagaga

SEQ ID NO: 178492 - RNA, 22 nt, Human
aacaaugaggaucuguucugag

SEQ ID NO: 178493 - RNA, 22 nt, Human
gcucaaauuucagacucaugaa

SEQ ID NO: 178494 - RNA, 17 nt, Human
gcaaggaaguucuuugc

SEQ ID NO: 178495 - RNA, 23 nt, Human
aagcuugucaccauuucuuucag

SEQ ID NO: 178496 - RNA, 22 nt, Human
cucugaggagaaagagcuuggu

SEQ ID NO: 178497 - RNA, 22 nt, Human
agcccagcccgggcugcgcuuu

SEQ ID NO: 178498 - RNA, 22 nt, Human
gcuggccccgagugcuacgcuc

SEQ ID NO: 178499 - RNA, 22 nt, Human
ugugggcacuaaugacaugcag

SEQ ID NO: 178500 - RNA, 22 nt, Human
agcuccugauucucagagauag

SEQ ID NO: 178501 - RNA, 21 nt, Human
uugcaacaaccuauauauuuu

SEQ ID NO: 178502 - RNA, 22 nt, Human
augccccaggaggugccaucca

SEQ ID NO: 178503 - RNA, 22 nt, Human
aaagcaguauauugguaguugu

SEQ ID NO: 178504 - RNA, 22 nt, Human
ugggaccuguuacauugaguua

SEQ ID NO: 178505 - RNA, 22 nt, Human
cuggcagggcucuuugggugcu

SEQ ID NO: 178506 - RNA, 22 nt, Human
uucuucaauuuuccauauacug

SEQ ID NO: 178507 - RNA, 16 nt, Human
ugguggggaggacagc

SEQ ID NO: 178508 - RNA, 23 nt, Human
acaaugucuguucauaaaauacc

SEQ ID NO: 178509 - RNA, 22 nt, Human
auugaaagguuuugagcagaua

SEQ ID NO: 178510 - RNA, 22 nt, Human
aaacaaacauagguuugaaagu

SEQ ID NO: 178511 - RNA, 22 nt, Human
aauuugugaaucugucucuuga

SEQ ID NO: 178512 - RNA, 22 nt, Human
acuguuucugccacaauagccc

SEQ ID NO: 178513 - RNA, 22 nt, Human
ugagauuuguuuuauaaaauag

SEQ ID NO: 178514 - RNA, 22 nt, Human
uucuggguggccaguauuuaga

SEQ ID NO: 178515 - RNA, 22 nt, Human
cucucuggaauuaaagcccaau

SEQ ID NO: 178516 - RNA, 22 nt, Human
agggcugaggcgagggagaugc

SEQ ID NO: 178517 - RNA, 22 nt, Human
agucacugaauaccuuaauguu

SEQ ID NO: 178518 - RNA, 20 nt, Human
gcugccuuggauggcuacac

SEQ ID NO: 178519 - RNA, 22 nt, Human
ggccugcacagagguggcucua

SEQ ID NO: 178520 - RNA, 22 nt, Human
accaggaguaacagugaguggu

SEQ ID NO: 178521 - RNA, 22 nt, Human
acuuucuucuuaugcauuaagg

SEQ ID NO: 178522 - RNA, 21 nt, Human
uuguguccuucuaaagggcca

SEQ ID NO: 178523 - RNA, 22 nt, Human
gacacugaccccaagcuguccu

SEQ ID NO: 178524 - RNA, 22 nt, Human
uugggagcuggaagcaaggccu

SEQ ID NO: 178525 - RNA, 22 nt, Human
aaugugucagcuugucgaucuu

SEQ ID NO: 178526 - RNA, 22 nt, Human
ucaguguccauaaauaaaguuu

SEQ ID NO: 178527 - RNA, 22 nt, Human
acagccagugcuccgugaggac

SEQ ID NO: 178528 - RNA, 22 nt, Human
agagguuguuagaauaguggag

SEQ ID NO: 178529 - RNA, 22 nt, Human
gccugagagucugcauuucuaa

SEQ ID NO: 178530 - RNA, 21 nt, Human
uggcggggacuuguggcugcc

SEQ ID NO: 178531 - RNA, 22 nt, Human
uccugggaaguugcaucaccgu

SEQ ID NO: 178532 - RNA, 19 nt, Human
auuuacugccuaaaaucuc

SEQ ID NO: 178533 - RNA, 22 nt, Human
ucagagagugcaaaauauagcu

SEQ ID NO: 178534 - RNA, 22 nt, Human
acagaacuuccagggaacauac

SEQ ID NO: 178535 - RNA, 22 nt, Human
caggagaugacagggaagaacc

SEQ ID NO: 178536 - RNA, 22 nt, Human
auugaaagaguuuucugcugca

SEQ ID NO: 178537 - RNA, 22 nt, Human
gccugaaguuucaugccucuau

SEQ ID NO: 178538 - RNA, 22 nt, Human
gacacagauaucucugagauua

SEQ ID NO: 178539 - RNA, 22 nt, Human
cucugugguaaaauagcaguau

SEQ ID NO: 178540 - RNA, 22 nt, Human
agcauccugcuugcugucugug

SEQ ID NO: 178541 - RNA, 22 nt, Human
gaaggccauugcguccugggau

SEQ ID NO: 178542 - RNA, 22 nt, Human
ccaggccauucccagaguugcu

SEQ ID NO: 178543 - RNA, 22 nt, Human
agcagugccgcaucuugugacc

SEQ ID NO: 178544 - RNA, 20 nt, Human
cuuuagaagaacccaagcau

SEQ ID NO: 178545 - RNA, 22 nt, Human
ugucugggauguaauuccugcc

SEQ ID NO: 178546 - RNA, 22 nt, Human
ugaaaugauuauaugguguuug

SEQ ID NO: 178547 - RNA, 22 nt, Human
auaagcuuugcuggagagaccu

SEQ ID NO: 178548 - RNA, 22 nt, Human
cagaaaccugucuggaguggga

SEQ ID NO: 178549 - RNA, 22 nt, Human
auucuacaaucauguagauccu

SEQ ID NO: 178550 - RNA, 22 nt, Human
gacagucccccagcagcaaacc

SEQ ID NO: 178551 - RNA, 22 nt, Human
ccacaagaugcaaacucuaaca

SEQ ID NO: 178552 - RNA, 22 nt, Human
ccuggcucaguguugaaggggu

SEQ ID NO: 178553 - RNA, 22 nt, Human
aggaaugucgucauaaacauga

SEQ ID NO: 178554 - RNA, 19 nt, Human
agcagcuguagauagacac

SEQ ID NO: 178555 - RNA, 22 nt, Human
gcuuucuguggugauguaaagg

SEQ ID NO: 178556 - RNA, 22 nt, Human
gaauacaaauaauaccaaggug

SEQ ID NO: 178557 - RNA, 22 nt, Human
agggucugacugaauggaaaag

SEQ ID NO: 178558 - RNA, 22 nt, Human
uugugucccugcggcugaggag

SEQ ID NO: 178559 - RNA, 22 nt, Human
guuccacauaacacaucuacaa

SEQ ID NO: 178560 - RNA, 22 nt, Human
accuagaauuuaaaacauugcu

SEQ ID NO: 178561 - RNA, 22 nt, Human
uugcugaagugaagguauguuu

SEQ ID NO: 178562 - RNA, 22 nt, Human
acugagcucuagguuuugaacc

SEQ ID NO: 178563 - RNA, 22 nt, Human
ucaggcugugucuuuaaacaau

SEQ ID NO: 178564 - RNA, 22 nt, Human
cuuagacauggcagcuccaagu

SEQ ID NO: 178565 - RNA, 22 nt, Human
uuggcagacuggguccugggga

SEQ ID NO: 178566 - RNA, 21 nt, Human
ucagagggcccuggaggcuca

SEQ ID NO: 178567 - RNA, 23 nt, Human
ucauuucauccagccuugagagu

SEQ ID NO: 178568 - RNA, 22 nt, Human
ccaggaagcggugagggcugcc

SEQ ID NO: 178569 - RNA, 22 nt, Human
aaugauauagcagacauagccu

SEQ ID NO: 178570 - RNA, 22 nt, Human
gcaggagugacauggaugugga

SEQ ID NO: 178571 - RNA, 22 nt, Human
uaugaaacauucauacaaauaa

SEQ ID NO: 178572 - RNA, 20 nt, Human
cuuccaccagggccgcugau

SEQ ID NO: 178573 - RNA, 22 nt, Human
cacaugcccagaacuucucauu

SEQ ID NO: 178574 - RNA, 22 nt, Human
aucauucaaaugauuuggaggu

SEQ ID NO: 178575 - RNA, 22 nt, Human
gccuccugcccagaugagugau

SEQ ID NO: 178576 - RNA, 23 nt, Human
cugauuugagcagaauaaaauag

SEQ ID NO: 178577 - RNA, 22 nt, Human
acauucuuauaagagugaggca

SEQ ID NO: 178578 - RNA, 22 nt, Human
uuaaagcaguuuguauacaugg

SEQ ID NO: 178579 - RNA, 22 nt, Human
cuuuauucugcaaauugccuug

SEQ ID NO: 178580 - RNA, 22 nt, Human
ucuguuuaugugucuaaauaaa

SEQ ID NO: 178581 - RNA, 22 nt, Human
agcagguguuagggauccaaug

SEQ ID NO: 178582 - RNA, 23 nt, Human
aguuuuuaauggucauagcugag

SEQ ID NO: 178583 - RNA, 22 nt, Human
cuaggcccaugagguuugcugg

SEQ ID NO: 178584 - RNA, 22 nt, Human
ugaaugaugcauuuguuuccca

SEQ ID NO: 178585 - RNA, 22 nt, Human
gcccucucggcauagcaggggc

SEQ ID NO: 178586 - RNA, 22 nt, Human
ucuacagugagucauucaaaca

SEQ ID NO: 178587 - RNA, 22 nt, Human
cagaaaauaaacauuuguggaa

SEQ ID NO: 178588 - RNA, 22 nt, Human
agccauggcgccacuagaggga

SEQ ID NO: 178589 - RNA, 22 nt, Human
cagaggcugacccugcuguugu

SEQ ID NO: 178590 - RNA, 22 nt, Human
gcuuccaguaaguugcugccau

SEQ ID NO: 178591 - RNA, 22 nt, Human
cauuugcaaaccaacaagauga

SEQ ID NO: 178592 - RNA, 22 nt, Human
gcacaguagguauuuacccagu

SEQ ID NO: 178593 - RNA, 22 nt, Human
ugaggacauugagacuggagac

SEQ ID NO: 178594 - RNA, 22 nt, Human
uacaggaaggagcacaucggga

SEQ ID NO: 178595 - RNA, 22 nt, Human
uccuggccucacaguccugggu

SEQ ID NO: 178596 - RNA, 22 nt, Human
agagcucaguguguuaugguua

SEQ ID NO: 178597 - RNA, 22 nt, Human
cccagagaugggaggugaucgg

SEQ ID NO: 178598 - RNA, 22 nt, Human
aauuaugagguagauaucacau

SEQ ID NO: 178599 - RNA, 22 nt, Human
acuguguggaccacucugaggc

SEQ ID NO: 178600 - RNA, 22 nt, Human
guccugggaggggcugguccug

SEQ ID NO: 178601 - RNA, 22 nt, Human
cuaacauuuauugagcacuuag

SEQ ID NO: 178602 - RNA, 22 nt, Human
gaauaacauuuuuuccuuuaca

SEQ ID NO: 178603 - RNA, 22 nt, Human
cagcagcaaggugaggguggag

SEQ ID NO: 178604 - RNA, 22 nt, Human
uguuacugugguuaccagaagc

SEQ ID NO: 178605 - RNA, 19 nt, Human
guuucauuaagauaggaaa

SEQ ID NO: 178606 - RNA, 22 nt, Human
ucccagcauuaaugccugucag

SEQ ID NO: 178607 - RNA, 22 nt, Human
aggaagcaaaaggcagggucua

SEQ ID NO: 178608 - RNA, 22 nt, Human
cacaaucucaacugccuuuuag

SEQ ID NO: 178609 - RNA, 22 nt, Human
aucucugguuguuuugcuccca

SEQ ID NO: 178610 - RNA, 22 nt, Human
auggugguuugggagaaaaagc

SEQ ID NO: 178611 - RNA, 22 nt, Human
ucuguccucuuugaagcugcuc

SEQ ID NO: 178612 - RNA, 20 nt, Human
uacauauuauaucagcugca

SEQ ID NO: 178613 - RNA, 22 nt, Human
aaaauugaagugaucaggaacu

SEQ ID NO: 178614 - RNA, 22 nt, Human
uggcugcagacaccuauggcag

SEQ ID NO: 178615 - RNA, 22 nt, Human
ugaaucaaugaauugcacuuca

SEQ ID NO: 178616 - RNA, 22 nt, Human
guuuuauaugucucugcugaca

SEQ ID NO: 178617 - RNA, 22 nt, Human
cccaggcauuuucaacuuuagu

SEQ ID NO: 178618 - RNA, 22 nt, Human
acccauuuuuaaauauaacuug

SEQ ID NO: 178619 - RNA, 21 nt, Human
aaggcuccuccucuaggccuc

SEQ ID NO: 178620 - RNA, 20 nt, Human
uugauucccucuaaacucgc

SEQ ID NO: 178621 - RNA, 22 nt, Human
guguguggaaaguuuuccaugg

SEQ ID NO: 178622 - RNA, 22 nt, Human
ggccuuggguauagguggguau

SEQ ID NO: 178623 - RNA, 22 nt, Human
acugugcagguagaugccuggg

SEQ ID NO: 178624 - RNA, 22 nt, Human
ggcugagcaauuuugaugacau

SEQ ID NO: 178625 - RNA, 22 nt, Human
ugacaggaggcuugaggccagg

SEQ ID NO: 178626 - RNA, 22 nt, Human
ggcugggaggaugacuugcuac

SEQ ID NO: 178627 - RNA, 22 nt, Human
gagccuggggacccuccugagu

SEQ ID NO: 178628 - RNA, 22 nt, Human
gaggggaagacuucuggacagu

SEQ ID NO: 178629 - RNA, 22 nt, Human
gggcucugggaugcucuuagag

SEQ ID NO: 178630 - RNA, 22 nt, Human
ccauguguucaauaagggaguu

SEQ ID NO: 178631 - RNA, 22 nt, Human
gcugucaccaaagcaggcacug

SEQ ID NO: 178632 - RNA, 23 nt, Human
aaauuauugcucuucaauugccu

SEQ ID NO: 178633 - RNA, 22 nt, Human
gccaccaguagcuaacaacagu

SEQ ID NO: 178634 - RNA, 22 nt, Human
agauggucuucauaaguuuuaa

SEQ ID NO: 178635 - RNA, 22 nt, Human
uaguuacagcaggcaggauaua

SEQ ID NO: 178636 - RNA, 22 nt, Human
gugcuucuuucuccucaagccu

SEQ ID NO: 178637 - RNA, 22 nt, Human
aauucaaucuguagauugugau

SEQ ID NO: 178638 - RNA, 22 nt, Human
accacccaccucacagcauagu

SEQ ID NO: 178639 - RNA, 20 nt, Human
cugcuccacccggcucucag

SEQ ID NO: 178640 - RNA, 22 nt, Human
ugaugauugggagacauuuggg

SEQ ID NO: 178641 - RNA, 23 nt, Human
uaaauuaccuuuccagugcaggg

SEQ ID NO: 178642 - RNA, 22 nt, Human
cacaggcagccuuguagaagaa

SEQ ID NO: 178643 - RNA, 22 nt, Human
ugcugagggcuguuaaggaagc

SEQ ID NO: 178644 - RNA, 22 nt, Human
agcuguggcaaccuugucagac

SEQ ID NO: 178645 - RNA, 22 nt, Human
ggcaggugaccuggccucccag

SEQ ID NO: 178646 - RNA, 19 nt, Human
uccugcagaccagaccugu

SEQ ID NO: 178647 - RNA, 22 nt, Human
uuaauuaauuaguuaagcaugu

SEQ ID NO: 178648 - RNA, 22 nt, Human
cagcagcucacucagguggcuc

SEQ ID NO: 178649 - RNA, 21 nt, Human
gagcugcaccuugaccuguuu

SEQ ID NO: 178650 - RNA, 22 nt, Human
uccuggcccggccgggccugcu

SEQ ID NO: 178651 - RNA, 22 nt, Human
agaaagcuccccaugagaugau

SEQ ID NO: 178652 - RNA, 22 nt, Human
uggaaacugugguauuucuuua

SEQ ID NO: 178653 - RNA, 22 nt, Human
caggaaaugaacaggaaugaac

SEQ ID NO: 178654 - RNA, 22 nt, Human
aucccauuuccuaguacaucau

SEQ ID NO: 178655 - RNA, 22 nt, Human
ugucuuuagagucacaaaacca

SEQ ID NO: 178656 - RNA, 22 nt, Human
uuauaccugaagcaggugaugu

SEQ ID NO: 178657 - RNA, 22 nt, Human
cugcuucuccaaaguaggacuu

SEQ ID NO: 178658 - RNA, 22 nt, Human
augugcaaauccaaugugaaug

SEQ ID NO: 178659 - RNA, 22 nt, Human
gaguccagacaccauaccugau

SEQ ID NO: 178660 - RNA, 22 nt, Human
uaacagaaaggggacagaaaua

SEQ ID NO: 178661 - RNA, 22 nt, Human
agcuggcuaugcccugugaacc

SEQ ID NO: 178662 - RNA, 22 nt, Human
uuccuuccuccuccaguucugg

SEQ ID NO: 178663 - RNA, 20 nt, Human
aggaaagccugugugagucu

SEQ ID NO: 178664 - RNA, 22 nt, Human
auacaucuaugccuuucugaca

SEQ ID NO: 178665 - RNA, 22 nt, Human
cagcuguguaaacacaugugua

SEQ ID NO: 178666 - RNA, 22 nt, Human
auggccagcccuucccgcagcu

SEQ ID NO: 178667 - RNA, 22 nt, Human
agaaaucccaaggcaucaacca

SEQ ID NO: 178668 - RNA, 22 nt, Human
uagcaacaagugacuaucuaua

SEQ ID NO: 178669 - RNA, 18 nt, Human
auggcacagucuuucccu

SEQ ID NO: 178670 - RNA, 22 nt, Human
gcacacauucuagccuuuugug

SEQ ID NO: 178671 - RNA, 22 nt, Human
agcuguguggugucugacagcu

SEQ ID NO: 178672 - RNA, 22 nt, Human
guggccagaaucuugaggccuu

SEQ ID NO: 178673 - RNA, 22 nt, Human
cccagagagguaaaacagccuu

SEQ ID NO: 178674 - RNA, 22 nt, Human
uauugcugacuuguucaguguu

SEQ ID NO: 178675 - RNA, 22 nt, Human
gcagccucagggcacucagaug

SEQ ID NO: 178676 - RNA, 22 nt, Human
ccaggcuccucaugaucuuguu

SEQ ID NO: 178677 - RNA, 22 nt, Human
gggagguaaagaugagcucagu

SEQ ID NO: 178678 - RNA, 22 nt, Human
aagcccagguaaguggcucaug

SEQ ID NO: 178679 - RNA, 22 nt, Human
agcugaagaaaugggaagcauu

SEQ ID NO: 178680 - RNA, 22 nt, Human
ccuagggucaguguggcaggag

SEQ ID NO: 178681 - RNA, 22 nt, Human
gaggcucagagggacuuucaag

SEQ ID NO: 178682 - RNA, 22 nt, Human
guaaguuuuucccuagauguag

SEQ ID NO: 178683 - RNA, 22 nt, Human
ggcaggcaggagcgugcuuggg

SEQ ID NO: 178684 - RNA, 22 nt, Human
agguguccaggaagaugcuggc

SEQ ID NO: 178685 - RNA, 22 nt, Human
ccagggagcccacaggacaaug

SEQ ID NO: 178686 - RNA, 22 nt, Human
gccaggcugccuuaucucuagc

SEQ ID NO: 178687 - RNA, 22 nt, Human
uuuaucuguuguaccugcauug

SEQ ID NO: 178688 - RNA, 22 nt, Human
cucugugcucccaugcuaguaa

SEQ ID NO: 178689 - RNA, 23 nt, Human
augugugggaggucagagagcca

SEQ ID NO: 178690 - RNA, 22 nt, Human
ccugguuuaugccagauccugu

SEQ ID NO: 178691 - RNA, 22 nt, Human
ucacagaaugucagaguugggg

SEQ ID NO: 178692 - RNA, 22 nt, Human
gaacuuuaaaacaaaguacagu

SEQ ID NO: 178693 - RNA, 22 nt, Human
uuuuucagccaugaauuacacu

SEQ ID NO: 178694 - RNA, 22 nt, Human
cuugaaucuggcuuugccacuu

SEQ ID NO: 178695 - RNA, 17 nt, Human
agucagaggaguaucug

SEQ ID NO: 178696 - RNA, 22 nt, Human
gucaaauauuaugcagcuugga

SEQ ID NO: 178697 - RNA, 22 nt, Human
agccuggauccuaggcucagcu

SEQ ID NO: 178698 - RNA, 22 nt, Human
uuggcuuggagaguugaaaugu

SEQ ID NO: 178699 - RNA, 22 nt, Human
ggaggaaauccuuaguaaggca

SEQ ID NO: 178700 - RNA, 22 nt, Human
gggcugacaaccaucugacaag

SEQ ID NO: 178701 - RNA, 22 nt, Human
ccugugaccacucugguucugc

SEQ ID NO: 178702 - RNA, 22 nt, Human
uguucauuaaacuacugugugg

SEQ ID NO: 178703 - RNA, 22 nt, Human
uaaagcauguacugugugcuag

SEQ ID NO: 178704 - RNA, 21 nt, Human
uggacuggugaguuuaggcug

SEQ ID NO: 178705 - RNA, 22 nt, Human
gggacgagaucuuggcagugug

SEQ ID NO: 178706 - RNA, 22 nt, Human
cuggguguuggguacugaccgu

SEQ ID NO: 178707 - RNA, 22 nt, Human
gcuuagaacauguggauugcaa

SEQ ID NO: 178708 - RNA, 22 nt, Human
uucauucugggcucuaaggaac

SEQ ID NO: 178709 - RNA, 22 nt, Human
ucucaggaagugauauugagac

SEQ ID NO: 178710 - RNA, 22 nt, Human
ugaggcaguauuuuagugacuu

SEQ ID NO: 178711 - RNA, 22 nt, Human
gcuccaggugucccagguaaaa

SEQ ID NO: 178712 - RNA, 22 nt, Human
cuuggcuccaaucccagcucug

SEQ ID NO: 178713 - RNA, 22 nt, Human
cugccugcaucccacagugggg

SEQ ID NO: 178714 - RNA, 19 nt, Human
ucuuauugagcagcugagg

SEQ ID NO: 178715 - RNA, 22 nt, Human
uaucuuuagaggaagagaaucu

SEQ ID NO: 178716 - RNA, 22 nt, Human
ccugcuguaaugugucuuuauu

SEQ ID NO: 178717 - RNA, 22 nt, Human
gccugcagccagggaguucucu

SEQ ID NO: 178718 - RNA, 22 nt, Human
uaaggccaggcuguggucggca

SEQ ID NO: 178719 - RNA, 22 nt, Human
ggagggcaucaaucaggccugg

SEQ ID NO: 178720 - RNA, 22 nt, Human
cuggaggagcaauaugguuagg

SEQ ID NO: 178721 - RNA, 19 nt, Human
gggaccugacuaauuggca

SEQ ID NO: 178722 - RNA, 22 nt, Human
gggggcaguaaccucaaagugu

SEQ ID NO: 178723 - RNA, 22 nt, Human
uaguauagauugaagcagauca

SEQ ID NO: 178724 - RNA, 22 nt, Human
gaggguccuggcuaagucugac

SEQ ID NO: 178725 - RNA, 22 nt, Human
aaauguacugauacuuauuuua

SEQ ID NO: 178726 - RNA, 22 nt, Human
cacaggagcuguggggcagugu

SEQ ID NO: 178727 - RNA, 22 nt, Human
aagggcucuguugccauuucag

SEQ ID NO: 178728 - RNA, 22 nt, Human
caggagugucgggucacuaggu

SEQ ID NO: 178729 - RNA, 20 nt, Human
uuggaaucaccuggagaggu

SEQ ID NO: 178730 - RNA, 22 nt, Human
caggaggcaguuucagaaguca

SEQ ID NO: 178731 - RNA, 22 nt, Human
ggugaggguaaauauaggcaaa

SEQ ID NO: 178732 - RNA, 22 nt, Human
agcaggcagccuaggaagugaa

SEQ ID NO: 178733 - RNA, 22 nt, Human
ggcugcagaggcccccaguggg

SEQ ID NO: 178734 - RNA, 22 nt, Human
agugaaauacugucguuuuuag

SEQ ID NO: 178735 - RNA, 22 nt, Human
gaggcagugcauugucuagggg

SEQ ID NO: 178736 - RNA, 22 nt, Human
augaggcacaucacagccaaug

SEQ ID NO: 178737 - RNA, 22 nt, Human
uagucuuuugagaaguauaucu

SEQ ID NO: 178738 - RNA, 22 nt, Human
auauuacuuccugguauaaaau

SEQ ID NO: 178739 - RNA, 22 nt, Human
aucuagaaguggcaugaauuac

SEQ ID NO: 178740 - RNA, 23 nt, Human
gaggagggucgugcuguguuccu

SEQ ID NO: 178741 - RNA, 22 nt, Human
uuuugcccuugcuagaucacug

SEQ ID NO: 178742 - RNA, 22 nt, Human
agaguacugccucaguuaugaa

SEQ ID NO: 178743 - RNA, 20 nt, Human
uacauuguagaaauauucaa

SEQ ID NO: 178744 - RNA, 22 nt, Human
guuccuuccuaucccgagagcc

SEQ ID NO: 178745 - RNA, 22 nt, Human
aauaccuuuucagugcacaaaa

SEQ ID NO: 178746 - RNA, 22 nt, Human
uuacaggggacauuggggacau

SEQ ID NO: 178747 - RNA, 22 nt, Human
cuucugaaguguuugaugauug

SEQ ID NO: 178748 - RNA, 22 nt, Human
cauuuguuuagaagucuuuaua

SEQ ID NO: 178749 - RNA, 22 nt, Human
ucuucccacugcccaugggcag

SEQ ID NO: 178750 - RNA, 22 nt, Human
cagcuggcgccuggggaccaga

SEQ ID NO: 178751 - RNA, 22 nt, Human
uggggcucuccacagugucuca

SEQ ID NO: 178752 - RNA, 22 nt, Human
ugucucagaggcaggaagagcc

SEQ ID NO: 178753 - RNA, 22 nt, Human
acaaguuaccaaaaaagauuca

SEQ ID NO: 178754 - RNA, 22 nt, Human
uucaggauuauacucucuuccc

SEQ ID NO: 178755 - RNA, 22 nt, Human
aaaugacagaguaagcuguuua

SEQ ID NO: 178756 - RNA, 22 nt, Human
uucuggaaggguggaguagcuu

SEQ ID NO: 178757 - RNA, 22 nt, Human
gcaucuaaauaaacgugggagu

SEQ ID NO: 178758 - RNA, 22 nt, Human
ucauuacacaguucaguggaaa

SEQ ID NO: 178759 - RNA, 20 nt, Human
ugggcacagcuuuggagggc

SEQ ID NO: 178760 - RNA, 18 nt, Human
ucucugaauauuuuaugu

SEQ ID NO: 178761 - RNA, 22 nt, Human
aacaaggcugguaucuuaaaga

SEQ ID NO: 178762 - RNA, 22 nt, Human
uaaugcuuuuccuucaaauaag

SEQ ID NO: 178763 - RNA, 22 nt, Human
ugccuuagaggauagugaagcc

SEQ ID NO: 178764 - RNA, 22 nt, Human
uucuccagacccuccugcagac

SEQ ID NO: 178765 - RNA, 22 nt, Human
cagggagcuggcuggcugugcc

SEQ ID NO: 178766 - RNA, 22 nt, Human
cauuuaauagaugcuguuucag

SEQ ID NO: 178767 - RNA, 22 nt, Human
cugagcccuugaacccaagucc

SEQ ID NO: 178768 - RNA, 22 nt, Human
gccuggagugguccugcugccc

SEQ ID NO: 178769 - RNA, 22 nt, Human
ucugagguguagcugggcuuca

SEQ ID NO: 178770 - RNA, 22 nt, Human
ggaauguugucauuuacauuau

SEQ ID NO: 178771 - RNA, 22 nt, Human
gggcagugguccaggcuacagc

SEQ ID NO: 178772 - RNA, 18 nt, Human
gcaggccuagaacuuggu

SEQ ID NO: 178773 - RNA, 22 nt, Human
aaagcacagagcucccacagga

SEQ ID NO: 178774 - RNA, 17 nt, Human
acaggcagaucaccuga

SEQ ID NO: 178775 - RNA, 22 nt, Human
aagcacagacucccucugagug

SEQ ID NO: 178776 - RNA, 23 nt, Human
acuuuagauaaauuaugugcaca

SEQ ID NO: 178777 - RNA, 22 nt, Human
auguaaacaagguuauugucca

SEQ ID NO: 178778 - RNA, 20 nt, Human
agacagaaucagagauaaag

SEQ ID NO: 178779 - RNA, 22 nt, Human
ucuggccugaaaguccaugcuu

SEQ ID NO: 178780 - RNA, 22 nt, Human
guccugggcggagggcugcugu

SEQ ID NO: 178781 - RNA, 22 nt, Human
agcuuuauauaaaagaguacau

SEQ ID NO: 178782 - RNA, 22 nt, Human
ccagcucucaaggcucccuggg

SEQ ID NO: 178783 - RNA, 19 nt, Human
cacgaguucucuuagcaaa

SEQ ID NO: 178784 - RNA, 22 nt, Human
caauucaugggcugaggaaggg

SEQ ID NO: 178785 - RNA, 22 nt, Human
uccuucaaagcuccuagugagc

SEQ ID NO: 178786 - RNA, 22 nt, Human
aaacaguuuuuuaagucucuag

SEQ ID NO: 178787 - RNA, 22 nt, Human
ugaagaggccgugugcagguga

SEQ ID NO: 178788 - RNA, 22 nt, Human
gcucucugccauaugaggauac

SEQ ID NO: 178789 - RNA, 19 nt, Human
uuuacagggaauggagacc

SEQ ID NO: 178790 - RNA, 17 nt, Human
ggucuggggccauuggc

SEQ ID NO: 178791 - RNA, 22 nt, Human
gugaggugguacaauauuaacu

SEQ ID NO: 178792 - RNA, 22 nt, Human
agucaccaacaugguucccagg

SEQ ID NO: 178793 - RNA, 22 nt, Human
gccucagguaaaacuugaguuu

SEQ ID NO: 178794 - RNA, 22 nt, Human
cuuccagucuagagcuaucugu

SEQ ID NO: 178795 - RNA, 22 nt, Human
acuugguugcuucugaaaugac

SEQ ID NO: 178796 - RNA, 22 nt, Human
uggugcagaugcaggucacugg

SEQ ID NO: 178797 - RNA, 22 nt, Human
ugaggcaggaguucaggcugcg

SEQ ID NO: 178798 - RNA, 22 nt, Human
acuaaagaagccaaaguuuucu

SEQ ID NO: 178799 - RNA, 22 nt, Human
acaaagugcacaagaugagaac

SEQ ID NO: 178800 - RNA, 22 nt, Human
ugcacacauucuauggggcuga

SEQ ID NO: 178801 - RNA, 22 nt, Human
ucagauagugauaauagcaugu

SEQ ID NO: 178802 - RNA, 22 nt, Human
aagugcauaauaacucccaagu

SEQ ID NO: 178803 - RNA, 22 nt, Human
gcaaggaccuuugagcgugcca

SEQ ID NO: 178804 - RNA, 22 nt, Human
ugccugucuucaggagugucac

SEQ ID NO: 178805 - RNA, 22 nt, Human
auugcaaaugagucuuaauaua

SEQ ID NO: 178806 - RNA, 22 nt, Human
cgucuuccucuuacgaugcgcu

SEQ ID NO: 178807 - RNA, 20 nt, Human
aaacauucauguacaaguga

SEQ ID NO: 178808 - RNA, 22 nt, Human
aaacaucuuucuauugcaaguu

SEQ ID NO: 178809 - RNA, 22 nt, Human
guggcccagcccuacagaggac

SEQ ID NO: 178810 - RNA, 22 nt, Human
ucaccagggagcuuguccucug

SEQ ID NO: 178811 - RNA, 22 nt, Human
ggcucuggagauguccgaccug

SEQ ID NO: 178812 - RNA, 22 nt, Human
uagacucagacagaaaaugugu

SEQ ID NO: 178813 - RNA, 22 nt, Human
ucuuagaaauuccccaguggcu

SEQ ID NO: 178814 - RNA, 22 nt, Human
ugagcagaacacgggauccaug

SEQ ID NO: 178815 - RNA, 22 nt, Human
cagcacuuugagggcucuuaau

SEQ ID NO: 178816 - RNA, 22 nt, Human
ggagcugagcagcgauggcgga

SEQ ID NO: 178817 - RNA, 22 nt, Human
gcacuggaaauaccuagaugaa

SEQ ID NO: 178818 - RNA, 17 nt, Human
cccagcuggcagugccg

SEQ ID NO: 178819 - RNA, 22 nt, Human
ucagaguuggccuuucuguauu

SEQ ID NO: 178820 - RNA, 22 nt, Human
gaccagaaaucaacacagaaug

SEQ ID NO: 178821 - RNA, 22 nt, Human
agcagagcgccugcucagaggg

SEQ ID NO: 178822 - RNA, 22 nt, Human
ccuagaauuauaaacuuauuag

SEQ ID NO: 178823 - RNA, 22 nt, Human
cuggcaugguguauuuguucaa

SEQ ID NO: 178824 - RNA, 22 nt, Human
gccuggcaggccucaugagggg

SEQ ID NO: 178825 - RNA, 22 nt, Human
uacuucugcaccaaccuuaaua

SEQ ID NO: 178826 - RNA, 22 nt, Human
aacacagcuaauuucugucaau

SEQ ID NO: 178827 - RNA, 22 nt, Human
cuggguccugcucucccuaaga

SEQ ID NO: 178828 - RNA, 22 nt, Human
uggguaggccaggaagcagugu

SEQ ID NO: 178829 - RNA, 22 nt, Human
uccugggagcauggugccguga

SEQ ID NO: 178830 - RNA, 20 nt, Human
aggcuugugcuuugucacuc

SEQ ID NO: 178831 - RNA, 22 nt, Human
uuggcagaauuaaccacugaag

SEQ ID NO: 178832 - RNA, 22 nt, Human
acacauauucauauguacuuac

SEQ ID NO: 178833 - RNA, 22 nt, Human
acagagagguaaaauauauagu

SEQ ID NO: 178834 - RNA, 22 nt, Human
ucacaugaguauuauuuuccaa

SEQ ID NO: 178835 - RNA, 22 nt, Human
aaaaguuauugaugcaggacaa

SEQ ID NO: 178836 - RNA, 22 nt, Human
uuuggcucuaguaaauauaacc

SEQ ID NO: 178837 - RNA, 22 nt, Human
gcagacacauccacuccuacag

SEQ ID NO: 178838 - RNA, 22 nt, Human
ggccccaguucacuccuggccg

SEQ ID NO: 178839 - RNA, 23 nt, Human
cccagggacacgaugacaccucc

SEQ ID NO: 178840 - RNA, 22 nt, Human
cacagcugaccacccugcuccc

SEQ ID NO: 178841 - RNA, 22 nt, Human
gaacaggguugggugagagagg

SEQ ID NO: 178842 - RNA, 22 nt, Human
guuacaaauguaaauucugggg

SEQ ID NO: 178843 - RNA, 22 nt, Human
cacuggggugggccugguagag

SEQ ID NO: 178844 - RNA, 22 nt, Human
ucaaaucccagcucagccucuc

SEQ ID NO: 178845 - RNA, 22 nt, Human
aagcuuggaagucuuccuuuca

SEQ ID NO: 178846 - RNA, 22 nt, Human
aaaugaucauguaauuucagaa

SEQ ID NO: 178847 - RNA, 22 nt, Human
gaauguuauuggacagcagugg

SEQ ID NO: 178848 - RNA, 22 nt, Human
gugcagggcagccgaaugggcu

SEQ ID NO: 178849 - RNA, 22 nt, Human
ugugcacaaugugcagguuugu

SEQ ID NO: 178850 - RNA, 22 nt, Human
ggucaaagggugagauggcagg

SEQ ID NO: 178851 - RNA, 22 nt, Human
uauugaauuagacccuaaaaug

SEQ ID NO: 178852 - RNA, 22 nt, Human
cuucacugaugggacagcucaa

SEQ ID NO: 178853 - RNA, 23 nt, Human
cuuucauugugguuucacagagc

SEQ ID NO: 178854 - RNA, 22 nt, Human
guccagugucuucuacauaaca

SEQ ID NO: 178855 - RNA, 22 nt, Human
cuuuggaaagugguucagguga

SEQ ID NO: 178856 - RNA, 22 nt, Human
ucaggccaaagaaacagcauga

SEQ ID NO: 178857 - RNA, 22 nt, Human
aaguacagaaauagcaggugca

SEQ ID NO: 178858 - RNA, 22 nt, Human
uaggcucagggcugggugacgg

SEQ ID NO: 178859 - RNA, 22 nt, Human
gagugcuggggugcagagaggu

SEQ ID NO: 178860 - RNA, 17 nt, Human
acacaucuuggcuuugc

SEQ ID NO: 178861 - RNA, 22 nt, Human
caggcauggaaaagcccagagg

SEQ ID NO: 178862 - RNA, 22 nt, Human
ugcuauuuuuaucuugaucaaa

SEQ ID NO: 178863 - RNA, 22 nt, Human
agcagagcaaagcucagaaaug

SEQ ID NO: 178864 - RNA, 22 nt, Human
ucaauagcauagcaauuaaugu

SEQ ID NO: 178865 - RNA, 22 nt, Human
ccaaggagcaaggcucaacaag

SEQ ID NO: 178866 - RNA, 22 nt, Human
agcaguuugaaucaauggccag

SEQ ID NO: 178867 - RNA, 22 nt, Human
ccagaggugguggugucuagaa

SEQ ID NO: 178868 - RNA, 19 nt, Human
auggcagcagcagcucucc

SEQ ID NO: 178869 - RNA, 22 nt, Human
gaguccaggcucagaaacccgu

SEQ ID NO: 178870 - RNA, 22 nt, Human
ugaaauuccaggagaguuaaaa

SEQ ID NO: 178871 - RNA, 22 nt, Human
acuuuaaaacugaucaucagag

SEQ ID NO: 178872 - RNA, 22 nt, Human
aaauauugguaggaugcuuguu

SEQ ID NO: 178873 - RNA, 22 nt, Human
ucaggggcuugaggugcauguc

SEQ ID NO: 178874 - RNA, 22 nt, Human
ccacccugagccgcaagagcag

SEQ ID NO: 178875 - RNA, 22 nt, Human
auuuccaagaaagcuuuaggau

SEQ ID NO: 178876 - RNA, 22 nt, Human
gccacagcagggcccucucagg

SEQ ID NO: 178877 - RNA, 22 nt, Human
cucucuggcccauccuguugcc

SEQ ID NO: 178878 - RNA, 22 nt, Human
ugcaggaguuccccucugccug

SEQ ID NO: 178879 - RNA, 22 nt, Human
ggcuucucccauucuucagggg

SEQ ID NO: 178880 - RNA, 22 nt, Human
uacacaggcugccucuuugcau

SEQ ID NO: 178881 - RNA, 22 nt, Human
ccaggaccuggagcucuaugaa

SEQ ID NO: 178882 - RNA, 22 nt, Human
ccaggcuagagagcaguggcau

SEQ ID NO: 178883 - RNA, 22 nt, Human
ucucugagacaguagccucugc

SEQ ID NO: 178884 - RNA, 22 nt, Human
gcuggcagggacagcugcgugu

SEQ ID NO: 178885 - RNA, 22 nt, Human
cagcaucuguuuuucugaccca

SEQ ID NO: 178886 - RNA, 22 nt, Human
caccuggaguagcaagguaauu

SEQ ID NO: 178887 - RNA, 22 nt, Human
ucucagaguuuuuuuccaggac

SEQ ID NO: 178888 - RNA, 22 nt, Human
uuaucugucaucaggcagacag

SEQ ID NO: 178889 - RNA, 20 nt, Human
gaggaaccacugggaggaga

SEQ ID NO: 178890 - RNA, 19 nt, Human
gcuccuggaugaccugugg

SEQ ID NO: 178891 - RNA, 22 nt, Human
aacgucuucucuccaaguaaau

SEQ ID NO: 178892 - RNA, 22 nt, Human
gcauucuugguaugaaggacag

SEQ ID NO: 178893 - RNA, 17 nt, Human
aggcauggucuggggug

SEQ ID NO: 178894 - RNA, 22 nt, Human
agcuugguggcccuccuggcug

SEQ ID NO: 178895 - RNA, 22 nt, Human
aaauagauuuccuagcauugga

SEQ ID NO: 178896 - RNA, 22 nt, Human
ucuccccuguuggccagguuuu

SEQ ID NO: 178897 - RNA, 22 nt, Human
ucccagagcaguacuccaggag

SEQ ID NO: 178898 - RNA, 22 nt, Human
ucuagagacaaaggaaggaggg

SEQ ID NO: 178899 - RNA, 22 nt, Human
aucagagcccggcaauuuauuu

SEQ ID NO: 178900 - RNA, 22 nt, Human
aguggcugauuacaaacugagu

SEQ ID NO: 178901 - RNA, 20 nt, Human
ucuguaggcaaguuagcagg

SEQ ID NO: 178902 - RNA, 21 nt, Human
agaggaagugauuggucuggc

SEQ ID NO: 178903 - RNA, 22 nt, Human
gggguugaucacagaggggucu

SEQ ID NO: 178904 - RNA, 19 nt, Human
ucaggcaguuauucacaaa

SEQ ID NO: 178905 - RNA, 22 nt, Human
gucugcauacaggacaugcaca

SEQ ID NO: 178906 - RNA, 22 nt, Human
cuguuucuccacacucuuccca

SEQ ID NO: 178907 - RNA, 22 nt, Human
caugagaucugcagggaugggc

SEQ ID NO: 178908 - RNA, 22 nt, Human
gccuguguguuuagcucugggg

SEQ ID NO: 178909 - RNA, 19 nt, Human
cgugaacaugacugcaugg

SEQ ID NO: 178910 - RNA, 20 nt, Human
gcuugcccacaucugcacug

SEQ ID NO: 178911 - RNA, 22 nt, Human
ggccuuaggcucaacaggcaga

SEQ ID NO: 178912 - RNA, 22 nt, Human
uuauauuaguuagacuugcugu

SEQ ID NO: 178913 - RNA, 19 nt, Human
cugucccucccagguauga

SEQ ID NO: 178914 - RNA, 20 nt, Human
aucaggauucuugcuuuguu

SEQ ID NO: 178915 - RNA, 22 nt, Human
agggauggagcccagcuguucu

SEQ ID NO: 178916 - RNA, 22 nt, Human
uacacuuucguuuguggauuag

SEQ ID NO: 178917 - RNA, 22 nt, Human
ucagucucaucaacucuauucc

SEQ ID NO: 178918 - RNA, 22 nt, Human
agaagcugcguuuauuuaaauc

SEQ ID NO: 178919 - RNA, 22 nt, Human
cagaguggcacucugcuggaug

SEQ ID NO: 178920 - RNA, 22 nt, Human
ucuccacacuuucucucccagg

SEQ ID NO: 178921 - RNA, 22 nt, Human
gaaaguauuuacauuaacaucu

SEQ ID NO: 178922 - RNA, 19 nt, Human
aggaggccaugccacuaga

SEQ ID NO: 178923 - RNA, 22 nt, Human
cagauaaauagacuuggucaga

SEQ ID NO: 178924 - RNA, 22 nt, Human
ucaggagcagcuguaggaaggg

SEQ ID NO: 178925 - RNA, 22 nt, Human
guccugugcaccgugggauguu

SEQ ID NO: 178926 - RNA, 22 nt, Human
uguaauuuccugauguuagaac

SEQ ID NO: 178927 - RNA, 22 nt, Human
cuugguuauacuccaggaacca

SEQ ID NO: 178928 - RNA, 22 nt, Human
agcugcaaguguugccuccuac

SEQ ID NO: 178929 - RNA, 22 nt, Human
agggaccagggguagcugagau

SEQ ID NO: 178930 - RNA, 22 nt, Human
cuggauguaaagggugaagaaa

SEQ ID NO: 178931 - RNA, 22 nt, Human
cuggcuggaggugagucacuga

SEQ ID NO: 178932 - RNA, 22 nt, Human
gacaugcaguucucaaggguag

SEQ ID NO: 178933 - RNA, 22 nt, Human
uguccccagagccuguuccugc

SEQ ID NO: 178934 - RNA, 22 nt, Human
aaucaggaugacugucauuuca

SEQ ID NO: 178935 - RNA, 22 nt, Human
aaaaugucugcuguugguuuau

SEQ ID NO: 178936 - RNA, 23 nt, Human
ggccucuguguucugcccacaug

SEQ ID NO: 178937 - RNA, 22 nt, Human
aggccugccuggagccuggcug

SEQ ID NO: 178938 - RNA, 22 nt, Human
aagcucaggcuggaccuggcuu

SEQ ID NO: 178939 - RNA, 22 nt, Human
cuucuuucccaggcauguuuua

SEQ ID NO: 178940 - RNA, 22 nt, Human
uucauagaucucaauuuugagg

SEQ ID NO: 178941 - RNA, 22 nt, Human
auucagugccaaggagaacuug

SEQ ID NO: 178942 - RNA, 21 nt, Human
agacacugguuuagcauucau

SEQ ID NO: 178943 - RNA, 22 nt, Human
cucagagaaaaggagcaagggu

SEQ ID NO: 178944 - RNA, 22 nt, Human
ugaggcaggaaguuauauaaug

SEQ ID NO: 178945 - RNA, 22 nt, Human
uucaguuuucccuccugcaggu

SEQ ID NO: 178946 - RNA, 22 nt, Human
cccugcagccggccagcucauu

SEQ ID NO: 178947 - RNA, 22 nt, Human
ccaggugugauuuggcaguguc

SEQ ID NO: 178948 - RNA, 22 nt, Human
agucuuauguuugugaagaacu

SEQ ID NO: 178949 - RNA, 22 nt, Human
accugucugcaugaucuaaaac

SEQ ID NO: 178950 - RNA, 22 nt, Human
ugaauaugugacuuugauuuca

SEQ ID NO: 178951 - RNA, 22 nt, Human
uagucaaaccucagaauacccc

SEQ ID NO: 178952 - RNA, 22 nt, Human
aggucagaaaaggagagcauug

SEQ ID NO: 178953 - RNA, 22 nt, Human
caggagccagaggcggauggag

SEQ ID NO: 178954 - RNA, 22 nt, Human
gaggacuaacuuggcagacgca

SEQ ID NO: 178955 - RNA, 22 nt, Human
ggcacgugccuaaggagcaggc

SEQ ID NO: 178956 - RNA, 22 nt, Human
uugcauuugcucauuugauaug

SEQ ID NO: 178957 - RNA, 22 nt, Human
auccuggguaaguuccuuuuaa

SEQ ID NO: 178958 - RNA, 22 nt, Human
gcuuuagaaauaucacugugga

SEQ ID NO: 178959 - RNA, 22 nt, Human
aacugguagcugauuaaguaua

SEQ ID NO: 178960 - RNA, 22 nt, Human
uccugaggcucacuuugaaugu

SEQ ID NO: 178961 - RNA, 22 nt, Human
ugccuguguggggucugccgcc

SEQ ID NO: 178962 - RNA, 22 nt, Human
cagcugcaugucuguggugguc

SEQ ID NO: 178963 - RNA, 22 nt, Human
ccucuggggugagugggccacu

SEQ ID NO: 178964 - RNA, 22 nt, Human
cuaaacaugcaagagcuucugg

SEQ ID NO: 178965 - RNA, 22 nt, Human
gacaauuagaucauuccuuuga

SEQ ID NO: 178966 - RNA, 22 nt, Human
cuggaggaccacagaagcuggu

SEQ ID NO: 178967 - RNA, 22 nt, Human
auacauacauguaugcacauac

SEQ ID NO: 178968 - RNA, 22 nt, Human
auaauaacaaugccagaugccu

SEQ ID NO: 178969 - RNA, 22 nt, Human
gaaggagagggucaaggauaau

SEQ ID NO: 178970 - RNA, 22 nt, Human
cagucccaaggaggaagcaguc

SEQ ID NO: 178971 - RNA, 22 nt, Human
ggagcugugcagugacuacaga

SEQ ID NO: 178972 - RNA, 22 nt, Human
aagaguuuaccagugcugcuuc

SEQ ID NO: 178973 - RNA, 22 nt, Human
aaaguacuaaugaauauuuugc

SEQ ID NO: 178974 - RNA, 22 nt, Human
cuuggacuggacccgaggaaug

SEQ ID NO: 178975 - RNA, 22 nt, Human
aagggggccacaccugguguga

SEQ ID NO: 178976 - RNA, 22 nt, Human
uggagcuggaagacagugauau

SEQ ID NO: 178977 - RNA, 22 nt, Human
ucuuuuccuucccuacagaucu

SEQ ID NO: 178978 - RNA, 22 nt, Human
uguaaagcaucucugucauaua

SEQ ID NO: 178979 - RNA, 22 nt, Human
gcucagcugcaccuggagagcc

SEQ ID NO: 178980 - RNA, 22 nt, Human
agggccugggucuguacuccuc

SEQ ID NO: 178981 - RNA, 19 nt, Human
aauaauguucaugagauug

SEQ ID NO: 178982 - RNA, 22 nt, Human
gcagcaggauggccaauugcca

SEQ ID NO: 178983 - RNA, 22 nt, Human
agaaucaacugaaaauugguga

SEQ ID NO: 178984 - RNA, 22 nt, Human
cuucagagcuuguuaaaacugu

SEQ ID NO: 178985 - RNA, 22 nt, Human
ccaggagcaaagaucacuggga

SEQ ID NO: 178986 - RNA, 22 nt, Human
acagucuugagcaucagccaga

SEQ ID NO: 178987 - RNA, 22 nt, Human
gccuggcugucuggcaagguuc

SEQ ID NO: 178988 - RNA, 22 nt, Human
gaaaacuauuggccuagaacaa

SEQ ID NO: 178989 - RNA, 22 nt, Human
caaaguccuagaacagugcuug

SEQ ID NO: 178990 - RNA, 22 nt, Human
gauuuacagcuauacccaaugg

SEQ ID NO: 178991 - RNA, 22 nt, Human
ugugaagguaagguuugcuuga

SEQ ID NO: 178992 - RNA, 22 nt, Human
cugugagacugauagggaagag

SEQ ID NO: 178993 - RNA, 22 nt, Human
uuaugaacaauuucuaggaaug

SEQ ID NO: 178994 - RNA, 22 nt, Human
gccuccugaagugcugggauua

SEQ ID NO: 178995 - RNA, 22 nt, Human
uucccaguuagucauuuuuaca

SEQ ID NO: 178996 - RNA, 23 nt, Human
ucucucuggcaaauuucacauau

SEQ ID NO: 178997 - RNA, 22 nt, Human
aaagacuaagaagaguauuauu

SEQ ID NO: 178998 - RNA, 22 nt, Human
gggcagcagaauuggacagaaa

SEQ ID NO: 178999 - RNA, 22 nt, Human
cauucugagcuaauaugcuuau

SEQ ID NO: 179000 - RNA, 22 nt, Human
gagcuuggcagugucacuaggg

SEQ ID NO: 179001 - RNA, 22 nt, Human
cccgagugucuacucacuccca

SEQ ID NO: 179002 - RNA, 23 nt, Human
ugggagcucaagggaggcugccc

SEQ ID NO: 179003 - RNA, 22 nt, Human
cagugccacuuaaugaggcugc

SEQ ID NO: 179004 - RNA, 22 nt, Human
aaggcauaggacaaaucaguga

SEQ ID NO: 179005 - RNA, 22 nt, Human
augcccugcucucgggaaggga

SEQ ID NO: 179006 - RNA, 22 nt, Human
agccggccauguggucuugugc

SEQ ID NO: 179007 - RNA, 22 nt, Human
uagcaagagugggcuuuguggg

SEQ ID NO: 179008 - RNA, 22 nt, Human
ugcagucucuaguuucugaaug

SEQ ID NO: 179009 - RNA, 22 nt, Human
cuccuggcucugccacuuacua

SEQ ID NO: 179010 - RNA, 22 nt, Human
agaggcaccaucuggaacagcc

SEQ ID NO: 179011 - RNA, 22 nt, Human
auuccaaagccugaauaaugga

SEQ ID NO: 179012 - RNA, 23 nt, Human
aggcaggcaguucagcuguuguu

SEQ ID NO: 179013 - RNA, 22 nt, Human
uuuaacacuaguuucuuuaacu

SEQ ID NO: 179014 - RNA, 17 nt, Human
ugaaagaaucagggaga

SEQ ID NO: 179015 - RNA, 22 nt, Human
uugaccuuggcuuuuaaaauau

SEQ ID NO: 179016 - RNA, 22 nt, Human
ugagccaggcccagugggguca

SEQ ID NO: 179017 - RNA, 19 nt, Human
acagugucuguauauaaau

SEQ ID NO: 179018 - RNA, 22 nt, Human
cugguuuagugaaauaggccag

SEQ ID NO: 179019 - RNA, 22 nt, Human
gagucagauugcagacagggcu

SEQ ID NO: 179020 - RNA, 22 nt, Human
cuguggaaagagccuuuggagg

SEQ ID NO: 179021 - RNA, 22 nt, Human
uccuccugcuguuagucuugaa

SEQ ID NO: 179022 - RNA, 22 nt, Human
uauaauauuccuuguuguaggu

SEQ ID NO: 179023 - RNA, 22 nt, Human
ccuggcagacagcacugaagcu

SEQ ID NO: 179024 - RNA, 22 nt, Human
uuuaucuucugcaguucuggcu

SEQ ID NO: 179025 - RNA, 22 nt, Human
agcuuaaacucuuugaaguuau

SEQ ID NO: 179026 - RNA, 22 nt, Human
aacauuugcaugcuuuauuaga

SEQ ID NO: 179027 - RNA, 22 nt, Human
uuuucauuagaaugacugagaa

SEQ ID NO: 179028 - RNA, 22 nt, Human
aagccuuggggcuccucuguau

SEQ ID NO: 179029 - RNA, 22 nt, Human
aggccaggccuuucuccauucc

SEQ ID NO: 179030 - RNA, 20 nt, Human
gaagacacagaguucaucuc

SEQ ID NO: 179031 - RNA, 22 nt, Human
gagguguccuagaaguauucag

SEQ ID NO: 179032 - RNA, 22 nt, Human
gaaugaagcaggucacacaguu

SEQ ID NO: 179033 - RNA, 22 nt, Human
auggcagccugaacacuuccug

SEQ ID NO: 179034 - RNA, 22 nt, Human
ugguauuacuucuagacacaag

SEQ ID NO: 179035 - RNA, 22 nt, Human
uagcaaagaagauauuauugca

SEQ ID NO: 179036 - RNA, 22 nt, Human
aacagcagggaaauuccaaguc

SEQ ID NO: 179037 - RNA, 22 nt, Human
ggcaacucuucuugcaaugggg

SEQ ID NO: 179038 - RNA, 22 nt, Human
ugcaauaaggaguaauaguaaa

SEQ ID NO: 179039 - RNA, 22 nt, Human
aguuagaauggauguugagagc

SEQ ID NO: 179040 - RNA, 22 nt, Human
caggacagagcccagacugugu

SEQ ID NO: 179041 - RNA, 22 nt, Human
agugugagaugauugaggagca

SEQ ID NO: 179042 - RNA, 22 nt, Human
uccugaccucuugcucugaccu

SEQ ID NO: 179043 - RNA, 22 nt, Human
gucuacacugaauuuccacaga

SEQ ID NO: 179044 - RNA, 22 nt, Human
guucuauucauugcuccacgag

SEQ ID NO: 179045 - RNA, 22 nt, Human
aagacaggaacauagcaaaucc

SEQ ID NO: 179046 - RNA, 22 nt, Human
ucuccagguaaauggcauccug

SEQ ID NO: 179047 - RNA, 23 nt, Human
ggccacugaauuuucugcaucuu

SEQ ID NO: 179048 - RNA, 22 nt, Human
uguggcugcaggcgauggagga

SEQ ID NO: 179049 - RNA, 22 nt, Human
gaacauaauuaaauguccuggg

SEQ ID NO: 179050 - RNA, 22 nt, Human
uggcuccuuccgcagcaugccu

SEQ ID NO: 179051 - RNA, 22 nt, Human
auuguaaauagugccacaauaa

SEQ ID NO: 179052 - RNA, 22 nt, Human
aaugggcucacaagaccugaau

SEQ ID NO: 179053 - RNA, 22 nt, Human
accugcacagccccagaaugcc

SEQ ID NO: 179054 - RNA, 22 nt, Human
gcuggccaggaagagucucaga

SEQ ID NO: 179055 - RNA, 22 nt, Human
aaagcaggcagcaggcuggauu

SEQ ID NO: 179056 - RNA, 22 nt, Human
aagcaccugcaguugacaaaaa

SEQ ID NO: 179057 - RNA, 22 nt, Human
acaggacucucugaaaauguac

SEQ ID NO: 179058 - RNA, 22 nt, Human
cacacaugguagcagguacaag

SEQ ID NO: 179059 - RNA, 22 nt, Human
agggcucccgugaggugacugc

SEQ ID NO: 179060 - RNA, 22 nt, Human
uucuaauuaaaucuacgcuagg

SEQ ID NO: 179061 - RNA, 22 nt, Human
uaccuucaccagcgaauguuug

SEQ ID NO: 179062 - RNA, 22 nt, Human
aagaguuucuuacuggcaucua

SEQ ID NO: 179063 - RNA, 22 nt, Human
agagcagaggcauggccguggg

SEQ ID NO: 179064 - RNA, 18 nt, Human
uucuggcucacucaugcu

SEQ ID NO: 179065 - RNA, 22 nt, Human
ggaaaucaagaagcagaugagu

SEQ ID NO: 179066 - RNA, 21 nt, Human
uagaucaugguauucuuuggc

SEQ ID NO: 179067 - RNA, 19 nt, Human
ugaggccaaggucacagau

SEQ ID NO: 179068 - RNA, 22 nt, Human
uuccaaguccagccaggccaaa

SEQ ID NO: 179069 - RNA, 22 nt, Human
caaaucugagucuacaauuuua

SEQ ID NO: 179070 - RNA, 22 nt, Human
caugaaggaauuaagguaagga

SEQ ID NO: 179071 - RNA, 22 nt, Human
gcuguaggaaugacauguaccu

SEQ ID NO: 179072 - RNA, 22 nt, Human
ugagccaaggccucaagaauuu

SEQ ID NO: 179073 - RNA, 22 nt, Human
cagguggucaggcagaugggcu

SEQ ID NO: 179074 - RNA, 23 nt, Human
ccagugauugccuggaaggaggu

SEQ ID NO: 179075 - RNA, 19 nt, Human
caagugaagccugggaugg

SEQ ID NO: 179076 - RNA, 22 nt, Human
accugggaaaaggaguggccau

SEQ ID NO: 179077 - RNA, 22 nt, Human
aguggcugagugacugugacuc

SEQ ID NO: 179078 - RNA, 20 nt, Human
cagucccaauccagggccag

SEQ ID NO: 179079 - RNA, 22 nt, Human
uguuuauaccuugguauaacca

SEQ ID NO: 179080 - RNA, 22 nt, Human
ggacugggaaucagggagaugc

SEQ ID NO: 179081 - RNA, 22 nt, Human
cagcccugggucccugcccugg

SEQ ID NO: 179082 - RNA, 22 nt, Human
gcugggcacugucccauaggcu

SEQ ID NO: 179083 - RNA, 22 nt, Human
aaacugaauucccaagggcaug

SEQ ID NO: 179084 - RNA, 22 nt, Human
agugcagccgagaucaggugcu

SEQ ID NO: 179085 - RNA, 22 nt, Human
uuaaaaccuagagaucagacag

SEQ ID NO: 179086 - RNA, 22 nt, Human
aaaguauucaaaaauauuuggu

SEQ ID NO: 179087 - RNA, 22 nt, Human
ugaaaugaaugugauucgauag

SEQ ID NO: 179088 - RNA, 22 nt, Human
cugccaggcagcagagggagaa

SEQ ID NO: 179089 - RNA, 21 nt, Human
ucucugagaggucugcuuaga

SEQ ID NO: 179090 - RNA, 22 nt, Human
cacugguagcaguuaaguuagg

SEQ ID NO: 179091 - RNA, 22 nt, Human
uaggaagaugaguaucaacuug

SEQ ID NO: 179092 - RNA, 22 nt, Human
uuccugugauauuagccacugu

SEQ ID NO: 179093 - RNA, 21 nt, Human
agugucauuugaucauuguua

SEQ ID NO: 179094 - RNA, 22 nt, Human
ugagcuucaaaauaugugaauc

SEQ ID NO: 179095 - RNA, 22 nt, Human
cuccuucugaggcucuggguuc

SEQ ID NO: 179096 - RNA, 22 nt, Human
caggaacagcaccaggagcuag

SEQ ID NO: 179097 - RNA, 22 nt, Human
ugacaaagugaggucuucagua

SEQ ID NO: 179098 - RNA, 22 nt, Human
aggcccugggagcagagaugca

SEQ ID NO: 179099 - RNA, 22 nt, Human
gugggggacccaggugcugucc

SEQ ID NO: 179100 - RNA, 17 nt, Human
gcuucuggagcuucugu

SEQ ID NO: 179101 - RNA, 22 nt, Human
caggcugcagcagcaguggccc

SEQ ID NO: 179102 - RNA, 22 nt, Human
ucccagagacagagccuccucc

SEQ ID NO: 179103 - RNA, 23 nt, Human
uccagggcaguggcugggucugc

SEQ ID NO: 179104 - RNA, 22 nt, Human
ccucagggaaugggaggcuggg

SEQ ID NO: 179105 - RNA, 22 nt, Human
gccagaagacuggagucagcug

SEQ ID NO: 179106 - RNA, 22 nt, Human
aguugacucucaagauccuguu

SEQ ID NO: 179107 - RNA, 22 nt, Human
agcuggagaauguggaugaucc

SEQ ID NO: 179108 - RNA, 22 nt, Human
aaacaguuuucucauuuagugu

SEQ ID NO: 179109 - RNA, 22 nt, Human
cucugggcaaagaugccucauc

SEQ ID NO: 179110 - RNA, 22 nt, Human
ugccaucuucucuggggauguu

SEQ ID NO: 179111 - RNA, 22 nt, Human
cucaagacugaucgcaguggaa

SEQ ID NO: 179112 - RNA, 22 nt, Human
ugagcccuaauuuacaacaucu

SEQ ID NO: 179113 - RNA, 22 nt, Human
gugcugggauuacaggugugag

SEQ ID NO: 179114 - RNA, 22 nt, Human
acaugcucuccaaggacagagc

SEQ ID NO: 179115 - RNA, 22 nt, Human
ggcugccuacuuucccagaguu

SEQ ID NO: 179116 - RNA, 22 nt, Human
agagcagagggcucugggacaa

SEQ ID NO: 179117 - RNA, 22 nt, Human
ggagagagaccuccaugcccag

SEQ ID NO: 179118 - RNA, 22 nt, Human
uacccagcuucaagucaggacu

SEQ ID NO: 179119 - RNA, 22 nt, Human
caggaaacauaugugcuugagg

SEQ ID NO: 179120 - RNA, 22 nt, Human
uucccucuuucacugugauuuu

SEQ ID NO: 179121 - RNA, 23 nt, Human
ccuggcacacaaggggugcugca

SEQ ID NO: 179122 - RNA, 19 nt, Human
uccagccccucugugugug

SEQ ID NO: 179123 - RNA, 22 nt, Human
aagcuguuguucauccugaauu

SEQ ID NO: 179124 - RNA, 22 nt, Human
uuccuccuucccauuccugggg

SEQ ID NO: 179125 - RNA, 22 nt, Human
uuccagcagcgugggagaagua

SEQ ID NO: 179126 - RNA, 22 nt, Human
auaugaauuuggcuggaaaggu

SEQ ID NO: 179127 - RNA, 22 nt, Human
ccugccugcaaaaugggacaag

SEQ ID NO: 179128 - RNA, 22 nt, Human
uaggaaauugacaccugcuuga

SEQ ID NO: 179129 - RNA, 23 nt, Human
cucagagguguuuuucacuuacu

SEQ ID NO: 179130 - RNA, 18 nt, Human
gcagugaagaaagagcuu

SEQ ID NO: 179131 - RNA, 22 nt, Human
agcugcccuuuaugaugcugaa

SEQ ID NO: 179132 - RNA, 19 nt, Human
acacaccagugccugugac

SEQ ID NO: 179133 - RNA, 22 nt, Human
acugagagcguguacaaacuua

SEQ ID NO: 179134 - RNA, 22 nt, Human
gaaacuagauguauuagagauu

SEQ ID NO: 179135 - RNA, 22 nt, Human
uggcaggugcacuuuugguuuc

SEQ ID NO: 179136 - RNA, 19 nt, Human
gguuauuugaggguuaaga

SEQ ID NO: 179137 - RNA, 22 nt, Human
agcuaggagauuuugugaggcu

SEQ ID NO: 179138 - RNA, 22 nt, Human
auauugagaugaggauauuaac

SEQ ID NO: 179139 - RNA, 22 nt, Human
gcugggcucagaccuagugaac

SEQ ID NO: 179140 - RNA, 18 nt, Human
cggcagagugcuucuagc

SEQ ID NO: 179141 - RNA, 22 nt, Human
guggcaggagagacacagccau

SEQ ID NO: 179142 - RNA, 22 nt, Human
ucucaaauuuguuagauaaaau

SEQ ID NO: 179143 - RNA, 22 nt, Human
gagggccaacuagcaccacuuu

SEQ ID NO: 179144 - RNA, 22 nt, Human
gcucugaggcugggagcacucu

SEQ ID NO: 179145 - RNA, 22 nt, Human
acaauucugaugguuucccagu

SEQ ID NO: 179146 - RNA, 22 nt, Human
uggcuuccuaggagcccgugcu

SEQ ID NO: 179147 - RNA, 22 nt, Human
aucugccugagucuagguuuuc

SEQ ID NO: 179148 - RNA, 22 nt, Human
ugagggucuggaaucugggcuu

SEQ ID NO: 179149 - RNA, 22 nt, Human
agggucagagucaggugcagua

SEQ ID NO: 179150 - RNA, 22 nt, Human
uuucuaguaaaagcuaauuacc

SEQ ID NO: 179151 - RNA, 22 nt, Human
ugagcccuugacaucgcccacu

SEQ ID NO: 179152 - RNA, 21 nt, Human
gagaggccugggcccgugagc

SEQ ID NO: 179153 - RNA, 22 nt, Human
augaggcaaucaugguccaguu

SEQ ID NO: 179154 - RNA, 22 nt, Human
ggaacugaaugucucgguauaa

SEQ ID NO: 179155 - RNA, 22 nt, Human
aaccaaguuuauuccaaguuac

SEQ ID NO: 179156 - RNA, 22 nt, Human
agcaggccacugcagcuggagc

SEQ ID NO: 179157 - RNA, 22 nt, Human
ucagucuuucgaauucagccag

SEQ ID NO: 179158 - RNA, 19 nt, Human
ucucaauucuccccacugc

SEQ ID NO: 179159 - RNA, 22 nt, Human
ccuccucugggaagauucagag

SEQ ID NO: 179160 - RNA, 22 nt, Human
ugagcuuuguggguaaagagag

SEQ ID NO: 179161 - RNA, 22 nt, Human
aucagagugggucuggcaugag

SEQ ID NO: 179162 - RNA, 22 nt, Human
uacagugcgauuuuuaggccuc

SEQ ID NO: 179163 - RNA, 22 nt, Human
agcccagcagaaaguccagccu

SEQ ID NO: 179164 - RNA, 22 nt, Human
agcugcaauucuggacauaguc

SEQ ID NO: 179165 - RNA, 22 nt, Human
ucccugggacucagacauggaa

SEQ ID NO: 179166 - RNA, 22 nt, Human
auguauuugaaauuugagacau

SEQ ID NO: 179167 - RNA, 23 nt, Human
uaucuuuuucaauguuggaaaua

SEQ ID NO: 179168 - RNA, 22 nt, Human
aaaguucagugccuucuauaca

SEQ ID NO: 179169 - RNA, 22 nt, Human
agaaaucaugucuuauuucuau

SEQ ID NO: 179170 - RNA, 22 nt, Human
cagugcagacguggagggggca

SEQ ID NO: 179171 - RNA, 22 nt, Human
ucagucaggagaugccagagau

SEQ ID NO: 179172 - RNA, 22 nt, Human
uaugcaaaguccuaagaaagaa

SEQ ID NO: 179173 - RNA, 22 nt, Human
auuugcuggugaauguauagcu

SEQ ID NO: 179174 - RNA, 22 nt, Human
aggaggccuacgcacaugucua

SEQ ID NO: 179175 - RNA, 22 nt, Human
uuguuacacauaauaacauuuu

SEQ ID NO: 179176 - RNA, 22 nt, Human
uugugcaaggcucuuggaaugu

SEQ ID NO: 179177 - RNA, 22 nt, Human
cugagacacaguggcugaaaag

SEQ ID NO: 179178 - RNA, 22 nt, Human
gcugcccucccagggcaagcuu

SEQ ID NO: 179179 - RNA, 23 nt, Human
agacacauaggagcagcuauugg

SEQ ID NO: 179180 - RNA, 22 nt, Human
uaagaugacuacuuaccacuga

SEQ ID NO: 179181 - RNA, 22 nt, Human
uggcuucauucuccugugaaua

SEQ ID NO: 179182 - RNA, 19 nt, Human
uguggcugagcacuccuua

SEQ ID NO: 179183 - RNA, 22 nt, Human
uugagggagaaagccgaggugu

SEQ ID NO: 179184 - RNA, 22 nt, Human
guccaggccaugguggacacag

SEQ ID NO: 179185 - RNA, 22 nt, Human
uuucuacaauuuuuggcaugag

SEQ ID NO: 179186 - RNA, 22 nt, Human
auagggcugccaucacagaaga

SEQ ID NO: 179187 - RNA, 22 nt, Human
ucagagaaaugacaauauauag

SEQ ID NO: 179188 - RNA, 22 nt, Human
cauguacaaaaggcaaaugccu

SEQ ID NO: 179189 - RNA, 22 nt, Human
aagcauuucagguagagauauu

SEQ ID NO: 179190 - RNA, 22 nt, Human
cugagcagucugacucaagcua

SEQ ID NO: 179191 - RNA, 22 nt, Human
gggcuggaggagauccagaggc

SEQ ID NO: 179192 - RNA, 22 nt, Human
ccagaagauggcucaaaccaug

SEQ ID NO: 179193 - RNA, 22 nt, Human
guacaaauacauucugaaggua

SEQ ID NO: 179194 - RNA, 20 nt, Human
uggcaggacuggcuccaccc

SEQ ID NO: 179195 - RNA, 22 nt, Human
cuggcagcauuaacagagagca

SEQ ID NO: 179196 - RNA, 22 nt, Human
gcugacaguuguaccugccccu

SEQ ID NO: 179197 - RNA, 22 nt, Human
uugagacagugggguguugccg

SEQ ID NO: 179198 - RNA, 22 nt, Human
ccuuguuuuggaaccaaaggau

SEQ ID NO: 179199 - RNA, 22 nt, Human
gcaccagcugcuggguucuaga

SEQ ID NO: 179200 - RNA, 22 nt, Human
ggacaggccuggcacaguacug

SEQ ID NO: 179201 - RNA, 22 nt, Human
acagccugagaguggagcuggc

SEQ ID NO: 179202 - RNA, 20 nt, Human
ucuuugugucagauggacag

SEQ ID NO: 179203 - RNA, 19 nt, Human
ggcugugguggugccuugc

SEQ ID NO: 179204 - RNA, 22 nt, Human
uuuuccaaauuagaaguagaga

SEQ ID NO: 179205 - RNA, 22 nt, Human
ggcuccaggcuccuauuucacu

SEQ ID NO: 179206 - RNA, 22 nt, Human
cugugggauucaugacauuaau

SEQ ID NO: 179207 - RNA, 22 nt, Human
ggaggagagagguugcaaacac

SEQ ID NO: 179208 - RNA, 22 nt, Human
ugaggcaggaggauugcaggau

SEQ ID NO: 179209 - RNA, 22 nt, Human
ggacucagcagccaggaguggc

SEQ ID NO: 179210 - RNA, 20 nt, Human
gcccucagucuugucuuuau

SEQ ID NO: 179211 - RNA, 22 nt, Human
gaggagagagggacugucugca

SEQ ID NO: 179212 - RNA, 18 nt, Human
gccaggcaggguggggaa

SEQ ID NO: 179213 - RNA, 22 nt, Human
guacauuuuacuuuguuugaau

SEQ ID NO: 179214 - RNA, 22 nt, Human
ugccugccuaggaagcugugaa

SEQ ID NO: 179215 - RNA, 22 nt, Human
auguuuuacccuuugcacaaac

SEQ ID NO: 179216 - RNA, 19 nt, Human
gacagugcaguuguaguac

SEQ ID NO: 179217 - RNA, 22 nt, Human
uccugaggaaugugaagagaac

SEQ ID NO: 179218 - RNA, 22 nt, Human
aagcacaugagcuauucaugcu

SEQ ID NO: 179219 - RNA, 22 nt, Human
acagucuuugcaaaguccuggu

SEQ ID NO: 179220 - RNA, 22 nt, Human
gccucugucauagcucauguga

SEQ ID NO: 179221 - RNA, 22 nt, Human
cuuguauucuuccacuuaagau

SEQ ID NO: 179222 - RNA, 23 nt, Human
ggcugggagcuccgggugcacgu

SEQ ID NO: 179223 - RNA, 22 nt, Human
uccugaggacccugucaggggc

SEQ ID NO: 179224 - RNA, 22 nt, Human
augcccuggggcuaccucugag

SEQ ID NO: 179225 - RNA, 22 nt, Human
ccagcucuggcuucuugcuggg

SEQ ID NO: 179226 - RNA, 22 nt, Human
ucugcuguguugaaugauuggu

SEQ ID NO: 179227 - RNA, 22 nt, Human
acucagaguuccugugcauagu

SEQ ID NO: 179228 - RNA, 20 nt, Human
agcaccagugggggcagccc

SEQ ID NO: 179229 - RNA, 22 nt, Human
cucaccacagagccuguccagc

SEQ ID NO: 179230 - RNA, 22 nt, Human
ggccucugccccagccacaccu

SEQ ID NO: 179231 - RNA, 22 nt, Human
uuacagguuguguauucaguga

SEQ ID NO: 179232 - RNA, 22 nt, Human
agaagccagucgcucucccgca

SEQ ID NO: 179233 - RNA, 22 nt, Human
cauguuuuguguacagaauauu

SEQ ID NO: 179234 - RNA, 22 nt, Human
ccuggcucuguccucgcgcaaa

SEQ ID NO: 179235 - RNA, 22 nt, Human
uucuguguucugugcaaugagc

SEQ ID NO: 179236 - RNA, 22 nt, Human
ggugaggaaagauggugacagu

SEQ ID NO: 179237 - RNA, 22 nt, Human
cugucuguucagauucauuacu

SEQ ID NO: 179238 - RNA, 22 nt, Human
cccacagggcugcugauggcag

SEQ ID NO: 179239 - RNA, 22 nt, Human
aacagcauaaguauuuauuuca

SEQ ID NO: 179240 - RNA, 22 nt, Human
ccuuuguucacuggagagugga

SEQ ID NO: 179241 - RNA, 22 nt, Human
acagaugaggcccaucagucug

SEQ ID NO: 179242 - RNA, 22 nt, Human
caagacaugcaauugccacuuu

SEQ ID NO: 179243 - RNA, 23 nt, Human
cagcuuucagggcuuuagggaag

SEQ ID NO: 179244 - RNA, 22 nt, Human
uagagaaauaagcuuugccuug

SEQ ID NO: 179245 - RNA, 23 nt, Human
aaguuaguuucaauaaagcaauu

SEQ ID NO: 179246 - RNA, 22 nt, Human
auaaaugaacauucacagagcu

SEQ ID NO: 179247 - RNA, 22 nt, Human
agaguggcuucuuugacaugcu

SEQ ID NO: 179248 - RNA, 22 nt, Human
aagcuguugaaguaauucagcc

SEQ ID NO: 179249 - RNA, 22 nt, Human
ugaggcugagauaucagggagg

SEQ ID NO: 179250 - RNA, 22 nt, Human
ugucuacuugggcucuacagca

SEQ ID NO: 179251 - RNA, 22 nt, Human
gcugcgagcucuuguucugaga

SEQ ID NO: 179252 - RNA, 22 nt, Human
gggggcugaggcuguucugagg

SEQ ID NO: 179253 - RNA, 22 nt, Human
aauuuacaggugcacucgccau

SEQ ID NO: 179254 - RNA, 22 nt, Human
auguacaauucuccuugguagg

SEQ ID NO: 179255 - RNA, 22 nt, Human
cagcaacaugugguaguguagg

SEQ ID NO: 179256 - RNA, 22 nt, Human
uucuuuugcaagacuauugauu

SEQ ID NO: 179257 - RNA, 22 nt, Human
gaaguucaaugucagcaucuau

SEQ ID NO: 179258 - RNA, 22 nt, Human
guggcuucuucuugggagcugc

SEQ ID NO: 179259 - RNA, 15 nt, Human
uuggaggauguagua

SEQ ID NO: 179260 - RNA, 22 nt, Human
ucuggcuuuccuggagcaagaa

SEQ ID NO: 179261 - RNA, 22 nt, Human
gaugauuuugaugcaguaaaga

SEQ ID NO: 179262 - RNA, 20 nt, Human
aguaggggaaugcaagagca

SEQ ID NO: 179263 - RNA, 16 nt, Human
ccagguggggcuguga

SEQ ID NO: 179264 - RNA, 22 nt, Human
ucaucuguucauacacaugcgu

SEQ ID NO: 179265 - RNA, 22 nt, Human
agugaggcaaagugagaggcag

SEQ ID NO: 179266 - RNA, 22 nt, Human
uagaacuucuuacagcuaaguu

SEQ ID NO: 179267 - RNA, 21 nt, Human
ucaggaagagcuucucccacu

SEQ ID NO: 179268 - RNA, 22 nt, Human
acacaucucucuuugaggagug

SEQ ID NO: 179269 - RNA, 20 nt, Human
uucaugggagcaaagaggcc

SEQ ID NO: 179270 - RNA, 22 nt, Human
cagguccucgggggaggccggc

SEQ ID NO: 179271 - RNA, 22 nt, Human
guuuagaagccaagauuugggu

SEQ ID NO: 179272 - RNA, 22 nt, Human
gucccagggcaaggcuguuucu

SEQ ID NO: 179273 - RNA, 22 nt, Human
guguccauucacugcaacacuu

SEQ ID NO: 179274 - RNA, 22 nt, Human
gcccugugcgcugaguucaggg

SEQ ID NO: 179275 - RNA, 22 nt, Human
ccagugcugaaugaggaggucu

SEQ ID NO: 179276 - RNA, 22 nt, Human
agugaugugggagaguauagcu

SEQ ID NO: 179277 - RNA, 22 nt, Human
gcagccacagaggagggaugca

SEQ ID NO: 179278 - RNA, 22 nt, Human
ugggaaggugauuuuccaaaag

SEQ ID NO: 179279 - RNA, 22 nt, Human
uaaggacaaucagguuaguagc

SEQ ID NO: 179280 - RNA, 22 nt, Human
gacauguugaagaauauuugga

SEQ ID NO: 179281 - RNA, 22 nt, Human
gucacaugccagugcacacagg

SEQ ID NO: 179282 - RNA, 19 nt, Human
cucagagaggggcagugcc

SEQ ID NO: 179283 - RNA, 22 nt, Human
uucuuucaauagcuggcauaug

SEQ ID NO: 179284 - RNA, 22 nt, Human
gcaggccagcugugcagauggg

SEQ ID NO: 179285 - RNA, 22 nt, Human
agggugccugcugcagguucag

SEQ ID NO: 179286 - RNA, 22 nt, Human
ccagagaguaaacauuuuccgg

SEQ ID NO: 179287 - RNA, 22 nt, Human
uccaggaguccuggguggcccc

SEQ ID NO: 179288 - RNA, 20 nt, Human
agugucuggauuuuguaacc

SEQ ID NO: 179289 - RNA, 22 nt, Human
ggagugaaagguaaguugagcu

SEQ ID NO: 179290 - RNA, 22 nt, Human
cugaggagauccccccagaagu

SEQ ID NO: 179291 - RNA, 22 nt, Human
cagagcccugggcacaugguag

SEQ ID NO: 179292 - RNA, 22 nt, Human
ucucagagaucuuucugcaugu

SEQ ID NO: 179293 - RNA, 22 nt, Human
agagacaagaaauaccugggac

SEQ ID NO: 179294 - RNA, 23 nt, Human
gcugggcuuacucuuucagugag

SEQ ID NO: 179295 - RNA, 22 nt, Human
uucuuacagcccuauuacuaaa

SEQ ID NO: 179296 - RNA, 22 nt, Human
cagagagaaucuuggcagcuga

SEQ ID NO: 179297 - RNA, 22 nt, Human
uugcccugucaguagaagugca

SEQ ID NO: 179298 - RNA, 19 nt, Human
uacaaaggaggauguaaaa

SEQ ID NO: 179299 - RNA, 22 nt, Human
cagaaguuugcaauuguuuauu

SEQ ID NO: 179300 - RNA, 22 nt, Human
cuauuuucccauaugguugaca

SEQ ID NO: 179301 - RNA, 22 nt, Human
uaaagauaagacaucaacugag

SEQ ID NO: 179302 - RNA, 22 nt, Human
gucuggcuguuccugccuguga

SEQ ID NO: 179303 - RNA, 22 nt, Human
uaugcagugguaucauuuuaaa

SEQ ID NO: 179304 - RNA, 22 nt, Human
uguuuugguagauugauuaugg

SEQ ID NO: 179305 - RNA, 22 nt, Human
gagcugugacacgcagcccagg

SEQ ID NO: 179306 - RNA, 22 nt, Human
ggagcccuucuauuccauggag

SEQ ID NO: 179307 - RNA, 22 nt, Human
aggaauguaacaggaguaaaaa

SEQ ID NO: 179308 - RNA, 22 nt, Human
cugugauggucaggcccuaucu

SEQ ID NO: 179309 - RNA, 22 nt, Human
cugcccugcuggagaucacagu

SEQ ID NO: 179310 - RNA, 22 nt, Human
gugcuucuccguucugcagcac

SEQ ID NO: 179311 - RNA, 22 nt, Human
aucuuuaggcaaguuacuuaac

SEQ ID NO: 179312 - RNA, 22 nt, Human
gcuuuggaacuuaaauccuugg

SEQ ID NO: 179313 - RNA, 22 nt, Human
uggcagcugaauggcuggaugg

SEQ ID NO: 179314 - RNA, 22 nt, Human
ggucacaugagaugcugcccuc

SEQ ID NO: 179315 - RNA, 22 nt, Human
augugucuaauuccaggagcac

SEQ ID NO: 179316 - RNA, 22 nt, Human
gagcacagaaggagaaauaugg

SEQ ID NO: 179317 - RNA, 22 nt, Human
uucuggcuucaucugacaagcc

SEQ ID NO: 179318 - RNA, 22 nt, Human
ucuucccagaccuuacauguga

SEQ ID NO: 179319 - RNA, 22 nt, Human
gcuggaguccaguggcaugauc

SEQ ID NO: 179320 - RNA, 17 nt, Human
uucaaugauuaaugcau

SEQ ID NO: 179321 - RNA, 22 nt, Human
uccuucagaaccugugauggaa

SEQ ID NO: 179322 - RNA, 19 nt, Human
cucucacucgccacauccu

SEQ ID NO: 179323 - RNA, 22 nt, Human
uuauacacugcagaaccagcau

SEQ ID NO: 179324 - RNA, 22 nt, Human
caugagagauccuucaugagag

SEQ ID NO: 179325 - RNA, 22 nt, Human
gaggcagagguuguugcaguga

SEQ ID NO: 179326 - RNA, 22 nt, Human
cagguccuuguuuguaaagcag

SEQ ID NO: 179327 - RNA, 14 nt, Human
gcagguggaucacu

SEQ ID NO: 179328 - RNA, 22 nt, Human
uggaggaggaugcauuuguugu

SEQ ID NO: 179329 - RNA, 22 nt, Human
aggcuucacauuuucuaggccu

SEQ ID NO: 179330 - RNA, 23 nt, Human
cggcugcucggccgaguccucgg

SEQ ID NO: 179331 - RNA, 22 nt, Human
ccagagagauugcuucuaaaga

SEQ ID NO: 179332 - RNA, 22 nt, Human
gccauauacccacugucuccau

SEQ ID NO: 179333 - RNA, 22 nt, Human
ggcuucagaggggagguagugc

SEQ ID NO: 179334 - RNA, 22 nt, Human
cuccauggaaccggggcugcuu

SEQ ID NO: 179335 - RNA, 22 nt, Human
aaugcuuauggguuccauaaua

SEQ ID NO: 179336 - RNA, 23 nt, Human
gagcucugcacuaggcccuggga

SEQ ID NO: 179337 - RNA, 22 nt, Human
gccaccagcagaaaaggggcca

SEQ ID NO: 179338 - RNA, 22 nt, Human
uauuucacuauucucuguaacu

SEQ ID NO: 179339 - RNA, 22 nt, Human
ugggcuuccuggagccugugcu

SEQ ID NO: 179340 - RNA, 22 nt, Human
aacauuuauugagcaccuacug

SEQ ID NO: 179341 - RNA, 22 nt, Human
aagggcugggucugguuaaccc

SEQ ID NO: 179342 - RNA, 22 nt, Human
gauaaaagaggaaauuuguuca

SEQ ID NO: 179343 - RNA, 22 nt, Human
aagccaguccucuacugggcac

SEQ ID NO: 179344 - RNA, 22 nt, Human
gccuccucuugagggucaggga

SEQ ID NO: 179345 - RNA, 21 nt, Human
aaaauguuuccuuguugguua

SEQ ID NO: 179346 - RNA, 22 nt, Human
uaauuauuaugacaacaauugc

SEQ ID NO: 179347 - RNA, 22 nt, Human
uuuuauagcugaauaguauucc

SEQ ID NO: 179348 - RNA, 22 nt, Human
guuagacaugcagaaucucagg

SEQ ID NO: 179349 - RNA, 22 nt, Human
uuuuuaucuuguaugugucucu

SEQ ID NO: 179350 - RNA, 22 nt, Human
ucuccugggcuugguugaaguu

SEQ ID NO: 179351 - RNA, 22 nt, Human
ucugagcuucugccugcugcaa

SEQ ID NO: 179352 - RNA, 20 nt, Human
cacccuacggccucaccucc

SEQ ID NO: 179353 - RNA, 20 nt, Human
uggcuucauaaugguuucug

SEQ ID NO: 179354 - RNA, 22 nt, Human
ugaggcucacgaacagaagacu

SEQ ID NO: 179355 - RNA, 22 nt, Human
cacaugugcaaauacugaggcu

SEQ ID NO: 179356 - RNA, 22 nt, Human
ccagaggaugcuggucagccuc

SEQ ID NO: 179357 - RNA, 22 nt, Human
aaaaccucaguucugcucuuaa

SEQ ID NO: 179358 - RNA, 22 nt, Human
aucaugaaucuuguguucuaug

SEQ ID NO: 179359 - RNA, 22 nt, Human
guccaggucuggacccugagcc

SEQ ID NO: 179360 - RNA, 22 nt, Human
uguuacaguacuacaauucugc

SEQ ID NO: 179361 - RNA, 22 nt, Human
ucagggcaagauugguuaauaa

SEQ ID NO: 179362 - RNA, 20 nt, Human
augugagggguugaaguggg

SEQ ID NO: 179363 - RNA, 22 nt, Human
gagcuccagaguuagacacccg

SEQ ID NO: 179364 - RNA, 22 nt, Human
gucuccugagacugcagucacc

SEQ ID NO: 179365 - RNA, 22 nt, Human
auauucaaauuacauuuacuaa

SEQ ID NO: 179366 - RNA, 22 nt, Human
gaaccuguuuauguuaccugcg

SEQ ID NO: 179367 - RNA, 22 nt, Human
ggggcugagucagugggaagag

SEQ ID NO: 179368 - RNA, 22 nt, Human
uaggagcuuuuggaguccugug

SEQ ID NO: 179369 - RNA, 22 nt, Human
auuauuucucacucacauaaua

SEQ ID NO: 179370 - RNA, 21 nt, Human
cucaggaucuuauauauuagu

SEQ ID NO: 179371 - RNA, 22 nt, Human
aacauucuauuuugcuaaaaca

SEQ ID NO: 179372 - RNA, 22 nt, Human
uaaauucuacaacuucaaagau

SEQ ID NO: 179373 - RNA, 22 nt, Human
agauacacagcccugccaucac

SEQ ID NO: 179374 - RNA, 22 nt, Human
gagacguggccuuugccugagc

SEQ ID NO: 179375 - RNA, 22 nt, Human
ucagaaaagaccacauuauucu

SEQ ID NO: 179376 - RNA, 22 nt, Human
uaacauauuguguggcacuagg

SEQ ID NO: 179377 - RNA, 22 nt, Human
ugugcaacuccuuccacagaca

SEQ ID NO: 179378 - RNA, 22 nt, Human
aaggaaaugagguugauggaug

SEQ ID NO: 179379 - RNA, 22 nt, Human
gcaggccucuaauucaccgcag

SEQ ID NO: 179380 - RNA, 22 nt, Human
guccucagcaccagaacuaggg

SEQ ID NO: 179381 - RNA, 22 nt, Human
cccagggaggcccaggcucugc

SEQ ID NO: 179382 - RNA, 22 nt, Human
gccaggcaggugucggagcccu

SEQ ID NO: 179383 - RNA, 22 nt, Human
acaaauggaacaaugaagacug

SEQ ID NO: 179384 - RNA, 22 nt, Human
gauucacucauauuuuacguuu

SEQ ID NO: 179385 - RNA, 22 nt, Human
uaggccagauuacuagaguagg

SEQ ID NO: 179386 - RNA, 22 nt, Human
gagcucagaggcgucuuugucc

SEQ ID NO: 179387 - RNA, 22 nt, Human
gagacacaguuaucaggcauac

SEQ ID NO: 179388 - RNA, 22 nt, Human
cuugauuuauuacccacuauau

SEQ ID NO: 179389 - RNA, 22 nt, Human
uguuuacagggugauuuuaccu

SEQ ID NO: 179390 - RNA, 22 nt, Human
agucuauugccuaacagagagg

SEQ ID NO: 179391 - RNA, 22 nt, Human
uaauaucuggcauucaaacaug

SEQ ID NO: 179392 - RNA, 22 nt, Human
uccaggcauguggccaguacuc

SEQ ID NO: 179393 - RNA, 22 nt, Human
ucaaaucuuuaacaugugcaaa

SEQ ID NO: 179394 - RNA, 22 nt, Human
auucaguuuuuauuggaccagc

SEQ ID NO: 179395 - RNA, 22 nt, Human
ucauguguguuucauguaugga

SEQ ID NO: 179396 - RNA, 22 nt, Human
aggcuagaggcuucuggcuuca

SEQ ID NO: 179397 - RNA, 22 nt, Human
ccucaggccugccagagcccca

SEQ ID NO: 179398 - RNA, 22 nt, Human
uuggcugccuguggaucgcauu

SEQ ID NO: 179399 - RNA, 22 nt, Human
ccaggagcagaguagguguuca

SEQ ID NO: 179400 - RNA, 22 nt, Human
auugucagugggauuugucaac

SEQ ID NO: 179401 - RNA, 22 nt, Human
uucucaaagaaagcugucauua

SEQ ID NO: 179402 - RNA, 23 nt, Human
cuggcccaggugagagguuggug

SEQ ID NO: 179403 - RNA, 23 nt, Human
ucagagcaagaugauguaugagc

SEQ ID NO: 179404 - RNA, 22 nt, Human
guccagcugggccagggcacuc

SEQ ID NO: 179405 - RNA, 22 nt, Human
cagcuauuuucucauuaaggau

SEQ ID NO: 179406 - RNA, 22 nt, Human
uuaaaugagauguucagauauu

SEQ ID NO: 179407 - RNA, 22 nt, Human
uuccaggacaagauguuucagg

SEQ ID NO: 179408 - RNA, 22 nt, Human
auucagugucuacuccauugcc

SEQ ID NO: 179409 - RNA, 22 nt, Human
ucagagcugugcuucaggaaag

SEQ ID NO: 179410 - RNA, 22 nt, Human
ugcaggguguccggaggaucac

SEQ ID NO: 179411 - RNA, 22 nt, Human
cuggauguucuucugcaauuau

SEQ ID NO: 179412 - RNA, 22 nt, Human
aacaucucuguauuuuauagac

SEQ ID NO: 179413 - RNA, 22 nt, Human
caggacagcucaacaccuccuc

SEQ ID NO: 179414 - RNA, 22 nt, Human
ccuuuccccgcgggaggugcca

SEQ ID NO: 179415 - RNA, 22 nt, Human
accuucaauuauuuuuguucca

SEQ ID NO: 179416 - RNA, 22 nt, Human
acauguaagacuagcuuaaagu

SEQ ID NO: 179417 - RNA, 22 nt, Human
ugcaaaaauugcuggaaucuuu

SEQ ID NO: 179418 - RNA, 22 nt, Human
agugcagggggaaagggugucu

SEQ ID NO: 179419 - RNA, 20 nt, Human
uggguccugugggagaagaa

SEQ ID NO: 179420 - RNA, 22 nt, Human
ggacccugggcagcuggcugcu

SEQ ID NO: 179421 - RNA, 22 nt, Human
aggacccacgcacaggaacccc

SEQ ID NO: 179422 - RNA, 22 nt, Human
uggcaaauauuuuguuuuguaa

SEQ ID NO: 179423 - RNA, 22 nt, Human
ugucacuuuggggagaguuuug

SEQ ID NO: 179424 - RNA, 22 nt, Human
uucuucagucccacuagccaca

SEQ ID NO: 179425 - RNA, 22 nt, Human
agcuggguacugaugucuucag

SEQ ID NO: 179426 - RNA, 22 nt, Human
ggaagaggcugaggccaugcug

SEQ ID NO: 179427 - RNA, 22 nt, Human
ugcccugccaagaccaaguggu

SEQ ID NO: 179428 - RNA, 22 nt, Human
ucuccaggcacuaccuggguaa

SEQ ID NO: 179429 - RNA, 22 nt, Human
cacaaaguauaacuugauggaa

SEQ ID NO: 179430 - RNA, 22 nt, Human
ugaggaagccaaacagcuacac

SEQ ID NO: 179431 - RNA, 22 nt, Human
uaucacuugcguuuuggcagag

SEQ ID NO: 179432 - RNA, 22 nt, Human
ggagcagaugucuucauggccu

SEQ ID NO: 179433 - RNA, 22 nt, Human
gucuccaguguucaggugacug

SEQ ID NO: 179434 - RNA, 22 nt, Human
cagagccaacgccaccugccca

SEQ ID NO: 179435 - RNA, 22 nt, Human
ugcccugguuacacuggagucc

SEQ ID NO: 179436 - RNA, 20 nt, Human
gcagagugugagagggugaa

SEQ ID NO: 179437 - RNA, 22 nt, Human
uagggcagccacccaggcugcu

SEQ ID NO: 179438 - RNA, 22 nt, Human
agugcccuggacggcggcccca

SEQ ID NO: 179439 - RNA, 22 nt, Human
aggcugggaaauguauuccagc

SEQ ID NO: 179440 - RNA, 22 nt, Human
aguaaacauuuucauauuuucu

SEQ ID NO: 179441 - RNA, 22 nt, Human
aacgaagcuuaacuuuucugag

SEQ ID NO: 179442 - RNA, 22 nt, Human
ugcuggcuuauuuaguaaaugu

SEQ ID NO: 179443 - RNA, 22 nt, Human
cucuuuggcguuggcagagcca

SEQ ID NO: 179444 - RNA, 22 nt, Human
cagaauaaagguacaauugagu

SEQ ID NO: 179445 - RNA, 20 nt, Human
gaacauuuggccauacugag

SEQ ID NO: 179446 - RNA, 22 nt, Human
aaggcagauaagaauucagcaa

SEQ ID NO: 179447 - RNA, 22 nt, Human
aggugucuggauggguguccuu

SEQ ID NO: 179448 - RNA, 22 nt, Human
uccagggaucuuuagagucuuu

SEQ ID NO: 179449 - RNA, 22 nt, Human
uuccuggcaccaccacuucuag

SEQ ID NO: 179450 - RNA, 22 nt, Human
aacuagaaaucacuacagguau

SEQ ID NO: 179451 - RNA, 22 nt, Human
gaggaaugggugucucgugauu

SEQ ID NO: 179452 - RNA, 22 nt, Human
agugggcaggcagggugcgcag

SEQ ID NO: 179453 - RNA, 22 nt, Human
ccugggugucaugggcagcugg

SEQ ID NO: 179454 - RNA, 22 nt, Human
ccucaggaaaugaauaaauggc

SEQ ID NO: 179455 - RNA, 22 nt, Human
agggaccaaucaccgacaggcu

SEQ ID NO: 179456 - RNA, 19 nt, Human
caaaugggacaggaaggca

SEQ ID NO: 179457 - RNA, 22 nt, Human
aagaguuuaugauauaacaugu

SEQ ID NO: 179458 - RNA, 22 nt, Human
uaagugguugcuuguuuucauu

SEQ ID NO: 179459 - RNA, 22 nt, Human
ugaggugggcuuguggauuugc

SEQ ID NO: 179460 - RNA, 23 nt, Human
uucugggcuguggaagccucggg

SEQ ID NO: 179461 - RNA, 22 nt, Human
uucaggaugaaagugugcaaca

SEQ ID NO: 179462 - RNA, 22 nt, Human
uagaaacauguucuguucuguu

SEQ ID NO: 179463 - RNA, 22 nt, Human
uugauuucuuacucuuccaagg

SEQ ID NO: 179464 - RNA, 22 nt, Human
ccugaggcucgcgcgccccugg

SEQ ID NO: 179465 - RNA, 22 nt, Human
uagcagagcagggaucagagcc

SEQ ID NO: 179466 - RNA, 22 nt, Human
cugccugaguacaagucccaga

SEQ ID NO: 179467 - RNA, 22 nt, Human
acaggauaguuuuuaaucuucc

SEQ ID NO: 179468 - RNA, 22 nt, Human
aggcuucuuuuagaggggaugg

SEQ ID NO: 179469 - RNA, 22 nt, Human
aaugaauugcaguacugacuug

SEQ ID NO: 179470 - RNA, 22 nt, Human
uuuucccaucuacaaagcaggg

SEQ ID NO: 179471 - RNA, 22 nt, Human
cagagccuuccuagcagacucu

SEQ ID NO: 179472 - RNA, 21 nt, Human
gcuuuagauuuagugagccag

SEQ ID NO: 179473 - RNA, 22 nt, Human
ugcccugggaacacagaugcca

SEQ ID NO: 179474 - RNA, 22 nt, Human
uuugacucauuaaagucuccgu

SEQ ID NO: 179475 - RNA, 22 nt, Human
caaagcuguaccccaaccuaug

SEQ ID NO: 179476 - RNA, 22 nt, Human
gagggugucugcguaacuggca

SEQ ID NO: 179477 - RNA, 22 nt, Human
auguaauaggguaacauaacau

SEQ ID NO: 179478 - RNA, 22 nt, Human
accuugaacccagcuugcugca

SEQ ID NO: 179479 - RNA, 22 nt, Human
agaaggaaggcugagugcugau

SEQ ID NO: 179480 - RNA, 22 nt, Human
gcagggaccucacuacccccag

SEQ ID NO: 179481 - RNA, 20 nt, Human
ugaggcaggagaauggcaug

SEQ ID NO: 179482 - RNA, 22 nt, Human
uguguguccuugaccucagugg

SEQ ID NO: 179483 - RNA, 22 nt, Human
agcccugggcuguagauaagca

SEQ ID NO: 179484 - RNA, 22 nt, Human
gcucugaguaaaugaaagcauu

SEQ ID NO: 179485 - RNA, 22 nt, Human
ugggaccucucuugagagagca

SEQ ID NO: 179486 - RNA, 22 nt, Human
cuuguaauuauaauguacuguu

SEQ ID NO: 179487 - RNA, 22 nt, Human
ccaguggaauuaaaaauaagug

SEQ ID NO: 179488 - RNA, 22 nt, Human
aggagccuccauggucacauuc

SEQ ID NO: 179489 - RNA, 21 nt, Human
ucugauguucacacccuguau

SEQ ID NO: 179490 - RNA, 22 nt, Human
gguguccuacugcuugguugcu

SEQ ID NO: 179491 - RNA, 22 nt, Human
gaagucuuggcugaaaacccuc

SEQ ID NO: 179492 - RNA, 22 nt, Human
agaggccaggcugcagagggau

SEQ ID NO: 179493 - RNA, 22 nt, Human
agcuccugaaaagcgcuugcuu

SEQ ID NO: 179494 - RNA, 22 nt, Human
agcaguuacuaguuaaaugcau

SEQ ID NO: 179495 - RNA, 22 nt, Human
ucugcccacaguccaauaguug

SEQ ID NO: 179496 - RNA, 22 nt, Human
uaguauuuccuguaagcuauag

SEQ ID NO: 179497 - RNA, 20 nt, Human
acagccagaggaggcagaca

SEQ ID NO: 179498 - RNA, 22 nt, Human
ucugccugaggacugacaccag

SEQ ID NO: 179499 - RNA, 22 nt, Human
caggagccgccaggcacguugg

SEQ ID NO: 179500 - RNA, 22 nt, Human
uucuuauagaagcaaccauugu

SEQ ID NO: 179501 - RNA, 22 nt, Human
gcugucccgaaccccugguaau

SEQ ID NO: 179502 - RNA, 22 nt, Human
aucagcugcuacauuggccucu

SEQ ID NO: 179503 - RNA, 22 nt, Human
cccagcuccagagccagaaaca

SEQ ID NO: 179504 - RNA, 17 nt, Human
gcagccucuugguagug

SEQ ID NO: 179505 - RNA, 22 nt, Human
guucuucacauuucauugagga

SEQ ID NO: 179506 - RNA, 22 nt, Human
gcaggcuggaggcuguucuggg

SEQ ID NO: 179507 - RNA, 22 nt, Human
uucugacaauucaguaacagca

SEQ ID NO: 179508 - RNA, 22 nt, Human
uaauuauagccgcuauuuugcu

SEQ ID NO: 179509 - RNA, 22 nt, Human
aggcagauauuucaguucacau

SEQ ID NO: 179510 - RNA, 22 nt, Human
ucugugccaccucuccaguguc

SEQ ID NO: 179511 - RNA, 22 nt, Human
ucucucagaacugcagcugcag

SEQ ID NO: 179512 - RNA, 22 nt, Human
aaaagccaagguccucuucaga

SEQ ID NO: 179513 - RNA, 21 nt, Human
uccugcagaaugccuuccuac

SEQ ID NO: 179514 - RNA, 22 nt, Human
ugcagcagggcccaggcacaga

SEQ ID NO: 179515 - RNA, 22 nt, Human
aauuuuacuaaucugaguguga

SEQ ID NO: 179516 - RNA, 22 nt, Human
ugagagcugggaaauguuagcu

SEQ ID NO: 179517 - RNA, 22 nt, Human
gggcccuggauuuaagcaugga

SEQ ID NO: 179518 - RNA, 22 nt, Human
auagaaacagaggucaggcauu

SEQ ID NO: 179519 - RNA, 22 nt, Human
aggucauuacaauuaucauuuu

SEQ ID NO: 179520 - RNA, 22 nt, Human
ggaauucaguggccagacauga

SEQ ID NO: 179521 - RNA, 22 nt, Human
gugaagaugccucaggugaccc

SEQ ID NO: 179522 - RNA, 22 nt, Human
uucccuuccucacucuacuugu

SEQ ID NO: 179523 - RNA, 22 nt, Human
ugcaaauuccauuuaaacacua

SEQ ID NO: 179524 - RNA, 22 nt, Human
acaaagaucuugcuuuccuacu

SEQ ID NO: 179525 - RNA, 22 nt, Human
ugcuguguaaaaggugauugaa

SEQ ID NO: 179526 - RNA, 22 nt, Human
caguccagcucaucaguggcac

SEQ ID NO: 179527 - RNA, 22 nt, Human
ucccugaguuuucuuucugacu

SEQ ID NO: 179528 - RNA, 22 nt, Human
uuuauuuauccuucuggauugc

SEQ ID NO: 179529 - RNA, 22 nt, Human
ccuuccaaaggagccacaucug

SEQ ID NO: 179530 - RNA, 22 nt, Human
aucuguaaaugcaaauguagcu

SEQ ID NO: 179531 - RNA, 22 nt, Human
aacaaaacauuugucuuguuuc

SEQ ID NO: 179532 - RNA, 22 nt, Human
cagcugggugaucuugggcagg

SEQ ID NO: 179533 - RNA, 20 nt, Human
ucacacaugguaagcuauga

SEQ ID NO: 179534 - RNA, 22 nt, Human
aagccaugguagaaaacucagu

SEQ ID NO: 179535 - RNA, 22 nt, Human
auguacuaugcagucaacuguu

SEQ ID NO: 179536 - RNA, 22 nt, Human
gggcagguauuuaucuucuauu

SEQ ID NO: 179537 - RNA, 22 nt, Human
gaggcaggcagauugcuugagg

SEQ ID NO: 179538 - RNA, 22 nt, Human
uccagauggauuuaagaccuaa

SEQ ID NO: 179539 - RNA, 22 nt, Human
ggaaggcuuucuguucugugac

SEQ ID NO: 179540 - RNA, 22 nt, Human
acagcauugcuccaucucaaga

SEQ ID NO: 179541 - RNA, 22 nt, Human
gauagaaagaauauagauucca

SEQ ID NO: 179542 - RNA, 22 nt, Human
gucuggcauucuuccuggagaa

SEQ ID NO: 179543 - RNA, 22 nt, Human
aggccagcugccacccgguccg

SEQ ID NO: 179544 - RNA, 22 nt, Human
acuguccagaagauagaaauau

SEQ ID NO: 179545 - RNA, 22 nt, Human
uagcccaggagaauugucuuuc

SEQ ID NO: 179546 - RNA, 22 nt, Human
cuccagagagaaaggaggccgc

SEQ ID NO: 179547 - RNA, 22 nt, Human
uggcuucucauuugcauuaaac

SEQ ID NO: 179548 - RNA, 22 nt, Human
cccugagagguugagugucugc

SEQ ID NO: 179549 - RNA, 22 nt, Human
aaaaugaacagaacaaugggga

SEQ ID NO: 179550 - RNA, 22 nt, Human
cuuuucugucagugcccaaauu

SEQ ID NO: 179551 - RNA, 22 nt, Human
gccaggaggggagaguguguca

SEQ ID NO: 179552 - RNA, 22 nt, Human
aagagcuccaggcaaugcgguc

SEQ ID NO: 179553 - RNA, 22 nt, Human
agccaggcugcaguuggcuggc

SEQ ID NO: 179554 - RNA, 22 nt, Human
aaagugcagggugcucugguau

SEQ ID NO: 179555 - RNA, 22 nt, Human
uccaaggagcagauccagagga

SEQ ID NO: 179556 - RNA, 22 nt, Human
cugcuuuaaucccugccuggaa

SEQ ID NO: 179557 - RNA, 22 nt, Human
ccugcccccgucagaggugaug

SEQ ID NO: 179558 - RNA, 22 nt, Human
ggagacacccacauugcugggu

SEQ ID NO: 179559 - RNA, 22 nt, Human
ccacucaggccuccugcucucc

SEQ ID NO: 179560 - RNA, 22 nt, Human
auucuucacauggauaggaucu

SEQ ID NO: 179561 - RNA, 22 nt, Human
acuuccagcaccucaagcggaa

SEQ ID NO: 179562 - RNA, 22 nt, Human
aaaugacacuaggcuuuuugca

SEQ ID NO: 179563 - RNA, 22 nt, Human
gaaggcuaaaggggcagagguu

SEQ ID NO: 179564 - RNA, 22 nt, Human
ucacuucuucccuugcacauau

SEQ ID NO: 179565 - RNA, 22 nt, Human
ugggaucugcaguuuaacaaaa

SEQ ID NO: 179566 - RNA, 22 nt, Human
uuugacucagcaaauucacagg

SEQ ID NO: 179567 - RNA, 22 nt, Human
ugcugaggcauuuggacagagu

SEQ ID NO: 179568 - RNA, 22 nt, Human
uagaauaugauuaauuuucuua

SEQ ID NO: 179569 - RNA, 19 nt, Human
aaagcagugcauccucuuu

SEQ ID NO: 179570 - RNA, 22 nt, Human
uaccaaaaccaagccauuaucu

SEQ ID NO: 179571 - RNA, 22 nt, Human
cuguggcaggaagggacuagca

SEQ ID NO: 179572 - RNA, 22 nt, Human
caguccucucacucaggccuuu

SEQ ID NO: 179573 - RNA, 22 nt, Human
ugcccugcugugccuggagcca

SEQ ID NO: 179574 - RNA, 22 nt, Human
gcuuggcuggagaaaguuaccu

SEQ ID NO: 179575 - RNA, 22 nt, Human
agggaaaucuuucaacacuuca

SEQ ID NO: 179576 - RNA, 22 nt, Human
acacacacaagcagguugugga

SEQ ID NO: 179577 - RNA, 22 nt, Human
ccagagcaauucucacagaacu

SEQ ID NO: 179578 - RNA, 22 nt, Human
ucucugagguuguuuccagcac

SEQ ID NO: 179579 - RNA, 22 nt, Human
cuuauuagaguuguguucuguu

SEQ ID NO: 179580 - RNA, 22 nt, Human
ggagcccucaccggcgagugcc

SEQ ID NO: 179581 - RNA, 22 nt, Human
cugaggcuggcguuugaggaag

SEQ ID NO: 179582 - RNA, 22 nt, Human
uuuggaaugguaccuucaguug

SEQ ID NO: 179583 - RNA, 22 nt, Human
uggacaugagcugagugggugu

SEQ ID NO: 179584 - RNA, 22 nt, Human
uguccaggcggccuugccuguu

SEQ ID NO: 179585 - RNA, 22 nt, Human
cuucuguggauauguucucucu

SEQ ID NO: 179586 - RNA, 22 nt, Human
ggucacaucuaaauggagcauu

SEQ ID NO: 179587 - RNA, 22 nt, Human
ucuuuggucaucaugggaagca

SEQ ID NO: 179588 - RNA, 22 nt, Human
aagcagaggaccgacggaggga

SEQ ID NO: 179589 - RNA, 22 nt, Human
cugaguccuugggcuuagagug

SEQ ID NO: 179590 - RNA, 22 nt, Human
aaugaugguuaaacacuggagg

SEQ ID NO: 179591 - RNA, 22 nt, Human
aagaugacuauuuaucuguaag

SEQ ID NO: 179592 - RNA, 22 nt, Human
gucuuccacauuucaagaggcu

SEQ ID NO: 179593 - RNA, 22 nt, Human
cgaggccaugcaugcugaggac

SEQ ID NO: 179594 - RNA, 22 nt, Human
cucuggagugcagccugguggc

SEQ ID NO: 179595 - RNA, 22 nt, Human
gccagguggagguugcagugag

SEQ ID NO: 179596 - RNA, 22 nt, Human
aaggugucaggcuugggaaagu

SEQ ID NO: 179597 - RNA, 22 nt, Human
accaggaaacucucgucuaguu

SEQ ID NO: 179598 - RNA, 22 nt, Human
cacugcacaauguagcaaagaa

SEQ ID NO: 179599 - RNA, 22 nt, Human
gaggccaggacaugaaagcuga

SEQ ID NO: 179600 - RNA, 22 nt, Human
ugguccagaugccuuggcuuua

SEQ ID NO: 179601 - RNA, 22 nt, Human
ucacaucucucauugccucugc

SEQ ID NO: 179602 - RNA, 22 nt, Human
acuguucuucccauuuauauug

SEQ ID NO: 179603 - RNA, 22 nt, Human
agccuggggcacuucuccaaac

SEQ ID NO: 179604 - RNA, 22 nt, Human
cagaaguggccucagagggagu

SEQ ID NO: 179605 - RNA, 22 nt, Human
acaagcucagaucccugucucu

SEQ ID NO: 179606 - RNA, 22 nt, Human
cuauuuucugucucuauagagu

SEQ ID NO: 179607 - RNA, 22 nt, Human
ggccugagcuugggcagcguau

SEQ ID NO: 179608 - RNA, 22 nt, Human
ugcagauaauacuagaacuuac

SEQ ID NO: 179609 - RNA, 22 nt, Human
ucacucuguuuuacucacuguu

SEQ ID NO: 179610 - RNA, 22 nt, Human
ccucaggcuucuaguucaguga

SEQ ID NO: 179611 - RNA, 22 nt, Human
aggcuucuucucuauguacaag

SEQ ID NO: 179612 - RNA, 22 nt, Human
auucuaaaucagagagcucugu

SEQ ID NO: 179613 - RNA, 22 nt, Human
auucaguuagccacagcuauuc

SEQ ID NO: 179614 - RNA, 22 nt, Human
aaaggcuauuuuuagauguuug

SEQ ID NO: 179615 - RNA, 22 nt, Human
auuuauugagagggaggggaau

SEQ ID NO: 179616 - RNA, 22 nt, Human
cagggcuggcuuccaaguuguu

SEQ ID NO: 179617 - RNA, 22 nt, Human
caauuucagguggauagguuuu

SEQ ID NO: 179618 - RNA, 22 nt, Human
ccaugggcgcacaggccuggag

SEQ ID NO: 179619 - RNA, 22 nt, Human
guguaucuggcaugucgagugu

SEQ ID NO: 179620 - RNA, 22 nt, Human
agagcucucuucauaacggccu

SEQ ID NO: 179621 - RNA, 22 nt, Human
cauacauuaccuaacuuaaugc

SEQ ID NO: 179622 - RNA, 22 nt, Human
cccugucucauugaucacuugu

SEQ ID NO: 179623 - RNA, 22 nt, Human
ucuuucuucuuucauaguguga

SEQ ID NO: 179624 - RNA, 22 nt, Human
auauauauugcccaggcugguu

SEQ ID NO: 179625 - RNA, 22 nt, Human
aucagagcugugauucccacuc

SEQ ID NO: 179626 - RNA, 22 nt, Human
acagacauuuuaagacacuuua

SEQ ID NO: 179627 - RNA, 22 nt, Human
uaucauuuuacugugacauuuu

SEQ ID NO: 179628 - RNA, 22 nt, Human
acacagaaccucauagccucuc

SEQ ID NO: 179629 - RNA, 23 nt, Human
guuuucaacacaauaaauguaac

SEQ ID NO: 179630 - RNA, 22 nt, Human
gaggugggaugugugugcuacu

SEQ ID NO: 179631 - RNA, 22 nt, Human
agguuugggaguagaaaucaga

SEQ ID NO: 179632 - RNA, 22 nt, Human
gccuggguccacugaucaugcu

SEQ ID NO: 179633 - RNA, 22 nt, Human
ggucagugccuaucaugugggc

SEQ ID NO: 179634 - RNA, 22 nt, Human
guccugguccugccuccccaug

SEQ ID NO: 179635 - RNA, 22 nt, Human
cucaggucacaggauggccagg

SEQ ID NO: 179636 - RNA, 16 nt, Human
uagggcugggaaggag

SEQ ID NO: 179637 - RNA, 22 nt, Human
aggagggaccuaggaauauugc

SEQ ID NO: 179638 - RNA, 22 nt, Human
caguuuuagggcaaugugaaga

SEQ ID NO: 179639 - RNA, 22 nt, Human
aggggcugggacagagccaagc

SEQ ID NO: 179640 - RNA, 22 nt, Human
ccaugugucuccccuggaagua

SEQ ID NO: 179641 - RNA, 22 nt, Human
uggcucuggauuaaucuaggaa

SEQ ID NO: 179642 - RNA, 22 nt, Human
acagaauaguuggcccugcuau

SEQ ID NO: 179643 - RNA, 22 nt, Human
uugaaagaagaagcugcgaugu

SEQ ID NO: 179644 - RNA, 22 nt, Human
uugcaaauucauggaucugaau

SEQ ID NO: 179645 - RNA, 22 nt, Human
uacacuggacaggaguaggaag

SEQ ID NO: 179646 - RNA, 22 nt, Human
aaacuugauuuagaacuaaggc

SEQ ID NO: 179647 - RNA, 22 nt, Human
cagucuuuguucccauuacuga

SEQ ID NO: 179648 - RNA, 22 nt, Human
gucuucuguuuacuuugaaguu

SEQ ID NO: 179649 - RNA, 22 nt, Human
cuuccuggcaaagcaaucagag

SEQ ID NO: 179650 - RNA, 22 nt, Human
gggcuggagagucccacguggg

SEQ ID NO: 179651 - RNA, 23 nt, Human
ggacacaggccuugucugcgccu

SEQ ID NO: 179652 - RNA, 22 nt, Human
uggaauguuuccccagccugca

SEQ ID NO: 179653 - RNA, 22 nt, Human
uggcuucucuguuuuaguauuu

SEQ ID NO: 179654 - RNA, 22 nt, Human
auuucucaguuccuacuguuua

SEQ ID NO: 179655 - RNA, 22 nt, Human
uaguuuuacuugcgaugauaau

SEQ ID NO: 179656 - RNA, 17 nt, Human
ucagggaaugagguugu

SEQ ID NO: 179657 - RNA, 22 nt, Human
gcuuccuguccaggccccacau

SEQ ID NO: 179658 - RNA, 22 nt, Human
ugauucaagcuacuguuacugg

SEQ ID NO: 179659 - RNA, 22 nt, Human
uaugugucugucgugcauaaau

SEQ ID NO: 179660 - RNA, 18 nt, Human
uggaggaaucacaauggc

SEQ ID NO: 179661 - RNA, 20 nt, Human
uccaggagguuaguguggcu

SEQ ID NO: 179662 - RNA, 22 nt, Human
acacauaagaaacuacaaagag

SEQ ID NO: 179663 - RNA, 20 nt, Human
gugcccugugggcuauuuuc

SEQ ID NO: 179664 - RNA, 22 nt, Human
gaugcuucaagcuuccuuauaa

SEQ ID NO: 179665 - RNA, 22 nt, Human
agcuuaaagccgccaucuagua

SEQ ID NO: 179666 - RNA, 22 nt, Human
auggaaaugauggaacauuaaa

SEQ ID NO: 179667 - RNA, 22 nt, Human
agaugguuuugucuuuaugauu

SEQ ID NO: 179668 - RNA, 22 nt, Human
cccccugcgcccggcacgucau

SEQ ID NO: 179669 - RNA, 22 nt, Human
uuacaaagaguguucuuuucca

SEQ ID NO: 179670 - RNA, 22 nt, Human
gagagggcaagguagaugcuac

SEQ ID NO: 179671 - RNA, 22 nt, Human
uaacaguauugaagauaaacua

SEQ ID NO: 179672 - RNA, 21 nt, Human
caggaaacugaggccaugggg

SEQ ID NO: 179673 - RNA, 22 nt, Human
cugugcccaccuggcucugagg

SEQ ID NO: 179674 - RNA, 22 nt, Human
agaaugauaaugccaugaugga

SEQ ID NO: 179675 - RNA, 22 nt, Human
augguacaaaauguauaaaguc

SEQ ID NO: 179676 - RNA, 22 nt, Human
caggacagaaauaaggaauaua

SEQ ID NO: 179677 - RNA, 22 nt, Human
agggccagcccauaaugccaaa

SEQ ID NO: 179678 - RNA, 23 nt, Human
cagcacaguacauuuccugucuc

SEQ ID NO: 179679 - RNA, 22 nt, Human
gaaaguuacagaaaccauuagu

SEQ ID NO: 179680 - RNA, 22 nt, Human
gcagacccugaacugggcaugg

SEQ ID NO: 179681 - RNA, 22 nt, Human
gccaggagagcuccuucagguu

SEQ ID NO: 179682 - RNA, 21 nt, Human
cuggcccagggaucugcauuu

SEQ ID NO: 179683 - RNA, 22 nt, Human
uagugaaauaugugcugauagc

SEQ ID NO: 179684 - RNA, 22 nt, Human
aaaguuguucaguaagaaacuc

SEQ ID NO: 179685 - RNA, 22 nt, Human
ucuauuaugguacuuaucauga

SEQ ID NO: 179686 - RNA, 22 nt, Human
caugugggacuccugcuguuuu

SEQ ID NO: 179687 - RNA, 22 nt, Human
ccaccagcuuuggcggugacag

SEQ ID NO: 179688 - RNA, 22 nt, Human
acagacauuuaauaaaugcuga

SEQ ID NO: 179689 - RNA, 22 nt, Human
ccugaggagauuguggcugggg

SEQ ID NO: 179690 - RNA, 22 nt, Human
aagauuauuuaagacaggaacc

SEQ ID NO: 179691 - RNA, 22 nt, Human
acauucaaaauuagguuaguug

SEQ ID NO: 179692 - RNA, 22 nt, Human
uacaugcuccuuaugagaaucu

SEQ ID NO: 179693 - RNA, 19 nt, Human
aagcauuagccaaagcauu

SEQ ID NO: 179694 - RNA, 22 nt, Human
agcuggcuuuugugaagguuuu

SEQ ID NO: 179695 - RNA, 22 nt, Human
cuagaaacgccuuuagcacaac

SEQ ID NO: 179696 - RNA, 22 nt, Human
caggggcaagaaugcugucagc

SEQ ID NO: 179697 - RNA, 22 nt, Human
agggggugucucugauuggguu

SEQ ID NO: 179698 - RNA, 22 nt, Human
cuccgcagcgggccaauccgga

SEQ ID NO: 179699 - RNA, 22 nt, Human
ccugcugucccucugggcucca

SEQ ID NO: 179700 - RNA, 22 nt, Human
cgcaccacugaauuccagccug

SEQ ID NO: 179701 - RNA, 19 nt, Human
agcuccugggcucugggcc

SEQ ID NO: 179702 - RNA, 19 nt, Human
gcuggcagauguggccgug

SEQ ID NO: 179703 - RNA, 22 nt, Human
cuguccuccagacgacaguccc

SEQ ID NO: 179704 - RNA, 22 nt, Human
auuccacagcucagccucucuu

SEQ ID NO: 179705 - RNA, 22 nt, Human
uucauaugcagauuaacaaaua

SEQ ID NO: 179706 - RNA, 22 nt, Human
uuucuguuguauggcuucugca

SEQ ID NO: 179707 - RNA, 22 nt, Human
ucugcagaauugucucaagcua

SEQ ID NO: 179708 - RNA, 22 nt, Human
cacaggcugcccgcagcuggga

SEQ ID NO: 179709 - RNA, 22 nt, Human
uagaaggcccauucauuuguuc

SEQ ID NO: 179710 - RNA, 22 nt, Human
agcaucuguuaagugccuucaa

SEQ ID NO: 179711 - RNA, 21 nt, Human
ugucacauugucccugcugcu

SEQ ID NO: 179712 - RNA, 22 nt, Human
ugcuuuaaaauggacuguuuug

SEQ ID NO: 179713 - RNA, 22 nt, Human
guggggguggaaaggcaaguug

SEQ ID NO: 179714 - RNA, 22 nt, Human
uuucaaagcaacugaaaaggaa

SEQ ID NO: 179715 - RNA, 22 nt, Human
aauauggcuccauuccuuuagg

SEQ ID NO: 179716 - RNA, 22 nt, Human
cagcauggacccaucgcugagu

SEQ ID NO: 179717 - RNA, 22 nt, Human
cuagcaucagaugagaagcugu

SEQ ID NO: 179718 - RNA, 22 nt, Human
agaagccacaggccucgucugg

SEQ ID NO: 179719 - RNA, 22 nt, Human
uacagugauuucuacugguguu

SEQ ID NO: 179720 - RNA, 19 nt, Human
ugaagcaggcagagaagau

SEQ ID NO: 179721 - RNA, 22 nt, Human
uagaacuguccaagucugagcu

SEQ ID NO: 179722 - RNA, 19 nt, Human
gccaggcuccauagccggc

SEQ ID NO: 179723 - RNA, 22 nt, Human
uaacaguaccauuaacuuugau

SEQ ID NO: 179724 - RNA, 22 nt, Human
ccaaugauggugcccacgauga

SEQ ID NO: 179725 - RNA, 19 nt, Human
ucaggaguuaguugugcuc

SEQ ID NO: 179726 - RNA, 23 nt, Human
guaacuggggaauuugagcuaug

SEQ ID NO: 179727 - RNA, 22 nt, Human
agaacuuuuggagacuuuuagu

SEQ ID NO: 179728 - RNA, 22 nt, Human
cagcuacagucugauugguuca

SEQ ID NO: 179729 - RNA, 22 nt, Human
ucaggcaggaucccagggaagg

SEQ ID NO: 179730 - RNA, 22 nt, Human
caauuuuuguacuuauaguacu

SEQ ID NO: 179731 - RNA, 22 nt, Human
ggcaggcaggucuucauggccc

SEQ ID NO: 179732 - RNA, 22 nt, Human
gaaaaugugccuuuggguauug

SEQ ID NO: 179733 - RNA, 22 nt, Human
uuaucacuuaugagcuuuuugc

SEQ ID NO: 179734 - RNA, 22 nt, Human
uuuuagcuguugauuguucccc

SEQ ID NO: 179735 - RNA, 22 nt, Human
uuagcuuucaugaaccuggucg

SEQ ID NO: 179736 - RNA, 22 nt, Human
ucugcaccucugaaauugguca

SEQ ID NO: 179737 - RNA, 20 nt, Human
ugguggagagaagcuauuug

SEQ ID NO: 179738 - RNA, 23 nt, Human
uugagcucaguagcucugcuggu

SEQ ID NO: 179739 - RNA, 22 nt, Human
gaggccagcgcgcagcacuuuu

SEQ ID NO: 179740 - RNA, 20 nt, Human
uagacuuuucaucaaccuua

SEQ ID NO: 179741 - RNA, 22 nt, Human
aggccucuguagggcccugaag

SEQ ID NO: 179742 - RNA, 22 nt, Human
uauauggauagugaucauaaga

SEQ ID NO: 179743 - RNA, 22 nt, Human
agccacccauucccgagcccua

SEQ ID NO: 179744 - RNA, 22 nt, Human
auacagagacacuugagacugg

SEQ ID NO: 179745 - RNA, 22 nt, Human
uuuguuuucuguaggccuuucc

SEQ ID NO: 179746 - RNA, 22 nt, Human
uguuuucuuccuaauugcucau

SEQ ID NO: 179747 - RNA, 18 nt, Human
cauaauuuucuuucuuua

SEQ ID NO: 179748 - RNA, 22 nt, Human
uuaaaugaacgagauaugcaac

SEQ ID NO: 179749 - RNA, 22 nt, Human
uugccagggcuuugguggcauc

SEQ ID NO: 179750 - RNA, 22 nt, Human
aguguguccagaaaucuguauu

SEQ ID NO: 179751 - RNA, 22 nt, Human
ccagagagaguacugggcucug

SEQ ID NO: 179752 - RNA, 22 nt, Human
ccagugugauuguugcaagaau

SEQ ID NO: 179753 - RNA, 22 nt, Human
cucuuaguaaugccaugaagca

SEQ ID NO: 179754 - RNA, 22 nt, Human
uccagagcuaauucagcagcug

SEQ ID NO: 179755 - RNA, 22 nt, Human
uauugguaucugagacagaguu

SEQ ID NO: 179756 - RNA, 22 nt, Human
acagugauugggguaucugcag

SEQ ID NO: 179757 - RNA, 23 nt, Human
cagcuccagugcacucagguagc

SEQ ID NO: 179758 - RNA, 22 nt, Human
ggagaugguggaagcuggugca

SEQ ID NO: 179759 - RNA, 22 nt, Human
aaugaauucugaagucuuccaa

SEQ ID NO: 179760 - RNA, 22 nt, Human
uucauugaaauacagucuugac

SEQ ID NO: 179761 - RNA, 22 nt, Human
gagcaggcucugccuguguguc

SEQ ID NO: 179762 - RNA, 22 nt, Human
gaugagcugucuagcuguugga

SEQ ID NO: 179763 - RNA, 22 nt, Human
ucugcaggugggccccuagaau

SEQ ID NO: 179764 - RNA, 22 nt, Human
gcaggagcagucaggggcagcu

SEQ ID NO: 179765 - RNA, 22 nt, Human
aagaaaacguuuugaggaguuu

SEQ ID NO: 179766 - RNA, 22 nt, Human
aaugccaucccucugucaccaa

SEQ ID NO: 179767 - RNA, 22 nt, Human
gacacaaaguuugucagaaauu

SEQ ID NO: 179768 - RNA, 22 nt, Human
ugcaggcuggggaggcagacuu

SEQ ID NO: 179769 - RNA, 22 nt, Human
cuccuucaugucauguguccgg

SEQ ID NO: 179770 - RNA, 22 nt, Human
ucagguggccaaaugggagcgc

SEQ ID NO: 179771 - RNA, 22 nt, Human
gucaaauauacuaagagguaaa

SEQ ID NO: 179772 - RNA, 22 nt, Human
caggcucccacaagcucccagc

SEQ ID NO: 179773 - RNA, 22 nt, Human
caaauaauuacuauccucacuu

SEQ ID NO: 179774 - RNA, 22 nt, Human
ggcaggguaugauuaccucuga

SEQ ID NO: 179775 - RNA, 22 nt, Human
ucuucaaaaaauauccaucagu

SEQ ID NO: 179776 - RNA, 22 nt, Human
cuaagaaaauagaagcaugcua

SEQ ID NO: 179777 - RNA, 22 nt, Human
agggaaugcuccguauaaaucu

SEQ ID NO: 179778 - RNA, 22 nt, Human
gggcugagugaccucaggccaa

SEQ ID NO: 179779 - RNA, 22 nt, Human
acagcuuuaguguggguggugc

SEQ ID NO: 179780 - RNA, 22 nt, Human
gagaagguggaccugaaggagc

SEQ ID NO: 179781 - RNA, 20 nt, Human
gugccuggagaagaggcugu

SEQ ID NO: 179782 - RNA, 22 nt, Human
cauuuucagcacccaucugaaa

SEQ ID NO: 179783 - RNA, 22 nt, Human
ugcagaggaccauuguccugga

SEQ ID NO: 179784 - RNA, 22 nt, Human
uccuggcauaauggcuuugcuc

SEQ ID NO: 179785 - RNA, 22 nt, Human
agugccaguuaauaagaaaugg

SEQ ID NO: 179786 - RNA, 22 nt, Human
gaaauguuugggaggagucaac

SEQ ID NO: 179787 - RNA, 22 nt, Human
aaccaccaccguaauuuaccca

SEQ ID NO: 179788 - RNA, 22 nt, Human
ggcaggaaaacaaugagccagg

SEQ ID NO: 179789 - RNA, 22 nt, Human
ugcagaagacacaagguaacgu

SEQ ID NO: 179790 - RNA, 22 nt, Human
uccugggguuuagagggaagug

SEQ ID NO: 179791 - RNA, 22 nt, Human
gcucugcccaaugucccuacac

SEQ ID NO: 179792 - RNA, 22 nt, Human
ucagggaaccucuccuguuucu

SEQ ID NO: 179793 - RNA, 22 nt, Human
cagcagaggugguucacauugu

SEQ ID NO: 179794 - RNA, 22 nt, Human
cugggccucacccuagaccaau

SEQ ID NO: 179795 - RNA, 23 nt, Human
agaggcaggaguggcuugcccgg

SEQ ID NO: 179796 - RNA, 22 nt, Human
gcagagcaccaaagugaaagau

SEQ ID NO: 179797 - RNA, 22 nt, Human
gggcuucucucaggggcaugag

SEQ ID NO: 179798 - RNA, 22 nt, Human
agaguuugggugggacagcuug

SEQ ID NO: 179799 - RNA, 22 nt, Human
uuuucauuuacauuagggaaga

SEQ ID NO: 179800 - RNA, 22 nt, Human
uuucaggauuuuaugagauagu

SEQ ID NO: 179801 - RNA, 22 nt, Human
cugagguagccauggcccaagu

SEQ ID NO: 179802 - RNA, 22 nt, Human
gucuuauuagguuaacccugcu

SEQ ID NO: 179803 - RNA, 22 nt, Human
ugcccucccacauuauggcugu

SEQ ID NO: 179804 - RNA, 22 nt, Human
ggccaugccugugggugcaggc

SEQ ID NO: 179805 - RNA, 22 nt, Human
cagucccagacccagaaggugg

SEQ ID NO: 179806 - RNA, 22 nt, Human
ggagcagagcucuucaucugca

SEQ ID NO: 179807 - RNA, 22 nt, Human
cuccaggacagauucagggcca

SEQ ID NO: 179808 - RNA, 22 nt, Human
agacagagauacuauguuguca

SEQ ID NO: 179809 - RNA, 22 nt, Human
aucuaagagagagagcaugucu

SEQ ID NO: 179810 - RNA, 22 nt, Human
ugcucuccugcuccucagccca

SEQ ID NO: 179811 - RNA, 22 nt, Human
ugcuggagaaaguuuuucugaa

SEQ ID NO: 179812 - RNA, 22 nt, Human
agguagaggccuccaggcagca

SEQ ID NO: 179813 - RNA, 16 nt, Human
caggugucagucaccu

SEQ ID NO: 179814 - RNA, 22 nt, Human
gauuagaaugggaagauacaag

SEQ ID NO: 179815 - RNA, 22 nt, Human
cagccaucccagccugugguuc

SEQ ID NO: 179816 - RNA, 22 nt, Human
uguaaguuuugugaaacaaaca

SEQ ID NO: 179817 - RNA, 22 nt, Human
uuccaauaaaauguuauuugca

SEQ ID NO: 179818 - RNA, 22 nt, Human
gggagagaauuauugccagacc

SEQ ID NO: 179819 - RNA, 22 nt, Human
aaugccaaugggcagaacuaga

SEQ ID NO: 179820 - RNA, 22 nt, Human
gcagaugguggggcaggaaaau

SEQ ID NO: 179821 - RNA, 22 nt, Human
augcuggggccucagaccagaa

SEQ ID NO: 179822 - RNA, 22 nt, Human
cugggcagaguccggaagaugg

SEQ ID NO: 179823 - RNA, 22 nt, Human
uuacacagaugguuaguagagg

SEQ ID NO: 179824 - RNA, 22 nt, Human
cauucacagagggggaagcauc

SEQ ID NO: 179825 - RNA, 22 nt, Human
ugccugugaaaacccugggguu

SEQ ID NO: 179826 - RNA, 22 nt, Human
aauuccucuaucuuucuucaag

SEQ ID NO: 179827 - RNA, 22 nt, Human
caggagcuucugcccauggcca

SEQ ID NO: 179828 - RNA, 22 nt, Human
gucuccagauauccuacacaac

SEQ ID NO: 179829 - RNA, 22 nt, Human
ucuccuggagcaggaagguggg

SEQ ID NO: 179830 - RNA, 22 nt, Human
uccuagaauagugugucuggag

SEQ ID NO: 179831 - RNA, 22 nt, Human
aguccugucaccucuacuuucg

SEQ ID NO: 179832 - RNA, 23 nt, Human
agagcaucaugaugcuaagucug

SEQ ID NO: 179833 - RNA, 22 nt, Human
acaguuuacagggauuugagcu

SEQ ID NO: 179834 - RNA, 22 nt, Human
uuacugaggguguaucuuagug

SEQ ID NO: 179835 - RNA, 21 nt, Human
ggacagcugcgcgcagggcuc

SEQ ID NO: 179836 - RNA, 22 nt, Human
cuacuguuguguuuuaaaggua

SEQ ID NO: 179837 - RNA, 22 nt, Human
cagguagguauggugcagucuu

SEQ ID NO: 179838 - RNA, 22 nt, Human
uaaaugagauguacauaacuca

SEQ ID NO: 179839 - RNA, 22 nt, Human
ucagagagguuggugauaagaa

SEQ ID NO: 179840 - RNA, 22 nt, Human
agcacuuuccuggcaaaugugg

SEQ ID NO: 179841 - RNA, 18 nt, Human
guaggucaguaccaagca

SEQ ID NO: 179842 - RNA, 18 nt, Human
agcagguggcgucugcag

SEQ ID NO: 179843 - RNA, 22 nt, Human
uggggaaggcggagcuugcagc

SEQ ID NO: 179844 - RNA, 22 nt, Human
agagaacaaauuaaaggugguu

SEQ ID NO: 179845 - RNA, 22 nt, Human
uccccucccuuccaacagagcu

SEQ ID NO: 179846 - RNA, 22 nt, Human
ucccagcccagauuugugugac

SEQ ID NO: 179847 - RNA, 22 nt, Human
gaguuaaaagcccucucagcag

SEQ ID NO: 179848 - RNA, 22 nt, Human
ccugcucccgggacgcguucac

SEQ ID NO: 179849 - RNA, 22 nt, Human
auaugagagaggaaagauuuua

SEQ ID NO: 179850 - RNA, 22 nt, Human
acuggcaguggcagcagaaaga

SEQ ID NO: 179851 - RNA, 22 nt, Human
uguuccugaggcaugugucaau

SEQ ID NO: 179852 - RNA, 22 nt, Human
cagguaguccacagugagggag

SEQ ID NO: 179853 - RNA, 22 nt, Human
cacaggacucgacugcagacag

SEQ ID NO: 179854 - RNA, 22 nt, Human
uaugaguuguggcuuagucaca

SEQ ID NO: 179855 - RNA, 22 nt, Human
agaaggcucauuugacugcauu

SEQ ID NO: 179856 - RNA, 22 nt, Human
ugcacacacaggagucuccucc

SEQ ID NO: 179857 - RNA, 22 nt, Human
aauugcuuaguugcaacuaugc

SEQ ID NO: 179858 - RNA, 22 nt, Human
uuucucuggccucaguuuaaca

SEQ ID NO: 179859 - RNA, 22 nt, Human
uaaggcuuauauacuuagacau

SEQ ID NO: 179860 - RNA, 22 nt, Human
agguaaauucagcagugacauu

SEQ ID NO: 179861 - RNA, 22 nt, Human
guggcugggcuccgagcggcuu

SEQ ID NO: 179862 - RNA, 22 nt, Human
uacauucauaugugugcauaca

SEQ ID NO: 179863 - RNA, 22 nt, Human
aaaggacugaugcugaguaccu

SEQ ID NO: 179864 - RNA, 22 nt, Human
cuggcuuucugcacagaauugg

SEQ ID NO: 179865 - RNA, 22 nt, Human
ggucacaugguugagcuugauc

SEQ ID NO: 179866 - RNA, 22 nt, Human
gucagagcugugcaaggcugag

SEQ ID NO: 179867 - RNA, 22 nt, Human
uuucaauguaugucuuucugag

SEQ ID NO: 179868 - RNA, 22 nt, Human
aagggaugcaggaaagaagguu

SEQ ID NO: 179869 - RNA, 22 nt, Human
uaugcauagguaucuauacuca

SEQ ID NO: 179870 - RNA, 22 nt, Human
ugcugaggaauuugguuuaugu

SEQ ID NO: 179871 - RNA, 22 nt, Human
ccagggcaacgcugucucagag

SEQ ID NO: 179872 - RNA, 22 nt, Human
uuuauauugggagucguuuuga

SEQ ID NO: 179873 - RNA, 22 nt, Human
ucucaaaucaaacuuugagcuu

SEQ ID NO: 179874 - RNA, 22 nt, Human
aacaggcuccuugugaauggau

SEQ ID NO: 179875 - RNA, 22 nt, Human
ucuugggauugcccugcaguuc

SEQ ID NO: 179876 - RNA, 22 nt, Human
ugggacagugaccccagagguc

SEQ ID NO: 179877 - RNA, 20 nt, Human
aggcugccaggucucacauc

SEQ ID NO: 179878 - RNA, 22 nt, Human
ccaggucucgggucugcucgug

SEQ ID NO: 179879 - RNA, 22 nt, Human
cucaacaugccuacucagucug

SEQ ID NO: 179880 - RNA, 22 nt, Human
agugcuggcccauagcugcugg

SEQ ID NO: 179881 - RNA, 22 nt, Human
acuucucuuccccggaacucua

SEQ ID NO: 179882 - RNA, 20 nt, Human
cagcagagacccauggggag

SEQ ID NO: 179883 - RNA, 22 nt, Human
caggcaccacacuaggggcuga

SEQ ID NO: 179884 - RNA, 22 nt, Human
ccagugcaccauuucccucugu

SEQ ID NO: 179885 - RNA, 22 nt, Human
aagcugaagacacagcuccagu

SEQ ID NO: 179886 - RNA, 22 nt, Human
gacacagucaagaguggaggaa

SEQ ID NO: 179887 - RNA, 22 nt, Human
ggcccugggaugcucagcagug

SEQ ID NO: 179888 - RNA, 21 nt, Human
guggagagugauuuugaugca

SEQ ID NO: 179889 - RNA, 22 nt, Human
cacuguaauagcauuauaagug

SEQ ID NO: 179890 - RNA, 22 nt, Human
aauguguuuuaugagagaauau

SEQ ID NO: 179891 - RNA, 22 nt, Human
uagauucucccaucaugagaug

SEQ ID NO: 179892 - RNA, 22 nt, Human
gggcugagggguaucucauggg

SEQ ID NO: 179893 - RNA, 22 nt, Human
uuugacuucuaucuaguaagaa

SEQ ID NO: 179894 - RNA, 22 nt, Human
aagcaauucacaguucacuuaa

SEQ ID NO: 179895 - RNA, 22 nt, Human
gaaaagcuuacugccacuuggc

SEQ ID NO: 179896 - RNA, 23 nt, Human
gaggccuggcccugccacaucuc

SEQ ID NO: 179897 - RNA, 22 nt, Human
aguuuucuguucuacaauuuga

SEQ ID NO: 179898 - RNA, 22 nt, Human
aggucugggcaccacuggcugc

SEQ ID NO: 179899 - RNA, 20 nt, Human
ugcucaggauggagaggugu

SEQ ID NO: 179900 - RNA, 22 nt, Human
acacuagcuauuaacuucacau

SEQ ID NO: 179901 - RNA, 22 nt, Human
aaacacaucauucaugucguca

SEQ ID NO: 179902 - RNA, 22 nt, Human
ucaggaaagaguguauccauca

SEQ ID NO: 179903 - RNA, 20 nt, Human
caccaggcgcucugagaaca

SEQ ID NO: 179904 - RNA, 22 nt, Human
gcuauugugacagcuuuucgcc

SEQ ID NO: 179905 - RNA, 22 nt, Human
uuccugugccucaggucucagc

SEQ ID NO: 179906 - RNA, 22 nt, Human
caaggccacuccagagacuggu

SEQ ID NO: 179907 - RNA, 21 nt, Human
uuggaaucucuucaucucugc

SEQ ID NO: 179908 - RNA, 22 nt, Human
aacuagaaaaagacuuucugag

SEQ ID NO: 179909 - RNA, 22 nt, Human
aucuggcuuacgaagcacuggu

SEQ ID NO: 179910 - RNA, 22 nt, Human
cugcacaguguuggaagcugcc

SEQ ID NO: 179911 - RNA, 22 nt, Human
cacgcgcacacucaggucaagu

SEQ ID NO: 179912 - RNA, 20 nt, Human
gaaauacuuacccaacuguu

SEQ ID NO: 179913 - RNA, 22 nt, Human
cugcacagcuggccagggagag

SEQ ID NO: 179914 - RNA, 22 nt, Human
aaagaaggaugggagaaauccu

SEQ ID NO: 179915 - RNA, 22 nt, Human
uggcucaggagggaucuuugcu

SEQ ID NO: 179916 - RNA, 22 nt, Human
caacaauaugcugaguuuuuca

SEQ ID NO: 179917 - RNA, 22 nt, Human
cugcaucaguggauaugauggu

SEQ ID NO: 179918 - RNA, 22 nt, Human
uucccucugcgcauugaauuuc

SEQ ID NO: 179919 - RNA, 22 nt, Human
uuggcaccucccuaggaagaag

SEQ ID NO: 179920 - RNA, 21 nt, Human
ugaggcucuguugugccugca

SEQ ID NO: 179921 - RNA, 22 nt, Human
auacuucuuuagcauauugaac

SEQ ID NO: 179922 - RNA, 17 nt, Human
gucagcagcuugcuugu

SEQ ID NO: 179923 - RNA, 22 nt, Human
ugcagggauuguuggcauccau

SEQ ID NO: 179924 - RNA, 22 nt, Human
agcauauaggaaauguugaauc

SEQ ID NO: 179925 - RNA, 21 nt, Human
aagaugauauuuuaucuguag

SEQ ID NO: 179926 - RNA, 22 nt, Human
gacaagcucuuguuucaugguu

SEQ ID NO: 179927 - RNA, 17 nt, Human
ugcauguccuuuguucc

SEQ ID NO: 179928 - RNA, 22 nt, Human
ggcaccagccaccuauuucuag

SEQ ID NO: 179929 - RNA, 22 nt, Human
uuauuuaaaagugguaagauuc

SEQ ID NO: 179930 - RNA, 22 nt, Human
ggcacagccacuuuggagaacu

SEQ ID NO: 179931 - RNA, 22 nt, Human
gggagagaaauuauagcaauga

SEQ ID NO: 179932 - RNA, 21 nt, Human
uacagaaugcgcuucagucug

SEQ ID NO: 179933 - RNA, 22 nt, Human
gcuuuagagcccagcuuggugg

SEQ ID NO: 179934 - RNA, 22 nt, Human
uuguugcucuuguugccacaug

SEQ ID NO: 179935 - RNA, 22 nt, Human
gacccuggcagauaccgucaca

SEQ ID NO: 179936 - RNA, 22 nt, Human
aguuagcagcuuauuagaaaca

SEQ ID NO: 179937 - RNA, 22 nt, Human
ugcugcagcagugcgggcagcu

SEQ ID NO: 179938 - RNA, 20 nt, Human
ugaaggugacuccuuucuug

SEQ ID NO: 179939 - RNA, 22 nt, Human
gagcuccuauggucgguggcuc

SEQ ID NO: 179940 - RNA, 22 nt, Human
cuugccaaauuaacauacagaa

SEQ ID NO: 179941 - RNA, 22 nt, Human
gggcucauucaucugggcuugg

SEQ ID NO: 179942 - RNA, 22 nt, Human
guuuccugcgugugccacucau

SEQ ID NO: 179943 - RNA, 22 nt, Human
aacaaaucuuaaaguaauucaa

SEQ ID NO: 179944 - RNA, 22 nt, Human
gcucaggcauguaugugguugc

SEQ ID NO: 179945 - RNA, 17 nt, Human
cuucucuggcagaagau

SEQ ID NO: 179946 - RNA, 22 nt, Human
acagacuggagcccuuuugccc

SEQ ID NO: 179947 - RNA, 22 nt, Human
gaugcugagcuguauggcuggu

SEQ ID NO: 179948 - RNA, 22 nt, Human
cagccgucagaugugccgcagc

SEQ ID NO: 179949 - RNA, 22 nt, Human
caccauuuaagaaagccaaauu

SEQ ID NO: 179950 - RNA, 22 nt, Human
gaacaauacaggcuuuauuccu

SEQ ID NO: 179951 - RNA, 22 nt, Human
ggggcagaguagcuggggugug

SEQ ID NO: 179952 - RNA, 22 nt, Human
ggcucuuguucguaccauggcu

SEQ ID NO: 179953 - RNA, 22 nt, Human
acugguggcuuucagacagaaa

SEQ ID NO: 179954 - RNA, 22 nt, Human
cacauuuaagcagauguggacc

SEQ ID NO: 179955 - RNA, 22 nt, Human
gcucccucccaccagccugcag

SEQ ID NO: 179956 - RNA, 22 nt, Human
acccugggugagaggcaaacag

SEQ ID NO: 179957 - RNA, 23 nt, Human
uuugcaaauuggacacaaccaca

SEQ ID NO: 179958 - RNA, 19 nt, Human
ggcuccuggggcucagccc

SEQ ID NO: 179959 - RNA, 22 nt, Human
cagggccaugaggcacaggguc

SEQ ID NO: 179960 - RNA, 22 nt, Human
uccaggagauacacugcaccag

SEQ ID NO: 179961 - RNA, 22 nt, Human
uuccagccuuuauccauccaga

SEQ ID NO: 179962 - RNA, 22 nt, Human
aacaaguuacucuuaaaguaua

SEQ ID NO: 179963 - RNA, 22 nt, Human
uauuacagcuuugauuaucugg

SEQ ID NO: 179964 - RNA, 22 nt, Human
ugccaggcccucccacagauua

SEQ ID NO: 179965 - RNA, 22 nt, Human
gaggugaugguugcacaaugcu

SEQ ID NO: 179966 - RNA, 22 nt, Human
cagagcagugaggaguugugua

SEQ ID NO: 179967 - RNA, 22 nt, Human
aaagccaggcagccaagccagu

SEQ ID NO: 179968 - RNA, 22 nt, Human
gcuuuuggccagauggggaaac

SEQ ID NO: 179969 - RNA, 22 nt, Human
aagagcauggaauggagaucca

SEQ ID NO: 179970 - RNA, 19 nt, Human
cgcagguggaaggagccgc

SEQ ID NO: 179971 - RNA, 22 nt, Human
ucaggagcaacaucuuugaauc

SEQ ID NO: 179972 - RNA, 16 nt, Human
auaauuacugcuacuu

SEQ ID NO: 179973 - RNA, 23 nt, Human
uagggcagcugggagggacaugc

SEQ ID NO: 179974 - RNA, 22 nt, Human
ugagaaaauuacuauaauuguc

SEQ ID NO: 179975 - RNA, 20 nt, Human
cuacacuuggcaccuggcau

SEQ ID NO: 179976 - RNA, 22 nt, Human
auacaacuuuacaugcaauucc

SEQ ID NO: 179977 - RNA, 21 nt, Human
agcagaggggacauguuugau

SEQ ID NO: 179978 - RNA, 22 nt, Human
gaggcuucuggaaagccuggca

SEQ ID NO: 179979 - RNA, 22 nt, Human
guggcauugacauguaaacagu

SEQ ID NO: 179980 - RNA, 22 nt, Human
uccuggaggcacucgcuggggc

SEQ ID NO: 179981 - RNA, 20 nt, Human
guuaggagguuggacaugga

SEQ ID NO: 179982 - RNA, 22 nt, Human
gcucugggccgggcaccagccu

SEQ ID NO: 179983 - RNA, 22 nt, Human
augcagggucuccgugugacga

SEQ ID NO: 179984 - RNA, 21 nt, Human
uccucugcagugagguggccu

SEQ ID NO: 179985 - RNA, 22 nt, Human
auucagugugagguuuucaagu

SEQ ID NO: 179986 - RNA, 22 nt, Human
uucucagaauugacugggagca

SEQ ID NO: 179987 - RNA, 22 nt, Human
auuucucaucuuugugaauggu

SEQ ID NO: 179988 - RNA, 22 nt, Human
guggcugcuguccucucugguu

SEQ ID NO: 179989 - RNA, 20 nt, Human
uaaaggcugugagguggccc

SEQ ID NO: 179990 - RNA, 22 nt, Human
accccagggcugccagccuccu

SEQ ID NO: 179991 - RNA, 22 nt, Human
ggagaguggauuccagcuguau

SEQ ID NO: 179992 - RNA, 22 nt, Human
agaaauuaggaaaguaacacuu

SEQ ID NO: 179993 - RNA, 22 nt, Human
uuaagacaguguauuuguuuuc

SEQ ID NO: 179994 - RNA, 22 nt, Human
ucuguaccucacaugcaccauc

SEQ ID NO: 179995 - RNA, 22 nt, Human
aagucucuuuaccucuccaggc

SEQ ID NO: 179996 - RNA, 22 nt, Human
agcagcaucugguucugaugug

SEQ ID NO: 179997 - RNA, 22 nt, Human
aggacucacauagcuucagaug

SEQ ID NO: 179998 - RNA, 22 nt, Human
cugaugccccuggaccugugac

SEQ ID NO: 179999 - RNA, 22 nt, Human
uggcuugguccuggcccuuccc

SEQ ID NO: 180000 - RNA, 22 nt, Human
agccucagugucaccaucuacc

SEQ ID NO: 180001 - RNA, 22 nt, Human
agcuguguagggaaucagagaa

SEQ ID NO: 180002 - RNA, 22 nt, Human
ucauuuguugcuguuaccugag

SEQ ID NO: 180003 - RNA, 22 nt, Human
agacaauauauaauuuuaguug

SEQ ID NO: 180004 - RNA, 22 nt, Human
uuggggaaggcuucccuguacc

SEQ ID NO: 180005 - RNA, 22 nt, Human
aucaggaucugggagccugaaa

SEQ ID NO: 180006 - RNA, 22 nt, Human
ugcuccagccuaugcucuccgg

SEQ ID NO: 180007 - RNA, 22 nt, Human
uaaggcaguuuugccugagaua

SEQ ID NO: 180008 - RNA, 22 nt, Human
uuaucugaaaaccucaaaauau

SEQ ID NO: 180009 - RNA, 22 nt, Human
gcuuuacauuuuggaaagguga

SEQ ID NO: 180010 - RNA, 22 nt, Human
ugagguggcacacacuuccugc

SEQ ID NO: 180011 - RNA, 22 nt, Human
ugcaacaggagaguucagggca

SEQ ID NO: 180012 - RNA, 23 nt, Human
ggggacaguucccacuggggucu

SEQ ID NO: 180013 - RNA, 22 nt, Human
ggcuagaguggaacuggagcgg

SEQ ID NO: 180014 - RNA, 22 nt, Human
agcuucugcccguguuugcucu

SEQ ID NO: 180015 - RNA, 22 nt, Human
ccccaaggugcucacugucugg

SEQ ID NO: 180016 - RNA, 22 nt, Human
gacaaacugaaguauauuuaga

SEQ ID NO: 180017 - RNA, 22 nt, Human
cuaucuuuuguucauuuugagu

SEQ ID NO: 180018 - RNA, 22 nt, Human
gcuguggaaaugccuaacauga

SEQ ID NO: 180019 - RNA, 22 nt, Human
caagaauuguacaaacugggug

SEQ ID NO: 180020 - RNA, 22 nt, Human
agggccuugcugucugaagcug

SEQ ID NO: 180021 - RNA, 22 nt, Human
guggaggagaggcgccuugcgg

SEQ ID NO: 180022 - RNA, 22 nt, Human
uuuaguuauugcacagaauuag

SEQ ID NO: 180023 - RNA, 22 nt, Human
ccauggcauuuuaugugucuua

SEQ ID NO: 180024 - RNA, 22 nt, Human
uaggaaauacuguaaguuuggg

SEQ ID NO: 180025 - RNA, 22 nt, Human
auuuuagauuuaagaauaaggu

SEQ ID NO: 180026 - RNA, 22 nt, Human
uuugcauuaguuuagauuucaa

SEQ ID NO: 180027 - RNA, 22 nt, Human
agccacugugugaccagcuguc

SEQ ID NO: 180028 - RNA, 21 nt, Human
uucaguuucuuccucaucuau

SEQ ID NO: 180029 - RNA, 22 nt, Human
ugaggcaagcugggcccaugga

SEQ ID NO: 180030 - RNA, 22 nt, Human
ucugauuagagcauucuugagu

SEQ ID NO: 180031 - RNA, 22 nt, Human
cugcuccuggucauccuccacu

SEQ ID NO: 180032 - RNA, 22 nt, Human
cauugcaacuucaaacuccugg

SEQ ID NO: 180033 - RNA, 14 nt, Human
uccacaucagcagu

SEQ ID NO: 180034 - RNA, 22 nt, Human
gacagguugaaguaucaaaggu

SEQ ID NO: 180035 - RNA, 22 nt, Human
gggcuucuguuccuuucacuug

SEQ ID NO: 180036 - RNA, 22 nt, Human
agguggagacccagagaaggcg

SEQ ID NO: 180037 - RNA, 22 nt, Human
agcugccacagagccuggccag

SEQ ID NO: 180038 - RNA, 22 nt, Human
ggcugcaaaggaaaagugguga

SEQ ID NO: 180039 - RNA, 22 nt, Human
ccaggccccagggcuggcuuuc

SEQ ID NO: 180040 - RNA, 22 nt, Human
ccugguggaaggugagugaggc

SEQ ID NO: 180041 - RNA, 22 nt, Human
uuuucauuuuuguagaugcaag

SEQ ID NO: 180042 - RNA, 22 nt, Human
augaggagcuguuuuaacugcu

SEQ ID NO: 180043 - RNA, 23 nt, Human
acagugugguggacaaggagcag

SEQ ID NO: 180044 - RNA, 22 nt, Human
aaguggcagccuuagaaggaga

SEQ ID NO: 180045 - RNA, 22 nt, Human
cuggaggggccauccacagucu

SEQ ID NO: 180046 - RNA, 22 nt, Human
ccugguggagaggggcggagcg

SEQ ID NO: 180047 - RNA, 22 nt, Human
gggcucugggucgugucuccau

SEQ ID NO: 180048 - RNA, 22 nt, Human
ugcuuuauugcaucaguguggg

SEQ ID NO: 180049 - RNA, 22 nt, Human
aaagccaucaguaaaaugauuu

SEQ ID NO: 180050 - RNA, 22 nt, Human
aaagugggaacaauggagagug

SEQ ID NO: 180051 - RNA, 22 nt, Human
cccagugucuccaacaucagau

SEQ ID NO: 180052 - RNA, 22 nt, Human
aaacacguauaaugugacagag

SEQ ID NO: 180053 - RNA, 22 nt, Human
ggucuagaugaaauuaaauguu

SEQ ID NO: 180054 - RNA, 22 nt, Human
uucauugaaggagggacuugcu

SEQ ID NO: 180055 - RNA, 22 nt, Human
acaucucuggguccuccaugca

SEQ ID NO: 180056 - RNA, 18 nt, Human
ccagcaugccagaggcug

SEQ ID NO: 180057 - RNA, 22 nt, Human
cuuuuguuaggagaaaacauca

SEQ ID NO: 180058 - RNA, 22 nt, Human
agcaggugggaucaagcuggca

SEQ ID NO: 180059 - RNA, 22 nt, Human
augcuguggggagugaggguag

SEQ ID NO: 180060 - RNA, 22 nt, Human
ucuggagaagcccagggagcug

SEQ ID NO: 180061 - RNA, 22 nt, Human
cccaaggccuucaagccagcuc

SEQ ID NO: 180062 - RNA, 22 nt, Human
ugggcaggaugcguugauucuu

SEQ ID NO: 180063 - RNA, 22 nt, Human
ucuguuaucucaagucacaaga

SEQ ID NO: 180064 - RNA, 22 nt, Human
cagggcuggauccuccagacuc

SEQ ID NO: 180065 - RNA, 22 nt, Human
cagcaugaucccaguugauugc

SEQ ID NO: 180066 - RNA, 22 nt, Human
uauuuaacuggaaacacaauga

SEQ ID NO: 180067 - RNA, 22 nt, Human
gaggaggggcacuugucuccua

SEQ ID NO: 180068 - RNA, 20 nt, Human
uccugcagucgcuagcgccc

SEQ ID NO: 180069 - RNA, 22 nt, Human
aauaccuuccaacaucaagaca

SEQ ID NO: 180070 - RNA, 22 nt, Human
gggugcagcagagcuccucugu

SEQ ID NO: 180071 - RNA, 22 nt, Human
ccagcagaggggcggagugcag

SEQ ID NO: 180072 - RNA, 22 nt, Human
ggcuggcuugcggagucacaga

SEQ ID NO: 180073 - RNA, 22 nt, Human
ucccugggccuccugcuaugca

SEQ ID NO: 180074 - RNA, 22 nt, Human
aguaacaaaugcaucugggcau

SEQ ID NO: 180075 - RNA, 22 nt, Human
agcacagaauggcuuggaagcc

SEQ ID NO: 180076 - RNA, 22 nt, Human
ucuccagguggggucaccuuuu

SEQ ID NO: 180077 - RNA, 22 nt, Human
caggccacacggcggcucccug

SEQ ID NO: 180078 - RNA, 22 nt, Human
aaugcuguccaauaggaacaua

SEQ ID NO: 180079 - RNA, 22 nt, Human
cagauaauaauaugacuucacu

SEQ ID NO: 180080 - RNA, 19 nt, Human
augucacucauguucccug

SEQ ID NO: 180081 - RNA, 23 nt, Human
ucucaaaucuuugcguuguaucu

SEQ ID NO: 180082 - RNA, 22 nt, Human
uguccuuuguguaucuauagua

SEQ ID NO: 180083 - RNA, 22 nt, Human
agcuccuguggcagcucuucug

SEQ ID NO: 180084 - RNA, 22 nt, Human
uacacauguauuuauguguaca

SEQ ID NO: 180085 - RNA, 22 nt, Human
caguuucuguuuuaaauagcag

SEQ ID NO: 180086 - RNA, 18 nt, Human
ucagaggagauaccuaaa

SEQ ID NO: 180087 - RNA, 22 nt, Human
ggcaggcacuguguuuuguguu

SEQ ID NO: 180088 - RNA, 23 nt, Human
cagaggugucagugcccaguguc

SEQ ID NO: 180089 - RNA, 22 nt, Human
uucguuuaguccacaaaugcau

SEQ ID NO: 180090 - RNA, 22 nt, Human
auaccauuuccauguuacauua

SEQ ID NO: 180091 - RNA, 23 nt, Human
gguggcaggaguggaugcugagc

SEQ ID NO: 180092 - RNA, 17 nt, Human
cagugaggccuuuccuc

SEQ ID NO: 180093 - RNA, 22 nt, Human
ccugucucuuucaaucugagag

SEQ ID NO: 180094 - RNA, 22 nt, Human
uggauuuccagacagcuuaauu

SEQ ID NO: 180095 - RNA, 22 nt, Human
uagcuucuugagaaagggugcc

SEQ ID NO: 180096 - RNA, 22 nt, Human
agccacagucaaccuguccaua

SEQ ID NO: 180097 - RNA, 22 nt, Human
cuggacucauccauagagguga

SEQ ID NO: 180098 - RNA, 22 nt, Human
cacaggugcuccucggggagcu

SEQ ID NO: 180099 - RNA, 22 nt, Human
aggccugggcaagaaggggcgu

SEQ ID NO: 180100 - RNA, 22 nt, Human
gcagcucaguaaaagaggagca

SEQ ID NO: 180101 - RNA, 22 nt, Human
uuuugauaucaugaugaacaga

SEQ ID NO: 180102 - RNA, 22 nt, Human
guuuuccugagcccagagaugc

SEQ ID NO: 180103 - RNA, 22 nt, Human
aguggcagaucucuggucugga

SEQ ID NO: 180104 - RNA, 22 nt, Human
auuuguuccaugaguaaggcua

SEQ ID NO: 180105 - RNA, 22 nt, Human
ucagguguucuccacucaguuu

SEQ ID NO: 180106 - RNA, 22 nt, Human
gccaggugggagacagacagca

SEQ ID NO: 180107 - RNA, 22 nt, Human
ccuuuauacuaaggcauacaau

SEQ ID NO: 180108 - RNA, 22 nt, Human
cuguggaaucaucaggucuuac

SEQ ID NO: 180109 - RNA, 22 nt, Human
ccucugggggcuuccuuacccu

SEQ ID NO: 180110 - RNA, 22 nt, Human
ccugcugugugacgggauguua

SEQ ID NO: 180111 - RNA, 22 nt, Human
cuuugcugccagaacccagcag

SEQ ID NO: 180112 - RNA, 22 nt, Human
uagcuucuaauacuuaccaauu

SEQ ID NO: 180113 - RNA, 22 nt, Human
cagggcuuugaacaggcaucaa

SEQ ID NO: 180114 - RNA, 22 nt, Human
cugaggcagagaaugaguuugu

SEQ ID NO: 180115 - RNA, 22 nt, Human
cuccccacgccuggacuaagag

SEQ ID NO: 180116 - RNA, 22 nt, Human
acaucuuuuacucugguucggg

SEQ ID NO: 180117 - RNA, 22 nt, Human
agaaaaguuuaaaucuuggcac

SEQ ID NO: 180118 - RNA, 22 nt, Human
uaacuucuggaaaugcaucugc

SEQ ID NO: 180119 - RNA, 22 nt, Human
uccugagggcgauucagcaggu

SEQ ID NO: 180120 - RNA, 22 nt, Human
aauaauaagauacuaagggagu

SEQ ID NO: 180121 - RNA, 22 nt, Human
guggggaggccuaagcaaguug

SEQ ID NO: 180122 - RNA, 22 nt, Human
ccacccagcagaggaggcaaga

SEQ ID NO: 180123 - RNA, 22 nt, Human
ucauguuauugacucauaauau

SEQ ID NO: 180124 - RNA, 22 nt, Human
ggccauggaccccgagcugacc

SEQ ID NO: 180125 - RNA, 22 nt, Human
aucucagacauguuguccauga

SEQ ID NO: 180126 - RNA, 22 nt, Human
uagacacaaaucucagugacac

SEQ ID NO: 180127 - RNA, 22 nt, Human
gcaguggccacauggaggagga

SEQ ID NO: 180128 - RNA, 22 nt, Human
ucagugaaaugcauauucuucg

SEQ ID NO: 180129 - RNA, 22 nt, Human
agggauggcaaguuaaccugag

SEQ ID NO: 180130 - RNA, 22 nt, Human
ucugaaauggggcugaagcacu

SEQ ID NO: 180131 - RNA, 22 nt, Human
aauaguuaagcaacuuuuucca

SEQ ID NO: 180132 - RNA, 22 nt, Human
auguugaguggaugaacaaaca

SEQ ID NO: 180133 - RNA, 22 nt, Human
ccucacugaagaggugacauuu

SEQ ID NO: 180134 - RNA, 22 nt, Human
ucuuuugugauucuucaguuac

SEQ ID NO: 180135 - RNA, 22 nt, Human
guuguaaauacaguacugaaac

SEQ ID NO: 180136 - RNA, 22 nt, Human
uuccugugaaauauagguccau

SEQ ID NO: 180137 - RNA, 22 nt, Human
gggccugaggcccagacacugg

SEQ ID NO: 180138 - RNA, 22 nt, Human
aagcuacauuaagcagauuuac

SEQ ID NO: 180139 - RNA, 18 nt, Human
ugcuuggagcauuuacca

SEQ ID NO: 180140 - RNA, 19 nt, Human
aggcagaggcuuggcuagc

SEQ ID NO: 180141 - RNA, 22 nt, Human
uuuacagagaauguacauaaag

SEQ ID NO: 180142 - RNA, 21 nt, Human
cugccaccugcuccaucagca

SEQ ID NO: 180143 - RNA, 22 nt, Human
uggcuucucaguuucauaauga

SEQ ID NO: 180144 - RNA, 22 nt, Human
aguggcugacaacuggguuaac

SEQ ID NO: 180145 - RNA, 22 nt, Human
uacaucauggcuucaugcugca

SEQ ID NO: 180146 - RNA, 22 nt, Human
cucuguggaagaagaaagaagg

SEQ ID NO: 180147 - RNA, 23 nt, Human
cccuggccuuggggcacaggcug

SEQ ID NO: 180148 - RNA, 22 nt, Human
cagacacacaagcaaucuaagu

SEQ ID NO: 180149 - RNA, 22 nt, Human
aggcucucuagaaacugugccu

SEQ ID NO: 180150 - RNA, 22 nt, Human
gcuggcuuuauggggcuugugg

SEQ ID NO: 180151 - RNA, 22 nt, Human
uggcuucuaaaguuucuuuuag

SEQ ID NO: 180152 - RNA, 22 nt, Human
uaaggacauugguuuugaguaa

SEQ ID NO: 180153 - RNA, 22 nt, Human
ggaaaaaugacacauaucucaa

SEQ ID NO: 180154 - RNA, 22 nt, Human
uuucucuucacugugugccuca

SEQ ID NO: 180155 - RNA, 22 nt, Human
aucuuuagucaggcguggguau

SEQ ID NO: 180156 - RNA, 22 nt, Human
aggagccaugagugacaucaca

SEQ ID NO: 180157 - RNA, 22 nt, Human
acagugauuggcacugauucag

SEQ ID NO: 180158 - RNA, 22 nt, Human
aagacucuguaucaugagggag

SEQ ID NO: 180159 - RNA, 22 nt, Human
uuaggaaauuccaccuguauuc

SEQ ID NO: 180160 - RNA, 22 nt, Human
aaucuauaugcuuuucacauac

SEQ ID NO: 180161 - RNA, 22 nt, Human
cuugaaagcuuugcgucuucua

SEQ ID NO: 180162 - RNA, 19 nt, Human
ggauucugcaguuuucaca

SEQ ID NO: 180163 - RNA, 22 nt, Human
ugacggcugggggcagugguca

SEQ ID NO: 180164 - RNA, 22 nt, Human
aagccuccuuauuaaaggauau

SEQ ID NO: 180165 - RNA, 23 nt, Human
ugguccugguugaggugggcccc

SEQ ID NO: 180166 - RNA, 22 nt, Human
uuaucugucuaucaagacuagc

SEQ ID NO: 180167 - RNA, 22 nt, Human
uuucaugaggggcaaaaucuca

SEQ ID NO: 180168 - RNA, 22 nt, Human
ccuuucugacagugaugggggg

SEQ ID NO: 180169 - RNA, 22 nt, Human
aaggcuggaguacagugcagug

SEQ ID NO: 180170 - RNA, 22 nt, Human
ggaagcaggaggcugggguaaa

SEQ ID NO: 180171 - RNA, 22 nt, Human
auccagaacaccuguaucacca

SEQ ID NO: 180172 - RNA, 22 nt, Human
cauuuguuuauaaguuccccag

SEQ ID NO: 180173 - RNA, 22 nt, Human
ccuggcagcuccguggccuucc

SEQ ID NO: 180174 - RNA, 22 nt, Human
uaaguuuucuggaauaacuugg

SEQ ID NO: 180175 - RNA, 22 nt, Human
agacauuuggaagauacacaua

SEQ ID NO: 180176 - RNA, 22 nt, Human
ccagaaaguucagcugugaaug

SEQ ID NO: 180177 - RNA, 22 nt, Human
aguuacucaaggcugauauaag

SEQ ID NO: 180178 - RNA, 22 nt, Human
ucugggcuuuuccaugccugug

SEQ ID NO: 180179 - RNA, 22 nt, Human
caggcucacuuucucagucaca

SEQ ID NO: 180180 - RNA, 22 nt, Human
guucaaaauucaaaugguauac

SEQ ID NO: 180181 - RNA, 22 nt, Human
uuuaguauguauuuaauggacu

SEQ ID NO: 180182 - RNA, 22 nt, Human
gaagauuaccugagaccacuug

SEQ ID NO: 180183 - RNA, 22 nt, Human
augugggccgugcggguguccu

SEQ ID NO: 180184 - RNA, 22 nt, Human
ggagacaauggaggccaaaaga

SEQ ID NO: 180185 - RNA, 22 nt, Human
ugacaugugcucaucuuggcua

SEQ ID NO: 180186 - RNA, 21 nt, Human
agccagucuguuuucuagugc

SEQ ID NO: 180187 - RNA, 22 nt, Human
guuuuacaagguuaaucagcag

SEQ ID NO: 180188 - RNA, 22 nt, Human
ggcucugccacuucuuggcugu

SEQ ID NO: 180189 - RNA, 22 nt, Human
agaggccacuuugccugugaug

SEQ ID NO: 180190 - RNA, 22 nt, Human
aggccagcuuccagaggggcag

SEQ ID NO: 180191 - RNA, 22 nt, Human
cucacagcugcuucaggaucca

SEQ ID NO: 180192 - RNA, 18 nt, Human
uagcaaagauguggauug

SEQ ID NO: 180193 - RNA, 22 nt, Human
uauuugagcgaagcaguguuuu

SEQ ID NO: 180194 - RNA, 22 nt, Human
cagcaggaggcauggcuucccu

SEQ ID NO: 180195 - RNA, 22 nt, Human
agugugggggcuuuggugucac

SEQ ID NO: 180196 - RNA, 22 nt, Human
ucuuuauguuugaaaguacaau

SEQ ID NO: 180197 - RNA, 22 nt, Human
uuaucaugacuucaagcaucca

SEQ ID NO: 180198 - RNA, 22 nt, Human
gcagagaggaaugaagccaucc

SEQ ID NO: 180199 - RNA, 22 nt, Human
aaagcagcagcacguggaagag

SEQ ID NO: 180200 - RNA, 22 nt, Human
uuuagguucuuggaaucagucu

SEQ ID NO: 180201 - RNA, 22 nt, Human
acucaggaagaaagcagcuggu

SEQ ID NO: 180202 - RNA, 22 nt, Human
cccaggagcuucucucugccuc

SEQ ID NO: 180203 - RNA, 22 nt, Human
cuugccuuugucuucaaaggcu

SEQ ID NO: 180204 - RNA, 22 nt, Human
uagggaugauggagccuaugua

SEQ ID NO: 180205 - RNA, 22 nt, Human
ucacagcuuugagcagagacca

SEQ ID NO: 180206 - RNA, 22 nt, Human
ucccuaggaccccaccuuccgc

SEQ ID NO: 180207 - RNA, 22 nt, Human
ugggcugaguguggaacuaguu

SEQ ID NO: 180208 - RNA, 22 nt, Human
uaaggcuuagaagcuaucugcu

SEQ ID NO: 180209 - RNA, 22 nt, Human
cgcaggcucgguucacagagca

SEQ ID NO: 180210 - RNA, 22 nt, Human
auauuuagauaaaaaugggcuu

SEQ ID NO: 180211 - RNA, 22 nt, Human
ugcccaggguuucuaagagcag

SEQ ID NO: 180212 - RNA, 22 nt, Human
ccuggcugccuuguguugaucu

SEQ ID NO: 180213 - RNA, 22 nt, Human
gaucaacaacuuuugaauagcu

SEQ ID NO: 180214 - RNA, 22 nt, Human
cauaacuugcuuuggagcccgg

SEQ ID NO: 180215 - RNA, 22 nt, Human
uucagagcucagaaaagugucu

SEQ ID NO: 180216 - RNA, 19 nt, Human
ugaggagcagcugguugau

SEQ ID NO: 180217 - RNA, 22 nt, Human
aagucuuuugcuaagaguaaug

SEQ ID NO: 180218 - RNA, 22 nt, Human
ucuccagguagauaugucagga

SEQ ID NO: 180219 - RNA, 22 nt, Human
uuguacuugccauagaacaaca

SEQ ID NO: 180220 - RNA, 22 nt, Human
gucucuggcuuuaugcugguuu

SEQ ID NO: 180221 - RNA, 22 nt, Human
uucacugugauguuuaagagaa

SEQ ID NO: 180222 - RNA, 22 nt, Human
gugcaaucugguuaauacgacu

SEQ ID NO: 180223 - RNA, 23 nt, Human
augaaugaauaaggcaggaaagc

SEQ ID NO: 180224 - RNA, 23 nt, Human
accuuggacuucccagcuuccag

SEQ ID NO: 180225 - RNA, 22 nt, Human
gcucacagucuggcauagucuc

SEQ ID NO: 180226 - RNA, 22 nt, Human
uaaaacuagugguugggacuaa

SEQ ID NO: 180227 - RNA, 19 nt, Human
cuuugucagaacaugcuuc

SEQ ID NO: 180228 - RNA, 22 nt, Human
cuuuaagagaucaccaaucaca

SEQ ID NO: 180229 - RNA, 20 nt, Human
cuccucaguuccaugggagg

SEQ ID NO: 180230 - RNA, 20 nt, Human
cucuggaagaguuuaaaugg

SEQ ID NO: 180231 - RNA, 22 nt, Human
aggcacagugccuggaaucaaa

SEQ ID NO: 180232 - RNA, 22 nt, Human
acacaucagaaauaugaaugag

SEQ ID NO: 180233 - RNA, 22 nt, Human
gugcaagacuuccuaagcaaua

SEQ ID NO: 180234 - RNA, 22 nt, Human
gaccucaucugaacauaugcaa

SEQ ID NO: 180235 - RNA, 22 nt, Human
cugggcccugaagacagucagg

SEQ ID NO: 180236 - RNA, 22 nt, Human
cagugcuguuguaagcucauug

SEQ ID NO: 180237 - RNA, 22 nt, Human
uuauagugcauaauuaacaugg

SEQ ID NO: 180238 - RNA, 22 nt, Human
gcuccugggcccugggcuaacu

SEQ ID NO: 180239 - RNA, 19 nt, Human
cagggauggguagggacuc

SEQ ID NO: 180240 - RNA, 22 nt, Human
gcugagggucuguucauguugc

SEQ ID NO: 180241 - RNA, 22 nt, Human
uuaacugugacaguuucucaga

SEQ ID NO: 180242 - RNA, 22 nt, Human
ccauucugacaccuaauucugu

SEQ ID NO: 180243 - RNA, 22 nt, Human
ucugucauuucaauaugguuaa

SEQ ID NO: 180244 - RNA, 22 nt, Human
ucuguggcuguuaucuuuauau

SEQ ID NO: 180245 - RNA, 20 nt, Human
ugagccuugaggagugacug

SEQ ID NO: 180246 - RNA, 22 nt, Human
ucaggcucagguuaggggccaa

SEQ ID NO: 180247 - RNA, 22 nt, Human
ucagucaugaccauggggugga

SEQ ID NO: 180248 - RNA, 22 nt, Human
ucuguggccugccuccucauuu

SEQ ID NO: 180249 - RNA, 22 nt, Human
uagaugcuuauaaagagcauau

SEQ ID NO: 180250 - RNA, 22 nt, Human
aucucuggguccauagaagaga

SEQ ID NO: 180251 - RNA, 22 nt, Human
uauauuguuggugggaauauaa

SEQ ID NO: 180252 - RNA, 22 nt, Human
uaccaaaagcuuguuucauaca

SEQ ID NO: 180253 - RNA, 22 nt, Human
ucagugucucauaugagguuuc

SEQ ID NO: 180254 - RNA, 22 nt, Human
uugaaugagaaguuauugccau

SEQ ID NO: 180255 - RNA, 22 nt, Human
acaugccagccucagcagcagu

SEQ ID NO: 180256 - RNA, 22 nt, Human
ggaagcugaacuuagcaaggaa

SEQ ID NO: 180257 - RNA, 22 nt, Human
ucugcagaaggaaucagcugag

SEQ ID NO: 180258 - RNA, 22 nt, Human
gcuggcaggagaaacggggugc

SEQ ID NO: 180259 - RNA, 22 nt, Human
aaagcugcccuugugaaacaag

SEQ ID NO: 180260 - RNA, 22 nt, Human
agugauggcaucggguccagca

SEQ ID NO: 180261 - RNA, 22 nt, Human
cccaguggagauaggagugugg

SEQ ID NO: 180262 - RNA, 22 nt, Human
gugaggcagagaugccaaaacu

SEQ ID NO: 180263 - RNA, 22 nt, Human
acaggagaaaucuggucaaaag

SEQ ID NO: 180264 - RNA, 22 nt, Human
gcucccagucugauggaggaga

SEQ ID NO: 180265 - RNA, 22 nt, Human
auuaagagccuacuaugugccg

SEQ ID NO: 180266 - RNA, 19 nt, Human
guggccagggcaggggcug

SEQ ID NO: 180267 - RNA, 22 nt, Human
uccaggacuauaggaaagacac

SEQ ID NO: 180268 - RNA, 22 nt, Human
aauauucaaguuauucuuucuu

SEQ ID NO: 180269 - RNA, 22 nt, Human
aaagccaggggagggauuccca

SEQ ID NO: 180270 - RNA, 22 nt, Human
acauggcucagucucaugacag

SEQ ID NO: 180271 - RNA, 22 nt, Human
ggggaggaagcuggaacacggg

SEQ ID NO: 180272 - RNA, 22 nt, Human
ugcuuccugaggccgucuucuc

SEQ ID NO: 180273 - RNA, 22 nt, Human
uacaugagggcacucugcaucu

SEQ ID NO: 180274 - RNA, 22 nt, Human
agaaaguuugagaacuguagau

SEQ ID NO: 180275 - RNA, 23 nt, Human
aacugcaagguugcugggaagua

SEQ ID NO: 180276 - RNA, 21 nt, Human
agacaacugugacuauucccu

SEQ ID NO: 180277 - RNA, 17 nt, Human
gggugggcacugcuggc

SEQ ID NO: 180278 - RNA, 22 nt, Human
gggaucuggaauuuugguaugu

SEQ ID NO: 180279 - RNA, 22 nt, Human
aaaggcuuguccaguaagggga

SEQ ID NO: 180280 - RNA, 22 nt, Human
gggaaaauauuaagcaggacuu

SEQ ID NO: 180281 - RNA, 22 nt, Human
aauuuacaguugcugaugguac

SEQ ID NO: 180282 - RNA, 22 nt, Human
uccagcccgagggcgcugauga

SEQ ID NO: 180283 - RNA, 22 nt, Human
auagggcauccuuuauugagau

SEQ ID NO: 180284 - RNA, 22 nt, Human
uguuggggucaggagcuagccu

SEQ ID NO: 180285 - RNA, 22 nt, Human
uugcccugucuuaagcuggcaa

SEQ ID NO: 180286 - RNA, 22 nt, Human
ccugagugcuuccagagucaug

SEQ ID NO: 180287 - RNA, 22 nt, Human
uuuaagaaguuauguuauaaau

SEQ ID NO: 180288 - RNA, 22 nt, Human
aggccagcagcaugacggcauc

SEQ ID NO: 180289 - RNA, 22 nt, Human
auaaacaguaaaugugagcagu

SEQ ID NO: 180290 - RNA, 22 nt, Human
uguuugaauuuugcuaacgugu

SEQ ID NO: 180291 - RNA, 22 nt, Human
uuuggaauguaguuuaaucauc

SEQ ID NO: 180292 - RNA, 21 nt, Human
aaguaaaucagagaaauaacc

SEQ ID NO: 180293 - RNA, 22 nt, Human
agagacagacacaucgggcugc

SEQ ID NO: 180294 - RNA, 22 nt, Human
ggcuggagauaugucuggaaca

SEQ ID NO: 180295 - RNA, 22 nt, Human
ggggagaugcuuagguccgggg

SEQ ID NO: 180296 - RNA, 22 nt, Human
ucuguuaugcauaagcaucagu

SEQ ID NO: 180297 - RNA, 22 nt, Human
cagaagaaaguggggagacaag

SEQ ID NO: 180298 - RNA, 22 nt, Human
guuucaaauagguuucagcaaa

SEQ ID NO: 180299 - RNA, 22 nt, Human
gcucucugggugugucuagaua

SEQ ID NO: 180300 - RNA, 22 nt, Human
uuuuuguucccagagaauuugu

SEQ ID NO: 180301 - RNA, 22 nt, Human
cuugggaguagaggcaggagca

SEQ ID NO: 180302 - RNA, 22 nt, Human
gaagccagccuugucugccucu

SEQ ID NO: 180303 - RNA, 22 nt, Human
auuuucagaacauucauucacu

SEQ ID NO: 180304 - RNA, 22 nt, Human
agagccacugggagacagagca

SEQ ID NO: 180305 - RNA, 22 nt, Human
gugcaaaaguaauugcgguuuu

SEQ ID NO: 180306 - RNA, 22 nt, Human
uggagcugguucuggggaagcu

SEQ ID NO: 180307 - RNA, 22 nt, Human
caguuaaaugaugugcccuaga

SEQ ID NO: 180308 - RNA, 22 nt, Human
ugccuugcugcuuuggaguccu

SEQ ID NO: 180309 - RNA, 22 nt, Human
caagcagagguuuauguauuag

SEQ ID NO: 180310 - RNA, 22 nt, Human
uccuggcacuuugggggcucgc

SEQ ID NO: 180311 - RNA, 22 nt, Human
gcugugcagugggaguucggug

SEQ ID NO: 180312 - RNA, 20 nt, Human
ucugugcaguuuaggaaggc

SEQ ID NO: 180313 - RNA, 22 nt, Human
auugguggugaggacaugccag

SEQ ID NO: 180314 - RNA, 22 nt, Human
gccucaguaaccuuaggggaua

SEQ ID NO: 180315 - RNA, 22 nt, Human
ggcugcagcccucgccuagcca

SEQ ID NO: 180316 - RNA, 22 nt, Human
cuggccuggggccucagcugcu

SEQ ID NO: 180317 - RNA, 22 nt, Human
uaggcugagcuaagagagcuua

SEQ ID NO: 180318 - RNA, 22 nt, Human
auucaguuucauggcacagcua

SEQ ID NO: 180319 - RNA, 22 nt, Human
ugguccuggaagguccugaggg

SEQ ID NO: 180320 - RNA, 22 nt, Human
acagcagcgugaaguguguuau

SEQ ID NO: 180321 - RNA, 22 nt, Human
uauuuccacccucaguaaggaa

SEQ ID NO: 180322 - RNA, 22 nt, Human
agucauuuaucuuagccauuau

SEQ ID NO: 180323 - RNA, 22 nt, Human
ggcuguccaccuaccaugccgg

SEQ ID NO: 180324 - RNA, 22 nt, Human
cugugggacucugaggaaaagc

SEQ ID NO: 180325 - RNA, 22 nt, Human
aauaaaauggucaguuuucuca

SEQ ID NO: 180326 - RNA, 22 nt, Human
uucucagugaaguuuagaacau

SEQ ID NO: 180327 - RNA, 22 nt, Human
aagcgccaugguuccugcgcag

SEQ ID NO: 180328 - RNA, 22 nt, Human
gaggccugcagcguggucccug

SEQ ID NO: 180329 - RNA, 23 nt, Human
ccucagcauggcaggagcccagc

SEQ ID NO: 180330 - RNA, 22 nt, Human
ugugaagguuuuuaugggauau

SEQ ID NO: 180331 - RNA, 22 nt, Human
agauaaaaugauuuucuggauc

SEQ ID NO: 180332 - RNA, 22 nt, Human
uagugaaauuuaugcacagcua

SEQ ID NO: 180333 - RNA, 22 nt, Human
gaccugccugagcugccucugc

SEQ ID NO: 180334 - RNA, 22 nt, Human
ucuguggagugaccugggcuuu

SEQ ID NO: 180335 - RNA, 22 nt, Human
gcuguggcuccaauggugagcc

SEQ ID NO: 180336 - RNA, 22 nt, Human
gaugagucacugcaggugcugg

SEQ ID NO: 180337 - RNA, 22 nt, Human
aagcagcuuaaauuagagccug

SEQ ID NO: 180338 - RNA, 22 nt, Human
ugaaucuuuuuggaaauaaaga

SEQ ID NO: 180339 - RNA, 22 nt, Human
auucuauuuuuuaagaaguagu

SEQ ID NO: 180340 - RNA, 22 nt, Human
uguucauugcccccuguguaaa

SEQ ID NO: 180341 - RNA, 22 nt, Human
ugaaggccuaacuuccagugcu

SEQ ID NO: 180342 - RNA, 17 nt, Human
uccuggcaguccccugg

SEQ ID NO: 180343 - RNA, 22 nt, Human
cuggcagcuuagcacucugguu

SEQ ID NO: 180344 - RNA, 20 nt, Human
aacucagagaugaaaaagac

SEQ ID NO: 180345 - RNA, 22 nt, Human
accucaaggaaaaucuagacag

SEQ ID NO: 180346 - RNA, 22 nt, Human
auugaaugcuugcuaacacuuu

SEQ ID NO: 180347 - RNA, 20 nt, Human
auaauuauuuacuuuugugc

SEQ ID NO: 180348 - RNA, 22 nt, Human
ugguuauaaauugcuaugcaga

SEQ ID NO: 180349 - RNA, 22 nt, Human
agaccagggucccacagagucu

SEQ ID NO: 180350 - RNA, 22 nt, Human
ggcuggcuggcugguagacaag

SEQ ID NO: 180351 - RNA, 22 nt, Human
aaucuucuuucuuaacaguaca

SEQ ID NO: 180352 - RNA, 22 nt, Human
cucugcccucacuuggggccug

SEQ ID NO: 180353 - RNA, 22 nt, Human
cugauagguuauuuucagugag

SEQ ID NO: 180354 - RNA, 22 nt, Human
uaggcuccugaguccacagcac

SEQ ID NO: 180355 - RNA, 22 nt, Human
acccugggcacaccauuucccc

SEQ ID NO: 180356 - RNA, 22 nt, Human
cauuuggauuuugaagagagua

SEQ ID NO: 180357 - RNA, 22 nt, Human
cagucagggacaccagcuagga

SEQ ID NO: 180358 - RNA, 22 nt, Human
cuccucugucuggcccugagcc

SEQ ID NO: 180359 - RNA, 22 nt, Human
ucaggccugcaaaugaauggua

SEQ ID NO: 180360 - RNA, 22 nt, Human
accaggcaguauggugcugcaa

SEQ ID NO: 180361 - RNA, 22 nt, Human
gaguaaaaguuggauuacaaag

SEQ ID NO: 180362 - RNA, 22 nt, Human
ccugagggaacaugcacccaau

SEQ ID NO: 180363 - RNA, 22 nt, Human
gcuugaugauaccuaggagaug

SEQ ID NO: 180364 - RNA, 22 nt, Human
ccuggcaagugggcucccagau

SEQ ID NO: 180365 - RNA, 22 nt, Human
aacacauauuuauauaugcaca

SEQ ID NO: 180366 - RNA, 22 nt, Human
uucuguggcaguuugggaggug

SEQ ID NO: 180367 - RNA, 22 nt, Human
gggcaugagaggcaggcaagug

SEQ ID NO: 180368 - RNA, 22 nt, Human
cagcugucuuugcacaguuuag

SEQ ID NO: 180369 - RNA, 22 nt, Human
uuuaaaugcagacguugauuca

SEQ ID NO: 180370 - RNA, 22 nt, Human
caaugucaugauuuuccauuag

SEQ ID NO: 180371 - RNA, 22 nt, Human
ggucagaauuaggucuagagua

SEQ ID NO: 180372 - RNA, 22 nt, Human
cucagcaacccacacacggucu

SEQ ID NO: 180373 - RNA, 22 nt, Human
cuggcagcauggagccugugcu

SEQ ID NO: 180374 - RNA, 22 nt, Human
agcaggguccugaggugaguca

SEQ ID NO: 180375 - RNA, 22 nt, Human
ccuauuuguaggcugggccagu

SEQ ID NO: 180376 - RNA, 22 nt, Human
agaaucuugggcaaauucaucu

SEQ ID NO: 180377 - RNA, 22 nt, Human
gcagggaaggggcaugcuggag

SEQ ID NO: 180378 - RNA, 17 nt, Human
agcugaaauugcugaag

SEQ ID NO: 180379 - RNA, 22 nt, Human
acaggcagggaccuuggcuaag

SEQ ID NO: 180380 - RNA, 22 nt, Human
uucauagugauuguucagauag

SEQ ID NO: 180381 - RNA, 22 nt, Human
aguacaaagugcuccugguucu

SEQ ID NO: 180382 - RNA, 22 nt, Human
uuuugcuugagugcacaaaaug

SEQ ID NO: 180383 - RNA, 22 nt, Human
caugggcaguuggcagggcuca

SEQ ID NO: 180384 - RNA, 22 nt, Human
ggccagacauaucgcucccaaa

SEQ ID NO: 180385 - RNA, 22 nt, Human
cagugcuggaggcuggagggaa

SEQ ID NO: 180386 - RNA, 22 nt, Human
gcuuaguccccaagagagacca

SEQ ID NO: 180387 - RNA, 22 nt, Human
aaugugaggccuugguaguuau

SEQ ID NO: 180388 - RNA, 22 nt, Human
agcagccacacgccuccuucuc

SEQ ID NO: 180389 - RNA, 22 nt, Human
cagaguccuggacacagagaca

SEQ ID NO: 180390 - RNA, 18 nt, Human
cauuuguuauugugugug

SEQ ID NO: 180391 - RNA, 22 nt, Human
gcuuuaaugcuucguggggcca

SEQ ID NO: 180392 - RNA, 22 nt, Human
cuuuuacaguggaccugccauu

SEQ ID NO: 180393 - RNA, 22 nt, Human
cacacaugugggauccgcaggg

SEQ ID NO: 180394 - RNA, 22 nt, Human
aguggcuggaauugcaggugcg

SEQ ID NO: 180395 - RNA, 22 nt, Human
uggcucucugggagguccuggc

SEQ ID NO: 180396 - RNA, 22 nt, Human
aacagagaucuuaauuccugua

SEQ ID NO: 180397 - RNA, 19 nt, Human
ugaguucugugguucucaa

SEQ ID NO: 180398 - RNA, 22 nt, Human
guuagaaacgcaggcucuccgg

SEQ ID NO: 180399 - RNA, 22 nt, Human
uugcugggugcuauuaugaaca

SEQ ID NO: 180400 - RNA, 22 nt, Human
auggaaauacacaagagguuuc

SEQ ID NO: 180401 - RNA, 22 nt, Human
uggguagaguggagggauaaga

SEQ ID NO: 180402 - RNA, 22 nt, Human
cuccugggaugacucuuucuuu

SEQ ID NO: 180403 - RNA, 22 nt, Human
agaguccaaaugugcaguuaug

SEQ ID NO: 180404 - RNA, 23 nt, Human
cucugggcgggcaggucagccuc

SEQ ID NO: 180405 - RNA, 22 nt, Human
uucuuugggcaauugcuggccc

SEQ ID NO: 180406 - RNA, 19 nt, Human
agggcacagggacagaagg

SEQ ID NO: 180407 - RNA, 22 nt, Human
ugaaguuucuugaaucuuggag

SEQ ID NO: 180408 - RNA, 22 nt, Human
cugccuggacagcucuuaccuu

SEQ ID NO: 180409 - RNA, 21 nt, Human
gcaguuuauguaauaugcacu

SEQ ID NO: 180410 - RNA, 22 nt, Human
auccaggaaggauggcauugag

SEQ ID NO: 180411 - RNA, 21 nt, Human
cucuuugggaucuuuggaaag

SEQ ID NO: 180412 - RNA, 22 nt, Human
gaggaagcagggcuuggcugag

SEQ ID NO: 180413 - RNA, 22 nt, Human
uauuacuguuacuucacacugu

SEQ ID NO: 180414 - RNA, 22 nt, Human
cauuuauucucagauccuuguc

SEQ ID NO: 180415 - RNA, 22 nt, Human
aauaugcaaauagguguaauga

SEQ ID NO: 180416 - RNA, 22 nt, Human
cuggcucccuggacauggggcc

SEQ ID NO: 180417 - RNA, 22 nt, Human
cagagggcacucggagugacau

SEQ ID NO: 180418 - RNA, 22 nt, Human
gguggcucggccagugcaggcc

SEQ ID NO: 180419 - RNA, 22 nt, Human
ugugcugggaaauggcaggaua

SEQ ID NO: 180420 - RNA, 22 nt, Human
ccugagccugcagccgagcaga

SEQ ID NO: 180421 - RNA, 22 nt, Human
agccacagggggugagggacaa

SEQ ID NO: 180422 - RNA, 22 nt, Human
uggcugaggagggucuucuggu

SEQ ID NO: 180423 - RNA, 22 nt, Human
ccccuccugcagcaccuuucuu

SEQ ID NO: 180424 - RNA, 22 nt, Human
gggagcuccacugccucucauu

SEQ ID NO: 180425 - RNA, 22 nt, Human
acaggugguagaguggaaagag

SEQ ID NO: 180426 - RNA, 22 nt, Human
agcccaggucucaaaguacagg

SEQ ID NO: 180427 - RNA, 22 nt, Human
ucuaaacacgucucuuugaaua

SEQ ID NO: 180428 - RNA, 22 nt, Human
uuggcugaccagaaccugcccc

SEQ ID NO: 180429 - RNA, 19 nt, Human
aaaaggaauauucuuuggg

SEQ ID NO: 180430 - RNA, 22 nt, Human
cuccugagcugcagccuugugu

SEQ ID NO: 180431 - RNA, 22 nt, Human
aggucaggaggccucugccauu

SEQ ID NO: 180432 - RNA, 22 nt, Human
ccucugagaccagcucugcacc

SEQ ID NO: 180433 - RNA, 22 nt, Human
uucaggaaauuggaguccuucu

SEQ ID NO: 180434 - RNA, 22 nt, Human
ccaaagguguuggccuucagug

SEQ ID NO: 180435 - RNA, 22 nt, Human
agcagcuguggggacaagggua

SEQ ID NO: 180436 - RNA, 22 nt, Human
gccugcaguucugugcuaggca

SEQ ID NO: 180437 - RNA, 22 nt, Human
ugcuuuaagagauuguuaguac

SEQ ID NO: 180438 - RNA, 22 nt, Human
gauacaguguguuaacgagaaa

SEQ ID NO: 180439 - RNA, 22 nt, Human
ugauucaacuuucauaacaaaa

SEQ ID NO: 180440 - RNA, 22 nt, Human
gggcuagaaauucugcagugga

SEQ ID NO: 180441 - RNA, 22 nt, Human
cacaguuucuauaggucagaau

SEQ ID NO: 180442 - RNA, 22 nt, Human
acauuugacuguagauacuugc

SEQ ID NO: 180443 - RNA, 22 nt, Human
uggugagagcugaccgugcgag

SEQ ID NO: 180444 - RNA, 22 nt, Human
uuucucuuucaaucugcaguac

SEQ ID NO: 180445 - RNA, 19 nt, Human
augauacaggugaaaauug

SEQ ID NO: 180446 - RNA, 23 nt, Human
aaggcauuggcuucucucauuuc

SEQ ID NO: 180447 - RNA, 22 nt, Human
gaggcugaugcugccucacaga

SEQ ID NO: 180448 - RNA, 22 nt, Human
cuugaaagucacaugcagcccu

SEQ ID NO: 180449 - RNA, 22 nt, Human
gcucugagaggugcagcaguaa

SEQ ID NO: 180450 - RNA, 19 nt, Human
aucugaggccucaucuggg

SEQ ID NO: 180451 - RNA, 22 nt, Human
agagggugcuggagagacauug

SEQ ID NO: 180452 - RNA, 20 nt, Human
aggagucccugugcucucuc

SEQ ID NO: 180453 - RNA, 22 nt, Human
uuugccugauucuaagagcuca

SEQ ID NO: 180454 - RNA, 22 nt, Human
cuucucuggcagaugugugucc

SEQ ID NO: 180455 - RNA, 22 nt, Human
cugcucuggcguacucggcauc

SEQ ID NO: 180456 - RNA, 22 nt, Human
agggacacgagguccugcuggg

SEQ ID NO: 180457 - RNA, 22 nt, Human
caggaaauaucucaacacuuua

SEQ ID NO: 180458 - RNA, 22 nt, Human
agaugugguaguugaagggaag

SEQ ID NO: 180459 - RNA, 22 nt, Human
caguagcccacuaguaugcagu

SEQ ID NO: 180460 - RNA, 22 nt, Human
uggcaggguuggccaccuuacc

SEQ ID NO: 180461 - RNA, 22 nt, Human
auugucaucgauguuagccagu

SEQ ID NO: 180462 - RNA, 22 nt, Human
uggggguguccuggugcacaca

SEQ ID NO: 180463 - RNA, 22 nt, Human
gcaccauugcugggcuaguucc

SEQ ID NO: 180464 - RNA, 19 nt, Human
agggaaggauucugucauu

SEQ ID NO: 180465 - RNA, 22 nt, Human
cuuaaucucaccugcaaagucc

SEQ ID NO: 180466 - RNA, 19 nt, Human
uagagcuuguuuuaggaag

SEQ ID NO: 180467 - RNA, 22 nt, Human
uuuccugagucagagacaccag

SEQ ID NO: 180468 - RNA, 22 nt, Human
auaucaaaauaaacagcaugca

SEQ ID NO: 180469 - RNA, 22 nt, Human
gaaggcugcugggaaguguggu

SEQ ID NO: 180470 - RNA, 22 nt, Human
cauagaaacugagacaaggauu

SEQ ID NO: 180471 - RNA, 22 nt, Human
aaaaguauaggguuuggaguca

SEQ ID NO: 180472 - RNA, 17 nt, Human
uauguguguguuuauac

SEQ ID NO: 180473 - RNA, 22 nt, Human
cagguucucagaaggcagucac

SEQ ID NO: 180474 - RNA, 22 nt, Human
ugggugcuucgucagcucugag

SEQ ID NO: 180475 - RNA, 22 nt, Human
aggaagccuggcauuaaaaagc

SEQ ID NO: 180476 - RNA, 22 nt, Human
uggggagguucgggaaucuugu

SEQ ID NO: 180477 - RNA, 22 nt, Human
uggagccagcaggacucagagg

SEQ ID NO: 180478 - RNA, 22 nt, Human
guggcagaguugcugacuagaa

SEQ ID NO: 180479 - RNA, 22 nt, Human
uggucccuagcacagcuguccu

SEQ ID NO: 180480 - RNA, 22 nt, Human
gcuggcccagcgcccagggcag

SEQ ID NO: 180481 - RNA, 22 nt, Human
ucauuauuuuggacuggagugu

SEQ ID NO: 180482 - RNA, 20 nt, Human
agcaagaguaaggacagcga

SEQ ID NO: 180483 - RNA, 22 nt, Human
cugggugugggucaagcaacca

SEQ ID NO: 180484 - RNA, 22 nt, Human
uuuuaucuaccuaugcucauuu

SEQ ID NO: 180485 - RNA, 22 nt, Human
agaugggccuucgagcaugccc

SEQ ID NO: 180486 - RNA, 22 nt, Human
acuuugaaauguguaagagaga

SEQ ID NO: 180487 - RNA, 22 nt, Human
gugcaggguagcgacggcagga

SEQ ID NO: 180488 - RNA, 22 nt, Human
caaauagacuuaagcaucugua

SEQ ID NO: 180489 - RNA, 22 nt, Human
uugaauuauaagugugucuacu

SEQ ID NO: 180490 - RNA, 22 nt, Human
ucucucagauggggcacuagua

SEQ ID NO: 180491 - RNA, 19 nt, Human
cuggaaugagaacaugccc

SEQ ID NO: 180492 - RNA, 22 nt, Human
cucugggcuuccuuuguggguu

SEQ ID NO: 180493 - RNA, 22 nt, Human
uugcaaauaaacaaguauacau

SEQ ID NO: 180494 - RNA, 22 nt, Human
gauugcugaagaaagugaguga

SEQ ID NO: 180495 - RNA, 22 nt, Human
ccuggugcccccaagccagcug

SEQ ID NO: 180496 - RNA, 22 nt, Human
cauguaaaccauugugagcauc

SEQ ID NO: 180497 - RNA, 23 nt, Human
ugggccucuccacccuuuucugu

SEQ ID NO: 180498 - RNA, 22 nt, Human
ugggcagcagcaaagccagacu

SEQ ID NO: 180499 - RNA, 22 nt, Human
ugcagaagaaugagcuuggagu

SEQ ID NO: 180500 - RNA, 22 nt, Human
auggcagggaccaagcugucau

SEQ ID NO: 180501 - RNA, 22 nt, Human
cugggaaagugugcuccccucc

SEQ ID NO: 180502 - RNA, 22 nt, Human
acucucacuagcucugugaccu

SEQ ID NO: 180503 - RNA, 22 nt, Human
cacaggagaaaggggaagcucg

SEQ ID NO: 180504 - RNA, 22 nt, Human
cuacauaaauauuuaugugucu

SEQ ID NO: 180505 - RNA, 21 nt, Human
aaauacagaaacuuguuuuca

SEQ ID NO: 180506 - RNA, 22 nt, Human
aucaggaaauacuuauuuauaa

SEQ ID NO: 180507 - RNA, 22 nt, Human
agggccugucuguagaacugaa

SEQ ID NO: 180508 - RNA, 22 nt, Human
uauuugauagagauaaaugaua

SEQ ID NO: 180509 - RNA, 22 nt, Human
ucaggcaaucugacagcuggag

SEQ ID NO: 180510 - RNA, 22 nt, Human
gaaacagauuaacagcauauuu

SEQ ID NO: 180511 - RNA, 22 nt, Human
uugcagggcuuggggauuacag

SEQ ID NO: 180512 - RNA, 22 nt, Human
gcuuuagacauaaaguucuuca

SEQ ID NO: 180513 - RNA, 20 nt, Human
uuucacaaugaacaugucuc

SEQ ID NO: 180514 - RNA, 22 nt, Human
aacaucuacuaagugccaggca

SEQ ID NO: 180515 - RNA, 22 nt, Human
aguguucacucuguggagccca

SEQ ID NO: 180516 - RNA, 22 nt, Human
cugggccuggcguuccaggcug

SEQ ID NO: 180517 - RNA, 22 nt, Human
ugcccuggggucuggagcagca

SEQ ID NO: 180518 - RNA, 22 nt, Human
uguuacuuaucucacgugaugc

SEQ ID NO: 180519 - RNA, 17 nt, Human
gcaggcacugcugccug

SEQ ID NO: 180520 - RNA, 22 nt, Human
ucaagcaaacucugagaaauaa

SEQ ID NO: 180521 - RNA, 22 nt, Human
uccaggaguuugagacugcagu

SEQ ID NO: 180522 - RNA, 22 nt, Human
gcucugagagcuacacagggua

SEQ ID NO: 180523 - RNA, 22 nt, Human
uuaguaaauaaagucuacuuuc

SEQ ID NO: 180524 - RNA, 22 nt, Human
uuaagucaauaucaaucucagc

SEQ ID NO: 180525 - RNA, 22 nt, Human
agggucucuggagagcugagga

SEQ ID NO: 180526 - RNA, 22 nt, Human
gaagcuaaugagauaaaugcca

SEQ ID NO: 180527 - RNA, 22 nt, Human
ucuaggaguaaugagcuagcac

SEQ ID NO: 180528 - RNA, 22 nt, Human
ucuguaguagguuguaguucuu

SEQ ID NO: 180529 - RNA, 22 nt, Human
uagugcagaggaggagccucug

SEQ ID NO: 180530 - RNA, 22 nt, Human
gcgcacugggcgcacgcguagg

SEQ ID NO: 180531 - RNA, 20 nt, Human
ugggccucuggugccucugg

SEQ ID NO: 180532 - RNA, 22 nt, Human
ggcaggcaacggaccacuaguc

SEQ ID NO: 180533 - RNA, 22 nt, Human
caguggauuagccagagcugga

SEQ ID NO: 180534 - RNA, 22 nt, Human
agucugggugugaaugaacuug

SEQ ID NO: 180535 - RNA, 22 nt, Human
ggcccagagggucaggagcuga

SEQ ID NO: 180536 - RNA, 22 nt, Human
aaaacaggugucagcaaacuau

SEQ ID NO: 180537 - RNA, 22 nt, Human
auugcugggaggauguguguuc

SEQ ID NO: 180538 - RNA, 22 nt, Human
ccaaaaaguacauuuaggugug

SEQ ID NO: 180539 - RNA, 22 nt, Human
gcuugcucuuuagccauggcca

SEQ ID NO: 180540 - RNA, 22 nt, Human
gggucuccuaauggaggaugac

SEQ ID NO: 180541 - RNA, 22 nt, Human
guuuacaguacucacuugcauu

SEQ ID NO: 180542 - RNA, 22 nt, Human
gcuaacauugauucagugccug

SEQ ID NO: 180543 - RNA, 22 nt, Human
cagacaaccaggucuuucaguu

SEQ ID NO: 180544 - RNA, 22 nt, Human
guacaaaugaaaauagaccacu

SEQ ID NO: 180545 - RNA, 22 nt, Human
ugguacugagaauagcgucuac

SEQ ID NO: 180546 - RNA, 19 nt, Human
agcccccagacagcaggcc

SEQ ID NO: 180547 - RNA, 22 nt, Human
auacaugugugagcgaagaugu

SEQ ID NO: 180548 - RNA, 22 nt, Human
ucucuggguauucacugccuuc

SEQ ID NO: 180549 - RNA, 22 nt, Human
cuucagugauauaggcuucucc

SEQ ID NO: 180550 - RNA, 22 nt, Human
ucccuggguuaccuuucaaggu

SEQ ID NO: 180551 - RNA, 22 nt, Human
cucugccaucuuggagcucaag

SEQ ID NO: 180552 - RNA, 22 nt, Human
ccacugagguuuugugguuaug

SEQ ID NO: 180553 - RNA, 22 nt, Human
ggcccugggacacaacaccgaa

SEQ ID NO: 180554 - RNA, 22 nt, Human
guccuggcccaggaguacacau

SEQ ID NO: 180555 - RNA, 18 nt, Human
gcauucaguagugaacaa

SEQ ID NO: 180556 - RNA, 22 nt, Human
uauguacaugauuucauuugcu

SEQ ID NO: 180557 - RNA, 21 nt, Human
aaucaagaguacugguguggc

SEQ ID NO: 180558 - RNA, 22 nt, Human
uacauagaauauuucacuuaaa

SEQ ID NO: 180559 - RNA, 22 nt, Human
auugaaaaaugacuauugcuua

SEQ ID NO: 180560 - RNA, 22 nt, Human
agugauuugggugucagaaagu

SEQ ID NO: 180561 - RNA, 22 nt, Human
cacagaggaaaggcaguuggua

SEQ ID NO: 180562 - RNA, 22 nt, Human
ccugggcuuuggaacaguacuu

SEQ ID NO: 180563 - RNA, 22 nt, Human
cgcugcagcuggcugcagggaa

SEQ ID NO: 180564 - RNA, 21 nt, Human
aaagugguaaggauuauuuug

SEQ ID NO: 180565 - RNA, 22 nt, Human
cugaaaaauauguuuuggagaa

SEQ ID NO: 180566 - RNA, 20 nt, Human
ucagauuuuucuaacuuuga

SEQ ID NO: 180567 - RNA, 22 nt, Human
agaaauaugcugauuagaugaa

SEQ ID NO: 180568 - RNA, 22 nt, Human
ucugggugcccuuugcucuguu

SEQ ID NO: 180569 - RNA, 22 nt, Human
ugcaggaguuaagugcucuccu

SEQ ID NO: 180570 - RNA, 22 nt, Human
aagucccugguuccuagcaaaa

SEQ ID NO: 180571 - RNA, 22 nt, Human
uuuacagugagagcuuagugag

SEQ ID NO: 180572 - RNA, 22 nt, Human
cagcccugugcuaagcacccuc

SEQ ID NO: 180573 - RNA, 22 nt, Human
uugauaaaaugauaucuucuuu

SEQ ID NO: 180574 - RNA, 23 nt, Human
acugcugucuuugaagugcuuga

SEQ ID NO: 180575 - RNA, 22 nt, Human
uacagagacuuuauggcacaaa

SEQ ID NO: 180576 - RNA, 20 nt, Human
ccagacagcaccugccuggu

SEQ ID NO: 180577 - RNA, 22 nt, Human
cuccugggcuaugucugcuugg

SEQ ID NO: 180578 - RNA, 23 nt, Human
aggagccaggaaccagcuucccc

SEQ ID NO: 180579 - RNA, 22 nt, Human
uccugaaaugugcacaugacau

SEQ ID NO: 180580 - RNA, 22 nt, Human
uuagccaugugggaaaaacagc

SEQ ID NO: 180581 - RNA, 22 nt, Human
ugcacuguaugguaucuggaca

SEQ ID NO: 180582 - RNA, 22 nt, Human
ugcaaauuucuuuaguacauaa

SEQ ID NO: 180583 - RNA, 19 nt, Human
ccucacccugcagaggagg

SEQ ID NO: 180584 - RNA, 22 nt, Human
uauaauuuuaagugguaaauua

SEQ ID NO: 180585 - RNA, 22 nt, Human
uugauucaucuucuaauaccca

SEQ ID NO: 180586 - RNA, 22 nt, Human
aucaaagugguuuucugugcuu

SEQ ID NO: 180587 - RNA, 22 nt, Human
ugcagagaaaguguagacaggc

SEQ ID NO: 180588 - RNA, 22 nt, Human
uggugggcacagugcccaggcu

SEQ ID NO: 180589 - RNA, 22 nt, Human
ugccagguacacaaguagccag

SEQ ID NO: 180590 - RNA, 22 nt, Human
acucaggaaauugagauaaugg

SEQ ID NO: 180591 - RNA, 22 nt, Human
cucuccaguuaccuaggucuga

SEQ ID NO: 180592 - RNA, 20 nt, Human
ugaaggcagguaagaaagau

SEQ ID NO: 180593 - RNA, 23 nt, Human
uuguccucuggaucgguuugguu

SEQ ID NO: 180594 - RNA, 22 nt, Human
ugaggugguuuguaucacuggg

SEQ ID NO: 180595 - RNA, 22 nt, Human
guccuuggagucaggcaaggcu

SEQ ID NO: 180596 - RNA, 22 nt, Human
agcucuguuacugauuuuccug

SEQ ID NO: 180597 - RNA, 22 nt, Human
cugccuugguuucuagcagggc

SEQ ID NO: 180598 - RNA, 22 nt, Human
cagagcacacaugcauagagug

SEQ ID NO: 180599 - RNA, 22 nt, Human
cucagagaaccuaagcggagga

SEQ ID NO: 180600 - RNA, 22 nt, Human
uuuuucucuaugccaggggccu

SEQ ID NO: 180601 - RNA, 22 nt, Human
uuauuguuagugagacuguaga

SEQ ID NO: 180602 - RNA, 22 nt, Human
uacauguaauuuucauaguaag

SEQ ID NO: 180603 - RNA, 22 nt, Human
gcacccaguuugucucaggguu

SEQ ID NO: 180604 - RNA, 22 nt, Human
augaaaagcauaaacgcugaag

SEQ ID NO: 180605 - RNA, 22 nt, Human
cuccaggcccacgucgaggagg

SEQ ID NO: 180606 - RNA, 22 nt, Human
guccuguguguugccggcugaa

SEQ ID NO: 180607 - RNA, 22 nt, Human
cagguuggggacuuaggaugac

SEQ ID NO: 180608 - RNA, 22 nt, Human
uaggugguugucugcuuuccua

SEQ ID NO: 180609 - RNA, 23 nt, Human
acucaucuucugguauccacagu

SEQ ID NO: 180610 - RNA, 22 nt, Human
aagcugcagcacagagaggugg

SEQ ID NO: 180611 - RNA, 22 nt, Human
gaaaggcuugagacauugauga

SEQ ID NO: 180612 - RNA, 22 nt, Human
aauuagggagagguagcuaggu

SEQ ID NO: 180613 - RNA, 22 nt, Human
ucacuuuacagaugggaaaacu

SEQ ID NO: 180614 - RNA, 22 nt, Human
gcucugaggagccaagaaugug

SEQ ID NO: 180615 - RNA, 22 nt, Human
caccaggcacagcucuccugcu

SEQ ID NO: 180616 - RNA, 23 nt, Human
ucuguaggcagcaugccacucuc

SEQ ID NO: 180617 - RNA, 22 nt, Human
ugaguguuguaaccauaugauu

SEQ ID NO: 180618 - RNA, 22 nt, Human
auguucuauaucauuauuguga

SEQ ID NO: 180619 - RNA, 22 nt, Human
gccugggacuggauguguuugu

SEQ ID NO: 180620 - RNA, 22 nt, Human
caggccuuugcacgugcaguug

SEQ ID NO: 180621 - RNA, 22 nt, Human
aaaauuauagaucuagugccug

SEQ ID NO: 180622 - RNA, 22 nt, Human
aggcuguccucucuugcucagu

SEQ ID NO: 180623 - RNA, 22 nt, Human
ucugaggauagaggcaauagga

SEQ ID NO: 180624 - RNA, 22 nt, Human
uuugacucuagucauagaagug

SEQ ID NO: 180625 - RNA, 22 nt, Human
gauagaaagguguugaaaucca

SEQ ID NO: 180626 - RNA, 22 nt, Human
cucaggaggaugacugccuugg

SEQ ID NO: 180627 - RNA, 22 nt, Human
cugaagcagggagugaugaagu

SEQ ID NO: 180628 - RNA, 21 nt, Human
ugacccuucuagcagaacaca

SEQ ID NO: 180629 - RNA, 22 nt, Human
ucccccacucuaaaggagccuu

SEQ ID NO: 180630 - RNA, 22 nt, Human
ucucacaucugcccugugcugg

SEQ ID NO: 180631 - RNA, 22 nt, Human
aacaggcucuucauuuccagag

SEQ ID NO: 180632 - RNA, 22 nt, Human
ccaggcuucccugagaggcugc

SEQ ID NO: 180633 - RNA, 22 nt, Human
cugggccacaucagaugaagac

SEQ ID NO: 180634 - RNA, 22 nt, Human
ccuuagaagaaaguuacuuuuu

SEQ ID NO: 180635 - RNA, 22 nt, Human
ggccuuagguucccugccucca

SEQ ID NO: 180636 - RNA, 22 nt, Human
ggaggccuagaaaagugguucu

SEQ ID NO: 180637 - RNA, 22 nt, Human
cagcuugggucaggugccugcu

SEQ ID NO: 180638 - RNA, 22 nt, Human
uguucccacaccagccucagcc

SEQ ID NO: 180639 - RNA, 22 nt, Human
ugagagggcccagagcacacca

SEQ ID NO: 180640 - RNA, 22 nt, Human
cagcugaauucuucagacucca

SEQ ID NO: 180641 - RNA, 22 nt, Human
auggaguaauauuaacauguua

SEQ ID NO: 180642 - RNA, 22 nt, Human
gugugucccuacaacagcuuca

SEQ ID NO: 180643 - RNA, 22 nt, Human
caucaucaaaagugacagagaa

SEQ ID NO: 180644 - RNA, 22 nt, Human
guccagucucuuuccaagccca

SEQ ID NO: 180645 - RNA, 22 nt, Human
uauguuuuucagacguccuaca

SEQ ID NO: 180646 - RNA, 19 nt, Human
ugguggaggugcaccugac

SEQ ID NO: 180647 - RNA, 21 nt, Human
aaugcugcccaguaagauggc

SEQ ID NO: 180648 - RNA, 22 nt, Human
caacagcuuuagaaacacuuuc

SEQ ID NO: 180649 - RNA, 22 nt, Human
agcccuaaauuaucuuuauuuu

SEQ ID NO: 180650 - RNA, 22 nt, Human
ugcauuaauuuuugccagguuc

SEQ ID NO: 180651 - RNA, 23 nt, Human
ccugcagcugccacgcccugcuc

SEQ ID NO: 180652 - RNA, 22 nt, Human
gcuuugcauuguuuaaucagga

SEQ ID NO: 180653 - RNA, 22 nt, Human
aguuauuuuggaaaaugaguca

SEQ ID NO: 180654 - RNA, 22 nt, Human
gaagcuugagaacuacuguccu

SEQ ID NO: 180655 - RNA, 22 nt, Human
uagauacauacauuuuaaaaug

SEQ ID NO: 180656 - RNA, 22 nt, Human
uuuaaaguuuuugcacauucug

SEQ ID NO: 180657 - RNA, 22 nt, Human
cuggcucugagcccaccuccag

SEQ ID NO: 180658 - RNA, 18 nt, Human
ugaacuuuuccugcugcu

SEQ ID NO: 180659 - RNA, 23 nt, Human
uuucaguuccagaaaaggggagc

SEQ ID NO: 180660 - RNA, 22 nt, Human
gccaaaguccuccagccaugca

SEQ ID NO: 180661 - RNA, 22 nt, Human
auucuuguaaauuuugugugaa

SEQ ID NO: 180662 - RNA, 22 nt, Human
ugagcucuguuagggcuggaac

SEQ ID NO: 180663 - RNA, 22 nt, Human
accagcugccuggucuaucugc

SEQ ID NO: 180664 - RNA, 20 nt, Human
uggcccagcacgacgaggac

SEQ ID NO: 180665 - RNA, 22 nt, Human
ugaggggccagaccccaccuag

SEQ ID NO: 180666 - RNA, 22 nt, Human
ucagacaggcuucuuucucccu

SEQ ID NO: 180667 - RNA, 22 nt, Human
uaucaacauuaauauuuucugg

SEQ ID NO: 180668 - RNA, 22 nt, Human
aucuuugggauccugauuuacu

SEQ ID NO: 180669 - RNA, 22 nt, Human
uagcauuccuuguggcuucuga

SEQ ID NO: 180670 - RNA, 22 nt, Human
agcacaggaacauggagauggg

SEQ ID NO: 180671 - RNA, 22 nt, Human
agaacugugaaguaugugaaau

SEQ ID NO: 180672 - RNA, 18 nt, Human
uggcaggggcaguacgcc

SEQ ID NO: 180673 - RNA, 22 nt, Human
ugucuguaauagucacuaugug

SEQ ID NO: 180674 - RNA, 22 nt, Human
auuccacaggacuaccaaugug

SEQ ID NO: 180675 - RNA, 22 nt, Human
gucccaggaacauucuggcuag

SEQ ID NO: 180676 - RNA, 22 nt, Human
aauguuugccugacuagagugg

SEQ ID NO: 180677 - RNA, 22 nt, Human
aaauccuuuucuauacagcaua

SEQ ID NO: 180678 - RNA, 18 nt, Human
auauucaagaagacagag

SEQ ID NO: 180679 - RNA, 22 nt, Human
agagccagauggagccgugugu

SEQ ID NO: 180680 - RNA, 21 nt, Human
uaggacagccccccugcccuc

SEQ ID NO: 180681 - RNA, 22 nt, Human
ucaaagaacaucaucugaaaug

SEQ ID NO: 180682 - RNA, 22 nt, Human
cuggcugcaaaaucuauucacu

SEQ ID NO: 180683 - RNA, 22 nt, Human
aucagucuguuggaauaucgcu

SEQ ID NO: 180684 - RNA, 22 nt, Human
uuuacaguuaagaaauguuacc

SEQ ID NO: 180685 - RNA, 22 nt, Human
ggugggagccaacacccuucug

SEQ ID NO: 180686 - RNA, 22 nt, Human
uuugugaauagguuggcuucca

SEQ ID NO: 180687 - RNA, 22 nt, Human
ugguccuggagaguguuccaua

SEQ ID NO: 180688 - RNA, 23 nt, Human
ugauuacaggaaguucaaguguu

SEQ ID NO: 180689 - RNA, 22 nt, Human
ugcuuauuaaacaugcauauuc

SEQ ID NO: 180690 - RNA, 22 nt, Human
ugcccugcccaucuacccuguc

SEQ ID NO: 180691 - RNA, 22 nt, Human
aaccugcauguuucuaaaagca

SEQ ID NO: 180692 - RNA, 22 nt, Human
gucagagcccuucccugauuuu

SEQ ID NO: 180693 - RNA, 22 nt, Human
aauaaugagcuugucuaauugu

SEQ ID NO: 180694 - RNA, 22 nt, Human
aggcugcucaccucccugucug

SEQ ID NO: 180695 - RNA, 22 nt, Human
gggcaggagaagguggaugucc

SEQ ID NO: 180696 - RNA, 22 nt, Human
uugagggagccugggagccaug

SEQ ID NO: 180697 - RNA, 20 nt, Human
gcauccagacacccagcugc

SEQ ID NO: 180698 - RNA, 23 nt, Human
auugugagauuacuaucacacug

SEQ ID NO: 180699 - RNA, 22 nt, Human
cuggagauguccgggugcuguu

SEQ ID NO: 180700 - RNA, 22 nt, Human
cacuggucagcaugguagacca

SEQ ID NO: 180701 - RNA, 22 nt, Human
gcaggcagagguggaggagaca

SEQ ID NO: 180702 - RNA, 22 nt, Human
ucucauguuucugguacuccuu

SEQ ID NO: 180703 - RNA, 22 nt, Human
agucacaugaucccugggccug

SEQ ID NO: 180704 - RNA, 18 nt, Human
ccuggaccugucuccuuu

SEQ ID NO: 180705 - RNA, 22 nt, Human
ugaaagcaaccuguaacaguga

SEQ ID NO: 180706 - RNA, 22 nt, Human
uugcuuuaccauuugaucucua

SEQ ID NO: 180707 - RNA, 22 nt, Human
ucagugcaguagaacuuuaguu

SEQ ID NO: 180708 - RNA, 19 nt, Human
ugcugcaggaugcugcugg

SEQ ID NO: 180709 - RNA, 22 nt, Human
ggcucaggaugagccuucucau

SEQ ID NO: 180710 - RNA, 20 nt, Human
acuccugguaacuuuuguga

SEQ ID NO: 180711 - RNA, 22 nt, Human
aagucauguggaagaauaaccu

SEQ ID NO: 180712 - RNA, 23 nt, Human
ccugucugugcuggguggacaca

SEQ ID NO: 180713 - RNA, 22 nt, Human
aggcaguuguagagagggcucu

SEQ ID NO: 180714 - RNA, 22 nt, Human
acagccaggagccaugggcagg

SEQ ID NO: 180715 - RNA, 21 nt, Human
ugcaggcuacuucugacucua

SEQ ID NO: 180716 - RNA, 22 nt, Human
augaaacacacacgcgcauacu

SEQ ID NO: 180717 - RNA, 22 nt, Human
uccugggagacccagcugugga

SEQ ID NO: 180718 - RNA, 22 nt, Human
gacaccaggucuguuguccucc

SEQ ID NO: 180719 - RNA, 22 nt, Human
uccugagcugccgcaucagcag

SEQ ID NO: 180720 - RNA, 22 nt, Human
aggcugagucgggaggaucacu

SEQ ID NO: 180721 - RNA, 22 nt, Human
uagaaccaguccacagaauuug

SEQ ID NO: 180722 - RNA, 22 nt, Human
gacuuugguuugagcaagucag

SEQ ID NO: 180723 - RNA, 22 nt, Human
caggcaagauccagaggcugcu

SEQ ID NO: 180724 - RNA, 22 nt, Human
ucugucugagugguguuagagu

SEQ ID NO: 180725 - RNA, 21 nt, Human
cccaggaggcugagaagagca

SEQ ID NO: 180726 - RNA, 22 nt, Human
agcauuuagucuuuauugcagc

SEQ ID NO: 180727 - RNA, 22 nt, Human
aacaguuugccugaaauguauu

SEQ ID NO: 180728 - RNA, 22 nt, Human
agggcagcucucaccucuggcc

SEQ ID NO: 180729 - RNA, 22 nt, Human
ggaugcaggaacacagcgaccu

SEQ ID NO: 180730 - RNA, 21 nt, Human
cuucuuggggagcagcuagac

SEQ ID NO: 180731 - RNA, 22 nt, Human
auguuucaucaguaagguuuug

SEQ ID NO: 180732 - RNA, 22 nt, Human
acugggcugccugguucuucua

SEQ ID NO: 180733 - RNA, 22 nt, Human
agugcuuuagcauccaacuguc

SEQ ID NO: 180734 - RNA, 22 nt, Human
acaacagugugguggaaggagc

SEQ ID NO: 180735 - RNA, 21 nt, Human
agcagccauuucacagagacu

SEQ ID NO: 180736 - RNA, 22 nt, Human
ucuccuccagaggcugugggga

SEQ ID NO: 180737 - RNA, 23 nt, Human
ggcugcucuuuucaugcuguuuc

SEQ ID NO: 180738 - RNA, 20 nt, Human
cagggccuaugauugagcuu

SEQ ID NO: 180739 - RNA, 22 nt, Human
aucaggaugacuauaaggcugc

SEQ ID NO: 180740 - RNA, 22 nt, Human
uguccaggcacugggacucuag

SEQ ID NO: 180741 - RNA, 22 nt, Human
aaacuggauuaccaggcuggug

SEQ ID NO: 180742 - RNA, 22 nt, Human
gccugccucaaaaucccaguuc

SEQ ID NO: 180743 - RNA, 22 nt, Human
aggccagcuucuacccucuguu

SEQ ID NO: 180744 - RNA, 22 nt, Human
uacacaguauaugggaucacag

SEQ ID NO: 180745 - RNA, 22 nt, Human
caacuacuggugcucaggaaau

SEQ ID NO: 180746 - RNA, 22 nt, Human
augcaaaaguaacugugauuuu

SEQ ID NO: 180747 - RNA, 18 nt, Human
ccuagccuccaagcucau

SEQ ID NO: 180748 - RNA, 22 nt, Human
gcuggcacugggaaggacugag

SEQ ID NO: 180749 - RNA, 22 nt, Human
uggaaaacuuugguggugaggg

SEQ ID NO: 180750 - RNA, 19 nt, Human
gcuucccaccagccagccc

SEQ ID NO: 180751 - RNA, 22 nt, Human
acaguggcuuuugugucugcag

SEQ ID NO: 180752 - RNA, 22 nt, Human
gauucuuugacaggguguuggg

SEQ ID NO: 180753 - RNA, 22 nt, Human
aucaggauuacacggggaugcu

SEQ ID NO: 180754 - RNA, 22 nt, Human
gccucugcugcaagccugguug

SEQ ID NO: 180755 - RNA, 22 nt, Human
caacagucucuauagcuccuug

SEQ ID NO: 180756 - RNA, 22 nt, Human
cauaucuccuccagcacaggcc

SEQ ID NO: 180757 - RNA, 21 nt, Human
uaaaugugagcagggcugggc

SEQ ID NO: 180758 - RNA, 22 nt, Human
uaggcccaguuccgccucccgg

SEQ ID NO: 180759 - RNA, 22 nt, Human
gcuucucuucgccuagguccuu

SEQ ID NO: 180760 - RNA, 22 nt, Human
gagacacaaacacauuuagagg

SEQ ID NO: 180761 - RNA, 22 nt, Human
ucugggagaagcugaugugaag

SEQ ID NO: 180762 - RNA, 22 nt, Human
cugugugaugggaagaauguuu

SEQ ID NO: 180763 - RNA, 22 nt, Human
cagaggccucacuuccagccag

SEQ ID NO: 180764 - RNA, 22 nt, Human
gaggcugucuguuagccuggga

SEQ ID NO: 180765 - RNA, 21 nt, Human
gcucccugcucagcuccuggg

SEQ ID NO: 180766 - RNA, 22 nt, Human
ucuggcucugacacuacuguua

SEQ ID NO: 180767 - RNA, 22 nt, Human
ccuggggaccugccucagcccu

SEQ ID NO: 180768 - RNA, 22 nt, Human
ucucacuuuccagacuuuucaa

SEQ ID NO: 180769 - RNA, 22 nt, Human
gaauucuuuucuuucugaaagu

SEQ ID NO: 180770 - RNA, 22 nt, Human
ccaagcuggacagcagcaagga

SEQ ID NO: 180771 - RNA, 22 nt, Human
aagauauacuauuaaguaccau

SEQ ID NO: 180772 - RNA, 22 nt, Human
gugcccugagcuuaugcauucu

SEQ ID NO: 180773 - RNA, 22 nt, Human
gcuccaggauaauaaaguuguu

SEQ ID NO: 180774 - RNA, 22 nt, Human
ucuccugguuuguuaaauaauu

SEQ ID NO: 180775 - RNA, 22 nt, Human
auugugcaaaaccucaggccuc

SEQ ID NO: 180776 - RNA, 22 nt, Human
gcagcacaaaguccccagggac

SEQ ID NO: 180777 - RNA, 22 nt, Human
gugcuuucugcugcauuccucu

SEQ ID NO: 180778 - RNA, 22 nt, Human
acauuucuuuucaucucuauau

SEQ ID NO: 180779 - RNA, 22 nt, Human
agcugcagcuacaguguugguu

SEQ ID NO: 180780 - RNA, 22 nt, Human
uuccaaagucauguugcugaua

SEQ ID NO: 180781 - RNA, 22 nt, Human
augucuuggguuucaguuuacu

SEQ ID NO: 180782 - RNA, 22 nt, Human
agccuccaaaugucaggucccg

SEQ ID NO: 180783 - RNA, 22 nt, Human
ugaguucucaugaaaucuaguu

SEQ ID NO: 180784 - RNA, 22 nt, Human
uuucuuuccauacauauugcua

SEQ ID NO: 180785 - RNA, 22 nt, Human
cagcacaggaauaugguggaca

SEQ ID NO: 180786 - RNA, 22 nt, Human
ucuaccagggucacagaggccc

SEQ ID NO: 180787 - RNA, 22 nt, Human
acauuugauuccauccucuacu

SEQ ID NO: 180788 - RNA, 22 nt, Human
guacaauuauuuaaauggugaa

SEQ ID NO: 180789 - RNA, 19 nt, Human
uguacaaggauuaugcagg

SEQ ID NO: 180790 - RNA, 22 nt, Human
uuuuauugucaaugaagacaga

SEQ ID NO: 180791 - RNA, 17 nt, Human
uacaggagagcaggaac

SEQ ID NO: 180792 - RNA, 22 nt, Human
aaagacucaauuguucccuaau

SEQ ID NO: 180793 - RNA, 22 nt, Human
uguguguguuucugcucauaca

SEQ ID NO: 180794 - RNA, 22 nt, Human
cuccuggagggccaaagaaaua

SEQ ID NO: 180795 - RNA, 22 nt, Human
cacugcucgcugcagcauggcc

SEQ ID NO: 180796 - RNA, 22 nt, Human
cccugggacccgcugcagaggc

SEQ ID NO: 180797 - RNA, 22 nt, Human
cugggugacagagugagauggu

SEQ ID NO: 180798 - RNA, 22 nt, Human
gccugggauuguguaagugaau

SEQ ID NO: 180799 - RNA, 22 nt, Human
accugcuuuauuccuccugccu

SEQ ID NO: 180800 - RNA, 22 nt, Human
uugcauauccuccaacacaugg

SEQ ID NO: 180801 - RNA, 22 nt, Human
uauccaaaguuucucagaaacu

SEQ ID NO: 180802 - RNA, 22 nt, Human
uguccuagaguacauuccacug

SEQ ID NO: 180803 - RNA, 22 nt, Human
ucuuucaaagcuguaguagauu

SEQ ID NO: 180804 - RNA, 22 nt, Human
accugcugugauucuaauuggc

SEQ ID NO: 180805 - RNA, 22 nt, Human
ggagccaguauuuaguggucuu

SEQ ID NO: 180806 - RNA, 22 nt, Human
uacauguggaguuuucuaguca

SEQ ID NO: 180807 - RNA, 20 nt, Human
ccuggcaggcggguuacuua

SEQ ID NO: 180808 - RNA, 22 nt, Human
cuguccugugucagccugaaau

SEQ ID NO: 180809 - RNA, 22 nt, Human
agggcugcuccuccuucaggcc

SEQ ID NO: 180810 - RNA, 22 nt, Human
ugcuggaguaacaagacacuca

SEQ ID NO: 180811 - RNA, 22 nt, Human
accuuggaaaguuuaauugagg

SEQ ID NO: 180812 - RNA, 19 nt, Human
uggaccugugcccauggcu

SEQ ID NO: 180813 - RNA, 22 nt, Human
accagcucuucugcucuaguug

SEQ ID NO: 180814 - RNA, 22 nt, Human
ugucuccuacugccuguggauc

SEQ ID NO: 180815 - RNA, 19 nt, Human
gaggcaguagucaaagcuu

SEQ ID NO: 180816 - RNA, 22 nt, Human
gcugcucuggcucugcaguguc

SEQ ID NO: 180817 - RNA, 19 nt, Human
aaggcugguaccauagguu

SEQ ID NO: 180818 - RNA, 22 nt, Human
aagagcuucccuguuguagagg

SEQ ID NO: 180819 - RNA, 22 nt, Human
uacagggacauggaacaggcuc

SEQ ID NO: 180820 - RNA, 22 nt, Human
gaaguuuauuucaaucuauuca

SEQ ID NO: 180821 - RNA, 21 nt, Human
aggcuguccuuugccagcccu

SEQ ID NO: 180822 - RNA, 22 nt, Human
ggaacugauuaagucaugagaa

SEQ ID NO: 180823 - RNA, 23 nt, Human
uucucuuuagauuuacauuacuc

SEQ ID NO: 180824 - RNA, 22 nt, Human
cuccaggcuucaagggccggcc

SEQ ID NO: 180825 - RNA, 22 nt, Human
gcagugcaggacaaaucagugc

SEQ ID NO: 180826 - RNA, 22 nt, Human
uggcagagacaaggccgggccu

SEQ ID NO: 180827 - RNA, 18 nt, Human
ggccagccccaggccagc

SEQ ID NO: 180828 - RNA, 22 nt, Human
cugguguggacuccgcgcggag

SEQ ID NO: 180829 - RNA, 17 nt, Human
ggccauggugcaagguu

SEQ ID NO: 180830 - RNA, 22 nt, Human
uuuacuaagcccaguuauaugc

SEQ ID NO: 180831 - RNA, 22 nt, Human
uggagggcuaagcugagggaua

SEQ ID NO: 180832 - RNA, 22 nt, Human
acagguguggggcugugguacu

SEQ ID NO: 180833 - RNA, 22 nt, Human
ggcugaggguuaagaucagaca

SEQ ID NO: 180834 - RNA, 22 nt, Human
gcagagugccgagauggaagcg

SEQ ID NO: 180835 - RNA, 22 nt, Human
ugagcucuucuaacuaauugug

SEQ ID NO: 180836 - RNA, 22 nt, Human
uuggcucccacuaacuccagca

SEQ ID NO: 180837 - RNA, 22 nt, Human
cuugacuucuucuagaaauaag

SEQ ID NO: 180838 - RNA, 22 nt, Human
uguaccagaugucuaaagccau

SEQ ID NO: 180839 - RNA, 21 nt, Human
cagcaagacauguuuaucaag

SEQ ID NO: 180840 - RNA, 22 nt, Human
gccaggcagauaugugagcuua

SEQ ID NO: 180841 - RNA, 22 nt, Human
aguuaaauguguuagccagggu

SEQ ID NO: 180842 - RNA, 17 nt, Human
guggcugcacacacaug

SEQ ID NO: 180843 - RNA, 22 nt, Human
gcuucuuuccuugggcuggaac

SEQ ID NO: 180844 - RNA, 23 nt, Human
uucagaagaaaugaguacaggag

SEQ ID NO: 180845 - RNA, 22 nt, Human
uuccucucaacaugccugccgg

SEQ ID NO: 180846 - RNA, 22 nt, Human
agagccuguaacaucuuucuua

SEQ ID NO: 180847 - RNA, 22 nt, Human
cuaccugguacauagaaauguu

SEQ ID NO: 180848 - RNA, 18 nt, Human
ugaagacaugagguuagu

SEQ ID NO: 180849 - RNA, 22 nt, Human
uugcauuacauuugcucagucu

SEQ ID NO: 180850 - RNA, 22 nt, Human
uucacauuacaaggccauauuu

SEQ ID NO: 180851 - RNA, 22 nt, Human
uugguaaacuugacagagaauc

SEQ ID NO: 180852 - RNA, 22 nt, Human
ucuggguccccgaggaaggaga

SEQ ID NO: 180853 - RNA, 23 nt, Human
uccagcagccaagaaggguagaa

SEQ ID NO: 180854 - RNA, 22 nt, Human
agaaggcuaaagaaacagauug

SEQ ID NO: 180855 - RNA, 21 nt, Human
ucugggugcuaguguuugcuu

SEQ ID NO: 180856 - RNA, 22 nt, Human
ucugcugcugcagcuacacuau

SEQ ID NO: 180857 - RNA, 22 nt, Human
gacaaaacugagaucacacugu

SEQ ID NO: 180858 - RNA, 22 nt, Human
uugggaaagaaugagaagguga

SEQ ID NO: 180859 - RNA, 22 nt, Human
agccugggcaugggacgggagg

SEQ ID NO: 180860 - RNA, 22 nt, Human
gaggcagagaccuucaggaccu

SEQ ID NO: 180861 - RNA, 22 nt, Human
cuucagaggggacucaaaguca

SEQ ID NO: 180862 - RNA, 22 nt, Human
ucaggugggucuacaauuaguu

SEQ ID NO: 180863 - RNA, 17 nt, Human
uccagccuccucugcug

SEQ ID NO: 180864 - RNA, 21 nt, Human
ucauguguaacuuuugaccac

SEQ ID NO: 180865 - RNA, 22 nt, Human
ggcaggugcuaagagagguaaa

SEQ ID NO: 180866 - RNA, 22 nt, Human
cuggaugugguaaugacuuuga

SEQ ID NO: 180867 - RNA, 22 nt, Human
uuguauuaaaauguguuucugu

SEQ ID NO: 180868 - RNA, 22 nt, Human
uggcuggagucuggugcuagcc

SEQ ID NO: 180869 - RNA, 22 nt, Human
cuucuuuccuuccuccaguggc

SEQ ID NO: 180870 - RNA, 22 nt, Human
cugccugcacugccuggcucca

SEQ ID NO: 180871 - RNA, 22 nt, Human
ggcucaggacacagugguuuag

SEQ ID NO: 180872 - RNA, 22 nt, Human
gcaaauaaaugcucacugcugu

SEQ ID NO: 180873 - RNA, 22 nt, Human
cagggcagagccaggauuucaa

SEQ ID NO: 180874 - RNA, 21 nt, Human
agacaguaacucuucuacucc

SEQ ID NO: 180875 - RNA, 22 nt, Human
cggagcugccugccaagccugc

SEQ ID NO: 180876 - RNA, 22 nt, Human
ccugugcauccgguggucauug

SEQ ID NO: 180877 - RNA, 22 nt, Human
ggcagagccucagcccuccacc

SEQ ID NO: 180878 - RNA, 22 nt, Human
ggcacugagcugccuuggggca

SEQ ID NO: 180879 - RNA, 22 nt, Human
cagguucuggguccuggguccu

SEQ ID NO: 180880 - RNA, 22 nt, Human
ugcagguggccaucuucguucu

SEQ ID NO: 180881 - RNA, 22 nt, Human
gugcucugccuggggucauggc

SEQ ID NO: 180882 - RNA, 22 nt, Human
caaaugcuacuaauaggcaagu

SEQ ID NO: 180883 - RNA, 22 nt, Human
gugguccaucaugcagagcucc

SEQ ID NO: 180884 - RNA, 22 nt, Human
cuguccugaaagggagauuggg

SEQ ID NO: 180885 - RNA, 19 nt, Human
caucuuggaguacuccuuu

SEQ ID NO: 180886 - RNA, 22 nt, Human
aaucaucuccgaaaaaagagua

SEQ ID NO: 180887 - RNA, 20 nt, Human
agcauacaucauaagaaacc

SEQ ID NO: 180888 - RNA, 22 nt, Human
agaaucaggaagacagccuggc

SEQ ID NO: 180889 - RNA, 22 nt, Human
gauuugcauucugaaagcuacc

SEQ ID NO: 180890 - RNA, 22 nt, Human
ugucuaacccaguggcaggagg

SEQ ID NO: 180891 - RNA, 22 nt, Human
ugcagcaggcacaggacggaag

SEQ ID NO: 180892 - RNA, 22 nt, Human
uggcuccuaaugcugcccagac

SEQ ID NO: 180893 - RNA, 22 nt, Human
ggagccagaggcugcugcugug

SEQ ID NO: 180894 - RNA, 22 nt, Human
uggugguuaugcgcuuuguggg

SEQ ID NO: 180895 - RNA, 22 nt, Human
aacgugcauuaggaccucucca

SEQ ID NO: 180896 - RNA, 22 nt, Human
aacacaggggcguggcucuuac

SEQ ID NO: 180897 - RNA, 20 nt, Human
uggaaccuaggcagagcugg

SEQ ID NO: 180898 - RNA, 22 nt, Human
aaaaagucugcaaaggagguug

SEQ ID NO: 180899 - RNA, 22 nt, Human
accaggcagucaccguccagga

SEQ ID NO: 180900 - RNA, 22 nt, Human
uuugaucaugaagaggauaaac

SEQ ID NO: 180901 - RNA, 22 nt, Human
cuaaaauuaccuaccaguuuag

SEQ ID NO: 180902 - RNA, 22 nt, Human
accaucuuagcagacugcagug

SEQ ID NO: 180903 - RNA, 23 nt, Human
ugcauuauccucucugaagacca

SEQ ID NO: 180904 - RNA, 22 nt, Human
aaguucuugaagacuuuaaaua

SEQ ID NO: 180905 - RNA, 18 nt, Human
cacaggcaggugauaggu

SEQ ID NO: 180906 - RNA, 22 nt, Human
cuccauacuuccaacaaacuuu

SEQ ID NO: 180907 - RNA, 22 nt, Human
uauuggauagcuugugcagaau

SEQ ID NO: 180908 - RNA, 22 nt, Human
ccuggccacagggcucugcauu

SEQ ID NO: 180909 - RNA, 22 nt, Human
agcuuuaugggagcuuagauaa

SEQ ID NO: 180910 - RNA, 22 nt, Human
uguuuucauuugauguaacaaa

SEQ ID NO: 180911 - RNA, 22 nt, Human
ugaauucccugcaggcauccuc

SEQ ID NO: 180912 - RNA, 22 nt, Human
aauagaauuuguacuguguuuu

SEQ ID NO: 180913 - RNA, 22 nt, Human
cuccagugcuucuagaaaauac

SEQ ID NO: 180914 - RNA, 22 nt, Human
ucagacagaaggacuauuugaa

SEQ ID NO: 180915 - RNA, 20 nt, Human
aucaaaggcugauucagucc

SEQ ID NO: 180916 - RNA, 22 nt, Human
gcagcuuugaagacuuauuugc

SEQ ID NO: 180917 - RNA, 22 nt, Human
gcaggcguguuucacgugccag

SEQ ID NO: 180918 - RNA, 22 nt, Human
uaaggcuagcaagaugagaaua

SEQ ID NO: 180919 - RNA, 22 nt, Human
auuuugaaaccaaguuauuucc

SEQ ID NO: 180920 - RNA, 22 nt, Human
cuuagaauuuuaauccagaaag

SEQ ID NO: 180921 - RNA, 22 nt, Human
caggaggaagaacucugcaaca

SEQ ID NO: 180922 - RNA, 22 nt, Human
uaggguccugccuacagagaca

SEQ ID NO: 180923 - RNA, 22 nt, Human
uguccuuuguucccugucucug

SEQ ID NO: 180924 - RNA, 22 nt, Human
cgguccaggauggcuggcaagc

SEQ ID NO: 180925 - RNA, 22 nt, Human
gcacucuccuggcugccacagu

SEQ ID NO: 180926 - RNA, 22 nt, Human
ucagauggcauagguuggaauu

SEQ ID NO: 180927 - RNA, 23 nt, Human
ggacccuguggagggugagaguc

SEQ ID NO: 180928 - RNA, 22 nt, Human
guaaguuauauuaaaauuucag

SEQ ID NO: 180929 - RNA, 22 nt, Human
cuggauguaacgaagguuucac

SEQ ID NO: 180930 - RNA, 22 nt, Human
ucugcuguuuacugugugauau

SEQ ID NO: 180931 - RNA, 22 nt, Human
cacugucacguucugaaacugu

SEQ ID NO: 180932 - RNA, 22 nt, Human
ggcugccuauagaauuauuagu

SEQ ID NO: 180933 - RNA, 22 nt, Human
aagagcaaguggguagugaagc

SEQ ID NO: 180934 - RNA, 22 nt, Human
acagugugguuugagcacuggg

SEQ ID NO: 180935 - RNA, 22 nt, Human
gaauacaccaaggaaucagaau

SEQ ID NO: 180936 - RNA, 22 nt, Human
ugucuuuuaguuugugagaucu

SEQ ID NO: 180937 - RNA, 22 nt, Human
ggcccugcugaagccgggucua

SEQ ID NO: 180938 - RNA, 22 nt, Human
ugucacauaggcaaaauguuuu

SEQ ID NO: 180939 - RNA, 22 nt, Human
gaaauuauugcuagagacugca

SEQ ID NO: 180940 - RNA, 22 nt, Human
uccaugcagcagccucccagcc

SEQ ID NO: 180941 - RNA, 22 nt, Human
cucugcaguguaacagcgcuug

SEQ ID NO: 180942 - RNA, 22 nt, Human
auuucuguauccugcugucaga

SEQ ID NO: 180943 - RNA, 22 nt, Human
aaggcagccuuuguuugauuga

SEQ ID NO: 180944 - RNA, 22 nt, Human
cauuaggguaauugaacacuua

SEQ ID NO: 180945 - RNA, 20 nt, Human
uggucuggagccagugagga

SEQ ID NO: 180946 - RNA, 22 nt, Human
gagaaagauggaaucuuacagg

SEQ ID NO: 180947 - RNA, 22 nt, Human
cagcagccauguaccacacuca

SEQ ID NO: 180948 - RNA, 22 nt, Human
uuucugaaacauggucuuugua

SEQ ID NO: 180949 - RNA, 22 nt, Human
aaucugucccuuaacuagucau

SEQ ID NO: 180950 - RNA, 22 nt, Human
uugcuuuaacuaguaaaugggg

SEQ ID NO: 180951 - RNA, 22 nt, Human
ccaugcccuugucaucuccagg

SEQ ID NO: 180952 - RNA, 22 nt, Human
uagaaucugccugcagcaaaga

SEQ ID NO: 180953 - RNA, 22 nt, Human
gcuccaagguauccaccagggu

SEQ ID NO: 180954 - RNA, 22 nt, Human
cucugagaggugagaagcagca

SEQ ID NO: 180955 - RNA, 22 nt, Human
cagugcagccaaggacaggcac

SEQ ID NO: 180956 - RNA, 22 nt, Human
ggcucuggcuacuccacccugu

SEQ ID NO: 180957 - RNA, 22 nt, Human
acaguuuaugguguuuuauaua

SEQ ID NO: 180958 - RNA, 22 nt, Human
ugcacagguaugcaaagcaugu

SEQ ID NO: 180959 - RNA, 22 nt, Human
ccuuggcuguguugccugcccu

SEQ ID NO: 180960 - RNA, 22 nt, Human
caguucuuaauaccaugugguu

SEQ ID NO: 180961 - RNA, 22 nt, Human
uucuggaacauagcaagaaguu

SEQ ID NO: 180962 - RNA, 22 nt, Human
gcacaaaacacauuuugacaau

SEQ ID NO: 180963 - RNA, 22 nt, Human
ugcucaggaggaggcugugagg

SEQ ID NO: 180964 - RNA, 22 nt, Human
augaggcagcugcuggagaacg

SEQ ID NO: 180965 - RNA, 22 nt, Human
ccagcccuugagauggaaggga

SEQ ID NO: 180966 - RNA, 22 nt, Human
uuacaggaggugcuagguguuu

SEQ ID NO: 180967 - RNA, 19 nt, Human
acugugcucgggaaccacu

SEQ ID NO: 180968 - RNA, 22 nt, Human
agugcagguuaaggaacuggcc

SEQ ID NO: 180969 - RNA, 22 nt, Human
uucuguuuauaauuugcaguug

SEQ ID NO: 180970 - RNA, 22 nt, Human
gagaggaguaggcugauggugc

SEQ ID NO: 180971 - RNA, 19 nt, Human
aguuuauuauaggugauuc

SEQ ID NO: 180972 - RNA, 22 nt, Human
ucacacaugcuaagccagagau

SEQ ID NO: 180973 - RNA, 22 nt, Human
uaaauguuguaaguacaucuaa

SEQ ID NO: 180974 - RNA, 22 nt, Human
aggcagcaauugaaaucauugu

SEQ ID NO: 180975 - RNA, 22 nt, Human
acgucuucguuggcagagauuu

SEQ ID NO: 180976 - RNA, 23 nt, Human
cagaaagcccuuuccccacagua

SEQ ID NO: 180977 - RNA, 22 nt, Human
gggacuuaaugcagagagggac

SEQ ID NO: 180978 - RNA, 22 nt, Human
agggaggugguuccccagugga

SEQ ID NO: 180979 - RNA, 22 nt, Human
cugagucuguacguuagccaua

SEQ ID NO: 180980 - RNA, 22 nt, Human
guggcagagauagaacuggaau

SEQ ID NO: 180981 - RNA, 22 nt, Human
acagaauauugguuacuguugc

SEQ ID NO: 180982 - RNA, 20 nt, Human
caccacagaauuggggacag

SEQ ID NO: 180983 - RNA, 22 nt, Human
ugaaggagaaauggaaaguggg

SEQ ID NO: 180984 - RNA, 22 nt, Human
agugugacuacauuacaagagu

SEQ ID NO: 180985 - RNA, 22 nt, Human
cugaaauaaaguugcuaaaauu

SEQ ID NO: 180986 - RNA, 22 nt, Human
ucagcuuggacagcuugguuga

SEQ ID NO: 180987 - RNA, 22 nt, Human
uuggcucagcugggacuguuga

SEQ ID NO: 180988 - RNA, 22 nt, Human
cuggcuuucucugugguguuca

SEQ ID NO: 180989 - RNA, 22 nt, Human
acagguuuuuguggauauaugu

SEQ ID NO: 180990 - RNA, 18 nt, Human
cugugggcuggugcauga

SEQ ID NO: 180991 - RNA, 22 nt, Human
cccagacccagagggaggcagg

SEQ ID NO: 180992 - RNA, 21 nt, Human
aaagagacaaauggcauauac

SEQ ID NO: 180993 - RNA, 22 nt, Human
aggcaaagcgauaccagagcua

SEQ ID NO: 180994 - RNA, 22 nt, Human
uccagccaagggagguuacuag

SEQ ID NO: 180995 - RNA, 22 nt, Human
ucccagccuuaucuccccuggc

SEQ ID NO: 180996 - RNA, 22 nt, Human
ucacagaagaaguagauugcau

SEQ ID NO: 180997 - RNA, 22 nt, Human
aagcugcaaggaagugugccag

SEQ ID NO: 180998 - RNA, 22 nt, Human
cuucucaguugcaagugucaga

SEQ ID NO: 180999 - RNA, 22 nt, Human
acagucuugcuguauggucagg

SEQ ID NO: 181000 - RNA, 22 nt, Human
auuauauugaguauaaccagag

SEQ ID NO: 181001 - RNA, 22 nt, Human
ucaggacacccugugcuuccuu

SEQ ID NO: 181002 - RNA, 22 nt, Human
agucucagccacacagaccuau

SEQ ID NO: 181003 - RNA, 21 nt, Human
uguggcugccucuggcccugg

SEQ ID NO: 181004 - RNA, 22 nt, Human
cugagccacugcuuguucagug

SEQ ID NO: 181005 - RNA, 21 nt, Human
gccugggaaaucugggaagcc

SEQ ID NO: 181006 - RNA, 22 nt, Human
ucucagaaaaacuuugagggua

SEQ ID NO: 181007 - RNA, 22 nt, Human
gcugccagucuaaugggaaaca

SEQ ID NO: 181008 - RNA, 22 nt, Human
uccuggauuuaacccuggcucu

SEQ ID NO: 181009 - RNA, 22 nt, Human
uuucacagagaaauauaacagg

SEQ ID NO: 181010 - RNA, 22 nt, Human
ccaucacaguccccaucgugau

SEQ ID NO: 181011 - RNA, 22 nt, Human
uguuuagacucaaaauugaaag

SEQ ID NO: 181012 - RNA, 22 nt, Human
agagugaaguucaucgugcagc

SEQ ID NO: 181013 - RNA, 22 nt, Human
cuuagaaugggacccaaugggu

SEQ ID NO: 181014 - RNA, 22 nt, Human
ccagagacgucggucagggcgc

SEQ ID NO: 181015 - RNA, 22 nt, Human
gaggaaggcuaaggggcuuaga

SEQ ID NO: 181016 - RNA, 22 nt, Human
uccaguccauggccucagucuu

SEQ ID NO: 181017 - RNA, 22 nt, Human
agcugcuguggggcucggccug

SEQ ID NO: 181018 - RNA, 22 nt, Human
gcuccuggauguucaagucggc

SEQ ID NO: 181019 - RNA, 22 nt, Human
acucagaggaaaguugagauug

SEQ ID NO: 181020 - RNA, 22 nt, Human
uauuagaaaggcuauugcauag

SEQ ID NO: 181021 - RNA, 22 nt, Human
cugaaagaauaagauguuuaca

SEQ ID NO: 181022 - RNA, 22 nt, Human
aacaugauuggaaaaugcuguc

SEQ ID NO: 181023 - RNA, 22 nt, Human
uagcuuuaagaugagaugugga

SEQ ID NO: 181024 - RNA, 22 nt, Human
guuguucucccuaacaauuacu

SEQ ID NO: 181025 - RNA, 22 nt, Human
cagcugagaaggucugaucagg

SEQ ID NO: 181026 - RNA, 19 nt, Human
uggcagguagugagcaguc

SEQ ID NO: 181027 - RNA, 19 nt, Human
uuccugggguuccauugug

SEQ ID NO: 181028 - RNA, 22 nt, Human
augaggcagcacaugggauugu

SEQ ID NO: 181029 - RNA, 22 nt, Human
agcauggacaguggcagcagug

SEQ ID NO: 181030 - RNA, 22 nt, Human
uacuuagacucuaucuagagau

SEQ ID NO: 181031 - RNA, 22 nt, Human
aaauguaguauguugcauguau

SEQ ID NO: 181032 - RNA, 22 nt, Human
ugucaacauuggcugacaguug

SEQ ID NO: 181033 - RNA, 22 nt, Human
uaagcuggggcuaugcuaaaua

SEQ ID NO: 181034 - RNA, 23 nt, Human
ugagggacaugguggcuucugag

SEQ ID NO: 181035 - RNA, 22 nt, Human
acaugaaaacugguuccuucag

SEQ ID NO: 181036 - RNA, 22 nt, Human
acugcaccucagccugggcgac

SEQ ID NO: 181037 - RNA, 23 nt, Human
agggccuggcguggagugugugc

SEQ ID NO: 181038 - RNA, 22 nt, Human
ggcccaucucuugcucuggguu

SEQ ID NO: 181039 - RNA, 18 nt, Human
gcuuucugugcagcggag

SEQ ID NO: 181040 - RNA, 21 nt, Human
cucagagcaguucagagggau

SEQ ID NO: 181041 - RNA, 21 nt, Human
guguggauaugugacaggugg

SEQ ID NO: 181042 - RNA, 22 nt, Human
ccugggcaacauagggagaccc

SEQ ID NO: 181043 - RNA, 22 nt, Human
agggaugauggaaagaagcagg

SEQ ID NO: 181044 - RNA, 22 nt, Human
cuggcuccugaggcuuggcccc

SEQ ID NO: 181045 - RNA, 22 nt, Human
gcaggagcaauggccuaucaga

SEQ ID NO: 181046 - RNA, 22 nt, Human
cuuccuucuguaagaccaguug

SEQ ID NO: 181047 - RNA, 22 nt, Human
ucagcuggagauccuuguugug

SEQ ID NO: 181048 - RNA, 22 nt, Human
ccaggucaagcuccccuguggu

SEQ ID NO: 181049 - RNA, 22 nt, Human
caagcagagagguuagaacaca

SEQ ID NO: 181050 - RNA, 22 nt, Human
ucucagguaagcuucuuugaug

SEQ ID NO: 181051 - RNA, 23 nt, Human
agcuucugguucaggucaagcag

SEQ ID NO: 181052 - RNA, 22 nt, Human
aagcacagggugucugcauuca

SEQ ID NO: 181053 - RNA, 22 nt, Human
ucacauuuucuacuacuguacg

SEQ ID NO: 181054 - RNA, 22 nt, Human
gcaggcugggguagccccacuu

SEQ ID NO: 181055 - RNA, 22 nt, Human
acaaagcuuagaccuaagagau

SEQ ID NO: 181056 - RNA, 22 nt, Human
cuggagggagauucaaaggagg

SEQ ID NO: 181057 - RNA, 22 nt, Human
auaggaaagaaaauuauguagg

SEQ ID NO: 181058 - RNA, 22 nt, Human
ucacuggggccuuuggucagga

SEQ ID NO: 181059 - RNA, 20 nt, Human
ccugcugggaacccucugaa

SEQ ID NO: 181060 - RNA, 22 nt, Human
aggcaacauaacacgaaagucu

SEQ ID NO: 181061 - RNA, 22 nt, Human
gaacagaauuaccgaagaucug

SEQ ID NO: 181062 - RNA, 22 nt, Human
uuggcugcuaauggcugacagc

SEQ ID NO: 181063 - RNA, 20 nt, Human
guugaaaguaauaugaugcu

SEQ ID NO: 181064 - RNA, 22 nt, Human
caauuucugggccucacacaag

SEQ ID NO: 181065 - RNA, 22 nt, Human
uguccuuuuucuuaggaaauau

SEQ ID NO: 181066 - RNA, 22 nt, Human
gguacagggcuuccuggacaag

SEQ ID NO: 181067 - RNA, 22 nt, Human
gagagcugcaagguagggcggg

SEQ ID NO: 181068 - RNA, 22 nt, Human
aacaggaccuuccaauccauca

SEQ ID NO: 181069 - RNA, 22 nt, Human
ucagaugagugcuuucagcugc

SEQ ID NO: 181070 - RNA, 22 nt, Human
uccaggcaaagugcugggcugc

SEQ ID NO: 181071 - RNA, 22 nt, Human
uguuucaugauugcugucauuu

SEQ ID NO: 181072 - RNA, 22 nt, Human
uucugggcucacagagcagcag

SEQ ID NO: 181073 - RNA, 22 nt, Human
agcaauuaugauaaggccgcug

SEQ ID NO: 181074 - RNA, 22 nt, Human
ucagguggcugguugcuggcua

SEQ ID NO: 181075 - RNA, 23 nt, Human
cagaaaugacaguaagcacccug

SEQ ID NO: 181076 - RNA, 22 nt, Human
uccugugccaucucuagagacu

SEQ ID NO: 181077 - RNA, 22 nt, Human
ccugaaaugacuccagcugagu

SEQ ID NO: 181078 - RNA, 22 nt, Human
cuucuuucuuuugaucacaggu

SEQ ID NO: 181079 - RNA, 22 nt, Human
gaggccugcuuuggcacucugg

SEQ ID NO: 181080 - RNA, 23 nt, Human
uuucacaaugagcauuacagaau

SEQ ID NO: 181081 - RNA, 20 nt, Human
cagcuuggaugagaggcuga

SEQ ID NO: 181082 - RNA, 22 nt, Human
gaaggcuauaugacucagcccu

SEQ ID NO: 181083 - RNA, 22 nt, Human
cucugcagaauuugagcugcuc

SEQ ID NO: 181084 - RNA, 22 nt, Human
gcugaugcaggguugagaggag

SEQ ID NO: 181085 - RNA, 22 nt, Human
uguauuuucagaguggcauuuc

SEQ ID NO: 181086 - RNA, 22 nt, Human
gaccagcugauaaggcauauaa

SEQ ID NO: 181087 - RNA, 22 nt, Human
uucuguuucuggggucucugac

SEQ ID NO: 181088 - RNA, 22 nt, Human
cauaauuugugguaguggggga

SEQ ID NO: 181089 - RNA, 18 nt, Human
gguugauaacuugugauu

SEQ ID NO: 181090 - RNA, 22 nt, Human
ucccugcagacguccugcgggu

SEQ ID NO: 181091 - RNA, 22 nt, Human
uggcugaguuccuggcacacgg

SEQ ID NO: 181092 - RNA, 22 nt, Human
cugggccugugacucccauccu

SEQ ID NO: 181093 - RNA, 22 nt, Human
cuuucuuuguccaccaacaaug

SEQ ID NO: 181094 - RNA, 22 nt, Human
cauaggaagccaucucagucac

SEQ ID NO: 181095 - RNA, 22 nt, Human
uucuuucugggaagaguucaga

SEQ ID NO: 181096 - RNA, 22 nt, Human
ccaggggcuggugcugagcugg

SEQ ID NO: 181097 - RNA, 22 nt, Human
uccagcacagaauuuccuagcu

SEQ ID NO: 181098 - RNA, 22 nt, Human
gcccaagccgccuuccagagac

SEQ ID NO: 181099 - RNA, 22 nt, Human
gccagcagccacagaagucacu

SEQ ID NO: 181100 - RNA, 22 nt, Human
cuuugcuugacacugugauugu

SEQ ID NO: 181101 - RNA, 22 nt, Human
ucugugugaccauaagccagcu

SEQ ID NO: 181102 - RNA, 22 nt, Human
uaagacacaugcguacaagaua

SEQ ID NO: 181103 - RNA, 22 nt, Human
aggcaacugacaguuucugcuu

SEQ ID NO: 181104 - RNA, 22 nt, Human
ucugcaggcauuuuugguuguc

SEQ ID NO: 181105 - RNA, 22 nt, Human
cagggcucacucggcuggcguc

SEQ ID NO: 181106 - RNA, 22 nt, Human
uguguccuucugggagucccag

SEQ ID NO: 181107 - RNA, 22 nt, Human
ccuggaucuaaggaagcuggga

SEQ ID NO: 181108 - RNA, 22 nt, Human
ggaaguuucaggaaucugcauu

SEQ ID NO: 181109 - RNA, 22 nt, Human
cuggcuggcagaugcucuugcu

SEQ ID NO: 181110 - RNA, 22 nt, Human
cagcaagaaucagacaaccuca

SEQ ID NO: 181111 - RNA, 22 nt, Human
uugccagggucaggaugagauc

SEQ ID NO: 181112 - RNA, 22 nt, Human
agucaagauucuggcacuagca

SEQ ID NO: 181113 - RNA, 22 nt, Human
agagccugucugccuuucuacc

SEQ ID NO: 181114 - RNA, 22 nt, Human
ccgggagcaggcgccaccgcca

SEQ ID NO: 181115 - RNA, 22 nt, Human
acauuucagauucaugaaguga

SEQ ID NO: 181116 - RNA, 21 nt, Human
uuuggcaguuucccaggaaau

SEQ ID NO: 181117 - RNA, 22 nt, Human
cuggcagguggagguugcagug

SEQ ID NO: 181118 - RNA, 22 nt, Human
aagaagcuaagacuaucugggu

SEQ ID NO: 181119 - RNA, 22 nt, Human
gaguggcauaugugccugugaa

SEQ ID NO: 181120 - RNA, 22 nt, Human
agaagccauaguaucucagggu

SEQ ID NO: 181121 - RNA, 22 nt, Human
gagcucugaaaaagcuugccuu

SEQ ID NO: 181122 - RNA, 22 nt, Human
gauucuuaugagugaacuuuac

SEQ ID NO: 181123 - RNA, 22 nt, Human
acagggcaccugagguaggaag

SEQ ID NO: 181124 - RNA, 22 nt, Human
cuuuuccacugagccucacaaa

SEQ ID NO: 181125 - RNA, 22 nt, Human
ccagcaggguugguuucuucug

SEQ ID NO: 181126 - RNA, 22 nt, Human
gcucugggaaggaucguaguga

SEQ ID NO: 181127 - RNA, 22 nt, Human
gggacucugagagccugagggu

SEQ ID NO: 181128 - RNA, 22 nt, Human
uggccuguguggcuuccuggga

SEQ ID NO: 181129 - RNA, 22 nt, Human
ugaggcagugauguuuaagcac

SEQ ID NO: 181130 - RNA, 22 nt, Human
cuuuacaaacuauaaagugcgg

SEQ ID NO: 181131 - RNA, 22 nt, Human
aaagcaguaguuuucaaauagu

SEQ ID NO: 181132 - RNA, 22 nt, Human
uucugagcugcaacacuaacau

SEQ ID NO: 181133 - RNA, 22 nt, Human
ucaggaaagguuuguugaaugg

SEQ ID NO: 181134 - RNA, 22 nt, Human
uccugggcccaggcugccaggg

SEQ ID NO: 181135 - RNA, 22 nt, Human
auugaaagcauggauuuggauu

SEQ ID NO: 181136 - RNA, 22 nt, Human
ccaggugucugucucuuuuuca

SEQ ID NO: 181137 - RNA, 22 nt, Human
gauagucaccucccuuaacuuu

SEQ ID NO: 181138 - RNA, 22 nt, Human
uccaggcugccacagugcaacg

SEQ ID NO: 181139 - RNA, 22 nt, Human
gggaggugauuaggaccaugua

SEQ ID NO: 181140 - RNA, 22 nt, Human
ugaggcaggacuugcauaaagu

SEQ ID NO: 181141 - RNA, 22 nt, Human
uucuccagucacugacuucgag

SEQ ID NO: 181142 - RNA, 22 nt, Human
uaacugguacucugguagccug

SEQ ID NO: 181143 - RNA, 22 nt, Human
aaguccaguuucauuugagguc

SEQ ID NO: 181144 - RNA, 22 nt, Human
ucugcuggccuuagcaggucua

SEQ ID NO: 181145 - RNA, 22 nt, Human
uguacauugucacucaucaagu

SEQ ID NO: 181146 - RNA, 22 nt, Human
uucuguguugugacauucuaga

SEQ ID NO: 181147 - RNA, 22 nt, Human
agaaaacagaaagucauuggug

SEQ ID NO: 181148 - RNA, 20 nt, Human
uauugccuaaauaccagaau

SEQ ID NO: 181149 - RNA, 22 nt, Human
uuguauuuccuauaaccuuucu

SEQ ID NO: 181150 - RNA, 22 nt, Human
agccucugauggcucccaagga

SEQ ID NO: 181151 - RNA, 22 nt, Human
guccucagaagccugcuuagcu

SEQ ID NO: 181152 - RNA, 22 nt, Human
acuugauuuuuauaauaaaugg

SEQ ID NO: 181153 - RNA, 22 nt, Human
uucauuccugagcccauauuua

SEQ ID NO: 181154 - RNA, 22 nt, Human
agcccaggaaguugaggcuugc

SEQ ID NO: 181155 - RNA, 22 nt, Human
cagcugcugcccuuggcugcag

SEQ ID NO: 181156 - RNA, 21 nt, Human
agcagcagaucuggugagggc

SEQ ID NO: 181157 - RNA, 22 nt, Human
cacaggccaauacccucucucu

SEQ ID NO: 181158 - RNA, 22 nt, Human
gagccugaugaaacaggcagac

SEQ ID NO: 181159 - RNA, 22 nt, Human
ugagcaggcgcagcaggagguc

SEQ ID NO: 181160 - RNA, 22 nt, Human
uggaggucugcaaggcgcugga

SEQ ID NO: 181161 - RNA, 22 nt, Human
acagccaguccucccacagggu

SEQ ID NO: 181162 - RNA, 22 nt, Human
ugggcaggagagaagcuaaaga

SEQ ID NO: 181163 - RNA, 22 nt, Human
aaacuugacaguagacagauua

SEQ ID NO: 181164 - RNA, 22 nt, Human
gcagcuuccugaguguggacag

SEQ ID NO: 181165 - RNA, 23 nt, Human
uucaugagauuaucugcaugugu

SEQ ID NO: 181166 - RNA, 22 nt, Human
uggcucaguuucugcccagcug

SEQ ID NO: 181167 - RNA, 22 nt, Human
acagguggcuuccauuuucuaa

SEQ ID NO: 181168 - RNA, 22 nt, Human
aggcaggcccugggccaucccg

SEQ ID NO: 181169 - RNA, 22 nt, Human
uaggcucuagauguggucuuug

SEQ ID NO: 181170 - RNA, 21 nt, Human
uggcuaaacccuaguaaauua

SEQ ID NO: 181171 - RNA, 22 nt, Human
uucucaggguuugugcaggcuu

SEQ ID NO: 181172 - RNA, 22 nt, Human
ucauaaauuagcugucuuugaa

SEQ ID NO: 181173 - RNA, 22 nt, Human
agguccagaggcuccuuauuac

SEQ ID NO: 181174 - RNA, 22 nt, Human
ggcccagugcuguucacccagu

SEQ ID NO: 181175 - RNA, 21 nt, Human
agcuuguuauuaauucagaac

SEQ ID NO: 181176 - RNA, 19 nt, Human
ugcccagaguguaugcgca

SEQ ID NO: 181177 - RNA, 23 nt, Human
uuuuagugacuccuuuaucugcc

SEQ ID NO: 181178 - RNA, 22 nt, Human
cagugcaguggcugagcuggag

SEQ ID NO: 181179 - RNA, 22 nt, Human
aagacaaugcauuacuaagaag

SEQ ID NO: 181180 - RNA, 23 nt, Human
uagaaucuguauuucugcaguuc

SEQ ID NO: 181181 - RNA, 22 nt, Human
ugcauauacccgcauuuacaua

SEQ ID NO: 181182 - RNA, 22 nt, Human
uuaauacaacuguugucacugg

SEQ ID NO: 181183 - RNA, 22 nt, Human
cgccucagccguggucaucuuc

SEQ ID NO: 181184 - RNA, 22 nt, Human
agcagguggugggccagauuug

SEQ ID NO: 181185 - RNA, 16 nt, Human
ucagugucagcuccug

SEQ ID NO: 181186 - RNA, 22 nt, Human
ccucuuugugccugcaggcugc

SEQ ID NO: 181187 - RNA, 22 nt, Human
cuguggucacuguuggggaaug

SEQ ID NO: 181188 - RNA, 22 nt, Human
acuaacuugcugagugaccaug

SEQ ID NO: 181189 - RNA, 22 nt, Human
caugccauuugguggauugaga

SEQ ID NO: 181190 - RNA, 22 nt, Human
auauuguacuaggguuacaugu

SEQ ID NO: 181191 - RNA, 22 nt, Human
caugcuaaaauaucugaagauu

SEQ ID NO: 181192 - RNA, 19 nt, Human
ccugggagucagcugaagg

SEQ ID NO: 181193 - RNA, 22 nt, Human
aaauucuuuugugcggugaagu

SEQ ID NO: 181194 - RNA, 22 nt, Human
gcugggagcccuggucugcucc

SEQ ID NO: 181195 - RNA, 18 nt, Human
caguggcauaguugagua

SEQ ID NO: 181196 - RNA, 22 nt, Human
uuggcccuuuaugggaugggca

SEQ ID NO: 181197 - RNA, 22 nt, Human
ggccagaggccacagcuguguc

SEQ ID NO: 181198 - RNA, 22 nt, Human
agaaaauaaauugaugguggaa

SEQ ID NO: 181199 - RNA, 18 nt, Human
ggacaucaucaggugcuu

SEQ ID NO: 181200 - RNA, 22 nt, Human
cauucauaagacuuugcucuug

SEQ ID NO: 181201 - RNA, 22 nt, Human
ugucacaucagggguguugaca

SEQ ID NO: 181202 - RNA, 22 nt, Human
uguuacagcagaauugaaagag

SEQ ID NO: 181203 - RNA, 23 nt, Human
agggcuccuuguugauuagcauu

SEQ ID NO: 181204 - RNA, 22 nt, Human
aauggccagcugggagaguuga

SEQ ID NO: 181205 - RNA, 22 nt, Human
gaggaugguaugaggcaagcaa

SEQ ID NO: 181206 - RNA, 22 nt, Human
cuacccaggcuggagugcagua

SEQ ID NO: 181207 - RNA, 22 nt, Human
cagcaucucuuuuugcauuccu

SEQ ID NO: 181208 - RNA, 19 nt, Human
cuggucugucaugcucccc

SEQ ID NO: 181209 - RNA, 22 nt, Human
uucugugaggacuucucaagga

SEQ ID NO: 181210 - RNA, 22 nt, Human
ccgaggcuggccucagggcugu

SEQ ID NO: 181211 - RNA, 22 nt, Human
ucuguacaguaccagauaguaa

SEQ ID NO: 181212 - RNA, 22 nt, Human
uugacucauaccugccugaccc

SEQ ID NO: 181213 - RNA, 22 nt, Human
ggaaaacaagagaaugauguuu

SEQ ID NO: 181214 - RNA, 22 nt, Human
ugggaguggggcauagaaggua

SEQ ID NO: 181215 - RNA, 22 nt, Human
accagucuuguugccaugucug

SEQ ID NO: 181216 - RNA, 22 nt, Human
gcuuggcucuaagacaccuauu

SEQ ID NO: 181217 - RNA, 22 nt, Human
uagaaaugugauaauagcuuaa

SEQ ID NO: 181218 - RNA, 22 nt, Human
uaugcaaaucauuagauuuccu

SEQ ID NO: 181219 - RNA, 22 nt, Human
ccuucuucuguguggcccaaga

SEQ ID NO: 181220 - RNA, 22 nt, Human
uucagcaguuucugagaagcaa

SEQ ID NO: 181221 - RNA, 22 nt, Human
augcacagacccaaaggccauc

SEQ ID NO: 181222 - RNA, 21 nt, Human
uuugccuucacgaagcauccu

SEQ ID NO: 181223 - RNA, 22 nt, Human
cuguccuguagcuccaucaguc

SEQ ID NO: 181224 - RNA, 22 nt, Human
ugaggcagaaauuccuguuuuc

SEQ ID NO: 181225 - RNA, 22 nt, Human
uggucuaagagccuaacugcug

SEQ ID NO: 181226 - RNA, 22 nt, Human
agcacccuccaacuucccugua

SEQ ID NO: 181227 - RNA, 22 nt, Human
acauguuuugugccuugacuag

SEQ ID NO: 181228 - RNA, 22 nt, Human
uggcagcaaaaccagaaucaga

SEQ ID NO: 181229 - RNA, 19 nt, Human
uccaggcauccuucaggcu

SEQ ID NO: 181230 - RNA, 22 nt, Human
uuuuauuggagugauaccaagc

SEQ ID NO: 181231 - RNA, 19 nt, Human
cuucugugauacaucaguc

SEQ ID NO: 181232 - RNA, 22 nt, Human
cugccucuguugggcauggucu

SEQ ID NO: 181233 - RNA, 19 nt, Human
gcacugaagaguuggucac

SEQ ID NO: 181234 - RNA, 19 nt, Human
ucauuguugguuugucggg

SEQ ID NO: 181235 - RNA, 22 nt, Human
uguuaaucaacaacaaacagug

SEQ ID NO: 181236 - RNA, 22 nt, Human
gagcucaguguagucauggcuu

SEQ ID NO: 181237 - RNA, 22 nt, Human
caagggcucacggucugcuggg

SEQ ID NO: 181238 - RNA, 22 nt, Human
aaaacacaagaagcaggguaca

SEQ ID NO: 181239 - RNA, 22 nt, Human
gugcauauuuugcacacagaug

SEQ ID NO: 181240 - RNA, 22 nt, Human
ugcuaacaaagucuaaaucaua

SEQ ID NO: 181241 - RNA, 21 nt, Human
gaaaaccauuugcaucaugag

SEQ ID NO: 181242 - RNA, 22 nt, Human
gauggcuuaagaguaaaaggca

SEQ ID NO: 181243 - RNA, 20 nt, Human
uuacuugucucagcauggag

SEQ ID NO: 181244 - RNA, 22 nt, Human
uuugaaaggguuaugagacuga

SEQ ID NO: 181245 - RNA, 22 nt, Human
cauaauuaggcaguugaucauu

SEQ ID NO: 181246 - RNA, 22 nt, Human
ccugcaccuaacacaacgcucu

SEQ ID NO: 181247 - RNA, 22 nt, Human
uugcaagagagucugaaaaaug

SEQ ID NO: 181248 - RNA, 22 nt, Human
ugcaggcaccauucugccucuc

SEQ ID NO: 181249 - RNA, 22 nt, Human
uuuagagcaggguguggcacau

SEQ ID NO: 181250 - RNA, 22 nt, Human
aguccauaguuuacauuacagc

SEQ ID NO: 181251 - RNA, 23 nt, Human
ugagaagccaggggagcgugagg

SEQ ID NO: 181252 - RNA, 22 nt, Human
acacuguuccacacuaagaagg

SEQ ID NO: 181253 - RNA, 22 nt, Human
acaggcuuuuuugcucucgaau

SEQ ID NO: 181254 - RNA, 18 nt, Human
ucccuccugccugcuucc

SEQ ID NO: 181255 - RNA, 22 nt, Human
auaucuaggcugaauguaaaau

SEQ ID NO: 181256 - RNA, 22 nt, Human
acaggccauaaaggcaggcccu

SEQ ID NO: 181257 - RNA, 22 nt, Human
cuggcccuaugagccuccugau

SEQ ID NO: 181258 - RNA, 22 nt, Human
ggcuggucucagugcuggguuc

SEQ ID NO: 181259 - RNA, 22 nt, Human
cagcaacugugccugacacaca

SEQ ID NO: 181260 - RNA, 22 nt, Human
uggaaucaguuacaugugguug

SEQ ID NO: 181261 - RNA, 22 nt, Human
auccuggcccucaugaccccuu

SEQ ID NO: 181262 - RNA, 22 nt, Human
uuccugaggaggaccaggacca

SEQ ID NO: 181263 - RNA, 22 nt, Human
agaagggaacucagagaugauu

SEQ ID NO: 181264 - RNA, 22 nt, Human
agaacuauugcaauaacaagaa

SEQ ID NO: 181265 - RNA, 19 nt, Human
agccacagaacuugcagga

SEQ ID NO: 181266 - RNA, 22 nt, Human
ccagagguuccaggcuagggag

SEQ ID NO: 181267 - RNA, 22 nt, Human
cuuuggauggcuguguguuuau

SEQ ID NO: 181268 - RNA, 22 nt, Human
guugaaaguagaugcuauuugg

SEQ ID NO: 181269 - RNA, 22 nt, Human
acaucucagaacugaguaaccg

SEQ ID NO: 181270 - RNA, 22 nt, Human
agagcaggcauaaagcuuugaa

SEQ ID NO: 181271 - RNA, 22 nt, Human
auucuagauaagaaaagggcug

SEQ ID NO: 181272 - RNA, 22 nt, Human
aaggaggccuggcagaugaaga

SEQ ID NO: 181273 - RNA, 22 nt, Human
aaacaucucaaagagguauuug

SEQ ID NO: 181274 - RNA, 22 nt, Human
guccagugacaaguagcuggcc

SEQ ID NO: 181275 - RNA, 18 nt, Human
agagacagcagcaaaaga

SEQ ID NO: 181276 - RNA, 16 nt, Human
aaggaaugucauucug

SEQ ID NO: 181277 - RNA, 22 nt, Human
agacagggucuugaucagagcu

SEQ ID NO: 181278 - RNA, 22 nt, Human
agaaacucaccuuuccagccau

SEQ ID NO: 181279 - RNA, 19 nt, Human
cucuuggguggcagaggcc

SEQ ID NO: 181280 - RNA, 22 nt, Human
agggaggagaauggacuccuuc

SEQ ID NO: 181281 - RNA, 22 nt, Human
caguucucuugaucgucucuug

SEQ ID NO: 181282 - RNA, 22 nt, Human
acauuuuacaguugucuggcua

SEQ ID NO: 181283 - RNA, 20 nt, Human
ggcaccaggcuaggauugga

SEQ ID NO: 181284 - RNA, 22 nt, Human
acuguuuucuguaaagggccag

SEQ ID NO: 181285 - RNA, 23 nt, Human
guuccuucauguggucauugguu

SEQ ID NO: 181286 - RNA, 22 nt, Human
gugagggcagcuuggucagugu

SEQ ID NO: 181287 - RNA, 21 nt, Human
gccaccccuggcacaggugcu

SEQ ID NO: 181288 - RNA, 22 nt, Human
ugcccaggguggagugcagcgg

SEQ ID NO: 181289 - RNA, 22 nt, Human
gaagcugggucgcugggauccu

SEQ ID NO: 181290 - RNA, 22 nt, Human
auguauuaugguuuuccuuaag

SEQ ID NO: 181291 - RNA, 22 nt, Human
uucaggauaguggugaguggca

SEQ ID NO: 181292 - RNA, 21 nt, Human
gucuuuuaagugaagagaggc

SEQ ID NO: 181293 - RNA, 23 nt, Human
ccaauucagauauuggcuugugc

SEQ ID NO: 181294 - RNA, 22 nt, Human
gcugaggccaggccccaccgga

SEQ ID NO: 181295 - RNA, 22 nt, Human
cuggcugcuugggacagccaug

SEQ ID NO: 181296 - RNA, 22 nt, Human
caggauggucagaugcauuguc

SEQ ID NO: 181297 - RNA, 22 nt, Human
uccuggccgccgcguggggccg

SEQ ID NO: 181298 - RNA, 22 nt, Human
ucugcauauuguuaauggaaug

SEQ ID NO: 181299 - RNA, 21 nt, Human
uuauuucacauggacuuccag

SEQ ID NO: 181300 - RNA, 22 nt, Human
uaagcaaugcuguaguucaguc

SEQ ID NO: 181301 - RNA, 22 nt, Human
uugagguaguacuuauuauugg

SEQ ID NO: 181302 - RNA, 18 nt, Human
aaauuauucuuccuuuuc

SEQ ID NO: 181303 - RNA, 22 nt, Human
uggcugccuagugucugagcag

SEQ ID NO: 181304 - RNA, 22 nt, Human
aacuuguauauguuauucagag

SEQ ID NO: 181305 - RNA, 22 nt, Human
ucacagacacauuaaacaugug

SEQ ID NO: 181306 - RNA, 22 nt, Human
ucauaaaaguacucauguucau

SEQ ID NO: 181307 - RNA, 17 nt, Human
caguggcagaucuucuc

SEQ ID NO: 181308 - RNA, 22 nt, Human
cuggcuuugaaggucuuuccua

SEQ ID NO: 181309 - RNA, 22 nt, Human
cagagccagagaccugcugugc

SEQ ID NO: 181310 - RNA, 22 nt, Human
ucacaaagcuuugauaagcaga

SEQ ID NO: 181311 - RNA, 22 nt, Human
ccuccugguaauuagcgaaagg

SEQ ID NO: 181312 - RNA, 23 nt, Human
uccuucaaguuaggaagugaaca

SEQ ID NO: 181313 - RNA, 22 nt, Human
ccugcaagaccugagacacacc

SEQ ID NO: 181314 - RNA, 22 nt, Human
uuagaaccauaaugaaucaaug

SEQ ID NO: 181315 - RNA, 22 nt, Human
gggagggagaggacaguucuau

SEQ ID NO: 181316 - RNA, 22 nt, Human
cuucccaguucugcuugagggg

SEQ ID NO: 181317 - RNA, 22 nt, Human
uguguacacgagagguuauaua

SEQ ID NO: 181318 - RNA, 21 nt, Human
gcaggggauagaaauggucug

SEQ ID NO: 181319 - RNA, 22 nt, Human
gagguggucgaggagggguacc

SEQ ID NO: 181320 - RNA, 22 nt, Human
ccuccaggccuugcagguuaac

SEQ ID NO: 181321 - RNA, 22 nt, Human
auggaaauggagugugcuugcu

SEQ ID NO: 181322 - RNA, 22 nt, Human
acuuguucauugaguacauaug

SEQ ID NO: 181323 - RNA, 22 nt, Human
ugcugcagacgaagcccaugcc

SEQ ID NO: 181324 - RNA, 22 nt, Human
caggcauggagaggcagagacu

SEQ ID NO: 181325 - RNA, 22 nt, Human
agguccugaagauuuuacuaga

SEQ ID NO: 181326 - RNA, 22 nt, Human
caggguggugaauagcuauagu

SEQ ID NO: 181327 - RNA, 22 nt, Human
auugucagggguuguggaguuu

SEQ ID NO: 181328 - RNA, 22 nt, Human
cugggaggauucauugagguga

SEQ ID NO: 181329 - RNA, 22 nt, Human
ucgagcugcacgcccccgagcu

SEQ ID NO: 181330 - RNA, 22 nt, Human
gugggacaaggaugaagauauu

SEQ ID NO: 181331 - RNA, 22 nt, Human
accugcagguguuuccacacuu

SEQ ID NO: 181332 - RNA, 22 nt, Human
uugccugguccugugggugcug

SEQ ID NO: 181333 - RNA, 22 nt, Human
gucaacaagguuugcuuaucuu

SEQ ID NO: 181334 - RNA, 19 nt, Human
uaaaggaagaggaagggaa

SEQ ID NO: 181335 - RNA, 22 nt, Human
gcccaggaguuggaggcugcag

SEQ ID NO: 181336 - RNA, 22 nt, Human
ucuugcacuucaugaauauguu

SEQ ID NO: 181337 - RNA, 22 nt, Human
gaauuuaaggaccaagcauuuu

SEQ ID NO: 181338 - RNA, 22 nt, Human
ccugaguggugcuaagcagaua

SEQ ID NO: 181339 - RNA, 22 nt, Human
gggcugcugggcaagaaacauu

SEQ ID NO: 181340 - RNA, 22 nt, Human
gcuguccucgucucucacgcaa

SEQ ID NO: 181341 - RNA, 22 nt, Human
guccuucauuuccugaucucua

SEQ ID NO: 181342 - RNA, 22 nt, Human
gauucaaagacagacucauuuc

SEQ ID NO: 181343 - RNA, 22 nt, Human
uaccuggcagucagucuuuccg

SEQ ID NO: 181344 - RNA, 22 nt, Human
cuuucuucaucaagugccacgu

SEQ ID NO: 181345 - RNA, 22 nt, Human
ugcugggccaaagcaggguuuu

SEQ ID NO: 181346 - RNA, 22 nt, Human
gucugcccuggggcaucaguuu

SEQ ID NO: 181347 - RNA, 22 nt, Human
acagcaugucuaguuaaauacu

SEQ ID NO: 181348 - RNA, 22 nt, Human
caggcucaauggccacuugggc

SEQ ID NO: 181349 - RNA, 22 nt, Human
acauaugaguacuauacagugc

SEQ ID NO: 181350 - RNA, 22 nt, Human
uuuagggaugucagaacaggga

SEQ ID NO: 181351 - RNA, 22 nt, Human
cagggccugccugguuccugga

SEQ ID NO: 181352 - RNA, 20 nt, Human
uaacugaucauuuucaccag

SEQ ID NO: 181353 - RNA, 22 nt, Human
cuagaacaaauuaggaggcaua

SEQ ID NO: 181354 - RNA, 22 nt, Human
aaauguauugcauaggauauuu

SEQ ID NO: 181355 - RNA, 22 nt, Human
augguuauuacugcuguuccag

SEQ ID NO: 181356 - RNA, 20 nt, Human
aguaggcaaaggaaagaucu

SEQ ID NO: 181357 - RNA, 22 nt, Human
cagcugguuaucagagaggccu

SEQ ID NO: 181358 - RNA, 22 nt, Human
uaaugcuuuguuuugaucuaac

SEQ ID NO: 181359 - RNA, 22 nt, Human
agguggcagaugggggugcucg

SEQ ID NO: 181360 - RNA, 18 nt, Human
aguuagaaaugaaggcca

SEQ ID NO: 181361 - RNA, 22 nt, Human
agucaaaggguauuuggauuga

SEQ ID NO: 181362 - RNA, 22 nt, Human
cacagguguccaauaccugcuu

SEQ ID NO: 181363 - RNA, 22 nt, Human
cucuuuaagcuccuaacagcca

SEQ ID NO: 181364 - RNA, 22 nt, Human
aagaaucuguugauuccccacu

SEQ ID NO: 181365 - RNA, 22 nt, Human
ucccagggacccagccugauac

SEQ ID NO: 181366 - RNA, 23 nt, Human
ugaguucuaggcuuaaaacuagc

SEQ ID NO: 181367 - RNA, 22 nt, Human
aagcugaaacauuagccuaaac

SEQ ID NO: 181368 - RNA, 22 nt, Human
gcugcgccggaucccacguucc

SEQ ID NO: 181369 - RNA, 22 nt, Human
aacuuauugaacauucucgaau

SEQ ID NO: 181370 - RNA, 22 nt, Human
aagagagacaauagguagcauu

SEQ ID NO: 181371 - RNA, 22 nt, Human
uuaucauugucgcagucuaauu

SEQ ID NO: 181372 - RNA, 17 nt, Human
acagggcagaaacagcu

SEQ ID NO: 181373 - RNA, 23 nt, Human
auuccagagcuagagucaagugg

SEQ ID NO: 181374 - RNA, 22 nt, Human
cuggcugccuauagucucccuu

SEQ ID NO: 181375 - RNA, 22 nt, Human
uucugugugccagaguugugcu

SEQ ID NO: 181376 - RNA, 22 nt, Human
ugagcugcccccuggccugcuc

SEQ ID NO: 181377 - RNA, 20 nt, Human
ugaaggccagcagcauaggg

SEQ ID NO: 181378 - RNA, 22 nt, Human
ugucauuuaauagauaugaugg

SEQ ID NO: 181379 - RNA, 20 nt, Human
uacaauauucccacuuugcu

SEQ ID NO: 181380 - RNA, 22 nt, Human
gugggcaggccccaaagcaggg

SEQ ID NO: 181381 - RNA, 22 nt, Human
ucaucucaaaacccaaggggca

SEQ ID NO: 181382 - RNA, 22 nt, Human
cucuggccugcuuccucaggua

SEQ ID NO: 181383 - RNA, 22 nt, Human
guugacagcuggugagcugcua

SEQ ID NO: 181384 - RNA, 22 nt, Human
uugcaggguccuguggcucucc

SEQ ID NO: 181385 - RNA, 22 nt, Human
uggcaauguaggcaagaacauu

SEQ ID NO: 181386 - RNA, 19 nt, Human
cuccuucccugguuucugu

SEQ ID NO: 181387 - RNA, 22 nt, Human
cugccuggcauagucuggucga

SEQ ID NO: 181388 - RNA, 20 nt, Human
gcuucucagggcuucucuga

SEQ ID NO: 181389 - RNA, 22 nt, Human
gcuccuguuuucuuccagaaau

SEQ ID NO: 181390 - RNA, 22 nt, Human
uggugagaccuuguuccuuaug

SEQ ID NO: 181391 - RNA, 22 nt, Human
agcugccugugcugggagccca

SEQ ID NO: 181392 - RNA, 17 nt, Human
acaacagaaauguauuc

SEQ ID NO: 181393 - RNA, 22 nt, Human
cccaggacucugacacccccaa

SEQ ID NO: 181394 - RNA, 22 nt, Human
ggccaggaagggaagaucagca

SEQ ID NO: 181395 - RNA, 22 nt, Human
gacccggcuccaggcccagcag

SEQ ID NO: 181396 - RNA, 22 nt, Human
gaggcugggaaguccaagacca

SEQ ID NO: 181397 - RNA, 22 nt, Human
agccuugcuuuuucaguagcac

SEQ ID NO: 181398 - RNA, 22 nt, Human
uucuucaaaauccagcaugauu

SEQ ID NO: 181399 - RNA, 22 nt, Human
cagcugucacuucuaaguuuug

SEQ ID NO: 181400 - RNA, 22 nt, Human
ucaucaaagucaaagaaugacu

SEQ ID NO: 181401 - RNA, 22 nt, Human
ucuuggagauagggucuuaaug

SEQ ID NO: 181402 - RNA, 22 nt, Human
cugugacuagaccugcaggaga

SEQ ID NO: 181403 - RNA, 22 nt, Human
aucagucuguguuagaaaagag

SEQ ID NO: 181404 - RNA, 23 nt, Human
guguucaucccagucugugcaau

SEQ ID NO: 181405 - RNA, 22 nt, Human
uaacaauacccauucuaauuac

SEQ ID NO: 181406 - RNA, 22 nt, Human
ccuguaaauaguuucuucugac

SEQ ID NO: 181407 - RNA, 22 nt, Human
gcuguagguucagucuccaugc

SEQ ID NO: 181408 - RNA, 22 nt, Human
auuguugggucucacuccuaga

SEQ ID NO: 181409 - RNA, 21 nt, Human
cagagcagcguucugcugugg

SEQ ID NO: 181410 - RNA, 22 nt, Human
ucucagaagugaucaggauguu

SEQ ID NO: 181411 - RNA, 22 nt, Human
ccugaggucacaacuugcuuau

SEQ ID NO: 181412 - RNA, 18 nt, Human
ucuguccuuccauucuuc

SEQ ID NO: 181413 - RNA, 22 nt, Human
cauugaaagagauaaagccuuu

SEQ ID NO: 181414 - RNA, 22 nt, Human
caaaugcuaugauuuugaguuu

SEQ ID NO: 181415 - RNA, 22 nt, Human
aagcugcaaaaaauuucugucu

SEQ ID NO: 181416 - RNA, 22 nt, Human
ugagacagcccuucugcacagg

SEQ ID NO: 181417 - RNA, 22 nt, Human
cacagugcaugaugggcagaag

SEQ ID NO: 181418 - RNA, 21 nt, Human
gugcccuguucccacaugccc

SEQ ID NO: 181419 - RNA, 22 nt, Human
agggaggcaggaaaguugucug

SEQ ID NO: 181420 - RNA, 22 nt, Human
ucaagggaggagacacagcccu

SEQ ID NO: 181421 - RNA, 19 nt, Human
uggcuuccugacucucauc

SEQ ID NO: 181422 - RNA, 22 nt, Human
uagggacacugcucaugaguuc

SEQ ID NO: 181423 - RNA, 22 nt, Human
aacagcuguucgcagauguagg

SEQ ID NO: 181424 - RNA, 19 nt, Human
ucucucuguacauuagaua

SEQ ID NO: 181425 - RNA, 22 nt, Human
aauaaucuugacuacugaauca

SEQ ID NO: 181426 - RNA, 22 nt, Human
cagcucuuccuagccaugccac

SEQ ID NO: 181427 - RNA, 22 nt, Human
aagcaaagagauaaccuuuugg

SEQ ID NO: 181428 - RNA, 21 nt, Human
aggcagcucaggcccagagag

SEQ ID NO: 181429 - RNA, 22 nt, Human
uugcagagugguugugaggauu

SEQ ID NO: 181430 - RNA, 22 nt, Human
aaaugucagaaaacauggagug

SEQ ID NO: 181431 - RNA, 22 nt, Human
uggggcagcuccaucuauucca

SEQ ID NO: 181432 - RNA, 22 nt, Human
acugaugaucugggaguagagu

SEQ ID NO: 181433 - RNA, 22 nt, Human
acuuccagcuagguucugcuaa

SEQ ID NO: 181434 - RNA, 22 nt, Human
agagagacgggggcugcugcuu

SEQ ID NO: 181435 - RNA, 18 nt, Human
auccugggagcagacagc

SEQ ID NO: 181436 - RNA, 22 nt, Human
gagaacacaugcagacugggua

SEQ ID NO: 181437 - RNA, 22 nt, Human
caauacaauuaccaguuaauca

SEQ ID NO: 181438 - RNA, 22 nt, Human
cagcccuccuuucacucccagg

SEQ ID NO: 181439 - RNA, 22 nt, Human
uccaggagaggccugaccaggu

SEQ ID NO: 181440 - RNA, 20 nt, Human
guaacucuggcuaaguaaau

SEQ ID NO: 181441 - RNA, 23 nt, Human
uucaaagaucuucugaaaucugu

SEQ ID NO: 181442 - RNA, 21 nt, Human
gggaggaagcugcuucucucu

SEQ ID NO: 181443 - RNA, 22 nt, Human
ucucucccaaaucugcagauag

SEQ ID NO: 181444 - RNA, 18 nt, Human
cuagaugagcuuggcaag

SEQ ID NO: 181445 - RNA, 22 nt, Human
aaagugcaguccaugaaauuaa

SEQ ID NO: 181446 - RNA, 22 nt, Human
ccacugaggccugggcccaggg

SEQ ID NO: 181447 - RNA, 22 nt, Human
uugcuguaaguaucuuucuacc

SEQ ID NO: 181448 - RNA, 22 nt, Human
uuauucuucuucucuugccagg

SEQ ID NO: 181449 - RNA, 22 nt, Human
uccuaggguuggagacagugac

SEQ ID NO: 181450 - RNA, 22 nt, Human
aacugcaauaacuugugcacca

SEQ ID NO: 181451 - RNA, 22 nt, Human
auucaagauuaauucuauguca

SEQ ID NO: 181452 - RNA, 22 nt, Human
cccaccacgugcuuugcuggag

SEQ ID NO: 181453 - RNA, 22 nt, Human
acuuucaauuugcacuaaccua

SEQ ID NO: 181454 - RNA, 20 nt, Human
uuuauucacagagaagaguu

SEQ ID NO: 181455 - RNA, 22 nt, Human
cugagcacugggcacauagcug

SEQ ID NO: 181456 - RNA, 21 nt, Human
ugcucaugagcccacagcugc

SEQ ID NO: 181457 - RNA, 22 nt, Human
aacaagaacaccuacaguucua

SEQ ID NO: 181458 - RNA, 22 nt, Human
uuugaaaguucuucugacacua

SEQ ID NO: 181459 - RNA, 22 nt, Human
auugauucuguaagucaacaau

SEQ ID NO: 181460 - RNA, 22 nt, Human
cuggagccgcauggagcaggga

SEQ ID NO: 181461 - RNA, 22 nt, Human
aaaauaugacugugcuccuuaa

SEQ ID NO: 181462 - RNA, 22 nt, Human
cuuugaaaaaugguuuccuaga

SEQ ID NO: 181463 - RNA, 22 nt, Human
cuucuagauuuuuguaauuguu

SEQ ID NO: 181464 - RNA, 22 nt, Human
uugcagcuucuugcaucagaaa

SEQ ID NO: 181465 - RNA, 22 nt, Human
agcccagcuuugaaccauauca

SEQ ID NO: 181466 - RNA, 22 nt, Human
agagucuucuuuaggccauuua

SEQ ID NO: 181467 - RNA, 22 nt, Human
caggaugagguagaggcagaua

SEQ ID NO: 181468 - RNA, 22 nt, Human
agggcuccuccccggccuccac

SEQ ID NO: 181469 - RNA, 22 nt, Human
gacccagccugguuuuuauagg

SEQ ID NO: 181470 - RNA, 22 nt, Human
gugaggagggcuggucccaggc

SEQ ID NO: 181471 - RNA, 22 nt, Human
ccugggacucggccaggacaga

SEQ ID NO: 181472 - RNA, 22 nt, Human
gucugaggucauuagcucucuu

SEQ ID NO: 181473 - RNA, 22 nt, Human
ugcaggcuggaggagggacuaa

SEQ ID NO: 181474 - RNA, 22 nt, Human
aggaagcuagagccaccggacu

SEQ ID NO: 181475 - RNA, 22 nt, Human
ggcagcugaccuagcaccaucc

SEQ ID NO: 181476 - RNA, 22 nt, Human
agccuagaagaaguggcuacuu

SEQ ID NO: 181477 - RNA, 22 nt, Human
agauuacagaagaauaaguaga

SEQ ID NO: 181478 - RNA, 22 nt, Human
caggcaggucagugaagaagga

SEQ ID NO: 181479 - RNA, 22 nt, Human
uuguacagaaaaaauucuuggu

SEQ ID NO: 181480 - RNA, 20 nt, Human
uuuucugugccaagaaaacu

SEQ ID NO: 181481 - RNA, 22 nt, Human
cagcugugauuccugcugucca

SEQ ID NO: 181482 - RNA, 22 nt, Human
aggagcucauguggcugccugu

SEQ ID NO: 181483 - RNA, 22 nt, Human
cauggaauuuucuaggcauaaa

SEQ ID NO: 181484 - RNA, 22 nt, Human
cuuuaucuguguccucuugccu

SEQ ID NO: 181485 - RNA, 22 nt, Human
gcuuguuugugauuucuccaga

SEQ ID NO: 181486 - RNA, 22 nt, Human
uuggaugggcauuaggaaaguc

SEQ ID NO: 181487 - RNA, 22 nt, Human
gaugaggaauuugagguuagaa

SEQ ID NO: 181488 - RNA, 22 nt, Human
gcuguguaccuacuaacugcuu

SEQ ID NO: 181489 - RNA, 23 nt, Human
uccuggguuugaauucuagucuu

SEQ ID NO: 181490 - RNA, 22 nt, Human
ucuuccucuucugcugagaagu

SEQ ID NO: 181491 - RNA, 22 nt, Human
cagcucugggagucccaccccu

SEQ ID NO: 181492 - RNA, 22 nt, Human
aaacugcacacgaugugccuga

SEQ ID NO: 181493 - RNA, 22 nt, Human
auagcaaacuggagcuugcuuu

SEQ ID NO: 181494 - RNA, 22 nt, Human
uauuccagugugaucuuuguag

SEQ ID NO: 181495 - RNA, 22 nt, Human
ugucacauccauuuugcaagua

SEQ ID NO: 181496 - RNA, 22 nt, Human
cugggcugcaguuccugguccu

SEQ ID NO: 181497 - RNA, 22 nt, Human
ggaugcugacuuuggagcaugg

SEQ ID NO: 181498 - RNA, 22 nt, Human
cuggccuaggaaugguuuuccg

SEQ ID NO: 181499 - RNA, 20 nt, Human
uacauucaaaacaaacucug

SEQ ID NO: 181500 - RNA, 19 nt, Human
augucuguugaauuucaua

SEQ ID NO: 181501 - RNA, 22 nt, Human
aggggaagauuauacuuuugaa

SEQ ID NO: 181502 - RNA, 20 nt, Human
uugcuuuaucagacaugaua

SEQ ID NO: 181503 - RNA, 22 nt, Human
accagcugccuuuucuuaguag

SEQ ID NO: 181504 - RNA, 22 nt, Human
acugugauguucucuaucuugg

SEQ ID NO: 181505 - RNA, 22 nt, Human
aggacacagguaagccagugga

SEQ ID NO: 181506 - RNA, 18 nt, Human
gaggagccgucccuacua

SEQ ID NO: 181507 - RNA, 22 nt, Human
ugcugaggaaaaaugugacucu

SEQ ID NO: 181508 - RNA, 22 nt, Human
gugggcuuuugacagugccugg

SEQ ID NO: 181509 - RNA, 22 nt, Human
gaagacacuaaacuggggcuuc

SEQ ID NO: 181510 - RNA, 22 nt, Human
caggagcucuuaaggaugugau

SEQ ID NO: 181511 - RNA, 22 nt, Human
ucugcaggcuuauaggaugggu

SEQ ID NO: 181512 - RNA, 22 nt, Human
cuguugcuaaguagugcaggua

SEQ ID NO: 181513 - RNA, 22 nt, Human
caggguccaucuuucaucacug

SEQ ID NO: 181514 - RNA, 20 nt, Human
uuugucaacugcauccagca

SEQ ID NO: 181515 - RNA, 22 nt, Human
augcaguguuuggaagcuuaag

SEQ ID NO: 181516 - RNA, 22 nt, Human
uccagcuggccuaacuucaggg

SEQ ID NO: 181517 - RNA, 22 nt, Human
uggcaggaaauacccugccuag

SEQ ID NO: 181518 - RNA, 22 nt, Human
uagcagugcccuguggaauaag

SEQ ID NO: 181519 - RNA, 17 nt, Human
aaucucaguggcuuaag

SEQ ID NO: 181520 - RNA, 22 nt, Human
gacugucuuuugaauaaaaaug

SEQ ID NO: 181521 - RNA, 22 nt, Human
agguggcugagcugugccccug

SEQ ID NO: 181522 - RNA, 22 nt, Human
ccugugcccuggaaggagagag

SEQ ID NO: 181523 - RNA, 18 nt, Human
gucuggaggucaggagcu

SEQ ID NO: 181524 - RNA, 19 nt, Human
uuggccuuguuucauaucu

SEQ ID NO: 181525 - RNA, 22 nt, Human
ucucugagcugcuucuugcaua

SEQ ID NO: 181526 - RNA, 22 nt, Human
uucaacauguucuacauaaggg

SEQ ID NO: 181527 - RNA, 22 nt, Human
gccuuuaucuugggccaaguuu

SEQ ID NO: 181528 - RNA, 22 nt, Human
uagggcuauaagagaauaagac

SEQ ID NO: 181529 - RNA, 19 nt, Human
auccuggguccuccagcug

SEQ ID NO: 181530 - RNA, 22 nt, Human
uaaggcuuuguagugauugcuu

SEQ ID NO: 181531 - RNA, 22 nt, Human
auggcuugucuaugagugcucu

SEQ ID NO: 181532 - RNA, 22 nt, Human
ugcuccagugccugccccacag

SEQ ID NO: 181533 - RNA, 22 nt, Human
gaggaggggacaguacuugugc

SEQ ID NO: 181534 - RNA, 22 nt, Human
aucauuaguuguggaauucuug

SEQ ID NO: 181535 - RNA, 22 nt, Human
acagcagguuacaguggcacag

SEQ ID NO: 181536 - RNA, 22 nt, Human
ugaaggccagcucuuuaucagc

SEQ ID NO: 181537 - RNA, 22 nt, Human
uggcuuccugcauggauccucu

SEQ ID NO: 181538 - RNA, 20 nt, Human
aguuacgcuauuacucuccu

SEQ ID NO: 181539 - RNA, 22 nt, Human
uagcugagagcucacuugagga

SEQ ID NO: 181540 - RNA, 22 nt, Human
auggaauuugcaauaacaggau

SEQ ID NO: 181541 - RNA, 22 nt, Human
gaauuacaaagugagacaagcu

SEQ ID NO: 181542 - RNA, 21 nt, Human
gcaaguacuaucaucauuauc

SEQ ID NO: 181543 - RNA, 19 nt, Human
ucuuuagccagagcucugg

SEQ ID NO: 181544 - RNA, 22 nt, Human
uagggcagagcuuguacacgau

SEQ ID NO: 181545 - RNA, 22 nt, Human
auauuuugaaguuaauaaugug

SEQ ID NO: 181546 - RNA, 22 nt, Human
cagccaggacucccauuuagga

SEQ ID NO: 181547 - RNA, 22 nt, Human
agcuccuggacgaacagggagu

SEQ ID NO: 181548 - RNA, 20 nt, Human
aucuccugcuaccacccauu

SEQ ID NO: 181549 - RNA, 22 nt, Human
gcccucaggacaagguuacgcu

SEQ ID NO: 181550 - RNA, 22 nt, Human
uggcuggagcauuccuugucuu

SEQ ID NO: 181551 - RNA, 20 nt, Human
gcacacauagaaaugcauau

SEQ ID NO: 181552 - RNA, 22 nt, Human
gcccagggcagggcaagaguga

SEQ ID NO: 181553 - RNA, 22 nt, Human
caaguuuugauuuugcaguaaa

SEQ ID NO: 181554 - RNA, 22 nt, Human
agggucucuugccaugccucag

SEQ ID NO: 181555 - RNA, 22 nt, Human
ucagcaguggcucucaugcagu

SEQ ID NO: 181556 - RNA, 22 nt, Human
cagagcagagugauuguucugg

SEQ ID NO: 181557 - RNA, 22 nt, Human
acauucuucagcuuugucaggc

SEQ ID NO: 181558 - RNA, 22 nt, Human
ugaugacaguguuacagcucca

SEQ ID NO: 181559 - RNA, 22 nt, Human
agucccaacagcuuacaaggaa

SEQ ID NO: 181560 - RNA, 21 nt, Human
gcuggcucucugacgugcuuu

SEQ ID NO: 181561 - RNA, 22 nt, Human
uacuuguguucuacuagagaaa

SEQ ID NO: 181562 - RNA, 22 nt, Human
auggcagcuuugaauuucuuga

SEQ ID NO: 181563 - RNA, 22 nt, Human
accagggcacaggagucugaag

SEQ ID NO: 181564 - RNA, 22 nt, Human
ccugggcagggagaccaggcuc

SEQ ID NO: 181565 - RNA, 22 nt, Human
uuagaaagcuuuccauagucaa

SEQ ID NO: 181566 - RNA, 22 nt, Human
uucuucaaugugcccuguuuuc

SEQ ID NO: 181567 - RNA, 21 nt, Human
ggaacuuucaugaaucuagca

SEQ ID NO: 181568 - RNA, 20 nt, Human
gccaggagggugugaugagc

SEQ ID NO: 181569 - RNA, 22 nt, Human
guccagagauggacgagcagau

SEQ ID NO: 181570 - RNA, 18 nt, Human
gcucagguauagacaggg

SEQ ID NO: 181571 - RNA, 22 nt, Human
agaugcuggauggaaaaugauc

SEQ ID NO: 181572 - RNA, 22 nt, Human
gaggugguucagguagagccca

SEQ ID NO: 181573 - RNA, 22 nt, Human
cagagcggccacuagagggcgc

SEQ ID NO: 181574 - RNA, 22 nt, Human
gcagaggccaggccaccagcaa

SEQ ID NO: 181575 - RNA, 22 nt, Human
aaaguugaccgaaagauuuuga

SEQ ID NO: 181576 - RNA, 18 nt, Human
aagaggaggagcagguug

SEQ ID NO: 181577 - RNA, 22 nt, Human
aaaaugaagcaaaggcauucag

SEQ ID NO: 181578 - RNA, 22 nt, Human
gagugucagugcuuggggcuac

SEQ ID NO: 181579 - RNA, 22 nt, Human
ccucugugauuucugagccaau

SEQ ID NO: 181580 - RNA, 22 nt, Human
gauaauuauaggcuaagccacu

SEQ ID NO: 181581 - RNA, 21 nt, Human
uuccuggggacuuccguggga

SEQ ID NO: 181582 - RNA, 21 nt, Human
ucuccagagugggaggaaauc

SEQ ID NO: 181583 - RNA, 19 nt, Human
cuuuucaucaacagccaau

SEQ ID NO: 181584 - RNA, 22 nt, Human
uguuuucuggguggaagguacu

SEQ ID NO: 181585 - RNA, 22 nt, Human
uccuggaucuacucucaauugg

SEQ ID NO: 181586 - RNA, 23 nt, Human
ccucagggucuagcagagagaag

SEQ ID NO: 181587 - RNA, 22 nt, Human
ucuauacaugugcacacacauc

SEQ ID NO: 181588 - RNA, 22 nt, Human
ucagaaccugcaagucuaaccu

SEQ ID NO: 181589 - RNA, 22 nt, Human
agaggaggccaggcccacaccu

SEQ ID NO: 181590 - RNA, 22 nt, Human
cugccuggucucaggcaugggg

SEQ ID NO: 181591 - RNA, 18 nt, Human
cagaaguccuucaaggcc

SEQ ID NO: 181592 - RNA, 22 nt, Human
guaggcagucucucaggugauc

SEQ ID NO: 181593 - RNA, 22 nt, Human
cuggugcccuguguggcaggag

SEQ ID NO: 181594 - RNA, 22 nt, Human
uuugugcagauguauauuugug

SEQ ID NO: 181595 - RNA, 22 nt, Human
ugccaggcauauggccucuuug

SEQ ID NO: 181596 - RNA, 22 nt, Human
gccuggcaaggcccuguugacu

SEQ ID NO: 181597 - RNA, 22 nt, Human
auuguauaagucuauuuacaau

SEQ ID NO: 181598 - RNA, 22 nt, Human
aauggcuuugacauuuucaaau

SEQ ID NO: 181599 - RNA, 22 nt, Human
acaguggccucaaagaaagaga

SEQ ID NO: 181600 - RNA, 22 nt, Human
uccaggagggauugggcugugg

SEQ ID NO: 181601 - RNA, 22 nt, Human
guuaauaaagguauagaaucag

SEQ ID NO: 181602 - RNA, 22 nt, Human
aucuguagucacugcacagcuc

SEQ ID NO: 181603 - RNA, 22 nt, Human
ucuguucaucaucuggacacau

SEQ ID NO: 181604 - RNA, 22 nt, Human
augaguguacgugaaaguagau

SEQ ID NO: 181605 - RNA, 22 nt, Human
gaucacaugaauggaauagaag

SEQ ID NO: 181606 - RNA, 22 nt, Human
ggcaugcaugcaagguggugua

SEQ ID NO: 181607 - RNA, 22 nt, Human
acacagaguaucuuuugccuag

SEQ ID NO: 181608 - RNA, 22 nt, Human
cagaggacaauagaauggaaag

SEQ ID NO: 181609 - RNA, 22 nt, Human
acagauauuaugguuucuccuu

SEQ ID NO: 181610 - RNA, 23 nt, Human
ggcaugcaauggacagagcugga

SEQ ID NO: 181611 - RNA, 22 nt, Human
cagaguguuucuuugggugggu

SEQ ID NO: 181612 - RNA, 22 nt, Human
cccugcccuggagacacuuaaa

SEQ ID NO: 181613 - RNA, 21 nt, Human
acucugaaaauuaauaguuau

SEQ ID NO: 181614 - RNA, 23 nt, Human
gcugucugucaucucugcgggag

SEQ ID NO: 181615 - RNA, 22 nt, Human
uaggaaacucaaagggaagugg

SEQ ID NO: 181616 - RNA, 22 nt, Human
auucaguuucaaucauuguagu

SEQ ID NO: 181617 - RNA, 19 nt, Human
auggaaaaugccagacuga

SEQ ID NO: 181618 - RNA, 22 nt, Human
uuccccaggggcuccugccuuu

SEQ ID NO: 181619 - RNA, 22 nt, Human
agagccaggaugucuucugggg

SEQ ID NO: 181620 - RNA, 22 nt, Human
aauucugugcaggcagagcuau

SEQ ID NO: 181621 - RNA, 19 nt, Human
caucuuuggucaccuaguc

SEQ ID NO: 181622 - RNA, 22 nt, Human
ucagaggaauaaugcugcauuu

SEQ ID NO: 181623 - RNA, 22 nt, Human
accagaggaagggaaucucaag

SEQ ID NO: 181624 - RNA, 20 nt, Human
gcuuggcauaggccacuuga

SEQ ID NO: 181625 - RNA, 22 nt, Human
cuggcuuuuggaggagggucag

SEQ ID NO: 181626 - RNA, 21 nt, Human
uugaggagugagaguggguuu

SEQ ID NO: 181627 - RNA, 22 nt, Human
aaggaaauacaacauguauuca

SEQ ID NO: 181628 - RNA, 22 nt, Human
ugcuccagggccuccagugggg

SEQ ID NO: 181629 - RNA, 22 nt, Human
uggcaagaauauuggaccagaa

SEQ ID NO: 181630 - RNA, 22 nt, Human
cuugaaaugacaggagcacauc

SEQ ID NO: 181631 - RNA, 19 nt, Human
agugucagaauucauugaa

SEQ ID NO: 181632 - RNA, 22 nt, Human
aagucucuuccucugccaaaga

SEQ ID NO: 181633 - RNA, 22 nt, Human
gaggcgagaagcuggagauggu

SEQ ID NO: 181634 - RNA, 22 nt, Human
uucuuuuagaauuuccuaaggu

SEQ ID NO: 181635 - RNA, 22 nt, Human
aggcucagucuguucaugcacu

SEQ ID NO: 181636 - RNA, 22 nt, Human
agcuuguuaaacagccuccacu

SEQ ID NO: 181637 - RNA, 22 nt, Human
gaggccaggaggaucucucuaa

SEQ ID NO: 181638 - RNA, 22 nt, Human
auccugggggcagcuggaaaca

SEQ ID NO: 181639 - RNA, 22 nt, Human
caggcagagucagauuagacuu

SEQ ID NO: 181640 - RNA, 19 nt, Human
ucucaggcugggcggcugc

SEQ ID NO: 181641 - RNA, 22 nt, Human
gaggagaggccaucguuguuau

SEQ ID NO: 181642 - RNA, 22 nt, Human
agagccaggcggcugggcaccu

SEQ ID NO: 181643 - RNA, 22 nt, Human
aaauguaagucuuuguuucuua

SEQ ID NO: 181644 - RNA, 22 nt, Human
uaugaaaugauggggaaaauag

SEQ ID NO: 181645 - RNA, 22 nt, Human
cagaaguuugaccuuggugggu

SEQ ID NO: 181646 - RNA, 22 nt, Human
agcugcaacaucugcuuguccc

SEQ ID NO: 181647 - RNA, 22 nt, Human
aguuacagcacucaaaguuuuc

SEQ ID NO: 181648 - RNA, 21 nt, Human
agaugaggauacugaggccua

SEQ ID NO: 181649 - RNA, 22 nt, Human
agagccacggcaggccuaggaa

SEQ ID NO: 181650 - RNA, 20 nt, Human
cucuggcaaaggaugccuau

SEQ ID NO: 181651 - RNA, 22 nt, Human
uccuggcucgauugcuaccaau

SEQ ID NO: 181652 - RNA, 22 nt, Human
ccaggcccaccuuggccacuua

SEQ ID NO: 181653 - RNA, 22 nt, Human
agaaagugugucauacuaagug

SEQ ID NO: 181654 - RNA, 22 nt, Human
aguggggccgcgguccugcccu

SEQ ID NO: 181655 - RNA, 22 nt, Human
cagaggcauuacugaaaaggug

SEQ ID NO: 181656 - RNA, 22 nt, Human
aagaguuaugaaagcaaggcau

SEQ ID NO: 181657 - RNA, 22 nt, Human
agauaaauuccuaagauuucag

SEQ ID NO: 181658 - RNA, 22 nt, Human
cagugcagguggcagaggacag

SEQ ID NO: 181659 - RNA, 22 nt, Human
gccuggcacaguagggacccaa

SEQ ID NO: 181660 - RNA, 22 nt, Human
cagauaugauaggauuagcaca

SEQ ID NO: 181661 - RNA, 22 nt, Human
ucucuuaaaagauuuuaaugac

SEQ ID NO: 181662 - RNA, 22 nt, Human
uauacagauuaacagauuuaaa

SEQ ID NO: 181663 - RNA, 22 nt, Human
agggcagaaaucgauuacaccu

SEQ ID NO: 181664 - RNA, 22 nt, Human
ucugugcacaauaggcauuuuu

SEQ ID NO: 181665 - RNA, 22 nt, Human
aaguuaguggauaaacagcaaa

SEQ ID NO: 181666 - RNA, 22 nt, Human
cucaggccagguuucucccaca

SEQ ID NO: 181667 - RNA, 22 nt, Human
agaaucagugcuggcuauuagc

SEQ ID NO: 181668 - RNA, 21 nt, Human
auuucacacccuccuuuuucu

SEQ ID NO: 181669 - RNA, 22 nt, Human
ugcugaaaaugcguaucuucca

SEQ ID NO: 181670 - RNA, 22 nt, Human
ccagccugaaaugccucauccu

SEQ ID NO: 181671 - RNA, 22 nt, Human
cccuucucuuucacucacuauu

SEQ ID NO: 181672 - RNA, 22 nt, Human
gcagcuuuggagguggaacucu

SEQ ID NO: 181673 - RNA, 22 nt, Human
uggccagcacuuagcccuuacc

SEQ ID NO: 181674 - RNA, 22 nt, Human
uguuucuucucacacaaacuca

SEQ ID NO: 181675 - RNA, 22 nt, Human
agauggucugguuauuuuuagu

SEQ ID NO: 181676 - RNA, 22 nt, Human
ucucucaaccucggcacuauug

SEQ ID NO: 181677 - RNA, 22 nt, Human
gaauguuauugaacuacgagcu

SEQ ID NO: 181678 - RNA, 22 nt, Human
agccucagggcucugcgcagac

SEQ ID NO: 181679 - RNA, 20 nt, Human
cagaguaauuauuacccuuu

SEQ ID NO: 181680 - RNA, 22 nt, Human
aaagcacauaguagaaggauuu

SEQ ID NO: 181681 - RNA, 22 nt, Human
auugcuuuuaagcaccaccuaa

SEQ ID NO: 181682 - RNA, 22 nt, Human
auugagaaaauaaguauggaua

SEQ ID NO: 181683 - RNA, 20 nt, Human
agcaucuugcaucuucaagu

SEQ ID NO: 181684 - RNA, 22 nt, Human
cugcccaguuugggagccuuuc

SEQ ID NO: 181685 - RNA, 22 nt, Human
ugcuuuauaacuuaguuuaugg

SEQ ID NO: 181686 - RNA, 22 nt, Human
caggaggcaucauggagcggac

SEQ ID NO: 181687 - RNA, 22 nt, Human
cuaguggaaacuaacuggaauu

SEQ ID NO: 181688 - RNA, 22 nt, Human
uuucuguuguacuuaaacuagg

SEQ ID NO: 181689 - RNA, 17 nt, Human
ggcucucuuccagacuu

SEQ ID NO: 181690 - RNA, 22 nt, Human
gccagcucucauuguauaggcu

SEQ ID NO: 181691 - RNA, 22 nt, Human
gggagcuggcggauuccccagg

SEQ ID NO: 181692 - RNA, 22 nt, Human
uuucuugagcccaggaggugga

SEQ ID NO: 181693 - RNA, 22 nt, Human
gcucaugugugauuacaguuuu

SEQ ID NO: 181694 - RNA, 22 nt, Human
cuguugcucugaacaggucuug

SEQ ID NO: 181695 - RNA, 22 nt, Human
gggcuugguggagagaaugcug

SEQ ID NO: 181696 - RNA, 22 nt, Human
uuaguuaaaagauaauuuugga

SEQ ID NO: 181697 - RNA, 22 nt, Human
ggcuggcaggggaugucagaug

SEQ ID NO: 181698 - RNA, 22 nt, Human
aauguauuauacauaauuugug

SEQ ID NO: 181699 - RNA, 22 nt, Human
uagaaucuaguucauucauuug

SEQ ID NO: 181700 - RNA, 22 nt, Human
ucugugcagauguagaccaguu

SEQ ID NO: 181701 - RNA, 22 nt, Human
gccaggccugcaagugcuggug

SEQ ID NO: 181702 - RNA, 22 nt, Human
aaaguuuauuuucccugguuag

SEQ ID NO: 181703 - RNA, 22 nt, Human
gcagacaggggcuuaggaaagg

SEQ ID NO: 181704 - RNA, 22 nt, Human
ccugccugccugcuggccggga

SEQ ID NO: 181705 - RNA, 22 nt, Human
uggcgugcccuccagacuuggc

SEQ ID NO: 181706 - RNA, 22 nt, Human
ucugggucucagagugaccaug

SEQ ID NO: 181707 - RNA, 22 nt, Human
aggcucugcauccaggcuuuau

SEQ ID NO: 181708 - RNA, 22 nt, Human
gcugcagcccggcgcgccugag

SEQ ID NO: 181709 - RNA, 22 nt, Human
gggaaaggauuuacaguuugau

SEQ ID NO: 181710 - RNA, 20 nt, Human
auacaaagagauugauguau

SEQ ID NO: 181711 - RNA, 22 nt, Human
uucugaaugauagucuugaacu

SEQ ID NO: 181712 - RNA, 22 nt, Human
gcaggagcugcucuccugacga

SEQ ID NO: 181713 - RNA, 22 nt, Human
ggcacuaggagaccuggggguc

SEQ ID NO: 181714 - RNA, 22 nt, Human
aauaauguaggaugauaaauga

SEQ ID NO: 181715 - RNA, 22 nt, Human
gcacacaggggaguucucagaa

SEQ ID NO: 181716 - RNA, 22 nt, Human
ccacagagagugucagccuuug

SEQ ID NO: 181717 - RNA, 18 nt, Human
uguuaaaugaagauuugc

SEQ ID NO: 181718 - RNA, 22 nt, Human
agggauguucauuuuguggcug

SEQ ID NO: 181719 - RNA, 22 nt, Human
cagggcucuuccggagcaggga

SEQ ID NO: 181720 - RNA, 22 nt, Human
agcaugaaagcauaggacaguc

SEQ ID NO: 181721 - RNA, 22 nt, Human
ugcucccacacuacucggaggc

SEQ ID NO: 181722 - RNA, 22 nt, Human
ugccucaguuucaucugcagaa

SEQ ID NO: 181723 - RNA, 22 nt, Human
cagcucuuuacucugcaaugau

SEQ ID NO: 181724 - RNA, 22 nt, Human
cucuucuuauggccguggcuga

SEQ ID NO: 181725 - RNA, 22 nt, Human
ggccuugagagccagugcaggc

SEQ ID NO: 181726 - RNA, 22 nt, Human
aggcuaggggcagugccagcau

SEQ ID NO: 181727 - RNA, 22 nt, Human
auugaguaccuccagauucaua

SEQ ID NO: 181728 - RNA, 22 nt, Human
acucagcauauggggccgcuug

SEQ ID NO: 181729 - RNA, 22 nt, Human
cacccucccgucagccccuggg

SEQ ID NO: 181730 - RNA, 22 nt, Human
aaaauacuguggaguguugaaa

SEQ ID NO: 181731 - RNA, 22 nt, Human
aguuuucacacucaccaaaagg

SEQ ID NO: 181732 - RNA, 22 nt, Human
auucugaucauucaagauguca

SEQ ID NO: 181733 - RNA, 22 nt, Human
caagccuuggaaauccauucug

SEQ ID NO: 181734 - RNA, 23 nt, Human
ccagagcucuuucaugcuuccau

SEQ ID NO: 181735 - RNA, 22 nt, Human
cacagguuugacaaggauaaaa

SEQ ID NO: 181736 - RNA, 22 nt, Human
guauuucacauauggauaugcu

SEQ ID NO: 181737 - RNA, 22 nt, Human
ugcucauuggcgaucugaggga

SEQ ID NO: 181738 - RNA, 22 nt, Human
cugccagcaaugugaccaugcu

SEQ ID NO: 181739 - RNA, 22 nt, Human
aacuacagaaucauagaaaaua

SEQ ID NO: 181740 - RNA, 22 nt, Human
ugaaacauuaggaaaucauuau

SEQ ID NO: 181741 - RNA, 22 nt, Human
uuggcugcucagugauaugaga

SEQ ID NO: 181742 - RNA, 22 nt, Human
uggacagcuugcagagccaccc

SEQ ID NO: 181743 - RNA, 20 nt, Human
cacaggccccaagaccugua

SEQ ID NO: 181744 - RNA, 23 nt, Human
aucuaauuucuccaaaucucuac

SEQ ID NO: 181745 - RNA, 22 nt, Human
aauucugaugaauaaaucaucc

SEQ ID NO: 181746 - RNA, 22 nt, Human
ucagccugcgucauggugacac

SEQ ID NO: 181747 - RNA, 22 nt, Human
ccugccagcugugggccagccu

SEQ ID NO: 181748 - RNA, 22 nt, Human
ggaguggcagagaggguauacu

SEQ ID NO: 181749 - RNA, 22 nt, Human
cacaggaauuagcagccuaaaa

SEQ ID NO: 181750 - RNA, 22 nt, Human
cugcugagcaucagggcugccc

SEQ ID NO: 181751 - RNA, 22 nt, Human
ucaggaaauggcuucaugguuu

SEQ ID NO: 181752 - RNA, 21 nt, Human
auccauucuccgguuaaugag

SEQ ID NO: 181753 - RNA, 22 nt, Human
ggcucuggugcccuggcuccca

SEQ ID NO: 181754 - RNA, 22 nt, Human
ucaagcaaagauacaaauggaa

SEQ ID NO: 181755 - RNA, 22 nt, Human
uucaguaaggauaauaaacaga

SEQ ID NO: 181756 - RNA, 22 nt, Human
cagcuauuaauguuuuugcuga

SEQ ID NO: 181757 - RNA, 22 nt, Human
uggcagcagccauggaaggccc

SEQ ID NO: 181758 - RNA, 22 nt, Human
ugcuuuguguuugaauagauaa

SEQ ID NO: 181759 - RNA, 22 nt, Human
ucaggccuuucuucagagcuuc

SEQ ID NO: 181760 - RNA, 22 nt, Human
ucaugccaguuaaaggcuguga

SEQ ID NO: 181761 - RNA, 22 nt, Human
uugauuuuuuucuacuaugcgc

SEQ ID NO: 181762 - RNA, 22 nt, Human
acagcuguauccccagagcuca

SEQ ID NO: 181763 - RNA, 21 nt, Human
auugaaagucaacaaucaguu

SEQ ID NO: 181764 - RNA, 22 nt, Human
gaaauauuguacuggagauguu

SEQ ID NO: 181765 - RNA, 22 nt, Human
auuggcuuugauaucuaaaggg

SEQ ID NO: 181766 - RNA, 22 nt, Human
accugccuauggagccacaugg

SEQ ID NO: 181767 - RNA, 22 nt, Human
aagucacagaguuggaagucag

SEQ ID NO: 181768 - RNA, 22 nt, Human
auccuggcaagcagaggagaac

SEQ ID NO: 181769 - RNA, 22 nt, Human
cucuggaauggguguuucuaac

SEQ ID NO: 181770 - RNA, 22 nt, Human
aguggggaagauuuugcaguca

SEQ ID NO: 181771 - RNA, 22 nt, Human
cuggcuuuggaaacaauuuauc

SEQ ID NO: 181772 - RNA, 22 nt, Human
gccaccagggggcuccagugag

SEQ ID NO: 181773 - RNA, 22 nt, Human
cucagggugcagcacaguuccu

SEQ ID NO: 181774 - RNA, 22 nt, Human
gcauguguaugguaggaauauu

SEQ ID NO: 181775 - RNA, 23 nt, Human
guguguccauucgcacucuuagg

SEQ ID NO: 181776 - RNA, 22 nt, Human
gguggcagcauggucccagugu

SEQ ID NO: 181777 - RNA, 18 nt, Human
ugaucuuugaguauaaug

SEQ ID NO: 181778 - RNA, 22 nt, Human
uuccugcagcaaggagaagcug

SEQ ID NO: 181779 - RNA, 22 nt, Human
ggcugcuccuuuacccuggcag

SEQ ID NO: 181780 - RNA, 22 nt, Human
caguccugggagacuuacccag

SEQ ID NO: 181781 - RNA, 22 nt, Human
gcagggcucaacaggacacccc

SEQ ID NO: 181782 - RNA, 22 nt, Human
uuagaacuuaaacuucagaaag

SEQ ID NO: 181783 - RNA, 20 nt, Human
auccaugagagucuggauuc

SEQ ID NO: 181784 - RNA, 22 nt, Human
uuccagaauugggagccuugag

SEQ ID NO: 181785 - RNA, 22 nt, Human
agucccagcuucccccaugcag

SEQ ID NO: 181786 - RNA, 22 nt, Human
cugcagagagugccgggcagcc

SEQ ID NO: 181787 - RNA, 23 nt, Human
aguccuuuuuauaaaauugagga

SEQ ID NO: 181788 - RNA, 22 nt, Human
cucagagcucagcuuuguuagu

SEQ ID NO: 181789 - RNA, 22 nt, Human
aauagugcugcuguggacaugg

SEQ ID NO: 181790 - RNA, 22 nt, Human
gcccugggauuggguggaggcu

SEQ ID NO: 181791 - RNA, 22 nt, Human
aaucuucacucauucagaguug

SEQ ID NO: 181792 - RNA, 22 nt, Human
ugcuggcuguguaccaucucaa

SEQ ID NO: 181793 - RNA, 22 nt, Human
gcagcccagcagggcccggagc

SEQ ID NO: 181794 - RNA, 22 nt, Human
gcagugugucuggaguacaugg

SEQ ID NO: 181795 - RNA, 22 nt, Human
agagaugcaggguacauggaau

SEQ ID NO: 181796 - RNA, 22 nt, Human
guauuucaguuccucuugugac

SEQ ID NO: 181797 - RNA, 22 nt, Human
gaaaguuauucagccucucuga

SEQ ID NO: 181798 - RNA, 22 nt, Human
auaaauugugcuuuugacaucu

SEQ ID NO: 181799 - RNA, 23 nt, Human
uccaggcugaaggagcagauuuu

SEQ ID NO: 181800 - RNA, 20 nt, Human
gccaaggaggagaaacaggc

SEQ ID NO: 181801 - RNA, 20 nt, Human
aauuuacucacagaaugaau

SEQ ID NO: 181802 - RNA, 22 nt, Human
uagcaagaaguagcucuggauu

SEQ ID NO: 181803 - RNA, 23 nt, Human
acagacuguauucaaaguaggac

SEQ ID NO: 181804 - RNA, 22 nt, Human
ucucucuucaacccuuaacuag

SEQ ID NO: 181805 - RNA, 22 nt, Human
auggcaauuguaaauggaaaga

SEQ ID NO: 181806 - RNA, 21 nt, Human
aaagcaucacgaacauuuggg

SEQ ID NO: 181807 - RNA, 22 nt, Human
agggcugcuuaccuggaauggc

SEQ ID NO: 181808 - RNA, 21 nt, Human
uaaaggcuuuagaauggcaaa

SEQ ID NO: 181809 - RNA, 22 nt, Human
acuggcuuugagggaauagcua

SEQ ID NO: 181810 - RNA, 22 nt, Human
aauguacaaaagucagccaacu

SEQ ID NO: 181811 - RNA, 22 nt, Human
ugguccugguagcggugugcuu

SEQ ID NO: 181812 - RNA, 22 nt, Human
ugccuguguauuuccggccugc

SEQ ID NO: 181813 - RNA, 22 nt, Human
uuugauacugagaaaaacaaau

SEQ ID NO: 181814 - RNA, 22 nt, Human
agagcugaggauccagcugagc

SEQ ID NO: 181815 - RNA, 22 nt, Human
uccugagggcugcagucauagg

SEQ ID NO: 181816 - RNA, 22 nt, Human
uccugggguccugacugcuucc

SEQ ID NO: 181817 - RNA, 17 nt, Human
gggcugacaguggccuc

SEQ ID NO: 181818 - RNA, 22 nt, Human
ccagaaucccauugucacuuca

SEQ ID NO: 181819 - RNA, 22 nt, Human
gaaggcagggaauguggugcua

SEQ ID NO: 181820 - RNA, 22 nt, Human
acagucuuaugcauacacuauu

SEQ ID NO: 181821 - RNA, 22 nt, Human
ggagaaagggacugaucugcuc

SEQ ID NO: 181822 - RNA, 22 nt, Human
ggacugggauucuggaucugcu

SEQ ID NO: 181823 - RNA, 22 nt, Human
cuuuuacacucaucugggaggg

SEQ ID NO: 181824 - RNA, 22 nt, Human
agggggugaaugucugucuaca

SEQ ID NO: 181825 - RNA, 22 nt, Human
agauggccccaggugcccaggg

SEQ ID NO: 181826 - RNA, 22 nt, Human
ucuagaaaguacuagagcuggu

SEQ ID NO: 181827 - RNA, 22 nt, Human
augaaaugauugaaaucuuuac

SEQ ID NO: 181828 - RNA, 22 nt, Human
gaauacauuugccgugguucuc

SEQ ID NO: 181829 - RNA, 22 nt, Human
gcauuagacccaagguauuuug

SEQ ID NO: 181830 - RNA, 22 nt, Human
gggagggauuaguucugccugg

SEQ ID NO: 181831 - RNA, 22 nt, Human
ccccagugguugcaacagcaga

SEQ ID NO: 181832 - RNA, 22 nt, Human
gucugcuggcacgucacagaua

SEQ ID NO: 181833 - RNA, 22 nt, Human
agaggcagccguauuucaaagg

SEQ ID NO: 181834 - RNA, 22 nt, Human
uauggcagaggagaggcacuag

SEQ ID NO: 181835 - RNA, 22 nt, Human
gagcccagcuaaauuuauauaa

SEQ ID NO: 181836 - RNA, 22 nt, Human
agcccuggggcuggucuuggaa

SEQ ID NO: 181837 - RNA, 22 nt, Human
gaggcuguuggcugaucugagu

SEQ ID NO: 181838 - RNA, 22 nt, Human
uguuuuaagcucuagaagggga

SEQ ID NO: 181839 - RNA, 22 nt, Human
acucagagcagagcagccugag

SEQ ID NO: 181840 - RNA, 18 nt, Human
ggagcccacggcguccca

SEQ ID NO: 181841 - RNA, 21 nt, Human
uguguaaaguugaaauccugu

SEQ ID NO: 181842 - RNA, 22 nt, Human
uagcuucugggaguguuuacua

SEQ ID NO: 181843 - RNA, 17 nt, Human
uguuaauuccaaugaua

SEQ ID NO: 181844 - RNA, 22 nt, Human
uuauuuaggagaaggaacccug

SEQ ID NO: 181845 - RNA, 22 nt, Human
caaggccaagucucugugaaga

SEQ ID NO: 181846 - RNA, 22 nt, Human
ggcuggcugauaaaggguugag

SEQ ID NO: 181847 - RNA, 22 nt, Human
uccaggagugugugcuaauggg

SEQ ID NO: 181848 - RNA, 22 nt, Human
cucacugacgaggaagcugaga

SEQ ID NO: 181849 - RNA, 22 nt, Human
agcugcuccuuuccugcaggcg

SEQ ID NO: 181850 - RNA, 21 nt, Human
ugucacuuuaagcuagcucua

SEQ ID NO: 181851 - RNA, 22 nt, Human
guacaauuaagugcacaaauag

SEQ ID NO: 181852 - RNA, 22 nt, Human
gcgggccaccuuggagagcgcu

SEQ ID NO: 181853 - RNA, 22 nt, Human
uguccagguggccucugcugcu

SEQ ID NO: 181854 - RNA, 22 nt, Human
uggcugccuucccugcuggagg

SEQ ID NO: 181855 - RNA, 22 nt, Human
ucagggcucagugggauagguc

SEQ ID NO: 181856 - RNA, 22 nt, Human
cuaaauaaucccucuggucuua

SEQ ID NO: 181857 - RNA, 22 nt, Human
aagguccuguagccacagagcc

SEQ ID NO: 181858 - RNA, 22 nt, Human
uuagggcaggcaugagagaacu

SEQ ID NO: 181859 - RNA, 22 nt, Human
gugucccagccccacaggccug

SEQ ID NO: 181860 - RNA, 19 nt, Human
aggucauugauagugcagg

SEQ ID NO: 181861 - RNA, 22 nt, Human
aggcagguuggggaaaagcacu

SEQ ID NO: 181862 - RNA, 22 nt, Human
gcccugugccagucacgcugug

SEQ ID NO: 181863 - RNA, 20 nt, Human
uccugguggauacugcuuaa

SEQ ID NO: 181864 - RNA, 22 nt, Human
cagcuucugcuaucgaacaucu

SEQ ID NO: 181865 - RNA, 22 nt, Human
caucacuguccucagcauucca

SEQ ID NO: 181866 - RNA, 22 nt, Human
agaauagaauucucauagaauu

SEQ ID NO: 181867 - RNA, 22 nt, Human
acaugagaucacaaagauaaau

SEQ ID NO: 181868 - RNA, 22 nt, Human
uuacugaggagcauaucugagu

SEQ ID NO: 181869 - RNA, 20 nt, Human
ccaggcuggcaaaugggggc

SEQ ID NO: 181870 - RNA, 22 nt, Human
gcaguccucauccuuuagcagu

SEQ ID NO: 181871 - RNA, 22 nt, Human
uggcagagcccagaacugagca

SEQ ID NO: 181872 - RNA, 22 nt, Human
ucccugggaacaaaggaugaga

SEQ ID NO: 181873 - RNA, 22 nt, Human
ugugaaauguggauguuaauag

SEQ ID NO: 181874 - RNA, 22 nt, Human
agguccaguugccagaauggcc

SEQ ID NO: 181875 - RNA, 22 nt, Human
gugaggucuuugggaggugauu

SEQ ID NO: 181876 - RNA, 22 nt, Human
auaagguauaaggccuauuuuu

SEQ ID NO: 181877 - RNA, 22 nt, Human
gcaggagcaaacugcagugugg

SEQ ID NO: 181878 - RNA, 22 nt, Human
ggagugucagaaacaguguccu

SEQ ID NO: 181879 - RNA, 22 nt, Human
ucuggcucucaacaaauauuua

SEQ ID NO: 181880 - RNA, 22 nt, Human
aacuuucucuggauggcuuccu

SEQ ID NO: 181881 - RNA, 22 nt, Human
uuacaaagcgcuuuaccucuga

SEQ ID NO: 181882 - RNA, 22 nt, Human
uuuuucuuaaauguggguuggc

SEQ ID NO: 181883 - RNA, 22 nt, Human
cccaggacucggcacucuccuu

SEQ ID NO: 181884 - RNA, 22 nt, Human
ucuguauucuauggcaguuggu

SEQ ID NO: 181885 - RNA, 22 nt, Human
aagaggcagaaauaucgcugaa

SEQ ID NO: 181886 - RNA, 22 nt, Human
uggcaagggauuguggagaacu

SEQ ID NO: 181887 - RNA, 22 nt, Human
aagacaugcaauuagcaaggaa

SEQ ID NO: 181888 - RNA, 22 nt, Human
ucuggagcuggagggcaaggca

SEQ ID NO: 181889 - RNA, 22 nt, Human
cagcuggacuuuugauagaagu

SEQ ID NO: 181890 - RNA, 22 nt, Human
gugcaggguccuaauuguuaag

SEQ ID NO: 181891 - RNA, 22 nt, Human
cugagggaacuugggcaagucu

SEQ ID NO: 181892 - RNA, 22 nt, Human
uggcugugggaugagagccuca

SEQ ID NO: 181893 - RNA, 22 nt, Human
ggagaccuuaaggugcuuccua

SEQ ID NO: 181894 - RNA, 22 nt, Human
cugggcccaggcggcucucgga

SEQ ID NO: 181895 - RNA, 22 nt, Human
aaagaaauagauggcauuuaaa

SEQ ID NO: 181896 - RNA, 22 nt, Human
cccugcagcuuuugcauaguca

SEQ ID NO: 181897 - RNA, 21 nt, Human
uucugggaaaugagcuggggc

SEQ ID NO: 181898 - RNA, 22 nt, Human
acaaaagcacugcagaguaagc

SEQ ID NO: 181899 - RNA, 22 nt, Human
aaaucacagggucucuaaguau

SEQ ID NO: 181900 - RNA, 22 nt, Human
gcaggcaguugcaguuuucuag

SEQ ID NO: 181901 - RNA, 21 nt, Human
cucauuuauuuuuguguccaa

SEQ ID NO: 181902 - RNA, 22 nt, Human
aggcacagggaugcggagccag

SEQ ID NO: 181903 - RNA, 22 nt, Human
ucuuguuaaagugaagauacug

SEQ ID NO: 181904 - RNA, 19 nt, Human
ucucagaggaaaaauugcu

SEQ ID NO: 181905 - RNA, 22 nt, Human
cacagaggcaugacccugcccu

SEQ ID NO: 181906 - RNA, 22 nt, Human
acacucugcucugagcuucagg

SEQ ID NO: 181907 - RNA, 22 nt, Human
ugaggccuaccccccuguguuu

SEQ ID NO: 181908 - RNA, 22 nt, Human
aauggaggugucuggccuggua

SEQ ID NO: 181909 - RNA, 22 nt, Human
acacauucaugagugcaugcac

SEQ ID NO: 181910 - RNA, 22 nt, Human
ugaaggcuuuuuaaagcauuug

SEQ ID NO: 181911 - RNA, 22 nt, Human
cuacauaaauuuaucacagacu

SEQ ID NO: 181912 - RNA, 22 nt, Human
gagcacccuuugcacaucaguc

SEQ ID NO: 181913 - RNA, 23 nt, Human
ucucuuucaagagcuuaaugugc

SEQ ID NO: 181914 - RNA, 22 nt, Human
ucccaccccggucaagggcuga

SEQ ID NO: 181915 - RNA, 22 nt, Human
gcugagagugagcacuggauau

SEQ ID NO: 181916 - RNA, 22 nt, Human
cuucauuaaugucuauaaguuu

SEQ ID NO: 181917 - RNA, 22 nt, Human
uucauagagcagcucacugaau

SEQ ID NO: 181918 - RNA, 22 nt, Human
uuccagauauuuuuauguggaa

SEQ ID NO: 181919 - RNA, 19 nt, Human
ucagggaguuuacagcaug

SEQ ID NO: 181920 - RNA, 22 nt, Human
cugcugggaaggucugcucagu

SEQ ID NO: 181921 - RNA, 22 nt, Human
caguccugaggaagagcugcug

SEQ ID NO: 181922 - RNA, 22 nt, Human
gugccaggugcuaagcugugcu

SEQ ID NO: 181923 - RNA, 22 nt, Human
uuccagugacuaagcuucugcu

SEQ ID NO: 181924 - RNA, 22 nt, Human
uggagggucaccccuugcugag

SEQ ID NO: 181925 - RNA, 22 nt, Human
cuguccugauggugccacuggu

SEQ ID NO: 181926 - RNA, 22 nt, Human
gcagcuuucuaagcuuuauugc

SEQ ID NO: 181927 - RNA, 22 nt, Human
auucuucaucacuaccuuguga

SEQ ID NO: 181928 - RNA, 22 nt, Human
agacaaguguggugagagcagu

SEQ ID NO: 181929 - RNA, 21 nt, Human
cugucaccugcucagagaggg

SEQ ID NO: 181930 - RNA, 22 nt, Human
ccuggcuggauggagccccugg

SEQ ID NO: 181931 - RNA, 22 nt, Human
acagcaggcaugaaugacacug

SEQ ID NO: 181932 - RNA, 22 nt, Human
gcucuguaccugcggagaugag

SEQ ID NO: 181933 - RNA, 22 nt, Human
gagggcuccucacauucucuau

SEQ ID NO: 181934 - RNA, 22 nt, Human
acaugcuaugagagauuacuuc

SEQ ID NO: 181935 - RNA, 22 nt, Human
aacaucuccaaccuacauccac

SEQ ID NO: 181936 - RNA, 22 nt, Human
auguucauccaugucguagcag

SEQ ID NO: 181937 - RNA, 22 nt, Human
gagaaggacuacacaucuggcc

SEQ ID NO: 181938 - RNA, 22 nt, Human
agagaugacugauggcugauua

SEQ ID NO: 181939 - RNA, 21 nt, Human
ucaggcaggucccacugaaca

SEQ ID NO: 181940 - RNA, 22 nt, Human
cagagggcccccuggccacagu

SEQ ID NO: 181941 - RNA, 23 nt, Human
uaguuacauuauugucagagcug

SEQ ID NO: 181942 - RNA, 22 nt, Human
ccuuaaacucugauaugauauu

SEQ ID NO: 181943 - RNA, 23 nt, Human
ugaaagcaaugggucuauaguau

SEQ ID NO: 181944 - RNA, 22 nt, Human
ggccuccucacccugcucaggc

SEQ ID NO: 181945 - RNA, 22 nt, Human
ucuccucaccaccagcagcaga

SEQ ID NO: 181946 - RNA, 22 nt, Human
gagcccucuugucuauauggua

SEQ ID NO: 181947 - RNA, 22 nt, Human
gauucuuuggccuuuauugaca

SEQ ID NO: 181948 - RNA, 22 nt, Human
cccaaggaagacgcuugugaua

SEQ ID NO: 181949 - RNA, 22 nt, Human
cagaucuaucuguugauggugc

SEQ ID NO: 181950 - RNA, 22 nt, Human
cucaggaugucggugacuauug

SEQ ID NO: 181951 - RNA, 22 nt, Human
uuccauauucccaauuuugcca

SEQ ID NO: 181952 - RNA, 22 nt, Human
augauauagagaguagauuaaa

SEQ ID NO: 181953 - RNA, 22 nt, Human
cugagccuuauucaccagcccu

SEQ ID NO: 181954 - RNA, 22 nt, Human
ccaggccagcgcuggcuggagg

SEQ ID NO: 181955 - RNA, 22 nt, Human
agcagcaggcuuaaggaaaagu

SEQ ID NO: 181956 - RNA, 22 nt, Human
uagagauagcaguauugauucg

SEQ ID NO: 181957 - RNA, 22 nt, Human
agaggggagagcuaagcaauuc

SEQ ID NO: 181958 - RNA, 22 nt, Human
ggcugcaagacaagguugguuu

SEQ ID NO: 181959 - RNA, 22 nt, Human
gcuggccauggccugcgccauc

SEQ ID NO: 181960 - RNA, 22 nt, Human
ccauucugaacaauucuugucu

SEQ ID NO: 181961 - RNA, 21 nt, Human
aauacagugaagaauuucuuu

SEQ ID NO: 181962 - RNA, 17 nt, Human
agcaaggcuuaaguaaa

SEQ ID NO: 181963 - RNA, 22 nt, Human
agugagcaguacuuacuccugc

SEQ ID NO: 181964 - RNA, 22 nt, Human
cgugauuucuggcuuucuauau

SEQ ID NO: 181965 - RNA, 22 nt, Human
cagaaacuagauuuagacacaa

SEQ ID NO: 181966 - RNA, 22 nt, Human
cucugagggcucgagggacgcg

SEQ ID NO: 181967 - RNA, 22 nt, Human
cccaggaccauccuucugugcc

SEQ ID NO: 181968 - RNA, 22 nt, Human
cucuagaaagauuguugaccaa

SEQ ID NO: 181969 - RNA, 22 nt, Human
uuccuuccauagcaaaacaugc

SEQ ID NO: 181970 - RNA, 22 nt, Human
agaaucuaaauaugcaauuuga

SEQ ID NO: 181971 - RNA, 22 nt, Human
gagccuggauugucaccgacuu

SEQ ID NO: 181972 - RNA, 18 nt, Human
ugucucaggcugaaacag

SEQ ID NO: 181973 - RNA, 22 nt, Human
gcagcagcucucaaaguggucu

SEQ ID NO: 181974 - RNA, 15 nt, Human
uaccagcugauccgu

SEQ ID NO: 181975 - RNA, 22 nt, Human
cucugggugucuuaggagcuca

SEQ ID NO: 181976 - RNA, 22 nt, Human
uggcagagguaauucaaauccc

SEQ ID NO: 181977 - RNA, 22 nt, Human
uuugaaacucaugaucaucacu

SEQ ID NO: 181978 - RNA, 22 nt, Human
ucaucucucaggauaccagcag

SEQ ID NO: 181979 - RNA, 22 nt, Human
aaugugacugaauauuuacucu

SEQ ID NO: 181980 - RNA, 22 nt, Human
gggcagguggagggcccagcca

SEQ ID NO: 181981 - RNA, 22 nt, Human
ugcugccaccugguggcugaag

SEQ ID NO: 181982 - RNA, 22 nt, Human
aauaggcugagccauuucaagu

SEQ ID NO: 181983 - RNA, 22 nt, Human
auuccuucuuugagaauaagca

SEQ ID NO: 181984 - RNA, 22 nt, Human
uccuggccgcuggccccugaga

SEQ ID NO: 181985 - RNA, 22 nt, Human
ugccaggcaggacccuagaacc

SEQ ID NO: 181986 - RNA, 22 nt, Human
gaccacuggggugagggccauc

SEQ ID NO: 181987 - RNA, 22 nt, Human
ugcaggugagugcaggggcuca

SEQ ID NO: 181988 - RNA, 22 nt, Human
augaaucaaaguucauuugauc

SEQ ID NO: 181989 - RNA, 23 nt, Human
uggcuaaacaguggagaaagcuu

SEQ ID NO: 181990 - RNA, 22 nt, Human
aggagugagcuuuggggucaga

SEQ ID NO: 181991 - RNA, 22 nt, Human
ccacguguagguggacaggauc

SEQ ID NO: 181992 - RNA, 17 nt, Human
ggccagaggcggggcug

SEQ ID NO: 181993 - RNA, 22 nt, Human
auuauucauugguaggcaagcu

SEQ ID NO: 181994 - RNA, 22 nt, Human
gaggaaaauauucagggagguu

SEQ ID NO: 181995 - RNA, 22 nt, Human
gcacuggggucauagccuccag

SEQ ID NO: 181996 - RNA, 22 nt, Human
guuuauaaugucugugccaaaa

SEQ ID NO: 181997 - RNA, 22 nt, Human
cuauuagguaugcagccuauuu

SEQ ID NO: 181998 - RNA, 17 nt, Human
uccagcccugcccgacg

SEQ ID NO: 181999 - RNA, 23 nt, Human
aguuuccacccaggguagaaggg

SEQ ID NO: 182000 - RNA, 22 nt, Human
ugagacagccucugcacucaug

SEQ ID NO: 182001 - RNA, 23 nt, Human
ucugcaagauaaugaagaugaua

SEQ ID NO: 182002 - RNA, 22 nt, Human
ucugaaaucuguaagcacuagc

SEQ ID NO: 182003 - RNA, 21 nt, Human
uggcagaguugaguaguuaug

SEQ ID NO: 182004 - RNA, 22 nt, Human
cacuuuauauucuaagacggcc

SEQ ID NO: 182005 - RNA, 22 nt, Human
aggcuggccagugcugcagugg

SEQ ID NO: 182006 - RNA, 22 nt, Human
ggagaggcgaugagucacagcc

SEQ ID NO: 182007 - RNA, 17 nt, Human
ucacaucacacaagcaa

SEQ ID NO: 182008 - RNA, 22 nt, Human
agggagaagagaacaaagcccu

SEQ ID NO: 182009 - RNA, 22 nt, Human
cuuuugcagccauuauugcugc

SEQ ID NO: 182010 - RNA, 22 nt, Human
gggagccagcagggcauggagc

SEQ ID NO: 182011 - RNA, 22 nt, Human
caauuucaugccauguauugcu

SEQ ID NO: 182012 - RNA, 22 nt, Human
agcaggggucucugcuaaugaa

SEQ ID NO: 182013 - RNA, 22 nt, Human
gcagagccugugucugagcaaa

SEQ ID NO: 182014 - RNA, 22 nt, Human
acagaauaagguuuaucucucc

SEQ ID NO: 182015 - RNA, 22 nt, Human
uugucaaguaaggcugacauuu

SEQ ID NO: 182016 - RNA, 20 nt, Human
agcuggagaagggcccuucc

SEQ ID NO: 182017 - RNA, 22 nt, Human
ugcagaugagggaugaaaauga

SEQ ID NO: 182018 - RNA, 22 nt, Human
uuggaacacuagaaucuguacu

SEQ ID NO: 182019 - RNA, 22 nt, Human
cugggaagaaauugugggaggc

SEQ ID NO: 182020 - RNA, 22 nt, Human
ggccccagauucugggcugggu

SEQ ID NO: 182021 - RNA, 22 nt, Human
aaauguauccuacuuccugagu

SEQ ID NO: 182022 - RNA, 22 nt, Human
acacuuuuaagacuuuaaugaa

SEQ ID NO: 182023 - RNA, 19 nt, Human
gcucugccagugguaacau

SEQ ID NO: 182024 - RNA, 22 nt, Human
uggagaagcuguagguggacuc

SEQ ID NO: 182025 - RNA, 22 nt, Human
ugauuuacuucuggauaaaucc

SEQ ID NO: 182026 - RNA, 22 nt, Human
gcagcuuucuugcccuaaucuu

SEQ ID NO: 182027 - RNA, 22 nt, Human
aguggcuguuuauaggugggua

SEQ ID NO: 182028 - RNA, 22 nt, Human
uucugucucuguguuuacauua

SEQ ID NO: 182029 - RNA, 22 nt, Human
ugcugggucccuugagagcuca

SEQ ID NO: 182030 - RNA, 22 nt, Human
uacauucuacuuuuucacuccc

SEQ ID NO: 182031 - RNA, 22 nt, Human
uccaggcaaagggacuagcagg

SEQ ID NO: 182032 - RNA, 22 nt, Human
aagucaugaguccucuucugug

SEQ ID NO: 182033 - RNA, 22 nt, Human
uaaauguauaggcacuaaaccu

SEQ ID NO: 182034 - RNA, 19 nt, Human
ugugaaagcuaguguucuu

SEQ ID NO: 182035 - RNA, 22 nt, Human
aucagcagugaguggcuuucau

SEQ ID NO: 182036 - RNA, 22 nt, Human
gcuguggaugcuauggaucauc

SEQ ID NO: 182037 - RNA, 22 nt, Human
gacaagucaucuggggccugug

SEQ ID NO: 182038 - RNA, 22 nt, Human
ccacugagcaguagcugcgucg

SEQ ID NO: 182039 - RNA, 22 nt, Human
acucaggcuacaggggcagaag

SEQ ID NO: 182040 - RNA, 22 nt, Human
uccaggcugugcgcaccgugug

SEQ ID NO: 182041 - RNA, 22 nt, Human
uuccaauggaaucaugucuuga

SEQ ID NO: 182042 - RNA, 22 nt, Human
agccaggcagacucucuuucuu

SEQ ID NO: 182043 - RNA, 22 nt, Human
gcucccagacugaccagaggug

SEQ ID NO: 182044 - RNA, 22 nt, Human
cuggcucacaggugagaugcau

SEQ ID NO: 182045 - RNA, 22 nt, Human
acaaugcauaccuagcagcuca

SEQ ID NO: 182046 - RNA, 22 nt, Human
gcuggcacuugggacaaaaucu

SEQ ID NO: 182047 - RNA, 22 nt, Human
ucagcagggcugggagcuguga

SEQ ID NO: 182048 - RNA, 17 nt, Human
cagagucugucugcauc

SEQ ID NO: 182049 - RNA, 22 nt, Human
ucagaagcugggucucagaagc

SEQ ID NO: 182050 - RNA, 22 nt, Human
cuuuacaauucaagggaacucu

SEQ ID NO: 182051 - RNA, 20 nt, Human
ggucacuguggcugcaggau

SEQ ID NO: 182052 - RNA, 22 nt, Human
cuggcugcaggaugaggcugcc

SEQ ID NO: 182053 - RNA, 22 nt, Human
ucucuggggaaaaggcugauac

SEQ ID NO: 182054 - RNA, 22 nt, Human
ccaguucugacacaagcacagu

SEQ ID NO: 182055 - RNA, 21 nt, Human
aaauccaaacacuaguccaca

SEQ ID NO: 182056 - RNA, 20 nt, Human
uccagcacccucacagagaa

SEQ ID NO: 182057 - RNA, 22 nt, Human
cucucugggguuccagacgugg

SEQ ID NO: 182058 - RNA, 22 nt, Human
cugcagggaccacaagcagguu

SEQ ID NO: 182059 - RNA, 22 nt, Human
aggaaacugaagcccagagagg

SEQ ID NO: 182060 - RNA, 22 nt, Human
caguacaagaggccaccugccc

SEQ ID NO: 182061 - RNA, 22 nt, Human
acguguaaugaucaccacaauc

SEQ ID NO: 182062 - RNA, 22 nt, Human
gccugcagcugcuuccacacac

SEQ ID NO: 182063 - RNA, 22 nt, Human
ggcuucucuaaagaucaugcgu

SEQ ID NO: 182064 - RNA, 22 nt, Human
acagcacaggaguugaaugggc

SEQ ID NO: 182065 - RNA, 22 nt, Human
augcuaaauucagacaggguua

SEQ ID NO: 182066 - RNA, 22 nt, Human
cagaugcugccugggaaugucu

SEQ ID NO: 182067 - RNA, 22 nt, Human
aauggcugccagggcaggaggu

SEQ ID NO: 182068 - RNA, 22 nt, Human
uucuuacuaugauuugagccuc

SEQ ID NO: 182069 - RNA, 22 nt, Human
caaauuuagguaacagucugua

SEQ ID NO: 182070 - RNA, 22 nt, Human
ugcaagagcccaccacacacuu

SEQ ID NO: 182071 - RNA, 22 nt, Human
uucuggaagcugcagguggccg

SEQ ID NO: 182072 - RNA, 22 nt, Human
uugcauuucccauugaguaaug

SEQ ID NO: 182073 - RNA, 22 nt, Human
ggcagcucugcuccacaugagu

SEQ ID NO: 182074 - RNA, 22 nt, Human
agaugcuauacauuguaagaca

SEQ ID NO: 182075 - RNA, 22 nt, Human
ggcagaggagcuggaaacaugg

SEQ ID NO: 182076 - RNA, 22 nt, Human
agcagcugguaggaguggccac

SEQ ID NO: 182077 - RNA, 22 nt, Human
augaaacaugagaaauggagag

SEQ ID NO: 182078 - RNA, 22 nt, Human
auggcagcuggcuugggcaccu

SEQ ID NO: 182079 - RNA, 21 nt, Human
aggcagcgugagggccacuca

SEQ ID NO: 182080 - RNA, 22 nt, Human
uggaaacucagggccagaagga

SEQ ID NO: 182081 - RNA, 22 nt, Human
uaguuuuuucaacaaauggugc

SEQ ID NO: 182082 - RNA, 22 nt, Human
cuggagggcuucugcagguuac

SEQ ID NO: 182083 - RNA, 19 nt, Human
agugcagggagcacccuca

SEQ ID NO: 182084 - RNA, 22 nt, Human
aaccagaucgacuguuaacagc

SEQ ID NO: 182085 - RNA, 22 nt, Human
agggcuccaggggaccaucagu

SEQ ID NO: 182086 - RNA, 22 nt, Human
ugccagccuggccugagucuuu

SEQ ID NO: 182087 - RNA, 22 nt, Human
gaggcuccuccuuacauuuacc

SEQ ID NO: 182088 - RNA, 22 nt, Human
caucucuucauuagcauuauug

SEQ ID NO: 182089 - RNA, 22 nt, Human
gccuguggccgacugagagccu

SEQ ID NO: 182090 - RNA, 22 nt, Human
caggccuccacuccacgcagac

SEQ ID NO: 182091 - RNA, 22 nt, Human
aaugaguuauuuaauagaaagg

SEQ ID NO: 182092 - RNA, 22 nt, Human
ugguccagacauuucugaggua

SEQ ID NO: 182093 - RNA, 22 nt, Human
aguaaaauuucugcugaggaga

SEQ ID NO: 182094 - RNA, 22 nt, Human
uggugaucagucaacugucuuc

SEQ ID NO: 182095 - RNA, 22 nt, Human
cucacagcagcucugcgagaua

SEQ ID NO: 182096 - RNA, 22 nt, Human
auaugcuuaugaugucucaagu

SEQ ID NO: 182097 - RNA, 22 nt, Human
cacaggagcccugaggccuccc

SEQ ID NO: 182098 - RNA, 22 nt, Human
guguggcuagaagugucuuguu

SEQ ID NO: 182099 - RNA, 22 nt, Human
ccuccaagcugguccucugugu

SEQ ID NO: 182100 - RNA, 22 nt, Human
uucaggcccagcacagcgcgug

SEQ ID NO: 182101 - RNA, 22 nt, Human
uccuuggaagagcauucccagg

SEQ ID NO: 182102 - RNA, 22 nt, Human
cuggcugcaggaaggagugggc

SEQ ID NO: 182103 - RNA, 22 nt, Human
ucuuucuugguauaaagcaggg

SEQ ID NO: 182104 - RNA, 17 nt, Human
cugccuggagucccauc

SEQ ID NO: 182105 - RNA, 22 nt, Human
uuccugguggcuuugccaacug

SEQ ID NO: 182106 - RNA, 22 nt, Human
ccauggcuucuuucucugccag

SEQ ID NO: 182107 - RNA, 22 nt, Human
ggaagugaggaaauauuuuguu

SEQ ID NO: 182108 - RNA, 22 nt, Human
uacaaaguaauguauaauaucg

SEQ ID NO: 182109 - RNA, 22 nt, Human
uggcugaguucuccaggaguag

SEQ ID NO: 182110 - RNA, 22 nt, Human
cucaggucacggaucugagcug

SEQ ID NO: 182111 - RNA, 22 nt, Human
uuuuucuacugcccacauugua

SEQ ID NO: 182112 - RNA, 22 nt, Human
uuauugcaaaggaagagcuuga

SEQ ID NO: 182113 - RNA, 22 nt, Human
uugccuggacucugcugguauu

SEQ ID NO: 182114 - RNA, 22 nt, Human
uaggaagcuuccagaacuuaag

SEQ ID NO: 182115 - RNA, 22 nt, Human
acaguuaaucaaauggcauaug

SEQ ID NO: 182116 - RNA, 22 nt, Human
ugggggcugggaugucacuuuc

SEQ ID NO: 182117 - RNA, 22 nt, Human
agcuggcaauguaagucccugg

SEQ ID NO: 182118 - RNA, 21 nt, Human
ggaaaacuuuccuugucugaa

SEQ ID NO: 182119 - RNA, 22 nt, Human
acugguuuuccagguuacuucu

SEQ ID NO: 182120 - RNA, 22 nt, Human
ugauguuuaauacuaugcuuuu

SEQ ID NO: 182121 - RNA, 22 nt, Human
agcauucauugcuagaauguaa

SEQ ID NO: 182122 - RNA, 22 nt, Human
uuacagaacugucuugaaauuu

SEQ ID NO: 182123 - RNA, 22 nt, Human
ccugcccagcuucccgagugca

SEQ ID NO: 182124 - RNA, 18 nt, Human
ggcuucucuguuuauuuc

SEQ ID NO: 182125 - RNA, 22 nt, Human
uaagacauccguugcuuauaau

SEQ ID NO: 182126 - RNA, 23 nt, Human
uucugaaaauagauaguggcucc

SEQ ID NO: 182127 - RNA, 22 nt, Human
aauacagaggggucacaauuca

SEQ ID NO: 182128 - RNA, 21 nt, Human
agacagagugcagucuacaua

SEQ ID NO: 182129 - RNA, 23 nt, Human
aggcuggcuucaggagccucucc

SEQ ID NO: 182130 - RNA, 22 nt, Human
caacuauauagaaauugauugu

SEQ ID NO: 182131 - RNA, 22 nt, Human
uguauuuaauuguaucaucaca

SEQ ID NO: 182132 - RNA, 22 nt, Human
ucagagugaggcgucaacauga

SEQ ID NO: 182133 - RNA, 22 nt, Human
uuggggaagcuuugaaauacuu

SEQ ID NO: 182134 - RNA, 22 nt, Human
ccugggcaggccggacgcuggg

SEQ ID NO: 182135 - RNA, 22 nt, Human
uuagaacauuccaucacugggu

SEQ ID NO: 182136 - RNA, 22 nt, Human
gagcuggcagugguagacaugg

SEQ ID NO: 182137 - RNA, 22 nt, Human
cugcagggagaggggacagccu

SEQ ID NO: 182138 - RNA, 22 nt, Human
auacaguagggaccaugucuga

SEQ ID NO: 182139 - RNA, 22 nt, Human
auggcagacacaggcaggcaga

SEQ ID NO: 182140 - RNA, 23 nt, Human
accuagaaauacguuuuacaugg

SEQ ID NO: 182141 - RNA, 22 nt, Human
cauaugaaauaugaguugaaca

SEQ ID NO: 182142 - RNA, 17 nt, Human
ucugaagccagucugcu

SEQ ID NO: 182143 - RNA, 22 nt, Human
uccaguuuauuuuuggcagggu

SEQ ID NO: 182144 - RNA, 22 nt, Human
cugcugagccgcacccaggagc

SEQ ID NO: 182145 - RNA, 22 nt, Human
uugcugggucagaagccaggag

SEQ ID NO: 182146 - RNA, 22 nt, Human
ccaggaaggcaggccuccccgc

SEQ ID NO: 182147 - RNA, 22 nt, Human
aaugaacauggacaaguuaaua

SEQ ID NO: 182148 - RNA, 22 nt, Human
ugcaaaguugcaucaaaaccca

SEQ ID NO: 182149 - RNA, 21 nt, Human
ugaccagugccccauccuguc

SEQ ID NO: 182150 - RNA, 22 nt, Human
aaaaugaggucaauauccuuuu

SEQ ID NO: 182151 - RNA, 22 nt, Human
ccugagcagggcucugcagggc

SEQ ID NO: 182152 - RNA, 22 nt, Human
gcagucuuugaaugugaaauag

SEQ ID NO: 182153 - RNA, 21 nt, Human
ucagaguguguuacagcaagc

SEQ ID NO: 182154 - RNA, 22 nt, Human
ucaacaauugcauguugauguu

SEQ ID NO: 182155 - RNA, 22 nt, Human
ggcugguggggaaagaggacca

SEQ ID NO: 182156 - RNA, 22 nt, Human
ggcuccagguuuaaggguaugu

SEQ ID NO: 182157 - RNA, 21 nt, Human
cucaggauggcggccuggugg

SEQ ID NO: 182158 - RNA, 22 nt, Human
aggacauguaaauggagaggga

SEQ ID NO: 182159 - RNA, 22 nt, Human
gcaggccugcccagcaggaugg

SEQ ID NO: 182160 - RNA, 22 nt, Human
gcaggagccacuucagggaugc

SEQ ID NO: 182161 - RNA, 22 nt, Human
aaagcugccaaggagaauacua

SEQ ID NO: 182162 - RNA, 22 nt, Human
aauaacuuaagaaauuucccca

SEQ ID NO: 182163 - RNA, 22 nt, Human
caggccagguggcaggcaaaac

SEQ ID NO: 182164 - RNA, 20 nt, Human
gaguccaggggccuguagca

SEQ ID NO: 182165 - RNA, 23 nt, Human
cccaggcuacaaauuaugcucug

SEQ ID NO: 182166 - RNA, 22 nt, Human
cuggcagucugccucuucacug

SEQ ID NO: 182167 - RNA, 22 nt, Human
acaguggaggccauaugguccu

SEQ ID NO: 182168 - RNA, 22 nt, Human
gagagccugccagugaguguau

SEQ ID NO: 182169 - RNA, 22 nt, Human
cagcugcauuaauuuuagugaa

SEQ ID NO: 182170 - RNA, 22 nt, Human
ggaggggccggcugccugccac

SEQ ID NO: 182171 - RNA, 19 nt, Human
ggcuggagaaaggaaucag

SEQ ID NO: 182172 - RNA, 22 nt, Human
acuggcagcuguaggaugcaug

SEQ ID NO: 182173 - RNA, 22 nt, Human
uacaaaugguugaauggaugaa

SEQ ID NO: 182174 - RNA, 22 nt, Human
cuccucuuuggggauuuacaca

SEQ ID NO: 182175 - RNA, 22 nt, Human
uggaggagaacucccuggcuac

SEQ ID NO: 182176 - RNA, 22 nt, Human
aacagugaggugaauaugcucc

SEQ ID NO: 182177 - RNA, 22 nt, Human
uacaacaauuuccacauuagaa

SEQ ID NO: 182178 - RNA, 23 nt, Human
cuucucugagcuaggaaugcucu

SEQ ID NO: 182179 - RNA, 22 nt, Human
agacagacaaaauuccugccug

SEQ ID NO: 182180 - RNA, 22 nt, Human
ggcucugguggcaauugacugg

SEQ ID NO: 182181 - RNA, 22 nt, Human
ccuguauuauuuguaugugcug

SEQ ID NO: 182182 - RNA, 22 nt, Human
gcugucuuuuccuggcaguaaa

SEQ ID NO: 182183 - RNA, 22 nt, Human
agccaggcucaaggccugcucc

SEQ ID NO: 182184 - RNA, 22 nt, Human
auugcugaacuuauaaaugaau

SEQ ID NO: 182185 - RNA, 23 nt, Human
uuacaaguucugaaauuuccuuc

SEQ ID NO: 182186 - RNA, 22 nt, Human
cuuugaaaacacacgaauagac

SEQ ID NO: 182187 - RNA, 22 nt, Human
gugugcagggaugagugcaggu

SEQ ID NO: 182188 - RNA, 22 nt, Human
agggggcucagcaggcucugga

SEQ ID NO: 182189 - RNA, 18 nt, Human
gcuccugguuggaaagaa

SEQ ID NO: 182190 - RNA, 22 nt, Human
gcugccagcccagcaaggugug

SEQ ID NO: 182191 - RNA, 22 nt, Human
agcugaggaggaaugaugggua

SEQ ID NO: 182192 - RNA, 22 nt, Human
gaggcccagcauucagggcagg

SEQ ID NO: 182193 - RNA, 22 nt, Human
uccugguggauagaagccaagg

SEQ ID NO: 182194 - RNA, 22 nt, Human
cucugggcuccuucagcccuuu

SEQ ID NO: 182195 - RNA, 22 nt, Human
uuuaugucaaaacuacaguugg

SEQ ID NO: 182196 - RNA, 19 nt, Human
gcugggugaggucguugga

SEQ ID NO: 182197 - RNA, 22 nt, Human
uuccaugaaagugaaauggagc

SEQ ID NO: 182198 - RNA, 22 nt, Human
agcaccaggccauggggucccu

SEQ ID NO: 182199 - RNA, 22 nt, Human
gaacuggucuuuuagguuuucu

SEQ ID NO: 182200 - RNA, 22 nt, Human
aaaguguuuuccaugcaaugaa

SEQ ID NO: 182201 - RNA, 22 nt, Human
caggugaguaacaaugggugau

SEQ ID NO: 182202 - RNA, 22 nt, Human
uacaugugauaaauugauuaaa

SEQ ID NO: 182203 - RNA, 22 nt, Human
uuugucuucccccuuuaaucag

SEQ ID NO: 182204 - RNA, 22 nt, Human
uggcuucaggguugucuucagc

SEQ ID NO: 182205 - RNA, 22 nt, Human
aaggccagaguacuagaggcug

SEQ ID NO: 182206 - RNA, 22 nt, Human
uuagaacuuuucaacuccauuc

SEQ ID NO: 182207 - RNA, 22 nt, Human
cugaggagaugauaaugucauu

SEQ ID NO: 182208 - RNA, 23 nt, Human
agaggggagcaucugcuggcuga

SEQ ID NO: 182209 - RNA, 22 nt, Human
ucagcuuuccuugcuuuagauu

SEQ ID NO: 182210 - RNA, 22 nt, Human
aggcccagcccguccucgugcu

SEQ ID NO: 182211 - RNA, 19 nt, Human
ucucugccgaucagggccc

SEQ ID NO: 182212 - RNA, 22 nt, Human
agcuucucaaguguuugcgggg

SEQ ID NO: 182213 - RNA, 22 nt, Human
aagauaaacucuugauuucuga

SEQ ID NO: 182214 - RNA, 22 nt, Human
augcacaggcugugggcugguu

SEQ ID NO: 182215 - RNA, 22 nt, Human
uguuuaaauagaacauacugca

SEQ ID NO: 182216 - RNA, 22 nt, Human
gcugcccuguuuagccaggguu

SEQ ID NO: 182217 - RNA, 22 nt, Human
cagagcagugggguuggucaga

SEQ ID NO: 182218 - RNA, 22 nt, Human
uuccugugugaccgagacagug

SEQ ID NO: 182219 - RNA, 22 nt, Human
uccugggagcacaugguccugc

SEQ ID NO: 182220 - RNA, 22 nt, Human
cuccagauuccugcuggcagaa

SEQ ID NO: 182221 - RNA, 22 nt, Human
acugggcuccagaugugauacg

SEQ ID NO: 182222 - RNA, 22 nt, Human
aacagugucaggauuacagaua

SEQ ID NO: 182223 - RNA, 22 nt, Human
aagcaaggcccagagcaucagc

SEQ ID NO: 182224 - RNA, 22 nt, Human
uguguucuggcugugacagcug

SEQ ID NO: 182225 - RNA, 22 nt, Human
agacauuuccugugaaccuacu

SEQ ID NO: 182226 - RNA, 22 nt, Human
aucagcaaaaaugccuucagaa

SEQ ID NO: 182227 - RNA, 22 nt, Human
cagcucuuauuuucucuccuaa

SEQ ID NO: 182228 - RNA, 21 nt, Human
acugggcuagccugacuucug

SEQ ID NO: 182229 - RNA, 22 nt, Human
auguuuaaaggagucagagacu

SEQ ID NO: 182230 - RNA, 22 nt, Human
gaagagcuaaaggcacaggcuu

SEQ ID NO: 182231 - RNA, 22 nt, Human
agaaaugaauauguagugguua

SEQ ID NO: 182232 - RNA, 22 nt, Human
ucucaguggguuaaaagagaag

SEQ ID NO: 182233 - RNA, 22 nt, Human
acacagaggaaagugugaaggg

SEQ ID NO: 182234 - RNA, 22 nt, Human
cucugcagagccuccagcccag

SEQ ID NO: 182235 - RNA, 22 nt, Human
uucaaugcauauagauauagaa

SEQ ID NO: 182236 - RNA, 22 nt, Human
aaaucucaauuugaauuguagc

SEQ ID NO: 182237 - RNA, 22 nt, Human
ucaggcagaggauggggagcgu

SEQ ID NO: 182238 - RNA, 22 nt, Human
ccuggcuguuuauuucggggcu

SEQ ID NO: 182239 - RNA, 22 nt, Human
aagagccagugggaaagucuug

SEQ ID NO: 182240 - RNA, 20 nt, Human
acuaacauuugcaaggggcu

SEQ ID NO: 182241 - RNA, 22 nt, Human
cagagcccugcaugcuccaucu

SEQ ID NO: 182242 - RNA, 22 nt, Human
aucugcugcccagccacuugcu

SEQ ID NO: 182243 - RNA, 22 nt, Human
ugcagggaaagggcacugggcu

SEQ ID NO: 182244 - RNA, 20 nt, Human
guacucagaucaagucagcu

SEQ ID NO: 182245 - RNA, 22 nt, Human
uuagaacuuaagaauacugucu

SEQ ID NO: 182246 - RNA, 22 nt, Human
caaauacuguacugaacacugu

SEQ ID NO: 182247 - RNA, 22 nt, Human
uggagagguuuaaacaaaaguu

SEQ ID NO: 182248 - RNA, 22 nt, Human
gcagcugggacacugaggccag

SEQ ID NO: 182249 - RNA, 22 nt, Human
ggcucagcacagggcuggcauc

SEQ ID NO: 182250 - RNA, 22 nt, Human
acagggaauggagggaucagua

SEQ ID NO: 182251 - RNA, 22 nt, Human
ucagugucauaucaagaagaug

SEQ ID NO: 182252 - RNA, 21 nt, Human
aguggcugucaagggggccuu

SEQ ID NO: 182253 - RNA, 22 nt, Human
agaacagaagggaggaaggccu

SEQ ID NO: 182254 - RNA, 22 nt, Human
gugcagcugcaggagucagguc

SEQ ID NO: 182255 - RNA, 22 nt, Human
uguuaaaccuaguacagguccu

SEQ ID NO: 182256 - RNA, 21 nt, Human
gaggggcagcucuuagcauua

SEQ ID NO: 182257 - RNA, 22 nt, Human
gccagguguaguggccacaccu

SEQ ID NO: 182258 - RNA, 18 nt, Human
gcaggagauggguggggu

SEQ ID NO: 182259 - RNA, 22 nt, Human
cagguauucauagaauucagag

SEQ ID NO: 182260 - RNA, 22 nt, Human
ucacaucauuaagacuucuccu

SEQ ID NO: 182261 - RNA, 22 nt, Human
aguuaaaucauggccauuggaa

SEQ ID NO: 182262 - RNA, 22 nt, Human
acacauuuucaacacugucaag

SEQ ID NO: 182263 - RNA, 22 nt, Human
acauucucuuuuagaaagcugu

SEQ ID NO: 182264 - RNA, 22 nt, Human
ucuugggaggagcaccugccug

SEQ ID NO: 182265 - RNA, 22 nt, Human
cucugcaggggaggcaugcacu

SEQ ID NO: 182266 - RNA, 22 nt, Human
acacagugugugcagucggacg

SEQ ID NO: 182267 - RNA, 19 nt, Human
aauaagcuuggguaaaacu

SEQ ID NO: 182268 - RNA, 17 nt, Human
ucaggcugugccuggua

SEQ ID NO: 182269 - RNA, 22 nt, Human
aaaguuuuauaugcugcagcga

SEQ ID NO: 182270 - RNA, 22 nt, Human
cuucagaaacuaguaacagcua

SEQ ID NO: 182271 - RNA, 22 nt, Human
aaugauaagacaugaguagagg

SEQ ID NO: 182272 - RNA, 22 nt, Human
cagagacauucaguaaauuauc

SEQ ID NO: 182273 - RNA, 22 nt, Human
uuuuauguuccugaagcuaucu

SEQ ID NO: 182274 - RNA, 22 nt, Human
uguucacaagcagauguugcuu

SEQ ID NO: 182275 - RNA, 21 nt, Human
gaaagcacagaaaggacucuu

SEQ ID NO: 182276 - RNA, 22 nt, Human
ucuguaaguguugguuauucua

SEQ ID NO: 182277 - RNA, 22 nt, Human
gaauuccuuaggcucuugacug

SEQ ID NO: 182278 - RNA, 22 nt, Human
gcagauuacuggacugauucca

SEQ ID NO: 182279 - RNA, 23 nt, Human
ucauaaauauuagcacaguagga

SEQ ID NO: 182280 - RNA, 22 nt, Human
ccagcccuguuuaugugucacu

SEQ ID NO: 182281 - RNA, 20 nt, Human
uccagcccagcagccugaca

SEQ ID NO: 182282 - RNA, 22 nt, Human
aggagggauagaaaaauacuug

SEQ ID NO: 182283 - RNA, 22 nt, Human
uuaaggagcagaaugcuuggac

SEQ ID NO: 182284 - RNA, 22 nt, Human
gcugggcuucucaaugcugccu

SEQ ID NO: 182285 - RNA, 22 nt, Human
ugccuugggagccagcaugcca

SEQ ID NO: 182286 - RNA, 22 nt, Human
cugggccuugagaaucauguuu

SEQ ID NO: 182287 - RNA, 21 nt, Human
uacuacagucucuuuaucagu

SEQ ID NO: 182288 - RNA, 22 nt, Human
auaaccugguaguauuaaaugu

SEQ ID NO: 182289 - RNA, 23 nt, Human
aaagccaagucagucuacuggaa

SEQ ID NO: 182290 - RNA, 22 nt, Human
ucugggcugcuucagccuucgc

SEQ ID NO: 182291 - RNA, 22 nt, Human
uuuguucacauuuaggacucuc

SEQ ID NO: 182292 - RNA, 22 nt, Human
cuuggcaggguggaggaugcag

SEQ ID NO: 182293 - RNA, 22 nt, Human
gccucccuguuuccugcuccaa

SEQ ID NO: 182294 - RNA, 22 nt, Human
aagaguuauaccuauuucuaac

SEQ ID NO: 182295 - RNA, 22 nt, Human
ugguuccugguucacuuggcag

SEQ ID NO: 182296 - RNA, 19 nt, Human
cagcucaguuugauucucu

SEQ ID NO: 182297 - RNA, 22 nt, Human
gcucacugcaaccucugcuucc

SEQ ID NO: 182298 - RNA, 22 nt, Human
cuuuuccuauugauucuguuac

SEQ ID NO: 182299 - RNA, 22 nt, Human
ggcucuggggggaagucuguug

SEQ ID NO: 182300 - RNA, 22 nt, Human
cacagcaagagcuaaaugacca

SEQ ID NO: 182301 - RNA, 21 nt, Human
auuugcauuaaaauauuacgc

SEQ ID NO: 182302 - RNA, 22 nt, Human
cacacaaauauucuggaggcaa

SEQ ID NO: 182303 - RNA, 20 nt, Human
uacaggaaucaagacugcau

SEQ ID NO: 182304 - RNA, 22 nt, Human
uaagacacgggcugaucuaaag

SEQ ID NO: 182305 - RNA, 22 nt, Human
uaagaacauuuucggaaagaua

SEQ ID NO: 182306 - RNA, 22 nt, Human
agcugggcuggagcuccaagcg

SEQ ID NO: 182307 - RNA, 22 nt, Human
gggcaggugcccagggccagag

SEQ ID NO: 182308 - RNA, 22 nt, Human
ucccacaggagccugaguccca

SEQ ID NO: 182309 - RNA, 22 nt, Human
aaaugcuuagagguguucaaau

SEQ ID NO: 182310 - RNA, 22 nt, Human
uauuccaguucaccuuuucauc

SEQ ID NO: 182311 - RNA, 22 nt, Human
acaggcuggaggaggaccaaga

SEQ ID NO: 182312 - RNA, 22 nt, Human
ugccuggcucuaucaguggugg

SEQ ID NO: 182313 - RNA, 22 nt, Human
gucuggagggaagagaugucag

SEQ ID NO: 182314 - RNA, 22 nt, Human
aaugaucacugcaguugaugag

SEQ ID NO: 182315 - RNA, 22 nt, Human
uucacauuggugauauguuucu

SEQ ID NO: 182316 - RNA, 22 nt, Human
aaagacacaugucucuuagauu

SEQ ID NO: 182317 - RNA, 22 nt, Human
uuaaaagaccuguugagguuag

SEQ ID NO: 182318 - RNA, 22 nt, Human
cuacaucacuuaauucuuagaa

SEQ ID NO: 182319 - RNA, 22 nt, Human
ucagggcagaauccaaagaauu

SEQ ID NO: 182320 - RNA, 22 nt, Human
cugaagggaugugauuucuaca

SEQ ID NO: 182321 - RNA, 22 nt, Human
acaaagauucauuugcauuauu

SEQ ID NO: 182322 - RNA, 22 nt, Human
ccacaugcucuuguuacagugu

SEQ ID NO: 182323 - RNA, 21 nt, Human
cuguggccuggcuagcaccgu

SEQ ID NO: 182324 - RNA, 22 nt, Human
cagacaugauguaagcagaggc

SEQ ID NO: 182325 - RNA, 22 nt, Human
gucagcagugucagcucugggg

SEQ ID NO: 182326 - RNA, 22 nt, Human
gcucucugcaagucagcagccu

SEQ ID NO: 182327 - RNA, 22 nt, Human
gaagccacccuccuuccagccc

SEQ ID NO: 182328 - RNA, 22 nt, Human
cugcagagcagccaguccccca

SEQ ID NO: 182329 - RNA, 22 nt, Human
aguuaggaguauaggaaugccu

SEQ ID NO: 182330 - RNA, 22 nt, Human
gccauuuucugucuuguuuauu

SEQ ID NO: 182331 - RNA, 22 nt, Human
acaggccugaugccuuggcugg

SEQ ID NO: 182332 - RNA, 22 nt, Human
cucccagggccaucgagucacu

SEQ ID NO: 182333 - RNA, 22 nt, Human
gcuguucacaucuggaccauuu

SEQ ID NO: 182334 - RNA, 22 nt, Human
ugcugcagcuaaggugaggugc

SEQ ID NO: 182335 - RNA, 22 nt, Human
ccuggcacauaguaaguacuag

SEQ ID NO: 182336 - RNA, 22 nt, Human
uuucacaaaugucuuuaacuug

SEQ ID NO: 182337 - RNA, 22 nt, Human
ggcugaaacagauuucaagaca

SEQ ID NO: 182338 - RNA, 22 nt, Human
agacagcugggaguguccuucu

SEQ ID NO: 182339 - RNA, 17 nt, Human
aggcuggcucacaggga

SEQ ID NO: 182340 - RNA, 22 nt, Human
ugacagggucagagcugagcug

SEQ ID NO: 182341 - RNA, 22 nt, Human
gcucagagaguuucacaaguuu

SEQ ID NO: 182342 - RNA, 22 nt, Human
ugacuuuaagcuaucugauucu

SEQ ID NO: 182343 - RNA, 22 nt, Human
aaaagaaccuagcuccucaguc

SEQ ID NO: 182344 - RNA, 23 nt, Human
ucccagggaaggugagcgaggcu

SEQ ID NO: 182345 - RNA, 22 nt, Human
gcacagaacuucucuuaguagg

SEQ ID NO: 182346 - RNA, 22 nt, Human
uuccuggcacugcagugguuga

SEQ ID NO: 182347 - RNA, 22 nt, Human
ggagugggaacaaugacauggu

SEQ ID NO: 182348 - RNA, 22 nt, Human
uucucuuacauuuucucagccu

SEQ ID NO: 182349 - RNA, 22 nt, Human
aaaggccacugcaagggaaggu

SEQ ID NO: 182350 - RNA, 23 nt, Human
cucugcaggagagugggcagggc

SEQ ID NO: 182351 - RNA, 22 nt, Human
cugaggccggagcacugaagag

SEQ ID NO: 182352 - RNA, 22 nt, Human
caacagagagaccagaaacagg

SEQ ID NO: 182353 - RNA, 22 nt, Human
aggugucuucagggugagacag

SEQ ID NO: 182354 - RNA, 22 nt, Human
uuggaaaagcguucucuguagc

SEQ ID NO: 182355 - RNA, 22 nt, Human
gcuggaggaucacuugagccca

SEQ ID NO: 182356 - RNA, 22 nt, Human
caauuucuuguuaauucucagg

SEQ ID NO: 182357 - RNA, 21 nt, Human
aacugcaaaucuuagacugca

SEQ ID NO: 182358 - RNA, 20 nt, Human
uucuggaggcuacaagucug

SEQ ID NO: 182359 - RNA, 22 nt, Human
aaguuugcauagauuaagcauu

SEQ ID NO: 182360 - RNA, 22 nt, Human
aacauguuuccaguguaaggcc

SEQ ID NO: 182361 - RNA, 20 nt, Human
aguuugugugucuaugcgcu

SEQ ID NO: 182362 - RNA, 22 nt, Human
auagaauuacaguguguuugga

SEQ ID NO: 182363 - RNA, 22 nt, Human
gcauuuggaacuugguugagau

SEQ ID NO: 182364 - RNA, 22 nt, Human
uggcagcacuugaacuugagcc

SEQ ID NO: 182365 - RNA, 22 nt, Human
ggcagggaguggagacucccua

SEQ ID NO: 182366 - RNA, 22 nt, Human
ugucccagggaaggcccagcac

SEQ ID NO: 182367 - RNA, 22 nt, Human
cuucucugcaccccacuuuugc

SEQ ID NO: 182368 - RNA, 22 nt, Human
accagccugucugagucguggg

SEQ ID NO: 182369 - RNA, 22 nt, Human
uuuaucugagcugauagauagu

SEQ ID NO: 182370 - RNA, 22 nt, Human
gcugucuuggaaaaggcaaaga

SEQ ID NO: 182371 - RNA, 22 nt, Human
uaguuaggaaaguccagggagc

SEQ ID NO: 182372 - RNA, 22 nt, Human
cagauucuucauugccccauuc

SEQ ID NO: 182373 - RNA, 22 nt, Human
auguacaguuucuagacucaaa

SEQ ID NO: 182374 - RNA, 22 nt, Human
uguuuuagcugacacauggagc

SEQ ID NO: 182375 - RNA, 22 nt, Human
cuuuuucuucuaggugugccug

SEQ ID NO: 182376 - RNA, 22 nt, Human
cugcccugcuugaugacagcga

SEQ ID NO: 182377 - RNA, 22 nt, Human
ugaggaguguggauggagcuug

SEQ ID NO: 182378 - RNA, 22 nt, Human
uucugagagagccucucauguu

SEQ ID NO: 182379 - RNA, 22 nt, Human
auccuuagguggugcaucaggg

SEQ ID NO: 182380 - RNA, 22 nt, Human
cucaacagcucugccauacucc

SEQ ID NO: 182381 - RNA, 22 nt, Human
uuucaaggcuaguuuuaauuag

SEQ ID NO: 182382 - RNA, 22 nt, Human
aucaaaguaauuaacacugaga

SEQ ID NO: 182383 - RNA, 22 nt, Human
ugcuuugcuggcacuccuggcu

SEQ ID NO: 182384 - RNA, 22 nt, Human
agcuuugggcagaagaggauuc

SEQ ID NO: 182385 - RNA, 22 nt, Human
uuccucagcuguguccuggcga

SEQ ID NO: 182386 - RNA, 22 nt, Human
uucacaguuuaauggcaaggau

SEQ ID NO: 182387 - RNA, 22 nt, Human
uauuuucaccuucucuggauau

SEQ ID NO: 182388 - RNA, 22 nt, Human
uguauuuucuucuggaagcuua

SEQ ID NO: 182389 - RNA, 22 nt, Human
cuucccugguguuagcccaaug

SEQ ID NO: 182390 - RNA, 22 nt, Human
gcuguacaaggccucugccauc

SEQ ID NO: 182391 - RNA, 22 nt, Human
agauacaguguuacauuuuuau

SEQ ID NO: 182392 - RNA, 22 nt, Human
uguuucaaagaaagaaaauaua

SEQ ID NO: 182393 - RNA, 22 nt, Human
aucagcaagauguaauuucuau

SEQ ID NO: 182394 - RNA, 22 nt, Human
cagcuguguagaugcaggguca

SEQ ID NO: 182395 - RNA, 22 nt, Human
agcagagucuucaagggcaggc

SEQ ID NO: 182396 - RNA, 22 nt, Human
uagaacuuccaauucagggcug

SEQ ID NO: 182397 - RNA, 22 nt, Human
ucuguuucuucuucuguuauau

SEQ ID NO: 182398 - RNA, 22 nt, Human
cccuccagugucccagugggga

SEQ ID NO: 182399 - RNA, 22 nt, Human
ccucccaccauuuagagagagc

SEQ ID NO: 182400 - RNA, 22 nt, Human
acucuguaauucugaagcaccu

SEQ ID NO: 182401 - RNA, 22 nt, Human
uuccucaguuagugccugaggc

SEQ ID NO: 182402 - RNA, 22 nt, Human
uacauuacaggaaagauaaaga

SEQ ID NO: 182403 - RNA, 22 nt, Human
cagaaaggacagagugagggug

SEQ ID NO: 182404 - RNA, 22 nt, Human
uggagcugaggggaaugcugag

SEQ ID NO: 182405 - RNA, 22 nt, Human
aggcaggcucaaugcccagucu

SEQ ID NO: 182406 - RNA, 22 nt, Human
cuguacaggugaggagggggcu

SEQ ID NO: 182407 - RNA, 20 nt, Human
cugcucagaccaacucuucu

SEQ ID NO: 182408 - RNA, 22 nt, Human
uuucugcucgcucucaaucagg

SEQ ID NO: 182409 - RNA, 22 nt, Human
uuccuggguugugcauuguaca

SEQ ID NO: 182410 - RNA, 22 nt, Human
acccaggcuggagugcaguggu

SEQ ID NO: 182411 - RNA, 21 nt, Human
ggcagccucuguggaagggga

SEQ ID NO: 182412 - RNA, 22 nt, Human
uagguggugggauaugagcauc

SEQ ID NO: 182413 - RNA, 22 nt, Human
uuacagaguggucuggcuaugu

SEQ ID NO: 182414 - RNA, 22 nt, Human
uucaggaugacaccauguccag

SEQ ID NO: 182415 - RNA, 23 nt, Human
auguaaacuucagagucauugcc

SEQ ID NO: 182416 - RNA, 22 nt, Human
ccauaaucguguguuaaauaau

SEQ ID NO: 182417 - RNA, 22 nt, Human
cuuuuccucaggaggagacgcg

SEQ ID NO: 182418 - RNA, 22 nt, Human
uccuggcaguucagcccccuaa

SEQ ID NO: 182419 - RNA, 22 nt, Human
uccaucuacggcuauaccaccc

SEQ ID NO: 182420 - RNA, 22 nt, Human
cuucuuuaauguauacaaaaga

SEQ ID NO: 182421 - RNA, 22 nt, Human
uugauucaaaacaggagguagg

SEQ ID NO: 182422 - RNA, 22 nt, Human
ggguccagaguuuucccgcccu

SEQ ID NO: 182423 - RNA, 22 nt, Human
ucuccaguaucuuuccaaugaa

SEQ ID NO: 182424 - RNA, 22 nt, Human
agcucccagggcugggcaaguu

SEQ ID NO: 182425 - RNA, 22 nt, Human
cuguuuucaaagagagagaaug

SEQ ID NO: 182426 - RNA, 22 nt, Human
ugauuaaagguggaaggcaggu

SEQ ID NO: 182427 - RNA, 22 nt, Human
cagaggaaggcucugggaaugu

SEQ ID NO: 182428 - RNA, 23 nt, Human
ugcuggguaucagaaucacugag

SEQ ID NO: 182429 - RNA, 22 nt, Human
cauaggccacggucagcccaca

SEQ ID NO: 182430 - RNA, 22 nt, Human
cgguccagggaacgcccccgcc

SEQ ID NO: 182431 - RNA, 22 nt, Human
aguccugucucucccagggcca

SEQ ID NO: 182432 - RNA, 22 nt, Human
cuggcaguuggcauuggcaucu

SEQ ID NO: 182433 - RNA, 22 nt, Human
uacauagaggguaauagcauca

SEQ ID NO: 182434 - RNA, 22 nt, Human
accucagauuguggcuccgcug

SEQ ID NO: 182435 - RNA, 22 nt, Human
uccuuggcaugccgucuucucc

SEQ ID NO: 182436 - RNA, 22 nt, Human
uugaauucauuucucauugagu

SEQ ID NO: 182437 - RNA, 22 nt, Human
aauaaucucccuuuuuguaugu

SEQ ID NO: 182438 - RNA, 19 nt, Human
acaugacaacaggggaggc

SEQ ID NO: 182439 - RNA, 22 nt, Human
gcugggacugagacagugaccu

SEQ ID NO: 182440 - RNA, 20 nt, Human
ucagacccggggaagggagc

SEQ ID NO: 182441 - RNA, 22 nt, Human
cccucuacagggaagcgcuuuc

SEQ ID NO: 182442 - RNA, 22 nt, Human
uguucaaaugaucuucuuaaau

SEQ ID NO: 182443 - RNA, 22 nt, Human
agaggccaucugcucugugggg

SEQ ID NO: 182444 - RNA, 22 nt, Human
caguggcagagaacagagaccu

SEQ ID NO: 182445 - RNA, 22 nt, Human
uuugucuuaaaucuuguuacug

SEQ ID NO: 182446 - RNA, 20 nt, Human
ucagugcucaggcaccaggu

SEQ ID NO: 182447 - RNA, 22 nt, Human
caacugaacugauaucaacuau

SEQ ID NO: 182448 - RNA, 17 nt, Human
ugcugucugcuucccua

SEQ ID NO: 182449 - RNA, 22 nt, Human
ucaagcagcagaucaagagcua

SEQ ID NO: 182450 - RNA, 22 nt, Human
auuggagaagaacaugaauuag

SEQ ID NO: 182451 - RNA, 22 nt, Human
aacagcaguggcaggagaaggc

SEQ ID NO: 182452 - RNA, 22 nt, Human
aggacacaggcaggaggagauc

SEQ ID NO: 182453 - RNA, 22 nt, Human
aggggagccccugguccuggug

SEQ ID NO: 182454 - RNA, 21 nt, Human
ugcaggaguguaaugugaccc

SEQ ID NO: 182455 - RNA, 22 nt, Human
ugaggcaagucucaaucuuuga

SEQ ID NO: 182456 - RNA, 20 nt, Human
uuaaaaagagucacaggaga

SEQ ID NO: 182457 - RNA, 22 nt, Human
auggcaguugcccagccaaucc

SEQ ID NO: 182458 - RNA, 22 nt, Human
uuccaggacuggguguuugaag

SEQ ID NO: 182459 - RNA, 22 nt, Human
aguuuacacuuuugauucuuau

SEQ ID NO: 182460 - RNA, 14 nt, Human
gcaggcagaucauu

SEQ ID NO: 182461 - RNA, 22 nt, Human
uagaacugacguuagggaagaa

SEQ ID NO: 182462 - RNA, 22 nt, Human
ugcugagggagggguuuuccag

SEQ ID NO: 182463 - RNA, 22 nt, Human
cagagacagcaaguugauuucc

SEQ ID NO: 182464 - RNA, 22 nt, Human
augaugucuaucuuuguaguau

SEQ ID NO: 182465 - RNA, 22 nt, Human
cuggcuggucaucagcaguacg

SEQ ID NO: 182466 - RNA, 22 nt, Human
ggaggguggcagcguccugggc

SEQ ID NO: 182467 - RNA, 22 nt, Human
agcccaaggcuucccugcuggc

SEQ ID NO: 182468 - RNA, 22 nt, Human
uauuuccaagcugaauccaaug

SEQ ID NO: 182469 - RNA, 19 nt, Human
gauuuaaacguggcucuau

SEQ ID NO: 182470 - RNA, 22 nt, Human
cucugagguuccuuugcccucg

SEQ ID NO: 182471 - RNA, 22 nt, Human
ccucuggaucuuucuccacacu

SEQ ID NO: 182472 - RNA, 22 nt, Human
uucauugaaccacuuuauucuu

SEQ ID NO: 182473 - RNA, 22 nt, Human
ucucagaguuccucuggagucc

SEQ ID NO: 182474 - RNA, 23 nt, Human
uggaggcaggaugcuaaggaguc

SEQ ID NO: 182475 - RNA, 22 nt, Human
acaauguuucucuuuagucauu

SEQ ID NO: 182476 - RNA, 22 nt, Human
ucucaaacuacaguauggcugu

SEQ ID NO: 182477 - RNA, 20 nt, Human
ucuggcucuuugcuccuccc

SEQ ID NO: 182478 - RNA, 22 nt, Human
uagggcuguggucaguccucua

SEQ ID NO: 182479 - RNA, 22 nt, Human
ggucugcccacuacucuccauu

SEQ ID NO: 182480 - RNA, 22 nt, Human
uuaauuuucucaucugugaaau

SEQ ID NO: 182481 - RNA, 22 nt, Human
aaguauauacuaaauguuaauc

SEQ ID NO: 182482 - RNA, 22 nt, Human
agcaccaguuucgucgugacaa

SEQ ID NO: 182483 - RNA, 22 nt, Human
ucucugaguucuccuccagccc

SEQ ID NO: 182484 - RNA, 22 nt, Human
gacugugggaagacuguagguu

SEQ ID NO: 182485 - RNA, 22 nt, Human
uagcuucuggaguguuugaaaa

SEQ ID NO: 182486 - RNA, 22 nt, Human
ggcugccuuuagaacggaugcu

SEQ ID NO: 182487 - RNA, 22 nt, Human
agggaagccaagccuuagagaa

SEQ ID NO: 182488 - RNA, 22 nt, Human
cagcccugcagcuggaucucac

SEQ ID NO: 182489 - RNA, 22 nt, Human
acacacagguaaaggagccugg

SEQ ID NO: 182490 - RNA, 22 nt, Human
acaugauucuugauaggcauug

SEQ ID NO: 182491 - RNA, 22 nt, Human
ugggcaaaugcuuuuuagucaa

SEQ ID NO: 182492 - RNA, 22 nt, Human
ccucaguguguggauguuagag

SEQ ID NO: 182493 - RNA, 21 nt, Human
guagauaaagcauuuucauua

SEQ ID NO: 182494 - RNA, 22 nt, Human
auuacagauagacuuugaagcu

SEQ ID NO: 182495 - RNA, 22 nt, Human
gaguucuucuauauaguaugag

SEQ ID NO: 182496 - RNA, 22 nt, Human
ucucucuacuggggcacuagga

SEQ ID NO: 182497 - RNA, 22 nt, Human
aaggggauagagcagacacucc

SEQ ID NO: 182498 - RNA, 22 nt, Human
ugugugcacaggaguguuugaa

SEQ ID NO: 182499 - RNA, 23 nt, Human
ucucagacccgaagccagaggaa

SEQ ID NO: 182500 - RNA, 22 nt, Human
ucagguguuuaaggauagugau

SEQ ID NO: 182501 - RNA, 22 nt, Human
ggcuucccuuuccgagaggaga

SEQ ID NO: 182502 - RNA, 22 nt, Human
auggagccauuccugaagacuu

SEQ ID NO: 182503 - RNA, 22 nt, Human
gccagucuucauauucauggug

SEQ ID NO: 182504 - RNA, 22 nt, Human
guagaaucccaguggcuauauu

SEQ ID NO: 182505 - RNA, 22 nt, Human
agguggguucccgacucuggcu

SEQ ID NO: 182506 - RNA, 22 nt, Human
aguacaaacuguuucaaaguag

SEQ ID NO: 182507 - RNA, 22 nt, Human
uuguugucauuguagaggauuu

SEQ ID NO: 182508 - RNA, 22 nt, Human
ugggggagauugugcaucucua

SEQ ID NO: 182509 - RNA, 23 nt, Human
auagaagauuauugcaacagucc

SEQ ID NO: 182510 - RNA, 22 nt, Human
gcaaauucaacagcacauucuc

SEQ ID NO: 182511 - RNA, 22 nt, Human
agggacuggcucucugagcagg

SEQ ID NO: 182512 - RNA, 22 nt, Human
ucaagaacugugaagagucuga

SEQ ID NO: 182513 - RNA, 22 nt, Human
caggaugcggccugacucuaag

SEQ ID NO: 182514 - RNA, 22 nt, Human
aaaaagauagcauugugcuccu

SEQ ID NO: 182515 - RNA, 22 nt, Human
aagccagauuucacucuuaauu

SEQ ID NO: 182516 - RNA, 22 nt, Human
gaagccacaacuuuuucuuagc

SEQ ID NO: 182517 - RNA, 22 nt, Human
agagucagcuuaugacacaguc

SEQ ID NO: 182518 - RNA, 22 nt, Human
cccauggagugccugagggcca

SEQ ID NO: 182519 - RNA, 22 nt, Human
ugagcuuccucccugcauccau

SEQ ID NO: 182520 - RNA, 22 nt, Human
ucucuggguaugguaacguugg

SEQ ID NO: 182521 - RNA, 22 nt, Human
gccagguccccucauggcuccu

SEQ ID NO: 182522 - RNA, 22 nt, Human
aaacugugaagcaaguacaagg

SEQ ID NO: 182523 - RNA, 22 nt, Human
aggcugagagcaacgugucaga

SEQ ID NO: 182524 - RNA, 22 nt, Human
uuggaauucaaguuguagcuua

SEQ ID NO: 182525 - RNA, 22 nt, Human
gaggggcagagguagagaacaa

SEQ ID NO: 182526 - RNA, 22 nt, Human
aacugaggucuccagugcagaa

SEQ ID NO: 182527 - RNA, 22 nt, Human
cuccuucagcugaaucccugcu

SEQ ID NO: 182528 - RNA, 22 nt, Human
uuagcuuuccuacuaauaaaua

SEQ ID NO: 182529 - RNA, 21 nt, Human
ucgugcagcagcugaggcuug

SEQ ID NO: 182530 - RNA, 22 nt, Human
uuccugguaguaagacaucugg

SEQ ID NO: 182531 - RNA, 22 nt, Human
uauguacaauuuguuguauguc

SEQ ID NO: 182532 - RNA, 22 nt, Human
caauuucaagauucuguucuuu

SEQ ID NO: 182533 - RNA, 22 nt, Human
ggaucuggggcucugcugcuca

SEQ ID NO: 182534 - RNA, 22 nt, Human
cucuggguucacugaggcucug

SEQ ID NO: 182535 - RNA, 22 nt, Human
caggccccauuccucuugggac

SEQ ID NO: 182536 - RNA, 22 nt, Human
aggcacuucucaaauucaugcc

SEQ ID NO: 182537 - RNA, 22 nt, Human
cuccuggaugcaggcugucugc

SEQ ID NO: 182538 - RNA, 22 nt, Human
ugggaggaaugucacugagcca

SEQ ID NO: 182539 - RNA, 22 nt, Human
cugggccuaacccacagcguuu

SEQ ID NO: 182540 - RNA, 22 nt, Human
auggccagcucagagcacucag

SEQ ID NO: 182541 - RNA, 22 nt, Human
gacuucugccucaggggaaggu

SEQ ID NO: 182542 - RNA, 22 nt, Human
uuauuauugugaccugagaaug

SEQ ID NO: 182543 - RNA, 22 nt, Human
cgggcuggcugcagcugcugga

SEQ ID NO: 182544 - RNA, 22 nt, Human
ucacaggcccaaaccacgcuua

SEQ ID NO: 182545 - RNA, 22 nt, Human
uuacaguagcuuuauuuggagu

SEQ ID NO: 182546 - RNA, 22 nt, Human
agggcagcuaaggugcugacug

SEQ ID NO: 182547 - RNA, 22 nt, Human
cuggccagcugacagcagggcu

SEQ ID NO: 182548 - RNA, 22 nt, Human
uuuccuucccuggaugagaagu

SEQ ID NO: 182549 - RNA, 22 nt, Human
uacuguuaauguuaaauucagg

SEQ ID NO: 182550 - RNA, 22 nt, Human
agucucuugcuagaaucagcca

SEQ ID NO: 182551 - RNA, 22 nt, Human
uucagaacaauaugaacagaac

SEQ ID NO: 182552 - RNA, 22 nt, Human
agcucaaagcuguuacauugua

SEQ ID NO: 182553 - RNA, 22 nt, Human
ucuuuacauaguguggacuacu

SEQ ID NO: 182554 - RNA, 22 nt, Human
auucuacauuuggagugauguc

SEQ ID NO: 182555 - RNA, 18 nt, Human
gcugaaauucuaaacaaa

SEQ ID NO: 182556 - RNA, 22 nt, Human
gugaggagucugaagcacauaa

SEQ ID NO: 182557 - RNA, 22 nt, Human
ucucugggcuaaaaucaaggug

SEQ ID NO: 182558 - RNA, 18 nt, Human
gcaacagaucaacagaaa

SEQ ID NO: 182559 - RNA, 22 nt, Human
ggaggccaaggaggagcuugcc

SEQ ID NO: 182560 - RNA, 22 nt, Human
uagacacauacccuugcccaaa

SEQ ID NO: 182561 - RNA, 22 nt, Human
ugaggcagguaagcaaguuuug

SEQ ID NO: 182562 - RNA, 22 nt, Human
uucuucuucuggcugcaccugg

SEQ ID NO: 182563 - RNA, 22 nt, Human
gacuuuggcaucuagacauugu

SEQ ID NO: 182564 - RNA, 22 nt, Human
uuucacaaugcaauccuacuuc

SEQ ID NO: 182565 - RNA, 22 nt, Human
agucucaaguguuaguauuauu

SEQ ID NO: 182566 - RNA, 22 nt, Human
aggccagcaagaaagagagucu

SEQ ID NO: 182567 - RNA, 22 nt, Human
agugaaauaugcccauugcugu

SEQ ID NO: 182568 - RNA, 22 nt, Human
uaagaugagguagguaagacuu

SEQ ID NO: 182569 - RNA, 22 nt, Human
aaaagcaguuaucugggaggaa

SEQ ID NO: 182570 - RNA, 20 nt, Human
gccugcagguuggaugggau

SEQ ID NO: 182571 - RNA, 22 nt, Human
acauacuuaacauuaaagucau

SEQ ID NO: 182572 - RNA, 22 nt, Human
accugcagcuaaagauguaggg

SEQ ID NO: 182573 - RNA, 22 nt, Human
aguuaacacagucaggaguaac

SEQ ID NO: 182574 - RNA, 22 nt, Human
ucagauggguuuugaaggaugu

SEQ ID NO: 182575 - RNA, 22 nt, Human
gagggggcucccugaagccagu

SEQ ID NO: 182576 - RNA, 22 nt, Human
uaugccagggacuguuucacca

SEQ ID NO: 182577 - RNA, 22 nt, Human
gcagguggcagaggugggaucu

SEQ ID NO: 182578 - RNA, 22 nt, Human
cccaggaacagcacagaacagc

SEQ ID NO: 182579 - RNA, 22 nt, Human
acagugcauaaaaacaacuuuu

SEQ ID NO: 182580 - RNA, 22 nt, Human
cagaaccuuggugguagggaca

SEQ ID NO: 182581 - RNA, 22 nt, Human
gaaugaguauucuuuauaggau

SEQ ID NO: 182582 - RNA, 17 nt, Human
uagcacaaagcaggauu

SEQ ID NO: 182583 - RNA, 21 nt, Human
agaagggauugugguaaagau

SEQ ID NO: 182584 - RNA, 22 nt, Human
cucuuccuuucccuugagggug

SEQ ID NO: 182585 - RNA, 22 nt, Human
uggaaacuuaccguuuggggaa

SEQ ID NO: 182586 - RNA, 22 nt, Human
ggagugaggcauuuguagcuga

SEQ ID NO: 182587 - RNA, 22 nt, Human
agcagaugcgucugagugggag

SEQ ID NO: 182588 - RNA, 22 nt, Human
uacugugacagaguacuuaaac

SEQ ID NO: 182589 - RNA, 22 nt, Human
uucacagacuuuccauagauug

SEQ ID NO: 182590 - RNA, 22 nt, Human
gugacaggccacugcggcucug

SEQ ID NO: 182591 - RNA, 22 nt, Human
agaaagggcuauuuugagguag

SEQ ID NO: 182592 - RNA, 22 nt, Human
uugugacacaugccguccugag

SEQ ID NO: 182593 - RNA, 22 nt, Human
gcuuuaaugaagucacgcaaag

SEQ ID NO: 182594 - RNA, 22 nt, Human
acauucuuccagcuggcuguug

SEQ ID NO: 182595 - RNA, 22 nt, Human
ccuggcugcauuuugcuggaug

SEQ ID NO: 182596 - RNA, 22 nt, Human
aggggagccgaggggcaucugu

SEQ ID NO: 182597 - RNA, 22 nt, Human
cugcauaugagaauaggagaaa

SEQ ID NO: 182598 - RNA, 22 nt, Human
gccucuggggcagcugagucau

SEQ ID NO: 182599 - RNA, 20 nt, Human
gcugcucuccacggucugca

SEQ ID NO: 182600 - RNA, 22 nt, Human
aagaaagccaaaguucauaccu

SEQ ID NO: 182601 - RNA, 18 nt, Human
ucaggcugggccuccuuc

SEQ ID NO: 182602 - RNA, 19 nt, Human
ugcuuucuaaacacaugca

SEQ ID NO: 182603 - RNA, 22 nt, Human
agcuagaacuacaggcaugugc

SEQ ID NO: 182604 - RNA, 23 nt, Human
ccacaggcacagaggcuugcauc

SEQ ID NO: 182605 - RNA, 22 nt, Human
gaucugaagauaugaaauauuu

SEQ ID NO: 182606 - RNA, 22 nt, Human
aucuuugaucuuuauugcuaag

SEQ ID NO: 182607 - RNA, 22 nt, Human
auuuccaccggcucaggaaguu

SEQ ID NO: 182608 - RNA, 22 nt, Human
gaggcuggcagaaaagcacagg

SEQ ID NO: 182609 - RNA, 22 nt, Human
ggcaggcugggagucaucagag

SEQ ID NO: 182610 - RNA, 22 nt, Human
gaccauuuguugaaaagauuau

SEQ ID NO: 182611 - RNA, 22 nt, Human
agugaauguccccgcgggucag

SEQ ID NO: 182612 - RNA, 22 nt, Human
cuggccagccugucgaugcccu

SEQ ID NO: 182613 - RNA, 22 nt, Human
gguaacugcagaaugugccuca

SEQ ID NO: 182614 - RNA, 22 nt, Human
cagacaggguuuuggucuuugg

SEQ ID NO: 182615 - RNA, 22 nt, Human
aauuuguuuucaagucacugga

SEQ ID NO: 182616 - RNA, 22 nt, Human
uucuucaugcuguugcugcuug

SEQ ID NO: 182617 - RNA, 23 nt, Human
ccaggaagaggccauccacaguc

SEQ ID NO: 182618 - RNA, 17 nt, Human
caggcuccuuccagauu

SEQ ID NO: 182619 - RNA, 22 nt, Human
aauguuucguaaauugucuaug

SEQ ID NO: 182620 - RNA, 22 nt, Human
uuaauuaacuagccaaccacua

SEQ ID NO: 182621 - RNA, 22 nt, Human
ccaggaggcggaagguacagug

SEQ ID NO: 182622 - RNA, 22 nt, Human
uucucugaucuugcuagacuga

SEQ ID NO: 182623 - RNA, 21 nt, Human
cggagcugggcagggcauccc

SEQ ID NO: 182624 - RNA, 22 nt, Human
cagacagggaccucgcuccaga

SEQ ID NO: 182625 - RNA, 22 nt, Human
guccaugcagucaccuccagcu

SEQ ID NO: 182626 - RNA, 20 nt, Human
agacucaguuucuaugcucu

SEQ ID NO: 182627 - RNA, 22 nt, Human
ccagggcacguugggacaguac

SEQ ID NO: 182628 - RNA, 22 nt, Human
aggcuucucuccuuggcuugca

SEQ ID NO: 182629 - RNA, 22 nt, Human
aggccucucuccuuggcuugua

SEQ ID NO: 182630 - RNA, 22 nt, Human
ggaggggcauaguucaccauca

SEQ ID NO: 182631 - RNA, 22 nt, Human
cagcacagugcagaugcugacu

SEQ ID NO: 182632 - RNA, 22 nt, Human
caggcagcagccacucugguau

SEQ ID NO: 182633 - RNA, 22 nt, Human
aacaaacauuaccuggugcugg

SEQ ID NO: 182634 - RNA, 23 nt, Human
uggagcugggcucagacccuggg

SEQ ID NO: 182635 - RNA, 23 nt, Human
uaaugagaagcuuuguuuccuga

SEQ ID NO: 182636 - RNA, 22 nt, Human
ucaggaaguuuugaaucaacug

SEQ ID NO: 182637 - RNA, 22 nt, Human
ugcagguggcuccagggacugc

SEQ ID NO: 182638 - RNA, 21 nt, Human
acacaggcagugucccgaggu

SEQ ID NO: 182639 - RNA, 22 nt, Human
aacaccuugcagggauuaugac

SEQ ID NO: 182640 - RNA, 22 nt, Human
uucugggugacucacgcucccc

SEQ ID NO: 182641 - RNA, 22 nt, Human
uguuuaauugggccaacagcgg

SEQ ID NO: 182642 - RNA, 22 nt, Human
auccaaaaccagugcauuuucc

SEQ ID NO: 182643 - RNA, 22 nt, Human
auggaaagccaguguuccauca

SEQ ID NO: 182644 - RNA, 22 nt, Human
cucaggccaauaagcuccagcc

SEQ ID NO: 182645 - RNA, 22 nt, Human
aguacacaagacacauuuaaaa

SEQ ID NO: 182646 - RNA, 22 nt, Human
cugagcugggacucaguagcaa

SEQ ID NO: 182647 - RNA, 22 nt, Human
aggaggccgcugaugggcuccc

SEQ ID NO: 182648 - RNA, 22 nt, Human
aggcaaggugcucuugcucuau

SEQ ID NO: 182649 - RNA, 22 nt, Human
uuuuaucuucauuccuaucuac

SEQ ID NO: 182650 - RNA, 22 nt, Human
guuaaauaaccucauguccguu

SEQ ID NO: 182651 - RNA, 22 nt, Human
acaugucaauuuaguacucuua

SEQ ID NO: 182652 - RNA, 22 nt, Human
agugcccucgugcccagggccu

SEQ ID NO: 182653 - RNA, 22 nt, Human
acagucucuuggaauuuucaga

SEQ ID NO: 182654 - RNA, 22 nt, Human
ggcucugggugugaccuugggu

SEQ ID NO: 182655 - RNA, 22 nt, Human
acccagggcuuaaggcggugca

SEQ ID NO: 182656 - RNA, 22 nt, Human
agauaauuauuuacuucaaagu

SEQ ID NO: 182657 - RNA, 22 nt, Human
ggagacagugacuuagagacug

SEQ ID NO: 182658 - RNA, 20 nt, Human
aagagcuacuuagccuuucc

SEQ ID NO: 182659 - RNA, 22 nt, Human
uagucuuuuuaauaaauaaugc

SEQ ID NO: 182660 - RNA, 22 nt, Human
ccucugaguacagugauggauu

SEQ ID NO: 182661 - RNA, 22 nt, Human
gcccagcacauugcugaggacc

SEQ ID NO: 182662 - RNA, 19 nt, Human
aaaguugagaaacaaugga

SEQ ID NO: 182663 - RNA, 22 nt, Human
aggccacauagcuugcauguag

SEQ ID NO: 182664 - RNA, 22 nt, Human
aagaugcaugcugaagcuggcu

SEQ ID NO: 182665 - RNA, 22 nt, Human
cauuucauaguugucacaauaa

SEQ ID NO: 182666 - RNA, 22 nt, Human
ugggcagagucauacaggagac

SEQ ID NO: 182667 - RNA, 22 nt, Human
ucauuugugcaauguagaugaa

SEQ ID NO: 182668 - RNA, 21 nt, Human
gcuuucuguggacucugcacc

SEQ ID NO: 182669 - RNA, 22 nt, Human
gccugcagaggugcugcuagcu

SEQ ID NO: 182670 - RNA, 22 nt, Human
acagaaaaaugagggagcugga

SEQ ID NO: 182671 - RNA, 22 nt, Human
uuuuaagaggaggcuguuugaa

SEQ ID NO: 182672 - RNA, 22 nt, Human
uccaggcaugucccaagccgga

SEQ ID NO: 182673 - RNA, 22 nt, Human
aagcuccuuuggcucgagaucu

SEQ ID NO: 182674 - RNA, 22 nt, Human
uagaaauggguuacauuuagag

SEQ ID NO: 182675 - RNA, 22 nt, Human
ggcagccaugugggcagcgagu

SEQ ID NO: 182676 - RNA, 22 nt, Human
uucaaaauuguucuaagcucug

SEQ ID NO: 182677 - RNA, 22 nt, Human
ggcugcucggagccuccuguga

SEQ ID NO: 182678 - RNA, 22 nt, Human
gcccucagcaggaaagaucaac

SEQ ID NO: 182679 - RNA, 20 nt, Human
cucaaguaagguuauaaggu

SEQ ID NO: 182680 - RNA, 22 nt, Human
cagagcaguggagaguaggucu

SEQ ID NO: 182681 - RNA, 22 nt, Human
aucugggccaauccuaguacca

SEQ ID NO: 182682 - RNA, 22 nt, Human
ucagcuggcaucggcucaccca

SEQ ID NO: 182683 - RNA, 22 nt, Human
aaauggaauguguuuauaauuc

SEQ ID NO: 182684 - RNA, 22 nt, Human
acaaaggcaggauugacuuagu

SEQ ID NO: 182685 - RNA, 20 nt, Human
ucugucucugagcuagacuu

SEQ ID NO: 182686 - RNA, 22 nt, Human
aaauaguccugggaauaguacu

SEQ ID NO: 182687 - RNA, 22 nt, Human
gucugcugcagucguggcucua

SEQ ID NO: 182688 - RNA, 22 nt, Human
cagcuguucggggcuggcaugu

SEQ ID NO: 182689 - RNA, 22 nt, Human
ucuuccagucuguaggacuagg

SEQ ID NO: 182690 - RNA, 22 nt, Human
gcgucaauuccaucauucuucu

SEQ ID NO: 182691 - RNA, 22 nt, Human
aaggcauugcugauccucaggu

SEQ ID NO: 182692 - RNA, 22 nt, Human
uggcuggaugugagaucaagag

SEQ ID NO: 182693 - RNA, 22 nt, Human
guucuguagucauagagcaauu

SEQ ID NO: 182694 - RNA, 22 nt, Human
ggcaggugguaaggauuucaua

SEQ ID NO: 182695 - RNA, 22 nt, Human
aguggagaauaugcagaaagcc

SEQ ID NO: 182696 - RNA, 22 nt, Human
ccaguguauuauuugagaaauu

SEQ ID NO: 182697 - RNA, 22 nt, Human
ccccaaaacuuagugacuuaaa

SEQ ID NO: 182698 - RNA, 22 nt, Human
uuugcugaauagauuguaaacu

SEQ ID NO: 182699 - RNA, 22 nt, Human
aaacacuggcaauuucaugcac

SEQ ID NO: 182700 - RNA, 22 nt, Human
caugaauuuauauuauuaguga

SEQ ID NO: 182701 - RNA, 22 nt, Human
caugaauuuuucuguggguuaa

SEQ ID NO: 182702 - RNA, 22 nt, Human
cucacugcccugaaguuggguu

SEQ ID NO: 182703 - RNA, 22 nt, Human
ucagagauggaguuagcaguga

SEQ ID NO: 182704 - RNA, 22 nt, Human
gcuggggugugguggauaagcu

SEQ ID NO: 182705 - RNA, 22 nt, Human
aaaucuaggccgggugcggugg

SEQ ID NO: 182706 - RNA, 22 nt, Human
gcucugggugaaggguaccauu

SEQ ID NO: 182707 - RNA, 22 nt, Human
ucugugcugucucagagaaagc

SEQ ID NO: 182708 - RNA, 22 nt, Human
ugauaacuuuaauuugaucuga

SEQ ID NO: 182709 - RNA, 22 nt, Human
aaaaaccuuucccauacuaaga

SEQ ID NO: 182710 - RNA, 22 nt, Human
uccacaggcugaggcccuucug

SEQ ID NO: 182711 - RNA, 22 nt, Human
ucuuugcuccacacucuagaga

SEQ ID NO: 182712 - RNA, 22 nt, Human
cucugugguuagacuauggcug

SEQ ID NO: 182713 - RNA, 22 nt, Human
aaccccgcucaggcugggugag

SEQ ID NO: 182714 - RNA, 21 nt, Human
uugcuuauggcacugcuuugc

SEQ ID NO: 182715 - RNA, 22 nt, Human
gcugaaaugucuuuagcagugu

SEQ ID NO: 182716 - RNA, 22 nt, Human
cacaagcuccuuauguggagaa

SEQ ID NO: 182717 - RNA, 22 nt, Human
acuggcugaucaccugccucag

SEQ ID NO: 182718 - RNA, 22 nt, Human
caagaaucuugcagcuuagacu

SEQ ID NO: 182719 - RNA, 22 nt, Human
ucauuuguucaucugcucuucu

SEQ ID NO: 182720 - RNA, 21 nt, Human
ggaagggcucugaggacggcu

SEQ ID NO: 182721 - RNA, 22 nt, Human
uuguccuuggaugaagcuggga

SEQ ID NO: 182722 - RNA, 20 nt, Human
caggcacacucauuccugcu

SEQ ID NO: 182723 - RNA, 22 nt, Human
uuaaagaggcagguuaaauaau

SEQ ID NO: 182724 - RNA, 22 nt, Human
ugcaggugucugggggcaacag

SEQ ID NO: 182725 - RNA, 22 nt, Human
ugagacaguuggugaaaucuaa

SEQ ID NO: 182726 - RNA, 22 nt, Human
caggggcagucugugugcgugg

SEQ ID NO: 182727 - RNA, 22 nt, Human
gagcccagcuguccuuggcaaa

SEQ ID NO: 182728 - RNA, 22 nt, Human
aauaacaggguugauuugcaau

SEQ ID NO: 182729 - RNA, 22 nt, Human
aggaccuggaucacagagaucu

SEQ ID NO: 182730 - RNA, 22 nt, Human
gagacaguguccauccaggggc

SEQ ID NO: 182731 - RNA, 22 nt, Human
ggauguucugggguucucuugu

SEQ ID NO: 182732 - RNA, 22 nt, Human
gggcacagaagucuaagacauc

SEQ ID NO: 182733 - RNA, 21 nt, Human
cccagagccuagggagggcac

SEQ ID NO: 182734 - RNA, 16 nt, Human
aagccaguucagcauu

SEQ ID NO: 182735 - RNA, 22 nt, Human
gaauguuaaugcacuucuagcu

SEQ ID NO: 182736 - RNA, 22 nt, Human
caaggcagugggcuaggaaccu

SEQ ID NO: 182737 - RNA, 20 nt, Human
auacacuugcccagcuugug

SEQ ID NO: 182738 - RNA, 22 nt, Human
caggcccucguggugagcuggg

SEQ ID NO: 182739 - RNA, 22 nt, Human
auuaugcauuccaaccuuauuc

SEQ ID NO: 182740 - RNA, 22 nt, Human
ccccaugaaguagggucucuga

SEQ ID NO: 182741 - RNA, 17 nt, Human
aggcagcucagaacauc

SEQ ID NO: 182742 - RNA, 22 nt, Human
aaaggacacacaggaggugucu

SEQ ID NO: 182743 - RNA, 22 nt, Human
ugaaaucugucccacuuuagcu

SEQ ID NO: 182744 - RNA, 22 nt, Human
agcucagagauaaucaagagac

SEQ ID NO: 182745 - RNA, 23 nt, Human
agccccucauggugucuagacag

SEQ ID NO: 182746 - RNA, 22 nt, Human
augaggcucucaggggagcugu

SEQ ID NO: 182747 - RNA, 22 nt, Human
ugaauacacuaaaaaucacuuu

SEQ ID NO: 182748 - RNA, 22 nt, Human
ugcagggccuugggucuuucuu

SEQ ID NO: 182749 - RNA, 22 nt, Human
auacauacauguacacauaaau

SEQ ID NO: 182750 - RNA, 22 nt, Human
gcauggcagugaggauggugcu

SEQ ID NO: 182751 - RNA, 22 nt, Human
agccuucaaccuagcuagagca

SEQ ID NO: 182752 - RNA, 22 nt, Human
aggaauguaguuugaguagaaa

SEQ ID NO: 182753 - RNA, 22 nt, Human
ugaagccaucaggaagccagca

SEQ ID NO: 182754 - RNA, 22 nt, Human
uacaucucaucugugcucuccg

SEQ ID NO: 182755 - RNA, 22 nt, Human
cccaggcugucuguccuuugcu

SEQ ID NO: 182756 - RNA, 22 nt, Human
aaaacuaaauacgcuuugccuc

SEQ ID NO: 182757 - RNA, 22 nt, Human
ccuccugcggcguccgcgcucu

SEQ ID NO: 182758 - RNA, 22 nt, Human
gcccacaguguagcagguacuc

SEQ ID NO: 182759 - RNA, 22 nt, Human
gaucuagaccagaagcuguugu

SEQ ID NO: 182760 - RNA, 22 nt, Human
ugucauuuucagcuuaugcuuc

SEQ ID NO: 182761 - RNA, 22 nt, Human
uaagccugcaugaaccaugaga

SEQ ID NO: 182762 - RNA, 22 nt, Human
ggcacagagcuuugucccaguu

SEQ ID NO: 182763 - RNA, 22 nt, Human
ggcagguggcacugcugcuccc

SEQ ID NO: 182764 - RNA, 22 nt, Human
gcaaaugaagguggugcuacag

SEQ ID NO: 182765 - RNA, 21 nt, Human
uggcagguucaaaggccuauc

SEQ ID NO: 182766 - RNA, 22 nt, Human
cucagaagaacaaaggcucuac

SEQ ID NO: 182767 - RNA, 22 nt, Human
ugcagcagguauggcaagcucc

SEQ ID NO: 182768 - RNA, 22 nt, Human
uugcagcugaggaaauugaagc

SEQ ID NO: 182769 - RNA, 22 nt, Human
aggcagccugguuugaauggaa

SEQ ID NO: 182770 - RNA, 22 nt, Human
cuccugggcugggaacucagcc

SEQ ID NO: 182771 - RNA, 22 nt, Human
ggcagagcgcaugcgucgcaga

SEQ ID NO: 182772 - RNA, 22 nt, Human
gcugccuccugagauuugggca

SEQ ID NO: 182773 - RNA, 22 nt, Human
uucauugauaguuuuauguaug

SEQ ID NO: 182774 - RNA, 22 nt, Human
uaugugucaaaccauucaucug

SEQ ID NO: 182775 - RNA, 22 nt, Human
agcuucuccaucugcccagaga

SEQ ID NO: 182776 - RNA, 22 nt, Human
ugaggcucuccaagcagaugag

SEQ ID NO: 182777 - RNA, 18 nt, Human
uacuuuauucccccucca

SEQ ID NO: 182778 - RNA, 22 nt, Human
ccugggagugucagacuugcuu

SEQ ID NO: 182779 - RNA, 22 nt, Human
caccaggcacauaguaggcacu

SEQ ID NO: 182780 - RNA, 22 nt, Human
uaucaguagauaaacggauugc

SEQ ID NO: 182781 - RNA, 22 nt, Human
uuuacagauguggaaagugagc

SEQ ID NO: 182782 - RNA, 21 nt, Human
uucucagaucgaguagugaga

SEQ ID NO: 182783 - RNA, 22 nt, Human
ggagaagaggagcuggaagccu

SEQ ID NO: 182784 - RNA, 22 nt, Human
uucugggccuccuaggacaggc

SEQ ID NO: 182785 - RNA, 22 nt, Human
ugacauuuaucuucuacaauga

SEQ ID NO: 182786 - RNA, 22 nt, Human
uuuaccacagaaaaaaguaacu

SEQ ID NO: 182787 - RNA, 22 nt, Human
gaaaaugagccucagcuacauu

SEQ ID NO: 182788 - RNA, 22 nt, Human
gcagcucuucacuuacuccuuu

SEQ ID NO: 182789 - RNA, 22 nt, Human
augaagaaacuguucugggugg

SEQ ID NO: 182790 - RNA, 22 nt, Human
ucauuuguggaagugauugugg

SEQ ID NO: 182791 - RNA, 22 nt, Human
ugggggugguucuugccuccag

SEQ ID NO: 182792 - RNA, 22 nt, Human
aggaaacauugauauugggaaa

SEQ ID NO: 182793 - RNA, 22 nt, Human
ucagaacauggcauguuccauc

SEQ ID NO: 182794 - RNA, 22 nt, Human
cuucucagcuuagguaugguuu

SEQ ID NO: 182795 - RNA, 22 nt, Human
uaggcuccaagagcgaacucag

SEQ ID NO: 182796 - RNA, 22 nt, Human
acaguuauuuucccagcauuua

SEQ ID NO: 182797 - RNA, 20 nt, Human
cuuaaacacagagauagauu

SEQ ID NO: 182798 - RNA, 22 nt, Human
uuuaauauucugcauucuccuu

SEQ ID NO: 182799 - RNA, 22 nt, Human
agaggccaugcuagaggccugg

SEQ ID NO: 182800 - RNA, 22 nt, Human
uugguauuuccucaggcauguc

SEQ ID NO: 182801 - RNA, 22 nt, Human
ucucagaggcccgacguucucc

SEQ ID NO: 182802 - RNA, 22 nt, Human
uugccucauuuucuggugaaau

SEQ ID NO: 182803 - RNA, 22 nt, Human
uggggacauagccagucuggcu

SEQ ID NO: 182804 - RNA, 23 nt, Human
cugaggggaaaagggcuucaggc

SEQ ID NO: 182805 - RNA, 21 nt, Human
uaaaacuguaacuuuguccug

SEQ ID NO: 182806 - RNA, 22 nt, Human
auacagguucucuagggaacag

SEQ ID NO: 182807 - RNA, 22 nt, Human
ucugaaauauauuuugaguguu

SEQ ID NO: 182808 - RNA, 22 nt, Human
ggaaucuagaaagggagcaagg

SEQ ID NO: 182809 - RNA, 19 nt, Human
gcuguucugaccaucaccc

SEQ ID NO: 182810 - RNA, 22 nt, Human
cuccugggagucuuccuggaug

SEQ ID NO: 182811 - RNA, 22 nt, Human
cuuuguuuauauuucuccucga

SEQ ID NO: 182812 - RNA, 22 nt, Human
aaggcugaaagaccuugaaccu

SEQ ID NO: 182813 - RNA, 22 nt, Human
uguaaagaaagacgcagaguua

SEQ ID NO: 182814 - RNA, 17 nt, Human
gagugcugguggagcuc

SEQ ID NO: 182815 - RNA, 22 nt, Human
ccuccagcauuacuggcccaug

SEQ ID NO: 182816 - RNA, 22 nt, Human
ugcuuauuuagguagauauuaa

SEQ ID NO: 182817 - RNA, 22 nt, Human
gggcucugcgcucagcuccagc

SEQ ID NO: 182818 - RNA, 22 nt, Human
aguuuacaucuucaaucucauu

SEQ ID NO: 182819 - RNA, 22 nt, Human
ggccuuggauccaagcugcggc

SEQ ID NO: 182820 - RNA, 22 nt, Human
uccugaagucacaggcucugag

SEQ ID NO: 182821 - RNA, 22 nt, Human
ccauuuguuuucgcuaccaugg

SEQ ID NO: 182822 - RNA, 22 nt, Human
cagcugugaauugucuuaucua

SEQ ID NO: 182823 - RNA, 23 nt, Human
aggugccaacugagagcugagag

SEQ ID NO: 182824 - RNA, 22 nt, Human
uauuaauaaauauguaggggcc

SEQ ID NO: 182825 - RNA, 22 nt, Human
cucugggucuauaaugcagcug

SEQ ID NO: 182826 - RNA, 17 nt, Human
uuccaaggagcauuuga

SEQ ID NO: 182827 - RNA, 22 nt, Human
cacuaaaacuacauuggaaaca

SEQ ID NO: 182828 - RNA, 18 nt, Human
ugggcugccuggccucug

SEQ ID NO: 182829 - RNA, 22 nt, Human
guauuuuacuuacgcaugacuu

SEQ ID NO: 182830 - RNA, 19 nt, Human
cacagugcagccauuucuc

SEQ ID NO: 182831 - RNA, 22 nt, Human
auacaucuugucagauucaugu

SEQ ID NO: 182832 - RNA, 22 nt, Human
gaauugcuaaccaauucaaaau

SEQ ID NO: 182833 - RNA, 22 nt, Human
cuggagagaauguggaaugauu

SEQ ID NO: 182834 - RNA, 22 nt, Human
cugugugagcaucacuucagau

SEQ ID NO: 182835 - RNA, 21 nt, Human
ugaagggguggcagugugcuu

SEQ ID NO: 182836 - RNA, 22 nt, Human
ucuaggaaagccuuucacaacu

SEQ ID NO: 182837 - RNA, 22 nt, Human
agcugccauggccugaauuuac

SEQ ID NO: 182838 - RNA, 22 nt, Human
uccaggccauugacugcauccu

SEQ ID NO: 182839 - RNA, 22 nt, Human
gaaauuuauuaucuacaucauu

SEQ ID NO: 182840 - RNA, 22 nt, Human
gaagaaggugccagaggcuuac

SEQ ID NO: 182841 - RNA, 22 nt, Human
aaagccaagcugggaaggcagg

SEQ ID NO: 182842 - RNA, 22 nt, Human
ccagguggcccugcccuacucu

SEQ ID NO: 182843 - RNA, 22 nt, Human
ccccaggacacauggaccaagu

SEQ ID NO: 182844 - RNA, 19 nt, Human
gugcuccagggcaaggagu

SEQ ID NO: 182845 - RNA, 22 nt, Human
auaugaaaguaagcaugugugu

SEQ ID NO: 182846 - RNA, 22 nt, Human
ugggaccugcucuuggaaugag

SEQ ID NO: 182847 - RNA, 22 nt, Human
gccuuggacuaccacucccaca

SEQ ID NO: 182848 - RNA, 22 nt, Human
auucagacuaugaacacgucag

SEQ ID NO: 182849 - RNA, 22 nt, Human
aaguuuuaacaaguacuuacua

SEQ ID NO: 182850 - RNA, 23 nt, Human
ccugccuguucuaacuccauuuc

SEQ ID NO: 182851 - RNA, 22 nt, Human
ccugggcuuugcuggcaaggcc

SEQ ID NO: 182852 - RNA, 22 nt, Human
ugggguccagugccuggcaagg

SEQ ID NO: 182853 - RNA, 22 nt, Human
aaguccaguuuuuccagguggu

SEQ ID NO: 182854 - RNA, 22 nt, Human
cagaggcuaagaguguccaaag

SEQ ID NO: 182855 - RNA, 22 nt, Human
aguccagaccccggcagcuggu

SEQ ID NO: 182856 - RNA, 22 nt, Human
agcugcccccagggcugugcuu

SEQ ID NO: 182857 - RNA, 22 nt, Human
agagaaaacucauugagguguc

SEQ ID NO: 182858 - RNA, 22 nt, Human
uacauuccauguguguguauuc

SEQ ID NO: 182859 - RNA, 22 nt, Human
uuuuggcuccagugguuugugc

SEQ ID NO: 182860 - RNA, 22 nt, Human
aaucuaaggacuuagcauugcu

SEQ ID NO: 182861 - RNA, 22 nt, Human
agagauggauguuauuaugggu

SEQ ID NO: 182862 - RNA, 22 nt, Human
gucugcuguagguaggacagca

SEQ ID NO: 182863 - RNA, 22 nt, Human
gcauucuuguuuuuccuacccu

SEQ ID NO: 182864 - RNA, 22 nt, Human
cacagugugacugaccuucagc

SEQ ID NO: 182865 - RNA, 22 nt, Human
uuccaggauggagacacuagua

SEQ ID NO: 182866 - RNA, 22 nt, Human
uuucucauagucaugccucuua

SEQ ID NO: 182867 - RNA, 22 nt, Human
ggaggggcugagcaacuuucag

SEQ ID NO: 182868 - RNA, 22 nt, Human
ccuggcucuagaggccacuccu

SEQ ID NO: 182869 - RNA, 22 nt, Human
gugauacagguguucuggauau

SEQ ID NO: 182870 - RNA, 22 nt, Human
gggagggccagugcucucuaga

SEQ ID NO: 182871 - RNA, 22 nt, Human
caugccauuuuucuagauugag

SEQ ID NO: 182872 - RNA, 22 nt, Human
gucagaagcauuuguggcugaa

SEQ ID NO: 182873 - RNA, 22 nt, Human
ggcccuuccucuugugcuggca

SEQ ID NO: 182874 - RNA, 22 nt, Human
ccacaagugaaguacaccugcc

SEQ ID NO: 182875 - RNA, 22 nt, Human
uagaugaaaggucuagcacagu

SEQ ID NO: 182876 - RNA, 22 nt, Human
gccuggagggucccucucugga

SEQ ID NO: 182877 - RNA, 22 nt, Human
gagucucugcuauguuuucucu

SEQ ID NO: 182878 - RNA, 23 nt, Human
agucaagaugcaucugugaggaa

SEQ ID NO: 182879 - RNA, 22 nt, Human
cuccccaagccuuggcuucucc

SEQ ID NO: 182880 - RNA, 19 nt, Human
agcaggcagguggcccagg

SEQ ID NO: 182881 - RNA, 22 nt, Human
gagucaggcuagaggugagucu

SEQ ID NO: 182882 - RNA, 22 nt, Human
ugcugagcgcauccggcggccg

SEQ ID NO: 182883 - RNA, 22 nt, Human
uuuacuugauauggagcugagg

SEQ ID NO: 182884 - RNA, 22 nt, Human
uugagucuccucagcagggcua

SEQ ID NO: 182885 - RNA, 22 nt, Human
ugucgggcaugcauucugagaa

SEQ ID NO: 182886 - RNA, 22 nt, Human
uuuacaaguuuacagaaugaug

SEQ ID NO: 182887 - RNA, 22 nt, Human
ugaacagauggcccagcagagg

SEQ ID NO: 182888 - RNA, 22 nt, Human
acaacaguuuagguauuuguag

SEQ ID NO: 182889 - RNA, 22 nt, Human
agagucaguuagcgaauacuua

SEQ ID NO: 182890 - RNA, 22 nt, Human
cccaggcugggaacgauucuag

SEQ ID NO: 182891 - RNA, 22 nt, Human
gcucuggcuaguuaccucuuac

SEQ ID NO: 182892 - RNA, 20 nt, Human
gcagccucaacaggcacagc

SEQ ID NO: 182893 - RNA, 23 nt, Human
uuguauuuuuaguagagacaggg

SEQ ID NO: 182894 - RNA, 22 nt, Human
ugaaguuuaauuuuggacauga

SEQ ID NO: 182895 - RNA, 22 nt, Human
cuguaacuuaaugagaggcaga

SEQ ID NO: 182896 - RNA, 22 nt, Human
ugaucuuuacugcuguuuauaa

SEQ ID NO: 182897 - RNA, 22 nt, Human
ucagucuucccuccagugcaac

SEQ ID NO: 182898 - RNA, 22 nt, Human
uuucacagauguuuuggagucu

SEQ ID NO: 182899 - RNA, 22 nt, Human
agcccuugguauuuuccgaucc

SEQ ID NO: 182900 - RNA, 22 nt, Human
aucugauucauugaaaugggug

SEQ ID NO: 182901 - RNA, 22 nt, Human
gcaggcugaaacucggggucua

SEQ ID NO: 182902 - RNA, 22 nt, Human
gagcugaagcgcuacagcaucc

SEQ ID NO: 182903 - RNA, 22 nt, Human
uucugaaaacacacuuugcagc

SEQ ID NO: 182904 - RNA, 22 nt, Human
augcacaaacccacaauuaguc

SEQ ID NO: 182905 - RNA, 22 nt, Human
agcaggugcguuacuucacucu

SEQ ID NO: 182906 - RNA, 22 nt, Human
aucagcaagcaugguuaggugu

SEQ ID NO: 182907 - RNA, 22 nt, Human
acuuuguuccuuucacaaagaa

SEQ ID NO: 182908 - RNA, 22 nt, Human
acacuucucccaucuccuguug

SEQ ID NO: 182909 - RNA, 22 nt, Human
ugccaggguccugagggccuug

SEQ ID NO: 182910 - RNA, 22 nt, Human
acagccugauuuauggagcagu

SEQ ID NO: 182911 - RNA, 22 nt, Human
agcagggcuuuggcuggcuuuc

SEQ ID NO: 182912 - RNA, 22 nt, Human
agagauggagagcacuggggcu

SEQ ID NO: 182913 - RNA, 22 nt, Human
uucacuguccugcaacucuaga

SEQ ID NO: 182914 - RNA, 22 nt, Human
ugggagaggcugccaucuugca

SEQ ID NO: 182915 - RNA, 22 nt, Human
ccuggccagaggcgugccugug

SEQ ID NO: 182916 - RNA, 22 nt, Human
uccaggagguagugcuuaauuu

SEQ ID NO: 182917 - RNA, 22 nt, Human
gcugugcagccaagugccucug

SEQ ID NO: 182918 - RNA, 22 nt, Human
agacucuaacucaugccauugc

SEQ ID NO: 182919 - RNA, 22 nt, Human
ucuccuugugcuggguccuucc

SEQ ID NO: 182920 - RNA, 22 nt, Human
ggcgccagcacugcagcgccuc

SEQ ID NO: 182921 - RNA, 22 nt, Human
auguuuacaauucaguauuaca

SEQ ID NO: 182922 - RNA, 22 nt, Human
ccuggccaaucuagggcuguua

SEQ ID NO: 182923 - RNA, 22 nt, Human
ugggaccugcuccuggaaugag

SEQ ID NO: 182924 - RNA, 22 nt, Human
uaucuagauaccaagaagcaca

SEQ ID NO: 182925 - RNA, 22 nt, Human
gcaagcaauggacggugacuuu

SEQ ID NO: 182926 - RNA, 22 nt, Human
ccagagccucaacacagguccu

SEQ ID NO: 182927 - RNA, 22 nt, Human
ggcuggcagugugagagaggga

SEQ ID NO: 182928 - RNA, 23 nt, Human
ucucccugagguuguuagcauua

SEQ ID NO: 182929 - RNA, 22 nt, Human
aaacucuaagacacuguacaau

SEQ ID NO: 182930 - RNA, 22 nt, Human
caggcuugggagcagagccacu

SEQ ID NO: 182931 - RNA, 22 nt, Human
aaguaaaacacacaguccaccg

SEQ ID NO: 182932 - RNA, 22 nt, Human
aaagaugugccuguuucauagu

SEQ ID NO: 182933 - RNA, 18 nt, Human
ugcuggguaacuguaugg

SEQ ID NO: 182934 - RNA, 22 nt, Human
aagcauuuggcaugaaacucuu

SEQ ID NO: 182935 - RNA, 23 nt, Human
ucagaacaguucuuggugcauag

SEQ ID NO: 182936 - RNA, 22 nt, Human
uugucaagaaaaauggaugaag

SEQ ID NO: 182937 - RNA, 22 nt, Human
gcccucuggcacagagaugcag

SEQ ID NO: 182938 - RNA, 22 nt, Human
cuagaaucuaugucaggaacuc

SEQ ID NO: 182939 - RNA, 22 nt, Human
cuggcugcagcuccgaggaaga

SEQ ID NO: 182940 - RNA, 21 nt, Human
ugacauaauccauaguacaaa

SEQ ID NO: 182941 - RNA, 22 nt, Human
gccuggagggauagaaugcaag

SEQ ID NO: 182942 - RNA, 20 nt, Human
uuuauucagccuacccucuu

SEQ ID NO: 182943 - RNA, 22 nt, Human
ggugaggguaaacuaaaacauc

SEQ ID NO: 182944 - RNA, 22 nt, Human
aggcaagccgugccugucucaa

SEQ ID NO: 182945 - RNA, 18 nt, Human
cuggcauucuucccugga

SEQ ID NO: 182946 - RNA, 22 nt, Human
auuuccaggcuguuuugugaau

SEQ ID NO: 182947 - RNA, 22 nt, Human
aaacucuuuugcauauuagagg

SEQ ID NO: 182948 - RNA, 22 nt, Human
gcuguaggucauuuaaucaccu

SEQ ID NO: 182949 - RNA, 22 nt, Human
uccaggcaugguguaauuuugc

SEQ ID NO: 182950 - RNA, 22 nt, Human
aacaugagugauaaaauuaccu

SEQ ID NO: 182951 - RNA, 22 nt, Human
uacacaggguauggcuugagga

SEQ ID NO: 182952 - RNA, 22 nt, Human
ggcugccugugcccaggcacac

SEQ ID NO: 182953 - RNA, 22 nt, Human
gugcacagaagcagaagcuaga

SEQ ID NO: 182954 - RNA, 22 nt, Human
ugugcagcucuagagccaagcc

SEQ ID NO: 182955 - RNA, 22 nt, Human
ggacuggccggcgcugaggccc

SEQ ID NO: 182956 - RNA, 22 nt, Human
uuuagaacagauauuguaacuu

SEQ ID NO: 182957 - RNA, 22 nt, Human
ucucugggcucaggagcccggc

SEQ ID NO: 182958 - RNA, 22 nt, Human
guucuuuugguagagugugcau

SEQ ID NO: 182959 - RNA, 21 nt, Human
cuuuuacauucagucaugaug

SEQ ID NO: 182960 - RNA, 22 nt, Human
ugggccaggggccucuucugau

SEQ ID NO: 182961 - RNA, 22 nt, Human
uugaaaguuaucuagauucuga

SEQ ID NO: 182962 - RNA, 22 nt, Human
acaccauacucauguugguucc

SEQ ID NO: 182963 - RNA, 22 nt, Human
agcuguugucugcaggagaagc

SEQ ID NO: 182964 - RNA, 23 nt, Human
agaggccaacuucuugccccucc

SEQ ID NO: 182965 - RNA, 22 nt, Human
gggcagcucugcccaucagagg

SEQ ID NO: 182966 - RNA, 22 nt, Human
gacuggccuggggcugggcaca

SEQ ID NO: 182967 - RNA, 22 nt, Human
gggcuuggguauugugagaggu

SEQ ID NO: 182968 - RNA, 22 nt, Human
gugcaaaagcaguuggauuuuu

SEQ ID NO: 182969 - RNA, 22 nt, Human
cagcccuguugcgcuuccggcg

SEQ ID NO: 182970 - RNA, 22 nt, Human
gcugcaggcucugcaggaauug

SEQ ID NO: 182971 - RNA, 21 nt, Human
cacauuugaaccucacagcaa

SEQ ID NO: 182972 - RNA, 22 nt, Human
gcuccugcagagauguuccaug

SEQ ID NO: 182973 - RNA, 23 nt, Human
agaugaggcuucuccauguuggu

SEQ ID NO: 182974 - RNA, 22 nt, Human
ugggcaaacugucaaccauguc

SEQ ID NO: 182975 - RNA, 22 nt, Human
guuccucaguuguaaaaaaugu

SEQ ID NO: 182976 - RNA, 22 nt, Human
gaccucagugaauggucaugua

SEQ ID NO: 182977 - RNA, 22 nt, Human
cuggagcugguauagggacaaa

SEQ ID NO: 182978 - RNA, 23 nt, Human
agcaguuagggauacaaguuauc

SEQ ID NO: 182979 - RNA, 22 nt, Human
aggaagagguagcugucaaggg

SEQ ID NO: 182980 - RNA, 18 nt, Human
ggcagggaaaagauaggg

SEQ ID NO: 182981 - RNA, 22 nt, Human
uuggcccagacucggggacuga

SEQ ID NO: 182982 - RNA, 20 nt, Human
acugugugaucuggaaagcu

SEQ ID NO: 182983 - RNA, 22 nt, Human
agaaguuugguccuauaaacuc

SEQ ID NO: 182984 - RNA, 22 nt, Human
cguccuuugaauugaggucuuu

SEQ ID NO: 182985 - RNA, 22 nt, Human
uggcucagugcauucacaguaa

SEQ ID NO: 182986 - RNA, 22 nt, Human
cacagagaauucccauauguga

SEQ ID NO: 182987 - RNA, 22 nt, Human
cucucuccuuagcugcagacca

SEQ ID NO: 182988 - RNA, 22 nt, Human
acaaacuucccagacaagcucc

SEQ ID NO: 182989 - RNA, 22 nt, Human
aagggcugagcacagugagcca

SEQ ID NO: 182990 - RNA, 22 nt, Human
aacaguaacgagauguccuaac

SEQ ID NO: 182991 - RNA, 22 nt, Human
cucuuccuuaagacuauaaaga

SEQ ID NO: 182992 - RNA, 22 nt, Human
ugggcagcauccuccacaguca

SEQ ID NO: 182993 - RNA, 22 nt, Human
guagggacccacagucuauauu

SEQ ID NO: 182994 - RNA, 22 nt, Human
ucucuagagcaugugcugggca

SEQ ID NO: 182995 - RNA, 22 nt, Human
uguucuuuggcuuccuuuccgu

SEQ ID NO: 182996 - RNA, 22 nt, Human
caggacuggaagucucaagaga

SEQ ID NO: 182997 - RNA, 22 nt, Human
gcauuuuagaauauuggagcaa

SEQ ID NO: 182998 - RNA, 22 nt, Human
gacagcagaauccauucccagu

SEQ ID NO: 182999 - RNA, 22 nt, Human
uaaagcacauaucuuacaauaa

SEQ ID NO: 183000 - RNA, 22 nt, Human
uucuucaaauagcagggaguca

SEQ ID NO: 183001 - RNA, 22 nt, Human
accaugacgucacagaggcuuc

SEQ ID NO: 183002 - RNA, 22 nt, Human
auccuggcgccacacggcucua

SEQ ID NO: 183003 - RNA, 22 nt, Human
agccuccaucccaugcacaaag

SEQ ID NO: 183004 - RNA, 22 nt, Human
ucacaguaucacacaaggauua

SEQ ID NO: 183005 - RNA, 22 nt, Human
ggcuuccuggagaaggucugag

SEQ ID NO: 183006 - RNA, 21 nt, Human
uucuaaguguuaccuuuucuu

SEQ ID NO: 183007 - RNA, 22 nt, Human
aaggcuuuugacgguugccucu

SEQ ID NO: 183008 - RNA, 22 nt, Human
uaacuacaagggcggucucugu

SEQ ID NO: 183009 - RNA, 22 nt, Human
ucugaggguuacuuuauuaggc

SEQ ID NO: 183010 - RNA, 22 nt, Human
acagugucugacacauuguagc

SEQ ID NO: 183011 - RNA, 22 nt, Human
uugcuuuaucucuuaugccuca

SEQ ID NO: 183012 - RNA, 22 nt, Human
ugucugugaccucuuaggcaag

SEQ ID NO: 183013 - RNA, 22 nt, Human
ugggagagcagagaacccucuu

SEQ ID NO: 183014 - RNA, 22 nt, Human
gcuaggaguggugggucaagga

SEQ ID NO: 183015 - RNA, 22 nt, Human
cuccugcaagccuccccaagca

SEQ ID NO: 183016 - RNA, 23 nt, Human
uuucaacaaugcuuagagaaaac

SEQ ID NO: 183017 - RNA, 22 nt, Human
ccauagaugagacaaaguagag

SEQ ID NO: 183018 - RNA, 22 nt, Human
agacagacacaugguaacagau

SEQ ID NO: 183019 - RNA, 22 nt, Human
auuuuguuauaggagcugaaau

SEQ ID NO: 183020 - RNA, 22 nt, Human
uacacguguguguauguacaua

SEQ ID NO: 183021 - RNA, 20 nt, Human
cucagcagauucuucuagaa

SEQ ID NO: 183022 - RNA, 22 nt, Human
agcagagcugggauccuggguc

SEQ ID NO: 183023 - RNA, 22 nt, Human
aggcucagagaugaguaagcac

SEQ ID NO: 183024 - RNA, 22 nt, Human
uggaaacugcaguucccgggga

SEQ ID NO: 183025 - RNA, 22 nt, Human
ucauuuaauagcuuuugucuuu

SEQ ID NO: 183026 - RNA, 22 nt, Human
cugcugagagccacguggcaca

SEQ ID NO: 183027 - RNA, 22 nt, Human
aagcacagagaugggcacgccu

SEQ ID NO: 183028 - RNA, 22 nt, Human
uggcaaagauuaccacaucuac

SEQ ID NO: 183029 - RNA, 22 nt, Human
agucucagaaaagaagcaugga

SEQ ID NO: 183030 - RNA, 22 nt, Human
aagugugauuuguagaaugccu

SEQ ID NO: 183031 - RNA, 22 nt, Human
cagcauauuacuuuaaaaaauc

SEQ ID NO: 183032 - RNA, 22 nt, Human
ucucaggcauucccacauagaa

SEQ ID NO: 183033 - RNA, 20 nt, Human
uuucuugucggcuguugcug

SEQ ID NO: 183034 - RNA, 22 nt, Human
cugcucaguaauaguccuaucu

SEQ ID NO: 183035 - RNA, 22 nt, Human
ugacuucucuggccuggugcag

SEQ ID NO: 183036 - RNA, 22 nt, Human
ucccaggugaugcugaggccac

SEQ ID NO: 183037 - RNA, 22 nt, Human
caugcuucacacacugaaugac

SEQ ID NO: 183038 - RNA, 22 nt, Human
cuguccucaccuuggcaggggg

SEQ ID NO: 183039 - RNA, 22 nt, Human
agagucugaggcagcugcagcc

SEQ ID NO: 183040 - RNA, 22 nt, Human
augcaccugaacuccaucagcu

SEQ ID NO: 183041 - RNA, 22 nt, Human
uaccuguuuuaaagcuaaaagg

SEQ ID NO: 183042 - RNA, 22 nt, Human
gacaguuuuuaauccuuucaug

SEQ ID NO: 183043 - RNA, 22 nt, Human
gcccaggaguugaagggcugac

SEQ ID NO: 183044 - RNA, 22 nt, Human
aaaaugaggaacggaucauggc

SEQ ID NO: 183045 - RNA, 22 nt, Human
agagucaguaacauauauggua

SEQ ID NO: 183046 - RNA, 22 nt, Human
acaggccugggguacaaguucu

SEQ ID NO: 183047 - RNA, 22 nt, Human
ccagcuuuuccucucauugcuu

SEQ ID NO: 183048 - RNA, 22 nt, Human
auuagauuguaaauguuuucac

SEQ ID NO: 183049 - RNA, 22 nt, Human
caguuacacaccauugugaaca

SEQ ID NO: 183050 - RNA, 22 nt, Human
aagggcagagggaaucccacau

SEQ ID NO: 183051 - RNA, 22 nt, Human
agcuucuguucaucuuccaggc

SEQ ID NO: 183052 - RNA, 22 nt, Human
gggugcaggggacccuagggac

SEQ ID NO: 183053 - RNA, 22 nt, Human
gcagaaccugaauugaacauug

SEQ ID NO: 183054 - RNA, 22 nt, Human
uauuccaagugccuagaagagu

SEQ ID NO: 183055 - RNA, 23 nt, Human
ugugacagggucauugaaaaggg

SEQ ID NO: 183056 - RNA, 22 nt, Human
agcucagcacugucagcacucc

SEQ ID NO: 183057 - RNA, 22 nt, Human
uguugcaguaaaaauggagagg

SEQ ID NO: 183058 - RNA, 22 nt, Human
aucaucuugcuuucuguuuacu

SEQ ID NO: 183059 - RNA, 22 nt, Human
ugcauuggucauuuagaaaaua

SEQ ID NO: 183060 - RNA, 22 nt, Human
gaggagcuggcagcgucuccgc

SEQ ID NO: 183061 - RNA, 22 nt, Human
ugguuuuugguuuaacacuaug

SEQ ID NO: 183062 - RNA, 22 nt, Human
cucuggaguucucaugaggaac

SEQ ID NO: 183063 - RNA, 22 nt, Human
cagagugaaauaggggaucaag

SEQ ID NO: 183064 - RNA, 22 nt, Human
gcuguggcuugcagcuggggcu

SEQ ID NO: 183065 - RNA, 23 nt, Human
aaagacugcugagaauuuuagga

SEQ ID NO: 183066 - RNA, 22 nt, Human
gaaggaggcguuagcccuagga

SEQ ID NO: 183067 - RNA, 22 nt, Human
ggccuugacaguuaagagaccu

SEQ ID NO: 183068 - RNA, 19 nt, Human
uuagaagccauagguacag

SEQ ID NO: 183069 - RNA, 22 nt, Human
augaaaagggagugauauuugu

SEQ ID NO: 183070 - RNA, 22 nt, Human
uauccauuuauuuucuaggcaa

SEQ ID NO: 183071 - RNA, 19 nt, Human
acuggcagggcugcggugg

SEQ ID NO: 183072 - RNA, 22 nt, Human
cucccugggccucaguuucucu

SEQ ID NO: 183073 - RNA, 22 nt, Human
ggugcagggagaggcaggcccc

SEQ ID NO: 183074 - RNA, 22 nt, Human
gaggcucccuuuagguccagau

SEQ ID NO: 183075 - RNA, 22 nt, Human
uccauggguagcccugguugag

SEQ ID NO: 183076 - RNA, 22 nt, Human
uuuuuuaucuaugguaguacca

SEQ ID NO: 183077 - RNA, 22 nt, Human
aggucugaguauggccugagaa

SEQ ID NO: 183078 - RNA, 22 nt, Human
auuccaguuaguggcagcuuau

SEQ ID NO: 183079 - RNA, 22 nt, Human
uuccagaagauggcagcaaagg

SEQ ID NO: 183080 - RNA, 22 nt, Human
gccagcccauuaaccccugucc

SEQ ID NO: 183081 - RNA, 22 nt, Human
aggcaguuggucauugcucuuu

SEQ ID NO: 183082 - RNA, 22 nt, Human
cagagccucucagccccuuggg

SEQ ID NO: 183083 - RNA, 22 nt, Human
ccagcagagucuaggaaggagg

SEQ ID NO: 183084 - RNA, 22 nt, Human
aacauuguuuugcacaacucuu

SEQ ID NO: 183085 - RNA, 22 nt, Human
cugggcacagacccccugggcc

SEQ ID NO: 183086 - RNA, 22 nt, Human
gcaugcugcugaggcuggaaua

SEQ ID NO: 183087 - RNA, 22 nt, Human
uugcaaaaaccacaauuacuuu

SEQ ID NO: 183088 - RNA, 22 nt, Human
ccagcccuugcugaaggguggc

SEQ ID NO: 183089 - RNA, 22 nt, Human
cccugaggauagggcaggaccc

SEQ ID NO: 183090 - RNA, 22 nt, Human
uguccucaggaccuggcacagu

SEQ ID NO: 183091 - RNA, 22 nt, Human
ucaggugggaccugcuaggaca

SEQ ID NO: 183092 - RNA, 22 nt, Human
uugaggaggaacugugaggcaa

SEQ ID NO: 183093 - RNA, 22 nt, Human
ggacagacaaaaauaguaagca

SEQ ID NO: 183094 - RNA, 22 nt, Human
cguagguggcucagcaccuggg

SEQ ID NO: 183095 - RNA, 22 nt, Human
acagucuuucuacauucugugc

SEQ ID NO: 183096 - RNA, 22 nt, Human
ccagguggugccucuguucgca

SEQ ID NO: 183097 - RNA, 22 nt, Human
aaagaacuaccuguaugauauu

SEQ ID NO: 183098 - RNA, 22 nt, Human
ucugacaggucauuuucuauag

SEQ ID NO: 183099 - RNA, 22 nt, Human
acaacaaaaucacuagucuucc

SEQ ID NO: 183100 - RNA, 22 nt, Human
ggcacaauugcagcaauaaaca

SEQ ID NO: 183101 - RNA, 22 nt, Human
ccucugcugcuguugagcaccg

SEQ ID NO: 183102 - RNA, 22 nt, Human
guauucauuuauuuacucaucc

SEQ ID NO: 183103 - RNA, 22 nt, Human
guccugugaccugcauccugag

SEQ ID NO: 183104 - RNA, 22 nt, Human
agaugguucagaauuauaaaga

SEQ ID NO: 183105 - RNA, 22 nt, Human
cagcacauaaucagugauugug

SEQ ID NO: 183106 - RNA, 22 nt, Human
agcacagggacaaugccaggug

SEQ ID NO: 183107 - RNA, 22 nt, Human
gcuguccagagcaugggagcaa

SEQ ID NO: 183108 - RNA, 22 nt, Human
aucauucuaguccuuauggucu

SEQ ID NO: 183109 - RNA, 22 nt, Human
gaugaguucuuucuauucuauu

SEQ ID NO: 183110 - RNA, 22 nt, Human
gccauauauauuuugcacuagg

SEQ ID NO: 183111 - RNA, 22 nt, Human
auugcuaggaacagguugcacc

SEQ ID NO: 183112 - RNA, 22 nt, Human
acagugucaugucguguucccc

SEQ ID NO: 183113 - RNA, 22 nt, Human
cagagccagaacuagaccuugu

SEQ ID NO: 183114 - RNA, 22 nt, Human
auucucagaucuuagaggaaua

SEQ ID NO: 183115 - RNA, 22 nt, Human
uucauguuuguaggacugaggc

SEQ ID NO: 183116 - RNA, 22 nt, Human
agcaucagccucuguccuggag

SEQ ID NO: 183117 - RNA, 15 nt, Human
augaggcauuugggg

SEQ ID NO: 183118 - RNA, 22 nt, Human
acaguguggugauggcacuugc

SEQ ID NO: 183119 - RNA, 17 nt, Human
gggcagggacuccuggg

SEQ ID NO: 183120 - RNA, 22 nt, Human
uggaagaaaauucaaucgaguu

SEQ ID NO: 183121 - RNA, 22 nt, Human
guuauuuucauuggcucagacu

SEQ ID NO: 183122 - RNA, 22 nt, Human
uaacagagguagaauucaaggu

SEQ ID NO: 183123 - RNA, 22 nt, Human
gcugccugggcaggaggcgcug

SEQ ID NO: 183124 - RNA, 22 nt, Human
agagaucucugaagcugcugcu

SEQ ID NO: 183125 - RNA, 22 nt, Human
acuuaaaaagaaucuuuucacg

SEQ ID NO: 183126 - RNA, 22 nt, Human
ucuuggaggagaguaaguaccu

SEQ ID NO: 183127 - RNA, 22 nt, Human
caugagauaauuuuucuccagu

SEQ ID NO: 183128 - RNA, 22 nt, Human
gccaggagugucccacucauuu

SEQ ID NO: 183129 - RNA, 22 nt, Human
ugucuauuaauuccacauaaaa

SEQ ID NO: 183130 - RNA, 22 nt, Human
uccuggacucaggaccacagga

SEQ ID NO: 183131 - RNA, 22 nt, Human
uucagagcuuagaauggacuac

SEQ ID NO: 183132 - RNA, 22 nt, Human
acuacauuuccugaccccugug

SEQ ID NO: 183133 - RNA, 22 nt, Human
gcaugguggccuuaggguagcc

SEQ ID NO: 183134 - RNA, 22 nt, Human
uuaaguaacuuguccaaaugag

SEQ ID NO: 183135 - RNA, 22 nt, Human
uagggcucagaguccaguuucu

SEQ ID NO: 183136 - RNA, 22 nt, Human
auuuuccuagucaugugcuucu

SEQ ID NO: 183137 - RNA, 22 nt, Human
ccagaagucaggaaugagucuu

SEQ ID NO: 183138 - RNA, 22 nt, Human
gggaucuguguugcgauggauu

SEQ ID NO: 183139 - RNA, 22 nt, Human
cagauaugcugagacuccugug

SEQ ID NO: 183140 - RNA, 22 nt, Human
aagcagagguagggugugcagu

SEQ ID NO: 183141 - RNA, 22 nt, Human
uuacaugguuuauuuaccuaag

SEQ ID NO: 183142 - RNA, 22 nt, Human
gguguccugggcaggcagcuga

SEQ ID NO: 183143 - RNA, 22 nt, Human
ccagguggaggugugagguccu

SEQ ID NO: 183144 - RNA, 21 nt, Human
gagcugaauauguucuagggg

SEQ ID NO: 183145 - RNA, 21 nt, Human
aguccaggagucacccaagcc

SEQ ID NO: 183146 - RNA, 22 nt, Human
ugccugccuugcugcuggacag

SEQ ID NO: 183147 - RNA, 22 nt, Human
cuguuauuuagaacauggaauc

SEQ ID NO: 183148 - RNA, 22 nt, Human
auuacacagcgguuacuacuag

SEQ ID NO: 183149 - RNA, 22 nt, Human
aaaggcuauugcugauaauguu

SEQ ID NO: 183150 - RNA, 22 nt, Human
aggcagcaugcucugcuucuac

SEQ ID NO: 183151 - RNA, 22 nt, Human
uccucagucucucaaaugaggc

SEQ ID NO: 183152 - RNA, 22 nt, Human
gcuccagggucagcucagaacu

SEQ ID NO: 183153 - RNA, 22 nt, Human
gugcaaaaguaauugagguuuu

SEQ ID NO: 183154 - RNA, 22 nt, Human
uccaggagugauaaggccacug

SEQ ID NO: 183155 - RNA, 18 nt, Human
aggcccuggccucgaaca

SEQ ID NO: 183156 - RNA, 20 nt, Human
uuucugugagaaacacuguu

SEQ ID NO: 183157 - RNA, 22 nt, Human
ggaaagcuacugguguccucug

SEQ ID NO: 183158 - RNA, 22 nt, Human
auuuuccucaagccucuggaag

SEQ ID NO: 183159 - RNA, 22 nt, Human
uuacuacauuguaacacaguac

SEQ ID NO: 183160 - RNA, 19 nt, Human
agcuccuguucagcagcuc

SEQ ID NO: 183161 - RNA, 22 nt, Human
cagaagggcagcacugggaagg

SEQ ID NO: 183162 - RNA, 22 nt, Human
cuacuguugggagcccuggaag

SEQ ID NO: 183163 - RNA, 22 nt, Human
cccaggcucccaggugggacaa

SEQ ID NO: 183164 - RNA, 22 nt, Human
ucagucuucuagcaaauccagg

SEQ ID NO: 183165 - RNA, 22 nt, Human
gggauggaucuuggcugaggcu

SEQ ID NO: 183166 - RNA, 22 nt, Human
uucuuaacucaaauauauaucc

SEQ ID NO: 183167 - RNA, 22 nt, Human
augcaggggccgccuggccagg

SEQ ID NO: 183168 - RNA, 22 nt, Human
cacagcaauagcuaacugauac

SEQ ID NO: 183169 - RNA, 22 nt, Human
acagugacaacccaggauaaau

SEQ ID NO: 183170 - RNA, 22 nt, Human
aucuuguuaaagugcagauucu

SEQ ID NO: 183171 - RNA, 22 nt, Human
caagaugggcaccccagcaccu

SEQ ID NO: 183172 - RNA, 22 nt, Human
agggauggaagcucgucugcaa

SEQ ID NO: 183173 - RNA, 20 nt, Human
ccagaagagaugaucaucca

SEQ ID NO: 183174 - RNA, 22 nt, Human
guggccagcaagugcugccucu

SEQ ID NO: 183175 - RNA, 22 nt, Human
gccugagaucaggagaaagcca

SEQ ID NO: 183176 - RNA, 22 nt, Human
uguaggauuuucaccagaccuu

SEQ ID NO: 183177 - RNA, 22 nt, Human
agugucagccugggcaaggaac

SEQ ID NO: 183178 - RNA, 22 nt, Human
ugaggcagaguaagauacauga

SEQ ID NO: 183179 - RNA, 22 nt, Human
uuccuucuuccagaggcugccc

SEQ ID NO: 183180 - RNA, 22 nt, Human
cagcugaagaaagagugguuag

SEQ ID NO: 183181 - RNA, 22 nt, Human
cacagguggcuucuuucaucuu

SEQ ID NO: 183182 - RNA, 22 nt, Human
uguaucaaggguuuauguaagc

SEQ ID NO: 183183 - RNA, 21 nt, Human
uccaggccucaggaagggaug

SEQ ID NO: 183184 - RNA, 22 nt, Human
ggcugaaggaugaaagcugcag

SEQ ID NO: 183185 - RNA, 22 nt, Human
cagcuuauucaguaagcacaua

SEQ ID NO: 183186 - RNA, 22 nt, Human
uuagaaaaauguucaguaguuu

SEQ ID NO: 183187 - RNA, 22 nt, Human
acacaaugugcaggacaccugu

SEQ ID NO: 183188 - RNA, 22 nt, Human
ccagguggcuucugcccgaugu

SEQ ID NO: 183189 - RNA, 19 nt, Human
gcauaaaaugucaaugugu

SEQ ID NO: 183190 - RNA, 22 nt, Human
aggcacuguacuagguacaggg

SEQ ID NO: 183191 - RNA, 22 nt, Human
auucuuucauauaaaggcucag

SEQ ID NO: 183192 - RNA, 22 nt, Human
aguauuuguggauuuguauugg

SEQ ID NO: 183193 - RNA, 23 nt, Human
gaguggggagaaauugguuaaac

SEQ ID NO: 183194 - RNA, 21 nt, Human
augaggcaugagaggguuucu

SEQ ID NO: 183195 - RNA, 22 nt, Human
ugcaggugguccauuugggaac

SEQ ID NO: 183196 - RNA, 22 nt, Human
uuggcagggcaucagacacgug

SEQ ID NO: 183197 - RNA, 22 nt, Human
uaugaacugcucuuguguuuug

SEQ ID NO: 183198 - RNA, 22 nt, Human
cugaaggagcauagucaguuuu

SEQ ID NO: 183199 - RNA, 22 nt, Human
aguauucuggaauucuauguga

SEQ ID NO: 183200 - RNA, 22 nt, Human
agcccuggagcaaaggugucuu

SEQ ID NO: 183201 - RNA, 22 nt, Human
uugcuuuagguauagaauccau

SEQ ID NO: 183202 - RNA, 22 nt, Human
gucaacaagugguuauugggau

SEQ ID NO: 183203 - RNA, 22 nt, Human
uggaaacuauaaaagcaccuuc

SEQ ID NO: 183204 - RNA, 22 nt, Human
caggcagcgcucguggccuggc

SEQ ID NO: 183205 - RNA, 22 nt, Human
uagggucccagauaggagccag

SEQ ID NO: 183206 - RNA, 22 nt, Human
ccacaucuaagccuucaugaua

SEQ ID NO: 183207 - RNA, 22 nt, Human
agagcuggcugugggugacuuu

SEQ ID NO: 183208 - RNA, 22 nt, Human
uaacaaagguugccaaacuaag

SEQ ID NO: 183209 - RNA, 22 nt, Human
cugacuuuagaacccaaaaagu

SEQ ID NO: 183210 - RNA, 18 nt, Human
ugaacagaugaguugaag

SEQ ID NO: 183211 - RNA, 22 nt, Human
cugucccagccccguacucuaa

SEQ ID NO: 183212 - RNA, 21 nt, Human
uuccagaaaucucuuucuuca

SEQ ID NO: 183213 - RNA, 22 nt, Human
aacugucaucuuucaaggaaga

SEQ ID NO: 183214 - RNA, 22 nt, Human
agggcugugucccuaggggagc

SEQ ID NO: 183215 - RNA, 22 nt, Human
ugggaaggacgugucaguggca

SEQ ID NO: 183216 - RNA, 22 nt, Human
ccaggcucugcaaaaucaggcu

SEQ ID NO: 183217 - RNA, 22 nt, Human
ugggaagcacgcucagcagaaa

SEQ ID NO: 183218 - RNA, 22 nt, Human
uguccccaagguucagcccaca

SEQ ID NO: 183219 - RNA, 22 nt, Human
cagugcugguguaggcugacca

SEQ ID NO: 183220 - RNA, 22 nt, Human
ucuucaggaagggaaaucaucc

SEQ ID NO: 183221 - RNA, 22 nt, Human
caggaauccagagugagccucc

SEQ ID NO: 183222 - RNA, 22 nt, Human
aacauuugugaaguacuuagau

SEQ ID NO: 183223 - RNA, 21 nt, Human
uaggaacuguucugagugguc

SEQ ID NO: 183224 - RNA, 22 nt, Human
ucccagcuacucuagaggcuga

SEQ ID NO: 183225 - RNA, 17 nt, Human
uccaggcagcaacugag

SEQ ID NO: 183226 - RNA, 22 nt, Human
ugcuuuaaaccauggaugugag

SEQ ID NO: 183227 - RNA, 22 nt, Human
caguuucuguggucucuuuuca

SEQ ID NO: 183228 - RNA, 18 nt, Human
gagcuugaaauggcuuuu

SEQ ID NO: 183229 - RNA, 19 nt, Human
ugucagugauacaugcuuu

SEQ ID NO: 183230 - RNA, 22 nt, Human
acagggccucagccagggcaga

SEQ ID NO: 183231 - RNA, 22 nt, Human
ucucagagagcuguguuuuccu

SEQ ID NO: 183232 - RNA, 22 nt, Human
uugcuuuacaaaaauugauggu

SEQ ID NO: 183233 - RNA, 22 nt, Human
gacccuguuucuacaaauaauu

SEQ ID NO: 183234 - RNA, 21 nt, Human
ucuaaugacauccucugacaa

SEQ ID NO: 183235 - RNA, 22 nt, Human
ucagaacauucucauugacugc

SEQ ID NO: 183236 - RNA, 22 nt, Human
uacaugcauguguguaaauaua

SEQ ID NO: 183237 - RNA, 22 nt, Human
ugacacaaaggaaagcauaauc

SEQ ID NO: 183238 - RNA, 20 nt, Human
ucugugcaguggaggggcag

SEQ ID NO: 183239 - RNA, 22 nt, Human
gucagcugggcaucugcagaug

SEQ ID NO: 183240 - RNA, 22 nt, Human
auuucauugaaguuaauucuuc

SEQ ID NO: 183241 - RNA, 22 nt, Human
uauaggaaauaggucuucugug

SEQ ID NO: 183242 - RNA, 22 nt, Human
guuauugagguggagucucacu

SEQ ID NO: 183243 - RNA, 22 nt, Human
aaggagagguuguccguguugu

SEQ ID NO: 183244 - RNA, 22 nt, Human
aggugaggauagguggccaagg

SEQ ID NO: 183245 - RNA, 22 nt, Human
uccagcagguguuugccaacuu

SEQ ID NO: 183246 - RNA, 19 nt, Human
ucagcagcacugugauuuc

SEQ ID NO: 183247 - RNA, 22 nt, Human
cagcccuuuccuucucagcuuu

SEQ ID NO: 183248 - RNA, 19 nt, Human
gagaaucucuuugauguuu

SEQ ID NO: 183249 - RNA, 22 nt, Human
ggcaugggguguauguggcacg

SEQ ID NO: 183250 - RNA, 22 nt, Human
uauuccaguccuauccucuuuu

SEQ ID NO: 183251 - RNA, 17 nt, Human
uaggagacuggcugucc

SEQ ID NO: 183252 - RNA, 22 nt, Human
gacccauauaggacccuccaaa

SEQ ID NO: 183253 - RNA, 19 nt, Human
acaguccagcuguuuguac

SEQ ID NO: 183254 - RNA, 22 nt, Human
uuacuaaggacucuaaguucua

SEQ ID NO: 183255 - RNA, 22 nt, Human
aucuuguuaaagugcagauuuu

SEQ ID NO: 183256 - RNA, 21 nt, Human
ugcacuucaguggcuaaauuc

SEQ ID NO: 183257 - RNA, 22 nt, Human
ggcagauguuauaugaucugag

SEQ ID NO: 183258 - RNA, 22 nt, Human
auucuccuuauucugaaaaaag

SEQ ID NO: 183259 - RNA, 22 nt, Human
agauggggcugaaaguuccaau

SEQ ID NO: 183260 - RNA, 22 nt, Human
ggaaagagaaguugggaggaau

SEQ ID NO: 183261 - RNA, 22 nt, Human
ugcuggcuggccuggccuggac

SEQ ID NO: 183262 - RNA, 22 nt, Human
ucucaggcugacauugggacuc

SEQ ID NO: 183263 - RNA, 22 nt, Human
cagcagguguccuuuuggugga

SEQ ID NO: 183264 - RNA, 22 nt, Human
ucaguguccggagccugagugc

SEQ ID NO: 183265 - RNA, 23 nt, Human
ucagugucuaguuguggaauuga

SEQ ID NO: 183266 - RNA, 22 nt, Human
acuuccagaauuagaauuuaag

SEQ ID NO: 183267 - RNA, 16 nt, Human
uuuuauugugacagcc

SEQ ID NO: 183268 - RNA, 22 nt, Human
caguuuuauugguugaaaucug

SEQ ID NO: 183269 - RNA, 20 nt, Human
cucucuggaaggugggagcc

SEQ ID NO: 183270 - RNA, 22 nt, Human
caggcugggcuccggagauaaa

SEQ ID NO: 183271 - RNA, 22 nt, Human
caguaguuauuaguugccacug

SEQ ID NO: 183272 - RNA, 22 nt, Human
gccuucaguagugucagcugua

SEQ ID NO: 183273 - RNA, 22 nt, Human
caguucugacuuucauaauguc

SEQ ID NO: 183274 - RNA, 22 nt, Human
cuguggcuccagugaaccaaug

SEQ ID NO: 183275 - RNA, 22 nt, Human
ccaggcauugugagugggcagg

SEQ ID NO: 183276 - RNA, 22 nt, Human
ggcugggcauccauccaugaga

SEQ ID NO: 183277 - RNA, 20 nt, Human
cuccacaccuguucgcaggc

SEQ ID NO: 183278 - RNA, 22 nt, Human
cuucauuuggagaacugugcuu

SEQ ID NO: 183279 - RNA, 22 nt, Human
aagcccaguaccuucagugagg

SEQ ID NO: 183280 - RNA, 22 nt, Human
agaguacugcugcuggguacug

SEQ ID NO: 183281 - RNA, 20 nt, Human
uaaagacauaagcuacuauc

SEQ ID NO: 183282 - RNA, 22 nt, Human
ugaucuagguuggcuucaacug

SEQ ID NO: 183283 - RNA, 22 nt, Human
acaguacauaauccugagucug

SEQ ID NO: 183284 - RNA, 22 nt, Human
gaggagagaugguagauugggu

SEQ ID NO: 183285 - RNA, 22 nt, Human
ggcuucccugccucacuuauuc

SEQ ID NO: 183286 - RNA, 22 nt, Human
ucucuaaaucugguucacuugc

SEQ ID NO: 183287 - RNA, 22 nt, Human
aaacaaauagugcaugggaauu

SEQ ID NO: 183288 - RNA, 22 nt, Human
uguucuuugccagugauuuaau

SEQ ID NO: 183289 - RNA, 23 nt, Human
cuucuggcucuauaucagaauuc

SEQ ID NO: 183290 - RNA, 22 nt, Human
ugcauugauagaaaaacaugga

SEQ ID NO: 183291 - RNA, 22 nt, Human
ucuucauucucgccuuugucgu

SEQ ID NO: 183292 - RNA, 22 nt, Human
cagccacuucgagcuuccugau

SEQ ID NO: 183293 - RNA, 22 nt, Human
cuucucuugguaguucuuguug

SEQ ID NO: 183294 - RNA, 22 nt, Human
aauauacuauacuacuuucugg

SEQ ID NO: 183295 - RNA, 22 nt, Human
ccagagcccagcacacggugcu

SEQ ID NO: 183296 - RNA, 22 nt, Human
aaagagggacaggcgcagacac

SEQ ID NO: 183297 - RNA, 22 nt, Human
agacauauuggcuugcuuuaau

SEQ ID NO: 183298 - RNA, 22 nt, Human
aucuuugggcaaugaugaggga

SEQ ID NO: 183299 - RNA, 22 nt, Human
uuugaaauaugugaugagagag

SEQ ID NO: 183300 - RNA, 22 nt, Human
gugagggauaauaugcgggguu

SEQ ID NO: 183301 - RNA, 22 nt, Human
uacuuacaugaauucaagagca

SEQ ID NO: 183302 - RNA, 22 nt, Human
agguccugaggguucgucugca

SEQ ID NO: 183303 - RNA, 22 nt, Human
gugcaaacaucauagaguguac

SEQ ID NO: 183304 - RNA, 22 nt, Human
uuccccaggugauucucauggc

SEQ ID NO: 183305 - RNA, 22 nt, Human
aaaaguauggugguccuuuuua

SEQ ID NO: 183306 - RNA, 22 nt, Human
ucuuggcuacuuaggaggauuc

SEQ ID NO: 183307 - RNA, 23 nt, Human
ucuggaggggacacugcagaugc

SEQ ID NO: 183308 - RNA, 22 nt, Human
agcccuggcucccagcagcgcu

SEQ ID NO: 183309 - RNA, 22 nt, Human
agaucagauucugccuuuguga

SEQ ID NO: 183310 - RNA, 22 nt, Human
aagcccuggcccaaccuugauu

SEQ ID NO: 183311 - RNA, 22 nt, Human
uaugaacuuuugaugugacaug

SEQ ID NO: 183312 - RNA, 22 nt, Human
agaucuuuagaagauagaauca

SEQ ID NO: 183313 - RNA, 22 nt, Human
acauuccucagugccaguugag

SEQ ID NO: 183314 - RNA, 22 nt, Human
ugccucagucuaaagucucuca

SEQ ID NO: 183315 - RNA, 22 nt, Human
uuuguacauguaagauugcauc

SEQ ID NO: 183316 - RNA, 22 nt, Human
uuuacauguaauguuauacaaa

SEQ ID NO: 183317 - RNA, 22 nt, Human
aguuuuuccugauuuuacagaa

SEQ ID NO: 183318 - RNA, 22 nt, Human
ucugggcugugggaauucaaca

SEQ ID NO: 183319 - RNA, 19 nt, Human
acacauuugcacaauccac

SEQ ID NO: 183320 - RNA, 18 nt, Human
gccugggaggaggaaaug

SEQ ID NO: 183321 - RNA, 22 nt, Human
gauuacaauucagguugauaag

SEQ ID NO: 183322 - RNA, 22 nt, Human
auuagugucauguugaggacuu

SEQ ID NO: 183323 - RNA, 22 nt, Human
ucaugcaguuugaaguucaggg

SEQ ID NO: 183324 - RNA, 22 nt, Human
acucuguagggacgguucuccc

SEQ ID NO: 183325 - RNA, 22 nt, Human
cagggcugugcccaucuucccc

SEQ ID NO: 183326 - RNA, 22 nt, Human
uaggaaaccaaucuuuugggag

SEQ ID NO: 183327 - RNA, 23 nt, Human
aaacuacauuuauaguuuuucuc

SEQ ID NO: 183328 - RNA, 22 nt, Human
gccugccuuugugaggaagcgg

SEQ ID NO: 183329 - RNA, 18 nt, Human
gugacguuuuggaugauu

SEQ ID NO: 183330 - RNA, 22 nt, Human
gggaaugugaaacaguaaggga

SEQ ID NO: 183331 - RNA, 22 nt, Human
aaacaggcaucacucagcaaag

SEQ ID NO: 183332 - RNA, 22 nt, Human
uggggcuguccuuagucugaga

SEQ ID NO: 183333 - RNA, 22 nt, Human
auguuuguguuacacucugcag

SEQ ID NO: 183334 - RNA, 22 nt, Human
gcucagccgaacuucagagcag

SEQ ID NO: 183335 - RNA, 22 nt, Human
uguuuguauggaccuguucuau

SEQ ID NO: 183336 - RNA, 22 nt, Human
ucuccuggaagaauaccacacu

SEQ ID NO: 183337 - RNA, 22 nt, Human
ccuccaucaccaucugcccuca

SEQ ID NO: 183338 - RNA, 22 nt, Human
aauguaguucacaauugguacu

SEQ ID NO: 183339 - RNA, 22 nt, Human
gguagcugcagcaggcuggcaa

SEQ ID NO: 183340 - RNA, 22 nt, Human
ccagccucaucgccugccuguc

SEQ ID NO: 183341 - RNA, 22 nt, Human
guggcagugggaugcuaucagg

SEQ ID NO: 183342 - RNA, 17 nt, Human
uggcuuuccugacacag

SEQ ID NO: 183343 - RNA, 22 nt, Human
uuugcauugcauuaaguauucu

SEQ ID NO: 183344 - RNA, 22 nt, Human
uaugaaagaaucucagagcaca

SEQ ID NO: 183345 - RNA, 22 nt, Human
uucuuguucugguucuguuagc

SEQ ID NO: 183346 - RNA, 22 nt, Human
uuuaauugcauuuaaagaugga

SEQ ID NO: 183347 - RNA, 23 nt, Human
gugugcaggauuauuugcagaca

SEQ ID NO: 183348 - RNA, 22 nt, Human
aucuguagaagauacucugaga

SEQ ID NO: 183349 - RNA, 22 nt, Human
aaaugcuguucuuuuagguaga

SEQ ID NO: 183350 - RNA, 22 nt, Human
accuccccgggagcagccuccu

SEQ ID NO: 183351 - RNA, 22 nt, Human
acagaacuggaauuggaacuca

SEQ ID NO: 183352 - RNA, 22 nt, Human
uaguuuagcauacaucuucagg

SEQ ID NO: 183353 - RNA, 22 nt, Human
aaagaagauggagaccugacua

SEQ ID NO: 183354 - RNA, 21 nt, Human
guuauugaccuccaggcuggc

SEQ ID NO: 183355 - RNA, 22 nt, Human
guccaaugguaaauccaaauaa

SEQ ID NO: 183356 - RNA, 23 nt, Human
aacugagauaauguauguaaagc

SEQ ID NO: 183357 - RNA, 22 nt, Human
aagugcuguuucugaugaaugc

SEQ ID NO: 183358 - RNA, 22 nt, Human
uacauucacuuguugaaggugg

SEQ ID NO: 183359 - RNA, 21 nt, Human
agugacuaugacauuauuacc

SEQ ID NO: 183360 - RNA, 22 nt, Human
aggcccugcauuguacugaggg

SEQ ID NO: 183361 - RNA, 18 nt, Human
uuggaccugugucagggc

SEQ ID NO: 183362 - RNA, 22 nt, Human
gagcuccuggauugcuccuagg

SEQ ID NO: 183363 - RNA, 20 nt, Human
agccugcuguagaaguuugg

SEQ ID NO: 183364 - RNA, 22 nt, Human
gcacacagauuaggaaacagaa

SEQ ID NO: 183365 - RNA, 20 nt, Human
uggaggcaccuguggagauc

SEQ ID NO: 183366 - RNA, 22 nt, Human
auuugggaaugugcauuauacu

SEQ ID NO: 183367 - RNA, 22 nt, Human
cuguaagggccugacuacccug

SEQ ID NO: 183368 - RNA, 20 nt, Human
ggcccagugaaccaggacgg

SEQ ID NO: 183369 - RNA, 22 nt, Human
caaggaaacaugaaaugcauug

SEQ ID NO: 183370 - RNA, 20 nt, Human
caggaggcaaggucaagguc

SEQ ID NO: 183371 - RNA, 22 nt, Human
ucaccaggcuggaaugcagugg

SEQ ID NO: 183372 - RNA, 23 nt, Human
acagaaaucauuuguaagguacc

SEQ ID NO: 183373 - RNA, 22 nt, Human
acagaggcagugugagauacug

SEQ ID NO: 183374 - RNA, 22 nt, Human
uuugggaagugggagcaaggug

SEQ ID NO: 183375 - RNA, 22 nt, Human
ggucccaugacugacacagcag

SEQ ID NO: 183376 - RNA, 22 nt, Human
uccugccaggagugcuggcccu

SEQ ID NO: 183377 - RNA, 22 nt, Human
uuucuucauucaccuucacccc

SEQ ID NO: 183378 - RNA, 22 nt, Human
aggcucagacaggaaaaguaac

SEQ ID NO: 183379 - RNA, 22 nt, Human
augcaaauaagugcaggcgugg

SEQ ID NO: 183380 - RNA, 22 nt, Human
aagucagagaugccaaagauua

SEQ ID NO: 183381 - RNA, 22 nt, Human
ugcacacacaugaaguagcaug

SEQ ID NO: 183382 - RNA, 17 nt, Human
cccagggaccacugcuu

SEQ ID NO: 183383 - RNA, 22 nt, Human
uguaauuaacguucuuguuaga

SEQ ID NO: 183384 - RNA, 22 nt, Human
ccagggaugcagagguugcagu

SEQ ID NO: 183385 - RNA, 22 nt, Human
gccugggaacucugaucuccug

SEQ ID NO: 183386 - RNA, 22 nt, Human
aaagugcaucaaaugacuuccc

SEQ ID NO: 183387 - RNA, 22 nt, Human
aggcaggucacaugcuuggcga

SEQ ID NO: 183388 - RNA, 22 nt, Human
ugcuucuggaguaacaggguga

SEQ ID NO: 183389 - RNA, 22 nt, Human
ucaggucaggaaaauaagauug

SEQ ID NO: 183390 - RNA, 22 nt, Human
ucacacauacucaugugugagu

SEQ ID NO: 183391 - RNA, 22 nt, Human
ucucugugucucauguuccuau

SEQ ID NO: 183392 - RNA, 22 nt, Human
aggaacacccccuuccuaccag

SEQ ID NO: 183393 - RNA, 22 nt, Human
cuccugggagcuguggcagagc

SEQ ID NO: 183394 - RNA, 22 nt, Human
gggaaacucaggcauuuccacu

SEQ ID NO: 183395 - RNA, 22 nt, Human
ccagaccagacugacuugagcc

SEQ ID NO: 183396 - RNA, 22 nt, Human
uccuuucuuuucuaugggccca

SEQ ID NO: 183397 - RNA, 22 nt, Human
ucaauucugccucuaaauauuu

SEQ ID NO: 183398 - RNA, 18 nt, Human
agagaugguguagaguuu

SEQ ID NO: 183399 - RNA, 23 nt, Human
gguccacccgagccugcagcuuc

SEQ ID NO: 183400 - RNA, 22 nt, Human
ccagaggaguugaggcuuuggg

SEQ ID NO: 183401 - RNA, 22 nt, Human
aaugaagaaauggacaucuuua

SEQ ID NO: 183402 - RNA, 22 nt, Human
cugcugucuuuauuucacugcu

SEQ ID NO: 183403 - RNA, 22 nt, Human
agguccaggauuuguggggucu

SEQ ID NO: 183404 - RNA, 22 nt, Human
uggaaagugcucuagacuuucu

SEQ ID NO: 183405 - RNA, 22 nt, Human
gggcaugguggugcacaccugu

SEQ ID NO: 183406 - RNA, 22 nt, Human
caacuuuagcaauguuaguaua

SEQ ID NO: 183407 - RNA, 22 nt, Human
cagcaggcccagaguuucaugg

SEQ ID NO: 183408 - RNA, 22 nt, Human
augcaagcaaucugagcuuugg

SEQ ID NO: 183409 - RNA, 22 nt, Human
gccaaaucuugcacacucuugu

SEQ ID NO: 183410 - RNA, 17 nt, Human
gcccuggagccaggcua

SEQ ID NO: 183411 - RNA, 22 nt, Human
agggcccucugggcacuguggc

SEQ ID NO: 183412 - RNA, 22 nt, Human
aaaauacacauacuaggggaaa

SEQ ID NO: 183413 - RNA, 22 nt, Human
uaagaaauuuaguuauagaaug

SEQ ID NO: 183414 - RNA, 23 nt, Human
aggaggccugaaacugaggcuga

SEQ ID NO: 183415 - RNA, 22 nt, Human
acucaaauuugucaacugaagc

SEQ ID NO: 183416 - RNA, 22 nt, Human
cagcaucuaaucuucaugccgg

SEQ ID NO: 183417 - RNA, 22 nt, Human
cugggcgugucuuccagcuggc

SEQ ID NO: 183418 - RNA, 22 nt, Human
auuucacagcugucaguguuac

SEQ ID NO: 183419 - RNA, 22 nt, Human
gagucucugggagggaaagaag

SEQ ID NO: 183420 - RNA, 22 nt, Human
aaagccuugagauccuauaguu

SEQ ID NO: 183421 - RNA, 22 nt, Human
caggccugcuucuuacccuuca

SEQ ID NO: 183422 - RNA, 22 nt, Human
ucucugucugagccuggcagac

SEQ ID NO: 183423 - RNA, 17 nt, Human
uccaggcauaucuccua

SEQ ID NO: 183424 - RNA, 22 nt, Human
ugugaaaagggcuuuguacaaa

SEQ ID NO: 183425 - RNA, 22 nt, Human
agucaggauuuuggauuauucg

SEQ ID NO: 183426 - RNA, 22 nt, Human
ugugagaauuccugaucacagg

SEQ ID NO: 183427 - RNA, 22 nt, Human
guguacauagaauugugcuuug

SEQ ID NO: 183428 - RNA, 22 nt, Human
acuaacuucugagaaccaauug

SEQ ID NO: 183429 - RNA, 22 nt, Human
cuccaaguauguuaaaaucuaa

SEQ ID NO: 183430 - RNA, 22 nt, Human
aaagcucuuuuccaaguauuga

SEQ ID NO: 183431 - RNA, 22 nt, Human
cccaggagaugcacuccauugg

SEQ ID NO: 183432 - RNA, 22 nt, Human
uagagggaaggaagaauggauu

SEQ ID NO: 183433 - RNA, 22 nt, Human
uagggcuauucugaguaauaau

SEQ ID NO: 183434 - RNA, 22 nt, Human
gaggccagauacucucuucugc

SEQ ID NO: 183435 - RNA, 20 nt, Human
ccuucucuggaauugccucc

SEQ ID NO: 183436 - RNA, 22 nt, Human
gugaccauaauagauuaugagu

SEQ ID NO: 183437 - RNA, 22 nt, Human
cugugacugggugacaguccuc

SEQ ID NO: 183438 - RNA, 22 nt, Human
gucugucucccugugacugaga

SEQ ID NO: 183439 - RNA, 18 nt, Human
cuuuaugugcagagcuuu

SEQ ID NO: 183440 - RNA, 22 nt, Human
agggcucuguccccagaggccc

SEQ ID NO: 183441 - RNA, 19 nt, Human
gcucagagggcccugugcu

SEQ ID NO: 183442 - RNA, 22 nt, Human
uguuuacuucuuuccauggcuu

SEQ ID NO: 183443 - RNA, 22 nt, Human
ucuggcagcuauccucuggcca

SEQ ID NO: 183444 - RNA, 22 nt, Human
ugcuguggcaguuuauguauag

SEQ ID NO: 183445 - RNA, 22 nt, Human
cuguggaaaauuuguauguaau

SEQ ID NO: 183446 - RNA, 22 nt, Human
ucagugcaaucaagguauguuu

SEQ ID NO: 183447 - RNA, 22 nt, Human
uauauuaaacccucucuguagg

SEQ ID NO: 183448 - RNA, 22 nt, Human
ugggagaagcauggggugcaga

SEQ ID NO: 183449 - RNA, 22 nt, Human
uuuacagugucuuguugacugu

SEQ ID NO: 183450 - RNA, 22 nt, Human
cuuccuucugaagcauagaagc

SEQ ID NO: 183451 - RNA, 22 nt, Human
ccagcacucuauugaauauucu

SEQ ID NO: 183452 - RNA, 22 nt, Human
ggcagguggaaggucuccauuc

SEQ ID NO: 183453 - RNA, 22 nt, Human
gacaacagugguuucagguucc

SEQ ID NO: 183454 - RNA, 22 nt, Human
gugaccagugaugcugaggagu

SEQ ID NO: 183455 - RNA, 22 nt, Human
cugugagagugguggccuaggc

SEQ ID NO: 183456 - RNA, 17 nt, Human
ggcagcugccacuuuuu

SEQ ID NO: 183457 - RNA, 22 nt, Human
aauguuguuuuucugcaugucu

SEQ ID NO: 183458 - RNA, 22 nt, Human
aagagcuggcucuugcagcagc

SEQ ID NO: 183459 - RNA, 22 nt, Human
acuguccaagcaugccuggcuu

SEQ ID NO: 183460 - RNA, 22 nt, Human
uccuggugguuugaaaacugaa

SEQ ID NO: 183461 - RNA, 22 nt, Human
ggcagccccaucagagacgcug

SEQ ID NO: 183462 - RNA, 22 nt, Human
gauuacaaaacucaucuaugac

SEQ ID NO: 183463 - RNA, 22 nt, Human
ccagaaggcggagauugcagug

SEQ ID NO: 183464 - RNA, 17 nt, Human
uggcacagaggugcuau

SEQ ID NO: 183465 - RNA, 22 nt, Human
uucucuuuugugaugugagaug

SEQ ID NO: 183466 - RNA, 22 nt, Human
uggcuaggaauccaugacucuc

SEQ ID NO: 183467 - RNA, 20 nt, Human
gcucagggccugggucugga

SEQ ID NO: 183468 - RNA, 22 nt, Human
acucagagucaauguuaauggc

SEQ ID NO: 183469 - RNA, 23 nt, Human
gggaagcuccauggaggugcugg

SEQ ID NO: 183470 - RNA, 22 nt, Human
uccaggcuagagugcaguggcc

SEQ ID NO: 183471 - RNA, 22 nt, Human
aaaaggcuagcuaguaacagaa

SEQ ID NO: 183472 - RNA, 22 nt, Human
ccagggugagugucauggguua

SEQ ID NO: 183473 - RNA, 18 nt, Human
uuggggugaggccaggaa

SEQ ID NO: 183474 - RNA, 22 nt, Human
agggcccuaaggaaggcacaca

SEQ ID NO: 183475 - RNA, 22 nt, Human
ucuucaaagaauuuuaguaauu

SEQ ID NO: 183476 - RNA, 22 nt, Human
ugggaaggggagcuggaaagga

SEQ ID NO: 183477 - RNA, 22 nt, Human
accuccccucaccaaucugguu

SEQ ID NO: 183478 - RNA, 22 nt, Human
ugccugggaucugugcccuuug

SEQ ID NO: 183479 - RNA, 22 nt, Human
uaguuucuaaagcuuccuaggu

SEQ ID NO: 183480 - RNA, 22 nt, Human
ggaugucugucauuaugcuuuc

SEQ ID NO: 183481 - RNA, 20 nt, Human
uccuggccucccuggggcuc

SEQ ID NO: 183482 - RNA, 22 nt, Human
uuugacucuuaaguggcucaau

SEQ ID NO: 183483 - RNA, 22 nt, Human
auagugcauuuuauuaucagca

SEQ ID NO: 183484 - RNA, 22 nt, Human
gcucuguagugggcaugugauu

SEQ ID NO: 183485 - RNA, 22 nt, Human
guccauggcauuuccgucacau

SEQ ID NO: 183486 - RNA, 22 nt, Human
gaggaugcugcagugcaggaca

SEQ ID NO: 183487 - RNA, 22 nt, Human
cugggaagaagugggcuacauu

SEQ ID NO: 183488 - RNA, 22 nt, Human
uagggugguuagaaggaguaug

SEQ ID NO: 183489 - RNA, 22 nt, Human
gacaggugaaacagcaagguaa

SEQ ID NO: 183490 - RNA, 22 nt, Human
caagcuuuauccgccauguagg

SEQ ID NO: 183491 - RNA, 22 nt, Human
ugaggcaagggauggccccgug

SEQ ID NO: 183492 - RNA, 22 nt, Human
acuguauuuggauauaagaucu

SEQ ID NO: 183493 - RNA, 22 nt, Human
ugacuuuaaaauaacaaguuua

SEQ ID NO: 183494 - RNA, 20 nt, Human
aaaaacaguaaugcugaaga

SEQ ID NO: 183495 - RNA, 22 nt, Human
caugcccauugagaagggccuc

SEQ ID NO: 183496 - RNA, 22 nt, Human
uuaggaaaaugaaauuaccugu

SEQ ID NO: 183497 - RNA, 22 nt, Human
ggacagguucagcaguuuauaa

SEQ ID NO: 183498 - RNA, 22 nt, Human
ggcugugaaguagcaggggcag

SEQ ID NO: 183499 - RNA, 22 nt, Human
uuggccuucugguguucauuuu

SEQ ID NO: 183500 - RNA, 22 nt, Human
uacaguuacgcugagaaacgaa

SEQ ID NO: 183501 - RNA, 22 nt, Human
gcuucuguggugaggucaccuu

SEQ ID NO: 183502 - RNA, 20 nt, Human
ugcuucauuaugugagauag

SEQ ID NO: 183503 - RNA, 22 nt, Human
cuguuucauagaguugugaauu

SEQ ID NO: 183504 - RNA, 22 nt, Human
ugcaggcucaucucaagaguag

SEQ ID NO: 183505 - RNA, 19 nt, Human
agaguauugaauuugcccu

SEQ ID NO: 183506 - RNA, 22 nt, Human
gcugaggaaaggcuggaaggga

SEQ ID NO: 183507 - RNA, 22 nt, Human
caaguauuuuaaggacuagugg

SEQ ID NO: 183508 - RNA, 22 nt, Human
gucugcccagaagacauccccu

SEQ ID NO: 183509 - RNA, 22 nt, Human
gcccuuggaacagccuccugcu

SEQ ID NO: 183510 - RNA, 22 nt, Human
ugggagcacccugaggagcuuc

SEQ ID NO: 183511 - RNA, 22 nt, Human
gcaggcuggucugaccaucccu

SEQ ID NO: 183512 - RNA, 22 nt, Human
uugcagcuuagugauguuaucu

SEQ ID NO: 183513 - RNA, 22 nt, Human
gccagguggcugagcagcugca

SEQ ID NO: 183514 - RNA, 22 nt, Human
agagugguacuucuuuuucuuc

SEQ ID NO: 183515 - RNA, 22 nt, Human
cacaugaggugacuuccaagcu

SEQ ID NO: 183516 - RNA, 22 nt, Human
cagggagcuuucccaggacccu

SEQ ID NO: 183517 - RNA, 22 nt, Human
gcaguccucucauuggccuccu

SEQ ID NO: 183518 - RNA, 22 nt, Human
uggagaugcacgagcaggugga

SEQ ID NO: 183519 - RNA, 22 nt, Human
ugggagagcacugcagccccgg

SEQ ID NO: 183520 - RNA, 22 nt, Human
cacaccucacaccucgcaugcu

SEQ ID NO: 183521 - RNA, 22 nt, Human
uaacaacuggacaauguugcuc

SEQ ID NO: 183522 - RNA, 22 nt, Human
cccacucccuacgacacgcucc

SEQ ID NO: 183523 - RNA, 21 nt, Human
agccagucucaguacuguacu

SEQ ID NO: 183524 - RNA, 22 nt, Human
uaauaauagcaguagcugccac

SEQ ID NO: 183525 - RNA, 22 nt, Human
uuacuguuuuuaacuaauugug

SEQ ID NO: 183526 - RNA, 22 nt, Human
uugguaaauccccuuacacaaa

SEQ ID NO: 183527 - RNA, 22 nt, Human
gaagagaagcaucaauagguaa

SEQ ID NO: 183528 - RNA, 22 nt, Human
ugagcugggaagagcagccaga

SEQ ID NO: 183529 - RNA, 22 nt, Human
aaucaauguuagucaugaauuu

SEQ ID NO: 183530 - RNA, 22 nt, Human
uucccuugaccccagacccugg

SEQ ID NO: 183531 - RNA, 22 nt, Human
cccagugugguugugaauucug

SEQ ID NO: 183532 - RNA, 20 nt, Human
aggucugaaugucagggcug

SEQ ID NO: 183533 - RNA, 22 nt, Human
agacuuaggagcugacaucucu

SEQ ID NO: 183534 - RNA, 22 nt, Human
gucaggggccaugggccaagga

SEQ ID NO: 183535 - RNA, 22 nt, Human
uccacaucaagggcagagaggu

SEQ ID NO: 183536 - RNA, 22 nt, Human
uccagccaccaccuugauugcc

SEQ ID NO: 183537 - RNA, 22 nt, Human
aacuuacaaggaugauagcugc

SEQ ID NO: 183538 - RNA, 22 nt, Human
gggcucuggacccaggcaagag

SEQ ID NO: 183539 - RNA, 22 nt, Human
gacagacuaaauggcuguagga

SEQ ID NO: 183540 - RNA, 22 nt, Human
agcaggcaggcugccagugaau

SEQ ID NO: 183541 - RNA, 22 nt, Human
gcugcugguccucagagcucau

SEQ ID NO: 183542 - RNA, 21 nt, Human
cacagagauauuggugagccu

SEQ ID NO: 183543 - RNA, 22 nt, Human
gaggccagaagucugagaucag

SEQ ID NO: 183544 - RNA, 22 nt, Human
cuguggcucucagaggcugcug

SEQ ID NO: 183545 - RNA, 22 nt, Human
cugcacccaugagcucaaggga

SEQ ID NO: 183546 - RNA, 22 nt, Human
uagcugcuucagucuaggucuc

SEQ ID NO: 183547 - RNA, 22 nt, Human
ugggccacaagccaugggacca

SEQ ID NO: 183548 - RNA, 22 nt, Human
cauuguuaccaucuuuuaccua

SEQ ID NO: 183549 - RNA, 22 nt, Human
cugcacugagcucucccagccc

SEQ ID NO: 183550 - RNA, 22 nt, Human
uucuagaaugauaugagguacu

SEQ ID NO: 183551 - RNA, 22 nt, Human
uuuuuuauagcaaugaacccac

SEQ ID NO: 183552 - RNA, 22 nt, Human
acagccuuauucuuuaguuuac

SEQ ID NO: 183553 - RNA, 22 nt, Human
cacauuaaaauccuaacuucca

SEQ ID NO: 183554 - RNA, 22 nt, Human
aagucagcacuccaggaagcca

SEQ ID NO: 183555 - RNA, 22 nt, Human
uacaguauggaaaauguauagu

SEQ ID NO: 183556 - RNA, 22 nt, Human
cugcacagggauauggggagcu

SEQ ID NO: 183557 - RNA, 22 nt, Human
gagucuggacuauucuggucuu

SEQ ID NO: 183558 - RNA, 22 nt, Human
uuccuggcugaacugaacuccu

SEQ ID NO: 183559 - RNA, 22 nt, Human
cagcuuguuuuauuuggggacc

SEQ ID NO: 183560 - RNA, 22 nt, Human
agugcuccugaagcuugaggca

SEQ ID NO: 183561 - RNA, 19 nt, Human
ucuguggccuucccugaug

SEQ ID NO: 183562 - RNA, 22 nt, Human
auaauaucgcuccuuuuuuuga

SEQ ID NO: 183563 - RNA, 22 nt, Human
ugggcaaagucacauacaugau

SEQ ID NO: 183564 - RNA, 22 nt, Human
uuagagaaaggguuugauuccg

SEQ ID NO: 183565 - RNA, 22 nt, Human
ugggacacacaaggucagcucu

SEQ ID NO: 183566 - RNA, 23 nt, Human
uaaagacagccuucaggauucug

SEQ ID NO: 183567 - RNA, 22 nt, Human
ucauuacaguguuuauaugucu

SEQ ID NO: 183568 - RNA, 22 nt, Human
agacacugaaauguauugaaga

SEQ ID NO: 183569 - RNA, 22 nt, Human
gucacaggcaguaacuaggacc

SEQ ID NO: 183570 - RNA, 20 nt, Human
caguccaaucagaggccacc

SEQ ID NO: 183571 - RNA, 21 nt, Human
ggagcugcaggagccgaaggc

SEQ ID NO: 183572 - RNA, 22 nt, Human
guguguccaaggcacggaugac

SEQ ID NO: 183573 - RNA, 22 nt, Human
caggaaagaaaugagaacacca

SEQ ID NO: 183574 - RNA, 22 nt, Human
cguggcuggggaggucagccag

SEQ ID NO: 183575 - RNA, 22 nt, Human
cugaagcaugcguuuguaaacu

SEQ ID NO: 183576 - RNA, 22 nt, Human
uuguggaagcccuaugagagac

SEQ ID NO: 183577 - RNA, 22 nt, Human
ccaggaagccucagaugcugag

SEQ ID NO: 183578 - RNA, 22 nt, Human
auuuggcuguaguaacuggauc

SEQ ID NO: 183579 - RNA, 22 nt, Human
gcccucagaaugggcucuaauc

SEQ ID NO: 183580 - RNA, 22 nt, Human
agugacauuauuuuguguacua

SEQ ID NO: 183581 - RNA, 22 nt, Human
auucaaguggcugcuauguuaa

SEQ ID NO: 183582 - RNA, 22 nt, Human
gccaggaggcuuaacuggacag

SEQ ID NO: 183583 - RNA, 22 nt, Human
caccagguggaaaugucacagc

SEQ ID NO: 183584 - RNA, 22 nt, Human
uugcugggcaugucuuaauucu

SEQ ID NO: 183585 - RNA, 22 nt, Human
uguuucuagagaaaauauuuac

SEQ ID NO: 183586 - RNA, 22 nt, Human
uguaaagaaauagcauuuguag

SEQ ID NO: 183587 - RNA, 22 nt, Human
uuugaagcaccaaaggagaaaa

SEQ ID NO: 183588 - RNA, 22 nt, Human
uauuucagguauggugugaaau

SEQ ID NO: 183589 - RNA, 22 nt, Human
gagcccugugauucuguugugu

SEQ ID NO: 183590 - RNA, 22 nt, Human
agagacaggaguucuguuucca

SEQ ID NO: 183591 - RNA, 20 nt, Human
uuacagaaaugauguuauuu

SEQ ID NO: 183592 - RNA, 22 nt, Human
uggcaguggauaggggagcggu

SEQ ID NO: 183593 - RNA, 22 nt, Human
aggaaacugauguuuuuuacaa

SEQ ID NO: 183594 - RNA, 22 nt, Human
ccaggcauggggagagccagau

SEQ ID NO: 183595 - RNA, 23 nt, Human
ugugggaauguuggagaggaaac

SEQ ID NO: 183596 - RNA, 22 nt, Human
aucuggaauccuuguggacaau

SEQ ID NO: 183597 - RNA, 22 nt, Human
aaacucuaguaaaauguauuca

SEQ ID NO: 183598 - RNA, 22 nt, Human
auugaaaauaaggccagaaaca

SEQ ID NO: 183599 - RNA, 22 nt, Human
auugaaagauaggcuacugugg

SEQ ID NO: 183600 - RNA, 22 nt, Human
gaauuagguaauagaacuagua

SEQ ID NO: 183601 - RNA, 22 nt, Human
ugcaaucucggcacuuugggag

SEQ ID NO: 183602 - RNA, 22 nt, Human
ggagggcaacuuuucaguaggu

SEQ ID NO: 183603 - RNA, 22 nt, Human
ggcagcuggguuggccagaaac

SEQ ID NO: 183604 - RNA, 22 nt, Human
gauuaguugauuaagagucaga

SEQ ID NO: 183605 - RNA, 22 nt, Human
augcaacaaauugugugcaaua

SEQ ID NO: 183606 - RNA, 23 nt, Human
uccagccaaaucuggcugacagu

SEQ ID NO: 183607 - RNA, 22 nt, Human
ggcaugugccugaggucacaca

SEQ ID NO: 183608 - RNA, 22 nt, Human
gagaauguuaauguugaaguau

SEQ ID NO: 183609 - RNA, 22 nt, Human
uuuccagucccuggauuuaacc

SEQ ID NO: 183610 - RNA, 21 nt, Human
ugcaggcuguuuaagaggcaa

SEQ ID NO: 183611 - RNA, 22 nt, Human
gacccugauaggaguagaagaa

SEQ ID NO: 183612 - RNA, 20 nt, Human
uccagcauauaaacuccucu

SEQ ID NO: 183613 - RNA, 22 nt, Human
auaauacaugguuaaccucuuu

SEQ ID NO: 183614 - RNA, 21 nt, Human
gccagcugggucuugcaggag

SEQ ID NO: 183615 - RNA, 22 nt, Human
uguuggaaaagaauuaacuagg

SEQ ID NO: 183616 - RNA, 22 nt, Human
acagguguaugaauauguucca

SEQ ID NO: 183617 - RNA, 22 nt, Human
ucacauuugcaauugcauuguu

SEQ ID NO: 183618 - RNA, 22 nt, Human
guugugcagaagugccucagua

SEQ ID NO: 183619 - RNA, 22 nt, Human
uuaagaaggcuguuugcuagac

SEQ ID NO: 183620 - RNA, 20 nt, Human
agcagcagauguuggaggug

SEQ ID NO: 183621 - RNA, 22 nt, Human
cugugucccagccaggauaaug

SEQ ID NO: 183622 - RNA, 22 nt, Human
gccacuguccugugccugugcu

SEQ ID NO: 183623 - RNA, 22 nt, Human
uaaaggcuucggagugcacacu

SEQ ID NO: 183624 - RNA, 22 nt, Human
uuuauugacccaaagcgagagu

SEQ ID NO: 183625 - RNA, 22 nt, Human
ccauuuugucugacuucuugcu

SEQ ID NO: 183626 - RNA, 22 nt, Human
caggacagaccaagaucgugcu

SEQ ID NO: 183627 - RNA, 22 nt, Human
acuguucacuagugaggguuga

SEQ ID NO: 183628 - RNA, 22 nt, Human
guuacaaaugccaaagcugaga

SEQ ID NO: 183629 - RNA, 22 nt, Human
cagcacaucugauuauaugacu

SEQ ID NO: 183630 - RNA, 22 nt, Human
ugcuccaggcugcugaagaucu

SEQ ID NO: 183631 - RNA, 22 nt, Human
ccuuuaugagauccugggguga

SEQ ID NO: 183632 - RNA, 22 nt, Human
ucuugccucuuccccuuuccau

SEQ ID NO: 183633 - RNA, 23 nt, Human
ggcugagaagucccaugauaggu

SEQ ID NO: 183634 - RNA, 18 nt, Human
cguuuuuccgggauugca

SEQ ID NO: 183635 - RNA, 22 nt, Human
auaaagcaauagauuguguaau

SEQ ID NO: 183636 - RNA, 22 nt, Human
caggaggguguggaaaacuggg

SEQ ID NO: 183637 - RNA, 22 nt, Human
augguuuaaagaguaugacuuu

SEQ ID NO: 183638 - RNA, 22 nt, Human
agcagcagcucuguugcccuac

SEQ ID NO: 183639 - RNA, 22 nt, Human
cuuuccuagauggccaucuuuc

SEQ ID NO: 183640 - RNA, 22 nt, Human
gagaaaaugucagacuuggucg

SEQ ID NO: 183641 - RNA, 22 nt, Human
aaucucagcucaugcaauucca

SEQ ID NO: 183642 - RNA, 22 nt, Human
cagcuggcagaaccugcaucca

SEQ ID NO: 183643 - RNA, 22 nt, Human
gcauguuuugcaacaagugacc

SEQ ID NO: 183644 - RNA, 22 nt, Human
ugcugggcacugucucugggga

SEQ ID NO: 183645 - RNA, 22 nt, Human
cuuacagcauuguucagaggcu

SEQ ID NO: 183646 - RNA, 22 nt, Human
ucaauguuuguucaugaaaaua

SEQ ID NO: 183647 - RNA, 22 nt, Human
cagagcugguaagugguagagg

SEQ ID NO: 183648 - RNA, 19 nt, Human
acaguuugggaaaugagca

SEQ ID NO: 183649 - RNA, 22 nt, Human
gaagccucaacaucucugcguc

SEQ ID NO: 183650 - RNA, 21 nt, Human
aaguuuuauguugccauuugu

SEQ ID NO: 183651 - RNA, 22 nt, Human
agucuggugcucgcucugcuuc

SEQ ID NO: 183652 - RNA, 22 nt, Human
aaaugucaaggugauagaugca

SEQ ID NO: 183653 - RNA, 22 nt, Human
cuauuuuucuguacccuaauuu

SEQ ID NO: 183654 - RNA, 22 nt, Human
cauuuuacugacucuugaauua

SEQ ID NO: 183655 - RNA, 22 nt, Human
guauuaggaggaacacaggccu

SEQ ID NO: 183656 - RNA, 17 nt, Human
augcaggugugaggggc

SEQ ID NO: 183657 - RNA, 22 nt, Human
cacagaggacuguagcggggag

SEQ ID NO: 183658 - RNA, 22 nt, Human
guaugaaaauuguaaaguucuu

SEQ ID NO: 183659 - RNA, 22 nt, Human
aggcucugccaauuccuuccuc

SEQ ID NO: 183660 - RNA, 22 nt, Human
auauauaucgaguucaugucuc

SEQ ID NO: 183661 - RNA, 22 nt, Human
gggaggaaugcaacuuauuuag

SEQ ID NO: 183662 - RNA, 22 nt, Human
cucauuuauguaaugauuaagg

SEQ ID NO: 183663 - RNA, 22 nt, Human
gcaagaacugcaauuacuuuug

SEQ ID NO: 183664 - RNA, 22 nt, Human
ccugucuuagggaaagacugga

SEQ ID NO: 183665 - RNA, 23 nt, Human
auauaaacaccagauagauugua

SEQ ID NO: 183666 - RNA, 22 nt, Human
ucaguggauuguagaaggcuua

SEQ ID NO: 183667 - RNA, 22 nt, Human
acucauguccuaggaguaaagc

SEQ ID NO: 183668 - RNA, 17 nt, Human
uguagcuucuccuucuc

SEQ ID NO: 183669 - RNA, 22 nt, Human
uugguuuaucuguggaucucuu

SEQ ID NO: 183670 - RNA, 22 nt, Human
agcagguggacagaggaagaaa

SEQ ID NO: 183671 - RNA, 22 nt, Human
cagccacuguggucuagcugca

SEQ ID NO: 183672 - RNA, 22 nt, Human
caugacccauuuuucuugcugu

SEQ ID NO: 183673 - RNA, 22 nt, Human
ucuucacaggagccugccugcc

SEQ ID NO: 183674 - RNA, 22 nt, Human
gugguacagcugaaaggcuugc

SEQ ID NO: 183675 - RNA, 19 nt, Human
cagaugagaaaagugaggu

SEQ ID NO: 183676 - RNA, 17 nt, Human
agccugggaaggaguga

SEQ ID NO: 183677 - RNA, 22 nt, Human
uuauucagauuggcuacaggau

SEQ ID NO: 183678 - RNA, 22 nt, Human
agagggcccauguugggcugcu

SEQ ID NO: 183679 - RNA, 22 nt, Human
cacagcagaaaguguaggagga

SEQ ID NO: 183680 - RNA, 23 nt, Human
gccuuggagaagucacucaggga

SEQ ID NO: 183681 - RNA, 22 nt, Human
ggucccaggaaucuguguucua

SEQ ID NO: 183682 - RNA, 22 nt, Human
ugcugaaacaauaacauacugg

SEQ ID NO: 183683 - RNA, 22 nt, Human
aggacccagaaggugcagcaga

SEQ ID NO: 183684 - RNA, 21 nt, Human
ccucuguaguuaaguuuccua

SEQ ID NO: 183685 - RNA, 22 nt, Human
gcagagugagauaugaacccag

SEQ ID NO: 183686 - RNA, 22 nt, Human
ugagcuggagucuguggcuccu

SEQ ID NO: 183687 - RNA, 20 nt, Human
gugguauucaguaacaguga

SEQ ID NO: 183688 - RNA, 17 nt, Human
cagguauuuaggcauug

SEQ ID NO: 183689 - RNA, 22 nt, Human
acaacaguaggaaaacaugucu

SEQ ID NO: 183690 - RNA, 22 nt, Human
cccugguucagguuucucugaa

SEQ ID NO: 183691 - RNA, 22 nt, Human
ccaggcuagagugcaguggcgu

SEQ ID NO: 183692 - RNA, 22 nt, Human
ugcagccccuaucgcggacagg

SEQ ID NO: 183693 - RNA, 22 nt, Human
uacagggauuguuuuaaucacc

SEQ ID NO: 183694 - RNA, 22 nt, Human
caggcccugggcaggaucagcc

SEQ ID NO: 183695 - RNA, 22 nt, Human
aacaugcugccuuucuacgagu

SEQ ID NO: 183696 - RNA, 22 nt, Human
ugucagcaugaacccugaauua

SEQ ID NO: 183697 - RNA, 22 nt, Human
guucuucagauuccauuucagu

SEQ ID NO: 183698 - RNA, 22 nt, Human
acaggcagcacuaaucucuggu

SEQ ID NO: 183699 - RNA, 23 nt, Human
agcagcuguggaguuuugcauuu

SEQ ID NO: 183700 - RNA, 22 nt, Human
uagaaacucacguuaucauugc

SEQ ID NO: 183701 - RNA, 22 nt, Human
aaagcaggguccaaggagaugu

SEQ ID NO: 183702 - RNA, 22 nt, Human
uauuucuugaguggucaguuuc

SEQ ID NO: 183703 - RNA, 22 nt, Human
uuccaugccucuauuuagaauu

SEQ ID NO: 183704 - RNA, 22 nt, Human
augcagcugugggcaagaaaug

SEQ ID NO: 183705 - RNA, 22 nt, Human
agugauuugcaguauuuacuaa

SEQ ID NO: 183706 - RNA, 22 nt, Human
aggaaccagacagaacugaaug

SEQ ID NO: 183707 - RNA, 22 nt, Human
uuuucuucuaccugcuguccaa

SEQ ID NO: 183708 - RNA, 22 nt, Human
uccucagauaccuggcagauca

SEQ ID NO: 183709 - RNA, 21 nt, Human
aguuugaugcaauuucugaga

SEQ ID NO: 183710 - RNA, 22 nt, Human
uggcagguagucagaggcgaca

SEQ ID NO: 183711 - RNA, 22 nt, Human
uuuaguuuuaacugaaagcuau

SEQ ID NO: 183712 - RNA, 22 nt, Human
uugcagagcaguaggaauauag

SEQ ID NO: 183713 - RNA, 22 nt, Human
gagguggcccuugcucagccuu

SEQ ID NO: 183714 - RNA, 21 nt, Human
aggaaaggccagcacguaggg

SEQ ID NO: 183715 - RNA, 22 nt, Human
caggaauaguggagcaacaaga

SEQ ID NO: 183716 - RNA, 22 nt, Human
aggcccagacucagcggggcgg

SEQ ID NO: 183717 - RNA, 22 nt, Human
ccugagcuagggaaggaagacc

SEQ ID NO: 183718 - RNA, 22 nt, Human
agcaacagaagauagagugaau

SEQ ID NO: 183719 - RNA, 17 nt, Human
acagagcacaucaagau

SEQ ID NO: 183720 - RNA, 22 nt, Human
gaaggccuaggaaggaagccuu

SEQ ID NO: 183721 - RNA, 22 nt, Human
uaugaacacacuuuggaaguga

SEQ ID NO: 183722 - RNA, 22 nt, Human
cuguccuuacugcuucuggcuu

SEQ ID NO: 183723 - RNA, 22 nt, Human
cuggcuuuaacccuacaaaccu

SEQ ID NO: 183724 - RNA, 22 nt, Human
uccuggugcugacacccauagc

SEQ ID NO: 183725 - RNA, 18 nt, Human
gcuggcuugcuggguuug

SEQ ID NO: 183726 - RNA, 22 nt, Human
ggagacagcaggaagaaauauc

SEQ ID NO: 183727 - RNA, 22 nt, Human
caggucccguuccccagagauu

SEQ ID NO: 183728 - RNA, 22 nt, Human
aggaggaaaaaggccacagcaa

SEQ ID NO: 183729 - RNA, 22 nt, Human
ccacugccuauuugcagggccc

SEQ ID NO: 183730 - RNA, 22 nt, Human
cagcugggcuaagaguagaggc

SEQ ID NO: 183731 - RNA, 23 nt, Human
ggagugugaagaccugauauagc

SEQ ID NO: 183732 - RNA, 22 nt, Human
ggagggagucagcugauuagaa

SEQ ID NO: 183733 - RNA, 22 nt, Human
accagcacggauuagaaugcuu

SEQ ID NO: 183734 - RNA, 22 nt, Human
ccuugagacacagccaaagaug

SEQ ID NO: 183735 - RNA, 22 nt, Human
ccugccagacgcaccagggggc

SEQ ID NO: 183736 - RNA, 22 nt, Human
uguguaaauuuauuuacauaaa

SEQ ID NO: 183737 - RNA, 22 nt, Human
ugauuacaauugucuuagauuu

SEQ ID NO: 183738 - RNA, 22 nt, Human
gauggcaggcaggugaguagag

SEQ ID NO: 183739 - RNA, 22 nt, Human
cccagagggaagggaaugaggu

SEQ ID NO: 183740 - RNA, 23 nt, Human
uuugaaguugacugccuuccaga

SEQ ID NO: 183741 - RNA, 22 nt, Human
uggcagggccugcucaucaucc

SEQ ID NO: 183742 - RNA, 22 nt, Human
gugaccauuugacauauccuug

SEQ ID NO: 183743 - RNA, 22 nt, Human
auucucagggaguauuuucuau

SEQ ID NO: 183744 - RNA, 22 nt, Human
ccucugggcugccugcacgggu

SEQ ID NO: 183745 - RNA, 22 nt, Human
agagcaauggcauccagcugau

SEQ ID NO: 183746 - RNA, 22 nt, Human
guacucaguaauauaacauauu

SEQ ID NO: 183747 - RNA, 22 nt, Human
uugccaggagacaaagugggcc

SEQ ID NO: 183748 - RNA, 22 nt, Human
uagcagcugcaucauuuuacag

SEQ ID NO: 183749 - RNA, 23 nt, Human
uccuccagaggcccuccuuggcc

SEQ ID NO: 183750 - RNA, 22 nt, Human
uacaguaccagaaaugcuaaga

SEQ ID NO: 183751 - RNA, 22 nt, Human
ccugggucuugguucaugcucu

SEQ ID NO: 183752 - RNA, 22 nt, Human
ucucugggaguugagcagcagc

SEQ ID NO: 183753 - RNA, 22 nt, Human
gaccuggccugcacagcccuua

SEQ ID NO: 183754 - RNA, 22 nt, Human
gaauauauuggugaaaauaguu

SEQ ID NO: 183755 - RNA, 22 nt, Human
ucacuuuacagcuaagguuguu

SEQ ID NO: 183756 - RNA, 20 nt, Human
ggccauggguugccugaggu

SEQ ID NO: 183757 - RNA, 22 nt, Human
aaggcauacauauuguuauagg

SEQ ID NO: 183758 - RNA, 22 nt, Human
aaggaaccuggaguagagggag

SEQ ID NO: 183759 - RNA, 22 nt, Human
aggccuccuggcuccaggccuu

SEQ ID NO: 183760 - RNA, 22 nt, Human
gccugugcuguucccucugcca

SEQ ID NO: 183761 - RNA, 22 nt, Human
aagggcuguuauguuuuuauac

SEQ ID NO: 183762 - RNA, 22 nt, Human
agaaguauuuggcuaaaagaca

SEQ ID NO: 183763 - RNA, 22 nt, Human
uugaggcagggcaugguggccc

SEQ ID NO: 183764 - RNA, 22 nt, Human
gccagccugugcuuggccaggc

SEQ ID NO: 183765 - RNA, 22 nt, Human
ugauagaagcagaagcauacca

SEQ ID NO: 183766 - RNA, 22 nt, Human
cagauuaguugugcuauggccu

SEQ ID NO: 183767 - RNA, 18 nt, Human
gcccugguggagcuggug

SEQ ID NO: 183768 - RNA, 22 nt, Human
uaagacagggucuauucuuagu

SEQ ID NO: 183769 - RNA, 22 nt, Human
uaaaacugcuugguauggucua

SEQ ID NO: 183770 - RNA, 22 nt, Human
caaaauugaugaauguaugauu

SEQ ID NO: 183771 - RNA, 22 nt, Human
cuggcacaacuccaccucagcg

SEQ ID NO: 183772 - RNA, 22 nt, Human
uccugggaacucggaaagcucu

SEQ ID NO: 183773 - RNA, 22 nt, Human
gcugagggggaaggaaagcuga

SEQ ID NO: 183774 - RNA, 22 nt, Human
ggaacugaggaacgaacuggga

SEQ ID NO: 183775 - RNA, 19 nt, Human
auguucuauccuccaaguu

SEQ ID NO: 183776 - RNA, 22 nt, Human
ccuuggcuugcacacggccacc

SEQ ID NO: 183777 - RNA, 15 nt, Human
gaggccaggcaugug

SEQ ID NO: 183778 - RNA, 22 nt, Human
aguagcagugacagcugaggua

SEQ ID NO: 183779 - RNA, 22 nt, Human
gggcuccagcagaggcagccgg

SEQ ID NO: 183780 - RNA, 20 nt, Human
ucacucugaugcuagggugg

SEQ ID NO: 183781 - RNA, 22 nt, Human
agaagauuauuagagacuuugu

SEQ ID NO: 183782 - RNA, 22 nt, Human
cucacaggguucuaucgaagag

SEQ ID NO: 183783 - RNA, 23 nt, Human
ggccucagcgcacagaaacugcu

SEQ ID NO: 183784 - RNA, 22 nt, Human
uagcugaauauaggcacaacag

SEQ ID NO: 183785 - RNA, 22 nt, Human
ggagaaugauauauagcucagu

SEQ ID NO: 183786 - RNA, 22 nt, Human
gaggacagagccgccuggcaag

SEQ ID NO: 183787 - RNA, 22 nt, Human
agacagugagaaugaguugaaa

SEQ ID NO: 183788 - RNA, 22 nt, Human
uuguacaacacauauucuacag

SEQ ID NO: 183789 - RNA, 19 nt, Human
gcccaggggcccgaugcug

SEQ ID NO: 183790 - RNA, 22 nt, Human
ccuggcuccugccucugcaggg

SEQ ID NO: 183791 - RNA, 23 nt, Human
uagagcagggaaaucugucagag

SEQ ID NO: 183792 - RNA, 22 nt, Human
cagcugucuggggagugcucgc

SEQ ID NO: 183793 - RNA, 22 nt, Human
aaauggauggaauugacauuua

SEQ ID NO: 183794 - RNA, 22 nt, Human
augguuuauuagcugcacaggc

SEQ ID NO: 183795 - RNA, 22 nt, Human
ggauguuuggcguuugaauugc

SEQ ID NO: 183796 - RNA, 22 nt, Human
auagggcaguggcaucucuuaa

SEQ ID NO: 183797 - RNA, 21 nt, Human
cugcuuccucucuucauggca

SEQ ID NO: 183798 - RNA, 22 nt, Human
cagggcuggcuguggcaaucuc

SEQ ID NO: 183799 - RNA, 22 nt, Human
auucuauagacagaaggucaau

SEQ ID NO: 183800 - RNA, 18 nt, Human
uggggggcuugucugaag

SEQ ID NO: 183801 - RNA, 22 nt, Human
cuucuggcaaucccagggucuu

SEQ ID NO: 183802 - RNA, 22 nt, Human
uguuccugaaugccuggcuggc

SEQ ID NO: 183803 - RNA, 22 nt, Human
caucauaauaacccagacacag

SEQ ID NO: 183804 - RNA, 22 nt, Human
ugugugcauguuaaugagaaaa

SEQ ID NO: 183805 - RNA, 22 nt, Human
ggcaaaguuuucaucucauaac

SEQ ID NO: 183806 - RNA, 22 nt, Human
uccagcccugcuuccugccuca

SEQ ID NO: 183807 - RNA, 22 nt, Human
ggucuggccucgggcaccccca

SEQ ID NO: 183808 - RNA, 22 nt, Human
ugcuuucugcucuggaaacagg

SEQ ID NO: 183809 - RNA, 19 nt, Human
cagcugcaccgugaccauc

SEQ ID NO: 183810 - RNA, 22 nt, Human
cucagccaugggguggaucagc

SEQ ID NO: 183811 - RNA, 19 nt, Human
gggcaguggcacuagggag

SEQ ID NO: 183812 - RNA, 22 nt, Human
acaagcgggccacagugcuggu

SEQ ID NO: 183813 - RNA, 22 nt, Human
uggagaugccuggagauuaggg

SEQ ID NO: 183814 - RNA, 22 nt, Human
gucuucaacaauaacuaccacu

SEQ ID NO: 183815 - RNA, 22 nt, Human
acugggcccagugguguggcug

SEQ ID NO: 183816 - RNA, 22 nt, Human
aggaagagcaucuuugggucug

SEQ ID NO: 183817 - RNA, 22 nt, Human
guagggcauguaagucaccaua

SEQ ID NO: 183818 - RNA, 22 nt, Human
aauguuuuauagcucaagcaau

SEQ ID NO: 183819 - RNA, 22 nt, Human
ucccugcuugcucucagcccuu

SEQ ID NO: 183820 - RNA, 22 nt, Human
gcagcucaaaggccacggacgg

SEQ ID NO: 183821 - RNA, 22 nt, Human
gucuuucucuggaacaguaaaa

SEQ ID NO: 183822 - RNA, 22 nt, Human
gagaaaaucuugggucaagaau

SEQ ID NO: 183823 - RNA, 22 nt, Human
cccagagcugauuguuggagcc

SEQ ID NO: 183824 - RNA, 22 nt, Human
agaaucaggaccuguggcuguc

SEQ ID NO: 183825 - RNA, 22 nt, Human
cuguccauggugcuggacgguc

SEQ ID NO: 183826 - RNA, 22 nt, Human
gaggccagaugucaugucuuau

SEQ ID NO: 183827 - RNA, 21 nt, Human
gauuuuaaagagacugccaca

SEQ ID NO: 183828 - RNA, 23 nt, Human
auccacauuacaguaucauacaa

SEQ ID NO: 183829 - RNA, 22 nt, Human
ggagccugacagugcccagcau

SEQ ID NO: 183830 - RNA, 22 nt, Human
uaucuguauccccaucuagcua

SEQ ID NO: 183831 - RNA, 22 nt, Human
gcccuucaguuacuccuugaug

SEQ ID NO: 183832 - RNA, 22 nt, Human
cuacaugaaaauaaguuugaaa

SEQ ID NO: 183833 - RNA, 22 nt, Human
aauuccaagagcuuccuaagug

SEQ ID NO: 183834 - RNA, 22 nt, Human
gugucuuuugaggcugaccagu

SEQ ID NO: 183835 - RNA, 22 nt, Human
augcacccagugucuggacuau

SEQ ID NO: 183836 - RNA, 22 nt, Human
gaugauuccuuuguucauugug

SEQ ID NO: 183837 - RNA, 23 nt, Human
uggucugaagccucagguuccuc

SEQ ID NO: 183838 - RNA, 22 nt, Human
cuuguauucuuguaccuuucaa

SEQ ID NO: 183839 - RNA, 23 nt, Human
caggagauggcugcugugucagc

SEQ ID NO: 183840 - RNA, 22 nt, Human
gguccagggaacuuugaaggau

SEQ ID NO: 183841 - RNA, 20 nt, Human
caccuucaaauuuccuggca

SEQ ID NO: 183842 - RNA, 22 nt, Human
acaugcuguccugucuuuguca

SEQ ID NO: 183843 - RNA, 22 nt, Human
cugcaucuuagucaaaaucugu

SEQ ID NO: 183844 - RNA, 22 nt, Human
gcacccagggacuuggcuggcc

SEQ ID NO: 183845 - RNA, 22 nt, Human
guagcaacuguagcccaaauuc

SEQ ID NO: 183846 - RNA, 21 nt, Human
cucaaaugccaguuuuauuua

SEQ ID NO: 183847 - RNA, 21 nt, Human
ugucugauguauuuuuugccu

SEQ ID NO: 183848 - RNA, 22 nt, Human
ugagcccugaggaucuguucgg

SEQ ID NO: 183849 - RNA, 22 nt, Human
ggccucgcggcuucugguggcu

SEQ ID NO: 183850 - RNA, 22 nt, Human
uccacaggcaagucucuuggca

SEQ ID NO: 183851 - RNA, 22 nt, Human
acugggccugauugggucggag

SEQ ID NO: 183852 - RNA, 22 nt, Human
cugcaggguucggagaguuccc

SEQ ID NO: 183853 - RNA, 22 nt, Human
cagcuucuccagaugacccuca

SEQ ID NO: 183854 - RNA, 22 nt, Human
uggcuugguaaggaccagcagg

SEQ ID NO: 183855 - RNA, 22 nt, Human
uccaggucaucuuggagagcug

SEQ ID NO: 183856 - RNA, 22 nt, Human
cagggcucccucuggcucccag

SEQ ID NO: 183857 - RNA, 22 nt, Human
aggaugagccgcgcaagcugac

SEQ ID NO: 183858 - RNA, 22 nt, Human
agagugggccuagcuguaaaag

SEQ ID NO: 183859 - RNA, 22 nt, Human
uucuaaaaccaauucugcuucu

SEQ ID NO: 183860 - RNA, 22 nt, Human
aaaguaguuagucaugugaaaa

SEQ ID NO: 183861 - RNA, 22 nt, Human
uguguguguuuacaguuucuca

SEQ ID NO: 183862 - RNA, 22 nt, Human
cucccugaguuuguggcuaagu

SEQ ID NO: 183863 - RNA, 21 nt, Human
ccucagucucccugcuccacu

SEQ ID NO: 183864 - RNA, 22 nt, Human
ccaaggacuggacacacagguu

SEQ ID NO: 183865 - RNA, 18 nt, Human
gguggcucagucaugggg

SEQ ID NO: 183866 - RNA, 22 nt, Human
ccagcccugucaccaacuggag

SEQ ID NO: 183867 - RNA, 22 nt, Human
ggccagcugggccaccaggugc

SEQ ID NO: 183868 - RNA, 22 nt, Human
acagauuauggauauaugugga

SEQ ID NO: 183869 - RNA, 22 nt, Human
ugcagugguugagagcccagac

SEQ ID NO: 183870 - RNA, 22 nt, Human
uggauaaaacguucugaaaaac

SEQ ID NO: 183871 - RNA, 22 nt, Human
caagauaauuuauucugaguuu

SEQ ID NO: 183872 - RNA, 22 nt, Human
agcugggaugaggagcauccuu

SEQ ID NO: 183873 - RNA, 22 nt, Human
ggaagacugcauggcauaguga

SEQ ID NO: 183874 - RNA, 22 nt, Human
ugcuuuauucccuucugaugug

SEQ ID NO: 183875 - RNA, 22 nt, Human
augguuuacugaucuuuuuggu

SEQ ID NO: 183876 - RNA, 20 nt, Human
ggccuuagggagggcuguaa

SEQ ID NO: 183877 - RNA, 22 nt, Human
uccaggccaggguaagaggaga

SEQ ID NO: 183878 - RNA, 22 nt, Human
ucagggaggugucugccagaga

SEQ ID NO: 183879 - RNA, 22 nt, Human
agaaucaauuagauucuaugag

SEQ ID NO: 183880 - RNA, 22 nt, Human
ugacaauucauuauaucuacag

SEQ ID NO: 183881 - RNA, 22 nt, Human
ugagacgaagucuugcucuguu

SEQ ID NO: 183882 - RNA, 22 nt, Human
ucccagagccaagcuauggaug

SEQ ID NO: 183883 - RNA, 20 nt, Human
cucuccucacccgugucagg

SEQ ID NO: 183884 - RNA, 22 nt, Human
auauuuucacagaacuugcaaa

SEQ ID NO: 183885 - RNA, 22 nt, Human
gcuguggcggcagcagcuggug

SEQ ID NO: 183886 - RNA, 22 nt, Human
aacugaggccaagugaggaaag

SEQ ID NO: 183887 - RNA, 22 nt, Human
uugggccugggguagugucgga

SEQ ID NO: 183888 - RNA, 22 nt, Human
uuguauuucuccacuuucuguu

SEQ ID NO: 183889 - RNA, 22 nt, Human
cccagacagugauuuacuuaau

SEQ ID NO: 183890 - RNA, 20 nt, Human
cagaggcauuuucagacucu

SEQ ID NO: 183891 - RNA, 23 nt, Human
augcaacauugccaguaugggca

SEQ ID NO: 183892 - RNA, 22 nt, Human
aagggacccuggaucaaaugga

SEQ ID NO: 183893 - RNA, 23 nt, Human
ucugaaagggaugcugggcagga

SEQ ID NO: 183894 - RNA, 22 nt, Human
cuccaggagggggauggcugua

SEQ ID NO: 183895 - RNA, 22 nt, Human
ugagcagaaaagaaugcugagc

SEQ ID NO: 183896 - RNA, 21 nt, Human
caggcucugcugggugcuggg

SEQ ID NO: 183897 - RNA, 22 nt, Human
agcugcugcccauaggugacau

SEQ ID NO: 183898 - RNA, 22 nt, Human
uucauguauuuaucauguaaau

SEQ ID NO: 183899 - RNA, 22 nt, Human
caggaagauuguggaggugguu

SEQ ID NO: 183900 - RNA, 22 nt, Human
uucuguggguaauaccucauac

SEQ ID NO: 183901 - RNA, 20 nt, Human
uggcuccagccuccccuacc

SEQ ID NO: 183902 - RNA, 22 nt, Human
gccaggaauuucaagagccacu

SEQ ID NO: 183903 - RNA, 22 nt, Human
aggggaauggguagacuguuga

SEQ ID NO: 183904 - RNA, 22 nt, Human
aauaucugucucuaaugcauau

SEQ ID NO: 183905 - RNA, 22 nt, Human
cagugcugggcagaggagagcg

SEQ ID NO: 183906 - RNA, 22 nt, Human
auagcaaaacccacugcauuac

SEQ ID NO: 183907 - RNA, 22 nt, Human
ugcagagauccuggacugagcg

SEQ ID NO: 183908 - RNA, 22 nt, Human
cuggccugcugggugagguccu

SEQ ID NO: 183909 - RNA, 22 nt, Human
gcaaaaaaugcuuguugcuuag

SEQ ID NO: 183910 - RNA, 20 nt, Human
ucccuccugcagauagagaa

SEQ ID NO: 183911 - RNA, 22 nt, Human
aaacuuuuuauucuaaugucua

SEQ ID NO: 183912 - RNA, 22 nt, Human
acauauuuugaaagcuuucuaa

SEQ ID NO: 183913 - RNA, 22 nt, Human
ucaucucuagacaggaggcugg

SEQ ID NO: 183914 - RNA, 22 nt, Human
acagagagaaacaaucagcagc

SEQ ID NO: 183915 - RNA, 22 nt, Human
gaggucuucacaaagaacagca

SEQ ID NO: 183916 - RNA, 21 nt, Human
aggaggggucuuucccacuga

SEQ ID NO: 183917 - RNA, 22 nt, Human
uuguuucagcccagaucuuuac

SEQ ID NO: 183918 - RNA, 22 nt, Human
aagaaucucucuacuuuauuac

SEQ ID NO: 183919 - RNA, 22 nt, Human
uugaagagaaucagaagguuga

SEQ ID NO: 183920 - RNA, 22 nt, Human
aggcuccagcccaaggcugcag

SEQ ID NO: 183921 - RNA, 22 nt, Human
ccagacccuuucuuggcaugug

SEQ ID NO: 183922 - RNA, 22 nt, Human
ucugggcagccaugugccuggc

SEQ ID NO: 183923 - RNA, 22 nt, Human
uuucucugggcuguuggcagcc

SEQ ID NO: 183924 - RNA, 22 nt, Human
aggaauguggaagguggcggcg

SEQ ID NO: 183925 - RNA, 22 nt, Human
agagucugaugucaacaguucu

SEQ ID NO: 183926 - RNA, 22 nt, Human
uggaaaacauugagauaccaag

SEQ ID NO: 183927 - RNA, 22 nt, Human
gucugcagacaacuuagaagca

SEQ ID NO: 183928 - RNA, 22 nt, Human
gaaagcauguagccuguaucca

SEQ ID NO: 183929 - RNA, 18 nt, Human
ucacagaauauugagugg

SEQ ID NO: 183930 - RNA, 19 nt, Human
gcaggugugaauccguaga

SEQ ID NO: 183931 - RNA, 19 nt, Human
uuccuggcucuucuguuuu

SEQ ID NO: 183932 - RNA, 22 nt, Human
ucugagaacuccggguuagauc

SEQ ID NO: 183933 - RNA, 23 nt, Human
ucacaggggccagcgcucugugg

SEQ ID NO: 183934 - RNA, 22 nt, Human
cuguggccuuggaccagcaucu

SEQ ID NO: 183935 - RNA, 22 nt, Human
agcugggugaaggcagauggcu

SEQ ID NO: 183936 - RNA, 22 nt, Human
cagcuagcuucccugcagugcu

SEQ ID NO: 183937 - RNA, 22 nt, Human
acaguggaagcaugaugcuauc

SEQ ID NO: 183938 - RNA, 22 nt, Human
ucaaagcagcacauucgcaagc

SEQ ID NO: 183939 - RNA, 19 nt, Human
ucuuucauuucuagcucug

SEQ ID NO: 183940 - RNA, 22 nt, Human
cugaagcagauguggcugagau

SEQ ID NO: 183941 - RNA, 22 nt, Human
ugcaaauuuaaugaaacuaugu

SEQ ID NO: 183942 - RNA, 22 nt, Human
aaagucaguuggccagaucacu

SEQ ID NO: 183943 - RNA, 18 nt, Human
auggucucauacugggag

SEQ ID NO: 183944 - RNA, 22 nt, Human
uuccuuguaagaccuauuuuug

SEQ ID NO: 183945 - RNA, 19 nt, Human
cagauguuuucaguucauu

SEQ ID NO: 183946 - RNA, 22 nt, Human
gcuggcaggguucucacugaaa

SEQ ID NO: 183947 - RNA, 22 nt, Human
acccaggcuggagugcaguguc

SEQ ID NO: 183948 - RNA, 22 nt, Human
acugaaguccacacauguagga

SEQ ID NO: 183949 - RNA, 22 nt, Human
aagauguuauugucuuccuugc

SEQ ID NO: 183950 - RNA, 22 nt, Human
ucccucagggugcaguugcuuu

SEQ ID NO: 183951 - RNA, 22 nt, Human
uccuggccuugcgucuugggag

SEQ ID NO: 183952 - RNA, 22 nt, Human
cacagggcuuugauggcugagu

SEQ ID NO: 183953 - RNA, 22 nt, Human
ugcucuguccagugcaccauca

SEQ ID NO: 183954 - RNA, 22 nt, Human
uccugcccagagcucuccacuc

SEQ ID NO: 183955 - RNA, 22 nt, Human
aggcuccucggggcugacggcg

SEQ ID NO: 183956 - RNA, 22 nt, Human
uucucaggugaggcugaggcug

SEQ ID NO: 183957 - RNA, 22 nt, Human
gaaauuaagcaggggucugugg

SEQ ID NO: 183958 - RNA, 22 nt, Human
agugcucacucuccacagugcc

SEQ ID NO: 183959 - RNA, 22 nt, Human
aggaagcaguuuauaaugcauu

SEQ ID NO: 183960 - RNA, 22 nt, Human
ugucucugcuuuccuugcaggg

SEQ ID NO: 183961 - RNA, 22 nt, Human
ccugccuggcugucagcagagc

SEQ ID NO: 183962 - RNA, 22 nt, Human
agugucugcuuugagucaggug

SEQ ID NO: 183963 - RNA, 19 nt, Human
gacucacaccuuccgcugu

SEQ ID NO: 183964 - RNA, 22 nt, Human
cugaggacauugaugaggcaau

SEQ ID NO: 183965 - RNA, 22 nt, Human
uuccaagugaaaguagcuuugu

SEQ ID NO: 183966 - RNA, 22 nt, Human
gagaggcuccgccacugcucag

SEQ ID NO: 183967 - RNA, 22 nt, Human
cuggcaggaaguuagaugguaa

SEQ ID NO: 183968 - RNA, 22 nt, Human
auauauuacaaaagaggaagga

SEQ ID NO: 183969 - RNA, 22 nt, Human
caccauaaaaauaagagaugcc

SEQ ID NO: 183970 - RNA, 22 nt, Human
caaguauuugcggaguuccacg

SEQ ID NO: 183971 - RNA, 22 nt, Human
gcugucugcaucucuagagcuu

SEQ ID NO: 183972 - RNA, 22 nt, Human
uuagaaaggagcuuauuucuuu

SEQ ID NO: 183973 - RNA, 22 nt, Human
ccauuguaaagaguauacuuug

SEQ ID NO: 183974 - RNA, 22 nt, Human
accuugucuuuuauagaacaag

SEQ ID NO: 183975 - RNA, 22 nt, Human
acacuguucuuugcacugagaa

SEQ ID NO: 183976 - RNA, 22 nt, Human
ucacaacaggaaggaccagcug

SEQ ID NO: 183977 - RNA, 22 nt, Human
ucaugaauauugaaugcuucau

SEQ ID NO: 183978 - RNA, 22 nt, Human
uggaaagacauucagccgcugg

SEQ ID NO: 183979 - RNA, 22 nt, Human
aguaaagcagaguugcaguaca

SEQ ID NO: 183980 - RNA, 22 nt, Human
aguuacauauaagaagacagac

SEQ ID NO: 183981 - RNA, 22 nt, Human
agcagggcuucugugccugugc

SEQ ID NO: 183982 - RNA, 22 nt, Human
aucauuugaacagaauuuguuu

SEQ ID NO: 183983 - RNA, 22 nt, Human
ccagcugucugguuccagagcc

SEQ ID NO: 183984 - RNA, 22 nt, Human
cuggagcugccagggcugccgc

SEQ ID NO: 183985 - RNA, 22 nt, Human
cgugagcaaaauggacacuccc

SEQ ID NO: 183986 - RNA, 22 nt, Human
ggcuguggcauuaggugaggcc

SEQ ID NO: 183987 - RNA, 22 nt, Human
uugggaaacaguauagcuaaca

SEQ ID NO: 183988 - RNA, 22 nt, Human
agcugugggccugggagagcug

SEQ ID NO: 183989 - RNA, 22 nt, Human
uugcauuccaugguuuuccuuc

SEQ ID NO: 183990 - RNA, 22 nt, Human
guccuggggauuauagaguguu

SEQ ID NO: 183991 - RNA, 20 nt, Human
cagagcuaucccuuuauuua

SEQ ID NO: 183992 - RNA, 22 nt, Human
ucagggcaggacaguguaggcc

SEQ ID NO: 183993 - RNA, 22 nt, Human
cauaaauucaguucugccucuu

SEQ ID NO: 183994 - RNA, 22 nt, Human
ugaggccugucauugucuuguu

SEQ ID NO: 183995 - RNA, 22 nt, Human
gugacccagguagguaagcaau

SEQ ID NO: 183996 - RNA, 22 nt, Human
cacugggcaauucugagccuaa

SEQ ID NO: 183997 - RNA, 22 nt, Human
agauuuacuggagucuuuggug

SEQ ID NO: 183998 - RNA, 22 nt, Human
acuuucuucuacuacuuggaga

SEQ ID NO: 183999 - RNA, 22 nt, Human
uuuguaaauagcaguacucaug

SEQ ID NO: 184000 - RNA, 19 nt, Human
cuggcuucaagcaguccuc

SEQ ID NO: 184001 - RNA, 22 nt, Human
cuccugggucauugccagcaaa

SEQ ID NO: 184002 - RNA, 22 nt, Human
acagcagguagcuuugugccuc

SEQ ID NO: 184003 - RNA, 22 nt, Human
aacugguaucucuucaguguaa

SEQ ID NO: 184004 - RNA, 22 nt, Human
augugcaaaguaaaguaauuuu

SEQ ID NO: 184005 - RNA, 22 nt, Human
uuucacauuuguuuuaagaagu

SEQ ID NO: 184006 - RNA, 18 nt, Human
auaauaggagauaaaaau

SEQ ID NO: 184007 - RNA, 21 nt, Human
agcaccaguuuuaugccaggc

SEQ ID NO: 184008 - RNA, 22 nt, Human
uccugggccaagggcugugagg

SEQ ID NO: 184009 - RNA, 22 nt, Human
uuacaaagagaaguuguagaau

SEQ ID NO: 184010 - RNA, 22 nt, Human
aguuuauucugcuuggcccucc

SEQ ID NO: 184011 - RNA, 22 nt, Human
ucuggcucacuucaggcuucac

SEQ ID NO: 184012 - RNA, 22 nt, Human
aaguacauguuguucaaaagcc

SEQ ID NO: 184013 - RNA, 22 nt, Human
gauggccuggguccccuuccgg

SEQ ID NO: 184014 - RNA, 22 nt, Human
gaacuauaucuucaagaaaaug

SEQ ID NO: 184015 - RNA, 22 nt, Human
uuagaaucuuuagagucucacu

SEQ ID NO: 184016 - RNA, 22 nt, Human
uucuuuccucccagccuuugga

SEQ ID NO: 184017 - RNA, 22 nt, Human
auaauggauucagaaccgucaa

SEQ ID NO: 184018 - RNA, 22 nt, Human
aagcagggcucccuggggacuc

SEQ ID NO: 184019 - RNA, 22 nt, Human
ggccagguggcuguccuggcgu

SEQ ID NO: 184020 - RNA, 22 nt, Human
agguggggcugggaaagauucc

SEQ ID NO: 184021 - RNA, 22 nt, Human
acagauggcaccuuuuugcugu

SEQ ID NO: 184022 - RNA, 19 nt, Human
aagcauggugccucaccuc

SEQ ID NO: 184023 - RNA, 22 nt, Human
aguuucuugaagacugauguuu

SEQ ID NO: 184024 - RNA, 22 nt, Human
acagaauacuacagacugguua

SEQ ID NO: 184025 - RNA, 17 nt, Human
ucuccuggcucuaucag

SEQ ID NO: 184026 - RNA, 19 nt, Human
aagaagcaauaagcuguga

SEQ ID NO: 184027 - RNA, 22 nt, Human
uacaugcaauuaagagggugaa

SEQ ID NO: 184028 - RNA, 22 nt, Human
ugcuucucccaaccagggccug

SEQ ID NO: 184029 - RNA, 22 nt, Human
ucugggaacgaaggcuaauaug

SEQ ID NO: 184030 - RNA, 18 nt, Human
gaugaggcugucugagaa

SEQ ID NO: 184031 - RNA, 22 nt, Human
uaauacuugucauaaaggcauu

SEQ ID NO: 184032 - RNA, 22 nt, Human
cugaggccuaagacaugaauga

SEQ ID NO: 184033 - RNA, 22 nt, Human
uagcaaaggccuuggacacgcu

SEQ ID NO: 184034 - RNA, 22 nt, Human
uccuggcccuguggccugcagu

SEQ ID NO: 184035 - RNA, 22 nt, Human
gagaaucuuuccccacagaagg

SEQ ID NO: 184036 - RNA, 22 nt, Human
ccaggauggggagcagauagaa

SEQ ID NO: 184037 - RNA, 22 nt, Human
ucugaaagcauaauuuguccca

SEQ ID NO: 184038 - RNA, 23 nt, Human
aucucucugguggucacagucag

SEQ ID NO: 184039 - RNA, 19 nt, Human
gccagcagaaugaugaggc

SEQ ID NO: 184040 - RNA, 22 nt, Human
ccuccuagaggaaccccagggc

SEQ ID NO: 184041 - RNA, 20 nt, Human
uuagaaguggcuauuuccuc

SEQ ID NO: 184042 - RNA, 22 nt, Human
uaacugguccucggauguugug

SEQ ID NO: 184043 - RNA, 22 nt, Human
uauuuaaaauagugcuccagca

SEQ ID NO: 184044 - RNA, 20 nt, Human
cccugcagccaugggagugg

SEQ ID NO: 184045 - RNA, 22 nt, Human
gucccuggaauggacucugcgc

SEQ ID NO: 184046 - RNA, 22 nt, Human
ugccugccaggcaaccugggag

SEQ ID NO: 184047 - RNA, 22 nt, Human
gacaucugaggcccucagagcc

SEQ ID NO: 184048 - RNA, 22 nt, Human
caagauuuguauugggccucug

SEQ ID NO: 184049 - RNA, 22 nt, Human
gccagagcuucccccgagugug

SEQ ID NO: 184050 - RNA, 22 nt, Human
cuuugcauucucagcacagagc

SEQ ID NO: 184051 - RNA, 23 nt, Human
ugcugcccacucuuccagcccuc

SEQ ID NO: 184052 - RNA, 22 nt, Human
aaagacagauggcaaggaugau

SEQ ID NO: 184053 - RNA, 22 nt, Human
caggcuugcugcuagagcacuu

SEQ ID NO: 184054 - RNA, 19 nt, Human
auuuggaaauaaggucuuc

SEQ ID NO: 184055 - RNA, 22 nt, Human
ucagaggcuugaagcccaagcc

SEQ ID NO: 184056 - RNA, 20 nt, Human
ccugcugugcuuuccaugga

SEQ ID NO: 184057 - RNA, 22 nt, Human
uggcaggagguuuucuccagga

SEQ ID NO: 184058 - RNA, 23 nt, Human
ugucuccaucucauuacuugggg

SEQ ID NO: 184059 - RNA, 22 nt, Human
auccugggaagcugacauugaa

SEQ ID NO: 184060 - RNA, 22 nt, Human
gaaccugcuuccuuuuauauua

SEQ ID NO: 184061 - RNA, 22 nt, Human
ggaccaggggcgcacucccugc

SEQ ID NO: 184062 - RNA, 22 nt, Human
ccagaagaggacacagugugga

SEQ ID NO: 184063 - RNA, 22 nt, Human
aucuaagaggaugguuggaaau

SEQ ID NO: 184064 - RNA, 23 nt, Human
ucucugugugccucaguuucuuc

SEQ ID NO: 184065 - RNA, 22 nt, Human
cacugguguauuagagcuagaa

SEQ ID NO: 184066 - RNA, 22 nt, Human
ccccacccucgcuccauuucgg

SEQ ID NO: 184067 - RNA, 22 nt, Human
cauguaaagcauccuucuaggg

SEQ ID NO: 184068 - RNA, 22 nt, Human
gcuggccaaaguguaccuggag

SEQ ID NO: 184069 - RNA, 22 nt, Human
aaacuugaggcaaugaaggugu

SEQ ID NO: 184070 - RNA, 22 nt, Human
uaacauugucaguucaacugcu

SEQ ID NO: 184071 - RNA, 22 nt, Human
gcaggcugaugacuggaguugg

SEQ ID NO: 184072 - RNA, 22 nt, Human
aaggguugcaaggucagaggaa

SEQ ID NO: 184073 - RNA, 22 nt, Human
aaaaguauuuuggaucucagau

SEQ ID NO: 184074 - RNA, 22 nt, Human
aguuauauaacuaucuagaugc

SEQ ID NO: 184075 - RNA, 22 nt, Human
uuagaaccacugaagacucaca

SEQ ID NO: 184076 - RNA, 22 nt, Human
aauuucuccaagaaugcuuaga

SEQ ID NO: 184077 - RNA, 22 nt, Human
ucuggcaggguguguauuuaca

SEQ ID NO: 184078 - RNA, 22 nt, Human
ugcuggcuuugcgagaugcauu

SEQ ID NO: 184079 - RNA, 22 nt, Human
auacaaaaauuagccgggagua

SEQ ID NO: 184080 - RNA, 22 nt, Human
gucaggucuuggaagauaggcu

SEQ ID NO: 184081 - RNA, 22 nt, Human
uccuggccacccgacagaaguc

SEQ ID NO: 184082 - RNA, 22 nt, Human
cagaugcuaaguuaucagcagg

SEQ ID NO: 184083 - RNA, 22 nt, Human
gcucugggcugcccucuggaca

SEQ ID NO: 184084 - RNA, 21 nt, Human
uuuguucaggcaaguuacagu

SEQ ID NO: 184085 - RNA, 22 nt, Human
acccugggucauauacagugug

SEQ ID NO: 184086 - RNA, 22 nt, Human
aaauugauguucccaguugaaa

SEQ ID NO: 184087 - RNA, 22 nt, Human
guguguccacacauacauacau

SEQ ID NO: 184088 - RNA, 22 nt, Human
cccuucaagcucucuggguuuu

SEQ ID NO: 184089 - RNA, 22 nt, Human
uuagcgcacaucacagggggaa

SEQ ID NO: 184090 - RNA, 22 nt, Human
gcucaggcaccauaugaugugu

SEQ ID NO: 184091 - RNA, 22 nt, Human
gcuucugucuuagcuaccuccc

SEQ ID NO: 184092 - RNA, 22 nt, Human
ccagaagacaagaauguucuua

SEQ ID NO: 184093 - RNA, 19 nt, Human
cuaaacuuaugugaccaca

SEQ ID NO: 184094 - RNA, 22 nt, Human
auggccucuagcugagaccaau

SEQ ID NO: 184095 - RNA, 22 nt, Human
cacacuugugaccgauauaaug

SEQ ID NO: 184096 - RNA, 22 nt, Human
ugcagggcaucuuugaagugug

SEQ ID NO: 184097 - RNA, 22 nt, Human
acucagagccucgagggacugc

SEQ ID NO: 184098 - RNA, 22 nt, Human
aacaugaaaguugcuaagugca

SEQ ID NO: 184099 - RNA, 22 nt, Human
aguguacauguuuacagcaucu

SEQ ID NO: 184100 - RNA, 22 nt, Human
uuguacaaagauuucacagcuc

SEQ ID NO: 184101 - RNA, 22 nt, Human
gccuuguuucauuacacguggu

SEQ ID NO: 184102 - RNA, 22 nt, Human
agguaaacaggagaaaaugaga

SEQ ID NO: 184103 - RNA, 22 nt, Human
gcucuagcuggcgcugaccugg

SEQ ID NO: 184104 - RNA, 22 nt, Human
gugaggcauugaagaccggaau

SEQ ID NO: 184105 - RNA, 22 nt, Human
ugccugaagcugcauuccuagu

SEQ ID NO: 184106 - RNA, 22 nt, Human
uuuugaaagccagguuuguaug

SEQ ID NO: 184107 - RNA, 20 nt, Human
ggaccagcugucugaggggc

SEQ ID NO: 184108 - RNA, 22 nt, Human
cagcccugccauggagccuccu

SEQ ID NO: 184109 - RNA, 22 nt, Human
ggaggccaagucacugaccugg

SEQ ID NO: 184110 - RNA, 22 nt, Human
cuugccugaggaacagagggua

SEQ ID NO: 184111 - RNA, 22 nt, Human
guagcuucaaguacucucccug

SEQ ID NO: 184112 - RNA, 22 nt, Human
guccugguuuucacagaccuuu

SEQ ID NO: 184113 - RNA, 22 nt, Human
uuugggaacucuaucauggaaa

SEQ ID NO: 184114 - RNA, 22 nt, Human
accuggcauaagggcuugaguc

SEQ ID NO: 184115 - RNA, 22 nt, Human
cacauuucuggaauugacuugg

SEQ ID NO: 184116 - RNA, 22 nt, Human
gcagagcuucuguccuucagga

SEQ ID NO: 184117 - RNA, 22 nt, Human
agaaagcccacccagaagaugu

SEQ ID NO: 184118 - RNA, 22 nt, Human
cuccagggagcuuggaaagacc

SEQ ID NO: 184119 - RNA, 22 nt, Human
caauguaucaaccagaaaguuc

SEQ ID NO: 184120 - RNA, 22 nt, Human
cuggcuuuaaaaugcuccugga

SEQ ID NO: 184121 - RNA, 22 nt, Human
augcuguguuuuaaauggaaau

SEQ ID NO: 184122 - RNA, 19 nt, Human
uaggccagaaguuuuccac

SEQ ID NO: 184123 - RNA, 22 nt, Human
ugggccaggucugugucagcug

SEQ ID NO: 184124 - RNA, 22 nt, Human
cuccugggggacagcggcaggg

SEQ ID NO: 184125 - RNA, 22 nt, Human
gggcagagagcuggaacuccuu

SEQ ID NO: 184126 - RNA, 22 nt, Human
uccugugagcagcacagagaca

SEQ ID NO: 184127 - RNA, 22 nt, Human
uuuggucaggguaggacaguug

SEQ ID NO: 184128 - RNA, 23 nt, Human
ugagaagccauuagagcaggugg

SEQ ID NO: 184129 - RNA, 22 nt, Human
uuaccaagcucugcauguuaag

SEQ ID NO: 184130 - RNA, 22 nt, Human
cugucaaagacuaagguucuua

SEQ ID NO: 184131 - RNA, 22 nt, Human
acuggguguauuagugguguuu

SEQ ID NO: 184132 - RNA, 22 nt, Human
uugaggaggacagaaacauuua

SEQ ID NO: 184133 - RNA, 22 nt, Human
uccauacauugaaauaccauuc

SEQ ID NO: 184134 - RNA, 22 nt, Human
ccaggcccugcuccucacacca

SEQ ID NO: 184135 - RNA, 22 nt, Human
gccaggcucuugguuauguuuu

SEQ ID NO: 184136 - RNA, 22 nt, Human
cagcuuccaucuccacugcccu

SEQ ID NO: 184137 - RNA, 23 nt, Human
ucugugccaguuuccaugucugu

SEQ ID NO: 184138 - RNA, 22 nt, Human
cuaucucuuguuuuccugaagc

SEQ ID NO: 184139 - RNA, 22 nt, Human
cugccucucaggucccugagau

SEQ ID NO: 184140 - RNA, 22 nt, Human
uccugggcuuaagugauccucc

SEQ ID NO: 184141 - RNA, 22 nt, Human
cugggcuuguguuagcugacaa

SEQ ID NO: 184142 - RNA, 22 nt, Human
auuuggcuaccaugaggauggg

SEQ ID NO: 184143 - RNA, 22 nt, Human
ggcuuggaccagucacaguggu

SEQ ID NO: 184144 - RNA, 22 nt, Human
ugacaagagaccccuccgcagg

SEQ ID NO: 184145 - RNA, 22 nt, Human
auggauaaauacuuggugguau

SEQ ID NO: 184146 - RNA, 22 nt, Human
ucccugccaaugauuggagcaa

SEQ ID NO: 184147 - RNA, 22 nt, Human
guccucuggaagaugaguucuu

SEQ ID NO: 184148 - RNA, 22 nt, Human
aggcugagcaaagggccuuacc

SEQ ID NO: 184149 - RNA, 22 nt, Human
uaaaaaguugaaaggacuuauc

SEQ ID NO: 184150 - RNA, 22 nt, Human
acagcaggcccauacuggaagg

SEQ ID NO: 184151 - RNA, 22 nt, Human
aaacuagaaaucagcaagauag

SEQ ID NO: 184152 - RNA, 22 nt, Human
agaaacuauuaugguaaacaaa

SEQ ID NO: 184153 - RNA, 22 nt, Human
uucugcaucugaauuuaaguac

SEQ ID NO: 184154 - RNA, 22 nt, Human
uagauuugauguaagcauaguc

SEQ ID NO: 184155 - RNA, 22 nt, Human
ugaaacauugcacuguaugaau

SEQ ID NO: 184156 - RNA, 22 nt, Human
aguggcuguuccaggugaggac

SEQ ID NO: 184157 - RNA, 22 nt, Human
augucuguacgaguuacaaugg

SEQ ID NO: 184158 - RNA, 22 nt, Human
ccaggaaccgaugaucagaggg

SEQ ID NO: 184159 - RNA, 21 nt, Human
agccugaaucccaccaguuca

SEQ ID NO: 184160 - RNA, 20 nt, Human
cuaaacucugcagauuuagu

SEQ ID NO: 184161 - RNA, 22 nt, Human
ucugcccuuggcucucuuguug

SEQ ID NO: 184162 - RNA, 23 nt, Human
uaggggaaaaaucuucugcaauu

SEQ ID NO: 184163 - RNA, 22 nt, Human
acuguggcaaagaagcaggcuc

SEQ ID NO: 184164 - RNA, 22 nt, Human
acugaaauauuuagaagugaag

SEQ ID NO: 184165 - RNA, 18 nt, Human
guguccuggcugcggcgc

SEQ ID NO: 184166 - RNA, 22 nt, Human
aagauaacaggaggaguuugua

SEQ ID NO: 184167 - RNA, 22 nt, Human
uguguucauguugauucauagc

SEQ ID NO: 184168 - RNA, 22 nt, Human
accaggaggcuacacuguccca

SEQ ID NO: 184169 - RNA, 22 nt, Human
ccagaagucaaugcagauguga

SEQ ID NO: 184170 - RNA, 23 nt, Human
uguccuuuuugaggccuccuccu

SEQ ID NO: 184171 - RNA, 22 nt, Human
cccaguuguugccggcucugga

SEQ ID NO: 184172 - RNA, 22 nt, Human
acaguguuuauguacagauugu

SEQ ID NO: 184173 - RNA, 22 nt, Human
augucugcggcccaggccaggg

SEQ ID NO: 184174 - RNA, 22 nt, Human
uaaggcagauguggaaucaauu

SEQ ID NO: 184175 - RNA, 22 nt, Human
gaacaaacauuuuuggcaguau

SEQ ID NO: 184176 - RNA, 18 nt, Human
cagucuaauucccuuccc

SEQ ID NO: 184177 - RNA, 22 nt, Human
auguggauagcacaggaauggu

SEQ ID NO: 184178 - RNA, 21 nt, Human
gcugggcuccagucugccgcu

SEQ ID NO: 184179 - RNA, 22 nt, Human
acucagcuaaacucagucuaug

SEQ ID NO: 184180 - RNA, 21 nt, Human
uagggcaggcauuggaagaga

SEQ ID NO: 184181 - RNA, 22 nt, Human
auuugaauggcuuaacacaacg

SEQ ID NO: 184182 - RNA, 22 nt, Human
ggacaggcccggggagccugga

SEQ ID NO: 184183 - RNA, 22 nt, Human
gcagcccacagcuggaggccua

SEQ ID NO: 184184 - RNA, 22 nt, Human
agugucugaucaguugacuaga

SEQ ID NO: 184185 - RNA, 22 nt, Human
uugaggaguuaggauguuuaua

SEQ ID NO: 184186 - RNA, 22 nt, Human
aacacaggccagccugugcagu

SEQ ID NO: 184187 - RNA, 22 nt, Human
cuggucagggcucuuugggagc

SEQ ID NO: 184188 - RNA, 22 nt, Human
cugccauguagucuauggggcg

SEQ ID NO: 184189 - RNA, 22 nt, Human
gcaggacaggcguugguccagu

SEQ ID NO: 184190 - RNA, 22 nt, Human
ccccuuccaggaagcagaaucg

SEQ ID NO: 184191 - RNA, 22 nt, Human
ggcuucccagucccugcucuca

SEQ ID NO: 184192 - RNA, 22 nt, Human
ucagaagccaccuuuuguuggg

SEQ ID NO: 184193 - RNA, 22 nt, Human
gagugaguagcuacaguuuuua

SEQ ID NO: 184194 - RNA, 22 nt, Human
ggaucaaagggaaccuguuagg

SEQ ID NO: 184195 - RNA, 22 nt, Human
ucgucugugaaauugggauaag

SEQ ID NO: 184196 - RNA, 22 nt, Human
cagcucagcuuccugggugugu

SEQ ID NO: 184197 - RNA, 22 nt, Human
uccuuggcaagacacagcacag

SEQ ID NO: 184198 - RNA, 22 nt, Human
uggcuuccuguuucccagaaag

SEQ ID NO: 184199 - RNA, 22 nt, Human
ggagaaggcacacccaccucug

SEQ ID NO: 184200 - RNA, 22 nt, Human
uuacauuucccccuuggaggcu

SEQ ID NO: 184201 - RNA, 22 nt, Human
acagugcaaacccucgggaaag

SEQ ID NO: 184202 - RNA, 22 nt, Human
gcagggauugugcagggggcua

SEQ ID NO: 184203 - RNA, 19 nt, Human
ugagccagggaggccaugc

SEQ ID NO: 184204 - RNA, 22 nt, Human
guagaaaaagcaguaagucuca

SEQ ID NO: 184205 - RNA, 22 nt, Human
aauuaggggaggacguaucaua

SEQ ID NO: 184206 - RNA, 22 nt, Human
cugaauuagaugaaaaaggcuc

SEQ ID NO: 184207 - RNA, 22 nt, Human
uggagccuuuuacccacaggag

SEQ ID NO: 184208 - RNA, 22 nt, Human
guggcuucacauggcauuuggc

SEQ ID NO: 184209 - RNA, 22 nt, Human
cugucagguuucccggcucacg

SEQ ID NO: 184210 - RNA, 22 nt, Human
ggcacugggaaugcagugauga

SEQ ID NO: 184211 - RNA, 22 nt, Human
cauuuguuggucagauuguagu

SEQ ID NO: 184212 - RNA, 22 nt, Human
gcuuagaaagugauugauacau

SEQ ID NO: 184213 - RNA, 22 nt, Human
aucauucagucucugggacagu

SEQ ID NO: 184214 - RNA, 22 nt, Human
guaguuauugcuguuuacuucu

SEQ ID NO: 184215 - RNA, 22 nt, Human
aggcaugaugugcaguggcaaa

SEQ ID NO: 184216 - RNA, 22 nt, Human
ucucugggugauggcagggcac

SEQ ID NO: 184217 - RNA, 22 nt, Human
cugagaauggacagcagggcag

SEQ ID NO: 184218 - RNA, 22 nt, Human
auuugcaauuuuacuuugcagu

SEQ ID NO: 184219 - RNA, 22 nt, Human
cuguauaaacauauuuucaagu

SEQ ID NO: 184220 - RNA, 22 nt, Human
uaaaguauccaguuauucuucu

SEQ ID NO: 184221 - RNA, 22 nt, Human
acaugaaacuguugcauuagaa

SEQ ID NO: 184222 - RNA, 22 nt, Human
ugauuucauaguauauacauga

SEQ ID NO: 184223 - RNA, 22 nt, Human
acacauuauaggcaaucaaaag

SEQ ID NO: 184224 - RNA, 21 nt, Human
uucuagaaccgugggcgguuc

SEQ ID NO: 184225 - RNA, 22 nt, Human
cuggcagcagcuucuggaucga

SEQ ID NO: 184226 - RNA, 22 nt, Human
aggcugagcuggcccuugaaau

SEQ ID NO: 184227 - RNA, 19 nt, Human
cuguccugguuuggucccu

SEQ ID NO: 184228 - RNA, 22 nt, Human
ggacacaggcagcugggugggu

SEQ ID NO: 184229 - RNA, 22 nt, Human
ugacauguaagauggaaaagcg

SEQ ID NO: 184230 - RNA, 22 nt, Human
uggcuggcgccgggcuagccac

SEQ ID NO: 184231 - RNA, 22 nt, Human
ucucaaauggacaauauugugg

SEQ ID NO: 184232 - RNA, 22 nt, Human
aggcagcuggaggcagagacua

SEQ ID NO: 184233 - RNA, 22 nt, Human
gcuucuggaagcugcuucugcc

SEQ ID NO: 184234 - RNA, 22 nt, Human
agaagccagauuguagugggac

SEQ ID NO: 184235 - RNA, 22 nt, Human
acacggcacuuuaggaaggggc

SEQ ID NO: 184236 - RNA, 22 nt, Human
ccauucugagucuuaugucuuu

SEQ ID NO: 184237 - RNA, 22 nt, Human
augacacauaaaacaaggacug

SEQ ID NO: 184238 - RNA, 17 nt, Human
acacagagauuaacaca

SEQ ID NO: 184239 - RNA, 22 nt, Human
aacuuucagcaaguaauucugg

SEQ ID NO: 184240 - RNA, 22 nt, Human
ggauuuacccaauggauagaug

SEQ ID NO: 184241 - RNA, 21 nt, Human
acauacauuaucuuuuuaaaa

SEQ ID NO: 184242 - RNA, 22 nt, Human
gccuuccugcagcucugagcgu

SEQ ID NO: 184243 - RNA, 22 nt, Human
gacagaggagaagaugcugugg

SEQ ID NO: 184244 - RNA, 22 nt, Human
uccagaccuagggcaccccagu

SEQ ID NO: 184245 - RNA, 22 nt, Human
ugugacuuauaacauagaauuu

SEQ ID NO: 184246 - RNA, 22 nt, Human
aauguuauuacacuugugaaau

SEQ ID NO: 184247 - RNA, 22 nt, Human
uuugaaagcuacuuucggguca

SEQ ID NO: 184248 - RNA, 22 nt, Human
acugaggucucagguggggaag

SEQ ID NO: 184249 - RNA, 22 nt, Human
uggugcaguucccagggccggg

SEQ ID NO: 184250 - RNA, 22 nt, Human
gaaaauacuucaguguucuggc

SEQ ID NO: 184251 - RNA, 22 nt, Human
cugguacagggaaauaaaggaa

SEQ ID NO: 184252 - RNA, 22 nt, Human
acacaaauuguaggauaauugc

SEQ ID NO: 184253 - RNA, 22 nt, Human
guggccaggucagggacuugug

SEQ ID NO: 184254 - RNA, 20 nt, Human
ccacaggaguccagucgacc

SEQ ID NO: 184255 - RNA, 22 nt, Human
cugaucaugugggaggauaugu

SEQ ID NO: 184256 - RNA, 22 nt, Human
uagguucagugucuuguucugc

SEQ ID NO: 184257 - RNA, 22 nt, Human
uggcaguuucaugugauucaac

SEQ ID NO: 184258 - RNA, 22 nt, Human
gacacagaugaucaggugugga

SEQ ID NO: 184259 - RNA, 22 nt, Human
uguaggucacagucccuauccc

SEQ ID NO: 184260 - RNA, 22 nt, Human
cccugcccaccacaugcuggga

SEQ ID NO: 184261 - RNA, 22 nt, Human
gcagaagaccaugguggaaaga

SEQ ID NO: 184262 - RNA, 20 nt, Human
cuacuuuaggcacugagaau

SEQ ID NO: 184263 - RNA, 22 nt, Human
caggcuucagcauccacuuagu

SEQ ID NO: 184264 - RNA, 22 nt, Human
agaagccagaggcaguggguac

SEQ ID NO: 184265 - RNA, 22 nt, Human
ggaugggaacuugguagggcau

SEQ ID NO: 184266 - RNA, 22 nt, Human
uuccugggccuuaaaucuuuug

SEQ ID NO: 184267 - RNA, 22 nt, Human
gaaaucugaacaacagcuguca

SEQ ID NO: 184268 - RNA, 22 nt, Human
guaucuaugauccuuuauaucu

SEQ ID NO: 184269 - RNA, 22 nt, Human
uacagugcgggugcgggccucu

SEQ ID NO: 184270 - RNA, 22 nt, Human
gcugguagaccucacugcacuc

SEQ ID NO: 184271 - RNA, 22 nt, Human
caaauggcuggcauccuucuac

SEQ ID NO: 184272 - RNA, 22 nt, Human
agggccagggaagcuguauuuu

SEQ ID NO: 184273 - RNA, 22 nt, Human
cagaggcagccgggggagaacg

SEQ ID NO: 184274 - RNA, 22 nt, Human
cuggaggacagaggccaugucu

SEQ ID NO: 184275 - RNA, 22 nt, Human
uccugggcuugcuccuccagcu

SEQ ID NO: 184276 - RNA, 22 nt, Human
uugcccagaguccacagcguac

SEQ ID NO: 184277 - RNA, 22 nt, Human
uagauccugagcccuaucuacu

SEQ ID NO: 184278 - RNA, 20 nt, Human
ucagacagucgcaguucugg

SEQ ID NO: 184279 - RNA, 22 nt, Human
ggcuccugcaccugucccucug

SEQ ID NO: 184280 - RNA, 22 nt, Human
cuauuugggguagaagauggau

SEQ ID NO: 184281 - RNA, 22 nt, Human
ccagaagaccccguccaccucc

SEQ ID NO: 184282 - RNA, 22 nt, Human
augugcugaguguguauauaca

SEQ ID NO: 184283 - RNA, 22 nt, Human
aucauacagccuuuguuagugu

SEQ ID NO: 184284 - RNA, 22 nt, Human
ggggcaggagguguucucuuuu

SEQ ID NO: 184285 - RNA, 22 nt, Human
aguacuuuagcauaaagcaguu

SEQ ID NO: 184286 - RNA, 22 nt, Human
ccacagcaggacuggagccgcc

SEQ ID NO: 184287 - RNA, 22 nt, Human
cagcaucucugggagaagcauc

SEQ ID NO: 184288 - RNA, 23 nt, Human
acugccugcuacuaugcccacgg

SEQ ID NO: 184289 - RNA, 21 nt, Human
acauguaagagaguuucaaga

SEQ ID NO: 184290 - RNA, 22 nt, Human
auccaggccccaagaccccgac

SEQ ID NO: 184291 - RNA, 22 nt, Human
caaaugaagguggugggucauu

SEQ ID NO: 184292 - RNA, 22 nt, Human
aagucccugugggguggaggcu

SEQ ID NO: 184293 - RNA, 22 nt, Human
ugcauuaaggccauugaaauuu

SEQ ID NO: 184294 - RNA, 22 nt, Human
uugaggcagcccuuaauuggga

SEQ ID NO: 184295 - RNA, 22 nt, Human
cugcccaggcugaaggaacauc

SEQ ID NO: 184296 - RNA, 22 nt, Human
uucucacuauguauguagauug

SEQ ID NO: 184297 - RNA, 22 nt, Human
ugauuugcauggagaauaacag

SEQ ID NO: 184298 - RNA, 18 nt, Human
gagaaggccacuuguuuu

SEQ ID NO: 184299 - RNA, 22 nt, Human
uugcuuuucccugucucugauu

SEQ ID NO: 184300 - RNA, 22 nt, Human
cucugugggaagcuggguguga

SEQ ID NO: 184301 - RNA, 22 nt, Human
acugucaaaugcaaugaacuca

SEQ ID NO: 184302 - RNA, 22 nt, Human
caucucugagaccucagcuggg

SEQ ID NO: 184303 - RNA, 22 nt, Human
caggcaugaugggaagugccug

SEQ ID NO: 184304 - RNA, 22 nt, Human
aucuuugucacucuacugucua

SEQ ID NO: 184305 - RNA, 22 nt, Human
uauuaggguaaauuugacaugc

SEQ ID NO: 184306 - RNA, 22 nt, Human
aacaucucauggacuacauucu

SEQ ID NO: 184307 - RNA, 22 nt, Human
cugccuuugugaucaguucuuu

SEQ ID NO: 184308 - RNA, 22 nt, Human
auguccagggcacacagcagug

SEQ ID NO: 184309 - RNA, 22 nt, Human
ccuaaggaccagggcuuccagc

SEQ ID NO: 184310 - RNA, 22 nt, Human
aggagcuccagcccagggaagu

SEQ ID NO: 184311 - RNA, 22 nt, Human
acaccaccgucccagccuccug

SEQ ID NO: 184312 - RNA, 22 nt, Human
uacacaaucuguuuuuccauuu

SEQ ID NO: 184313 - RNA, 22 nt, Human
ccugggccuugaccucgugggc

SEQ ID NO: 184314 - RNA, 22 nt, Human
uuucaucauguuggcagauugg

SEQ ID NO: 184315 - RNA, 22 nt, Human
agaagugcuccagugaguuggg

SEQ ID NO: 184316 - RNA, 22 nt, Human
agcgugaaggcgggcagucggc

SEQ ID NO: 184317 - RNA, 22 nt, Human
ccaggcacuucaucauuagggu

SEQ ID NO: 184318 - RNA, 22 nt, Human
uacuucauuccuuuguaaaaug

SEQ ID NO: 184319 - RNA, 22 nt, Human
cugggcuuaggaccuggugcgg

SEQ ID NO: 184320 - RNA, 21 nt, Human
ugggcucagccccagcccugc

SEQ ID NO: 184321 - RNA, 22 nt, Human
uauuuuguaauuggucauagcu

SEQ ID NO: 184322 - RNA, 20 nt, Human
caggugagcagaucugggug

SEQ ID NO: 184323 - RNA, 22 nt, Human
aaacugcaauuauuuuugcaau

SEQ ID NO: 184324 - RNA, 22 nt, Human
aagcccuggcaaugucagauga

SEQ ID NO: 184325 - RNA, 22 nt, Human
ucccagaggcaguugguaacuu

SEQ ID NO: 184326 - RNA, 22 nt, Human
agcucugggaguaguuccaccu

SEQ ID NO: 184327 - RNA, 22 nt, Human
cagggagaucuuggcuccuggu

SEQ ID NO: 184328 - RNA, 22 nt, Human
uuugaaauaugaggcauuauga

SEQ ID NO: 184329 - RNA, 22 nt, Human
ggcuuggcagaggugggugcuu

SEQ ID NO: 184330 - RNA, 22 nt, Human
ucagaacauccugguuuaaaau

SEQ ID NO: 184331 - RNA, 22 nt, Human
agacauuuuacauucuuccauu

SEQ ID NO: 184332 - RNA, 18 nt, Human
acccaggcucaugguccu

SEQ ID NO: 184333 - RNA, 22 nt, Human
gaacuggugagaguucacggga

SEQ ID NO: 184334 - RNA, 22 nt, Human
uuuuacaagcugagucguuaaa

SEQ ID NO: 184335 - RNA, 22 nt, Human
cuguccugcccacccugcaggg

SEQ ID NO: 184336 - RNA, 20 nt, Human
gaguuccccauuucuccugg

SEQ ID NO: 184337 - RNA, 22 nt, Human
ggcaggcuguucaccugcuuuu

SEQ ID NO: 184338 - RNA, 22 nt, Human
acagcagagugugagauagcca

SEQ ID NO: 184339 - RNA, 22 nt, Human
ggagucaccaaguaggagucuu

SEQ ID NO: 184340 - RNA, 22 nt, Human
gccuuuaucccuguacaaggug

SEQ ID NO: 184341 - RNA, 22 nt, Human
ccucuguaaugauucacugaau

SEQ ID NO: 184342 - RNA, 22 nt, Human
caaguccuuagaugguucuuug

SEQ ID NO: 184343 - RNA, 22 nt, Human
ggagaggguagggguccugccc

SEQ ID NO: 184344 - RNA, 20 nt, Human
auucacaaagccaguguugc

SEQ ID NO: 184345 - RNA, 22 nt, Human
uggcagaguggaccauacucaa

SEQ ID NO: 184346 - RNA, 22 nt, Human
cgaaaucagcaucuugaggcaa

SEQ ID NO: 184347 - RNA, 22 nt, Human
uucucugggguucaguaucucu

SEQ ID NO: 184348 - RNA, 22 nt, Human
gcaggcuccaggccggccccuu

SEQ ID NO: 184349 - RNA, 22 nt, Human
cuggguucuauuuuuggcuuca

SEQ ID NO: 184350 - RNA, 23 nt, Human
acccugggcaagucaccuaaccu

SEQ ID NO: 184351 - RNA, 22 nt, Human
acuauacaccaaaauauuaagg

SEQ ID NO: 184352 - RNA, 22 nt, Human
uccaugaggaccaaauucguag

SEQ ID NO: 184353 - RNA, 22 nt, Human
gcuucauuucucucuguagacc

SEQ ID NO: 184354 - RNA, 23 nt, Human
ggggacagagggcagcccgcauc

SEQ ID NO: 184355 - RNA, 22 nt, Human
aacuuucuaauuuuggcugagc

SEQ ID NO: 184356 - RNA, 22 nt, Human
cucugggccaugcuacugcucu

SEQ ID NO: 184357 - RNA, 22 nt, Human
uucccaggcugugcuaccagag

SEQ ID NO: 184358 - RNA, 22 nt, Human
uuugaauauacuucaaacaaag

SEQ ID NO: 184359 - RNA, 22 nt, Human
caucugaagugaauugcuuuuu

SEQ ID NO: 184360 - RNA, 20 nt, Human
agugcauggagggagagggc

SEQ ID NO: 184361 - RNA, 22 nt, Human
uguguaaagcuuguuccagaaa

SEQ ID NO: 184362 - RNA, 22 nt, Human
ccuccccucagacagagacugg

SEQ ID NO: 184363 - RNA, 22 nt, Human
ugcuggagaccugcuugcacca

SEQ ID NO: 184364 - RNA, 22 nt, Human
ggccaccucugcccuacugagu

SEQ ID NO: 184365 - RNA, 22 nt, Human
ucuaugaaucaauuuuaacauc

SEQ ID NO: 184366 - RNA, 22 nt, Human
uugcacucaccacauuucaggu

SEQ ID NO: 184367 - RNA, 22 nt, Human
uccugggaccgagggaagagcu

SEQ ID NO: 184368 - RNA, 18 nt, Human
uuugggauccucuuuucu

SEQ ID NO: 184369 - RNA, 22 nt, Human
acauguaaacauuuacaguauu

SEQ ID NO: 184370 - RNA, 19 nt, Human
agugcauuuuauguuucaa

SEQ ID NO: 184371 - RNA, 22 nt, Human
acagaaguggcuucaaagagca

SEQ ID NO: 184372 - RNA, 22 nt, Human
aggcccuggcccccagagauuc

SEQ ID NO: 184373 - RNA, 22 nt, Human
ucacagccuggucacucugccc

SEQ ID NO: 184374 - RNA, 22 nt, Human
ccaaggacguacaggagauaau

SEQ ID NO: 184375 - RNA, 22 nt, Human
aaguccuucccaagcauguacc

SEQ ID NO: 184376 - RNA, 22 nt, Human
acaagauuuggcugaaacucca

SEQ ID NO: 184377 - RNA, 22 nt, Human
agcaguuauauugaaauaaaaa

SEQ ID NO: 184378 - RNA, 22 nt, Human
acaggcugccacuugcauccaa

SEQ ID NO: 184379 - RNA, 22 nt, Human
acugccugccuuccagguacug

SEQ ID NO: 184380 - RNA, 22 nt, Human
agaaggcacagugcugcuaaga

SEQ ID NO: 184381 - RNA, 19 nt, Human
cuggaauguggcuggugca

SEQ ID NO: 184382 - RNA, 22 nt, Human
uuuccaauguagaugucucugg

SEQ ID NO: 184383 - RNA, 22 nt, Human
agagacagaggcaauauagcuu

SEQ ID NO: 184384 - RNA, 22 nt, Human
gcuucucuggcuggucugccac

SEQ ID NO: 184385 - RNA, 22 nt, Human
aggccuuggaagccagggagcc

SEQ ID NO: 184386 - RNA, 22 nt, Human
uaugagcuuuggaaugagaaac

SEQ ID NO: 184387 - RNA, 22 nt, Human
agcaaacuaauugcaguucugg

SEQ ID NO: 184388 - RNA, 22 nt, Human
uuuuauugucuguauugccuau

SEQ ID NO: 184389 - RNA, 22 nt, Human
augcaauuuacuguacauaaau

SEQ ID NO: 184390 - RNA, 22 nt, Human
ugucgcagcugaaaaucucaau

SEQ ID NO: 184391 - RNA, 22 nt, Human
cccuugagccuggaggagcucu

SEQ ID NO: 184392 - RNA, 22 nt, Human
guauuuucaugauuucagacca

SEQ ID NO: 184393 - RNA, 22 nt, Human
gacauuagacuaauguagcauu

SEQ ID NO: 184394 - RNA, 20 nt, Human
acuguuaguauacuugugcc

SEQ ID NO: 184395 - RNA, 22 nt, Human
caguagcuucaguugaggccug

SEQ ID NO: 184396 - RNA, 22 nt, Human
gcagccaggaaagcuggacccu

SEQ ID NO: 184397 - RNA, 22 nt, Human
uaugccuggaaccuuucucuuu

SEQ ID NO: 184398 - RNA, 21 nt, Human
uuugaaagcuacaucuauagc

SEQ ID NO: 184399 - RNA, 22 nt, Human
ugauuuaccaguuacuaucuug

SEQ ID NO: 184400 - RNA, 22 nt, Human
cagagccauuauggagacuugc

SEQ ID NO: 184401 - RNA, 22 nt, Human
acccucaggcagaauguauucu

SEQ ID NO: 184402 - RNA, 22 nt, Human
uccaggacuuggcaggagauga

SEQ ID NO: 184403 - RNA, 22 nt, Human
cugaggcaggggcagcuggaga

SEQ ID NO: 184404 - RNA, 22 nt, Human
aaaggcuugguucuuugaugac

SEQ ID NO: 184405 - RNA, 18 nt, Human
agacccucuaagggcagu

SEQ ID NO: 184406 - RNA, 22 nt, Human
agagccagccuucucagcuuac

SEQ ID NO: 184407 - RNA, 22 nt, Human
cuccugccugugggacugagga

SEQ ID NO: 184408 - RNA, 19 nt, Human
agcaggccaggcagguggc

SEQ ID NO: 184409 - RNA, 22 nt, Human
gcaugucaugucauguaggaau

SEQ ID NO: 184410 - RNA, 22 nt, Human
ccugcaccugccaugugagaua

SEQ ID NO: 184411 - RNA, 22 nt, Human
acaugcauacacguacauaccu

SEQ ID NO: 184412 - RNA, 22 nt, Human
ugccagggucagcugcagcucu

SEQ ID NO: 184413 - RNA, 22 nt, Human
accccaggagcugugccuaguc

SEQ ID NO: 184414 - RNA, 22 nt, Human
caaauucagaaaauugguagag

SEQ ID NO: 184415 - RNA, 22 nt, Human
ucagcaggcaggaggcaugcca

SEQ ID NO: 184416 - RNA, 22 nt, Human
auugcuuuucagacaaugaggc

SEQ ID NO: 184417 - RNA, 22 nt, Human
gcuuuauuuugugagggauuac

SEQ ID NO: 184418 - RNA, 22 nt, Human
uaauuucaccguugcuagaaau

SEQ ID NO: 184419 - RNA, 22 nt, Human
ucaguguuuccugugguacagc

SEQ ID NO: 184420 - RNA, 22 nt, Human
ggcugaaguguaguggcucacu

SEQ ID NO: 184421 - RNA, 23 nt, Human
cauggaaaacugaaagcugaccu

SEQ ID NO: 184422 - RNA, 22 nt, Human
gugggcagagcaagggaacuca

SEQ ID NO: 184423 - RNA, 22 nt, Human
ggagcaguuguugagcaagcca

SEQ ID NO: 184424 - RNA, 22 nt, Human
acauggauaaauuuuacuuucc

SEQ ID NO: 184425 - RNA, 22 nt, Human
ccuucccaggcuagaccaacau

SEQ ID NO: 184426 - RNA, 22 nt, Human
uccagggaugguaaugagcagu

SEQ ID NO: 184427 - RNA, 22 nt, Human
cauuauugccagccauacugaa

SEQ ID NO: 184428 - RNA, 22 nt, Human
gaugagguuuuugaaaugugga

SEQ ID NO: 184429 - RNA, 22 nt, Human
uacagguagagucucuaguuua

SEQ ID NO: 184430 - RNA, 22 nt, Human
ucuguucagcugccucagggua

SEQ ID NO: 184431 - RNA, 22 nt, Human
uggcucugguaacauuggguag

SEQ ID NO: 184432 - RNA, 22 nt, Human
ggcucugaauuauuccugaguc

SEQ ID NO: 184433 - RNA, 22 nt, Human
gacccauaggaaucuguugucc

SEQ ID NO: 184434 - RNA, 23 nt, Human
aggcauggcauggaugguggcuc

SEQ ID NO: 184435 - RNA, 19 nt, Human
caucucugcaaggagcugc

SEQ ID NO: 184436 - RNA, 22 nt, Human
gucuuuggaggcacuguugagu

SEQ ID NO: 184437 - RNA, 22 nt, Human
uuguuucagcuguaugcuaugu

SEQ ID NO: 184438 - RNA, 22 nt, Human
cuuugcaaaaguuaauuguuga

SEQ ID NO: 184439 - RNA, 22 nt, Human
auguccucuucugccucaggcc

SEQ ID NO: 184440 - RNA, 22 nt, Human
aucuuuagacaggaagcaauca

SEQ ID NO: 184441 - RNA, 22 nt, Human
caccagguuccgggcagagcug

SEQ ID NO: 184442 - RNA, 22 nt, Human
guuucuuucuauugacugaaca

SEQ ID NO: 184443 - RNA, 17 nt, Human
caaggccagcaucuuca

SEQ ID NO: 184444 - RNA, 22 nt, Human
uuccuucuccagaacuucuagg

SEQ ID NO: 184445 - RNA, 22 nt, Human
gcaggcuccaaggccugggaga

SEQ ID NO: 184446 - RNA, 22 nt, Human
cauuugaaccuggauguucuua

SEQ ID NO: 184447 - RNA, 22 nt, Human
ucuucacagaugcauauacuuc

SEQ ID NO: 184448 - RNA, 22 nt, Human
accagucuguuguugcagagug

SEQ ID NO: 184449 - RNA, 22 nt, Human
ugcaacuaggagguucuuagcu

SEQ ID NO: 184450 - RNA, 22 nt, Human
gccuccacuuuugcuggcuucu

SEQ ID NO: 184451 - RNA, 22 nt, Human
ucaguaaaugaaugaauauaug

SEQ ID NO: 184452 - RNA, 21 nt, Human
aggcucccagaaaugggcauc

SEQ ID NO: 184453 - RNA, 22 nt, Human
caugcuuugggucagaaaugcc

SEQ ID NO: 184454 - RNA, 22 nt, Human
ggcugccugaacuuuggggaaa

SEQ ID NO: 184455 - RNA, 20 nt, Human
caguggcugauaacaaauua

SEQ ID NO: 184456 - RNA, 22 nt, Human
auuuccaacuaccccuccauuu

SEQ ID NO: 184457 - RNA, 22 nt, Human
ucucuucuaacacuagaaauuc

SEQ ID NO: 184458 - RNA, 22 nt, Human
acucugugaagaugcaggcuug

SEQ ID NO: 184459 - RNA, 22 nt, Human
ugaguccgaaguugcagugagc

SEQ ID NO: 184460 - RNA, 22 nt, Human
aagcauggcugagugcaauggu

SEQ ID NO: 184461 - RNA, 22 nt, Human
aaauucuguccugaaugccauu

SEQ ID NO: 184462 - RNA, 22 nt, Human
aaggaagagcaaagaauuaugu

SEQ ID NO: 184463 - RNA, 22 nt, Human
gcagcucucuggccugcccugg

SEQ ID NO: 184464 - RNA, 22 nt, Human
cacuggcuugauggguaaugcc

SEQ ID NO: 184465 - RNA, 22 nt, Human
uuucuucacaggguauugggug

SEQ ID NO: 184466 - RNA, 22 nt, Human
ugagaggucauuaggccaugag

SEQ ID NO: 184467 - RNA, 22 nt, Human
acuggcuggccgcgcucuucgc

SEQ ID NO: 184468 - RNA, 22 nt, Human
uuuccaaaggcuaaacucaguu

SEQ ID NO: 184469 - RNA, 22 nt, Human
cagugcugccaaagggaccuug

SEQ ID NO: 184470 - RNA, 22 nt, Human
aggaccuacugauaucuuagca

SEQ ID NO: 184471 - RNA, 22 nt, Human
aaguaugugugggaugcuggga

SEQ ID NO: 184472 - RNA, 22 nt, Human
acagcaaaggacgaacacucug

SEQ ID NO: 184473 - RNA, 22 nt, Human
auccugaagcaugaaugucaaa

SEQ ID NO: 184474 - RNA, 22 nt, Human
agaggaaguaaucaggaccugc

SEQ ID NO: 184475 - RNA, 22 nt, Human
auucuuugcaucucuggguggc

SEQ ID NO: 184476 - RNA, 21 nt, Human
ccagcuuucccaagucccuuu

SEQ ID NO: 184477 - RNA, 22 nt, Human
aaguuucugauauuguuaaagc

SEQ ID NO: 184478 - RNA, 22 nt, Human
ggugcccagagccaggaaugag

SEQ ID NO: 184479 - RNA, 22 nt, Human
aacuguagcaaagaacagcucu

SEQ ID NO: 184480 - RNA, 22 nt, Human
auaaccuguuucagacauuugu

SEQ ID NO: 184481 - RNA, 22 nt, Human
uccagccucauuucuccugcuu

SEQ ID NO: 184482 - RNA, 22 nt, Human
cauuaucugagaguguccuaca

SEQ ID NO: 184483 - RNA, 22 nt, Human
aucuguggcgcaaacaaaggcu

SEQ ID NO: 184484 - RNA, 21 nt, Human
gcaugccugcaucuuaguguu

SEQ ID NO: 184485 - RNA, 22 nt, Human
uuuauuuauaagccacuugcug

SEQ ID NO: 184486 - RNA, 22 nt, Human
gguuucaacucagcuaguaagg

SEQ ID NO: 184487 - RNA, 22 nt, Human
gcccuguggacccaggaacucu

SEQ ID NO: 184488 - RNA, 22 nt, Human
uucaggcccaacgcacagcuuc

SEQ ID NO: 184489 - RNA, 22 nt, Human
ggcaucuggaucugcuucuccc

SEQ ID NO: 184490 - RNA, 22 nt, Human
caggccuuuuuuccugcagugu

SEQ ID NO: 184491 - RNA, 22 nt, Human
accaggcuugauaccaagaaau

SEQ ID NO: 184492 - RNA, 22 nt, Human
ucugaauuuugaugugcauuga

SEQ ID NO: 184493 - RNA, 22 nt, Human
aauggcaaggaaaccguuacca

SEQ ID NO: 184494 - RNA, 22 nt, Human
guucuucaaagugacaacuaaa

SEQ ID NO: 184495 - RNA, 22 nt, Human
ucuggagccacaaaccucagcu

SEQ ID NO: 184496 - RNA, 22 nt, Human
acagugcuucugauaugaugcc

SEQ ID NO: 184497 - RNA, 22 nt, Human
uccagccaaucaacuauuguuu

SEQ ID NO: 184498 - RNA, 22 nt, Human
cccagcagccuugucccuucuc

SEQ ID NO: 184499 - RNA, 22 nt, Human
gagagaauguacaugcuagggg

SEQ ID NO: 184500 - RNA, 22 nt, Human
gcagauggaaagugcuugaggg

SEQ ID NO: 184501 - RNA, 22 nt, Human
gagaggucaucucccaucagca

SEQ ID NO: 184502 - RNA, 23 nt, Human
aaagugcaguugaggaaucauag

SEQ ID NO: 184503 - RNA, 22 nt, Human
gugcccugacacaccuggugug

SEQ ID NO: 184504 - RNA, 22 nt, Human
cacaggaggcaaugguaagauu

SEQ ID NO: 184505 - RNA, 22 nt, Human
auacagcagugaauaagauaaa

SEQ ID NO: 184506 - RNA, 21 nt, Human
ucucuccucaagcucgacccc

SEQ ID NO: 184507 - RNA, 22 nt, Human
aucuuuauauaucuccucugaa

SEQ ID NO: 184508 - RNA, 22 nt, Human
ucagagaguccuggucauuugc

SEQ ID NO: 184509 - RNA, 17 nt, Human
uuucaucugggaccacc

SEQ ID NO: 184510 - RNA, 22 nt, Human
agaauccuauugucagauucuu

SEQ ID NO: 184511 - RNA, 22 nt, Human
aauaauaguugcaaaguguuua

SEQ ID NO: 184512 - RNA, 22 nt, Human
gacugagaaucauagaaggcaa

SEQ ID NO: 184513 - RNA, 22 nt, Human
gggaucugauuuaggaugggag

SEQ ID NO: 184514 - RNA, 21 nt, Human
ccugugugugucccuuuaaga

SEQ ID NO: 184515 - RNA, 22 nt, Human
aagucuaaccuauuccgguguu

SEQ ID NO: 184516 - RNA, 22 nt, Human
uaggccaggacagagcuuccag

SEQ ID NO: 184517 - RNA, 22 nt, Human
gggcuguguuaggugcgguuac

SEQ ID NO: 184518 - RNA, 17 nt, Human
gaggagcuccaguaggu

SEQ ID NO: 184519 - RNA, 22 nt, Human
ugaacuuuugcacagaggauuu

SEQ ID NO: 184520 - RNA, 22 nt, Human
acaauuacccuggcuugauaaa

SEQ ID NO: 184521 - RNA, 22 nt, Human
cugggccuuuaccuacggaguu

SEQ ID NO: 184522 - RNA, 22 nt, Human
auuccaaagacagaagcagcug

SEQ ID NO: 184523 - RNA, 22 nt, Human
aagaacauugauauugucuaug

SEQ ID NO: 184524 - RNA, 22 nt, Human
agacaaauggaguaugagcaac

SEQ ID NO: 184525 - RNA, 22 nt, Human
ccaggccuuucuucuuggucug

SEQ ID NO: 184526 - RNA, 22 nt, Human
uuucagauggagguuuaggaca

SEQ ID NO: 184527 - RNA, 22 nt, Human
uaggaaagcaguagagccagga

SEQ ID NO: 184528 - RNA, 22 nt, Human
aaggccugggaggccucucuuc

SEQ ID NO: 184529 - RNA, 22 nt, Human
gcacaguggguggucauguaca

SEQ ID NO: 184530 - RNA, 22 nt, Human
aagagcuggucacagguccauu

SEQ ID NO: 184531 - RNA, 22 nt, Human
uagaaacaaugacaugcuugua

SEQ ID NO: 184532 - RNA, 22 nt, Human
uuaaagacaucacagauuacac

SEQ ID NO: 184533 - RNA, 22 nt, Human
uaugaagaaaccuauccucuag

SEQ ID NO: 184534 - RNA, 17 nt, Human
gccuuccuuccuccaca

SEQ ID NO: 184535 - RNA, 22 nt, Human
uaacuguauauuaagguggccc

SEQ ID NO: 184536 - RNA, 22 nt, Human
aauuuccagaucagaugacuca

SEQ ID NO: 184537 - RNA, 22 nt, Human
uaguuacagagaaaugauuuga

SEQ ID NO: 184538 - RNA, 19 nt, Human
cuggccaggccaggggccc

SEQ ID NO: 184539 - RNA, 22 nt, Human
ggcaggugacggggaugaguau

SEQ ID NO: 184540 - RNA, 22 nt, Human
uuccagagguagcaaugacuug

SEQ ID NO: 184541 - RNA, 22 nt, Human
aggacccaagcacaguuccugg

SEQ ID NO: 184542 - RNA, 22 nt, Human
aacaaauggaacacaaaucuuu

SEQ ID NO: 184543 - RNA, 22 nt, Human
gaggggcagugcacccgggccc

SEQ ID NO: 184544 - RNA, 22 nt, Human
aagcugaaauuccuccugaaau

SEQ ID NO: 184545 - RNA, 22 nt, Human
aacuuagacuuguuucuuggua

SEQ ID NO: 184546 - RNA, 22 nt, Human
uccuccuguuucucaggccugg

SEQ ID NO: 184547 - RNA, 22 nt, Human
gaagggugugugugagggacac

SEQ ID NO: 184548 - RNA, 22 nt, Human
ucacaucuauacccaauaauuu

SEQ ID NO: 184549 - RNA, 22 nt, Human
ucagaggaauuugcuuuucaug

SEQ ID NO: 184550 - RNA, 22 nt, Human
cugccugccacguucagcugua

SEQ ID NO: 184551 - RNA, 19 nt, Human
agucaguucugaggaggaa

SEQ ID NO: 184552 - RNA, 22 nt, Human
agccuccuguagcccucaccca

SEQ ID NO: 184553 - RNA, 22 nt, Human
agacuguugccugaacuuagcc

SEQ ID NO: 184554 - RNA, 22 nt, Human
cugggacauggugcugucuuua

SEQ ID NO: 184555 - RNA, 22 nt, Human
gcaaagugcuucagugggagcu

SEQ ID NO: 184556 - RNA, 22 nt, Human
ucaggugugggcagagaaacca

SEQ ID NO: 184557 - RNA, 22 nt, Human
gcagggcucagccgcucccacc

SEQ ID NO: 184558 - RNA, 22 nt, Human
cagaggcagaauggagauuugg

SEQ ID NO: 184559 - RNA, 22 nt, Human
augugucucuaaaauuuaguaa

SEQ ID NO: 184560 - RNA, 22 nt, Human
uaagucuucauagucuaauguc

SEQ ID NO: 184561 - RNA, 22 nt, Human
ugauagaaaggaaauuaauugg

SEQ ID NO: 184562 - RNA, 22 nt, Human
agaccuggaugugagggaagua

SEQ ID NO: 184563 - RNA, 19 nt, Human
ccuggcccugcugcgcggg

SEQ ID NO: 184564 - RNA, 15 nt, Human
cuauuucauccuucu

SEQ ID NO: 184565 - RNA, 22 nt, Human
uacaaugauuagcuaacuugcc

SEQ ID NO: 184566 - RNA, 17 nt, Human
gcugaacaaggaaaaua

SEQ ID NO: 184567 - RNA, 22 nt, Human
gauucaaaguuaaugaagaugc

SEQ ID NO: 184568 - RNA, 22 nt, Human
uuauuuaaaauguagguuggga

SEQ ID NO: 184569 - RNA, 22 nt, Human
agguggcugguccaggcugcag

SEQ ID NO: 184570 - RNA, 22 nt, Human
aagggagguaaagcuauuuaaa

SEQ ID NO: 184571 - RNA, 21 nt, Human
gccugccugcgugacccucuu

SEQ ID NO: 184572 - RNA, 22 nt, Human
uuuggaauuacuuacucaagcc

SEQ ID NO: 184573 - RNA, 22 nt, Human
ggggccucugcagucacgcugg

SEQ ID NO: 184574 - RNA, 22 nt, Human
uuagaaaauuugcuucuuugga

SEQ ID NO: 184575 - RNA, 22 nt, Human
agugcauuccuggggaagaagc

SEQ ID NO: 184576 - RNA, 22 nt, Human
cugagcugucaggaauggaaag

SEQ ID NO: 184577 - RNA, 22 nt, Human
gucacaggccuggaugaggggc

SEQ ID NO: 184578 - RNA, 22 nt, Human
aaucacauuacagcauaucugu

SEQ ID NO: 184579 - RNA, 22 nt, Human
agcaccugucacaagcagaagg

SEQ ID NO: 184580 - RNA, 22 nt, Human
ccuguucagagcuaagcaucau

SEQ ID NO: 184581 - RNA, 18 nt, Human
caggaugagugaugggga

SEQ ID NO: 184582 - RNA, 22 nt, Human
ugaggagucgagaagggguaau

SEQ ID NO: 184583 - RNA, 22 nt, Human
agucacugagauggugaggcua

SEQ ID NO: 184584 - RNA, 22 nt, Human
aacagcagggaugacauggcca

SEQ ID NO: 184585 - RNA, 22 nt, Human
ugcugaggacuaaaggagauga

SEQ ID NO: 184586 - RNA, 21 nt, Human
aaaaguuugacaggaaaggga

SEQ ID NO: 184587 - RNA, 23 nt, Human
augcaggguuacagggcugacuu

SEQ ID NO: 184588 - RNA, 22 nt, Human
uuuggacugcaugaugaucugg

SEQ ID NO: 184589 - RNA, 22 nt, Human
acccuaauaaucacagacuagu

SEQ ID NO: 184590 - RNA, 22 nt, Human
ugcagaauuauggugcuggcuu

SEQ ID NO: 184591 - RNA, 22 nt, Human
gggcaggaggcuaauucugcau

SEQ ID NO: 184592 - RNA, 18 nt, Human
gcagugcaggaagaagag

SEQ ID NO: 184593 - RNA, 22 nt, Human
acaaaguagucaaaguagauga

SEQ ID NO: 184594 - RNA, 22 nt, Human
ggagacacagagcaacaaaaua

SEQ ID NO: 184595 - RNA, 22 nt, Human
uauucauguguuggaaaggaac

SEQ ID NO: 184596 - RNA, 22 nt, Human
aggguccuaagccucagauaag

SEQ ID NO: 184597 - RNA, 22 nt, Human
uuuuuccuuggaugugucucuc

SEQ ID NO: 184598 - RNA, 17 nt, Human
ucuggccuuccugaacu

SEQ ID NO: 184599 - RNA, 19 nt, Human
gucagcuggaacucugaaa

SEQ ID NO: 184600 - RNA, 22 nt, Human
gcugagcacagccuguguccuc

SEQ ID NO: 184601 - RNA, 22 nt, Human
caagggcucaaacggugguugc

SEQ ID NO: 184602 - RNA, 22 nt, Human
agaaaucucuagcacaucgaau

SEQ ID NO: 184603 - RNA, 22 nt, Human
ucagcagaggggaaggcaucug

SEQ ID NO: 184604 - RNA, 22 nt, Human
gcuggccagcccucuuccucca

SEQ ID NO: 184605 - RNA, 22 nt, Human
cuuagcuuguuuucaccuaaga

SEQ ID NO: 184606 - RNA, 22 nt, Human
ggcugagacuagagugaggcau

SEQ ID NO: 184607 - RNA, 22 nt, Human
cagcaggucucagcagcuccuu

SEQ ID NO: 184608 - RNA, 22 nt, Human
agaguugcuaccaagaugcuag

SEQ ID NO: 184609 - RNA, 22 nt, Human
aaucuggaauauuugcauugua

SEQ ID NO: 184610 - RNA, 22 nt, Human
uuguaaagcugauuagaaagcc

SEQ ID NO: 184611 - RNA, 22 nt, Human
aggugcuuggcucgugcacaca

SEQ ID NO: 184612 - RNA, 22 nt, Human
gcacagggcugccaggcggcuu

SEQ ID NO: 184613 - RNA, 22 nt, Human
ucuuauaugcacauacauuggg

SEQ ID NO: 184614 - RNA, 23 nt, Human
aagaacuuugguccugcagaguc

SEQ ID NO: 184615 - RNA, 23 nt, Human
augguuuauguuguugugaagca

SEQ ID NO: 184616 - RNA, 18 nt, Human
cuccucccuaagggcuca

SEQ ID NO: 184617 - RNA, 22 nt, Human
gaaaguuuucauauauaccaaa

SEQ ID NO: 184618 - RNA, 22 nt, Human
agauacaacuguuuaaacauua

SEQ ID NO: 184619 - RNA, 22 nt, Human
agggagaaugaccaagguauau

SEQ ID NO: 184620 - RNA, 22 nt, Human
gagagaagggggauaugagccu

SEQ ID NO: 184621 - RNA, 20 nt, Human
ugcugagguugacaugccca

SEQ ID NO: 184622 - RNA, 20 nt, Human
gagucacagaagaagcugaa

SEQ ID NO: 184623 - RNA, 20 nt, Human
agguauaagaaaugugauuu

SEQ ID NO: 184624 - RNA, 22 nt, Human
ugauuuacacaucaaagcagca

SEQ ID NO: 184625 - RNA, 22 nt, Human
ggcaggcacauuugggggccgu

SEQ ID NO: 184626 - RNA, 18 nt, Human
auggcuucugaguggagg

SEQ ID NO: 184627 - RNA, 22 nt, Human
uuacaaugacagguguaucauu

SEQ ID NO: 184628 - RNA, 22 nt, Human
cauucuuauauuuacucauuca

SEQ ID NO: 184629 - RNA, 22 nt, Human
ucugggagagcacguggcugac

SEQ ID NO: 184630 - RNA, 22 nt, Human
ggccacagugggaaauccuggg

SEQ ID NO: 184631 - RNA, 22 nt, Human
uuaggaaagaagcagcuaggag

SEQ ID NO: 184632 - RNA, 21 nt, Human
ggcagagcuggggccuccagc

SEQ ID NO: 184633 - RNA, 22 nt, Human
ggcuuuguggggugaaguaaag

SEQ ID NO: 184634 - RNA, 22 nt, Human
agcuggugcugaagcucuugag

SEQ ID NO: 184635 - RNA, 22 nt, Human
agauaucugcaauauaauuuaa

SEQ ID NO: 184636 - RNA, 22 nt, Human
uggcugagggggcucugcucag

SEQ ID NO: 184637 - RNA, 22 nt, Human
auuucuagccucugaaguagga

SEQ ID NO: 184638 - RNA, 22 nt, Human
ccagcuuucugggugguuucug

SEQ ID NO: 184639 - RNA, 22 nt, Human
uacaccagguuaccaaucacug

SEQ ID NO: 184640 - RNA, 22 nt, Human
gcaccugggcaaggauucagag

SEQ ID NO: 184641 - RNA, 22 nt, Human
cagagcagaagcgguccucaca

SEQ ID NO: 184642 - RNA, 22 nt, Human
acagauuuuaaaugacacuccc

SEQ ID NO: 184643 - RNA, 22 nt, Human
auagcaaacuggcagcuugugg

SEQ ID NO: 184644 - RNA, 22 nt, Human
cagggcagugaagaacacacgu

SEQ ID NO: 184645 - RNA, 22 nt, Human
acacauauauuugcauauacac

SEQ ID NO: 184646 - RNA, 22 nt, Human
ugauuuacccguaacuauuucu

SEQ ID NO: 184647 - RNA, 22 nt, Human
gaggggcuggguagggcaaccc

SEQ ID NO: 184648 - RNA, 22 nt, Human
aguuaucaucccuuacacuuug

SEQ ID NO: 184649 - RNA, 22 nt, Human
gcuggagauaguaggauccaua

SEQ ID NO: 184650 - RNA, 22 nt, Human
cucaugauguagcgaaugagaa

SEQ ID NO: 184651 - RNA, 18 nt, Human
uguaaacacuuucauucu

SEQ ID NO: 184652 - RNA, 23 nt, Human
cagcucagaguguguccuguuuc

SEQ ID NO: 184653 - RNA, 22 nt, Human
aagccagauagaagaacucauu

SEQ ID NO: 184654 - RNA, 22 nt, Human
cacagaaauauugugucccuug

SEQ ID NO: 184655 - RNA, 22 nt, Human
auuuacugcuugacacauuggu

SEQ ID NO: 184656 - RNA, 22 nt, Human
caggccucaggggcucaggcug

SEQ ID NO: 184657 - RNA, 22 nt, Human
augccuuaaggcgagauacuua

SEQ ID NO: 184658 - RNA, 22 nt, Human
cuccugggaaaugaaggggcag

SEQ ID NO: 184659 - RNA, 22 nt, Human
ggucuggccuccgggcaggugg

SEQ ID NO: 184660 - RNA, 22 nt, Human
ccagaugucugagccacacucc

SEQ ID NO: 184661 - RNA, 22 nt, Human
uugcaaauuccaauccaauauu

SEQ ID NO: 184662 - RNA, 23 nt, Human
cuggcuucuggggccucuguuuc

SEQ ID NO: 184663 - RNA, 22 nt, Human
acuugaauaggaaagccacaaa

SEQ ID NO: 184664 - RNA, 22 nt, Human
uugccauguugccaaggcuggu

SEQ ID NO: 184665 - RNA, 22 nt, Human
ccaagaugaucuuuacaguguu

SEQ ID NO: 184666 - RNA, 22 nt, Human
agugaccaaucacugaaugauu

SEQ ID NO: 184667 - RNA, 22 nt, Human
ucagucauaguuuggagagaau

SEQ ID NO: 184668 - RNA, 22 nt, Human
uguagaaccuguuuauuauaga

SEQ ID NO: 184669 - RNA, 22 nt, Human
cucuggaguucuucaagcuacu

SEQ ID NO: 184670 - RNA, 22 nt, Human
augggcaguuaggaggccagga

SEQ ID NO: 184671 - RNA, 22 nt, Human
gauuccacagcuucgaggucuu

SEQ ID NO: 184672 - RNA, 22 nt, Human
gagugcaguuggggugagggga

SEQ ID NO: 184673 - RNA, 22 nt, Human
uggcacugaaaaaggagagguu

SEQ ID NO: 184674 - RNA, 22 nt, Human
auauuaggugcucaauacaugc

SEQ ID NO: 184675 - RNA, 21 nt, Human
acucugucuugagccaucugu

SEQ ID NO: 184676 - RNA, 22 nt, Human
gagggcuccacacgggcccagc

SEQ ID NO: 184677 - RNA, 22 nt, Human
uaaauuaugucacaugacucug

SEQ ID NO: 184678 - RNA, 22 nt, Human
ucauuuaauugguuuugcucgu

SEQ ID NO: 184679 - RNA, 22 nt, Human
uagucaguugggucuaguggca

SEQ ID NO: 184680 - RNA, 22 nt, Human
cucuggccuggggccugcuccc

SEQ ID NO: 184681 - RNA, 22 nt, Human
gaauucugguuuugaaaugaau

SEQ ID NO: 184682 - RNA, 22 nt, Human
cugcagugcaagcccagaugga

SEQ ID NO: 184683 - RNA, 22 nt, Human
ccaggccugcaucugcugcgca

SEQ ID NO: 184684 - RNA, 22 nt, Human
cugcaaaagucauugugguuuu

SEQ ID NO: 184685 - RNA, 22 nt, Human
cacccaggacaggccagaugug

SEQ ID NO: 184686 - RNA, 22 nt, Human
gcagggcugagucaugugugcc

SEQ ID NO: 184687 - RNA, 20 nt, Human
uuucaccaucuuggccaggc

SEQ ID NO: 184688 - RNA, 22 nt, Human
gggauagguuuggaagaggugg

SEQ ID NO: 184689 - RNA, 22 nt, Human
cugcaggagcaaagccucugcu

SEQ ID NO: 184690 - RNA, 22 nt, Human
aaacucaaagucagaucagaga

SEQ ID NO: 184691 - RNA, 19 nt, Human
ggcugucucggcccagcca

SEQ ID NO: 184692 - RNA, 22 nt, Human
ugagaauauuugaagauguuag

SEQ ID NO: 184693 - RNA, 21 nt, Human
uauuugcugccaucuuugagg

SEQ ID NO: 184694 - RNA, 22 nt, Human
uuugaaccugagcuucugcaug

SEQ ID NO: 184695 - RNA, 22 nt, Human
cccacagguccccaugaacucg

SEQ ID NO: 184696 - RNA, 18 nt, Human
ggccucuggacuggcagc

SEQ ID NO: 184697 - RNA, 22 nt, Human
gcagccaggcuacagcgggcuu

SEQ ID NO: 184698 - RNA, 22 nt, Human
caggcugugaaacugagaugcg

SEQ ID NO: 184699 - RNA, 22 nt, Human
cucaggauuaaggaaucuaaau

SEQ ID NO: 184700 - RNA, 22 nt, Human
uagaacuuauuuggcauuauuu

SEQ ID NO: 184701 - RNA, 22 nt, Human
uuugcaaauuagccacccuguu

SEQ ID NO: 184702 - RNA, 22 nt, Human
aauaaugucugcuauuuuaaaa

SEQ ID NO: 184703 - RNA, 22 nt, Human
caacagaaaucaauuuucccau

SEQ ID NO: 184704 - RNA, 22 nt, Human
uagauaucagaaauagaauuua

SEQ ID NO: 184705 - RNA, 22 nt, Human
ugcuucuuuaugauguaugauu

SEQ ID NO: 184706 - RNA, 22 nt, Human
uauaccaaaaaaauucuugucu

SEQ ID NO: 184707 - RNA, 22 nt, Human
ggagaagggacagacucagcuu

SEQ ID NO: 184708 - RNA, 22 nt, Human
cucccucauauacccagcgaga

SEQ ID NO: 184709 - RNA, 23 nt, Human
agagcuuucuaaaauguaaaucu

SEQ ID NO: 184710 - RNA, 22 nt, Human
gaaacccaaacuaagacaguag

SEQ ID NO: 184711 - RNA, 17 nt, Human
gcucuggcacaggauug

SEQ ID NO: 184712 - RNA, 22 nt, Human
ccacuguuuuucaguuaacuuu

SEQ ID NO: 184713 - RNA, 22 nt, Human
aagccuggacuaucgcgugugc

SEQ ID NO: 184714 - RNA, 22 nt, Human
uguuuuaugagccauauaaccu

SEQ ID NO: 184715 - RNA, 22 nt, Human
gagggaaagguuaauacaugau

SEQ ID NO: 184716 - RNA, 22 nt, Human
cucugcaacuucuagcaguguc

SEQ ID NO: 184717 - RNA, 22 nt, Human
uccaaagccgacugacaucuga

SEQ ID NO: 184718 - RNA, 23 nt, Human
uucaaagcuuaagcucuuuccac

SEQ ID NO: 184719 - RNA, 22 nt, Human
gucagcauaguucacacacagu

SEQ ID NO: 184720 - RNA, 22 nt, Human
augcuuuauuguuaggucaugu

SEQ ID NO: 184721 - RNA, 22 nt, Human
guaguucugcagugucaccuga

SEQ ID NO: 184722 - RNA, 22 nt, Human
guugaaaaugacuuuauaccau

SEQ ID NO: 184723 - RNA, 22 nt, Human
cugcaaaucaaguucuuauaau

SEQ ID NO: 184724 - RNA, 22 nt, Human
uggaugaggcuggguuaggcag

SEQ ID NO: 184725 - RNA, 22 nt, Human
uaggguggagacuggaagcagg

SEQ ID NO: 184726 - RNA, 22 nt, Human
uuucuaggacaugauaggauau

SEQ ID NO: 184727 - RNA, 22 nt, Human
aaagcugguuauucugaggcag

SEQ ID NO: 184728 - RNA, 21 nt, Human
ccuccaggugauuccgugcuc

SEQ ID NO: 184729 - RNA, 20 nt, Human
ucucugcagcagaggcuggg

SEQ ID NO: 184730 - RNA, 22 nt, Human
uaaaagauuuuauaggaacaag

SEQ ID NO: 184731 - RNA, 22 nt, Human
gccgugcgugcgcaggugcugu

SEQ ID NO: 184732 - RNA, 22 nt, Human
agagcuggacgucugagcccua

SEQ ID NO: 184733 - RNA, 22 nt, Human
ugcauauuguccuugauauuau

SEQ ID NO: 184734 - RNA, 22 nt, Human
uaaaucucucaguggccagaga

SEQ ID NO: 184735 - RNA, 22 nt, Human
uucugucuucccacugaggagc

SEQ ID NO: 184736 - RNA, 22 nt, Human
ugcagaguagugaggggacaga

SEQ ID NO: 184737 - RNA, 22 nt, Human
agcagcuguacuuucaucuguu

SEQ ID NO: 184738 - RNA, 22 nt, Human
agagaaggaaagcugacauggg

SEQ ID NO: 184739 - RNA, 22 nt, Human
ugcaaauacaaaaugguacagc

SEQ ID NO: 184740 - RNA, 22 nt, Human
uccucccugaguggggacagcu

SEQ ID NO: 184741 - RNA, 22 nt, Human
uuucuauaaucuaccaugccag

SEQ ID NO: 184742 - RNA, 22 nt, Human
gauaaacuuguggaguuuuggu

SEQ ID NO: 184743 - RNA, 22 nt, Human
ccugucucuguuaccacauuug

SEQ ID NO: 184744 - RNA, 22 nt, Human
auucucugcugcacugauaaca

SEQ ID NO: 184745 - RNA, 22 nt, Human
agcagugugcuucguuucauga

SEQ ID NO: 184746 - RNA, 22 nt, Human
guuacucuuccccggggucugg

SEQ ID NO: 184747 - RNA, 22 nt, Human
agcagcagugacagccgaaagc

SEQ ID NO: 184748 - RNA, 22 nt, Human
cucugggcccacuuaaaucugg

SEQ ID NO: 184749 - RNA, 21 nt, Human
cucaaaauucuuucuguugga

SEQ ID NO: 184750 - RNA, 22 nt, Human
agcaaugaccagugaucuugua

SEQ ID NO: 184751 - RNA, 22 nt, Human
aagguggugaguacaguuaggu

SEQ ID NO: 184752 - RNA, 22 nt, Human
gccuucccaagacgccugaguu

SEQ ID NO: 184753 - RNA, 22 nt, Human
ccucuggguuaguuuagggagc

SEQ ID NO: 184754 - RNA, 22 nt, Human
uaaaggaacagaggacucauuu

SEQ ID NO: 184755 - RNA, 22 nt, Human
guccugggcccaggggcugccu

SEQ ID NO: 184756 - RNA, 22 nt, Human
cauuggucuucuaacagagaga

SEQ ID NO: 184757 - RNA, 20 nt, Human
aggagcugaauuagaggguu

SEQ ID NO: 184758 - RNA, 23 nt, Human
ccagcugugccuggcccaggagc

SEQ ID NO: 184759 - RNA, 22 nt, Human
cauuuguaauacugacuugcag

SEQ ID NO: 184760 - RNA, 22 nt, Human
uucuagaacaggcaaaaccaau

SEQ ID NO: 184761 - RNA, 22 nt, Human
uggucaagggacagagcugaac

SEQ ID NO: 184762 - RNA, 22 nt, Human
aucaaaguaucucaauauggua

SEQ ID NO: 184763 - RNA, 22 nt, Human
agaaauucaauucuaauuagcu

SEQ ID NO: 184764 - RNA, 22 nt, Human
aaagaugucaguuugaaauaac

SEQ ID NO: 184765 - RNA, 22 nt, Human
cccagguguuuguggcagaggu

SEQ ID NO: 184766 - RNA, 22 nt, Human
guacagggccccucagcagggc

SEQ ID NO: 184767 - RNA, 22 nt, Human
cauggcggucaggauguaggug

SEQ ID NO: 184768 - RNA, 22 nt, Human
ccucuggccacaugggacauag

SEQ ID NO: 184769 - RNA, 22 nt, Human
ggcugcugacaaacaugaucau

SEQ ID NO: 184770 - RNA, 21 nt, Human
uucacaguggauaacuuucug

SEQ ID NO: 184771 - RNA, 22 nt, Human
aaaggccacuugaaggauuuuu

SEQ ID NO: 184772 - RNA, 20 nt, Human
ugcuccaucuaaagugauua

SEQ ID NO: 184773 - RNA, 22 nt, Human
cugccucuggccucaggcccag

SEQ ID NO: 184774 - RNA, 22 nt, Human
uaggcucccagaucguuugcug

SEQ ID NO: 184775 - RNA, 22 nt, Human
uuaaaugaggcugauguagauu

SEQ ID NO: 184776 - RNA, 17 nt, Human
ugguuccaaccauacgc

SEQ ID NO: 184777 - RNA, 22 nt, Human
gauaaacauucuugcacaugug

SEQ ID NO: 184778 - RNA, 22 nt, Human
uuuggaaaguugucacuuuaga

SEQ ID NO: 184779 - RNA, 22 nt, Human
aagguuagugcaucuuuuguuu

SEQ ID NO: 184780 - RNA, 22 nt, Human
gaccuucaguguguuucucaca

SEQ ID NO: 184781 - RNA, 22 nt, Human
uaaaaugguaacuuucauuugc

SEQ ID NO: 184782 - RNA, 22 nt, Human
uuccauaaaggugauaguauac

SEQ ID NO: 184783 - RNA, 23 nt, Human
aaugaguugggcagcauacaggc

SEQ ID NO: 184784 - RNA, 19 nt, Human
ccuggcucugagcccagcc

SEQ ID NO: 184785 - RNA, 22 nt, Human
gugccugggacuugcuccggau

SEQ ID NO: 184786 - RNA, 22 nt, Human
uggcacaguccugggugccugc

SEQ ID NO: 184787 - RNA, 22 nt, Human
gaggagacggggugccuggagc

SEQ ID NO: 184788 - RNA, 19 nt, Human
aggguggcaaaggagggug

SEQ ID NO: 184789 - RNA, 16 nt, Human
gcagaggaaaggggag

SEQ ID NO: 184790 - RNA, 22 nt, Human
uugcugcucccaagaggcagcu

SEQ ID NO: 184791 - RNA, 19 nt, Human
ccuugccugucccugcagc

SEQ ID NO: 184792 - RNA, 22 nt, Human
ccugccaggacauugcuugaag

SEQ ID NO: 184793 - RNA, 22 nt, Human
ugaggcaggaauggggaaaagu

SEQ ID NO: 184794 - RNA, 22 nt, Human
gacccagcuaaccaggugggga

SEQ ID NO: 184795 - RNA, 22 nt, Human
gaggggagacagggaaaucagu

SEQ ID NO: 184796 - RNA, 22 nt, Human
acuuguauggagacuuggaacc

SEQ ID NO: 184797 - RNA, 22 nt, Human
cuggcuugcagcucaucauaaa

SEQ ID NO: 184798 - RNA, 22 nt, Human
acagccagcagagcuguuuccu

SEQ ID NO: 184799 - RNA, 22 nt, Human
gcccagggcugcaaguggacgc

SEQ ID NO: 184800 - RNA, 22 nt, Human
auaguguuagagccaguauguu

SEQ ID NO: 184801 - RNA, 17 nt, Human
uuucaagguuacguucc

SEQ ID NO: 184802 - RNA, 22 nt, Human
ucaggagcugugaauacaaagg

SEQ ID NO: 184803 - RNA, 22 nt, Human
ccucaggaaccacauugcugcu

SEQ ID NO: 184804 - RNA, 22 nt, Human
cagggcucuucaucacacagua

SEQ ID NO: 184805 - RNA, 22 nt, Human
uaacagaaaggcucaggugcuc

SEQ ID NO: 184806 - RNA, 22 nt, Human
gcuucuaaccugcuuccuguag

SEQ ID NO: 184807 - RNA, 22 nt, Human
ugaaguuugaacuguguugcug

SEQ ID NO: 184808 - RNA, 22 nt, Human
gacaggcuuagggagggugcuc

SEQ ID NO: 184809 - RNA, 22 nt, Human
uuuggcuuaacuuacaugauau

SEQ ID NO: 184810 - RNA, 22 nt, Human
uagaaaauggccaagcaggacu

SEQ ID NO: 184811 - RNA, 22 nt, Human
gggcucuggggucagacagccu

SEQ ID NO: 184812 - RNA, 22 nt, Human
uugcaaggugauaaaagaauga

SEQ ID NO: 184813 - RNA, 22 nt, Human
aucaaauaaagguaccuagcuu

SEQ ID NO: 184814 - RNA, 17 nt, Human
aggaagcgagcuggccu

SEQ ID NO: 184815 - RNA, 22 nt, Human
ucagaaguuucaaucccagcug

SEQ ID NO: 184816 - RNA, 21 nt, Human
agccugcaauguagguaccgg

SEQ ID NO: 184817 - RNA, 22 nt, Human
auaucaaagcuaguggaaauuu

SEQ ID NO: 184818 - RNA, 22 nt, Human
ggcaccagcacuugggauggcu

SEQ ID NO: 184819 - RNA, 22 nt, Human
aauucacauauacauuauuccu

SEQ ID NO: 184820 - RNA, 22 nt, Human
ucugcagguagagcucaggaau

SEQ ID NO: 184821 - RNA, 23 nt, Human
uaauacugcuucagaggcuuaga

SEQ ID NO: 184822 - RNA, 22 nt, Human
augaggcaaggcuggccguguu

SEQ ID NO: 184823 - RNA, 22 nt, Human
aaugccuuggagagccuagagg

SEQ ID NO: 184824 - RNA, 22 nt, Human
guauuagguuggugcaaaauug

SEQ ID NO: 184825 - RNA, 22 nt, Human
aggcaguuuauccccagagccu

SEQ ID NO: 184826 - RNA, 21 nt, Human
auugugaccaucauuuuggaa

SEQ ID NO: 184827 - RNA, 22 nt, Human
ggacagagcccugguggccuaa

SEQ ID NO: 184828 - RNA, 22 nt, Human
agccacagugcaagagagaaaa

SEQ ID NO: 184829 - RNA, 22 nt, Human
auuucucaucaagugccaacuc

SEQ ID NO: 184830 - RNA, 22 nt, Human
caccugcagggggagucaagag

SEQ ID NO: 184831 - RNA, 22 nt, Human
aaggccaguggauaaaaccucu

SEQ ID NO: 184832 - RNA, 22 nt, Human
uguuuucuagaaacaaugccua

SEQ ID NO: 184833 - RNA, 22 nt, Human
aaaucagugcucauuugaaagg

SEQ ID NO: 184834 - RNA, 22 nt, Human
gggcagaggcucuggcccaucc

SEQ ID NO: 184835 - RNA, 22 nt, Human
uucugggcagagcuggagcugc

SEQ ID NO: 184836 - RNA, 22 nt, Human
auugucauuggcuucuaugucu

SEQ ID NO: 184837 - RNA, 22 nt, Human
cuuuauguccaccagacugcaa

SEQ ID NO: 184838 - RNA, 22 nt, Human
ccaggcucacagcaucccagga

SEQ ID NO: 184839 - RNA, 22 nt, Human
cuuggccugggccgcagccacu

SEQ ID NO: 184840 - RNA, 22 nt, Human
gcucaggcucucccaggggaau

SEQ ID NO: 184841 - RNA, 22 nt, Human
uagcuucagggaaaccacugcu

SEQ ID NO: 184842 - RNA, 19 nt, Human
uacagugaaccaggaggag

SEQ ID NO: 184843 - RNA, 22 nt, Human
ugagcuguguccugggggcagu

SEQ ID NO: 184844 - RNA, 22 nt, Human
auggcuggcaugugcauaacgg

SEQ ID NO: 184845 - RNA, 22 nt, Human
agacagcuagggcugcagggac

SEQ ID NO: 184846 - RNA, 22 nt, Human
ccaggagagcauugcacagagg

SEQ ID NO: 184847 - RNA, 22 nt, Human
gagacugggggcuuggccuuuu

SEQ ID NO: 184848 - RNA, 22 nt, Human
aagacacagcgaaauguuccug

SEQ ID NO: 184849 - RNA, 22 nt, Human
augacaagaguguucagggaga

SEQ ID NO: 184850 - RNA, 22 nt, Human
aaacaucaauugcaucucccaa

SEQ ID NO: 184851 - RNA, 21 nt, Human
uuaaugcuaugcagaaaaucu

SEQ ID NO: 184852 - RNA, 22 nt, Human
cuuguagaauugaaauggucuc

SEQ ID NO: 184853 - RNA, 22 nt, Human
aacauucaaaacccaguucagu

SEQ ID NO: 184854 - RNA, 18 nt, Human
gugugcucagagagugag

SEQ ID NO: 184855 - RNA, 22 nt, Human
agguggcagcagaaucagggag

SEQ ID NO: 184856 - RNA, 20 nt, Human
uuuaagaaguuucugaggaa

SEQ ID NO: 184857 - RNA, 22 nt, Human
ccaaaggccaagcucagguaaa

SEQ ID NO: 184858 - RNA, 22 nt, Human
agcagguggccuccugucuguc

SEQ ID NO: 184859 - RNA, 20 nt, Human
cuccugugccucucugggcc

SEQ ID NO: 184860 - RNA, 22 nt, Human
agucccagagaggucggggcca

SEQ ID NO: 184861 - RNA, 22 nt, Human
gauggacaccuccugagguucu

SEQ ID NO: 184862 - RNA, 22 nt, Human
cucuccagaucugcugagccag

SEQ ID NO: 184863 - RNA, 22 nt, Human
uuggaggauugcucucagccca

SEQ ID NO: 184864 - RNA, 22 nt, Human
aggucaagauucuacauuugua

SEQ ID NO: 184865 - RNA, 22 nt, Human
uuccauauuguacucuuuggag

SEQ ID NO: 184866 - RNA, 22 nt, Human
cccacauuuuugagucuucauc

SEQ ID NO: 184867 - RNA, 22 nt, Human
gaggaaacauuguagaagcagu

SEQ ID NO: 184868 - RNA, 22 nt, Human
uugggccucucaaagugcuggg

SEQ ID NO: 184869 - RNA, 22 nt, Human
ugacacaguaucaaacaugauu

SEQ ID NO: 184870 - RNA, 22 nt, Human
ucugaaagcauuacaguuuauu

SEQ ID NO: 184871 - RNA, 22 nt, Human
gaagagccaggugucgcugugg

SEQ ID NO: 184872 - RNA, 22 nt, Human
agggccugggccagcacccuuu

SEQ ID NO: 184873 - RNA, 22 nt, Human
uuuggcucaucucaguccuagg

SEQ ID NO: 184874 - RNA, 22 nt, Human
gcauauuaguaaucuuucaaca

SEQ ID NO: 184875 - RNA, 22 nt, Human
acaaugcaccuauuuuaaaacu

SEQ ID NO: 184876 - RNA, 23 nt, Human
aagauccauucaaauuauguauc

SEQ ID NO: 184877 - RNA, 23 nt, Human
uggacgccgacuuuggaggcgcu

SEQ ID NO: 184878 - RNA, 22 nt, Human
caaguccucaaagggcucugcu

SEQ ID NO: 184879 - RNA, 22 nt, Human
uaacaaacuggaaauugacauu

SEQ ID NO: 184880 - RNA, 22 nt, Human
gcucagagcuugaaguuccacu

SEQ ID NO: 184881 - RNA, 22 nt, Human
cucugggaugaggccuaggcac

SEQ ID NO: 184882 - RNA, 22 nt, Human
ugggcacuccuggggacagcug

SEQ ID NO: 184883 - RNA, 22 nt, Human
gcuccuggucuggagcuucaag

SEQ ID NO: 184884 - RNA, 22 nt, Human
cagcagcuggugagacacagcc

SEQ ID NO: 184885 - RNA, 22 nt, Human
gugagcuucugccucucagucc

SEQ ID NO: 184886 - RNA, 22 nt, Human
gugcaaagugcauggggaaggg

SEQ ID NO: 184887 - RNA, 23 nt, Human
uuuugugugacuuaauaucucuu

SEQ ID NO: 184888 - RNA, 22 nt, Human
cagcuuuguggccuugaccucg

SEQ ID NO: 184889 - RNA, 22 nt, Human
uuaguucauagaauguaacagg

SEQ ID NO: 184890 - RNA, 22 nt, Human
ucugaaagaugagugguccauu

SEQ ID NO: 184891 - RNA, 22 nt, Human
ccugcagacacuuguccagcaa

SEQ ID NO: 184892 - RNA, 22 nt, Human
guccagcuccagggaggcaggc

SEQ ID NO: 184893 - RNA, 23 nt, Human
uaggcuucugcuguccccgacgc

SEQ ID NO: 184894 - RNA, 22 nt, Human
aucucuucugagcaauuccugu

SEQ ID NO: 184895 - RNA, 22 nt, Human
uucuaauuguguuugcauaucu

SEQ ID NO: 184896 - RNA, 20 nt, Human
uagggcucauuaugaucucc

SEQ ID NO: 184897 - RNA, 22 nt, Human
uggcuucugggacuugugagca

SEQ ID NO: 184898 - RNA, 22 nt, Human
ccagggcagcagaauuggggca

SEQ ID NO: 184899 - RNA, 22 nt, Human
gccugucaauuuuguguacaau

SEQ ID NO: 184900 - RNA, 22 nt, Human
ugccagcuuguggucagaggcu

SEQ ID NO: 184901 - RNA, 22 nt, Human
acugaugaaaacuaauaaauua

SEQ ID NO: 184902 - RNA, 22 nt, Human
cuucaggaaaaucucuaaggau

SEQ ID NO: 184903 - RNA, 22 nt, Human
ugucagaggcucagggucucag

SEQ ID NO: 184904 - RNA, 22 nt, Human
ugauuuaggaaacagcuacagg

SEQ ID NO: 184905 - RNA, 19 nt, Human
ccauggcaaugaucugaug

SEQ ID NO: 184906 - RNA, 22 nt, Human
ccuauacaggcuucuuuacaug

SEQ ID NO: 184907 - RNA, 22 nt, Human
cuguggcugcgcccugggggag

SEQ ID NO: 184908 - RNA, 22 nt, Human
gcagggcucauugccaggcauu

SEQ ID NO: 184909 - RNA, 22 nt, Human
uaauucuagauugacauuuuga

SEQ ID NO: 184910 - RNA, 21 nt, Human
ugauugauauuugcaaacaga

SEQ ID NO: 184911 - RNA, 22 nt, Human
ugugucugcacugaguccucac

SEQ ID NO: 184912 - RNA, 17 nt, Human
uuauuuuuugggcugag

SEQ ID NO: 184913 - RNA, 22 nt, Human
uaaaauugcggugaauauuucc

SEQ ID NO: 184914 - RNA, 22 nt, Human
agagccugugggagaugcagcu

SEQ ID NO: 184915 - RNA, 22 nt, Human
gucaguuauucaauugguuuaa

SEQ ID NO: 184916 - RNA, 22 nt, Human
gcauggccaggaaagguagaaa

SEQ ID NO: 184917 - RNA, 22 nt, Human
uuuaaugugagucccuuucaag

SEQ ID NO: 184918 - RNA, 22 nt, Human
agaggucucaguuauguuuaaa

SEQ ID NO: 184919 - RNA, 22 nt, Human
gaauacauuggaaaucagaaua

SEQ ID NO: 184920 - RNA, 22 nt, Human
ucauggggcucuucaaguggag

SEQ ID NO: 184921 - RNA, 17 nt, Human
agaggcagauacuugga

SEQ ID NO: 184922 - RNA, 22 nt, Human
aauaucuucuaaggauagaacu

SEQ ID NO: 184923 - RNA, 22 nt, Human
cucagggcuggaaagccaggaa

SEQ ID NO: 184924 - RNA, 21 nt, Human
agguggggcugcaccucugcu

SEQ ID NO: 184925 - RNA, 22 nt, Human
aacacugagaacaauacagagu

SEQ ID NO: 184926 - RNA, 22 nt, Human
ccucccugccggcuggacuagu

SEQ ID NO: 184927 - RNA, 22 nt, Human
cagccucuugcacuuugaaggc

SEQ ID NO: 184928 - RNA, 22 nt, Human
caaggcuuauuuuccuccuucc

SEQ ID NO: 184929 - RNA, 22 nt, Human
uguggcugacuccuggucccca

SEQ ID NO: 184930 - RNA, 21 nt, Human
cucuggagucaagagcuucca

SEQ ID NO: 184931 - RNA, 22 nt, Human
uucugggcauguuacauucugu

SEQ ID NO: 184932 - RNA, 22 nt, Human
uggucugauaccggauuccagu

SEQ ID NO: 184933 - RNA, 20 nt, Human
caggaugauuggacacgaug

SEQ ID NO: 184934 - RNA, 22 nt, Human
cuccugggcucaagugauccuc

SEQ ID NO: 184935 - RNA, 19 nt, Human
ugcucuggagccagcucuc

SEQ ID NO: 184936 - RNA, 22 nt, Human
ugguccagucguuccuuuccuu

SEQ ID NO: 184937 - RNA, 21 nt, Human
aguugcugcugcugcagguga

SEQ ID NO: 184938 - RNA, 22 nt, Human
ucugcuucuccuacuucauggg

SEQ ID NO: 184939 - RNA, 22 nt, Human
uguuuuaguucugucuugcaug

SEQ ID NO: 184940 - RNA, 22 nt, Human
acuuuaaggaggcacucaucuc

SEQ ID NO: 184941 - RNA, 22 nt, Human
auuggucuaggcuuuaaaaaga

SEQ ID NO: 184942 - RNA, 22 nt, Human
ugggugugccauauuccauuuc

SEQ ID NO: 184943 - RNA, 22 nt, Human
ccuuaaacuuuaucuugugaga

SEQ ID NO: 184944 - RNA, 22 nt, Human
ccccacccaccuaagagaaacu

SEQ ID NO: 184945 - RNA, 22 nt, Human
ccagguggugaaagugggcccu

SEQ ID NO: 184946 - RNA, 22 nt, Human
ugucucagguacaugcguccug

SEQ ID NO: 184947 - RNA, 22 nt, Human
uuguagaacaugcagcacaaug

SEQ ID NO: 184948 - RNA, 22 nt, Human
ugcugaaauauuuaugggucaa

SEQ ID NO: 184949 - RNA, 22 nt, Human
cugggagagaagcgaagcuggg

SEQ ID NO: 184950 - RNA, 22 nt, Human
uugaggagcaggaugggaggcu

SEQ ID NO: 184951 - RNA, 22 nt, Human
ucccaaaguauuagcauuucaa

SEQ ID NO: 184952 - RNA, 18 nt, Human
agcccaggcaucgucugc

SEQ ID NO: 184953 - RNA, 22 nt, Human
uuggaauuugcuucagcuaaua

SEQ ID NO: 184954 - RNA, 21 nt, Human
aguccaggaggaggccagguu

SEQ ID NO: 184955 - RNA, 22 nt, Human
cugcacugaagaaaggagcucu

SEQ ID NO: 184956 - RNA, 22 nt, Human
ccagcuccucuugucucuagca

SEQ ID NO: 184957 - RNA, 22 nt, Human
cgccccagccaguugagcggcg

SEQ ID NO: 184958 - RNA, 20 nt, Human
ccuucagaacuuacauagua

SEQ ID NO: 184959 - RNA, 22 nt, Human
gaagcuggagaaugggucuagg

SEQ ID NO: 184960 - RNA, 22 nt, Human
cccaaggcugcagugagcauga

SEQ ID NO: 184961 - RNA, 22 nt, Human
uguuuacagcugaucaggcauc

SEQ ID NO: 184962 - RNA, 22 nt, Human
aggcuuggaaguggcagaacug

SEQ ID NO: 184963 - RNA, 22 nt, Human
caucaagagucuuacuaucagu

SEQ ID NO: 184964 - RNA, 20 nt, Human
ucauuacagugcuaagaugu

SEQ ID NO: 184965 - RNA, 22 nt, Human
gaggaagaagcaaaccagcuaa

SEQ ID NO: 184966 - RNA, 22 nt, Human
aucucuguuagaucugcuuaaa

SEQ ID NO: 184967 - RNA, 22 nt, Human
agcugguguccuccuggagcug

SEQ ID NO: 184968 - RNA, 22 nt, Human
auguuuugcuggauguuggcua

SEQ ID NO: 184969 - RNA, 22 nt, Human
aagagacuauggugucuaugaa

SEQ ID NO: 184970 - RNA, 22 nt, Human
ucacagaaaaguggagagccua

SEQ ID NO: 184971 - RNA, 22 nt, Human
uucuggguaguaugguuaguuu

SEQ ID NO: 184972 - RNA, 22 nt, Human
auuuaauuaaucauggugaauu

SEQ ID NO: 184973 - RNA, 22 nt, Human
aucucugcguccccagcaucga

SEQ ID NO: 184974 - RNA, 22 nt, Human
auguggggacaaaaugauggcc

SEQ ID NO: 184975 - RNA, 22 nt, Human
uguccagggggcuuaccuggag

SEQ ID NO: 184976 - RNA, 22 nt, Human
ggacaggaugcugaagaugaag

SEQ ID NO: 184977 - RNA, 22 nt, Human
gcucucucgugaacaggugguu

SEQ ID NO: 184978 - RNA, 22 nt, Human
agugauuagaaaguacacuugg

SEQ ID NO: 184979 - RNA, 22 nt, Human
agcugcccaaggucacagagcu

SEQ ID NO: 184980 - RNA, 22 nt, Human
uaaaauguagcuucuaggcugg

SEQ ID NO: 184981 - RNA, 22 nt, Human
caucauacuguuuacacucaaa

SEQ ID NO: 184982 - RNA, 22 nt, Human
uacaaaaggaagagggaucuua

SEQ ID NO: 184983 - RNA, 22 nt, Human
uguuagaaaggcuauuggacca

SEQ ID NO: 184984 - RNA, 22 nt, Human
augcaggguucugggcuagaga

SEQ ID NO: 184985 - RNA, 22 nt, Human
uggaaacuagagaguuuguauu

SEQ ID NO: 184986 - RNA, 21 nt, Human
aaggcugagacaacucaggag

SEQ ID NO: 184987 - RNA, 22 nt, Human
caggcagggagcuggaaaggau

SEQ ID NO: 184988 - RNA, 22 nt, Human
uaaaugaagaaauggagauugu

SEQ ID NO: 184989 - RNA, 22 nt, Human
uaugcagcaccacucacugcag

SEQ ID NO: 184990 - RNA, 22 nt, Human
guugaaaauacagauuccuagg

SEQ ID NO: 184991 - RNA, 22 nt, Human
uuugcaguguucaucaguauuu

SEQ ID NO: 184992 - RNA, 21 nt, Human
uucuucaggccaaugcucauu

SEQ ID NO: 184993 - RNA, 22 nt, Human
aaaugcagauugucauucagga

SEQ ID NO: 184994 - RNA, 22 nt, Human
ccugggagguggagguugcagc

SEQ ID NO: 184995 - RNA, 22 nt, Human
ccuggagcacagcccaguccca

SEQ ID NO: 184996 - RNA, 22 nt, Human
ugaggcaggaguuaaugugcuc

SEQ ID NO: 184997 - RNA, 22 nt, Human
aucucuguaauuacaugauauu

SEQ ID NO: 184998 - RNA, 22 nt, Human
cugagcaguagagggucucuuu

SEQ ID NO: 184999 - RNA, 22 nt, Human
agcaguuuggaaaauacuagaa

SEQ ID NO: 185000 - RNA, 22 nt, Human
acuuguuuggucucauguuuaa

SEQ ID NO: 185001 - RNA, 22 nt, Human
cugugugccuagaggguggccg

SEQ ID NO: 185002 - RNA, 22 nt, Human
cuuuucugugaugcugacaguc

SEQ ID NO: 185003 - RNA, 22 nt, Human
aaaaguuaccucuguaauauaa

SEQ ID NO: 185004 - RNA, 22 nt, Human
gccagaagggguggauccaggc

SEQ ID NO: 185005 - RNA, 22 nt, Human
uuuucaguuacuguuuauguga

SEQ ID NO: 185006 - RNA, 22 nt, Human
gaggcagcggcucacagagaaa

SEQ ID NO: 185007 - RNA, 22 nt, Human
uacagucaagcauaagaaguca

SEQ ID NO: 185008 - RNA, 22 nt, Human
uguauauucacugagcaagggg

SEQ ID NO: 185009 - RNA, 22 nt, Human
caaauacuggguaaguuaauuu

SEQ ID NO: 185010 - RNA, 22 nt, Human
agagucagaaagcagacagggg

SEQ ID NO: 185011 - RNA, 22 nt, Human
aacaugcaugaagaaguuauau

SEQ ID NO: 185012 - RNA, 22 nt, Human
aaaaaccucaauuacuuuugca

SEQ ID NO: 185013 - RNA, 22 nt, Human
caccagggccccaggcugugcc

SEQ ID NO: 185014 - RNA, 22 nt, Human
aucuuuggguacaaacuugccu

SEQ ID NO: 185015 - RNA, 22 nt, Human
gugaccauccugguaaugaauc

SEQ ID NO: 185016 - RNA, 22 nt, Human
cugggcugcuguccacuagggu

SEQ ID NO: 185017 - RNA, 22 nt, Human
gcugggagaggcagcuuucgga

SEQ ID NO: 185018 - RNA, 22 nt, Human
acauuucuaauuuaauguaaca

SEQ ID NO: 185019 - RNA, 22 nt, Human
uaucagcucggaaucuguugaa

SEQ ID NO: 185020 - RNA, 22 nt, Human
caggccuugcgucccauggccu

SEQ ID NO: 185021 - RNA, 17 nt, Human
accagccucuccugggg

SEQ ID NO: 185022 - RNA, 23 nt, Human
auugaugacuugauuacacuuuu

SEQ ID NO: 185023 - RNA, 21 nt, Human
uuuguucauagcucacucuuu

SEQ ID NO: 185024 - RNA, 22 nt, Human
ccccacaggugucugaggcagg

SEQ ID NO: 185025 - RNA, 22 nt, Human
gugugcuguuguucagguagaa

SEQ ID NO: 185026 - RNA, 22 nt, Human
ucaguucugcuagaaaaacagu

SEQ ID NO: 185027 - RNA, 22 nt, Human
cugaagcaaaugaaacagcucu

SEQ ID NO: 185028 - RNA, 22 nt, Human
cagugucugggacagaaaguca

SEQ ID NO: 185029 - RNA, 22 nt, Human
gccuccaguuuuuuucugaacu

SEQ ID NO: 185030 - RNA, 22 nt, Human
acuuucauuuguaauaaacuuc

SEQ ID NO: 185031 - RNA, 22 nt, Human
gagucagaauuguauuuuaaac

SEQ ID NO: 185032 - RNA, 22 nt, Human
ucuccccagggguauggguauu

SEQ ID NO: 185033 - RNA, 22 nt, Human
cucccuggcacagcgagagguu

SEQ ID NO: 185034 - RNA, 22 nt, Human
uuugcuuuguuuaaaaguggua

SEQ ID NO: 185035 - RNA, 22 nt, Human
gacaggccagacaggagacuga

SEQ ID NO: 185036 - RNA, 22 nt, Human
agaaagcuggaagagcugggau

SEQ ID NO: 185037 - RNA, 18 nt, Human
uccuggcagucagagagg

SEQ ID NO: 185038 - RNA, 22 nt, Human
ugagaugcuaaagggcugcuca

SEQ ID NO: 185039 - RNA, 22 nt, Human
ucaauucuagagccuuacauug

SEQ ID NO: 185040 - RNA, 22 nt, Human
uuauucacaugggcucauucua

SEQ ID NO: 185041 - RNA, 22 nt, Human
gcuccuggcucuggccaaggga

SEQ ID NO: 185042 - RNA, 22 nt, Human
ucuuccagcuucuagaggaugc

SEQ ID NO: 185043 - RNA, 22 nt, Human
aagugcauuagauagaaugaug

SEQ ID NO: 185044 - RNA, 22 nt, Human
aucaagagaaggggaagaugaa

SEQ ID NO: 185045 - RNA, 22 nt, Human
acucuguagccuguaagagagc

SEQ ID NO: 185046 - RNA, 18 nt, Human
gacacaggagagaguccc

SEQ ID NO: 185047 - RNA, 22 nt, Human
auucucaaacaagugguuugau

SEQ ID NO: 185048 - RNA, 22 nt, Human
uccugugcuuuggaugcuuaga

SEQ ID NO: 185049 - RNA, 22 nt, Human
ggcucaggccuguaauccuagc

SEQ ID NO: 185050 - RNA, 23 nt, Human
guaaaauacgcagugcaguguga

SEQ ID NO: 185051 - RNA, 22 nt, Human
agggcugcccagugugagagcu

SEQ ID NO: 185052 - RNA, 22 nt, Human
cauccugagaggucucucuacc

SEQ ID NO: 185053 - RNA, 22 nt, Human
aauaagagcacuggcuuuggag

SEQ ID NO: 185054 - RNA, 22 nt, Human
auaugcuuaugaugguuaauuu

SEQ ID NO: 185055 - RNA, 22 nt, Human
acccagagaacugugccuugag

SEQ ID NO: 185056 - RNA, 21 nt, Human
guuugcaugaacaagucagcc

SEQ ID NO: 185057 - RNA, 22 nt, Human
ugaaauuauucuuaccaaggug

SEQ ID NO: 185058 - RNA, 22 nt, Human
cagcugaauggcucccugcuaa

SEQ ID NO: 185059 - RNA, 22 nt, Human
ggaggaaaggcucccucccucu

SEQ ID NO: 185060 - RNA, 22 nt, Human
uucaauucugaugaaggcaaua

SEQ ID NO: 185061 - RNA, 22 nt, Human
ugaagccauaggacagaggaua

SEQ ID NO: 185062 - RNA, 22 nt, Human
agggccagcugcagaauuagca

SEQ ID NO: 185063 - RNA, 22 nt, Human
cagauucacuaauagcuggccu

SEQ ID NO: 185064 - RNA, 22 nt, Human
gauggcuggcuauaucagggga

SEQ ID NO: 185065 - RNA, 20 nt, Human
caucaucacaugagccaauu

SEQ ID NO: 185066 - RNA, 22 nt, Human
gacacagguagaauaaaguacu

SEQ ID NO: 185067 - RNA, 22 nt, Human
aggccuggccccaguugcuagg

SEQ ID NO: 185068 - RNA, 22 nt, Human
agaaguggucugucuuccagau

SEQ ID NO: 185069 - RNA, 22 nt, Human
gagucuggcccugaugcaucau

SEQ ID NO: 185070 - RNA, 22 nt, Human
gauuagaauaugucagucauaa

SEQ ID NO: 185071 - RNA, 20 nt, Human
auauuucuuaagaacuuuca

SEQ ID NO: 185072 - RNA, 22 nt, Human
cauccauagauugagagauggu

SEQ ID NO: 185073 - RNA, 22 nt, Human
ugcccauguuucucuguauccc

SEQ ID NO: 185074 - RNA, 22 nt, Human
cuguuuaucucuaaccuguuua

SEQ ID NO: 185075 - RNA, 22 nt, Human
ucugauauaaaagugacauuca

SEQ ID NO: 185076 - RNA, 22 nt, Human
cuucucagcauuuugucagucu

SEQ ID NO: 185077 - RNA, 20 nt, Human
ucagguagaucuuugagguc

SEQ ID NO: 185078 - RNA, 22 nt, Human
aucacaucucaccacugcaacc

SEQ ID NO: 185079 - RNA, 22 nt, Human
ugaggccauggaacuagcuugg

SEQ ID NO: 185080 - RNA, 22 nt, Human
gcgugugugauaugccucugca

SEQ ID NO: 185081 - RNA, 22 nt, Human
uaauuauagcauuggaguggcc

SEQ ID NO: 185082 - RNA, 22 nt, Human
ugauuaaauuaauuaagaugag

SEQ ID NO: 185083 - RNA, 22 nt, Human
acaggaaaugaaaugguaucua

SEQ ID NO: 185084 - RNA, 22 nt, Human
aacuagaacgagaaagcugaac

SEQ ID NO: 185085 - RNA, 22 nt, Human
acggugcuggguauugggguuc

SEQ ID NO: 185086 - RNA, 22 nt, Human
auggcagcaguccauugccuca

SEQ ID NO: 185087 - RNA, 22 nt, Human
gugaaguugauuguuaucguca

SEQ ID NO: 185088 - RNA, 22 nt, Human
agucaguguagaaagcccaggc

SEQ ID NO: 185089 - RNA, 22 nt, Human
gugcugugugauccaugcuggc

SEQ ID NO: 185090 - RNA, 22 nt, Human
cacaguuaugggaaacguaguu

SEQ ID NO: 185091 - RNA, 22 nt, Human
ucugcugugucccuggucuccu

SEQ ID NO: 185092 - RNA, 22 nt, Human
accaugaugcauccuuaaggaa

SEQ ID NO: 185093 - RNA, 20 nt, Human
gcagugcuggugccucugcu

SEQ ID NO: 185094 - RNA, 22 nt, Human
ggagccugguuacuagagccug

SEQ ID NO: 185095 - RNA, 22 nt, Human
cugccuggggaaugugaggauu

SEQ ID NO: 185096 - RNA, 22 nt, Human
caggaaacauucccauaacaca

SEQ ID NO: 185097 - RNA, 22 nt, Human
uuuccaaguacugagcugucaa

SEQ ID NO: 185098 - RNA, 22 nt, Human
auuucagagaaugaaccuaauc

SEQ ID NO: 185099 - RNA, 19 nt, Human
aguuuagagagacucuaaa

SEQ ID NO: 185100 - RNA, 22 nt, Human
ggucaggaaaagacuccccaga

SEQ ID NO: 185101 - RNA, 22 nt, Human
agccugcugggaagggaggcuu

SEQ ID NO: 185102 - RNA, 22 nt, Human
uccagaaaaaguaauuuauuug

SEQ ID NO: 185103 - RNA, 22 nt, Human
agugggagcggcagucggggac

SEQ ID NO: 185104 - RNA, 22 nt, Human
agggcugaaacauaauccuucu

SEQ ID NO: 185105 - RNA, 21 nt, Human
uucaaaguuugccuaaagauu

SEQ ID NO: 185106 - RNA, 22 nt, Human
agagcuuugggacauuugcuag

SEQ ID NO: 185107 - RNA, 22 nt, Human
cauguacaguuuuucuguccug

SEQ ID NO: 185108 - RNA, 23 nt, Human
ugacagaccuucccagacaguca

SEQ ID NO: 185109 - RNA, 22 nt, Human
aaagugcagcugaaaacauccu

SEQ ID NO: 185110 - RNA, 22 nt, Human
uuucauucauuauacaguagag

SEQ ID NO: 185111 - RNA, 22 nt, Human
aggcucugucaggcggagcagc

SEQ ID NO: 185112 - RNA, 22 nt, Human
ccuugaaacccugacacucugu

SEQ ID NO: 185113 - RNA, 22 nt, Human
agcacaauagagcaguuaaaaa

SEQ ID NO: 185114 - RNA, 22 nt, Human
gagggugcaggaggaugguagu

SEQ ID NO: 185115 - RNA, 23 nt, Human
uuacaugugugcacacauucugg

SEQ ID NO: 185116 - RNA, 22 nt, Human
ggcucuugggagcucagaguug

SEQ ID NO: 185117 - RNA, 22 nt, Human
cuuuggaguucccuaauuuccc

SEQ ID NO: 185118 - RNA, 22 nt, Human
ugggccacacacagaagaauca

SEQ ID NO: 185119 - RNA, 22 nt, Human
ucacacauuugaaggccuguca

SEQ ID NO: 185120 - RNA, 22 nt, Human
uacauaauugucuuuguccuca

SEQ ID NO: 185121 - RNA, 22 nt, Human
aaaucccaaugcuagacccggu

SEQ ID NO: 185122 - RNA, 21 nt, Human
ccugugccaaaguguguuagg

SEQ ID NO: 185123 - RNA, 22 nt, Human
ugucuucagaauuaagaguaug

SEQ ID NO: 185124 - RNA, 22 nt, Human
ccagccuggggaggcagcuucu

SEQ ID NO: 185125 - RNA, 22 nt, Human
gagaugaagaggcccuuggagu

SEQ ID NO: 185126 - RNA, 22 nt, Human
uucccagucccaagaaaagcca

SEQ ID NO: 185127 - RNA, 21 nt, Human
uggaggaauaaagcacagaag

SEQ ID NO: 185128 - RNA, 19 nt, Human
uuucauguuuuuggugaga

SEQ ID NO: 185129 - RNA, 21 nt, Human
cucugcccagggccuccugcc

SEQ ID NO: 185130 - RNA, 22 nt, Human
acauucuauucugcaggacaag

SEQ ID NO: 185131 - RNA, 22 nt, Human
acuccugugggcauggcacccc

SEQ ID NO: 185132 - RNA, 20 nt, Human
guuuccuauuuaccuccuca

SEQ ID NO: 185133 - RNA, 22 nt, Human
gcauaggcacuuuccuccuccu

SEQ ID NO: 185134 - RNA, 22 nt, Human
gcagaggaucaggcucuggaaa

SEQ ID NO: 185135 - RNA, 22 nt, Human
cccugccuugggguccacaccg

SEQ ID NO: 185136 - RNA, 22 nt, Human
aagugauucuagucaugauucu

SEQ ID NO: 185137 - RNA, 22 nt, Human
uaaauacuuaguuuugugucua

SEQ ID NO: 185138 - RNA, 22 nt, Human
gcuccucuccucggagucgggg

SEQ ID NO: 185139 - RNA, 22 nt, Human
uuugacuccuuugugaaaagag

SEQ ID NO: 185140 - RNA, 22 nt, Human
ucaagcaacagaacugugagac

SEQ ID NO: 185141 - RNA, 22 nt, Human
ucuuguuucuucuaagcagcag

SEQ ID NO: 185142 - RNA, 22 nt, Human
aagguauuggggaauauuugac

SEQ ID NO: 185143 - RNA, 22 nt, Human
cauauuugguauaacuuaagca

SEQ ID NO: 185144 - RNA, 22 nt, Human
aaaguacaugcaauucuucuga

SEQ ID NO: 185145 - RNA, 22 nt, Human
ggcaagcucaggccucaggugu

SEQ ID NO: 185146 - RNA, 22 nt, Human
uccaggagguuuggaggaagca

SEQ ID NO: 185147 - RNA, 22 nt, Human
gcagggcacagacagugccaag

SEQ ID NO: 185148 - RNA, 17 nt, Human
ugagacagggcaggccc

SEQ ID NO: 185149 - RNA, 22 nt, Human
ugguggcuucugaggauggcga

SEQ ID NO: 185150 - RNA, 22 nt, Human
agugggaccggugcuauuccag

SEQ ID NO: 185151 - RNA, 22 nt, Human
gcugucugggaggccuccacuu

SEQ ID NO: 185152 - RNA, 22 nt, Human
cugcagggcauuguaacucuuu

SEQ ID NO: 185153 - RNA, 22 nt, Human
ugcaaauauuuccuuauagcca

SEQ ID NO: 185154 - RNA, 22 nt, Human
cccagcaggucggugcugccug

SEQ ID NO: 185155 - RNA, 22 nt, Human
ccugguccuuacgucauugcuu

SEQ ID NO: 185156 - RNA, 22 nt, Human
agcucccagcuccuuugagaga

SEQ ID NO: 185157 - RNA, 23 nt, Human
accagcugcccugaacuuugugc

SEQ ID NO: 185158 - RNA, 22 nt, Human
uggaagcuguggcauaacugag

SEQ ID NO: 185159 - RNA, 20 nt, Human
uggcagaguugucccaccca

SEQ ID NO: 185160 - RNA, 22 nt, Human
uagguucacuuagcugugggaa

SEQ ID NO: 185161 - RNA, 22 nt, Human
ugagcacagcuuucacuagaaa

SEQ ID NO: 185162 - RNA, 22 nt, Human
auacuuuagagcuagauugccu

SEQ ID NO: 185163 - RNA, 22 nt, Human
aaggccaggcagggagcuguga

SEQ ID NO: 185164 - RNA, 22 nt, Human
ggcugcccucgucuacugccca

SEQ ID NO: 185165 - RNA, 18 nt, Human
agcuccuggucucaggga

SEQ ID NO: 185166 - RNA, 22 nt, Human
uacaaacuuguuuuaaguaagu

SEQ ID NO: 185167 - RNA, 22 nt, Human
cacagcagacagggaggcggcu

SEQ ID NO: 185168 - RNA, 22 nt, Human
augugaaaaauuucuuauuaca

SEQ ID NO: 185169 - RNA, 22 nt, Human
gaaacauuuguugaguacuugc

SEQ ID NO: 185170 - RNA, 22 nt, Human
uccaguuuccaaucacugcacg

SEQ ID NO: 185171 - RNA, 22 nt, Human
uuagaacaguagaagaaagggu

SEQ ID NO: 185172 - RNA, 22 nt, Human
gaaaggcucagauucccccagg

SEQ ID NO: 185173 - RNA, 22 nt, Human
uuucuuuccagagugauuggca

SEQ ID NO: 185174 - RNA, 22 nt, Human
ucuggcucuauaacuccuagcu

SEQ ID NO: 185175 - RNA, 22 nt, Human
cugugugucauuugucaauccu

SEQ ID NO: 185176 - RNA, 22 nt, Human
cauaacauuaagccucuauuuc

SEQ ID NO: 185177 - RNA, 22 nt, Human
ccugggaggcggagguugcagg

SEQ ID NO: 185178 - RNA, 22 nt, Human
cugcauaugauagaugccuugc

SEQ ID NO: 185179 - RNA, 22 nt, Human
ucagcuguguaucccagggccu

SEQ ID NO: 185180 - RNA, 22 nt, Human
uggcugugucccuguccagagu

SEQ ID NO: 185181 - RNA, 22 nt, Human
ucauuuaugcaggaauggcaua

SEQ ID NO: 185182 - RNA, 22 nt, Human
gggugggacucuuuggccugag

SEQ ID NO: 185183 - RNA, 22 nt, Human
uuaagacacauuucucagacgg

SEQ ID NO: 185184 - RNA, 22 nt, Human
uggcucagccagcccuaggaac

SEQ ID NO: 185185 - RNA, 22 nt, Human
uguuagcagagcagcugacaga

SEQ ID NO: 185186 - RNA, 22 nt, Human
agcauaaaggucaacguuuuag

SEQ ID NO: 185187 - RNA, 22 nt, Human
gagucagaaacucacucuauag

SEQ ID NO: 185188 - RNA, 22 nt, Human
aagggcuggucuagaaagggag

SEQ ID NO: 185189 - RNA, 20 nt, Human
ugguccugucccacccacuc

SEQ ID NO: 185190 - RNA, 22 nt, Human
cagcugaguuuccaagucugcc

SEQ ID NO: 185191 - RNA, 22 nt, Human
gacaagcucgccugccccggaa

SEQ ID NO: 185192 - RNA, 22 nt, Human
uacaaugcugugcauguaaugg

SEQ ID NO: 185193 - RNA, 16 nt, Human
gaggcuggcagauguc

SEQ ID NO: 185194 - RNA, 22 nt, Human
ucauggaaacagcaaugcuaau

SEQ ID NO: 185195 - RNA, 23 nt, Human
uuucacagcuuuuauucugcauc

SEQ ID NO: 185196 - RNA, 22 nt, Human
agccccagccccucucucacaa

SEQ ID NO: 185197 - RNA, 22 nt, Human
agaguguuucagucuuccuaga

SEQ ID NO: 185198 - RNA, 22 nt, Human
auguuucugaguguauauacau

SEQ ID NO: 185199 - RNA, 22 nt, Human
ucaauaacuuuguuuagcauug

SEQ ID NO: 185200 - RNA, 22 nt, Human
agagaagggccuguauguaauc

SEQ ID NO: 185201 - RNA, 22 nt, Human
uagguguccucguccaaagauu

SEQ ID NO: 185202 - RNA, 22 nt, Human
cucccuggaggugagcuggcac

SEQ ID NO: 185203 - RNA, 22 nt, Human
caggcugcauggagggguacag

SEQ ID NO: 185204 - RNA, 22 nt, Human
augagagccaccaugcuucugu

SEQ ID NO: 185205 - RNA, 22 nt, Human
uucacauucucacaagaggaaa

SEQ ID NO: 185206 - RNA, 22 nt, Human
agcuuuaucacaauauuggcua

SEQ ID NO: 185207 - RNA, 22 nt, Human
guacauucagcuuagcacuucu

SEQ ID NO: 185208 - RNA, 22 nt, Human
guuuauugauaaaagcuggaca

SEQ ID NO: 185209 - RNA, 22 nt, Human
gaaggccucacucugcagcaua

SEQ ID NO: 185210 - RNA, 22 nt, Human
caggcagcaucagucugcugua

SEQ ID NO: 185211 - RNA, 22 nt, Human
aggcccuggucaggucuggcug

SEQ ID NO: 185212 - RNA, 23 nt, Human
cacuccuguuucuaagccagcau

SEQ ID NO: 185213 - RNA, 19 nt, Human
guucuuuucaccucugugc

SEQ ID NO: 185214 - RNA, 18 nt, Human
gcaggcuuuuccuggguc

SEQ ID NO: 185215 - RNA, 22 nt, Human
uaaaucuucuacaucaucauaa

SEQ ID NO: 185216 - RNA, 22 nt, Human
guauacaauacacaaugcucug

SEQ ID NO: 185217 - RNA, 22 nt, Human
aagcauuuauagauaagaauuu

SEQ ID NO: 185218 - RNA, 22 nt, Human
ucuucuguauuguuaacucagg

SEQ ID NO: 185219 - RNA, 17 nt, Human
ggaaaaggaugauacag

SEQ ID NO: 185220 - RNA, 22 nt, Human
ucaaaggcgguccaggaauaaa

SEQ ID NO: 185221 - RNA, 22 nt, Human
uuuauucacuggggucugcccg

SEQ ID NO: 185222 - RNA, 22 nt, Human
gccaguguuuauagcagugagg

SEQ ID NO: 185223 - RNA, 22 nt, Human
gaguguauggaaggaagagauu

SEQ ID NO: 185224 - RNA, 22 nt, Human
cuuaaaggucauucuguugaua

SEQ ID NO: 185225 - RNA, 22 nt, Human
aaaauucucuugaucuugacag

SEQ ID NO: 185226 - RNA, 22 nt, Human
gucuaugauauuuuguuauagc

SEQ ID NO: 185227 - RNA, 22 nt, Human
aaucuucuacuugacaguucuc

SEQ ID NO: 185228 - RNA, 22 nt, Human
ggacaggugugaggcuggcaca

SEQ ID NO: 185229 - RNA, 22 nt, Human
gcuccagcaccuagagcagguc

SEQ ID NO: 185230 - RNA, 17 nt, Human
auuucacuuagcaugag

SEQ ID NO: 185231 - RNA, 22 nt, Human
agacaauggaccaagcaccuuc

SEQ ID NO: 185232 - RNA, 22 nt, Human
gaggcaguggucugaugcaagg

SEQ ID NO: 185233 - RNA, 22 nt, Human
uucagucucaagugcugcucac

SEQ ID NO: 185234 - RNA, 22 nt, Human
ucagaacauuuaaaaagugguu

SEQ ID NO: 185235 - RNA, 22 nt, Human
uaugaacugugagugugauggg

SEQ ID NO: 185236 - RNA, 22 nt, Human
ccucccacuucuugcugagguc

SEQ ID NO: 185237 - RNA, 17 nt, Human
uuucaaagcagucagga

SEQ ID NO: 185238 - RNA, 22 nt, Human
uccaggcuagccugguagagaa

SEQ ID NO: 185239 - RNA, 22 nt, Human
auucuucauggcugugaguccu

SEQ ID NO: 185240 - RNA, 21 nt, Human
ucuccaguugacagugucucc

SEQ ID NO: 185241 - RNA, 22 nt, Human
cauggcagccugcccugcuugc

SEQ ID NO: 185242 - RNA, 22 nt, Human
gacaggcuggcaaugcccugcu

SEQ ID NO: 185243 - RNA, 22 nt, Human
acaggcagagaacucagccaga

SEQ ID NO: 185244 - RNA, 22 nt, Human
aguggcagguguuucguggugc

SEQ ID NO: 185245 - RNA, 22 nt, Human
cucugaggaagucaaguagcca

SEQ ID NO: 185246 - RNA, 22 nt, Human
caggaagauuagaccaagagcu

SEQ ID NO: 185247 - RNA, 22 nt, Human
gcuguggcgauugguaucgauu

SEQ ID NO: 185248 - RNA, 22 nt, Human
agauaaacccaacuuaaugaag

SEQ ID NO: 185249 - RNA, 22 nt, Human
uuugaaaggugucgagaugugu

SEQ ID NO: 185250 - RNA, 22 nt, Human
ugcugggcuugaaagcugcuaa

SEQ ID NO: 185251 - RNA, 19 nt, Human
ugccuggcaccagcuccac

SEQ ID NO: 185252 - RNA, 22 nt, Human
uuucaaaguggagaauuagaca

SEQ ID NO: 185253 - RNA, 22 nt, Human
acuuuacucuucauaugugaca

SEQ ID NO: 185254 - RNA, 22 nt, Human
cacugagaccagagucccugac

SEQ ID NO: 185255 - RNA, 22 nt, Human
cugccagggaggcugggaaguu

SEQ ID NO: 185256 - RNA, 18 nt, Human
ugggcacaaugaacagca

SEQ ID NO: 185257 - RNA, 22 nt, Human
uauuccagaugaaaucauucag

SEQ ID NO: 185258 - RNA, 22 nt, Human
aauagcauguuaauaaccagag

SEQ ID NO: 185259 - RNA, 22 nt, Human
cauuuguaguuaaaaaugucuc

SEQ ID NO: 185260 - RNA, 23 nt, Human
acagggcuuaucugucacucauc

SEQ ID NO: 185261 - RNA, 22 nt, Human
ggcugaggggcccagaggaaca

SEQ ID NO: 185262 - RNA, 22 nt, Human
gggcucuggaguucuagaaaga

SEQ ID NO: 185263 - RNA, 22 nt, Human
uaccucaaguuccaggaaagcg

SEQ ID NO: 185264 - RNA, 22 nt, Human
auuucucauuuugcuucaaagg

SEQ ID NO: 185265 - RNA, 22 nt, Human
ccaggcuguuuucaaacuuggg

SEQ ID NO: 185266 - RNA, 19 nt, Human
uuucuaguuucagcuuguc

SEQ ID NO: 185267 - RNA, 22 nt, Human
aaauauguuuuccaguugucau

SEQ ID NO: 185268 - RNA, 22 nt, Human
ccuuugugguggcccagugugg

SEQ ID NO: 185269 - RNA, 22 nt, Human
gcccugguuuuagaggagcagg

SEQ ID NO: 185270 - RNA, 22 nt, Human
aguuuacaaaguuucacuguuc

SEQ ID NO: 185271 - RNA, 22 nt, Human
caucacuacaaauuuaagaaau

SEQ ID NO: 185272 - RNA, 19 nt, Human
aaugaguuccaugaaaaga

SEQ ID NO: 185273 - RNA, 22 nt, Human
uaaaguuuguagcaauugauau

SEQ ID NO: 185274 - RNA, 22 nt, Human
uucuagaaacuggagcaaacag

SEQ ID NO: 185275 - RNA, 22 nt, Human
agauccaucaucauauuuucua

SEQ ID NO: 185276 - RNA, 22 nt, Human
gagcugcagcggcugacgcaac

SEQ ID NO: 185277 - RNA, 22 nt, Human
acauuugagcauauuucuuguc

SEQ ID NO: 185278 - RNA, 22 nt, Human
auuuacaggacagcuuggcauu

SEQ ID NO: 185279 - RNA, 22 nt, Human
cugaggaagacagcagcugugu

SEQ ID NO: 185280 - RNA, 22 nt, Human
uauagcaacuccaaagagacuu

SEQ ID NO: 185281 - RNA, 17 nt, Human
ucagcaaagacaaagga

SEQ ID NO: 185282 - RNA, 22 nt, Human
gcuguucuccgaugaccccgug

SEQ ID NO: 185283 - RNA, 22 nt, Human
auuagauacacagauuuccacu

SEQ ID NO: 185284 - RNA, 22 nt, Human
uucuuuuuaaaguguguaugca

SEQ ID NO: 185285 - RNA, 22 nt, Human
cggcagagcggcgagccccucc

SEQ ID NO: 185286 - RNA, 22 nt, Human
aaagcagugcaccuuaauugau

SEQ ID NO: 185287 - RNA, 19 nt, Human
uggcugagcuggacugagg

SEQ ID NO: 185288 - RNA, 22 nt, Human
uguacauagaaaggauacagcu

SEQ ID NO: 185289 - RNA, 20 nt, Human
accagagauagcaauagugc

SEQ ID NO: 185290 - RNA, 22 nt, Human
auuucuguuugcuacuauaagu

SEQ ID NO: 185291 - RNA, 22 nt, Human
gugaauuacauguauuuuuaag

SEQ ID NO: 185292 - RNA, 22 nt, Human
ucuuuuaagccucuggcauagg

SEQ ID NO: 185293 - RNA, 22 nt, Human
ggcagugcaaggcagccuggau

SEQ ID NO: 185294 - RNA, 22 nt, Human
cuacccagcaccuaggcugccu

SEQ ID NO: 185295 - RNA, 19 nt, Human
acauugaauuuucuucuuu

SEQ ID NO: 185296 - RNA, 22 nt, Human
gagcugccuacauugccaagag

SEQ ID NO: 185297 - RNA, 22 nt, Human
ugagggcuccccgcugcugugu

SEQ ID NO: 185298 - RNA, 22 nt, Human
aggcccugcccagugccacaag

SEQ ID NO: 185299 - RNA, 22 nt, Human
cugaggccgucugggucugcag

SEQ ID NO: 185300 - RNA, 22 nt, Human
aggauaacuuugaaaguaaauu

SEQ ID NO: 185301 - RNA, 22 nt, Human
agccagaggaacuugaugacug

SEQ ID NO: 185302 - RNA, 20 nt, Human
cagggccacgcuccaaggca

SEQ ID NO: 185303 - RNA, 22 nt, Human
agaaucuucagucuaauuccua

SEQ ID NO: 185304 - RNA, 20 nt, Human
ccacagaggacagggcugug

SEQ ID NO: 185305 - RNA, 22 nt, Human
agcacauaccagaaccacaggu

SEQ ID NO: 185306 - RNA, 22 nt, Human
aggaggcuguggagcacuccau

SEQ ID NO: 185307 - RNA, 22 nt, Human
aggcuucugugagcucauacaa

SEQ ID NO: 185308 - RNA, 22 nt, Human
gagaauuagggcguaauucaga

SEQ ID NO: 185309 - RNA, 22 nt, Human
cugggccuagcaacagaggagu

SEQ ID NO: 185310 - RNA, 22 nt, Human
agacagguaaauagagaugcug

SEQ ID NO: 185311 - RNA, 22 nt, Human
ugaggggauacgguacacauug

SEQ ID NO: 185312 - RNA, 22 nt, Human
cucugugauucucauguaccac

SEQ ID NO: 185313 - RNA, 22 nt, Human
cuuuaauucucaggugcacaua

SEQ ID NO: 185314 - RNA, 22 nt, Human
uggagaagauuggucaccauuc

SEQ ID NO: 185315 - RNA, 22 nt, Human
ucugggugaugaaaugcacugu

SEQ ID NO: 185316 - RNA, 22 nt, Human
ugcucugcacaucccucacaaa

SEQ ID NO: 185317 - RNA, 22 nt, Human
cagcuccugggccaucuccuag

SEQ ID NO: 185318 - RNA, 20 nt, Human
aaugaaguuauuaaugaugu

SEQ ID NO: 185319 - RNA, 22 nt, Human
gccaccagugggggccugggca

SEQ ID NO: 185320 - RNA, 22 nt, Human
uuggaggaagcucaugggggau

SEQ ID NO: 185321 - RNA, 22 nt, Human
ggcaagagguccaagaggucuc

SEQ ID NO: 185322 - RNA, 22 nt, Human
acagcuuuguguuaaugggaag

SEQ ID NO: 185323 - RNA, 22 nt, Human
ccuggaaaacaugggaaucaca

SEQ ID NO: 185324 - RNA, 22 nt, Human
uggggcucaccuaggcuggaag

SEQ ID NO: 185325 - RNA, 22 nt, Human
ugguacaaucacagcucacugu

SEQ ID NO: 185326 - RNA, 22 nt, Human
uucuagaggggagauacuagua

SEQ ID NO: 185327 - RNA, 22 nt, Human
uuucaguugccaagcuaauucu

SEQ ID NO: 185328 - RNA, 22 nt, Human
aggguccaguaacagaugccag

SEQ ID NO: 185329 - RNA, 22 nt, Human
uuggcagagggaccagccuaca

SEQ ID NO: 185330 - RNA, 22 nt, Human
uuucuuagcgaugcuugauaaa

SEQ ID NO: 185331 - RNA, 22 nt, Human
caaggcauuucgcuuagagaga

SEQ ID NO: 185332 - RNA, 22 nt, Human
agacagugacuuagugaccaga

SEQ ID NO: 185333 - RNA, 22 nt, Human
aggaagugaaagggaaggaguu

SEQ ID NO: 185334 - RNA, 19 nt, Human
uccucagugacaaccucag

SEQ ID NO: 185335 - RNA, 21 nt, Human
augugaaauaucaucagagca

SEQ ID NO: 185336 - RNA, 22 nt, Human
aacacuuuuuauauauuguauc

SEQ ID NO: 185337 - RNA, 22 nt, Human
gccaggaaauucaugccagauc

SEQ ID NO: 185338 - RNA, 22 nt, Human
agggccugcaucaggagcuugg

SEQ ID NO: 185339 - RNA, 18 nt, Human
ucagggaaucuuggccuu

SEQ ID NO: 185340 - RNA, 22 nt, Human
cucuccccacacccucugcaug

SEQ ID NO: 185341 - RNA, 22 nt, Human
ucuuguuucuguauauaaugac

SEQ ID NO: 185342 - RNA, 22 nt, Human
uuuuuuggugcuccuaggaagg

SEQ ID NO: 185343 - RNA, 22 nt, Human
gcacagcucgagcucaggaggg

SEQ ID NO: 185344 - RNA, 22 nt, Human
aaggccuccgccaauggcagag

SEQ ID NO: 185345 - RNA, 22 nt, Human
acacuguagcugagggcaugcg

SEQ ID NO: 185346 - RNA, 22 nt, Human
uccaguguguguccagcugcug

SEQ ID NO: 185347 - RNA, 23 nt, Human
gauugcuguaugcaggagcauuc

SEQ ID NO: 185348 - RNA, 22 nt, Human
uuucauuacguguuugacuugu

SEQ ID NO: 185349 - RNA, 22 nt, Human
aauuuguuauaacuugggcuga

SEQ ID NO: 185350 - RNA, 22 nt, Human
gcccucugcucagcuccucagc

SEQ ID NO: 185351 - RNA, 20 nt, Human
cccagccccuaccuguugcc

SEQ ID NO: 185352 - RNA, 22 nt, Human
gaaaucuacuuagugucuggau

SEQ ID NO: 185353 - RNA, 22 nt, Human
ggcuccacugcugaccacucca

SEQ ID NO: 185354 - RNA, 22 nt, Human
agugucugcaaaaugaaagagc

SEQ ID NO: 185355 - RNA, 22 nt, Human
cagcagcauugcucuggauucc

SEQ ID NO: 185356 - RNA, 22 nt, Human
caucccugguuccuguguuuaa

SEQ ID NO: 185357 - RNA, 22 nt, Human
ccuaggccuuacuuuccugugc

SEQ ID NO: 185358 - RNA, 22 nt, Human
uugugagaugauuugaaagugu

SEQ ID NO: 185359 - RNA, 22 nt, Human
gcuuucagggucacugucaaca

SEQ ID NO: 185360 - RNA, 22 nt, Human
aguucacagccauguucaugug

SEQ ID NO: 185361 - RNA, 20 nt, Human
uccagcccugcuucucucuu

SEQ ID NO: 185362 - RNA, 22 nt, Human
accugggauggggccagguuua

SEQ ID NO: 185363 - RNA, 22 nt, Human
uggcugagaccaucagggugua

SEQ ID NO: 185364 - RNA, 22 nt, Human
augcuuuuuaaacuuaauugga

SEQ ID NO: 185365 - RNA, 22 nt, Human
aagauuuucucaacuguauuug

SEQ ID NO: 185366 - RNA, 22 nt, Human
ucaugccaaaauccaguggcuu

SEQ ID NO: 185367 - RNA, 22 nt, Human
cagggagcaggcucuguccauc

SEQ ID NO: 185368 - RNA, 22 nt, Human
gcagggaggaagagaugcuucc

SEQ ID NO: 185369 - RNA, 22 nt, Human
uggugcccauguaucccuucac

SEQ ID NO: 185370 - RNA, 22 nt, Human
cuacauuucccagcugccuucc

SEQ ID NO: 185371 - RNA, 22 nt, Human
ucugaaauagaagugucuuucu

SEQ ID NO: 185372 - RNA, 22 nt, Human
gguggggccugcuccagcggcc

SEQ ID NO: 185373 - RNA, 22 nt, Human
agagcacagaagaauaggugcu

SEQ ID NO: 185374 - RNA, 22 nt, Human
ucccagggucaguggugaggcc

SEQ ID NO: 185375 - RNA, 22 nt, Human
acauuucuuccacaugcugcug

SEQ ID NO: 185376 - RNA, 22 nt, Human
gaggcaguguuuacugcccugu

SEQ ID NO: 185377 - RNA, 22 nt, Human
ugaggaaggaauugagguuuua

SEQ ID NO: 185378 - RNA, 22 nt, Human
ugccuuccugcuuugaguucug

SEQ ID NO: 185379 - RNA, 22 nt, Human
caguggcagagccguugccauc

SEQ ID NO: 185380 - RNA, 22 nt, Human
aauaacagugccaugaaauuga

SEQ ID NO: 185381 - RNA, 22 nt, Human
uuguccagcgaccaggcucugu

SEQ ID NO: 185382 - RNA, 22 nt, Human
agaacucuauauucaugaacaa

SEQ ID NO: 185383 - RNA, 19 nt, Human
ucugaggguccagaugcau

SEQ ID NO: 185384 - RNA, 22 nt, Human
gcccaggagguugggcugugca

SEQ ID NO: 185385 - RNA, 22 nt, Human
gaggcuuuauaacuauuuguuc

SEQ ID NO: 185386 - RNA, 22 nt, Human
acccagagcccuuagcacagac

SEQ ID NO: 185387 - RNA, 22 nt, Human
aauauguuccacuuaaagcugg

SEQ ID NO: 185388 - RNA, 22 nt, Human
uuucauugucaauaaacuguau

SEQ ID NO: 185389 - RNA, 22 nt, Human
gaacuauucauucucauuagcg

SEQ ID NO: 185390 - RNA, 22 nt, Human
uguccuuugggagggcacagcu

SEQ ID NO: 185391 - RNA, 22 nt, Human
agaacagaggccuuauguuuca

SEQ ID NO: 185392 - RNA, 22 nt, Human
acucugggaauccucaccuucc

SEQ ID NO: 185393 - RNA, 22 nt, Human
cuggcucccgucugguggccau

SEQ ID NO: 185394 - RNA, 22 nt, Human
agucacagguucuugggauuag

SEQ ID NO: 185395 - RNA, 22 nt, Human
ucucagcucuuuuuucacagaa

SEQ ID NO: 185396 - RNA, 22 nt, Human
uucauguuuccucuugugcugc

SEQ ID NO: 185397 - RNA, 22 nt, Human
cagagcacccaaggagcauuug

SEQ ID NO: 185398 - RNA, 22 nt, Human
uccaugaggcagggaggcuggc

SEQ ID NO: 185399 - RNA, 22 nt, Human
gaaucauucauugcucaauuaa

SEQ ID NO: 185400 - RNA, 22 nt, Human
ccuggcuccugcacagaucuuu

SEQ ID NO: 185401 - RNA, 22 nt, Human
ccugguggcuucuggguggacg

SEQ ID NO: 185402 - RNA, 22 nt, Human
agcucccugagaugccacagca

SEQ ID NO: 185403 - RNA, 22 nt, Human
ccaggccucaccugcccaccua

SEQ ID NO: 185404 - RNA, 20 nt, Human
caggccagagguuugauggc

SEQ ID NO: 185405 - RNA, 22 nt, Human
ccagaggaaaaauaucucccua

SEQ ID NO: 185406 - RNA, 22 nt, Human
cggagggguuugaacagaggag

SEQ ID NO: 185407 - RNA, 22 nt, Human
uuagaacaauauucucccuaca

SEQ ID NO: 185408 - RNA, 22 nt, Human
ucugcucuguacugcacuggcc

SEQ ID NO: 185409 - RNA, 22 nt, Human
aggggcugacuggaaagugcca

SEQ ID NO: 185410 - RNA, 22 nt, Human
caggcacaauuauuucccuuuc

SEQ ID NO: 185411 - RNA, 22 nt, Human
ucagaggucagcagcuugccca

SEQ ID NO: 185412 - RNA, 22 nt, Human
cugcuuuaauguaagauauacc

SEQ ID NO: 185413 - RNA, 22 nt, Human
ugagauuuuccuaaauauaaug

SEQ ID NO: 185414 - RNA, 22 nt, Human
aagcacaguaaaagcagauuuu

SEQ ID NO: 185415 - RNA, 18 nt, Human
ggaaaaggagugucuagc

SEQ ID NO: 185416 - RNA, 21 nt, Human
gcuccuggugcugcguggcgc

SEQ ID NO: 185417 - RNA, 22 nt, Human
aggcacagagagguuaaaugca

SEQ ID NO: 185418 - RNA, 22 nt, Human
ucagagaccuagcaagaaauug

SEQ ID NO: 185419 - RNA, 22 nt, Human
uccauacuggaguccacaguuc

SEQ ID NO: 185420 - RNA, 22 nt, Human
gccagcugguaggcaccuagcc

SEQ ID NO: 185421 - RNA, 22 nt, Human
ucaucuuuguaucccuaacaca

SEQ ID NO: 185422 - RNA, 22 nt, Human
cugugucccaguaccuugggua

SEQ ID NO: 185423 - RNA, 22 nt, Human
aagugcaggaguggggaaagua

SEQ ID NO: 185424 - RNA, 19 nt, Human
ccagcagacacagcugccc

SEQ ID NO: 185425 - RNA, 22 nt, Human
aauauguugagucuaucuuuau

SEQ ID NO: 185426 - RNA, 22 nt, Human
aguuugaagaaggugagaugca

SEQ ID NO: 185427 - RNA, 22 nt, Human
ucacacagugagaaagugcgga

SEQ ID NO: 185428 - RNA, 22 nt, Human
ggcucugcuggauugaggccag

SEQ ID NO: 185429 - RNA, 22 nt, Human
uggaaagaaaaacaggccauga

SEQ ID NO: 185430 - RNA, 22 nt, Human
gaggccuggugugucucccgcu

SEQ ID NO: 185431 - RNA, 22 nt, Human
ccacaguagcauccaaacagua

SEQ ID NO: 185432 - RNA, 22 nt, Human
acuguucauuuguccuguaucu

SEQ ID NO: 185433 - RNA, 22 nt, Human
aagaaaggauauaugggaggua

SEQ ID NO: 185434 - RNA, 22 nt, Human
gaggaccacagaugagccugca

SEQ ID NO: 185435 - RNA, 22 nt, Human
aaugcacauaaauauggucuua

SEQ ID NO: 185436 - RNA, 22 nt, Human
ccccucagguacccgugcagca

SEQ ID NO: 185437 - RNA, 22 nt, Human
acaagugugugcaguuuguaaa

SEQ ID NO: 185438 - RNA, 22 nt, Human
uuccccuugggcuguggaggag

SEQ ID NO: 185439 - RNA, 18 nt, Human
cacuggaagauuaggguc

SEQ ID NO: 185440 - RNA, 22 nt, Human
ucuuggacucaaaauugccuua

SEQ ID NO: 185441 - RNA, 22 nt, Human
gccuggccgcuccgagcuccgc

SEQ ID NO: 185442 - RNA, 22 nt, Human
uuauuccauuauuucacuuagg

SEQ ID NO: 185443 - RNA, 22 nt, Human
uugguacagaugagguauucuc

SEQ ID NO: 185444 - RNA, 22 nt, Human
ucugugcaggauuugaggaacc

SEQ ID NO: 185445 - RNA, 22 nt, Human
cuguaaaacacuguaguaucug

SEQ ID NO: 185446 - RNA, 20 nt, Human
ucccucccuccagcucuggg

SEQ ID NO: 185447 - RNA, 22 nt, Human
agaaauagucacauuggaggaa

SEQ ID NO: 185448 - RNA, 22 nt, Human
uggccaggcagguagaacggcc

SEQ ID NO: 185449 - RNA, 22 nt, Human
cacaucuucuuaacuccaaagu

SEQ ID NO: 185450 - RNA, 22 nt, Human
gagcaagacccuggguucucuc

SEQ ID NO: 185451 - RNA, 23 nt, Human
cugugggaagucggggagcgcgc

SEQ ID NO: 185452 - RNA, 22 nt, Human
ccuggcuccaaagcugugacuc

SEQ ID NO: 185453 - RNA, 22 nt, Human
guuuuccauggaggucugaccu

SEQ ID NO: 185454 - RNA, 22 nt, Human
ucacagugauaacuaaguccug

SEQ ID NO: 185455 - RNA, 22 nt, Human
uccaggagguugagugaguucc

SEQ ID NO: 185456 - RNA, 22 nt, Human
ccaggcucagcuauuaagaaac

SEQ ID NO: 185457 - RNA, 22 nt, Human
uacauacagagaugcuaguuaa

SEQ ID NO: 185458 - RNA, 22 nt, Human
uuauacauguuuauaagguuga

SEQ ID NO: 185459 - RNA, 22 nt, Human
gcuggaguuggcaaggcaugua

SEQ ID NO: 185460 - RNA, 22 nt, Human
agcaggcaguguagagccuuca

SEQ ID NO: 185461 - RNA, 22 nt, Human
gccaggcagcaggaagccagug

SEQ ID NO: 185462 - RNA, 22 nt, Human
gugcccaggugucccugagaag

SEQ ID NO: 185463 - RNA, 22 nt, Human
agguacagaugaaagucuaguu

SEQ ID NO: 185464 - RNA, 22 nt, Human
gggcccucagucccaggccuuc

SEQ ID NO: 185465 - RNA, 22 nt, Human
cacugguacacugaauggcguu

SEQ ID NO: 185466 - RNA, 22 nt, Human
uccucagagaugggcaucuaag

SEQ ID NO: 185467 - RNA, 22 nt, Human
ucagggcaaugucccucagaag

SEQ ID NO: 185468 - RNA, 22 nt, Human
ucccucaggugguucuuguuuc

SEQ ID NO: 185469 - RNA, 22 nt, Human
ucugaggaauaagaaggaagug

SEQ ID NO: 185470 - RNA, 22 nt, Human
augauuuaaagucauugugaac

SEQ ID NO: 185471 - RNA, 22 nt, Human
gguccaaggcucgguggcgggg

SEQ ID NO: 185472 - RNA, 22 nt, Human
gaggcugguaggaaaggaaaca

SEQ ID NO: 185473 - RNA, 22 nt, Human
uuacuguuuugguaccucauug

SEQ ID NO: 185474 - RNA, 22 nt, Human
agaaucuucgguaacuggaaga

SEQ ID NO: 185475 - RNA, 22 nt, Human
uguguucauuuaacuguucuuu

SEQ ID NO: 185476 - RNA, 21 nt, Human
uugcugcccucccuuuccuca

SEQ ID NO: 185477 - RNA, 22 nt, Human
ucugccugcggcugcagguggc

SEQ ID NO: 185478 - RNA, 23 nt, Human
ucucagaaaggagaaguaauuug

SEQ ID NO: 185479 - RNA, 22 nt, Human
caggggcucuaaugcaugauca

SEQ ID NO: 185480 - RNA, 22 nt, Human
gcauucuucacuaggugagagc

SEQ ID NO: 185481 - RNA, 16 nt, Human
caccaguccuuccugc

SEQ ID NO: 185482 - RNA, 22 nt, Human
ugggagcaagcuggugcuggag

SEQ ID NO: 185483 - RNA, 22 nt, Human
gacaucuggaggagaugaaugg

SEQ ID NO: 185484 - RNA, 22 nt, Human
augccaaagcccaaguucauca

SEQ ID NO: 185485 - RNA, 18 nt, Human
ugacauuuccagagugua

SEQ ID NO: 185486 - RNA, 22 nt, Human
uggguccucgucuuccaaggca

SEQ ID NO: 185487 - RNA, 20 nt, Human
aggcacaguuccuaguuggg

SEQ ID NO: 185488 - RNA, 22 nt, Human
aaaucacugauuaaaguuagaa

SEQ ID NO: 185489 - RNA, 22 nt, Human
uggcucagauaauucaaggggc

SEQ ID NO: 185490 - RNA, 22 nt, Human
uuacaacagcgauuuaccuguc

SEQ ID NO: 185491 - RNA, 22 nt, Human
guuaaaagaacaacucggaggu

SEQ ID NO: 185492 - RNA, 21 nt, Human
gagccuucccucugcccuuuc

SEQ ID NO: 185493 - RNA, 22 nt, Human
cuguggcucuuuaguugagcac

SEQ ID NO: 185494 - RNA, 22 nt, Human
agccacagucuguagccagcuu

SEQ ID NO: 185495 - RNA, 22 nt, Human
cuggcagccaagugggauacuc

SEQ ID NO: 185496 - RNA, 22 nt, Human
cacaauguauauguauaucaaa

SEQ ID NO: 185497 - RNA, 22 nt, Human
ugcaaaaaggcagacuggugau

SEQ ID NO: 185498 - RNA, 22 nt, Human
ugcaccccauuuuacauuuaca

SEQ ID NO: 185499 - RNA, 22 nt, Human
aaaauccucuaauucuagaaua

SEQ ID NO: 185500 - RNA, 22 nt, Human
ucccagcagucagagcuaugug

SEQ ID NO: 185501 - RNA, 22 nt, Human
cagacucuugagcugauuguau

SEQ ID NO: 185502 - RNA, 22 nt, Human
auucuuucaaggaauaguuauu

SEQ ID NO: 185503 - RNA, 22 nt, Human
cugaaugagggauucugagggc

SEQ ID NO: 185504 - RNA, 22 nt, Human
cagcucuguucauagauggugc

SEQ ID NO: 185505 - RNA, 22 nt, Human
aacacuuucuauuauuaugguu

SEQ ID NO: 185506 - RNA, 23 nt, Human
gcccagagaggcucaccaggaau

SEQ ID NO: 185507 - RNA, 22 nt, Human
acaguucugcaagauauuuuuu

SEQ ID NO: 185508 - RNA, 22 nt, Human
ugccucugugggccuuccuggc

SEQ ID NO: 185509 - RNA, 22 nt, Human
uguuuacuagccaacauggaga

SEQ ID NO: 185510 - RNA, 22 nt, Human
aaggcagauauaaagacuagag

SEQ ID NO: 185511 - RNA, 22 nt, Human
cucaggaugaaagucaugguga

SEQ ID NO: 185512 - RNA, 21 nt, Human
ugucagaaauaagcaugugau

SEQ ID NO: 185513 - RNA, 22 nt, Human
ucaauuauuugauaugaaaggg

SEQ ID NO: 185514 - RNA, 22 nt, Human
uccugaggucugaaaaaggagc

SEQ ID NO: 185515 - RNA, 22 nt, Human
ggcugcagaggcgaucugaggu

SEQ ID NO: 185516 - RNA, 22 nt, Human
ugcccuggcacacacacagcug

SEQ ID NO: 185517 - RNA, 22 nt, Human
uagauugagcuugacaguguug

SEQ ID NO: 185518 - RNA, 22 nt, Human
gcuggcugcgucaucacagggc

SEQ ID NO: 185519 - RNA, 22 nt, Human
aaguacauuauaugagcagaau

SEQ ID NO: 185520 - RNA, 22 nt, Human
cuggccacuggagguggcaccc

SEQ ID NO: 185521 - RNA, 22 nt, Human
cauaaagucucauaauucacuu

SEQ ID NO: 185522 - RNA, 21 nt, Human
aggacacagagacaccuauug

SEQ ID NO: 185523 - RNA, 22 nt, Human
ucugaagaacugucuagagaac

SEQ ID NO: 185524 - RNA, 22 nt, Human
uuuuaaucaugcuucuaugucc

SEQ ID NO: 185525 - RNA, 22 nt, Human
auggcugcagagaccugaagaa

SEQ ID NO: 185526 - RNA, 22 nt, Human
ugcagugugaccuguagcgagc

SEQ ID NO: 185527 - RNA, 22 nt, Human
ucauccaguucacauggugagu

SEQ ID NO: 185528 - RNA, 22 nt, Human
aaacuguauauuuauggcaugu

SEQ ID NO: 185529 - RNA, 20 nt, Human
ggcugcagugcaccucaucu

SEQ ID NO: 185530 - RNA, 22 nt, Human
gugcucagggccuggcugggga

SEQ ID NO: 185531 - RNA, 22 nt, Human
gaagagcauaugaagagcauau

SEQ ID NO: 185532 - RNA, 22 nt, Human
gacaugcaugaaugcaggucuc

SEQ ID NO: 185533 - RNA, 22 nt, Human
ucagagaaaggccaaaauauca

SEQ ID NO: 185534 - RNA, 22 nt, Human
gcaugcagagucccucugcauu

SEQ ID NO: 185535 - RNA, 22 nt, Human
ucccucagcucauauuuaugcc

SEQ ID NO: 185536 - RNA, 22 nt, Human
gggauugaauugggggaucaca

SEQ ID NO: 185537 - RNA, 22 nt, Human
ggcucaggagaggggcuaaaag

SEQ ID NO: 185538 - RNA, 22 nt, Human
caugagugaguaucucaagaua

SEQ ID NO: 185539 - RNA, 22 nt, Human
ucagaaaagagaaaaucuuaua

SEQ ID NO: 185540 - RNA, 22 nt, Human
uaucagaaaugccuuaaauugg

SEQ ID NO: 185541 - RNA, 22 nt, Human
ggaggaguguggggcacucugc

SEQ ID NO: 185542 - RNA, 22 nt, Human
uucaaaugauggcaguccuggc

SEQ ID NO: 185543 - RNA, 22 nt, Human
uggcuguagaaucagagacuug

SEQ ID NO: 185544 - RNA, 22 nt, Human
cccugguguggaugugauuggc

SEQ ID NO: 185545 - RNA, 22 nt, Human
gucaggacaggcucuggacuga

SEQ ID NO: 185546 - RNA, 22 nt, Human
acauuucugcaucucagagcua

SEQ ID NO: 185547 - RNA, 22 nt, Human
gaggccaggggucagcaauugg

SEQ ID NO: 185548 - RNA, 17 nt, Human
gagagcugcugcuuccg

SEQ ID NO: 185549 - RNA, 22 nt, Human
auaacagaguugggaagugaaa

SEQ ID NO: 185550 - RNA, 22 nt, Human
uuuuggcuuaaagagaauguau

SEQ ID NO: 185551 - RNA, 22 nt, Human
ugacaagaauuugggacuguua

SEQ ID NO: 185552 - RNA, 22 nt, Human
augguggacgggagacaggacu

SEQ ID NO: 185553 - RNA, 22 nt, Human
cugggucccaauagcuuuuguu

SEQ ID NO: 185554 - RNA, 22 nt, Human
aaacaaguuuagaauaaugaau

SEQ ID NO: 185555 - RNA, 22 nt, Human
ggggugugucugacaaugguau

SEQ ID NO: 185556 - RNA, 22 nt, Human
aauuuagauugauaaacaugga

SEQ ID NO: 185557 - RNA, 22 nt, Human
agaugauuaugauagcacuguu

SEQ ID NO: 185558 - RNA, 22 nt, Human
uauuguuucuggcuguggcagc

SEQ ID NO: 185559 - RNA, 22 nt, Human
aggagagagaacacuugggucc

SEQ ID NO: 185560 - RNA, 23 nt, Human
ccagaaucuacucauuggaauga

SEQ ID NO: 185561 - RNA, 22 nt, Human
ggcacagggagaggcggauuuu

SEQ ID NO: 185562 - RNA, 22 nt, Human
uguuaagaagaggcaguacuua

SEQ ID NO: 185563 - RNA, 22 nt, Human
ucucuuuaaagacucagagauu

SEQ ID NO: 185564 - RNA, 22 nt, Human
ggcaggugugagcuguaaagga

SEQ ID NO: 185565 - RNA, 22 nt, Human
uacaucuuugucuaugaccagc

SEQ ID NO: 185566 - RNA, 21 nt, Human
agcaggcccaauggagggggc

SEQ ID NO: 185567 - RNA, 22 nt, Human
gugcauuacauguaauaaaaua

SEQ ID NO: 185568 - RNA, 15 nt, Human
gggcaggucuggggc

SEQ ID NO: 185569 - RNA, 22 nt, Human
gcccacauccacuagacaugca

SEQ ID NO: 185570 - RNA, 22 nt, Human
uaacagaaauaguaggugaggg

SEQ ID NO: 185571 - RNA, 22 nt, Human
acaguggaaagaacauggauuu

SEQ ID NO: 185572 - RNA, 22 nt, Human
gggggacuggaccguccugggu

SEQ ID NO: 185573 - RNA, 22 nt, Human
ggccccaaaugucaauaguacu

SEQ ID NO: 185574 - RNA, 22 nt, Human
guggggagggagaugcugaagu

SEQ ID NO: 185575 - RNA, 22 nt, Human
aaucacaugugcucaauuuuaa

SEQ ID NO: 185576 - RNA, 22 nt, Human
ucaguaaccuuuagcacaguug

SEQ ID NO: 185577 - RNA, 22 nt, Human
aucccccucuuggauggcggca

SEQ ID NO: 185578 - RNA, 22 nt, Human
accagccagccacaguggcucc

SEQ ID NO: 185579 - RNA, 22 nt, Human
ucaagaugaaccaggacauuca

SEQ ID NO: 185580 - RNA, 22 nt, Human
agcagcucuuaacaaagcaugg

SEQ ID NO: 185581 - RNA, 22 nt, Human
ucuggcugucauuggaggcccc

SEQ ID NO: 185582 - RNA, 22 nt, Human
gcagcaggagaguaauagcggu

SEQ ID NO: 185583 - RNA, 22 nt, Human
aagcuugggaaccacgguaauc

SEQ ID NO: 185584 - RNA, 22 nt, Human
gcagcagagaacacaaugaugg

SEQ ID NO: 185585 - RNA, 22 nt, Human
uaugaaauuuaaacacagauca

SEQ ID NO: 185586 - RNA, 22 nt, Human
ugauugauacaacucaauccaa

SEQ ID NO: 185587 - RNA, 22 nt, Human
uacauguauguuuaucuugaga

SEQ ID NO: 185588 - RNA, 22 nt, Human
agcauccaggccagguugggca

SEQ ID NO: 185589 - RNA, 22 nt, Human
gggcugacucugcacugagcca

SEQ ID NO: 185590 - RNA, 22 nt, Human
uuucuguagugugguauguagg

SEQ ID NO: 185591 - RNA, 22 nt, Human
ccaggugucaugcgugugaccc

SEQ ID NO: 185592 - RNA, 22 nt, Human
auaagacacgccccacucacuc

SEQ ID NO: 185593 - RNA, 22 nt, Human
agguccugucuuaucucuguaa

SEQ ID NO: 185594 - RNA, 22 nt, Human
ucagcaggcacggacaggcugc

SEQ ID NO: 185595 - RNA, 22 nt, Human
ucaacaguugcacuggagaggu

SEQ ID NO: 185596 - RNA, 22 nt, Human
uuuuccucugcagagcaguuag

SEQ ID NO: 185597 - RNA, 21 nt, Human
uccuguaagcuuggguggcuc

SEQ ID NO: 185598 - RNA, 22 nt, Human
ggaaagaaucaagugauccugu

SEQ ID NO: 185599 - RNA, 22 nt, Human
gcacauaacugaccacaucuaa

SEQ ID NO: 185600 - RNA, 22 nt, Human
uauagaaguaagcauugugaug

SEQ ID NO: 185601 - RNA, 23 nt, Human
acaaaguaauuccugcuuccaaa

SEQ ID NO: 185602 - RNA, 22 nt, Human
gaguccaguucuuuccagcagu

SEQ ID NO: 185603 - RNA, 22 nt, Human
gucaggaugcuauuguuauuaa

SEQ ID NO: 185604 - RNA, 22 nt, Human
uaggaaacucucagcuggucau

SEQ ID NO: 185605 - RNA, 22 nt, Human
ggagcacccugcucagccaagc

SEQ ID NO: 185606 - RNA, 22 nt, Human
caagagcuucugcucuucaugg

SEQ ID NO: 185607 - RNA, 22 nt, Human
ucccagagaaagucaaggucuu

SEQ ID NO: 185608 - RNA, 22 nt, Human
aagucugggccagggcacagcc

SEQ ID NO: 185609 - RNA, 22 nt, Human
agccugagccccauccagcuga

SEQ ID NO: 185610 - RNA, 22 nt, Human
auggcugcugccuuccccugcu

SEQ ID NO: 185611 - RNA, 22 nt, Human
uugcuugacuuuguguaccugu

SEQ ID NO: 185612 - RNA, 22 nt, Human
uuacaaugcacucaccuuuaga

SEQ ID NO: 185613 - RNA, 20 nt, Human
cagggcucugggccuggccu

SEQ ID NO: 185614 - RNA, 23 nt, Human
aaugacagugugugauugaagaa

SEQ ID NO: 185615 - RNA, 22 nt, Human
cccaggcuggccuccgcagugc

SEQ ID NO: 185616 - RNA, 22 nt, Human
acauuaaagaguaagguuaguu

SEQ ID NO: 185617 - RNA, 22 nt, Human
ucuuucaaagcaaaaugaggcu

SEQ ID NO: 185618 - RNA, 22 nt, Human
ugccuggaaggcccaugggaag

SEQ ID NO: 185619 - RNA, 22 nt, Human
auauaaagaaguggaaaaugag

SEQ ID NO: 185620 - RNA, 22 nt, Human
aaucuucagcacuccagagacu

SEQ ID NO: 185621 - RNA, 22 nt, Human
uaguaacaacaacuagcauuuu

SEQ ID NO: 185622 - RNA, 22 nt, Human
cagcagcuuugccaagucagcc

SEQ ID NO: 185623 - RNA, 20 nt, Human
augcaaaucccaaaaucagg

SEQ ID NO: 185624 - RNA, 22 nt, Human
gaaucaauuauccaggcuguug

SEQ ID NO: 185625 - RNA, 22 nt, Human
uuuccuuccuugcuagccugag

SEQ ID NO: 185626 - RNA, 22 nt, Human
gccuguuggugacuuucuguug

SEQ ID NO: 185627 - RNA, 22 nt, Human
aaaaagggauuugugauccagg

SEQ ID NO: 185628 - RNA, 21 nt, Human
uccuucucuaugauugucuga

SEQ ID NO: 185629 - RNA, 19 nt, Human
uuugauagggcauaauaua

SEQ ID NO: 185630 - RNA, 22 nt, Human
gcagggcugaaggucccaggcc

SEQ ID NO: 185631 - RNA, 22 nt, Human
uuagccaugcccuagaagagga

SEQ ID NO: 185632 - RNA, 22 nt, Human
agcagccaauuggaggaugaag

SEQ ID NO: 185633 - RNA, 22 nt, Human
ggccacuguccucuagcccaga

SEQ ID NO: 185634 - RNA, 22 nt, Human
uugacaaguggagauauuuaag

SEQ ID NO: 185635 - RNA, 22 nt, Human
cucagcuucuaccuccugagug

SEQ ID NO: 185636 - RNA, 22 nt, Human
aaagccacugcauguguaguau

SEQ ID NO: 185637 - RNA, 22 nt, Human
ucuggugucaguauucuuugaa

SEQ ID NO: 185638 - RNA, 22 nt, Human
uguuauacuauuuagagguaca

SEQ ID NO: 185639 - RNA, 21 nt, Human
acagucuccccagaucucucc

SEQ ID NO: 185640 - RNA, 22 nt, Human
aggcuuggugccaaggagccug

SEQ ID NO: 185641 - RNA, 22 nt, Human
guuugccugugauguacauuuc

SEQ ID NO: 185642 - RNA, 22 nt, Human
cuggacaaccacucagccucag

SEQ ID NO: 185643 - RNA, 20 nt, Human
cauugcaaaguagcagacug

SEQ ID NO: 185644 - RNA, 22 nt, Human
acauaugcucaucugcauuccc

SEQ ID NO: 185645 - RNA, 22 nt, Human
aaguacaugcuguaaugauugg

SEQ ID NO: 185646 - RNA, 22 nt, Human
ugccugugcccuucuuggcauu

SEQ ID NO: 185647 - RNA, 22 nt, Human
ugacaaaccaguagcaauaaag

SEQ ID NO: 185648 - RNA, 16 nt, Human
ucacacauuuguuggu

SEQ ID NO: 185649 - RNA, 22 nt, Human
aucuguggucaaaauagaaacu

SEQ ID NO: 185650 - RNA, 22 nt, Human
gucagaggggcagcugccaggc

SEQ ID NO: 185651 - RNA, 22 nt, Human
cagcugaguuacucugaggucu

SEQ ID NO: 185652 - RNA, 22 nt, Human
uauauaacuacuauuuugcuca

SEQ ID NO: 185653 - RNA, 22 nt, Human
uuccaugaaggagacugagaag

SEQ ID NO: 185654 - RNA, 22 nt, Human
aaaugcuaacaaggaaugcugc

SEQ ID NO: 185655 - RNA, 22 nt, Human
gagcuggcugugguugagugca

SEQ ID NO: 185656 - RNA, 22 nt, Human
ugcaauccacuauucuaaagcc

SEQ ID NO: 185657 - RNA, 22 nt, Human
uuuauuagauuaucaaagaggu

SEQ ID NO: 185658 - RNA, 22 nt, Human
ucaguggaacugucugggugag

SEQ ID NO: 185659 - RNA, 22 nt, Human
uagaaacccugccuuaguagcu

SEQ ID NO: 185660 - RNA, 22 nt, Human
augcagcugucagggagaacau

SEQ ID NO: 185661 - RNA, 22 nt, Human
uggagccagagcgcagccuggg

SEQ ID NO: 185662 - RNA, 22 nt, Human
uggaaucugugcuguuuuagug

SEQ ID NO: 185663 - RNA, 22 nt, Human
uagagcagaacuuguuaacacc

SEQ ID NO: 185664 - RNA, 22 nt, Human
ucucaaauucccuuuuccuccu

SEQ ID NO: 185665 - RNA, 22 nt, Human
ucuacauuuucuuuauguacau

SEQ ID NO: 185666 - RNA, 22 nt, Human
ugcacuguugcuuuauaugauu

SEQ ID NO: 185667 - RNA, 22 nt, Human
aucuguggauaugaccuuccug

SEQ ID NO: 185668 - RNA, 22 nt, Human
acauguguaagaugugauauau

SEQ ID NO: 185669 - RNA, 22 nt, Human
ggguggggccaggcaauuugca

SEQ ID NO: 185670 - RNA, 22 nt, Human
guguacagugauuugaguucac

SEQ ID NO: 185671 - RNA, 22 nt, Human
uuuccuuccaaaugcccgggag

SEQ ID NO: 185672 - RNA, 22 nt, Human
uacagagaugugaaaagcucua

SEQ ID NO: 185673 - RNA, 22 nt, Human
gcagggaccuugcccacccucc

SEQ ID NO: 185674 - RNA, 22 nt, Human
ccagcuggaaacaaauagagug

SEQ ID NO: 185675 - RNA, 22 nt, Human
ccucaugcugcaucucugaggu

SEQ ID NO: 185676 - RNA, 22 nt, Human
guacaguagagccagguucagu

SEQ ID NO: 185677 - RNA, 22 nt, Human
gcacagaggaagcacagacucu

SEQ ID NO: 185678 - RNA, 22 nt, Human
aggccacacaacucuuagagau

SEQ ID NO: 185679 - RNA, 22 nt, Human
uuucuuaauuugaguuccacua

SEQ ID NO: 185680 - RNA, 22 nt, Human
ugggcaugaguggacagagaag

SEQ ID NO: 185681 - RNA, 22 nt, Human
cucaggcaguucuguagccucc

SEQ ID NO: 185682 - RNA, 22 nt, Human
ccagaggggugggccugguuua

SEQ ID NO: 185683 - RNA, 22 nt, Human
caaagugcuggaauuacaggug

SEQ ID NO: 185684 - RNA, 22 nt, Human
cagcugcuguucaguuuuguuu

SEQ ID NO: 185685 - RNA, 16 nt, Human
aggaggggaauuagga

SEQ ID NO: 185686 - RNA, 22 nt, Human
acaagauucaaugaauugauug

SEQ ID NO: 185687 - RNA, 20 nt, Human
ucacaggagggaaggcaggu

SEQ ID NO: 185688 - RNA, 22 nt, Human
ucccugcugagagugcucuccc

SEQ ID NO: 185689 - RNA, 22 nt, Human
uggccaggccggggacagaacu

SEQ ID NO: 185690 - RNA, 22 nt, Human
cccucuccuggcugcauggagc

SEQ ID NO: 185691 - RNA, 22 nt, Human
cuuugaauuccaguacaauaac

SEQ ID NO: 185692 - RNA, 22 nt, Human
aaacagauugaaauucguagua

SEQ ID NO: 185693 - RNA, 22 nt, Human
cagcaagauggugaaugagacg

SEQ ID NO: 185694 - RNA, 22 nt, Human
auaguuacauacagaaauauuu

SEQ ID NO: 185695 - RNA, 22 nt, Human
aauuccaaguagcaucccauca

SEQ ID NO: 185696 - RNA, 22 nt, Human
uagaaucauugagaauaacagg

SEQ ID NO: 185697 - RNA, 22 nt, Human
aauuucuucagcucuaaaaugg

SEQ ID NO: 185698 - RNA, 22 nt, Human
ccuggcucucugcagauccugg

SEQ ID NO: 185699 - RNA, 22 nt, Human
uaaguggaagguuauaugcuaa

SEQ ID NO: 185700 - RNA, 22 nt, Human
caagcuggcugggagaggcacg

SEQ ID NO: 185701 - RNA, 20 nt, Human
ggcuucacucugcaccacca

SEQ ID NO: 185702 - RNA, 22 nt, Human
ggguggcaggauuggcaggagu

SEQ ID NO: 185703 - RNA, 22 nt, Human
uguucccauuuucugcauaauc

SEQ ID NO: 185704 - RNA, 22 nt, Human
ggucuggaauaagguccaggaa

SEQ ID NO: 185705 - RNA, 22 nt, Human
gcugccuccacuggcucccagu

SEQ ID NO: 185706 - RNA, 22 nt, Human
uuugucuugaggcuggggaagu

SEQ ID NO: 185707 - RNA, 22 nt, Human
ucccagaggacuguuggugcua

SEQ ID NO: 185708 - RNA, 22 nt, Human
ucuucuguccuaagucaaagca

SEQ ID NO: 185709 - RNA, 20 nt, Human
gcagggcaagggauaugaaa

SEQ ID NO: 185710 - RNA, 22 nt, Human
cagcccuuggcuggcuccuugc

SEQ ID NO: 185711 - RNA, 22 nt, Human
guuggcaaguguuccuuccucu

SEQ ID NO: 185712 - RNA, 22 nt, Human
ucccaggacaggccacauggaa

SEQ ID NO: 185713 - RNA, 22 nt, Human
ggcugcagagcuggugcccugg

SEQ ID NO: 185714 - RNA, 22 nt, Human
uccuggguccugggaagcccug

SEQ ID NO: 185715 - RNA, 23 nt, Human
gcccucaguagaaaauguuagaa

SEQ ID NO: 185716 - RNA, 22 nt, Human
uuuauugagcacccguugugcg

SEQ ID NO: 185717 - RNA, 22 nt, Human
ccucuuggagucuaucauucug

SEQ ID NO: 185718 - RNA, 22 nt, Human
acaguaaaucaacagaauaucu

SEQ ID NO: 185719 - RNA, 22 nt, Human
cuggcagauauuugcagacaug

SEQ ID NO: 185720 - RNA, 22 nt, Human
acaggcaacuucaaaucucacu

SEQ ID NO: 185721 - RNA, 22 nt, Human
uguaaccaugaugagcagguau

SEQ ID NO: 185722 - RNA, 22 nt, Human
auccaaagcccuaaguuaacug

SEQ ID NO: 185723 - RNA, 22 nt, Human
cuucaggaguaguuaccuagca

SEQ ID NO: 185724 - RNA, 22 nt, Human
agaguucugcucuucucaguga

SEQ ID NO: 185725 - RNA, 22 nt, Human
uguggggacccaugccaugggc

SEQ ID NO: 185726 - RNA, 22 nt, Human
gcccggcagucacacacccagg

SEQ ID NO: 185727 - RNA, 22 nt, Human
uugggaagaauggaggugguua

SEQ ID NO: 185728 - RNA, 22 nt, Human
agaacucuaggauuggcuggau

SEQ ID NO: 185729 - RNA, 21 nt, Human
caugugucauuggagagcaau

SEQ ID NO: 185730 - RNA, 22 nt, Human
uguugauuaguguuuagacuua

SEQ ID NO: 185731 - RNA, 22 nt, Human
cacacaugguuccgcaggaugc

SEQ ID NO: 185732 - RNA, 22 nt, Human
ggcaucaggaucugucuugcuu

SEQ ID NO: 185733 - RNA, 22 nt, Human
acaugggaucaaugaggcaggc

SEQ ID NO: 185734 - RNA, 22 nt, Human
gaaggaaaacagaucugccuga

SEQ ID NO: 185735 - RNA, 22 nt, Human
cacaaauaccaguuuccuaaca

SEQ ID NO: 185736 - RNA, 22 nt, Human
ucaucugugcaggacucagaag

SEQ ID NO: 185737 - RNA, 22 nt, Human
cuggcagauuggggucagcagu

SEQ ID NO: 185738 - RNA, 22 nt, Human
accaggcucugccaguguuuac

SEQ ID NO: 185739 - RNA, 22 nt, Human
acagugcuaaugaugccaagau

SEQ ID NO: 185740 - RNA, 22 nt, Human
aaagccagugguaugagagaaa

SEQ ID NO: 185741 - RNA, 22 nt, Human
cuccucccugcgauugcucugc

SEQ ID NO: 185742 - RNA, 20 nt, Human
uacagaaugcaauaaaaugg

SEQ ID NO: 185743 - RNA, 22 nt, Human
cagggaaacuaggaaauaagcu

SEQ ID NO: 185744 - RNA, 22 nt, Human
uuccuggggcuccagcuaccag

SEQ ID NO: 185745 - RNA, 22 nt, Human
gagccuggguccuucccuggga

SEQ ID NO: 185746 - RNA, 22 nt, Human
agacagcaugagccugcugaug

SEQ ID NO: 185747 - RNA, 22 nt, Human
ucugugccuuuaagaagcucau

SEQ ID NO: 185748 - RNA, 22 nt, Human
ugcaggugucucugucuagcgu

SEQ ID NO: 185749 - RNA, 22 nt, Human
ggcaguuuuaacagagguagua

SEQ ID NO: 185750 - RNA, 22 nt, Human
uagagcugauaaugaggccaag

SEQ ID NO: 185751 - RNA, 22 nt, Human
ucuacccagagcuaugaccuga

SEQ ID NO: 185752 - RNA, 15 nt, Human
aaagugcacccaaua

SEQ ID NO: 185753 - RNA, 22 nt, Human
caggggcuguggcacauggugu

SEQ ID NO: 185754 - RNA, 22 nt, Human
ccaggcagccugcuccauucug

SEQ ID NO: 185755 - RNA, 22 nt, Human
ccuccuggaggcucuagggaaa

SEQ ID NO: 185756 - RNA, 22 nt, Human
cugggugauuccuguccaggca

SEQ ID NO: 185757 - RNA, 22 nt, Human
ugaggcaggagaaucacaugaa

SEQ ID NO: 185758 - RNA, 20 nt, Human
caauaauuuacuucccuauu

SEQ ID NO: 185759 - RNA, 22 nt, Human
uugagcccuaccucagacuuuc

SEQ ID NO: 185760 - RNA, 22 nt, Human
ccuggggagccgccugagcccc

SEQ ID NO: 185761 - RNA, 23 nt, Human
gccugggacucaggaggagcuca

SEQ ID NO: 185762 - RNA, 22 nt, Human
ugcuggaggggccugaccagga

SEQ ID NO: 185763 - RNA, 22 nt, Human
uucaguuuugcuuuuaaucaug

SEQ ID NO: 185764 - RNA, 22 nt, Human
uucuaaguguugacaaagucua

SEQ ID NO: 185765 - RNA, 22 nt, Human
gcagcaggacugccguuaaagu

SEQ ID NO: 185766 - RNA, 22 nt, Human
ucuuucugcagcacaggggcag

SEQ ID NO: 185767 - RNA, 18 nt, Human
gaaagugcggggcagggg

SEQ ID NO: 185768 - RNA, 22 nt, Human
gcuuuuucaaaugaaagcuggu

SEQ ID NO: 185769 - RNA, 22 nt, Human
aaaaccugauugaauucuauuu

SEQ ID NO: 185770 - RNA, 23 nt, Human
agcuuggaacaaugcaaauacag

SEQ ID NO: 185771 - RNA, 22 nt, Human
gugaagagcuguugcagagauu

SEQ ID NO: 185772 - RNA, 22 nt, Human
ccuggacucaggcugugggcac

SEQ ID NO: 185773 - RNA, 22 nt, Human
cuuuacauuaauuucuacugau

SEQ ID NO: 185774 - RNA, 22 nt, Human
gcuggacuagaagcagggcuca

SEQ ID NO: 185775 - RNA, 22 nt, Human
aacaagaagggaaggcaugauu

SEQ ID NO: 185776 - RNA, 22 nt, Human
caucaaaguugauauccaauua

SEQ ID NO: 185777 - RNA, 16 nt, Human
aagccuaaauuacaga

SEQ ID NO: 185778 - RNA, 22 nt, Human
acuaaaguaucuccuauuucau

SEQ ID NO: 185779 - RNA, 22 nt, Human
acugagcagaagagaucuguga

SEQ ID NO: 185780 - RNA, 22 nt, Human
gggcuucucccuaaggacucug

SEQ ID NO: 185781 - RNA, 22 nt, Human
agaauacaguaugcaaaaagau

SEQ ID NO: 185782 - RNA, 22 nt, Human
ggcugccuucagacuccagcuu

SEQ ID NO: 185783 - RNA, 22 nt, Human
guggucagaaaucucaguggca

SEQ ID NO: 185784 - RNA, 22 nt, Human
cugagacccagacaccugagga

SEQ ID NO: 185785 - RNA, 21 nt, Human
gccugggaagagaaagguaag

SEQ ID NO: 185786 - RNA, 22 nt, Human
caaguuuugcauaguucuguau

SEQ ID NO: 185787 - RNA, 22 nt, Human
uuuacaguauaguaggacucau

SEQ ID NO: 185788 - RNA, 22 nt, Human
aggcccaguguggcuuccugga

SEQ ID NO: 185789 - RNA, 22 nt, Human
auucuggguuugcuguacaaag

SEQ ID NO: 185790 - RNA, 22 nt, Human
gaagaaggugcuacacagggca

SEQ ID NO: 185791 - RNA, 22 nt, Human
augcaaacauguuuccucuaag

SEQ ID NO: 185792 - RNA, 22 nt, Human
gccuguuugacuggucucugcu

SEQ ID NO: 185793 - RNA, 22 nt, Human
uuucuucuugaguaaccagauu

SEQ ID NO: 185794 - RNA, 22 nt, Human
cccaggcugcguauccacaaua

SEQ ID NO: 185795 - RNA, 22 nt, Human
cccacaucucacaucuuggaac

SEQ ID NO: 185796 - RNA, 22 nt, Human
uagcucauguaauccgaacaua

SEQ ID NO: 185797 - RNA, 22 nt, Human
auucacaugauguauguagggc

SEQ ID NO: 185798 - RNA, 22 nt, Human
gaggguggggaauagacugcua

SEQ ID NO: 185799 - RNA, 22 nt, Human
acauguaaaagauaaauuaaca

SEQ ID NO: 185800 - RNA, 22 nt, Human
uaaaugaguaauauagcuguuu

SEQ ID NO: 185801 - RNA, 22 nt, Human
gagcaugagggaaggcagcaga

SEQ ID NO: 185802 - RNA, 22 nt, Human
gcugccuugcuuacuccacugc

SEQ ID NO: 185803 - RNA, 22 nt, Human
uggagagaugucuguucaaggu

SEQ ID NO: 185804 - RNA, 22 nt, Human
ccuucuccccucugcagggugu

SEQ ID NO: 185805 - RNA, 22 nt, Human
aagcuguggcuuggaggaaaca

SEQ ID NO: 185806 - RNA, 21 nt, Human
gggagcugacagcagcacggc

SEQ ID NO: 185807 - RNA, 19 nt, Human
ccagcccauaguccaucac

SEQ ID NO: 185808 - RNA, 22 nt, Human
caggaaaauggaaucaccugua

SEQ ID NO: 185809 - RNA, 22 nt, Human
uugagaaaggggucaauaucuc

SEQ ID NO: 185810 - RNA, 21 nt, Human
augauucugcaaaugaguagu

SEQ ID NO: 185811 - RNA, 22 nt, Human
gcugcaggaugaggcucugcuc

SEQ ID NO: 185812 - RNA, 23 nt, Human
agccaucauccugcugcuggggc

SEQ ID NO: 185813 - RNA, 22 nt, Human
uuccuggccucuuccaccacca

SEQ ID NO: 185814 - RNA, 22 nt, Human
ccaggagaugggaaaguagcag

SEQ ID NO: 185815 - RNA, 17 nt, Human
cccuggcucuaggugga

SEQ ID NO: 185816 - RNA, 22 nt, Human
gguguucaaaugaacacaugca

SEQ ID NO: 185817 - RNA, 21 nt, Human
cuggcaugaggagcuuuguuu

SEQ ID NO: 185818 - RNA, 22 nt, Human
cuuccagagauccaugaauacc

SEQ ID NO: 185819 - RNA, 20 nt, Human
accauaauguuaauuacaaa

SEQ ID NO: 185820 - RNA, 22 nt, Human
aggugggggcuguguccuugac

SEQ ID NO: 185821 - RNA, 22 nt, Human
cacccuggcuggaggugcagug

SEQ ID NO: 185822 - RNA, 22 nt, Human
agggaccucauguaaguggauu

SEQ ID NO: 185823 - RNA, 22 nt, Human
ccccacagcuuguggagagaau

SEQ ID NO: 185824 - RNA, 22 nt, Human
gugugcucagcucauuuggaua

SEQ ID NO: 185825 - RNA, 22 nt, Human
augcaaagcacacacagaaucc

SEQ ID NO: 185826 - RNA, 22 nt, Human
uaaggaggcgagguggugagca

SEQ ID NO: 185827 - RNA, 22 nt, Human
gaaucaauugugaagacuauga

SEQ ID NO: 185828 - RNA, 22 nt, Human
uggggauguaaaugaggugaua

SEQ ID NO: 185829 - RNA, 22 nt, Human
auuagucuucucauuuggaucc

SEQ ID NO: 185830 - RNA, 22 nt, Human
gccaggcauuuguuaggugcug

SEQ ID NO: 185831 - RNA, 22 nt, Human
uaggccagaggagcagcuuugg

SEQ ID NO: 185832 - RNA, 22 nt, Human
caggaggcagagguugcaguga

SEQ ID NO: 185833 - RNA, 22 nt, Human
ucugcugccaccuuguggugag

SEQ ID NO: 185834 - RNA, 22 nt, Human
gggcuugcuaagaagagcgcau

SEQ ID NO: 185835 - RNA, 22 nt, Human
ccaaggagcugcaggcacuugu

SEQ ID NO: 185836 - RNA, 22 nt, Human
gugguaaagcugauugaauuga

SEQ ID NO: 185837 - RNA, 22 nt, Human
gaauacaugcacgacacggggg

SEQ ID NO: 185838 - RNA, 22 nt, Human
aaagauaauguuuccuuauucu

SEQ ID NO: 185839 - RNA, 18 nt, Human
ggcagcaagaagggaggg

SEQ ID NO: 185840 - RNA, 22 nt, Human
gcagcuuuguaaaguaugaagc

SEQ ID NO: 185841 - RNA, 22 nt, Human
aggcucccaagcacugacccca

SEQ ID NO: 185842 - RNA, 22 nt, Human
uuaauaugcugcuucuugaaaa

SEQ ID NO: 185843 - RNA, 22 nt, Human
ggcacccuuggggggccacagc

SEQ ID NO: 185844 - RNA, 22 nt, Human
aagcacaguucuuagaguuaca

SEQ ID NO: 185845 - RNA, 22 nt, Human
cagcuuggaggaggaucuaaga

SEQ ID NO: 185846 - RNA, 22 nt, Human
gugaaggcuacaagagaucaag

SEQ ID NO: 185847 - RNA, 22 nt, Human
cauuaaaucuuccagaccucac

SEQ ID NO: 185848 - RNA, 22 nt, Human
gaggagggccuggugucccuuc

SEQ ID NO: 185849 - RNA, 22 nt, Human
ugagcaggacugaccggccuua

SEQ ID NO: 185850 - RNA, 22 nt, Human
gauauagguucauaguguuaca

SEQ ID NO: 185851 - RNA, 22 nt, Human
aggacaguuaguuaggaaguuu

SEQ ID NO: 185852 - RNA, 22 nt, Human
ccaggucuggcacuggccaguc

SEQ ID NO: 185853 - RNA, 22 nt, Human
ugcaauuaugggcaauuuuuaa

SEQ ID NO: 185854 - RNA, 22 nt, Human
uggccugggugcugcugacauc

SEQ ID NO: 185855 - RNA, 22 nt, Human
cucagcagguaccacaugaucu

SEQ ID NO: 185856 - RNA, 22 nt, Human
aauaagauaagauuucugcucu

SEQ ID NO: 185857 - RNA, 22 nt, Human
ugcccugcuaaccuugguucca

SEQ ID NO: 185858 - RNA, 22 nt, Human
guccuucagcaccucccucggc

SEQ ID NO: 185859 - RNA, 22 nt, Human
gugagggagguagauuucauca

SEQ ID NO: 185860 - RNA, 22 nt, Human
acaaggccaagcauucuagcaa

SEQ ID NO: 185861 - RNA, 22 nt, Human
gaagccuuaucagucacuuaua

SEQ ID NO: 185862 - RNA, 21 nt, Human
ugugucagucuuuggaagcaa

SEQ ID NO: 185863 - RNA, 20 nt, Human
uccaguuuuggagacauucu

SEQ ID NO: 185864 - RNA, 22 nt, Human
uacauaauuaaucuuuaaguuc

SEQ ID NO: 185865 - RNA, 22 nt, Human
augcagggagguaagaggugcc

SEQ ID NO: 185866 - RNA, 22 nt, Human
uuuccugguuugaagcagcagc

SEQ ID NO: 185867 - RNA, 22 nt, Human
ucccacacuugaaacaaggcug

SEQ ID NO: 185868 - RNA, 22 nt, Human
agggccuggcgcguggccgccg

SEQ ID NO: 185869 - RNA, 22 nt, Human
cugaaagcaaaguaauucuuaa

SEQ ID NO: 185870 - RNA, 22 nt, Human
uggauuaguuucaaggcagcaa

SEQ ID NO: 185871 - RNA, 22 nt, Human
aaacagauaagggacaauuuca

SEQ ID NO: 185872 - RNA, 22 nt, Human
cauuaaguauuucaguuacugu

SEQ ID NO: 185873 - RNA, 22 nt, Human
caggucuguuuucaaggucagu

SEQ ID NO: 185874 - RNA, 22 nt, Human
auuauucuuaugucaucauggc

SEQ ID NO: 185875 - RNA, 22 nt, Human
caaaucuaggaugcauguagug

SEQ ID NO: 185876 - RNA, 19 nt, Human
uugaaauuguuugauaugg

SEQ ID NO: 185877 - RNA, 22 nt, Human
cugccuucuuucaaggguaagc

SEQ ID NO: 185878 - RNA, 22 nt, Human
gaggcucaacccacagggguug

SEQ ID NO: 185879 - RNA, 22 nt, Human
uuuaucugaggaaagcagacaa

SEQ ID NO: 185880 - RNA, 22 nt, Human
cuuuuuguuguccacacuagga

SEQ ID NO: 185881 - RNA, 22 nt, Human
ggaagccagagugcugggcagg

SEQ ID NO: 185882 - RNA, 22 nt, Human
uggaaacuauccucacaacuag

SEQ ID NO: 185883 - RNA, 23 nt, Human
acucaaauuucgcuuggaguuca

SEQ ID NO: 185884 - RNA, 22 nt, Human
cacuuuacuaucuauaaaauaa

SEQ ID NO: 185885 - RNA, 21 nt, Human
ucuggcaguggucuuucaaau

SEQ ID NO: 185886 - RNA, 22 nt, Human
gguggcacucauuaucaggugc

SEQ ID NO: 185887 - RNA, 22 nt, Human
uggccuggcugcccugucugga

SEQ ID NO: 185888 - RNA, 22 nt, Human
cucuucuugaaagaggaauuca

SEQ ID NO: 185889 - RNA, 21 nt, Human
gcugugcacauaguagaagug

SEQ ID NO: 185890 - RNA, 22 nt, Human
gaucuuuucagucuugguaguu

SEQ ID NO: 185891 - RNA, 22 nt, Human
acagugcuaaacacuucuugaa

SEQ ID NO: 185892 - RNA, 22 nt, Human
agucucagcaagcauggcuagu

SEQ ID NO: 185893 - RNA, 17 nt, Human
gcaagggaugggagauu

SEQ ID NO: 185894 - RNA, 22 nt, Human
cuggcugcaguagcaagagacu

SEQ ID NO: 185895 - RNA, 22 nt, Human
cacaagggcuuuguaggcuuug

SEQ ID NO: 185896 - RNA, 22 nt, Human
uauaucaccaaaaacaguucug

SEQ ID NO: 185897 - RNA, 22 nt, Human
agggccagcuagagcccucgcc

SEQ ID NO: 185898 - RNA, 22 nt, Human
acacucacccucccacugccug

SEQ ID NO: 185899 - RNA, 22 nt, Human
cugccagacacguuaugcucau

SEQ ID NO: 185900 - RNA, 22 nt, Human
aaagauuaggcggcaacugggc

SEQ ID NO: 185901 - RNA, 22 nt, Human
gagcuugggugccaugcugagc

SEQ ID NO: 185902 - RNA, 22 nt, Human
uuuacauguccuucaagagcag

SEQ ID NO: 185903 - RNA, 22 nt, Human
cgacccuacagacagugcugag

SEQ ID NO: 185904 - RNA, 21 nt, Human
uguggcagauguugggaggca

SEQ ID NO: 185905 - RNA, 22 nt, Human
aggcagguccccuggaaggcac

SEQ ID NO: 185906 - RNA, 23 nt, Human
agaguggccuacucacacucauu

SEQ ID NO: 185907 - RNA, 22 nt, Human
gaaucauuuauuuuugacagca

SEQ ID NO: 185908 - RNA, 22 nt, Human
uagcagaggcaaggaugugaau

SEQ ID NO: 185909 - RNA, 22 nt, Human
gaugugucuccguuucaaggca

SEQ ID NO: 185910 - RNA, 22 nt, Human
aagagccagcuagugaagaggc

SEQ ID NO: 185911 - RNA, 22 nt, Human
gcauggaauucccuuaugggcc

SEQ ID NO: 185912 - RNA, 23 nt, Human
gggcccagcacaggaccuggcag

SEQ ID NO: 185913 - RNA, 22 nt, Human
gcacagccugucccuguccugg

SEQ ID NO: 185914 - RNA, 19 nt, Human
cuucuucuuggcagccaag

SEQ ID NO: 185915 - RNA, 22 nt, Human
uggugggagugagggcaugcca

SEQ ID NO: 185916 - RNA, 21 nt, Human
uguauaacuucucucccucag

SEQ ID NO: 185917 - RNA, 19 nt, Human
agggccaggauucuggaac

SEQ ID NO: 185918 - RNA, 22 nt, Human
gugcagcaaaguuugagauaua

SEQ ID NO: 185919 - RNA, 22 nt, Human
aucugguauuuccuuugauagc

SEQ ID NO: 185920 - RNA, 22 nt, Human
cagcagucaggccugugggaga

SEQ ID NO: 185921 - RNA, 22 nt, Human
cuucccagacgggguggcagcc

SEQ ID NO: 185922 - RNA, 22 nt, Human
aacccuggggcugcucugccug

SEQ ID NO: 185923 - RNA, 22 nt, Human
uucuucagauggugagaccucc

SEQ ID NO: 185924 - RNA, 22 nt, Human
aggcuuggcugcacgccucgcu

SEQ ID NO: 185925 - RNA, 22 nt, Human
uggacauguccggccagacaau

SEQ ID NO: 185926 - RNA, 22 nt, Human
gcuucccaggcgccugaccuuu

SEQ ID NO: 185927 - RNA, 22 nt, Human
cauggcaggaaggacaugcacu

SEQ ID NO: 185928 - RNA, 22 nt, Human
agugcauucaguauucauaggc

SEQ ID NO: 185929 - RNA, 22 nt, Human
acaugacagugacuuuauaaga

SEQ ID NO: 185930 - RNA, 22 nt, Human
aggcuggagagugcaguggcgu

SEQ ID NO: 185931 - RNA, 22 nt, Human
ugaaugaugguguguucuugcc

SEQ ID NO: 185932 - RNA, 22 nt, Human
aggagaggcaucaagaaaaucg

SEQ ID NO: 185933 - RNA, 22 nt, Human
ugucacagagcgugcaacagaa

SEQ ID NO: 185934 - RNA, 22 nt, Human
cugcaauaugaugucugagaaa

SEQ ID NO: 185935 - RNA, 22 nt, Human
caugccauuaacauuagcuagc

SEQ ID NO: 185936 - RNA, 22 nt, Human
cacauuucuaggaaauuaaaug

SEQ ID NO: 185937 - RNA, 22 nt, Human
cacaauuuccaagucauguuau

SEQ ID NO: 185938 - RNA, 22 nt, Human
gaggugucaugagggccugcuc

SEQ ID NO: 185939 - RNA, 22 nt, Human
gugcauuaguuuccuauugcug

SEQ ID NO: 185940 - RNA, 20 nt, Human
agcaaacucuucccaucuuc

SEQ ID NO: 185941 - RNA, 22 nt, Human
agacagugcuaucccaucugug

SEQ ID NO: 185942 - RNA, 22 nt, Human
gcucccuggaauguuggcugcc

SEQ ID NO: 185943 - RNA, 22 nt, Human
auccauuugacauaauuucagc

SEQ ID NO: 185944 - RNA, 22 nt, Human
gugugcagggcugccugugccg

SEQ ID NO: 185945 - RNA, 21 nt, Human
gggccuggcugcgcaggacgg

SEQ ID NO: 185946 - RNA, 22 nt, Human
ggcuguaccugccucuccucua

SEQ ID NO: 185947 - RNA, 22 nt, Human
ggaggcaggaaagacagguuca

SEQ ID NO: 185948 - RNA, 22 nt, Human
ucaugaaucguggaaugauuua

SEQ ID NO: 185949 - RNA, 22 nt, Human
uacaguuucccagcagaugcaa

SEQ ID NO: 185950 - RNA, 22 nt, Human
cuuuggaaggaagaccuuucag

SEQ ID NO: 185951 - RNA, 22 nt, Human
uauuucagcaagaagaaugugg

SEQ ID NO: 185952 - RNA, 21 nt, Human
ggcugguguuuagcugugaua

SEQ ID NO: 185953 - RNA, 22 nt, Human
auaucacaguaguuguuuaguu

SEQ ID NO: 185954 - RNA, 22 nt, Human
agccuggguuaggguucuuccc

SEQ ID NO: 185955 - RNA, 18 nt, Human
gcuuuauuucuuggggaa

SEQ ID NO: 185956 - RNA, 22 nt, Human
ggaagccagaaagugagaauau

SEQ ID NO: 185957 - RNA, 22 nt, Human
ugacgucaacugcaaaggccuu

SEQ ID NO: 185958 - RNA, 22 nt, Human
aaugcaaagcaagcagagauuu

SEQ ID NO: 185959 - RNA, 22 nt, Human
gaggaagcauugacauaaucuc

SEQ ID NO: 185960 - RNA, 22 nt, Human
auucauaacggcaaaugucacc

SEQ ID NO: 185961 - RNA, 22 nt, Human
ggagacacauauacagaaagag

SEQ ID NO: 185962 - RNA, 22 nt, Human
gaggcugaaguguacaugggug

SEQ ID NO: 185963 - RNA, 22 nt, Human
uucauagcagucccuuucuggg

SEQ ID NO: 185964 - RNA, 22 nt, Human
ucuaauuuuggcauuuuaaccu

SEQ ID NO: 185965 - RNA, 22 nt, Human
ugcugagguaaccauauccugc

SEQ ID NO: 185966 - RNA, 22 nt, Human
aggcugcuucaauggauaagau

SEQ ID NO: 185967 - RNA, 20 nt, Human
gugcagaggcagccuguggg

SEQ ID NO: 185968 - RNA, 22 nt, Human
uaaggccaaggggccauagucu

SEQ ID NO: 185969 - RNA, 22 nt, Human
auucaaacaggccaauugaccu

SEQ ID NO: 185970 - RNA, 23 nt, Human
acaaguguuuccaauauggcugg

SEQ ID NO: 185971 - RNA, 22 nt, Human
ccugguucagucuuucuaugcu

SEQ ID NO: 185972 - RNA, 23 nt, Human
cugggcuguccugaggucaccuc

SEQ ID NO: 185973 - RNA, 22 nt, Human
auggaauugaagacagcauagg

SEQ ID NO: 185974 - RNA, 20 nt, Human
ugcagguguuggagaaggua

SEQ ID NO: 185975 - RNA, 22 nt, Human
gugcaugcaaauuacuguaaag

SEQ ID NO: 185976 - RNA, 22 nt, Human
gcuguggccgggcccaggccgc

SEQ ID NO: 185977 - RNA, 22 nt, Human
aauuucuguaugaauagagaaa

SEQ ID NO: 185978 - RNA, 22 nt, Human
aaugguauuugucaagcauagu

SEQ ID NO: 185979 - RNA, 22 nt, Human
ucugggagauccaagcagaacu

SEQ ID NO: 185980 - RNA, 22 nt, Human
aucaggaugaagcuguagcgaa

SEQ ID NO: 185981 - RNA, 20 nt, Human
ucucaguuucuagagucagg

SEQ ID NO: 185982 - RNA, 17 nt, Human
aaugaaugaauucuuug

SEQ ID NO: 185983 - RNA, 22 nt, Human
aucucuguaaaccauaaauuga

SEQ ID NO: 185984 - RNA, 22 nt, Human
acaagauuuagcuuaaagggcu

SEQ ID NO: 185985 - RNA, 22 nt, Human
acaguaauuuauugaacaccuu

SEQ ID NO: 185986 - RNA, 22 nt, Human
uauugcuggggugggccauguu

SEQ ID NO: 185987 - RNA, 22 nt, Human
ucuguggcaugguaucuggagg

SEQ ID NO: 185988 - RNA, 22 nt, Human
cagcuacaggaccugaugcacc

SEQ ID NO: 185989 - RNA, 22 nt, Human
gcaggcaguuugcuuuucccuc

SEQ ID NO: 185990 - RNA, 22 nt, Human
aacagcagcuuucaggaucauc

SEQ ID NO: 185991 - RNA, 22 nt, Human
cuggagcucuguguguuccuga

SEQ ID NO: 185992 - RNA, 22 nt, Human
uggugcugccucagaugccuua

SEQ ID NO: 185993 - RNA, 22 nt, Human
agcugguugucauucagaauug

SEQ ID NO: 185994 - RNA, 22 nt, Human
uuagaaaugcacccaagaccua

SEQ ID NO: 185995 - RNA, 22 nt, Human
uuuguucaccuagcaaacuuuu

SEQ ID NO: 185996 - RNA, 22 nt, Human
cgcaggugggcccuucauugau

SEQ ID NO: 185997 - RNA, 22 nt, Human
gcucaggucuuacccaugccug

SEQ ID NO: 185998 - RNA, 22 nt, Human
ggccuugauccuccagagcacu

SEQ ID NO: 185999 - RNA, 23 nt, Human
aaauagagauaggccagcuuugc

SEQ ID NO: 186000 - RNA, 22 nt, Human
gcagaggagcaaguugcuacag

SEQ ID NO: 186001 - RNA, 22 nt, Human
gccaggcugcuccagggaggcc

SEQ ID NO: 186002 - RNA, 22 nt, Human
aauugcuucauuaacauuuagg

SEQ ID NO: 186003 - RNA, 22 nt, Human
ggccugaucuuugacccucauc

SEQ ID NO: 186004 - RNA, 22 nt, Human
gcuguucagggcacucaugggc

SEQ ID NO: 186005 - RNA, 22 nt, Human
ggagcucauaacaagguagcca

SEQ ID NO: 186006 - RNA, 22 nt, Human
ggcucuggcggcucuuucaaua

SEQ ID NO: 186007 - RNA, 22 nt, Human
cacugugucagaguaugaugau

SEQ ID NO: 186008 - RNA, 19 nt, Human
cuucuggcccugagccacc

SEQ ID NO: 186009 - RNA, 17 nt, Human
cagcuuuaugcuacugu

SEQ ID NO: 186010 - RNA, 22 nt, Human
gggucuggagauccgggugaag

SEQ ID NO: 186011 - RNA, 22 nt, Human
ccuacaguuauauucuugauug

SEQ ID NO: 186012 - RNA, 22 nt, Human
uggaaagcaguucuuagaaucg

SEQ ID NO: 186013 - RNA, 22 nt, Human
aacagaaaagguagguggcuuu

SEQ ID NO: 186014 - RNA, 22 nt, Human
ucuggcagcaagauaacaaugg

SEQ ID NO: 186015 - RNA, 21 nt, Human
aucauucuggaaaauucaagc

SEQ ID NO: 186016 - RNA, 22 nt, Human
ugaggauggaaugcugugcaag

SEQ ID NO: 186017 - RNA, 22 nt, Human
ccuuccuugucuacaaaagcuc

SEQ ID NO: 186018 - RNA, 22 nt, Human
auccugaaaauugaauggaagg

SEQ ID NO: 186019 - RNA, 22 nt, Human
auuuucauggcuucugcucagu

SEQ ID NO: 186020 - RNA, 22 nt, Human
gugagcagccucaccugagggu

SEQ ID NO: 186021 - RNA, 20 nt, Human
aaggcagaguggguuggagc

SEQ ID NO: 186022 - RNA, 22 nt, Human
agaaauguugaauacacaaaau

SEQ ID NO: 186023 - RNA, 18 nt, Human
ccagggagcuuauuagga

SEQ ID NO: 186024 - RNA, 22 nt, Human
ucucugugucuuagugaaggga

SEQ ID NO: 186025 - RNA, 22 nt, Human
gcucugcucuaacauuccugac

SEQ ID NO: 186026 - RNA, 22 nt, Human
uaguuacaauggguucugugac

SEQ ID NO: 186027 - RNA, 22 nt, Human
aggcccuguuaugagccacugu

SEQ ID NO: 186028 - RNA, 22 nt, Human
agggaagaggaccagagucucu

SEQ ID NO: 186029 - RNA, 22 nt, Human
agcagagguguuuauuauggga

SEQ ID NO: 186030 - RNA, 22 nt, Human
aucuccagcaauggggagcucu

SEQ ID NO: 186031 - RNA, 22 nt, Human
gggcacagagaagguuuuagug

SEQ ID NO: 186032 - RNA, 21 nt, Human
aggaccuagaaaagugccuag

SEQ ID NO: 186033 - RNA, 22 nt, Human
gagggucccugcucagggccag

SEQ ID NO: 186034 - RNA, 22 nt, Human
aagcuuagguacagaaguuaag

SEQ ID NO: 186035 - RNA, 22 nt, Human
ucuuccuugcuccuugucacuu

SEQ ID NO: 186036 - RNA, 22 nt, Human
aggccacaguacuuugcagacc

SEQ ID NO: 186037 - RNA, 22 nt, Human
gcccugaggcaaaagaacaguc

SEQ ID NO: 186038 - RNA, 17 nt, Human
cugcuuggccucugggg

SEQ ID NO: 186039 - RNA, 17 nt, Human
aggccucugccggugcc

SEQ ID NO: 186040 - RNA, 22 nt, Human
ucuaauuuuaggcauuuguuca

SEQ ID NO: 186041 - RNA, 17 nt, Human
auuuccugcaagccccu

SEQ ID NO: 186042 - RNA, 22 nt, Human
auauuauaaguuauuucaaguu

SEQ ID NO: 186043 - RNA, 22 nt, Human
ugcaggcuccaugaggacaggc

SEQ ID NO: 186044 - RNA, 22 nt, Human
uuugcaaaugcucugcagagcu

SEQ ID NO: 186045 - RNA, 22 nt, Human
augauucuaggcauugaagaua

SEQ ID NO: 186046 - RNA, 22 nt, Human
agagucagacuaagccauggug

SEQ ID NO: 186047 - RNA, 22 nt, Human
uucuguacccaacauuuuuacu

SEQ ID NO: 186048 - RNA, 17 nt, Human
acccaggcucuaucuug

SEQ ID NO: 186049 - RNA, 22 nt, Human
agcagggccuggcacuccuggg

SEQ ID NO: 186050 - RNA, 22 nt, Human
uuugggauuuuacauuguaugg

SEQ ID NO: 186051 - RNA, 22 nt, Human
aucaccaguaaguuuucaguuu

SEQ ID NO: 186052 - RNA, 22 nt, Human
uacacaucauacacugggauua

SEQ ID NO: 186053 - RNA, 22 nt, Human
auacgccauaggcuccucacuu

SEQ ID NO: 186054 - RNA, 22 nt, Human
uuuguucauuuugagcucauca

SEQ ID NO: 186055 - RNA, 22 nt, Human
agguccugugguuuggguaaaa

SEQ ID NO: 186056 - RNA, 22 nt, Human
uguucaguccaauguuggaaaa

SEQ ID NO: 186057 - RNA, 22 nt, Human
gcaggugugaaugugaauuaag

SEQ ID NO: 186058 - RNA, 22 nt, Human
aaggcugagccagggccccuau

SEQ ID NO: 186059 - RNA, 22 nt, Human
aagagucuuauaguguaauuaa

SEQ ID NO: 186060 - RNA, 23 nt, Human
caguggagacucaugcuuccuua

SEQ ID NO: 186061 - RNA, 22 nt, Human
ugucaccaccggaagaaacugc

SEQ ID NO: 186062 - RNA, 22 nt, Human
ucucugguggcuccaucaguag

SEQ ID NO: 186063 - RNA, 22 nt, Human
cagacaaggccaucuuucauuu

SEQ ID NO: 186064 - RNA, 22 nt, Human
uaguaaucagagguaaacuuua

SEQ ID NO: 186065 - RNA, 22 nt, Human
guucuucaggccauccucccag

SEQ ID NO: 186066 - RNA, 22 nt, Human
aggagcugauagucuauggaga

SEQ ID NO: 186067 - RNA, 22 nt, Human
aagucucucugugugggauaag

SEQ ID NO: 186068 - RNA, 21 nt, Human
agccagucugccagagaagcc

SEQ ID NO: 186069 - RNA, 22 nt, Human
guuauuuuaacuucucaguaau

SEQ ID NO: 186070 - RNA, 21 nt, Human
uuucuccaagugacugauucc

SEQ ID NO: 186071 - RNA, 22 nt, Human
aacuacauagaaauuaguauuu

SEQ ID NO: 186072 - RNA, 22 nt, Human
agcaggaaggucugugugaguc

SEQ ID NO: 186073 - RNA, 19 nt, Human
acauggcaucccaggaggu

SEQ ID NO: 186074 - RNA, 21 nt, Human
ucaccuggcuucugaccuggc

SEQ ID NO: 186075 - RNA, 22 nt, Human
uuacaaucaucuaggauaaaga

SEQ ID NO: 186076 - RNA, 22 nt, Human
gcaugcaacucccaguucugcc

SEQ ID NO: 186077 - RNA, 22 nt, Human
agggcuuucuuuguaaaagaag

SEQ ID NO: 186078 - RNA, 22 nt, Human
ugcccuggagucaguggcuauu

SEQ ID NO: 186079 - RNA, 22 nt, Human
guccagagguccaggaucaagg

SEQ ID NO: 186080 - RNA, 22 nt, Human
aagcccauaaaaagaggucccu

SEQ ID NO: 186081 - RNA, 22 nt, Human
aaggugguuugcuaaucccaac

SEQ ID NO: 186082 - RNA, 22 nt, Human
gaacuacaguaagaauugaugu

SEQ ID NO: 186083 - RNA, 22 nt, Human
ucugcucuccauacuuccgcac

SEQ ID NO: 186084 - RNA, 22 nt, Human
uucacauuucucugcuguuuga

SEQ ID NO: 186085 - RNA, 22 nt, Human
uaugucaugucuuagagaauga

SEQ ID NO: 186086 - RNA, 22 nt, Human
uauuugcaggcuuuugucaugg

SEQ ID NO: 186087 - RNA, 22 nt, Human
gccuccuggauuuuagugccau

SEQ ID NO: 186088 - RNA, 22 nt, Human
ggaggcacuucccgucucagcc

SEQ ID NO: 186089 - RNA, 22 nt, Human
ccaggagcaccaggccugugcc

SEQ ID NO: 186090 - RNA, 22 nt, Human
uaagugaugaaagcagaugucu

SEQ ID NO: 186091 - RNA, 22 nt, Human
cuccugggcugucggcgcucug

SEQ ID NO: 186092 - RNA, 21 nt, Human
uguguaauauguauaagaaua

SEQ ID NO: 186093 - RNA, 22 nt, Human
ucugcaggaagcuggcggcuga

SEQ ID NO: 186094 - RNA, 23 nt, Human
agcaaucuguguuucagcaagcc

SEQ ID NO: 186095 - RNA, 22 nt, Human
uuccuacaucaccagggggagu

SEQ ID NO: 186096 - RNA, 22 nt, Human
accccagcgcauauggucugcg

SEQ ID NO: 186097 - RNA, 22 nt, Human
cuugaauguccuguggcaaagu

SEQ ID NO: 186098 - RNA, 22 nt, Human
agugcaugcgcuugggaggggu

SEQ ID NO: 186099 - RNA, 22 nt, Human
gcagggcaguaagagcuagagu

SEQ ID NO: 186100 - RNA, 22 nt, Human
gcugcuguggcagauuggauuc

SEQ ID NO: 186101 - RNA, 22 nt, Human
aggaaacuucagaguuuugguc

SEQ ID NO: 186102 - RNA, 22 nt, Human
ccugcagggugcugccacagau

SEQ ID NO: 186103 - RNA, 22 nt, Human
agaagccacaggaaagcagcuu

SEQ ID NO: 186104 - RNA, 22 nt, Human
aauguuuugcauuaguuuucua

SEQ ID NO: 186105 - RNA, 22 nt, Human
aggcagguuacaaaaacuuuau

SEQ ID NO: 186106 - RNA, 17 nt, Human
ucagacccugugucagg

SEQ ID NO: 186107 - RNA, 22 nt, Human
ugcugcagaucagcugaguccu

SEQ ID NO: 186108 - RNA, 22 nt, Human
uccaaggaggcuuugacgucca

SEQ ID NO: 186109 - RNA, 22 nt, Human
aauaucuguuguucuaagccac

SEQ ID NO: 186110 - RNA, 22 nt, Human
gccugccaaaagaagcugcugg

SEQ ID NO: 186111 - RNA, 18 nt, Human
ccagguggugacagagau

SEQ ID NO: 186112 - RNA, 17 nt, Human
gcagccagugcagcagg

SEQ ID NO: 186113 - RNA, 22 nt, Human
uccuuuaaacuccuuucaaguc

SEQ ID NO: 186114 - RNA, 22 nt, Human
cacugaaaggaaaccagagcau

SEQ ID NO: 186115 - RNA, 21 nt, Human
ucccucagaagguagccaagc

SEQ ID NO: 186116 - RNA, 22 nt, Human
ucuuaagaaagugacaaauagg

SEQ ID NO: 186117 - RNA, 22 nt, Human
ugcugaggucauuuccaaguga

SEQ ID NO: 186118 - RNA, 22 nt, Human
gggauggggagcuggaaagggg

SEQ ID NO: 186119 - RNA, 22 nt, Human
cagcaggacauggaggaguaaa

SEQ ID NO: 186120 - RNA, 19 nt, Human
uccuggggaggggcauggc

SEQ ID NO: 186121 - RNA, 22 nt, Human
ccuggggcuccagagcagcgga

SEQ ID NO: 186122 - RNA, 22 nt, Human
uuaucuugaguauugagauucu

SEQ ID NO: 186123 - RNA, 22 nt, Human
agcagagguuuguuggaaaccu

SEQ ID NO: 186124 - RNA, 22 nt, Human
accacuguacuauuugaguggc

SEQ ID NO: 186125 - RNA, 23 nt, Human
cauguuuuucuaucucagcgugu

SEQ ID NO: 186126 - RNA, 22 nt, Human
aacuuaguuggggacaccaugg

SEQ ID NO: 186127 - RNA, 22 nt, Human
guggcugcagcggcuguggaga

SEQ ID NO: 186128 - RNA, 22 nt, Human
uguguucaaucccuagucucag

SEQ ID NO: 186129 - RNA, 22 nt, Human
auuagcagcuuucuggucucua

SEQ ID NO: 186130 - RNA, 22 nt, Human
ucccaggcaaaggcagcucauu

SEQ ID NO: 186131 - RNA, 22 nt, Human
cuguguguccucggacgaguuu

SEQ ID NO: 186132 - RNA, 22 nt, Human
gaggcaagcccagugggucuaa

SEQ ID NO: 186133 - RNA, 23 nt, Human
gguccaggaaaggcagcagcacc

SEQ ID NO: 186134 - RNA, 22 nt, Human
ccuccccacccacggcuggugg

SEQ ID NO: 186135 - RNA, 22 nt, Human
uagaaucuuuaaaauucauagu

SEQ ID NO: 186136 - RNA, 22 nt, Human
aggcacagaauggcauucagug

SEQ ID NO: 186137 - RNA, 22 nt, Human
cacagaggaugcccaagcgauc

SEQ ID NO: 186138 - RNA, 22 nt, Human
uacauucacaguuguucaucuc

SEQ ID NO: 186139 - RNA, 22 nt, Human
acaugucucuucugaaagacaa

SEQ ID NO: 186140 - RNA, 22 nt, Human
aaagcuggccucucaggcuuua

SEQ ID NO: 186141 - RNA, 22 nt, Human
cauuuauugguuaggccagcag

SEQ ID NO: 186142 - RNA, 22 nt, Human
gaacaacuccaagggacaucau

SEQ ID NO: 186143 - RNA, 22 nt, Human
auucuuuaauucaauugaagga

SEQ ID NO: 186144 - RNA, 21 nt, Human
acagaacuguauagugauaaa

SEQ ID NO: 186145 - RNA, 22 nt, Human
auuucaugaguuauuauagugg

SEQ ID NO: 186146 - RNA, 22 nt, Human
gaugcucaucuguccuuugaug

SEQ ID NO: 186147 - RNA, 22 nt, Human
aauuguaagugcugaguuaagg

SEQ ID NO: 186148 - RNA, 22 nt, Human
aggcagugccuggaccccagcu

SEQ ID NO: 186149 - RNA, 17 nt, Human
ggcugugccaggugaga

SEQ ID NO: 186150 - RNA, 20 nt, Human
uccugagccuccaccauguc

SEQ ID NO: 186151 - RNA, 22 nt, Human
agcugccuucccucucauuagg

SEQ ID NO: 186152 - RNA, 22 nt, Human
ugaggcagggagaguggauaug

SEQ ID NO: 186153 - RNA, 22 nt, Human
cacuaaguugguguuaauuagu

SEQ ID NO: 186154 - RNA, 22 nt, Human
acagacugugaguaugcauagu

SEQ ID NO: 186155 - RNA, 22 nt, Human
augcccugggagugcuguacca

SEQ ID NO: 186156 - RNA, 17 nt, Human
aguguuuccuuaucauu

SEQ ID NO: 186157 - RNA, 22 nt, Human
gugcuggcccuguccucgagcu

SEQ ID NO: 186158 - RNA, 22 nt, Human
gugcauuauucuuaccuuucuu

SEQ ID NO: 186159 - RNA, 22 nt, Human
cccaggcuggcacugcugaagu

SEQ ID NO: 186160 - RNA, 22 nt, Human
ggcucccuguucuauucccugg

SEQ ID NO: 186161 - RNA, 22 nt, Human
cugucucagcaggaagucauca

SEQ ID NO: 186162 - RNA, 22 nt, Human
gcagccagggagagaaccaggg

SEQ ID NO: 186163 - RNA, 22 nt, Human
cagcaaucgggugauaugcaau

SEQ ID NO: 186164 - RNA, 22 nt, Human
acaaugaauaucaugaaguacu

SEQ ID NO: 186165 - RNA, 22 nt, Human
gagggggcuagcgcagugccca

SEQ ID NO: 186166 - RNA, 22 nt, Human
ggaagaaaagcuuccagcgccu

SEQ ID NO: 186167 - RNA, 22 nt, Human
agucucuuacccaagcagaaug

SEQ ID NO: 186168 - RNA, 22 nt, Human
uuucaaagacagccauauuugu

SEQ ID NO: 186169 - RNA, 22 nt, Human
gaggagaggggcucccaagagc

SEQ ID NO: 186170 - RNA, 19 nt, Human
uccaggaggcugccauuga

SEQ ID NO: 186171 - RNA, 22 nt, Human
caaucugaguugggaauguauu

SEQ ID NO: 186172 - RNA, 22 nt, Human
auuucacucauucauguuacuu

SEQ ID NO: 186173 - RNA, 22 nt, Human
ggggcccagggcagcagugcag

SEQ ID NO: 186174 - RNA, 22 nt, Human
acugagcucccugagggcaggc

SEQ ID NO: 186175 - RNA, 22 nt, Human
ugucagcuggagauggcauggg

SEQ ID NO: 186176 - RNA, 22 nt, Human
augucuuucgcaucaguagcua

SEQ ID NO: 186177 - RNA, 22 nt, Human
acauuucagauguaaugugaug

SEQ ID NO: 186178 - RNA, 22 nt, Human
gggucucucucggcuccacgcg

SEQ ID NO: 186179 - RNA, 23 nt, Human
cccagaggagcagggcgugagau

SEQ ID NO: 186180 - RNA, 22 nt, Human
cuaacugucaugcacauguguu

SEQ ID NO: 186181 - RNA, 22 nt, Human
ggguagggugacuuaggcuggc

SEQ ID NO: 186182 - RNA, 22 nt, Human
ugcucagggagcauagugaauu

SEQ ID NO: 186183 - RNA, 22 nt, Human
aauucacauguugaaguccuaa

SEQ ID NO: 186184 - RNA, 19 nt, Human
ucccaggcaaaggcuucuc

SEQ ID NO: 186185 - RNA, 22 nt, Human
gggaccugaggagggguuucag

SEQ ID NO: 186186 - RNA, 22 nt, Human
uguaacaguuauaacaaugugg

SEQ ID NO: 186187 - RNA, 22 nt, Human
aagugcugggauuacaggcguc

SEQ ID NO: 186188 - RNA, 20 nt, Human
cuucuucaguaguuuguucu

SEQ ID NO: 186189 - RNA, 22 nt, Human
uaaagguagugugacauauugu

SEQ ID NO: 186190 - RNA, 20 nt, Human
caucagugccugacaggucc

SEQ ID NO: 186191 - RNA, 22 nt, Human
gcagcaucaauccaugcuucuc

SEQ ID NO: 186192 - RNA, 22 nt, Human
uuccacuggcuuucagugaucu

SEQ ID NO: 186193 - RNA, 22 nt, Human
ugugccagccucuggcuguguc

SEQ ID NO: 186194 - RNA, 22 nt, Human
ccagcccugaacccugcugcau

SEQ ID NO: 186195 - RNA, 23 nt, Human
gguuauuugcauccuguaauuau

SEQ ID NO: 186196 - RNA, 22 nt, Human
caggacaguuugcuuugcccug

SEQ ID NO: 186197 - RNA, 22 nt, Human
cccaggagagaggggauaaagc

SEQ ID NO: 186198 - RNA, 22 nt, Human
uugggaucucaaauccagcuau

SEQ ID NO: 186199 - RNA, 22 nt, Human
gggcuggcugauuuuccucucu

SEQ ID NO: 186200 - RNA, 22 nt, Human
cugcaggacagggaggagcaag

SEQ ID NO: 186201 - RNA, 22 nt, Human
auuugcaugaccuuugcaagug

SEQ ID NO: 186202 - RNA, 22 nt, Human
ccuuucuguguugcccuauuug

SEQ ID NO: 186203 - RNA, 22 nt, Human
uccaggcuuuuucaugcugucu

SEQ ID NO: 186204 - RNA, 22 nt, Human
aagugcugaaugaagacacaaa

SEQ ID NO: 186205 - RNA, 22 nt, Human
agggagcagcagccacaggaug

SEQ ID NO: 186206 - RNA, 19 nt, Human
cauauugugcuugcauuuu

SEQ ID NO: 186207 - RNA, 22 nt, Human
aucaggaagaagaauguguugg

SEQ ID NO: 186208 - RNA, 22 nt, Human
gaucaaugguguaacuuguccu

SEQ ID NO: 186209 - RNA, 22 nt, Human
ugagggaguguggauacaguag

SEQ ID NO: 186210 - RNA, 22 nt, Human
aggccccaaagcagugcaagua

SEQ ID NO: 186211 - RNA, 22 nt, Human
gggaccagaagaaggaugguga

SEQ ID NO: 186212 - RNA, 22 nt, Human
cagaucuuguacucauuauuga

SEQ ID NO: 186213 - RNA, 22 nt, Human
agcaccaggcaguauaucaaag

SEQ ID NO: 186214 - RNA, 22 nt, Human
ucuggagaggggccuagaauuu

SEQ ID NO: 186215 - RNA, 22 nt, Human
gauuuguuucaaguuagcaucu

SEQ ID NO: 186216 - RNA, 22 nt, Human
uggcugcagaucugugggacac

SEQ ID NO: 186217 - RNA, 22 nt, Human
uuuuauuaucuuugaaugggac

SEQ ID NO: 186218 - RNA, 22 nt, Human
ugacauuucagauaugguauuu

SEQ ID NO: 186219 - RNA, 22 nt, Human
ucacagaaaagcugagcaucag

SEQ ID NO: 186220 - RNA, 22 nt, Human
ucagaggaaacaaucuuuagua

SEQ ID NO: 186221 - RNA, 22 nt, Human
uauugaggaucuccugcuaauu

SEQ ID NO: 186222 - RNA, 22 nt, Human
aacuacaauauguauguaugua

SEQ ID NO: 186223 - RNA, 22 nt, Human
gaggccuggucuaugagauguu

SEQ ID NO: 186224 - RNA, 22 nt, Human
ccugagggcguaauuaacagug

SEQ ID NO: 186225 - RNA, 22 nt, Human
cagcccugaaacaaccuccucu

SEQ ID NO: 186226 - RNA, 22 nt, Human
cagaggccaccuguggccacug

SEQ ID NO: 186227 - RNA, 18 nt, Human
gagcucagcguguuucua

SEQ ID NO: 186228 - RNA, 22 nt, Human
uguuauuuaucugagcauuuau

SEQ ID NO: 186229 - RNA, 22 nt, Human
agaguuguuguacaaacuaaau

SEQ ID NO: 186230 - RNA, 20 nt, Human
gagcugugcucucaggagcc

SEQ ID NO: 186231 - RNA, 22 nt, Human
uugugcaauaguuuucucauga

SEQ ID NO: 186232 - RNA, 22 nt, Human
ucaggaagauuaguuuccuacc

SEQ ID NO: 186233 - RNA, 22 nt, Human
acaggcugcugagccauuugcu

SEQ ID NO: 186234 - RNA, 22 nt, Human
ggccucaguuucuccauggguu

SEQ ID NO: 186235 - RNA, 22 nt, Human
ugcuggcuuccugugcacagca

SEQ ID NO: 186236 - RNA, 22 nt, Human
gggaaacuucugcuaaaaccag

SEQ ID NO: 186237 - RNA, 22 nt, Human
uagguacagcuaaaaauuaucu

SEQ ID NO: 186238 - RNA, 22 nt, Human
agagggcaugcuugguggccug

SEQ ID NO: 186239 - RNA, 22 nt, Human
aguguccuggcaaggguuucag

SEQ ID NO: 186240 - RNA, 22 nt, Human
cuggcuggggaagucauuugau

SEQ ID NO: 186241 - RNA, 22 nt, Human
uuauauaaagauaacuuuucuu

SEQ ID NO: 186242 - RNA, 18 nt, Human
uggcagcaggaagccauu

SEQ ID NO: 186243 - RNA, 22 nt, Human
ucucuguaauaucuuuuacaac

SEQ ID NO: 186244 - RNA, 22 nt, Human
acuuggaaagaugcaacacagu

SEQ ID NO: 186245 - RNA, 22 nt, Human
ucuagaucugcacuguuggaca

SEQ ID NO: 186246 - RNA, 22 nt, Human
cuucuucauaggcaguccuguu

SEQ ID NO: 186247 - RNA, 22 nt, Human
uccagccacucagcagggauug

SEQ ID NO: 186248 - RNA, 20 nt, Human
gauaaauugucucuuaagug

SEQ ID NO: 186249 - RNA, 22 nt, Human
cagguggcuucucugcagccuu

SEQ ID NO: 186250 - RNA, 22 nt, Human
agucuggugagaacauaaauag

SEQ ID NO: 186251 - RNA, 21 nt, Human
gccugcaguuuugaagcccuu

SEQ ID NO: 186252 - RNA, 22 nt, Human
ucuggcugaaaggggcugugcc

SEQ ID NO: 186253 - RNA, 22 nt, Human
auguaauuugcccucaaguuaa

SEQ ID NO: 186254 - RNA, 16 nt, Human
uggcuuggguuucaug

SEQ ID NO: 186255 - RNA, 22 nt, Human
aggaaacugggccucagguuag

SEQ ID NO: 186256 - RNA, 22 nt, Human
caggcaugagccaggccccucc

SEQ ID NO: 186257 - RNA, 22 nt, Human
ccuggcacaagagcagcauugg

SEQ ID NO: 186258 - RNA, 22 nt, Human
gcugccuugaacauccuaagua

SEQ ID NO: 186259 - RNA, 22 nt, Human
ugagccaggcucaagugauccu

SEQ ID NO: 186260 - RNA, 22 nt, Human
uuugcaaauucuugucuagccu

SEQ ID NO: 186261 - RNA, 22 nt, Human
uccagcuccacagccucccugu

SEQ ID NO: 186262 - RNA, 22 nt, Human
ugagcaggucaggaaguacauu

SEQ ID NO: 186263 - RNA, 22 nt, Human
uagauucuggagagacagcagu

SEQ ID NO: 186264 - RNA, 22 nt, Human
ucauuucaaugauacuacuaag

SEQ ID NO: 186265 - RNA, 22 nt, Human
agcauucucagaaugucauuuu

SEQ ID NO: 186266 - RNA, 22 nt, Human
caggagguugguagcaguagau

SEQ ID NO: 186267 - RNA, 18 nt, Human
gcagagcugggauuccca

SEQ ID NO: 186268 - RNA, 21 nt, Human
cccugggaugggcuuggacuu

SEQ ID NO: 186269 - RNA, 21 nt, Human
cagagguggccugaccucuga

SEQ ID NO: 186270 - RNA, 22 nt, Human
acaaacagaguugaaaaauagg

SEQ ID NO: 186271 - RNA, 22 nt, Human
uguaaacaugcugaggcuggag

SEQ ID NO: 186272 - RNA, 23 nt, Human
guaggaauuuucacuuccucuug

SEQ ID NO: 186273 - RNA, 21 nt, Human
uucucuggucaagcacacaua

SEQ ID NO: 186274 - RNA, 22 nt, Human
ucccaggauguuggcggcaggu

SEQ ID NO: 186275 - RNA, 22 nt, Human
aauuuacacuucauuuggaggg

SEQ ID NO: 186276 - RNA, 22 nt, Human
uguuugcuauauccuacuucau

SEQ ID NO: 186277 - RNA, 22 nt, Human
ggccacagaacagcuacaggac

SEQ ID NO: 186278 - RNA, 22 nt, Human
cacauuucuguacuuagguaga

SEQ ID NO: 186279 - RNA, 22 nt, Human
auucacaguucauuagcuguaa

SEQ ID NO: 186280 - RNA, 22 nt, Human
acacauuuauuacaugcaugug

SEQ ID NO: 186281 - RNA, 22 nt, Human
cacagccuuacugagauccacu

SEQ ID NO: 186282 - RNA, 22 nt, Human
uggccaguagauaggcaggcaa

SEQ ID NO: 186283 - RNA, 22 nt, Human
auuuccaggagaaaggauuuua

SEQ ID NO: 186284 - RNA, 20 nt, Human
ucaagcuaguuuccaaaguu

SEQ ID NO: 186285 - RNA, 22 nt, Human
acagcuggaggucugugagcac

SEQ ID NO: 186286 - RNA, 16 nt, Human
aaggcugauuuucccu

SEQ ID NO: 186287 - RNA, 22 nt, Human
caggacccaaccucccugcucu

SEQ ID NO: 186288 - RNA, 21 nt, Human
aggggacagaguagcuccagg

SEQ ID NO: 186289 - RNA, 22 nt, Human
gauuuaaaguagaccuuuguuu

SEQ ID NO: 186290 - RNA, 22 nt, Human
ggcucagguuuaaagugcuuua

SEQ ID NO: 186291 - RNA, 22 nt, Human
ucccagggauccuccgggucgc

SEQ ID NO: 186292 - RNA, 22 nt, Human
agcuccagcccaucugcucgug

SEQ ID NO: 186293 - RNA, 22 nt, Human
uuccccaguagugacaaucaaa

SEQ ID NO: 186294 - RNA, 22 nt, Human
cuggaggaauaaucuccuaccc

SEQ ID NO: 186295 - RNA, 22 nt, Human
augcauuugacgggauauauuu

SEQ ID NO: 186296 - RNA, 22 nt, Human
agacagacugguuugaauuggu

SEQ ID NO: 186297 - RNA, 22 nt, Human
ugauucaacuuucuugaaugca

SEQ ID NO: 186298 - RNA, 22 nt, Human
aagacucaaggaacaacacagu

SEQ ID NO: 186299 - RNA, 22 nt, Human
cucuccucugaaguggugaccc

SEQ ID NO: 186300 - RNA, 22 nt, Human
cccaggaggacauuccauaccc

SEQ ID NO: 186301 - RNA, 23 nt, Human
ucagaagugggauacaaagcuga

SEQ ID NO: 186302 - RNA, 22 nt, Human
cugccuggaaugccagcuucuc

SEQ ID NO: 186303 - RNA, 22 nt, Human
ucucauugccuucacucuucag

SEQ ID NO: 186304 - RNA, 22 nt, Human
accaaagggcagaacaugagca

SEQ ID NO: 186305 - RNA, 22 nt, Human
uucuuuauaucugcuagugggu

SEQ ID NO: 186306 - RNA, 22 nt, Human
gggcuccaacggugagcaugga

SEQ ID NO: 186307 - RNA, 22 nt, Human
caggacaggcccuguggggucu

SEQ ID NO: 186308 - RNA, 22 nt, Human
ccaggcuccccaggaggcccuu

SEQ ID NO: 186309 - RNA, 22 nt, Human
aguguacaucagaacauaucaa

SEQ ID NO: 186310 - RNA, 22 nt, Human
cccagugggucacugcaucuca

SEQ ID NO: 186311 - RNA, 19 nt, Human
uccccaagaguucuagcuc

SEQ ID NO: 186312 - RNA, 22 nt, Human
uugaagaguuugauagaguuga

SEQ ID NO: 186313 - RNA, 22 nt, Human
uggacagguuugggugccuguu

SEQ ID NO: 186314 - RNA, 20 nt, Human
aagaaguugguaagcagugc

SEQ ID NO: 186315 - RNA, 17 nt, Human
gcaguuaaauuaagaug

SEQ ID NO: 186316 - RNA, 22 nt, Human
acugggcuaccccaccauuacc

SEQ ID NO: 186317 - RNA, 23 nt, Human
augcccuguagaggcugcugacc

SEQ ID NO: 186318 - RNA, 22 nt, Human
agccaacagccagcaucaacca

SEQ ID NO: 186319 - RNA, 22 nt, Human
gggcucuguuuagaccagagau

SEQ ID NO: 186320 - RNA, 22 nt, Human
ccagguggaaggucugugcucu

SEQ ID NO: 186321 - RNA, 22 nt, Human
ugguggaaggcagagcuacacc

SEQ ID NO: 186322 - RNA, 23 nt, Human
cacugggcccaggguguggaggc

SEQ ID NO: 186323 - RNA, 22 nt, Human
acugaaauggggacaguccuua

SEQ ID NO: 186324 - RNA, 22 nt, Human
gcaggccuguaaugaagggaca

SEQ ID NO: 186325 - RNA, 22 nt, Human
ucaacaguucuguccaauuaau

SEQ ID NO: 186326 - RNA, 22 nt, Human
uuuauaugaaagugaccagugg

SEQ ID NO: 186327 - RNA, 22 nt, Human
agggcugacaguggcguggcgu

SEQ ID NO: 186328 - RNA, 22 nt, Human
uuaauguuuuaaguuauagaga

SEQ ID NO: 186329 - RNA, 22 nt, Human
aaggcugagagucacaguccua

SEQ ID NO: 186330 - RNA, 22 nt, Human
uaugugucucaguugugauuga

SEQ ID NO: 186331 - RNA, 22 nt, Human
gcaaagcagaacccucucuauc

SEQ ID NO: 186332 - RNA, 22 nt, Human
auggcagagaaagcgagccaca

SEQ ID NO: 186333 - RNA, 22 nt, Human
cuucccagaacaauguaggcuu

SEQ ID NO: 186334 - RNA, 21 nt, Human
auucagaaagggaauaaacuc

SEQ ID NO: 186335 - RNA, 22 nt, Human
uucuuguuccaugaaagacaga

SEQ ID NO: 186336 - RNA, 22 nt, Human
acuguccauaauauuggugaac

SEQ ID NO: 186337 - RNA, 22 nt, Human
ugcuggcucuaggcugagacag

SEQ ID NO: 186338 - RNA, 22 nt, Human
aguuuacauaaaaaggcagagg

SEQ ID NO: 186339 - RNA, 22 nt, Human
uuccaggaugcugcugcuuuuu

SEQ ID NO: 186340 - RNA, 22 nt, Human
cuuuuaaugggagcaguauuug

SEQ ID NO: 186341 - RNA, 22 nt, Human
gaggcuccuugaaagggggacu

SEQ ID NO: 186342 - RNA, 22 nt, Human
caccagcuugcagucuuaaccc

SEQ ID NO: 186343 - RNA, 22 nt, Human
ggaacuggguuagggucucuuc

SEQ ID NO: 186344 - RNA, 22 nt, Human
cuggcuggccaugcagcgccag

SEQ ID NO: 186345 - RNA, 22 nt, Human
ucugagcccagugagucucgca

SEQ ID NO: 186346 - RNA, 22 nt, Human
aagacccuucucugaggaggaa

SEQ ID NO: 186347 - RNA, 22 nt, Human
augacagcauucaagacauaga

SEQ ID NO: 186348 - RNA, 22 nt, Human
cuggccugggagcugcuagcgu

SEQ ID NO: 186349 - RNA, 22 nt, Human
gggagccacaguuuauagugau

SEQ ID NO: 186350 - RNA, 22 nt, Human
aggcucuggacagugaggaguu

SEQ ID NO: 186351 - RNA, 20 nt, Human
ugacuucuucaugcuguacu

SEQ ID NO: 186352 - RNA, 22 nt, Human
gagagcugggcuuugggugaag

SEQ ID NO: 186353 - RNA, 22 nt, Human
uggcugccaauggcuuggaaag

SEQ ID NO: 186354 - RNA, 22 nt, Human
gaugugaggacucauguggagg

SEQ ID NO: 186355 - RNA, 22 nt, Human
acuugguuggucucacccuguu

SEQ ID NO: 186356 - RNA, 22 nt, Human
uguacaaauucauugaacugua

SEQ ID NO: 186357 - RNA, 22 nt, Human
ugaaugcuuggagucauaaaau

SEQ ID NO: 186358 - RNA, 23 nt, Human
uuucucauccagagagucagucc

SEQ ID NO: 186359 - RNA, 22 nt, Human
agggcacaagacucugagcccc

SEQ ID NO: 186360 - RNA, 20 nt, Human
cucugggcugcacccucgcc

SEQ ID NO: 186361 - RNA, 23 nt, Human
ccaggcaguagcuauugaaguga

SEQ ID NO: 186362 - RNA, 22 nt, Human
uucaaacaguguagaauauaug

SEQ ID NO: 186363 - RNA, 22 nt, Human
cagucucagaggugggaguggg

SEQ ID NO: 186364 - RNA, 22 nt, Human
agucaccuugaaaugucuugaa

SEQ ID NO: 186365 - RNA, 22 nt, Human
ucaggcugauaggaggaacuga

SEQ ID NO: 186366 - RNA, 22 nt, Human
acaggacaaggggaagaagaua

SEQ ID NO: 186367 - RNA, 22 nt, Human
ccugccugacagagaagguuca

SEQ ID NO: 186368 - RNA, 21 nt, Human
ucauuugugaucugauuucca

SEQ ID NO: 186369 - RNA, 20 nt, Human
ccuggcugcauucaggacgg

SEQ ID NO: 186370 - RNA, 22 nt, Human
cucuggcuggcugggccucagu

SEQ ID NO: 186371 - RNA, 22 nt, Human
uugccuauuguucuuacauguu

SEQ ID NO: 186372 - RNA, 23 nt, Human
gugucauuacuguaauuauugug

SEQ ID NO: 186373 - RNA, 22 nt, Human
uguccuuuuggcugucuauggu

SEQ ID NO: 186374 - RNA, 22 nt, Human
uucagugucacaagagcaagcc

SEQ ID NO: 186375 - RNA, 22 nt, Human
uggccuggccacauccagcagg

SEQ ID NO: 186376 - RNA, 22 nt, Human
ucuggcaucacucgcaagagca

SEQ ID NO: 186377 - RNA, 22 nt, Human
cugagucucccggcaguggagg

SEQ ID NO: 186378 - RNA, 18 nt, Human
ggagccagucugucucug

SEQ ID NO: 186379 - RNA, 22 nt, Human
caucuucagguucauggucaua

SEQ ID NO: 186380 - RNA, 16 nt, Human
aggcagagauuuaccc

SEQ ID NO: 186381 - RNA, 18 nt, Human
ugcugggcauuaggcuua

SEQ ID NO: 186382 - RNA, 22 nt, Human
acugggcuucacuuggcacauc

SEQ ID NO: 186383 - RNA, 18 nt, Human
guagauccuugagcuacc

SEQ ID NO: 186384 - RNA, 18 nt, Human
ggucugagaucguuuuuc

SEQ ID NO: 186385 - RNA, 22 nt, Human
uuggaauccugagaugagaauu

SEQ ID NO: 186386 - RNA, 22 nt, Human
cugguaguuugcaaaauggugu

SEQ ID NO: 186387 - RNA, 23 nt, Human
aucuccugagaacccacaguggu

SEQ ID NO: 186388 - RNA, 22 nt, Human
ccaggcuggaguguagucgcau

SEQ ID NO: 186389 - RNA, 22 nt, Human
acagacauucauauccucggua

SEQ ID NO: 186390 - RNA, 22 nt, Human
caaaggcucaguaaaucuuugu

SEQ ID NO: 186391 - RNA, 22 nt, Human
agcaggcuuguuaugucugaga

SEQ ID NO: 186392 - RNA, 22 nt, Human
ggcagauggagaagcagcaggu

SEQ ID NO: 186393 - RNA, 22 nt, Human
auuaucuauguagaaugauuuu

SEQ ID NO: 186394 - RNA, 22 nt, Human
ucaagcuggcuguugcuauuuc

SEQ ID NO: 186395 - RNA, 19 nt, Human
uucuccagccugaccugag

SEQ ID NO: 186396 - RNA, 22 nt, Human
augagugucauguaugagauau

SEQ ID NO: 186397 - RNA, 22 nt, Human
caccucuuugauuugaggcaag

SEQ ID NO: 186398 - RNA, 22 nt, Human
ucuuccuggcauugaugcugca

SEQ ID NO: 186399 - RNA, 22 nt, Human
agggccugagaccguggcuuga

SEQ ID NO: 186400 - RNA, 22 nt, Human
cucaggaguuggaggcuacagu

SEQ ID NO: 186401 - RNA, 22 nt, Human
gugugacuuuauuuggaaauag

SEQ ID NO: 186402 - RNA, 22 nt, Human
cuucagaauccagaaucagaau

SEQ ID NO: 186403 - RNA, 22 nt, Human
ucaggauaaaauguaauggcaa

SEQ ID NO: 186404 - RNA, 20 nt, Human
ugcagggcugccucccagcu

SEQ ID NO: 186405 - RNA, 21 nt, Human
ucuguggcggacucuaggccc

SEQ ID NO: 186406 - RNA, 22 nt, Human
cagcugguuuuagcacaguuag

SEQ ID NO: 186407 - RNA, 22 nt, Human
ugcccugccaagacucaguggu

SEQ ID NO: 186408 - RNA, 22 nt, Human
uuagaagcacuaauuacucaca

SEQ ID NO: 186409 - RNA, 22 nt, Human
cugcaggggaccaaagucugac

SEQ ID NO: 186410 - RNA, 22 nt, Human
agcagugaugcaugacagccua

SEQ ID NO: 186411 - RNA, 22 nt, Human
uucuccagaccacugccucugu

SEQ ID NO: 186412 - RNA, 22 nt, Human
ucagauggauuuauacuauuuc

SEQ ID NO: 186413 - RNA, 22 nt, Human
ggcagaaggcaauuagagacug

SEQ ID NO: 186414 - RNA, 22 nt, Human
uguaaauugaaggaaauuugug

SEQ ID NO: 186415 - RNA, 22 nt, Human
ucugagacaggaaguggagggu

SEQ ID NO: 186416 - RNA, 22 nt, Human
uggcuucucccuacaacaugcc

SEQ ID NO: 186417 - RNA, 22 nt, Human
agacucuuggagaagagcuaua

SEQ ID NO: 186418 - RNA, 22 nt, Human
aggcuguggcccuggucuagca

SEQ ID NO: 186419 - RNA, 22 nt, Human
uggcccuguguccugcugccag

SEQ ID NO: 186420 - RNA, 22 nt, Human
uguugaguauauaccuacaagu

SEQ ID NO: 186421 - RNA, 22 nt, Human
ucugaaagucugaaacaguguc

SEQ ID NO: 186422 - RNA, 22 nt, Human
uagcucagcaggugggacaggu

SEQ ID NO: 186423 - RNA, 22 nt, Human
ccugguuuuucaaacauacaag

SEQ ID NO: 186424 - RNA, 22 nt, Human
gcaggugaaugauggacuagga

SEQ ID NO: 186425 - RNA, 22 nt, Human
gcuguggucugugagcuccaaa

SEQ ID NO: 186426 - RNA, 22 nt, Human
gcuggaaaaggaggcaaaauau

SEQ ID NO: 186427 - RNA, 22 nt, Human
ccaugccagcugcuaggucaca

SEQ ID NO: 186428 - RNA, 20 nt, Human
aggagggaccuggauuggcg

SEQ ID NO: 186429 - RNA, 22 nt, Human
gcaaacaucuuuauuuggcaag

SEQ ID NO: 186430 - RNA, 22 nt, Human
cagggauggccuggcgggccac

SEQ ID NO: 186431 - RNA, 22 nt, Human
agaaagcacucugucuuuuacc

SEQ ID NO: 186432 - RNA, 22 nt, Human
aagauuuucagcuaauggugca

SEQ ID NO: 186433 - RNA, 22 nt, Human
gagagggauacugaguuuuggu

SEQ ID NO: 186434 - RNA, 22 nt, Human
cacacagggagaaagaaagccu

SEQ ID NO: 186435 - RNA, 22 nt, Human
acuguucacagauuagucgaug

SEQ ID NO: 186436 - RNA, 22 nt, Human
cccuucagcugagugggacagc

SEQ ID NO: 186437 - RNA, 17 nt, Human
gucugggcuuuagagac

SEQ ID NO: 186438 - RNA, 22 nt, Human
uagagaaaaccacuggugagcu

SEQ ID NO: 186439 - RNA, 22 nt, Human
gggagggacacaaagaguuccc

SEQ ID NO: 186440 - RNA, 22 nt, Human
uaggcagagaggccauaagaau

SEQ ID NO: 186441 - RNA, 23 nt, Human
acagggcauugcuggccucgagg

SEQ ID NO: 186442 - RNA, 22 nt, Human
acucuggccccaggaucugugu

SEQ ID NO: 186443 - RNA, 20 nt, Human
ugcagggccuaaaaagggaa

SEQ ID NO: 186444 - RNA, 17 nt, Human
uuagagcuacauguuga

SEQ ID NO: 186445 - RNA, 22 nt, Human
auggcuggauuugauccauggg

SEQ ID NO: 186446 - RNA, 22 nt, Human
uuacuguugguguauccauagc

SEQ ID NO: 186447 - RNA, 22 nt, Human
ccaguggaaauguggucaggau

SEQ ID NO: 186448 - RNA, 22 nt, Human
gcugcaggcuguggcaggggag

SEQ ID NO: 186449 - RNA, 22 nt, Human
auuuauuaagcaucugcuaugu

SEQ ID NO: 186450 - RNA, 22 nt, Human
ucaaauaguugacauuaacuug

SEQ ID NO: 186451 - RNA, 22 nt, Human
gaggagcccuguuccccaggcc

SEQ ID NO: 186452 - RNA, 19 nt, Human
cucugggcugcaucuuggu

SEQ ID NO: 186453 - RNA, 22 nt, Human
uuuacaugucaagacuggcagu

SEQ ID NO: 186454 - RNA, 22 nt, Human
caaauacuacgauucuugcagu

SEQ ID NO: 186455 - RNA, 22 nt, Human
ccugcccuucuuuccccagcau

SEQ ID NO: 186456 - RNA, 22 nt, Human
ggcccucugcucacuuccuauu

SEQ ID NO: 186457 - RNA, 22 nt, Human
ucugaaaugaacucuugaacuu

SEQ ID NO: 186458 - RNA, 22 nt, Human
gagcuuggacaccuuggcaggu

SEQ ID NO: 186459 - RNA, 22 nt, Human
auacaaaguauugauccugagu

SEQ ID NO: 186460 - RNA, 22 nt, Human
aaacaauguagauuaccauuua

SEQ ID NO: 186461 - RNA, 22 nt, Human
aguacaaaggcccuugauuacu

SEQ ID NO: 186462 - RNA, 22 nt, Human
ucucugggaauucacaagcccu

SEQ ID NO: 186463 - RNA, 22 nt, Human
ccucugggcagguagcagcagc

SEQ ID NO: 186464 - RNA, 22 nt, Human
agggggcaggagagaccugcug

SEQ ID NO: 186465 - RNA, 19 nt, Human
ccagcagguucauuucagg

SEQ ID NO: 186466 - RNA, 22 nt, Human
gaauucaucgucuuagcugcca

SEQ ID NO: 186467 - RNA, 22 nt, Human
auagagugauguaagguaugug

SEQ ID NO: 186468 - RNA, 22 nt, Human
gugggcagacagugcuuugcag

SEQ ID NO: 186469 - RNA, 22 nt, Human
uuagaaaucaccucugaagauc

SEQ ID NO: 186470 - RNA, 22 nt, Human
guuaaauucgaugauggauaaa

SEQ ID NO: 186471 - RNA, 22 nt, Human
augcacaugaggcaagcaaaau

SEQ ID NO: 186472 - RNA, 22 nt, Human
ugucauuuaguccucugugugu

SEQ ID NO: 186473 - RNA, 22 nt, Human
uccuagaaugcaccucugcugu

SEQ ID NO: 186474 - RNA, 22 nt, Human
aucuccagaacauuuauaaacg

SEQ ID NO: 186475 - RNA, 22 nt, Human
ucuccugggaggacaaggaagg

SEQ ID NO: 186476 - RNA, 22 nt, Human
uggcagagaauaaaucuugacu

SEQ ID NO: 186477 - RNA, 22 nt, Human
caugaccccccaaggccugcag

SEQ ID NO: 186478 - RNA, 17 nt, Human
auuuacauugucaccga

SEQ ID NO: 186479 - RNA, 21 nt, Human
gccuggcagguggaagggcuc

SEQ ID NO: 186480 - RNA, 22 nt, Human
auuagaucagaucggcaguaau

SEQ ID NO: 186481 - RNA, 22 nt, Human
cagcccucucugggccccaagg

SEQ ID NO: 186482 - RNA, 22 nt, Human
uucuucuuuccaauuacauggu

SEQ ID NO: 186483 - RNA, 22 nt, Human
agguauauauucugguccuuau

SEQ ID NO: 186484 - RNA, 22 nt, Human
auuuaucaacauguaccauugg

SEQ ID NO: 186485 - RNA, 22 nt, Human
cagugucuuucagacucagaaa

SEQ ID NO: 186486 - RNA, 22 nt, Human
cugcccuguagcuguucuagca

SEQ ID NO: 186487 - RNA, 22 nt, Human
uaggccucaggaccccagggcu

SEQ ID NO: 186488 - RNA, 22 nt, Human
ugcuagaagauagcuagaagau

SEQ ID NO: 186489 - RNA, 21 nt, Human
gccuggcucucacuggccugg

SEQ ID NO: 186490 - RNA, 22 nt, Human
uucaaaguaccguacuuaaugg

SEQ ID NO: 186491 - RNA, 22 nt, Human
acacaugagaaacaucaguugu

SEQ ID NO: 186492 - RNA, 22 nt, Human
uaaagcacgucuauuuaaugau

SEQ ID NO: 186493 - RNA, 22 nt, Human
gagacaaagcuuccugugggua

SEQ ID NO: 186494 - RNA, 22 nt, Human
gccaccuguuucgcuugcccag

SEQ ID NO: 186495 - RNA, 22 nt, Human
gcagggcugauggcuucccuca

SEQ ID NO: 186496 - RNA, 22 nt, Human
uccagaccaugugagaggcgca

SEQ ID NO: 186497 - RNA, 22 nt, Human
gaggcagaggaagguggucucu

SEQ ID NO: 186498 - RNA, 22 nt, Human
aaaguguuuugugagcagucug

SEQ ID NO: 186499 - RNA, 22 nt, Human
ucaggcugaaucauccuagcuu

SEQ ID NO: 186500 - RNA, 22 nt, Human
cuggauguuuugcuaaggacuc

SEQ ID NO: 186501 - RNA, 22 nt, Human
cacauaauacauguuccacuua

SEQ ID NO: 186502 - RNA, 22 nt, Human
ucagcuccagaguugcacagug

SEQ ID NO: 186503 - RNA, 22 nt, Human
ucugguggugggccacaagcau

SEQ ID NO: 186504 - RNA, 22 nt, Human
caccagcuacuccagggccgug

SEQ ID NO: 186505 - RNA, 22 nt, Human
ugugauuucacuggugacaugu

SEQ ID NO: 186506 - RNA, 22 nt, Human
cuucuuuaccaagagauagagu

SEQ ID NO: 186507 - RNA, 22 nt, Human
ucuggggagcagcccuggugag

SEQ ID NO: 186508 - RNA, 22 nt, Human
cuucguuuuuaguagcaauguu

SEQ ID NO: 186509 - RNA, 19 nt, Human
uucuggucuggaaucaagg

SEQ ID NO: 186510 - RNA, 22 nt, Human
agucaacaccugguucuauuac

SEQ ID NO: 186511 - RNA, 22 nt, Human
aggcagaaccagcugggacuuu

SEQ ID NO: 186512 - RNA, 22 nt, Human
aaaugcugucaguguuauugga

SEQ ID NO: 186513 - RNA, 22 nt, Human
uguuuacugcauucuauuugcu

SEQ ID NO: 186514 - RNA, 22 nt, Human
ccauaaucuggcuuugagagag

SEQ ID NO: 186515 - RNA, 20 nt, Human
gcugggcuuugacugacaca

SEQ ID NO: 186516 - RNA, 22 nt, Human
gucucugagcucugagcuggcu

SEQ ID NO: 186517 - RNA, 22 nt, Human
cugacugugagagcaggaaugg

SEQ ID NO: 186518 - RNA, 22 nt, Human
acuuugcagguacaugagcauc

SEQ ID NO: 186519 - RNA, 23 nt, Human
agaagcagcuucuggaguaucgg

SEQ ID NO: 186520 - RNA, 22 nt, Human
ucaagcaacugaauucuaaaag

SEQ ID NO: 186521 - RNA, 18 nt, Human
ucuuggaguaaugaucaa

SEQ ID NO: 186522 - RNA, 22 nt, Human
uccaggcucccucaggaugcac

SEQ ID NO: 186523 - RNA, 22 nt, Human
gcuggccugaccagccacaggc

SEQ ID NO: 186524 - RNA, 22 nt, Human
caaggcuuagguggcucccugu

SEQ ID NO: 186525 - RNA, 22 nt, Human
uuauuagguuauucucuguacu

SEQ ID NO: 186526 - RNA, 22 nt, Human
cagcuucuguuucuagccccug

SEQ ID NO: 186527 - RNA, 23 nt, Human
uuuaccagaauagcaggggagag

SEQ ID NO: 186528 - RNA, 22 nt, Human
ugacauuucgguguaugugaug

SEQ ID NO: 186529 - RNA, 22 nt, Human
acaguggagaaggcaugaggcu

SEQ ID NO: 186530 - RNA, 21 nt, Human
cuggcucuguugucacccggc

SEQ ID NO: 186531 - RNA, 23 nt, Human
aaugaacugagaaucuguacagu

SEQ ID NO: 186532 - RNA, 22 nt, Human
agcagguugugauacacucaga

SEQ ID NO: 186533 - RNA, 22 nt, Human
gagcccuguagcaagucauguc

SEQ ID NO: 186534 - RNA, 22 nt, Human
auuaagugacuaaaguaaugcu

SEQ ID NO: 186535 - RNA, 22 nt, Human
uccuuggcagcagggagcauga

SEQ ID NO: 186536 - RNA, 22 nt, Human
agaaggcuaaaguaacuuagua

SEQ ID NO: 186537 - RNA, 22 nt, Human
ucucacugauuugagaccaagg

SEQ ID NO: 186538 - RNA, 20 nt, Human
aucaaaauccuauugagguu

SEQ ID NO: 186539 - RNA, 22 nt, Human
cuuccuuccuuccccgaaaugc

SEQ ID NO: 186540 - RNA, 22 nt, Human
uucugggcacacaggcccuggu

SEQ ID NO: 186541 - RNA, 22 nt, Human
ccugggcuccacuccaagagca

SEQ ID NO: 186542 - RNA, 22 nt, Human
cagaugugauucuucccucagc

SEQ ID NO: 186543 - RNA, 22 nt, Human
uuaauugagccagaaaguaucu

SEQ ID NO: 186544 - RNA, 22 nt, Human
uagugaaacaguuaucaaucug

SEQ ID NO: 186545 - RNA, 22 nt, Human
auucacauuuacaaagcacuca

SEQ ID NO: 186546 - RNA, 22 nt, Human
cugcagggcagggccuccuggc

SEQ ID NO: 186547 - RNA, 22 nt, Human
cugggggcaagcagacagcugu

SEQ ID NO: 186548 - RNA, 22 nt, Human
uagaauuuucugcuuugauagu

SEQ ID NO: 186549 - RNA, 22 nt, Human
uccaaggacucuugucagcugu

SEQ ID NO: 186550 - RNA, 22 nt, Human
aagcugugcaggaacugcuugc

SEQ ID NO: 186551 - RNA, 22 nt, Human
aguguuucaccguauguucuca

SEQ ID NO: 186552 - RNA, 22 nt, Human
ugcauggacucaucagacaaga

SEQ ID NO: 186553 - RNA, 22 nt, Human
gcaggccaagcccucgcagaga

SEQ ID NO: 186554 - RNA, 22 nt, Human
cccagcccaucucaaaggucua

SEQ ID NO: 186555 - RNA, 22 nt, Human
aucaaaauggaagaauuuggcu

SEQ ID NO: 186556 - RNA, 22 nt, Human
gcacacuuaauacucacugugc

SEQ ID NO: 186557 - RNA, 18 nt, Human
agaacacuugguuagauc

SEQ ID NO: 186558 - RNA, 22 nt, Human
uccaugagaacccuuggagaua

SEQ ID NO: 186559 - RNA, 21 nt, Human
guuuagaaguagucuggcuca

SEQ ID NO: 186560 - RNA, 22 nt, Human
ucauuuuucacacagggucacc

SEQ ID NO: 186561 - RNA, 22 nt, Human
acagugugugggaaaugugacu

SEQ ID NO: 186562 - RNA, 22 nt, Human
cuggcagugcccucagccccca

SEQ ID NO: 186563 - RNA, 22 nt, Human
cagggcauccgugcuccaugcu

SEQ ID NO: 186564 - RNA, 22 nt, Human
gaguuucuccagugcuaguugu

SEQ ID NO: 186565 - RNA, 22 nt, Human
ccaggcuucccccauccuagga

SEQ ID NO: 186566 - RNA, 23 nt, Human
ugauuacaagggccaaagaaagg

SEQ ID NO: 186567 - RNA, 22 nt, Human
gagguucaguaaggaauacuga

SEQ ID NO: 186568 - RNA, 23 nt, Human
uuaaaggcagauguugaguauua

SEQ ID NO: 186569 - RNA, 22 nt, Human
gcgugcaacagccucuuccauu

SEQ ID NO: 186570 - RNA, 22 nt, Human
ccuggccauagggcccaggaaa

SEQ ID NO: 186571 - RNA, 22 nt, Human
cccuccaccaagcagggcgcca

SEQ ID NO: 186572 - RNA, 22 nt, Human
uuugggaaauaguagaaaaugu

SEQ ID NO: 186573 - RNA, 22 nt, Human
cagcaagauuaagggcagaaaa

SEQ ID NO: 186574 - RNA, 22 nt, Human
auggaggaugugcagcaugggc

SEQ ID NO: 186575 - RNA, 22 nt, Human
ccugugcaggcuccauaauaga

SEQ ID NO: 186576 - RNA, 22 nt, Human
ugguccugccccgugcacagag

SEQ ID NO: 186577 - RNA, 22 nt, Human
ugucugguggguugacaggcag

SEQ ID NO: 186578 - RNA, 22 nt, Human
ccagagucuaugaguccucauu

SEQ ID NO: 186579 - RNA, 22 nt, Human
ccauuguaguaucuguuuuagu

SEQ ID NO: 186580 - RNA, 22 nt, Human
cuggguuccauguagccaagag

SEQ ID NO: 186581 - RNA, 22 nt, Human
caaggaaaaagcgagcucgggg

SEQ ID NO: 186582 - RNA, 22 nt, Human
ucagagcuuuggagaccaggaa

SEQ ID NO: 186583 - RNA, 22 nt, Human
aaacaguuguuauuuuuauaug

SEQ ID NO: 186584 - RNA, 17 nt, Human
ugcugacagcugugugu

SEQ ID NO: 186585 - RNA, 21 nt, Human
uuucagaccuaucuuugaagg

SEQ ID NO: 186586 - RNA, 22 nt, Human
aucuggcugagcgaggcccaca

SEQ ID NO: 186587 - RNA, 22 nt, Human
uugaggagcacuagucagguau

SEQ ID NO: 186588 - RNA, 22 nt, Human
gacuggggcucuagccaggccu

SEQ ID NO: 186589 - RNA, 22 nt, Human
ggcagcugucucugaguuagca

SEQ ID NO: 186590 - RNA, 22 nt, Human
auacauagauagauaaucuggc

SEQ ID NO: 186591 - RNA, 22 nt, Human
uaguuaugucugcaugcauauu

SEQ ID NO: 186592 - RNA, 21 nt, Human
uuccagagauuguuucaccug

SEQ ID NO: 186593 - RNA, 22 nt, Human
guggauggacaugggcaagagg

SEQ ID NO: 186594 - RNA, 22 nt, Human
ugauugaacugagcuucaagau

SEQ ID NO: 186595 - RNA, 22 nt, Human
cauuagaauuagguuguuuacc

SEQ ID NO: 186596 - RNA, 22 nt, Human
ugcaggcauaaccgauguugau

SEQ ID NO: 186597 - RNA, 22 nt, Human
guccugugucccagagaaagag

SEQ ID NO: 186598 - RNA, 22 nt, Human
uuuuucugagaauaugagagga

SEQ ID NO: 186599 - RNA, 22 nt, Human
agguucuguuuggcugaggauc

SEQ ID NO: 186600 - RNA, 22 nt, Human
uucucaagaacauauguagggu

SEQ ID NO: 186601 - RNA, 22 nt, Human
ccuggucaccccucucucugca

SEQ ID NO: 186602 - RNA, 22 nt, Human
ucacagaagcuugaagauuuuc

SEQ ID NO: 186603 - RNA, 22 nt, Human
cugaggaccccacaggaggccc

SEQ ID NO: 186604 - RNA, 22 nt, Human
aggagacauacuauaggaauau

SEQ ID NO: 186605 - RNA, 22 nt, Human
ugagacaguaauuguauaguuu

SEQ ID NO: 186606 - RNA, 22 nt, Human
agacaucucccaugcauuuuua

SEQ ID NO: 186607 - RNA, 22 nt, Human
ucccugggccuaucuuagcucc

SEQ ID NO: 186608 - RNA, 22 nt, Human
gcucagagaaaacuggggcuug

SEQ ID NO: 186609 - RNA, 22 nt, Human
ucagcccugggcuuccucaugg

SEQ ID NO: 186610 - RNA, 22 nt, Human
ugaguacugauuuaagauacac

SEQ ID NO: 186611 - RNA, 22 nt, Human
uuagaagccaggauggagcagg

SEQ ID NO: 186612 - RNA, 22 nt, Human
ccaggagaagcaucugagugua

SEQ ID NO: 186613 - RNA, 22 nt, Human
cuggcagcuucaggacacucgg

SEQ ID NO: 186614 - RNA, 22 nt, Human
uaacuguauuuuucugagauuc

SEQ ID NO: 186615 - RNA, 22 nt, Human
aaauaucauuuauaacuuuuaa

SEQ ID NO: 186616 - RNA, 22 nt, Human
ugccuguccugaggaugagggu

SEQ ID NO: 186617 - RNA, 22 nt, Human
uuuuuuguagcaagcgcagaua

SEQ ID NO: 186618 - RNA, 22 nt, Human
ugacaggcagugcugggcaugu

SEQ ID NO: 186619 - RNA, 22 nt, Human
acagaggccgccucucucacgg

SEQ ID NO: 186620 - RNA, 22 nt, Human
uccuggccuagaguuuguguuc

SEQ ID NO: 186621 - RNA, 22 nt, Human
acaauacuauuuucaguauccu

SEQ ID NO: 186622 - RNA, 22 nt, Human
uuucugcugugcuuucuugcgu

SEQ ID NO: 186623 - RNA, 22 nt, Human
cagauucucacuguauucaggu

SEQ ID NO: 186624 - RNA, 22 nt, Human
acauaauagguaccugaauaau

SEQ ID NO: 186625 - RNA, 22 nt, Human
uccaguuugcacuguauaauag

SEQ ID NO: 186626 - RNA, 22 nt, Human
ggcugguccuuucucuguccua

SEQ ID NO: 186627 - RNA, 22 nt, Human
ggcccaggcuggagugcggugg

SEQ ID NO: 186628 - RNA, 22 nt, Human
ccugagauuggcuaguaugagu

SEQ ID NO: 186629 - RNA, 22 nt, Human
gacaggcuagguugcuguccuc

SEQ ID NO: 186630 - RNA, 22 nt, Human
aagauacugaugauguaggcua

SEQ ID NO: 186631 - RNA, 22 nt, Human
ccaggagcagccggcccaccug

SEQ ID NO: 186632 - RNA, 19 nt, Human
auacacguguauacauaca

SEQ ID NO: 186633 - RNA, 22 nt, Human
aggcagcaugggcccagagucc

SEQ ID NO: 186634 - RNA, 22 nt, Human
aacauucugguucuaaaaaccu

SEQ ID NO: 186635 - RNA, 22 nt, Human
agucacuaggcugaaaguggag

SEQ ID NO: 186636 - RNA, 22 nt, Human
ugaggccugacagaccaagccu

SEQ ID NO: 186637 - RNA, 22 nt, Human
ccaggaagccuuuuucuuugac

SEQ ID NO: 186638 - RNA, 18 nt, Human
uugagggaggggcagagu

SEQ ID NO: 186639 - RNA, 22 nt, Human
ggaacauuuuuuaaggcagaaa

SEQ ID NO: 186640 - RNA, 22 nt, Human
cuugaaugggccauaagacggu

SEQ ID NO: 186641 - RNA, 22 nt, Human
auuuucugaguccagaauuuac

SEQ ID NO: 186642 - RNA, 22 nt, Human
aggcagaagccagccagggucc

SEQ ID NO: 186643 - RNA, 22 nt, Human
agaacuguccuuggaggagagu

SEQ ID NO: 186644 - RNA, 22 nt, Human
ccuccaggaacuugagagacac

SEQ ID NO: 186645 - RNA, 22 nt, Human
aacaggcaaacugugggauccc

SEQ ID NO: 186646 - RNA, 22 nt, Human
auucuggggcugguuauuuuga

SEQ ID NO: 186647 - RNA, 22 nt, Human
agaaaagguugaaaguaggauu

SEQ ID NO: 186648 - RNA, 22 nt, Human
ccagugucuagucacagguacu

SEQ ID NO: 186649 - RNA, 22 nt, Human
cuggaagguaacaaggccauua

SEQ ID NO: 186650 - RNA, 22 nt, Human
agcuucucggcugggaguauuu

SEQ ID NO: 186651 - RNA, 22 nt, Human
ggacauuuaguuucauugggca

SEQ ID NO: 186652 - RNA, 21 nt, Human
ucugagaacuucugcugcagc

SEQ ID NO: 186653 - RNA, 22 nt, Human
uacuucuguucuuaaaccaaga

SEQ ID NO: 186654 - RNA, 22 nt, Human
aaaggcuugacuagaagggaga

SEQ ID NO: 186655 - RNA, 22 nt, Human
gugcagcugugugagagcucca

SEQ ID NO: 186656 - RNA, 22 nt, Human
gaaugaauuuuggauggugaag

SEQ ID NO: 186657 - RNA, 22 nt, Human
uccuggagugucuuccccaagg

SEQ ID NO: 186658 - RNA, 20 nt, Human
acgggcugggacccaugcac

SEQ ID NO: 186659 - RNA, 22 nt, Human
uucacaagugugaaggcagagc

SEQ ID NO: 186660 - RNA, 22 nt, Human
agguggcuucuggccaggugug

SEQ ID NO: 186661 - RNA, 22 nt, Human
cagguggaucucuaaggacuga

SEQ ID NO: 186662 - RNA, 22 nt, Human
aaugucugcucuacucaggagg

SEQ ID NO: 186663 - RNA, 22 nt, Human
aaacaucaccauuuuaccuaau

SEQ ID NO: 186664 - RNA, 22 nt, Human
cugacucccaaagaggacgcgu

SEQ ID NO: 186665 - RNA, 22 nt, Human
ucagacagcuugggauaacuga

SEQ ID NO: 186666 - RNA, 22 nt, Human
uucugggagauucauaugaaaa

SEQ ID NO: 186667 - RNA, 23 nt, Human
aagaauaaaugacauuaaaggug

SEQ ID NO: 186668 - RNA, 22 nt, Human
caggauggagaguuguugguug

SEQ ID NO: 186669 - RNA, 22 nt, Human
gggaucuugaaacagcuggauu

SEQ ID NO: 186670 - RNA, 21 nt, Human
uuucuucacuuugccccaugu

SEQ ID NO: 186671 - RNA, 23 nt, Human
auuuuacaggucaguuccuugaa

SEQ ID NO: 186672 - RNA, 22 nt, Human
cuggagaggcugggaacagguu

SEQ ID NO: 186673 - RNA, 22 nt, Human
ccaggccagcaggcacaccugc

SEQ ID NO: 186674 - RNA, 22 nt, Human
gaaaguuuauagguuauauaau

SEQ ID NO: 186675 - RNA, 22 nt, Human
cauuagaacuaagauguccagg

SEQ ID NO: 186676 - RNA, 22 nt, Human
ugguccuguagcucucuaaguu

SEQ ID NO: 186677 - RNA, 20 nt, Human
gaugagacccaugcaugaga

SEQ ID NO: 186678 - RNA, 22 nt, Human
auugcugaaaugaaaggauaug

SEQ ID NO: 186679 - RNA, 22 nt, Human
cugccucucagccugaccgcca

SEQ ID NO: 186680 - RNA, 23 nt, Human
auaucacacccaguacagucucc

SEQ ID NO: 186681 - RNA, 22 nt, Human
aacaugaaguuuucuauaguga

SEQ ID NO: 186682 - RNA, 22 nt, Human
uuguucaugguuguaaguuuga

SEQ ID NO: 186683 - RNA, 23 nt, Human
agcugaggcugugggugucagag

SEQ ID NO: 186684 - RNA, 22 nt, Human
augguuuauccuuuaccagucg

SEQ ID NO: 186685 - RNA, 22 nt, Human
ucuguucaguuguaccuucccc

SEQ ID NO: 186686 - RNA, 22 nt, Human
caggauaaauaguaaauguaag

SEQ ID NO: 186687 - RNA, 22 nt, Human
uuuaguauauaaaaagagaagu

SEQ ID NO: 186688 - RNA, 22 nt, Human
uggggggcaugaaccuccacgg

SEQ ID NO: 186689 - RNA, 22 nt, Human
ucucuuccauguuucagcccca

SEQ ID NO: 186690 - RNA, 22 nt, Human
aaugauuuggcaaaggaaucca

SEQ ID NO: 186691 - RNA, 22 nt, Human
gcucagggcuaaggcugagggg

SEQ ID NO: 186692 - RNA, 22 nt, Human
ggugcagugcaggguaauuaua

SEQ ID NO: 186693 - RNA, 22 nt, Human
gcugggagcaaagccaugcaua

SEQ ID NO: 186694 - RNA, 22 nt, Human
cugagcagugcuuugcaguggg

SEQ ID NO: 186695 - RNA, 22 nt, Human
agccuguggaucccugcacugg

SEQ ID NO: 186696 - RNA, 22 nt, Human
ucuuagaaaaaugguauguuuu

SEQ ID NO: 186697 - RNA, 23 nt, Human
aaauggguuucuguuuuguggac

SEQ ID NO: 186698 - RNA, 22 nt, Human
accccaggucaucugagagucc

SEQ ID NO: 186699 - RNA, 22 nt, Human
gggcagagacucagaaacagaa

SEQ ID NO: 186700 - RNA, 22 nt, Human
acagggauuuuccaggcuaccc

SEQ ID NO: 186701 - RNA, 22 nt, Human
uguuucaggaccuaucuuuuag

SEQ ID NO: 186702 - RNA, 22 nt, Human
ccuguucaaguugcagggcugg

SEQ ID NO: 186703 - RNA, 22 nt, Human
agugguauaagucugaagauca

SEQ ID NO: 186704 - RNA, 22 nt, Human
cuguuagucuuuugcaggagag

SEQ ID NO: 186705 - RNA, 22 nt, Human
gaguccaguaguuaggacagag

SEQ ID NO: 186706 - RNA, 22 nt, Human
caguggaauauauaggggauuu

SEQ ID NO: 186707 - RNA, 22 nt, Human
gggaagcagcauugugcuggcu

SEQ ID NO: 186708 - RNA, 22 nt, Human
ugauuuuacuuagcaugauguu

SEQ ID NO: 186709 - RNA, 19 nt, Human
accaggcuuauggucagug

SEQ ID NO: 186710 - RNA, 21 nt, Human
agagucugagugugcaagggc

SEQ ID NO: 186711 - RNA, 22 nt, Human
aacucuuuggucucaggaaagg

SEQ ID NO: 186712 - RNA, 22 nt, Human
aucuacagugcacaggacagcc

SEQ ID NO: 186713 - RNA, 22 nt, Human
ucugcacccacguaccuuggcu

SEQ ID NO: 186714 - RNA, 22 nt, Human
uuuggaaacugccucagcucuu

SEQ ID NO: 186715 - RNA, 22 nt, Human
caggccaguuuugauuuaagcc

SEQ ID NO: 186716 - RNA, 22 nt, Human
auugaaaauauaauucuaggag

SEQ ID NO: 186717 - RNA, 22 nt, Human
acauguguaaaaguggauaaaa

SEQ ID NO: 186718 - RNA, 22 nt, Human
ucuguuuuagauaagaaaggcu

SEQ ID NO: 186719 - RNA, 22 nt, Human
cggucaggugcagcguuggcac

SEQ ID NO: 186720 - RNA, 22 nt, Human
acuaaacacaugagauuccugc

SEQ ID NO: 186721 - RNA, 22 nt, Human
ccagcagggaaaaacccaccaa

SEQ ID NO: 186722 - RNA, 22 nt, Human
ugcauuaagggccuggagauac

SEQ ID NO: 186723 - RNA, 22 nt, Human
guggaauuuuuaccuaugaaug

SEQ ID NO: 186724 - RNA, 22 nt, Human
caucugucugcuguuagcugca

SEQ ID NO: 186725 - RNA, 22 nt, Human
uuagagaaguuuuacuuaagaa

SEQ ID NO: 186726 - RNA, 22 nt, Human
cuggugccuccucucccagguc

SEQ ID NO: 186727 - RNA, 23 nt, Human
gagggcucugagugcuugggcca

SEQ ID NO: 186728 - RNA, 22 nt, Human
agagaagagucuugucaaauua

SEQ ID NO: 186729 - RNA, 20 nt, Human
caaagcaguaggauaaaaau

SEQ ID NO: 186730 - RNA, 22 nt, Human
gaacaaacacaucccagcagug

SEQ ID NO: 186731 - RNA, 22 nt, Human
ugagaugucauaguucaguuca

SEQ ID NO: 186732 - RNA, 22 nt, Human
ccugcugugaaacuggcauaug

SEQ ID NO: 186733 - RNA, 22 nt, Human
uucuccagcucaucagggaggg

SEQ ID NO: 186734 - RNA, 22 nt, Human
gcugcccucuguguuuguccuu

SEQ ID NO: 186735 - RNA, 22 nt, Human
acaugccaagauccucgucuuu

SEQ ID NO: 186736 - RNA, 22 nt, Human
uggggucuggaguugcccauga

SEQ ID NO: 186737 - RNA, 22 nt, Human
ucaaugagccagaauguaguac

SEQ ID NO: 186738 - RNA, 15 nt, Human
ucccucagcuaaaga

SEQ ID NO: 186739 - RNA, 22 nt, Human
ugacaauugcagacacagaagu

SEQ ID NO: 186740 - RNA, 22 nt, Human
gaagaacaccugcugcccagug

SEQ ID NO: 186741 - RNA, 19 nt, Human
uucugggcagcacaugaau

SEQ ID NO: 186742 - RNA, 22 nt, Human
acacauuauagagaguauaaua

SEQ ID NO: 186743 - RNA, 22 nt, Human
ucucuggagggcuccaggcggg

SEQ ID NO: 186744 - RNA, 22 nt, Human
ucagguguuagaagaaauuuca

SEQ ID NO: 186745 - RNA, 19 nt, Human
uauauauuuugggguugug

SEQ ID NO: 186746 - RNA, 22 nt, Human
acacagagccagggaauacagu

SEQ ID NO: 186747 - RNA, 22 nt, Human
cauuuguucugauuucaaaagg

SEQ ID NO: 186748 - RNA, 22 nt, Human
uuggaugagguugagaaucauu

SEQ ID NO: 186749 - RNA, 19 nt, Human
uauucuguuaaccuuuguc

SEQ ID NO: 186750 - RNA, 22 nt, Human
aggcccagcugggccaggaaca

SEQ ID NO: 186751 - RNA, 22 nt, Human
agcuuccuugaauucuguagaa

SEQ ID NO: 186752 - RNA, 22 nt, Human
uugauacaugcucuagaguuga

SEQ ID NO: 186753 - RNA, 22 nt, Human
gcaucucuuacccacgagccag

SEQ ID NO: 186754 - RNA, 22 nt, Human
acacaucuauauugcaucugca

SEQ ID NO: 186755 - RNA, 22 nt, Human
ucagccugcuccaagugcugcc

SEQ ID NO: 186756 - RNA, 22 nt, Human
auuggaaauacaguagaaaaau

SEQ ID NO: 186757 - RNA, 22 nt, Human
aaugcaaacagcccagaaucca

SEQ ID NO: 186758 - RNA, 22 nt, Human
uuugaaaauuagacacaggcua

SEQ ID NO: 186759 - RNA, 22 nt, Human
aagacagaagugauuugaugug

SEQ ID NO: 186760 - RNA, 22 nt, Human
uacaagagguauauagaaacag

SEQ ID NO: 186761 - RNA, 20 nt, Human
uucuagaaugcccagggaca

SEQ ID NO: 186762 - RNA, 23 nt, Human
caggcaggaugaggacuacacuc

SEQ ID NO: 186763 - RNA, 22 nt, Human
ggcuccagauguccccuggcaa

SEQ ID NO: 186764 - RNA, 22 nt, Human
uaugcacacauuagcacagggu

SEQ ID NO: 186765 - RNA, 22 nt, Human
ucugugcaggaagucauuauga

SEQ ID NO: 186766 - RNA, 22 nt, Human
gcaggcaucucuguagccaggg

SEQ ID NO: 186767 - RNA, 22 nt, Human
aguggggacaaugagagcaggu

SEQ ID NO: 186768 - RNA, 22 nt, Human
ugaguauuccuuaucugaaaug

SEQ ID NO: 186769 - RNA, 22 nt, Human
ugacaggucauauaagcuugca

SEQ ID NO: 186770 - RNA, 22 nt, Human
ccaggagggaccgcggcauccc

SEQ ID NO: 186771 - RNA, 22 nt, Human
augaggaggccaguaagagccu

SEQ ID NO: 186772 - RNA, 22 nt, Human
auacauuagcucauaugauuaa

SEQ ID NO: 186773 - RNA, 22 nt, Human
gaaaguauuuaaguccauauuu

SEQ ID NO: 186774 - RNA, 22 nt, Human
agcuccugaaaauccagacugg

SEQ ID NO: 186775 - RNA, 22 nt, Human
agggccaguaccaggugggugg

SEQ ID NO: 186776 - RNA, 22 nt, Human
aauuuuacaagaaggccucgua

SEQ ID NO: 186777 - RNA, 22 nt, Human
auaugaagucagacaaacuggg

SEQ ID NO: 186778 - RNA, 22 nt, Human
gaugaggucuacauuguuaaaa

SEQ ID NO: 186779 - RNA, 22 nt, Human
agaaggccagauggacggggcu

SEQ ID NO: 186780 - RNA, 22 nt, Human
caaauguuucuugaacaccaac

SEQ ID NO: 186781 - RNA, 22 nt, Human
ccugagggaucuguggaauagc

SEQ ID NO: 186782 - RNA, 22 nt, Human
uuuaucagaaguuagagaaaga

SEQ ID NO: 186783 - RNA, 22 nt, Human
ggccuugcugcuuccagaaggu

SEQ ID NO: 186784 - RNA, 22 nt, Human
ucacagugaggaguuacaguuu

SEQ ID NO: 186785 - RNA, 22 nt, Human
accagcucagaagccagaaaga

SEQ ID NO: 186786 - RNA, 21 nt, Human
aaagaaaucucccauugguag

SEQ ID NO: 186787 - RNA, 22 nt, Human
gaaggccacuuuguguugagaa

SEQ ID NO: 186788 - RNA, 22 nt, Human
auuuauucuccagauggcgaga

SEQ ID NO: 186789 - RNA, 22 nt, Human
ccugggagcuguggaaaggcug

SEQ ID NO: 186790 - RNA, 22 nt, Human
uagggggcuguccugugcauua

SEQ ID NO: 186791 - RNA, 22 nt, Human
uagcuacaaucacuguccuuug

SEQ ID NO: 186792 - RNA, 21 nt, Human
uggcugacucuuccuaucauu

SEQ ID NO: 186793 - RNA, 22 nt, Human
cugcugcugagagcucagccug

SEQ ID NO: 186794 - RNA, 22 nt, Human
ucuuugaaguuccccuggaaga

SEQ ID NO: 186795 - RNA, 22 nt, Human
uuucuugucuuuaguaucuggc

SEQ ID NO: 186796 - RNA, 22 nt, Human
auucaccuguuaguaaaaaucu

SEQ ID NO: 186797 - RNA, 22 nt, Human
uugagggagauguugacuucag

SEQ ID NO: 186798 - RNA, 22 nt, Human
ugguccauguccuccaucucuc

SEQ ID NO: 186799 - RNA, 22 nt, Human
auguaaaagauuauuuuccugu

SEQ ID NO: 186800 - RNA, 22 nt, Human
uaucuaagagagucaauauuua

SEQ ID NO: 186801 - RNA, 22 nt, Human
cuuucucuucacugucaugauc

SEQ ID NO: 186802 - RNA, 22 nt, Human
ggcagcugcaaaucugcucugu

SEQ ID NO: 186803 - RNA, 22 nt, Human
ugaagucucuguuuucucauuu

SEQ ID NO: 186804 - RNA, 22 nt, Human
auacacgugccauguuggugug

SEQ ID NO: 186805 - RNA, 22 nt, Human
ucauacaucuguccuggagcuc

SEQ ID NO: 186806 - RNA, 22 nt, Human
augcauaucagugauuguuugc

SEQ ID NO: 186807 - RNA, 22 nt, Human
augagucacucagcagaaaagg

SEQ ID NO: 186808 - RNA, 22 nt, Human
cucugagaagaguucaaguaaa

SEQ ID NO: 186809 - RNA, 22 nt, Human
acuucauuguaauauuauagca

SEQ ID NO: 186810 - RNA, 22 nt, Human
uucacauuagccaagagaugga

SEQ ID NO: 186811 - RNA, 20 nt, Human
agggcagcuugaggagccgg

SEQ ID NO: 186812 - RNA, 22 nt, Human
ucaucuguggcugcuuuugugc

SEQ ID NO: 186813 - RNA, 22 nt, Human
aggaggugagcggucauguggu

SEQ ID NO: 186814 - RNA, 22 nt, Human
caauuauucagugacuuaagag

SEQ ID NO: 186815 - RNA, 22 nt, Human
cagagggcuucagguucaggau

SEQ ID NO: 186816 - RNA, 22 nt, Human
gggagggaggugaugcuuggcu

SEQ ID NO: 186817 - RNA, 22 nt, Human
gcaggaagcauagaagaaugcc

SEQ ID NO: 186818 - RNA, 22 nt, Human
auccacaggucauguaaugugg

SEQ ID NO: 186819 - RNA, 22 nt, Human
gcugccacauuuucaggacuaa

SEQ ID NO: 186820 - RNA, 22 nt, Human
cacauacaugcacaccuaaaua

SEQ ID NO: 186821 - RNA, 22 nt, Human
ugaccugcguaggugguuucug

SEQ ID NO: 186822 - RNA, 22 nt, Human
uccuggguaaacacugaccuuu

SEQ ID NO: 186823 - RNA, 22 nt, Human
acauuuuuauucaucaaagcag

SEQ ID NO: 186824 - RNA, 22 nt, Human
cagcuguuguguaucaggcaga

SEQ ID NO: 186825 - RNA, 22 nt, Human
acaucuaagccaauuuugauuu

SEQ ID NO: 186826 - RNA, 22 nt, Human
uucugugugucucagcaagcug

SEQ ID NO: 186827 - RNA, 22 nt, Human
aggagccaaauuacuagcucug

SEQ ID NO: 186828 - RNA, 22 nt, Human
agucaggguuguaggcucaccc

SEQ ID NO: 186829 - RNA, 22 nt, Human
aaugguuuaacauaugcuugag

SEQ ID NO: 186830 - RNA, 22 nt, Human
ccagcuuuucuuaucauuauaa

SEQ ID NO: 186831 - RNA, 22 nt, Human
ggcucugggccuccaaggucug

SEQ ID NO: 186832 - RNA, 22 nt, Human
guggagcaaucagagggucagu

SEQ ID NO: 186833 - RNA, 22 nt, Human
uuagcuguggaagcuucagcca

SEQ ID NO: 186834 - RNA, 22 nt, Human
uuuuagaaagaucccuggcagg

SEQ ID NO: 186835 - RNA, 22 nt, Human
agaugcugggaggcugagugca

SEQ ID NO: 186836 - RNA, 22 nt, Human
augggacacacaaggaaguaaa

SEQ ID NO: 186837 - RNA, 22 nt, Human
ccaggcugcagucaaggggcau

SEQ ID NO: 186838 - RNA, 22 nt, Human
uagaacuugugaaauaucaaug

SEQ ID NO: 186839 - RNA, 22 nt, Human
uagaggcagaagaaauugacaa

SEQ ID NO: 186840 - RNA, 22 nt, Human
cuucaugcucccauuuccuaca

SEQ ID NO: 186841 - RNA, 22 nt, Human
uuaccaaaucccgugcacauuc

SEQ ID NO: 186842 - RNA, 22 nt, Human
gucaaaugcacagaaccauuaa

SEQ ID NO: 186843 - RNA, 22 nt, Human
ugucccaacccugagaagauuc

SEQ ID NO: 186844 - RNA, 22 nt, Human
cugucuccuccacugcauggga

SEQ ID NO: 186845 - RNA, 22 nt, Human
uuucaguuuuugcucgauguau

SEQ ID NO: 186846 - RNA, 22 nt, Human
uacacaugcucagauuccugug

SEQ ID NO: 186847 - RNA, 22 nt, Human
ugagcuuuguuguuaguauauu

SEQ ID NO: 186848 - RNA, 20 nt, Human
ccucaguguccuggacuggg

SEQ ID NO: 186849 - RNA, 22 nt, Human
ucgccucaucauccuaauuaca

SEQ ID NO: 186850 - RNA, 22 nt, Human
gcucccagguucuugggccuug

SEQ ID NO: 186851 - RNA, 22 nt, Human
ccugggagugugccaucucugu

SEQ ID NO: 186852 - RNA, 22 nt, Human
guccuguguaagccaggacaau

SEQ ID NO: 186853 - RNA, 22 nt, Human
uagcuacauacuuggccauucu

SEQ ID NO: 186854 - RNA, 21 nt, Human
agcaggucuacagguucauag

SEQ ID NO: 186855 - RNA, 22 nt, Human
cucacugugccuuuucccaaac

SEQ ID NO: 186856 - RNA, 22 nt, Human
ucagcuggugaguggauagaca

SEQ ID NO: 186857 - RNA, 22 nt, Human
uuaaagcauguugcuuaacagg

SEQ ID NO: 186858 - RNA, 22 nt, Human
uuucucauuuagaguggcaggg

SEQ ID NO: 186859 - RNA, 22 nt, Human
cuggccuggucuggccucucca

SEQ ID NO: 186860 - RNA, 22 nt, Human
cugcccugggccaggaagcggc

SEQ ID NO: 186861 - RNA, 22 nt, Human
cauuugauuccuuuacucuuau

SEQ ID NO: 186862 - RNA, 22 nt, Human
ucccagggauuaggacauggau

SEQ ID NO: 186863 - RNA, 22 nt, Human
uuacaugcuuagagaugcaugc

SEQ ID NO: 186864 - RNA, 21 nt, Human
gcugggucagcagguccucug

SEQ ID NO: 186865 - RNA, 21 nt, Human
uauuaauaugucuaagcugau

SEQ ID NO: 186866 - RNA, 20 nt, Human
ucauggcagccacccacagg

SEQ ID NO: 186867 - RNA, 22 nt, Human
aggaaacuccccuacaucucaa

SEQ ID NO: 186868 - RNA, 22 nt, Human
uuucucaaguacugcacaugaa

SEQ ID NO: 186869 - RNA, 19 nt, Human
gcugggcuuggguuuguag

SEQ ID NO: 186870 - RNA, 22 nt, Human
accuccccacaugguagugagu

SEQ ID NO: 186871 - RNA, 22 nt, Human
cuuuacuaucaggaauaaacaa

SEQ ID NO: 186872 - RNA, 22 nt, Human
gcucagggcgcgagggacgugg

SEQ ID NO: 186873 - RNA, 22 nt, Human
uagggaugaugucuaaaaucau

SEQ ID NO: 186874 - RNA, 22 nt, Human
cagacagggcccugugauggua

SEQ ID NO: 186875 - RNA, 22 nt, Human
gacuauugcacacuucucucac

SEQ ID NO: 186876 - RNA, 22 nt, Human
caggugcugugaaucuucauaa

SEQ ID NO: 186877 - RNA, 22 nt, Human
cucauuuacuacucaugugacc

SEQ ID NO: 186878 - RNA, 22 nt, Human
uuaaauggggaugaguagaugg

SEQ ID NO: 186879 - RNA, 22 nt, Human
uuaguuaauugacuauguugca

SEQ ID NO: 186880 - RNA, 22 nt, Human
uccagccaugacucggacagug

SEQ ID NO: 186881 - RNA, 22 nt, Human
ggagucuggaguggggcccaag

SEQ ID NO: 186882 - RNA, 22 nt, Human
ucccugcuuggaaugacccuua

SEQ ID NO: 186883 - RNA, 22 nt, Human
ggcaggguccacaccugggaaa

SEQ ID NO: 186884 - RNA, 22 nt, Human
agaauacaguucaguaauggau

SEQ ID NO: 186885 - RNA, 17 nt, Human
agguggcugcugcgccu

SEQ ID NO: 186886 - RNA, 22 nt, Human
aaacaugagcaucucuucaagc

SEQ ID NO: 186887 - RNA, 22 nt, Human
acagugcacauccugagugauu

SEQ ID NO: 186888 - RNA, 22 nt, Human
agcccugagccagccuggucag

SEQ ID NO: 186889 - RNA, 22 nt, Human
agauccugccaauggaagcagg

SEQ ID NO: 186890 - RNA, 22 nt, Human
ggcuuccuccuuccugcuguca

SEQ ID NO: 186891 - RNA, 22 nt, Human
cagcugaggucuuuuuuaugug

SEQ ID NO: 186892 - RNA, 22 nt, Human
aaggaugaacauuaauacauca

SEQ ID NO: 186893 - RNA, 22 nt, Human
uuacacuuaccuguccauugaa

SEQ ID NO: 186894 - RNA, 22 nt, Human
gcucuguguaaauguagggucc

SEQ ID NO: 186895 - RNA, 20 nt, Human
ccuuuagaaacucauaugua

SEQ ID NO: 186896 - RNA, 22 nt, Human
gauuuacaaagcucucuagugu

SEQ ID NO: 186897 - RNA, 22 nt, Human
cugccagguuggcgcucgcucu

SEQ ID NO: 186898 - RNA, 22 nt, Human
cauguaaaaaauuaggucaucu

SEQ ID NO: 186899 - RNA, 22 nt, Human
ccagggcauguccaagacuuag

SEQ ID NO: 186900 - RNA, 20 nt, Human
uucacauuucuguagugauu

SEQ ID NO: 186901 - RNA, 22 nt, Human
uaggccaguugguggcccugga

SEQ ID NO: 186902 - RNA, 21 nt, Human
gccuggcuagaagcuccuagc

SEQ ID NO: 186903 - RNA, 22 nt, Human
gcuguauucaacagugaaaaga

SEQ ID NO: 186904 - RNA, 22 nt, Human
caaaaccaagaacauucauuuc

SEQ ID NO: 186905 - RNA, 22 nt, Human
uuucuuuccaugagccuaugua

SEQ ID NO: 186906 - RNA, 22 nt, Human
uccaggccgcauaguuacucug

SEQ ID NO: 186907 - RNA, 22 nt, Human
gcacagggcccugugcguaggu

SEQ ID NO: 186908 - RNA, 20 nt, Human
uacagaaacaggacuuuugg

SEQ ID NO: 186909 - RNA, 22 nt, Human
uauuaucauuaacuguugaauu

SEQ ID NO: 186910 - RNA, 21 nt, Human
gcuuuuuguauggcccaggaa

SEQ ID NO: 186911 - RNA, 20 nt, Human
gggaucuuccaggcucuccu

SEQ ID NO: 186912 - RNA, 19 nt, Human
ucuccaaaaccaaucacua

SEQ ID NO: 186913 - RNA, 22 nt, Human
cuuggaauugaugauuuucaua

SEQ ID NO: 186914 - RNA, 22 nt, Human
gugcaauccucauagaacucau

SEQ ID NO: 186915 - RNA, 22 nt, Human
ccacuggagacuggucucugug

SEQ ID NO: 186916 - RNA, 22 nt, Human
uggugggggaggcugucuagca

SEQ ID NO: 186917 - RNA, 22 nt, Human
ggagcugaaggggugggcucag

SEQ ID NO: 186918 - RNA, 21 nt, Human
auuuucauuuccaggggagga

SEQ ID NO: 186919 - RNA, 22 nt, Human
ucagagaagcugccaggcgagc

SEQ ID NO: 186920 - RNA, 22 nt, Human
acagcuggagugaggauggagu

SEQ ID NO: 186921 - RNA, 22 nt, Human
uagaaugagaaaguguagcagg

SEQ ID NO: 186922 - RNA, 21 nt, Human
aggguccuacagggcucagga

SEQ ID NO: 186923 - RNA, 20 nt, Human
ugagccaggcuaggaagggc

SEQ ID NO: 186924 - RNA, 22 nt, Human
gaccccagaggaaggggcgccg

SEQ ID NO: 186925 - RNA, 22 nt, Human
acaaauuucauaggcaaauuuu

SEQ ID NO: 186926 - RNA, 22 nt, Human
cccgggaggaggaaguugcagu

SEQ ID NO: 186927 - RNA, 22 nt, Human
cucuuuuagagaugaaaauugg

SEQ ID NO: 186928 - RNA, 22 nt, Human
cagcaugauuggugucugguga

SEQ ID NO: 186929 - RNA, 20 nt, Human
ucaguuaaguugcugaaucu

SEQ ID NO: 186930 - RNA, 22 nt, Human
uuucagaaaucaaaaccagggu

SEQ ID NO: 186931 - RNA, 22 nt, Human
gcaguuccuacaguggaaagcg

SEQ ID NO: 186932 - RNA, 22 nt, Human
ccaggacaggaguuggcuucgc

SEQ ID NO: 186933 - RNA, 22 nt, Human
cauucauuagaauagauaugua

SEQ ID NO: 186934 - RNA, 22 nt, Human
uacacaguaaaugguaaauaca

SEQ ID NO: 186935 - RNA, 22 nt, Human
ucuagguggaugaggaacauag

SEQ ID NO: 186936 - RNA, 22 nt, Human
aauuuuacuucccucaguguag

SEQ ID NO: 186937 - RNA, 22 nt, Human
cugcugucaaaaaucacuccau

SEQ ID NO: 186938 - RNA, 17 nt, Human
uucucugagcuguauug

SEQ ID NO: 186939 - RNA, 22 nt, Human
cuagaaucuccaaguuuacuca

SEQ ID NO: 186940 - RNA, 22 nt, Human
ugaggccagccacagccacccu

SEQ ID NO: 186941 - RNA, 20 nt, Human
ggggaagaaaaggaugugau

SEQ ID NO: 186942 - RNA, 22 nt, Human
ccaaggcagaagauggcucuug

SEQ ID NO: 186943 - RNA, 22 nt, Human
aauuauauugaaguugaauguc

SEQ ID NO: 186944 - RNA, 22 nt, Human
auuuccuucggacaguuugggu

SEQ ID NO: 186945 - RNA, 22 nt, Human
cacuguuuuauuccaacauagg

SEQ ID NO: 186946 - RNA, 22 nt, Human
aacuggaaagaucaguaggaag

SEQ ID NO: 186947 - RNA, 22 nt, Human
gugggggcaggcagugcuagga

SEQ ID NO: 186948 - RNA, 23 nt, Human
uccugcagauaagcugguugaca

SEQ ID NO: 186949 - RNA, 22 nt, Human
agucucucuugggugugguuug

SEQ ID NO: 186950 - RNA, 22 nt, Human
ucaucaguuuagaaaaaauaug

SEQ ID NO: 186951 - RNA, 22 nt, Human
ugagcuacacacuaggcauggg

SEQ ID NO: 186952 - RNA, 22 nt, Human
uucaaguuuacuuugaaguuua

SEQ ID NO: 186953 - RNA, 22 nt, Human
agaggccaauaguagguggcau

SEQ ID NO: 186954 - RNA, 22 nt, Human
acuuucaaauaucaugauucua

SEQ ID NO: 186955 - RNA, 22 nt, Human
aacagcuaguaccaauccacua

SEQ ID NO: 186956 - RNA, 22 nt, Human
uuccuggcaaagugagcaucac

SEQ ID NO: 186957 - RNA, 22 nt, Human
uccuuggcaagcugcaauggga

SEQ ID NO: 186958 - RNA, 22 nt, Human
gggugggaucuguggagccuca

SEQ ID NO: 186959 - RNA, 21 nt, Human
aaggaaaagcuuggucucuga

SEQ ID NO: 186960 - RNA, 22 nt, Human
cccagggaagggcuaccugagg

SEQ ID NO: 186961 - RNA, 22 nt, Human
ccaggccagggcugcagcgagc

SEQ ID NO: 186962 - RNA, 22 nt, Human
gucaucuucgcagagugauuuu

SEQ ID NO: 186963 - RNA, 22 nt, Human
auuugggaauuauuugccuaau

SEQ ID NO: 186964 - RNA, 19 nt, Human
gaggagcuaucggagacag

SEQ ID NO: 186965 - RNA, 22 nt, Human
aggcacuuaauaaggauucaau

SEQ ID NO: 186966 - RNA, 17 nt, Human
ggcaccagacggagagu

SEQ ID NO: 186967 - RNA, 22 nt, Human
gcacaguggugaaagcaugggu

SEQ ID NO: 186968 - RNA, 22 nt, Human
uaggugugggcucaggaaugug

SEQ ID NO: 186969 - RNA, 22 nt, Human
gaaggcuggaaggcaaguagga

SEQ ID NO: 186970 - RNA, 22 nt, Human
uuaggaaagucucuuggcuggg

SEQ ID NO: 186971 - RNA, 22 nt, Human
cuuccugcuccccugccaauuc

SEQ ID NO: 186972 - RNA, 22 nt, Human
caugcauauaugcuacaugcaa

SEQ ID NO: 186973 - RNA, 17 nt, Human
ucugggcuucagugguc

SEQ ID NO: 186974 - RNA, 20 nt, Human
ucagaugggagugagccauc

SEQ ID NO: 186975 - RNA, 22 nt, Human
ugcugugcuggcggcagaggcc

SEQ ID NO: 186976 - RNA, 22 nt, Human
ucagugucuucucuuuccuacc

SEQ ID NO: 186977 - RNA, 22 nt, Human
ugucuuuauauauuuggaaaau

SEQ ID NO: 186978 - RNA, 22 nt, Human
caaaacauucagagagcucacu

SEQ ID NO: 186979 - RNA, 22 nt, Human
cagagggacaguguaaugcaua

SEQ ID NO: 186980 - RNA, 22 nt, Human
gacuuuauuuuaacggagauuc

SEQ ID NO: 186981 - RNA, 21 nt, Human
agguggucugcagcagcugaa

SEQ ID NO: 186982 - RNA, 22 nt, Human
gcagagugauggaaugugggug

SEQ ID NO: 186983 - RNA, 22 nt, Human
acugccuguuuggcauggcccc

SEQ ID NO: 186984 - RNA, 22 nt, Human
gcuacccugggaaucucccuca

SEQ ID NO: 186985 - RNA, 23 nt, Human
ccugugacacuguuugugguaag

SEQ ID NO: 186986 - RNA, 22 nt, Human
acaugauauuaaugucuuauuu

SEQ ID NO: 186987 - RNA, 22 nt, Human
gaaaugauuuuaguuuaucaug

SEQ ID NO: 186988 - RNA, 22 nt, Human
cugcuguuugccgucauugccu

SEQ ID NO: 186989 - RNA, 22 nt, Human
guucuggguagauguaucuuuu

SEQ ID NO: 186990 - RNA, 22 nt, Human
uuuuccagagcugucucuugca

SEQ ID NO: 186991 - RNA, 18 nt, Human
uacaugcauaaaugaagc

SEQ ID NO: 186992 - RNA, 22 nt, Human
agaaaggcaauauuaacuacac

SEQ ID NO: 186993 - RNA, 22 nt, Human
aagucacuggcaaaagcugcag

SEQ ID NO: 186994 - RNA, 22 nt, Human
aaagaucugacuuagacacaga

SEQ ID NO: 186995 - RNA, 22 nt, Human
gacauuuagaaguuagauucaa

SEQ ID NO: 186996 - RNA, 21 nt, Human
agaacugauuaaauaagcagu

SEQ ID NO: 186997 - RNA, 22 nt, Human
cugggguggauggguccaaguu

SEQ ID NO: 186998 - RNA, 22 nt, Human
auuuggaagguuuacaaagaga

SEQ ID NO: 186999 - RNA, 22 nt, Human
aaauucagcagugaaaugcccc

SEQ ID NO: 187000 - RNA, 22 nt, Human
cagagacaggcuugcccuccac

SEQ ID NO: 187001 - RNA, 19 nt, Human
caacaguacugguuugucc

SEQ ID NO: 187002 - RNA, 22 nt, Human
uggaaugucauaccauaaaaga

SEQ ID NO: 187003 - RNA, 20 nt, Human
accaggccccgggcccugca

SEQ ID NO: 187004 - RNA, 19 nt, Human
cacaacuucgcuugauucc

SEQ ID NO: 187005 - RNA, 22 nt, Human
cuuuacagaaagagaacucugg

SEQ ID NO: 187006 - RNA, 20 nt, Human
uuguuuauuauguucugauc

SEQ ID NO: 187007 - RNA, 22 nt, Human
ggaaucuuaauggcauggaguu

SEQ ID NO: 187008 - RNA, 22 nt, Human
cagaagcauugacuccuugcuc

SEQ ID NO: 187009 - RNA, 22 nt, Human
cccaucccugauuuucacucgu

SEQ ID NO: 187010 - RNA, 22 nt, Human
aaacacacagaaaugaaugagg

SEQ ID NO: 187011 - RNA, 22 nt, Human
aguuuccuuggauucaauuugg

SEQ ID NO: 187012 - RNA, 22 nt, Human
uaugcacauucacacaaaaaug

SEQ ID NO: 187013 - RNA, 22 nt, Human
acaggcagagaguggcggacuc

SEQ ID NO: 187014 - RNA, 22 nt, Human
augugaggaagaaagagguaag

SEQ ID NO: 187015 - RNA, 22 nt, Human
cuccaggugcagaaggacucag

SEQ ID NO: 187016 - RNA, 22 nt, Human
uggaaagguguaaagcagaacc

SEQ ID NO: 187017 - RNA, 22 nt, Human
agucccagcuacucaagaggcu

SEQ ID NO: 187018 - RNA, 22 nt, Human
uaauucaugggcccagugauau

SEQ ID NO: 187019 - RNA, 22 nt, Human
aaagacacacagugcuucaguu

SEQ ID NO: 187020 - RNA, 22 nt, Human
ugggcagggagcuggaaccaca

SEQ ID NO: 187021 - RNA, 22 nt, Human
aggacagagggaccagagccca

SEQ ID NO: 187022 - RNA, 19 nt, Human
guccugcaacuggcucucc

SEQ ID NO: 187023 - RNA, 22 nt, Human
cccaguauugagcuacaggccu

SEQ ID NO: 187024 - RNA, 22 nt, Human
cagucuaagacucacgccaaga

SEQ ID NO: 187025 - RNA, 22 nt, Human
cauguguuucgagacuguugag

SEQ ID NO: 187026 - RNA, 22 nt, Human
cugcagggaugugaggcccguu

SEQ ID NO: 187027 - RNA, 22 nt, Human
ucucacaggugcacguggcugu

SEQ ID NO: 187028 - RNA, 22 nt, Human
uugcacuaggaaaaggcagcca

SEQ ID NO: 187029 - RNA, 22 nt, Human
uggcaaaggcgcucacaugccu

SEQ ID NO: 187030 - RNA, 22 nt, Human
cacacgaugugaauucuugccc

SEQ ID NO: 187031 - RNA, 23 nt, Human
augaaaugcuggcucagggaggu

SEQ ID NO: 187032 - RNA, 22 nt, Human
aucucagggguuccuucuagag

SEQ ID NO: 187033 - RNA, 22 nt, Human
uuucuccacuucucuugccaac

SEQ ID NO: 187034 - RNA, 22 nt, Human
guaaacauuuucaucugugccc

SEQ ID NO: 187035 - RNA, 22 nt, Human
ccugggccuauccuagaaccaa

SEQ ID NO: 187036 - RNA, 22 nt, Human
ggaagacagaagccuacagcuu

SEQ ID NO: 187037 - RNA, 22 nt, Human
agucuacauuuuuguuaauggu

SEQ ID NO: 187038 - RNA, 22 nt, Human
aggagcucauugaaguggauga

SEQ ID NO: 187039 - RNA, 20 nt, Human
ugcccacaucacucaggagu

SEQ ID NO: 187040 - RNA, 22 nt, Human
gaacuugggagaagggagugug

SEQ ID NO: 187041 - RNA, 22 nt, Human
gccuggguuccaugaucuccag

SEQ ID NO: 187042 - RNA, 22 nt, Human
gagcugggaguuauagcauguu

SEQ ID NO: 187043 - RNA, 22 nt, Human
ugaccugcagucaagaggggaa

SEQ ID NO: 187044 - RNA, 22 nt, Human
ucacucaauaucccaguggggc

SEQ ID NO: 187045 - RNA, 22 nt, Human
cauuucuagggaucauaaagua

SEQ ID NO: 187046 - RNA, 22 nt, Human
gcuaaugaaaaauagauuauag

SEQ ID NO: 187047 - RNA, 22 nt, Human
uguguccucauguggcagagag

SEQ ID NO: 187048 - RNA, 22 nt, Human
ugucuccaggggcaggccagcc

SEQ ID NO: 187049 - RNA, 22 nt, Human
ugaaugauauauugggaauaau

SEQ ID NO: 187050 - RNA, 19 nt, Human
acagggcucuggacgccau

SEQ ID NO: 187051 - RNA, 22 nt, Human
cuucuaauucuuauguaagcuu

SEQ ID NO: 187052 - RNA, 22 nt, Human
cagcccacuucccagcaccuac

SEQ ID NO: 187053 - RNA, 22 nt, Human
guauucagggcuagucagagga

SEQ ID NO: 187054 - RNA, 22 nt, Human
auaaugagcuuuugaauacuga

SEQ ID NO: 187055 - RNA, 22 nt, Human
auuuccuucccagauuugguuc

SEQ ID NO: 187056 - RNA, 22 nt, Human
gggaugaggaucaaucagggag

SEQ ID NO: 187057 - RNA, 22 nt, Human
gauuucuugauaauucaaaucc

SEQ ID NO: 187058 - RNA, 22 nt, Human
guucacuggcugugugacucug

SEQ ID NO: 187059 - RNA, 22 nt, Human
cugguuuauucgucacaccgga

SEQ ID NO: 187060 - RNA, 22 nt, Human
agcagcagggcaugucuuacuc

SEQ ID NO: 187061 - RNA, 22 nt, Human
gcucugggugaacuuggagcaa

SEQ ID NO: 187062 - RNA, 22 nt, Human
ugaaaaacacuaauuggaaagc

SEQ ID NO: 187063 - RNA, 19 nt, Human
auucuuguuaagugucauc

SEQ ID NO: 187064 - RNA, 22 nt, Human
aacuuuuaaaauacacagacaa

SEQ ID NO: 187065 - RNA, 22 nt, Human
ugccaggaguguagagugguuu

SEQ ID NO: 187066 - RNA, 22 nt, Human
cacaugcaggagccaauguaca

SEQ ID NO: 187067 - RNA, 22 nt, Human
ugcuccagugagcuggccaucc

SEQ ID NO: 187068 - RNA, 22 nt, Human
cucugaagggagggccaagccc

SEQ ID NO: 187069 - RNA, 22 nt, Human
gaacucuugcagugaaagcuua

SEQ ID NO: 187070 - RNA, 22 nt, Human
cucagcaguaaacguccggaac

SEQ ID NO: 187071 - RNA, 22 nt, Human
aaugaguuagaugagaaaauaa

SEQ ID NO: 187072 - RNA, 22 nt, Human
aaauuagaaauacuuucaaagc

SEQ ID NO: 187073 - RNA, 22 nt, Human
gcaccaugauggagccucauua

SEQ ID NO: 187074 - RNA, 22 nt, Human
aguggaugguauugggaccagg

SEQ ID NO: 187075 - RNA, 22 nt, Human
ucacucuguggcccaggcagug

SEQ ID NO: 187076 - RNA, 22 nt, Human
uacaguuuaacacuuuggagaa

SEQ ID NO: 187077 - RNA, 22 nt, Human
agcuaggauaagcagagacugg

SEQ ID NO: 187078 - RNA, 22 nt, Human
ugugaaaugcuauugugacaaa

SEQ ID NO: 187079 - RNA, 23 nt, Human
uugaauaggguggcaacaaacug

SEQ ID NO: 187080 - RNA, 22 nt, Human
ugaagggguucagcaugggggu

SEQ ID NO: 187081 - RNA, 22 nt, Human
uccaucaccacagaggacagag

SEQ ID NO: 187082 - RNA, 22 nt, Human
uucaaaguuucaaucuguauca

SEQ ID NO: 187083 - RNA, 22 nt, Human
ugaaggcauuugaguuggugag

SEQ ID NO: 187084 - RNA, 20 nt, Human
aguuuauuccaggagaacug

SEQ ID NO: 187085 - RNA, 22 nt, Human
aguguggggucaccggcccagg

SEQ ID NO: 187086 - RNA, 22 nt, Human
uuguuaaaaugaggucauucug

SEQ ID NO: 187087 - RNA, 22 nt, Human
cugcuguacuuaggaagaggaa

SEQ ID NO: 187088 - RNA, 22 nt, Human
agaggaggcucugggaucgucc

SEQ ID NO: 187089 - RNA, 19 nt, Human
gauaggcagccaugagccc

SEQ ID NO: 187090 - RNA, 22 nt, Human
agcaccaggcaccaaagggccu

SEQ ID NO: 187091 - RNA, 19 nt, Human
ccuacaugaguaagcuugg

SEQ ID NO: 187092 - RNA, 22 nt, Human
ggcacagcacagagcacaugua

SEQ ID NO: 187093 - RNA, 22 nt, Human
agcccuaacucccaguaucuug

SEQ ID NO: 187094 - RNA, 22 nt, Human
agggcuagaguugagaugggga

SEQ ID NO: 187095 - RNA, 22 nt, Human
agcuggaacccgggugggcagc

SEQ ID NO: 187096 - RNA, 22 nt, Human
ugcugccacauuuaaagagggg

SEQ ID NO: 187097 - RNA, 22 nt, Human
cugcccugaccugccucagagu

SEQ ID NO: 187098 - RNA, 19 nt, Human
gaggcaaggaguuuaagcc

SEQ ID NO: 187099 - RNA, 22 nt, Human
acucccagguugccuggcaggc

SEQ ID NO: 187100 - RNA, 22 nt, Human
cucauaaagugagaauaugacc

SEQ ID NO: 187101 - RNA, 22 nt, Human
aguuuuucuccccuggcuucau

SEQ ID NO: 187102 - RNA, 22 nt, Human
caggcacaagaucggcuagaua

SEQ ID NO: 187103 - RNA, 22 nt, Human
aaauguguuccuuugcuacaga

SEQ ID NO: 187104 - RNA, 22 nt, Human
cacuagagaaacgcccaggcuc

SEQ ID NO: 187105 - RNA, 22 nt, Human
cucagccccaauuugcccucuu

SEQ ID NO: 187106 - RNA, 22 nt, Human
uccauuuagcuggcaaacaaug

SEQ ID NO: 187107 - RNA, 22 nt, Human
gggugggguguaucggauccua

SEQ ID NO: 187108 - RNA, 22 nt, Human
uaaagugcuuaugauaaccaag

SEQ ID NO: 187109 - RNA, 22 nt, Human
acaggugguaaaauggacuguc

SEQ ID NO: 187110 - RNA, 21 nt, Human
gagaacugaaccagagcagcu

SEQ ID NO: 187111 - RNA, 22 nt, Human
cucugggcaccaaagagcagcu

SEQ ID NO: 187112 - RNA, 22 nt, Human
uauuucaacguaugaaaagcug

SEQ ID NO: 187113 - RNA, 23 nt, Human
ugcuucucugcuugacaguucug

SEQ ID NO: 187114 - RNA, 18 nt, Human
ucccuucucccuugccuc

SEQ ID NO: 187115 - RNA, 22 nt, Human
uugcagggauaaaacaagugaa

SEQ ID NO: 187116 - RNA, 22 nt, Human
uuacagagcuggguggagagag

SEQ ID NO: 187117 - RNA, 22 nt, Human
aacaugcagguuuuaggguugc

SEQ ID NO: 187118 - RNA, 22 nt, Human
ucugcccuggggucagccucca

SEQ ID NO: 187119 - RNA, 22 nt, Human
aauacuauguagccaaaauaau

SEQ ID NO: 187120 - RNA, 22 nt, Human
cuagagaauggcaaagauuaga

SEQ ID NO: 187121 - RNA, 22 nt, Human
cuggcagacuuaccaucagaca

SEQ ID NO: 187122 - RNA, 22 nt, Human
ccugguuucaggaacauaaucu

SEQ ID NO: 187123 - RNA, 22 nt, Human
uggcugccagcuccucgccuug

SEQ ID NO: 187124 - RNA, 22 nt, Human
ucacaggagcccaggggagcug

SEQ ID NO: 187125 - RNA, 22 nt, Human
ccaggcaguggaagcuaaaauu

SEQ ID NO: 187126 - RNA, 22 nt, Human
uaacuguacaacugguuaguca

SEQ ID NO: 187127 - RNA, 22 nt, Human
cagcuagcuaagaaggccagag

SEQ ID NO: 187128 - RNA, 22 nt, Human
aggagguguagauuuccuguca

SEQ ID NO: 187129 - RNA, 22 nt, Human
acauuuaacccucagguuucug

SEQ ID NO: 187130 - RNA, 22 nt, Human
uccaggcuggagugcaguggcg

SEQ ID NO: 187131 - RNA, 22 nt, Human
guuuucaugucuauugggcaua

SEQ ID NO: 187132 - RNA, 22 nt, Human
ccuggcucccuggaccucauua

SEQ ID NO: 187133 - RNA, 22 nt, Human
cauauuucagucuaagaugugu

SEQ ID NO: 187134 - RNA, 22 nt, Human
gcuccuggugcaaaguuucuuc

SEQ ID NO: 187135 - RNA, 22 nt, Human
uucaacaaaauauauuuuucca

SEQ ID NO: 187136 - RNA, 18 nt, Human
gguccugggccuggcuca

SEQ ID NO: 187137 - RNA, 22 nt, Human
uuagacaaucuguugguaaggu

SEQ ID NO: 187138 - RNA, 22 nt, Human
ucucuagggaucuguuuuaauu

SEQ ID NO: 187139 - RNA, 22 nt, Human
ugcacaguuggcuacaucgugg

SEQ ID NO: 187140 - RNA, 22 nt, Human
gggcuaggcuuggccagcacug

SEQ ID NO: 187141 - RNA, 22 nt, Human
cccugcagaucagugagaacuu

SEQ ID NO: 187142 - RNA, 22 nt, Human
cuuggcaguuucggaaggauga

SEQ ID NO: 187143 - RNA, 22 nt, Human
gagauuuauugacuuaacagua

SEQ ID NO: 187144 - RNA, 22 nt, Human
agccccaguaagggagggccug

SEQ ID NO: 187145 - RNA, 22 nt, Human
aggagacccagaauguugcugu

SEQ ID NO: 187146 - RNA, 22 nt, Human
uugagaauaaauuagcagacau

SEQ ID NO: 187147 - RNA, 22 nt, Human
guggcugcuacagagcuggagg

SEQ ID NO: 187148 - RNA, 22 nt, Human
ggagcugagguaacagugagug

SEQ ID NO: 187149 - RNA, 22 nt, Human
acagagcugggaucugaaccca

SEQ ID NO: 187150 - RNA, 22 nt, Human
ugcuuuaacauaagauaucuuu

SEQ ID NO: 187151 - RNA, 22 nt, Human
ggucccaagugcuuuuccugca

SEQ ID NO: 187152 - RNA, 22 nt, Human
ucuccuggcauuugguugagua

SEQ ID NO: 187153 - RNA, 22 nt, Human
aaauagauugcugaggcauuac

SEQ ID NO: 187154 - RNA, 22 nt, Human
gagaggcugguaaagucugaac

SEQ ID NO: 187155 - RNA, 22 nt, Human
gcacaguauugcacaacucuag

SEQ ID NO: 187156 - RNA, 22 nt, Human
agagaagagcaaugauaaauuu

SEQ ID NO: 187157 - RNA, 22 nt, Human
gcugcagugagccaagaucgug

SEQ ID NO: 187158 - RNA, 20 nt, Human
ccuuccccacccgcugaggu

SEQ ID NO: 187159 - RNA, 22 nt, Human
auuuugcugugguacauuagga

SEQ ID NO: 187160 - RNA, 22 nt, Human
ucagcaaacauugauuggacuu

SEQ ID NO: 187161 - RNA, 22 nt, Human
auacuguuucucuucuacauga

SEQ ID NO: 187162 - RNA, 22 nt, Human
agccaguccaucacuaaugggu

SEQ ID NO: 187163 - RNA, 19 nt, Human
uuugaaagaguuuuauugg

SEQ ID NO: 187164 - RNA, 22 nt, Human
gucccugggucuaaggcaguaa

SEQ ID NO: 187165 - RNA, 22 nt, Human
acagguuuagcucuuaguaguc

SEQ ID NO: 187166 - RNA, 22 nt, Human
cuggcuggaaguuagagaacuu

SEQ ID NO: 187167 - RNA, 22 nt, Human
cugccugcucaccagggcucug

SEQ ID NO: 187168 - RNA, 22 nt, Human
uuaacauuguccuuagcagauu

SEQ ID NO: 187169 - RNA, 22 nt, Human
aggaagcuagaaggucuucuuu

SEQ ID NO: 187170 - RNA, 22 nt, Human
uacuuguucuuucaagagauag

SEQ ID NO: 187171 - RNA, 23 nt, Human
ccuggggagcuguauccagagug

SEQ ID NO: 187172 - RNA, 21 nt, Human
uuacaaagcaagugcuguguc

SEQ ID NO: 187173 - RNA, 22 nt, Human
uugagggacuuucucuauuauu

SEQ ID NO: 187174 - RNA, 22 nt, Human
gugugcucccucugucgucaua

SEQ ID NO: 187175 - RNA, 22 nt, Human
cucccagagagcaggugggccg

SEQ ID NO: 187176 - RNA, 22 nt, Human
agauuuguaugucuaaauguaa

SEQ ID NO: 187177 - RNA, 22 nt, Human
cucaggauugugccuagggaga

SEQ ID NO: 187178 - RNA, 22 nt, Human
aaaugcugggaaccauuggauc

SEQ ID NO: 187179 - RNA, 22 nt, Human
cugauauggaugccucauuguc

SEQ ID NO: 187180 - RNA, 22 nt, Human
gcuggggucugugaggagggcu

SEQ ID NO: 187181 - RNA, 22 nt, Human
gcugucuuccuugcuccaaggg

SEQ ID NO: 187182 - RNA, 22 nt, Human
ugcuggagugcaguggcuuaac

SEQ ID NO: 187183 - RNA, 22 nt, Human
uggcacagccacugaaucggga

SEQ ID NO: 187184 - RNA, 22 nt, Human
acuuccuguaaauagaauucca

SEQ ID NO: 187185 - RNA, 22 nt, Human
aaauuagaccagggcuccugga

SEQ ID NO: 187186 - RNA, 22 nt, Human
ccugcccuagagaugacacaau

SEQ ID NO: 187187 - RNA, 22 nt, Human
gucuuagauuucaccgauaaug

SEQ ID NO: 187188 - RNA, 22 nt, Human
gccaucugcgcgguguccagcu

SEQ ID NO: 187189 - RNA, 18 nt, Human
uuucuuucugccuggggc

SEQ ID NO: 187190 - RNA, 22 nt, Human
cuccucagacuuuccuuguccg

SEQ ID NO: 187191 - RNA, 22 nt, Human
augcaacaggucagccaggaag

SEQ ID NO: 187192 - RNA, 22 nt, Human
uagcaagaagcugucacaggug

SEQ ID NO: 187193 - RNA, 22 nt, Human
uggacaguuacugagcuugagu

SEQ ID NO: 187194 - RNA, 22 nt, Human
ucacugucugaaagaaauggcc

SEQ ID NO: 187195 - RNA, 22 nt, Human
agauggugagggcagaaguaac

SEQ ID NO: 187196 - RNA, 22 nt, Human
agcugggcaaaaugugagguug

SEQ ID NO: 187197 - RNA, 22 nt, Human
ucuccuggaagugauuccccug

SEQ ID NO: 187198 - RNA, 22 nt, Human
ucugucauguuuccauuacaug

SEQ ID NO: 187199 - RNA, 22 nt, Human
agagccaggcucuaccuggguu

SEQ ID NO: 187200 - RNA, 22 nt, Human
aaagucauguuuuuguuuagca

SEQ ID NO: 187201 - RNA, 19 nt, Human
uguggccaugguucagcug

SEQ ID NO: 187202 - RNA, 22 nt, Human
ugaugacagcaaaaaaugcuag

SEQ ID NO: 187203 - RNA, 22 nt, Human
acauaaguuauggauaaaaugu

SEQ ID NO: 187204 - RNA, 22 nt, Human
gcuuggaaguaggauugggaga

SEQ ID NO: 187205 - RNA, 15 nt, Human
ucugugcagcaaggg

SEQ ID NO: 187206 - RNA, 22 nt, Human
ccaguccagugccaugcauggc

SEQ ID NO: 187207 - RNA, 22 nt, Human
uucauuuaaucagaaucucuaa

SEQ ID NO: 187208 - RNA, 22 nt, Human
uucaauucaauucuaaauauau

SEQ ID NO: 187209 - RNA, 22 nt, Human
augcuauguaacuggcagauag

SEQ ID NO: 187210 - RNA, 20 nt, Human
auuucaguguuugcaauuuc

SEQ ID NO: 187211 - RNA, 22 nt, Human
auacacaugcacacaugugugu

SEQ ID NO: 187212 - RNA, 22 nt, Human
ugccugucuuaauaucuggaaa

SEQ ID NO: 187213 - RNA, 22 nt, Human
aagcugccagcugagcugaggc

SEQ ID NO: 187214 - RNA, 22 nt, Human
aauaaugauaaugguuauagcu

SEQ ID NO: 187215 - RNA, 22 nt, Human
uacagagagauaaguguaaaag

SEQ ID NO: 187216 - RNA, 22 nt, Human
ccaggcuuucuccugacucaca

SEQ ID NO: 187217 - RNA, 22 nt, Human
uucucagauauuuacugagcau

SEQ ID NO: 187218 - RNA, 22 nt, Human
uacugugaauacaaaauaaauu

SEQ ID NO: 187219 - RNA, 22 nt, Human
cauuuguucaaccauucucgcu

SEQ ID NO: 187220 - RNA, 22 nt, Human
uccccuccucuccugauauggg

SEQ ID NO: 187221 - RNA, 22 nt, Human
gaggugaguggaucacgagguc

SEQ ID NO: 187222 - RNA, 20 nt, Human
cauuaugguugggcacagug

SEQ ID NO: 187223 - RNA, 22 nt, Human
ucuguugaccaagucuucuucc

SEQ ID NO: 187224 - RNA, 22 nt, Human
uguguccuuucuuaagagugag

SEQ ID NO: 187225 - RNA, 22 nt, Human
ccagggccaagagaccucgagg

SEQ ID NO: 187226 - RNA, 22 nt, Human
agccccugggaguagcugcugc

SEQ ID NO: 187227 - RNA, 22 nt, Human
acagaugguagcauuauguugg

SEQ ID NO: 187228 - RNA, 22 nt, Human
gcuacugauugaccuuggagag

SEQ ID NO: 187229 - RNA, 22 nt, Human
auguuuccauagaagucacagu

SEQ ID NO: 187230 - RNA, 22 nt, Human
cccaggagguggagcuugcagu

SEQ ID NO: 187231 - RNA, 22 nt, Human
caggaugagaggcccagggaag

SEQ ID NO: 187232 - RNA, 22 nt, Human
gaagcaguagauuccuacucau

SEQ ID NO: 187233 - RNA, 17 nt, Human
aaucagauuucugagga

SEQ ID NO: 187234 - RNA, 22 nt, Human
aaacaucauaggcaugcaugau

SEQ ID NO: 187235 - RNA, 22 nt, Human
agacuccuucucacugccugua

SEQ ID NO: 187236 - RNA, 22 nt, Human
aaacacauuuuaggaaaaucua

SEQ ID NO: 187237 - RNA, 22 nt, Human
ugcucagcacagaccaggccag

SEQ ID NO: 187238 - RNA, 22 nt, Human
accaggaauauuuugcucauuu

SEQ ID NO: 187239 - RNA, 22 nt, Human
aaaucaaaagacauguguuuua

SEQ ID NO: 187240 - RNA, 22 nt, Human
gcaaauauucaagacuuuucca

SEQ ID NO: 187241 - RNA, 22 nt, Human
gaagccaucuuuguuccccacc

SEQ ID NO: 187242 - RNA, 22 nt, Human
ucugaaauaaaugcacuguuag

SEQ ID NO: 187243 - RNA, 22 nt, Human
uucacauuucauaccacagcuu

SEQ ID NO: 187244 - RNA, 18 nt, Human
uccagcaggucugaggug

SEQ ID NO: 187245 - RNA, 22 nt, Human
gcagcugcagacccucagugcu

SEQ ID NO: 187246 - RNA, 22 nt, Human
aacuguuucagaaauauuguug

SEQ ID NO: 187247 - RNA, 22 nt, Human
cacuggguaaauuugaggcuga

SEQ ID NO: 187248 - RNA, 22 nt, Human
cagagacauccauguuaguugg

SEQ ID NO: 187249 - RNA, 22 nt, Human
cuuguuuauuaugcacuguaga

SEQ ID NO: 187250 - RNA, 22 nt, Human
gaggcccagcagcgcaggucuu

SEQ ID NO: 187251 - RNA, 22 nt, Human
ucuucagacuccaaauguuuua

SEQ ID NO: 187252 - RNA, 22 nt, Human
uuauacuaaaacgcauugaauu

SEQ ID NO: 187253 - RNA, 20 nt, Human
ugugugcaucuguauguauu

SEQ ID NO: 187254 - RNA, 22 nt, Human
auacaaugauugguucucaccc

SEQ ID NO: 187255 - RNA, 22 nt, Human
ccucccugguggcucuggucua

SEQ ID NO: 187256 - RNA, 22 nt, Human
gcaggccuccccugcuggagcu

SEQ ID NO: 187257 - RNA, 22 nt, Human
ucagauggaaugaugccacugc

SEQ ID NO: 187258 - RNA, 22 nt, Human
uacagugcuugguaucuaguaa

SEQ ID NO: 187259 - RNA, 22 nt, Human
gcugaggcucaauccccuucug

SEQ ID NO: 187260 - RNA, 22 nt, Human
aauccauagaauaaaauugcag

SEQ ID NO: 187261 - RNA, 22 nt, Human
ggaacagggauuuggccugguu

SEQ ID NO: 187262 - RNA, 22 nt, Human
uuccugggguacuggagaaaau

SEQ ID NO: 187263 - RNA, 22 nt, Human
aaaggcuucucagaaaggccuu

SEQ ID NO: 187264 - RNA, 22 nt, Human
augugaaauagcuggauaugaa

SEQ ID NO: 187265 - RNA, 22 nt, Human
aaauuggauugggagaauguga

SEQ ID NO: 187266 - RNA, 22 nt, Human
cagcucaggaaggaaggccggc

SEQ ID NO: 187267 - RNA, 22 nt, Human
uccacuccuuaugccagacggu

SEQ ID NO: 187268 - RNA, 22 nt, Human
acagaggccaugagcugccacc

SEQ ID NO: 187269 - RNA, 22 nt, Human
ccaaggcugagguuuccaguug

SEQ ID NO: 187270 - RNA, 21 nt, Human
aggcuuggaucuagacaggcc

SEQ ID NO: 187271 - RNA, 23 nt, Human
ugcaguaggauggggcugggccu

SEQ ID NO: 187272 - RNA, 22 nt, Human
agucaaagaugaccgaguuccu

SEQ ID NO: 187273 - RNA, 22 nt, Human
ggcagggagagcaugcugauaa

SEQ ID NO: 187274 - RNA, 22 nt, Human
agcacagggcccagccuaggcc

SEQ ID NO: 187275 - RNA, 22 nt, Human
agcuuuauagaaaggaucagug

SEQ ID NO: 187276 - RNA, 22 nt, Human
aauuuuacauaggggauauggg

SEQ ID NO: 187277 - RNA, 22 nt, Human
ggcagcacgacaggaguggaag

SEQ ID NO: 187278 - RNA, 22 nt, Human
uucugcugaaaacagccaugua

SEQ ID NO: 187279 - RNA, 22 nt, Human
gcacugugcuagaagccagggg

SEQ ID NO: 187280 - RNA, 21 nt, Human
uguuacaguccaaauguuugu

SEQ ID NO: 187281 - RNA, 22 nt, Human
gcagaagcugggagaagggauu

SEQ ID NO: 187282 - RNA, 22 nt, Human
gaggagugccagccguggaguc

SEQ ID NO: 187283 - RNA, 22 nt, Human
cuuugcaauagaggcacacaug

SEQ ID NO: 187284 - RNA, 22 nt, Human
auuagcuuuauuugaaauagga

SEQ ID NO: 187285 - RNA, 22 nt, Human
cugugggcucccagcuucucuc

SEQ ID NO: 187286 - RNA, 22 nt, Human
aagcacugagcacaguggcuga

SEQ ID NO: 187287 - RNA, 22 nt, Human
ugguguggggauaagcacucug

SEQ ID NO: 187288 - RNA, 22 nt, Human
uuuaaauuauaguuaaugucug

SEQ ID NO: 187289 - RNA, 22 nt, Human
gaggcugguucccuugaucuuu

SEQ ID NO: 187290 - RNA, 22 nt, Human
ucaagaugcauggguggcauaa

SEQ ID NO: 187291 - RNA, 22 nt, Human
gaaagucauggaugaacacuac

SEQ ID NO: 187292 - RNA, 22 nt, Human
gccuugccgcucagcagugggg

SEQ ID NO: 187293 - RNA, 22 nt, Human
gagugugggggugcugaggaca

SEQ ID NO: 187294 - RNA, 22 nt, Human
gcagcagauuguuuuuucaccu

SEQ ID NO: 187295 - RNA, 22 nt, Human
augguggacucuugauucaggc

SEQ ID NO: 187296 - RNA, 22 nt, Human
uuggaaacuuucaagcauaaug

SEQ ID NO: 187297 - RNA, 22 nt, Human
ggaaagggcauggccuuuucac

SEQ ID NO: 187298 - RNA, 22 nt, Human
ugacaauugugggcaguuugug

SEQ ID NO: 187299 - RNA, 22 nt, Human
ucuugagguuauuaagcuguua

SEQ ID NO: 187300 - RNA, 22 nt, Human
aguuugaagcaaaauugaggaa

SEQ ID NO: 187301 - RNA, 22 nt, Human
ccccugccauagucaaaucuaa

SEQ ID NO: 187302 - RNA, 22 nt, Human
gaagcagccacggggagacaga

SEQ ID NO: 187303 - RNA, 22 nt, Human
gcaggaagggaaagguugacuc

SEQ ID NO: 187304 - RNA, 22 nt, Human
ggaaggaauuccaagacuaaag

SEQ ID NO: 187305 - RNA, 22 nt, Human
auagcaaagaucacuuccuuga

SEQ ID NO: 187306 - RNA, 22 nt, Human
gaggcugaggguuagagaguca

SEQ ID NO: 187307 - RNA, 22 nt, Human
cccacaucccuuccccgcugug

SEQ ID NO: 187308 - RNA, 20 nt, Human
uuguuagaggaaugccauag

SEQ ID NO: 187309 - RNA, 23 nt, Human
gcagagcugcccuauugccuugg

SEQ ID NO: 187310 - RNA, 22 nt, Human
cugagccaaaaagcagagcuug

SEQ ID NO: 187311 - RNA, 22 nt, Human
ucaaaguuuuugagaauuacau

SEQ ID NO: 187312 - RNA, 22 nt, Human
ccaguguguuaguggauuuccc

SEQ ID NO: 187313 - RNA, 22 nt, Human
ggagccuuagacaucugauccu

SEQ ID NO: 187314 - RNA, 22 nt, Human
acagcugcugcuucucacuggg

SEQ ID NO: 187315 - RNA, 22 nt, Human
cggcuucuauuaggucggugca

SEQ ID NO: 187316 - RNA, 22 nt, Human
aagcuguuaauggcuugcagcu

SEQ ID NO: 187317 - RNA, 22 nt, Human
acacauuaucucauuaaauacu

SEQ ID NO: 187318 - RNA, 21 nt, Human
uaagcauaucagauagacucu

SEQ ID NO: 187319 - RNA, 22 nt, Human
caggcaccaacuuccuggggag

SEQ ID NO: 187320 - RNA, 22 nt, Human
cuccuggcucgcccccagcuga

SEQ ID NO: 187321 - RNA, 22 nt, Human
acacugugugacuucugagacu

SEQ ID NO: 187322 - RNA, 22 nt, Human
aaguggggccuggugguacagu

SEQ ID NO: 187323 - RNA, 22 nt, Human
ccugggcuuugagggcaggaug

SEQ ID NO: 187324 - RNA, 22 nt, Human
ggcaucugagcuguguaugguu

SEQ ID NO: 187325 - RNA, 22 nt, Human
gcucuguaucuuacaacagggu

SEQ ID NO: 187326 - RNA, 22 nt, Human
agaaugcauuuuguguagcuau

SEQ ID NO: 187327 - RNA, 22 nt, Human
cuuguucaguccugacuuccug

SEQ ID NO: 187328 - RNA, 22 nt, Human
guccugucccccaaggcugugg

SEQ ID NO: 187329 - RNA, 22 nt, Human
uaugcuccuauuggaaugauag

SEQ ID NO: 187330 - RNA, 23 nt, Human
uggggagaguuacccuggaagcg

SEQ ID NO: 187331 - RNA, 22 nt, Human
agaaguauucugcauguacuga

SEQ ID NO: 187332 - RNA, 22 nt, Human
cuggccucauagccaagcugug

SEQ ID NO: 187333 - RNA, 22 nt, Human
aggaauguaaaucuagauuuua

SEQ ID NO: 187334 - RNA, 22 nt, Human
gcagugcaggaacauagcuucu

SEQ ID NO: 187335 - RNA, 22 nt, Human
uguagaaggcuauagacuagga

SEQ ID NO: 187336 - RNA, 22 nt, Human
caauuucucgaacucuaaucca

SEQ ID NO: 187337 - RNA, 22 nt, Human
gcucagugaaacaucaaauagu

SEQ ID NO: 187338 - RNA, 22 nt, Human
gagauuuagcugcuuaacuccu

SEQ ID NO: 187339 - RNA, 22 nt, Human
ucucaaacuaacaaugauuaua

SEQ ID NO: 187340 - RNA, 22 nt, Human
acugugaugcaguugccaucca

SEQ ID NO: 187341 - RNA, 22 nt, Human
uggcagagaaccugggcuuugu

SEQ ID NO: 187342 - RNA, 22 nt, Human
uaauuucuaauucauuuucagu

SEQ ID NO: 187343 - RNA, 22 nt, Human
acuucccaggugguguggaguu

SEQ ID NO: 187344 - RNA, 22 nt, Human
ucacauucuucccugacuucuu

SEQ ID NO: 187345 - RNA, 20 nt, Human
aaaugaugggaauaaucuau

SEQ ID NO: 187346 - RNA, 22 nt, Human
agcucagaaaugccaguaggua

SEQ ID NO: 187347 - RNA, 22 nt, Human
uaaauguguuagucaugguuuu

SEQ ID NO: 187348 - RNA, 22 nt, Human
gccucugggguggagcccagca

SEQ ID NO: 187349 - RNA, 22 nt, Human
gcagccucugcaguucaggagg

SEQ ID NO: 187350 - RNA, 22 nt, Human
auuuugaaaagcauuugaguaa

SEQ ID NO: 187351 - RNA, 22 nt, Human
cauuuuaagaugaccugguuuc

SEQ ID NO: 187352 - RNA, 19 nt, Human
cugcucaggucagucuguc

SEQ ID NO: 187353 - RNA, 22 nt, Human
guacccagaggcaugaucccag

SEQ ID NO: 187354 - RNA, 22 nt, Human
aaaacagacagccaguguagag

SEQ ID NO: 187355 - RNA, 22 nt, Human
gacaggcugugauggccgggag

SEQ ID NO: 187356 - RNA, 22 nt, Human
gagcccagucugcuccugcgcc

SEQ ID NO: 187357 - RNA, 20 nt, Human
acugagguuagauaacaggu

SEQ ID NO: 187358 - RNA, 22 nt, Human
gcagagugaggaagagcuucca

SEQ ID NO: 187359 - RNA, 22 nt, Human
agaguguaccaaauauccuaca

SEQ ID NO: 187360 - RNA, 22 nt, Human
acuggggccuccuccaugcucu

SEQ ID NO: 187361 - RNA, 19 nt, Human
ccagagucaugucuccccc

SEQ ID NO: 187362 - RNA, 22 nt, Human
aguagugugacaauuaauauuu

SEQ ID NO: 187363 - RNA, 22 nt, Human
guuuuauuggaacacagccaug

SEQ ID NO: 187364 - RNA, 22 nt, Human
aacacaaagaagcugcaggauc

SEQ ID NO: 187365 - RNA, 22 nt, Human
gcuggcuuugucaagggcagca

SEQ ID NO: 187366 - RNA, 22 nt, Human
ugcuuuaagacacuaaguuuga

SEQ ID NO: 187367 - RNA, 22 nt, Human
auauaauacaaccugcuaagug

SEQ ID NO: 187368 - RNA, 22 nt, Human
ugcuucucaaagaagcauaaug

SEQ ID NO: 187369 - RNA, 22 nt, Human
uccagccauaucuuguagcccu

SEQ ID NO: 187370 - RNA, 20 nt, Human
ucucuggguucucacucagc

SEQ ID NO: 187371 - RNA, 22 nt, Human
acagcagggguggaauaaacgu

SEQ ID NO: 187372 - RNA, 21 nt, Human
uucugggccggagaaggggcg

SEQ ID NO: 187373 - RNA, 22 nt, Human
auaauagcuaacacagagugcu

SEQ ID NO: 187374 - RNA, 22 nt, Human
uuuccaaaggaggaaccaguuu

SEQ ID NO: 187375 - RNA, 22 nt, Human
gagcugcacaucugaggcuaau

SEQ ID NO: 187376 - RNA, 22 nt, Human
uaagacauaccaaguuguguga

SEQ ID NO: 187377 - RNA, 22 nt, Human
ggcuccuucaagccugucacug

SEQ ID NO: 187378 - RNA, 22 nt, Human
ugucagcagcugguuugcuguu

SEQ ID NO: 187379 - RNA, 22 nt, Human
cugagcugguucucuugugaaa

SEQ ID NO: 187380 - RNA, 22 nt, Human
ugcuuaaaauaguucauuuuug

SEQ ID NO: 187381 - RNA, 22 nt, Human
agaaaguuagcagacucuuggc

SEQ ID NO: 187382 - RNA, 22 nt, Human
acccagaguaacagauggauuc

SEQ ID NO: 187383 - RNA, 22 nt, Human
ccugagucccauaauguugcca

SEQ ID NO: 187384 - RNA, 22 nt, Human
agucagucaccauuuaagaaca

SEQ ID NO: 187385 - RNA, 21 nt, Human
cccugcaggccagggcugagc

SEQ ID NO: 187386 - RNA, 22 nt, Human
uuugcaaacacuuaagaagaga

SEQ ID NO: 187387 - RNA, 23 nt, Human
aauucaaauucagugugacuagg

SEQ ID NO: 187388 - RNA, 22 nt, Human
auuuuucucucacacuuaccag

SEQ ID NO: 187389 - RNA, 18 nt, Human
ccuguguguguugcaggc

SEQ ID NO: 187390 - RNA, 22 nt, Human
agagggcauuaacucugucuug

SEQ ID NO: 187391 - RNA, 18 nt, Human
guuaauuuugaaguucau

SEQ ID NO: 187392 - RNA, 22 nt, Human
cugugcaguaggucagggcugg

SEQ ID NO: 187393 - RNA, 22 nt, Human
aagauguugucguuagugauga

SEQ ID NO: 187394 - RNA, 22 nt, Human
aaaguguuuacauugcuauaag

SEQ ID NO: 187395 - RNA, 22 nt, Human
ccuggagcaaaaaucuaaggag

SEQ ID NO: 187396 - RNA, 22 nt, Human
gagaaucucaggcacccagaag

SEQ ID NO: 187397 - RNA, 22 nt, Human
cugggagcggcugucacugguu

SEQ ID NO: 187398 - RNA, 22 nt, Human
ugcagcugauuaaagggcagac

SEQ ID NO: 187399 - RNA, 22 nt, Human
ggugacagcgggucaagaggag

SEQ ID NO: 187400 - RNA, 22 nt, Human
uccaggccucuagcccucucuu

SEQ ID NO: 187401 - RNA, 22 nt, Human
ugggguugaagaaaggaucuag

SEQ ID NO: 187402 - RNA, 22 nt, Human
uucucagauccaucagaagucc

SEQ ID NO: 187403 - RNA, 22 nt, Human
gcuuaauucuggcucaguuucc

SEQ ID NO: 187404 - RNA, 22 nt, Human
acagaaagaugauuugaaaugg

SEQ ID NO: 187405 - RNA, 22 nt, Human
gccuuggcccacagugcuccug

SEQ ID NO: 187406 - RNA, 22 nt, Human
ugcccugcuucucuugggacag

SEQ ID NO: 187407 - RNA, 22 nt, Human
ucugacccguggcucugccucc

SEQ ID NO: 187408 - RNA, 22 nt, Human
uacacaaugacuuaagauguca

SEQ ID NO: 187409 - RNA, 22 nt, Human
uaagacuuccaggaaaaggugg

SEQ ID NO: 187410 - RNA, 22 nt, Human
auuuagguagcugucuaagugu

SEQ ID NO: 187411 - RNA, 22 nt, Human
uuucacaauuuuaaggagcaaa

SEQ ID NO: 187412 - RNA, 22 nt, Human
aacugcaacuuguuugauucuu

SEQ ID NO: 187413 - RNA, 23 nt, Human
gccagccuugcucuccugcagcc

SEQ ID NO: 187414 - RNA, 22 nt, Human
ucacaagaauuuguagaugaaa

SEQ ID NO: 187415 - RNA, 22 nt, Human
uggaaccuggugauguacaagu

SEQ ID NO: 187416 - RNA, 22 nt, Human
uuuuaucaaucauuaagacauu

SEQ ID NO: 187417 - RNA, 22 nt, Human
aggcuguguucugcccucuccc

SEQ ID NO: 187418 - RNA, 22 nt, Human
gaaaggcucacuuuagaucaug

SEQ ID NO: 187419 - RNA, 22 nt, Human
uucugguuacauuguuacagcu

SEQ ID NO: 187420 - RNA, 22 nt, Human
cagagaugugauccagcugucu

SEQ ID NO: 187421 - RNA, 22 nt, Human
agcagaaucuguccuuggaaga

SEQ ID NO: 187422 - RNA, 22 nt, Human
aggaugggucagcuagagucca

SEQ ID NO: 187423 - RNA, 22 nt, Human
acucugagucaugcacuccuug

SEQ ID NO: 187424 - RNA, 22 nt, Human
aauuuuauuagaaggcaagggg

SEQ ID NO: 187425 - RNA, 22 nt, Human
uugugcaaggucuggacuauag

SEQ ID NO: 187426 - RNA, 22 nt, Human
gccugggauucucaaaggggug

SEQ ID NO: 187427 - RNA, 22 nt, Human
auacugauuaguugagaaagca

SEQ ID NO: 187428 - RNA, 22 nt, Human
ucucugggaauuuuuuggacau

SEQ ID NO: 187429 - RNA, 22 nt, Human
aggucagcuagacagcucucug

SEQ ID NO: 187430 - RNA, 22 nt, Human
gcugaaauucagauuccuaggc

SEQ ID NO: 187431 - RNA, 22 nt, Human
agcuucucaucuuccaaaauug

SEQ ID NO: 187432 - RNA, 17 nt, Human
gaccaggagaaaccagg

SEQ ID NO: 187433 - RNA, 22 nt, Human
cagggcucgcucuugcccuucg

SEQ ID NO: 187434 - RNA, 19 nt, Human
ugggagaggcaacagagua

SEQ ID NO: 187435 - RNA, 22 nt, Human
cuggcugcuuguuuugaugggu

SEQ ID NO: 187436 - RNA, 21 nt, Human
cacacagugaucuauccacau

SEQ ID NO: 187437 - RNA, 21 nt, Human
caaagccaggcaacucucucc

SEQ ID NO: 187438 - RNA, 22 nt, Human
uuguuugucauaauaucauuac

SEQ ID NO: 187439 - RNA, 22 nt, Human
uguggauaaugcacuauccaua

SEQ ID NO: 187440 - RNA, 21 nt, Human
uuagaguugccauuauaugua

SEQ ID NO: 187441 - RNA, 22 nt, Human
cuggugcuguagccugauugag

SEQ ID NO: 187442 - RNA, 22 nt, Human
uaauuuuccacucuguuuaucu

SEQ ID NO: 187443 - RNA, 22 nt, Human
uauuuccaggccccacucuaga

SEQ ID NO: 187444 - RNA, 22 nt, Human
uuuauugacuucagugagucuu

SEQ ID NO: 187445 - RNA, 22 nt, Human
acaguuaauuaacauuaagggg

SEQ ID NO: 187446 - RNA, 17 nt, Human
uuacaacaauucaugag

SEQ ID NO: 187447 - RNA, 22 nt, Human
aagauccaugggaauguuuggc

SEQ ID NO: 187448 - RNA, 22 nt, Human
gcaggccugcagguauggccgg

SEQ ID NO: 187449 - RNA, 22 nt, Human
cuucuguagccaguaacauaua

SEQ ID NO: 187450 - RNA, 22 nt, Human
aaagccuucuucggucugugau

SEQ ID NO: 187451 - RNA, 22 nt, Human
uggcuucagacuucugcuacgu

SEQ ID NO: 187452 - RNA, 22 nt, Human
gcacugggcuccaggaaggagg

SEQ ID NO: 187453 - RNA, 22 nt, Human
cucuagggcucugugagguugg

SEQ ID NO: 187454 - RNA, 22 nt, Human
ugcuccagcaccaagagcucca

SEQ ID NO: 187455 - RNA, 22 nt, Human
aggagccauuuuccaagggcga

SEQ ID NO: 187456 - RNA, 22 nt, Human
uagcccucuccagcgaggucug

SEQ ID NO: 187457 - RNA, 22 nt, Human
aagcuguuuuggccuuaguuga

SEQ ID NO: 187458 - RNA, 23 nt, Human
acaucagaguuaguucaaucagg

SEQ ID NO: 187459 - RNA, 22 nt, Human
augucaaaucaguuuuaucaga

SEQ ID NO: 187460 - RNA, 20 nt, Human
aggacagcagcugccacuug

SEQ ID NO: 187461 - RNA, 22 nt, Human
uauuccucccaguaaguacaac

SEQ ID NO: 187462 - RNA, 22 nt, Human
cgugggaguggugggugcucag

SEQ ID NO: 187463 - RNA, 22 nt, Human
cuuacauugugugcaugagggg

SEQ ID NO: 187464 - RNA, 22 nt, Human
uggagccagaagagccaguuca

SEQ ID NO: 187465 - RNA, 22 nt, Human
aaguguuuauuuauaacgaucu

SEQ ID NO: 187466 - RNA, 22 nt, Human
caggugguuugauaggauaacu

SEQ ID NO: 187467 - RNA, 23 nt, Human
agagccuuuucacacuucaaugu

SEQ ID NO: 187468 - RNA, 22 nt, Human
agcagccuuagguauugugauu

SEQ ID NO: 187469 - RNA, 22 nt, Human
cuggccucacagaggcuaagcc

SEQ ID NO: 187470 - RNA, 22 nt, Human
gaaucuuauccccaguccuuaa

SEQ ID NO: 187471 - RNA, 22 nt, Human
augacagaugcuguggggaggu

SEQ ID NO: 187472 - RNA, 22 nt, Human
ucucagaaauacuauguuguca

SEQ ID NO: 187473 - RNA, 22 nt, Human
ucaggcuguggcuuugaccgca

SEQ ID NO: 187474 - RNA, 22 nt, Human
augcugaaugaaagaaauuagu

SEQ ID NO: 187475 - RNA, 19 nt, Human
gggcuucugggaucaagag

SEQ ID NO: 187476 - RNA, 22 nt, Human
augcaaagcaccacacuaagau

SEQ ID NO: 187477 - RNA, 22 nt, Human
uguuacuucuuauuucuuacau

SEQ ID NO: 187478 - RNA, 22 nt, Human
cuuucuuauaccugucagggcc

SEQ ID NO: 187479 - RNA, 22 nt, Human
acaccuuugccccaagucauag

SEQ ID NO: 187480 - RNA, 22 nt, Human
gcuccucuucucccacugaaug

SEQ ID NO: 187481 - RNA, 22 nt, Human
cugccuccaggcucaccuugac

SEQ ID NO: 187482 - RNA, 22 nt, Human
ucugagccccuagaacugagcg

SEQ ID NO: 187483 - RNA, 22 nt, Human
acacugaauauacaaugaauau

SEQ ID NO: 187484 - RNA, 22 nt, Human
uggccagcccucuucccacacu

SEQ ID NO: 187485 - RNA, 22 nt, Human
accaggaggaaguguuaaugau

SEQ ID NO: 187486 - RNA, 22 nt, Human
auuauuauauagggaaaguccc

SEQ ID NO: 187487 - RNA, 22 nt, Human
cccacaggcaggggcagagaca

SEQ ID NO: 187488 - RNA, 19 nt, Human
uggcagggagugauauuag

SEQ ID NO: 187489 - RNA, 22 nt, Human
ccagcuccccucagcagguaau

SEQ ID NO: 187490 - RNA, 22 nt, Human
ucuguuuauucaauuucuauau

SEQ ID NO: 187491 - RNA, 22 nt, Human
ucugaaauauugguaauacuuu

SEQ ID NO: 187492 - RNA, 22 nt, Human
agagggcuggacgcagguugga

SEQ ID NO: 187493 - RNA, 22 nt, Human
ucagaagcaagcuucuacuucu

SEQ ID NO: 187494 - RNA, 22 nt, Human
gcagacaggauuggguuaauag

SEQ ID NO: 187495 - RNA, 22 nt, Human
aggcuugggucagaaggcuugu

SEQ ID NO: 187496 - RNA, 22 nt, Human
cucaggcacuuuugucacagac

SEQ ID NO: 187497 - RNA, 22 nt, Human
ugcaaacaguuaagaugcaggc

SEQ ID NO: 187498 - RNA, 22 nt, Human
aaauuugauaagccauuguuac

SEQ ID NO: 187499 - RNA, 22 nt, Human
ugagcagagucgcuccagagug

SEQ ID NO: 187500 - RNA, 22 nt, Human
ugaaaauggccugaagaagcaa

SEQ ID NO: 187501 - RNA, 22 nt, Human
cugagcugagccaaaucugucu

SEQ ID NO: 187502 - RNA, 22 nt, Human
aggaagccaggcccuugggugg

SEQ ID NO: 187503 - RNA, 22 nt, Human
aguguuacuacagacugguuaa

SEQ ID NO: 187504 - RNA, 23 nt, Human
uugggaaauaguuaagacaugag

SEQ ID NO: 187505 - RNA, 22 nt, Human
agugucugccugggaggagcau

SEQ ID NO: 187506 - RNA, 22 nt, Human
uaggccaggaaucagcaagcuu

SEQ ID NO: 187507 - RNA, 22 nt, Human
aucugggcguauaggugcaagu

SEQ ID NO: 187508 - RNA, 22 nt, Human
gagcugcaugcaacucgaaaau

SEQ ID NO: 187509 - RNA, 22 nt, Human
cagaaaaggguguuuguucagg

SEQ ID NO: 187510 - RNA, 22 nt, Human
ucucugcagucuugggcaggca

SEQ ID NO: 187511 - RNA, 22 nt, Human
gggagguagcaagccugcagcu

SEQ ID NO: 187512 - RNA, 22 nt, Human
cuacucugaaaacccagaaacu

SEQ ID NO: 187513 - RNA, 22 nt, Human
ucucagcagccagauccagagc

SEQ ID NO: 187514 - RNA, 22 nt, Human
auuuccuauggauacaggcaga

SEQ ID NO: 187515 - RNA, 19 nt, Human
gaacuuggccaggcacagu

SEQ ID NO: 187516 - RNA, 22 nt, Human
gucugccccacaggcucaguug

SEQ ID NO: 187517 - RNA, 22 nt, Human
uguguucuccuacagauaagga

SEQ ID NO: 187518 - RNA, 22 nt, Human
aaacaguucuccaggaagccag

SEQ ID NO: 187519 - RNA, 22 nt, Human
agugcaugaaagcauacaaggc

SEQ ID NO: 187520 - RNA, 22 nt, Human
uuuacauuucccucugucaguu

SEQ ID NO: 187521 - RNA, 22 nt, Human
gcauuuuaaugagguuuaugag

SEQ ID NO: 187522 - RNA, 22 nt, Human
gaguuacuggguggaaggcacu

SEQ ID NO: 187523 - RNA, 22 nt, Human
caggaugcagugggacccaggg

SEQ ID NO: 187524 - RNA, 22 nt, Human
gcuaguccacagccauccaggc

SEQ ID NO: 187525 - RNA, 22 nt, Human
agcaguguucaaugauacacug

SEQ ID NO: 187526 - RNA, 22 nt, Human
ugaggcaggaugcuugcacagg

SEQ ID NO: 187527 - RNA, 22 nt, Human
uccuuagacaaagagugggcuu

SEQ ID NO: 187528 - RNA, 22 nt, Human
agagccugagccugaaagcccu

SEQ ID NO: 187529 - RNA, 22 nt, Human
cccccaccguguuccugcucgg

SEQ ID NO: 187530 - RNA, 22 nt, Human
ccucagagacugcaucuucccu

SEQ ID NO: 187531 - RNA, 22 nt, Human
guuccucagcccuuacuuagcc

SEQ ID NO: 187532 - RNA, 22 nt, Human
cacaggcuuccaguccccagcu

SEQ ID NO: 187533 - RNA, 20 nt, Human
caugcaacagauuauuuccc

SEQ ID NO: 187534 - RNA, 22 nt, Human
uaggcuucccgcucacaugccc

SEQ ID NO: 187535 - RNA, 23 nt, Human
gaauucuuaaggucacuaaaguc

SEQ ID NO: 187536 - RNA, 22 nt, Human
auagauuauuugcucauuacuu

SEQ ID NO: 187537 - RNA, 22 nt, Human
uccugagagcagaguccaggug

SEQ ID NO: 187538 - RNA, 22 nt, Human
agcauguucaucuucuguuggu

SEQ ID NO: 187539 - RNA, 22 nt, Human
uaaggcacccuucugaguagag

SEQ ID NO: 187540 - RNA, 19 nt, Human
agucuuguauuuuucaagc

SEQ ID NO: 187541 - RNA, 21 nt, Human
uuucucaguugugugagcagc

SEQ ID NO: 187542 - RNA, 22 nt, Human
ccacugagaagggguugggguc

SEQ ID NO: 187543 - RNA, 22 nt, Human
uccacaguuuugccacuagcug

SEQ ID NO: 187544 - RNA, 22 nt, Human
aggaggcagaugcuuggcugua

SEQ ID NO: 187545 - RNA, 22 nt, Human
acaagcuuccaggugaugcuga

SEQ ID NO: 187546 - RNA, 22 nt, Human
cagugagggaagaucucagcac

SEQ ID NO: 187547 - RNA, 22 nt, Human
cagaugaacucuauccuguggc

SEQ ID NO: 187548 - RNA, 22 nt, Human
uggcuugcuacugaggugucag

SEQ ID NO: 187549 - RNA, 22 nt, Human
cugggccaguuaugucucaucu

SEQ ID NO: 187550 - RNA, 22 nt, Human
uccauuuacuauucucauaucg

SEQ ID NO: 187551 - RNA, 22 nt, Human
cagagccucugcccugggcacu

SEQ ID NO: 187552 - RNA, 20 nt, Human
cacagaugggacaggaaagg

SEQ ID NO: 187553 - RNA, 22 nt, Human
aaggcaguuaauuuggcuagaa

SEQ ID NO: 187554 - RNA, 22 nt, Human
cuggcccuggcuggagcccagg

SEQ ID NO: 187555 - RNA, 21 nt, Human
cccagggaagccgcagucacc

SEQ ID NO: 187556 - RNA, 22 nt, Human
ucccuaguagacccagaucauu

SEQ ID NO: 187557 - RNA, 22 nt, Human
gcuggagugcugaggugcagug

SEQ ID NO: 187558 - RNA, 22 nt, Human
cagcugaaccuuucccuggagc

SEQ ID NO: 187559 - RNA, 22 nt, Human
gcuuucugccugggcuccauuu

SEQ ID NO: 187560 - RNA, 22 nt, Human
agcagugaaacagcugcauaug

SEQ ID NO: 187561 - RNA, 22 nt, Human
uacagcuagagggcacgugaac

SEQ ID NO: 187562 - RNA, 22 nt, Human
auucuuuacauuggcuucuucc

SEQ ID NO: 187563 - RNA, 22 nt, Human
ugaccauuugaucuacauucca

SEQ ID NO: 187564 - RNA, 22 nt, Human
gaaaguaugccaucuaccucuu

SEQ ID NO: 187565 - RNA, 22 nt, Human
ucacagugaugacgugggagca

SEQ ID NO: 187566 - RNA, 22 nt, Human
ugaggccaggcaaaggcgaucu

SEQ ID NO: 187567 - RNA, 22 nt, Human
agaggcaaugaaagcagucucu

SEQ ID NO: 187568 - RNA, 22 nt, Human
cuuguggagauauccaugucug

SEQ ID NO: 187569 - RNA, 22 nt, Human
uugcaaaugguaccaagggucu

SEQ ID NO: 187570 - RNA, 22 nt, Human
cuucagaagaaaagcagugugu

SEQ ID NO: 187571 - RNA, 22 nt, Human
ucagugcacaaugacgguggcu

SEQ ID NO: 187572 - RNA, 22 nt, Human
cuucucccaaguaugcaguuug

SEQ ID NO: 187573 - RNA, 22 nt, Human
gugcagaggucacaaaagugaa

SEQ ID NO: 187574 - RNA, 21 nt, Human
ggaggaaaaaggaaugacuug

SEQ ID NO: 187575 - RNA, 22 nt, Human
ucaggcuuuuucucaaccucuu

SEQ ID NO: 187576 - RNA, 22 nt, Human
augguaaugauuuauguaaauu

SEQ ID NO: 187577 - RNA, 22 nt, Human
caggcuuccgccagguuuccag

SEQ ID NO: 187578 - RNA, 22 nt, Human
ucagcuuuuaaaaacaagaagu

SEQ ID NO: 187579 - RNA, 22 nt, Human
ccugaggcaaggacuugguggc

SEQ ID NO: 187580 - RNA, 22 nt, Human
aguccacugccccagcuccucg

SEQ ID NO: 187581 - RNA, 22 nt, Human
aguaaacaguaucuuuaguguc

SEQ ID NO: 187582 - RNA, 22 nt, Human
uguuacaguggcuuuuuaaaca

SEQ ID NO: 187583 - RNA, 22 nt, Human
uguagaacugacauuuuggacu

SEQ ID NO: 187584 - RNA, 22 nt, Human
aauaacuggcacauaucacaua

SEQ ID NO: 187585 - RNA, 22 nt, Human
ccaugaccccuggcauccaggg

SEQ ID NO: 187586 - RNA, 22 nt, Human
gcagcuuugucacggagugucg

SEQ ID NO: 187587 - RNA, 22 nt, Human
cauuuacagugagaguuuuuac

SEQ ID NO: 187588 - RNA, 22 nt, Human
aauaccaugcagaaauaacaua

SEQ ID NO: 187589 - RNA, 22 nt, Human
cugaggagucagcuuacucacu

SEQ ID NO: 187590 - RNA, 22 nt, Human
aucacauucuuucaaagcaguc

SEQ ID NO: 187591 - RNA, 18 nt, Human
cugaaggcaccagggcag

SEQ ID NO: 187592 - RNA, 22 nt, Human
uugcuuauuugauuaaaugucu

SEQ ID NO: 187593 - RNA, 22 nt, Human
gaggcucccucaacucugggug

SEQ ID NO: 187594 - RNA, 22 nt, Human
aaugucuauuugcuacaaagcc

SEQ ID NO: 187595 - RNA, 22 nt, Human
cucuucuugucucugguuagaa

SEQ ID NO: 187596 - RNA, 22 nt, Human
ugugacagaucuuuaaauaaug

SEQ ID NO: 187597 - RNA, 22 nt, Human
uuugcugaauaaaugugugacu

SEQ ID NO: 187598 - RNA, 22 nt, Human
ucuuucugaauauuugaccuca

SEQ ID NO: 187599 - RNA, 22 nt, Human
aaaacucugcaguuaguuucua

SEQ ID NO: 187600 - RNA, 22 nt, Human
uguaaugagaaagagagugaau

SEQ ID NO: 187601 - RNA, 22 nt, Human
gcccagcaaggaccaagggccg

SEQ ID NO: 187602 - RNA, 22 nt, Human
acauugugauccgacugauuaa

SEQ ID NO: 187603 - RNA, 22 nt, Human
guuuccuauaacucaggcacca

SEQ ID NO: 187604 - RNA, 22 nt, Human
ggcuguggcagcuggaaguggu

SEQ ID NO: 187605 - RNA, 22 nt, Human
ccuuuuauacucagugauauca

SEQ ID NO: 187606 - RNA, 22 nt, Human
ugggcugcacccucagccucug

SEQ ID NO: 187607 - RNA, 22 nt, Human
ucugggcagccgccccauagga

SEQ ID NO: 187608 - RNA, 22 nt, Human
agggcugcuuugcuaaauaugg

SEQ ID NO: 187609 - RNA, 22 nt, Human
agcaaagucaguggaaccaucc

SEQ ID NO: 187610 - RNA, 22 nt, Human
uucuaguuaaaguauguauuag

SEQ ID NO: 187611 - RNA, 23 nt, Human
ugccguguuagaaauguuuuaca

SEQ ID NO: 187612 - RNA, 22 nt, Human
cagcuggccaaucagggcgccc

SEQ ID NO: 187613 - RNA, 22 nt, Human
uuaguuguaaaauggaauuugu

SEQ ID NO: 187614 - RNA, 22 nt, Human
ggaacuuuuuaacaagcugcug

SEQ ID NO: 187615 - RNA, 22 nt, Human
uccaaauauucggucuuucuga

SEQ ID NO: 187616 - RNA, 22 nt, Human
cuggacucagggugcuccagcg

SEQ ID NO: 187617 - RNA, 22 nt, Human
uuggaagcaguguacacuguac

SEQ ID NO: 187618 - RNA, 22 nt, Human
uggcucaguuccaucaucugga

SEQ ID NO: 187619 - RNA, 14 nt, Human
aggaauguccuagg

SEQ ID NO: 187620 - RNA, 22 nt, Human
auuuacagaugaugcuauuuga

SEQ ID NO: 187621 - RNA, 22 nt, Human
gagcuucagagaccacuuaacu

SEQ ID NO: 187622 - RNA, 22 nt, Human
cacagcagaaauaugaaggcag

SEQ ID NO: 187623 - RNA, 22 nt, Human
guucucugccggcaccuacccg

SEQ ID NO: 187624 - RNA, 20 nt, Human
aggucugauuccagaaucag

SEQ ID NO: 187625 - RNA, 18 nt, Human
gcuccuggaccaggucac

SEQ ID NO: 187626 - RNA, 22 nt, Human
cuggccagacuacacaugugug

SEQ ID NO: 187627 - RNA, 22 nt, Human
gaagaaagauuggcaugcuuca

SEQ ID NO: 187628 - RNA, 17 nt, Human
aggagggaaauagcuug

SEQ ID NO: 187629 - RNA, 22 nt, Human
caggagacuauggcccaaggcc

SEQ ID NO: 187630 - RNA, 22 nt, Human
acacaggaagagagauaauaau

SEQ ID NO: 187631 - RNA, 22 nt, Human
auagacaacacuuauuauuccu

SEQ ID NO: 187632 - RNA, 22 nt, Human
agccacagcaacaagugcaauu

SEQ ID NO: 187633 - RNA, 22 nt, Human
gccuggugcuaugagggccagc

SEQ ID NO: 187634 - RNA, 18 nt, Human
gcagaugaguaguguacc

SEQ ID NO: 187635 - RNA, 22 nt, Human
cugauaauguccugcaguaaau

SEQ ID NO: 187636 - RNA, 22 nt, Human
ucugagcuaauccuguugccga

SEQ ID NO: 187637 - RNA, 22 nt, Human
gcccagcaccucucucaggguu

SEQ ID NO: 187638 - RNA, 22 nt, Human
caggucagagucccccuguccu

SEQ ID NO: 187639 - RNA, 22 nt, Human
ucacaugucaagaagauaauuu

SEQ ID NO: 187640 - RNA, 22 nt, Human
aagucuaaacacauauuuaaaa

SEQ ID NO: 187641 - RNA, 22 nt, Human
agaccugcagggccaggccugc

SEQ ID NO: 187642 - RNA, 22 nt, Human
cuguuacccagcaaccccagca

SEQ ID NO: 187643 - RNA, 22 nt, Human
auauuagguuggugcaaaagua

SEQ ID NO: 187644 - RNA, 22 nt, Human
uccauuuuagaagaaaauccac

SEQ ID NO: 187645 - RNA, 22 nt, Human
uuagguaaguaggaucaaaaaa

SEQ ID NO: 187646 - RNA, 22 nt, Human
agucugagguaauauuuuucuc

SEQ ID NO: 187647 - RNA, 22 nt, Human
ucuaguucuagaucccugagga

SEQ ID NO: 187648 - RNA, 20 nt, Human
uugaggagauauugaauacu

SEQ ID NO: 187649 - RNA, 22 nt, Human
uuuguucagcucucauugauua

SEQ ID NO: 187650 - RNA, 22 nt, Human
gcaagcaagcagguagagcuga

SEQ ID NO: 187651 - RNA, 22 nt, Human
uauuccagguuucuuguuguau

SEQ ID NO: 187652 - RNA, 22 nt, Human
cucuccaggagagcacuuugag

SEQ ID NO: 187653 - RNA, 22 nt, Human
uuugacucuuagcccaggacuc

SEQ ID NO: 187654 - RNA, 22 nt, Human
uuccugguuugccuggaaucca

SEQ ID NO: 187655 - RNA, 22 nt, Human
ugagguuauuuauuaugcauga

SEQ ID NO: 187656 - RNA, 22 nt, Human
ccuggcagggcugcaguaaugg

SEQ ID NO: 187657 - RNA, 22 nt, Human
gcagguggaucaccacgucagg

SEQ ID NO: 187658 - RNA, 22 nt, Human
ccacaauuuuaugauuuaggag

SEQ ID NO: 187659 - RNA, 22 nt, Human
ucauuccauuuccagcucugaa

SEQ ID NO: 187660 - RNA, 22 nt, Human
uuggcucagugugagggagaug

SEQ ID NO: 187661 - RNA, 22 nt, Human
cagagaaagggugaauuccuuc

SEQ ID NO: 187662 - RNA, 22 nt, Human
uuuguucugcaucacagaaaaa

SEQ ID NO: 187663 - RNA, 22 nt, Human
gcacugcuuuuaccuaggugag

SEQ ID NO: 187664 - RNA, 22 nt, Human
uguacaguguaaauaaguggau

SEQ ID NO: 187665 - RNA, 22 nt, Human
aaguuuuucacauugcuguugu

SEQ ID NO: 187666 - RNA, 23 nt, Human
auguuauuauuagcagucuugcc

SEQ ID NO: 187667 - RNA, 22 nt, Human
auugaggcagcauaguucaggg

SEQ ID NO: 187668 - RNA, 22 nt, Human
cgcaacucagcaacuuaacugc

SEQ ID NO: 187669 - RNA, 22 nt, Human
agaguuauauugguugagaauu

SEQ ID NO: 187670 - RNA, 22 nt, Human
ggccaccaguccucuggcaggg

SEQ ID NO: 187671 - RNA, 22 nt, Human
auucuucaucagagaugcacua

SEQ ID NO: 187672 - RNA, 22 nt, Human
aucuagaacuuaaagucaguca

SEQ ID NO: 187673 - RNA, 22 nt, Human
aauaucagcacuuuugugguau

SEQ ID NO: 187674 - RNA, 22 nt, Human
uggcaguugugagguucauauu

SEQ ID NO: 187675 - RNA, 22 nt, Human
aagccaaggccugucuggggcu

SEQ ID NO: 187676 - RNA, 22 nt, Human
gcagagugaagggagaggugug

SEQ ID NO: 187677 - RNA, 22 nt, Human
ugcuucaggagaugucaccaug

SEQ ID NO: 187678 - RNA, 21 nt, Human
gguggcucaccugauuggaua

SEQ ID NO: 187679 - RNA, 22 nt, Human
gcagaauacauuugggauuacu

SEQ ID NO: 187680 - RNA, 22 nt, Human
uacaguuuguauggucaggaau

SEQ ID NO: 187681 - RNA, 22 nt, Human
uucucaggcucugagacccuau

SEQ ID NO: 187682 - RNA, 22 nt, Human
guuucuuuugugaucaccaacc

SEQ ID NO: 187683 - RNA, 22 nt, Human
uuucuguuuagcauaaaguggc

SEQ ID NO: 187684 - RNA, 16 nt, Human
ucccugggaguggugg

SEQ ID NO: 187685 - RNA, 22 nt, Human
agcuggaggaguuucuccuagc

SEQ ID NO: 187686 - RNA, 19 nt, Human
uuuuguguagcugcugguu

SEQ ID NO: 187687 - RNA, 22 nt, Human
agcugguccuuggcaguucuca

SEQ ID NO: 187688 - RNA, 22 nt, Human
cugaauauuagucaugucugau

SEQ ID NO: 187689 - RNA, 22 nt, Human
acaguucccgucuugcacagcu

SEQ ID NO: 187690 - RNA, 22 nt, Human
auuuccaagguaauuuugagua

SEQ ID NO: 187691 - RNA, 17 nt, Human
uggccaggccccgccag

SEQ ID NO: 187692 - RNA, 22 nt, Human
caagaggagcaggcaggugugc

SEQ ID NO: 187693 - RNA, 22 nt, Human
uuccugagggccccagaggagg

SEQ ID NO: 187694 - RNA, 22 nt, Human
ccugcacccaggccgcaccucu

SEQ ID NO: 187695 - RNA, 22 nt, Human
acuccuggguugcaguccucaa

SEQ ID NO: 187696 - RNA, 22 nt, Human
aggcagcuuuguaguaaagcua

SEQ ID NO: 187697 - RNA, 21 nt, Human
caauuacuaugaaccaguuga

SEQ ID NO: 187698 - RNA, 22 nt, Human
uaggacagaguucccugauggc

SEQ ID NO: 187699 - RNA, 22 nt, Human
gcagugcuugcucaggcuucau

SEQ ID NO: 187700 - RNA, 22 nt, Human
ucuuucccuuagaacauuaaca

SEQ ID NO: 187701 - RNA, 22 nt, Human
agggaagcuuguuacugagaag

SEQ ID NO: 187702 - RNA, 20 nt, Human
gcacugaaauucaauguuug

SEQ ID NO: 187703 - RNA, 22 nt, Human
guccacccaugacaccugccug

SEQ ID NO: 187704 - RNA, 22 nt, Human
ccugcaggcugcaggccaguuc

SEQ ID NO: 187705 - RNA, 23 nt, Human
cagaugagguuggcagcaugguc

SEQ ID NO: 187706 - RNA, 22 nt, Human
uaggcugcucaccaggcucaga

SEQ ID NO: 187707 - RNA, 22 nt, Human
uggagcucagcgggugguuucu

SEQ ID NO: 187708 - RNA, 22 nt, Human
agggcagcccuucugggagggc

SEQ ID NO: 187709 - RNA, 22 nt, Human
gccuggcaggggccugggagug

SEQ ID NO: 187710 - RNA, 22 nt, Human
cagggcucaggcucugggauuc

SEQ ID NO: 187711 - RNA, 22 nt, Human
augcacaagaggcuagaaaaga

SEQ ID NO: 187712 - RNA, 22 nt, Human
ccucucagccggacugucaggc

SEQ ID NO: 187713 - RNA, 22 nt, Human
uugauagguuuuauguauaguu

SEQ ID NO: 187714 - RNA, 22 nt, Human
agcucccagcagagcuggccac

SEQ ID NO: 187715 - RNA, 22 nt, Human
ucuggggaugagguccagugau

SEQ ID NO: 187716 - RNA, 22 nt, Human
auggaugaguccuugagacaca

SEQ ID NO: 187717 - RNA, 22 nt, Human
uucauucccuuauauuagcauu

SEQ ID NO: 187718 - RNA, 22 nt, Human
augaggcagucuggccugaggg

SEQ ID NO: 187719 - RNA, 22 nt, Human
ucacagaagagcauuaagauga

SEQ ID NO: 187720 - RNA, 22 nt, Human
agcugggucuugggccaggaga

SEQ ID NO: 187721 - RNA, 22 nt, Human
aaccagagugacacucuacaga

SEQ ID NO: 187722 - RNA, 22 nt, Human
cagugguuuccaaacuuguucc

SEQ ID NO: 187723 - RNA, 22 nt, Human
auacuuuuaauuccuucugagu

SEQ ID NO: 187724 - RNA, 22 nt, Human
uaagaugggggaaagaaauagu

SEQ ID NO: 187725 - RNA, 22 nt, Human
agcaguccuucuuuagagagcc

SEQ ID NO: 187726 - RNA, 22 nt, Human
gucaggaaaacccggguugacu

SEQ ID NO: 187727 - RNA, 18 nt, Human
uggcaggaaaugcacuuu

SEQ ID NO: 187728 - RNA, 22 nt, Human
ccuggcucuggggcggacagcu

SEQ ID NO: 187729 - RNA, 22 nt, Human
ucccugcugcacucacaccuac

SEQ ID NO: 187730 - RNA, 22 nt, Human
gagcuuaaauggcuaaauauaa

SEQ ID NO: 187731 - RNA, 22 nt, Human
uccuggcauuuacaaacccacc

SEQ ID NO: 187732 - RNA, 22 nt, Human
augcagaaugaguucacgaucu

SEQ ID NO: 187733 - RNA, 22 nt, Human
acauugauauuucaaauacagg

SEQ ID NO: 187734 - RNA, 22 nt, Human
guucuuuaaguggagaaggaaa

SEQ ID NO: 187735 - RNA, 22 nt, Human
gucuccuguccugcaggaugga

SEQ ID NO: 187736 - RNA, 22 nt, Human
cagaagugaaugugauaaacca

SEQ ID NO: 187737 - RNA, 22 nt, Human
uaggcugacuuguuucauaaag

SEQ ID NO: 187738 - RNA, 22 nt, Human
cuuuaauucagauuugaaggga

SEQ ID NO: 187739 - RNA, 19 nt, Human
aagcuacagcccaggucug

SEQ ID NO: 187740 - RNA, 22 nt, Human
caggaaacugugggcuuaaauc

SEQ ID NO: 187741 - RNA, 22 nt, Human
aaaagccuggauacuaucauua

SEQ ID NO: 187742 - RNA, 22 nt, Human
ucccagcaggaguccaguuccc

SEQ ID NO: 187743 - RNA, 22 nt, Human
uggcucccacaaacucacuacu

SEQ ID NO: 187744 - RNA, 22 nt, Human
agccucugaugaucacaggggg

SEQ ID NO: 187745 - RNA, 22 nt, Human
ucagagcaacuuuuccugcuuu

SEQ ID NO: 187746 - RNA, 22 nt, Human
cugaggugagaggaggccaugu

SEQ ID NO: 187747 - RNA, 22 nt, Human
uuuucuuuaaucugguggggug

SEQ ID NO: 187748 - RNA, 22 nt, Human
caguuuuauacacugcagcucc

SEQ ID NO: 187749 - RNA, 22 nt, Human
acaugcaaaaauauauuuauga

SEQ ID NO: 187750 - RNA, 22 nt, Human
ugcuguaauacuuaagguuaag

SEQ ID NO: 187751 - RNA, 22 nt, Human
ucacaucuugugauguuuucau

SEQ ID NO: 187752 - RNA, 22 nt, Human
ugguaaaauauuacaaggcacu

SEQ ID NO: 187753 - RNA, 22 nt, Human
cugggcccuauggaagaaaggg

SEQ ID NO: 187754 - RNA, 22 nt, Human
gacugagguauuaagauggcuu

SEQ ID NO: 187755 - RNA, 22 nt, Human
acacaguugguggcucagucug

SEQ ID NO: 187756 - RNA, 19 nt, Human
agcuggcucuucuuugucu

SEQ ID NO: 187757 - RNA, 22 nt, Human
uuugacauuaaggaacauauau

SEQ ID NO: 187758 - RNA, 22 nt, Human
gaauuagacaugcuuugcuuuu

SEQ ID NO: 187759 - RNA, 22 nt, Human
aggaaugucugagaaagaggca

SEQ ID NO: 187760 - RNA, 22 nt, Human
caagcugcuuauucucugcucu

SEQ ID NO: 187761 - RNA, 22 nt, Human
uuagggaagcauggaggagaug

SEQ ID NO: 187762 - RNA, 20 nt, Human
cuggaguguagcaguggcug

SEQ ID NO: 187763 - RNA, 21 nt, Human
gcugugcagaggauggagugg

SEQ ID NO: 187764 - RNA, 20 nt, Human
uuucugcagauguuuacaug

SEQ ID NO: 187765 - RNA, 18 nt, Human
cccagaggaaugccugga

SEQ ID NO: 187766 - RNA, 22 nt, Human
agagcuggccagggaucacucu

SEQ ID NO: 187767 - RNA, 22 nt, Human
agacagguguuuuacaacuucg

SEQ ID NO: 187768 - RNA, 22 nt, Human
cuguccugguacuuugagguuc

SEQ ID NO: 187769 - RNA, 16 nt, Human
uggcugagagaggguu

SEQ ID NO: 187770 - RNA, 22 nt, Human
gggagcugcugaacacaagggu

SEQ ID NO: 187771 - RNA, 22 nt, Human
aaacagguagcccuagccuucu

SEQ ID NO: 187772 - RNA, 22 nt, Human
caguuucuuggaugccaauuuc

SEQ ID NO: 187773 - RNA, 22 nt, Human
ggcaggcuccagagcccucucc

SEQ ID NO: 187774 - RNA, 22 nt, Human
aacaucacaauuucauuuaugc

SEQ ID NO: 187775 - RNA, 22 nt, Human
uggggugggguuacucauucug

SEQ ID NO: 187776 - RNA, 22 nt, Human
cagcuccagcccaggcagcucc

SEQ ID NO: 187777 - RNA, 22 nt, Human
cuggcugcgucugcucugacag

SEQ ID NO: 187778 - RNA, 22 nt, Human
acagggugacuuugugacagau

SEQ ID NO: 187779 - RNA, 22 nt, Human
uaccaggaauggggucaccguc

SEQ ID NO: 187780 - RNA, 22 nt, Human
gagggggacguauccugguaug

SEQ ID NO: 187781 - RNA, 22 nt, Human
ucugucauccaggcuggaauau

SEQ ID NO: 187782 - RNA, 22 nt, Human
ccaggcacgguggcucaugccu

SEQ ID NO: 187783 - RNA, 22 nt, Human
acauuuugagaaaugacaagcu

SEQ ID NO: 187784 - RNA, 22 nt, Human
aagagacaagaauuccaacgcu

SEQ ID NO: 187785 - RNA, 23 nt, Human
ugaaauauucuuuugcaugagcu

SEQ ID NO: 187786 - RNA, 22 nt, Human
uauucauaguaaacaaaagugg

SEQ ID NO: 187787 - RNA, 22 nt, Human
ucuccacauucuauuggcuaua

SEQ ID NO: 187788 - RNA, 22 nt, Human
aaagaacaaauuagcuguuuua

SEQ ID NO: 187789 - RNA, 22 nt, Human
uggcagccucagacaaggaccu

SEQ ID NO: 187790 - RNA, 22 nt, Human
ccucuccagcggccucagggcc

SEQ ID NO: 187791 - RNA, 22 nt, Human
cagccccuuguccgguagccac

SEQ ID NO: 187792 - RNA, 22 nt, Human
gaugaugaggccaugaggcagg

SEQ ID NO: 187793 - RNA, 22 nt, Human
gaccuagauuaacauucuguga

SEQ ID NO: 187794 - RNA, 22 nt, Human
ucagugucccgucucuuaacuc

SEQ ID NO: 187795 - RNA, 22 nt, Human
acaaaaagcuccauuacugucc

SEQ ID NO: 187796 - RNA, 22 nt, Human
aggaggaaggcuucauuagguu

SEQ ID NO: 187797 - RNA, 22 nt, Human
auaugcauuuaccuggcauaua

SEQ ID NO: 187798 - RNA, 22 nt, Human
cuguuuauucucaucuaaaaug

SEQ ID NO: 187799 - RNA, 20 nt, Human
ucagagaagggacugagauu

SEQ ID NO: 187800 - RNA, 22 nt, Human
cacuugaaaaucagaggaaauu

SEQ ID NO: 187801 - RNA, 22 nt, Human
gcagugauuggaucagagaugg

SEQ ID NO: 187802 - RNA, 22 nt, Human
gagaggaagccuucuguacuug

SEQ ID NO: 187803 - RNA, 17 nt, Human
acacagccagguucucc

SEQ ID NO: 187804 - RNA, 22 nt, Human
ccuggaagucauuccucguucc

SEQ ID NO: 187805 - RNA, 22 nt, Human
gccaggaccucagaugcagggc

SEQ ID NO: 187806 - RNA, 22 nt, Human
aaaaacuguaauuacuuuugca

SEQ ID NO: 187807 - RNA, 22 nt, Human
gaaauguuuuacaaggcauacu

SEQ ID NO: 187808 - RNA, 22 nt, Human
uacaucauguaagcagaaucau

SEQ ID NO: 187809 - RNA, 22 nt, Human
acauguguaaggucucucaguc

SEQ ID NO: 187810 - RNA, 22 nt, Human
ugcuuagacgucaaguacagcc

SEQ ID NO: 187811 - RNA, 22 nt, Human
uauuuugcguugagucagauuu

SEQ ID NO: 187812 - RNA, 22 nt, Human
uucccaugccuggccccuaucc

SEQ ID NO: 187813 - RNA, 22 nt, Human
uaucagaaaucaacacacagug

SEQ ID NO: 187814 - RNA, 22 nt, Human
gaacaguauuuccaggaauccc

SEQ ID NO: 187815 - RNA, 22 nt, Human
uaucagcaggccaaagcugcaa

SEQ ID NO: 187816 - RNA, 19 nt, Human
uggcuucuggcaacagaug

SEQ ID NO: 187817 - RNA, 22 nt, Human
uugugugguagcuucauugaac

SEQ ID NO: 187818 - RNA, 22 nt, Human
cagcugugcugauugcucagua

SEQ ID NO: 187819 - RNA, 17 nt, Human
ggcaggugcggggccgc

SEQ ID NO: 187820 - RNA, 22 nt, Human
cccagccucagcuuuacuucca

SEQ ID NO: 187821 - RNA, 22 nt, Human
aaaggauuaaauaaaugugcug

SEQ ID NO: 187822 - RNA, 20 nt, Human
aguaacuuagcaacucuagg

SEQ ID NO: 187823 - RNA, 22 nt, Human
cuguacagaguucugaguguac

SEQ ID NO: 187824 - RNA, 22 nt, Human
ugguggggccagacuucagcuc

SEQ ID NO: 187825 - RNA, 22 nt, Human
gcuccuguccuuagccccagag

SEQ ID NO: 187826 - RNA, 22 nt, Human
accuaaauucuggcugauuagg

SEQ ID NO: 187827 - RNA, 22 nt, Human
uucauugagcuguacacuuagg

SEQ ID NO: 187828 - RNA, 22 nt, Human
uugguaaauguugauuguggcu

SEQ ID NO: 187829 - RNA, 21 nt, Human
accaggcuugugggagggagc

SEQ ID NO: 187830 - RNA, 22 nt, Human
gaaaggcuucuuaagcuucacu

SEQ ID NO: 187831 - RNA, 22 nt, Human
ugucugucugcacagcucaugg

SEQ ID NO: 187832 - RNA, 22 nt, Human
uucagaaguagcuaagcaguca

SEQ ID NO: 187833 - RNA, 22 nt, Human
acaaagugugcggagcccaggg

SEQ ID NO: 187834 - RNA, 22 nt, Human
ugacugaaauggcgacagugaa

SEQ ID NO: 187835 - RNA, 20 nt, Human
agccaagaacaggcagaacc

SEQ ID NO: 187836 - RNA, 22 nt, Human
guggcacagugggagagcccca

SEQ ID NO: 187837 - RNA, 22 nt, Human
gccagcugggccuuagggcugg

SEQ ID NO: 187838 - RNA, 22 nt, Human
ucugcaugaugaacaaaugagc

SEQ ID NO: 187839 - RNA, 22 nt, Human
uuguacagguuccuagggugga

SEQ ID NO: 187840 - RNA, 22 nt, Human
uuuauuggaacacagccaugac

SEQ ID NO: 187841 - RNA, 22 nt, Human
uuuggccucaugaauuucuugc

SEQ ID NO: 187842 - RNA, 22 nt, Human
ucuuucuugguauucugagcua

SEQ ID NO: 187843 - RNA, 22 nt, Human
uucuucuaaaugugcuuauuaa

SEQ ID NO: 187844 - RNA, 22 nt, Human
uauuucuucgggauucaagcua

SEQ ID NO: 187845 - RNA, 22 nt, Human
gccagccaguuugcugauggcu

SEQ ID NO: 187846 - RNA, 22 nt, Human
ugaggcagcccacuuuccuuag

SEQ ID NO: 187847 - RNA, 22 nt, Human
uacuuucaguuucagcugaagu

SEQ ID NO: 187848 - RNA, 22 nt, Human
gcagugcuaaguagcuggccca

SEQ ID NO: 187849 - RNA, 22 nt, Human
auagacauauggcuuuguuucu

SEQ ID NO: 187850 - RNA, 22 nt, Human
uagucaguagcaagguauuuug

SEQ ID NO: 187851 - RNA, 22 nt, Human
aaggaagcagcaaugcaugauu

SEQ ID NO: 187852 - RNA, 20 nt, Human
gagggcucguggauggauaa

SEQ ID NO: 187853 - RNA, 22 nt, Human
gggggcaggucuggaacuuuga

SEQ ID NO: 187854 - RNA, 22 nt, Human
ccaggcuagagugcaauggcgc

SEQ ID NO: 187855 - RNA, 22 nt, Human
cuggcuggucugagcagucgca

SEQ ID NO: 187856 - RNA, 22 nt, Human
uugaaaauaucacaggagcagc

SEQ ID NO: 187857 - RNA, 22 nt, Human
uucccucccccagccuggcagg

SEQ ID NO: 187858 - RNA, 22 nt, Human
uguugaagauaaaguucucauu

SEQ ID NO: 187859 - RNA, 22 nt, Human
auuccucagcaggccuuuuguu

SEQ ID NO: 187860 - RNA, 22 nt, Human
augucuuucuaguuaagagcua

SEQ ID NO: 187861 - RNA, 22 nt, Human
cacacuguugaggacgagaugu

SEQ ID NO: 187862 - RNA, 22 nt, Human
aaaggccacacagagcagggag

SEQ ID NO: 187863 - RNA, 18 nt, Human
gcucugguuccuucaacc

SEQ ID NO: 187864 - RNA, 22 nt, Human
auguccaagucacagauuuuca

SEQ ID NO: 187865 - RNA, 22 nt, Human
auugugcaaauauuaucuguag

SEQ ID NO: 187866 - RNA, 22 nt, Human
uuaauuuuaaccuguuuguguc

SEQ ID NO: 187867 - RNA, 22 nt, Human
uguguccuuucuaaugcccaga

SEQ ID NO: 187868 - RNA, 19 nt, Human
gccaggagggcucuggcug

SEQ ID NO: 187869 - RNA, 22 nt, Human
ucugaggcagcuugccacucua

SEQ ID NO: 187870 - RNA, 22 nt, Human
aaguuucugccauacuguggug

SEQ ID NO: 187871 - RNA, 22 nt, Human
ugcuggaacucagugaaucauu

SEQ ID NO: 187872 - RNA, 22 nt, Human
caguuuuaaauuguuagauaau

SEQ ID NO: 187873 - RNA, 17 nt, Human
aggggagagugggaaga

SEQ ID NO: 187874 - RNA, 22 nt, Human
gcuguucacggaggaggauggg

SEQ ID NO: 187875 - RNA, 22 nt, Human
aggaaauguaguccucaucucc

SEQ ID NO: 187876 - RNA, 20 nt, Human
cuccugguccaggagccuga

SEQ ID NO: 187877 - RNA, 22 nt, Human
cugcauuagucaugcuuugcag

SEQ ID NO: 187878 - RNA, 22 nt, Human
auuauuaaagcuuaggucuuau

SEQ ID NO: 187879 - RNA, 22 nt, Human
gugagucuguggaccgggcacu

SEQ ID NO: 187880 - RNA, 22 nt, Human
agcugccagcaucccggaaggg

SEQ ID NO: 187881 - RNA, 22 nt, Human
gaaagugcuuagagugugguau

SEQ ID NO: 187882 - RNA, 22 nt, Human
ggcuagggagacagagggcaug

SEQ ID NO: 187883 - RNA, 22 nt, Human
aacccgggaggcagagguugug

SEQ ID NO: 187884 - RNA, 22 nt, Human
ccaucuccaaauaccaucacau

SEQ ID NO: 187885 - RNA, 22 nt, Human
guaaaauucuagcaucugaaag

SEQ ID NO: 187886 - RNA, 22 nt, Human
aaccaaagaaaacuguggugag

SEQ ID NO: 187887 - RNA, 22 nt, Human
cuggaggaauaauggcaucuug

SEQ ID NO: 187888 - RNA, 22 nt, Human
cuuggcauguucaucugcuugg

SEQ ID NO: 187889 - RNA, 22 nt, Human
aagucucugguugcuugcaugg

SEQ ID NO: 187890 - RNA, 16 nt, Human
cuacccagugagaagg

SEQ ID NO: 187891 - RNA, 22 nt, Human
gagucaggaguccugugugaga

SEQ ID NO: 187892 - RNA, 22 nt, Human
uauugguagauggagagagaca

SEQ ID NO: 187893 - RNA, 22 nt, Human
gcccagucucuucuggcccugu

SEQ ID NO: 187894 - RNA, 22 nt, Human
uagaaucugauggcccgucugg

SEQ ID NO: 187895 - RNA, 22 nt, Human
uagaagauucauuuccucugaa

SEQ ID NO: 187896 - RNA, 22 nt, Human
cuacccuugccugccaggugac

SEQ ID NO: 187897 - RNA, 22 nt, Human
uuacagagccucauuuuagaga

SEQ ID NO: 187898 - RNA, 22 nt, Human
ugauuuacuucccagcuggguu

SEQ ID NO: 187899 - RNA, 23 nt, Human
aagguauuuauuuuaaagguaag

SEQ ID NO: 187900 - RNA, 22 nt, Human
cacuggaauauggcguugaacc

SEQ ID NO: 187901 - RNA, 22 nt, Human
aaguaaaauucaaucuucacug

SEQ ID NO: 187902 - RNA, 22 nt, Human
gcugccucugcgacucugggcg

SEQ ID NO: 187903 - RNA, 22 nt, Human
gggcagucacagugcuggagca

SEQ ID NO: 187904 - RNA, 22 nt, Human
uuuggagagcagcuaggcccuu

SEQ ID NO: 187905 - RNA, 22 nt, Human
acacacaauuaguuuuaugcuu

SEQ ID NO: 187906 - RNA, 22 nt, Human
ccugaggcccuggcugugcuga

SEQ ID NO: 187907 - RNA, 22 nt, Human
cuauuuuaagaggccauuaggu

SEQ ID NO: 187908 - RNA, 22 nt, Human
ucuacauuuuaacaagaugccc

SEQ ID NO: 187909 - RNA, 22 nt, Human
ccucagaguuauuugaagugaa

SEQ ID NO: 187910 - RNA, 22 nt, Human
uaaacagccuaaaacuuucuuu

SEQ ID NO: 187911 - RNA, 22 nt, Human
caucacagaaauaaacauaccu

SEQ ID NO: 187912 - RNA, 22 nt, Human
acaauagaguucucauaggaca

SEQ ID NO: 187913 - RNA, 22 nt, Human
uauuaaguaucuugaugacaaa

SEQ ID NO: 187914 - RNA, 22 nt, Human
ucugcaggacugaggccuguuu

SEQ ID NO: 187915 - RNA, 22 nt, Human
gccagacacuccccugggcagg

SEQ ID NO: 187916 - RNA, 19 nt, Human
ugggaguggggaagguccu

SEQ ID NO: 187917 - RNA, 22 nt, Human
aagugccccaggcuguuaacau

SEQ ID NO: 187918 - RNA, 23 nt, Human
uacuacagggucuugcuaugaau

SEQ ID NO: 187919 - RNA, 22 nt, Human
cagcuuuccccgugccucagcc

SEQ ID NO: 187920 - RNA, 22 nt, Human
uuucacaugguacugccuguuu

SEQ ID NO: 187921 - RNA, 22 nt, Human
ggaggucaaauggagggcuggg

SEQ ID NO: 187922 - RNA, 22 nt, Human
gucuggcucaguccuagcugua

SEQ ID NO: 187923 - RNA, 22 nt, Human
cuccugugcaccuccagcggca

SEQ ID NO: 187924 - RNA, 22 nt, Human
ggcucaggggccaggccugucc

SEQ ID NO: 187925 - RNA, 22 nt, Human
aguguucucagcuacuagagag

SEQ ID NO: 187926 - RNA, 22 nt, Human
accagcaagauuuugcuuugca

SEQ ID NO: 187927 - RNA, 22 nt, Human
ugccuggcaaugccagaagcca

SEQ ID NO: 187928 - RNA, 22 nt, Human
cagguuuacaaaguaaagugug

SEQ ID NO: 187929 - RNA, 22 nt, Human
uccagaccauggauggcugcaa

SEQ ID NO: 187930 - RNA, 22 nt, Human
cauuugugcuuuuauaaaauag

SEQ ID NO: 187931 - RNA, 22 nt, Human
ccuacauucucugaguuuuccu

SEQ ID NO: 187932 - RNA, 22 nt, Human
cauucaaaggcauguccuauuu

SEQ ID NO: 187933 - RNA, 22 nt, Human
cucagauaaucuuugagucuuc

SEQ ID NO: 187934 - RNA, 21 nt, Human
ugcaggcaggcagagaugcug

SEQ ID NO: 187935 - RNA, 18 nt, Human
ggacccagggccucaccc

SEQ ID NO: 187936 - RNA, 20 nt, Human
aggaaaaggguggugguaga

SEQ ID NO: 187937 - RNA, 22 nt, Human
acagcuuugggcaaugcuauga

SEQ ID NO: 187938 - RNA, 22 nt, Human
agagcagcucgcuaccucucua

SEQ ID NO: 187939 - RNA, 22 nt, Human
agccacaggccaugagauacca

SEQ ID NO: 187940 - RNA, 21 nt, Human
ucacuagugccuucugucauu

SEQ ID NO: 187941 - RNA, 18 nt, Human
gccugcucugcucucccc

SEQ ID NO: 187942 - RNA, 22 nt, Human
aacuucugaccucaagaacugu

SEQ ID NO: 187943 - RNA, 22 nt, Human
gaauuguauugauuuuucagag

SEQ ID NO: 187944 - RNA, 22 nt, Human
gaggaguggaguugcuggguug

SEQ ID NO: 187945 - RNA, 22 nt, Human
uucuggaaguuggaaauagcag

SEQ ID NO: 187946 - RNA, 22 nt, Human
cgccugcucucacuggacagcu

SEQ ID NO: 187947 - RNA, 17 nt, Human
gagccacccugugcgag

SEQ ID NO: 187948 - RNA, 22 nt, Human
ccagaggagggcucugaugagg

SEQ ID NO: 187949 - RNA, 22 nt, Human
auguucuuguucaaaugucagu

SEQ ID NO: 187950 - RNA, 22 nt, Human
ucaaaggaauuugauuuugaug

SEQ ID NO: 187951 - RNA, 22 nt, Human
agaggagugggaagcagugcaa

SEQ ID NO: 187952 - RNA, 21 nt, Human
agacaugugaacuaaagguga

SEQ ID NO: 187953 - RNA, 22 nt, Human
uuuccucacucaugucaucagu

SEQ ID NO: 187954 - RNA, 18 nt, Human
aauuucuuugacaacuua

SEQ ID NO: 187955 - RNA, 22 nt, Human
aaggagcucccggcagaccagg

SEQ ID NO: 187956 - RNA, 22 nt, Human
caagacuuagagcaucuugaaa

SEQ ID NO: 187957 - RNA, 22 nt, Human
uguuaacagguaacugaggcug

SEQ ID NO: 187958 - RNA, 22 nt, Human
gccuccugagaagccacaggcu

SEQ ID NO: 187959 - RNA, 20 nt, Human
ucccaagggcugagaggauc

SEQ ID NO: 187960 - RNA, 22 nt, Human
auucuucacaaauauauagaag

SEQ ID NO: 187961 - RNA, 22 nt, Human
cuucacagucuuuauuuccucc

SEQ ID NO: 187962 - RNA, 22 nt, Human
ugagcaguaacagcucacaggg

SEQ ID NO: 187963 - RNA, 23 nt, Human
ccucccaggcugcgagucccgag

SEQ ID NO: 187964 - RNA, 22 nt, Human
aacagagcugaccagugagggc

SEQ ID NO: 187965 - RNA, 22 nt, Human
ugaggcuccagccaggccagca

SEQ ID NO: 187966 - RNA, 22 nt, Human
gccuuggaaagcuggagcaguu

SEQ ID NO: 187967 - RNA, 17 nt, Human
aggaagggcaaguuucu

SEQ ID NO: 187968 - RNA, 22 nt, Human
uuacaguuguucuaucagcaug

SEQ ID NO: 187969 - RNA, 23 nt, Human
ugccagcagggaaugggaaggac

SEQ ID NO: 187970 - RNA, 22 nt, Human
gcgagugccgagagggcagggc

SEQ ID NO: 187971 - RNA, 22 nt, Human
aucuagguuuggaagauagagu

SEQ ID NO: 187972 - RNA, 22 nt, Human
ugaggacauuaggaagugaagg

SEQ ID NO: 187973 - RNA, 16 nt, Human
aauugcuucuugcugc

SEQ ID NO: 187974 - RNA, 22 nt, Human
ugguuuaccccuguccuauauc

SEQ ID NO: 187975 - RNA, 20 nt, Human
ccucugccuuucuagucuga

SEQ ID NO: 187976 - RNA, 22 nt, Human
uuaggaaucaccugcagaucuu

SEQ ID NO: 187977 - RNA, 22 nt, Human
aaagcugcccagcugccuguuu

SEQ ID NO: 187978 - RNA, 22 nt, Human
augcauauugucauuuaguccu

SEQ ID NO: 187979 - RNA, 22 nt, Human
aagaguuuucucugauggcauu

SEQ ID NO: 187980 - RNA, 22 nt, Human
cuugaaauccagauuucagagg

SEQ ID NO: 187981 - RNA, 22 nt, Human
agguccugaugaucucugagag

SEQ ID NO: 187982 - RNA, 22 nt, Human
cucagagggaggacugggcugg

SEQ ID NO: 187983 - RNA, 22 nt, Human
uauugcugcuauugucaguuca

SEQ ID NO: 187984 - RNA, 22 nt, Human
cuggggaaggcggugacugcgc

SEQ ID NO: 187985 - RNA, 23 nt, Human
agggccucugucccccagcacuc

SEQ ID NO: 187986 - RNA, 22 nt, Human
uggguccugucuccuuguucug

SEQ ID NO: 187987 - RNA, 22 nt, Human
agcaucugugauauuuuguuau

SEQ ID NO: 187988 - RNA, 22 nt, Human
gcucuagcccauuuccugcuug

SEQ ID NO: 187989 - RNA, 22 nt, Human
caugugucuuuauggagccaca

SEQ ID NO: 187990 - RNA, 22 nt, Human
gaauuacaugacccugaguaga

SEQ ID NO: 187991 - RNA, 22 nt, Human
aaggcaguaggaucuuccacag

SEQ ID NO: 187992 - RNA, 22 nt, Human
cacugguacguagguuggggca

SEQ ID NO: 187993 - RNA, 22 nt, Human
ugccacccuggcggcagccugc

SEQ ID NO: 187994 - RNA, 22 nt, Human
guuuaauucccacaccugcccu

SEQ ID NO: 187995 - RNA, 22 nt, Human
aggcuucuccuuccuaccuucc

SEQ ID NO: 187996 - RNA, 22 nt, Human
cagcacuuuagcggaggcauca

SEQ ID NO: 187997 - RNA, 22 nt, Human
uucagcaaauggcuugagauaa

SEQ ID NO: 187998 - RNA, 22 nt, Human
cuaggcagacugagcucuaggg

SEQ ID NO: 187999 - RNA, 22 nt, Human
uauguucaucuggugcaucagu

SEQ ID NO: 188000 - RNA, 22 nt, Human
uuagaaacuuuggaggauagau

SEQ ID NO: 188001 - RNA, 22 nt, Human
gaaaaugugucaucccuacugu

SEQ ID NO: 188002 - RNA, 22 nt, Human
aggugacugguuuaucuggcag

SEQ ID NO: 188003 - RNA, 22 nt, Human
uacaggcuagggagagugacug

SEQ ID NO: 188004 - RNA, 22 nt, Human
cagagacauucuccccauugga

SEQ ID NO: 188005 - RNA, 22 nt, Human
ugccuaguaggguuguuguagg

SEQ ID NO: 188006 - RNA, 22 nt, Human
ggaaggaagugcagacuuuaaa

SEQ ID NO: 188007 - RNA, 22 nt, Human
uauuucuuuucgugacuuauug

SEQ ID NO: 188008 - RNA, 22 nt, Human
guggccuggcuggcaccaccuc

SEQ ID NO: 188009 - RNA, 22 nt, Human
cuuaauaaaugguagcuguuau

SEQ ID NO: 188010 - RNA, 22 nt, Human
agaguuuggugaagcaauuuga

SEQ ID NO: 188011 - RNA, 22 nt, Human
ggcaggcucagcagccaaggag

SEQ ID NO: 188012 - RNA, 22 nt, Human
uugagacacaaggcacaguaag

SEQ ID NO: 188013 - RNA, 22 nt, Human
uccuucuccuccuugagugaca

SEQ ID NO: 188014 - RNA, 22 nt, Human
gaccacagguaugggcuuggca

SEQ ID NO: 188015 - RNA, 22 nt, Human
cucuggucaagcaaagagguuu

SEQ ID NO: 188016 - RNA, 22 nt, Human
aaggcaguuugggccaccaucu

SEQ ID NO: 188017 - RNA, 22 nt, Human
acugucacuccaacugagucgu

SEQ ID NO: 188018 - RNA, 22 nt, Human
ggaaacacaugaucagacaucu

SEQ ID NO: 188019 - RNA, 22 nt, Human
agcuguguguuuccacugagcu

SEQ ID NO: 188020 - RNA, 22 nt, Human
agggccucugagccaguucugg

SEQ ID NO: 188021 - RNA, 21 nt, Human
uuucacaaaaguaugugacaa

SEQ ID NO: 188022 - RNA, 22 nt, Human
cuuuggaggucauagccaagag

SEQ ID NO: 188023 - RNA, 20 nt, Human
uuacucauaggaccacaagc

SEQ ID NO: 188024 - RNA, 22 nt, Human
aggagcuggccacuaggaugca

SEQ ID NO: 188025 - RNA, 22 nt, Human
gguggcagcgucuaucugacau

SEQ ID NO: 188026 - RNA, 22 nt, Human
acuaaaugcauugguaucuauu

SEQ ID NO: 188027 - RNA, 22 nt, Human
uagggcuguuaguaauucucag

SEQ ID NO: 188028 - RNA, 22 nt, Human
agcaacaggaccauggagccca

SEQ ID NO: 188029 - RNA, 20 nt, Human
gcagggcaucuuggccccca

SEQ ID NO: 188030 - RNA, 22 nt, Human
ggagaagggaacugaguuuuug

SEQ ID NO: 188031 - RNA, 22 nt, Human
uugaaaguccuucuugaguuac

SEQ ID NO: 188032 - RNA, 22 nt, Human
gguggcaggcccugagcauccc

SEQ ID NO: 188033 - RNA, 22 nt, Human
gcagugcauuacucacauguuu

SEQ ID NO: 188034 - RNA, 22 nt, Human
cugcagagcaugaggaggucug

SEQ ID NO: 188035 - RNA, 22 nt, Human
cugccaggggccucacaggcca

SEQ ID NO: 188036 - RNA, 22 nt, Human
uuuagugugacaguccccagua

SEQ ID NO: 188037 - RNA, 22 nt, Human
ggucagagggugggcugccugu

SEQ ID NO: 188038 - RNA, 22 nt, Human
augcagaagcagaacuuacaca

SEQ ID NO: 188039 - RNA, 22 nt, Human
ccagagcagauguggccuuggu

SEQ ID NO: 188040 - RNA, 22 nt, Human
ggauagugggagaaugcuaugu

SEQ ID NO: 188041 - RNA, 22 nt, Human
auuacuagauugucaagauuua

SEQ ID NO: 188042 - RNA, 22 nt, Human
ugcaguggaagagguggagauc

SEQ ID NO: 188043 - RNA, 22 nt, Human
uauguagguaaacacagacaua

SEQ ID NO: 188044 - RNA, 22 nt, Human
uugcucaggcuggugugcagug

SEQ ID NO: 188045 - RNA, 21 nt, Human
ucuggcagcaguuuguugagu

SEQ ID NO: 188046 - RNA, 22 nt, Human
cagagcacagagcuugggacaa

SEQ ID NO: 188047 - RNA, 20 nt, Human
gagugggccauggagugaga

SEQ ID NO: 188048 - RNA, 19 nt, Human
ccucucccaugcuuaccuc

SEQ ID NO: 188049 - RNA, 22 nt, Human
aggaggugcguggugauccccu

SEQ ID NO: 188050 - RNA, 18 nt, Human
gagcucugccucccaguc

SEQ ID NO: 188051 - RNA, 22 nt, Human
ugccagugaaacauggaagaau

SEQ ID NO: 188052 - RNA, 22 nt, Human
auagccuugacucacagcucuu

SEQ ID NO: 188053 - RNA, 22 nt, Human
gcccugcucauuucacguguuu

SEQ ID NO: 188054 - RNA, 22 nt, Human
accuguuuacccugggcucccc

SEQ ID NO: 188055 - RNA, 22 nt, Human
ucuggcaggauaucgaagugaa

SEQ ID NO: 188056 - RNA, 21 nt, Human
uacaacagguuuuauuucgau

SEQ ID NO: 188057 - RNA, 22 nt, Human
aucagaagaaauggaugugacu

SEQ ID NO: 188058 - RNA, 21 nt, Human
aggagcucuccaaggacaaag

SEQ ID NO: 188059 - RNA, 22 nt, Human
gcuccaggagcucacagcucgc

SEQ ID NO: 188060 - RNA, 22 nt, Human
ugcuuucuccugucugaaagau

SEQ ID NO: 188061 - RNA, 23 nt, Human
ugguggggucuuggagacagcac

SEQ ID NO: 188062 - RNA, 22 nt, Human
auuugcuucauagaucugugga

SEQ ID NO: 188063 - RNA, 22 nt, Human
uggaggcaugacagugucugga

SEQ ID NO: 188064 - RNA, 19 nt, Human
uucacauuggaagaaguag

SEQ ID NO: 188065 - RNA, 22 nt, Human
acugagcacuugguauauuucc

SEQ ID NO: 188066 - RNA, 22 nt, Human
uccuguggaagacaguguuggg

SEQ ID NO: 188067 - RNA, 22 nt, Human
agggaagaaaauccaucgcugc

SEQ ID NO: 188068 - RNA, 22 nt, Human
ucucauugcacaaugcagagug

SEQ ID NO: 188069 - RNA, 22 nt, Human
gagguggcacugugaggagcac

SEQ ID NO: 188070 - RNA, 17 nt, Human
ucauuucaguaaaucca

SEQ ID NO: 188071 - RNA, 22 nt, Human
uauccauuaggucuauggucaa

SEQ ID NO: 188072 - RNA, 22 nt, Human
guccauggcagagcccuucugc

SEQ ID NO: 188073 - RNA, 22 nt, Human
gauuuauuuuuaaucagcaggg

SEQ ID NO: 188074 - RNA, 22 nt, Human
cagcuggggagagacauggcag

SEQ ID NO: 188075 - RNA, 22 nt, Human
guucugcugugucucagcaggu

SEQ ID NO: 188076 - RNA, 22 nt, Human
gccuggaggggacagucucugg

SEQ ID NO: 188077 - RNA, 22 nt, Human
gaagacaauucuggguggagga

SEQ ID NO: 188078 - RNA, 23 nt, Human
acaugauacacaauuagcaaacc

SEQ ID NO: 188079 - RNA, 22 nt, Human
aaauugcugaccaaguauauuc

SEQ ID NO: 188080 - RNA, 22 nt, Human
uggcuucagagacagaaucuau

SEQ ID NO: 188081 - RNA, 22 nt, Human
cugagcagcaauugcuggccca

SEQ ID NO: 188082 - RNA, 22 nt, Human
aggccacagguggaagccagag

SEQ ID NO: 188083 - RNA, 20 nt, Human
uggguccugcuucuuccuga

SEQ ID NO: 188084 - RNA, 22 nt, Human
uagaaauaaaucugcagcuggg

SEQ ID NO: 188085 - RNA, 22 nt, Human
caggcagccaggggaccugucc

SEQ ID NO: 188086 - RNA, 22 nt, Human
cugggagaggaaccucgagggu

SEQ ID NO: 188087 - RNA, 22 nt, Human
ucaaaacacuauuaccuuuaau

SEQ ID NO: 188088 - RNA, 22 nt, Human
ugaggcagcaauugauuauuca

SEQ ID NO: 188089 - RNA, 22 nt, Human
aacaguuucaguuacugaugag

SEQ ID NO: 188090 - RNA, 22 nt, Human
uccugggaaguggcuggcugag

SEQ ID NO: 188091 - RNA, 22 nt, Human
uccucuguggaccgggcuuugg

SEQ ID NO: 188092 - RNA, 22 nt, Human
gcagaugggagccccaggggag

SEQ ID NO: 188093 - RNA, 22 nt, Human
gaggcugacggcaccaucuucu

SEQ ID NO: 188094 - RNA, 20 nt, Human
gcuggcagaugucuugagau

SEQ ID NO: 188095 - RNA, 22 nt, Human
cagugucuacaguggcuggagg

SEQ ID NO: 188096 - RNA, 22 nt, Human
ucucuguagcagcuuccuuccu

SEQ ID NO: 188097 - RNA, 22 nt, Human
gggagcuggccuacuauuagau

SEQ ID NO: 188098 - RNA, 15 nt, Human
gcccucaggcgacac

SEQ ID NO: 188099 - RNA, 22 nt, Human
gagcugcacuggggguggaaug

SEQ ID NO: 188100 - RNA, 22 nt, Human
aauaauuuccagccaacuggaa

SEQ ID NO: 188101 - RNA, 22 nt, Human
uuacucugaauguuucuacuga

SEQ ID NO: 188102 - RNA, 22 nt, Human
aggcucuggaguuagccaggca

SEQ ID NO: 188103 - RNA, 22 nt, Human
agaucuuuagugaagcuaaauc

SEQ ID NO: 188104 - RNA, 22 nt, Human
gcucagggaguuucacagugua

SEQ ID NO: 188105 - RNA, 22 nt, Human
cucagagagguugaacaacuug

SEQ ID NO: 188106 - RNA, 22 nt, Human
agcugaggccugauuucgccgu

SEQ ID NO: 188107 - RNA, 22 nt, Human
ccucuguaagccuuagucuaga

SEQ ID NO: 188108 - RNA, 22 nt, Human
gccuggacaccgcccuugcaga

SEQ ID NO: 188109 - RNA, 22 nt, Human
agcaccuggauuugauagucag

SEQ ID NO: 188110 - RNA, 22 nt, Human
agacagacagagaauuuaaaua

SEQ ID NO: 188111 - RNA, 22 nt, Human
gcauguguuauuucucuguggg

SEQ ID NO: 188112 - RNA, 22 nt, Human
acucagaggaccaaaaggaaag

SEQ ID NO: 188113 - RNA, 22 nt, Human
gccuggagaauuaaaaggaagg

SEQ ID NO: 188114 - RNA, 22 nt, Human
gcuggcagaagagcugguucaa

SEQ ID NO: 188115 - RNA, 22 nt, Human
uucuaaauuuuggaagaugcag

SEQ ID NO: 188116 - RNA, 22 nt, Human
cugcuguccaggagugcccugu

SEQ ID NO: 188117 - RNA, 22 nt, Human
auguucuuggauguuguguaua

SEQ ID NO: 188118 - RNA, 22 nt, Human
ugccuggcaccccagucugcac

SEQ ID NO: 188119 - RNA, 22 nt, Human
cacagcugcccuacuccaugug

SEQ ID NO: 188120 - RNA, 22 nt, Human
gcugcaggcagaaucucccaau

SEQ ID NO: 188121 - RNA, 22 nt, Human
gcacccagaauaaggacaggac

SEQ ID NO: 188122 - RNA, 22 nt, Human
aaguaacacauguuacuucugc

SEQ ID NO: 188123 - RNA, 22 nt, Human
uugagggagaaagcugaggugu

SEQ ID NO: 188124 - RNA, 22 nt, Human
agcuguguaagucauguaggug

SEQ ID NO: 188125 - RNA, 22 nt, Human
aucucaggugaaacuucuaggu

SEQ ID NO: 188126 - RNA, 22 nt, Human
gcacagccggaccgaggaaaag

SEQ ID NO: 188127 - RNA, 22 nt, Human
aggcuguguuuccccuggagcu

SEQ ID NO: 188128 - RNA, 22 nt, Human
ugccagccagggaagcucaccc

SEQ ID NO: 188129 - RNA, 22 nt, Human
ugaggcaauguccuucauccuu

SEQ ID NO: 188130 - RNA, 22 nt, Human
aaggcuuuuaacuacuguuuua

SEQ ID NO: 188131 - RNA, 22 nt, Human
aaagcagggaugaggcuagagg

SEQ ID NO: 188132 - RNA, 21 nt, Human
uggcagagugcagucuauaca

SEQ ID NO: 188133 - RNA, 22 nt, Human
gagcucccuggagguucagaua

SEQ ID NO: 188134 - RNA, 21 nt, Human
cuggaggcagguggugccagg

SEQ ID NO: 188135 - RNA, 22 nt, Human
aagccaagugcuggccaugggc

SEQ ID NO: 188136 - RNA, 22 nt, Human
uggguggauuaggauaggguau

SEQ ID NO: 188137 - RNA, 22 nt, Human
accagaggcucugccaccucca

SEQ ID NO: 188138 - RNA, 22 nt, Human
gucuuacccacagcaucuagaa

SEQ ID NO: 188139 - RNA, 22 nt, Human
gccaggcuggggggagaugucu

SEQ ID NO: 188140 - RNA, 22 nt, Human
uucugaauccucgaaacauagc

SEQ ID NO: 188141 - RNA, 22 nt, Human
uuguaacagguacuaaauaacu

SEQ ID NO: 188142 - RNA, 22 nt, Human
aggcucugggcucuagauuuug

SEQ ID NO: 188143 - RNA, 22 nt, Human
uaacagaaauauuuccagguga

SEQ ID NO: 188144 - RNA, 22 nt, Human
acauucccaccaacaguguaaa

SEQ ID NO: 188145 - RNA, 22 nt, Human
cugggcuccacucccacagugu

SEQ ID NO: 188146 - RNA, 22 nt, Human
gagcugggccucagaacacagu

SEQ ID NO: 188147 - RNA, 22 nt, Human
acugggcuuauuucuugugaac

SEQ ID NO: 188148 - RNA, 20 nt, Human
ccuccaggcacacccaugug

SEQ ID NO: 188149 - RNA, 22 nt, Human
guugggaaggugaacaugaugc

SEQ ID NO: 188150 - RNA, 22 nt, Human
augggaaguguuagaagauuuu

SEQ ID NO: 188151 - RNA, 20 nt, Human
agucugucaauuuacagugg

SEQ ID NO: 188152 - RNA, 22 nt, Human
uuacauucauugaagugauuca

SEQ ID NO: 188153 - RNA, 22 nt, Human
agucuccacuugacaucagcag

SEQ ID NO: 188154 - RNA, 22 nt, Human
gucauuuuaugggaacagauuu

SEQ ID NO: 188155 - RNA, 22 nt, Human
agcaggucgccgaagauagcuc

SEQ ID NO: 188156 - RNA, 22 nt, Human
gacagcugcucccguuucugcu

SEQ ID NO: 188157 - RNA, 22 nt, Human
uaggcuguaagagagggcagag

SEQ ID NO: 188158 - RNA, 22 nt, Human
gcugccugguuucucagcugca

SEQ ID NO: 188159 - RNA, 22 nt, Human
cagcagagcauuugguaggagg

SEQ ID NO: 188160 - RNA, 22 nt, Human
gggcaggucugggucagccuga

SEQ ID NO: 188161 - RNA, 22 nt, Human
uucugagggaaccuuguucuug

SEQ ID NO: 188162 - RNA, 22 nt, Human
gaggaagggcugccugccgggc

SEQ ID NO: 188163 - RNA, 22 nt, Human
ugggcuccuugggagcaaguga

SEQ ID NO: 188164 - RNA, 22 nt, Human
gauaauuuaagucuugggggcu

SEQ ID NO: 188165 - RNA, 22 nt, Human
uuuguuaauucuuauguuagag

SEQ ID NO: 188166 - RNA, 22 nt, Human
uaaaauguuugcaagagaccag

SEQ ID NO: 188167 - RNA, 22 nt, Human
aggaagccugcaggugacugcu

SEQ ID NO: 188168 - RNA, 23 nt, Human
uuucaaauuacucugcagaugac

SEQ ID NO: 188169 - RNA, 22 nt, Human
uuggcucugauggggaucagga

SEQ ID NO: 188170 - RNA, 17 nt, Human
aaggagcugagagaugg

SEQ ID NO: 188171 - RNA, 22 nt, Human
ucaggcuugucucuagagcaau

SEQ ID NO: 188172 - RNA, 22 nt, Human
auggcuugcagagaaaagaggu

SEQ ID NO: 188173 - RNA, 22 nt, Human
uacacaugcauguacuccagga

SEQ ID NO: 188174 - RNA, 22 nt, Human
ucacagacucaagggcauagga

SEQ ID NO: 188175 - RNA, 22 nt, Human
agcgcuggcuggcgcuccuucc

SEQ ID NO: 188176 - RNA, 22 nt, Human
acaguacaccacuguguacagu

SEQ ID NO: 188177 - RNA, 22 nt, Human
gcaaauguuuuugaguguuuac

SEQ ID NO: 188178 - RNA, 22 nt, Human
ugaggcagggaguuuaauuguc

SEQ ID NO: 188179 - RNA, 22 nt, Human
uggacaaaugauuucuaccuuu

SEQ ID NO: 188180 - RNA, 22 nt, Human
ucaggaaggcuucacacgagug

SEQ ID NO: 188181 - RNA, 22 nt, Human
cuuucuaguugacagcaugcca

SEQ ID NO: 188182 - RNA, 22 nt, Human
uugauacagcagccugugaucc

SEQ ID NO: 188183 - RNA, 22 nt, Human
ucccaaggauaagagagucuga

SEQ ID NO: 188184 - RNA, 22 nt, Human
caacauuauauagccacaugcc

SEQ ID NO: 188185 - RNA, 22 nt, Human
agaugcugucacacacacuguu

SEQ ID NO: 188186 - RNA, 22 nt, Human
agagaaaguaaagauucuaccu

SEQ ID NO: 188187 - RNA, 22 nt, Human
caagaggcaaauugucuagaag

SEQ ID NO: 188188 - RNA, 19 nt, Human
cccagccaggucuugcauc

SEQ ID NO: 188189 - RNA, 22 nt, Human
cuccccaccuucgcggucccug

SEQ ID NO: 188190 - RNA, 21 nt, Human
gugcacaguccugcacacagg

SEQ ID NO: 188191 - RNA, 22 nt, Human
aauuagggaaaacauuugcuuu

SEQ ID NO: 188192 - RNA, 22 nt, Human
acaguacagugcagaggaagau

SEQ ID NO: 188193 - RNA, 22 nt, Human
ugacugugccuguugaaugaau

SEQ ID NO: 188194 - RNA, 23 nt, Human
uguaaaaugggguaguguuacca

SEQ ID NO: 188195 - RNA, 22 nt, Human
auagucuuagaucagauaaagu

SEQ ID NO: 188196 - RNA, 22 nt, Human
ucuauaaauuaugcagucucag

SEQ ID NO: 188197 - RNA, 22 nt, Human
gaaggaggugucaguuggacug

SEQ ID NO: 188198 - RNA, 22 nt, Human
uccccagucccggcggugggug

SEQ ID NO: 188199 - RNA, 22 nt, Human
aggcaagcugcagagaguccuu

SEQ ID NO: 188200 - RNA, 22 nt, Human
ggcacagcccucucuguggaca

SEQ ID NO: 188201 - RNA, 22 nt, Human
guccagccugaagagugggggc

SEQ ID NO: 188202 - RNA, 22 nt, Human
acacaugaaucacugguggaag

SEQ ID NO: 188203 - RNA, 22 nt, Human
ugucucugagaugacucccacc

SEQ ID NO: 188204 - RNA, 22 nt, Human
uaacuguuuuugaaauauaucu

SEQ ID NO: 188205 - RNA, 22 nt, Human
ugucacaugaagccaacauagc

SEQ ID NO: 188206 - RNA, 22 nt, Human
uguuacagaaaguuuaugaaug

SEQ ID NO: 188207 - RNA, 22 nt, Human
ggggaccuggccacccauccuu

SEQ ID NO: 188208 - RNA, 22 nt, Human
ucuauguuagagauacauccua

SEQ ID NO: 188209 - RNA, 22 nt, Human
ccaucagagggcugcucugcaa

SEQ ID NO: 188210 - RNA, 22 nt, Human
ucugugugcccaccugacaccu

SEQ ID NO: 188211 - RNA, 22 nt, Human
gaacugaaacuugguuuaaagc

SEQ ID NO: 188212 - RNA, 22 nt, Human
ugggcaggggcccugcuuccgu

SEQ ID NO: 188213 - RNA, 22 nt, Human
cugagcugguguuucaggguca

SEQ ID NO: 188214 - RNA, 22 nt, Human
auggcagcccacgauggcaaug

SEQ ID NO: 188215 - RNA, 22 nt, Human
aacauucaaguucugguuuaug

SEQ ID NO: 188216 - RNA, 22 nt, Human
auggcagauccacaguuugaag

SEQ ID NO: 188217 - RNA, 22 nt, Human
ucucauugaaaugugacugagu

SEQ ID NO: 188218 - RNA, 22 nt, Human
uugaauuuagauuguauguuga

SEQ ID NO: 188219 - RNA, 22 nt, Human
uccugcaggccuguucccagua

SEQ ID NO: 188220 - RNA, 23 nt, Human
acauaaacagaaggugugcuucc

SEQ ID NO: 188221 - RNA, 22 nt, Human
ugggcagccaucccagccucuc

SEQ ID NO: 188222 - RNA, 22 nt, Human
cauaacauugagcagcauuccu

SEQ ID NO: 188223 - RNA, 18 nt, Human
cuccuccacagccccugc

SEQ ID NO: 188224 - RNA, 22 nt, Human
agugcauguccaguaguuuaug

SEQ ID NO: 188225 - RNA, 22 nt, Human
gcccugagcacacaguagcaaa

SEQ ID NO: 188226 - RNA, 22 nt, Human
aacuagaaccacuuguauuucc

SEQ ID NO: 188227 - RNA, 22 nt, Human
acucuacuguaguaugggcacu

SEQ ID NO: 188228 - RNA, 22 nt, Human
aacucuagugcuccuuggagga

SEQ ID NO: 188229 - RNA, 22 nt, Human
gaauacauguguguauagaggu

SEQ ID NO: 188230 - RNA, 22 nt, Human
cuggagcucagcccagguucca

SEQ ID NO: 188231 - RNA, 22 nt, Human
agccacugucugaacuucugug

SEQ ID NO: 188232 - RNA, 22 nt, Human
agcaggugaugugagucuggaa

SEQ ID NO: 188233 - RNA, 19 nt, Human
ggcauccacgaaugcagag

SEQ ID NO: 188234 - RNA, 22 nt, Human
aucaauaucagaucagacagga

SEQ ID NO: 188235 - RNA, 23 nt, Human
uccaggacccugguagacacaca

SEQ ID NO: 188236 - RNA, 22 nt, Human
ucaguaucaggcuggaauuaag

SEQ ID NO: 188237 - RNA, 22 nt, Human
uuaaaauuauggcccauuugga

SEQ ID NO: 188238 - RNA, 22 nt, Human
gaggagcucaugaaagcggugu

SEQ ID NO: 188239 - RNA, 22 nt, Human
auggcugcaucauccugguuga

SEQ ID NO: 188240 - RNA, 22 nt, Human
ugagucucccagcguuaaaccu

SEQ ID NO: 188241 - RNA, 20 nt, Human
aggugcaaggcauggcaugu

SEQ ID NO: 188242 - RNA, 21 nt, Human
acagaugggaugagcacacug

SEQ ID NO: 188243 - RNA, 22 nt, Human
aggccagaacagcucugcacca

SEQ ID NO: 188244 - RNA, 22 nt, Human
caggacugauguuccuccagcc

SEQ ID NO: 188245 - RNA, 22 nt, Human
agcuacaagucaucagcuauca

SEQ ID NO: 188246 - RNA, 22 nt, Human
agcccagaggcugggcgugcau

SEQ ID NO: 188247 - RNA, 20 nt, Human
guagaaccaugugugcuggg

SEQ ID NO: 188248 - RNA, 22 nt, Human
uuagauaaauugcaacuugauu

SEQ ID NO: 188249 - RNA, 22 nt, Human
aaggcagccauagcaccaucca

SEQ ID NO: 188250 - RNA, 19 nt, Human
gaauguuucugucucuucu

SEQ ID NO: 188251 - RNA, 22 nt, Human
cacagauaaggauguuaauuuu

SEQ ID NO: 188252 - RNA, 22 nt, Human
gcucuggcuacuguggcuaccg

SEQ ID NO: 188253 - RNA, 22 nt, Human
ggcaugcaaaugugggugaccu

SEQ ID NO: 188254 - RNA, 23 nt, Human
agacaaaagccucagucuuaggc

SEQ ID NO: 188255 - RNA, 22 nt, Human
cgugggaggaaaaaugggcuuc

SEQ ID NO: 188256 - RNA, 22 nt, Human
agugagggaugaagaacugcgg

SEQ ID NO: 188257 - RNA, 22 nt, Human
ugggccucugccacgcuccccc

SEQ ID NO: 188258 - RNA, 21 nt, Human
ggcagcccgcccucuccuggc

SEQ ID NO: 188259 - RNA, 22 nt, Human
uugaaagaggcaaaguuugauc

SEQ ID NO: 188260 - RNA, 22 nt, Human
uucaugaacgaacauauguaua

SEQ ID NO: 188261 - RNA, 22 nt, Human
gagggagugccagagggccagc

SEQ ID NO: 188262 - RNA, 22 nt, Human
aagagaauacaagcaggcagga

SEQ ID NO: 188263 - RNA, 22 nt, Human
cagagccuggcgaugucaugga

SEQ ID NO: 188264 - RNA, 22 nt, Human
uccacagugguugaacuaguaa

SEQ ID NO: 188265 - RNA, 22 nt, Human
aagaacaacugcuuuaaaagca

SEQ ID NO: 188266 - RNA, 22 nt, Human
gcucaguguguucaagggcuca

SEQ ID NO: 188267 - RNA, 22 nt, Human
aagauuuauuagaugcuuaccu

SEQ ID NO: 188268 - RNA, 22 nt, Human
ugacaaagacaaagauaugucc

SEQ ID NO: 188269 - RNA, 22 nt, Human
ggugaagggccuuaggagacag

SEQ ID NO: 188270 - RNA, 22 nt, Human
agugcccuggcccagcuggacc

SEQ ID NO: 188271 - RNA, 22 nt, Human
acugaauagugcugcauuguac

SEQ ID NO: 188272 - RNA, 22 nt, Human
acaaauguuggauuugucuucc

SEQ ID NO: 188273 - RNA, 22 nt, Human
cugcuuccauaaauaaugugcu

SEQ ID NO: 188274 - RNA, 22 nt, Human
uuccucuggggccaggccaaca

SEQ ID NO: 188275 - RNA, 22 nt, Human
gagggaccccaggcuggcccuu

SEQ ID NO: 188276 - RNA, 22 nt, Human
ccugagggcgccgagcucccag

SEQ ID NO: 188277 - RNA, 22 nt, Human
auugcugacaccaaguaguagc

SEQ ID NO: 188278 - RNA, 22 nt, Human
gggaccugggccagaggacagu

SEQ ID NO: 188279 - RNA, 22 nt, Human
gccugaaggagucagagagggc

SEQ ID NO: 188280 - RNA, 22 nt, Human
uauuuaaaaagaggccagcugg

SEQ ID NO: 188281 - RNA, 22 nt, Human
uguucacauguacaugaauauu

SEQ ID NO: 188282 - RNA, 22 nt, Human
cuggugcauguggccuugcucu

SEQ ID NO: 188283 - RNA, 22 nt, Human
gcacggcuaauuuuuguauuuu

SEQ ID NO: 188284 - RNA, 22 nt, Human
uuuggagauggagagagggcau

SEQ ID NO: 188285 - RNA, 22 nt, Human
aaggcaaaagaggugucaucac

SEQ ID NO: 188286 - RNA, 22 nt, Human
uucaggaaucaaccaagucauu

SEQ ID NO: 188287 - RNA, 22 nt, Human
gcuacagagcucugugaagaga

SEQ ID NO: 188288 - RNA, 22 nt, Human
gcuggccauagaagccaaagag

SEQ ID NO: 188289 - RNA, 22 nt, Human
uaugccagacugugagcuucuu

SEQ ID NO: 188290 - RNA, 22 nt, Human
acuagaaagaaguuuuuugaga

SEQ ID NO: 188291 - RNA, 22 nt, Human
guacaaauguacacuuguauaa

SEQ ID NO: 188292 - RNA, 22 nt, Human
ucaggcaaggcccuuagagugu

SEQ ID NO: 188293 - RNA, 22 nt, Human
cugagguguugaugaccuaugc

SEQ ID NO: 188294 - RNA, 23 nt, Human
aaugggugcaacuauccaugaca

SEQ ID NO: 188295 - RNA, 22 nt, Human
ccugggugcccggcccuucucu

SEQ ID NO: 188296 - RNA, 22 nt, Human
aagcacauuuggaaaacaugga

SEQ ID NO: 188297 - RNA, 22 nt, Human
gcagcccaggucucucucacuc

SEQ ID NO: 188298 - RNA, 22 nt, Human
ucacaagacagaaaacauuuag

SEQ ID NO: 188299 - RNA, 22 nt, Human
agcuuccuuggcgcugaggccu

SEQ ID NO: 188300 - RNA, 22 nt, Human
uacaggaaagaaauuugaacuc

SEQ ID NO: 188301 - RNA, 22 nt, Human
agaggugaaagaauuuggcucu

SEQ ID NO: 188302 - RNA, 22 nt, Human
cucuggaagaauacacuuagaa

SEQ ID NO: 188303 - RNA, 22 nt, Human
uucaaauccuagcccuguggcc

SEQ ID NO: 188304 - RNA, 20 nt, Human
uauaagcagcuccaggcaga

SEQ ID NO: 188305 - RNA, 22 nt, Human
ccugucagccccacuucugccu

SEQ ID NO: 188306 - RNA, 22 nt, Human
gauggccuuguuuucucccuuc

SEQ ID NO: 188307 - RNA, 23 nt, Human
gcccacccucagcguccucacgg

SEQ ID NO: 188308 - RNA, 22 nt, Human
uccaaaacagaacucugugaau

SEQ ID NO: 188309 - RNA, 22 nt, Human
aacccuggggcagcugcuaggg

SEQ ID NO: 188310 - RNA, 22 nt, Human
uuuauugucuucguggugccua

SEQ ID NO: 188311 - RNA, 22 nt, Human
acaaggcuggcugggaaaaacu

SEQ ID NO: 188312 - RNA, 22 nt, Human
caaagauaaucacagaauaccc

SEQ ID NO: 188313 - RNA, 22 nt, Human
cugugggaauacugcgagugua

SEQ ID NO: 188314 - RNA, 22 nt, Human
caugugugaaucuugugaucau

SEQ ID NO: 188315 - RNA, 22 nt, Human
auggcugccuagaggugagaug

SEQ ID NO: 188316 - RNA, 22 nt, Human
gcugcugucuggucugagggcu

SEQ ID NO: 188317 - RNA, 22 nt, Human
auugcagauucuucucagggag

SEQ ID NO: 188318 - RNA, 22 nt, Human
ugagcccugaccuagccuggcc

SEQ ID NO: 188319 - RNA, 22 nt, Human
cccaugagaccugguuuaaggc

SEQ ID NO: 188320 - RNA, 22 nt, Human
agcuccuggaggugcgcacucg

SEQ ID NO: 188321 - RNA, 18 nt, Human
agccugggcucugccugg

SEQ ID NO: 188322 - RNA, 17 nt, Human
cuuuuaauuuacuuccc

SEQ ID NO: 188323 - RNA, 18 nt, Human
gccugcaggcacgggggu

SEQ ID NO: 188324 - RNA, 22 nt, Human
cuugucagccaauuguggauuu

SEQ ID NO: 188325 - RNA, 22 nt, Human
guucuugccagcauccucaggu

SEQ ID NO: 188326 - RNA, 22 nt, Human
gaggugucuguuaggaauaggc

SEQ ID NO: 188327 - RNA, 22 nt, Human
ccaggcugugguuuagauagag

SEQ ID NO: 188328 - RNA, 22 nt, Human
auaggagccauaaauaaaaucu

SEQ ID NO: 188329 - RNA, 22 nt, Human
ugcagagagauccucaggguuu

SEQ ID NO: 188330 - RNA, 22 nt, Human
ucagaacaauugggaaccauua

SEQ ID NO: 188331 - RNA, 23 nt, Human
aguguugagcagaugcaaagguu

SEQ ID NO: 188332 - RNA, 22 nt, Human
cuggcuggcguuuuccaaaagc

SEQ ID NO: 188333 - RNA, 22 nt, Human
gagcauggauagaaggugggau

SEQ ID NO: 188334 - RNA, 22 nt, Human
auuagaaaaacucaagggcucu

SEQ ID NO: 188335 - RNA, 22 nt, Human
ucugagcaccuuauauucuuga

SEQ ID NO: 188336 - RNA, 22 nt, Human
cacacacaguuuuguauucugu

SEQ ID NO: 188337 - RNA, 18 nt, Human
gccugggagaaguuucac

SEQ ID NO: 188338 - RNA, 22 nt, Human
aaacuacacuuugggaccagca

SEQ ID NO: 188339 - RNA, 22 nt, Human
caggaagcaguagaacuuuucc

SEQ ID NO: 188340 - RNA, 22 nt, Human
cagccagugguugaagaugcag

SEQ ID NO: 188341 - RNA, 18 nt, Human
agucuucugauccauuuu

SEQ ID NO: 188342 - RNA, 22 nt, Human
uggugagaauugguuggauuua

SEQ ID NO: 188343 - RNA, 23 nt, Human
acagaauaccauugacuaggugu

SEQ ID NO: 188344 - RNA, 22 nt, Human
acauggaagcaaaguucuauuu

SEQ ID NO: 188345 - RNA, 22 nt, Human
acagauuuuauuauucagguau

SEQ ID NO: 188346 - RNA, 22 nt, Human
uccaggcaaagccuuguagacg

SEQ ID NO: 188347 - RNA, 22 nt, Human
cagcaugacagucugcagcaga

SEQ ID NO: 188348 - RNA, 22 nt, Human
ugagcugggcugggcugagcug

SEQ ID NO: 188349 - RNA, 22 nt, Human
uagaaagcguuaaaucuacaga

SEQ ID NO: 188350 - RNA, 22 nt, Human
caggacaauuuccacuugguaa

SEQ ID NO: 188351 - RNA, 22 nt, Human
gaggaaccaaaucagcuugcac

SEQ ID NO: 188352 - RNA, 22 nt, Human
ccuugcucggggagcugcagga

SEQ ID NO: 188353 - RNA, 22 nt, Human
auuuccuauccuggucuuaaaa

SEQ ID NO: 188354 - RNA, 22 nt, Human
cagcccagccgagggccuggcu

SEQ ID NO: 188355 - RNA, 17 nt, Human
ugaagaugcauggcagc

SEQ ID NO: 188356 - RNA, 22 nt, Human
ccucuuccagcuguugcuucca

SEQ ID NO: 188357 - RNA, 22 nt, Human
aacaagucuuugguuuuggcua

SEQ ID NO: 188358 - RNA, 22 nt, Human
cagcaggcggcccgcgggcccg

SEQ ID NO: 188359 - RNA, 22 nt, Human
aguuggagugaacaugagauug

SEQ ID NO: 188360 - RNA, 23 nt, Human
uaucucagaggaauguaguuacu

SEQ ID NO: 188361 - RNA, 22 nt, Human
uccugaggugcucagccaggaa

SEQ ID NO: 188362 - RNA, 22 nt, Human
acaggacuguggaaggaucucu

SEQ ID NO: 188363 - RNA, 22 nt, Human
gugaggagcugacacuggggug

SEQ ID NO: 188364 - RNA, 22 nt, Human
guguuacuuaauuagaaucugc

SEQ ID NO: 188365 - RNA, 22 nt, Human
agugggaauuucagugcuaaaa

SEQ ID NO: 188366 - RNA, 22 nt, Human
cuucucagaucucagcuuugag

SEQ ID NO: 188367 - RNA, 22 nt, Human
cugaggaaagcugcagcgguac

SEQ ID NO: 188368 - RNA, 22 nt, Human
gugucccaauguucaggacggc

SEQ ID NO: 188369 - RNA, 22 nt, Human
aggcagacaaggacacaguggg

SEQ ID NO: 188370 - RNA, 22 nt, Human
acaacaaucuacccuagcuucu

SEQ ID NO: 188371 - RNA, 22 nt, Human
gguccagcacaacacuggcaug

SEQ ID NO: 188372 - RNA, 22 nt, Human
aaggccaucuacuuacggaauu

SEQ ID NO: 188373 - RNA, 22 nt, Human
ugaggggcggccugcagaggcc

SEQ ID NO: 188374 - RNA, 22 nt, Human
ucauugccauggcauuugcaga

SEQ ID NO: 188375 - RNA, 23 nt, Human
ucaauuaucaauggaaagaaguu

SEQ ID NO: 188376 - RNA, 22 nt, Human
ugaaguucaagggcuacauuug

SEQ ID NO: 188377 - RNA, 22 nt, Human
uuacagaguagugcagaacuca

SEQ ID NO: 188378 - RNA, 22 nt, Human
uucuguaggcacacaguuucaa

SEQ ID NO: 188379 - RNA, 22 nt, Human
cugaggcugcccagggccaggu

SEQ ID NO: 188380 - RNA, 22 nt, Human
uccagaggcuccaaagggagau

SEQ ID NO: 188381 - RNA, 22 nt, Human
accuggacaccugcugucaucu

SEQ ID NO: 188382 - RNA, 22 nt, Human
uuucuaguucuaccacaguaau

SEQ ID NO: 188383 - RNA, 22 nt, Human
gugcaaaaguaauuacaguuuu

SEQ ID NO: 188384 - RNA, 22 nt, Human
uucccucuccaggagcccugag

SEQ ID NO: 188385 - RNA, 22 nt, Human
cugccccaggaccucuucugga

SEQ ID NO: 188386 - RNA, 22 nt, Human
acugccuucugcucaggguuca

SEQ ID NO: 188387 - RNA, 22 nt, Human
agcuccuggcuuuccucucacc

SEQ ID NO: 188388 - RNA, 22 nt, Human
uaaaggcuuuuagugaugguaa

SEQ ID NO: 188389 - RNA, 22 nt, Human
gaggacugaaacuuacaggaaa

SEQ ID NO: 188390 - RNA, 23 nt, Human
ugggguugaauuguagcugugcc

SEQ ID NO: 188391 - RNA, 22 nt, Human
gggauggggucgggacccugcu

SEQ ID NO: 188392 - RNA, 20 nt, Human
uucagagucagcaaaugcag

SEQ ID NO: 188393 - RNA, 22 nt, Human
cccauucauccucgcuuccuuc

SEQ ID NO: 188394 - RNA, 22 nt, Human
uugcagcuucgagucuaucugu

SEQ ID NO: 188395 - RNA, 22 nt, Human
uaaaguguggacaguaucuaua

SEQ ID NO: 188396 - RNA, 22 nt, Human
agggagcucuuuggucuugccg

SEQ ID NO: 188397 - RNA, 22 nt, Human
uaaaaucagccgaccauggugg

SEQ ID NO: 188398 - RNA, 22 nt, Human
ucgugcaaaggcccaugugggu

SEQ ID NO: 188399 - RNA, 22 nt, Human
ggcugugcuugguguccuugga

SEQ ID NO: 188400 - RNA, 22 nt, Human
agggaacagugaaaggcaucag

SEQ ID NO: 188401 - RNA, 22 nt, Human
acuguucauuuggauuucucug

SEQ ID NO: 188402 - RNA, 22 nt, Human
ggcuggagacaacguccugccc

SEQ ID NO: 188403 - RNA, 22 nt, Human
cagcacuguucccagaccacug

SEQ ID NO: 188404 - RNA, 22 nt, Human
aaaaguaauugcaguuuuguca

SEQ ID NO: 188405 - RNA, 21 nt, Human
ugcuggcugaaaggcacagag

SEQ ID NO: 188406 - RNA, 22 nt, Human
auggaagacagauaaggcagaa

SEQ ID NO: 188407 - RNA, 22 nt, Human
gaacugggaaugcugucccauc

SEQ ID NO: 188408 - RNA, 22 nt, Human
agcuggaagcugaugagcacag

SEQ ID NO: 188409 - RNA, 22 nt, Human
aaucuuucccuauuaaaugugg

SEQ ID NO: 188410 - RNA, 19 nt, Human
aaaauugcguauuuugagg

SEQ ID NO: 188411 - RNA, 22 nt, Human
ucuggccccgcaugcacuuuau

SEQ ID NO: 188412 - RNA, 22 nt, Human
uugagguauugauauuuuauga

SEQ ID NO: 188413 - RNA, 22 nt, Human
guauuauuggguaguaugguaa

SEQ ID NO: 188414 - RNA, 22 nt, Human
ugaggugguuacuguggugcuc

SEQ ID NO: 188415 - RNA, 22 nt, Human
ccaggacuuauuacaguauaac

SEQ ID NO: 188416 - RNA, 22 nt, Human
aauggaaugccucacauguauu

SEQ ID NO: 188417 - RNA, 22 nt, Human
ugccagacuuucuuaccagugu

SEQ ID NO: 188418 - RNA, 22 nt, Human
caugcagcagaauaaugacuau

SEQ ID NO: 188419 - RNA, 22 nt, Human
ugggagaaagaacccugaguga

SEQ ID NO: 188420 - RNA, 18 nt, Human
gugggguguugugaggau

SEQ ID NO: 188421 - RNA, 22 nt, Human
guggcccaggcacccugaugac

SEQ ID NO: 188422 - RNA, 20 nt, Human
guccaggacccagcaggagg

SEQ ID NO: 188423 - RNA, 22 nt, Human
ggcuuagauugacacugaucuc

SEQ ID NO: 188424 - RNA, 22 nt, Human
auuguacagguuggaggaagug

SEQ ID NO: 188425 - RNA, 19 nt, Human
ccuacuuguuugagggaag

SEQ ID NO: 188426 - RNA, 22 nt, Human
gcaugugugagaccuuuuagca

SEQ ID NO: 188427 - RNA, 19 nt, Human
ucugagcugauaugacauu

SEQ ID NO: 188428 - RNA, 22 nt, Human
uuauuuaauuuucucacucaga

SEQ ID NO: 188429 - RNA, 22 nt, Human
agggcucuuuaggccgaggcca

SEQ ID NO: 188430 - RNA, 22 nt, Human
gaucaguaagugaauaaugagu

SEQ ID NO: 188431 - RNA, 22 nt, Human
uauugauaaggauggcugcaau

SEQ ID NO: 188432 - RNA, 22 nt, Human
ccuuuucuacaagcaaaugugc

SEQ ID NO: 188433 - RNA, 22 nt, Human
uugguaaauacuauaaucaaau

SEQ ID NO: 188434 - RNA, 22 nt, Human
aaguguccucauucaacaugca

SEQ ID NO: 188435 - RNA, 22 nt, Human
gacauauacuauggaugguucu

SEQ ID NO: 188436 - RNA, 22 nt, Human
gaaggcuugcagcucuguggca

SEQ ID NO: 188437 - RNA, 22 nt, Human
aggcagggcucauuucuuaggc

SEQ ID NO: 188438 - RNA, 22 nt, Human
agggggugcuacuuccagaguu

SEQ ID NO: 188439 - RNA, 22 nt, Human
agauugaauauagagauucuug

SEQ ID NO: 188440 - RNA, 22 nt, Human
cuuaagaaauugcauucuaauc

SEQ ID NO: 188441 - RNA, 22 nt, Human
agggcacuugaggcugggccug

SEQ ID NO: 188442 - RNA, 22 nt, Human
uucauugucucuguuugccuuc

SEQ ID NO: 188443 - RNA, 22 nt, Human
agggcuccgggccaccggccug

SEQ ID NO: 188444 - RNA, 22 nt, Human
uaaaguucuuagaacaaggccu

SEQ ID NO: 188445 - RNA, 22 nt, Human
caggaagagaacauggaggcug

SEQ ID NO: 188446 - RNA, 22 nt, Human
aaacugaggaguuagacuaggg

SEQ ID NO: 188447 - RNA, 22 nt, Human
ggccagagaauaugccuuacgu

SEQ ID NO: 188448 - RNA, 22 nt, Human
agguucuuggugagcauuuggu

SEQ ID NO: 188449 - RNA, 20 nt, Human
cucuuaaauguaaaguaggc

SEQ ID NO: 188450 - RNA, 19 nt, Human
agagacacagguaaguagg

SEQ ID NO: 188451 - RNA, 22 nt, Human
uccugccuaccuugcggaggug

SEQ ID NO: 188452 - RNA, 22 nt, Human
aaucuagagacaauuugaauau

SEQ ID NO: 188453 - RNA, 22 nt, Human
cugcagggcuuaccuugcucug

SEQ ID NO: 188454 - RNA, 22 nt, Human
agacaugucaccaauucuuacu

SEQ ID NO: 188455 - RNA, 22 nt, Human
gucugagggacagaguccuggc

SEQ ID NO: 188456 - RNA, 22 nt, Human
uguguucaguaugacauucaca

SEQ ID NO: 188457 - RNA, 18 nt, Human
ucucagaggccauccuag

SEQ ID NO: 188458 - RNA, 22 nt, Human
gucucugggugugugaugccaa

SEQ ID NO: 188459 - RNA, 22 nt, Human
gaagaauauauaaugauuuugu

SEQ ID NO: 188460 - RNA, 22 nt, Human
ggugucagauacauaggaagua

SEQ ID NO: 188461 - RNA, 22 nt, Human
aagggcuggcccugggaagagu

SEQ ID NO: 188462 - RNA, 22 nt, Human
uaguaagccucuccagagacag

SEQ ID NO: 188463 - RNA, 22 nt, Human
gccucccuccaccacugcaggu

SEQ ID NO: 188464 - RNA, 22 nt, Human
cugggcagugguggcaucuuug

SEQ ID NO: 188465 - RNA, 22 nt, Human
gcucagaccccacccuggcaga

SEQ ID NO: 188466 - RNA, 22 nt, Human
uccagggagagccgcugcucca

SEQ ID NO: 188467 - RNA, 17 nt, Human
ucuccaggacgagcuca

SEQ ID NO: 188468 - RNA, 22 nt, Human
acuguucacccagcacuagcag

SEQ ID NO: 188469 - RNA, 22 nt, Human
uaauacuguauacugcaaauuu

SEQ ID NO: 188470 - RNA, 22 nt, Human
gcugcucugcuguguaagcagg

SEQ ID NO: 188471 - RNA, 22 nt, Human
uuucucaguaguaauggcaguc

SEQ ID NO: 188472 - RNA, 16 nt, Human
cuuuuucuccccucuu

SEQ ID NO: 188473 - RNA, 22 nt, Human
uuacacuuguaaauggcaugua

SEQ ID NO: 188474 - RNA, 22 nt, Human
cauggaacuguauaaaggcacu

SEQ ID NO: 188475 - RNA, 22 nt, Human
caggaaggaaaggguguggaga

SEQ ID NO: 188476 - RNA, 22 nt, Human
gcaaacauguugugagauacca

SEQ ID NO: 188477 - RNA, 22 nt, Human
aagucugccuaaccuucauguu

SEQ ID NO: 188478 - RNA, 19 nt, Human
cugggacaaugaaagcauc

SEQ ID NO: 188479 - RNA, 19 nt, Human
uagcccuggccaucaugag

SEQ ID NO: 188480 - RNA, 20 nt, Human
ugaaauagauacucagagau

SEQ ID NO: 188481 - RNA, 22 nt, Human
ggccaaggaugguggcucuggu

SEQ ID NO: 188482 - RNA, 22 nt, Human
uuuccauguguacuggccagaa

SEQ ID NO: 188483 - RNA, 22 nt, Human
aaggcugccucugccagaggag

SEQ ID NO: 188484 - RNA, 22 nt, Human
uccugggcuuuguuucucuccu

SEQ ID NO: 188485 - RNA, 22 nt, Human
auggcuucucgcuggcaccugu

SEQ ID NO: 188486 - RNA, 22 nt, Human
agaucauaugcaguaaugaacu

SEQ ID NO: 188487 - RNA, 22 nt, Human
ugcacagaucugguggcaagga

SEQ ID NO: 188488 - RNA, 22 nt, Human
uuuauaaccaaguucugcuugu

SEQ ID NO: 188489 - RNA, 20 nt, Human
cucaggauacugcaaaguug

SEQ ID NO: 188490 - RNA, 22 nt, Human
aaauaggggaccaggaaaggag

SEQ ID NO: 188491 - RNA, 20 nt, Human
agagagcacaggcaggaaag

SEQ ID NO: 188492 - RNA, 22 nt, Human
acauuccugaaugggcacauuu

SEQ ID NO: 188493 - RNA, 22 nt, Human
aggagaggucucccuuccccag

SEQ ID NO: 188494 - RNA, 22 nt, Human
gcuggguuuucuuccgggccua

SEQ ID NO: 188495 - RNA, 22 nt, Human
aucucaaagcauggagcagaau

SEQ ID NO: 188496 - RNA, 22 nt, Human
augucacagucugacucaguga

SEQ ID NO: 188497 - RNA, 22 nt, Human
ccccucuugugggcucagguca

SEQ ID NO: 188498 - RNA, 22 nt, Human
aaggccaggagacuuggaguca

SEQ ID NO: 188499 - RNA, 17 nt, Human
aaucuguuuacagucag

SEQ ID NO: 188500 - RNA, 22 nt, Human
aucuccagguugugccugcguc

SEQ ID NO: 188501 - RNA, 22 nt, Human
auggcugggucaccaucagggu

SEQ ID NO: 188502 - RNA, 22 nt, Human
uuaaaaugcagauucugauuca

SEQ ID NO: 188503 - RNA, 22 nt, Human
ccaugagcuucaacugacacag

SEQ ID NO: 188504 - RNA, 22 nt, Human
cccagcccagcguucgaggggu

SEQ ID NO: 188505 - RNA, 22 nt, Human
ccccacucucggccagauaggc

SEQ ID NO: 188506 - RNA, 22 nt, Human
uuguagaaaauucucuuggaua

SEQ ID NO: 188507 - RNA, 22 nt, Human
uuuauucauuguuucgucgcag

SEQ ID NO: 188508 - RNA, 22 nt, Human
ccuugggguguuggaggcagcc

SEQ ID NO: 188509 - RNA, 22 nt, Human
ugagcugucuaugguccugucu

SEQ ID NO: 188510 - RNA, 22 nt, Human
uuucagaaauggcacugaaauc

SEQ ID NO: 188511 - RNA, 22 nt, Human
guuuccuacacuguaguauuau

SEQ ID NO: 188512 - RNA, 22 nt, Human
aagccaguguuuuugagaguug

SEQ ID NO: 188513 - RNA, 22 nt, Human
gugacccagaggcugacuaaca

SEQ ID NO: 188514 - RNA, 22 nt, Human
agcauccagaaaacucucagaa

SEQ ID NO: 188515 - RNA, 21 nt, Human
cugcuguggcccccgacaugc

SEQ ID NO: 188516 - RNA, 21 nt, Human
uuucccagcagagauagcugg

SEQ ID NO: 188517 - RNA, 22 nt, Human
cauggaaagcacucagcccagu

SEQ ID NO: 188518 - RNA, 22 nt, Human
aagaaaugcacacaacugcugg

SEQ ID NO: 188519 - RNA, 22 nt, Human
uuauucaccucuauuagacuca

SEQ ID NO: 188520 - RNA, 22 nt, Human
caucacagggggcuagaagucu

SEQ ID NO: 188521 - RNA, 22 nt, Human
auuuguuucagggccuugguau

SEQ ID NO: 188522 - RNA, 22 nt, Human
ugcugaggagguggcugugcuu

SEQ ID NO: 188523 - RNA, 22 nt, Human
ggucuggauuuuaucuacugua

SEQ ID NO: 188524 - RNA, 22 nt, Human
gagauggagucuuuuucuguca

SEQ ID NO: 188525 - RNA, 22 nt, Human
ggucagagccguuagcauucag

SEQ ID NO: 188526 - RNA, 22 nt, Human
ucucuggcagacuggcugggcu

SEQ ID NO: 188527 - RNA, 22 nt, Human
gcagcucacagucuccgccauc

SEQ ID NO: 188528 - RNA, 22 nt, Human
ucuggagagcagaugccucugg

SEQ ID NO: 188529 - RNA, 22 nt, Human
aaauuagucgguuuaggaauuu

SEQ ID NO: 188530 - RNA, 19 nt, Human
aucuuuagggauguggcuu

SEQ ID NO: 188531 - RNA, 22 nt, Human
uggaagaauagaagaugguuga

SEQ ID NO: 188532 - RNA, 22 nt, Human
ccucagcauccucaugcucagu

SEQ ID NO: 188533 - RNA, 22 nt, Human
augaaaugcugagaggugcuuc

SEQ ID NO: 188534 - RNA, 22 nt, Human
ugacauuucuuguugauauaaa

SEQ ID NO: 188535 - RNA, 22 nt, Human
gucuagagccugaugaggauga

SEQ ID NO: 188536 - RNA, 22 nt, Human
ccagcagagcauggggaggaag

SEQ ID NO: 188537 - RNA, 21 nt, Human
auaagcaugcugauuacauuu

SEQ ID NO: 188538 - RNA, 22 nt, Human
augaaacucuaacuuaacaagu

SEQ ID NO: 188539 - RNA, 22 nt, Human
uggcuggcguuggggccaguga

SEQ ID NO: 188540 - RNA, 22 nt, Human
auucucuuuguauaacaucuug

SEQ ID NO: 188541 - RNA, 22 nt, Human
gggcagcaaaucugagucuggu

SEQ ID NO: 188542 - RNA, 22 nt, Human
acagcuguauucaaguugcaag

SEQ ID NO: 188543 - RNA, 22 nt, Human
cugggacuuuguaggccaguug

SEQ ID NO: 188544 - RNA, 17 nt, Human
aggugcagaggcagagc

SEQ ID NO: 188545 - RNA, 22 nt, Human
acagagcuguacaugugccaug

SEQ ID NO: 188546 - RNA, 22 nt, Human
cugcugccaagggugccacagg

SEQ ID NO: 188547 - RNA, 22 nt, Human
ugguccugaggcuuguuuccac

SEQ ID NO: 188548 - RNA, 22 nt, Human
cagagagaggccacugcuauua

SEQ ID NO: 188549 - RNA, 19 nt, Human
aauucuguuucagcagauc

SEQ ID NO: 188550 - RNA, 16 nt, Human
ucucuggguugcacag

SEQ ID NO: 188551 - RNA, 22 nt, Human
ucauaacagcuaagucccuuuc

SEQ ID NO: 188552 - RNA, 22 nt, Human
auacuguuggcuuuggugaugg

SEQ ID NO: 188553 - RNA, 22 nt, Human
cuacaugaacucuuaagucaca

SEQ ID NO: 188554 - RNA, 22 nt, Human
uauuagaaagcuuaauaucgug

SEQ ID NO: 188555 - RNA, 22 nt, Human
aucugaaauagucuuaucugag

SEQ ID NO: 188556 - RNA, 18 nt, Human
cagacacucugcucugca

SEQ ID NO: 188557 - RNA, 22 nt, Human
ugucagcucccagucagagaga

SEQ ID NO: 188558 - RNA, 22 nt, Human
ucugcccucauugcugccugga

SEQ ID NO: 188559 - RNA, 22 nt, Human
ucagagucuuaacuauucagag

SEQ ID NO: 188560 - RNA, 22 nt, Human
uuucaguuugaaggaaaggcca

SEQ ID NO: 188561 - RNA, 22 nt, Human
uucuggcaugagagaugggggu

SEQ ID NO: 188562 - RNA, 22 nt, Human
ucuugaaagcaugagauggaca

SEQ ID NO: 188563 - RNA, 22 nt, Human
uggaggcacuaaauggccacaa

SEQ ID NO: 188564 - RNA, 22 nt, Human
agauuuacugagaacugauuac

SEQ ID NO: 188565 - RNA, 22 nt, Human
auggcuuccucuggauuggauu

SEQ ID NO: 188566 - RNA, 22 nt, Human
cauuuacauuuaagguuaauau

SEQ ID NO: 188567 - RNA, 22 nt, Human
aaaccaacccuggcuggccuag

SEQ ID NO: 188568 - RNA, 22 nt, Human
ucaguggucuuggcugauuguu

SEQ ID NO: 188569 - RNA, 22 nt, Human
gcagguguggagaguggucggg

SEQ ID NO: 188570 - RNA, 22 nt, Human
auacacauauauacacguuuaa

SEQ ID NO: 188571 - RNA, 22 nt, Human
gcuccaggcgagcuggaccaga

SEQ ID NO: 188572 - RNA, 22 nt, Human
aaacauuuuucuucaucauccu

SEQ ID NO: 188573 - RNA, 22 nt, Human
gcaacaugaagaaaacagaacc

SEQ ID NO: 188574 - RNA, 22 nt, Human
gccuggcugcuuagccuacuuc

SEQ ID NO: 188575 - RNA, 22 nt, Human
uacaagaauuucuuucugguug

SEQ ID NO: 188576 - RNA, 22 nt, Human
ggcucacacaugacugggcucu

SEQ ID NO: 188577 - RNA, 22 nt, Human
ccaaauuaaaucauacagacag

SEQ ID NO: 188578 - RNA, 22 nt, Human
acugucuugcuaugagcuccca

SEQ ID NO: 188579 - RNA, 22 nt, Human
ggccacugaccuacaucugggg

SEQ ID NO: 188580 - RNA, 22 nt, Human
agugauguugacuagcuauaag

SEQ ID NO: 188581 - RNA, 23 nt, Human
cagaggguuccauggagcauggu

SEQ ID NO: 188582 - RNA, 20 nt, Human
caucugagcccacagaaguc

SEQ ID NO: 188583 - RNA, 22 nt, Human
aggcuccacccuacagagcucc

SEQ ID NO: 188584 - RNA, 19 nt, Human
uaguacaaaagcagccaua

SEQ ID NO: 188585 - RNA, 22 nt, Human
caggccagcggcccgcgcguuc

SEQ ID NO: 188586 - RNA, 22 nt, Human
gccucagggggagaggccagcu

SEQ ID NO: 188587 - RNA, 22 nt, Human
uaaaggcucacuggcuuggggu

SEQ ID NO: 188588 - RNA, 22 nt, Human
ucaggccugagaaaaauccuuu

SEQ ID NO: 188589 - RNA, 22 nt, Human
aacacugaccucuacccucagu

SEQ ID NO: 188590 - RNA, 22 nt, Human
gcugggcuccaggccaggguga

SEQ ID NO: 188591 - RNA, 22 nt, Human
gagauccagauuuccauuccuu

SEQ ID NO: 188592 - RNA, 22 nt, Human
gcagugaaaaagugcacccugu

SEQ ID NO: 188593 - RNA, 22 nt, Human
gcuggagugaugccugugucuc

SEQ ID NO: 188594 - RNA, 22 nt, Human
gucuguagauauucacuccuuc

SEQ ID NO: 188595 - RNA, 23 nt, Human
cagaaaguuugagaagauacauc

SEQ ID NO: 188596 - RNA, 22 nt, Human
gagaugcugaaaucugagugua

SEQ ID NO: 188597 - RNA, 22 nt, Human
uugcagggaaacaguuuaggaa

SEQ ID NO: 188598 - RNA, 22 nt, Human
uuccuacaauuagagccucuuu

SEQ ID NO: 188599 - RNA, 22 nt, Human
ucugccugagcagagggaggcc

SEQ ID NO: 188600 - RNA, 22 nt, Human
ucccagccaggcucuaccacuu

SEQ ID NO: 188601 - RNA, 22 nt, Human
ucugaaaucuaaugcucugugg

SEQ ID NO: 188602 - RNA, 22 nt, Human
gagggcugugaaggagcggguu

SEQ ID NO: 188603 - RNA, 22 nt, Human
ucucaggcuccugacauauaug

SEQ ID NO: 188604 - RNA, 22 nt, Human
cauaacuuuaaagacagugugg

SEQ ID NO: 188605 - RNA, 21 nt, Human
uguuuacucccugcaagcacg

SEQ ID NO: 188606 - RNA, 22 nt, Human
cucugugggggagaggcagcug

SEQ ID NO: 188607 - RNA, 22 nt, Human
uuauccuggauuauauauguga

SEQ ID NO: 188608 - RNA, 22 nt, Human
aaugcaaauuaucaggcuucuc

SEQ ID NO: 188609 - RNA, 22 nt, Human
ucacagaaaucuguuuuuucua

SEQ ID NO: 188610 - RNA, 22 nt, Human
uauugguaggacucagcugaga

SEQ ID NO: 188611 - RNA, 22 nt, Human
aucugggggagcugcucaugga

SEQ ID NO: 188612 - RNA, 22 nt, Human
gccaguggcaugcggcagggac

SEQ ID NO: 188613 - RNA, 22 nt, Human
agugaaggaaguuugucuuggg

SEQ ID NO: 188614 - RNA, 22 nt, Human
aaggcagccagauccuuugggu

SEQ ID NO: 188615 - RNA, 22 nt, Human
uauuuccugcauggugauguaa

SEQ ID NO: 188616 - RNA, 23 nt, Human
guguuacucugauaggugcuuuu

SEQ ID NO: 188617 - RNA, 22 nt, Human
ggagccuuacuagaaugugagc

SEQ ID NO: 188618 - RNA, 22 nt, Human
gcuggagggguaauaggauggg

SEQ ID NO: 188619 - RNA, 22 nt, Human
uucauuccuucccuaagcaacu

SEQ ID NO: 188620 - RNA, 22 nt, Human
aaggaacuuugcagaggugauu

SEQ ID NO: 188621 - RNA, 22 nt, Human
cagagccccucagcucucuccc

SEQ ID NO: 188622 - RNA, 22 nt, Human
auuucuugugggaaaugcagca

SEQ ID NO: 188623 - RNA, 22 nt, Human
gucaacaaguaguuuucuucca

SEQ ID NO: 188624 - RNA, 22 nt, Human
ggcccagccucagacaugcccu

SEQ ID NO: 188625 - RNA, 22 nt, Human
ucuaucuggccccuuuuauaua

SEQ ID NO: 188626 - RNA, 22 nt, Human
ucuggaagaacggggcaugcug

SEQ ID NO: 188627 - RNA, 22 nt, Human
ccugagggaggguauaggcugu

SEQ ID NO: 188628 - RNA, 22 nt, Human
cagugccaaggagaaggacagc

SEQ ID NO: 188629 - RNA, 22 nt, Human
uuggucagcucaauggagaggg

SEQ ID NO: 188630 - RNA, 20 nt, Human
gcaacuagggagacacagcu

SEQ ID NO: 188631 - RNA, 22 nt, Human
ucuguggcuuucuuauguugua

SEQ ID NO: 188632 - RNA, 22 nt, Human
uucuaaacugaaguauuuuaaa

SEQ ID NO: 188633 - RNA, 22 nt, Human
ugugucuguuuugcucaccauu

SEQ ID NO: 188634 - RNA, 22 nt, Human
gacaggaaacaagaaggcagga

SEQ ID NO: 188635 - RNA, 22 nt, Human
cacccagcacagagggaggcga

SEQ ID NO: 188636 - RNA, 22 nt, Human
aaggccucuucucucuggagau

SEQ ID NO: 188637 - RNA, 22 nt, Human
uuuggaauuccauuucugcauu

SEQ ID NO: 188638 - RNA, 22 nt, Human
acagguguuuuggaggaugauu

SEQ ID NO: 188639 - RNA, 21 nt, Human
augcagagaacuccagggaag

SEQ ID NO: 188640 - RNA, 22 nt, Human
gauuguaauucuacuuuccgcu

SEQ ID NO: 188641 - RNA, 20 nt, Human
aggugcaagcaguaaauugc

SEQ ID NO: 188642 - RNA, 22 nt, Human
uucagugucccuaguagaaguu

SEQ ID NO: 188643 - RNA, 22 nt, Human
uuuguaaagucuguucugaguu

SEQ ID NO: 188644 - RNA, 22 nt, Human
ucucagaggucuucagccucug

SEQ ID NO: 188645 - RNA, 22 nt, Human
gcaggucuguugauuacaguca

SEQ ID NO: 188646 - RNA, 22 nt, Human
gggcacauguaaagcuggagaa

SEQ ID NO: 188647 - RNA, 22 nt, Human
uccagcccgggggcaggugacc

SEQ ID NO: 188648 - RNA, 22 nt, Human
cacaguuuaugaucucagugaa

SEQ ID NO: 188649 - RNA, 22 nt, Human
uuccaggaugggcuguccuacu

SEQ ID NO: 188650 - RNA, 22 nt, Human
aagagggguggucugugaggau

SEQ ID NO: 188651 - RNA, 22 nt, Human
auuauucaaucauauuaaaagu

SEQ ID NO: 188652 - RNA, 22 nt, Human
cuggaggcaguugccccaguca

SEQ ID NO: 188653 - RNA, 22 nt, Human
cuuaggaagcgggaccugugca

SEQ ID NO: 188654 - RNA, 22 nt, Human
uuucacauaaauggaguaaaga

SEQ ID NO: 188655 - RNA, 23 nt, Human
ccuccccaccagacucuaacaua

SEQ ID NO: 188656 - RNA, 22 nt, Human
aauuugauuuucuuaaaccaua

SEQ ID NO: 188657 - RNA, 22 nt, Human
ggaggaaaugaaaggaggguuu

SEQ ID NO: 188658 - RNA, 20 nt, Human
cugggcucaagugauccucc

SEQ ID NO: 188659 - RNA, 22 nt, Human
ucuggcccagccccugauccca

SEQ ID NO: 188660 - RNA, 22 nt, Human
aguaacauuuagcuucucacug

SEQ ID NO: 188661 - RNA, 22 nt, Human
cccaggagaauauaauguucuu

SEQ ID NO: 188662 - RNA, 22 nt, Human
cagaggcagacccuccagggcg

SEQ ID NO: 188663 - RNA, 22 nt, Human
uuaugcaaggacuuauuacagu

SEQ ID NO: 188664 - RNA, 22 nt, Human
cuacuucuaaguacauggugau

SEQ ID NO: 188665 - RNA, 22 nt, Human
cccagacauaacagcagagagg

SEQ ID NO: 188666 - RNA, 22 nt, Human
ugccuugacaguuguaagaccu

SEQ ID NO: 188667 - RNA, 22 nt, Human
uuugguaaaugcagguucuucu

SEQ ID NO: 188668 - RNA, 22 nt, Human
ucugagcugcagaguggggugg

SEQ ID NO: 188669 - RNA, 22 nt, Human
agaugguccaugcacagauaug

SEQ ID NO: 188670 - RNA, 20 nt, Human
ccagguggugccuggagagg

SEQ ID NO: 188671 - RNA, 22 nt, Human
gggagagaugcugauugccaau

SEQ ID NO: 188672 - RNA, 19 nt, Human
ugacagagagcaggguggu

SEQ ID NO: 188673 - RNA, 22 nt, Human
uguuuuuccaugugcagaacaa

SEQ ID NO: 188674 - RNA, 22 nt, Human
aaauacagauuccagggucuua

SEQ ID NO: 188675 - RNA, 22 nt, Human
aaaaacugcaauuacuuuuguc

SEQ ID NO: 188676 - RNA, 21 nt, Human
ucugggagugggaaaaugguc

SEQ ID NO: 188677 - RNA, 22 nt, Human
ggcugccuugacccuggcuccg

SEQ ID NO: 188678 - RNA, 22 nt, Human
uccagcacucgcccagggcuug

SEQ ID NO: 188679 - RNA, 22 nt, Human
agcuguuuccauaaaugagaca

SEQ ID NO: 188680 - RNA, 22 nt, Human
ggcagagguagcuggaaccagg

SEQ ID NO: 188681 - RNA, 22 nt, Human
gggacauggcuaggauuccaau

SEQ ID NO: 188682 - RNA, 22 nt, Human
uuuuagaaauacugauuuagug

SEQ ID NO: 188683 - RNA, 22 nt, Human
aucuuuggugcuuggugcuccc

SEQ ID NO: 188684 - RNA, 22 nt, Human
uagcaccuagaguauuuuauca

SEQ ID NO: 188685 - RNA, 22 nt, Human
ggcuucaucucguugacaccuc

SEQ ID NO: 188686 - RNA, 23 nt, Human
auaguuuucccugguucuugcca

SEQ ID NO: 188687 - RNA, 22 nt, Human
gaggaggcuggcgccgccugcc

SEQ ID NO: 188688 - RNA, 22 nt, Human
uccuggcucugcugccuccuag

SEQ ID NO: 188689 - RNA, 22 nt, Human
cagggacagggaucauuugcuu

SEQ ID NO: 188690 - RNA, 22 nt, Human
cacaugugcaguuacaugaauu

SEQ ID NO: 188691 - RNA, 22 nt, Human
aaguucugggguaaugagaauu

SEQ ID NO: 188692 - RNA, 22 nt, Human
uagggaggcuacuucuuguagg

SEQ ID NO: 188693 - RNA, 22 nt, Human
agaggccagaucaucauagaug

SEQ ID NO: 188694 - RNA, 22 nt, Human
agaaacugaacacaagagucgg

SEQ ID NO: 188695 - RNA, 22 nt, Human
gaggagggagcuggaagcucuu

SEQ ID NO: 188696 - RNA, 19 nt, Human
uggcagggagaguuugaag

SEQ ID NO: 188697 - RNA, 22 nt, Human
augaauuaaggauaacuggucu

SEQ ID NO: 188698 - RNA, 22 nt, Human
uucagugugaagcuucugaaag

SEQ ID NO: 188699 - RNA, 22 nt, Human
aagccaggcugcacuugcuggg

SEQ ID NO: 188700 - RNA, 22 nt, Human
acagcagagccugguacuuacu

SEQ ID NO: 188701 - RNA, 22 nt, Human
gugggcuuguuuugaugagauc

SEQ ID NO: 188702 - RNA, 21 nt, Human
gaagacacauaaccucucucc

SEQ ID NO: 188703 - RNA, 22 nt, Human
uuuaagcuaaugucauaauuag

SEQ ID NO: 188704 - RNA, 22 nt, Human
ugaggcagccugcauuaaagag

SEQ ID NO: 188705 - RNA, 22 nt, Human
uccuggccuagcucacccugga

SEQ ID NO: 188706 - RNA, 22 nt, Human
ugguaauuaauuugauagguuc

SEQ ID NO: 188707 - RNA, 22 nt, Human
cagcaggacguccaagugcuau

SEQ ID NO: 188708 - RNA, 22 nt, Human
gcaguccaaaguggcucucacc

SEQ ID NO: 188709 - RNA, 22 nt, Human
agugcuuuccuucuugugacau

SEQ ID NO: 188710 - RNA, 22 nt, Human
ugggagcucagaaagggagguc

SEQ ID NO: 188711 - RNA, 22 nt, Human
agggccagaaucccucagucua

SEQ ID NO: 188712 - RNA, 22 nt, Human
agaauccuguuuuacuucauca

SEQ ID NO: 188713 - RNA, 22 nt, Human
ugagaaaauccagaggcuaguu

SEQ ID NO: 188714 - RNA, 22 nt, Human
aggcagagcuaggaagaauugu

SEQ ID NO: 188715 - RNA, 20 nt, Human
uugagcuuuuaguacagaca

SEQ ID NO: 188716 - RNA, 22 nt, Human
gcuggcuuaauguagcuaaaaa

SEQ ID NO: 188717 - RNA, 22 nt, Human
uuuucaauuuugaggcaguggu

SEQ ID NO: 188718 - RNA, 22 nt, Human
uuacagugcucuucaagacuuc

SEQ ID NO: 188719 - RNA, 22 nt, Human
gaacaguacaguugaguaguug

SEQ ID NO: 188720 - RNA, 22 nt, Human
augggacacguuuuaaggaaaa

SEQ ID NO: 188721 - RNA, 22 nt, Human
acaaaugugucuaauugugccu

SEQ ID NO: 188722 - RNA, 22 nt, Human
cucugcaggccugugaagggug

SEQ ID NO: 188723 - RNA, 21 nt, Human
gcagccacugccuucaacaau

SEQ ID NO: 188724 - RNA, 22 nt, Human
auauacacaucuuuuuaaauau

SEQ ID NO: 188725 - RNA, 22 nt, Human
ucaggucuauacuaugagaggc

SEQ ID NO: 188726 - RNA, 22 nt, Human
cacagaggucugggcccagcag

SEQ ID NO: 188727 - RNA, 22 nt, Human
cugaggagcguuggucacgugu

SEQ ID NO: 188728 - RNA, 22 nt, Human
agugucuguuguucagaacucu

SEQ ID NO: 188729 - RNA, 22 nt, Human
uacaagucacuuccuuucuaaa

SEQ ID NO: 188730 - RNA, 22 nt, Human
caccagcuuacagucucacccc

SEQ ID NO: 188731 - RNA, 22 nt, Human
cagggcucccaaauaucucuuc

SEQ ID NO: 188732 - RNA, 18 nt, Human
ggauaggaccuuaggcag

SEQ ID NO: 188733 - RNA, 20 nt, Human
uuuuccagaaaguaucauug

SEQ ID NO: 188734 - RNA, 18 nt, Human
acucugcggaggccccag

SEQ ID NO: 188735 - RNA, 22 nt, Human
gggcagguuauuggaguaggga

SEQ ID NO: 188736 - RNA, 22 nt, Human
agugcaggccccaggccaggcc

SEQ ID NO: 188737 - RNA, 20 nt, Human
acagagacugagacacuugc

SEQ ID NO: 188738 - RNA, 22 nt, Human
aaggcugagguagggccuaaaa

SEQ ID NO: 188739 - RNA, 22 nt, Human
uuccaggcuucucuggggcguc

SEQ ID NO: 188740 - RNA, 22 nt, Human
ccauguguugauucucugcaga

SEQ ID NO: 188741 - RNA, 22 nt, Human
acauuugagaugccuuuuaggu

SEQ ID NO: 188742 - RNA, 22 nt, Human
uugaaugaaugguccauauaga

SEQ ID NO: 188743 - RNA, 22 nt, Human
cauaacauccuugcuacuuuga

SEQ ID NO: 188744 - RNA, 22 nt, Human
acaguuaucuuugaaauagaga

SEQ ID NO: 188745 - RNA, 18 nt, Human
ccucugccauagccagca

SEQ ID NO: 188746 - RNA, 22 nt, Human
aaaucuaguaccuuuuugauua

SEQ ID NO: 188747 - RNA, 22 nt, Human
uuuaguguaagcauaaagaaca

SEQ ID NO: 188748 - RNA, 22 nt, Human
agaggcuguuacacucccagau

SEQ ID NO: 188749 - RNA, 21 nt, Human
guauucuuuaugaagugaaaa

SEQ ID NO: 188750 - RNA, 22 nt, Human
aucagaguguaaguucuuuccu

SEQ ID NO: 188751 - RNA, 22 nt, Human
gcucaggaucagccaccucuuu

SEQ ID NO: 188752 - RNA, 22 nt, Human
agcacuuuagaauuuagaguug

SEQ ID NO: 188753 - RNA, 22 nt, Human
gcaguguuuacauauuagaaac

SEQ ID NO: 188754 - RNA, 22 nt, Human
auucaagguauuuaaaacauaa

SEQ ID NO: 188755 - RNA, 22 nt, Human
uaauuagagucacaaguaacca

SEQ ID NO: 188756 - RNA, 22 nt, Human
agccuugaaccaauuguuuagc

SEQ ID NO: 188757 - RNA, 22 nt, Human
agcaaauacauuuuuagcauaa

SEQ ID NO: 188758 - RNA, 21 nt, Human
ugguacagaggaggugaagug

SEQ ID NO: 188759 - RNA, 22 nt, Human
ucucugggacacugggucaguu

SEQ ID NO: 188760 - RNA, 22 nt, Human
acucaggccccaucgcccaucu

SEQ ID NO: 188761 - RNA, 22 nt, Human
gugugucccuccucuccugagu

SEQ ID NO: 188762 - RNA, 22 nt, Human
ucucagugaagaguauaacaaa

SEQ ID NO: 188763 - RNA, 22 nt, Human
gcagcaggcacuuaccguugcu

SEQ ID NO: 188764 - RNA, 22 nt, Human
acuacaguaagggaggcagcau

SEQ ID NO: 188765 - RNA, 22 nt, Human
aagaguuauauaauguguaguu

SEQ ID NO: 188766 - RNA, 22 nt, Human
cagaaggcauagaugaaggccu

SEQ ID NO: 188767 - RNA, 22 nt, Human
agccuggcggucgucggucagg

SEQ ID NO: 188768 - RNA, 22 nt, Human
uggcagccucccagcugcauuc

SEQ ID NO: 188769 - RNA, 22 nt, Human
uggagguggcacaagggagguc

SEQ ID NO: 188770 - RNA, 22 nt, Human
guugccaggggcugcugucacc

SEQ ID NO: 188771 - RNA, 22 nt, Human
agucuagauguguacuagguua

SEQ ID NO: 188772 - RNA, 22 nt, Human
aaugggaaagagacuagaugcu

SEQ ID NO: 188773 - RNA, 22 nt, Human
uaucacuacacuaagauacaga

SEQ ID NO: 188774 - RNA, 20 nt, Human
auagacaaagacaugccaga

SEQ ID NO: 188775 - RNA, 19 nt, Human
ggggccugugauggucaca

SEQ ID NO: 188776 - RNA, 22 nt, Human
aagaauguggguggauaugaug

SEQ ID NO: 188777 - RNA, 22 nt, Human
gaguuaauucgaauauucuagc

SEQ ID NO: 188778 - RNA, 22 nt, Human
uugugcuccugugagaaucuag

SEQ ID NO: 188779 - RNA, 22 nt, Human
acagaguggaguucaguaaaua

SEQ ID NO: 188780 - RNA, 22 nt, Human
caggaggugacuuccagggguu

SEQ ID NO: 188781 - RNA, 22 nt, Human
uccaauauuucucacauaugga

SEQ ID NO: 188782 - RNA, 22 nt, Human
gccaggcauguccucugcagaa

SEQ ID NO: 188783 - RNA, 22 nt, Human
ucuggcaggcaaucggcucugg

SEQ ID NO: 188784 - RNA, 22 nt, Human
auucacauuuagacaucaggua

SEQ ID NO: 188785 - RNA, 22 nt, Human
cagaaagcgggaugcagcaugu

SEQ ID NO: 188786 - RNA, 22 nt, Human
cauuuugugcuagacacuaugg

SEQ ID NO: 188787 - RNA, 22 nt, Human
ugggagccauuuuagaggcugc

SEQ ID NO: 188788 - RNA, 22 nt, Human
cuccccuccuuaggucuucuag

SEQ ID NO: 188789 - RNA, 17 nt, Human
caggcacaugaagccag

SEQ ID NO: 188790 - RNA, 22 nt, Human
ggcugaaagcgcgacuugcccc

SEQ ID NO: 188791 - RNA, 22 nt, Human
auguaaacuuagauaagcagua

SEQ ID NO: 188792 - RNA, 20 nt, Human
aaagagaagccucaccuugu

SEQ ID NO: 188793 - RNA, 22 nt, Human
ugcaaacagccuugaaagaggg

SEQ ID NO: 188794 - RNA, 22 nt, Human
cccugggauucaauuucacucu

SEQ ID NO: 188795 - RNA, 22 nt, Human
cucauuuaccuuugcaaucaag

SEQ ID NO: 188796 - RNA, 20 nt, Human
ccagagcagccacugaaguu

SEQ ID NO: 188797 - RNA, 22 nt, Human
uuccuucuggaagcuucagggg

SEQ ID NO: 188798 - RNA, 22 nt, Human
ugcaaauguguagguuuacaua

SEQ ID NO: 188799 - RNA, 22 nt, Human
caggacucuugucaucaucagu

SEQ ID NO: 188800 - RNA, 22 nt, Human
ugcaggcucacccuggagcuga

SEQ ID NO: 188801 - RNA, 22 nt, Human
ccugagaguaggugucucuuua

SEQ ID NO: 188802 - RNA, 22 nt, Human
ugguauuuccaggcuuauggua

SEQ ID NO: 188803 - RNA, 22 nt, Human
ucugagacacucuugugauggg

SEQ ID NO: 188804 - RNA, 22 nt, Human
gaaggcuugccgggaagcggca

SEQ ID NO: 188805 - RNA, 20 nt, Human
uucucuggauagccagaugu

SEQ ID NO: 188806 - RNA, 22 nt, Human
acacuugauaggucaaaucagu

SEQ ID NO: 188807 - RNA, 21 nt, Human
agcugcagucaagccagaggu

SEQ ID NO: 188808 - RNA, 22 nt, Human
ucucauugguaugauguguaga

SEQ ID NO: 188809 - RNA, 22 nt, Human
augcuguguggucaaguuaauu

SEQ ID NO: 188810 - RNA, 22 nt, Human
gauaauauuagaagauacaaau

SEQ ID NO: 188811 - RNA, 22 nt, Human
aagugcauauuuuuguuguaga

SEQ ID NO: 188812 - RNA, 22 nt, Human
cuuuauauccagauguuuggug

SEQ ID NO: 188813 - RNA, 22 nt, Human
ucagugcaggaaucucuagcca

SEQ ID NO: 188814 - RNA, 22 nt, Human
uuuuuaagcuccuuugauguca

SEQ ID NO: 188815 - RNA, 22 nt, Human
aaggaaauuagguuauuuugcu

SEQ ID NO: 188816 - RNA, 22 nt, Human
ccuggcacaucuaacucacucu

SEQ ID NO: 188817 - RNA, 22 nt, Human
ccacugcccccugaagaccagg

SEQ ID NO: 188818 - RNA, 22 nt, Human
ucuggcaguuugagaaaggcua

SEQ ID NO: 188819 - RNA, 22 nt, Human
agugcagggccugcccagcagg

SEQ ID NO: 188820 - RNA, 22 nt, Human
gugagcaggauuucauggugua

SEQ ID NO: 188821 - RNA, 22 nt, Human
uggccaggcauucagauaagac

SEQ ID NO: 188822 - RNA, 22 nt, Human
cugaggagcagcuggcccgcua

SEQ ID NO: 188823 - RNA, 22 nt, Human
ugggcucucgucccugcagaag

SEQ ID NO: 188824 - RNA, 22 nt, Human
acaagauagcuuagaagauuca

SEQ ID NO: 188825 - RNA, 22 nt, Human
aaggaacacuacaaggcuggga

SEQ ID NO: 188826 - RNA, 20 nt, Human
ugcugcagacagggccauug

SEQ ID NO: 188827 - RNA, 22 nt, Human
uccugcagaucaaagccuuuga

SEQ ID NO: 188828 - RNA, 22 nt, Human
gcuccuguaauuuuuaaaaguc

SEQ ID NO: 188829 - RNA, 22 nt, Human
cucuuuggggugccccacuggu

SEQ ID NO: 188830 - RNA, 22 nt, Human
ucuguaggcuuacgcggcuucu

SEQ ID NO: 188831 - RNA, 22 nt, Human
agggucaguucugugagguguu

SEQ ID NO: 188832 - RNA, 22 nt, Human
guggcagauugcucaccauggu

SEQ ID NO: 188833 - RNA, 22 nt, Human
ccuggagggcgccgcacagucc

SEQ ID NO: 188834 - RNA, 19 nt, Human
agugugagacuccaucuca

SEQ ID NO: 188835 - RNA, 22 nt, Human
gcuguggcucucacaagcaaau

SEQ ID NO: 188836 - RNA, 22 nt, Human
ggugccagaguggcccaggggc

SEQ ID NO: 188837 - RNA, 22 nt, Human
caagggaagaggacagggaccu

SEQ ID NO: 188838 - RNA, 22 nt, Human
gcacauaugcuguaagcacaug

SEQ ID NO: 188839 - RNA, 22 nt, Human
ucaccaggcuccuguuaagaug

SEQ ID NO: 188840 - RNA, 22 nt, Human
ugucacaguuuguacuuuauag

SEQ ID NO: 188841 - RNA, 22 nt, Human
aacauauaaacucuuaaguuca

SEQ ID NO: 188842 - RNA, 22 nt, Human
gagcacagcuggagguagcauu

SEQ ID NO: 188843 - RNA, 22 nt, Human
uuuggaagacagggcaggaaag

SEQ ID NO: 188844 - RNA, 22 nt, Human
gcauccaaaccauucaucagcc

SEQ ID NO: 188845 - RNA, 22 nt, Human
ggugcaaaaguaauuugguuuu

SEQ ID NO: 188846 - RNA, 22 nt, Human
ggagcugagacccaguggcuga

SEQ ID NO: 188847 - RNA, 22 nt, Human
ccugugcauugaccacacucuc

SEQ ID NO: 188848 - RNA, 22 nt, Human
gccaccuguuucagaugugguu

SEQ ID NO: 188849 - RNA, 22 nt, Human
cacagcauuaacugggacagcu

SEQ ID NO: 188850 - RNA, 22 nt, Human
guggguggggagcucucuggag

SEQ ID NO: 188851 - RNA, 22 nt, Human
ucugaauucugacaauuugaau

SEQ ID NO: 188852 - RNA, 22 nt, Human
acaguguggggugagauggaac

SEQ ID NO: 188853 - RNA, 22 nt, Human
gagggcucugaaaggaggucac

SEQ ID NO: 188854 - RNA, 22 nt, Human
gcuggagguuucaccugaguuu

SEQ ID NO: 188855 - RNA, 22 nt, Human
uugggaaguaauaugguggucu

SEQ ID NO: 188856 - RNA, 22 nt, Human
auucuuauuauaguaaaacagu

SEQ ID NO: 188857 - RNA, 22 nt, Human
gaguccuucuggcuggcaggau

SEQ ID NO: 188858 - RNA, 22 nt, Human
gacaagauaaugaagugcaauu

SEQ ID NO: 188859 - RNA, 22 nt, Human
agugucaguugccuugucauaa

SEQ ID NO: 188860 - RNA, 22 nt, Human
gguggcagaauaauugaagguc

SEQ ID NO: 188861 - RNA, 22 nt, Human
ugagcagaagcccuccuggacu

SEQ ID NO: 188862 - RNA, 22 nt, Human
ccuggccucuccgaguaaccug

SEQ ID NO: 188863 - RNA, 22 nt, Human
uuuuuacacuuagcauugagcg

SEQ ID NO: 188864 - RNA, 23 nt, Human
ucagagaggcccccugcagagau

SEQ ID NO: 188865 - RNA, 22 nt, Human
ccucagaggugaacaucagugc

SEQ ID NO: 188866 - RNA, 22 nt, Human
uagaagcaguaauagaaauagg

SEQ ID NO: 188867 - RNA, 22 nt, Human
cacugguagagagaagacaagg

SEQ ID NO: 188868 - RNA, 22 nt, Human
ugguccuuuaagucuuucucug

SEQ ID NO: 188869 - RNA, 22 nt, Human
uggcaaaggaaaugauuuaaga

SEQ ID NO: 188870 - RNA, 22 nt, Human
ucuccagggacauguuucugga

SEQ ID NO: 188871 - RNA, 22 nt, Human
auguuaaaagugaggauggcca

SEQ ID NO: 188872 - RNA, 22 nt, Human
guucucugaguccuggcaaaau

SEQ ID NO: 188873 - RNA, 22 nt, Human
acacagaugcauuacacaucua

SEQ ID NO: 188874 - RNA, 22 nt, Human
cauuuguaguaucuguuuauau

SEQ ID NO: 188875 - RNA, 22 nt, Human
ggcccugagucuagcugcucuu

SEQ ID NO: 188876 - RNA, 22 nt, Human
aggcaucuaacagagaucuuua

SEQ ID NO: 188877 - RNA, 22 nt, Human
caggugcucugcugcagguaag

SEQ ID NO: 188878 - RNA, 22 nt, Human
caggcuggagugaguguagugg

SEQ ID NO: 188879 - RNA, 23 nt, Human
ugucuucgacuccugcgugcuuc

SEQ ID NO: 188880 - RNA, 22 nt, Human
ucagcaggcacaccaaaaacug

SEQ ID NO: 188881 - RNA, 22 nt, Human
agcuaggccauuuguucaguga

SEQ ID NO: 188882 - RNA, 22 nt, Human
uugagcaaugcugcaaagagau

SEQ ID NO: 188883 - RNA, 22 nt, Human
uuggcuaugcuuguguucaguu

SEQ ID NO: 188884 - RNA, 22 nt, Human
cccaggcugcaugaguccaugg

SEQ ID NO: 188885 - RNA, 19 nt, Human
acugagaccacagacaagu

SEQ ID NO: 188886 - RNA, 18 nt, Human
gcacagagcccaggcucu

SEQ ID NO: 188887 - RNA, 22 nt, Human
agagccagcauuugggcccugc

SEQ ID NO: 188888 - RNA, 22 nt, Human
ccagcuccaggacugggagcug

SEQ ID NO: 188889 - RNA, 22 nt, Human
cagagucauugacuuccaggag

SEQ ID NO: 188890 - RNA, 22 nt, Human
cauggcagugauucagccuuug

SEQ ID NO: 188891 - RNA, 22 nt, Human
aauugcuuagagaauccaggua

SEQ ID NO: 188892 - RNA, 21 nt, Human
aauagcauucaggaugggcuc

SEQ ID NO: 188893 - RNA, 22 nt, Human
gaaagcacaguucugaccaugu

SEQ ID NO: 188894 - RNA, 19 nt, Human
ugccucagggcuuugagga

SEQ ID NO: 188895 - RNA, 22 nt, Human
cugugucccccucagccaggug

SEQ ID NO: 188896 - RNA, 22 nt, Human
uggcuuuacuuaaacugaauca

SEQ ID NO: 188897 - RNA, 22 nt, Human
cacacuuugugcuaaucuauuu

SEQ ID NO: 188898 - RNA, 22 nt, Human
ucucuuuguggccaggagagga

SEQ ID NO: 188899 - RNA, 22 nt, Human
cucagccaugcaacaugcuggg

SEQ ID NO: 188900 - RNA, 22 nt, Human
uaagcugugggagauuggcaua

SEQ ID NO: 188901 - RNA, 22 nt, Human
augcaaaauaaggcagaaacau

SEQ ID NO: 188902 - RNA, 22 nt, Human
gugaaauauuuaacguccaggu

SEQ ID NO: 188903 - RNA, 22 nt, Human
gcaggcagaucaccugucagga

SEQ ID NO: 188904 - RNA, 22 nt, Human
uggaguugcagcuaccagacau

SEQ ID NO: 188905 - RNA, 22 nt, Human
agucacauucugggguacuggg

SEQ ID NO: 188906 - RNA, 22 nt, Human
uuggaacaggauucaauuaaag

SEQ ID NO: 188907 - RNA, 22 nt, Human
caugaggugauaaagcugggau

SEQ ID NO: 188908 - RNA, 17 nt, Human
gccuggcccagccuggc

SEQ ID NO: 188909 - RNA, 22 nt, Human
uuaaaagagacuuccuuuguuu

SEQ ID NO: 188910 - RNA, 22 nt, Human
guguguccucaguaguggcaug

SEQ ID NO: 188911 - RNA, 22 nt, Human
uaugauaaccuguuguaguuug

SEQ ID NO: 188912 - RNA, 19 nt, Human
ugaggccagcuggcauuuu

SEQ ID NO: 188913 - RNA, 22 nt, Human
aagauggcugcagcaauuccaa

SEQ ID NO: 188914 - RNA, 22 nt, Human
ucccagggcacucacccucccu

SEQ ID NO: 188915 - RNA, 22 nt, Human
ucuuuccaaggacucuguagca

SEQ ID NO: 188916 - RNA, 22 nt, Human
uuacaaacaacagacauuuauu

SEQ ID NO: 188917 - RNA, 22 nt, Human
cuuucucuucgaaaaccugccc

SEQ ID NO: 188918 - RNA, 22 nt, Human
cugcugguugcacagagcuagg

SEQ ID NO: 188919 - RNA, 22 nt, Human
gggaacuugccccagaggaauu

SEQ ID NO: 188920 - RNA, 22 nt, Human
ugccaccccucugcacccucag

SEQ ID NO: 188921 - RNA, 22 nt, Human
agcaccagcaacuaugggcugc

SEQ ID NO: 188922 - RNA, 22 nt, Human
ggcuucuugugugucaggcucu

SEQ ID NO: 188923 - RNA, 22 nt, Human
ccagcaggacuuuggaaauaug

SEQ ID NO: 188924 - RNA, 22 nt, Human
ugcuggagaugaaagggcccug

SEQ ID NO: 188925 - RNA, 22 nt, Human
acacauuuacauguuuacguau

SEQ ID NO: 188926 - RNA, 22 nt, Human
ucauuagaaaugcagauucuca

SEQ ID NO: 188927 - RNA, 22 nt, Human
agauggugauagagcugggauu

SEQ ID NO: 188928 - RNA, 22 nt, Human
ccuuccuuuuacugucuccgga

SEQ ID NO: 188929 - RNA, 22 nt, Human
auuucuucagguucuucuagga

SEQ ID NO: 188930 - RNA, 22 nt, Human
cagguccccuccccuaccaggc

SEQ ID NO: 188931 - RNA, 22 nt, Human
guggcccaggcuuggcgcuggc

SEQ ID NO: 188932 - RNA, 22 nt, Human
uuuccucugggcccugccaccc

SEQ ID NO: 188933 - RNA, 22 nt, Human
cuggcugugcagucuuccagaa

SEQ ID NO: 188934 - RNA, 22 nt, Human
acuuuuuaguuuccucaaacau

SEQ ID NO: 188935 - RNA, 17 nt, Human
gauuagaaaacacauga

SEQ ID NO: 188936 - RNA, 22 nt, Human
gaggaagccccauugaagccag

SEQ ID NO: 188937 - RNA, 22 nt, Human
ugaaggaggaauguggccucca

SEQ ID NO: 188938 - RNA, 17 nt, Human
uguccauuugccuggag

SEQ ID NO: 188939 - RNA, 22 nt, Human
ucagcuuucucuucuaucgaua

SEQ ID NO: 188940 - RNA, 22 nt, Human
ccccuuggcugcucucaagucc

SEQ ID NO: 188941 - RNA, 22 nt, Human
acacaguucuuucacuguuggu

SEQ ID NO: 188942 - RNA, 22 nt, Human
aaagcuauuuauuacagagaau

SEQ ID NO: 188943 - RNA, 22 nt, Human
ucaggcaggacaauuauuuagg

SEQ ID NO: 188944 - RNA, 23 nt, Human
ccacuggagaaaguggcaggugg

SEQ ID NO: 188945 - RNA, 22 nt, Human
auaguacauggguguccucaca

SEQ ID NO: 188946 - RNA, 22 nt, Human
uacaacaguucaugaaaugaaa

SEQ ID NO: 188947 - RNA, 22 nt, Human
uugaggcaaaaucaacgggaag

SEQ ID NO: 188948 - RNA, 23 nt, Human
cguguccuucagggagagugugg

SEQ ID NO: 188949 - RNA, 22 nt, Human
agcggcuggaccagcguucaag

SEQ ID NO: 188950 - RNA, 22 nt, Human
aauaugauccuuaaccuucaug

SEQ ID NO: 188951 - RNA, 22 nt, Human
caggagugaguuggggucuaca

SEQ ID NO: 188952 - RNA, 22 nt, Human
cugccuuugcccuugacacugu

SEQ ID NO: 188953 - RNA, 22 nt, Human
uacuuuauuguaaaugcugaug

SEQ ID NO: 188954 - RNA, 22 nt, Human
uggagcagaggcugagguuggg

SEQ ID NO: 188955 - RNA, 22 nt, Human
ucaagacauauuaaaugugcga

SEQ ID NO: 188956 - RNA, 22 nt, Human
gacagacauuuccugauccaau

SEQ ID NO: 188957 - RNA, 22 nt, Human
aguguccuugauuccuguuguu

SEQ ID NO: 188958 - RNA, 22 nt, Human
ugacugaaggacuagauugauu

SEQ ID NO: 188959 - RNA, 22 nt, Human
uucuacaaauauuuacuguucc

SEQ ID NO: 188960 - RNA, 22 nt, Human
uugucauugggguuauuuguua

SEQ ID NO: 188961 - RNA, 22 nt, Human
guggagggaaugaaucuucucu

SEQ ID NO: 188962 - RNA, 22 nt, Human
caagggccaucugagggcacug

SEQ ID NO: 188963 - RNA, 22 nt, Human
ggaggauuugucaucugaagau

SEQ ID NO: 188964 - RNA, 22 nt, Human
uagcugaauaaugcgucugcag

SEQ ID NO: 188965 - RNA, 22 nt, Human
ucuuuggauggaaaauguauuc

SEQ ID NO: 188966 - RNA, 22 nt, Human
aaagccaucuguauuaagugaa

SEQ ID NO: 188967 - RNA, 22 nt, Human
caugagaaugaagaagacuuaa

SEQ ID NO: 188968 - RNA, 22 nt, Human
cuguggcucauucuugguggca

SEQ ID NO: 188969 - RNA, 22 nt, Human
aggugacaggacaggagcuggu

SEQ ID NO: 188970 - RNA, 22 nt, Human
caggagacaauggcuguggggc

SEQ ID NO: 188971 - RNA, 22 nt, Human
uguuacaggaaauagaauuacc

SEQ ID NO: 188972 - RNA, 21 nt, Human
cagagccagacugcugaauuu

SEQ ID NO: 188973 - RNA, 22 nt, Human
caggcuuggagggcaguggcau

SEQ ID NO: 188974 - RNA, 22 nt, Human
cuugggauguaaccuuuguucc

SEQ ID NO: 188975 - RNA, 22 nt, Human
caaagcugugaauuccuacaaa

SEQ ID NO: 188976 - RNA, 23 nt, Human
ucucaaauaugaucugggucauc

SEQ ID NO: 188977 - RNA, 22 nt, Human
uggcccaguagaaaagggaucg

SEQ ID NO: 188978 - RNA, 22 nt, Human
uggugcugccaggcuccugcca

SEQ ID NO: 188979 - RNA, 22 nt, Human
uccaggcagagcaacaaaauau

SEQ ID NO: 188980 - RNA, 22 nt, Human
auugagcagcuucucugccauc

SEQ ID NO: 188981 - RNA, 23 nt, Human
gggagcuguggugaaaagaggug

SEQ ID NO: 188982 - RNA, 22 nt, Human
aguggacucuucccagugcuug

SEQ ID NO: 188983 - RNA, 20 nt, Human
ggaaucaggguaauguacug

SEQ ID NO: 188984 - RNA, 22 nt, Human
uggcagguagaguucugagaug

SEQ ID NO: 188985 - RNA, 22 nt, Human
uugcacaucuaauaaugcuaga

SEQ ID NO: 188986 - RNA, 22 nt, Human
uguggcagaaccagaauucaaa

SEQ ID NO: 188987 - RNA, 22 nt, Human
ugggagcccaagggagcugccg

SEQ ID NO: 188988 - RNA, 22 nt, Human
aggaagaguguuaccuaugggu

SEQ ID NO: 188989 - RNA, 22 nt, Human
uuagagcugauaguacacuggu

SEQ ID NO: 188990 - RNA, 22 nt, Human
gccuccccugcaauuguccuug

SEQ ID NO: 188991 - RNA, 22 nt, Human
acaguuuagagcaugaugacca

SEQ ID NO: 188992 - RNA, 22 nt, Human
agaggaaggaugcauauccaaa

SEQ ID NO: 188993 - RNA, 22 nt, Human
cugcucuggcuguguacuucag

SEQ ID NO: 188994 - RNA, 22 nt, Human
aagggcugaaagaccuugggca

SEQ ID NO: 188995 - RNA, 22 nt, Human
ccugggccaggcuugggaaugc

SEQ ID NO: 188996 - RNA, 22 nt, Human
gcucugagcccccagaagcaga

SEQ ID NO: 188997 - RNA, 22 nt, Human
aaaggcuaauuaaccaccuggu

SEQ ID NO: 188998 - RNA, 22 nt, Human
uuucauaaccucaagcuacagu

SEQ ID NO: 188999 - RNA, 22 nt, Human
uggagagucucugagccagggc

SEQ ID NO: 189000 - RNA, 18 nt, Human
acucaggaaaugaugaca

SEQ ID NO: 189001 - RNA, 18 nt, Human
agcuccugaacucugugg

SEQ ID NO: 189002 - RNA, 22 nt, Human
cccucagagccugaagcaagca

SEQ ID NO: 189003 - RNA, 21 nt, Human
aacuacaguuguuccuucauu

SEQ ID NO: 189004 - RNA, 23 nt, Human
cucuccaccuucccacccaggga

SEQ ID NO: 189005 - RNA, 18 nt, Human
cucaguguuugcugaaaa

SEQ ID NO: 189006 - RNA, 22 nt, Human
ugcuuccugcuaaggcugccug

SEQ ID NO: 189007 - RNA, 22 nt, Human
agcuggcuuuaugguuggcuaa

SEQ ID NO: 189008 - RNA, 22 nt, Human
cuucuggcguuggaggucugag

SEQ ID NO: 189009 - RNA, 22 nt, Human
ugagcaguucgacuucuucccc

SEQ ID NO: 189010 - RNA, 22 nt, Human
cuguggcugaguuccuuauguu

SEQ ID NO: 189011 - RNA, 22 nt, Human
uacaugcuuaaaaugcaauguu

SEQ ID NO: 189012 - RNA, 22 nt, Human
ccagccacgaagcucccuucau

SEQ ID NO: 189013 - RNA, 22 nt, Human
cacuuauuaugggcuaggaacu

SEQ ID NO: 189014 - RNA, 22 nt, Human
uccuucugaaaaaugcacacga

SEQ ID NO: 189015 - RNA, 19 nt, Human
gccacaucuguaccccuuu

SEQ ID NO: 189016 - RNA, 22 nt, Human
aucuuuauuuauugagcacuua

SEQ ID NO: 189017 - RNA, 21 nt, Human
ugcucagucugucuccagcuu

SEQ ID NO: 189018 - RNA, 22 nt, Human
gagagggcugccuggugugagg

SEQ ID NO: 189019 - RNA, 22 nt, Human
aauauuuauauuucucuucccu

SEQ ID NO: 189020 - RNA, 21 nt, Human
ccagucuguaaaauggggaca

SEQ ID NO: 189021 - RNA, 18 nt, Human
ucagcuggggcugcagcc

SEQ ID NO: 189022 - RNA, 21 nt, Human
ccaggguccagcugccauggu

SEQ ID NO: 189023 - RNA, 22 nt, Human
uaacacugugcccagaguccca

SEQ ID NO: 189024 - RNA, 22 nt, Human
acaggcugcugggcuccgugcu

SEQ ID NO: 189025 - RNA, 22 nt, Human
uuucccaauugagagguucugu

SEQ ID NO: 189026 - RNA, 23 nt, Human
agcuggguggccugcgugaagcu

SEQ ID NO: 189027 - RNA, 22 nt, Human
ucugagggugggagaaggagcu

SEQ ID NO: 189028 - RNA, 22 nt, Human
caaauacuuuuagccuauugag

SEQ ID NO: 189029 - RNA, 22 nt, Human
uuuuacaggugaaaaaugaaga

SEQ ID NO: 189030 - RNA, 22 nt, Human
uccucagaauccaaacugcagu

SEQ ID NO: 189031 - RNA, 22 nt, Human
acccagggcagccagcggggag

SEQ ID NO: 189032 - RNA, 22 nt, Human
guggcagaaauauucuugcucu

SEQ ID NO: 189033 - RNA, 22 nt, Human
ugcagaaauucagaaagcauaa

SEQ ID NO: 189034 - RNA, 22 nt, Human
uucacuguaugagagggcuuga

SEQ ID NO: 189035 - RNA, 22 nt, Human
agugaaauaaagcugccuaugg

SEQ ID NO: 189036 - RNA, 22 nt, Human
uguguucaugucacuggaaucc

SEQ ID NO: 189037 - RNA, 22 nt, Human
aucacuguguauguauaugcag

SEQ ID NO: 189038 - RNA, 22 nt, Human
cugccuggccugaucuccacgc

SEQ ID NO: 189039 - RNA, 22 nt, Human
ucaguaguuuugaucugagcag

SEQ ID NO: 189040 - RNA, 22 nt, Human
gcucugggguuggaaagugauc

SEQ ID NO: 189041 - RNA, 22 nt, Human
ggucaggauccaagucugugcu

SEQ ID NO: 189042 - RNA, 22 nt, Human
cuuguauuaagcuuagagaggc

SEQ ID NO: 189043 - RNA, 22 nt, Human
uaaagcaagacacacccauagc

SEQ ID NO: 189044 - RNA, 22 nt, Human
ccccucugcaaauagccaggcu

SEQ ID NO: 189045 - RNA, 22 nt, Human
uuucaucucucuaaaagacagu

SEQ ID NO: 189046 - RNA, 22 nt, Human
aaucauaauuguauacauucau

SEQ ID NO: 189047 - RNA, 22 nt, Human
agcugcagauucucuacuucau

SEQ ID NO: 189048 - RNA, 22 nt, Human
ggaggaggggugacugaaugcu

SEQ ID NO: 189049 - RNA, 22 nt, Human
cauucugacccuaugauuuaag

SEQ ID NO: 189050 - RNA, 22 nt, Human
uuucaaagggaaguuaugaagu

SEQ ID NO: 189051 - RNA, 22 nt, Human
uacugaaagacugaauauuuag

SEQ ID NO: 189052 - RNA, 22 nt, Human
agauaacugguuuacauuauug

SEQ ID NO: 189053 - RNA, 22 nt, Human
gcugcugcaagagccagcucuu

SEQ ID NO: 189054 - RNA, 22 nt, Human
ccacaggacggaggucuggccg

SEQ ID NO: 189055 - RNA, 22 nt, Human
gacugaaggucucagcauguga

SEQ ID NO: 189056 - RNA, 22 nt, Human
aacacagguucauucugugagg

SEQ ID NO: 189057 - RNA, 23 nt, Human
acagacauuguacaucuuguuuu

SEQ ID NO: 189058 - RNA, 16 nt, Human
gggagggaguuggugg

SEQ ID NO: 189059 - RNA, 22 nt, Human
ucuuccucccuacagagcucag

SEQ ID NO: 189060 - RNA, 22 nt, Human
aagagcauuuccacuggcacug

SEQ ID NO: 189061 - RNA, 22 nt, Human
aggaagaacagauaauggacgc

SEQ ID NO: 189062 - RNA, 22 nt, Human
uuuacaguccccaggugaggau

SEQ ID NO: 189063 - RNA, 22 nt, Human
acugggaaggaaaggaauguaa

SEQ ID NO: 189064 - RNA, 22 nt, Human
aagaaucuuuccaguuuugaug

SEQ ID NO: 189065 - RNA, 19 nt, Human
augaugcagagcugacuca

SEQ ID NO: 189066 - RNA, 22 nt, Human
caguggggggacugaggccuga

SEQ ID NO: 189067 - RNA, 22 nt, Human
ucccagugcugcuaaagaggua

SEQ ID NO: 189068 - RNA, 22 nt, Human
acaggcugagcguccaucuuca

SEQ ID NO: 189069 - RNA, 22 nt, Human
caaauagaacucacagacaaga

SEQ ID NO: 189070 - RNA, 22 nt, Human
gguccuggaaguguaaguggca

SEQ ID NO: 189071 - RNA, 21 nt, Human
uuccuggcggcagaaacguga

SEQ ID NO: 189072 - RNA, 22 nt, Human
uugcugggcucuucaacacaca

SEQ ID NO: 189073 - RNA, 22 nt, Human
uucauuaguucugaagaugucu

SEQ ID NO: 189074 - RNA, 22 nt, Human
aggccacagccugggaggugac

SEQ ID NO: 189075 - RNA, 22 nt, Human
uggaggcagguggaggagugaa

SEQ ID NO: 189076 - RNA, 17 nt, Human
uggucuggaagaacuga

SEQ ID NO: 189077 - RNA, 22 nt, Human
gagagguuccucccugcuuuac

SEQ ID NO: 189078 - RNA, 22 nt, Human
uggaagccucaguuugccuucu

SEQ ID NO: 189079 - RNA, 22 nt, Human
gaaaaggauugguaaaauaucu

SEQ ID NO: 189080 - RNA, 22 nt, Human
gccagcuggcugcaggucccag

SEQ ID NO: 189081 - RNA, 22 nt, Human
caggguggcccuguggucucau

SEQ ID NO: 189082 - RNA, 23 nt, Human
uggauaaaauacuuacauucaac

SEQ ID NO: 189083 - RNA, 17 nt, Human
ugaggccauggcaccau

SEQ ID NO: 189084 - RNA, 22 nt, Human
cugcccugggauggucugugcg

SEQ ID NO: 189085 - RNA, 22 nt, Human
uggcaggaagacguggggcacc

SEQ ID NO: 189086 - RNA, 22 nt, Human
gaauguuagagauucuuagguu

SEQ ID NO: 189087 - RNA, 22 nt, Human
uuucacaaucaaauggugaaau

SEQ ID NO: 189088 - RNA, 22 nt, Human
cguccaggaagaucggccgaug

SEQ ID NO: 189089 - RNA, 22 nt, Human
accuuggcaguuucuaccuuuu

SEQ ID NO: 189090 - RNA, 22 nt, Human
ucugcaagaucauuaaagcaga

SEQ ID NO: 189091 - RNA, 22 nt, Human
uucaacaaugaaagcuaaggaa

SEQ ID NO: 189092 - RNA, 22 nt, Human
guguguccaaggccacaauagc

SEQ ID NO: 189093 - RNA, 18 nt, Human
ucaggcucucuggcuaga

SEQ ID NO: 189094 - RNA, 22 nt, Human
ugggagcagcugggaacacagc

SEQ ID NO: 189095 - RNA, 22 nt, Human
gggagggaggugcugguucacg

SEQ ID NO: 189096 - RNA, 22 nt, Human
ucucagcacguuguuuucauug

SEQ ID NO: 189097 - RNA, 22 nt, Human
gaccacagaggugugggagaga

SEQ ID NO: 189098 - RNA, 22 nt, Human
agcagcucauggaguaggcacu

SEQ ID NO: 189099 - RNA, 22 nt, Human
accaggagggacccugguggcc

SEQ ID NO: 189100 - RNA, 22 nt, Human
uuauugaguuuacagcuuuaga

SEQ ID NO: 189101 - RNA, 22 nt, Human
caaaugaaguccaaagggcuua

SEQ ID NO: 189102 - RNA, 22 nt, Human
ucagugcuugccucuggaggag

SEQ ID NO: 189103 - RNA, 22 nt, Human
uccugugggcucucggccucca

SEQ ID NO: 189104 - RNA, 20 nt, Human
agcaggugacggggccugcu

SEQ ID NO: 189105 - RNA, 22 nt, Human
aucaggaucaugcuggguggga

SEQ ID NO: 189106 - RNA, 22 nt, Human
cugggaggcagucucucuagaa

SEQ ID NO: 189107 - RNA, 22 nt, Human
ucaucugaacaugcagccugug

SEQ ID NO: 189108 - RNA, 22 nt, Human
ugcccugguagacacagacugu

SEQ ID NO: 189109 - RNA, 21 nt, Human
ugucuucauaugagauggugu

SEQ ID NO: 189110 - RNA, 22 nt, Human
aacaggaugucauuucucaugu

SEQ ID NO: 189111 - RNA, 23 nt, Human
ggacaugucucuggguauuuuga

SEQ ID NO: 189112 - RNA, 22 nt, Human
augcccugccaagcaggcuaaa

SEQ ID NO: 189113 - RNA, 22 nt, Human
acaagagauuaucuacagauga

SEQ ID NO: 189114 - RNA, 22 nt, Human
cagccccagcacuuagcugagu

SEQ ID NO: 189115 - RNA, 22 nt, Human
ucuuguguggaacugcuuuucu

SEQ ID NO: 189116 - RNA, 22 nt, Human
ugagaaucagcugcacagaggu

SEQ ID NO: 189117 - RNA, 22 nt, Human
uuacuaaguuuuaugcaacuua

SEQ ID NO: 189118 - RNA, 22 nt, Human
gcagcagcccagggcucucaga

SEQ ID NO: 189119 - RNA, 22 nt, Human
uggcagguacccauuggcugua

SEQ ID NO: 189120 - RNA, 22 nt, Human
ucaacuaacucuauuauuugaa

SEQ ID NO: 189121 - RNA, 22 nt, Human
cauuguaagaggcuuugcagca

SEQ ID NO: 189122 - RNA, 22 nt, Human
gucuggcuuuauauuugcuauu

SEQ ID NO: 189123 - RNA, 22 nt, Human
gcuuuugucauucaaaugcucu

SEQ ID NO: 189124 - RNA, 22 nt, Human
accagcagaguugaggaggaca

SEQ ID NO: 189125 - RNA, 22 nt, Human
uccucagaugcucuuggacgcc

SEQ ID NO: 189126 - RNA, 22 nt, Human
ggaaggguuuggaaagccgaga

SEQ ID NO: 189127 - RNA, 22 nt, Human
uggugagcucuggcagucugug

SEQ ID NO: 189128 - RNA, 18 nt, Human
gcagggcugcacacgcau

SEQ ID NO: 189129 - RNA, 22 nt, Human
ucugggaagcugcgugccuguu

SEQ ID NO: 189130 - RNA, 22 nt, Human
cagugcaggcugggggcccugc

SEQ ID NO: 189131 - RNA, 22 nt, Human
ggccagcauauagagugaagua

SEQ ID NO: 189132 - RNA, 22 nt, Human
ucagcucugcaaggucaccucc

SEQ ID NO: 189133 - RNA, 22 nt, Human
aggcucuccagagagcugcuuu

SEQ ID NO: 189134 - RNA, 22 nt, Human
cagaacuguuauaacagcuguu

SEQ ID NO: 189135 - RNA, 22 nt, Human
agacauccuggggagggcaaug

SEQ ID NO: 189136 - RNA, 22 nt, Human
agcccugccucuccaaugccca

SEQ ID NO: 189137 - RNA, 22 nt, Human
cagcugguagguagcagauuug

SEQ ID NO: 189138 - RNA, 22 nt, Human
ugcaacuuguuuggagagaaag

SEQ ID NO: 189139 - RNA, 22 nt, Human
aggcagcuggaaaacuccaggc

SEQ ID NO: 189140 - RNA, 22 nt, Human
uccacagggaugccugcggcuu

SEQ ID NO: 189141 - RNA, 22 nt, Human
uagcugaagggcauuuaauaaa

SEQ ID NO: 189142 - RNA, 22 nt, Human
acuucauguuguuuacaacuua

SEQ ID NO: 189143 - RNA, 22 nt, Human
ccugugcucccauagcuucugu

SEQ ID NO: 189144 - RNA, 22 nt, Human
uaaggaauagugcuaugaaaaa

SEQ ID NO: 189145 - RNA, 22 nt, Human
agcaggcauagaguagcacuca

SEQ ID NO: 189146 - RNA, 22 nt, Human
uggugcaguagagcugucuggg

SEQ ID NO: 189147 - RNA, 22 nt, Human
ugaggaauguuuugagugccga

SEQ ID NO: 189148 - RNA, 22 nt, Human
caauucaugugagcggacucuu

SEQ ID NO: 189149 - RNA, 22 nt, Human
ucuuuucuguaacucagugucu

SEQ ID NO: 189150 - RNA, 22 nt, Human
ucccaggcuaggccucugcguu

SEQ ID NO: 189151 - RNA, 22 nt, Human
ugggcaggugcuauuuuccaug

SEQ ID NO: 189152 - RNA, 22 nt, Human
aaagguaucauguccauacagu

SEQ ID NO: 189153 - RNA, 20 nt, Human
uccucccccaccuuugcagc

SEQ ID NO: 189154 - RNA, 22 nt, Human
uuucaugaggcugcauaaggag

SEQ ID NO: 189155 - RNA, 22 nt, Human
aaguguuuccauugugcaggcu

SEQ ID NO: 189156 - RNA, 22 nt, Human
ucugaggaaaaguucuugucac

SEQ ID NO: 189157 - RNA, 19 nt, Human
aggacccuuauccuggcuu

SEQ ID NO: 189158 - RNA, 21 nt, Human
cccaggagaagaaaagaugca

SEQ ID NO: 189159 - RNA, 18 nt, Human
uuacacuagccuugguuc

SEQ ID NO: 189160 - RNA, 22 nt, Human
cagcagagaugagauuccuaua

SEQ ID NO: 189161 - RNA, 22 nt, Human
uaaugcuucaauuuccuugauu

SEQ ID NO: 189162 - RNA, 21 nt, Human
ggguguggaaauuacauccug

SEQ ID NO: 189163 - RNA, 19 nt, Human
gcccugaguaagcuaggag

SEQ ID NO: 189164 - RNA, 22 nt, Human
cugcugcaacucuuuagagggu

SEQ ID NO: 189165 - RNA, 23 nt, Human
ugucaacaaaacuuucaggagaa

SEQ ID NO: 189166 - RNA, 22 nt, Human
gcagccaggggcugugaccugu

SEQ ID NO: 189167 - RNA, 22 nt, Human
aguccuggcauauagguccuca

SEQ ID NO: 189168 - RNA, 22 nt, Human
accaauuuuuacagcugugguu

SEQ ID NO: 189169 - RNA, 22 nt, Human
uucuuuaugcuucuguuuaggc

SEQ ID NO: 189170 - RNA, 22 nt, Human
uauuucugagaaccaacuuacc

SEQ ID NO: 189171 - RNA, 22 nt, Human
caugugcuguagcagagaggaa

SEQ ID NO: 189172 - RNA, 22 nt, Human
acccagagccagggucaggagc

SEQ ID NO: 189173 - RNA, 22 nt, Human
acaggcucgugcgcgcacgugu

SEQ ID NO: 189174 - RNA, 22 nt, Human
aaggugcucacgggcucaggga

SEQ ID NO: 189175 - RNA, 22 nt, Human
uuacaguuuaguccaagccaga

SEQ ID NO: 189176 - RNA, 22 nt, Human
gccuggugauaagcagugaccu

SEQ ID NO: 189177 - RNA, 22 nt, Human
cacucuggggaugcaaggagag

SEQ ID NO: 189178 - RNA, 22 nt, Human
cuuccaaauguaaauaaguuuc

SEQ ID NO: 189179 - RNA, 22 nt, Human
gugagagaucccccacucaucu

SEQ ID NO: 189180 - RNA, 19 nt, Human
ucucccagcugagaagggc

SEQ ID NO: 189181 - RNA, 22 nt, Human
uucugggucacccuucugcuca

SEQ ID NO: 189182 - RNA, 22 nt, Human
gcucagagaugucugcugccuu

SEQ ID NO: 189183 - RNA, 22 nt, Human
agcugccaucugaagaacugca

SEQ ID NO: 189184 - RNA, 22 nt, Human
cccaugagguggagguugcagu

SEQ ID NO: 189185 - RNA, 22 nt, Human
acuugccuguuacauuucuagu

SEQ ID NO: 189186 - RNA, 22 nt, Human
gauucauguuauagagagucag

SEQ ID NO: 189187 - RNA, 22 nt, Human
gcacagagucacuagcuaagca

SEQ ID NO: 189188 - RNA, 22 nt, Human
ugagcccaggaguaugaggcug

SEQ ID NO: 189189 - RNA, 22 nt, Human
agugaaauagcauuuaugaagc

SEQ ID NO: 189190 - RNA, 22 nt, Human
agcuccuguucugagagcagga

SEQ ID NO: 189191 - RNA, 22 nt, Human
uccagggcaugcucagacucag

SEQ ID NO: 189192 - RNA, 22 nt, Human
aaugcacauguuguaauaaaua

SEQ ID NO: 189193 - RNA, 22 nt, Human
gggaaggccgguccagucaggu

SEQ ID NO: 189194 - RNA, 22 nt, Human
gauauugugaugaugucuuugg

SEQ ID NO: 189195 - RNA, 22 nt, Human
cuccucuuuacccgcauggucu

SEQ ID NO: 189196 - RNA, 22 nt, Human
aucaggauguuuggcugucaua

SEQ ID NO: 189197 - RNA, 22 nt, Human
augggcuugacccuacagaaag

SEQ ID NO: 189198 - RNA, 22 nt, Human
ugcuacacucaaucagugcuau

SEQ ID NO: 189199 - RNA, 22 nt, Human
aagagcugcacauauuuauauc

SEQ ID NO: 189200 - RNA, 22 nt, Human
uuagggaaggcugcugucagcu

SEQ ID NO: 189201 - RNA, 22 nt, Human
aggaugagaagauuggaaucuu

SEQ ID NO: 189202 - RNA, 22 nt, Human
ugcccacauggugccauggcca

SEQ ID NO: 189203 - RNA, 22 nt, Human
ugcucuggaaauaaaugauuua

SEQ ID NO: 189204 - RNA, 22 nt, Human
aucaagaacuuauuuuggaaau

SEQ ID NO: 189205 - RNA, 22 nt, Human
uccuguggcuuccacgaccuaa

SEQ ID NO: 189206 - RNA, 22 nt, Human
cagacaggguccuguccgucac

SEQ ID NO: 189207 - RNA, 22 nt, Human
gagacugcauagauggccacaa

SEQ ID NO: 189208 - RNA, 22 nt, Human
cacaauuuguuuuaucaguauu

SEQ ID NO: 189209 - RNA, 19 nt, Human
uaaaucuguauucuucaaa

SEQ ID NO: 189210 - RNA, 22 nt, Human
cugcccucuagggaugcacugg

SEQ ID NO: 189211 - RNA, 22 nt, Human
ggaugugaaucugggcugagac

SEQ ID NO: 189212 - RNA, 22 nt, Human
acccugagggguauagcagaag

SEQ ID NO: 189213 - RNA, 22 nt, Human
aagaaucucucaagugugacaa

SEQ ID NO: 189214 - RNA, 22 nt, Human
uuagcuuuagagccauuacugg

SEQ ID NO: 189215 - RNA, 22 nt, Human
ucuagaagggugccgaucuuag

SEQ ID NO: 189216 - RNA, 22 nt, Human
cugcuuuggcucagugacauca

SEQ ID NO: 189217 - RNA, 22 nt, Human
caucuuauuuucuucuagugcu

SEQ ID NO: 189218 - RNA, 22 nt, Human
gaggcugguucugaaguacugu

SEQ ID NO: 189219 - RNA, 22 nt, Human
uuggaggaggcauuggaggauu

SEQ ID NO: 189220 - RNA, 22 nt, Human
aacaagauguuuugauauaugu

SEQ ID NO: 189221 - RNA, 22 nt, Human
ucagggaguaguuugugcuaug

SEQ ID NO: 189222 - RNA, 22 nt, Human
cccugggaaguauuccagcuau

SEQ ID NO: 189223 - RNA, 21 nt, Human
ggcugcagggagcccuggggu

SEQ ID NO: 189224 - RNA, 22 nt, Human
caucuuugagacagcauuaccc

SEQ ID NO: 189225 - RNA, 21 nt, Human
aauuuugaaggaagauuaagg

SEQ ID NO: 189226 - RNA, 23 nt, Human
aggaagaggcaauuucucuuaga

SEQ ID NO: 189227 - RNA, 22 nt, Human
ccaagcuacuuaggagucugag

SEQ ID NO: 189228 - RNA, 22 nt, Human
ucaggcugggagacaaucacug

SEQ ID NO: 189229 - RNA, 22 nt, Human
uaacuagaauggcuauuuugag

SEQ ID NO: 189230 - RNA, 22 nt, Human
ucaggacagaaggcugccaggg

SEQ ID NO: 189231 - RNA, 22 nt, Human
cucuggguccuggggcuacaag

SEQ ID NO: 189232 - RNA, 18 nt, Human
agaauuauucuuguccuc

SEQ ID NO: 189233 - RNA, 22 nt, Human
agcuuuauggugccucacuuga

SEQ ID NO: 189234 - RNA, 22 nt, Human
ggcccagagcucugggggagcu

SEQ ID NO: 189235 - RNA, 21 nt, Human
auauuucucauaagguuaugg

SEQ ID NO: 189236 - RNA, 22 nt, Human
aaaauccugcugacucgagaug

SEQ ID NO: 189237 - RNA, 22 nt, Human
cucuuuggcccccgaugauuca

SEQ ID NO: 189238 - RNA, 22 nt, Human
cucuggaauugaccugggaggg

SEQ ID NO: 189239 - RNA, 22 nt, Human
gcugcagaccucaugcaggugg

SEQ ID NO: 189240 - RNA, 22 nt, Human
gucuucuggaagagagccagcu

SEQ ID NO: 189241 - RNA, 22 nt, Human
augucccucacuccucauucag

SEQ ID NO: 189242 - RNA, 22 nt, Human
auuauuagugauguuguuacug

SEQ ID NO: 189243 - RNA, 22 nt, Human
uuccuacagcccugaaucucua

SEQ ID NO: 189244 - RNA, 18 nt, Human
ccugcagcccaggaggcc

SEQ ID NO: 189245 - RNA, 22 nt, Human
gcuccagcucguggcucccagc

SEQ ID NO: 189246 - RNA, 22 nt, Human
gagagacagcagaacgugcagc

SEQ ID NO: 189247 - RNA, 22 nt, Human
gguaggggaagacaagugaaaa

SEQ ID NO: 189248 - RNA, 22 nt, Human
uggggaaaaugcagaagauuac

SEQ ID NO: 189249 - RNA, 22 nt, Human
ucacaaaaggccauguggcuuc

SEQ ID NO: 189250 - RNA, 22 nt, Human
gguggcagagacauaggacaua

SEQ ID NO: 189251 - RNA, 22 nt, Human
cagagccugcugccuucugaag

SEQ ID NO: 189252 - RNA, 22 nt, Human
acagugcaggucucaacaauua

SEQ ID NO: 189253 - RNA, 22 nt, Human
aaacauagcacacacagcucuu

SEQ ID NO: 189254 - RNA, 22 nt, Human
aggcccuggcacugccugggag

SEQ ID NO: 189255 - RNA, 22 nt, Human
agacaucagcuugugugcaggg

SEQ ID NO: 189256 - RNA, 22 nt, Human
ugcuguauuacuuuuacaaacu

SEQ ID NO: 189257 - RNA, 22 nt, Human
ucccuccccacuucugagcuuu

SEQ ID NO: 189258 - RNA, 23 nt, Human
caggaagcagaugggguagaaga

SEQ ID NO: 189259 - RNA, 22 nt, Human
agguccuggacugcucuuguua

SEQ ID NO: 189260 - RNA, 22 nt, Human
aauuagggaaaauuuacuugua

SEQ ID NO: 189261 - RNA, 22 nt, Human
aaagaacaauguggaaucuccu

SEQ ID NO: 189262 - RNA, 22 nt, Human
agccaggccuuuucucaagguu

SEQ ID NO: 189263 - RNA, 20 nt, Human
gcucaguggagaaaugcacc

SEQ ID NO: 189264 - RNA, 22 nt, Human
agucuucuggguguuuccagag

SEQ ID NO: 189265 - RNA, 22 nt, Human
ggcugugagcaggcagaaugcu

SEQ ID NO: 189266 - RNA, 22 nt, Human
ccagguucaaauagcuguguga

SEQ ID NO: 189267 - RNA, 22 nt, Human
auggaacaucagguuaagaaau

SEQ ID NO: 189268 - RNA, 22 nt, Human
uuaauaacauuguguaucaccc

SEQ ID NO: 189269 - RNA, 22 nt, Human
uuucugcagguauugcauaagu

SEQ ID NO: 189270 - RNA, 22 nt, Human
ucugagagcucuggggccccuu

SEQ ID NO: 189271 - RNA, 22 nt, Human
acacaggaacucugagaggugg

SEQ ID NO: 189272 - RNA, 22 nt, Human
ggcaggcuugguggcaccgguu

SEQ ID NO: 189273 - RNA, 22 nt, Human
aagcugcagaugugccugugga

SEQ ID NO: 189274 - RNA, 22 nt, Human
guagccagaucugcugugucug

SEQ ID NO: 189275 - RNA, 22 nt, Human
ucaguuaacaacuauuuauuga

SEQ ID NO: 189276 - RNA, 22 nt, Human
agaggccagcacugcagggaag

SEQ ID NO: 189277 - RNA, 22 nt, Human
uuugaagggcacgacaauaguu

SEQ ID NO: 189278 - RNA, 22 nt, Human
uucaugcuaguaugugcuguuc

SEQ ID NO: 189279 - RNA, 22 nt, Human
uuugggcauauagcuguucccu

SEQ ID NO: 189280 - RNA, 22 nt, Human
ugaaacagcuaucaguagacug

SEQ ID NO: 189281 - RNA, 22 nt, Human
aacauacauauuucagugucca

SEQ ID NO: 189282 - RNA, 22 nt, Human
aggauuuaaucaguuggcauuu

SEQ ID NO: 189283 - RNA, 22 nt, Human
guagauuccaguggucuguguc

SEQ ID NO: 189284 - RNA, 22 nt, Human
gcagcuggugcaaaugucacuc

SEQ ID NO: 189285 - RNA, 22 nt, Human
ucugggagggagccucagaauc

SEQ ID NO: 189286 - RNA, 22 nt, Human
ugaugaaaguucaguagugaau

SEQ ID NO: 189287 - RNA, 22 nt, Human
accagagcucuucagcacagga

SEQ ID NO: 189288 - RNA, 22 nt, Human
gcuggcaguaaaggguuuggca

SEQ ID NO: 189289 - RNA, 19 nt, Human
acccagcccaggaguggca

SEQ ID NO: 189290 - RNA, 17 nt, Human
agcugagcuggccaggg

SEQ ID NO: 189291 - RNA, 22 nt, Human
gaggagaagcuaagaaacacag

SEQ ID NO: 189292 - RNA, 18 nt, Human
ugccugccccguaagggu

SEQ ID NO: 189293 - RNA, 22 nt, Human
cccacacauuuuucacuuaccg

SEQ ID NO: 189294 - RNA, 17 nt, Human
cauuugcugguuggcuc

SEQ ID NO: 189295 - RNA, 22 nt, Human
cugcccuguaucuucucccaau

SEQ ID NO: 189296 - RNA, 22 nt, Human
cccagcugauuuuugcagagau

SEQ ID NO: 189297 - RNA, 22 nt, Human
ucacaaaugaggaaaucgagca

SEQ ID NO: 189298 - RNA, 19 nt, Human
cccaguccuuguccugggc

SEQ ID NO: 189299 - RNA, 22 nt, Human
gccugccugcugugugcaaguu

SEQ ID NO: 189300 - RNA, 22 nt, Human
ugcaacaggcugugacauggaa

SEQ ID NO: 189301 - RNA, 22 nt, Human
uuggaaggauuuagagaugucu

SEQ ID NO: 189302 - RNA, 22 nt, Human
uaggaaauuugaaauauguggg

SEQ ID NO: 189303 - RNA, 22 nt, Human
ccagccagcaagcucccaguuc

SEQ ID NO: 189304 - RNA, 22 nt, Human
gaucacaugaguuaucuaacuu

SEQ ID NO: 189305 - RNA, 22 nt, Human
guuuaauaauguugaauuacua

SEQ ID NO: 189306 - RNA, 22 nt, Human
gugucugcacauaggaucucaa

SEQ ID NO: 189307 - RNA, 22 nt, Human
uugccugggcuaguaagccaga

SEQ ID NO: 189308 - RNA, 22 nt, Human
ucuccauuuuauagauaaugaa

SEQ ID NO: 189309 - RNA, 22 nt, Human
uaacugauguucccuuacugua

SEQ ID NO: 189310 - RNA, 21 nt, Human
aagaaguuuggauuuuguccu

SEQ ID NO: 189311 - RNA, 22 nt, Human
cagaggaaaguauuucuggaag

SEQ ID NO: 189312 - RNA, 22 nt, Human
aaugcaaacuucuuguuacuug

SEQ ID NO: 189313 - RNA, 22 nt, Human
uagaaagcccuguguucacugc

SEQ ID NO: 189314 - RNA, 23 nt, Human
agggucugcucagugucguucaa

SEQ ID NO: 189315 - RNA, 22 nt, Human
guggcugcaguaguguaggguc

SEQ ID NO: 189316 - RNA, 22 nt, Human
gagggcuggggcuuaggcuuag

SEQ ID NO: 189317 - RNA, 22 nt, Human
ugaaugaucuaguuuuguagac

SEQ ID NO: 189318 - RNA, 22 nt, Human
cuagaaguuggggcuagggaua

SEQ ID NO: 189319 - RNA, 22 nt, Human
cauuagaaccuauaaaaagcau

SEQ ID NO: 189320 - RNA, 22 nt, Human
ggaagcagccugaagccaaggg

SEQ ID NO: 189321 - RNA, 22 nt, Human
agcugguucauggacugccugg

SEQ ID NO: 189322 - RNA, 22 nt, Human
uggcccagaucucugaccuuga

SEQ ID NO: 189323 - RNA, 22 nt, Human
aaacaguagaaguguauuuuau

SEQ ID NO: 189324 - RNA, 22 nt, Human
cagugagagagaacgcauucau

SEQ ID NO: 189325 - RNA, 22 nt, Human
gucuucuguaagaugagguccc

SEQ ID NO: 189326 - RNA, 20 nt, Human
guccugggagccacagcaca

SEQ ID NO: 189327 - RNA, 22 nt, Human
cauagaaaagaguagguaaugu

SEQ ID NO: 189328 - RNA, 22 nt, Human
ggggaggagccauguaacuagu

SEQ ID NO: 189329 - RNA, 20 nt, Human
ugcuggaggcgccggcgcuc

SEQ ID NO: 189330 - RNA, 22 nt, Human
aggauuuacaaugauucuaggu

SEQ ID NO: 189331 - RNA, 22 nt, Human
gaggcuuuuggcuaauaacugu

SEQ ID NO: 189332 - RNA, 22 nt, Human
uuguguacacgccuuuaaauga

SEQ ID NO: 189333 - RNA, 22 nt, Human
cuggccacaacuagcccaggac

SEQ ID NO: 189334 - RNA, 22 nt, Human
cagaccagccauuugccucuuc

SEQ ID NO: 189335 - RNA, 22 nt, Human
guccuguggaaagcuagccgcu

SEQ ID NO: 189336 - RNA, 22 nt, Human
ucuccuguaugggacuggcgag

SEQ ID NO: 189337 - RNA, 21 nt, Human
gauaaggcaggaggauaagua

SEQ ID NO: 189338 - RNA, 22 nt, Human
gggaaacugcaacucagagagg

SEQ ID NO: 189339 - RNA, 22 nt, Human
uuggcuuuuaugcagcuuaggu

SEQ ID NO: 189340 - RNA, 22 nt, Human
uucugcauaggcuauauuuguu

SEQ ID NO: 189341 - RNA, 22 nt, Human
ccauuuguuguguauuaauauu

SEQ ID NO: 189342 - RNA, 22 nt, Human
uggcugccuagucccucagccu

SEQ ID NO: 189343 - RNA, 18 nt, Human
agcugcagaccaggaggu

SEQ ID NO: 189344 - RNA, 18 nt, Human
uuugaaggauggccugga

SEQ ID NO: 189345 - RNA, 22 nt, Human
uuuuuccuaagcaguggagcug

SEQ ID NO: 189346 - RNA, 22 nt, Human
cucacaggucaugugguggcuu

SEQ ID NO: 189347 - RNA, 22 nt, Human
uauaaagaaggcacagcaagac

SEQ ID NO: 189348 - RNA, 22 nt, Human
aaacugcaugaagcugauuuua

SEQ ID NO: 189349 - RNA, 22 nt, Human
gaauuauagguuugcaugcuaa

SEQ ID NO: 189350 - RNA, 22 nt, Human
uccaagaauacagauuugugaa

SEQ ID NO: 189351 - RNA, 22 nt, Human
cugggacacccaaggaaagagc

SEQ ID NO: 189352 - RNA, 22 nt, Human
uccagcccugcacugauuagau

SEQ ID NO: 189353 - RNA, 22 nt, Human
ucaggugugaacuauuuggaaa

SEQ ID NO: 189354 - RNA, 22 nt, Human
caaagggcauggccugagcacu

SEQ ID NO: 189355 - RNA, 22 nt, Human
guuauuguccagcacaguuggg

SEQ ID NO: 189356 - RNA, 22 nt, Human
uucugguaccgugucagaaacc

SEQ ID NO: 189357 - RNA, 22 nt, Human
uguucaguuaacacagacacca

SEQ ID NO: 189358 - RNA, 22 nt, Human
aagcaggagaugcaggaaugua

SEQ ID NO: 189359 - RNA, 22 nt, Human
uggccagguguggguucucaga

SEQ ID NO: 189360 - RNA, 22 nt, Human
cugggccuugccaggggugucu

SEQ ID NO: 189361 - RNA, 22 nt, Human
gaggggcaaugagggaaagagu

SEQ ID NO: 189362 - RNA, 22 nt, Human
uucuucuuaauguccugggaac

SEQ ID NO: 189363 - RNA, 22 nt, Human
caaauacuuuauauacuucaaa

SEQ ID NO: 189364 - RNA, 22 nt, Human
aaagccuucugucuagcagaua

SEQ ID NO: 189365 - RNA, 22 nt, Human
auucauguucggggccacguug

SEQ ID NO: 189366 - RNA, 22 nt, Human
uauugacauuuuuauagcuuga

SEQ ID NO: 189367 - RNA, 23 nt, Human
gggcuccagucucugcucaguug

SEQ ID NO: 189368 - RNA, 22 nt, Human
aaugguaucaccucacagaauu

SEQ ID NO: 189369 - RNA, 22 nt, Human
gcuuggggucaugaggcugcug

SEQ ID NO: 189370 - RNA, 22 nt, Human
caggggcucugggugaugugag

SEQ ID NO: 189371 - RNA, 22 nt, Human
aggcccucucauuccagaggca

SEQ ID NO: 189372 - RNA, 22 nt, Human
ggagucugacucugacccugga

SEQ ID NO: 189373 - RNA, 22 nt, Human
uagggaugagcaacugguagug

SEQ ID NO: 189374 - RNA, 22 nt, Human
ucagacagauuuugacacuugc

SEQ ID NO: 189375 - RNA, 22 nt, Human
auauguuuuuggaaagaacaca

SEQ ID NO: 189376 - RNA, 22 nt, Human
aaauccuaaaaguuugacuuaa

SEQ ID NO: 189377 - RNA, 22 nt, Human
auagcuguuagauuggggucga

SEQ ID NO: 189378 - RNA, 22 nt, Human
aagcaguuuagauaggcaaagg

SEQ ID NO: 189379 - RNA, 22 nt, Human
acauuguaaauaccuuuaucac

SEQ ID NO: 189380 - RNA, 22 nt, Human
cauggcaggaaaaugaacaggc

SEQ ID NO: 189381 - RNA, 22 nt, Human
gcaucuaauccaguccagcauc

SEQ ID NO: 189382 - RNA, 21 nt, Human
gaggaaaugcucugguguuca

SEQ ID NO: 189383 - RNA, 22 nt, Human
cagagacauguggccugcacgu

SEQ ID NO: 189384 - RNA, 16 nt, Human
gaaggcuuacugcagg

SEQ ID NO: 189385 - RNA, 22 nt, Human
cugaguccagggacagaggcgu

SEQ ID NO: 189386 - RNA, 22 nt, Human
uggagagcaaugaggggcaggc

SEQ ID NO: 189387 - RNA, 22 nt, Human
gcauucuugguggagugcuaaa

SEQ ID NO: 189388 - RNA, 22 nt, Human
agaaucagugagcaguugugau

SEQ ID NO: 189389 - RNA, 22 nt, Human
agcugcagucaagcugggccac

SEQ ID NO: 189390 - RNA, 22 nt, Human
aaggaaaugugccugacacugc

SEQ ID NO: 189391 - RNA, 22 nt, Human
uauaauuuaucaugucacaguu

SEQ ID NO: 189392 - RNA, 22 nt, Human
cugucuguuuuguauacaggcc

SEQ ID NO: 189393 - RNA, 22 nt, Human
ucuagaaugacaugcaagagua

SEQ ID NO: 189394 - RNA, 22 nt, Human
ccuuguccucugguuuccuguu

SEQ ID NO: 189395 - RNA, 22 nt, Human
uaggaagauaaacauuuguaug

SEQ ID NO: 189396 - RNA, 22 nt, Human
uucaaagugcuuuuaaccuuua

SEQ ID NO: 189397 - RNA, 22 nt, Human
aggaacugauuuauaacuuuag

SEQ ID NO: 189398 - RNA, 22 nt, Human
ugugaaaaaaguucuagaagga

SEQ ID NO: 189399 - RNA, 22 nt, Human
aggagugaguguccucagcaga

SEQ ID NO: 189400 - RNA, 20 nt, Human
cacaggccuugugagcagac

SEQ ID NO: 189401 - RNA, 19 nt, Human
agcugcuggcccagggacc

SEQ ID NO: 189402 - RNA, 22 nt, Human
aacuacaguauguccaaagaau

SEQ ID NO: 189403 - RNA, 22 nt, Human
ugucucagaauggcucauaaua

SEQ ID NO: 189404 - RNA, 22 nt, Human
gggaacacuccagggcuuggaa

SEQ ID NO: 189405 - RNA, 22 nt, Human
cauucccaugacuccugcucag

SEQ ID NO: 189406 - RNA, 22 nt, Human
cugagggauguggauuuugguc

SEQ ID NO: 189407 - RNA, 22 nt, Human
ugucuggcauaguugcucccug

SEQ ID NO: 189408 - RNA, 22 nt, Human
uuguuucauggggauguuuauu

SEQ ID NO: 189409 - RNA, 22 nt, Human
uggcugcagugcuugagauguc

SEQ ID NO: 189410 - RNA, 22 nt, Human
uucuucagacuacugaugauug

SEQ ID NO: 189411 - RNA, 22 nt, Human
auaguacagagggcuacugguu

SEQ ID NO: 189412 - RNA, 19 nt, Human
accaggagacagugagcuu

SEQ ID NO: 189413 - RNA, 20 nt, Human
gcucugggugguaaaugacu

SEQ ID NO: 189414 - RNA, 21 nt, Human
auauuguagguaaagugcagg

SEQ ID NO: 189415 - RNA, 23 nt, Human
ugccaggguuuguuugugguuca

SEQ ID NO: 189416 - RNA, 22 nt, Human
ucaucaguguccuuaucacuua

SEQ ID NO: 189417 - RNA, 22 nt, Human
uucaguuuguuugacuguuaga

SEQ ID NO: 189418 - RNA, 22 nt, Human
agcaacagguuuauuaucuuau

SEQ ID NO: 189419 - RNA, 23 nt, Human
acucagagaccccgggaagugac

SEQ ID NO: 189420 - RNA, 22 nt, Human
ccucagggucauccuaguaaua

SEQ ID NO: 189421 - RNA, 22 nt, Human
cccagugucucuugugccuuuc

SEQ ID NO: 189422 - RNA, 22 nt, Human
aaguuggaaucuggaacugauc

SEQ ID NO: 189423 - RNA, 22 nt, Human
ucucccucauuccugcuuccau

SEQ ID NO: 189424 - RNA, 22 nt, Human
gccuguguccuucccagugggg

SEQ ID NO: 189425 - RNA, 20 nt, Human
cccaguguccagccuugcca

SEQ ID NO: 189426 - RNA, 21 nt, Human
ucagaaucugugagcuaucuc

SEQ ID NO: 189427 - RNA, 22 nt, Human
cuuguaaaugcagauucugauu

SEQ ID NO: 189428 - RNA, 22 nt, Human
aaagcagcagcaccugcauuuc

SEQ ID NO: 189429 - RNA, 22 nt, Human
cugaggcucugggugucacugu

SEQ ID NO: 189430 - RNA, 22 nt, Human
uggcucaguaaucgagucuccu

SEQ ID NO: 189431 - RNA, 22 nt, Human
aaagcugcuaugaacauucuau

SEQ ID NO: 189432 - RNA, 22 nt, Human
cccagccucuguuugcuccucu

SEQ ID NO: 189433 - RNA, 22 nt, Human
ugggccugccccaggcuucagc

SEQ ID NO: 189434 - RNA, 20 nt, Human
caugugucaguucucaccca

SEQ ID NO: 189435 - RNA, 22 nt, Human
acagagucugacagguaggcgc

SEQ ID NO: 189436 - RNA, 22 nt, Human
auguuucaugacugagcaaaau

SEQ ID NO: 189437 - RNA, 22 nt, Human
ugaaggcuuuuagcucugaaaa

SEQ ID NO: 189438 - RNA, 22 nt, Human
uaggcugggcugagcuggacgg

SEQ ID NO: 189439 - RNA, 22 nt, Human
ugagaaaacaguuuguaauaau

SEQ ID NO: 189440 - RNA, 20 nt, Human
uucgcugggaguggccaggc

SEQ ID NO: 189441 - RNA, 22 nt, Human
ggcugggucccagcugggagga

SEQ ID NO: 189442 - RNA, 22 nt, Human
ucucugcaugacccaaggcuga

SEQ ID NO: 189443 - RNA, 22 nt, Human
cauuuagaagucuuagaacuau

SEQ ID NO: 189444 - RNA, 18 nt, Human
agcccagcggagugaauc

SEQ ID NO: 189445 - RNA, 22 nt, Human
gagcuuggugaugccuccuggu

SEQ ID NO: 189446 - RNA, 22 nt, Human
ucccuggcacaagaaggcuguc

SEQ ID NO: 189447 - RNA, 22 nt, Human
ugcauacacaagcauacaugua

SEQ ID NO: 189448 - RNA, 22 nt, Human
uuggugaacacauacacauuuu

SEQ ID NO: 189449 - RNA, 22 nt, Human
aucugaaagcuaggaguucuca

SEQ ID NO: 189450 - RNA, 19 nt, Human
cagugcccgacgcaggucu

SEQ ID NO: 189451 - RNA, 22 nt, Human
cagcuuggcuuccgcuuuacug

SEQ ID NO: 189452 - RNA, 22 nt, Human
cagcccucugaagaggcgcuug

SEQ ID NO: 189453 - RNA, 21 nt, Human
ccucagagacagauacgggug

SEQ ID NO: 189454 - RNA, 21 nt, Human
uucugcuguucaccaccaccc

SEQ ID NO: 189455 - RNA, 22 nt, Human
agggcagcuggaagguggcuuc

SEQ ID NO: 189456 - RNA, 22 nt, Human
ucaaauaccagcaauuucaugu

SEQ ID NO: 189457 - RNA, 22 nt, Human
ccugcuggcauucuugcucccu

SEQ ID NO: 189458 - RNA, 22 nt, Human
aaaugaacaucaagaauagccu

SEQ ID NO: 189459 - RNA, 22 nt, Human
gaaggcaacaccaggaugcacu

SEQ ID NO: 189460 - RNA, 22 nt, Human
agguccuguguccaggggccug

SEQ ID NO: 189461 - RNA, 23 nt, Human
uggccuggagagaaaagaugagu

SEQ ID NO: 189462 - RNA, 21 nt, Human
gacuuucuuaccagauuuuug

SEQ ID NO: 189463 - RNA, 22 nt, Human
agaguggcagcaagucagguag

SEQ ID NO: 189464 - RNA, 22 nt, Human
guguuuauacagcaaagagcau

SEQ ID NO: 189465 - RNA, 22 nt, Human
ucuuagcauuucauaacaacug

SEQ ID NO: 189466 - RNA, 22 nt, Human
ucagaccccagaaugaagccag

SEQ ID NO: 189467 - RNA, 19 nt, Human
uacaagcuuaaaguaaugu

SEQ ID NO: 189468 - RNA, 22 nt, Human
gcagauggacuguaugaccuga

SEQ ID NO: 189469 - RNA, 22 nt, Human
guucaguuugacaaccuuuaua

SEQ ID NO: 189470 - RNA, 22 nt, Human
uuucaguuuagacuaaagguag

SEQ ID NO: 189471 - RNA, 22 nt, Human
aagggcucccaacucaucuuuu

SEQ ID NO: 189472 - RNA, 22 nt, Human
ugcaauaaguauugcuuacaug

SEQ ID NO: 189473 - RNA, 19 nt, Human
ccaccccuuugcugggccc

SEQ ID NO: 189474 - RNA, 22 nt, Human
aggggccauuguucugcccgcu

SEQ ID NO: 189475 - RNA, 22 nt, Human
cuuauuucagcccugggcaccc

SEQ ID NO: 189476 - RNA, 23 nt, Human
aggucaaccacaagcugacaaac

SEQ ID NO: 189477 - RNA, 20 nt, Human
agacaaaaugacuucaugca

SEQ ID NO: 189478 - RNA, 22 nt, Human
cuagggcagggaguguuugcgc

SEQ ID NO: 189479 - RNA, 22 nt, Human
cuccucuggcuuccuggaggca

SEQ ID NO: 189480 - RNA, 22 nt, Human
ucugucagccccucagcuguca

SEQ ID NO: 189481 - RNA, 22 nt, Human
agcaggcuacuccuguguucgu

SEQ ID NO: 189482 - RNA, 22 nt, Human
gcacagcacagcaacauguuuu

SEQ ID NO: 189483 - RNA, 22 nt, Human
uucuuuccccauggaguucgga

SEQ ID NO: 189484 - RNA, 22 nt, Human
agaucaaugugucagaagagau

SEQ ID NO: 189485 - RNA, 22 nt, Human
ccuaaagaauuuucauagagcu

SEQ ID NO: 189486 - RNA, 20 nt, Human
accuacauguauagugaggg

SEQ ID NO: 189487 - RNA, 22 nt, Human
auugaaaaauucacaauucugg

SEQ ID NO: 189488 - RNA, 22 nt, Human
ccuggcacaugcaguacucaag

SEQ ID NO: 189489 - RNA, 22 nt, Human
gccauguccugggcaucugcca

SEQ ID NO: 189490 - RNA, 22 nt, Human
ucaaauaggcuuguagugacug

SEQ ID NO: 189491 - RNA, 22 nt, Human
uggcaccaccagacaccaggag

SEQ ID NO: 189492 - RNA, 20 nt, Human
uuucugugauagagaggugu

SEQ ID NO: 189493 - RNA, 22 nt, Human
aaaggaggaauggagagaugcu

SEQ ID NO: 189494 - RNA, 22 nt, Human
gaggcuggacgugcauuucuac

SEQ ID NO: 189495 - RNA, 16 nt, Human
cucuuuggcuuccaag

SEQ ID NO: 189496 - RNA, 22 nt, Human
cugggccuccagcucugccagc

SEQ ID NO: 189497 - RNA, 22 nt, Human
cuccuacacauagaugcuuuca

SEQ ID NO: 189498 - RNA, 22 nt, Human
cagcucagucuggagagaugca

SEQ ID NO: 189499 - RNA, 22 nt, Human
auguccucggcucugugcugcu

SEQ ID NO: 189500 - RNA, 22 nt, Human
aaaugacaauaaaaguccaugc

SEQ ID NO: 189501 - RNA, 22 nt, Human
aguugguucacuccuucaugcc

SEQ ID NO: 189502 - RNA, 22 nt, Human
agcugggcugggcugagcugag

SEQ ID NO: 189503 - RNA, 19 nt, Human
gcaggcaguggcauucgga

SEQ ID NO: 189504 - RNA, 22 nt, Human
uuucaaagucaauaucauuacc

SEQ ID NO: 189505 - RNA, 22 nt, Human
gcauggcuucugccaggcaccu

SEQ ID NO: 189506 - RNA, 22 nt, Human
cccuggcagaaugucucugggc

SEQ ID NO: 189507 - RNA, 21 nt, Human
auguuuacacugacuacugug

SEQ ID NO: 189508 - RNA, 22 nt, Human
gcaagcaaauuauuuauaggca

SEQ ID NO: 189509 - RNA, 22 nt, Human
uuggcugcaaucacagggacuc

SEQ ID NO: 189510 - RNA, 23 nt, Human
gggaucuguaaguugaagacaaa

SEQ ID NO: 189511 - RNA, 22 nt, Human
ggagacccagguuaggaaguaa

SEQ ID NO: 189512 - RNA, 18 nt, Human
cacaauuuacagaugaca

SEQ ID NO: 189513 - RNA, 22 nt, Human
ggcuuaggugucucucugcacc

SEQ ID NO: 189514 - RNA, 22 nt, Human
gauuuauugucccuguccugcu

SEQ ID NO: 189515 - RNA, 22 nt, Human
augacagacagaagggauuuuu

SEQ ID NO: 189516 - RNA, 22 nt, Human
gcuggcagccaagugaagaggg

SEQ ID NO: 189517 - RNA, 22 nt, Human
uggcugacaaauaggugcaguu

SEQ ID NO: 189518 - RNA, 22 nt, Human
gcugggcucuuuaccccuguac

SEQ ID NO: 189519 - RNA, 22 nt, Human
cagugcaagugacugaucaagg

SEQ ID NO: 189520 - RNA, 22 nt, Human
aagcaauugguuuuaguaaaau

SEQ ID NO: 189521 - RNA, 22 nt, Human
ugaaugauuucuuaggcaauug

SEQ ID NO: 189522 - RNA, 17 nt, Human
acaggccugcuugcacu

SEQ ID NO: 189523 - RNA, 22 nt, Human
gcauuugaaaugcaagaaagug

SEQ ID NO: 189524 - RNA, 22 nt, Human
gugaugucagcaagaauaggaa

SEQ ID NO: 189525 - RNA, 22 nt, Human
uuccagccaugguuucccuaug

SEQ ID NO: 189526 - RNA, 22 nt, Human
uguaacaguaguuacuauucuu

SEQ ID NO: 189527 - RNA, 20 nt, Human
guccuagguuugaagguaaa

SEQ ID NO: 189528 - RNA, 22 nt, Human
ucuccaggagaaauaugaagga

SEQ ID NO: 189529 - RNA, 22 nt, Human
ggacagagagugaauaugacau

SEQ ID NO: 189530 - RNA, 22 nt, Human
agggcaugugggagaggagccu

SEQ ID NO: 189531 - RNA, 22 nt, Human
uugcaggggaaggagcagagcu

SEQ ID NO: 189532 - RNA, 22 nt, Human
ucucucagggggaaggcugaag

SEQ ID NO: 189533 - RNA, 22 nt, Human
caggaggagggcagccgccucc

SEQ ID NO: 189534 - RNA, 22 nt, Human
uacacuauuuuacugauacaaa

SEQ ID NO: 189535 - RNA, 22 nt, Human
uuagaaaggggugaaucaaugg

SEQ ID NO: 189536 - RNA, 22 nt, Human
uggcuuccaguaaucaggauuu

SEQ ID NO: 189537 - RNA, 22 nt, Human
cagggcccaggccacuggguug

SEQ ID NO: 189538 - RNA, 22 nt, Human
cucucuguuaugcuuucaugaa

SEQ ID NO: 189539 - RNA, 22 nt, Human
cauggaggccaggaaacagccu

SEQ ID NO: 189540 - RNA, 22 nt, Human
accaguuucugggggagguugg

SEQ ID NO: 189541 - RNA, 22 nt, Human
ucuaagaauacucauaucuucu

SEQ ID NO: 189542 - RNA, 20 nt, Human
agugucugggccucaggccc

SEQ ID NO: 189543 - RNA, 22 nt, Human
aauugcuuacuguuuuucaccu

SEQ ID NO: 189544 - RNA, 22 nt, Human
cacacgugugagagcuguggca

SEQ ID NO: 189545 - RNA, 22 nt, Human
cucuucuuggcccccaugaggg

SEQ ID NO: 189546 - RNA, 22 nt, Human
uaagacacaaauaucuuuuaca

SEQ ID NO: 189547 - RNA, 22 nt, Human
cucccagguuacaucugagccu

SEQ ID NO: 189548 - RNA, 22 nt, Human
aaaugccaaggagagacuguua

SEQ ID NO: 189549 - RNA, 22 nt, Human
aaagccaggguccaggccugcc

SEQ ID NO: 189550 - RNA, 22 nt, Human
gagucuggucauuuucucuccc

SEQ ID NO: 189551 - RNA, 21 nt, Human
aucacauuggcuguuauuauu

SEQ ID NO: 189552 - RNA, 22 nt, Human
ccagcucccauucuucaccugu

SEQ ID NO: 189553 - RNA, 22 nt, Human
uguggcucugccuggcaguauu

SEQ ID NO: 189554 - RNA, 19 nt, Human
gcaaaucugaccaaauagu

SEQ ID NO: 189555 - RNA, 22 nt, Human
uuaucuuguagagauauuuucg

SEQ ID NO: 189556 - RNA, 22 nt, Human
agcaggaggguuuuguagaguc

SEQ ID NO: 189557 - RNA, 22 nt, Human
gcucucagaugcuccagcagcc

SEQ ID NO: 189558 - RNA, 21 nt, Human
ugcuccuuuaccccacaagac

SEQ ID NO: 189559 - RNA, 22 nt, Human
uaugcuauucuucagaguguuc

SEQ ID NO: 189560 - RNA, 22 nt, Human
ugcucagaauugcgcuggugga

SEQ ID NO: 189561 - RNA, 21 nt, Human
aucuagaaucucucuccccac

SEQ ID NO: 189562 - RNA, 22 nt, Human
cagcugcuuucagcaggaggga

SEQ ID NO: 189563 - RNA, 22 nt, Human
acuggcuuggcaggaggaagau

SEQ ID NO: 189564 - RNA, 22 nt, Human
caggugcaaugagacagcucug

SEQ ID NO: 189565 - RNA, 22 nt, Human
ggagcugaggaauagcuuugau

SEQ ID NO: 189566 - RNA, 22 nt, Human
gggcaguggcucacgccuguaa

SEQ ID NO: 189567 - RNA, 22 nt, Human
cacgugcaggucuuaggagaca

SEQ ID NO: 189568 - RNA, 22 nt, Human
aaggcaggaugggaaaagauuu

SEQ ID NO: 189569 - RNA, 22 nt, Human
ugucucaggggcauugaaauaa

SEQ ID NO: 189570 - RNA, 22 nt, Human
uuguaagaauaugaauacaaau

SEQ ID NO: 189571 - RNA, 22 nt, Human
uggggagcccacucaccucccc

SEQ ID NO: 189572 - RNA, 22 nt, Human
gaguguggaucccagaagcaga

SEQ ID NO: 189573 - RNA, 22 nt, Human
uggcucuguugugcugagccag

SEQ ID NO: 189574 - RNA, 22 nt, Human
cugcuguggaugcaggaccuca

SEQ ID NO: 189575 - RNA, 22 nt, Human
agcugcaggagucgccuaggau

SEQ ID NO: 189576 - RNA, 22 nt, Human
acacagaagcuuuuucuauucc

SEQ ID NO: 189577 - RNA, 19 nt, Human
auacacauacguaaacuga

SEQ ID NO: 189578 - RNA, 22 nt, Human
caggccugucugcacaugaggc

SEQ ID NO: 189579 - RNA, 21 nt, Human
ucugacuugaucuauucuccc

SEQ ID NO: 189580 - RNA, 22 nt, Human
agauaucugaugaaaauacucu

SEQ ID NO: 189581 - RNA, 20 nt, Human
ggaagccagcauccuugagg

SEQ ID NO: 189582 - RNA, 22 nt, Human
gccaggcauuuauugauugaau

SEQ ID NO: 189583 - RNA, 22 nt, Human
ucaggcugaaaggacuccaguu

SEQ ID NO: 189584 - RNA, 22 nt, Human
uacaguuccucucguggaggug

SEQ ID NO: 189585 - RNA, 22 nt, Human
ucgagcucuggagccaaggaug

SEQ ID NO: 189586 - RNA, 22 nt, Human
cagauggaaggcauagagguuu

SEQ ID NO: 189587 - RNA, 22 nt, Human
guucacaucccagaaagagcau

SEQ ID NO: 189588 - RNA, 22 nt, Human
guggcuucaccccaguugucuc

SEQ ID NO: 189589 - RNA, 22 nt, Human
ccagcucucuguccuccccaca

SEQ ID NO: 189590 - RNA, 22 nt, Human
aaucuguauuguuaacaaguaa

SEQ ID NO: 189591 - RNA, 22 nt, Human
uucuccagccuauuggccuauc

SEQ ID NO: 189592 - RNA, 20 nt, Human
ggguaaaaggcaguguugca

SEQ ID NO: 189593 - RNA, 22 nt, Human
ggccgugcuccaaagucaucgu

SEQ ID NO: 189594 - RNA, 22 nt, Human
ucagcugcucaaauuuauguca

SEQ ID NO: 189595 - RNA, 22 nt, Human
augcccugcugccaucuggccg

SEQ ID NO: 189596 - RNA, 22 nt, Human
ucucuggucccaccuggccauu

SEQ ID NO: 189597 - RNA, 22 nt, Human
aagguugcagcaguguugauga

SEQ ID NO: 189598 - RNA, 21 nt, Human
acagaaguggcuuggucucag

SEQ ID NO: 189599 - RNA, 22 nt, Human
agguuuauguuuggugcaggag

SEQ ID NO: 189600 - RNA, 22 nt, Human
caagggcagcagccucaagcgg

SEQ ID NO: 189601 - RNA, 22 nt, Human
ggcacuaugaguuauaagugga

SEQ ID NO: 189602 - RNA, 22 nt, Human
uccuguuguucgccugcgaugg

SEQ ID NO: 189603 - RNA, 22 nt, Human
caggcugaucagggcugggaug

SEQ ID NO: 189604 - RNA, 19 nt, Human
ggccaggcugacugugguc

SEQ ID NO: 189605 - RNA, 22 nt, Human
uuacaucauugagacauacaua

SEQ ID NO: 189606 - RNA, 22 nt, Human
gccaguggucacugaggaagaa

SEQ ID NO: 189607 - RNA, 20 nt, Human
uuacucaguuccugccaugc

SEQ ID NO: 189608 - RNA, 22 nt, Human
agauuuuauagauaauuuccca

SEQ ID NO: 189609 - RNA, 22 nt, Human
aguucuguugucuagggaagcc

SEQ ID NO: 189610 - RNA, 22 nt, Human
uuccggaagguucucuagaauu

SEQ ID NO: 189611 - RNA, 22 nt, Human
uaguuaaaccaccauucuggua

SEQ ID NO: 189612 - RNA, 22 nt, Human
ucagggauugcaaaauucaucc

SEQ ID NO: 189613 - RNA, 22 nt, Human
agaaggaaaaccugucuuaugu

SEQ ID NO: 189614 - RNA, 22 nt, Human
aauguuaaguuuagauuauaac

SEQ ID NO: 189615 - RNA, 22 nt, Human
caagauuuagcucccuuaucuc

SEQ ID NO: 189616 - RNA, 20 nt, Human
aguuuucagcagaacaccca

SEQ ID NO: 189617 - RNA, 22 nt, Human
augagggaggcaaggagaugcu

SEQ ID NO: 189618 - RNA, 22 nt, Human
agcugggcagacugcagugguu

SEQ ID NO: 189619 - RNA, 22 nt, Human
aauuuucacagugcugugagau

SEQ ID NO: 189620 - RNA, 22 nt, Human
gguaggaagauagagcaaaguu

SEQ ID NO: 189621 - RNA, 22 nt, Human
gaaagcacccaagauuuccuuc

SEQ ID NO: 189622 - RNA, 22 nt, Human
uuacauuuugggguaaggauaa

SEQ ID NO: 189623 - RNA, 22 nt, Human
ccagcacucgcugauuuuagga

SEQ ID NO: 189624 - RNA, 22 nt, Human
gaauaauagcagaaauuagcag

SEQ ID NO: 189625 - RNA, 22 nt, Human
ggauuuacacaccugccuguca

SEQ ID NO: 189626 - RNA, 23 nt, Human
uagaggaggaugugaugcauauu

SEQ ID NO: 189627 - RNA, 17 nt, Human
ugguggcuggagucagg

SEQ ID NO: 189628 - RNA, 22 nt, Human
gggcgagggcgaaagcgagagc

SEQ ID NO: 189629 - RNA, 20 nt, Human
uguccaggggaucguuggcc

SEQ ID NO: 189630 - RNA, 22 nt, Human
ggcaaaaacagcaaugacuuuu

SEQ ID NO: 189631 - RNA, 22 nt, Human
agcccugggaggccagcuugua

SEQ ID NO: 189632 - RNA, 22 nt, Human
auccaugaucaauuuauuacua

SEQ ID NO: 189633 - RNA, 22 nt, Human
agcccugcucaucuggaucccg

SEQ ID NO: 189634 - RNA, 22 nt, Human
cugcucuggucucuucauguuu

SEQ ID NO: 189635 - RNA, 22 nt, Human
ugcuggcuaauggaaaccagau

SEQ ID NO: 189636 - RNA, 22 nt, Human
acagugcugaacgacauggaag

SEQ ID NO: 189637 - RNA, 22 nt, Human
uucaguuucagucuugcaaaaa

SEQ ID NO: 189638 - RNA, 22 nt, Human
ucacaggccuggggcagagggc

SEQ ID NO: 189639 - RNA, 22 nt, Human
cagggagcugacaaccaaggag

SEQ ID NO: 189640 - RNA, 22 nt, Human
cucagagcugaggccagggaca

SEQ ID NO: 189641 - RNA, 22 nt, Human
gaaaggcuugguuuugaauaua

SEQ ID NO: 189642 - RNA, 22 nt, Human
cuauugcuuuugugugcuccca

SEQ ID NO: 189643 - RNA, 22 nt, Human
agcucagaacugcagacaugug

SEQ ID NO: 189644 - RNA, 22 nt, Human
aaaccugucugauuauggagac

SEQ ID NO: 189645 - RNA, 22 nt, Human
aaccuuuugcaagugccuugac

SEQ ID NO: 189646 - RNA, 22 nt, Human
uucauugagugguuuauucuaa

SEQ ID NO: 189647 - RNA, 22 nt, Human
uccuuucuccgggggacuguug

SEQ ID NO: 189648 - RNA, 22 nt, Human
acagaggaaggcugagcugccc

SEQ ID NO: 189649 - RNA, 16 nt, Human
gggcugggggauucug

SEQ ID NO: 189650 - RNA, 19 nt, Human
guguccauggagcauggag

SEQ ID NO: 189651 - RNA, 22 nt, Human
uucuugaaucacuuuagagaua

SEQ ID NO: 189652 - RNA, 21 nt, Human
ucuguuggaggccucucuucc

SEQ ID NO: 189653 - RNA, 22 nt, Human
gcaccuggacagugacccuagc

SEQ ID NO: 189654 - RNA, 22 nt, Human
uccucugggcucccugcaacag

SEQ ID NO: 189655 - RNA, 23 nt, Human
ucagagaacucgggcagaugacc

SEQ ID NO: 189656 - RNA, 22 nt, Human
ugcccagcaauaaaccagaaga

SEQ ID NO: 189657 - RNA, 22 nt, Human
ucacagcuaagcuuggucacug

SEQ ID NO: 189658 - RNA, 22 nt, Human
uguguucaccaaaguguagaaa

SEQ ID NO: 189659 - RNA, 22 nt, Human
uccuaguucucugccagucgcu

SEQ ID NO: 189660 - RNA, 22 nt, Human
guacaaauugauacagauuuga

SEQ ID NO: 189661 - RNA, 22 nt, Human
auucuucauaccuacugagguu

SEQ ID NO: 189662 - RNA, 22 nt, Human
caguuaaauuuggcuguuuucu

SEQ ID NO: 189663 - RNA, 22 nt, Human
cagcagcccacgcgugcugucc

SEQ ID NO: 189664 - RNA, 22 nt, Human
ggcaguagccagggacuggcag

SEQ ID NO: 189665 - RNA, 22 nt, Human
uucaguuugcuacaagcaacau

SEQ ID NO: 189666 - RNA, 22 nt, Human
guacacuugucuugaacagccu

SEQ ID NO: 189667 - RNA, 19 nt, Human
aggugacaugugacagccu

SEQ ID NO: 189668 - RNA, 20 nt, Human
ugggucugcuuggcuucagu

SEQ ID NO: 189669 - RNA, 22 nt, Human
uggagacugugcuaagggaguu

SEQ ID NO: 189670 - RNA, 20 nt, Human
cuaauuacagauuuuggaca

SEQ ID NO: 189671 - RNA, 22 nt, Human
uggagcauucagguuucccuuu

SEQ ID NO: 189672 - RNA, 23 nt, Human
uggcuacuuuaugagguugagga

SEQ ID NO: 189673 - RNA, 21 nt, Human
ugagcaggugcugcuuuuaug

SEQ ID NO: 189674 - RNA, 21 nt, Human
ugagucuuuuaauaggugcac

SEQ ID NO: 189675 - RNA, 23 nt, Human
agucagagagugugagacaacug

SEQ ID NO: 189676 - RNA, 22 nt, Human
cacccagccuucacacaggagu

SEQ ID NO: 189677 - RNA, 22 nt, Human
cuuccagguccuucuugagaag

SEQ ID NO: 189678 - RNA, 21 nt, Human
aaggagccuaggaggcucagg

SEQ ID NO: 189679 - RNA, 22 nt, Human
uucucugcucucacauacagaa

SEQ ID NO: 189680 - RNA, 22 nt, Human
uacauguacaugcauagguaga

SEQ ID NO: 189681 - RNA, 22 nt, Human
gccagccauaggccagcacugg

SEQ ID NO: 189682 - RNA, 22 nt, Human
uucauuuagcaugcuaaaccug

SEQ ID NO: 189683 - RNA, 22 nt, Human
auguccucaaaacugauugcag

SEQ ID NO: 189684 - RNA, 22 nt, Human
gaaagaggaaggagauguauua

SEQ ID NO: 189685 - RNA, 22 nt, Human
aucaguuuauacuuauaaaucu

SEQ ID NO: 189686 - RNA, 22 nt, Human
uggcaggugccaugggcucaga

SEQ ID NO: 189687 - RNA, 22 nt, Human
ccugacucuggccaggccagcu

SEQ ID NO: 189688 - RNA, 22 nt, Human
uaccauuucuacauaucuuguc

SEQ ID NO: 189689 - RNA, 22 nt, Human
aucugcuguucuucacagcuug

SEQ ID NO: 189690 - RNA, 22 nt, Human
ucaggaggaugucggcaaauuu

SEQ ID NO: 189691 - RNA, 22 nt, Human
cugccugcugcccuccagagcc

SEQ ID NO: 189692 - RNA, 22 nt, Human
uauacugagagcaaauacauuc

SEQ ID NO: 189693 - RNA, 19 nt, Human
agacaaguuuccagaagcc

SEQ ID NO: 189694 - RNA, 22 nt, Human
uucauguaacuuuucuucucca

SEQ ID NO: 189695 - RNA, 20 nt, Human
ucaggaugugcugagugaag

SEQ ID NO: 189696 - RNA, 22 nt, Human
uuuugcugggguggcuagcuua

SEQ ID NO: 189697 - RNA, 22 nt, Human
gaaacuguuucuggcuuuggug

SEQ ID NO: 189698 - RNA, 22 nt, Human
acagcuuuucugauagauccug

SEQ ID NO: 189699 - RNA, 22 nt, Human
ccacagagucuuccuucucuuc

SEQ ID NO: 189700 - RNA, 22 nt, Human
aacuuagagcucuccuaaauga

SEQ ID NO: 189701 - RNA, 22 nt, Human
gagcagagacaguacaacuggc

SEQ ID NO: 189702 - RNA, 22 nt, Human
uuaguugacccccaguccuggc

SEQ ID NO: 189703 - RNA, 22 nt, Human
aucuauuucugcuaauaacaau

SEQ ID NO: 189704 - RNA, 22 nt, Human
augucacaucugggauggcccu

SEQ ID NO: 189705 - RNA, 22 nt, Human
acugggcaucccauggcagagc

SEQ ID NO: 189706 - RNA, 22 nt, Human
gcagguuagauuuaauccauuc

SEQ ID NO: 189707 - RNA, 22 nt, Human
cagcaggugcaggugcggccgc

SEQ ID NO: 189708 - RNA, 18 nt, Human
agucuuuauuucuuucau

SEQ ID NO: 189709 - RNA, 22 nt, Human
cuuauauuuuaggaacagacaa

SEQ ID NO: 189710 - RNA, 22 nt, Human
ucagagaggcaauacuguuuaa

SEQ ID NO: 189711 - RNA, 22 nt, Human
agggcuggcaagggauugaaau

SEQ ID NO: 189712 - RNA, 20 nt, Human
ucccucaguuuccagcccug

SEQ ID NO: 189713 - RNA, 22 nt, Human
ugaaggcccagccacagaaugg

SEQ ID NO: 189714 - RNA, 22 nt, Human
aaugccaucuggugauguauua

SEQ ID NO: 189715 - RNA, 22 nt, Human
ccaguccacgucaagaagaggu

SEQ ID NO: 189716 - RNA, 22 nt, Human
acuuccagugucugcugcuagc

SEQ ID NO: 189717 - RNA, 22 nt, Human
augcaacaauguauuuauguau

SEQ ID NO: 189718 - RNA, 22 nt, Human
cuguccugagauaaagaugagg

SEQ ID NO: 189719 - RNA, 22 nt, Human
caggaagccacaggacagguag

SEQ ID NO: 189720 - RNA, 23 nt, Human
ccucagaggccucauagucuggc

SEQ ID NO: 189721 - RNA, 22 nt, Human
ugaguccauguggaggggaggu

SEQ ID NO: 189722 - RNA, 22 nt, Human
ggaaucagaauuacugaaugga

SEQ ID NO: 189723 - RNA, 17 nt, Human
cucugcagugcauggcu

SEQ ID NO: 189724 - RNA, 22 nt, Human
ucagcuggauguggaagugcua

SEQ ID NO: 189725 - RNA, 22 nt, Human
cuguauuaguccauuugagcug

SEQ ID NO: 189726 - RNA, 19 nt, Human
cugugcaggccgggcugag

SEQ ID NO: 189727 - RNA, 22 nt, Human
cuggaucuugcugcauugagaa

SEQ ID NO: 189728 - RNA, 22 nt, Human
ucauuguauucagaacugaaga

SEQ ID NO: 189729 - RNA, 22 nt, Human
ccagcuggagcucgcagauagg

SEQ ID NO: 189730 - RNA, 22 nt, Human
aaggucagagcaggaaggaguc

SEQ ID NO: 189731 - RNA, 22 nt, Human
acaguguagcaugguagcaaug

SEQ ID NO: 189732 - RNA, 21 nt, Human
gagagggcauuauaggaagug

SEQ ID NO: 189733 - RNA, 22 nt, Human
auuccucauuuguugagaacca

SEQ ID NO: 189734 - RNA, 21 nt, Human
aacacauccagaguauuugac

SEQ ID NO: 189735 - RNA, 22 nt, Human
aggcuucuugggcuucauucug

SEQ ID NO: 189736 - RNA, 22 nt, Human
uauucccugauguacacuggca

SEQ ID NO: 189737 - RNA, 22 nt, Human
uggccaugacauggaggcuuug

SEQ ID NO: 189738 - RNA, 23 nt, Human
gauacacucccugcugggcacug

SEQ ID NO: 189739 - RNA, 22 nt, Human
ucccugggguaucgcugaggca

SEQ ID NO: 189740 - RNA, 22 nt, Human
caggcugcguuugugaaaggua

SEQ ID NO: 189741 - RNA, 22 nt, Human
gggcugacaguuuccccugaaa

SEQ ID NO: 189742 - RNA, 22 nt, Human
uaacagaauagcagaaacagaa

SEQ ID NO: 189743 - RNA, 22 nt, Human
gaugaaaaauugcugugucaua

SEQ ID NO: 189744 - RNA, 22 nt, Human
cacacagcuagugacaggagaa

SEQ ID NO: 189745 - RNA, 19 nt, Human
caggaaacaccuacugcua

SEQ ID NO: 189746 - RNA, 22 nt, Human
gagucgagcagaaagccgucgg

SEQ ID NO: 189747 - RNA, 22 nt, Human
gauacaguauuuaaagagcaac

SEQ ID NO: 189748 - RNA, 22 nt, Human
ggcugugccucaaggcuacuca

SEQ ID NO: 189749 - RNA, 22 nt, Human
cgaggcagggaagcugcaaaag

SEQ ID NO: 189750 - RNA, 22 nt, Human
aagaaaacaaugacuugccagc

SEQ ID NO: 189751 - RNA, 22 nt, Human
ccuggcuuuagcugccuucccu

SEQ ID NO: 189752 - RNA, 22 nt, Human
uauaaaucuuuguuccuagaau

SEQ ID NO: 189753 - RNA, 19 nt, Human
ucuucccuggcugucaguc

SEQ ID NO: 189754 - RNA, 22 nt, Human
uuuuuacagucauggucacuca

SEQ ID NO: 189755 - RNA, 22 nt, Human
ucucaaauaggccuugguccug

SEQ ID NO: 189756 - RNA, 22 nt, Human
gaagauuuaagcacaauagucu

SEQ ID NO: 189757 - RNA, 22 nt, Human
agaauaaacugcuuuagggcag

SEQ ID NO: 189758 - RNA, 20 nt, Human
ggcucuggaaucuggugggc

SEQ ID NO: 189759 - RNA, 22 nt, Human
ccaaaguccacaguuuacauua

SEQ ID NO: 189760 - RNA, 22 nt, Human
cagacacuauuguguauaaauc

SEQ ID NO: 189761 - RNA, 22 nt, Human
agcaacagcccuguuucauuag

SEQ ID NO: 189762 - RNA, 22 nt, Human
gacaguaagucagagacuuggu

SEQ ID NO: 189763 - RNA, 22 nt, Human
uggaagccguaggguuugggaa

SEQ ID NO: 189764 - RNA, 22 nt, Human
aggagcugcuuuggugcgguuu

SEQ ID NO: 189765 - RNA, 22 nt, Human
aaauggcugacuaaauuaaauu

SEQ ID NO: 189766 - RNA, 22 nt, Human
uuuagggaagaagcccauggcc

SEQ ID NO: 189767 - RNA, 21 nt, Human
gccugggauaguggccuccgg

SEQ ID NO: 189768 - RNA, 22 nt, Human
uucagagccagcaacacuaggc

SEQ ID NO: 189769 - RNA, 22 nt, Human
uugaucucuguugcugucuuug

SEQ ID NO: 189770 - RNA, 22 nt, Human
uaaggaggcagucauuaucagg

SEQ ID NO: 189771 - RNA, 22 nt, Human
ucagcagaaguauagaggccau

SEQ ID NO: 189772 - RNA, 22 nt, Human
gagcuaaaugaaucauaaauca

SEQ ID NO: 189773 - RNA, 22 nt, Human
aagucucuuuucuuccuguauu

SEQ ID NO: 189774 - RNA, 22 nt, Human
uguaaacaaaugcauucuugcu

SEQ ID NO: 189775 - RNA, 22 nt, Human
uggagcaggugcucaggguaau

SEQ ID NO: 189776 - RNA, 22 nt, Human
uauguuuuuaagagaaugcauu

SEQ ID NO: 189777 - RNA, 22 nt, Human
uccuagaaggaucauucuagug

SEQ ID NO: 189778 - RNA, 22 nt, Human
uggagcugguaaacagugacau

SEQ ID NO: 189779 - RNA, 22 nt, Human
gagcuccaccaccuucaggcag

SEQ ID NO: 189780 - RNA, 22 nt, Human
aaaaucugcuuccuuuuacaga

SEQ ID NO: 189781 - RNA, 22 nt, Human
cugcaggcugagcgccugccgg

SEQ ID NO: 189782 - RNA, 22 nt, Human
gacaggcuauuuucuuacgggu

SEQ ID NO: 189783 - RNA, 22 nt, Human
cacuuuacccuuguuacucaug

SEQ ID NO: 189784 - RNA, 22 nt, Human
ccucagcugucuuuuccgaggu

SEQ ID NO: 189785 - RNA, 22 nt, Human
gacugccagaaugugaggccug

SEQ ID NO: 189786 - RNA, 22 nt, Human
uaggaaauucucuugcuaaguu

SEQ ID NO: 189787 - RNA, 22 nt, Human
gcuggagcugcagccugggccu

SEQ ID NO: 189788 - RNA, 22 nt, Human
cucuagaguacgggcuggcaug

SEQ ID NO: 189789 - RNA, 22 nt, Human
agagcugucacauagagccaga

SEQ ID NO: 189790 - RNA, 22 nt, Human
acccagagucauggcacuuagc

SEQ ID NO: 189791 - RNA, 22 nt, Human
ugcagaaacagucauuaaugua

SEQ ID NO: 189792 - RNA, 22 nt, Human
guagcuuacaucagaguugguu

SEQ ID NO: 189793 - RNA, 23 nt, Human
gcaggacaacagagugggaaggc

SEQ ID NO: 189794 - RNA, 22 nt, Human
ucucuggcagcuugugcuguug

SEQ ID NO: 189795 - RNA, 22 nt, Human
cugcugagguauacuaugugac

SEQ ID NO: 189796 - RNA, 22 nt, Human
gggaaaaauaaugcacagauau

SEQ ID NO: 189797 - RNA, 22 nt, Human
cugauagacaaucaccauggga

SEQ ID NO: 189798 - RNA, 22 nt, Human
uccaggcaaaaaccaacuacag

SEQ ID NO: 189799 - RNA, 17 nt, Human
ugguccagguggagcca

SEQ ID NO: 189800 - RNA, 22 nt, Human
gucugggcaucagacugcgggc

SEQ ID NO: 189801 - RNA, 22 nt, Human
ccucugaguuggccugucuugu

SEQ ID NO: 189802 - RNA, 22 nt, Human
cuggcugguaauggaacgacag

SEQ ID NO: 189803 - RNA, 22 nt, Human
aggggaggagcuuuucuugccu

SEQ ID NO: 189804 - RNA, 22 nt, Human
cugagggaaggcagucaguugg

SEQ ID NO: 189805 - RNA, 22 nt, Human
aagauggagcacgagcagaagc

SEQ ID NO: 189806 - RNA, 22 nt, Human
aggcaaauuauuguaugcaguu

SEQ ID NO: 189807 - RNA, 22 nt, Human
ccagagagucgaugggggacac

SEQ ID NO: 189808 - RNA, 22 nt, Human
cuuucauaaaggaaaugaugag

SEQ ID NO: 189809 - RNA, 22 nt, Human
gaagacauuaagucuaugucac

SEQ ID NO: 189810 - RNA, 22 nt, Human
gucaucuuaaggacugcuauag

SEQ ID NO: 189811 - RNA, 22 nt, Human
cuucucaaaguugugaaucagg

SEQ ID NO: 189812 - RNA, 22 nt, Human
accuguuucucucugaguuacu

SEQ ID NO: 189813 - RNA, 22 nt, Human
ggcugcaggcaggguauccacu

SEQ ID NO: 189814 - RNA, 22 nt, Human
uuuuaauugcaauuaugguccc

SEQ ID NO: 189815 - RNA, 22 nt, Human
acuauacaguauguacgugcac

SEQ ID NO: 189816 - RNA, 22 nt, Human
aauaagauccugaagauauguu

SEQ ID NO: 189817 - RNA, 22 nt, Human
auguuuuaaauauguguguaaa

SEQ ID NO: 189818 - RNA, 19 nt, Human
ugucccagacuccgugucu

SEQ ID NO: 189819 - RNA, 22 nt, Human
uaaaauagcaugugcagugaaa

SEQ ID NO: 189820 - RNA, 22 nt, Human
augcacauguaucuauauacaa

SEQ ID NO: 189821 - RNA, 22 nt, Human
ccaaggcuccucagcuggucuu

SEQ ID NO: 189822 - RNA, 22 nt, Human
uguggacuagagaauucuguug

SEQ ID NO: 189823 - RNA, 22 nt, Human
ccuguacaucugcucucauugc

SEQ ID NO: 189824 - RNA, 22 nt, Human
uucaucaauguguuuaauaaug

SEQ ID NO: 189825 - RNA, 22 nt, Human
gcagcagcucugaaugggcccc

SEQ ID NO: 189826 - RNA, 22 nt, Human
ugauaaacuuagaaagaauguu

SEQ ID NO: 189827 - RNA, 22 nt, Human
uuuaagagccuguacaaauauu

SEQ ID NO: 189828 - RNA, 22 nt, Human
uucaugugaucacagauuguaa

SEQ ID NO: 189829 - RNA, 22 nt, Human
gaggcucacgacgggacgaacu

SEQ ID NO: 189830 - RNA, 22 nt, Human
ccagaggugcugggagaggucu

SEQ ID NO: 189831 - RNA, 22 nt, Human
augcauaaagaaagcuaucugg

SEQ ID NO: 189832 - RNA, 22 nt, Human
agcugguaaaggggaaagcaga

SEQ ID NO: 189833 - RNA, 22 nt, Human
aagccagggucaggggccuccu

SEQ ID NO: 189834 - RNA, 22 nt, Human
uccugaccacacugccuucugc

SEQ ID NO: 189835 - RNA, 22 nt, Human
uccugcugccauuucaagugcu

SEQ ID NO: 189836 - RNA, 22 nt, Human
cuggguuuuauuacagugagcu

SEQ ID NO: 189837 - RNA, 22 nt, Human
ggagcccugcccuaggcagcuc

SEQ ID NO: 189838 - RNA, 22 nt, Human
ugcaggugcugugucaagagag

SEQ ID NO: 189839 - RNA, 22 nt, Human
aauucuauguucuugaguaaga

SEQ ID NO: 189840 - RNA, 22 nt, Human
aguggcugcuucugguugcucc

SEQ ID NO: 189841 - RNA, 19 nt, Human
ccaggcuuuaugcaaauac

SEQ ID NO: 189842 - RNA, 22 nt, Human
gucagagcuggaggcaaguucu

SEQ ID NO: 189843 - RNA, 22 nt, Human
guaacucuuuggaaaacauuuu

SEQ ID NO: 189844 - RNA, 22 nt, Human
agaggcugggaaggguccccgg

SEQ ID NO: 189845 - RNA, 23 nt, Human
uuucuucagaagccuugcgaggc

SEQ ID NO: 189846 - RNA, 22 nt, Human
uuuauaaaauagacugggucua

SEQ ID NO: 189847 - RNA, 22 nt, Human
gcucuuuguauuuuggaaucaa

SEQ ID NO: 189848 - RNA, 22 nt, Human
aauguauuugauguauuagccu

SEQ ID NO: 189849 - RNA, 22 nt, Human
ucagcagggccuccuugugcag

SEQ ID NO: 189850 - RNA, 22 nt, Human
ucucuucccuuuaugguaugug

SEQ ID NO: 189851 - RNA, 22 nt, Human
ucaguggauauuucuguggcug

SEQ ID NO: 189852 - RNA, 22 nt, Human
ucugugcccucggugcugggcc

SEQ ID NO: 189853 - RNA, 22 nt, Human
guugaaagaugucuugguuccc

SEQ ID NO: 189854 - RNA, 22 nt, Human
uucuauuaauauguuaauucug

SEQ ID NO: 189855 - RNA, 22 nt, Human
cucugccauuuaucagaacugu

SEQ ID NO: 189856 - RNA, 21 nt, Human
uuacaaagcuacagauguugc

SEQ ID NO: 189857 - RNA, 22 nt, Human
ugguugccucucagagauuccg

SEQ ID NO: 189858 - RNA, 22 nt, Human
uccugcagucugcacucugccu

SEQ ID NO: 189859 - RNA, 22 nt, Human
ugcaggguggagcggaagcgga

SEQ ID NO: 189860 - RNA, 22 nt, Human
aucucagaaggcauuuccaaga

SEQ ID NO: 189861 - RNA, 22 nt, Human
ucguacagcagacugaaguccu

SEQ ID NO: 189862 - RNA, 22 nt, Human
aguguccuacagcuccugccug

SEQ ID NO: 189863 - RNA, 22 nt, Human
uggggugguaauacaccguucu

SEQ ID NO: 189864 - RNA, 20 nt, Human
gcucagguuugggcuuugug

SEQ ID NO: 189865 - RNA, 22 nt, Human
cugccuugcaccggcucucugg

SEQ ID NO: 189866 - RNA, 18 nt, Human
ucaggcuggaaguuugcc

SEQ ID NO: 189867 - RNA, 22 nt, Human
uugaaauacugcauuguucagu

SEQ ID NO: 189868 - RNA, 22 nt, Human
gaagucugcugcucaggaguuu

SEQ ID NO: 189869 - RNA, 22 nt, Human
uuaaagucccugccuuaauucc

SEQ ID NO: 189870 - RNA, 22 nt, Human
acauucuuucaccuugugucca

SEQ ID NO: 189871 - RNA, 22 nt, Human
uguccuuuucuuuagugcagcu

SEQ ID NO: 189872 - RNA, 22 nt, Human
ucuuuggaaugcuagcauucua

SEQ ID NO: 189873 - RNA, 22 nt, Human
agauugggguccagacuccuga

SEQ ID NO: 189874 - RNA, 22 nt, Human
uuauuugaaugauggcacaauu

SEQ ID NO: 189875 - RNA, 22 nt, Human
aaugcuaaaacacagauuuuug

SEQ ID NO: 189876 - RNA, 22 nt, Human
uuucaaacauaucuucauuacu

SEQ ID NO: 189877 - RNA, 22 nt, Human
ucugccagaaguucugagagua

SEQ ID NO: 189878 - RNA, 21 nt, Human
ggugcucgcugaugaggagug

SEQ ID NO: 189879 - RNA, 22 nt, Human
gcauuuuaauaagauucauagg

SEQ ID NO: 189880 - RNA, 22 nt, Human
uaauuuugcugugaccauugaa

SEQ ID NO: 189881 - RNA, 22 nt, Human
gcccagugguaaaagcaggccu

SEQ ID NO: 189882 - RNA, 22 nt, Human
acaugcauaagccuagccauca

SEQ ID NO: 189883 - RNA, 22 nt, Human
aguauauaugaggaaccacaaa

SEQ ID NO: 189884 - RNA, 22 nt, Human
aguuuagacaaagucuugcauu

SEQ ID NO: 189885 - RNA, 22 nt, Human
cauuuauucaugaucuguagcu

SEQ ID NO: 189886 - RNA, 23 nt, Human
aggagccccuaauucugggcagc

SEQ ID NO: 189887 - RNA, 21 nt, Human
caggcucugcuagaggagccu

SEQ ID NO: 189888 - RNA, 23 nt, Human
uuggagagggugaguagugucag

SEQ ID NO: 189889 - RNA, 22 nt, Human
gggaggacgguccagggcaaag

SEQ ID NO: 189890 - RNA, 22 nt, Human
accaucuuuuccucugccuccu

SEQ ID NO: 189891 - RNA, 22 nt, Human
uguguccuuaugaaaauacugu

SEQ ID NO: 189892 - RNA, 22 nt, Human
ggcagagaaucuggcuguuuac

SEQ ID NO: 189893 - RNA, 22 nt, Human
caaacuuacguagucuuacuac

SEQ ID NO: 189894 - RNA, 22 nt, Human
gaaaauguuuccuguuauuugc

SEQ ID NO: 189895 - RNA, 22 nt, Human
uuguacaaguuuugagcuuaag

SEQ ID NO: 189896 - RNA, 22 nt, Human
agcagcauuaugauauaucuua

SEQ ID NO: 189897 - RNA, 22 nt, Human
uauuuugcaaaccugaguuuga

SEQ ID NO: 189898 - RNA, 22 nt, Human
augugcaugcacuuacaugugu

SEQ ID NO: 189899 - RNA, 22 nt, Human
ugaggccucugugccauccagg

SEQ ID NO: 189900 - RNA, 22 nt, Human
cauuuggaccaaaauagccaac

SEQ ID NO: 189901 - RNA, 21 nt, Human
ugaggccucuccugggcuggc

SEQ ID NO: 189902 - RNA, 22 nt, Human
ucaggagcugcacugggcccac

SEQ ID NO: 189903 - RNA, 22 nt, Human
agggccccauagucacugcccg

SEQ ID NO: 189904 - RNA, 22 nt, Human
uuccuuguugaaaaugucugca

SEQ ID NO: 189905 - RNA, 22 nt, Human
gcagagugggagcccagggcug

SEQ ID NO: 189906 - RNA, 19 nt, Human
cuuuagacacaccuggaca

SEQ ID NO: 189907 - RNA, 21 nt, Human
agggccucuguguacuggggg

SEQ ID NO: 189908 - RNA, 22 nt, Human
gguucucuaacuuugacuggag

SEQ ID NO: 189909 - RNA, 19 nt, Human
uccugggcugcgucuugcc

SEQ ID NO: 189910 - RNA, 22 nt, Human
gcaacaguuggauuccagagga

SEQ ID NO: 189911 - RNA, 23 nt, Human
gcacagagcaguuaggggaagau

SEQ ID NO: 189912 - RNA, 20 nt, Human
agggugugggccuuagccau

SEQ ID NO: 189913 - RNA, 22 nt, Human
gaccagcuggugaaaaccaauu

SEQ ID NO: 189914 - RNA, 22 nt, Human
acauggcuggcaccuuaaauuu

SEQ ID NO: 189915 - RNA, 22 nt, Human
caggccugcaggaaaggcuccc

SEQ ID NO: 189916 - RNA, 22 nt, Human
gggcaguagcuucguaggcauc

SEQ ID NO: 189917 - RNA, 22 nt, Human
uccuggccugucuggaguagcu

SEQ ID NO: 189918 - RNA, 22 nt, Human
ggcagaggugaaguucacaagg

SEQ ID NO: 189919 - RNA, 22 nt, Human
cugcccagauuuuaccaccugc

SEQ ID NO: 189920 - RNA, 22 nt, Human
auuucaaguguugagcucauaa

SEQ ID NO: 189921 - RNA, 20 nt, Human
agggaggugcugggccugag

SEQ ID NO: 189922 - RNA, 22 nt, Human
acaggcugaggaugauugcauc

SEQ ID NO: 189923 - RNA, 22 nt, Human
gugggagcuuuggcaucaggcu

SEQ ID NO: 189924 - RNA, 22 nt, Human
ugagaagcagcuuacagguguc

SEQ ID NO: 189925 - RNA, 22 nt, Human
ccagagagagaggucaauggca

SEQ ID NO: 189926 - RNA, 22 nt, Human
cagaaauauuuauugagugaca

SEQ ID NO: 189927 - RNA, 22 nt, Human
uugcagggauuaccuuauuuuu

SEQ ID NO: 189928 - RNA, 22 nt, Human
guggcuucaugaacacugauga

SEQ ID NO: 189929 - RNA, 22 nt, Human
ggcuggacuuuuugcaggucau

SEQ ID NO: 189930 - RNA, 22 nt, Human
guggcagugugaggauccugcu

SEQ ID NO: 189931 - RNA, 22 nt, Human
uguaauuauguuguuagaguau

SEQ ID NO: 189932 - RNA, 22 nt, Human
cagaaucuucuuaauuggcaca

SEQ ID NO: 189933 - RNA, 22 nt, Human
gaggcugggaaguccaauauca

SEQ ID NO: 189934 - RNA, 22 nt, Human
agggccucgaaggcagagggau

SEQ ID NO: 189935 - RNA, 22 nt, Human
cucuguuucucagccuauuucc

SEQ ID NO: 189936 - RNA, 21 nt, Human
aggagggcacaaggccaggaa

SEQ ID NO: 189937 - RNA, 22 nt, Human
auacuucuuuaagaguaagucu

SEQ ID NO: 189938 - RNA, 22 nt, Human
ucccuccaggcagcuggguacu

SEQ ID NO: 189939 - RNA, 22 nt, Human
aaaauacuacugucuucuuccc

SEQ ID NO: 189940 - RNA, 22 nt, Human
aaguacaugcuuuauucagagu

SEQ ID NO: 189941 - RNA, 22 nt, Human
uugaaaggugcugugugcugau

SEQ ID NO: 189942 - RNA, 22 nt, Human
gaguuaaauauuuucugaaguu

SEQ ID NO: 189943 - RNA, 22 nt, Human
ggccuugcggaacgcucaggcg

SEQ ID NO: 189944 - RNA, 22 nt, Human
gggaagguauuuagcugcugaa

SEQ ID NO: 189945 - RNA, 22 nt, Human
caaaguuuaaaguagauuucag

SEQ ID NO: 189946 - RNA, 23 nt, Human
uacuauaacgcugugucagcucc

SEQ ID NO: 189947 - RNA, 22 nt, Human
augcugggaaguccuaaccaca

SEQ ID NO: 189948 - RNA, 22 nt, Human
gaggcucuggaguagguacaca

SEQ ID NO: 189949 - RNA, 22 nt, Human
aaagucuuguuacguuccauug

SEQ ID NO: 189950 - RNA, 22 nt, Human
guuauuuauaagguguaacucc

SEQ ID NO: 189951 - RNA, 22 nt, Human
cucuucuugcuagacugagugc

SEQ ID NO: 189952 - RNA, 22 nt, Human
ccuggcugaaccaaugaagugg

SEQ ID NO: 189953 - RNA, 22 nt, Human
guccaaaagagccagccgggcg

SEQ ID NO: 189954 - RNA, 23 nt, Human
agccacagccagagcuaucucca

SEQ ID NO: 189955 - RNA, 22 nt, Human
ggaugucucccagcaccaaagu

SEQ ID NO: 189956 - RNA, 22 nt, Human
agaugcugaagcugaggcaaca

SEQ ID NO: 189957 - RNA, 22 nt, Human
agccugggaauuuagaguucgg

SEQ ID NO: 189958 - RNA, 22 nt, Human
uuuguacacaggauguuauaau

SEQ ID NO: 189959 - RNA, 22 nt, Human
aagugcauaaguaugauuauuu

SEQ ID NO: 189960 - RNA, 22 nt, Human
ugcagaagauggucugagcacc

SEQ ID NO: 189961 - RNA, 22 nt, Human
ccagguaacuugagaacaugag

SEQ ID NO: 189962 - RNA, 22 nt, Human
agcugaggaauaauaacaaggu

SEQ ID NO: 189963 - RNA, 16 nt, Human
acaaauacaacugcug

SEQ ID NO: 189964 - RNA, 22 nt, Human
uuuuuggguccaggcuguaucu

SEQ ID NO: 189965 - RNA, 22 nt, Human
uggccugccacugccacgccac

SEQ ID NO: 189966 - RNA, 22 nt, Human
caacaagcgcucagagcaaagc

SEQ ID NO: 189967 - RNA, 22 nt, Human
cucugaggcuuguucuauguau

SEQ ID NO: 189968 - RNA, 22 nt, Human
cagagacaggaucucgaagacu

SEQ ID NO: 189969 - RNA, 22 nt, Human
acugaggauggauaggucauau

SEQ ID NO: 189970 - RNA, 22 nt, Human
acagugcaaauaggacugucuu

SEQ ID NO: 189971 - RNA, 22 nt, Human
aucuucaaggaaaaaauacagu

SEQ ID NO: 189972 - RNA, 22 nt, Human
auucagugaccuaauuacuuac

SEQ ID NO: 189973 - RNA, 22 nt, Human
ucuuuccucugagcuccuguag

SEQ ID NO: 189974 - RNA, 22 nt, Human
uucucuggagggcugcccggcc

SEQ ID NO: 189975 - RNA, 22 nt, Human
ugcacacagaugguacaugcau

SEQ ID NO: 189976 - RNA, 22 nt, Human
agggagcuuuaccccagaucac

SEQ ID NO: 189977 - RNA, 22 nt, Human
uccuggguggcucugcccggcu

SEQ ID NO: 189978 - RNA, 22 nt, Human
cucuuccuacagucugcuaugc

SEQ ID NO: 189979 - RNA, 22 nt, Human
cacugagaaagugaccugccaa

SEQ ID NO: 189980 - RNA, 22 nt, Human
uuaaaucuguucucaugucugu

SEQ ID NO: 189981 - RNA, 22 nt, Human
aaugugaaaccgcacagaauaa

SEQ ID NO: 189982 - RNA, 22 nt, Human
cuuauucagauacagacucuug

SEQ ID NO: 189983 - RNA, 22 nt, Human
ucugagagagcaccuauccacu

SEQ ID NO: 189984 - RNA, 21 nt, Human
agcaggcagugggcuggauuu

SEQ ID NO: 189985 - RNA, 22 nt, Human
accuguuuuccuaucuagauug

SEQ ID NO: 189986 - RNA, 22 nt, Human
cccaaggaauaggaucccagga

SEQ ID NO: 189987 - RNA, 22 nt, Human
gggagaaggagcuaguucuuga

SEQ ID NO: 189988 - RNA, 22 nt, Human
ucccuucaucagugagcaagcc

SEQ ID NO: 189989 - RNA, 23 nt, Human
ugggcuucugagaaagcaccuaa

SEQ ID NO: 189990 - RNA, 18 nt, Human
gcugcccuagcuccccuc

SEQ ID NO: 189991 - RNA, 22 nt, Human
ucuccaggugcuaagugugccu

SEQ ID NO: 189992 - RNA, 22 nt, Human
aaauuccauuuugugacuauuc

SEQ ID NO: 189993 - RNA, 22 nt, Human
uggagggcauagcuguucuuuc

SEQ ID NO: 189994 - RNA, 22 nt, Human
ugacauuugagcauacauguaa

SEQ ID NO: 189995 - RNA, 22 nt, Human
gucuauauauugcuugaauaau

SEQ ID NO: 189996 - RNA, 23 nt, Human
gugagucuugccuuugcugugga

SEQ ID NO: 189997 - RNA, 22 nt, Human
cugaagccacgauagcuuccua

SEQ ID NO: 189998 - RNA, 22 nt, Human
gccagcugucuaagagaguaaa

SEQ ID NO: 189999 - RNA, 22 nt, Human
augggcaguaacaguggcaguc

SEQ ID NO: 190000 - RNA, 22 nt, Human
ugccaggcccagcuccagagcu

SEQ ID NO: 190001 - RNA, 22 nt, Human
acagguguagguacauuugcau

SEQ ID NO: 190002 - RNA, 22 nt, Human
caguaacauuucaagguagagg

SEQ ID NO: 190003 - RNA, 22 nt, Human
acaugcuaauggagaugccaag

SEQ ID NO: 190004 - RNA, 22 nt, Human
gguggccucgguggugcacagg

SEQ ID NO: 190005 - RNA, 22 nt, Human
ucagaaauguaagcugaugacu

SEQ ID NO: 190006 - RNA, 22 nt, Human
agggccagccaggcccuacaaa

SEQ ID NO: 190007 - RNA, 22 nt, Human
gcugauggcuugcuggcugaca

SEQ ID NO: 190008 - RNA, 22 nt, Human
ggguccagacacuccagaggaa

SEQ ID NO: 190009 - RNA, 22 nt, Human
cugagaggaacaucuuaugcuu

SEQ ID NO: 190010 - RNA, 22 nt, Human
uugcagcucugauccagggacc

SEQ ID NO: 190011 - RNA, 22 nt, Human
gagcccaggaugguguauggcu

SEQ ID NO: 190012 - RNA, 22 nt, Human
auagacaaugguuugccaagaa

SEQ ID NO: 190013 - RNA, 22 nt, Human
cuggagugacuuuguuccuuuu

SEQ ID NO: 190014 - RNA, 22 nt, Human
agauaacucauuuuguauaucc

SEQ ID NO: 190015 - RNA, 22 nt, Human
uuucacauuagauaugucauuu

SEQ ID NO: 190016 - RNA, 22 nt, Human
uagggcucgggcacaggacagg

SEQ ID NO: 190017 - RNA, 22 nt, Human
cagcuucucagaaagcugaggu

SEQ ID NO: 190018 - RNA, 22 nt, Human
ccucugggcggagaucugcugc

SEQ ID NO: 190019 - RNA, 22 nt, Human
cucagagaggcaguggaaguca

SEQ ID NO: 190020 - RNA, 22 nt, Human
cugaggagaaagaugguccaag

SEQ ID NO: 190021 - RNA, 22 nt, Human
aggccucaugucaaagcagcaa

SEQ ID NO: 190022 - RNA, 22 nt, Human
uauauucauuuuaaagccaucu

SEQ ID NO: 190023 - RNA, 22 nt, Human
ucacugcugcugccaugaugga

SEQ ID NO: 190024 - RNA, 23 nt, Human
ggggaaguggcagugagugaggc

SEQ ID NO: 190025 - RNA, 22 nt, Human
uuuccauguuaucuugcagacu

SEQ ID NO: 190026 - RNA, 22 nt, Human
acacauauaugucgaaguccuc

SEQ ID NO: 190027 - RNA, 22 nt, Human
gagaaggccaggaacccagugu

SEQ ID NO: 190028 - RNA, 22 nt, Human
uuuuuauaggucagggcaaguc

SEQ ID NO: 190029 - RNA, 20 nt, Human
uuggaugugcauggccgugc

SEQ ID NO: 190030 - RNA, 21 nt, Human
uucauaaaccauucucaugca

SEQ ID NO: 190031 - RNA, 22 nt, Human
ggguccagaguugaagagguua

SEQ ID NO: 190032 - RNA, 22 nt, Human
uccuggcccgaucccugugaag

SEQ ID NO: 190033 - RNA, 22 nt, Human
caugguuuggucuuuguagugg

SEQ ID NO: 190034 - RNA, 20 nt, Human
uuccuggggaaugauagaag

SEQ ID NO: 190035 - RNA, 17 nt, Human
gcaauuauugggcauuu

SEQ ID NO: 190036 - RNA, 22 nt, Human
aagccuugccuauuugaugaca

SEQ ID NO: 190037 - RNA, 22 nt, Human
acaggcucucagccaguuggca

SEQ ID NO: 190038 - RNA, 22 nt, Human
ggcacagagaggcccuggaagg

SEQ ID NO: 190039 - RNA, 19 nt, Human
ugcugcagucaggcgaggg

SEQ ID NO: 190040 - RNA, 22 nt, Human
gugcauuugugcaugcacaugu

SEQ ID NO: 190041 - RNA, 22 nt, Human
uggcaggaaaguaacagagcac

SEQ ID NO: 190042 - RNA, 22 nt, Human
gggaauuauagcugucacaggc

SEQ ID NO: 190043 - RNA, 22 nt, Human
ucucagagaacaguuggugcuu

SEQ ID NO: 190044 - RNA, 22 nt, Human
agggaggucuggcugcccugag

SEQ ID NO: 190045 - RNA, 21 nt, Human
auaguuuggagugggaaaguc

SEQ ID NO: 190046 - RNA, 22 nt, Human
cagcauuuagaauuugaagugu

SEQ ID NO: 190047 - RNA, 22 nt, Human
cccugcaggcucagacuggagu

SEQ ID NO: 190048 - RNA, 22 nt, Human
cuucuucaauagcaagcgcaua

SEQ ID NO: 190049 - RNA, 22 nt, Human
agggguuggauuuggccuagag

SEQ ID NO: 190050 - RNA, 22 nt, Human
gaagaagggagugacaaaugca

SEQ ID NO: 190051 - RNA, 22 nt, Human
uuugagaagcaucugguccacu

SEQ ID NO: 190052 - RNA, 20 nt, Human
cacugcccuccagccugagc

SEQ ID NO: 190053 - RNA, 22 nt, Human
uuggguuuugauacaugucuaa

SEQ ID NO: 190054 - RNA, 19 nt, Human
aggaaacugucuuuuccag

SEQ ID NO: 190055 - RNA, 22 nt, Human
aaagugguuucccaguucagua

SEQ ID NO: 190056 - RNA, 22 nt, Human
aggcucugaucagguggcugug

SEQ ID NO: 190057 - RNA, 22 nt, Human
aacauacuuauacuaaauaaug

SEQ ID NO: 190058 - RNA, 22 nt, Human
agugagaguauuaaugugaacu

SEQ ID NO: 190059 - RNA, 23 nt, Human
uagcaaaguuguuugggaaauuu

SEQ ID NO: 190060 - RNA, 22 nt, Human
uguggaagccggugggaagcag

SEQ ID NO: 190061 - RNA, 22 nt, Human
uccuggauuaauagggagcugu

SEQ ID NO: 190062 - RNA, 21 nt, Human
cuggacugaggagacagucgc

SEQ ID NO: 190063 - RNA, 22 nt, Human
ggagaugccuuguuucaggaac

SEQ ID NO: 190064 - RNA, 22 nt, Human
gggaaggagguggcuugaagug

SEQ ID NO: 190065 - RNA, 22 nt, Human
ggcaggcagauggcugcaccaa

SEQ ID NO: 190066 - RNA, 22 nt, Human
guggagcaggacuagcugagaa

SEQ ID NO: 190067 - RNA, 22 nt, Human
ugcuccagcgcugccaccaguu

SEQ ID NO: 190068 - RNA, 22 nt, Human
aaucucuuuggcucaaggaucc

SEQ ID NO: 190069 - RNA, 22 nt, Human
augagcagcauugcuccucuua

SEQ ID NO: 190070 - RNA, 22 nt, Human
ugagcuucuuuauuuggccaga

SEQ ID NO: 190071 - RNA, 19 nt, Human
uccagaacugcccuggccu

SEQ ID NO: 190072 - RNA, 22 nt, Human
cuugggugcuggaggcugccgc

SEQ ID NO: 190073 - RNA, 22 nt, Human
cccugcaggggaccugcagccu

SEQ ID NO: 190074 - RNA, 22 nt, Human
uguuuacaaggaguuuauauug

SEQ ID NO: 190075 - RNA, 22 nt, Human
gggacauggaggcgcgcaggca

SEQ ID NO: 190076 - RNA, 22 nt, Human
uauuuucauucugugugacugu

SEQ ID NO: 190077 - RNA, 22 nt, Human
ggcauggacgucucugaggcca

SEQ ID NO: 190078 - RNA, 22 nt, Human
caaggcagcguuccuuucugga

SEQ ID NO: 190079 - RNA, 22 nt, Human
gaacuugguauuccuuuuaaca

SEQ ID NO: 190080 - RNA, 22 nt, Human
uguguucugaaggagaagagug

SEQ ID NO: 190081 - RNA, 21 nt, Human
agagcugggacuugccugaga

SEQ ID NO: 190082 - RNA, 22 nt, Human
agggaguuccgaucugugcacc

SEQ ID NO: 190083 - RNA, 22 nt, Human
ccagggcuccauugcucauccu

SEQ ID NO: 190084 - RNA, 22 nt, Human
gggggagaagauucugcugcuu

SEQ ID NO: 190085 - RNA, 22 nt, Human
uauaaaacagaaagcacuaccu

SEQ ID NO: 190086 - RNA, 22 nt, Human
uuggcucuggaacuauuucuga

SEQ ID NO: 190087 - RNA, 22 nt, Human
gcuggagcugaguucccugggc

SEQ ID NO: 190088 - RNA, 22 nt, Human
cccugcagaaccacagacaaac

SEQ ID NO: 190089 - RNA, 22 nt, Human
gcuguccacgggguugguagag

SEQ ID NO: 190090 - RNA, 22 nt, Human
gccaaggagacacgguguugua

SEQ ID NO: 190091 - RNA, 22 nt, Human
uaucugagaaagaagcaccaga

SEQ ID NO: 190092 - RNA, 22 nt, Human
uggggcuggcacagucucuauu

SEQ ID NO: 190093 - RNA, 22 nt, Human
cugugcugauucagcacaggcc

SEQ ID NO: 190094 - RNA, 22 nt, Human
ugaugaaaauguucagcaauua

SEQ ID NO: 190095 - RNA, 22 nt, Human
aacaaacaguuaaguguggaug

SEQ ID NO: 190096 - RNA, 22 nt, Human
agugucugcuagguucaucaac

SEQ ID NO: 190097 - RNA, 22 nt, Human
ucccaggcuggcaggcagcagu

SEQ ID NO: 190098 - RNA, 22 nt, Human
ugcugucugcaacaguacuaca

SEQ ID NO: 190099 - RNA, 22 nt, Human
uguguccuuuggaggaucagcg

SEQ ID NO: 190100 - RNA, 23 nt, Human
ggucccaguggagaggccucacc

SEQ ID NO: 190101 - RNA, 22 nt, Human
aguccaggaguugggugacauu

SEQ ID NO: 190102 - RNA, 22 nt, Human
cauucuugcaccgugauggcuu

SEQ ID NO: 190103 - RNA, 22 nt, Human
aacuagaaaacaagaugcugau

SEQ ID NO: 190104 - RNA, 22 nt, Human
cuuccuucaauauaauuuuuac

SEQ ID NO: 190105 - RNA, 22 nt, Human
ggagcugagaguagucccuuuu

SEQ ID NO: 190106 - RNA, 22 nt, Human
uagcuuuaggcacguuugaauu

SEQ ID NO: 190107 - RNA, 22 nt, Human
uccagagagguuucuccaugcu

SEQ ID NO: 190108 - RNA, 22 nt, Human
cuggcuccaaauucugauguuc

SEQ ID NO: 190109 - RNA, 22 nt, Human
caggcccaaaugcaaccuucuu

SEQ ID NO: 190110 - RNA, 22 nt, Human
ccagugcucuuaaaggucauaa

SEQ ID NO: 190111 - RNA, 22 nt, Human
uucuccuuuguaauucucaucc

SEQ ID NO: 190112 - RNA, 22 nt, Human
cucugggucuaccuguggccag

SEQ ID NO: 190113 - RNA, 22 nt, Human
ugcacaguuaauaugugacaga

SEQ ID NO: 190114 - RNA, 22 nt, Human
ucaggagcauauauugaugucu

SEQ ID NO: 190115 - RNA, 22 nt, Human
gaacaguaucaguagugccagu

SEQ ID NO: 190116 - RNA, 22 nt, Human
auauaacauacauacagaaaag

SEQ ID NO: 190117 - RNA, 23 nt, Human
cuucucagaagucugugccagga

SEQ ID NO: 190118 - RNA, 22 nt, Human
gcucgcagaucaccugggggcg

SEQ ID NO: 190119 - RNA, 22 nt, Human
ucucuggaguauaaccagggau

SEQ ID NO: 190120 - RNA, 22 nt, Human
aauaggaaaauauuuaacaaga

SEQ ID NO: 190121 - RNA, 22 nt, Human
uuucccaaguguaaacauggca

SEQ ID NO: 190122 - RNA, 22 nt, Human
uuccugggacuggagcagccca

SEQ ID NO: 190123 - RNA, 19 nt, Human
acauuuagaauguacuugc

SEQ ID NO: 190124 - RNA, 22 nt, Human
cuguugcugagguucaaggguc

SEQ ID NO: 190125 - RNA, 20 nt, Human
uggagcuccagcguccaugu

SEQ ID NO: 190126 - RNA, 22 nt, Human
agauaaugucaaauucugucug

SEQ ID NO: 190127 - RNA, 21 nt, Human
agcuuccagagcacauuccau

SEQ ID NO: 190128 - RNA, 22 nt, Human
aacaguaaaaaucauuuaguug

SEQ ID NO: 190129 - RNA, 22 nt, Human
ucuuucauucuagucugagguu

SEQ ID NO: 190130 - RNA, 17 nt, Human
agggucaggugaaguuc

SEQ ID NO: 190131 - RNA, 22 nt, Human
uucuucuuuccuauaauuaauu

SEQ ID NO: 190132 - RNA, 22 nt, Human
ggccuugguggcuuugcugaug

SEQ ID NO: 190133 - RNA, 22 nt, Human
gaaguuuuagucaaaauguaga

SEQ ID NO: 190134 - RNA, 22 nt, Human
cagagugaaaacugagcucaaa

SEQ ID NO: 190135 - RNA, 22 nt, Human
uugaaaguagcagcugcauaug

SEQ ID NO: 190136 - RNA, 18 nt, Human
guccauggccuccaccca

SEQ ID NO: 190137 - RNA, 20 nt, Human
gagcaguggaguuuccaggg

SEQ ID NO: 190138 - RNA, 22 nt, Human
ccuggagcacucucccuggcug

SEQ ID NO: 190139 - RNA, 22 nt, Human
ccagcuuuuggggugacaauuu

SEQ ID NO: 190140 - RNA, 22 nt, Human
uucagagagaaaccagugggaa

SEQ ID NO: 190141 - RNA, 22 nt, Human
aauucuagcauugugaaaauau

SEQ ID NO: 190142 - RNA, 23 nt, Human
auuuuuugucuuuguaacuagau

SEQ ID NO: 190143 - RNA, 22 nt, Human
ugguuagaugaggcugguuuca

SEQ ID NO: 190144 - RNA, 22 nt, Human
cccuccuuucuaggcuuccagc

SEQ ID NO: 190145 - RNA, 22 nt, Human
uacaggcauguagcauggugau

SEQ ID NO: 190146 - RNA, 22 nt, Human
agccuggccaggccugcccagg

SEQ ID NO: 190147 - RNA, 22 nt, Human
aguccugggugugcaaggcaga

SEQ ID NO: 190148 - RNA, 22 nt, Human
uaauuauacaaaaaggcaugca

SEQ ID NO: 190149 - RNA, 22 nt, Human
ugcucagaaacgaggugcagcc

SEQ ID NO: 190150 - RNA, 22 nt, Human
ccacagcuucgcagucugcugc

SEQ ID NO: 190151 - RNA, 22 nt, Human
agugcucaugcacauuuauagu

SEQ ID NO: 190152 - RNA, 22 nt, Human
accaugccaguggcagccagac

SEQ ID NO: 190153 - RNA, 22 nt, Human
cuggucccagcagagcucugag

SEQ ID NO: 190154 - RNA, 22 nt, Human
ucugccaugcuaacuucaguau

SEQ ID NO: 190155 - RNA, 22 nt, Human
agggcugagaaugacagggccg

SEQ ID NO: 190156 - RNA, 22 nt, Human
uucagagcuggugucuacagcu

SEQ ID NO: 190157 - RNA, 22 nt, Human
uuuagaaguucacacauuuaaa

SEQ ID NO: 190158 - RNA, 19 nt, Human
uuggaaggagccagagugg

SEQ ID NO: 190159 - RNA, 22 nt, Human
ucuccagaaauggggcugggga

SEQ ID NO: 190160 - RNA, 22 nt, Human
uuucuauaugaggagcuaaagu

SEQ ID NO: 190161 - RNA, 22 nt, Human
agcagcugucccuuaacaucag

SEQ ID NO: 190162 - RNA, 21 nt, Human
agcugcaaaaacauacaguuc

SEQ ID NO: 190163 - RNA, 23 nt, Human
ucugggcugcuuaaggaucaagg

SEQ ID NO: 190164 - RNA, 22 nt, Human
cuaggcucagucucuggucugu

SEQ ID NO: 190165 - RNA, 16 nt, Human
uggcuucuuauuucua

SEQ ID NO: 190166 - RNA, 21 nt, Human
cucuggaguuugaaggcuggg

SEQ ID NO: 190167 - RNA, 22 nt, Human
cacagagcuggaaaggcugggc

SEQ ID NO: 190168 - RNA, 22 nt, Human
ccaggcccuugcaagucccacc

SEQ ID NO: 190169 - RNA, 22 nt, Human
augccuggacugacaugcacug

SEQ ID NO: 190170 - RNA, 22 nt, Human
ccccaggagauuugggagcaca

SEQ ID NO: 190171 - RNA, 22 nt, Human
aguguauuaucagaaacugugg

SEQ ID NO: 190172 - RNA, 22 nt, Human
auuuauaacgugcagccagggu

SEQ ID NO: 190173 - RNA, 22 nt, Human
ugaggccaugcccgugccggcc

SEQ ID NO: 190174 - RNA, 22 nt, Human
uggauuaguuaagaaauguuag

SEQ ID NO: 190175 - RNA, 22 nt, Human
acauaacaaucauaggacauag

SEQ ID NO: 190176 - RNA, 22 nt, Human
aucugcuugaaugagcaacagg

SEQ ID NO: 190177 - RNA, 22 nt, Human
agggcccuuacgcaggcccuuc

SEQ ID NO: 190178 - RNA, 22 nt, Human
ugccugccccacaagggguugc

SEQ ID NO: 190179 - RNA, 22 nt, Human
uccauuauacuucugauucaaa

SEQ ID NO: 190180 - RNA, 22 nt, Human
uacaacacuguucagccucuuc

SEQ ID NO: 190181 - RNA, 22 nt, Human
cucucugguacauagaguuugg

SEQ ID NO: 190182 - RNA, 22 nt, Human
cacugccuggaaggagagacau

SEQ ID NO: 190183 - RNA, 22 nt, Human
gccacuguacuccagccugcga

SEQ ID NO: 190184 - RNA, 22 nt, Human
auaguuugugaaacacagcagu

SEQ ID NO: 190185 - RNA, 22 nt, Human
auccuggcccagguguggaggg

SEQ ID NO: 190186 - RNA, 19 nt, Human
aaauggagcuaaucuuguc

SEQ ID NO: 190187 - RNA, 22 nt, Human
uggcccagcugcagauggugga

SEQ ID NO: 190188 - RNA, 22 nt, Human
uauugcugccucguccaggcug

SEQ ID NO: 190189 - RNA, 22 nt, Human
cuugauauuuuaaacauacagu

SEQ ID NO: 190190 - RNA, 22 nt, Human
cucaaggccaguucuucugacu

SEQ ID NO: 190191 - RNA, 22 nt, Human
caggaaauauaggaaaaggaac

SEQ ID NO: 190192 - RNA, 22 nt, Human
uggguagggagcuggaauccua

SEQ ID NO: 190193 - RNA, 22 nt, Human
agggcuacugccugccuucagg

SEQ ID NO: 190194 - RNA, 18 nt, Human
uaaaucucucuuuaguca

SEQ ID NO: 190195 - RNA, 23 nt, Human
agguccuggacauaugugcauca

SEQ ID NO: 190196 - RNA, 22 nt, Human
aggcuugcacaugcacgcacgu

SEQ ID NO: 190197 - RNA, 22 nt, Human
aucuggcugacuuugugggaca

SEQ ID NO: 190198 - RNA, 22 nt, Human
gcacacaugcaugcacaggagu

SEQ ID NO: 190199 - RNA, 22 nt, Human
ggcaggaagcauuaaaacgauu

SEQ ID NO: 190200 - RNA, 22 nt, Human
cuucugugagucaguguuucug

SEQ ID NO: 190201 - RNA, 22 nt, Human
aaaaagacuagucgagugcagu

SEQ ID NO: 190202 - RNA, 22 nt, Human
ccugugccauccugagcauccc

SEQ ID NO: 190203 - RNA, 23 nt, Human
gugcaaagauauaccacauggcu

SEQ ID NO: 190204 - RNA, 22 nt, Human
caugcuguccugaaaagauauu

SEQ ID NO: 190205 - RNA, 22 nt, Human
gaaaaggaaauuuauagagauc

SEQ ID NO: 190206 - RNA, 22 nt, Human
aauugcuuuugggggcaguuac

SEQ ID NO: 190207 - RNA, 22 nt, Human
aaaugugcuugugaucagcugu

SEQ ID NO: 190208 - RNA, 19 nt, Human
gacuccaacuuuaagcaug

SEQ ID NO: 190209 - RNA, 22 nt, Human
augucauugccaagaugcuaau

SEQ ID NO: 190210 - RNA, 22 nt, Human
aguggcagagccaggguuggga

SEQ ID NO: 190211 - RNA, 22 nt, Human
gcaaaggccacuggggcgaugg

SEQ ID NO: 190212 - RNA, 22 nt, Human
ggagcugaaccccaucgugcug

SEQ ID NO: 190213 - RNA, 22 nt, Human
auuuauuccuuuauggcuggag

SEQ ID NO: 190214 - RNA, 22 nt, Human
uaaaugagggcugacaugauug

SEQ ID NO: 190215 - RNA, 22 nt, Human
cucagaggggaugcuuggagaa

SEQ ID NO: 190216 - RNA, 22 nt, Human
uuugggaauagcagggacugag

SEQ ID NO: 190217 - RNA, 22 nt, Human
ugcaucaaaacuggacuccuuc

SEQ ID NO: 190218 - RNA, 22 nt, Human
caggaaauggcugaauaaauuc

SEQ ID NO: 190219 - RNA, 22 nt, Human
agucuuagauuuuauuuugguc

SEQ ID NO: 190220 - RNA, 22 nt, Human
agcacacaucacuucugcucau

SEQ ID NO: 190221 - RNA, 22 nt, Human
uauugagaacccucaggaggca

SEQ ID NO: 190222 - RNA, 22 nt, Human
gagcuuccugaugccgaccagu

SEQ ID NO: 190223 - RNA, 22 nt, Human
aaauuuuaguaaggaaguugag

SEQ ID NO: 190224 - RNA, 22 nt, Human
cuugcuacuaugccuggcuaau

SEQ ID NO: 190225 - RNA, 18 nt, Human
agcaggugcuguuucuuu

SEQ ID NO: 190226 - RNA, 22 nt, Human
uggccugaggcucggcaugggu

SEQ ID NO: 190227 - RNA, 22 nt, Human
ugggugugcccagauggugucc

SEQ ID NO: 190228 - RNA, 22 nt, Human
aacuuuggguaaugcuucaauu

SEQ ID NO: 190229 - RNA, 20 nt, Human
agagagagguaaauugagca

SEQ ID NO: 190230 - RNA, 22 nt, Human
agaggagguggugaugcuuuaa

SEQ ID NO: 190231 - RNA, 22 nt, Human
augccauuguauauucauugau

SEQ ID NO: 190232 - RNA, 22 nt, Human
aggggagguguccccaaaucuc

SEQ ID NO: 190233 - RNA, 22 nt, Human
ugaaggccagggauuugcagcc

SEQ ID NO: 190234 - RNA, 22 nt, Human
auaugcauguacgugugcacaa

SEQ ID NO: 190235 - RNA, 22 nt, Human
ucacucagguucaugucuuugu

SEQ ID NO: 190236 - RNA, 22 nt, Human
ggagcuggucagccuugagcau

SEQ ID NO: 190237 - RNA, 22 nt, Human
ugaugacaauguugcugcaaua

SEQ ID NO: 190238 - RNA, 22 nt, Human
uaacacuggagaguugguugug

SEQ ID NO: 190239 - RNA, 22 nt, Human
uggguccacggaagacuuaggg

SEQ ID NO: 190240 - RNA, 22 nt, Human
uuucaaguucuguuccuaaacu

SEQ ID NO: 190241 - RNA, 22 nt, Human
ucacaucaacauuauagcauga

SEQ ID NO: 190242 - RNA, 22 nt, Human
agcagccagaaagggcagucga

SEQ ID NO: 190243 - RNA, 22 nt, Human
ugggagcaaaugacugggagau

SEQ ID NO: 190244 - RNA, 22 nt, Human
cuggaugucuuggggacuccug

SEQ ID NO: 190245 - RNA, 22 nt, Human
auauccaccauucugcaccuuc

SEQ ID NO: 190246 - RNA, 22 nt, Human
aacugaaaucaaucagugauuc

SEQ ID NO: 190247 - RNA, 22 nt, Human
gagcccaggaaguggaggcuga

SEQ ID NO: 190248 - RNA, 22 nt, Human
ccagaggggcugagcaggucac

SEQ ID NO: 190249 - RNA, 22 nt, Human
cagccuccugggacacucaccg

SEQ ID NO: 190250 - RNA, 22 nt, Human
guucuuuaaccuagucucauuu

SEQ ID NO: 190251 - RNA, 20 nt, Human
aaauuuaggaaauuuuacgc

SEQ ID NO: 190252 - RNA, 21 nt, Human
aaauuucugcaagccucaacu

SEQ ID NO: 190253 - RNA, 22 nt, Human
cauuugaacuaauaacugugcu

SEQ ID NO: 190254 - RNA, 22 nt, Human
auuaaauuaaguggcuaauuua

SEQ ID NO: 190255 - RNA, 22 nt, Human
caugauuauauuaauggcuuca

SEQ ID NO: 190256 - RNA, 22 nt, Human
ccaggaggcagagguuguagug

SEQ ID NO: 190257 - RNA, 22 nt, Human
guccugggaacuggacagcuaa

SEQ ID NO: 190258 - RNA, 22 nt, Human
cugauuccagagucuguguucu

SEQ ID NO: 190259 - RNA, 22 nt, Human
gguggaguaauucgcagagguu

SEQ ID NO: 190260 - RNA, 22 nt, Human
guaggguuggagagcacaacca

SEQ ID NO: 190261 - RNA, 22 nt, Human
caguggagaggcaugcuuggca

SEQ ID NO: 190262 - RNA, 22 nt, Human
auucacacuguauacacaggau

SEQ ID NO: 190263 - RNA, 22 nt, Human
cacagaacauuuuuagaugcag

SEQ ID NO: 190264 - RNA, 22 nt, Human
caggucuccauuuugaugaguu

SEQ ID NO: 190265 - RNA, 22 nt, Human
ucagagaguuacacaaauuguu

SEQ ID NO: 190266 - RNA, 22 nt, Human
gcaggaagaggcucgaagcccc

SEQ ID NO: 190267 - RNA, 19 nt, Human
uccaccccagccagcucug

SEQ ID NO: 190268 - RNA, 22 nt, Human
aggcucugaggcagauuuucgu

SEQ ID NO: 190269 - RNA, 22 nt, Human
agcuccugugugcccaccugcu

SEQ ID NO: 190270 - RNA, 22 nt, Human
cuccagucuaguagagccugcu

SEQ ID NO: 190271 - RNA, 22 nt, Human
ggcagugaaucugagagccugg

SEQ ID NO: 190272 - RNA, 22 nt, Human
cugcaaauaggggugugaauaa

SEQ ID NO: 190273 - RNA, 22 nt, Human
caucaggaggagaugaagaaaa

SEQ ID NO: 190274 - RNA, 22 nt, Human
ucucagucagccuugauguccc

SEQ ID NO: 190275 - RNA, 22 nt, Human
uguuacugauuugauauacagu

SEQ ID NO: 190276 - RNA, 19 nt, Human
acccagagcccuuugcagg

SEQ ID NO: 190277 - RNA, 22 nt, Human
uucuccaacacaagcaugaugu

SEQ ID NO: 190278 - RNA, 20 nt, Human
ucuucagaugcuuuuggagu

SEQ ID NO: 190279 - RNA, 22 nt, Human
agagcuuuuugacaucucucua

SEQ ID NO: 190280 - RNA, 22 nt, Human
uccagcccuccugggaucacag

SEQ ID NO: 190281 - RNA, 22 nt, Human
ggaggccauaguuugggaguca

SEQ ID NO: 190282 - RNA, 22 nt, Human
cucuguaccuuaaaagggcuuu

SEQ ID NO: 190283 - RNA, 22 nt, Human
agugauggugagugagaagcuc

SEQ ID NO: 190284 - RNA, 22 nt, Human
ccagagagaaauggauuugagu

SEQ ID NO: 190285 - RNA, 22 nt, Human
uuuuaauuuuagcccuucuggu

SEQ ID NO: 190286 - RNA, 22 nt, Human
agcuguggcagcacuuuggagu

SEQ ID NO: 190287 - RNA, 22 nt, Human
ccucaggcucugggugccuacc

SEQ ID NO: 190288 - RNA, 22 nt, Human
cugggccuggacgggcagaucu

SEQ ID NO: 190289 - RNA, 22 nt, Human
aaguaacaugggaacaucugaa

SEQ ID NO: 190290 - RNA, 20 nt, Human
gcugggcuaccacuggcccu

SEQ ID NO: 190291 - RNA, 22 nt, Human
ucacaagacugagcuugcuuga

SEQ ID NO: 190292 - RNA, 22 nt, Human
uuagacauguuugcuaaaauga

SEQ ID NO: 190293 - RNA, 22 nt, Human
aggggcaguuccaaguuuugug

SEQ ID NO: 190294 - RNA, 22 nt, Human
ggggaccuucccagagcaguug

SEQ ID NO: 190295 - RNA, 19 nt, Human
aaggcuggagaaggccucu

SEQ ID NO: 190296 - RNA, 22 nt, Human
gcagucaguguugacuacaugc

SEQ ID NO: 190297 - RNA, 22 nt, Human
cuuuggaacauacugcugagcu

SEQ ID NO: 190298 - RNA, 22 nt, Human
uugagucuucaguaaaagggua

SEQ ID NO: 190299 - RNA, 22 nt, Human
gccagaaagaggaggaccuggg

SEQ ID NO: 190300 - RNA, 22 nt, Human
guguucucucuacaggaauuua

SEQ ID NO: 190301 - RNA, 22 nt, Human
uaaggcuuaugaucagaagguu

SEQ ID NO: 190302 - RNA, 22 nt, Human
gauccugugcauggggugaugg

SEQ ID NO: 190303 - RNA, 22 nt, Human
ucauccaguuguggagagggaa

SEQ ID NO: 190304 - RNA, 22 nt, Human
uggucagaaggaagggcuccua

SEQ ID NO: 190305 - RNA, 22 nt, Human
caggugggcugccucuccagcu

SEQ ID NO: 190306 - RNA, 22 nt, Human
gucacaaaggugagggacauga

SEQ ID NO: 190307 - RNA, 22 nt, Human
ucugcccaguuugugcucaggu

SEQ ID NO: 190308 - RNA, 22 nt, Human
acaguuacaucacuuacugaca

SEQ ID NO: 190309 - RNA, 23 nt, Human
gacaccaggcguggcccucgaca

SEQ ID NO: 190310 - RNA, 22 nt, Human
acuuguuucaacuguacucucc

SEQ ID NO: 190311 - RNA, 22 nt, Human
ccaggcuggagugcaguagugu

SEQ ID NO: 190312 - RNA, 22 nt, Human
acagacaaguaguucagacaag

SEQ ID NO: 190313 - RNA, 22 nt, Human
gaaugcagugacggaggcuuac

SEQ ID NO: 190314 - RNA, 22 nt, Human
agacauaagugcuaugacauug

SEQ ID NO: 190315 - RNA, 22 nt, Human
gcuggcucccauugguccuucc

SEQ ID NO: 190316 - RNA, 22 nt, Human
cuauaauuaugcucaaaaugua

SEQ ID NO: 190317 - RNA, 22 nt, Human
gaaggcaucacagaggcugugg

SEQ ID NO: 190318 - RNA, 22 nt, Human
gaugaugagauaaggauaacuu

SEQ ID NO: 190319 - RNA, 22 nt, Human
agagccaaucuucagagcagag

SEQ ID NO: 190320 - RNA, 22 nt, Human
aauuugaaacauagucaccacu

SEQ ID NO: 190321 - RNA, 22 nt, Human
acaucacagagcccagauaaag

SEQ ID NO: 190322 - RNA, 20 nt, Human
ucuuacaaucguuacaucca

SEQ ID NO: 190323 - RNA, 22 nt, Human
ggacccuuggcuucugcagauu

SEQ ID NO: 190324 - RNA, 22 nt, Human
ccugggucuauagacuucaaga

SEQ ID NO: 190325 - RNA, 22 nt, Human
cuggauuaaguaaaauagagga

SEQ ID NO: 190326 - RNA, 22 nt, Human
cugccuuugaaaguucuguuga

SEQ ID NO: 190327 - RNA, 22 nt, Human
cuggcuggucaugucaugagcc

SEQ ID NO: 190328 - RNA, 22 nt, Human
ugcagggccagacuggguugga

SEQ ID NO: 190329 - RNA, 22 nt, Human
acacugcucacuucuucccuug

SEQ ID NO: 190330 - RNA, 22 nt, Human
uagaaacccauguuuauucagu

SEQ ID NO: 190331 - RNA, 22 nt, Human
ugcuggcuuuuugguccuugcu

SEQ ID NO: 190332 - RNA, 18 nt, Human
aguaaagcuuauuacaug

SEQ ID NO: 190333 - RNA, 22 nt, Human
ggguccagcuacaucagggugg

SEQ ID NO: 190334 - RNA, 22 nt, Human
gauugaaacauaggcagucgag

SEQ ID NO: 190335 - RNA, 22 nt, Human
aggacaaaggaccagaucugga

SEQ ID NO: 190336 - RNA, 22 nt, Human
acagugaaaauaauaucuucaa

SEQ ID NO: 190337 - RNA, 22 nt, Human
ucuagaauggcugggcacagcu

SEQ ID NO: 190338 - RNA, 22 nt, Human
ggaagcugaauccagagacagg

SEQ ID NO: 190339 - RNA, 22 nt, Human
cucccaggugucccuucugcca

SEQ ID NO: 190340 - RNA, 22 nt, Human
acauguguacuuuuaaggaugu

SEQ ID NO: 190341 - RNA, 22 nt, Human
ucagcugugauccaucuaucua

SEQ ID NO: 190342 - RNA, 22 nt, Human
agccauccucccaccucagccu

SEQ ID NO: 190343 - RNA, 19 nt, Human
aggagaagacucucucccc

SEQ ID NO: 190344 - RNA, 22 nt, Human
cagcugccccuccagggcuggg

SEQ ID NO: 190345 - RNA, 22 nt, Human
ggugcaggagcggggugcucgg

SEQ ID NO: 190346 - RNA, 22 nt, Human
ggaugucuggucuauuucaagu

SEQ ID NO: 190347 - RNA, 22 nt, Human
caaauagauuguucaauccuga

SEQ ID NO: 190348 - RNA, 22 nt, Human
gaggagggcaguuccucuuuua

SEQ ID NO: 190349 - RNA, 22 nt, Human
auuuccauuaucaugacaaauu

SEQ ID NO: 190350 - RNA, 22 nt, Human
ugcaaauucagaagaacugccc

SEQ ID NO: 190351 - RNA, 22 nt, Human
aguuugaaggaguugaaucacc

SEQ ID NO: 190352 - RNA, 19 nt, Human
ucacuucuguuagcaugga

SEQ ID NO: 190353 - RNA, 22 nt, Human
ggcacagauagaucaagugucu

SEQ ID NO: 190354 - RNA, 22 nt, Human
gccagccacuucagcuauggcu

SEQ ID NO: 190355 - RNA, 22 nt, Human
aucuguuuaauucauuuucaca

SEQ ID NO: 190356 - RNA, 20 nt, Human
ugagggcuaaccagacucug

SEQ ID NO: 190357 - RNA, 19 nt, Human
cugggccagagcuguccuc

SEQ ID NO: 190358 - RNA, 22 nt, Human
aaucagaaucaguugacacagc

SEQ ID NO: 190359 - RNA, 18 nt, Human
cugccacuuaauguggug

SEQ ID NO: 190360 - RNA, 22 nt, Human
uugguuuaccagagggaacgug

SEQ ID NO: 190361 - RNA, 22 nt, Human
caucuucugggacuucucaguu

SEQ ID NO: 190362 - RNA, 22 nt, Human
gaauuuacaaguugaauaacaa

SEQ ID NO: 190363 - RNA, 22 nt, Human
uuagagccccagaaaacagugg

SEQ ID NO: 190364 - RNA, 23 nt, Human
cauggcagcaagagcucauggcc

SEQ ID NO: 190365 - RNA, 22 nt, Human
caaggcagcccgcugaaccaca

SEQ ID NO: 190366 - RNA, 22 nt, Human
acugucuguacuucuugcaagg

SEQ ID NO: 190367 - RNA, 22 nt, Human
guucacaguguuuucuuugcau

SEQ ID NO: 190368 - RNA, 22 nt, Human
uagagucagagaaucauuacag

SEQ ID NO: 190369 - RNA, 22 nt, Human
acccaggcgggagugcaguguc

SEQ ID NO: 190370 - RNA, 22 nt, Human
uccagacccaugacccugggga

SEQ ID NO: 190371 - RNA, 22 nt, Human
uuaaagcugagcccucagaagc

SEQ ID NO: 190372 - RNA, 22 nt, Human
ugagcagauggaggcuucugca

SEQ ID NO: 190373 - RNA, 22 nt, Human
uggcucccaaggagcuccugcc

SEQ ID NO: 190374 - RNA, 22 nt, Human
cauuuacacuucuaaccacaag

SEQ ID NO: 190375 - RNA, 22 nt, Human
ugagauucccugaaugauauau

SEQ ID NO: 190376 - RNA, 22 nt, Human
cucucuggacuugaguaucagc

SEQ ID NO: 190377 - RNA, 22 nt, Human
aagcuguagcuuuucaaaacgu

SEQ ID NO: 190378 - RNA, 17 nt, Human
uuuuggugaguuguuuc

SEQ ID NO: 190379 - RNA, 22 nt, Human
ucagaggaugcuguucuuuaau

SEQ ID NO: 190380 - RNA, 22 nt, Human
acuucagaaaauguugaauguu

SEQ ID NO: 190381 - RNA, 22 nt, Human
gggcacagcugcuacccagugc

SEQ ID NO: 190382 - RNA, 22 nt, Human
gagccgugccagcccugucucg

SEQ ID NO: 190383 - RNA, 22 nt, Human
ugcagugggccggaggccaggg

SEQ ID NO: 190384 - RNA, 22 nt, Human
cccagagggcugaggauaugaa

SEQ ID NO: 190385 - RNA, 21 nt, Human
gggcgaggccugauguggcuc

SEQ ID NO: 190386 - RNA, 22 nt, Human
ugccacauggugcauuuccuag

SEQ ID NO: 190387 - RNA, 22 nt, Human
gggcuucuagaauuucugauau

SEQ ID NO: 190388 - RNA, 22 nt, Human
aauguacaccguggguuuuuua

SEQ ID NO: 190389 - RNA, 22 nt, Human
uggaggcugguuucugcugagg

SEQ ID NO: 190390 - RNA, 22 nt, Human
cugggccuuagggcacucccuu

SEQ ID NO: 190391 - RNA, 22 nt, Human
aaaggcuaugauaguccagugg

SEQ ID NO: 190392 - RNA, 22 nt, Human
aagggaggggauguaagccugg

SEQ ID NO: 190393 - RNA, 22 nt, Human
agagaagcagggagucaucugu

SEQ ID NO: 190394 - RNA, 22 nt, Human
aaaggcuuguuugaggacuggu

SEQ ID NO: 190395 - RNA, 22 nt, Human
ccuggaggagcgcugaccagcu

SEQ ID NO: 190396 - RNA, 22 nt, Human
aggaagcccuugucauuucugu

SEQ ID NO: 190397 - RNA, 22 nt, Human
ggagccagagggaugcaguuga

SEQ ID NO: 190398 - RNA, 22 nt, Human
cccagaggcugaguugggagca

SEQ ID NO: 190399 - RNA, 22 nt, Human
ggacaggugacugcccagagug

SEQ ID NO: 190400 - RNA, 22 nt, Human
aggacagagcccuaguuucaua

SEQ ID NO: 190401 - RNA, 22 nt, Human
acugccuugaaagauuguugag

SEQ ID NO: 190402 - RNA, 22 nt, Human
uucacaucuauaacuuagauaa

SEQ ID NO: 190403 - RNA, 22 nt, Human
uugggggcagagggagcaucug

SEQ ID NO: 190404 - RNA, 22 nt, Human
uaguaacucuacacacgacacu

SEQ ID NO: 190405 - RNA, 22 nt, Human
ucuagaacuccaguuaggcaau

SEQ ID NO: 190406 - RNA, 22 nt, Human
ucuccccuagugcauuaaagug

SEQ ID NO: 190407 - RNA, 21 nt, Human
uuuaugcagauaaugcuauuu

SEQ ID NO: 190408 - RNA, 22 nt, Human
agaagccuguugagagggccgu

SEQ ID NO: 190409 - RNA, 22 nt, Human
cuggaucuguuugugcuugugg

SEQ ID NO: 190410 - RNA, 22 nt, Human
auuuccuaauuuaugcaggagu

SEQ ID NO: 190411 - RNA, 22 nt, Human
agaccuggaaguucaagagaaa

SEQ ID NO: 190412 - RNA, 22 nt, Human
agauguaaacucucaugucauu

SEQ ID NO: 190413 - RNA, 22 nt, Human
cuuaggaauauccacagcaggu

SEQ ID NO: 190414 - RNA, 22 nt, Human
auaaaaguucaagagaguacag

SEQ ID NO: 190415 - RNA, 22 nt, Human
aguguuacugguucaugaaucu

SEQ ID NO: 190416 - RNA, 22 nt, Human
uauaaucugguuuuauuaagag

SEQ ID NO: 190417 - RNA, 22 nt, Human
cagugauuaaaacaugacagcc

SEQ ID NO: 190418 - RNA, 19 nt, Human
aggcuuggauuguggccaa

SEQ ID NO: 190419 - RNA, 22 nt, Human
gcucagagaaucagcagacacc

SEQ ID NO: 190420 - RNA, 21 nt, Human
ucagggcagugggagguuccu

SEQ ID NO: 190421 - RNA, 22 nt, Human
guguguggaaugcucauuuauu

SEQ ID NO: 190422 - RNA, 22 nt, Human
uguuuauucauggcuaaugaaa

SEQ ID NO: 190423 - RNA, 22 nt, Human
uggggcaguuaauaaacauucu

SEQ ID NO: 190424 - RNA, 22 nt, Human
ugccugggaaccaauccuggcu

SEQ ID NO: 190425 - RNA, 22 nt, Human
gggugagagucaggcagagauu

SEQ ID NO: 190426 - RNA, 22 nt, Human
ccugggaggcagagguugcagu

SEQ ID NO: 190427 - RNA, 22 nt, Human
uacaggguauagguacagauga

SEQ ID NO: 190428 - RNA, 22 nt, Human
gagggaugugccugaaggcagg

SEQ ID NO: 190429 - RNA, 20 nt, Human
ugucuccagggcugagugga

SEQ ID NO: 190430 - RNA, 22 nt, Human
ucacaggacagccuuccacccg

SEQ ID NO: 190431 - RNA, 22 nt, Human
uugugcucuuauugugcaggga

SEQ ID NO: 190432 - RNA, 22 nt, Human
cagaaggcuggcagauugagau

SEQ ID NO: 190433 - RNA, 22 nt, Human
agcagggguggaagguagcuuu

SEQ ID NO: 190434 - RNA, 22 nt, Human
uggcucugucgccguuuggaau

SEQ ID NO: 190435 - RNA, 22 nt, Human
uugcugaugguauuaugcuagu

SEQ ID NO: 190436 - RNA, 22 nt, Human
ucucuguagagacagcacugug

SEQ ID NO: 190437 - RNA, 22 nt, Human
uuacuucuuuggccuucagcca

SEQ ID NO: 190438 - RNA, 22 nt, Human
ucuggcagggucagggcccagg

SEQ ID NO: 190439 - RNA, 22 nt, Human
uguaauuaaacugaagacagaa

SEQ ID NO: 190440 - RNA, 22 nt, Human
aauaauuuuagcucagaguugu

SEQ ID NO: 190441 - RNA, 22 nt, Human
ucauucauaaaaauuaguuggc

SEQ ID NO: 190442 - RNA, 22 nt, Human
auuuuccaaaauaauuguuacu

SEQ ID NO: 190443 - RNA, 22 nt, Human
gcucugggugaauggcagauug

SEQ ID NO: 190444 - RNA, 20 nt, Human
ugccccaggccugcaccugc

SEQ ID NO: 190445 - RNA, 22 nt, Human
ucaggcugcuguacugugaaug

SEQ ID NO: 190446 - RNA, 22 nt, Human
augucacuguuuaccagcucca

SEQ ID NO: 190447 - RNA, 22 nt, Human
caaggcuuagucagagggugcu

SEQ ID NO: 190448 - RNA, 22 nt, Human
aucuguucuugugucaguaauu

SEQ ID NO: 190449 - RNA, 21 nt, Human
ucucuucccaucaggacacua

SEQ ID NO: 190450 - RNA, 22 nt, Human
gcagagcugguacuugagccug

SEQ ID NO: 190451 - RNA, 22 nt, Human
gccagauguagauagcaaggua

SEQ ID NO: 190452 - RNA, 22 nt, Human
caggaguggugugagggacucc

SEQ ID NO: 190453 - RNA, 22 nt, Human
cagcaagacaaggaacaaacug

SEQ ID NO: 190454 - RNA, 22 nt, Human
ucuuuagaguuaacaauaauga

SEQ ID NO: 190455 - RNA, 22 nt, Human
ccccugccagcuaucccugaac

SEQ ID NO: 190456 - RNA, 18 nt, Human
cuuagaacaucauuccuu

SEQ ID NO: 190457 - RNA, 21 nt, Human
cggaaacucggcucugguucc

SEQ ID NO: 190458 - RNA, 22 nt, Human
caggaggaaacuggauucacuu

SEQ ID NO: 190459 - RNA, 19 nt, Human
ugcucaggccaaggagccc

SEQ ID NO: 190460 - RNA, 22 nt, Human
auugcuuuuccuuaacacaugc

SEQ ID NO: 190461 - RNA, 22 nt, Human
ugugcugguacaugugaggaug

SEQ ID NO: 190462 - RNA, 22 nt, Human
guuucauucggcagcucauaag

SEQ ID NO: 190463 - RNA, 22 nt, Human
auugcugacucaauaauugaag

SEQ ID NO: 190464 - RNA, 18 nt, Human
guggccagccuggucuug

SEQ ID NO: 190465 - RNA, 22 nt, Human
gacacaggaaucaccuuggaug

SEQ ID NO: 190466 - RNA, 22 nt, Human
caucuuugccauaugauguaau

SEQ ID NO: 190467 - RNA, 22 nt, Human
aagaggaggacgguucccagaa

SEQ ID NO: 190468 - RNA, 22 nt, Human
cugaauuaauacacagaauggc

SEQ ID NO: 190469 - RNA, 22 nt, Human
guuuccuaggcuuauacagcug

SEQ ID NO: 190470 - RNA, 22 nt, Human
augggaagugaagucagggagg

SEQ ID NO: 190471 - RNA, 22 nt, Human
auuacugaggcaaaguaguuuu

SEQ ID NO: 190472 - RNA, 22 nt, Human
aaggcaguacuuuauguccaua

SEQ ID NO: 190473 - RNA, 23 nt, Human
uggucucacuugguaagaugaag

SEQ ID NO: 190474 - RNA, 23 nt, Human
ucuggaaugguacucacuggagu

SEQ ID NO: 190475 - RNA, 22 nt, Human
auaugcuuugggauuagaucau

SEQ ID NO: 190476 - RNA, 22 nt, Human
ggaaagcucagaucuuguugga

SEQ ID NO: 190477 - RNA, 22 nt, Human
uagaacacuugaccacugcucc

SEQ ID NO: 190478 - RNA, 22 nt, Human
uggccucugggaaagcagauuc

SEQ ID NO: 190479 - RNA, 22 nt, Human
ucaggaggcggugcugccuuug

SEQ ID NO: 190480 - RNA, 22 nt, Human
cagauuuaccuaacuccaaguu

SEQ ID NO: 190481 - RNA, 22 nt, Human
uacaaagagguaauugcauaua

SEQ ID NO: 190482 - RNA, 22 nt, Human
cugcacagucauuuccucucaa

SEQ ID NO: 190483 - RNA, 22 nt, Human
gagguccauacagcuauucuac

SEQ ID NO: 190484 - RNA, 22 nt, Human
guaggagcucauggggccagga

SEQ ID NO: 190485 - RNA, 22 nt, Human
gagugucagugccuggcuuguu

SEQ ID NO: 190486 - RNA, 22 nt, Human
uguacuauuaagaggccuaaau

SEQ ID NO: 190487 - RNA, 22 nt, Human
ucuggaggcaacuaaccuaguu

SEQ ID NO: 190488 - RNA, 22 nt, Human
uggcccuuguucaaauauguca

SEQ ID NO: 190489 - RNA, 22 nt, Human
ucaucuuuaccccuugcuucaa

SEQ ID NO: 190490 - RNA, 22 nt, Human
uacacaugacaguggacugaga

SEQ ID NO: 190491 - RNA, 22 nt, Human
gcaugaugaaggaggaggaguc

SEQ ID NO: 190492 - RNA, 22 nt, Human
uugggcagguguggcucuccuu

SEQ ID NO: 190493 - RNA, 18 nt, Human
uaagcaaugacauugcaa

SEQ ID NO: 190494 - RNA, 22 nt, Human
aacuaaaagugugucucuugua

SEQ ID NO: 190495 - RNA, 22 nt, Human
uguggcugccacccugaagccg

SEQ ID NO: 190496 - RNA, 18 nt, Human
caucuacaaaugccagaa

SEQ ID NO: 190497 - RNA, 22 nt, Human
aaauacauuagacggagaguua

SEQ ID NO: 190498 - RNA, 22 nt, Human
ugaguugcuaucuagauccaga

SEQ ID NO: 190499 - RNA, 23 nt, Human
ccccucugguggcucagcuccug

SEQ ID NO: 190500 - RNA, 22 nt, Human
ugacucuuggugauuacugggu

SEQ ID NO: 190501 - RNA, 20 nt, Human
ucuguaauuaugccaucacu

SEQ ID NO: 190502 - RNA, 22 nt, Human
ucccugcccugccuucaugguu

SEQ ID NO: 190503 - RNA, 22 nt, Human
uggcagagaacacggcugaucu

SEQ ID NO: 190504 - RNA, 22 nt, Human
ugcaggagacauaauagggacu

SEQ ID NO: 190505 - RNA, 18 nt, Human
acuggagcauuagcagcu

SEQ ID NO: 190506 - RNA, 22 nt, Human
gcugagagcaaagcaugucuag

SEQ ID NO: 190507 - RNA, 22 nt, Human
cacuguggcaaccugugcccaa

SEQ ID NO: 190508 - RNA, 22 nt, Human
acauguguauagccuguauaga

SEQ ID NO: 190509 - RNA, 22 nt, Human
ccagucuguucucaccucugag

SEQ ID NO: 190510 - RNA, 22 nt, Human
uaggcugagguugaugccaggg

SEQ ID NO: 190511 - RNA, 22 nt, Human
aaagaguugaggcaguuaucca

SEQ ID NO: 190512 - RNA, 22 nt, Human
uucugggcaccaccacagacuu

SEQ ID NO: 190513 - RNA, 22 nt, Human
aguggggaagagcaugggcccu

SEQ ID NO: 190514 - RNA, 22 nt, Human
cuaaauuaucaugagaauuaug

SEQ ID NO: 190515 - RNA, 22 nt, Human
aguguccuagcaagccgguccu

SEQ ID NO: 190516 - RNA, 22 nt, Human
aggaccugacuggcuccugcuu

SEQ ID NO: 190517 - RNA, 22 nt, Human
uaacaagguggucuugguauuu

SEQ ID NO: 190518 - RNA, 22 nt, Human
gggaguggguuuggccuaggcc

SEQ ID NO: 190519 - RNA, 22 nt, Human
cuugggucacaacucugaggug

SEQ ID NO: 190520 - RNA, 22 nt, Human
aauuucaaguggcaucuuugau

SEQ ID NO: 190521 - RNA, 22 nt, Human
cggcuucuuuuaagguugcuga

SEQ ID NO: 190522 - RNA, 22 nt, Human
uauggcuucugcuuucuugacu

SEQ ID NO: 190523 - RNA, 22 nt, Human
cacaugacacuauuuuguucua

SEQ ID NO: 190524 - RNA, 22 nt, Human
cccugaggagagcgcuucccga

SEQ ID NO: 190525 - RNA, 22 nt, Human
uccugccuuagagcaaggaaaa

SEQ ID NO: 190526 - RNA, 22 nt, Human
ggggcagauggaacagagcaca

SEQ ID NO: 190527 - RNA, 22 nt, Human
gacaucauguucugcuaauagu

SEQ ID NO: 190528 - RNA, 20 nt, Human
uccugcaguuccuaggaggg

SEQ ID NO: 190529 - RNA, 22 nt, Human
ucuccagggacugaggcuggag

SEQ ID NO: 190530 - RNA, 16 nt, Human
agugggaggagaaaga

SEQ ID NO: 190531 - RNA, 22 nt, Human
cugaggcagagggcagaccaga

SEQ ID NO: 190532 - RNA, 22 nt, Human
agaggagcugggaggcccucgu

SEQ ID NO: 190533 - RNA, 22 nt, Human
ucccagaguucaaugggaaggu

SEQ ID NO: 190534 - RNA, 22 nt, Human
acaauuacucaacuuugcugcu

SEQ ID NO: 190535 - RNA, 22 nt, Human
aaacauuagacaccauaugcuc

SEQ ID NO: 190536 - RNA, 22 nt, Human
gauugcuggggcaggcuguagc

SEQ ID NO: 190537 - RNA, 17 nt, Human
agauggcaggaggcaga

SEQ ID NO: 190538 - RNA, 22 nt, Human
uccugugucucagcgugaagca

SEQ ID NO: 190539 - RNA, 22 nt, Human
aaaggauucucuugauuucagu

SEQ ID NO: 190540 - RNA, 22 nt, Human
aaaugcucuccaaaaugaaagu

SEQ ID NO: 190541 - RNA, 22 nt, Human
aagggccauaacuugcaguguu

SEQ ID NO: 190542 - RNA, 22 nt, Human
cucuuaaagaauguuccagcug

SEQ ID NO: 190543 - RNA, 19 nt, Human
uuugaaaggauuguuauuu

SEQ ID NO: 190544 - RNA, 22 nt, Human
uucugugaaucuuuuuucccac

SEQ ID NO: 190545 - RNA, 22 nt, Human
caaagugccuguaccacuuugc

SEQ ID NO: 190546 - RNA, 22 nt, Human
aaaccacaguucagugcuuuug

SEQ ID NO: 190547 - RNA, 22 nt, Human
ggagcugggaauuggaucaucu

SEQ ID NO: 190548 - RNA, 23 nt, Human
uauuagggccaggacuggcaaau

SEQ ID NO: 190549 - RNA, 22 nt, Human
ucuggcagaaggcagaaauuca

SEQ ID NO: 190550 - RNA, 22 nt, Human
uucacaauuucccuucaucagg

SEQ ID NO: 190551 - RNA, 22 nt, Human
gcagggcaggauuugaacccag

SEQ ID NO: 190552 - RNA, 22 nt, Human
ccauucugugucucuccacagc

SEQ ID NO: 190553 - RNA, 22 nt, Human
cugagcagcaccuucaagaaac

SEQ ID NO: 190554 - RNA, 22 nt, Human
uuguagcuuaucaaggcuguuu

SEQ ID NO: 190555 - RNA, 22 nt, Human
gacaggcuucaugauggcagga

SEQ ID NO: 190556 - RNA, 22 nt, Human
uuguauauauucuuaaagaugu

SEQ ID NO: 190557 - RNA, 22 nt, Human
cggggcugcucguccuccugug

SEQ ID NO: 190558 - RNA, 22 nt, Human
cugugggagggaaggcgcggcc

SEQ ID NO: 190559 - RNA, 22 nt, Human
uuuguuuaucaaggucuagcau

SEQ ID NO: 190560 - RNA, 22 nt, Human
ugcacaguaaacaugacuggag

SEQ ID NO: 190561 - RNA, 22 nt, Human
agauguggccggcuagggagag

SEQ ID NO: 190562 - RNA, 22 nt, Human
uuuugcaauauguuccugaaua

SEQ ID NO: 190563 - RNA, 22 nt, Human
ggagcugaugguagaagaauga

SEQ ID NO: 190564 - RNA, 22 nt, Human
gugugggcugcagaggcacagc

SEQ ID NO: 190565 - RNA, 17 nt, Human
gccucugcuugugucau

SEQ ID NO: 190566 - RNA, 22 nt, Human
uugcuuuacuuugccauucguu

SEQ ID NO: 190567 - RNA, 23 nt, Human
uucuuuggaauugggcugcaagg

SEQ ID NO: 190568 - RNA, 22 nt, Human
uguguccugguguuaauuuuau

SEQ ID NO: 190569 - RNA, 22 nt, Human
caaaugaauuucccugcaaaug

SEQ ID NO: 190570 - RNA, 22 nt, Human
aacuguaauuuuuacauaguaa

SEQ ID NO: 190571 - RNA, 22 nt, Human
uguccucuuccagugcuccuuc

SEQ ID NO: 190572 - RNA, 22 nt, Human
ccuccuggcccugggccuggaa

SEQ ID NO: 190573 - RNA, 22 nt, Human
aggggagaguuaaugugaaugu

SEQ ID NO: 190574 - RNA, 22 nt, Human
agcugcagagguuugugcaaca

SEQ ID NO: 190575 - RNA, 22 nt, Human
uauucucagcaacacacaugga

SEQ ID NO: 190576 - RNA, 22 nt, Human
agguuccaagaaaucaucagug

SEQ ID NO: 190577 - RNA, 22 nt, Human
acuguccauucacucauauuca

SEQ ID NO: 190578 - RNA, 22 nt, Human
agggcacuuuacccauagcuug

SEQ ID NO: 190579 - RNA, 22 nt, Human
gucccagggaagaaggcagcac

SEQ ID NO: 190580 - RNA, 22 nt, Human
auggucuucucaagcaacacug

SEQ ID NO: 190581 - RNA, 22 nt, Human
ugaaauguuuggguccagaagu

SEQ ID NO: 190582 - RNA, 22 nt, Human
cugucuguuaucucaccagucc

SEQ ID NO: 190583 - RNA, 22 nt, Human
gacauuuaaggcagucacuuaa

SEQ ID NO: 190584 - RNA, 22 nt, Human
uuccaggaagacaucucaggaa

SEQ ID NO: 190585 - RNA, 22 nt, Human
ugaugaauuaguaacaaaugag

SEQ ID NO: 190586 - RNA, 22 nt, Human
ugugggaggaauuagaauggga

SEQ ID NO: 190587 - RNA, 22 nt, Human
uauagacaagcguaacaagaag

SEQ ID NO: 190588 - RNA, 22 nt, Human
ggcagcaguccauggcccaagg

SEQ ID NO: 190589 - RNA, 22 nt, Human
uuuggacaaacagaauagagcu

SEQ ID NO: 190590 - RNA, 22 nt, Human
uuucuaagugaacauucaaguu

SEQ ID NO: 190591 - RNA, 22 nt, Human
gggagcuggggcauuuauaccc

SEQ ID NO: 190592 - RNA, 22 nt, Human
cuggaagagugacuuugcauuu

SEQ ID NO: 190593 - RNA, 22 nt, Human
uccaggacuuucuuaaggcacu

SEQ ID NO: 190594 - RNA, 22 nt, Human
ggcacagaguuggcagagcugc

SEQ ID NO: 190595 - RNA, 22 nt, Human
cugcccuggccacugugcccag

SEQ ID NO: 190596 - RNA, 22 nt, Human
gaggccuggcugggaggaggug

SEQ ID NO: 190597 - RNA, 22 nt, Human
ccauccagaccaguccaugggu

SEQ ID NO: 190598 - RNA, 17 nt, Human
uuugauagaaucagagu

SEQ ID NO: 190599 - RNA, 22 nt, Human
agggauguuaguugugagcuca

SEQ ID NO: 190600 - RNA, 22 nt, Human
aucaucuuaucugacucauuuu

SEQ ID NO: 190601 - RNA, 17 nt, Human
ucuagagcacuuugaga

SEQ ID NO: 190602 - RNA, 22 nt, Human
caguugauguuuagacucugca

SEQ ID NO: 190603 - RNA, 19 nt, Human
aucagcaagguaggaugug

SEQ ID NO: 190604 - RNA, 22 nt, Human
aaauccuaccaagaaauucccu

SEQ ID NO: 190605 - RNA, 22 nt, Human
aaauuccauuaggaaacuucca

SEQ ID NO: 190606 - RNA, 22 nt, Human
augucacaugagagcgcagcac

SEQ ID NO: 190607 - RNA, 22 nt, Human
uagcacagcuucuugaugucac

SEQ ID NO: 190608 - RNA, 21 nt, Human
aggaggagagcuuggccuacc

SEQ ID NO: 190609 - RNA, 22 nt, Human
caggcucccacccuccugcagc

SEQ ID NO: 190610 - RNA, 21 nt, Human
ugaacaaaguucuuaucguga

SEQ ID NO: 190611 - RNA, 22 nt, Human
agguccaggcauuuggguuggg

SEQ ID NO: 190612 - RNA, 21 nt, Human
uuuagagaauacucacuauuu

SEQ ID NO: 190613 - RNA, 22 nt, Human
cagcaccuuccuuaacuccagg

SEQ ID NO: 190614 - RNA, 22 nt, Human
cucagagauauagucccugcuu

SEQ ID NO: 190615 - RNA, 22 nt, Human
uauagcaauucagaauacaugu

SEQ ID NO: 190616 - RNA, 22 nt, Human
uuacaguggcagaguuggguag

SEQ ID NO: 190617 - RNA, 22 nt, Human
ucucagaacacccuucuauggu

SEQ ID NO: 190618 - RNA, 22 nt, Human
ggcugcaguugugugaaggccg

SEQ ID NO: 190619 - RNA, 22 nt, Human
ucuuuucauugagaacacacug

SEQ ID NO: 190620 - RNA, 22 nt, Human
uccaggcugggcugaagggugc

SEQ ID NO: 190621 - RNA, 22 nt, Human
acuucccacugcagugacugag

SEQ ID NO: 190622 - RNA, 22 nt, Human
uggcuucuaguuugaggaaaaa

SEQ ID NO: 190623 - RNA, 22 nt, Human
uccacaggaaagcaccucccau

SEQ ID NO: 190624 - RNA, 18 nt, Human
gcauuuuaaucugaggca

SEQ ID NO: 190625 - RNA, 22 nt, Human
uccuggcauccgugggucugug

SEQ ID NO: 190626 - RNA, 22 nt, Human
aacagaggcucccugcacuugu

SEQ ID NO: 190627 - RNA, 22 nt, Human
aaacugccacaagagggacauc

SEQ ID NO: 190628 - RNA, 22 nt, Human
ccagcaucgacuuccugccuga

SEQ ID NO: 190629 - RNA, 22 nt, Human
uagaacuggaauuuugugguuu

SEQ ID NO: 190630 - RNA, 22 nt, Human
cauaucauaggucuuggauaau

SEQ ID NO: 190631 - RNA, 22 nt, Human
gaccuucuugcuguguccuaac

SEQ ID NO: 190632 - RNA, 22 nt, Human
uuaaugcuugucuagaucuucu

SEQ ID NO: 190633 - RNA, 22 nt, Human
aacaucuacagugagauguuag

SEQ ID NO: 190634 - RNA, 22 nt, Human
auagauuagcccuauaguuuua

SEQ ID NO: 190635 - RNA, 20 nt, Human
ugccaggcacggagugcaug

SEQ ID NO: 190636 - RNA, 22 nt, Human
uuggaauaaaaacaacucacag

SEQ ID NO: 190637 - RNA, 22 nt, Human
auauucuuauccuuuucucugu

SEQ ID NO: 190638 - RNA, 22 nt, Human
agugcagaguacauuuguggca

SEQ ID NO: 190639 - RNA, 22 nt, Human
auuccacacaguaauacucaau

SEQ ID NO: 190640 - RNA, 22 nt, Human
acuuuggacgccaugcuguuug

SEQ ID NO: 190641 - RNA, 22 nt, Human
ugcuuuauuuuaaauaugccau

SEQ ID NO: 190642 - RNA, 22 nt, Human
auuacugagcuuguagcugcau

SEQ ID NO: 190643 - RNA, 22 nt, Human
ggccagagucuauaugcagaca

SEQ ID NO: 190644 - RNA, 22 nt, Human
caacagagggaauggaucucau

SEQ ID NO: 190645 - RNA, 22 nt, Human
uuccuucuauucagcuccaaga

SEQ ID NO: 190646 - RNA, 22 nt, Human
uggcaguggcucagagugcaga

SEQ ID NO: 190647 - RNA, 22 nt, Human
auuagaaugcaggguucauugu

SEQ ID NO: 190648 - RNA, 22 nt, Human
ucucugaguaagugacaguuca

SEQ ID NO: 190649 - RNA, 22 nt, Human
acauuaaacuugcuuggcugua

SEQ ID NO: 190650 - RNA, 22 nt, Human
aaaagcaaguugccuagguuga

SEQ ID NO: 190651 - RNA, 22 nt, Human
acugggccaggugugggugagu

SEQ ID NO: 190652 - RNA, 23 nt, Human
agaaaagcuuggacacauggccu

SEQ ID NO: 190653 - RNA, 22 nt, Human
gccagcuguucagacauucuuu

SEQ ID NO: 190654 - RNA, 22 nt, Human
cacaagucauuuucagcaggcu

SEQ ID NO: 190655 - RNA, 22 nt, Human
cccaggcucacuguccgcuucc

SEQ ID NO: 190656 - RNA, 22 nt, Human
gagugugggucucagcuuuaag

SEQ ID NO: 190657 - RNA, 22 nt, Human
uauauguagucagucagaguaa

SEQ ID NO: 190658 - RNA, 22 nt, Human
uacauguuauuucacuauuggu

SEQ ID NO: 190659 - RNA, 22 nt, Human
ggcuguggucauuaggagguug

SEQ ID NO: 190660 - RNA, 20 nt, Human
uuuauugagcacguacugug

SEQ ID NO: 190661 - RNA, 22 nt, Human
aucuuauuuaacacagcaaaac

SEQ ID NO: 190662 - RNA, 22 nt, Human
uucugaauggcaagcauuaggc

SEQ ID NO: 190663 - RNA, 22 nt, Human
aggauucagaauguaugcagug

SEQ ID NO: 190664 - RNA, 22 nt, Human
ggugggacagguaggaguggcu

SEQ ID NO: 190665 - RNA, 22 nt, Human
ucuggagggggaugccucaucc

SEQ ID NO: 190666 - RNA, 21 nt, Human
ugcacaaacuuucuguggcuu

SEQ ID NO: 190667 - RNA, 22 nt, Human
caagauuaucuucuucuuguua

SEQ ID NO: 190668 - RNA, 22 nt, Human
guacagugugacuuuggaguga

SEQ ID NO: 190669 - RNA, 22 nt, Human
aggcugcuggcaggcguggacg

SEQ ID NO: 190670 - RNA, 22 nt, Human
agaccugggugcccugugcuuu

SEQ ID NO: 190671 - RNA, 22 nt, Human
acuacauuucucaguaccugaa

SEQ ID NO: 190672 - RNA, 22 nt, Human
gccaggcuguuuuuauuacugu

SEQ ID NO: 190673 - RNA, 22 nt, Human
acuguacaugcaucuugucuau

SEQ ID NO: 190674 - RNA, 22 nt, Human
auauacagggagaaacagcuua

SEQ ID NO: 190675 - RNA, 19 nt, Human
gagaaaccccgucuuuagg

SEQ ID NO: 190676 - RNA, 22 nt, Human
uggagcaggugggaugucguga

SEQ ID NO: 190677 - RNA, 22 nt, Human
cagaaagaccugggcucaagag

SEQ ID NO: 190678 - RNA, 22 nt, Human
uucugcuccaccacuuccagca

SEQ ID NO: 190679 - RNA, 22 nt, Human
aagugguuugagcacagugcug

SEQ ID NO: 190680 - RNA, 22 nt, Human
gaaauacagaaagggcugaaug

SEQ ID NO: 190681 - RNA, 22 nt, Human
caacugccauacagcuccaugg

SEQ ID NO: 190682 - RNA, 22 nt, Human
agggucagguuaagggagucau

SEQ ID NO: 190683 - RNA, 22 nt, Human
caggacaagagggaaucgauaa

SEQ ID NO: 190684 - RNA, 22 nt, Human
uagaagauucuaaaguggagag

SEQ ID NO: 190685 - RNA, 22 nt, Human
cuugcuggaaacucucucugcc

SEQ ID NO: 190686 - RNA, 22 nt, Human
gguaauaaaauugugucaaaca

SEQ ID NO: 190687 - RNA, 18 nt, Human
gaggauggaaggagaugc

SEQ ID NO: 190688 - RNA, 22 nt, Human
ugaaugauuugggugcauucag

SEQ ID NO: 190689 - RNA, 22 nt, Human
gcccucucuucugcagccucca

SEQ ID NO: 190690 - RNA, 22 nt, Human
ucucuguaucccagaaccaaaa

SEQ ID NO: 190691 - RNA, 22 nt, Human
acacagcuuuguguugcuccac

SEQ ID NO: 190692 - RNA, 20 nt, Human
ucugagaccuuuccacaccc

SEQ ID NO: 190693 - RNA, 22 nt, Human
uauauguaagcuauguaagagu

SEQ ID NO: 190694 - RNA, 22 nt, Human
augcaaauaaagcaacuauaca

SEQ ID NO: 190695 - RNA, 22 nt, Human
ggcucaggacugcagcguagag

SEQ ID NO: 190696 - RNA, 22 nt, Human
aagcaucuauauuccacuguga

SEQ ID NO: 190697 - RNA, 22 nt, Human
agcaggaacgaguucaugggga

SEQ ID NO: 190698 - RNA, 22 nt, Human
gcucagaggaggccuuuaccua

SEQ ID NO: 190699 - RNA, 22 nt, Human
ugugaaggcagagccagugaaa

SEQ ID NO: 190700 - RNA, 22 nt, Human
auaauauuuggauaggacagua

SEQ ID NO: 190701 - RNA, 22 nt, Human
gaggcucagagacuuuaaguuu

SEQ ID NO: 190702 - RNA, 22 nt, Human
gaauaacagcaaguuugcaggc

SEQ ID NO: 190703 - RNA, 22 nt, Human
auuaagggccaauccuccagcc

SEQ ID NO: 190704 - RNA, 22 nt, Human
gagugcugcuugggauagugag

SEQ ID NO: 190705 - RNA, 22 nt, Human
aacaagcagaugcaaugcacuu

SEQ ID NO: 190706 - RNA, 22 nt, Human
ucuucuggaucgaucacauugu

SEQ ID NO: 190707 - RNA, 22 nt, Human
agugaaaugacugaaucagaua

SEQ ID NO: 190708 - RNA, 23 nt, Human
cuguggcccugcuucaugcagcc

SEQ ID NO: 190709 - RNA, 22 nt, Human
cagguugggcugcgaggaggag

SEQ ID NO: 190710 - RNA, 22 nt, Human
uuuagaauguuagcguuaaagg

SEQ ID NO: 190711 - RNA, 22 nt, Human
acuggacagaggaaauauggag

SEQ ID NO: 190712 - RNA, 19 nt, Human
uagauacugaugaacucca

SEQ ID NO: 190713 - RNA, 22 nt, Human
guaacauaguuugugcuucauc

SEQ ID NO: 190714 - RNA, 21 nt, Human
ugcaggaaagugcugcgaccc

SEQ ID NO: 190715 - RNA, 22 nt, Human
cagcuuuuggcaggaugaccag

SEQ ID NO: 190716 - RNA, 22 nt, Human
aaauguacgggaguagaauuag

SEQ ID NO: 190717 - RNA, 22 nt, Human
guccuggcuagucguccgcgac

SEQ ID NO: 190718 - RNA, 22 nt, Human
aagaugugaacagaaccacagg

SEQ ID NO: 190719 - RNA, 20 nt, Human
aggauggcaagcaagugcau

SEQ ID NO: 190720 - RNA, 22 nt, Human
acacuguaaauugagugcguga

SEQ ID NO: 190721 - RNA, 19 nt, Human
uucuuuccacaucuucucu

SEQ ID NO: 190722 - RNA, 18 nt, Human
gcagcuuuugauucaccc

SEQ ID NO: 190723 - RNA, 22 nt, Human
agcuugauuucucugcagugug

SEQ ID NO: 190724 - RNA, 22 nt, Human
ucugagagcaucacugggguac

SEQ ID NO: 190725 - RNA, 22 nt, Human
ccagcuguuucugaugcuaggc

SEQ ID NO: 190726 - RNA, 22 nt, Human
auauuuuggggugaugugcauc

SEQ ID NO: 190727 - RNA, 22 nt, Human
cagaguccugcaccagcuccag

SEQ ID NO: 190728 - RNA, 22 nt, Human
caggcucccugggcaguggcag

SEQ ID NO: 190729 - RNA, 22 nt, Human
ucaaacugaauuaaacacuugu

SEQ ID NO: 190730 - RNA, 22 nt, Human
ucugcccacugcucugcugccc

SEQ ID NO: 190731 - RNA, 22 nt, Human
ucacauuuuaucuauuuuaagu

SEQ ID NO: 190732 - RNA, 22 nt, Human
gccuggcaauggccucaggaag

SEQ ID NO: 190733 - RNA, 22 nt, Human
cuguacagaccuauuagcccag

SEQ ID NO: 190734 - RNA, 22 nt, Human
aacugcaaaauaaucaaguugu

SEQ ID NO: 190735 - RNA, 22 nt, Human
cauggcccucuucuggagcaau

SEQ ID NO: 190736 - RNA, 22 nt, Human
uccuagaagauggaucagagaa

SEQ ID NO: 190737 - RNA, 22 nt, Human
cauagaaacuugcagcaagcac

SEQ ID NO: 190738 - RNA, 22 nt, Human
cauuuucaugaguuucuguuca

SEQ ID NO: 190739 - RNA, 19 nt, Human
cacuuuauuucuguuuugu

SEQ ID NO: 190740 - RNA, 22 nt, Human
aauagcuuucucaugacuucac

SEQ ID NO: 190741 - RNA, 22 nt, Human
uuuacauggaauauugucuugu

SEQ ID NO: 190742 - RNA, 19 nt, Human
cugggagguguucagagaa

SEQ ID NO: 190743 - RNA, 22 nt, Human
cacaugacucuggcuacccaga

SEQ ID NO: 190744 - RNA, 22 nt, Human
uugcuggggugugaaaucugau

SEQ ID NO: 190745 - RNA, 22 nt, Human
gcaguaagauguuucccagagc

SEQ ID NO: 190746 - RNA, 22 nt, Human
aagaaagauaagguuugcuugg

SEQ ID NO: 190747 - RNA, 22 nt, Human
ccuuccagugacuaaggaggaa

SEQ ID NO: 190748 - RNA, 22 nt, Human
uggcagcuugaaugcagucuuu

SEQ ID NO: 190749 - RNA, 22 nt, Human
ugcauuaugcuugugcuguaua

SEQ ID NO: 190750 - RNA, 22 nt, Human
gagucuggaaacuuugacaaaa

SEQ ID NO: 190751 - RNA, 20 nt, Human
uggcaucucucaauuguagg

SEQ ID NO: 190752 - RNA, 22 nt, Human
ucugcugucuaugcaaguccuu

SEQ ID NO: 190753 - RNA, 22 nt, Human
ugcaggagcugugcggugaggg

SEQ ID NO: 190754 - RNA, 18 nt, Human
ucucaaucgcugcagucu

SEQ ID NO: 190755 - RNA, 22 nt, Human
agggcaguucaacuucauagug

SEQ ID NO: 190756 - RNA, 21 nt, Human
aaugcauuaacauaaagcuga

SEQ ID NO: 190757 - RNA, 22 nt, Human
ucaccugggagggcugugguag

SEQ ID NO: 190758 - RNA, 22 nt, Human
ucagucuuucccucccucaguu

SEQ ID NO: 190759 - RNA, 22 nt, Human
acuuugcagggcuugauaucca

SEQ ID NO: 190760 - RNA, 22 nt, Human
guggaggguuugcaaugugcag

SEQ ID NO: 190761 - RNA, 22 nt, Human
ugcuguuauacuuagcugguua

SEQ ID NO: 190762 - RNA, 22 nt, Human
aaauaagcacuuaacuguauca

SEQ ID NO: 190763 - RNA, 22 nt, Human
gaagcagagccuaaggcagaca

SEQ ID NO: 190764 - RNA, 19 nt, Human
cuggccuguguccugugcu

SEQ ID NO: 190765 - RNA, 22 nt, Human
cuguucacacacuuguacucuc

SEQ ID NO: 190766 - RNA, 22 nt, Human
aagaguuucugggucaaggauu

SEQ ID NO: 190767 - RNA, 22 nt, Human
uggcuucuuuccacuguccugu

SEQ ID NO: 190768 - RNA, 22 nt, Human
caccuguuagcucuaauuuucu

SEQ ID NO: 190769 - RNA, 22 nt, Human
ccagcuccgggaguugcugcug

SEQ ID NO: 190770 - RNA, 22 nt, Human
gguggcugguuuuauaagaggu

SEQ ID NO: 190771 - RNA, 22 nt, Human
cuaguucuagaucccugaggaa

SEQ ID NO: 190772 - RNA, 22 nt, Human
ggguggcacugauaaugagacg

SEQ ID NO: 190773 - RNA, 23 nt, Human
ccugggcauuggcugcagcuucu

SEQ ID NO: 190774 - RNA, 22 nt, Human
gaccccaggcagaucagggggu

SEQ ID NO: 190775 - RNA, 22 nt, Human
cucugcaaggcccuccaguagc

SEQ ID NO: 190776 - RNA, 22 nt, Human
uuacagugugcaaucccagaau

SEQ ID NO: 190777 - RNA, 22 nt, Human
uuucuacagaagauacacugcu

SEQ ID NO: 190778 - RNA, 22 nt, Human
cuugagcuaggaaggcugaggc

SEQ ID NO: 190779 - RNA, 22 nt, Human
acagauuuguucuuuugggcua

SEQ ID NO: 190780 - RNA, 21 nt, Human
uggaaggcugcucugccaggg

SEQ ID NO: 190781 - RNA, 22 nt, Human
ugagaggcagaauggugccugc

SEQ ID NO: 190782 - RNA, 21 nt, Human
cugcaggaugcugaagccagg

SEQ ID NO: 190783 - RNA, 22 nt, Human
gcaggcuucccccacaccuacg

SEQ ID NO: 190784 - RNA, 22 nt, Human
acagccaacgucuuucuuacuu

SEQ ID NO: 190785 - RNA, 22 nt, Human
cacaguuugcauaggaaaaaca

SEQ ID NO: 190786 - RNA, 22 nt, Human
aucuuugaagaggacuugaagu

SEQ ID NO: 190787 - RNA, 17 nt, Human
uggcuucccugggccac

SEQ ID NO: 190788 - RNA, 20 nt, Human
gacacaggcaguccucagag

SEQ ID NO: 190789 - RNA, 22 nt, Human
auguguccauuaucaguucugg

SEQ ID NO: 190790 - RNA, 22 nt, Human
gagcuuggacaagcucugaagg

SEQ ID NO: 190791 - RNA, 22 nt, Human
accuagaaugaagcaaugcugu

SEQ ID NO: 190792 - RNA, 22 nt, Human
agaaucugaaggcaccucuggu

SEQ ID NO: 190793 - RNA, 22 nt, Human
aaaacaguuuaggcaucacagu

SEQ ID NO: 190794 - RNA, 22 nt, Human
auguccuguuuuggcuugcucu

SEQ ID NO: 190795 - RNA, 22 nt, Human
cagcaggcucugaguggcugcc

SEQ ID NO: 190796 - RNA, 22 nt, Human
aaaugacacucauucaguguca

SEQ ID NO: 190797 - RNA, 22 nt, Human
gaaacauauuaauccagugaaa

SEQ ID NO: 190798 - RNA, 22 nt, Human
gaguuagaagacagaauguaaa

SEQ ID NO: 190799 - RNA, 22 nt, Human
uccaugcagaguccaggccuca

SEQ ID NO: 190800 - RNA, 22 nt, Human
ggcucugcuucagaaggcucau

SEQ ID NO: 190801 - RNA, 21 nt, Human
gggugggguuccagccuuuuc

SEQ ID NO: 190802 - RNA, 22 nt, Human
ucuuuauacaaacugggaaaca

SEQ ID NO: 190803 - RNA, 22 nt, Human
cuguuuauagcagagcaagccu

SEQ ID NO: 190804 - RNA, 22 nt, Human
aguccuuugggaaaaaugacua

SEQ ID NO: 190805 - RNA, 21 nt, Human
aagugguuuagguuaccgggg

SEQ ID NO: 190806 - RNA, 22 nt, Human
ggucacugcccucccuuuugca

SEQ ID NO: 190807 - RNA, 22 nt, Human
gaggaggcuuccgggaggcacg

SEQ ID NO: 190808 - RNA, 22 nt, Human
aauaauuuugagagccuggaaa

SEQ ID NO: 190809 - RNA, 22 nt, Human
gaugaaaaucuugagaugucga

SEQ ID NO: 190810 - RNA, 22 nt, Human
auuugcauuuagaaagaucacu

SEQ ID NO: 190811 - RNA, 22 nt, Human
gaaggacccacgaagucacugg

SEQ ID NO: 190812 - RNA, 22 nt, Human
gcugggcuucaccuccagaguu

SEQ ID NO: 190813 - RNA, 22 nt, Human
ucaggaagaaagaagggagugu

SEQ ID NO: 190814 - RNA, 22 nt, Human
uggcagcagacaucugaggucu

SEQ ID NO: 190815 - RNA, 22 nt, Human
agcuggaugaauuuggaacacu

SEQ ID NO: 190816 - RNA, 22 nt, Human
cacccaggcuggagugcauugg

SEQ ID NO: 190817 - RNA, 22 nt, Human
ggaccaggacuggugguaucuc

SEQ ID NO: 190818 - RNA, 22 nt, Human
auacaguaauuuguaacucauc

SEQ ID NO: 190819 - RNA, 22 nt, Human
uucagcacuguuauggauuugc

SEQ ID NO: 190820 - RNA, 17 nt, Human
gcagaaaagucaaggga

SEQ ID NO: 190821 - RNA, 22 nt, Human
uagguuuacugaauuaguggaa

SEQ ID NO: 190822 - RNA, 22 nt, Human
cccagccuuugcuuccugguuc

SEQ ID NO: 190823 - RNA, 22 nt, Human
agcaucugcuuaauggcuuaac

SEQ ID NO: 190824 - RNA, 20 nt, Human
uggaguuguucugcuagguc

SEQ ID NO: 190825 - RNA, 22 nt, Human
aggccaaguagcuagcauugaa

SEQ ID NO: 190826 - RNA, 22 nt, Human
aauuggcuuugagaaguuugag

SEQ ID NO: 190827 - RNA, 22 nt, Human
ugcucugggauucagcagccug

SEQ ID NO: 190828 - RNA, 22 nt, Human
ccaggcaggcgauggugcagug

SEQ ID NO: 190829 - RNA, 22 nt, Human
ucuagaaucacuguuuccaucu

SEQ ID NO: 190830 - RNA, 22 nt, Human
gcccugcugaguccggcucaga

SEQ ID NO: 190831 - RNA, 22 nt, Human
gggcaguggguggcugcagccu

SEQ ID NO: 190832 - RNA, 22 nt, Human
acacaguugauugucacucagg

SEQ ID NO: 190833 - RNA, 22 nt, Human
acaacugucaguaaagaauauu

SEQ ID NO: 190834 - RNA, 22 nt, Human
ucagagacaguucuggggcagg

SEQ ID NO: 190835 - RNA, 22 nt, Human
aggcucaggucucaggucuggc

SEQ ID NO: 190836 - RNA, 22 nt, Human
ugguccagaagauauucaacca

SEQ ID NO: 190837 - RNA, 22 nt, Human
aaaaguuuaagacucauucuag

SEQ ID NO: 190838 - RNA, 22 nt, Human
acuuugaaaagacaguagcucu

SEQ ID NO: 190839 - RNA, 22 nt, Human
gccaggcuggugcaaggauauu

SEQ ID NO: 190840 - RNA, 22 nt, Human
ucagagacaccagagagcugug

SEQ ID NO: 190841 - RNA, 22 nt, Human
uaaggcuaucuuuugagugugu

SEQ ID NO: 190842 - RNA, 22 nt, Human
aggggcucugagugggccagga

SEQ ID NO: 190843 - RNA, 22 nt, Human
uagggaugagccaguggguagu

SEQ ID NO: 190844 - RNA, 22 nt, Human
gaggaagagagcucugccuugu

SEQ ID NO: 190845 - RNA, 22 nt, Human
cacaaaaguaggaggcaggcgg

SEQ ID NO: 190846 - RNA, 22 nt, Human
ugauuacauugguaauguuuau

SEQ ID NO: 190847 - RNA, 22 nt, Human
uguuuacuccagcugauggaac

SEQ ID NO: 190848 - RNA, 22 nt, Human
gagcuggguauauggcuuuaug

SEQ ID NO: 190849 - RNA, 22 nt, Human
gucuggagagcugagcagaguu

SEQ ID NO: 190850 - RNA, 22 nt, Human
ggugcugccuauagucugaaac

SEQ ID NO: 190851 - RNA, 22 nt, Human
uccagggcagugacuacagcgg

SEQ ID NO: 190852 - RNA, 22 nt, Human
uucuguauauuguaaagacuca

SEQ ID NO: 190853 - RNA, 22 nt, Human
auguuuguugaacaucuacugc

SEQ ID NO: 190854 - RNA, 22 nt, Human
aacucuuuguggacauuaaauu

SEQ ID NO: 190855 - RNA, 22 nt, Human
aaaggcuuugagaaguccugca

SEQ ID NO: 190856 - RNA, 22 nt, Human
auuagcaacauggugaauaugu

SEQ ID NO: 190857 - RNA, 22 nt, Human
uaucuagaaacagaguuuuacu

SEQ ID NO: 190858 - RNA, 22 nt, Human
acaggcucacagucauuucauu

SEQ ID NO: 190859 - RNA, 22 nt, Human
cucagcaucaugguaucugggg

SEQ ID NO: 190860 - RNA, 22 nt, Human
acauucaugucccacuucuagc

SEQ ID NO: 190861 - RNA, 22 nt, Human
acugccuugucucuugccuguu

SEQ ID NO: 190862 - RNA, 22 nt, Human
auggucuuuuuguuaugagaga

SEQ ID NO: 190863 - RNA, 22 nt, Human
uguccuuuaugaaaugguguuu

SEQ ID NO: 190864 - RNA, 22 nt, Human
cugcaaaaguaauuggggcuuu

SEQ ID NO: 190865 - RNA, 22 nt, Human
agauguguuucuaguuccugca

SEQ ID NO: 190866 - RNA, 22 nt, Human
cuguucuggagacacugaugaa

SEQ ID NO: 190867 - RNA, 22 nt, Human
agggcagacuaggauggaagug

SEQ ID NO: 190868 - RNA, 16 nt, Human
gcacacagccagccuu

SEQ ID NO: 190869 - RNA, 22 nt, Human
ugaaucaaagcugaaguuuuca

SEQ ID NO: 190870 - RNA, 22 nt, Human
ucagaagucuggacugcuucuc

SEQ ID NO: 190871 - RNA, 22 nt, Human
ucagggcaucaucaugaauaua

SEQ ID NO: 190872 - RNA, 18 nt, Human
uucuuuucaugugaucuc

SEQ ID NO: 190873 - RNA, 20 nt, Human
cuggguggcaagcaaggggg

SEQ ID NO: 190874 - RNA, 21 nt, Human
acccccacaccuccuuaguuc

SEQ ID NO: 190875 - RNA, 22 nt, Human
aguugacauccauaacaggaag

SEQ ID NO: 190876 - RNA, 22 nt, Human
aguaaaugaaagcaauuuuaga

SEQ ID NO: 190877 - RNA, 22 nt, Human
cgcccagcugaaaucuccaggc

SEQ ID NO: 190878 - RNA, 22 nt, Human
acacagccccacggugagcaaa

SEQ ID NO: 190879 - RNA, 22 nt, Human
acagucauagcagccuuuguua

SEQ ID NO: 190880 - RNA, 22 nt, Human
uggcagggccugaaucuuauac

SEQ ID NO: 190881 - RNA, 22 nt, Human
cuuauagauggcgaucuucuug

SEQ ID NO: 190882 - RNA, 22 nt, Human
uccagcccugcccauucucucg

SEQ ID NO: 190883 - RNA, 22 nt, Human
uacaaaguagaaauucaguaaa

SEQ ID NO: 190884 - RNA, 22 nt, Human
augaggcacguguuacuggccu

SEQ ID NO: 190885 - RNA, 22 nt, Human
cuucucugacagucuguuucac

SEQ ID NO: 190886 - RNA, 22 nt, Human
uggauucucaugggaccaguag

SEQ ID NO: 190887 - RNA, 22 nt, Human
ugcccugugugugcaagcacug

SEQ ID NO: 190888 - RNA, 22 nt, Human
acacucaguaaacgacaauggg

SEQ ID NO: 190889 - RNA, 22 nt, Human
uuuaaauucugucugccgcuua

SEQ ID NO: 190890 - RNA, 22 nt, Human
agagggcuaacugggaagcagg

SEQ ID NO: 190891 - RNA, 22 nt, Human
uuugaagacagaucaauauaag

SEQ ID NO: 190892 - RNA, 22 nt, Human
ugaguaaauauuuaugacuaga

SEQ ID NO: 190893 - RNA, 22 nt, Human
gaauaacauuggaacccugaag

SEQ ID NO: 190894 - RNA, 22 nt, Human
auucugggagguagaacugaaa

SEQ ID NO: 190895 - RNA, 22 nt, Human
ucgaaauacuguuuccccuuua

SEQ ID NO: 190896 - RNA, 17 nt, Human
agcugcagaugaaguug

SEQ ID NO: 190897 - RNA, 22 nt, Human
ugaguuaaaugagaacaugaaa

SEQ ID NO: 190898 - RNA, 22 nt, Human
cuuugucauuuugucucucagu

SEQ ID NO: 190899 - RNA, 22 nt, Human
ccaggcuggauuuugcaguuca

SEQ ID NO: 190900 - RNA, 22 nt, Human
ccaggaguuugaggcugcagug

SEQ ID NO: 190901 - RNA, 22 nt, Human
gggcaguuuauucuagaugguu

SEQ ID NO: 190902 - RNA, 22 nt, Human
ucaggcuuggugcuccagugcc

SEQ ID NO: 190903 - RNA, 22 nt, Human
guuucaaaagucaggcuauucu

SEQ ID NO: 190904 - RNA, 22 nt, Human
ucuguugcaaugugcaugguga

SEQ ID NO: 190905 - RNA, 22 nt, Human
uggcaguguuucuaaggggcuc

SEQ ID NO: 190906 - RNA, 22 nt, Human
ugggcugcagagcccggccuuc

SEQ ID NO: 190907 - RNA, 22 nt, Human
acaaguauuuaagguuaguaua

SEQ ID NO: 190908 - RNA, 22 nt, Human
ggacaucuugguugcuuccaag

SEQ ID NO: 190909 - RNA, 22 nt, Human
aacugcaauuacuuuugcacca

SEQ ID NO: 190910 - RNA, 21 nt, Human
ugcacagggcccaggagagcc

SEQ ID NO: 190911 - RNA, 22 nt, Human
ucagcuuucucucgccaucagg

SEQ ID NO: 190912 - RNA, 22 nt, Human
ugugaggguuuuaagggaauga

SEQ ID NO: 190913 - RNA, 22 nt, Human
auguagagcaguguuguccaau

SEQ ID NO: 190914 - RNA, 22 nt, Human
uggauuugcuaccuucugauau

SEQ ID NO: 190915 - RNA, 22 nt, Human
caaaaacugcaauuacuuuuac

SEQ ID NO: 190916 - RNA, 22 nt, Human
aggcggcugguguccugcaggu

SEQ ID NO: 190917 - RNA, 22 nt, Human
uacauucccccaauuaccaaug

SEQ ID NO: 190918 - RNA, 22 nt, Human
uaggggaaagcagaauccugga

SEQ ID NO: 190919 - RNA, 22 nt, Human
cuguuacugaaaugcaccgugc

SEQ ID NO: 190920 - RNA, 22 nt, Human
cugaauuacuuauuagugggga

SEQ ID NO: 190921 - RNA, 21 nt, Human
aggagaccggcuuguuugugc

SEQ ID NO: 190922 - RNA, 22 nt, Human
guccuaaucucuucuuauaagg

SEQ ID NO: 190923 - RNA, 21 nt, Human
agagcucaaggcaaaaauaau

SEQ ID NO: 190924 - RNA, 22 nt, Human
cucagcagugacaagagaguau

SEQ ID NO: 190925 - RNA, 22 nt, Human
auguuuuauauuuugcagcagu

SEQ ID NO: 190926 - RNA, 22 nt, Human
ugcaaaagaauauagauauugu

SEQ ID NO: 190927 - RNA, 22 nt, Human
auaaaaggaaagccuguuguga

SEQ ID NO: 190928 - RNA, 22 nt, Human
caaacauucaaguacaagucuu

SEQ ID NO: 190929 - RNA, 22 nt, Human
agaggcaugaucuuauaauuua

SEQ ID NO: 190930 - RNA, 22 nt, Human
caccucauggauaagauaaacu

SEQ ID NO: 190931 - RNA, 22 nt, Human
ggcugcugggaauaugccagcu

SEQ ID NO: 190932 - RNA, 22 nt, Human
acagguguccaacauuuaccuu

SEQ ID NO: 190933 - RNA, 22 nt, Human
guuugaaugcaguaugcauuuu

SEQ ID NO: 190934 - RNA, 22 nt, Human
ggccaggaggcaggggcucaau

SEQ ID NO: 190935 - RNA, 22 nt, Human
ggcagccauacucagaccuggg

SEQ ID NO: 190936 - RNA, 22 nt, Human
aagagcugugggugguaguccu

SEQ ID NO: 190937 - RNA, 22 nt, Human
uuucagagaaagcccaaagacu

SEQ ID NO: 190938 - RNA, 21 nt, Human
acauuauaauucauauuccac

SEQ ID NO: 190939 - RNA, 21 nt, Human
ugagucuuuugcacaaggaau

SEQ ID NO: 190940 - RNA, 22 nt, Human
uucaacaucaagaaugcaugga

SEQ ID NO: 190941 - RNA, 22 nt, Human
aagggugggcaccgccagguca

SEQ ID NO: 190942 - RNA, 22 nt, Human
aauagcauguucaugauaaaau

SEQ ID NO: 190943 - RNA, 22 nt, Human
agaguuggcccacguguaggcg

SEQ ID NO: 190944 - RNA, 22 nt, Human
cagcauuucaggaggcugaggu

SEQ ID NO: 190945 - RNA, 22 nt, Human
agggcagccucucagccuaggu

SEQ ID NO: 190946 - RNA, 22 nt, Human
aggcacagccucccuucacaug

SEQ ID NO: 190947 - RNA, 20 nt, Human
gcccaggaucucugaggcau

SEQ ID NO: 190948 - RNA, 22 nt, Human
cuuauucagcacuugcucugua

SEQ ID NO: 190949 - RNA, 22 nt, Human
uaggcagcgcuuggcugugcuu

SEQ ID NO: 190950 - RNA, 23 nt, Human
uuuauacaagaaaccgcuggccu

SEQ ID NO: 190951 - RNA, 22 nt, Human
gcuuccagcaccagcagagggg

SEQ ID NO: 190952 - RNA, 22 nt, Human
uagcuguuugaaguauuuuucu

SEQ ID NO: 190953 - RNA, 22 nt, Human
ucuggcaaaggcaaccacaguu

SEQ ID NO: 190954 - RNA, 22 nt, Human
ugaaaucaugaacaagguaggu

SEQ ID NO: 190955 - RNA, 22 nt, Human
guuugcauggaagacagugagu

SEQ ID NO: 190956 - RNA, 22 nt, Human
ucauuguauacuuuauuuauga

SEQ ID NO: 190957 - RNA, 22 nt, Human
ucagagagguuaaauaucuugu

SEQ ID NO: 190958 - RNA, 22 nt, Human
augccaggaacaaacaguggug

SEQ ID NO: 190959 - RNA, 22 nt, Human
ugcugggcuaggguggagcucu

SEQ ID NO: 190960 - RNA, 23 nt, Human
ggguccagccaauuccaaggaaa

SEQ ID NO: 190961 - RNA, 22 nt, Human
uuuccuuugaggguccuacacu

SEQ ID NO: 190962 - RNA, 22 nt, Human
gagagcugggggacuguggaug

SEQ ID NO: 190963 - RNA, 22 nt, Human
ugagacaguuuuucuauuucca

SEQ ID NO: 190964 - RNA, 22 nt, Human
cuggggcccaucgagggcugag

SEQ ID NO: 190965 - RNA, 22 nt, Human
ucagaaaauaacuguuaguuug

SEQ ID NO: 190966 - RNA, 22 nt, Human
uagcccuguccuuggccugugc

SEQ ID NO: 190967 - RNA, 22 nt, Human
gaggaaaaugggacaggcugua

SEQ ID NO: 190968 - RNA, 22 nt, Human
auuucccagcuuugaucaguuu

SEQ ID NO: 190969 - RNA, 22 nt, Human
uacaugcuucuauaugugaagu

SEQ ID NO: 190970 - RNA, 22 nt, Human
agacugaaguaagaaugcagcu

SEQ ID NO: 190971 - RNA, 22 nt, Human
auguuaaauagccauuuguuug

SEQ ID NO: 190972 - RNA, 22 nt, Human
augcauaauguauguauugacu

SEQ ID NO: 190973 - RNA, 22 nt, Human
cagagcaucgcgcagagagccu

SEQ ID NO: 190974 - RNA, 22 nt, Human
aaaugucauauuuaaguaggaa

SEQ ID NO: 190975 - RNA, 22 nt, Human
auaaugucugcagagccacaca

SEQ ID NO: 190976 - RNA, 22 nt, Human
uauucacauguacauaugcuca

SEQ ID NO: 190977 - RNA, 22 nt, Human
ggcuucucuccaguaugcauuc

SEQ ID NO: 190978 - RNA, 22 nt, Human
cauuuaaagguuguggguaaaa

SEQ ID NO: 190979 - RNA, 22 nt, Human
aagauuuuuuuccacagacuca

SEQ ID NO: 190980 - RNA, 20 nt, Human
gucagaggacccuagagcga

SEQ ID NO: 190981 - RNA, 22 nt, Human
caagauaucaaugacauaguau

SEQ ID NO: 190982 - RNA, 22 nt, Human
auccaggcuggguguggcuacu

SEQ ID NO: 190983 - RNA, 22 nt, Human
ugggcccaagagagucuccaac

SEQ ID NO: 190984 - RNA, 22 nt, Human
gaaagcacugugagaucuuguu

SEQ ID NO: 190985 - RNA, 22 nt, Human
aggaaaaauaaggcagcagggc

SEQ ID NO: 190986 - RNA, 20 nt, Human
ugagagcugggcagggauac

SEQ ID NO: 190987 - RNA, 22 nt, Human
agaagaaaugugaaggccacug

SEQ ID NO: 190988 - RNA, 22 nt, Human
acuagaaagcacuaagcuaggc

SEQ ID NO: 190989 - RNA, 22 nt, Human
ugucuguauuagucagcauucu

SEQ ID NO: 190990 - RNA, 22 nt, Human
uggagaaaagguugaauccauc

SEQ ID NO: 190991 - RNA, 22 nt, Human
cauucacauucuucuuacuguu

SEQ ID NO: 190992 - RNA, 23 nt, Human
uggaauguuucuuguacugaaug

SEQ ID NO: 190993 - RNA, 22 nt, Human
uaguaagcacauggacaagugg

SEQ ID NO: 190994 - RNA, 22 nt, Human
auucugggcgccuauggcugca

SEQ ID NO: 190995 - RNA, 22 nt, Human
ugucauacaacaauaaguaccg

SEQ ID NO: 190996 - RNA, 22 nt, Human
uccucccugggagcuucugagu

SEQ ID NO: 190997 - RNA, 22 nt, Human
ucucuugggaggaaagagagaa

SEQ ID NO: 190998 - RNA, 22 nt, Human
gaggcugcuguuagcccugggc

SEQ ID NO: 190999 - RNA, 22 nt, Human
ccuagacauuaagcuuggguuu

SEQ ID NO: 191000 - RNA, 22 nt, Human
uuacaugggcuugugaguccuu

SEQ ID NO: 191001 - RNA, 22 nt, Human
accaugggucagccaccucagc

SEQ ID NO: 191002 - RNA, 22 nt, Human
agaagccauggggucaccagag

SEQ ID NO: 191003 - RNA, 22 nt, Human
uccugggcccuccggaucaggu

SEQ ID NO: 191004 - RNA, 22 nt, Human
gaguuaaaggaaaauaacuuua

SEQ ID NO: 191005 - RNA, 22 nt, Human
ggcaggaauaaauuauggacuu

SEQ ID NO: 191006 - RNA, 22 nt, Human
ggaggagucaguugggcugcuu

SEQ ID NO: 191007 - RNA, 23 nt, Human
agcaccaggaacagugugguccu

SEQ ID NO: 191008 - RNA, 22 nt, Human
agccagaaaaacaccaagagga

SEQ ID NO: 191009 - RNA, 22 nt, Human
ccugccugaaggucagccaccc

SEQ ID NO: 191010 - RNA, 22 nt, Human
accuguuuggaggagguguuag

SEQ ID NO: 191011 - RNA, 22 nt, Human
aaaauuuucagcuugacuugau

SEQ ID NO: 191012 - RNA, 22 nt, Human
uaacagaguuguacaguuacgu

SEQ ID NO: 191013 - RNA, 22 nt, Human
uaaggaaaauggacaucaaaca

SEQ ID NO: 191014 - RNA, 22 nt, Human
gccaccagggggugcaaggucc

SEQ ID NO: 191015 - RNA, 22 nt, Human
uuaaaauuuccccaccauguau

SEQ ID NO: 191016 - RNA, 22 nt, Human
acacgguggccagcaguaggug

SEQ ID NO: 191017 - RNA, 22 nt, Human
uucuuucuuagcaaucuauggu

SEQ ID NO: 191018 - RNA, 22 nt, Human
gccuuagccugcacuuccuguu

SEQ ID NO: 191019 - RNA, 22 nt, Human
auccacagugcagcaagggccc

SEQ ID NO: 191020 - RNA, 22 nt, Human
ucugggaacucugucauuuccc

SEQ ID NO: 191021 - RNA, 22 nt, Human
guguacaggaugacuguacuua

SEQ ID NO: 191022 - RNA, 22 nt, Human
cucugugggccagagaggcccc

SEQ ID NO: 191023 - RNA, 22 nt, Human
gcugagagaucaaggcaggauu

SEQ ID NO: 191024 - RNA, 22 nt, Human
gccagccacguuagacuggccc

SEQ ID NO: 191025 - RNA, 18 nt, Human
uuuguuggguugccuuua

SEQ ID NO: 191026 - RNA, 22 nt, Human
auuuggucacaccaguccacau

SEQ ID NO: 191027 - RNA, 22 nt, Human
gcucuggguagccacugccugg

SEQ ID NO: 191028 - RNA, 18 nt, Human
gagagcccagcagguggu

SEQ ID NO: 191029 - RNA, 22 nt, Human
caggaaaccgcaucccaguggg

SEQ ID NO: 191030 - RNA, 18 nt, Human
ucagagagcagcuuuauu

SEQ ID NO: 191031 - RNA, 19 nt, Human
uccaggagcaaagccaguu

SEQ ID NO: 191032 - RNA, 22 nt, Human
cuccaggggccagaagccuggc

SEQ ID NO: 191033 - RNA, 22 nt, Human
aacacucaauuuacaaacucug

SEQ ID NO: 191034 - RNA, 20 nt, Human
aaacauaguggauaccacag

SEQ ID NO: 191035 - RNA, 22 nt, Human
ccugggagguggagguugcagu

SEQ ID NO: 191036 - RNA, 22 nt, Human
uucucauggugucuuuauacau

SEQ ID NO: 191037 - RNA, 22 nt, Human
cagcaucuuucucuucuggagu

SEQ ID NO: 191038 - RNA, 22 nt, Human
gggcuucuagaccagcagugag

SEQ ID NO: 191039 - RNA, 22 nt, Human
ucugggcugggcuuaggaaccc

SEQ ID NO: 191040 - RNA, 22 nt, Human
ucacagugucguccuugggugu

SEQ ID NO: 191041 - RNA, 22 nt, Human
uaauccaggguauucuaguuuc

SEQ ID NO: 191042 - RNA, 22 nt, Human
agcugcagguucagcauuccac

SEQ ID NO: 191043 - RNA, 22 nt, Human
uggggcagggaugggaaacuau

SEQ ID NO: 191044 - RNA, 22 nt, Human
gcacagccacugagugagaacc

SEQ ID NO: 191045 - RNA, 22 nt, Human
gccuguuuuagaugcauugaug

SEQ ID NO: 191046 - RNA, 22 nt, Human
uccucagauauaaaugagggug

SEQ ID NO: 191047 - RNA, 22 nt, Human
cugggagauugaggccauggug

SEQ ID NO: 191048 - RNA, 22 nt, Human
cuguggagcuuguggcaguggg

SEQ ID NO: 191049 - RNA, 22 nt, Human
agaagccagcuucagcugcccg

SEQ ID NO: 191050 - RNA, 22 nt, Human
gaugguccuccugcugccucuc

SEQ ID NO: 191051 - RNA, 22 nt, Human
uggaaauggaucugaugagucu

SEQ ID NO: 191052 - RNA, 22 nt, Human
auucuucacuguuucagaauga

SEQ ID NO: 191053 - RNA, 22 nt, Human
caggaaaggugugucaugaugg

SEQ ID NO: 191054 - RNA, 22 nt, Human
aacugaaacguauuuuugagau

SEQ ID NO: 191055 - RNA, 22 nt, Human
ucacagaagagauauugacaga

SEQ ID NO: 191056 - RNA, 22 nt, Human
aagcuuuaagugucagucagcc

SEQ ID NO: 191057 - RNA, 23 nt, Human
agcagcaaaaauuuaucuuucug

SEQ ID NO: 191058 - RNA, 22 nt, Human
cauccugguuaccccauaguca

SEQ ID NO: 191059 - RNA, 23 nt, Human
auguagaguacagcacaacagca

SEQ ID NO: 191060 - RNA, 19 nt, Human
ggccuugcucuguggcagc

SEQ ID NO: 191061 - RNA, 22 nt, Human
acaaucuuauuaguaguauaga

SEQ ID NO: 191062 - RNA, 22 nt, Human
uucaguuucuucccugugaaau

SEQ ID NO: 191063 - RNA, 21 nt, Human
aaggcuggagaugcaggucug

SEQ ID NO: 191064 - RNA, 22 nt, Human
auauuauucuagcucuugugug

SEQ ID NO: 191065 - RNA, 22 nt, Human
uacagggaccaauaauaacuau

SEQ ID NO: 191066 - RNA, 22 nt, Human
uggagcagcacaagaaagggga

SEQ ID NO: 191067 - RNA, 22 nt, Human
ccugcagguccccggaugcgca

SEQ ID NO: 191068 - RNA, 23 nt, Human
accaacaagccucuggagagugg

SEQ ID NO: 191069 - RNA, 22 nt, Human
gaagaauauucuugaucuuaga

SEQ ID NO: 191070 - RNA, 22 nt, Human
uguguuauugccacugaagacc

SEQ ID NO: 191071 - RNA, 22 nt, Human
gagucacaaaagaugcccaggg

SEQ ID NO: 191072 - RNA, 22 nt, Human
ccuguccuccaagagcacaucu

SEQ ID NO: 191073 - RNA, 22 nt, Human
acugaaaguccagcaugguaca

SEQ ID NO: 191074 - RNA, 22 nt, Human
aacaacaacggagaaaggguug

SEQ ID NO: 191075 - RNA, 22 nt, Human
gggcuucuacuugcaaaggaua

SEQ ID NO: 191076 - RNA, 22 nt, Human
cccccauccaugucaggagagg

SEQ ID NO: 191077 - RNA, 22 nt, Human
ucagaagguggagguugcagug

SEQ ID NO: 191078 - RNA, 22 nt, Human
uggaaguggcagaaaaugaaca

SEQ ID NO: 191079 - RNA, 22 nt, Human
cugaggagugggugggcaguga

SEQ ID NO: 191080 - RNA, 22 nt, Human
gaagcacauggcuauagcuauu

SEQ ID NO: 191081 - RNA, 19 nt, Human
aaacuaaggggaaauguuu

SEQ ID NO: 191082 - RNA, 19 nt, Human
accaggccucagaggcccu

SEQ ID NO: 191083 - RNA, 22 nt, Human
aagcuggagaguuaggugaaua

SEQ ID NO: 191084 - RNA, 19 nt, Human
uuuagaaguugaaacucug

SEQ ID NO: 191085 - RNA, 22 nt, Human
ugaagcuuuccuguggucagga

SEQ ID NO: 191086 - RNA, 22 nt, Human
ucaggaacauuuaaccacaggg

SEQ ID NO: 191087 - RNA, 22 nt, Human
ccuggguccaauucuggcuugu

SEQ ID NO: 191088 - RNA, 22 nt, Human
cuccagccucaucuccuggcug

SEQ ID NO: 191089 - RNA, 22 nt, Human
agaaauacaaaguacuaagaua

SEQ ID NO: 191090 - RNA, 22 nt, Human
ugcaagagcagaaagaacugag

SEQ ID NO: 191091 - RNA, 22 nt, Human
ucauagcuaagcuccagagugc

SEQ ID NO: 191092 - RNA, 22 nt, Human
cuuguuuaagccgcuguuaagc

SEQ ID NO: 191093 - RNA, 21 nt, Human
cucugcagcccugcuuccagg

SEQ ID NO: 191094 - RNA, 21 nt, Human
ugaggcaaguccuuuuauagc

SEQ ID NO: 191095 - RNA, 23 nt, Human
acagaaaguucugcuggacagag

SEQ ID NO: 191096 - RNA, 22 nt, Human
ucagugcugaguagcgugcacc

SEQ ID NO: 191097 - RNA, 22 nt, Human
cugccccaccccaaccugaggu

SEQ ID NO: 191098 - RNA, 23 nt, Human
ugcuggcuguguuauugccaaca

SEQ ID NO: 191099 - RNA, 22 nt, Human
ggugggagggcugcguuccucu

SEQ ID NO: 191100 - RNA, 22 nt, Human
acagauaauuagcauaaaugcu

SEQ ID NO: 191101 - RNA, 22 nt, Human
aacugagauuacaagagacauu

SEQ ID NO: 191102 - RNA, 22 nt, Human
agacccacacuuugaguagcaa

SEQ ID NO: 191103 - RNA, 20 nt, Human
gcuuggaagccaccuguauu

SEQ ID NO: 191104 - RNA, 22 nt, Human
acugcaccuguguaccaagaug

SEQ ID NO: 191105 - RNA, 22 nt, Human
uggaggcauuucuuuuuggucg

SEQ ID NO: 191106 - RNA, 22 nt, Human
acaacacagcuuuccucaaguu

SEQ ID NO: 191107 - RNA, 22 nt, Human
gcagaaguuaaucgaaggccau

SEQ ID NO: 191108 - RNA, 22 nt, Human
uucucuggaaggcucuacggga

SEQ ID NO: 191109 - RNA, 22 nt, Human
cagccugcaggaggccgucagc

SEQ ID NO: 191110 - RNA, 22 nt, Human
cugaggcacccaucuucuccug

SEQ ID NO: 191111 - RNA, 22 nt, Human
ucaaaggcuugugguucuggga

SEQ ID NO: 191112 - RNA, 22 nt, Human
ugaugaaauguugaggcaguga

SEQ ID NO: 191113 - RNA, 19 nt, Human
uuuacucuccaaggugagu

SEQ ID NO: 191114 - RNA, 22 nt, Human
cugcagagggguugaagggucc

SEQ ID NO: 191115 - RNA, 22 nt, Human
ucagcuuuuuggauugcccaag

SEQ ID NO: 191116 - RNA, 20 nt, Human
ccuucuccagcuuguucuug

SEQ ID NO: 191117 - RNA, 22 nt, Human
gcucuggcacuggcgcgggaug

SEQ ID NO: 191118 - RNA, 22 nt, Human
uuugacucugggugcuuuuucg

SEQ ID NO: 191119 - RNA, 22 nt, Human
uguucaguuugcuaucauaauc

SEQ ID NO: 191120 - RNA, 22 nt, Human
ugguuacagagauuuuuaagau

SEQ ID NO: 191121 - RNA, 22 nt, Human
cccagagcugggugggcagcgg

SEQ ID NO: 191122 - RNA, 22 nt, Human
gaaaggccagcucacagaugag

SEQ ID NO: 191123 - RNA, 22 nt, Human
aaucuguucuacucuauucaga

SEQ ID NO: 191124 - RNA, 22 nt, Human
cuucccacuaguaucacagagc

SEQ ID NO: 191125 - RNA, 22 nt, Human
ugaggcagcaauuguauuguau

SEQ ID NO: 191126 - RNA, 21 nt, Human
cucuagaaaucgaauaaccuu

SEQ ID NO: 191127 - RNA, 22 nt, Human
uaucuauuccaaauaucagcgu

SEQ ID NO: 191128 - RNA, 22 nt, Human
agugggacaguguagagcguca

SEQ ID NO: 191129 - RNA, 22 nt, Human
gcuggcugccuuacuuugugga

SEQ ID NO: 191130 - RNA, 20 nt, Human
ucauggcugcugagagguuc

SEQ ID NO: 191131 - RNA, 22 nt, Human
acaggacugugauccaguaacc

SEQ ID NO: 191132 - RNA, 20 nt, Human
aggaggaagaaagcacacug

SEQ ID NO: 191133 - RNA, 22 nt, Human
cagaacacaggcuaaacugaga

SEQ ID NO: 191134 - RNA, 22 nt, Human
aggcaguggagcuggaauaggc

SEQ ID NO: 191135 - RNA, 22 nt, Human
gauaacccccaagaaggucuuu

SEQ ID NO: 191136 - RNA, 22 nt, Human
agccacagcacauuguaagaaa

SEQ ID NO: 191137 - RNA, 22 nt, Human
cugcaacucucuccagaggcug

SEQ ID NO: 191138 - RNA, 21 nt, Human
agccugggaggcggagguugc

SEQ ID NO: 191139 - RNA, 22 nt, Human
aagauggaguaguguaaugguu

SEQ ID NO: 191140 - RNA, 22 nt, Human
agacaggcagaggcugcagagg

SEQ ID NO: 191141 - RNA, 22 nt, Human
augauauauguguugagcuugc

SEQ ID NO: 191142 - RNA, 22 nt, Human
uugaagagugccuuccagacau

SEQ ID NO: 191143 - RNA, 22 nt, Human
gucugggccaggcgagccgagg

SEQ ID NO: 191144 - RNA, 22 nt, Human
ucccaguggugggugcacauuu

SEQ ID NO: 191145 - RNA, 22 nt, Human
uuucaauguaacauuuccaggc

SEQ ID NO: 191146 - RNA, 22 nt, Human
cucuccaggcgagguccuacug

SEQ ID NO: 191147 - RNA, 16 nt, Human
ucuuuguaaucagcag

SEQ ID NO: 191148 - RNA, 22 nt, Human
ugagacaggcuuccuucuuggg

SEQ ID NO: 191149 - RNA, 22 nt, Human
cuggagugaagcuuauuuuuca

SEQ ID NO: 191150 - RNA, 22 nt, Human
gaguggguaaaggugcuuggcu

SEQ ID NO: 191151 - RNA, 22 nt, Human
uagcuccuggcugcagggccuc

SEQ ID NO: 191152 - RNA, 20 nt, Human
acguggccaccaguggcuua

SEQ ID NO: 191153 - RNA, 22 nt, Human
cuuccucccggcccaugcucug

SEQ ID NO: 191154 - RNA, 22 nt, Human
aucuuccuucacuuucucccac

SEQ ID NO: 191155 - RNA, 22 nt, Human
uggauuuuagcauguaacugug

SEQ ID NO: 191156 - RNA, 22 nt, Human
gaggggccuggcacugagcugg

SEQ ID NO: 191157 - RNA, 22 nt, Human
aacagugucugugguuaaaggu

SEQ ID NO: 191158 - RNA, 22 nt, Human
auggguuucccucugaaauuau

SEQ ID NO: 191159 - RNA, 22 nt, Human
cauggcagggcugugggcaggu

SEQ ID NO: 191160 - RNA, 18 nt, Human
gcucaggcccuagucagu

SEQ ID NO: 191161 - RNA, 22 nt, Human
uggcauuuuguucaguauaugg

SEQ ID NO: 191162 - RNA, 22 nt, Human
cccuaggguuuggccagagccc

SEQ ID NO: 191163 - RNA, 22 nt, Human
gucaggaagcaagguugggcau

SEQ ID NO: 191164 - RNA, 22 nt, Human
uuugacauuggcuuauucuguu

SEQ ID NO: 191165 - RNA, 22 nt, Human
ggccuuagcugucuuuccuuug

SEQ ID NO: 191166 - RNA, 22 nt, Human
ggaaagagcccagcagugcuug

SEQ ID NO: 191167 - RNA, 22 nt, Human
aaccuagaaguuagaguaucau

SEQ ID NO: 191168 - RNA, 22 nt, Human
caggcucgguccaguggcaccc

SEQ ID NO: 191169 - RNA, 23 nt, Human
gccauggcugccccacaggccuc

SEQ ID NO: 191170 - RNA, 22 nt, Human
uacagucaacauugaugaugau

SEQ ID NO: 191171 - RNA, 22 nt, Human
aaacacugaagaccuaucuggu

SEQ ID NO: 191172 - RNA, 21 nt, Human
gguguccagaggaguccccag

SEQ ID NO: 191173 - RNA, 22 nt, Human
gagguccaggguggggccugag

SEQ ID NO: 191174 - RNA, 21 nt, Human
auggcugguggcucagccucc

SEQ ID NO: 191175 - RNA, 22 nt, Human
aucuuuaccaccaaagaaugcu

SEQ ID NO: 191176 - RNA, 22 nt, Human
agcccuagagaaccagccugug

SEQ ID NO: 191177 - RNA, 22 nt, Human
acugcaggccuuggugccagca

SEQ ID NO: 191178 - RNA, 22 nt, Human
ugucaggacacagcuuucugug

SEQ ID NO: 191179 - RNA, 22 nt, Human
uacccagcuccucagaagacca

SEQ ID NO: 191180 - RNA, 22 nt, Human
ggcagugggaaauaagugagaa

SEQ ID NO: 191181 - RNA, 22 nt, Human
uagauaccugcuggaccucauu

SEQ ID NO: 191182 - RNA, 22 nt, Human
ugcugccaaaugcgagcucugu

SEQ ID NO: 191183 - RNA, 22 nt, Human
gaagagcuguagccugcucuuu

SEQ ID NO: 191184 - RNA, 22 nt, Human
gucccaggaguugcugggccuu

SEQ ID NO: 191185 - RNA, 22 nt, Human
acacauuccugcagacaugaug

SEQ ID NO: 191186 - RNA, 22 nt, Human
gagcucuucuaaagauggcaau

SEQ ID NO: 191187 - RNA, 22 nt, Human
auggcagcuuucauuguccaca

SEQ ID NO: 191188 - RNA, 22 nt, Human
uccuuccugcucuaacauucag

SEQ ID NO: 191189 - RNA, 22 nt, Human
caguuugucuugauucagaaca

SEQ ID NO: 191190 - RNA, 19 nt, Human
agguccugaucagcaagga

SEQ ID NO: 191191 - RNA, 22 nt, Human
cugugucccuugucccagagcc

SEQ ID NO: 191192 - RNA, 22 nt, Human
gccaggcuggccagcaccuucu

SEQ ID NO: 191193 - RNA, 22 nt, Human
acaguggaaaugugggagggga

SEQ ID NO: 191194 - RNA, 22 nt, Human
uucacacuguuuuucauagugg

SEQ ID NO: 191195 - RNA, 22 nt, Human
aggaucuugcuguagaggauag

SEQ ID NO: 191196 - RNA, 22 nt, Human
aagaagcaggucacagacaggg

SEQ ID NO: 191197 - RNA, 22 nt, Human
cagcccuggcccaggugccuua

SEQ ID NO: 191198 - RNA, 22 nt, Human
aagcuggaacaucuugaggaag

SEQ ID NO: 191199 - RNA, 22 nt, Human
gcacaggcuguuggccuucaga

SEQ ID NO: 191200 - RNA, 22 nt, Human
gugacuuuaacuucagauuaga

SEQ ID NO: 191201 - RNA, 22 nt, Human
ccuacaggaaauuguaucaaaa

SEQ ID NO: 191202 - RNA, 22 nt, Human
agacuguagcuucugucuugag

SEQ ID NO: 191203 - RNA, 22 nt, Human
gccaggaaagccacuggcauac

SEQ ID NO: 191204 - RNA, 22 nt, Human
uauauuaacacccacuugccuc

SEQ ID NO: 191205 - RNA, 22 nt, Human
uacaaaaguaauuacgguuuuu

SEQ ID NO: 191206 - RNA, 22 nt, Human
caucuuugguuuucuauaugcc

SEQ ID NO: 191207 - RNA, 22 nt, Human
aagccuucccuuuuugagcuca

SEQ ID NO: 191208 - RNA, 22 nt, Human
ucugaaauggcagcgggaauga

SEQ ID NO: 191209 - RNA, 22 nt, Human
guaggaaagggagugaagggaa

SEQ ID NO: 191210 - RNA, 22 nt, Human
agucuagaugauccuaggaaua

SEQ ID NO: 191211 - RNA, 22 nt, Human
gggcagcagagcccugccgagu

SEQ ID NO: 191212 - RNA, 22 nt, Human
uacacuuuauggauccuacuuu

SEQ ID NO: 191213 - RNA, 19 nt, Human
gcucugugaugcugagggg

SEQ ID NO: 191214 - RNA, 22 nt, Human
acguggagagaauagggcacca

SEQ ID NO: 191215 - RNA, 22 nt, Human
aacugcucauuugagaguaugc

SEQ ID NO: 191216 - RNA, 22 nt, Human
agggcugccugacuccagagcc

SEQ ID NO: 191217 - RNA, 22 nt, Human
uccaagagaauacuggagagua

SEQ ID NO: 191218 - RNA, 22 nt, Human
gcucccagaaccaaggcugggg

SEQ ID NO: 191219 - RNA, 22 nt, Human
ugccuagccuucuucaugccau

SEQ ID NO: 191220 - RNA, 22 nt, Human
aagcuggcaugucaccugagaa

SEQ ID NO: 191221 - RNA, 18 nt, Human
aauuuccauaugaauugc

SEQ ID NO: 191222 - RNA, 23 nt, Human
cagcccuuccugcauguuuuugu

SEQ ID NO: 191223 - RNA, 22 nt, Human
uggcaaaggggaccauguugaa

SEQ ID NO: 191224 - RNA, 22 nt, Human
caggucccgccccgggcugacc

SEQ ID NO: 191225 - RNA, 22 nt, Human
uuuuauuaguggcuagaugggg

SEQ ID NO: 191226 - RNA, 22 nt, Human
ggccaggccaagaggguuggaa

SEQ ID NO: 191227 - RNA, 22 nt, Human
uuuacagaucuguugauuuguu

SEQ ID NO: 191228 - RNA, 22 nt, Human
uguacagagguguacauaugau

SEQ ID NO: 191229 - RNA, 22 nt, Human
ucugcucaauacugcucaugaa

SEQ ID NO: 191230 - RNA, 22 nt, Human
ccugccuucuaaagcgcccgcc

SEQ ID NO: 191231 - RNA, 22 nt, Human
uugaauuauuuguuugcaagcu

SEQ ID NO: 191232 - RNA, 22 nt, Human
ccuggccugcucggcucuuaag

SEQ ID NO: 191233 - RNA, 22 nt, Human
aggaggccgggauucuggagau

SEQ ID NO: 191234 - RNA, 22 nt, Human
acccaggcuggaaugcaguggc

SEQ ID NO: 191235 - RNA, 22 nt, Human
acccaggcuggagugcagugac

SEQ ID NO: 191236 - RNA, 23 nt, Human
ccuggcuguggauuugggccugc

SEQ ID NO: 191237 - RNA, 22 nt, Human
ucucuuggacauguggcucugc

SEQ ID NO: 191238 - RNA, 22 nt, Human
cacacagguauauauauguaca

SEQ ID NO: 191239 - RNA, 22 nt, Human
uccucagugcuagccaacugcc

SEQ ID NO: 191240 - RNA, 22 nt, Human
cagcagugcuucagugugagau

SEQ ID NO: 191241 - RNA, 22 nt, Human
aauacauaauaaguuuugucug

SEQ ID NO: 191242 - RNA, 18 nt, Human
cagugaggaugaaggguu

SEQ ID NO: 191243 - RNA, 22 nt, Human
auucauuuagguauucacuuac

SEQ ID NO: 191244 - RNA, 16 nt, Human
ggugggaggugaggug

SEQ ID NO: 191245 - RNA, 22 nt, Human
uguuuccuucugucucuuugga

SEQ ID NO: 191246 - RNA, 19 nt, Human
ugacagguuuuauguguuu

SEQ ID NO: 191247 - RNA, 22 nt, Human
aagccugaggguguugcuagau

SEQ ID NO: 191248 - RNA, 22 nt, Human
gcagcuuuguggagaggcccau

SEQ ID NO: 191249 - RNA, 22 nt, Human
ugguccugcuugcugcuuaaga

SEQ ID NO: 191250 - RNA, 22 nt, Human
uaaauuaaagauuggagaagga

SEQ ID NO: 191251 - RNA, 22 nt, Human
ccagcucuagccccauguggcu

SEQ ID NO: 191252 - RNA, 22 nt, Human
aaaguuuuuaagcaagacccuu

SEQ ID NO: 191253 - RNA, 22 nt, Human
acauauaagggaucagugacag

SEQ ID NO: 191254 - RNA, 22 nt, Human
ugcucccagcuguaggaauguu

SEQ ID NO: 191255 - RNA, 22 nt, Human
ucaguuuucucaucuguaauuu

SEQ ID NO: 191256 - RNA, 22 nt, Human
uucugucauccuuucuagaugu

SEQ ID NO: 191257 - RNA, 22 nt, Human
uucugucaaaugccaguagaga

SEQ ID NO: 191258 - RNA, 22 nt, Human
aauggcuuuaaguagucucaca

SEQ ID NO: 191259 - RNA, 22 nt, Human
cuguccugucugcuuuuaauuu

SEQ ID NO: 191260 - RNA, 19 nt, Human
caguuuaacuaauuuuauc

SEQ ID NO: 191261 - RNA, 22 nt, Human
uaucuauaaguacuaacauggu

SEQ ID NO: 191262 - RNA, 22 nt, Human
ugacauuuuuauaagagucaaa

SEQ ID NO: 191263 - RNA, 22 nt, Human
auuccaaaggcuggccuggagg

SEQ ID NO: 191264 - RNA, 22 nt, Human
auuagagcaguguauuaugaua

SEQ ID NO: 191265 - RNA, 22 nt, Human
uaggugguuauaaauucaaggc

SEQ ID NO: 191266 - RNA, 20 nt, Human
aggcagcugggaaaugaggg

SEQ ID NO: 191267 - RNA, 22 nt, Human
agccuugagcaguucacuuggu

SEQ ID NO: 191268 - RNA, 22 nt, Human
cugggcagcacaucaucguauc

SEQ ID NO: 191269 - RNA, 22 nt, Human
cagagcagggugcaccuugggc

SEQ ID NO: 191270 - RNA, 22 nt, Human
uuacaugcagagggaagggaga

SEQ ID NO: 191271 - RNA, 22 nt, Human
acugucuuguuccaagacuaaa

SEQ ID NO: 191272 - RNA, 22 nt, Human
auuacaaaagaagggagaaggu

SEQ ID NO: 191273 - RNA, 22 nt, Human
gcgaggcugggcccugcaggcg

SEQ ID NO: 191274 - RNA, 22 nt, Human
agcuucucagaagaguccugua

SEQ ID NO: 191275 - RNA, 22 nt, Human
gagaugaugagauuuggaacuu

SEQ ID NO: 191276 - RNA, 22 nt, Human
gccuggagcucaugugggcauu

SEQ ID NO: 191277 - RNA, 22 nt, Human
cucccuccucaaauaucuuugu

SEQ ID NO: 191278 - RNA, 22 nt, Human
uagggcugccuauggcuagaua

SEQ ID NO: 191279 - RNA, 20 nt, Human
cauuugggaucaugagguuu

SEQ ID NO: 191280 - RNA, 22 nt, Human
uccuggcuuccacuccucuguu

SEQ ID NO: 191281 - RNA, 22 nt, Human
agccaguguuaagugacugguu

SEQ ID NO: 191282 - RNA, 20 nt, Human
aauuuuacuguccuauagag

SEQ ID NO: 191283 - RNA, 22 nt, Human
ugaugaggaccuggucucugcu

SEQ ID NO: 191284 - RNA, 18 nt, Human
accuccccauuuucugaa

SEQ ID NO: 191285 - RNA, 22 nt, Human
ucugccuggccuggagggcaca

SEQ ID NO: 191286 - RNA, 22 nt, Human
uuggaaaccaggcuuugagacg

SEQ ID NO: 191287 - RNA, 22 nt, Human
cuggcuguuucaggcagugucc

SEQ ID NO: 191288 - RNA, 22 nt, Human
uucauaaugagguccuagaggc

SEQ ID NO: 191289 - RNA, 22 nt, Human
ugaaggagaauuaauaggcauu

SEQ ID NO: 191290 - RNA, 22 nt, Human
ugagcagaggaggcugccaacu

SEQ ID NO: 191291 - RNA, 22 nt, Human
agaagugagugugacucagcag

SEQ ID NO: 191292 - RNA, 22 nt, Human
ggagggcccugggugcagcucu

SEQ ID NO: 191293 - RNA, 22 nt, Human
aucaaaaugcuccagugauggu

SEQ ID NO: 191294 - RNA, 22 nt, Human
gggcugagacgauggggucuuc

SEQ ID NO: 191295 - RNA, 22 nt, Human
aaguggacuaauacaaggacua

SEQ ID NO: 191296 - RNA, 22 nt, Human
aggaaagcaauggcugagaaca

SEQ ID NO: 191297 - RNA, 22 nt, Human
ccaggugccuccagucacagug

SEQ ID NO: 191298 - RNA, 22 nt, Human
gcugaagauaggcauuucagca

SEQ ID NO: 191299 - RNA, 22 nt, Human
agugugaguuugguugagacuu

SEQ ID NO: 191300 - RNA, 22 nt, Human
aauuacugucuguaaagggaau

SEQ ID NO: 191301 - RNA, 19 nt, Human
uaaaaugucuguggucagu

SEQ ID NO: 191302 - RNA, 22 nt, Human
gaucugaaucaauagaauaacu

SEQ ID NO: 191303 - RNA, 22 nt, Human
ccugggagggcaagugcugaug

SEQ ID NO: 191304 - RNA, 22 nt, Human
uuuguguuuucccauacuauug

SEQ ID NO: 191305 - RNA, 22 nt, Human
uaacacugugucugccauaucc

SEQ ID NO: 191306 - RNA, 22 nt, Human
uacagcuguugguguuuccucu

SEQ ID NO: 191307 - RNA, 22 nt, Human
agauggggcagaauggagccau

SEQ ID NO: 191308 - RNA, 22 nt, Human
gagccuggacaucucaggccca

SEQ ID NO: 191309 - RNA, 22 nt, Human
acagaacugcaggaggaaaagc

SEQ ID NO: 191310 - RNA, 20 nt, Human
ucagaagugcagcugccccu

SEQ ID NO: 191311 - RNA, 22 nt, Human
cagcaugaaaaguguugcuauc

SEQ ID NO: 191312 - RNA, 20 nt, Human
aggaggggauagaaucaaag

SEQ ID NO: 191313 - RNA, 22 nt, Human
aagcaguuacuauuuacuauua

SEQ ID NO: 191314 - RNA, 22 nt, Human
aaauuuucucucuaagacuuaa

SEQ ID NO: 191315 - RNA, 22 nt, Human
agcaaaguaugugcugggagcu

SEQ ID NO: 191316 - RNA, 22 nt, Human
acauguuaaacaucauggaaug

SEQ ID NO: 191317 - RNA, 22 nt, Human
cacacagugggaaaaccugaag

SEQ ID NO: 191318 - RNA, 22 nt, Human
ggaaagaggauaguggguaggu

SEQ ID NO: 191319 - RNA, 22 nt, Human
aggucucucacacucacagggc

SEQ ID NO: 191320 - RNA, 22 nt, Human
aacagguacaguuucccucugg

SEQ ID NO: 191321 - RNA, 22 nt, Human
auaagccugauucacuugucau

SEQ ID NO: 191322 - RNA, 22 nt, Human
acccugcccucuccagcucagg

SEQ ID NO: 191323 - RNA, 22 nt, Human
cccuguuuggauggggacccag

SEQ ID NO: 191324 - RNA, 22 nt, Human
agugcuauaaagguagaccaca

SEQ ID NO: 191325 - RNA, 22 nt, Human
agucuuggcuaugcauagagcu

SEQ ID NO: 191326 - RNA, 22 nt, Human
aagagguggguuggacagauac

SEQ ID NO: 191327 - RNA, 22 nt, Human
uccugagggcauuuuggugacu

SEQ ID NO: 191328 - RNA, 22 nt, Human
uccuggcuaguuuugcugaaau

SEQ ID NO: 191329 - RNA, 22 nt, Human
auauuuacugcuguggugaagg

SEQ ID NO: 191330 - RNA, 22 nt, Human
agauuuccguucucucuucagu

SEQ ID NO: 191331 - RNA, 22 nt, Human
aaagccauugcagagcaggauu

SEQ ID NO: 191332 - RNA, 17 nt, Human
uuaguguaucuguuuug

SEQ ID NO: 191333 - RNA, 21 nt, Human
gcagcgcccucugaccuugau

SEQ ID NO: 191334 - RNA, 19 nt, Human
uggaagaggaagggaaaua

SEQ ID NO: 191335 - RNA, 22 nt, Human
aaugaauucgagugaaggaaag

SEQ ID NO: 191336 - RNA, 22 nt, Human
cgacugucauacacaagacaug

SEQ ID NO: 191337 - RNA, 22 nt, Human
ucuuucuuauuagccauuguuc

SEQ ID NO: 191338 - RNA, 22 nt, Human
cuguuuauacucaaaagauaca

SEQ ID NO: 191339 - RNA, 22 nt, Human
uuacacuucuaaaaaaagcagg

SEQ ID NO: 191340 - RNA, 22 nt, Human
cugaggagaugggcuuuuuagg

SEQ ID NO: 191341 - RNA, 22 nt, Human
ucuuuccauggccacacagucu

SEQ ID NO: 191342 - RNA, 22 nt, Human
gaagaagcaggaguguguagca

SEQ ID NO: 191343 - RNA, 22 nt, Human
aaauaugaaugauaagaguuau

SEQ ID NO: 191344 - RNA, 22 nt, Human
ugaagccacuuuccagaaucac

SEQ ID NO: 191345 - RNA, 22 nt, Human
ugaaugcucacaugccuagguc

SEQ ID NO: 191346 - RNA, 19 nt, Human
ugcagggcugcgccugggg

SEQ ID NO: 191347 - RNA, 22 nt, Human
gugguccugcacccgcuuggcc

SEQ ID NO: 191348 - RNA, 22 nt, Human
gcugggcaugugaccaacagaa

SEQ ID NO: 191349 - RNA, 22 nt, Human
ggcaggcauggccacucccuag

SEQ ID NO: 191350 - RNA, 22 nt, Human
ucuuuaucaggugaagagggac

SEQ ID NO: 191351 - RNA, 22 nt, Human
ugagcuggcuugucaaccaggg

SEQ ID NO: 191352 - RNA, 22 nt, Human
auucuuuggacaauaaguggug

SEQ ID NO: 191353 - RNA, 22 nt, Human
uuccagaaaucuuucagcucaa

SEQ ID NO: 191354 - RNA, 22 nt, Human
agaggucagcugcaugccacau

SEQ ID NO: 191355 - RNA, 22 nt, Human
agguccaguuuucaguucucau

SEQ ID NO: 191356 - RNA, 18 nt, Human
uggcucugcagccagaug

SEQ ID NO: 191357 - RNA, 22 nt, Human
ugucaacagauacuagagagcu

SEQ ID NO: 191358 - RNA, 23 nt, Human
agcagcccagaugccuuccaucc

SEQ ID NO: 191359 - RNA, 22 nt, Human
ugcuuuauucagucucugccau

SEQ ID NO: 191360 - RNA, 23 nt, Human
uuuggcuccauggguggcucauu

SEQ ID NO: 191361 - RNA, 22 nt, Human
cuaauaauagagguggcauuug

SEQ ID NO: 191362 - RNA, 22 nt, Human
ucugggaacugagcuccccuag

SEQ ID NO: 191363 - RNA, 22 nt, Human
cuaguacaauuuuagcaagaug

SEQ ID NO: 191364 - RNA, 22 nt, Human
ucaugcugaggaugcugugaag

SEQ ID NO: 191365 - RNA, 22 nt, Human
auuugggaguugcuagugaguu

SEQ ID NO: 191366 - RNA, 22 nt, Human
gugcaaaaguaacugugguuuu

SEQ ID NO: 191367 - RNA, 22 nt, Human
auagaauagcauagaaaauuga

SEQ ID NO: 191368 - RNA, 22 nt, Human
cagucuucuaaccuagcagccu

SEQ ID NO: 191369 - RNA, 20 nt, Human
agcaggccuuggggagagga

SEQ ID NO: 191370 - RNA, 22 nt, Human
caggccaccagauacaugcccc

SEQ ID NO: 191371 - RNA, 22 nt, Human
cuguccucaacccauccuucuc

SEQ ID NO: 191372 - RNA, 21 nt, Human
agacagacugccugacccacg

SEQ ID NO: 191373 - RNA, 20 nt, Human
agugugcauuuagagucugc

SEQ ID NO: 191374 - RNA, 22 nt, Human
acagggccuuauauccagaagg

SEQ ID NO: 191375 - RNA, 22 nt, Human
agcuuccacaucugucuucagu

SEQ ID NO: 191376 - RNA, 22 nt, Human
cagaacugagucucauggccau

SEQ ID NO: 191377 - RNA, 22 nt, Human
caguccuuaaggaaacauuugu

SEQ ID NO: 191378 - RNA, 22 nt, Human
uggguccaguguccuggcuaug

SEQ ID NO: 191379 - RNA, 22 nt, Human
cacauguaguaagcaggcaaug

SEQ ID NO: 191380 - RNA, 22 nt, Human
ugcaguggaggccgugagacag

SEQ ID NO: 191381 - RNA, 22 nt, Human
ugugugaggugguucugagaag

SEQ ID NO: 191382 - RNA, 22 nt, Human
cugccaggugccuuugugcagu

SEQ ID NO: 191383 - RNA, 22 nt, Human
uaccaugucaagcgagacaugu

SEQ ID NO: 191384 - RNA, 22 nt, Human
uuucuauuguaagucuccuaua

SEQ ID NO: 191385 - RNA, 22 nt, Human
uucuuuggaauaagucaagcug

SEQ ID NO: 191386 - RNA, 22 nt, Human
aaggaaaucuuuguaacaucuu

SEQ ID NO: 191387 - RNA, 22 nt, Human
guuuuucuaaguagcgauauuu

SEQ ID NO: 191388 - RNA, 22 nt, Human
aguguuuuauuagaacacagcc

SEQ ID NO: 191389 - RNA, 21 nt, Human
gggaucugaggcaagucuccu

SEQ ID NO: 191390 - RNA, 22 nt, Human
aguuguaagaggcacaaggaag

SEQ ID NO: 191391 - RNA, 22 nt, Human
aggcuggcauacauuuguucuu

SEQ ID NO: 191392 - RNA, 22 nt, Human
acagagacuaagcuuuucauca

SEQ ID NO: 191393 - RNA, 22 nt, Human
ucucugggaaauggagaauuuu

SEQ ID NO: 191394 - RNA, 22 nt, Human
agguccugucuaucacccucgc

SEQ ID NO: 191395 - RNA, 22 nt, Human
caugcuguugaauaugacauug

SEQ ID NO: 191396 - RNA, 21 nt, Human
acagugugcuucucucccucc

SEQ ID NO: 191397 - RNA, 22 nt, Human
gacuucuauuaauaccucuacu

SEQ ID NO: 191398 - RNA, 22 nt, Human
accaggcccauguggauuacua

SEQ ID NO: 191399 - RNA, 22 nt, Human
gcauucauguccuuccugaacg

SEQ ID NO: 191400 - RNA, 22 nt, Human
uuaauuacuggcauggugguug

SEQ ID NO: 191401 - RNA, 22 nt, Human
uuuauaaacaguaccacggugc

SEQ ID NO: 191402 - RNA, 22 nt, Human
aggcugaggaucguacuuucca

SEQ ID NO: 191403 - RNA, 22 nt, Human
cugagcagcguggggagcuggc

SEQ ID NO: 191404 - RNA, 22 nt, Human
agaagcuaauucaugucuuaug

SEQ ID NO: 191405 - RNA, 18 nt, Human
ucagccuguugucugccu

SEQ ID NO: 191406 - RNA, 23 nt, Human
uaugaacugcauugcuggugugu

SEQ ID NO: 191407 - RNA, 22 nt, Human
cauguaaaaagaagaaucugga

SEQ ID NO: 191408 - RNA, 22 nt, Human
ucucuggccgagagucccuggg

SEQ ID NO: 191409 - RNA, 22 nt, Human
ugauuuaugaccaaguuagaau

SEQ ID NO: 191410 - RNA, 22 nt, Human
ggagacaggguugaaccacgca

SEQ ID NO: 191411 - RNA, 22 nt, Human
aggagcugaagucucugcacuc

SEQ ID NO: 191412 - RNA, 22 nt, Human
uacuuacagagcuuauaaguua

SEQ ID NO: 191413 - RNA, 22 nt, Human
caggcucuuuugguggcaagga

SEQ ID NO: 191414 - RNA, 20 nt, Human
caggcuccgcaggacuaggg

SEQ ID NO: 191415 - RNA, 19 nt, Human
gucagcaccauggacaggg

SEQ ID NO: 191416 - RNA, 22 nt, Human
acugugcaugguauccuugaug

SEQ ID NO: 191417 - RNA, 22 nt, Human
auauucacuccuggugagacua

SEQ ID NO: 191418 - RNA, 22 nt, Human
cccacugcugcucuccauggca

SEQ ID NO: 191419 - RNA, 22 nt, Human
cuguuguucaucaucugucauu

SEQ ID NO: 191420 - RNA, 22 nt, Human
uuuguucaacaggugaaauaga

SEQ ID NO: 191421 - RNA, 22 nt, Human
gagaugguguuccacugccagu

SEQ ID NO: 191422 - RNA, 22 nt, Human
auuugguuacucaguugucuga

SEQ ID NO: 191423 - RNA, 22 nt, Human
uuuggcgucucucaggagcuca

SEQ ID NO: 191424 - RNA, 19 nt, Human
agaggcaaggguggaagua

SEQ ID NO: 191425 - RNA, 22 nt, Human
gagaagcucuagagguguuuuu

SEQ ID NO: 191426 - RNA, 22 nt, Human
cccaguggggagcugagguuca

SEQ ID NO: 191427 - RNA, 22 nt, Human
acagggcaugugcaagagacau

SEQ ID NO: 191428 - RNA, 22 nt, Human
cugcagcugggccagggccacc

SEQ ID NO: 191429 - RNA, 23 nt, Human
ucuugaaaagccuacagcaguuc

SEQ ID NO: 191430 - RNA, 22 nt, Human
ccaguuacaagugauucuuggu

SEQ ID NO: 191431 - RNA, 22 nt, Human
cuuugcaaacgauuaccacaug

SEQ ID NO: 191432 - RNA, 22 nt, Human
uuuuccuucugauacuccauuu

SEQ ID NO: 191433 - RNA, 22 nt, Human
uagugcagguuaauaggacuuc

SEQ ID NO: 191434 - RNA, 22 nt, Human
ugucuucaggaguaaauaucau

SEQ ID NO: 191435 - RNA, 22 nt, Human
ccaauacacuuuauagaagaaa

SEQ ID NO: 191436 - RNA, 22 nt, Human
gucccagggagguucagggcuu

SEQ ID NO: 191437 - RNA, 19 nt, Human
aaggugucccaacugcguu

SEQ ID NO: 191438 - RNA, 22 nt, Human
cugaaggauuuaguucuuugcu

SEQ ID NO: 191439 - RNA, 22 nt, Human
ugcucuggaauaguccuaggca

SEQ ID NO: 191440 - RNA, 18 nt, Human
uuaaggauaagcagacua

SEQ ID NO: 191441 - RNA, 22 nt, Human
uucuagauugccuguaaguaaa

SEQ ID NO: 191442 - RNA, 22 nt, Human
ccucuguacagccucuuuauug

SEQ ID NO: 191443 - RNA, 22 nt, Human
acacaugcacaacaguucuuuc

SEQ ID NO: 191444 - RNA, 22 nt, Human
caguaucugucaguaaucaggu

SEQ ID NO: 191445 - RNA, 22 nt, Human
agugaaaugauucugagcaaga

SEQ ID NO: 191446 - RNA, 22 nt, Human
agagaucugucuacuauuuaag

SEQ ID NO: 191447 - RNA, 22 nt, Human
uauguacacacacaugcaugua

SEQ ID NO: 191448 - RNA, 21 nt, Human
agggccugugcucuccagguc

SEQ ID NO: 191449 - RNA, 22 nt, Human
gcagagguccuagccaggaguc

SEQ ID NO: 191450 - RNA, 22 nt, Human
agauggcuuccuucucacugug

SEQ ID NO: 191451 - RNA, 18 nt, Human
gugcugugggcaguggcc

SEQ ID NO: 191452 - RNA, 21 nt, Human
cccaggcugaauuaaaaauau

SEQ ID NO: 191453 - RNA, 22 nt, Human
ucacaccuugcuggcugagugc

SEQ ID NO: 191454 - RNA, 22 nt, Human
uacagagaauaauaggacaggu

SEQ ID NO: 191455 - RNA, 22 nt, Human
uagauuuaagacccugaauuug

SEQ ID NO: 191456 - RNA, 22 nt, Human
accgggaaguccugcacugggc

SEQ ID NO: 191457 - RNA, 21 nt, Human
aaucaguacauacugcacauc

SEQ ID NO: 191458 - RNA, 22 nt, Human
uuucuuugagucucaguuugcu

SEQ ID NO: 191459 - RNA, 22 nt, Human
uccuucuuucccccuagucauu

SEQ ID NO: 191460 - RNA, 22 nt, Human
aggccaggcaacauucugaagu

SEQ ID NO: 191461 - RNA, 22 nt, Human
guauacaugugguaaaaugcac

SEQ ID NO: 191462 - RNA, 22 nt, Human
aggguggcacugguggcucuau

SEQ ID NO: 191463 - RNA, 22 nt, Human
cagaccucaguccucaguagga

SEQ ID NO: 191464 - RNA, 19 nt, Human
uguuggugcggauguggag

SEQ ID NO: 191465 - RNA, 22 nt, Human
gcucagagaagcgguuucgccu

SEQ ID NO: 191466 - RNA, 22 nt, Human
uauucugugugauauguaaaug

SEQ ID NO: 191467 - RNA, 22 nt, Human
uucaggauucucucccauuuac

SEQ ID NO: 191468 - RNA, 22 nt, Human
uauuccagguauucuucaagag

SEQ ID NO: 191469 - RNA, 22 nt, Human
ugaguccacuuuaaaaugucag

SEQ ID NO: 191470 - RNA, 22 nt, Human
gccuggcuccuaaggacuggcu

SEQ ID NO: 191471 - RNA, 22 nt, Human
uaggacuugguuugaagauuuu

SEQ ID NO: 191472 - RNA, 22 nt, Human
uuggcaguagugguaguacauu

SEQ ID NO: 191473 - RNA, 22 nt, Human
cuauauuucuuggcuuuaaaca

SEQ ID NO: 191474 - RNA, 22 nt, Human
guauuucaucuugaaaaccagu

SEQ ID NO: 191475 - RNA, 23 nt, Human
ccagggaaggccaucuucaacug

SEQ ID NO: 191476 - RNA, 22 nt, Human
gcuuaucuugaaauccaccagc

SEQ ID NO: 191477 - RNA, 22 nt, Human
agacauuuccuagacaucaaug

SEQ ID NO: 191478 - RNA, 22 nt, Human
agaagcuauaacaacaauuaua

SEQ ID NO: 191479 - RNA, 19 nt, Human
gcgaggaagucacuguggc

SEQ ID NO: 191480 - RNA, 22 nt, Human
agcagacaauugccuggaugga

SEQ ID NO: 191481 - RNA, 22 nt, Human
uuccugaagucaaagaucuaaa

SEQ ID NO: 191482 - RNA, 22 nt, Human
ugugugcacgcugggagcugga

SEQ ID NO: 191483 - RNA, 22 nt, Human
uuuucuuccuggauuuuggcau

SEQ ID NO: 191484 - RNA, 22 nt, Human
gcuucaggaggucggucuccuu

SEQ ID NO: 191485 - RNA, 22 nt, Human
aggacaggauugagcugaacug

SEQ ID NO: 191486 - RNA, 22 nt, Human
ucucuguguguuggcuguauau

SEQ ID NO: 191487 - RNA, 22 nt, Human
caguagcaggcacucagcacgu

SEQ ID NO: 191488 - RNA, 22 nt, Human
uuuauucugugcuacaugaaga

SEQ ID NO: 191489 - RNA, 22 nt, Human
cagcagcuccucugcggcuaug

SEQ ID NO: 191490 - RNA, 22 nt, Human
ugcucuggggagcuccucugcg

SEQ ID NO: 191491 - RNA, 22 nt, Human
acgguaacagauaccacagacu

SEQ ID NO: 191492 - RNA, 22 nt, Human
cagaauaaacagaaacguagcu

SEQ ID NO: 191493 - RNA, 22 nt, Human
uuauuuacaacucuucucuucc

SEQ ID NO: 191494 - RNA, 22 nt, Human
ggcaccaggacaugacucccag

SEQ ID NO: 191495 - RNA, 22 nt, Human
agcuaagaacuugagcucugga

SEQ ID NO: 191496 - RNA, 22 nt, Human
gcagggcuguucaggagggugg

SEQ ID NO: 191497 - RNA, 22 nt, Human
acacaugaguucucaucuugug

SEQ ID NO: 191498 - RNA, 22 nt, Human
gcaaaguaaaaauagauucuga

SEQ ID NO: 191499 - RNA, 22 nt, Human
ggguaggcucugcaggcugggu

SEQ ID NO: 191500 - RNA, 22 nt, Human
cugcagcuccuucuggcaugug

SEQ ID NO: 191501 - RNA, 22 nt, Human
uccuggucagugccaaacuggu

SEQ ID NO: 191502 - RNA, 21 nt, Human
ucugaugguagaugagaugug

SEQ ID NO: 191503 - RNA, 20 nt, Human
acaaagacuggaaaagcaag

SEQ ID NO: 191504 - RNA, 22 nt, Human
uauucagaauaaagacuacauu

SEQ ID NO: 191505 - RNA, 19 nt, Human
ccucagagcuagugaacau

SEQ ID NO: 191506 - RNA, 22 nt, Human
caaaauuagaaaugcagcuguu

SEQ ID NO: 191507 - RNA, 22 nt, Human
aaagccagggacagugugcaug

SEQ ID NO: 191508 - RNA, 22 nt, Human
ucugccuuagcaauugucaagg

SEQ ID NO: 191509 - RNA, 22 nt, Human
ucccugagcuucaucaggcuuu

SEQ ID NO: 191510 - RNA, 22 nt, Human
uuacaugggccauuuagacaug

SEQ ID NO: 191511 - RNA, 22 nt, Human
uggucagacaaaggagaauguu

SEQ ID NO: 191512 - RNA, 22 nt, Human
cagaaagaccugauuggcaguu

SEQ ID NO: 191513 - RNA, 22 nt, Human
guccaugacugugacucacaug

SEQ ID NO: 191514 - RNA, 22 nt, Human
acucagaguuugcguuccauac

SEQ ID NO: 191515 - RNA, 22 nt, Human
agcauuagauuaaaaauuuaga

SEQ ID NO: 191516 - RNA, 21 nt, Human
ucuccaguauccuucucugag

SEQ ID NO: 191517 - RNA, 22 nt, Human
uuugcugaacuaaaauucugaa

SEQ ID NO: 191518 - RNA, 22 nt, Human
cauaacuugguguuggaaacug

SEQ ID NO: 191519 - RNA, 22 nt, Human
cuccuggccacguucuugcugg

SEQ ID NO: 191520 - RNA, 22 nt, Human
ucauguuuguuggaaauguggc

SEQ ID NO: 191521 - RNA, 22 nt, Human
uggaaacuuaucugacacgaac

SEQ ID NO: 191522 - RNA, 22 nt, Human
ucccuccuuuaucaaaaagaga

SEQ ID NO: 191523 - RNA, 22 nt, Human
gagcucuuccuuucaggaggcc

SEQ ID NO: 191524 - RNA, 22 nt, Human
aagagacuggaaacuaggguca

SEQ ID NO: 191525 - RNA, 22 nt, Human
uagggaugacgaaaggacagag

SEQ ID NO: 191526 - RNA, 22 nt, Human
gggagggucugagagcugcacc

SEQ ID NO: 191527 - RNA, 22 nt, Human
cccagcuguaacgggucugcac

SEQ ID NO: 191528 - RNA, 22 nt, Human
ugugugugacaaccuaguucag

SEQ ID NO: 191529 - RNA, 22 nt, Human
gaccuggaggauccucuucuug

SEQ ID NO: 191530 - RNA, 22 nt, Human
ccuccccacaggccaaauaggc

SEQ ID NO: 191531 - RNA, 22 nt, Human
cagucuuauccugaaaacaaca

SEQ ID NO: 191532 - RNA, 22 nt, Human
uucaagcagagauauuucaaga

SEQ ID NO: 191533 - RNA, 22 nt, Human
uaguuuuagucccauuuuacag

SEQ ID NO: 191534 - RNA, 22 nt, Human
auguccagaguaaagcacauuc

SEQ ID NO: 191535 - RNA, 22 nt, Human
cuacagugaagacuagcuauag

SEQ ID NO: 191536 - RNA, 19 nt, Human
uaugacaaguacuaguucu

SEQ ID NO: 191537 - RNA, 22 nt, Human
agagcuuuguuugauugucaga

SEQ ID NO: 191538 - RNA, 22 nt, Human
gcaaagcaucaguagaaauguu

SEQ ID NO: 191539 - RNA, 22 nt, Human
cugguaaagaagacaaacaggg

SEQ ID NO: 191540 - RNA, 20 nt, Human
guucaugucucaaauagaaa

SEQ ID NO: 191541 - RNA, 20 nt, Human
cagguauuacuuccuuuaug

SEQ ID NO: 191542 - RNA, 21 nt, Human
uggggaggggaccugauuaug

SEQ ID NO: 191543 - RNA, 21 nt, Human
uccugugaggaccugucagug

SEQ ID NO: 191544 - RNA, 22 nt, Human
acaaggacauaggaaacuacaa

SEQ ID NO: 191545 - RNA, 22 nt, Human
aucuuuuuacuaacacugcuua

SEQ ID NO: 191546 - RNA, 22 nt, Human
uguguacacaaugauugcagag

SEQ ID NO: 191547 - RNA, 22 nt, Human
auuuucaagggagaggccucug

SEQ ID NO: 191548 - RNA, 22 nt, Human
uggcaaagaccgcaauuacuuu

SEQ ID NO: 191549 - RNA, 22 nt, Human
gaacaauagugguaacaaagcc

SEQ ID NO: 191550 - RNA, 22 nt, Human
uauuaggguuuugaagguuugu

SEQ ID NO: 191551 - RNA, 22 nt, Human
uaacacugugguguucuuuguc

SEQ ID NO: 191552 - RNA, 22 nt, Human
ucccagagccucugccacucug

SEQ ID NO: 191553 - RNA, 22 nt, Human
uaaaaugaucucucauguucuu

SEQ ID NO: 191554 - RNA, 22 nt, Human
uuauauguaugcuuauaaacca

SEQ ID NO: 191555 - RNA, 22 nt, Human
uuaaaagggauguuaucuguaa

SEQ ID NO: 191556 - RNA, 22 nt, Human
cuucauuaaccaaaaugcaaua

SEQ ID NO: 191557 - RNA, 22 nt, Human
agguccagaacgugccuacucu

SEQ ID NO: 191558 - RNA, 22 nt, Human
gccuggcugggcaccaggggag

SEQ ID NO: 191559 - RNA, 22 nt, Human
uuugcaaagugacuauuauaug

SEQ ID NO: 191560 - RNA, 22 nt, Human
ucagggcucagcaucuggcauu

SEQ ID NO: 191561 - RNA, 22 nt, Human
gauguguagagggaauuucaaa

SEQ ID NO: 191562 - RNA, 22 nt, Human
guuuggugguagcauuggcuau

SEQ ID NO: 191563 - RNA, 22 nt, Human
auauuaguuuggagacuacaau

SEQ ID NO: 191564 - RNA, 22 nt, Human
ugcgcaggagcucugccaggag

SEQ ID NO: 191565 - RNA, 22 nt, Human
acccacccuacuagcagugucc

SEQ ID NO: 191566 - RNA, 23 nt, Human
caggaaaucaauucuuccagcau

SEQ ID NO: 191567 - RNA, 22 nt, Human
acaaauguggacauggauaaug

SEQ ID NO: 191568 - RNA, 22 nt, Human
ggcagcccuguggagaggccca

SEQ ID NO: 191569 - RNA, 22 nt, Human
agauuuacaaaggauuugcuuu

SEQ ID NO: 191570 - RNA, 22 nt, Human
gcugccuugccaggggcagaaa

SEQ ID NO: 191571 - RNA, 22 nt, Human
ccccuuccuuccucagacagcc

SEQ ID NO: 191572 - RNA, 16 nt, Human
gaggggagcaguaggc

SEQ ID NO: 191573 - RNA, 19 nt, Human
gaaaggcugcugcuaccug

SEQ ID NO: 191574 - RNA, 22 nt, Human
cuagaaccuaggaguacuaaag

SEQ ID NO: 191575 - RNA, 22 nt, Human
ccucugugugugcaugcaugcg

SEQ ID NO: 191576 - RNA, 20 nt, Human
ccagaggguagggccgcccc

SEQ ID NO: 191577 - RNA, 22 nt, Human
cagagugcauggugcuguucau

SEQ ID NO: 191578 - RNA, 22 nt, Human
auacucagcugcuagacagaag

SEQ ID NO: 191579 - RNA, 22 nt, Human
uaacuguaauauaaauaugagu

SEQ ID NO: 191580 - RNA, 22 nt, Human
aggugcugccccgagaaggaug

SEQ ID NO: 191581 - RNA, 22 nt, Human
aaucaguuucuuggcaaguuua

SEQ ID NO: 191582 - RNA, 22 nt, Human
cucugggcuucaagucagauuu

SEQ ID NO: 191583 - RNA, 22 nt, Human
agcgggucugcaagccuucccu

SEQ ID NO: 191584 - RNA, 22 nt, Human
ugggccagcugaagugccgccc

SEQ ID NO: 191585 - RNA, 22 nt, Human
accacaggacccaugagucagu

SEQ ID NO: 191586 - RNA, 22 nt, Human
aaaucaugguggaagaaacaga

SEQ ID NO: 191587 - RNA, 22 nt, Human
auucacaugugcuucuuaucac

SEQ ID NO: 191588 - RNA, 23 nt, Human
aacacaaagcugauuccaguggc

SEQ ID NO: 191589 - RNA, 22 nt, Human
uuucuuucaauucuccuaaugc

SEQ ID NO: 191590 - RNA, 22 nt, Human
gaauuucuggacccuuugagaa

SEQ ID NO: 191591 - RNA, 22 nt, Human
ucaguuuauggucuaguucaug

SEQ ID NO: 191592 - RNA, 22 nt, Human
acuuggccuuauuuccacagaa

SEQ ID NO: 191593 - RNA, 22 nt, Human
aauacuuuugaacugaaaggca

SEQ ID NO: 191594 - RNA, 22 nt, Human
guggcagugccguuugguucag

SEQ ID NO: 191595 - RNA, 22 nt, Human
gccagagcaugcacugccugca

SEQ ID NO: 191596 - RNA, 22 nt, Human
uaaagccacgcuggaaaucagg

SEQ ID NO: 191597 - RNA, 22 nt, Human
gagggccaauggauuucaacug

SEQ ID NO: 191598 - RNA, 22 nt, Human
agcaccaucggguucuugcuuu

SEQ ID NO: 191599 - RNA, 22 nt, Human
agaaaccaucuuuauauaucug

SEQ ID NO: 191600 - RNA, 21 nt, Human
ggcugagauggcagaaucacc

SEQ ID NO: 191601 - RNA, 22 nt, Human
gaugcaggauagcuucacccag

SEQ ID NO: 191602 - RNA, 22 nt, Human
aacauugcugaaagcugggaca

SEQ ID NO: 191603 - RNA, 22 nt, Human
agugacugguuuugacaggaau

SEQ ID NO: 191604 - RNA, 22 nt, Human
ucuuacauauagcaugaguaca

SEQ ID NO: 191605 - RNA, 22 nt, Human
uguuaaaugcucagcucgggga

SEQ ID NO: 191606 - RNA, 22 nt, Human
aagcaggcucacgccaggcagu

SEQ ID NO: 191607 - RNA, 22 nt, Human
uggcacagacagcacagcaaug

SEQ ID NO: 191608 - RNA, 22 nt, Human
ggcagaagauaggacagggaau

SEQ ID NO: 191609 - RNA, 22 nt, Human
aaaccacacuuagcaguuucgu

SEQ ID NO: 191610 - RNA, 22 nt, Human
ggacagggaucauuaucugagc

SEQ ID NO: 191611 - RNA, 22 nt, Human
ggcccugcaugagauuaagguu

SEQ ID NO: 191612 - RNA, 22 nt, Human
aaacaggcacauaguaacauuu

SEQ ID NO: 191613 - RNA, 22 nt, Human
ggucacugucugagguacugga

SEQ ID NO: 191614 - RNA, 22 nt, Human
aucaggauuauuaaaucuggau

SEQ ID NO: 191615 - RNA, 22 nt, Human
aacugacagcaggaaccauucc

SEQ ID NO: 191616 - RNA, 22 nt, Human
cccugggcagucugcacuucag

SEQ ID NO: 191617 - RNA, 23 nt, Human
aucauucuccaaucuggagcagg

SEQ ID NO: 191618 - RNA, 22 nt, Human
aucauaaaccacuuuguaaucu

SEQ ID NO: 191619 - RNA, 22 nt, Human
aagucagaaaucaucuagugua

SEQ ID NO: 191620 - RNA, 22 nt, Human
ugcagagguuuccaggcaaguu

SEQ ID NO: 191621 - RNA, 22 nt, Human
uacaugugcacgugugacuuug

SEQ ID NO: 191622 - RNA, 22 nt, Human
ugguagcaacaucucaguggcu

SEQ ID NO: 191623 - RNA, 22 nt, Human
ucuguuaaaaguggaauaauag

SEQ ID NO: 191624 - RNA, 22 nt, Human
uagaaagacuguccagauuuca

SEQ ID NO: 191625 - RNA, 22 nt, Human
ccacagaaaguugucuagagua

SEQ ID NO: 191626 - RNA, 22 nt, Human
gugaagcauaacugaaggauuu

SEQ ID NO: 191627 - RNA, 22 nt, Human
caguagacacauuaauauggaa

SEQ ID NO: 191628 - RNA, 22 nt, Human
agccugcuugagaguccuggcu

SEQ ID NO: 191629 - RNA, 22 nt, Human
cagcccugcacgcugccuccgc

SEQ ID NO: 191630 - RNA, 22 nt, Human
ccaguguuuccgucaguacacg

SEQ ID NO: 191631 - RNA, 22 nt, Human
auguacauuuuccuaauguuuu

SEQ ID NO: 191632 - RNA, 22 nt, Human
auauuucucucagacauggaag

SEQ ID NO: 191633 - RNA, 22 nt, Human
cugagcugcggcaggcaccugg

SEQ ID NO: 191634 - RNA, 22 nt, Human
uucugcuuucaguucuucuggg

SEQ ID NO: 191635 - RNA, 22 nt, Human
accuugucugugcaccugggcu

SEQ ID NO: 191636 - RNA, 22 nt, Human
uauguuacuucuguaucugcuu

SEQ ID NO: 191637 - RNA, 22 nt, Human
ucuucuccuuugccauguguuu

SEQ ID NO: 191638 - RNA, 22 nt, Human
cggcaggugugcucacucugcc

SEQ ID NO: 191639 - RNA, 22 nt, Human
ggcaggugccaguuggcuuggg

SEQ ID NO: 191640 - RNA, 22 nt, Human
auccauuauugggccaauaaag

SEQ ID NO: 191641 - RNA, 22 nt, Human
ugauuuuuagcuauucugaaga

SEQ ID NO: 191642 - RNA, 21 nt, Human
ucaauacaggugcaugugucu

SEQ ID NO: 191643 - RNA, 22 nt, Human
caggccagugugcuucccaggc

SEQ ID NO: 191644 - RNA, 22 nt, Human
cugaggaaugagugaggagcca

SEQ ID NO: 191645 - RNA, 22 nt, Human
auggaaauguaacuucugauuc

SEQ ID NO: 191646 - RNA, 22 nt, Human
ugcugaggucacggcggccaga

SEQ ID NO: 191647 - RNA, 21 nt, Human
gcccacagugaggaggauccc

SEQ ID NO: 191648 - RNA, 22 nt, Human
ccugaguccccucauucacucu

SEQ ID NO: 191649 - RNA, 22 nt, Human
ggacagaaauucuuguuggaca

SEQ ID NO: 191650 - RNA, 22 nt, Human
gacaagacuauguagaaaguau

SEQ ID NO: 191651 - RNA, 22 nt, Human
ucugggaagcugguccuguucu

SEQ ID NO: 191652 - RNA, 22 nt, Human
uaugauaugcacuuuaucagaa

SEQ ID NO: 191653 - RNA, 19 nt, Human
ucucuggcauagacucaau

SEQ ID NO: 191654 - RNA, 22 nt, Human
aucaagaaaagugcuuucggcu

SEQ ID NO: 191655 - RNA, 22 nt, Human
aauaaaguagcguuuaaggugc

SEQ ID NO: 191656 - RNA, 22 nt, Human
cccugaggaaaggguggagggc

SEQ ID NO: 191657 - RNA, 22 nt, Human
ugcaggagcugcuguccugcuc

SEQ ID NO: 191658 - RNA, 22 nt, Human
acugcaaucuggauccuagaag

SEQ ID NO: 191659 - RNA, 22 nt, Human
caggcacgguggcucaugccug

SEQ ID NO: 191660 - RNA, 22 nt, Human
uccaggcaggguuaaggguccu

SEQ ID NO: 191661 - RNA, 22 nt, Human
agcagggcugcagugugucuuu

SEQ ID NO: 191662 - RNA, 22 nt, Human
gcaggcagagaaggaacauuua

SEQ ID NO: 191663 - RNA, 22 nt, Human
caggguggggcuggcuaucaaa

SEQ ID NO: 191664 - RNA, 22 nt, Human
ucugugcugagcucugagaugu

SEQ ID NO: 191665 - RNA, 22 nt, Human
caauaauuuacauuggauacca

SEQ ID NO: 191666 - RNA, 22 nt, Human
ugguacaagauguucuaacuga

SEQ ID NO: 191667 - RNA, 22 nt, Human
uuccugcuuccuggccucacaa

SEQ ID NO: 191668 - RNA, 22 nt, Human
gaaauccaguucccuacucuua

SEQ ID NO: 191669 - RNA, 22 nt, Human
gggucuggagggcagcccuucu

SEQ ID NO: 191670 - RNA, 22 nt, Human
gagggagggacuagcauucucu

SEQ ID NO: 191671 - RNA, 22 nt, Human
ucaggaaauggugauuugguug

SEQ ID NO: 191672 - RNA, 22 nt, Human
cauucccacguguucuuugcuu

SEQ ID NO: 191673 - RNA, 22 nt, Human
cugggaaauauaauaaaguggu

SEQ ID NO: 191674 - RNA, 22 nt, Human
ugccucaguuucuccauaugaa

SEQ ID NO: 191675 - RNA, 22 nt, Human
acaggcaggcuucggccagagc

SEQ ID NO: 191676 - RNA, 22 nt, Human
ggaggccucaguaccuugcuuu

SEQ ID NO: 191677 - RNA, 22 nt, Human
ugagccagauaagggcucacgc

SEQ ID NO: 191678 - RNA, 22 nt, Human
uaccauuucaguaaaaacuuag

SEQ ID NO: 191679 - RNA, 22 nt, Human
gcuccaaaguccagcuguuucc

SEQ ID NO: 191680 - RNA, 18 nt, Human
ugucucaguucugcuaug

SEQ ID NO: 191681 - RNA, 22 nt, Human
cagcagcaguguucuagaaucu

SEQ ID NO: 191682 - RNA, 22 nt, Human
gguggcauaagaacacuaaaga

SEQ ID NO: 191683 - RNA, 22 nt, Human
guggcagggcaaugcucccucu

SEQ ID NO: 191684 - RNA, 22 nt, Human
gcugugcaguaguagguacagu

SEQ ID NO: 191685 - RNA, 22 nt, Human
ucuguagucugugccauagcug

SEQ ID NO: 191686 - RNA, 22 nt, Human
agaaucuaaguacacagacaga

SEQ ID NO: 191687 - RNA, 22 nt, Human
uguucacaggggagccauuuau

SEQ ID NO: 191688 - RNA, 22 nt, Human
ugaaaucuacccuauucagggu

SEQ ID NO: 191689 - RNA, 22 nt, Human
cuguggcuuugcagggcuuguu

SEQ ID NO: 191690 - RNA, 22 nt, Human
ugcucagcagaucucaggagau

SEQ ID NO: 191691 - RNA, 22 nt, Human
agggucagcuggcugucagggg

SEQ ID NO: 191692 - RNA, 22 nt, Human
uguauacauuuaacuagauaga

SEQ ID NO: 191693 - RNA, 21 nt, Human
aagaguggcugaggaggugau

SEQ ID NO: 191694 - RNA, 23 nt, Human
uuucucaaagaguggcagcuuca

SEQ ID NO: 191695 - RNA, 22 nt, Human
gggucugagcugaggggaaauc

SEQ ID NO: 191696 - RNA, 22 nt, Human
agcugagguuaguauaaaugug

SEQ ID NO: 191697 - RNA, 22 nt, Human
uggaaaacaaagcucucauuau

SEQ ID NO: 191698 - RNA, 22 nt, Human
aagugugggacuagggcuccag

SEQ ID NO: 191699 - RNA, 22 nt, Human
agauugaagacugguggagcug

SEQ ID NO: 191700 - RNA, 22 nt, Human
cagcuccugccugggcagcugu

SEQ ID NO: 191701 - RNA, 19 nt, Human
uggggcuguguuuugaccc

SEQ ID NO: 191702 - RNA, 22 nt, Human
acaguguuuuagaaaagcuuga

SEQ ID NO: 191703 - RNA, 22 nt, Human
ccagaggugccacagaaagagc

SEQ ID NO: 191704 - RNA, 19 nt, Human
ugagcaugcgagcugagaa

SEQ ID NO: 191705 - RNA, 22 nt, Human
aucucagaaaguuuaauuuuuc

SEQ ID NO: 191706 - RNA, 22 nt, Human
aaagagcccuuccaugacucuu

SEQ ID NO: 191707 - RNA, 22 nt, Human
uaguggcaaaagcauuuugggu

SEQ ID NO: 191708 - RNA, 22 nt, Human
ccucuggcagccagccaguugu

SEQ ID NO: 191709 - RNA, 19 nt, Human
aucuaagagaugggggaaa

SEQ ID NO: 191710 - RNA, 22 nt, Human
uuucugcaaguguagauaccca

SEQ ID NO: 191711 - RNA, 22 nt, Human
gaacaaacugggucccaaugau

SEQ ID NO: 191712 - RNA, 22 nt, Human
aauucaaauuacaauaguuguu

SEQ ID NO: 191713 - RNA, 22 nt, Human
cugagcccgggugcucuacccc

SEQ ID NO: 191714 - RNA, 22 nt, Human
gggaggugaaaggucaugugug

SEQ ID NO: 191715 - RNA, 22 nt, Human
uuuguggcaggagcggagaccg

SEQ ID NO: 191716 - RNA, 22 nt, Human
cuuccaaaauuuauauguugaa

SEQ ID NO: 191717 - RNA, 22 nt, Human
cacaggagagguuaaugggggc

SEQ ID NO: 191718 - RNA, 21 nt, Human
uuagcuuucuagaaucuuugu

SEQ ID NO: 191719 - RNA, 22 nt, Human
gcuaucuuucugcaccauaauu

SEQ ID NO: 191720 - RNA, 22 nt, Human
aucauguacuugacaaauaugu

SEQ ID NO: 191721 - RNA, 22 nt, Human
uguccugcaagcccuaaugaau

SEQ ID NO: 191722 - RNA, 22 nt, Human
acacaaaaucaaaguccuaggc

SEQ ID NO: 191723 - RNA, 22 nt, Human
gaauuguaaguaccagcaugcu

SEQ ID NO: 191724 - RNA, 22 nt, Human
ccagaggagcaggcuggcucca

SEQ ID NO: 191725 - RNA, 22 nt, Human
caggaaaugcuaucauagcuga

SEQ ID NO: 191726 - RNA, 22 nt, Human
aggaggcugggcacaguggccu

SEQ ID NO: 191727 - RNA, 22 nt, Human
uacuauuuuugcaacguauaca

SEQ ID NO: 191728 - RNA, 22 nt, Human
aauauuuguuaguguuuuaaug

SEQ ID NO: 191729 - RNA, 22 nt, Human
aaagucaucuaggagcagauuu

SEQ ID NO: 191730 - RNA, 22 nt, Human
ugcaucaaauucugaaauuagc

SEQ ID NO: 191731 - RNA, 22 nt, Human
aaccuguucccugguccuugac

SEQ ID NO: 191732 - RNA, 22 nt, Human
uguccuggggcgacuuggggcc

SEQ ID NO: 191733 - RNA, 22 nt, Human
ugcaagagcccaaacuauauac

SEQ ID NO: 191734 - RNA, 22 nt, Human
gccagcagggaagccuugggcu

SEQ ID NO: 191735 - RNA, 22 nt, Human
aaguguuuacuuaaagucaugg

SEQ ID NO: 191736 - RNA, 22 nt, Human
ccaaaauuauuacauuuguagg

SEQ ID NO: 191737 - RNA, 22 nt, Human
ucauucacuuugaaauaaacga

SEQ ID NO: 191738 - RNA, 22 nt, Human
ucuggcaggucaaucauucuuu

SEQ ID NO: 191739 - RNA, 22 nt, Human
gaaaguauucacaaaguucuug

SEQ ID NO: 191740 - RNA, 20 nt, Human
auguggcuuuuugaccugcu

SEQ ID NO: 191741 - RNA, 22 nt, Human
uccuggccuugcuccugaugcc

SEQ ID NO: 191742 - RNA, 22 nt, Human
guuccacaaaaggucuaguuua

SEQ ID NO: 191743 - RNA, 22 nt, Human
aagcaggcccugggccagggga

SEQ ID NO: 191744 - RNA, 22 nt, Human
uguguccugcagacagacucag

SEQ ID NO: 191745 - RNA, 22 nt, Human
cagggacauaagaggaacaugg

SEQ ID NO: 191746 - RNA, 22 nt, Human
caccuguuguuuauucaucucu

SEQ ID NO: 191747 - RNA, 20 nt, Human
ucauuccaaauaguucagca

SEQ ID NO: 191748 - RNA, 22 nt, Human
uuggcccacaguaccaugcugu

SEQ ID NO: 191749 - RNA, 22 nt, Human
caguggccugagccaggcuucc

SEQ ID NO: 191750 - RNA, 22 nt, Human
uaaauuguuuucuagaaguugu

SEQ ID NO: 191751 - RNA, 20 nt, Human
gauacacagcacagagggcc

SEQ ID NO: 191752 - RNA, 22 nt, Human
cucaucugauaaaucacucuua

SEQ ID NO: 191753 - RNA, 22 nt, Human
ccucaggggucacugugaggag

SEQ ID NO: 191754 - RNA, 22 nt, Human
uuugauucuguaaaauaacagg

SEQ ID NO: 191755 - RNA, 22 nt, Human
uggcaucuccgacagucuugau

SEQ ID NO: 191756 - RNA, 22 nt, Human
ucuguucaguugauguaguuuu

SEQ ID NO: 191757 - RNA, 22 nt, Human
ccucagaguuggccacgagagc

SEQ ID NO: 191758 - RNA, 22 nt, Human
uaagaucaguucaaacaugugu

SEQ ID NO: 191759 - RNA, 22 nt, Human
aaacaugagcauuucuguuuaa

SEQ ID NO: 191760 - RNA, 22 nt, Human
uuucaguuacugcuauaucauu

SEQ ID NO: 191761 - RNA, 22 nt, Human
uagaaacauauguuugagacau

SEQ ID NO: 191762 - RNA, 22 nt, Human
uccuggggaggguucuggcucc

SEQ ID NO: 191763 - RNA, 22 nt, Human
cucuuuggucgcaucauccauu

SEQ ID NO: 191764 - RNA, 23 nt, Human
auaagccuuuucuuucugcccca

SEQ ID NO: 191765 - RNA, 21 nt, Human
uucccagcaccuagcacaggu

SEQ ID NO: 191766 - RNA, 22 nt, Human
agguaguguagcugagugggau

SEQ ID NO: 191767 - RNA, 22 nt, Human
uacaggcugaacucaaugauga

SEQ ID NO: 191768 - RNA, 22 nt, Human
gagggagccgccacagacuggg

SEQ ID NO: 191769 - RNA, 22 nt, Human
gaaugauauuauuucgugcugg

SEQ ID NO: 191770 - RNA, 22 nt, Human
uccaaauucuagggccuugguu

SEQ ID NO: 191771 - RNA, 22 nt, Human
aagacacaaagcuucccuuuuc

SEQ ID NO: 191772 - RNA, 22 nt, Human
gucuggaggcccgucagcccua

SEQ ID NO: 191773 - RNA, 22 nt, Human
guccucuuagccacuuaauuau

SEQ ID NO: 191774 - RNA, 22 nt, Human
uucauagacccagaacucauua

SEQ ID NO: 191775 - RNA, 22 nt, Human
uacagauauagagauuuauaga

SEQ ID NO: 191776 - RNA, 22 nt, Human
ggcagcuguuggcucucuagga

SEQ ID NO: 191777 - RNA, 22 nt, Human
gcugauagacugaauguuggga

SEQ ID NO: 191778 - RNA, 22 nt, Human
ggagagcaggguccugagauac

SEQ ID NO: 191779 - RNA, 22 nt, Human
uauacagauaucuaagauguaa

SEQ ID NO: 191780 - RNA, 22 nt, Human
uacccaggggcugagcagaggu

SEQ ID NO: 191781 - RNA, 22 nt, Human
ucugaagacauaugauauggug

SEQ ID NO: 191782 - RNA, 22 nt, Human
agaucagacacggcuugugacg

SEQ ID NO: 191783 - RNA, 20 nt, Human
aggcaagguagaugucugcu

SEQ ID NO: 191784 - RNA, 22 nt, Human
uaagacacauucauaucugucu

SEQ ID NO: 191785 - RNA, 22 nt, Human
uuuuucuacugguguuggugua

SEQ ID NO: 191786 - RNA, 21 nt, Human
ucagacuugagcucuucuaca

SEQ ID NO: 191787 - RNA, 22 nt, Human
aggagcugggcccaaggaugcu

SEQ ID NO: 191788 - RNA, 22 nt, Human
uacaaggcaaauccaugauguc

SEQ ID NO: 191789 - RNA, 22 nt, Human
agauuugggggcuagggcuggu

SEQ ID NO: 191790 - RNA, 22 nt, Human
aucaaaaccuugacuuuuaaug

SEQ ID NO: 191791 - RNA, 22 nt, Human
ggagaggagauuguggcauuuu

SEQ ID NO: 191792 - RNA, 22 nt, Human
caggccagaggcuguuguugcg

SEQ ID NO: 191793 - RNA, 22 nt, Human
gggcuucuauucaagucuguuu

SEQ ID NO: 191794 - RNA, 22 nt, Human
ggcccagaaaaaggcuuagaau

SEQ ID NO: 191795 - RNA, 22 nt, Human
acacuuggagcaacacuuaugg

SEQ ID NO: 191796 - RNA, 22 nt, Human
aguuugauggcuuaauaguaga

SEQ ID NO: 191797 - RNA, 22 nt, Human
augguacaaugauggauagugg

SEQ ID NO: 191798 - RNA, 22 nt, Human
uuccagugugcuuuuauguuag

SEQ ID NO: 191799 - RNA, 22 nt, Human
caaaugauacuguuuuuagucu

SEQ ID NO: 191800 - RNA, 22 nt, Human
agucacaguucugcugucugag

SEQ ID NO: 191801 - RNA, 22 nt, Human
agagccaguuguuaagcacuua

SEQ ID NO: 191802 - RNA, 23 nt, Human
agcaccugugauuuccuagcucu

SEQ ID NO: 191803 - RNA, 22 nt, Human
cuucuggggauggagcccagaa

SEQ ID NO: 191804 - RNA, 22 nt, Human
gacacuuuaggauuuaaaaguc

SEQ ID NO: 191805 - RNA, 22 nt, Human
gcagcccacaccacucugcuca

SEQ ID NO: 191806 - RNA, 22 nt, Human
uacugccuggagcauuggugcu

SEQ ID NO: 191807 - RNA, 22 nt, Human
uugcauuucacuuucaguaggc

SEQ ID NO: 191808 - RNA, 22 nt, Human
ggcucugggucuguggggagcg

SEQ ID NO: 191809 - RNA, 22 nt, Human
ucuucucccaucuccaggcagg

SEQ ID NO: 191810 - RNA, 22 nt, Human
ucucaggacuccucuggccaua

SEQ ID NO: 191811 - RNA, 22 nt, Human
gggugacauuaggaagauagac

SEQ ID NO: 191812 - RNA, 22 nt, Human
cuccaggcgccgcuuuugcagu

SEQ ID NO: 191813 - RNA, 22 nt, Human
uauuucuguuuauuuguacauc

SEQ ID NO: 191814 - RNA, 16 nt, Human
ccccucaggaaguaca

SEQ ID NO: 191815 - RNA, 22 nt, Human
caggcacaggggaaugucuuuu

SEQ ID NO: 191816 - RNA, 22 nt, Human
acaacaaggcuuuucauucaua

SEQ ID NO: 191817 - RNA, 22 nt, Human
uugggaucuacauagcuaugua

SEQ ID NO: 191818 - RNA, 22 nt, Human
uagggauguccugagacuuggc

SEQ ID NO: 191819 - RNA, 22 nt, Human
uugcauucccagccaaguuagu

SEQ ID NO: 191820 - RNA, 22 nt, Human
gauuucucugcacccacucagg

SEQ ID NO: 191821 - RNA, 22 nt, Human
aggcuggagugugcaguggcgc

SEQ ID NO: 191822 - RNA, 22 nt, Human
ccacugaggggucaugguggga

SEQ ID NO: 191823 - RNA, 22 nt, Human
aggcugagggcuccugagggca

SEQ ID NO: 191824 - RNA, 22 nt, Human
cuucagagcaucacuucagcug

SEQ ID NO: 191825 - RNA, 22 nt, Human
ucuuggaaguagaacacagucu

SEQ ID NO: 191826 - RNA, 22 nt, Human
uggaggcaggggauacagguca

SEQ ID NO: 191827 - RNA, 22 nt, Human
cucagcagcuacaggauucggg

SEQ ID NO: 191828 - RNA, 22 nt, Human
ggcuggugaguucagagaaccc

SEQ ID NO: 191829 - RNA, 22 nt, Human
cugugggcugaaagugcucccg

SEQ ID NO: 191830 - RNA, 21 nt, Human
uccauccaucaguccagccag

SEQ ID NO: 191831 - RNA, 22 nt, Human
ucaggaagugguaaaggauguu

SEQ ID NO: 191832 - RNA, 22 nt, Human
gcugggcugcccaaccucugac

SEQ ID NO: 191833 - RNA, 22 nt, Human
gaggcuguuagggccugaggua

SEQ ID NO: 191834 - RNA, 22 nt, Human
uuuagggaaauugaggguuaag

SEQ ID NO: 191835 - RNA, 22 nt, Human
ccucagagguuuucauucugua

SEQ ID NO: 191836 - RNA, 20 nt, Human
ucugagagucugagugauga

SEQ ID NO: 191837 - RNA, 22 nt, Human
cagaguaaggagcugucaaacg

SEQ ID NO: 191838 - RNA, 22 nt, Human
augaaauguaugagucuggguu

SEQ ID NO: 191839 - RNA, 22 nt, Human
ugcuggagucucuugacccugg

SEQ ID NO: 191840 - RNA, 22 nt, Human
gagagugaggcaucaggggcag

SEQ ID NO: 191841 - RNA, 22 nt, Human
caacuuuaugauugguuuguca

SEQ ID NO: 191842 - RNA, 22 nt, Human
agcacacaggccaccuccacuu

SEQ ID NO: 191843 - RNA, 21 nt, Human
ucugccagcugaagaggugga

SEQ ID NO: 191844 - RNA, 23 nt, Human
acugggcuuaugaggaggcuugu

SEQ ID NO: 191845 - RNA, 22 nt, Human
guaugaaagcaucauuccugcu

SEQ ID NO: 191846 - RNA, 22 nt, Human
aaagacugaggggaaagugaug

SEQ ID NO: 191847 - RNA, 22 nt, Human
cacuggcaaauggagagaaugu

SEQ ID NO: 191848 - RNA, 23 nt, Human
aagaggaggcccugcucccgucc

SEQ ID NO: 191849 - RNA, 22 nt, Human
ugccugccacgcuugcuaccac

SEQ ID NO: 191850 - RNA, 22 nt, Human
ucugcucagggagggucacuac

SEQ ID NO: 191851 - RNA, 20 nt, Human
uggcugugggcaucuguuuc

SEQ ID NO: 191852 - RNA, 22 nt, Human
ucagcuguagguauggaugucc

SEQ ID NO: 191853 - RNA, 22 nt, Human
gaaucagccugaguuugcagcu

SEQ ID NO: 191854 - RNA, 22 nt, Human
aggcuuggcucuccuaugagaa

SEQ ID NO: 191855 - RNA, 19 nt, Human
uucacaagugaugucucuc

SEQ ID NO: 191856 - RNA, 22 nt, Human
ugaagaagccaauugguaggcu

SEQ ID NO: 191857 - RNA, 22 nt, Human
cagggcaggaugcugugauuau

SEQ ID NO: 191858 - RNA, 22 nt, Human
agcuggugccugcuuuugugug

SEQ ID NO: 191859 - RNA, 21 nt, Human
ucuagaauccuguauaagacu

SEQ ID NO: 191860 - RNA, 22 nt, Human
agggcagagggugccucaccug

SEQ ID NO: 191861 - RNA, 22 nt, Human
ucuaacuuagggaauacuuuag

SEQ ID NO: 191862 - RNA, 22 nt, Human
ucccagcccagacuucuccagu

SEQ ID NO: 191863 - RNA, 22 nt, Human
acacagggcagagagcuggcuc

SEQ ID NO: 191864 - RNA, 22 nt, Human
ggcuucccagcagagggcgcac

SEQ ID NO: 191865 - RNA, 22 nt, Human
cuguaacuuagcaugguuacua

SEQ ID NO: 191866 - RNA, 22 nt, Human
ugguacaacuguauuaggcaaa

SEQ ID NO: 191867 - RNA, 22 nt, Human
aaagauacuuaauaguugucug

SEQ ID NO: 191868 - RNA, 22 nt, Human
auacacacaaucagguuuugua

SEQ ID NO: 191869 - RNA, 22 nt, Human
ugaggaggugggcacacagagu

SEQ ID NO: 191870 - RNA, 22 nt, Human
uuaguacagaaucaaaagcaau

SEQ ID NO: 191871 - RNA, 22 nt, Human
uaguuucagcuccuucauccug

SEQ ID NO: 191872 - RNA, 22 nt, Human
uucacauucagaaaaagcccgu

SEQ ID NO: 191873 - RNA, 22 nt, Human
ggaguugauuuuggauauauua

SEQ ID NO: 191874 - RNA, 22 nt, Human
uccugggcaaagaggggcagug

SEQ ID NO: 191875 - RNA, 15 nt, Human
gcaggcagaucaccg

SEQ ID NO: 191876 - RNA, 22 nt, Human
aauauccacacugugucccugc

SEQ ID NO: 191877 - RNA, 22 nt, Human
ucccacaugugaauccucaggu

SEQ ID NO: 191878 - RNA, 22 nt, Human
cagcacaguuucccccaugagc

SEQ ID NO: 191879 - RNA, 22 nt, Human
ucccugccugacagcacccacc

SEQ ID NO: 191880 - RNA, 22 nt, Human
uaaaguguccuagcuaggaggc

SEQ ID NO: 191881 - RNA, 22 nt, Human
uuagaaacucaacucugggaau

SEQ ID NO: 191882 - RNA, 20 nt, Human
auaaaauaacugccacaaga

SEQ ID NO: 191883 - RNA, 22 nt, Human
auuugguagugauugaaauuau

SEQ ID NO: 191884 - RNA, 22 nt, Human
ucugugauaguuuuucagcuau

SEQ ID NO: 191885 - RNA, 22 nt, Human
ggcugcggccgcgggucugugc

SEQ ID NO: 191886 - RNA, 22 nt, Human
uuccuggccaagcagaguggaa

SEQ ID NO: 191887 - RNA, 22 nt, Human
gcugaagauaagugaagaggcu

SEQ ID NO: 191888 - RNA, 22 nt, Human
cucuccacuguccuuugcuggu

SEQ ID NO: 191889 - RNA, 19 nt, Human
uuagaaacuguugacacug

SEQ ID NO: 191890 - RNA, 22 nt, Human
uuuuguguugccauguuaagca

SEQ ID NO: 191891 - RNA, 22 nt, Human
ucugggcuugccugguugugca

SEQ ID NO: 191892 - RNA, 19 nt, Human
agaaauagccuuccuuguc

SEQ ID NO: 191893 - RNA, 22 nt, Human
uguacauagaucuugaaaauua

SEQ ID NO: 191894 - RNA, 22 nt, Human
aagcauggcuguucuagcuaua

SEQ ID NO: 191895 - RNA, 22 nt, Human
ugaugaaaguguuuacucaccu

SEQ ID NO: 191896 - RNA, 22 nt, Human
cuccuuccugccccagugauaa

SEQ ID NO: 191897 - RNA, 22 nt, Human
ggacaugauauuucaggaagac

SEQ ID NO: 191898 - RNA, 22 nt, Human
ucacucugaaugguacugagga

SEQ ID NO: 191899 - RNA, 22 nt, Human
gcugggcaaggcugaagcuacc

SEQ ID NO: 191900 - RNA, 22 nt, Human
aaagccuucaaguagauguaag

SEQ ID NO: 191901 - RNA, 20 nt, Human
cugggcucaagugagccucc

SEQ ID NO: 191902 - RNA, 22 nt, Human
auaaagcauacuuuguaugacu

SEQ ID NO: 191903 - RNA, 22 nt, Human
caguggagugggacuggucuga

SEQ ID NO: 191904 - RNA, 22 nt, Human
gaacagcagcucguucucgaug

SEQ ID NO: 191905 - RNA, 22 nt, Human
agucaauuaucucuaggucauc

SEQ ID NO: 191906 - RNA, 22 nt, Human
ggggccaguaggagugauguac

SEQ ID NO: 191907 - RNA, 19 nt, Human
ucauaaacugggcacagug

SEQ ID NO: 191908 - RNA, 20 nt, Human
aacuaugaauagaagagauu

SEQ ID NO: 191909 - RNA, 22 nt, Human
uagcaucaugaucagaacuguu

SEQ ID NO: 191910 - RNA, 22 nt, Human
guggccuggcgagcuggcgcgg

SEQ ID NO: 191911 - RNA, 20 nt, Human
gcaggcuccgggcuugggag

SEQ ID NO: 191912 - RNA, 22 nt, Human
cuggcugugucuuggaggagcu

SEQ ID NO: 191913 - RNA, 22 nt, Human
acagauuuauugaagcugcugc

SEQ ID NO: 191914 - RNA, 22 nt, Human
cagagcuuugugucagggcugu

SEQ ID NO: 191915 - RNA, 22 nt, Human
ucaggacuucauuaccucaggu

SEQ ID NO: 191916 - RNA, 21 nt, Human
ucaggcugaugucgauguuag

SEQ ID NO: 191917 - RNA, 19 nt, Human
uggagaggaaaugcugcuc

SEQ ID NO: 191918 - RNA, 22 nt, Human
uucaaggagauuggagucuacu

SEQ ID NO: 191919 - RNA, 22 nt, Human
aggcucugcuuuucuggauaua

SEQ ID NO: 191920 - RNA, 22 nt, Human
gccaccuggacucagagccagg

SEQ ID NO: 191921 - RNA, 22 nt, Human
ccaggagauuuuuccauagcac

SEQ ID NO: 191922 - RNA, 22 nt, Human
ggcaggugugagaucgaggcca

SEQ ID NO: 191923 - RNA, 23 nt, Human
ugguaauagggagcagaagguag

SEQ ID NO: 191924 - RNA, 22 nt, Human
ugaaaccccagauuaccacaaa

SEQ ID NO: 191925 - RNA, 22 nt, Human
acugccuuauaugcugugugug

SEQ ID NO: 191926 - RNA, 20 nt, Human
ucucugagcuucucuugggg

SEQ ID NO: 191927 - RNA, 22 nt, Human
gauuuuacaaacugcaggaccc

SEQ ID NO: 191928 - RNA, 18 nt, Human
cugcccagagcacuugug

SEQ ID NO: 191929 - RNA, 22 nt, Human
uccaggccuaggccaagugauu

SEQ ID NO: 191930 - RNA, 22 nt, Human
aggcucugguucaucaugaugg

SEQ ID NO: 191931 - RNA, 22 nt, Human
aggcccaguagugcugccuuua

SEQ ID NO: 191932 - RNA, 22 nt, Human
ggagcuguucaggacugcuuca

SEQ ID NO: 191933 - RNA, 22 nt, Human
cucaggcuccagacuuccgucc

SEQ ID NO: 191934 - RNA, 22 nt, Human
cccagcccacgguccugggugg

SEQ ID NO: 191935 - RNA, 22 nt, Human
agcuuugggauucaggcaggaa

SEQ ID NO: 191936 - RNA, 22 nt, Human
cuugaagaaaguauguugggau

SEQ ID NO: 191937 - RNA, 22 nt, Human
ucacaucucuguuuucuaaauc

SEQ ID NO: 191938 - RNA, 22 nt, Human
gcugcagcaagcccuccagggg

SEQ ID NO: 191939 - RNA, 22 nt, Human
ugauggaagagcuaacaauauc

SEQ ID NO: 191940 - RNA, 23 nt, Human
cagaagcaccuguugacugcugc

SEQ ID NO: 191941 - RNA, 19 nt, Human
uucauucuuucuacuuacc

SEQ ID NO: 191942 - RNA, 22 nt, Human
caaaaguaauugcgguuuuugc

SEQ ID NO: 191943 - RNA, 22 nt, Human
ugccaaggagcuggaucagggc

SEQ ID NO: 191944 - RNA, 22 nt, Human
cagggcuccccagagagccucu

SEQ ID NO: 191945 - RNA, 22 nt, Human
ugcccugaggcacuccauccau

SEQ ID NO: 191946 - RNA, 22 nt, Human
aggagaccuuuugagugugaga

SEQ ID NO: 191947 - RNA, 22 nt, Human
cccagggaaugacucuggccuu

SEQ ID NO: 191948 - RNA, 22 nt, Human
ggauccugauauguguuucuca

SEQ ID NO: 191949 - RNA, 22 nt, Human
agcagguuuaaacucuaaugca

SEQ ID NO: 191950 - RNA, 22 nt, Human
uguuaacagccagauuugguga

SEQ ID NO: 191951 - RNA, 19 nt, Human
auguuuacacucaggggcu

SEQ ID NO: 191952 - RNA, 22 nt, Human
ccuggaccugcagcaucagcau

SEQ ID NO: 191953 - RNA, 22 nt, Human
gggucagaguaagcaaggacaa

SEQ ID NO: 191954 - RNA, 22 nt, Human
uugaaagugccaaguccuagug

SEQ ID NO: 191955 - RNA, 22 nt, Human
caggccuccuaugagcacuagc

SEQ ID NO: 191956 - RNA, 22 nt, Human
ucucugaugcugccagggaaaa

SEQ ID NO: 191957 - RNA, 22 nt, Human
ugguuccacuaaccugagagcc

SEQ ID NO: 191958 - RNA, 19 nt, Human
agcaguuauaugcauggga

SEQ ID NO: 191959 - RNA, 22 nt, Human
agucuccagaaauauagcagug

SEQ ID NO: 191960 - RNA, 22 nt, Human
acuucccacacccuguuuucuc

SEQ ID NO: 191961 - RNA, 22 nt, Human
uugcagggcuggaacauggaau

SEQ ID NO: 191962 - RNA, 20 nt, Human
gcagcagacagacaggggac

SEQ ID NO: 191963 - RNA, 23 nt, Human
gggaaaggauaugauccuagggg

SEQ ID NO: 191964 - RNA, 22 nt, Human
ucuccagguggcuugggcuucu

SEQ ID NO: 191965 - RNA, 22 nt, Human
uaggagggcccugaaaauggca

SEQ ID NO: 191966 - RNA, 22 nt, Human
cacugucugagcuggugauuag

SEQ ID NO: 191967 - RNA, 22 nt, Human
accagagcuggcucugagcacc

SEQ ID NO: 191968 - RNA, 22 nt, Human
uuaauaaacaggugcagcugaa

SEQ ID NO: 191969 - RNA, 22 nt, Human
cacaggaaugaacagggaaaga

SEQ ID NO: 191970 - RNA, 22 nt, Human
augcagagacagauguggcaug

SEQ ID NO: 191971 - RNA, 22 nt, Human
uuuuuggcagcucagaaacuuc

SEQ ID NO: 191972 - RNA, 22 nt, Human
uuggagagauuuaggucucagu

SEQ ID NO: 191973 - RNA, 22 nt, Human
ggagagaauuccauggacaugu

SEQ ID NO: 191974 - RNA, 22 nt, Human
cuggcccuucucuugcuuccug

SEQ ID NO: 191975 - RNA, 22 nt, Human
ugggcugaguggcagccagagu

SEQ ID NO: 191976 - RNA, 22 nt, Human
aaaucuguuguaauguuuuuua

SEQ ID NO: 191977 - RNA, 22 nt, Human
cccagugucaccaacaggacac

SEQ ID NO: 191978 - RNA, 22 nt, Human
aagucagugcuagcuaauggcu

SEQ ID NO: 191979 - RNA, 22 nt, Human
cugccuucaucucugagcuggg

SEQ ID NO: 191980 - RNA, 22 nt, Human
agcugacagugcauggagggac

SEQ ID NO: 191981 - RNA, 22 nt, Human
ggcuucuccagguacugagcau

SEQ ID NO: 191982 - RNA, 22 nt, Human
ggcuucuuccugugaacauguu

SEQ ID NO: 191983 - RNA, 22 nt, Human
uuacaagacacagugcugaagg

SEQ ID NO: 191984 - RNA, 22 nt, Human
cccugcagggaggauucugaag

SEQ ID NO: 191985 - RNA, 22 nt, Human
ccuccuguugucaccaggcgug

SEQ ID NO: 191986 - RNA, 22 nt, Human
aagucagauaggugaguccaaa

SEQ ID NO: 191987 - RNA, 22 nt, Human
uacaagcuuuuguguauaaaug

SEQ ID NO: 191988 - RNA, 22 nt, Human
gaauauauuauucagcuuuuca

SEQ ID NO: 191989 - RNA, 22 nt, Human
agccagggugagagggcuuugu

SEQ ID NO: 191990 - RNA, 22 nt, Human
uaaaugacauucuuaagucuug

SEQ ID NO: 191991 - RNA, 22 nt, Human
cugaaaauguuacacaggaaga

SEQ ID NO: 191992 - RNA, 22 nt, Human
uccucagcauuagcacagacau

SEQ ID NO: 191993 - RNA, 22 nt, Human
agaaucuucagaugauuuguca

SEQ ID NO: 191994 - RNA, 22 nt, Human
gaaggggacuggcagcugcaga

SEQ ID NO: 191995 - RNA, 20 nt, Human
uugaggcaugucuagaagua

SEQ ID NO: 191996 - RNA, 21 nt, Human
ugagcccuugccucagagccc

SEQ ID NO: 191997 - RNA, 22 nt, Human
cuauuuggauguuagccucagu

SEQ ID NO: 191998 - RNA, 22 nt, Human
gcacucaguaccaggucacugc

SEQ ID NO: 191999 - RNA, 22 nt, Human
ugccuuuuccaguuucuagggg

SEQ ID NO: 192000 - RNA, 18 nt, Human
gcucugcaggugcucggu

SEQ ID NO: 192001 - RNA, 22 nt, Human
auggcagcaaagaggccuucuu

SEQ ID NO: 192002 - RNA, 22 nt, Human
gaguguuuuacucaaagaaaga

SEQ ID NO: 192003 - RNA, 22 nt, Human
uucucugggaucuggcaaaagg

SEQ ID NO: 192004 - RNA, 22 nt, Human
ccaggggaaacagggagcacuc

SEQ ID NO: 192005 - RNA, 22 nt, Human
ucacacagcuccuuuccuuagu

SEQ ID NO: 192006 - RNA, 20 nt, Human
ucacauccucucccaacaug

SEQ ID NO: 192007 - RNA, 22 nt, Human
ugauucuguaagucauauuguu

SEQ ID NO: 192008 - RNA, 22 nt, Human
gcacacacuguuuuccucacau

SEQ ID NO: 192009 - RNA, 19 nt, Human
ugaauacagagauacagaa

SEQ ID NO: 192010 - RNA, 22 nt, Human
aagaggaccaguagauaaauuu

SEQ ID NO: 192011 - RNA, 22 nt, Human
auuuauugaagcuuauuacguu

SEQ ID NO: 192012 - RNA, 22 nt, Human
aacaaugugauugaagcuagaa

SEQ ID NO: 192013 - RNA, 20 nt, Human
aagcuggcaggucauagcuu

SEQ ID NO: 192014 - RNA, 22 nt, Human
uucucauucugacucaguguag

SEQ ID NO: 192015 - RNA, 22 nt, Human
ucaagagcauguaucucccuaa

SEQ ID NO: 192016 - RNA, 19 nt, Human
caacaguugcaacacuguc

SEQ ID NO: 192017 - RNA, 22 nt, Human
aaggccagacaggaccacaucu

SEQ ID NO: 192018 - RNA, 22 nt, Human
uagaaagcagaaaccaucagag

SEQ ID NO: 192019 - RNA, 22 nt, Human
cuuuggcucaugguuuuaucca

SEQ ID NO: 192020 - RNA, 18 nt, Human
agacuuugaguuagaggg

SEQ ID NO: 192021 - RNA, 22 nt, Human
acucuguguuuugguggcagca

SEQ ID NO: 192022 - RNA, 22 nt, Human
gagcaagauccuguuuuucuau

SEQ ID NO: 192023 - RNA, 22 nt, Human
caaauguauaaauguacuuucu

SEQ ID NO: 192024 - RNA, 23 nt, Human
uggagcuccugcccauccuggcu

SEQ ID NO: 192025 - RNA, 22 nt, Human
uuauucagcauuuagaggaagg

SEQ ID NO: 192026 - RNA, 22 nt, Human
caggaugauguuaauugaaguu

SEQ ID NO: 192027 - RNA, 22 nt, Human
cauuggaaugaucguuuugcug

SEQ ID NO: 192028 - RNA, 22 nt, Human
ugaggaaacuuacaaggcagaa

SEQ ID NO: 192029 - RNA, 22 nt, Human
cagaacugggcucgcucugguu

SEQ ID NO: 192030 - RNA, 17 nt, Human
ugagcaguagaagaugc

SEQ ID NO: 192031 - RNA, 22 nt, Human
cugugggcauuugagugugggu

SEQ ID NO: 192032 - RNA, 22 nt, Human
caccagcuacagacuacugugu

SEQ ID NO: 192033 - RNA, 22 nt, Human
cugugucccacacgagguguau

SEQ ID NO: 192034 - RNA, 22 nt, Human
gugcugugcgcuuuuucuguau

SEQ ID NO: 192035 - RNA, 22 nt, Human
gcagggcagaaggugcugagga

SEQ ID NO: 192036 - RNA, 22 nt, Human
guacaaauugauacagguuuuc

SEQ ID NO: 192037 - RNA, 18 nt, Human
ucaggcugcccugugucu

SEQ ID NO: 192038 - RNA, 22 nt, Human
gguggggcccuggcacugguau

SEQ ID NO: 192039 - RNA, 22 nt, Human
aaggagugauauaugggugcua

SEQ ID NO: 192040 - RNA, 22 nt, Human
uccaggucuuccuauuccaggu

SEQ ID NO: 192041 - RNA, 22 nt, Human
uggcaggaaaaacauuggagau

SEQ ID NO: 192042 - RNA, 22 nt, Human
aggaaacugagguuacgggacu

SEQ ID NO: 192043 - RNA, 22 nt, Human
gcagagucagguccaaggacug

SEQ ID NO: 192044 - RNA, 20 nt, Human
uguggcaggaugagggcgga

SEQ ID NO: 192045 - RNA, 22 nt, Human
gcuucucuggccugcagggcau

SEQ ID NO: 192046 - RNA, 22 nt, Human
uuugacucaagccuuucuuuag

SEQ ID NO: 192047 - RNA, 20 nt, Human
aggcugagggugauuguguc

SEQ ID NO: 192048 - RNA, 22 nt, Human
ucaugauuuccugguuaaggac

SEQ ID NO: 192049 - RNA, 22 nt, Human
agggucuguauuucuggcaagc

SEQ ID NO: 192050 - RNA, 22 nt, Human
agggcacuucagucagacugag

SEQ ID NO: 192051 - RNA, 23 nt, Human
uggcuccaggagaagccagaagc

SEQ ID NO: 192052 - RNA, 22 nt, Human
aaguccagugcuuuagauucca

SEQ ID NO: 192053 - RNA, 22 nt, Human
uggcagaguucgcuccuauuca

SEQ ID NO: 192054 - RNA, 22 nt, Human
gccccaccugcuaccuuccagc

SEQ ID NO: 192055 - RNA, 22 nt, Human
ccuuuggucuugaugaacuguu

SEQ ID NO: 192056 - RNA, 22 nt, Human
uacauucagagaaaguuuccau

SEQ ID NO: 192057 - RNA, 22 nt, Human
cuggcagcgugagcagcaucca

SEQ ID NO: 192058 - RNA, 22 nt, Human
gcaccuuucuauauucaguggc

SEQ ID NO: 192059 - RNA, 22 nt, Human
auucucaaaacauaacuucacu

SEQ ID NO: 192060 - RNA, 22 nt, Human
aguuucuagcaaggauuguuga

SEQ ID NO: 192061 - RNA, 22 nt, Human
gccagugccugcugcucagggc

SEQ ID NO: 192062 - RNA, 22 nt, Human
augaugaagaguaacaggcuga

SEQ ID NO: 192063 - RNA, 23 nt, Human
uuaggcacuuaguagggccagag

SEQ ID NO: 192064 - RNA, 22 nt, Human
auggcagggacuguggcccuug

SEQ ID NO: 192065 - RNA, 22 nt, Human
agggcccugaguugcagcccug

SEQ ID NO: 192066 - RNA, 22 nt, Human
caggcccucugcacccucgucu

SEQ ID NO: 192067 - RNA, 22 nt, Human
cagcagugacaagacuaagaag

SEQ ID NO: 192068 - RNA, 22 nt, Human
gcacaaaagguacuucauguag

SEQ ID NO: 192069 - RNA, 20 nt, Human
caaagacaugcuaggggugg

SEQ ID NO: 192070 - RNA, 23 nt, Human
ucucugggugggcugugucuaua

SEQ ID NO: 192071 - RNA, 22 nt, Human
acuggcagccacaacuggcagg

SEQ ID NO: 192072 - RNA, 22 nt, Human
augagugcaacagaucagcaug

SEQ ID NO: 192073 - RNA, 22 nt, Human
augaaauguauucagauaugua

SEQ ID NO: 192074 - RNA, 22 nt, Human
ucaugaggauuuacuagacuag

SEQ ID NO: 192075 - RNA, 22 nt, Human
gcaaagcacacuggagaugucg

SEQ ID NO: 192076 - RNA, 22 nt, Human
ugggccucaugcccagccaccc

SEQ ID NO: 192077 - RNA, 19 nt, Human
augaauguguucuuaccuc

SEQ ID NO: 192078 - RNA, 23 nt, Human
ccaggcucuuucaccugcuauuc

SEQ ID NO: 192079 - RNA, 22 nt, Human
uugucaagauugagagaugacu

SEQ ID NO: 192080 - RNA, 22 nt, Human
uuuuccagauuggacuuagucc

SEQ ID NO: 192081 - RNA, 22 nt, Human
uugcucugcaguccagacagua

SEQ ID NO: 192082 - RNA, 22 nt, Human
acagggagauaucuucaauauc

SEQ ID NO: 192083 - RNA, 17 nt, Human
ccuggcugggaaucuga

SEQ ID NO: 192084 - RNA, 22 nt, Human
acagauuuuugguaaauaauuu

SEQ ID NO: 192085 - RNA, 22 nt, Human
gugcugagugcagagugcagag

SEQ ID NO: 192086 - RNA, 22 nt, Human
auaguuuuaaaaccucaggaag

SEQ ID NO: 192087 - RNA, 22 nt, Human
ucugucuuggccagccaucugg

SEQ ID NO: 192088 - RNA, 22 nt, Human
uucaaguaugagaaaggggacu

SEQ ID NO: 192089 - RNA, 22 nt, Human
aacauucuaugugcauucagaa

SEQ ID NO: 192090 - RNA, 22 nt, Human
gagguccucuguguccgcgggc

SEQ ID NO: 192091 - RNA, 22 nt, Human
aggguauguuuuaggcugaguu

SEQ ID NO: 192092 - RNA, 22 nt, Human
uuacuuuggauggucaagaaag

SEQ ID NO: 192093 - RNA, 20 nt, Human
gcuaggcuguguccugccca

SEQ ID NO: 192094 - RNA, 22 nt, Human
uccucagucacgguagcacauu

SEQ ID NO: 192095 - RNA, 18 nt, Human
uggaggaaaaaucucaug

SEQ ID NO: 192096 - RNA, 22 nt, Human
uagcagcuggggcuauucauca

SEQ ID NO: 192097 - RNA, 22 nt, Human
cacagcuguuuucuccaggcag

SEQ ID NO: 192098 - RNA, 21 nt, Human
uucuccagggggagcucucuc

SEQ ID NO: 192099 - RNA, 20 nt, Human
uaugaauucuggucccuggg

SEQ ID NO: 192100 - RNA, 22 nt, Human
uucucuguuuuccccucgaugu

SEQ ID NO: 192101 - RNA, 22 nt, Human
caucaguggauauagauuagcg

SEQ ID NO: 192102 - RNA, 22 nt, Human
agggagcuaggauccugaaggu

SEQ ID NO: 192103 - RNA, 20 nt, Human
uuugagaccagucugcccaa

SEQ ID NO: 192104 - RNA, 22 nt, Human
auuacaacuacauaaucucaga

SEQ ID NO: 192105 - RNA, 22 nt, Human
ugugaccauaauuuguaaauaa

SEQ ID NO: 192106 - RNA, 22 nt, Human
ucuagaaucuaaacuauaguuu

SEQ ID NO: 192107 - RNA, 22 nt, Human
ggcucugcucacagcccgcagc

SEQ ID NO: 192108 - RNA, 22 nt, Human
gucuuuggagaggugccauuuc

SEQ ID NO: 192109 - RNA, 21 nt, Human
agcacagcauauccaauguca

SEQ ID NO: 192110 - RNA, 22 nt, Human
ggagaucuugcuugaaggcaug

SEQ ID NO: 192111 - RNA, 22 nt, Human
aauaugcaaagcguguuaucug

SEQ ID NO: 192112 - RNA, 22 nt, Human
uaaucucuuuuaggacagagcc

SEQ ID NO: 192113 - RNA, 22 nt, Human
augagacuaccuguaauguggc

SEQ ID NO: 192114 - RNA, 22 nt, Human
aguugaagguuggcugauccau

SEQ ID NO: 192115 - RNA, 22 nt, Human
auuuagaaauuccaaaaguauu

SEQ ID NO: 192116 - RNA, 22 nt, Human
aaagcgcuauauaaauguuaac

SEQ ID NO: 192117 - RNA, 22 nt, Human
uccauguguuuuccuguccaca

SEQ ID NO: 192118 - RNA, 22 nt, Human
cccaggcacauccacucuguga

SEQ ID NO: 192119 - RNA, 22 nt, Human
uucauguaggcugcaaugcaca

SEQ ID NO: 192120 - RNA, 22 nt, Human
auugauuuagcucaagacacau

SEQ ID NO: 192121 - RNA, 20 nt, Human
ugaaagcaugugguauuugg

SEQ ID NO: 192122 - RNA, 22 nt, Human
cuccaggccaagauuaaguaau

SEQ ID NO: 192123 - RNA, 22 nt, Human
acauuacauaagauuguaaccu

SEQ ID NO: 192124 - RNA, 22 nt, Human
agacaacuagaaaacuagacag

SEQ ID NO: 192125 - RNA, 23 nt, Human
acugggcugaaauuuuucauggc

SEQ ID NO: 192126 - RNA, 22 nt, Human
ugggagcaggaagcaggaagua

SEQ ID NO: 192127 - RNA, 22 nt, Human
cucuccagggcaugaguuccac

SEQ ID NO: 192128 - RNA, 22 nt, Human
aacuuugucuuuuaugcuuaca

SEQ ID NO: 192129 - RNA, 22 nt, Human
aaagagcugggacuuaaagugc

SEQ ID NO: 192130 - RNA, 21 nt, Human
cacaugugaauuacugaacug

SEQ ID NO: 192131 - RNA, 22 nt, Human
gagucugagaacugggcucagu

SEQ ID NO: 192132 - RNA, 22 nt, Human
ugcagugauuuguacaauuaga

SEQ ID NO: 192133 - RNA, 22 nt, Human
ggaagaggcugguagugcccgu

SEQ ID NO: 192134 - RNA, 22 nt, Human
agagaugguagaacagucauaa

SEQ ID NO: 192135 - RNA, 20 nt, Human
ugugaaagcaguagaaugac

SEQ ID NO: 192136 - RNA, 22 nt, Human
guccacugcugugugcuucacc

SEQ ID NO: 192137 - RNA, 22 nt, Human
ccagcagccagagaaggaccuc

SEQ ID NO: 192138 - RNA, 23 nt, Human
ugucugguucaugcuuauuuugg

SEQ ID NO: 192139 - RNA, 22 nt, Human
uagaguccauuaaugcaaguuu

SEQ ID NO: 192140 - RNA, 22 nt, Human
aggcagcugaggucuggcgccc

SEQ ID NO: 192141 - RNA, 22 nt, Human
aaucuuuuucacaagaaagcac

SEQ ID NO: 192142 - RNA, 22 nt, Human
aggaagccaagccugacacuca

SEQ ID NO: 192143 - RNA, 22 nt, Human
gggcugagugggccucuuacuu

SEQ ID NO: 192144 - RNA, 22 nt, Human
cuggcagcgguuugcagccugg

SEQ ID NO: 192145 - RNA, 22 nt, Human
uccaccccugggaaugucaaua

SEQ ID NO: 192146 - RNA, 20 nt, Human
gcccucugccucccucagcg

SEQ ID NO: 192147 - RNA, 22 nt, Human
cuggccaggcucucacgugguc

SEQ ID NO: 192148 - RNA, 18 nt, Human
agcaggugugcagaaugu

SEQ ID NO: 192149 - RNA, 23 nt, Human
agacaaacuuccuucacugcacc

SEQ ID NO: 192150 - RNA, 22 nt, Human
ugucuuuagaaagaagcagaca

SEQ ID NO: 192151 - RNA, 22 nt, Human
cagcacagggacaauagcagau

SEQ ID NO: 192152 - RNA, 22 nt, Human
uccaguccuagaaacuggagag

SEQ ID NO: 192153 - RNA, 22 nt, Human
uuauagaauccaguuguuguau

SEQ ID NO: 192154 - RNA, 22 nt, Human
gaaauacaaagccagccauuuu

SEQ ID NO: 192155 - RNA, 22 nt, Human
uccaggcauguugggaagauga

SEQ ID NO: 192156 - RNA, 22 nt, Human
cagguggguguaugaaugcaaa

SEQ ID NO: 192157 - RNA, 22 nt, Human
ccaggcagggcucaaggaaccu

SEQ ID NO: 192158 - RNA, 22 nt, Human
gugucugcuugcugagcauuua

SEQ ID NO: 192159 - RNA, 22 nt, Human
caggcuuuugcauagcacuggg

SEQ ID NO: 192160 - RNA, 22 nt, Human
uccugagcccuguaggacccug

SEQ ID NO: 192161 - RNA, 22 nt, Human
cagccaggagcucccccugcuc

SEQ ID NO: 192162 - RNA, 21 nt, Human
auaauguacaaaaacugucuu

SEQ ID NO: 192163 - RNA, 22 nt, Human
guucuuaaagauucaucaagca

SEQ ID NO: 192164 - RNA, 22 nt, Human
agggcugagugggagagaguug

SEQ ID NO: 192165 - RNA, 21 nt, Human
ccugucuuggacugaggcacc

SEQ ID NO: 192166 - RNA, 22 nt, Human
ucucuggcagacaccucccuga

SEQ ID NO: 192167 - RNA, 22 nt, Human
cuggggcucacuccagcccugg

SEQ ID NO: 192168 - RNA, 22 nt, Human
acaguaaugauaaccagcauuu

SEQ ID NO: 192169 - RNA, 22 nt, Human
aagucuggugcuguccucaccc

SEQ ID NO: 192170 - RNA, 23 nt, Human
aguuaggucaaguuaggucaauu

SEQ ID NO: 192171 - RNA, 22 nt, Human
auuauuaggugcucucugacaa

SEQ ID NO: 192172 - RNA, 19 nt, Human
gccaggucuuggguccagg

SEQ ID NO: 192173 - RNA, 22 nt, Human
uuuaauugauucacagucugua

SEQ ID NO: 192174 - RNA, 22 nt, Human
gcuuuucuucagcagccugaug

SEQ ID NO: 192175 - RNA, 22 nt, Human
agcccagcugccugccugcugu

SEQ ID NO: 192176 - RNA, 22 nt, Human
uccaggcugcagucuugcccuc

SEQ ID NO: 192177 - RNA, 22 nt, Human
aagaacaguugggaggugagcc

SEQ ID NO: 192178 - RNA, 17 nt, Human
ucugagaacuugaagca

SEQ ID NO: 192179 - RNA, 22 nt, Human
uuaggauuugaaaaggggcaga

SEQ ID NO: 192180 - RNA, 22 nt, Human
ucccagauucuucugugugggc

SEQ ID NO: 192181 - RNA, 22 nt, Human
acucaggaauggggcugggacu

SEQ ID NO: 192182 - RNA, 22 nt, Human
ugcaaauagccugaugaaagaa

SEQ ID NO: 192183 - RNA, 22 nt, Human
gaagugucuccguuuuuaaagg

SEQ ID NO: 192184 - RNA, 22 nt, Human
gcugagugagguccagagcuug

SEQ ID NO: 192185 - RNA, 22 nt, Human
cugucuccagggcaggugcagg

SEQ ID NO: 192186 - RNA, 22 nt, Human
ggugaggcagagggaguaaccu

SEQ ID NO: 192187 - RNA, 22 nt, Human
aacuuauuccauaggcucacug

SEQ ID NO: 192188 - RNA, 22 nt, Human
ugucaacacaccuaucucaauu

SEQ ID NO: 192189 - RNA, 22 nt, Human
uagcacccaccucgugggguuu

SEQ ID NO: 192190 - RNA, 22 nt, Human
agaagccagccuugccuccuuu

SEQ ID NO: 192191 - RNA, 21 nt, Human
ccagccucagaucagggagcu

SEQ ID NO: 192192 - RNA, 22 nt, Human
uugcauuccaguccccacugug

SEQ ID NO: 192193 - RNA, 20 nt, Human
gcugaggucauuaugccuca

SEQ ID NO: 192194 - RNA, 22 nt, Human
acugaauuacagucugcauuuu

SEQ ID NO: 192195 - RNA, 22 nt, Human
cccagagagcacaggugguggg

SEQ ID NO: 192196 - RNA, 22 nt, Human
agcuuguucucauccauucuuc

SEQ ID NO: 192197 - RNA, 22 nt, Human
uucauuccuucuguaccuugcc

SEQ ID NO: 192198 - RNA, 22 nt, Human
agucuagaggauggguccagau

SEQ ID NO: 192199 - RNA, 22 nt, Human
guaaauuauuucaagaucaucu

SEQ ID NO: 192200 - RNA, 22 nt, Human
caacaguuccuccauccucucu

SEQ ID NO: 192201 - RNA, 22 nt, Human
ugcaggagggaggguuacaguu

SEQ ID NO: 192202 - RNA, 22 nt, Human
gaugucuuugccaugcaugugu

SEQ ID NO: 192203 - RNA, 21 nt, Human
aagucugguugauuccuuugc

SEQ ID NO: 192204 - RNA, 22 nt, Human
ccugagagcccuagccaggcgc

SEQ ID NO: 192205 - RNA, 22 nt, Human
cuucauuacuugcucguagcac

SEQ ID NO: 192206 - RNA, 22 nt, Human
gucaggauuggggucaugaguc

SEQ ID NO: 192207 - RNA, 20 nt, Human
agcccuguuuccuggagaga

SEQ ID NO: 192208 - RNA, 22 nt, Human
gcaggugguggggcuaugaucu

SEQ ID NO: 192209 - RNA, 22 nt, Human
auauuugucaauucacuguuca

SEQ ID NO: 192210 - RNA, 22 nt, Human
caucuccuggcagcuguuagga

SEQ ID NO: 192211 - RNA, 22 nt, Human
gaaaacugugauuagaaugccu

SEQ ID NO: 192212 - RNA, 18 nt, Human
ccuucagcucugccagua

SEQ ID NO: 192213 - RNA, 22 nt, Human
aggaaaggccucagcagaaacc

SEQ ID NO: 192214 - RNA, 22 nt, Human
ucucuggaauuggcugaggcaa

SEQ ID NO: 192215 - RNA, 22 nt, Human
caggaggcauauuuaaauccaa

SEQ ID NO: 192216 - RNA, 23 nt, Human
cauggcugauuucaagcuaccac

SEQ ID NO: 192217 - RNA, 22 nt, Human
gggcacuggaggccaaggagcu

SEQ ID NO: 192218 - RNA, 22 nt, Human
uuccuggccucucucugagcag

SEQ ID NO: 192219 - RNA, 22 nt, Human
caugggggucuggacaacaggc

SEQ ID NO: 192220 - RNA, 23 nt, Human
ucugguacuauugcuguugagca

SEQ ID NO: 192221 - RNA, 22 nt, Human
ucugcuuucaaauucacuuagu

SEQ ID NO: 192222 - RNA, 22 nt, Human
gagccaggguuugaaacuagac

SEQ ID NO: 192223 - RNA, 22 nt, Human
aaaggccaccaacaugaagcau

SEQ ID NO: 192224 - RNA, 22 nt, Human
uggcugugccucuuuccaggcc

SEQ ID NO: 192225 - RNA, 22 nt, Human
cagacugaguggauuaaacaau

SEQ ID NO: 192226 - RNA, 21 nt, Human
cagcuucugaagguguaggaa

SEQ ID NO: 192227 - RNA, 22 nt, Human
uuuguuaaggaguauugcuucu

SEQ ID NO: 192228 - RNA, 22 nt, Human
aaauucuaaggucacaauguug

SEQ ID NO: 192229 - RNA, 22 nt, Human
uccuggcuggaauuucucacuc

SEQ ID NO: 192230 - RNA, 22 nt, Human
guugucuuagucagaaauaugc

SEQ ID NO: 192231 - RNA, 22 nt, Human
uuuuguuuguguccacugcagu

SEQ ID NO: 192232 - RNA, 22 nt, Human
acagauguacacucauauauaa

SEQ ID NO: 192233 - RNA, 22 nt, Human
cacaucauucaauggugauauu

SEQ ID NO: 192234 - RNA, 22 nt, Human
ugcuuugacagggaugacauga

SEQ ID NO: 192235 - RNA, 22 nt, Human
aggcuggggaauugaauuugcu

SEQ ID NO: 192236 - RNA, 22 nt, Human
gucuucuguucugugaggcuuc

SEQ ID NO: 192237 - RNA, 22 nt, Human
uggcccaggccaaagcccugga

SEQ ID NO: 192238 - RNA, 22 nt, Human
uaugagaaaauaaauaucuguu

SEQ ID NO: 192239 - RNA, 22 nt, Human
ucucagagugacaaugagaauu

SEQ ID NO: 192240 - RNA, 22 nt, Human
uugugaaaucguguuuggaagc

SEQ ID NO: 192241 - RNA, 18 nt, Human
ggcagccuacccacuugu

SEQ ID NO: 192242 - RNA, 22 nt, Human
acuaccuuauacaaaauguagg

SEQ ID NO: 192243 - RNA, 23 nt, Human
aguguucagcauguaguaaauac

SEQ ID NO: 192244 - RNA, 22 nt, Human
aaugcauucucgguuugugugu

SEQ ID NO: 192245 - RNA, 22 nt, Human
uggagcuggcagcggaaaaggg

SEQ ID NO: 192246 - RNA, 22 nt, Human
uuugcuugacccuugugcugaa

SEQ ID NO: 192247 - RNA, 22 nt, Human
gcagcauccugggccacagucc

SEQ ID NO: 192248 - RNA, 22 nt, Human
aaagcaauggcacaugauggua

SEQ ID NO: 192249 - RNA, 22 nt, Human
auucuucacaccuguuccuguu

SEQ ID NO: 192250 - RNA, 19 nt, Human
aggcuugguugcagcaagc

SEQ ID NO: 192251 - RNA, 22 nt, Human
gcucaggaccgaggggugggaa

SEQ ID NO: 192252 - RNA, 22 nt, Human
ucugaggacagugcugugccug

SEQ ID NO: 192253 - RNA, 22 nt, Human
ucauggcacaugcccuccaggg

SEQ ID NO: 192254 - RNA, 23 nt, Human
ucacagagcauacugcauuuugc

SEQ ID NO: 192255 - RNA, 22 nt, Human
gcuuucugggcuauagaacggg

SEQ ID NO: 192256 - RNA, 22 nt, Human
aaauuacagccuuggguagcuu

SEQ ID NO: 192257 - RNA, 22 nt, Human
agggcuggagccacagcuggga

SEQ ID NO: 192258 - RNA, 22 nt, Human
agaauuuaggaugcaugugaau

SEQ ID NO: 192259 - RNA, 22 nt, Human
uuuauugaauuguaacccuauu

SEQ ID NO: 192260 - RNA, 22 nt, Human
cugggggucuugaaagggagag

SEQ ID NO: 192261 - RNA, 22 nt, Human
ugccauuugccccagcacuguc

SEQ ID NO: 192262 - RNA, 22 nt, Human
ugcuuugccugcuuugacucau

SEQ ID NO: 192263 - RNA, 22 nt, Human
gcacccagaggucagcagugcu

SEQ ID NO: 192264 - RNA, 22 nt, Human
ccagaaagguaaacacuggauu

SEQ ID NO: 192265 - RNA, 22 nt, Human
agcugguauuucugaaggaaag

SEQ ID NO: 192266 - RNA, 22 nt, Human
uggagggaacccaggcugcucu

SEQ ID NO: 192267 - RNA, 22 nt, Human
ugucacauaauuuaucuguagg

SEQ ID NO: 192268 - RNA, 22 nt, Human
uuccaggccgggcaggaaacac

SEQ ID NO: 192269 - RNA, 22 nt, Human
ggguauuaaaaugaaggagaaa

SEQ ID NO: 192270 - RNA, 22 nt, Human
gugugagagaagcugccaugga

SEQ ID NO: 192271 - RNA, 22 nt, Human
agcuggcagcucucagggguac

SEQ ID NO: 192272 - RNA, 22 nt, Human
uuuauacuccacucugcaagcg

SEQ ID NO: 192273 - RNA, 22 nt, Human
ucccagugggaagcagcacgcu

SEQ ID NO: 192274 - RNA, 22 nt, Human
ggucagugacuuuuuucugugg

SEQ ID NO: 192275 - RNA, 22 nt, Human
aagaggucauaccagauaaggg

SEQ ID NO: 192276 - RNA, 22 nt, Human
uagauucuuugcuagaucauug

SEQ ID NO: 192277 - RNA, 22 nt, Human
uaggaaacaaagcuuagcagga

SEQ ID NO: 192278 - RNA, 22 nt, Human
auugcaaaauuguccuguggaa

SEQ ID NO: 192279 - RNA, 22 nt, Human
gagaaucucuuugacaagcaga

SEQ ID NO: 192280 - RNA, 20 nt, Human
cgggacacucaagcucuggg

SEQ ID NO: 192281 - RNA, 22 nt, Human
caugaaaaugucaaguucugcu

SEQ ID NO: 192282 - RNA, 22 nt, Human
augucucugccccagagagcuu

SEQ ID NO: 192283 - RNA, 22 nt, Human
uaguuacaggaguuucugaaau

SEQ ID NO: 192284 - RNA, 18 nt, Human
caguauaaccagcaacuc

SEQ ID NO: 192285 - RNA, 22 nt, Human
uagccauugacuuaaagcuuau

SEQ ID NO: 192286 - RNA, 22 nt, Human
aauaucaguauauuguaucagu

SEQ ID NO: 192287 - RNA, 22 nt, Human
ugaaagcauuagucuaagguag

SEQ ID NO: 192288 - RNA, 22 nt, Human
ggcucugggguuggcccaucuc

SEQ ID NO: 192289 - RNA, 22 nt, Human
uggcuguggacucagauggcuc

SEQ ID NO: 192290 - RNA, 19 nt, Human
auuuccaagaauuggagag

SEQ ID NO: 192291 - RNA, 22 nt, Human
aagaaugauuacaaagcaacga

SEQ ID NO: 192292 - RNA, 22 nt, Human
aggacccugagcgggcaugccg

SEQ ID NO: 192293 - RNA, 22 nt, Human
cuguggcugcagccuugguccu

SEQ ID NO: 192294 - RNA, 22 nt, Human
ucugcaucauuuuucagagccg

SEQ ID NO: 192295 - RNA, 20 nt, Human
caugccaugucuacugaggc

SEQ ID NO: 192296 - RNA, 19 nt, Human
cugcugaauuagcucugga

SEQ ID NO: 192297 - RNA, 22 nt, Human
augggcaggcaagguggcgagu

SEQ ID NO: 192298 - RNA, 20 nt, Human
uuucuggguacucucccucu

SEQ ID NO: 192299 - RNA, 22 nt, Human
ugcaggugacaccacucuuccu

SEQ ID NO: 192300 - RNA, 22 nt, Human
agugggcauaugaagucucaag

SEQ ID NO: 192301 - RNA, 22 nt, Human
agcacagauaacauggagugga

SEQ ID NO: 192302 - RNA, 22 nt, Human
ucaaauuuuaacaugcauuaga

SEQ ID NO: 192303 - RNA, 22 nt, Human
caaaugauagagccgauuauca

SEQ ID NO: 192304 - RNA, 20 nt, Human
agggucaguagcacagagcu

SEQ ID NO: 192305 - RNA, 22 nt, Human
ggaaucuucagccaugccaaga

SEQ ID NO: 192306 - RNA, 17 nt, Human
uuuauaauuggccucuu

SEQ ID NO: 192307 - RNA, 22 nt, Human
cagugaugaucauuguaacauc

SEQ ID NO: 192308 - RNA, 22 nt, Human
aaauccaugguaaucuguuaca

SEQ ID NO: 192309 - RNA, 22 nt, Human
gagguuggugaggggacacggu

SEQ ID NO: 192310 - RNA, 22 nt, Human
ccugggugaaaucucuccugca

SEQ ID NO: 192311 - RNA, 20 nt, Human
aagcuggguaggagaggagc

SEQ ID NO: 192312 - RNA, 22 nt, Human
uguccuggagacacaagguggu

SEQ ID NO: 192313 - RNA, 22 nt, Human
agggaccugucaaugacaguua

SEQ ID NO: 192314 - RNA, 22 nt, Human
cagcugcaggcugugcaggaag

SEQ ID NO: 192315 - RNA, 19 nt, Human
agagaccacagagcugccu

SEQ ID NO: 192316 - RNA, 22 nt, Human
aagaguuuccaguuguggcuca

SEQ ID NO: 192317 - RNA, 19 nt, Human
uccauacaaacuguugaaa

SEQ ID NO: 192318 - RNA, 22 nt, Human
uuuguguuuguacaaugcacua

SEQ ID NO: 192319 - RNA, 22 nt, Human
cuguggaacuuagugggagaca

SEQ ID NO: 192320 - RNA, 22 nt, Human
cuacauuuuaauaagcugcuua

SEQ ID NO: 192321 - RNA, 22 nt, Human
cacuuuaugggaagcaaaaauu

SEQ ID NO: 192322 - RNA, 22 nt, Human
ucacuagcauuguugaaggacu

SEQ ID NO: 192323 - RNA, 22 nt, Human
aaauggaagaagugcaauacug

SEQ ID NO: 192324 - RNA, 22 nt, Human
ucagggcuccggaaguggccuc

SEQ ID NO: 192325 - RNA, 22 nt, Human
aaggacuaaugaauagaugaau

SEQ ID NO: 192326 - RNA, 22 nt, Human
accuacauguuccacauaguug

SEQ ID NO: 192327 - RNA, 22 nt, Human
accuccaggaagcucuugguac

SEQ ID NO: 192328 - RNA, 22 nt, Human
acccagaggcggagguugcagu

SEQ ID NO: 192329 - RNA, 22 nt, Human
cagcaagucauccaggaugaug

SEQ ID NO: 192330 - RNA, 22 nt, Human
gcuuugcugggugcuucaugua

SEQ ID NO: 192331 - RNA, 22 nt, Human
accacuguacagcagauauagu

SEQ ID NO: 192332 - RNA, 22 nt, Human
augucugguggucgaugcuaca

SEQ ID NO: 192333 - RNA, 22 nt, Human
ccaggccugugcaaggagggag

SEQ ID NO: 192334 - RNA, 22 nt, Human
uuccugagucgccgagucuaug

SEQ ID NO: 192335 - RNA, 21 nt, Human
ggcaauuaggcuucugaguau

SEQ ID NO: 192336 - RNA, 22 nt, Human
ucuggcucaaaauacguacucu

SEQ ID NO: 192337 - RNA, 22 nt, Human
aguggcacaauuuugacucccc

SEQ ID NO: 192338 - RNA, 22 nt, Human
aagggggcggcagccaguggaa

SEQ ID NO: 192339 - RNA, 22 nt, Human
ucagacauauuuuuaacaaagu

SEQ ID NO: 192340 - RNA, 22 nt, Human
gagagugaggccugggaaucua

SEQ ID NO: 192341 - RNA, 22 nt, Human
ucccagccuuccuuguggugaa

SEQ ID NO: 192342 - RNA, 22 nt, Human
ggcagcugggucacaccgaucu

SEQ ID NO: 192343 - RNA, 22 nt, Human
agucucuuuaaucacagugucu

SEQ ID NO: 192344 - RNA, 22 nt, Human
uuuggaaaaagccugaacauag

SEQ ID NO: 192345 - RNA, 22 nt, Human
aagcccuccguacgugcuagcu

SEQ ID NO: 192346 - RNA, 22 nt, Human
uuacaguuaaugugacuaacca

SEQ ID NO: 192347 - RNA, 22 nt, Human
caaagcugauacucagcaagua

SEQ ID NO: 192348 - RNA, 22 nt, Human
aaaggcuuagacacagaacugu

SEQ ID NO: 192349 - RNA, 22 nt, Human
ugggacaguuguccuccacucu

SEQ ID NO: 192350 - RNA, 22 nt, Human
guaacuuaccauuguagcauca

SEQ ID NO: 192351 - RNA, 22 nt, Human
uuguuacagcacuuaaccuuuu

SEQ ID NO: 192352 - RNA, 22 nt, Human
uuaaaacagcgugaaucuggca

SEQ ID NO: 192353 - RNA, 22 nt, Human
ugaacagaucaauagaacugac

SEQ ID NO: 192354 - RNA, 20 nt, Human
cugaacacagaauaagcaca

SEQ ID NO: 192355 - RNA, 18 nt, Human
ccauguguuccuuuuggg

SEQ ID NO: 192356 - RNA, 22 nt, Human
ccuggcagguggagguugcagu

SEQ ID NO: 192357 - RNA, 17 nt, Human
aagucccagcuaacaca

SEQ ID NO: 192358 - RNA, 22 nt, Human
caggcuugaagcuucagaguau

SEQ ID NO: 192359 - RNA, 22 nt, Human
aagaacaugguaggauaacaaa

SEQ ID NO: 192360 - RNA, 21 nt, Human
ugggccaguagaaaggaaggc

SEQ ID NO: 192361 - RNA, 22 nt, Human
aggacagaccuaggacuggagc

SEQ ID NO: 192362 - RNA, 22 nt, Human
cuggcagcaguuaugaaacaau

SEQ ID NO: 192363 - RNA, 22 nt, Human
gggcugagaaguugaucccaag

SEQ ID NO: 192364 - RNA, 22 nt, Human
caauaguauuuauugaacaccu

SEQ ID NO: 192365 - RNA, 22 nt, Human
aggaguggaauuacuggguucu

SEQ ID NO: 192366 - RNA, 22 nt, Human
ggaaggguuuaagcaggagagu

SEQ ID NO: 192367 - RNA, 22 nt, Human
uauacacuguuguugggagucu

SEQ ID NO: 192368 - RNA, 22 nt, Human
aaaagcaagaggcuggauuaaa

SEQ ID NO: 192369 - RNA, 22 nt, Human
uugaaacucccuuuugucuagu

SEQ ID NO: 192370 - RNA, 22 nt, Human
agcugccuggccggagccacug

SEQ ID NO: 192371 - RNA, 19 nt, Human
uggcuuccaucucucucau

SEQ ID NO: 192372 - RNA, 22 nt, Human
ucuuuauuuaagucuguuguaa

SEQ ID NO: 192373 - RNA, 22 nt, Human
acuuuaaagcagaauggcuaug

SEQ ID NO: 192374 - RNA, 22 nt, Human
ugggaagauggagugacaggca

SEQ ID NO: 192375 - RNA, 22 nt, Human
agaaacucauccuggagaugac

SEQ ID NO: 192376 - RNA, 22 nt, Human
ugaauaauuccuuuuugucaag

SEQ ID NO: 192377 - RNA, 22 nt, Human
uguccaggaguaaaaagaccug

SEQ ID NO: 192378 - RNA, 22 nt, Human
ccauggcaauggucagucuauu

SEQ ID NO: 192379 - RNA, 22 nt, Human
agaugguggacuaucugacuug

SEQ ID NO: 192380 - RNA, 22 nt, Human
uccaggacagcggcaggcagau

SEQ ID NO: 192381 - RNA, 22 nt, Human
acagaauuugcuugggcaaugg

SEQ ID NO: 192382 - RNA, 19 nt, Human
agcugcagaccagaagugc

SEQ ID NO: 192383 - RNA, 22 nt, Human
aucugggccagccccaagagac

SEQ ID NO: 192384 - RNA, 20 nt, Human
agcuggucuuaaguaacuga

SEQ ID NO: 192385 - RNA, 22 nt, Human
caggcucaaggcugacuuccau

SEQ ID NO: 192386 - RNA, 22 nt, Human
ccuggaucccgauggcugugag

SEQ ID NO: 192387 - RNA, 22 nt, Human
cccucagcuccacccucagcag

SEQ ID NO: 192388 - RNA, 22 nt, Human
aaugcacauauauguguauaca

SEQ ID NO: 192389 - RNA, 21 nt, Human
ucagcuuugcaacugcacauc

SEQ ID NO: 192390 - RNA, 22 nt, Human
gcaccaggcuuagagccccagg

SEQ ID NO: 192391 - RNA, 22 nt, Human
agcugcaacuguccuugccuug

SEQ ID NO: 192392 - RNA, 22 nt, Human
auugagaauauugugacagugu

SEQ ID NO: 192393 - RNA, 21 nt, Human
agaaccuuggaugccauugca

SEQ ID NO: 192394 - RNA, 22 nt, Human
uggcacugacagggugcucaag

SEQ ID NO: 192395 - RNA, 22 nt, Human
auuguuuaaagauacaucccug

SEQ ID NO: 192396 - RNA, 22 nt, Human
ugaggcaguugagcuuccugag

SEQ ID NO: 192397 - RNA, 22 nt, Human
caccaggugcuggaggacauca

SEQ ID NO: 192398 - RNA, 22 nt, Human
aaaauuauggaguaucccaaag

SEQ ID NO: 192399 - RNA, 22 nt, Human
uucaguuucguuaucuaugaga

SEQ ID NO: 192400 - RNA, 22 nt, Human
caggaagaggacaggcuucccc

SEQ ID NO: 192401 - RNA, 22 nt, Human
auuggucucuagagucuauugu

SEQ ID NO: 192402 - RNA, 22 nt, Human
agcugcugccgguggccacccu

SEQ ID NO: 192403 - RNA, 22 nt, Human
guggcugguuuccugcaugcaa

SEQ ID NO: 192404 - RNA, 22 nt, Human
ccuggcacugaccaggcacuga

SEQ ID NO: 192405 - RNA, 22 nt, Human
ugguuaaguccagaaaggaagc

SEQ ID NO: 192406 - RNA, 22 nt, Human
cucugggccaccgcugguguau

SEQ ID NO: 192407 - RNA, 22 nt, Human
gcaggaguuaggcgucguggau

SEQ ID NO: 192408 - RNA, 22 nt, Human
cugggucucuuuagggugccgu

SEQ ID NO: 192409 - RNA, 22 nt, Human
acagugcugugcagucugcccu

SEQ ID NO: 192410 - RNA, 22 nt, Human
ugggagcaccuugagggcagaa

SEQ ID NO: 192411 - RNA, 22 nt, Human
auguucuguuuuguaauucaua

SEQ ID NO: 192412 - RNA, 22 nt, Human
uagaagcacagguuaaaggcau

SEQ ID NO: 192413 - RNA, 22 nt, Human
uuugucaaucccuugaaaaccu

SEQ ID NO: 192414 - RNA, 22 nt, Human
uucagaaacagagugagugagu

SEQ ID NO: 192415 - RNA, 22 nt, Human
cagcccuguccagcagagggug

SEQ ID NO: 192416 - RNA, 22 nt, Human
uuucucagcucagcaucugggu

SEQ ID NO: 192417 - RNA, 22 nt, Human
ggcaggcaaugaggaugggaag

SEQ ID NO: 192418 - RNA, 22 nt, Human
cauuuauuggcauguaguaggu

SEQ ID NO: 192419 - RNA, 22 nt, Human
gaaaguuuucucacacaguaau

SEQ ID NO: 192420 - RNA, 22 nt, Human
cuuuagaaaucuggauguauuu

SEQ ID NO: 192421 - RNA, 22 nt, Human
aguguaugcagguuuucaaugu

SEQ ID NO: 192422 - RNA, 19 nt, Human
uccagacuguccaggcuau

SEQ ID NO: 192423 - RNA, 22 nt, Human
aggaagccacgaguggcacggg

SEQ ID NO: 192424 - RNA, 22 nt, Human
agccuaggggguccugggccac

SEQ ID NO: 192425 - RNA, 22 nt, Human
gcccacaguuaaugggggcucu

SEQ ID NO: 192426 - RNA, 22 nt, Human
ucuggguguagggccuggcaac

SEQ ID NO: 192427 - RNA, 22 nt, Human
ccacagcuucuuauaucacugg

SEQ ID NO: 192428 - RNA, 22 nt, Human
ucugggaagauguuucaaaggu

SEQ ID NO: 192429 - RNA, 22 nt, Human
cuuggaauggggcagaaaaugg

SEQ ID NO: 192430 - RNA, 22 nt, Human
gggaucugggacaacagguggu

SEQ ID NO: 192431 - RNA, 22 nt, Human
uuuggcaaagaucaacauguua

SEQ ID NO: 192432 - RNA, 22 nt, Human
uauuucuaagagauaucuguac

SEQ ID NO: 192433 - RNA, 22 nt, Human
gggaaugugucugauggaaaga

SEQ ID NO: 192434 - RNA, 22 nt, Human
ggcaucaggagcuucuucaggu

SEQ ID NO: 192435 - RNA, 22 nt, Human
augggagaaacaucaugaggca

SEQ ID NO: 192436 - RNA, 22 nt, Human
uuaagacauucagauauuucua

SEQ ID NO: 192437 - RNA, 20 nt, Human
uucuagaaguuugcuaccca

SEQ ID NO: 192438 - RNA, 22 nt, Human
uuccugagggacuuuugagauu

SEQ ID NO: 192439 - RNA, 22 nt, Human
agcaacagcagguuugcacucc

SEQ ID NO: 192440 - RNA, 22 nt, Human
caagaaggcuauaugggccagg

SEQ ID NO: 192441 - RNA, 22 nt, Human
ugggaaccacaggacucggcac

SEQ ID NO: 192442 - RNA, 22 nt, Human
cucuguagccauggguauauuc

SEQ ID NO: 192443 - RNA, 22 nt, Human
uggcaauaugcuuucaguggcc

SEQ ID NO: 192444 - RNA, 22 nt, Human
cuggauggucccaugagcagcu

SEQ ID NO: 192445 - RNA, 22 nt, Human
ucagggcauacucuucaagguc

SEQ ID NO: 192446 - RNA, 22 nt, Human
caggugaggcugaacagaugaa

SEQ ID NO: 192447 - RNA, 22 nt, Human
gagaaggcuuccaaauucugug

SEQ ID NO: 192448 - RNA, 22 nt, Human
ugcaauaaguuguguuaucacu

SEQ ID NO: 192449 - RNA, 22 nt, Human
aguauaaagugguuuucagcac

SEQ ID NO: 192450 - RNA, 22 nt, Human
uaauuacagagguuugccaguu

SEQ ID NO: 192451 - RNA, 22 nt, Human
agcaccagcucaaggugcaccu

SEQ ID NO: 192452 - RNA, 22 nt, Human
gggccaagggugcguggcagga

SEQ ID NO: 192453 - RNA, 22 nt, Human
uuuccaggagaaagagagccuu

SEQ ID NO: 192454 - RNA, 22 nt, Human
acuaaaaacuacugccaauagc

SEQ ID NO: 192455 - RNA, 22 nt, Human
ugcaaucagaaaguucagcggu

SEQ ID NO: 192456 - RNA, 22 nt, Human
caggcauagguaggauguuucu

SEQ ID NO: 192457 - RNA, 22 nt, Human
gagaggcugaaaucacaggagc

SEQ ID NO: 192458 - RNA, 21 nt, Human
gcauuaaaagcaguuguuggu

SEQ ID NO: 192459 - RNA, 22 nt, Human
aguuugaauugaaaugcagaug

SEQ ID NO: 192460 - RNA, 22 nt, Human
caaauucucaagguuuauccca

SEQ ID NO: 192461 - RNA, 22 nt, Human
auguucuacagauggaaagggg

SEQ ID NO: 192462 - RNA, 22 nt, Human
aguguccuggggcccuaaggcc

SEQ ID NO: 192463 - RNA, 23 nt, Human
agaggcacuaauuauucagagau

SEQ ID NO: 192464 - RNA, 22 nt, Human
gcugugugcugggcauggcacu

SEQ ID NO: 192465 - RNA, 22 nt, Human
auauucuauaagcaguuggaag

SEQ ID NO: 192466 - RNA, 22 nt, Human
aagucacagaacccauuguaac

SEQ ID NO: 192467 - RNA, 22 nt, Human
ucuggagaaaguugaguuugug

SEQ ID NO: 192468 - RNA, 17 nt, Human
ggcugcaguccaggagg

SEQ ID NO: 192469 - RNA, 22 nt, Human
uuucaaguacuguaaacaugcu

SEQ ID NO: 192470 - RNA, 22 nt, Human
acaugacauaguagaaaagccc

SEQ ID NO: 192471 - RNA, 22 nt, Human
cuggccaagcuucucuaagcag

SEQ ID NO: 192472 - RNA, 21 nt, Human
gggggaagaggaguugcuagu

SEQ ID NO: 192473 - RNA, 22 nt, Human
gcccagcacuccucucugacau

SEQ ID NO: 192474 - RNA, 22 nt, Human
uuuccuugcacauugguuucca

SEQ ID NO: 192475 - RNA, 22 nt, Human
gucuguagucacacaggugaca

SEQ ID NO: 192476 - RNA, 20 nt, Human
agugccagggcaggugagag

SEQ ID NO: 192477 - RNA, 22 nt, Human
cagagugauggcaccugcuggg

SEQ ID NO: 192478 - RNA, 22 nt, Human
ccugugacuuggcaaaccucca

SEQ ID NO: 192479 - RNA, 22 nt, Human
uucuucaacaaggacacuguua

SEQ ID NO: 192480 - RNA, 22 nt, Human
cagagccaaaugcugugguuau

SEQ ID NO: 192481 - RNA, 19 nt, Human
agggaauccggcugaggga

SEQ ID NO: 192482 - RNA, 22 nt, Human
guuuacauguacucauuauacu

SEQ ID NO: 192483 - RNA, 22 nt, Human
caccagcuacucggguuuccug

SEQ ID NO: 192484 - RNA, 22 nt, Human
caauagaaaacucaauacuuaa

SEQ ID NO: 192485 - RNA, 22 nt, Human
aggugucugugaugggagcgau

SEQ ID NO: 192486 - RNA, 22 nt, Human
agaggccucccucccagcuggu

SEQ ID NO: 192487 - RNA, 22 nt, Human
ugcagcaaacaggccuucaggg

SEQ ID NO: 192488 - RNA, 22 nt, Human
ucugcuguucauucuuuuagcu

SEQ ID NO: 192489 - RNA, 22 nt, Human
gcuggccugaccugaggcuggg

SEQ ID NO: 192490 - RNA, 22 nt, Human
ucaagagacaggacguguuuca

SEQ ID NO: 192491 - RNA, 22 nt, Human
aagcucagaguagcucagcguc

SEQ ID NO: 192492 - RNA, 22 nt, Human
agugucuguuacgcuugcagaa

SEQ ID NO: 192493 - RNA, 22 nt, Human
gagcugaauuacggugagucau

SEQ ID NO: 192494 - RNA, 22 nt, Human
uuauuacacugaaagaauugcg

SEQ ID NO: 192495 - RNA, 22 nt, Human
aaaccuagaaggaagggucucu

SEQ ID NO: 192496 - RNA, 22 nt, Human
ucagacagugugaucagucucu

SEQ ID NO: 192497 - RNA, 22 nt, Human
gaugaggaaaccaaggcucagg

SEQ ID NO: 192498 - RNA, 22 nt, Human
agugggguccucaguaugguuc

SEQ ID NO: 192499 - RNA, 22 nt, Human
ccaggacaauucgucacuuucu

SEQ ID NO: 192500 - RNA, 22 nt, Human
auuagguaaucuuuagauacac

SEQ ID NO: 192501 - RNA, 22 nt, Human
ugacacagauuagagacauacc

SEQ ID NO: 192502 - RNA, 22 nt, Human
uuuaggaauauuuucuuucagg

SEQ ID NO: 192503 - RNA, 22 nt, Human
ucagaggaacuggacuaaagcc

SEQ ID NO: 192504 - RNA, 18 nt, Human
gcacagcuaggagggucc

SEQ ID NO: 192505 - RNA, 22 nt, Human
ucuguggauuuuaguguucaug

SEQ ID NO: 192506 - RNA, 22 nt, Human
gugaagaucugagcccucaggu

SEQ ID NO: 192507 - RNA, 22 nt, Human
uuuauuuaccuuauguccucca

SEQ ID NO: 192508 - RNA, 22 nt, Human
ucucuguaucagcaccugcugg

SEQ ID NO: 192509 - RNA, 22 nt, Human
ucaggaguaaagacagaguucc

SEQ ID NO: 192510 - RNA, 22 nt, Human
aaguuucuguaugcucuucugu

SEQ ID NO: 192511 - RNA, 22 nt, Human
uguacuuaugagauccuagucg

SEQ ID NO: 192512 - RNA, 22 nt, Human
aucuguaauuuugaaugcaaau

SEQ ID NO: 192513 - RNA, 19 nt, Human
agugcaugggcgaggugca

SEQ ID NO: 192514 - RNA, 22 nt, Human
agcugcaaaccaggccggcgcg

SEQ ID NO: 192515 - RNA, 22 nt, Human
gggcagcagcaggaggucucug

SEQ ID NO: 192516 - RNA, 23 nt, Human
ucagaggaucaucaaacguuuuc

SEQ ID NO: 192517 - RNA, 22 nt, Human
ucacacagggucggaaagagug

SEQ ID NO: 192518 - RNA, 22 nt, Human
aggcagcugaccacaguaugau

SEQ ID NO: 192519 - RNA, 22 nt, Human
aauuccaaaucaacuagucuag

SEQ ID NO: 192520 - RNA, 22 nt, Human
aauaauacaugagauuaauguu

SEQ ID NO: 192521 - RNA, 22 nt, Human
aaauaagugugggccagucaaa

SEQ ID NO: 192522 - RNA, 22 nt, Human
ucugccaucuuaauucucuuuu

SEQ ID NO: 192523 - RNA, 22 nt, Human
ugggcagugagaaaggucaggu

SEQ ID NO: 192524 - RNA, 22 nt, Human
ucucaaauggcaaauguggguc

SEQ ID NO: 192525 - RNA, 22 nt, Human
uuaaaugaugcauaucauuuag

SEQ ID NO: 192526 - RNA, 19 nt, Human
ugaggggcucacagucuca

SEQ ID NO: 192527 - RNA, 18 nt, Human
gucuuuggaguggaggua

SEQ ID NO: 192528 - RNA, 22 nt, Human
caguuucccugcuugaaaacgu

SEQ ID NO: 192529 - RNA, 22 nt, Human
uggggucccaacucugauugau

SEQ ID NO: 192530 - RNA, 22 nt, Human
aucagcaaucucguguauuagg

SEQ ID NO: 192531 - RNA, 22 nt, Human
cuccugugaggcuuaagcccag

SEQ ID NO: 192532 - RNA, 22 nt, Human
aucuuuggacggucccaacuga

SEQ ID NO: 192533 - RNA, 22 nt, Human
caucucaucagugagagucagc

SEQ ID NO: 192534 - RNA, 22 nt, Human
uguguucaucaugauaucaggu

SEQ ID NO: 192535 - RNA, 22 nt, Human
auguggauguuuauaugaagaa

SEQ ID NO: 192536 - RNA, 22 nt, Human
uguaaugggcuacuaggaagag

SEQ ID NO: 192537 - RNA, 22 nt, Human
acaagauuuaaugcaacccaag

SEQ ID NO: 192538 - RNA, 21 nt, Human
caguuacagccaggacaaggc

SEQ ID NO: 192539 - RNA, 22 nt, Human
uucuguauuuaguuugaggaca

SEQ ID NO: 192540 - RNA, 22 nt, Human
aaugucuucaguguauacaugg

SEQ ID NO: 192541 - RNA, 22 nt, Human
uccaaggacgcuggaccccugc

SEQ ID NO: 192542 - RNA, 22 nt, Human
agccaagaggagccuaaagcga

SEQ ID NO: 192543 - RNA, 22 nt, Human
uccucagcaaacacuucacucu

SEQ ID NO: 192544 - RNA, 22 nt, Human
gcucuucuaaagaauguacagg

SEQ ID NO: 192545 - RNA, 22 nt, Human
uuacagagauaaacuguaagug

SEQ ID NO: 192546 - RNA, 22 nt, Human
cauuuauauaaaauguccagaa

SEQ ID NO: 192547 - RNA, 22 nt, Human
ccaggagcaggagcugcagcug

SEQ ID NO: 192548 - RNA, 22 nt, Human
cacacaggaugaagcagcagaa

SEQ ID NO: 192549 - RNA, 22 nt, Human
ggggccuuggaucugugccccg

SEQ ID NO: 192550 - RNA, 22 nt, Human
cccagcuugcgggcggcaggag

SEQ ID NO: 192551 - RNA, 22 nt, Human
ucagaacagaagcuggcuauaa

SEQ ID NO: 192552 - RNA, 22 nt, Human
gggucugggcaggcgcuuccuc

SEQ ID NO: 192553 - RNA, 22 nt, Human
cugccugcuucugagccagagg

SEQ ID NO: 192554 - RNA, 23 nt, Human
acugaaaggauccuagcagagac

SEQ ID NO: 192555 - RNA, 22 nt, Human
gcagggcagugugucugugggg

SEQ ID NO: 192556 - RNA, 22 nt, Human
ucuuccuugccuugcuucauca

SEQ ID NO: 192557 - RNA, 22 nt, Human
cuuuccuccacucccuaggcuu

SEQ ID NO: 192558 - RNA, 22 nt, Human
gagugcugaaugcgagaacaga

SEQ ID NO: 192559 - RNA, 22 nt, Human
ugaucaaauucaggagucugga

SEQ ID NO: 192560 - RNA, 17 nt, Human
gcccacccuuaggagcu

SEQ ID NO: 192561 - RNA, 22 nt, Human
ucugaauucaguauggucuuuc

SEQ ID NO: 192562 - RNA, 21 nt, Human
aggcaggauucaaacacagag

SEQ ID NO: 192563 - RNA, 22 nt, Human
ccuccagggccccucucacugg

SEQ ID NO: 192564 - RNA, 22 nt, Human
ccucaggcuuacgggcaaugga

SEQ ID NO: 192565 - RNA, 22 nt, Human
agcagcagauucagcaggaaug

SEQ ID NO: 192566 - RNA, 22 nt, Human
uccugggaguaaaagcugcccu

SEQ ID NO: 192567 - RNA, 22 nt, Human
gacagacaccugggggguugcu

SEQ ID NO: 192568 - RNA, 22 nt, Human
cagacagaccugcaagggcaca

SEQ ID NO: 192569 - RNA, 22 nt, Human
uucauugauuuccuuggaauaa

SEQ ID NO: 192570 - RNA, 22 nt, Human
gcucaggcuggauugcaguggc

SEQ ID NO: 192571 - RNA, 22 nt, Human
cuucacauguuggaguccuuug

SEQ ID NO: 192572 - RNA, 22 nt, Human
agugucaacugucuacagggag

SEQ ID NO: 192573 - RNA, 22 nt, Human
ugcaaaauaaugaacgauuuuu

SEQ ID NO: 192574 - RNA, 22 nt, Human
caggcagccugcggucugcaca

SEQ ID NO: 192575 - RNA, 22 nt, Human
gucaggauuaaugggaguaugc

SEQ ID NO: 192576 - RNA, 22 nt, Human
uugcaggguugaccaauaggcu

SEQ ID NO: 192577 - RNA, 22 nt, Human
ugaggccuuaguaacccugcac

SEQ ID NO: 192578 - RNA, 22 nt, Human
ugcugauuuugccuacugaucc

SEQ ID NO: 192579 - RNA, 22 nt, Human
augagcagaugcuccugccucu

SEQ ID NO: 192580 - RNA, 22 nt, Human
gacaagauuaaccauaguuaag

SEQ ID NO: 192581 - RNA, 22 nt, Human
uuaggaaugagauuucuaguga

SEQ ID NO: 192582 - RNA, 22 nt, Human
ucaagacaggguuuaagguuga

SEQ ID NO: 192583 - RNA, 20 nt, Human
ucacacauaagugaacgcac

SEQ ID NO: 192584 - RNA, 22 nt, Human
ugcaggcccaguguagaggcuc

SEQ ID NO: 192585 - RNA, 22 nt, Human
agggcugcugaggaagccuugc

SEQ ID NO: 192586 - RNA, 22 nt, Human
auagcacaauauuaccuuuaug

SEQ ID NO: 192587 - RNA, 22 nt, Human
auauauuggugucagaaagagu

SEQ ID NO: 192588 - RNA, 22 nt, Human
ucagagcuaaggggagagcaaa

SEQ ID NO: 192589 - RNA, 22 nt, Human
gcugguccagggccucuguggg

SEQ ID NO: 192590 - RNA, 22 nt, Human
uacaagaaggauggagcccacu

SEQ ID NO: 192591 - RNA, 23 nt, Human
agugcucagggcauuaggcuaga

SEQ ID NO: 192592 - RNA, 22 nt, Human
aaaggcuugagcauuuguugaa

SEQ ID NO: 192593 - RNA, 22 nt, Human
cacauuuaaagguugaagcuga

SEQ ID NO: 192594 - RNA, 22 nt, Human
cagcugaagagaggugcugagu

SEQ ID NO: 192595 - RNA, 20 nt, Human
ccuggcuuugcagcaugaga

SEQ ID NO: 192596 - RNA, 22 nt, Human
ucugccuguggauacaugcucu

SEQ ID NO: 192597 - RNA, 22 nt, Human
uuugacaugaaguagcuuauaa

SEQ ID NO: 192598 - RNA, 22 nt, Human
uuggaaagucucacccaguuga

SEQ ID NO: 192599 - RNA, 22 nt, Human
uagaaaguagccacuuacagag

SEQ ID NO: 192600 - RNA, 21 nt, Human
agagaucugaagaaccauuag

SEQ ID NO: 192601 - RNA, 22 nt, Human
caggaaaugcguaguugaacuu

SEQ ID NO: 192602 - RNA, 22 nt, Human
ugacagacacaccuuaggaaag

SEQ ID NO: 192603 - RNA, 22 nt, Human
ugcagaggagcuggaaggcugg

SEQ ID NO: 192604 - RNA, 22 nt, Human
ggaggccaccauggagucacuu

SEQ ID NO: 192605 - RNA, 22 nt, Human
uggcaggugccuguaaucucag

SEQ ID NO: 192606 - RNA, 22 nt, Human
uagaauacaguuuaagaacuac

SEQ ID NO: 192607 - RNA, 22 nt, Human
gacagacacagggccaugauug

SEQ ID NO: 192608 - RNA, 22 nt, Human
ugcuuccuugagcucuccaauc

SEQ ID NO: 192609 - RNA, 22 nt, Human
cagucuuuuguauauuagcaga

SEQ ID NO: 192610 - RNA, 22 nt, Human
agguuccagguucgaaucccau

SEQ ID NO: 192611 - RNA, 22 nt, Human
gcuuuacaaguggugcagauua

SEQ ID NO: 192612 - RNA, 22 nt, Human
uucccagacuccacacugaggc

SEQ ID NO: 192613 - RNA, 22 nt, Human
cccaggucugugccagcucuga

SEQ ID NO: 192614 - RNA, 22 nt, Human
cacagcaggcacuauacagggc

SEQ ID NO: 192615 - RNA, 22 nt, Human
acaaaggcagagaauucaacau

SEQ ID NO: 192616 - RNA, 22 nt, Human
ccagcuuuaucaagucugagcu

SEQ ID NO: 192617 - RNA, 22 nt, Human
agugcugaagacuggcuaggga

SEQ ID NO: 192618 - RNA, 22 nt, Human
cgcagggccgcgagcgggacca

SEQ ID NO: 192619 - RNA, 22 nt, Human
ggugaaauuccuuguggaaagu

SEQ ID NO: 192620 - RNA, 22 nt, Human
aaugucaaaauggaaugagacu

SEQ ID NO: 192621 - RNA, 22 nt, Human
agaaagacaaaaugcaguggcu

SEQ ID NO: 192622 - RNA, 22 nt, Human
gugcaguaucucugggaguggg

SEQ ID NO: 192623 - RNA, 22 nt, Human
cccaggucccggggccagcugc

SEQ ID NO: 192624 - RNA, 22 nt, Human
guaagccugagaaacaccaccu

SEQ ID NO: 192625 - RNA, 22 nt, Human
uuugguuuagggucauuuaaca

SEQ ID NO: 192626 - RNA, 22 nt, Human
cguggcuggggcgacuccacgg

SEQ ID NO: 192627 - RNA, 22 nt, Human
augguuuuucaaguauucagaa

SEQ ID NO: 192628 - RNA, 22 nt, Human
cacugugucuggagugagcugg

SEQ ID NO: 192629 - RNA, 22 nt, Human
ucaaaguauaauugcuuuuuug

SEQ ID NO: 192630 - RNA, 22 nt, Human
gagccaagcucuucuccaugag

SEQ ID NO: 192631 - RNA, 22 nt, Human
auggagggaaaaguggagagcc

SEQ ID NO: 192632 - RNA, 22 nt, Human
guggccagaaccaggagaauga

SEQ ID NO: 192633 - RNA, 22 nt, Human
gcuuugugaauuauuacucaca

SEQ ID NO: 192634 - RNA, 22 nt, Human
uuacaguagauuuugaaugugg

SEQ ID NO: 192635 - RNA, 22 nt, Human
aagcaaacaggagaagagcugu

SEQ ID NO: 192636 - RNA, 22 nt, Human
auccuggcgggggaacugccca

SEQ ID NO: 192637 - RNA, 22 nt, Human
agaugaaagauuuuuauagaga

SEQ ID NO: 192638 - RNA, 22 nt, Human
cccagggagguagcaggagaaa

SEQ ID NO: 192639 - RNA, 22 nt, Human
acauuucaguaaguguuaauuu

SEQ ID NO: 192640 - RNA, 22 nt, Human
uccuggaguuuguggugauaug

SEQ ID NO: 192641 - RNA, 22 nt, Human
aaauugcugacacuugaccauu

SEQ ID NO: 192642 - RNA, 22 nt, Human
cuccugaguaguagcauuguca

SEQ ID NO: 192643 - RNA, 22 nt, Human
caggcacaaugagcgccaucuu

SEQ ID NO: 192644 - RNA, 22 nt, Human
auuuauuccugauuccuggcuu

SEQ ID NO: 192645 - RNA, 22 nt, Human
ggugugggcccugaugucagca

SEQ ID NO: 192646 - RNA, 21 nt, Human
ggcugccugggaagaagaaga

SEQ ID NO: 192647 - RNA, 22 nt, Human
gcuuaggaguuucaggcucuca

SEQ ID NO: 192648 - RNA, 22 nt, Human
uccucuggauauaagccucacc

SEQ ID NO: 192649 - RNA, 22 nt, Human
cugccugugugugccugcagaa

SEQ ID NO: 192650 - RNA, 22 nt, Human
ggccagaguugauggcaucuug

SEQ ID NO: 192651 - RNA, 22 nt, Human
uguaaaacaaaauuuguggaga

SEQ ID NO: 192652 - RNA, 22 nt, Human
agcuuuauauuuaaugaauucu

SEQ ID NO: 192653 - RNA, 22 nt, Human
aauuuugugugggaucaaagga

SEQ ID NO: 192654 - RNA, 22 nt, Human
uuacaauaguuccuucuuuugu

SEQ ID NO: 192655 - RNA, 22 nt, Human
auuagcugugacgaggcauugu

SEQ ID NO: 192656 - RNA, 22 nt, Human
aaugucuacauucugaauucgu

SEQ ID NO: 192657 - RNA, 22 nt, Human
gccuuccaccuaggccucugcu

SEQ ID NO: 192658 - RNA, 22 nt, Human
cuucugugcuaaaugcaaaacc

SEQ ID NO: 192659 - RNA, 20 nt, Human
uuucugugcccaggucuguu

SEQ ID NO: 192660 - RNA, 22 nt, Human
aguggcugaagcaucaaaggca

SEQ ID NO: 192661 - RNA, 19 nt, Human
ugcagagagaggcaaagaa

SEQ ID NO: 192662 - RNA, 22 nt, Human
cuguggcuaugguguacauacu

SEQ ID NO: 192663 - RNA, 22 nt, Human
acaggucuacuggcaagcagug

SEQ ID NO: 192664 - RNA, 22 nt, Human
ccugaaauccauaguuuacacu

SEQ ID NO: 192665 - RNA, 22 nt, Human
gcccugagccuaugagccucuc

SEQ ID NO: 192666 - RNA, 22 nt, Human
ggccacugcccuggcuacaccg

SEQ ID NO: 192667 - RNA, 22 nt, Human
ggcaauuaaaguacugugaaug

SEQ ID NO: 192668 - RNA, 22 nt, Human
acagucuuuaauuucuuugugg

SEQ ID NO: 192669 - RNA, 22 nt, Human
ccagcaggggaauauuuuuagg

SEQ ID NO: 192670 - RNA, 19 nt, Human
uccuggcacaguggaacca

SEQ ID NO: 192671 - RNA, 22 nt, Human
ggcucugccugcccagcagcac

SEQ ID NO: 192672 - RNA, 20 nt, Human
aucuucuuggccagcuugcu

SEQ ID NO: 192673 - RNA, 22 nt, Human
cuggaaagucaggucagaaacu

SEQ ID NO: 192674 - RNA, 22 nt, Human
auggcugcaguccgugcccugg

SEQ ID NO: 192675 - RNA, 23 nt, Human
uccaggcacgcauuucuucuagc

SEQ ID NO: 192676 - RNA, 22 nt, Human
ucacagaaguguagugaggaaa

SEQ ID NO: 192677 - RNA, 22 nt, Human
gccccuggcuggccagcuccuc

SEQ ID NO: 192678 - RNA, 22 nt, Human
ucuccaggugacucugauguau

SEQ ID NO: 192679 - RNA, 22 nt, Human
acaggcuggugguccuggccau

SEQ ID NO: 192680 - RNA, 22 nt, Human
agagggcuuugauucucaguuc

SEQ ID NO: 192681 - RNA, 22 nt, Human
uccaggaacucuugauggugau

SEQ ID NO: 192682 - RNA, 22 nt, Human
ucccagggcucuagagugcugg

SEQ ID NO: 192683 - RNA, 22 nt, Human
cuacaggucaagcaguagcucu

SEQ ID NO: 192684 - RNA, 22 nt, Human
uaggguaguaccaugcugccag

SEQ ID NO: 192685 - RNA, 22 nt, Human
augacaggaggcagcugggcag

SEQ ID NO: 192686 - RNA, 22 nt, Human
ccugccagugccucccacuggu

SEQ ID NO: 192687 - RNA, 22 nt, Human
cuucaguuaguuucaugugagc

SEQ ID NO: 192688 - RNA, 22 nt, Human
gcagagccaggagagacccuug

SEQ ID NO: 192689 - RNA, 22 nt, Human
gcucaggcaaauuucuggugaa

SEQ ID NO: 192690 - RNA, 22 nt, Human
gcccuccaccuggucucucugg

SEQ ID NO: 192691 - RNA, 23 nt, Human
uccuuccuuugagaggcuccauc

SEQ ID NO: 192692 - RNA, 22 nt, Human
uguuuacuuaaauguuuucaua

SEQ ID NO: 192693 - RNA, 22 nt, Human
caugcucacuuuuauacuguaa

SEQ ID NO: 192694 - RNA, 19 nt, Human
agaaaaacugguacugcug

SEQ ID NO: 192695 - RNA, 22 nt, Human
gccagcucagugccaggccccu

SEQ ID NO: 192696 - RNA, 22 nt, Human
ucacaucugauuagugacugau

SEQ ID NO: 192697 - RNA, 22 nt, Human
gagagaggccuccauguacuga

SEQ ID NO: 192698 - RNA, 22 nt, Human
uaaaaaacauuacucuguccug

SEQ ID NO: 192699 - RNA, 22 nt, Human
gggcuggcaggaccugggcuga

SEQ ID NO: 192700 - RNA, 22 nt, Human
acaaaugacuauuugguacagg

SEQ ID NO: 192701 - RNA, 22 nt, Human
uuggaacaugccgggguccagg

SEQ ID NO: 192702 - RNA, 22 nt, Human
cgcugcagacgcgcuggcgaaa

SEQ ID NO: 192703 - RNA, 22 nt, Human
uugucuggucaaaucacuugua

SEQ ID NO: 192704 - RNA, 22 nt, Human
aggaaccuaagagccugcaguc

SEQ ID NO: 192705 - RNA, 22 nt, Human
aauccauuuacucuuuacaaga

SEQ ID NO: 192706 - RNA, 22 nt, Human
ccucuguaagccucaguuucuu

SEQ ID NO: 192707 - RNA, 22 nt, Human
cacacaccaaucaaaugucaga

SEQ ID NO: 192708 - RNA, 22 nt, Human
gaagauuucaguuaaguaucua

SEQ ID NO: 192709 - RNA, 22 nt, Human
caucugcugacuugacaaguac

SEQ ID NO: 192710 - RNA, 22 nt, Human
aacuauuuuuggagcuaacucu

SEQ ID NO: 192711 - RNA, 22 nt, Human
ucagaacugguauuuaucaagg

SEQ ID NO: 192712 - RNA, 22 nt, Human
cuaaagaauuuugcuugaccag

SEQ ID NO: 192713 - RNA, 22 nt, Human
uccucuggcucuuucccuagga

SEQ ID NO: 192714 - RNA, 22 nt, Human
auauacacauuugcuuaugugu

SEQ ID NO: 192715 - RNA, 22 nt, Human
aggaagaaaacuaauuagaugg

SEQ ID NO: 192716 - RNA, 20 nt, Human
aguggcugauggaaagaagc

SEQ ID NO: 192717 - RNA, 22 nt, Human
auuuccuaacagaggcaacagu

SEQ ID NO: 192718 - RNA, 22 nt, Human
ucuacugcacuggugucucauc

SEQ ID NO: 192719 - RNA, 22 nt, Human
ugagcagagcaguaacaggagc

SEQ ID NO: 192720 - RNA, 22 nt, Human
auuuucuauucugcugguuuag

SEQ ID NO: 192721 - RNA, 22 nt, Human
uuuacacaaaagauagcacacc

SEQ ID NO: 192722 - RNA, 22 nt, Human
agcaccugcuaugugucaggga

SEQ ID NO: 192723 - RNA, 22 nt, Human
aaaguauauuuacuuacuguga

SEQ ID NO: 192724 - RNA, 22 nt, Human
accaauuuuagagcaccaagaa

SEQ ID NO: 192725 - RNA, 22 nt, Human
ucuuuaaaguuggagcuugcaa

SEQ ID NO: 192726 - RNA, 22 nt, Human
augagggagggguggugccgca

SEQ ID NO: 192727 - RNA, 19 nt, Human
auuccucaaggacagaaau

SEQ ID NO: 192728 - RNA, 22 nt, Human
cuccucagucaggucuaggguc

SEQ ID NO: 192729 - RNA, 22 nt, Human
gagcccucgggcgagcccgcgc

SEQ ID NO: 192730 - RNA, 22 nt, Human
gaaaggagggaaacagagcggu

SEQ ID NO: 192731 - RNA, 22 nt, Human
uggcaguuauauugccuuaggg

SEQ ID NO: 192732 - RNA, 22 nt, Human
caauucauuacauugcaaagac

SEQ ID NO: 192733 - RNA, 22 nt, Human
gggcuggaccgcgaccccugag

SEQ ID NO: 192734 - RNA, 22 nt, Human
uucuuugguguuacccagcuca

SEQ ID NO: 192735 - RNA, 22 nt, Human
ugcagaagugagucaugaggaa

SEQ ID NO: 192736 - RNA, 22 nt, Human
ggcuggcgcucucccagcgcug

SEQ ID NO: 192737 - RNA, 22 nt, Human
uccaggagggggagccgugccg

SEQ ID NO: 192738 - RNA, 22 nt, Human
cagggagcuggaguuggaguac

SEQ ID NO: 192739 - RNA, 22 nt, Human
gcaccuggcugcccagguggag

SEQ ID NO: 192740 - RNA, 22 nt, Human
aauggcuggguuucauuuugua

SEQ ID NO: 192741 - RNA, 22 nt, Human
agcagcagaagguuugcaccca

SEQ ID NO: 192742 - RNA, 22 nt, Human
aggaagggcuguuucuccaaga

SEQ ID NO: 192743 - RNA, 22 nt, Human
agcaccuccuuagcuaugacca

SEQ ID NO: 192744 - RNA, 22 nt, Human
ugaugcaauguuuacaucuuga

SEQ ID NO: 192745 - RNA, 22 nt, Human
gucugcccuuccucuccacgau

SEQ ID NO: 192746 - RNA, 22 nt, Human
cugggcuccacuacuugcuaac

SEQ ID NO: 192747 - RNA, 22 nt, Human
gcugaagggagugcugagucug

SEQ ID NO: 192748 - RNA, 22 nt, Human
agucacugucaaagccacacac

SEQ ID NO: 192749 - RNA, 21 nt, Human
uccagaggaggacagacucag

SEQ ID NO: 192750 - RNA, 22 nt, Human
aucuagaaaguguugaagauca

SEQ ID NO: 192751 - RNA, 22 nt, Human
ucugucccugagagcucaggag

SEQ ID NO: 192752 - RNA, 18 nt, Human
ucccugggauauaauuac

SEQ ID NO: 192753 - RNA, 22 nt, Human
uacacauccuucugaacaaccu

SEQ ID NO: 192754 - RNA, 19 nt, Human
agacagagcucaguggguu

SEQ ID NO: 192755 - RNA, 22 nt, Human
aaucuacauagagaucaaauga

SEQ ID NO: 192756 - RNA, 22 nt, Human
auguuuaagaaagucuuccaua

SEQ ID NO: 192757 - RNA, 22 nt, Human
cccacagaaugccaaugagacc

SEQ ID NO: 192758 - RNA, 22 nt, Human
cagguccuggcaucaggcaggu

SEQ ID NO: 192759 - RNA, 23 nt, Human
aggaccagguucccaaaagucaa

SEQ ID NO: 192760 - RNA, 22 nt, Human
uucaggaauauaggcauugaca

SEQ ID NO: 192761 - RNA, 22 nt, Human
gaacuuugcaaaugucagaagc

SEQ ID NO: 192762 - RNA, 22 nt, Human
aucaggauagucuguaaauugu

SEQ ID NO: 192763 - RNA, 22 nt, Human
cucuuuggugcaccuugcaguc

SEQ ID NO: 192764 - RNA, 22 nt, Human
ccugcucugccaaguccucuuu

SEQ ID NO: 192765 - RNA, 22 nt, Human
cucagccaugucaugccuaccu

SEQ ID NO: 192766 - RNA, 22 nt, Human
uccagcuuuggcucuagcuaca

SEQ ID NO: 192767 - RNA, 22 nt, Human
ucugacccucagaucaugucca

SEQ ID NO: 192768 - RNA, 22 nt, Human
ggagcagcacugccacacagag

SEQ ID NO: 192769 - RNA, 22 nt, Human
ggcaucuucaaaauugccaaau

SEQ ID NO: 192770 - RNA, 22 nt, Human
uuccuguggccuuacaucugug

SEQ ID NO: 192771 - RNA, 22 nt, Human
uucuuaacuggaaaaugucaga

SEQ ID NO: 192772 - RNA, 22 nt, Human
acacugcagaugaaagcauaag

SEQ ID NO: 192773 - RNA, 22 nt, Human
uuucugcagcagacucagugug

SEQ ID NO: 192774 - RNA, 22 nt, Human
gaggccuggguuaccuacucgu

SEQ ID NO: 192775 - RNA, 22 nt, Human
ccagcuuggaauaugccauugu

SEQ ID NO: 192776 - RNA, 22 nt, Human
ucuggcucuuugggugauugua

SEQ ID NO: 192777 - RNA, 23 nt, Human
aggcccugccugucccucuuuuu

SEQ ID NO: 192778 - RNA, 22 nt, Human
augaaacaugcuuuguggauga

SEQ ID NO: 192779 - RNA, 22 nt, Human
uuucucucuuaaggaguuuaaa

SEQ ID NO: 192780 - RNA, 22 nt, Human
agucauuucccauucuucauau

SEQ ID NO: 192781 - RNA, 21 nt, Human
ugcuucucuagaucaacuacu

SEQ ID NO: 192782 - RNA, 22 nt, Human
agaaacucuaggucaauugagg

SEQ ID NO: 192783 - RNA, 22 nt, Human
ccuguaggaacgccuucauuug

SEQ ID NO: 192784 - RNA, 22 nt, Human
ucuggcagcagcaucaguggcu

SEQ ID NO: 192785 - RNA, 22 nt, Human
uuccuuccugucuuccuuacug

SEQ ID NO: 192786 - RNA, 22 nt, Human
uggcagaguuauggguauuuau

SEQ ID NO: 192787 - RNA, 22 nt, Human
cacaggcuuuucugacauaggc

SEQ ID NO: 192788 - RNA, 22 nt, Human
aucagagauggcuccagugcuc

SEQ ID NO: 192789 - RNA, 22 nt, Human
ucccagagauuuccucuccuuc

SEQ ID NO: 192790 - RNA, 20 nt, Human
ccucaggccaguuuuaaagu

SEQ ID NO: 192791 - RNA, 22 nt, Human
auggauuggauuuuuauggacc

SEQ ID NO: 192792 - RNA, 20 nt, Human
cuucuucagccuaugcuuca

SEQ ID NO: 192793 - RNA, 22 nt, Human
acaguuuacuggccuugccguu

SEQ ID NO: 192794 - RNA, 22 nt, Human
ugaggauggggagauggugucu

SEQ ID NO: 192795 - RNA, 22 nt, Human
uucucuguggauugggugagag

SEQ ID NO: 192796 - RNA, 22 nt, Human
gacuuuauccugccugaccacg

SEQ ID NO: 192797 - RNA, 22 nt, Human
cugggaggcaccgcgucgugcu

SEQ ID NO: 192798 - RNA, 22 nt, Human
ucuccacaccagaaggagcuga

SEQ ID NO: 192799 - RNA, 22 nt, Human
ugggaagggucugaaucugaga

SEQ ID NO: 192800 - RNA, 22 nt, Human
uagggacaaagagcugaggccu

SEQ ID NO: 192801 - RNA, 22 nt, Human
uggcucugcgucuguucguggg

SEQ ID NO: 192802 - RNA, 22 nt, Human
aaauagcaaugugaaaagagga

SEQ ID NO: 192803 - RNA, 22 nt, Human
gcauucuuuuugacuccugguu

SEQ ID NO: 192804 - RNA, 21 nt, Human
ggguccugggaugggauccag

SEQ ID NO: 192805 - RNA, 22 nt, Human
cagagacaacaaguuuaacuau

SEQ ID NO: 192806 - RNA, 22 nt, Human
ugaguccaucgcagggaagugg

SEQ ID NO: 192807 - RNA, 22 nt, Human
cauagaaaguauuauggaauuu

SEQ ID NO: 192808 - RNA, 22 nt, Human
acaggauuucaccauguuggcc

SEQ ID NO: 192809 - RNA, 22 nt, Human
auugcuggcaucagugacaaua

SEQ ID NO: 192810 - RNA, 22 nt, Human
auauauuguaucuuucaugggg

SEQ ID NO: 192811 - RNA, 22 nt, Human
ccuggcucgcugaccucagggg

SEQ ID NO: 192812 - RNA, 22 nt, Human
gagggcugcaaugagacagaga

SEQ ID NO: 192813 - RNA, 23 nt, Human
gggugggccaaauuagguagccu

SEQ ID NO: 192814 - RNA, 20 nt, Human
auagaaguauuauguaaugu

SEQ ID NO: 192815 - RNA, 22 nt, Human
ucuugcauacacuauauguaca

SEQ ID NO: 192816 - RNA, 18 nt, Human
uccucucuuuccccaggg

SEQ ID NO: 192817 - RNA, 23 nt, Human
uucuuuauaaaucaaugggaugu

SEQ ID NO: 192818 - RNA, 22 nt, Human
gacuggccuggagaugcagcug

SEQ ID NO: 192819 - RNA, 19 nt, Human
cgguggcuugcagggaggu

SEQ ID NO: 192820 - RNA, 22 nt, Human
uguuuuaagagcgcacuuuaua

SEQ ID NO: 192821 - RNA, 22 nt, Human
uuuccaagagcuuauuucugaa

SEQ ID NO: 192822 - RNA, 22 nt, Human
aggaggagguaagaaaagcaua

SEQ ID NO: 192823 - RNA, 20 nt, Human
uugaaugaaugucuggcuca

SEQ ID NO: 192824 - RNA, 22 nt, Human
ucuccuggccuuuagguuaagg

SEQ ID NO: 192825 - RNA, 22 nt, Human
gcccuggggaaggugucuccaa

SEQ ID NO: 192826 - RNA, 21 nt, Human
ucauuuauugagaaaugacug

SEQ ID NO: 192827 - RNA, 22 nt, Human
ugacaccaaggaaguaucauuu

SEQ ID NO: 192828 - RNA, 22 nt, Human
ucucagcugccugcccugcucc

SEQ ID NO: 192829 - RNA, 22 nt, Human
uuuuuugucccagagagccugg

SEQ ID NO: 192830 - RNA, 17 nt, Human
uagcauuuaucuuccuu

SEQ ID NO: 192831 - RNA, 22 nt, Human
guccucuccaggaggcucugau

SEQ ID NO: 192832 - RNA, 22 nt, Human
augaacaucggaaaugagacug

SEQ ID NO: 192833 - RNA, 16 nt, Human
uggcagguuuuuaucu

SEQ ID NO: 192834 - RNA, 22 nt, Human
agauggucuaguugaaccauau

SEQ ID NO: 192835 - RNA, 22 nt, Human
ugggaagccuagcagacagcug

SEQ ID NO: 192836 - RNA, 22 nt, Human
uuuaauguauucuuuggaacca

SEQ ID NO: 192837 - RNA, 22 nt, Human
gggaaagaccuuccuggggugu

SEQ ID NO: 192838 - RNA, 20 nt, Human
augagucuacacacuggcuu

SEQ ID NO: 192839 - RNA, 22 nt, Human
ccagggaagauuagaagccacu

SEQ ID NO: 192840 - RNA, 22 nt, Human
ugggaaaguguugaggugucuu

SEQ ID NO: 192841 - RNA, 22 nt, Human
cauaauuagucauguuaugcau

SEQ ID NO: 192842 - RNA, 22 nt, Human
cgcaauuaauucgggccacagu

SEQ ID NO: 192843 - RNA, 22 nt, Human
uuugacuccugccuucuccugu

SEQ ID NO: 192844 - RNA, 22 nt, Human
aggugagguuugggagguguca

SEQ ID NO: 192845 - RNA, 22 nt, Human
auucaguguuugcagcaacuuu

SEQ ID NO: 192846 - RNA, 22 nt, Human
augaggcaggaaaggcguaucu

SEQ ID NO: 192847 - RNA, 22 nt, Human
ggccugagcagacagcaugaug

SEQ ID NO: 192848 - RNA, 22 nt, Human
uuucuucucgacaccuuauccc

SEQ ID NO: 192849 - RNA, 21 nt, Human
aggaagaaagguuggagguug

SEQ ID NO: 192850 - RNA, 19 nt, Human
ggccaucucugccccagca

SEQ ID NO: 192851 - RNA, 22 nt, Human
gcacacaugcguguauaugggu

SEQ ID NO: 192852 - RNA, 22 nt, Human
ccuguucauuuuuugacucugc

SEQ ID NO: 192853 - RNA, 22 nt, Human
ggcaaggggucaggcugagaca

SEQ ID NO: 192854 - RNA, 22 nt, Human
uugagucugcaauacauaacac

SEQ ID NO: 192855 - RNA, 22 nt, Human
ucuguggaguuagacugguauc

SEQ ID NO: 192856 - RNA, 22 nt, Human
uguugccugacuuuaaaaugug

SEQ ID NO: 192857 - RNA, 22 nt, Human
cugaggccucucccacuccagc

SEQ ID NO: 192858 - RNA, 22 nt, Human
acaguacauagaucucuacccu

SEQ ID NO: 192859 - RNA, 22 nt, Human
ccugagugaccugaggucuagu

SEQ ID NO: 192860 - RNA, 22 nt, Human
uauuuuagguaauauccauugu

SEQ ID NO: 192861 - RNA, 22 nt, Human
aguaaugauuauguacagaaug

SEQ ID NO: 192862 - RNA, 22 nt, Human
ucaaugcaugugacaaagagua

SEQ ID NO: 192863 - RNA, 22 nt, Human
ggcccucccugagccagguggg

SEQ ID NO: 192864 - RNA, 22 nt, Human
ggguuccaaacauagucuuccu

SEQ ID NO: 192865 - RNA, 22 nt, Human
acugagcauaaauaugugucca

SEQ ID NO: 192866 - RNA, 22 nt, Human
uggacacacauguaugucagag

SEQ ID NO: 192867 - RNA, 22 nt, Human
guggcugcucgggcuccggccc

SEQ ID NO: 192868 - RNA, 22 nt, Human
uaauuuuuccacguacacuggg

SEQ ID NO: 192869 - RNA, 22 nt, Human
guccagcccucugccuccaggu

SEQ ID NO: 192870 - RNA, 22 nt, Human
gacagcaguuuuucucuagggu

SEQ ID NO: 192871 - RNA, 21 nt, Human
gcuggcugucccagggaagca

SEQ ID NO: 192872 - RNA, 22 nt, Human
cuucuuuagggaucucuugcug

SEQ ID NO: 192873 - RNA, 22 nt, Human
auauuuuccgaacuugagguag

SEQ ID NO: 192874 - RNA, 18 nt, Human
ccuggagcuccacagcaa

SEQ ID NO: 192875 - RNA, 22 nt, Human
cugucccacaagcagugugcac

SEQ ID NO: 192876 - RNA, 22 nt, Human
uggcuaugcaaaccugaggcug

SEQ ID NO: 192877 - RNA, 22 nt, Human
uagguucacacaucuuccagau

SEQ ID NO: 192878 - RNA, 22 nt, Human
cagugcagucaaggaagaacca

SEQ ID NO: 192879 - RNA, 22 nt, Human
uggcauuuccucagugcucaga

SEQ ID NO: 192880 - RNA, 22 nt, Human
ggcugcaggaacgacggagggg

SEQ ID NO: 192881 - RNA, 22 nt, Human
guuagacaugagugugcuuaca

SEQ ID NO: 192882 - RNA, 22 nt, Human
ggcugugggugugacaggccuc

SEQ ID NO: 192883 - RNA, 17 nt, Human
gcucccugaggacagcu

SEQ ID NO: 192884 - RNA, 22 nt, Human
uuuccucacuucaugagaguuu

SEQ ID NO: 192885 - RNA, 22 nt, Human
cauagaauggauugacaagauu

SEQ ID NO: 192886 - RNA, 22 nt, Human
aggagcucagccugcagggagc

SEQ ID NO: 192887 - RNA, 22 nt, Human
cagcagagcugugugggaaggg

SEQ ID NO: 192888 - RNA, 22 nt, Human
ucagggaacaucguuaaacuag

SEQ ID NO: 192889 - RNA, 22 nt, Human
cuucuucuuuuaauaaaugucu

SEQ ID NO: 192890 - RNA, 22 nt, Human
aauuagggaaguauuuaguagu

SEQ ID NO: 192891 - RNA, 22 nt, Human
ggagggagguuagauucaagcu

SEQ ID NO: 192892 - RNA, 23 nt, Human
cuucaucaaaaguuaacacuagu

SEQ ID NO: 192893 - RNA, 22 nt, Human
caguuuuagcuagagcaaacca

SEQ ID NO: 192894 - RNA, 22 nt, Human
agagccaaggccucagucucaa

SEQ ID NO: 192895 - RNA, 22 nt, Human
acauuuuacaccaagacuucuu

SEQ ID NO: 192896 - RNA, 22 nt, Human
aggcuggcgucaggggcuguac

SEQ ID NO: 192897 - RNA, 22 nt, Human
uugguuuaguaccugccagcgu

SEQ ID NO: 192898 - RNA, 22 nt, Human
uuugcaaaaugaggugaagagu

SEQ ID NO: 192899 - RNA, 22 nt, Human
gacagcuguacacuccugguua

SEQ ID NO: 192900 - RNA, 22 nt, Human
ggcaguuuggcaggauggaggg

SEQ ID NO: 192901 - RNA, 22 nt, Human
gaggcccaguccugcaagcacg

SEQ ID NO: 192902 - RNA, 22 nt, Human
cuguccagcugaccagagcagc

SEQ ID NO: 192903 - RNA, 22 nt, Human
ucccuggguccugcuugcucuc

SEQ ID NO: 192904 - RNA, 22 nt, Human
uguucuuucaguuagacacagu

SEQ ID NO: 192905 - RNA, 16 nt, Human
cagaggcaccuggcuc

SEQ ID NO: 192906 - RNA, 22 nt, Human
gaacagugccagcacacaauaa

SEQ ID NO: 192907 - RNA, 22 nt, Human
gcugccucuguagcuuuggacc

SEQ ID NO: 192908 - RNA, 22 nt, Human
cuuuucuuacucccgcaaggca

SEQ ID NO: 192909 - RNA, 22 nt, Human
uccaaagccccaugcacuuucu

SEQ ID NO: 192910 - RNA, 22 nt, Human
gaugaggucauguuuuacauau

SEQ ID NO: 192911 - RNA, 22 nt, Human
uugaaauuggguguggcuguca

SEQ ID NO: 192912 - RNA, 22 nt, Human
cccugugccucaguuuccucau

SEQ ID NO: 192913 - RNA, 22 nt, Human
ugugccugagucucggcccacc

SEQ ID NO: 192914 - RNA, 22 nt, Human
agcugcaguuagccccagauga

SEQ ID NO: 192915 - RNA, 21 nt, Human
uggaaacuucuagcuuacgua

SEQ ID NO: 192916 - RNA, 22 nt, Human
agcugcaggauuauggaaugga

SEQ ID NO: 192917 - RNA, 22 nt, Human
uccaggacuuagugaccuaaaa

SEQ ID NO: 192918 - RNA, 22 nt, Human
ugggggaguauagucuggccuc

SEQ ID NO: 192919 - RNA, 22 nt, Human
gggcccagcgugguuccaucug

SEQ ID NO: 192920 - RNA, 22 nt, Human
gcuguccagguuguggagcaac

SEQ ID NO: 192921 - RNA, 22 nt, Human
uuuccucugcugccauugcccc

SEQ ID NO: 192922 - RNA, 22 nt, Human
auggccaguguuucccucaguu

SEQ ID NO: 192923 - RNA, 22 nt, Human
gacagacacuguguccucacuu

SEQ ID NO: 192924 - RNA, 22 nt, Human
ggaggccaaggcagguggauca

SEQ ID NO: 192925 - RNA, 22 nt, Human
uccuggagggcucacaggcggc

SEQ ID NO: 192926 - RNA, 20 nt, Human
aaauuacugccacacauuuc

SEQ ID NO: 192927 - RNA, 22 nt, Human
ccuuccuugagaagcaauuccu

SEQ ID NO: 192928 - RNA, 22 nt, Human
cuguauaucaugguuuugcagu

SEQ ID NO: 192929 - RNA, 22 nt, Human
aucucuggccuuccuuuuccaa

SEQ ID NO: 192930 - RNA, 22 nt, Human
uaagaaucgauguuuauuuaga

SEQ ID NO: 192931 - RNA, 22 nt, Human
ucuggcuucaacuuuacugaaa

SEQ ID NO: 192932 - RNA, 22 nt, Human
aaaagcagagacucuggagcua

SEQ ID NO: 192933 - RNA, 22 nt, Human
ucagguguaucauggaguugaa

SEQ ID NO: 192934 - RNA, 22 nt, Human
caggcacacugucuacacugag

SEQ ID NO: 192935 - RNA, 22 nt, Human
uccaugagagguaacuuuacaa

SEQ ID NO: 192936 - RNA, 22 nt, Human
ucuccuggucaccucagaaguc

SEQ ID NO: 192937 - RNA, 20 nt, Human
guccagaguaaugugcugac

SEQ ID NO: 192938 - RNA, 22 nt, Human
gacagaaggcaucuagggcacg

SEQ ID NO: 192939 - RNA, 22 nt, Human
caugaaggaccauuucacgguc

SEQ ID NO: 192940 - RNA, 22 nt, Human
auaaagcuuugaaauggagaua

SEQ ID NO: 192941 - RNA, 22 nt, Human
aaaggcuucuuugcuccauguc

SEQ ID NO: 192942 - RNA, 22 nt, Human
auguguccacaggugugagaga

SEQ ID NO: 192943 - RNA, 22 nt, Human
caguuuaaggcaggacauggga

SEQ ID NO: 192944 - RNA, 18 nt, Human
gccagccaggcguugcuc

SEQ ID NO: 192945 - RNA, 19 nt, Human
ccuaggcauuguccaaggg

SEQ ID NO: 192946 - RNA, 22 nt, Human
gacaagaugagcagcucagugu

SEQ ID NO: 192947 - RNA, 22 nt, Human
acugagguaauugugaggauua

SEQ ID NO: 192948 - RNA, 22 nt, Human
gacuuucuugcagaaauauucc

SEQ ID NO: 192949 - RNA, 22 nt, Human
agggucugaccaccaguaggga

SEQ ID NO: 192950 - RNA, 22 nt, Human
ugagccagucucucagaacccu

SEQ ID NO: 192951 - RNA, 22 nt, Human
cagggcucugccuugagggaug

SEQ ID NO: 192952 - RNA, 22 nt, Human
uggaggaaucagggcuuaggcu

SEQ ID NO: 192953 - RNA, 22 nt, Human
uuuccucuaaacgcauuugcuu

SEQ ID NO: 192954 - RNA, 22 nt, Human
uccagggagcaagucaggccgg

SEQ ID NO: 192955 - RNA, 22 nt, Human
ccuccaggauaagucagggccu

SEQ ID NO: 192956 - RNA, 22 nt, Human
ggcaccaggaucagucugucau

SEQ ID NO: 192957 - RNA, 22 nt, Human
accccagaggcggaggcugcag

SEQ ID NO: 192958 - RNA, 22 nt, Human
aaaaccuucuagacuuuauauu

SEQ ID NO: 192959 - RNA, 22 nt, Human
guugaaugaaucauucuaugua

SEQ ID NO: 192960 - RNA, 22 nt, Human
uucauucuuauuugugaucugg

SEQ ID NO: 192961 - RNA, 22 nt, Human
uuccugugugcucucauuuagu

SEQ ID NO: 192962 - RNA, 22 nt, Human
gcccugugagucaugcggcaga

SEQ ID NO: 192963 - RNA, 22 nt, Human
agauuugaaacuugcuucauaa

SEQ ID NO: 192964 - RNA, 22 nt, Human
uagcuacacugaggcugcuuaa

SEQ ID NO: 192965 - RNA, 22 nt, Human
aggcuggagggcaauggcaaga

SEQ ID NO: 192966 - RNA, 22 nt, Human
aaaaggcauggagguugauagu

SEQ ID NO: 192967 - RNA, 22 nt, Human
cuauuaaauacucuucaaauug

SEQ ID NO: 192968 - RNA, 22 nt, Human
cugcccucgggcccucccauag

SEQ ID NO: 192969 - RNA, 22 nt, Human
aacagcauaccaauguacauau

SEQ ID NO: 192970 - RNA, 22 nt, Human
acucagagaacuggauuagagg

SEQ ID NO: 192971 - RNA, 22 nt, Human
uccagccacuugcacaguuaaa

SEQ ID NO: 192972 - RNA, 22 nt, Human
gcuggcuggaaugggagaagaa

SEQ ID NO: 192973 - RNA, 19 nt, Human
agacacaucacauuucucc

SEQ ID NO: 192974 - RNA, 22 nt, Human
gucuccagaagccuagacagcc

SEQ ID NO: 192975 - RNA, 19 nt, Human
ccugaggaaaagaugauug

SEQ ID NO: 192976 - RNA, 17 nt, Human
gacuuuggaguuucaua

SEQ ID NO: 192977 - RNA, 22 nt, Human
caccuagcaugaaauucagcag

SEQ ID NO: 192978 - RNA, 22 nt, Human
gacaugugagcaagcgugcggc

SEQ ID NO: 192979 - RNA, 22 nt, Human
agaagaaagauugaagguuccu

SEQ ID NO: 192980 - RNA, 22 nt, Human
ggguggggcccaggaaaucuau

SEQ ID NO: 192981 - RNA, 22 nt, Human
ucugugcuuucccugccuucuu

SEQ ID NO: 192982 - RNA, 22 nt, Human
ucaggccugcagugccaaccca

SEQ ID NO: 192983 - RNA, 22 nt, Human
cagugcaguuucccagaugcug

SEQ ID NO: 192984 - RNA, 22 nt, Human
cacauuccuggugcucagcagc

SEQ ID NO: 192985 - RNA, 22 nt, Human
ugaucccaaucuuuccugcucc

SEQ ID NO: 192986 - RNA, 22 nt, Human
uacaucaugaaagcauacauca

SEQ ID NO: 192987 - RNA, 22 nt, Human
uacagcaaagaaacccucaguc

SEQ ID NO: 192988 - RNA, 22 nt, Human
cugagcagugguucuugagcgc

SEQ ID NO: 192989 - RNA, 22 nt, Human
ucacagugggacuuuuaucgcu

SEQ ID NO: 192990 - RNA, 22 nt, Human
ucugcccacagccuccugucca

SEQ ID NO: 192991 - RNA, 22 nt, Human
agugcagcucccucaccugcuu

SEQ ID NO: 192992 - RNA, 20 nt, Human
gcuggugggggcuugacaug

SEQ ID NO: 192993 - RNA, 22 nt, Human
guuuguuagaagagcagaaucu

SEQ ID NO: 192994 - RNA, 23 nt, Human
caggaaauguucuugaagccuga

SEQ ID NO: 192995 - RNA, 22 nt, Human
gcccuguggacagugagaagug

SEQ ID NO: 192996 - RNA, 22 nt, Human
ucugaaauccuuuaucuuggcu

SEQ ID NO: 192997 - RNA, 22 nt, Human
ccucccagugccuccagagcag

SEQ ID NO: 192998 - RNA, 22 nt, Human
aucuucccaggcuggggagagg

SEQ ID NO: 192999 - RNA, 22 nt, Human
uggcagguggcucuggcauucu

SEQ ID NO: 193000 - RNA, 22 nt, Human
ccuggaggcagaaauaggacuu

SEQ ID NO: 193001 - RNA, 22 nt, Human
uacaccagcuugccugggcucu

SEQ ID NO: 193002 - RNA, 22 nt, Human
uuuccuugccuccuguccuucu

SEQ ID NO: 193003 - RNA, 22 nt, Human
ugcaaauguguuuuaaaccaaa

SEQ ID NO: 193004 - RNA, 22 nt, Human
aaccagcuaacauguggaauga

SEQ ID NO: 193005 - RNA, 22 nt, Human
agcagccaguucucugugguag

SEQ ID NO: 193006 - RNA, 22 nt, Human
aaucaagaguuguguaauauuu

SEQ ID NO: 193007 - RNA, 22 nt, Human
agguuacagugauuauagguuu

SEQ ID NO: 193008 - RNA, 22 nt, Human
cuggaaagacagagggcauggg

SEQ ID NO: 193009 - RNA, 22 nt, Human
accugagaccuaaucugacugu

SEQ ID NO: 193010 - RNA, 22 nt, Human
agcugcuuagagucucuucuua

SEQ ID NO: 193011 - RNA, 22 nt, Human
gugcuggcuggggcaucaggca

SEQ ID NO: 193012 - RNA, 22 nt, Human
gaguccaggcuguugcucaucu

SEQ ID NO: 193013 - RNA, 22 nt, Human
cugggcagcuaccaccacugcu

SEQ ID NO: 193014 - RNA, 22 nt, Human
cuuggagcaacacaugacaucu

SEQ ID NO: 193015 - RNA, 22 nt, Human
ucaugcuaguuaagaacacaau

SEQ ID NO: 193016 - RNA, 22 nt, Human
gaucuuuucagguuucucuagu

SEQ ID NO: 193017 - RNA, 22 nt, Human
uucauguaccguguaccaggca

SEQ ID NO: 193018 - RNA, 22 nt, Human
uccagugguacauggagacacu

SEQ ID NO: 193019 - RNA, 19 nt, Human
aggcuuggaacagccuuau

SEQ ID NO: 193020 - RNA, 22 nt, Human
uugcaacacaaaguuugauucc

SEQ ID NO: 193021 - RNA, 22 nt, Human
ucacuucacacccacuaucaug

SEQ ID NO: 193022 - RNA, 22 nt, Human
caucccugacuucuaggugaca

SEQ ID NO: 193023 - RNA, 22 nt, Human
gcugcccagacauugaaucagg

SEQ ID NO: 193024 - RNA, 22 nt, Human
acagagcuaauguugcauaggc

SEQ ID NO: 193025 - RNA, 22 nt, Human
ucauggcauuguuaaggguuuu

SEQ ID NO: 193026 - RNA, 22 nt, Human
ccaggagcgcgugaacaggcug

SEQ ID NO: 193027 - RNA, 22 nt, Human
aggcugccucgugagcucgcug

SEQ ID NO: 193028 - RNA, 19 nt, Human
cacaauuaugagacacuua

SEQ ID NO: 193029 - RNA, 22 nt, Human
acaaauauuuacugaauccacu

SEQ ID NO: 193030 - RNA, 22 nt, Human
agacacagauuuuggaaaagau

SEQ ID NO: 193031 - RNA, 22 nt, Human
uacagaauuagauuauuagaga

SEQ ID NO: 193032 - RNA, 18 nt, Human
agauuuugagaaauacaa

SEQ ID NO: 193033 - RNA, 22 nt, Human
aggacagcauuuucagcaucuc

SEQ ID NO: 193034 - RNA, 22 nt, Human
cucugggugugacagcaccugg

SEQ ID NO: 193035 - RNA, 22 nt, Human
gguggcugcaauggcuaacuuc

SEQ ID NO: 193036 - RNA, 22 nt, Human
aaagaagggacagacugccucu

SEQ ID NO: 193037 - RNA, 22 nt, Human
cucagcacugacccaggagaug

SEQ ID NO: 193038 - RNA, 22 nt, Human
ucucauugguauauacaugugu

SEQ ID NO: 193039 - RNA, 19 nt, Human
gacaggacgaagggaaguu

SEQ ID NO: 193040 - RNA, 22 nt, Human
agguaacacuacuuaguauacu

SEQ ID NO: 193041 - RNA, 19 nt, Human
acuccagggaugacagaag

SEQ ID NO: 193042 - RNA, 22 nt, Human
ggcaggcagaaaaauagaauau

SEQ ID NO: 193043 - RNA, 18 nt, Human
ucuagaaacccagacucu

SEQ ID NO: 193044 - RNA, 22 nt, Human
caugccugccuggugggcgugg

SEQ ID NO: 193045 - RNA, 22 nt, Human
gcgagaaacuaagugcccuuug

SEQ ID NO: 193046 - RNA, 23 nt, Human
cugcuccaggacagcauggaggu

SEQ ID NO: 193047 - RNA, 22 nt, Human
uucuguggucucccaugucugu

SEQ ID NO: 193048 - RNA, 22 nt, Human
gaaguuacucucguuaaauaug

SEQ ID NO: 193049 - RNA, 22 nt, Human
ugaggcucaagaauagacagua

SEQ ID NO: 193050 - RNA, 22 nt, Human
uauggaaaaauguaucuuguca

SEQ ID NO: 193051 - RNA, 22 nt, Human
ccagugcaggugagcaccaggu

SEQ ID NO: 193052 - RNA, 22 nt, Human
auagaguccaaaguaugaauau

SEQ ID NO: 193053 - RNA, 22 nt, Human
ucagagaagguaagugaccugc

SEQ ID NO: 193054 - RNA, 22 nt, Human
uuaugaaguuccuguuacagug

SEQ ID NO: 193055 - RNA, 22 nt, Human
uaauaauuggcuaacccuggga

SEQ ID NO: 193056 - RNA, 22 nt, Human
aaggcacagccacuugaucauc

SEQ ID NO: 193057 - RNA, 22 nt, Human
cucugggaaguagauuuggccu

SEQ ID NO: 193058 - RNA, 22 nt, Human
gagcugcauagcugggauccuc

SEQ ID NO: 193059 - RNA, 22 nt, Human
cuucccagcaccucagucuggc

SEQ ID NO: 193060 - RNA, 22 nt, Human
agcagguguuuguaucauaagg

SEQ ID NO: 193061 - RNA, 19 nt, Human
ccaggccugcgggcguugg

SEQ ID NO: 193062 - RNA, 21 nt, Human
aauuagggugccucuuauaau

SEQ ID NO: 193063 - RNA, 21 nt, Human
ccagagagagggaaguggguu

SEQ ID NO: 193064 - RNA, 22 nt, Human
agaaaucauuuuaggcuugaug

SEQ ID NO: 193065 - RNA, 22 nt, Human
guguggcuguuuagugacuuuc

SEQ ID NO: 193066 - RNA, 22 nt, Human
uuccaggcuauucccuuuggag

SEQ ID NO: 193067 - RNA, 22 nt, Human
uggagcugucacucagaaccaa

SEQ ID NO: 193068 - RNA, 22 nt, Human
cuccugagggaugcuuaggcuu

SEQ ID NO: 193069 - RNA, 22 nt, Human
cuucucagaggccagaagcuau

SEQ ID NO: 193070 - RNA, 20 nt, Human
cuagaacugagaaauuuaaa

SEQ ID NO: 193071 - RNA, 22 nt, Human
gauaacauuuugaagugcuagu

SEQ ID NO: 193072 - RNA, 22 nt, Human
uguaaagagaaugguauaugga

SEQ ID NO: 193073 - RNA, 22 nt, Human
gcaggaagaugagcucagguaa

SEQ ID NO: 193074 - RNA, 22 nt, Human
ggugagcagcugucuguaugga

SEQ ID NO: 193075 - RNA, 22 nt, Human
uuuuauucuaaguaugauggga

SEQ ID NO: 193076 - RNA, 21 nt, Human
ugauaggguuugggcaauuau

SEQ ID NO: 193077 - RNA, 22 nt, Human
ugcuccagcuggagaugggggc

SEQ ID NO: 193078 - RNA, 22 nt, Human
uugagaaugaugagauucuucc

SEQ ID NO: 193079 - RNA, 22 nt, Human
aaguuugaugaguuucuggagg

SEQ ID NO: 193080 - RNA, 22 nt, Human
auggcucugcugggcaaagcaa

SEQ ID NO: 193081 - RNA, 22 nt, Human
cugguagcagugaagcuguuga

SEQ ID NO: 193082 - RNA, 22 nt, Human
ucaggcugaggucaucugcauc

SEQ ID NO: 193083 - RNA, 22 nt, Human
gcaguaggagaagaggaugcuu

SEQ ID NO: 193084 - RNA, 22 nt, Human
ccauucauacaauuuuguucua

SEQ ID NO: 193085 - RNA, 22 nt, Human
cacuucucugauaaucucaguu

SEQ ID NO: 193086 - RNA, 22 nt, Human
ucuagagcuuuuuccucuugua

SEQ ID NO: 193087 - RNA, 22 nt, Human
aggacagcaguuggugagguuc

SEQ ID NO: 193088 - RNA, 22 nt, Human
acauauguguuguacaugcaug

SEQ ID NO: 193089 - RNA, 22 nt, Human
ccucagagccaugccugaguuc

SEQ ID NO: 193090 - RNA, 22 nt, Human
auaagaggaauuacagaagagg

SEQ ID NO: 193091 - RNA, 22 nt, Human
ugugccugauggucacguggcc

SEQ ID NO: 193092 - RNA, 22 nt, Human
agagggggugucagcacugcag

SEQ ID NO: 193093 - RNA, 17 nt, Human
cuccuggcagccucagg

SEQ ID NO: 193094 - RNA, 22 nt, Human
ucucaguggcuuccucacuuuu

SEQ ID NO: 193095 - RNA, 22 nt, Human
aagccauggcaugccaggauca

SEQ ID NO: 193096 - RNA, 23 nt, Human
ugaggaccucucaggggccaggc

SEQ ID NO: 193097 - RNA, 22 nt, Human
ugcauuggaaaacuauggcuca

SEQ ID NO: 193098 - RNA, 22 nt, Human
gaagcaguuucuguaaugaaau

SEQ ID NO: 193099 - RNA, 22 nt, Human
uggagcagcauucauccagcag

SEQ ID NO: 193100 - RNA, 22 nt, Human
cacagcuuguuuagugacucac

SEQ ID NO: 193101 - RNA, 22 nt, Human
cauacuuuugcccugacauucu

SEQ ID NO: 193102 - RNA, 22 nt, Human
cauuaaacaaccuugaaucaau

SEQ ID NO: 193103 - RNA, 22 nt, Human
caugauuauguguuagaguuug

SEQ ID NO: 193104 - RNA, 22 nt, Human
ucagguguuucuggagaaguaa

SEQ ID NO: 193105 - RNA, 22 nt, Human
acaauguuuuuguucaaagagu

SEQ ID NO: 193106 - RNA, 22 nt, Human
uauucacagcugccgcacucag

SEQ ID NO: 193107 - RNA, 22 nt, Human
gauccacaguuugaugaucaua

SEQ ID NO: 193108 - RNA, 22 nt, Human
caaagagcuguucagugucgcu

SEQ ID NO: 193109 - RNA, 22 nt, Human
ggugccacugcacucuggccug

SEQ ID NO: 193110 - RNA, 22 nt, Human
agcgagggaggucugaggacag

SEQ ID NO: 193111 - RNA, 20 nt, Human
uuguuuuaaauccuggauga

SEQ ID NO: 193112 - RNA, 22 nt, Human
aggugggguucagucucagccg

SEQ ID NO: 193113 - RNA, 22 nt, Human
cagcugaggucaaagaagcagg

SEQ ID NO: 193114 - RNA, 22 nt, Human
augggcucuaugucuaggagau

SEQ ID NO: 193115 - RNA, 22 nt, Human
uugcaaauguuauacugccagu

SEQ ID NO: 193116 - RNA, 22 nt, Human
uagacauuucugguuauugaca

SEQ ID NO: 193117 - RNA, 21 nt, Human
uuucaauguguucuuuguagu

SEQ ID NO: 193118 - RNA, 22 nt, Human
uuuaguguagccuaagcagaau

SEQ ID NO: 193119 - RNA, 22 nt, Human
cuguggcuucugggucaguuca

SEQ ID NO: 193120 - RNA, 22 nt, Human
ucccugggucauucucuggcac

SEQ ID NO: 193121 - RNA, 22 nt, Human
uucugggcuguccagaggguga

SEQ ID NO: 193122 - RNA, 22 nt, Human
ugcugccaggucuugcugucca

SEQ ID NO: 193123 - RNA, 22 nt, Human
ccaaggaggccccaggucagcu

SEQ ID NO: 193124 - RNA, 22 nt, Human
aggaagcuuuaugaccagcuaa

SEQ ID NO: 193125 - RNA, 22 nt, Human
ucacagaauagcacuguaagcg

SEQ ID NO: 193126 - RNA, 22 nt, Human
acugcccuuguccuggcacacc

SEQ ID NO: 193127 - RNA, 19 nt, Human
cguccaggugcuggaagau

SEQ ID NO: 193128 - RNA, 19 nt, Human
aguggcagaucuggaagua

SEQ ID NO: 193129 - RNA, 22 nt, Human
cauuaauaaacauuucagaaga

SEQ ID NO: 193130 - RNA, 22 nt, Human
gaggcugccccuuccucagcug

SEQ ID NO: 193131 - RNA, 22 nt, Human
aagaguuucuuuauuaaccuuu

SEQ ID NO: 193132 - RNA, 22 nt, Human
aaauuucaguuaccuuuacguu

SEQ ID NO: 193133 - RNA, 22 nt, Human
agggaguuagaaauccaggaua

SEQ ID NO: 193134 - RNA, 22 nt, Human
guuguauucuucaauaucagag

SEQ ID NO: 193135 - RNA, 20 nt, Human
gaacauggcagguggagggg

SEQ ID NO: 193136 - RNA, 22 nt, Human
uaguccagguuaaucccugccu

SEQ ID NO: 193137 - RNA, 22 nt, Human
uuauguguguguauacauacaa

SEQ ID NO: 193138 - RNA, 22 nt, Human
uuuauaucuuaugucauuucaa

SEQ ID NO: 193139 - RNA, 22 nt, Human
ucucaacuuugagaaacauugu

SEQ ID NO: 193140 - RNA, 22 nt, Human
ccagaauagaaggcagcuguca

SEQ ID NO: 193141 - RNA, 22 nt, Human
cucugcaggccuugaguguggu

SEQ ID NO: 193142 - RNA, 22 nt, Human
agcugugggagaaucucugggu

SEQ ID NO: 193143 - RNA, 22 nt, Human
uuuagaagacagaugcacagcc

SEQ ID NO: 193144 - RNA, 22 nt, Human
agagcugagcaccaagcauggu

SEQ ID NO: 193145 - RNA, 22 nt, Human
ucacaggcucuagggauuaaga

SEQ ID NO: 193146 - RNA, 22 nt, Human
caggcacacagcacauggccug

SEQ ID NO: 193147 - RNA, 22 nt, Human
caagagcuggguggcaagcuag

SEQ ID NO: 193148 - RNA, 21 nt, Human
uguuuaauacauauuugugga

SEQ ID NO: 193149 - RNA, 22 nt, Human
uagcaagauccuucccuggcgu

SEQ ID NO: 193150 - RNA, 22 nt, Human
cccuagaacacgcagacacuga

SEQ ID NO: 193151 - RNA, 22 nt, Human
cacuggcauuagucacgaggca

SEQ ID NO: 193152 - RNA, 22 nt, Human
ugaaguuagaacuaugaggaua

SEQ ID NO: 193153 - RNA, 22 nt, Human
uuacauguuuacggauacacuu

SEQ ID NO: 193154 - RNA, 22 nt, Human
gcaugucuguaauuacagagcc

SEQ ID NO: 193155 - RNA, 22 nt, Human
auagacauuauaacacagagcu

SEQ ID NO: 193156 - RNA, 22 nt, Human
agucacagaaugauggcuccag

SEQ ID NO: 193157 - RNA, 22 nt, Human
uucuucaaccaucuacauaaac

SEQ ID NO: 193158 - RNA, 22 nt, Human
cacuggcccagccaggccuguu

SEQ ID NO: 193159 - RNA, 22 nt, Human
ggaguauuguagcuuccaguuc

SEQ ID NO: 193160 - RNA, 22 nt, Human
agggcacaggcuccggguccag

SEQ ID NO: 193161 - RNA, 22 nt, Human
cugggugagcuggccagagggu

SEQ ID NO: 193162 - RNA, 22 nt, Human
cugggagaucuguugggacugg

SEQ ID NO: 193163 - RNA, 21 nt, Human
uccagcuccugccacuccuua

SEQ ID NO: 193164 - RNA, 22 nt, Human
gcagggcagaccuccagccuau

SEQ ID NO: 193165 - RNA, 22 nt, Human
guggcagguuauaagcaucuca

SEQ ID NO: 193166 - RNA, 22 nt, Human
uuacauguacaaacaauucuua

SEQ ID NO: 193167 - RNA, 22 nt, Human
gcagagugagccgaggcugcuc

SEQ ID NO: 193168 - RNA, 22 nt, Human
uguuuacuuuuaauuaccuguc

SEQ ID NO: 193169 - RNA, 22 nt, Human
caaacuuuuccuggaaaagauu

SEQ ID NO: 193170 - RNA, 22 nt, Human
cagugugcugcagagaacauuu

SEQ ID NO: 193171 - RNA, 22 nt, Human
uguguccugcaggugcugccug

SEQ ID NO: 193172 - RNA, 22 nt, Human
augcugugucaccuuaggauuu

SEQ ID NO: 193173 - RNA, 22 nt, Human
ucccguugaugacggugcaucc

SEQ ID NO: 193174 - RNA, 22 nt, Human
agcuggaauccuacuucuaaca

SEQ ID NO: 193175 - RNA, 22 nt, Human
caggaaaugggucguuuuauaa

SEQ ID NO: 193176 - RNA, 22 nt, Human
uacagaggaggugguugggagu

SEQ ID NO: 193177 - RNA, 22 nt, Human
cugguuuaagcuuauauaguug

SEQ ID NO: 193178 - RNA, 22 nt, Human
ccaucccuucaccacagcagua

SEQ ID NO: 193179 - RNA, 23 nt, Human
ugccucaguggaaugugagggug

SEQ ID NO: 193180 - RNA, 22 nt, Human
gcugucugccgcaggcugccac

SEQ ID NO: 193181 - RNA, 22 nt, Human
auaucauucugauguauaucuu

SEQ ID NO: 193182 - RNA, 22 nt, Human
uuauuaggaacucaggauuuuu

SEQ ID NO: 193183 - RNA, 22 nt, Human
agggccagccgacuuccagccu

SEQ ID NO: 193184 - RNA, 18 nt, Human
ccucagaggcaaauuguu

SEQ ID NO: 193185 - RNA, 22 nt, Human
gaagcuccguacuaugacuuuu

SEQ ID NO: 193186 - RNA, 22 nt, Human
aggccaguuguucagugggccg

SEQ ID NO: 193187 - RNA, 22 nt, Human
caagaucaagguaucagcagau

SEQ ID NO: 193188 - RNA, 22 nt, Human
caagaucaaggugucagcaggu

SEQ ID NO: 193189 - RNA, 22 nt, Human
uucucagaaaauguagagaaaa

SEQ ID NO: 193190 - RNA, 22 nt, Human
auucuggguucaugagugagcu

SEQ ID NO: 193191 - RNA, 22 nt, Human
aggagggcaggcuggcugccua

SEQ ID NO: 193192 - RNA, 22 nt, Human
ccagcaugagacgaugaugaag

SEQ ID NO: 193193 - RNA, 23 nt, Human
aguaacaugcaaauaacagucug

SEQ ID NO: 193194 - RNA, 22 nt, Human
ucugugcacugugucauuaggu

SEQ ID NO: 193195 - RNA, 22 nt, Human
auucagugauucauuuguacaa

SEQ ID NO: 193196 - RNA, 22 nt, Human
gaugucuuuagggcaaaauauu

SEQ ID NO: 193197 - RNA, 22 nt, Human
aauguugauguuuucagugagc

SEQ ID NO: 193198 - RNA, 22 nt, Human
agggaagggcagggucuaugca

SEQ ID NO: 193199 - RNA, 22 nt, Human
aaagaguucuaugaucuuucca

SEQ ID NO: 193200 - RNA, 21 nt, Human
uggagagcccuugccugaguc

SEQ ID NO: 193201 - RNA, 22 nt, Human
acugggaggcaucuggagcuga

SEQ ID NO: 193202 - RNA, 22 nt, Human
gcuguggcugaccaccaggggg

SEQ ID NO: 193203 - RNA, 22 nt, Human
aggggacauuuagcaaugacua

SEQ ID NO: 193204 - RNA, 22 nt, Human
gacaccaguaaauauucaaaag

SEQ ID NO: 193205 - RNA, 22 nt, Human
ccaggcagagggauccccaucc

SEQ ID NO: 193206 - RNA, 22 nt, Human
uugcacuccagcccgagcaaca

SEQ ID NO: 193207 - RNA, 22 nt, Human
cauuucacgcacacucauuacu

SEQ ID NO: 193208 - RNA, 22 nt, Human
agacuacagaauggcauuguuu

SEQ ID NO: 193209 - RNA, 22 nt, Human
uucugcauuucuaauaaguucc

SEQ ID NO: 193210 - RNA, 22 nt, Human
acaaugcuugguuuuucuagaa

SEQ ID NO: 193211 - RNA, 22 nt, Human
cacaguccagacuccuggaguu

SEQ ID NO: 193212 - RNA, 22 nt, Human
gccacccugagcugggccaggg

SEQ ID NO: 193213 - RNA, 22 nt, Human
aagcuguucucuaaguuucaug

SEQ ID NO: 193214 - RNA, 22 nt, Human
auccuggguuugugaguuuaug

SEQ ID NO: 193215 - RNA, 23 nt, Human
ugggcagcuucugcaugcccacc

SEQ ID NO: 193216 - RNA, 22 nt, Human
acagaauuaacauuugaugaau

SEQ ID NO: 193217 - RNA, 22 nt, Human
auaggugugugguucauggccc

SEQ ID NO: 193218 - RNA, 22 nt, Human
cuuuaguuugugauacgaagau

SEQ ID NO: 193219 - RNA, 22 nt, Human
auucugagaaaugcauugucag

SEQ ID NO: 193220 - RNA, 23 nt, Human
uuucaaggugucuguaccacuga

SEQ ID NO: 193221 - RNA, 22 nt, Human
caguuacucaauaauucuugcg

SEQ ID NO: 193222 - RNA, 19 nt, Human
cuccacagggauugugauu

SEQ ID NO: 193223 - RNA, 22 nt, Human
ugcccuggaaaugagaggugug

SEQ ID NO: 193224 - RNA, 23 nt, Human
accccaggcaucgcauuccucuu

SEQ ID NO: 193225 - RNA, 22 nt, Human
gagggagcuaugaauagaagaa

SEQ ID NO: 193226 - RNA, 21 nt, Human
uuccuuuuuauggcuuagugg

SEQ ID NO: 193227 - RNA, 22 nt, Human
gcugcagcccugcggaucacuu

SEQ ID NO: 193228 - RNA, 22 nt, Human
cagcuccugaggacugcuggga

SEQ ID NO: 193229 - RNA, 18 nt, Human
caguuacaccuucauuca

SEQ ID NO: 193230 - RNA, 22 nt, Human
cugagcagccccaccagccauu

SEQ ID NO: 193231 - RNA, 17 nt, Human
agaacuguaguagcucc

SEQ ID NO: 193232 - RNA, 22 nt, Human
aaguggagagcccuggaggucu

SEQ ID NO: 193233 - RNA, 22 nt, Human
caaggccauauugccuguaugu

SEQ ID NO: 193234 - RNA, 21 nt, Human
guuauuuuaagugagcuuugc

SEQ ID NO: 193235 - RNA, 20 nt, Human
agucucuguagugccugaga

SEQ ID NO: 193236 - RNA, 22 nt, Human
aaugucuucccuggcaggccaa

SEQ ID NO: 193237 - RNA, 22 nt, Human
agauggggcucaguguggaggc

SEQ ID NO: 193238 - RNA, 17 nt, Human
uuacagagguaauuaag

SEQ ID NO: 193239 - RNA, 22 nt, Human
cuccagucuuucagaugucccu

SEQ ID NO: 193240 - RNA, 22 nt, Human
acccagcccagaaucuggggcc

SEQ ID NO: 193241 - RNA, 22 nt, Human
auguuacagaaagcaaagauga

SEQ ID NO: 193242 - RNA, 22 nt, Human
uucuuggaaauacauucaauaa

SEQ ID NO: 193243 - RNA, 22 nt, Human
auaaauggcuuucauuccuagg

SEQ ID NO: 193244 - RNA, 22 nt, Human
agcuaagcucucagauacuaag

SEQ ID NO: 193245 - RNA, 22 nt, Human
ggaaagagcuaaaagggugaga

SEQ ID NO: 193246 - RNA, 22 nt, Human
ccuggcucccccaucauagcug

SEQ ID NO: 193247 - RNA, 22 nt, Human
aaggcauuuguuggauuucuca

SEQ ID NO: 193248 - RNA, 22 nt, Human
uccagcaugaaggggcuuuuau

SEQ ID NO: 193249 - RNA, 22 nt, Human
cagcagcuucuguugaucagaa

SEQ ID NO: 193250 - RNA, 22 nt, Human
cugcuuccaugcaauggcaguc

SEQ ID NO: 193251 - RNA, 22 nt, Human
ggcuggcuuucucuccgcaccu

SEQ ID NO: 193252 - RNA, 22 nt, Human
ucagaaggaaacgaugccagcu

SEQ ID NO: 193253 - RNA, 22 nt, Human
uuacagggguguggaggcaauc

SEQ ID NO: 193254 - RNA, 22 nt, Human
cccuccaugagugugcugcugg

SEQ ID NO: 193255 - RNA, 22 nt, Human
auccuucuccaaaacuggcucc

SEQ ID NO: 193256 - RNA, 23 nt, Human
agaaguggaauggccgugggguc

SEQ ID NO: 193257 - RNA, 22 nt, Human
caggcaugaucauaggaguuua

SEQ ID NO: 193258 - RNA, 22 nt, Human
agugugagccuacaggccaaag

SEQ ID NO: 193259 - RNA, 19 nt, Human
ccuggaggugaagguucuc

SEQ ID NO: 193260 - RNA, 22 nt, Human
ucacaucugccuccauagcacc

SEQ ID NO: 193261 - RNA, 22 nt, Human
gacugagcuucugcaacacugg

SEQ ID NO: 193262 - RNA, 22 nt, Human
gcagcuuuagaaacaagggcug

SEQ ID NO: 193263 - RNA, 22 nt, Human
agaaccuugaucuuggacuucu

SEQ ID NO: 193264 - RNA, 22 nt, Human
agcucagggccaggcgcguuuc

SEQ ID NO: 193265 - RNA, 19 nt, Human
uccuucagucagaucuggg

SEQ ID NO: 193266 - RNA, 21 nt, Human
aacucccagugccuucccagc

SEQ ID NO: 193267 - RNA, 22 nt, Human
ugagaagcaguuucaguaagaa

SEQ ID NO: 193268 - RNA, 22 nt, Human
ugucccaguuuaucugggacug

SEQ ID NO: 193269 - RNA, 22 nt, Human
ggaggagguggguuaaguugua

SEQ ID NO: 193270 - RNA, 22 nt, Human
aucugacaaggccacauauucu

SEQ ID NO: 193271 - RNA, 22 nt, Human
uucugaaggucagcagcuuggu

SEQ ID NO: 193272 - RNA, 22 nt, Human
cuccaaguccgagggcucucaa

SEQ ID NO: 193273 - RNA, 22 nt, Human
ugcugaaagaccguauuuaucu

SEQ ID NO: 193274 - RNA, 22 nt, Human
ccuggcccacauggcuucuccc

SEQ ID NO: 193275 - RNA, 22 nt, Human
cccuggagugugacgaggcauu

SEQ ID NO: 193276 - RNA, 22 nt, Human
ggacuucuaagugccagacacu

SEQ ID NO: 193277 - RNA, 22 nt, Human
augaagcagaauuucccacucu

SEQ ID NO: 193278 - RNA, 22 nt, Human
aacuuucuugugacauuugggg

SEQ ID NO: 193279 - RNA, 22 nt, Human
cagagcucagagcagggcacuc

SEQ ID NO: 193280 - RNA, 22 nt, Human
uuugauaucuugguauacagau

SEQ ID NO: 193281 - RNA, 22 nt, Human
gccaggagaaugcuagcagagg

SEQ ID NO: 193282 - RNA, 22 nt, Human
accacaggaggauggcugcugg

SEQ ID NO: 193283 - RNA, 22 nt, Human
caaagauaugacauggaaaaug

SEQ ID NO: 193284 - RNA, 22 nt, Human
ggcagugagcuggagggaagga

SEQ ID NO: 193285 - RNA, 18 nt, Human
cccuuagccuuuccucuc

SEQ ID NO: 193286 - RNA, 22 nt, Human
agagccaggccaggccggggca

SEQ ID NO: 193287 - RNA, 23 nt, Human
auaaauuacuaucucccuagagc

SEQ ID NO: 193288 - RNA, 22 nt, Human
aaaccuuugugugucugugccu

SEQ ID NO: 193289 - RNA, 22 nt, Human
ucugcugucacucauuugcuuc

SEQ ID NO: 193290 - RNA, 22 nt, Human
agacagugugaguucagggugg

SEQ ID NO: 193291 - RNA, 22 nt, Human
gugggaagucucucggaggaag

SEQ ID NO: 193292 - RNA, 22 nt, Human
agcuucucucuuugcacucaca

SEQ ID NO: 193293 - RNA, 22 nt, Human
aggucugguguugaugaauucc

SEQ ID NO: 193294 - RNA, 22 nt, Human
auggcauuugaaucugucuuuu

SEQ ID NO: 193295 - RNA, 22 nt, Human
uuagagccaguuacaaggucaa

SEQ ID NO: 193296 - RNA, 22 nt, Human
uucaaugucuauguacauuuua

SEQ ID NO: 193297 - RNA, 19 nt, Human
ggcaccuuggucuuggacu

SEQ ID NO: 193298 - RNA, 22 nt, Human
ugucuccucaacucaugcucga

SEQ ID NO: 193299 - RNA, 22 nt, Human
aguacaauuauauuuagauggu

SEQ ID NO: 193300 - RNA, 22 nt, Human
guuccuaaccagcagagaaaca

SEQ ID NO: 193301 - RNA, 22 nt, Human
acuggcagaauugaauaguugu

SEQ ID NO: 193302 - RNA, 22 nt, Human
uagaaaggauauugagaugaau

SEQ ID NO: 193303 - RNA, 22 nt, Human
ucaaggaaugacuauaugagga

SEQ ID NO: 193304 - RNA, 22 nt, Human
guagcuacuuagagccguucuu

SEQ ID NO: 193305 - RNA, 22 nt, Human
cagagcugugauaaauagauau

SEQ ID NO: 193306 - RNA, 22 nt, Human
gcugggagcaaguacucaucuu

SEQ ID NO: 193307 - RNA, 22 nt, Human
cagcccuggaacagcugacuca

SEQ ID NO: 193308 - RNA, 22 nt, Human
gaggacaaagcccaggugcugg

SEQ ID NO: 193309 - RNA, 22 nt, Human
gugcucagaaacuugcucauuu

SEQ ID NO: 193310 - RNA, 22 nt, Human
aaguaaugguuaaauaauucua

SEQ ID NO: 193311 - RNA, 22 nt, Human
ucucuguggcaagcaugcugcu

SEQ ID NO: 193312 - RNA, 22 nt, Human
ugcucaggaaauaaugucugug

SEQ ID NO: 193313 - RNA, 22 nt, Human
auuuauugagacuuaacaaccc

SEQ ID NO: 193314 - RNA, 22 nt, Human
ugccaggccaauucuauuugac

SEQ ID NO: 193315 - RNA, 22 nt, Human
ugucacauucugaugugaggug

SEQ ID NO: 193316 - RNA, 22 nt, Human
cuagggaacaagaugcccaggg

SEQ ID NO: 193317 - RNA, 22 nt, Human
cagaggaguucaguacacagcc

SEQ ID NO: 193318 - RNA, 22 nt, Human
cuacugaugauguugguugugg

SEQ ID NO: 193319 - RNA, 22 nt, Human
auggugcuccugcaggaagcag

SEQ ID NO: 193320 - RNA, 22 nt, Human
gcacacaguagggauucaauga

SEQ ID NO: 193321 - RNA, 22 nt, Human
ucaaggagcccacagucuaaug

SEQ ID NO: 193322 - RNA, 22 nt, Human
uagaagucucucaagaaacaua

SEQ ID NO: 193323 - RNA, 22 nt, Human
uacagucucuuugagugauugu

SEQ ID NO: 193324 - RNA, 22 nt, Human
gaaauauacauugcaggaagag

SEQ ID NO: 193325 - RNA, 22 nt, Human
cugagagaucaagccacaggau

SEQ ID NO: 193326 - RNA, 22 nt, Human
cccagaggugaaggagguggga

SEQ ID NO: 193327 - RNA, 22 nt, Human
ucaugcaguuucuuaucugcca

SEQ ID NO: 193328 - RNA, 22 nt, Human
cuggcccaggagagcaggcauu

SEQ ID NO: 193329 - RNA, 22 nt, Human
ggcugggagcuggacaggccgg

SEQ ID NO: 193330 - RNA, 22 nt, Human
agggcagaaaccaccuugaugg

SEQ ID NO: 193331 - RNA, 22 nt, Human
cagggagcuggugccagccgac

SEQ ID NO: 193332 - RNA, 22 nt, Human
ucugaggggcuggaagggcugc

SEQ ID NO: 193333 - RNA, 22 nt, Human
uucucuggccauagcuggcuag

SEQ ID NO: 193334 - RNA, 22 nt, Human
gcggguugaagggcgcaucgaa

SEQ ID NO: 193335 - RNA, 22 nt, Human
ucucagacucuuuagugaaggu

SEQ ID NO: 193336 - RNA, 20 nt, Human
ucuguacacucaucuucugc

SEQ ID NO: 193337 - RNA, 22 nt, Human
uaagccaucaucauggcuuugg

SEQ ID NO: 193338 - RNA, 22 nt, Human
gccugcuuccuagccuuccaag

SEQ ID NO: 193339 - RNA, 22 nt, Human
gugcaaaaaucuaucaccagca

SEQ ID NO: 193340 - RNA, 22 nt, Human
uuucuucucaucccugaaauca

SEQ ID NO: 193341 - RNA, 22 nt, Human
uuguacaaaugcauauuccugg

SEQ ID NO: 193342 - RNA, 22 nt, Human
agucugguaaacugaaaaauau

SEQ ID NO: 193343 - RNA, 22 nt, Human
cugcagggagguuccuuguucu

SEQ ID NO: 193344 - RNA, 22 nt, Human
cuggcucuuucagccgcuggag

SEQ ID NO: 193345 - RNA, 22 nt, Human
gcuucuggaggagcugggcuga

SEQ ID NO: 193346 - RNA, 22 nt, Human
aggcagguuggugagaagacug

SEQ ID NO: 193347 - RNA, 22 nt, Human
ggcuguguuccaagugucagga

SEQ ID NO: 193348 - RNA, 20 nt, Human
cauuuguuagcuuucuacug

SEQ ID NO: 193349 - RNA, 22 nt, Human
ccugggucccagccaggcuuug

SEQ ID NO: 193350 - RNA, 22 nt, Human
gaggacaagcugugaguggggu

SEQ ID NO: 193351 - RNA, 22 nt, Human
uuuguucuugcaacaguuauua

SEQ ID NO: 193352 - RNA, 22 nt, Human
ugagcuucaaaguuggaucuga

SEQ ID NO: 193353 - RNA, 22 nt, Human
ugcugugguucccagaguggau

SEQ ID NO: 193354 - RNA, 22 nt, Human
accauuuaaggaaaauguauca

SEQ ID NO: 193355 - RNA, 22 nt, Human
gcagcuguggugcugagauagg

SEQ ID NO: 193356 - RNA, 22 nt, Human
uuugggaagaggaaucucugga

SEQ ID NO: 193357 - RNA, 22 nt, Human
gacugucucugugaaugguagg

SEQ ID NO: 193358 - RNA, 23 nt, Human
cagaggcaucggauucaacauca

SEQ ID NO: 193359 - RNA, 22 nt, Human
ugaaauaggaaacagauguuuc

SEQ ID NO: 193360 - RNA, 22 nt, Human
gucuucuaaguaucaaagcaga

SEQ ID NO: 193361 - RNA, 22 nt, Human
uaggcuucacuuccaguuauuc

SEQ ID NO: 193362 - RNA, 22 nt, Human
cuggagagagaaaaagccuuaa

SEQ ID NO: 193363 - RNA, 22 nt, Human
ugcuauuuggcacuuuugaccu

SEQ ID NO: 193364 - RNA, 22 nt, Human
aaacuggguuguggucaguggu

SEQ ID NO: 193365 - RNA, 22 nt, Human
aaagcacaugaguaguguagua

SEQ ID NO: 193366 - RNA, 22 nt, Human
gccacuguuccaccaucuugau

SEQ ID NO: 193367 - RNA, 22 nt, Human
agagggaaauccaggagugcuu

SEQ ID NO: 193368 - RNA, 18 nt, Human
caauuuuacccagucccu

SEQ ID NO: 193369 - RNA, 22 nt, Human
acagccugcugccugcuucuug

SEQ ID NO: 193370 - RNA, 22 nt, Human
gcucaggggaaugggcugccgu

SEQ ID NO: 193371 - RNA, 23 nt, Human
aggaaagcauucauuuuuaccau

SEQ ID NO: 193372 - RNA, 22 nt, Human
cagcaagaaaauucacaugcuc

SEQ ID NO: 193373 - RNA, 22 nt, Human
cagacaggaauucuggcguggu

SEQ ID NO: 193374 - RNA, 22 nt, Human
gucucugucauuucaccuuccc

SEQ ID NO: 193375 - RNA, 22 nt, Human
aacuggaauagcacaggaaaag

SEQ ID NO: 193376 - RNA, 19 nt, Human
uuucaauggcuuagagaaa

SEQ ID NO: 193377 - RNA, 22 nt, Human
ccaggcucaccuggagccccug

SEQ ID NO: 193378 - RNA, 22 nt, Human
agcuccugcagacuccugcuca

SEQ ID NO: 193379 - RNA, 19 nt, Human
aggagccuugagcagugag

SEQ ID NO: 193380 - RNA, 22 nt, Human
cuguauuucccacauucucuau

SEQ ID NO: 193381 - RNA, 22 nt, Human
gucuccuggaaauaugcccaua

SEQ ID NO: 193382 - RNA, 22 nt, Human
gugucccaaagauuagaaauca

SEQ ID NO: 193383 - RNA, 22 nt, Human
uuccuggagaguuuucccaaag

SEQ ID NO: 193384 - RNA, 22 nt, Human
agucugaguuaguggaaaugua

SEQ ID NO: 193385 - RNA, 22 nt, Human
uccaggaccaaagacacaugua

SEQ ID NO: 193386 - RNA, 22 nt, Human
gaggagcuggcugucgggaggc

SEQ ID NO: 193387 - RNA, 22 nt, Human
aggcaggccccugagaauagac

SEQ ID NO: 193388 - RNA, 23 nt, Human
caccccacccugaggaggaggga

SEQ ID NO: 193389 - RNA, 22 nt, Human
uuuacuuugugucaagucaaga

SEQ ID NO: 193390 - RNA, 20 nt, Human
uguaggaaggacccugucug

SEQ ID NO: 193391 - RNA, 22 nt, Human
aguuggguuugugucaguugca

SEQ ID NO: 193392 - RNA, 22 nt, Human
aauugcuuuucaaggguacagc

SEQ ID NO: 193393 - RNA, 22 nt, Human
uugaccugggcacagugagcau

SEQ ID NO: 193394 - RNA, 22 nt, Human
acagagguuuccauugagguuu

SEQ ID NO: 193395 - RNA, 22 nt, Human
ggaagccaggcugggggaucug

SEQ ID NO: 193396 - RNA, 22 nt, Human
cucuccagagcccuuccggccc

SEQ ID NO: 193397 - RNA, 22 nt, Human
ugcauuauuacaagguaagacu

SEQ ID NO: 193398 - RNA, 22 nt, Human
cacagagcugaaccugggucau

SEQ ID NO: 193399 - RNA, 22 nt, Human
uuacauauuauccaaaacugcu

SEQ ID NO: 193400 - RNA, 22 nt, Human
uagaguaacacaaacgaauugg

SEQ ID NO: 193401 - RNA, 22 nt, Human
cuuauagaauguuuuuauaugu

SEQ ID NO: 193402 - RNA, 22 nt, Human
gcacagcuggacucugccuggc

SEQ ID NO: 193403 - RNA, 22 nt, Human
guguuuuggccauuagugugau

SEQ ID NO: 193404 - RNA, 18 nt, Human
ccugaagccugugucuuu

SEQ ID NO: 193405 - RNA, 22 nt, Human
gggcacagcccagugggguccc

SEQ ID NO: 193406 - RNA, 22 nt, Human
uggccugucuuguugugcuaga

SEQ ID NO: 193407 - RNA, 22 nt, Human
gcaagauguuaacauagggaga

SEQ ID NO: 193408 - RNA, 22 nt, Human
aagaaucuccauuccuguuuua

SEQ ID NO: 193409 - RNA, 22 nt, Human
aguaaacacuaaaaugacugcg

SEQ ID NO: 193410 - RNA, 18 nt, Human
gggugcuggggccccuug

SEQ ID NO: 193411 - RNA, 22 nt, Human
gcagcccagagcgcaggacccc

SEQ ID NO: 193412 - RNA, 23 nt, Human
augcaggacuuauaagguaaggu

SEQ ID NO: 193413 - RNA, 22 nt, Human
gcagcuggcucagagagguggg

SEQ ID NO: 193414 - RNA, 21 nt, Human
ucuuccugcuccacacucccc

SEQ ID NO: 193415 - RNA, 22 nt, Human
cuuucacacacauacauuugga

SEQ ID NO: 193416 - RNA, 22 nt, Human
ugcugucuuuucccaauccugg

SEQ ID NO: 193417 - RNA, 22 nt, Human
ugcaggggcuugucugggccug

SEQ ID NO: 193418 - RNA, 22 nt, Human
agagaucaguuaaaaucuuuuu

SEQ ID NO: 193419 - RNA, 22 nt, Human
gaaugauagagcugccuucgga

SEQ ID NO: 193420 - RNA, 22 nt, Human
cacugcaguuccccagugcgca

SEQ ID NO: 193421 - RNA, 22 nt, Human
caaauguaaauucuuuugaagc

SEQ ID NO: 193422 - RNA, 22 nt, Human
agaccugugaucacauggaaug

SEQ ID NO: 193423 - RNA, 22 nt, Human
aacuucugccaaacagcuguua

SEQ ID NO: 193424 - RNA, 22 nt, Human
ugguggacauucuggaugugcu

SEQ ID NO: 193425 - RNA, 22 nt, Human
gacugguaagguauuggaauuc

SEQ ID NO: 193426 - RNA, 22 nt, Human
ugcuucucuuuauuuguagguu

SEQ ID NO: 193427 - RNA, 22 nt, Human
ucucugagcccagugucccccu

SEQ ID NO: 193428 - RNA, 22 nt, Human
uauuucccagggagcaacaagc

SEQ ID NO: 193429 - RNA, 21 nt, Human
caaauagacauggcuagagga

SEQ ID NO: 193430 - RNA, 20 nt, Human
gaaauucucguauuaguuua

SEQ ID NO: 193431 - RNA, 17 nt, Human
uccaugagacaugaaga

SEQ ID NO: 193432 - RNA, 22 nt, Human
acagcagcaauagcagugacau

SEQ ID NO: 193433 - RNA, 19 nt, Human
auucagcauucugcacuuc

SEQ ID NO: 193434 - RNA, 22 nt, Human
uaucaugaucagcaacuaauca

SEQ ID NO: 193435 - RNA, 22 nt, Human
gucaaauaauuuucucaauagu

SEQ ID NO: 193436 - RNA, 22 nt, Human
acauuuaaguuaaaaccucagu

SEQ ID NO: 193437 - RNA, 22 nt, Human
ucagggagagugacccauccac

SEQ ID NO: 193438 - RNA, 22 nt, Human
gggacaggccccucgcuagcuu

SEQ ID NO: 193439 - RNA, 22 nt, Human
cuucucagcaugguuacuguga

SEQ ID NO: 193440 - RNA, 22 nt, Human
aggcaacuugcaucucggcaag

SEQ ID NO: 193441 - RNA, 22 nt, Human
agcagguguagggcucuuugua

SEQ ID NO: 193442 - RNA, 22 nt, Human
agaagccauucccuguaggcuc

SEQ ID NO: 193443 - RNA, 22 nt, Human
acauuucuuugcuagacagcag

SEQ ID NO: 193444 - RNA, 22 nt, Human
ucucagagggaggauuacugcc

SEQ ID NO: 193445 - RNA, 22 nt, Human
gucuagaauaucuagaaagauc

SEQ ID NO: 193446 - RNA, 22 nt, Human
uauguacagggauagaacuuga

SEQ ID NO: 193447 - RNA, 22 nt, Human
uacaccaguaucuuaagcauga

SEQ ID NO: 193448 - RNA, 22 nt, Human
uuugaagaccuuaucucuaaau

SEQ ID NO: 193449 - RNA, 22 nt, Human
uggcuucauucagcaugacagu

SEQ ID NO: 193450 - RNA, 22 nt, Human
uauaucagaguuaaaagaaugu

SEQ ID NO: 193451 - RNA, 22 nt, Human
auacacuuuagaaaaacgcugc

SEQ ID NO: 193452 - RNA, 17 nt, Human
ugauucaacuagaaacu

SEQ ID NO: 193453 - RNA, 22 nt, Human
acccaggccugagagacaggag

SEQ ID NO: 193454 - RNA, 19 nt, Human
acauguuuugcagaacagc

SEQ ID NO: 193455 - RNA, 22 nt, Human
aacagcugucugccuaucucug

SEQ ID NO: 193456 - RNA, 22 nt, Human
ggcagcuucucccaggcuguuu

SEQ ID NO: 193457 - RNA, 22 nt, Human
cagagcauuaaaaccagcucug

SEQ ID NO: 193458 - RNA, 22 nt, Human
aaagaggauggaguagucagcu

SEQ ID NO: 193459 - RNA, 22 nt, Human
cagcuacacuucuggguguguc

SEQ ID NO: 193460 - RNA, 22 nt, Human
uccuucuggaggcuguaaagga

SEQ ID NO: 193461 - RNA, 22 nt, Human
ucacuggcaacuugugcucccu

SEQ ID NO: 193462 - RNA, 22 nt, Human
ugauuagacaaaggaaucaugc

SEQ ID NO: 193463 - RNA, 22 nt, Human
aggagccagaauccagacucgg

SEQ ID NO: 193464 - RNA, 22 nt, Human
cccugggauaccagacaccaga

SEQ ID NO: 193465 - RNA, 22 nt, Human
aaccagcuccagccuccauuca

SEQ ID NO: 193466 - RNA, 19 nt, Human
ucucagagcccuagaggcc

SEQ ID NO: 193467 - RNA, 22 nt, Human
gccaggaaaaacguggugggag

SEQ ID NO: 193468 - RNA, 22 nt, Human
uccuccagugguacuggccaau

SEQ ID NO: 193469 - RNA, 22 nt, Human
ugcccuggugaagugcucuccu

SEQ ID NO: 193470 - RNA, 18 nt, Human
uacaaacuccuugaaggc

SEQ ID NO: 193471 - RNA, 22 nt, Human
ucccagagcagaugugcuaaag

SEQ ID NO: 193472 - RNA, 22 nt, Human
ucagugugaguaccaugcucag

SEQ ID NO: 193473 - RNA, 22 nt, Human
acccuggggguggccagugcca

SEQ ID NO: 193474 - RNA, 22 nt, Human
acaugaaguggucagaucaaac

SEQ ID NO: 193475 - RNA, 22 nt, Human
acccugggacuuccgaguugag

SEQ ID NO: 193476 - RNA, 22 nt, Human
gcuuugcugaggucugaggauu

SEQ ID NO: 193477 - RNA, 22 nt, Human
caaaccuuguuccagucaacuc

SEQ ID NO: 193478 - RNA, 22 nt, Human
agggccugagcuggcugaccuc

SEQ ID NO: 193479 - RNA, 22 nt, Human
augacagaggagugcaggugau

SEQ ID NO: 193480 - RNA, 21 nt, Human
aagagcuggaucaaggauaag

SEQ ID NO: 193481 - RNA, 22 nt, Human
cuaauacacccuauugcuuguu

SEQ ID NO: 193482 - RNA, 23 nt, Human
augggcuuagaaagcaaguggga

SEQ ID NO: 193483 - RNA, 22 nt, Human
uucacacugucccggguggaaa

SEQ ID NO: 193484 - RNA, 22 nt, Human
cagccuucaaggcuuagcucag

SEQ ID NO: 193485 - RNA, 19 nt, Human
uccagcccuguucccuuuu

SEQ ID NO: 193486 - RNA, 23 nt, Human
gagaccagggccagcugugucau

SEQ ID NO: 193487 - RNA, 22 nt, Human
aguggcugucuuccaaaaucug

SEQ ID NO: 193488 - RNA, 22 nt, Human
ggaguggccucuccugugcagg

SEQ ID NO: 193489 - RNA, 22 nt, Human
uaggaaauuuuacuggucuggg

SEQ ID NO: 193490 - RNA, 22 nt, Human
cacauacauacguauguauaca

SEQ ID NO: 193491 - RNA, 22 nt, Human
agauguuaucauucagaguagc

SEQ ID NO: 193492 - RNA, 22 nt, Human
auuaaauuagcaaacugugaaa

SEQ ID NO: 193493 - RNA, 22 nt, Human
ugauguguggcaguuaaacugu

SEQ ID NO: 193494 - RNA, 22 nt, Human
gcuggaggauggacuggaagaa

SEQ ID NO: 193495 - RNA, 23 nt, Human
ucuguucaaggcuuucuccuuga

SEQ ID NO: 193496 - RNA, 22 nt, Human
cagcucaggcacuggcgcggga

SEQ ID NO: 193497 - RNA, 22 nt, Human
cugggggccuuacggaacucca

SEQ ID NO: 193498 - RNA, 22 nt, Human
cagcugcugauggccugacaga

SEQ ID NO: 193499 - RNA, 22 nt, Human
cacagugcgaaagaaacccagc

SEQ ID NO: 193500 - RNA, 22 nt, Human
ggcagccagagggcagcuggau

SEQ ID NO: 193501 - RNA, 22 nt, Human
ugggggcauggaccagccuggc

SEQ ID NO: 193502 - RNA, 23 nt, Human
aggcagugggggccacuuugcuu

SEQ ID NO: 193503 - RNA, 22 nt, Human
aaauuuaaggaggugcucacuu

SEQ ID NO: 193504 - RNA, 22 nt, Human
aacuuugcuugggucaaacuca

SEQ ID NO: 193505 - RNA, 22 nt, Human
ggcugagccaugggcacugcag

SEQ ID NO: 193506 - RNA, 22 nt, Human
uuuaggaaauacuguccuauga

SEQ ID NO: 193507 - RNA, 22 nt, Human
accagaaaggaugccuccuucc

SEQ ID NO: 193508 - RNA, 22 nt, Human
cuguuauuucugccaggugagu

SEQ ID NO: 193509 - RNA, 22 nt, Human
guuuacuguuuucugauaagug

SEQ ID NO: 193510 - RNA, 22 nt, Human
acccuggguucccgcagcacca

SEQ ID NO: 193511 - RNA, 22 nt, Human
cuucuuucaagaauggauuagg

SEQ ID NO: 193512 - RNA, 22 nt, Human
uucagauaucauuaauuuagua

SEQ ID NO: 193513 - RNA, 22 nt, Human
ucugcaccccgcagggucaggu

SEQ ID NO: 193514 - RNA, 22 nt, Human
uuucauuucauagaauuguguu

SEQ ID NO: 193515 - RNA, 22 nt, Human
agcuuuggagcugggugaaaga

SEQ ID NO: 193516 - RNA, 22 nt, Human
aaacucuauaggcagaagcaau

SEQ ID NO: 193517 - RNA, 22 nt, Human
uggcugagugaacauguccauu

SEQ ID NO: 193518 - RNA, 22 nt, Human
ccacugcuccugaccaagguca

SEQ ID NO: 193519 - RNA, 22 nt, Human
ugcuuuauuuauaaaauagcaa

SEQ ID NO: 193520 - RNA, 21 nt, Human
ucauccagguccugcuucuuc

SEQ ID NO: 193521 - RNA, 22 nt, Human
uagaggagcggcgagcugagcu

SEQ ID NO: 193522 - RNA, 22 nt, Human
gcacagagcuggcccuccaggc

SEQ ID NO: 193523 - RNA, 22 nt, Human
aaagguuuucaucacagcaaga

SEQ ID NO: 193524 - RNA, 22 nt, Human
uggagagcgugcuuagcacucu

SEQ ID NO: 193525 - RNA, 22 nt, Human
uguaggccuauguccagcaauu

SEQ ID NO: 193526 - RNA, 22 nt, Human
uagaagcacugacagaguuuga

SEQ ID NO: 193527 - RNA, 18 nt, Human
uggcucagauggcuuuaa

SEQ ID NO: 193528 - RNA, 22 nt, Human
guuuuccuguugaguaguauuc

SEQ ID NO: 193529 - RNA, 19 nt, Human
gggcucucgagcaaccaac

SEQ ID NO: 193530 - RNA, 18 nt, Human
gccuuugcacaagcagcu

SEQ ID NO: 193531 - RNA, 22 nt, Human
uccuguggggaaaagccuaucu

SEQ ID NO: 193532 - RNA, 22 nt, Human
ggagggggaauucagccccagc

SEQ ID NO: 193533 - RNA, 22 nt, Human
agguuccucuuccucuggccug

SEQ ID NO: 193534 - RNA, 22 nt, Human
guuuccugacccuggcccagca

SEQ ID NO: 193535 - RNA, 22 nt, Human
ugcaggagauaauggugcuuag

SEQ ID NO: 193536 - RNA, 22 nt, Human
cugggccucauccagccacaac

SEQ ID NO: 193537 - RNA, 22 nt, Human
ucugcagcccaaagucucuuag

SEQ ID NO: 193538 - RNA, 22 nt, Human
ucugugcaaguauuugacauuu

SEQ ID NO: 193539 - RNA, 22 nt, Human
acagaauagucagcuguaggcc

SEQ ID NO: 193540 - RNA, 22 nt, Human
ugcuggcuuggaaggaaagcgc

SEQ ID NO: 193541 - RNA, 22 nt, Human
gcagcaggucugucaaugucau

SEQ ID NO: 193542 - RNA, 22 nt, Human
ggagagcugguauaugaagaca

SEQ ID NO: 193543 - RNA, 22 nt, Human
uacugucuauacacuugauuac

SEQ ID NO: 193544 - RNA, 22 nt, Human
uagcaucagccacaccuuguac

SEQ ID NO: 193545 - RNA, 22 nt, Human
uugagcucccgcuucuucuuug

SEQ ID NO: 193546 - RNA, 22 nt, Human
accagcuccaggccccugcugg

SEQ ID NO: 193547 - RNA, 22 nt, Human
cccagccugucuuucccaauga

SEQ ID NO: 193548 - RNA, 22 nt, Human
uccuccaggauaaaauguguug

SEQ ID NO: 193549 - RNA, 19 nt, Human
aaggugguuugucucugua

SEQ ID NO: 193550 - RNA, 22 nt, Human
gucucaguuuuccaaacuguca

SEQ ID NO: 193551 - RNA, 22 nt, Human
aggaccugcuaaugugccaagu

SEQ ID NO: 193552 - RNA, 21 nt, Human
acauuuucuguuuuaggaagu

SEQ ID NO: 193553 - RNA, 22 nt, Human
uccagcauauauagagaaugag

SEQ ID NO: 193554 - RNA, 22 nt, Human
uccaggcugauccaugaagaau

SEQ ID NO: 193555 - RNA, 19 nt, Human
ugagacugggugcaguacu

SEQ ID NO: 193556 - RNA, 22 nt, Human
gguggcagagaggagguaguuu

SEQ ID NO: 193557 - RNA, 22 nt, Human
cugcaucuguuagauuaucacc

SEQ ID NO: 193558 - RNA, 22 nt, Human
gagcugaacgggaauuccccga

SEQ ID NO: 193559 - RNA, 22 nt, Human
gagaggcuggguuggagaucga

SEQ ID NO: 193560 - RNA, 22 nt, Human
accagaaggaccagaggcaagg

SEQ ID NO: 193561 - RNA, 22 nt, Human
uuguauucuuccuuagcaguac

SEQ ID NO: 193562 - RNA, 22 nt, Human
uacaaagcuuguacugugugac

SEQ ID NO: 193563 - RNA, 22 nt, Human
acagaaagaagguguauuugag

SEQ ID NO: 193564 - RNA, 22 nt, Human
gggcccaggccuccuuccuucc

SEQ ID NO: 193565 - RNA, 22 nt, Human
aauuaaaagauaacccaugagu

SEQ ID NO: 193566 - RNA, 22 nt, Human
uuugcaaugguaguuguugcuc

SEQ ID NO: 193567 - RNA, 22 nt, Human
gaucuucuauguaaugaagugu

SEQ ID NO: 193568 - RNA, 22 nt, Human
cagaucaagcuguauggucaga

SEQ ID NO: 193569 - RNA, 22 nt, Human
aggaagaauguuuacauaucaa

SEQ ID NO: 193570 - RNA, 22 nt, Human
gcugggucuggcugugagccgg

SEQ ID NO: 193571 - RNA, 22 nt, Human
acaguuugaauaauuuagauag

SEQ ID NO: 193572 - RNA, 22 nt, Human
agggccaaguccaggaccucgg

SEQ ID NO: 193573 - RNA, 22 nt, Human
agcuggccauugugaguggccu

SEQ ID NO: 193574 - RNA, 22 nt, Human
aggcgugggaggaucugaggcc

SEQ ID NO: 193575 - RNA, 22 nt, Human
cccugcagagagugcuuuugug

SEQ ID NO: 193576 - RNA, 22 nt, Human
ucacuuauugcucaucucaugc

SEQ ID NO: 193577 - RNA, 22 nt, Human
acauugaugugaugcagaagug

SEQ ID NO: 193578 - RNA, 22 nt, Human
agagccagcauuugacacuggc

SEQ ID NO: 193579 - RNA, 22 nt, Human
aggcuggcuggcaggggacaca

SEQ ID NO: 193580 - RNA, 19 nt, Human
aauggacaggcaauagucu

SEQ ID NO: 193581 - RNA, 22 nt, Human
ucugugucugcagaaguucagc

SEQ ID NO: 193582 - RNA, 22 nt, Human
agaaagagcucgggauuaacag

SEQ ID NO: 193583 - RNA, 20 nt, Human
agcccuguaaauccccugga

SEQ ID NO: 193584 - RNA, 19 nt, Human
agcagguggguaagaaaau

SEQ ID NO: 193585 - RNA, 22 nt, Human
aucuagaggcaaugaaggaggu

SEQ ID NO: 193586 - RNA, 22 nt, Human
aggcugugcauuuuggagggcc

SEQ ID NO: 193587 - RNA, 22 nt, Human
aauugcuuguuuucggucauaa

SEQ ID NO: 193588 - RNA, 22 nt, Human
caggugguacuuaaagucagaa

SEQ ID NO: 193589 - RNA, 22 nt, Human
gggcccaguacccucugccaag

SEQ ID NO: 193590 - RNA, 22 nt, Human
agagacuucugccuuagcaaga

SEQ ID NO: 193591 - RNA, 22 nt, Human
uaggugucuggacaacuuugua

SEQ ID NO: 193592 - RNA, 22 nt, Human
gcugcucugaaaaugacuguug

SEQ ID NO: 193593 - RNA, 22 nt, Human
uccucagaagaaccccuagauu

SEQ ID NO: 193594 - RNA, 22 nt, Human
cuagggucaggggccugcgucg

SEQ ID NO: 193595 - RNA, 22 nt, Human
aucuccagcuggcugugauaaa

SEQ ID NO: 193596 - RNA, 22 nt, Human
ugacuuccagcaacuuccucca

SEQ ID NO: 193597 - RNA, 22 nt, Human
caaugacauggauaaucauauu

SEQ ID NO: 193598 - RNA, 22 nt, Human
uagcuaucuguguccagaucca

SEQ ID NO: 193599 - RNA, 20 nt, Human
gggagaagggcugaugagag

SEQ ID NO: 193600 - RNA, 22 nt, Human
ccucugggaagccaguccugcu

SEQ ID NO: 193601 - RNA, 22 nt, Human
aacuggaaccuuuuauucaguc

SEQ ID NO: 193602 - RNA, 22 nt, Human
gccagaggggcucgaaggcgcg

SEQ ID NO: 193603 - RNA, 22 nt, Human
gcuccugugcaggucucgguug

SEQ ID NO: 193604 - RNA, 22 nt, Human
uggagcagcuaagccucugaga

SEQ ID NO: 193605 - RNA, 22 nt, Human
ugggccugggagggcagacgcu

SEQ ID NO: 193606 - RNA, 22 nt, Human
ucucaggagccacagcgggagu

SEQ ID NO: 193607 - RNA, 22 nt, Human
auucgcacauuaacacucauau

SEQ ID NO: 193608 - RNA, 22 nt, Human
ggcccagaauacuuuguaaaau

SEQ ID NO: 193609 - RNA, 22 nt, Human
aagugcaaauuuaagaaggcau

SEQ ID NO: 193610 - RNA, 22 nt, Human
cccugggagcugccuggcugac

SEQ ID NO: 193611 - RNA, 22 nt, Human
uuauguuuuaaguguguaucuu

SEQ ID NO: 193612 - RNA, 22 nt, Human
gccacugugguccucccaugau

SEQ ID NO: 193613 - RNA, 22 nt, Human
auucauguaaaauuggauagac

SEQ ID NO: 193614 - RNA, 22 nt, Human
auuugcuuuuacuauguuaaaa

SEQ ID NO: 193615 - RNA, 22 nt, Human
ucugguaauaggcaauagcuug

SEQ ID NO: 193616 - RNA, 22 nt, Human
gcccuggauguacaggcauguu

SEQ ID NO: 193617 - RNA, 22 nt, Human
agcugcaagucuguguggggag

SEQ ID NO: 193618 - RNA, 22 nt, Human
ucuggcaguugccgcuucaguc

SEQ ID NO: 193619 - RNA, 22 nt, Human
ggacccagaggggagucuggca

SEQ ID NO: 193620 - RNA, 22 nt, Human
aggagcagaacuguuguggagg

SEQ ID NO: 193621 - RNA, 22 nt, Human
ugcugugcuccauugucuucac

SEQ ID NO: 193622 - RNA, 20 nt, Human
uguugauuggugucaucuca

SEQ ID NO: 193623 - RNA, 22 nt, Human
agucacugcuuugucccugugu

SEQ ID NO: 193624 - RNA, 22 nt, Human
aaggugguucgcugguacccag

SEQ ID NO: 193625 - RNA, 22 nt, Human
uguuuacuaugauguaaccuau

SEQ ID NO: 193626 - RNA, 22 nt, Human
gcuggccagggcugcucgcgga

SEQ ID NO: 193627 - RNA, 22 nt, Human
ugggagcaggcugaugauaggu

SEQ ID NO: 193628 - RNA, 22 nt, Human
agagccuuuggagcugcuauua

SEQ ID NO: 193629 - RNA, 22 nt, Human
caggcuggagugcaauggugcu

SEQ ID NO: 193630 - RNA, 22 nt, Human
ugagggcuaaauuguggcaggu

SEQ ID NO: 193631 - RNA, 22 nt, Human
uacacauuacauaauacuaucu

SEQ ID NO: 193632 - RNA, 22 nt, Human
gaggcuguuaggagggacucug

SEQ ID NO: 193633 - RNA, 21 nt, Human
agcugggccucagccugcagu

SEQ ID NO: 193634 - RNA, 22 nt, Human
uucaaaguccugucagguagcc

SEQ ID NO: 193635 - RNA, 22 nt, Human
aaagacacaaauguagaccaaa

SEQ ID NO: 193636 - RNA, 22 nt, Human
uaaaaaguagugagaauggcgc

SEQ ID NO: 193637 - RNA, 22 nt, Human
aacaucagaauauccauguugg

SEQ ID NO: 193638 - RNA, 22 nt, Human
gaaaggaaauauucuaagcacu

SEQ ID NO: 193639 - RNA, 17 nt, Human
aauugcuuguacuccca

SEQ ID NO: 193640 - RNA, 22 nt, Human
uuauaagcucugaaaucuccua

SEQ ID NO: 193641 - RNA, 22 nt, Human
uacagauauuguacaguuauag

SEQ ID NO: 193642 - RNA, 22 nt, Human
agccucuuauucuccaggacuu

SEQ ID NO: 193643 - RNA, 22 nt, Human
gaggcucagggaguauaugaau

SEQ ID NO: 193644 - RNA, 22 nt, Human
uuuguguuuucacuagcagugu

SEQ ID NO: 193645 - RNA, 22 nt, Human
ucuggcuguguaagguagcacc

SEQ ID NO: 193646 - RNA, 22 nt, Human
gggucucucagaaggcugcaau

SEQ ID NO: 193647 - RNA, 22 nt, Human
ugaaauacugagugaaagaauu

SEQ ID NO: 193648 - RNA, 22 nt, Human
guccuggcaccucacuggcuac

SEQ ID NO: 193649 - RNA, 22 nt, Human
caggacugaagggcacagggaa

SEQ ID NO: 193650 - RNA, 22 nt, Human
uccuccagcuacuaggcaaaua

SEQ ID NO: 193651 - RNA, 20 nt, Human
caugguggaggagcagggcc

SEQ ID NO: 193652 - RNA, 20 nt, Human
uuugacauauacaguucagg

SEQ ID NO: 193653 - RNA, 22 nt, Human
aaugcuuuaauugcauguagug

SEQ ID NO: 193654 - RNA, 22 nt, Human
uagaacuaagaguuaucauuua

SEQ ID NO: 193655 - RNA, 22 nt, Human
gggcuuggcucauaaguggaug

SEQ ID NO: 193656 - RNA, 22 nt, Human
uuagaaucuuguaucagaaguu

SEQ ID NO: 193657 - RNA, 22 nt, Human
uuccaggagacuuccagaaaua

SEQ ID NO: 193658 - RNA, 22 nt, Human
cuucaagagaaugcagggaugu

SEQ ID NO: 193659 - RNA, 22 nt, Human
gaggcucuucaauaggucaaug

SEQ ID NO: 193660 - RNA, 22 nt, Human
cuccccgagagagguuguccgc

SEQ ID NO: 193661 - RNA, 22 nt, Human
cacacagaugguaagggaggga

SEQ ID NO: 193662 - RNA, 22 nt, Human
cucucagaaguagcacgugggc

SEQ ID NO: 193663 - RNA, 22 nt, Human
uucaacaauuaaguaucagccu

SEQ ID NO: 193664 - RNA, 22 nt, Human
auagaaauguauuuuggacuag

SEQ ID NO: 193665 - RNA, 22 nt, Human
cugaaauucugccucugcacaa

SEQ ID NO: 193666 - RNA, 22 nt, Human
ucaugcaucugggcuggcuggu

SEQ ID NO: 193667 - RNA, 22 nt, Human
aaacaugaauagauauuaaaca

SEQ ID NO: 193668 - RNA, 22 nt, Human
uacugaaacucuuguaaauauc

SEQ ID NO: 193669 - RNA, 22 nt, Human
ucuuccugcuuuggugaggcuu

SEQ ID NO: 193670 - RNA, 22 nt, Human
agaggccaagccagacugugca

SEQ ID NO: 193671 - RNA, 22 nt, Human
uauguuacaaaguuuuucuaaa

SEQ ID NO: 193672 - RNA, 22 nt, Human
auacauauaugguacuuccugg

SEQ ID NO: 193673 - RNA, 22 nt, Human
uucaauaucucuaagaaugagg

SEQ ID NO: 193674 - RNA, 22 nt, Human
cugugagggucacagccaugcc

SEQ ID NO: 193675 - RNA, 22 nt, Human
cucacagguuaguuguguggau

SEQ ID NO: 193676 - RNA, 22 nt, Human
ugacauguauaucuuacgcuau

SEQ ID NO: 193677 - RNA, 22 nt, Human
aucuuuagugugaauuuauuga

SEQ ID NO: 193678 - RNA, 22 nt, Human
ucuuagaaguuuauggcacgga

SEQ ID NO: 193679 - RNA, 22 nt, Human
cuggacaggcuggggacugcaa

SEQ ID NO: 193680 - RNA, 22 nt, Human
agcagugugggcugcacgcugg

SEQ ID NO: 193681 - RNA, 20 nt, Human
uuugcuguggguguaagaau

SEQ ID NO: 193682 - RNA, 22 nt, Human
cugggucaaggaaugcuggugg

SEQ ID NO: 193683 - RNA, 22 nt, Human
cugcccagaagccagaugggca

SEQ ID NO: 193684 - RNA, 22 nt, Human
ugucugggucaccccuccuggc

SEQ ID NO: 193685 - RNA, 22 nt, Human
cagggagggacaauugucaccu

SEQ ID NO: 193686 - RNA, 22 nt, Human
uggugagauaacuuucggcaag

SEQ ID NO: 193687 - RNA, 22 nt, Human
gugcccaguccugccuugacag

SEQ ID NO: 193688 - RNA, 22 nt, Human
agaaaucacuuagaggaaguga

SEQ ID NO: 193689 - RNA, 22 nt, Human
ugagucuucugccuaaagaagu

SEQ ID NO: 193690 - RNA, 22 nt, Human
gcuuccaaaucuguucaaaaug

SEQ ID NO: 193691 - RNA, 22 nt, Human
auacaucuagagucauaaaaac

SEQ ID NO: 193692 - RNA, 22 nt, Human
gcaaaggcuagagacacaggga

SEQ ID NO: 193693 - RNA, 22 nt, Human
uggauugauaaaaugggauguu

SEQ ID NO: 193694 - RNA, 22 nt, Human
uccuggguuaauuaugauucac

SEQ ID NO: 193695 - RNA, 22 nt, Human
gggagccacaguagcagcuacu

SEQ ID NO: 193696 - RNA, 22 nt, Human
gccauugagauugaaguaagca

SEQ ID NO: 193697 - RNA, 22 nt, Human
agaauaaaugcuaccuaucaca

SEQ ID NO: 193698 - RNA, 22 nt, Human
gccaaaggauucuauggagaua

SEQ ID NO: 193699 - RNA, 22 nt, Human
uuccuaaucacgaacauuauuu

SEQ ID NO: 193700 - RNA, 22 nt, Human
ucuucaaauacagucauauuga

SEQ ID NO: 193701 - RNA, 22 nt, Human
aaaugcuguagaucagugaguu

SEQ ID NO: 193702 - RNA, 22 nt, Human
agacauauauugcaauucacug

SEQ ID NO: 193703 - RNA, 22 nt, Human
uacuguuagagccagaaaccua

SEQ ID NO: 193704 - RNA, 18 nt, Human
agcagguucucacagcca

SEQ ID NO: 193705 - RNA, 21 nt, Human
ugaaugaugccccagaguugu

SEQ ID NO: 193706 - RNA, 22 nt, Human
uguuauugagguuacuuauaag

SEQ ID NO: 193707 - RNA, 18 nt, Human
cuccccagcugcccccag

SEQ ID NO: 193708 - RNA, 22 nt, Human
ugaguagagaauucagcuaagg

SEQ ID NO: 193709 - RNA, 22 nt, Human
aacagcugcaaaagguugccug

SEQ ID NO: 193710 - RNA, 22 nt, Human
ucccagugagaugaaacaggua

SEQ ID NO: 193711 - RNA, 22 nt, Human
cugaggagagaucacguggugu

SEQ ID NO: 193712 - RNA, 22 nt, Human
acaguaaaacauuuuuauuagg

SEQ ID NO: 193713 - RNA, 22 nt, Human
cagucccuaguggagcucacag

SEQ ID NO: 193714 - RNA, 22 nt, Human
cuggcucaguucuugguuuuca

SEQ ID NO: 193715 - RNA, 22 nt, Human
uucacagugagcuaugucuugu

SEQ ID NO: 193716 - RNA, 22 nt, Human
gugcagagugucuguggacuga

SEQ ID NO: 193717 - RNA, 22 nt, Human
ugggcugcggauaggccucgga

SEQ ID NO: 193718 - RNA, 22 nt, Human
cagugggacaugggcacugggc

SEQ ID NO: 193719 - RNA, 22 nt, Human
uaguacuacguuuucuacuauc

SEQ ID NO: 193720 - RNA, 22 nt, Human
uaaggagguugguggguuggau

SEQ ID NO: 193721 - RNA, 22 nt, Human
agucagaguuuugaggugugac

SEQ ID NO: 193722 - RNA, 22 nt, Human
cugaggcuuugugugcaugccu

SEQ ID NO: 193723 - RNA, 22 nt, Human
ugaaaucuuauacuuugguagu

SEQ ID NO: 193724 - RNA, 22 nt, Human
acaggauuaauaaaaaauugua

SEQ ID NO: 193725 - RNA, 22 nt, Human
ugacagagcauguagugacagc

SEQ ID NO: 193726 - RNA, 22 nt, Human
gggcugcuacgagaacugaaua

SEQ ID NO: 193727 - RNA, 22 nt, Human
ugcaggaguccaaucaggagac

SEQ ID NO: 193728 - RNA, 22 nt, Human
gccugggacccuuagcucuugg

SEQ ID NO: 193729 - RNA, 22 nt, Human
ccagaggucuccugcacgggau

SEQ ID NO: 193730 - RNA, 20 nt, Human
uccaggcccacucagcugaa

SEQ ID NO: 193731 - RNA, 21 nt, Human
gucuuucuaccucuauguggc

SEQ ID NO: 193732 - RNA, 22 nt, Human
uaggaagaucaaguuuaucuca

SEQ ID NO: 193733 - RNA, 22 nt, Human
gacaagacugguuuauuuaagg

SEQ ID NO: 193734 - RNA, 22 nt, Human
ugaaagauaaguuauuauguac

SEQ ID NO: 193735 - RNA, 22 nt, Human
uuccuucuagcccaaguauugg

SEQ ID NO: 193736 - RNA, 22 nt, Human
aggcacugacaauucuggacug

SEQ ID NO: 193737 - RNA, 22 nt, Human
agggacaguauccaucucacag

SEQ ID NO: 193738 - RNA, 22 nt, Human
gcaggaguaugcagcuaugguu

SEQ ID NO: 193739 - RNA, 22 nt, Human
aagaacagauucagccugaacu

SEQ ID NO: 193740 - RNA, 22 nt, Human
gugcagcuuccuggucucagcc

SEQ ID NO: 193741 - RNA, 22 nt, Human
ggcugccuccugcugggcugga

SEQ ID NO: 193742 - RNA, 22 nt, Human
gacauaaaauggaauucuguug

SEQ ID NO: 193743 - RNA, 17 nt, Human
uuaucuacugcuacugu

SEQ ID NO: 193744 - RNA, 22 nt, Human
ggcuguggucucaucuagccuu

SEQ ID NO: 193745 - RNA, 22 nt, Human
uuaucagaguccccaaaagaaa

SEQ ID NO: 193746 - RNA, 22 nt, Human
cugggcucugcggugucgcucu

SEQ ID NO: 193747 - RNA, 22 nt, Human
cuggaggagaacuugaggaagg

SEQ ID NO: 193748 - RNA, 22 nt, Human
aauucacugaacuucucugaga

SEQ ID NO: 193749 - RNA, 22 nt, Human
agcuaaaugugaaaugucaacc

SEQ ID NO: 193750 - RNA, 22 nt, Human
ggagcagccacgucucagggca

SEQ ID NO: 193751 - RNA, 22 nt, Human
uuuaaagugcugcuccuauccu

SEQ ID NO: 193752 - RNA, 22 nt, Human
aucaaaucauugcauuaauguu

SEQ ID NO: 193753 - RNA, 22 nt, Human
gauacagcucuggccagaugug

SEQ ID NO: 193754 - RNA, 22 nt, Human
caggcucagcaggagccugacc

SEQ ID NO: 193755 - RNA, 22 nt, Human
cucugggucucccugaggcuaa

SEQ ID NO: 193756 - RNA, 22 nt, Human
uucugcauguguuucaaauacu

SEQ ID NO: 193757 - RNA, 22 nt, Human
cuuuggaggaaaauugagguca

SEQ ID NO: 193758 - RNA, 22 nt, Human
ggccucugcuuaugcugaugac

SEQ ID NO: 193759 - RNA, 22 nt, Human
cuccaggaccagggcuccugga

SEQ ID NO: 193760 - RNA, 22 nt, Human
agcacaguuucuuuuccuuguc

SEQ ID NO: 193761 - RNA, 22 nt, Human
accaggcagagcugggccuuaa

SEQ ID NO: 193762 - RNA, 22 nt, Human
auucaagguuuauucaguuuag

SEQ ID NO: 193763 - RNA, 22 nt, Human
agaggcugcacuugcucaugau

SEQ ID NO: 193764 - RNA, 22 nt, Human
gaggagggcuuuguugauguua

SEQ ID NO: 193765 - RNA, 23 nt, Human
uccuccugacacagccugaguga

SEQ ID NO: 193766 - RNA, 22 nt, Human
aggcagugagugugacuucaca

SEQ ID NO: 193767 - RNA, 22 nt, Human
gucucuaucauagcugaacccu

SEQ ID NO: 193768 - RNA, 22 nt, Human
cuucucuuggguguggugucuu

SEQ ID NO: 193769 - RNA, 22 nt, Human
uuccuucuuguaaugaucugcc

SEQ ID NO: 193770 - RNA, 22 nt, Human
ccaggccuggccaggggaugcc

SEQ ID NO: 193771 - RNA, 22 nt, Human
uauuauugcaaguauauaaagu

SEQ ID NO: 193772 - RNA, 22 nt, Human
agggaaaggcugaugcuguggg

SEQ ID NO: 193773 - RNA, 22 nt, Human
auagcaagguaugacuggagcc

SEQ ID NO: 193774 - RNA, 19 nt, Human
agcaauuaagacugugggc

SEQ ID NO: 193775 - RNA, 22 nt, Human
cccugcagugugaccucaccua

SEQ ID NO: 193776 - RNA, 22 nt, Human
uuccuucucuguggggaaggca

SEQ ID NO: 193777 - RNA, 22 nt, Human
agcagcagugugguuuggggaa

SEQ ID NO: 193778 - RNA, 22 nt, Human
gguggccuccagggcauaggug

SEQ ID NO: 193779 - RNA, 22 nt, Human
agaagggcuacacgggcucucc

SEQ ID NO: 193780 - RNA, 22 nt, Human
ucugggagagggaaagaagacu

SEQ ID NO: 193781 - RNA, 19 nt, Human
uguacauauagagcucagu

SEQ ID NO: 193782 - RNA, 22 nt, Human
gaaagaaucaacuaugucucug

SEQ ID NO: 193783 - RNA, 22 nt, Human
augcuucugguauaagaaaaau

SEQ ID NO: 193784 - RNA, 21 nt, Human
agcaacucugacuagaugagg

SEQ ID NO: 193785 - RNA, 22 nt, Human
auuauaaaccuuugaggguggg

SEQ ID NO: 193786 - RNA, 18 nt, Human
gcuucucauuucuaagca

SEQ ID NO: 193787 - RNA, 22 nt, Human
ugucucugaaauauguggcucc

SEQ ID NO: 193788 - RNA, 22 nt, Human
cugaggcauguuacaggacaua

SEQ ID NO: 193789 - RNA, 22 nt, Human
cucaggagaugacagaagguau

SEQ ID NO: 193790 - RNA, 22 nt, Human
ucaaaggaaacacaagcuucug

SEQ ID NO: 193791 - RNA, 22 nt, Human
ccacugucuuuuccaggcugaa

SEQ ID NO: 193792 - RNA, 22 nt, Human
uuccuaaaagaauacacuggau

SEQ ID NO: 193793 - RNA, 22 nt, Human
uucugagguccaugcaguacug

SEQ ID NO: 193794 - RNA, 22 nt, Human
cagcccuuccuucuguuuauac

SEQ ID NO: 193795 - RNA, 22 nt, Human
cugccucugguuuuggucccug

SEQ ID NO: 193796 - RNA, 21 nt, Human
uagaggcaggagggacugcag

SEQ ID NO: 193797 - RNA, 22 nt, Human
uggagcuccacuggaaaaaugu

SEQ ID NO: 193798 - RNA, 22 nt, Human
uuuugcuuuuguaacacagugu

SEQ ID NO: 193799 - RNA, 22 nt, Human
ggcccagcuguauauuacaguu

SEQ ID NO: 193800 - RNA, 22 nt, Human
agucuucugaauaagaaucacu

SEQ ID NO: 193801 - RNA, 22 nt, Human
ugcagggccuugggaugugucc

SEQ ID NO: 193802 - RNA, 21 nt, Human
uggcucccuugaauugucugu

SEQ ID NO: 193803 - RNA, 22 nt, Human
aauagcuuuggucaccaucugg

SEQ ID NO: 193804 - RNA, 22 nt, Human
ugcuucucuguucuaacccuug

SEQ ID NO: 193805 - RNA, 22 nt, Human
aacauguugaguugaaaguagc

SEQ ID NO: 193806 - RNA, 22 nt, Human
gccccaggauaaauuuguaaga

SEQ ID NO: 193807 - RNA, 22 nt, Human
guuuuucuagacugggaguuug

SEQ ID NO: 193808 - RNA, 22 nt, Human
gggcaauuaaggucccguuucc

SEQ ID NO: 193809 - RNA, 23 nt, Human
aggcaguggugguaacaugucaa

SEQ ID NO: 193810 - RNA, 19 nt, Human
agguggucuaggcuggaga

SEQ ID NO: 193811 - RNA, 19 nt, Human
cugcucagagcagcuccag

SEQ ID NO: 193812 - RNA, 22 nt, Human
cucagggcggcgggcagcccag

SEQ ID NO: 193813 - RNA, 22 nt, Human
ccugccuugacguaacgcauga

SEQ ID NO: 193814 - RNA, 22 nt, Human
guggaugagauaacuguagaag

SEQ ID NO: 193815 - RNA, 22 nt, Human
cacauaaauggugccauguuuu

SEQ ID NO: 193816 - RNA, 20 nt, Human
ugggcucugcuuccuggagu

SEQ ID NO: 193817 - RNA, 22 nt, Human
ugacaagaaagcgucuucuuuu

SEQ ID NO: 193818 - RNA, 22 nt, Human
gcagcugucggaaagcuaagug

SEQ ID NO: 193819 - RNA, 22 nt, Human
ucuuuccacagcauguccaugc

SEQ ID NO: 193820 - RNA, 23 nt, Human
caugucugcuuucaugcuacaac

SEQ ID NO: 193821 - RNA, 22 nt, Human
uccaggaaucugugccuagccc

SEQ ID NO: 193822 - RNA, 22 nt, Human
gaggccauaagaaguucuuggg

SEQ ID NO: 193823 - RNA, 21 nt, Human
uuacauucagaggaguggaag

SEQ ID NO: 193824 - RNA, 22 nt, Human
aacagcagguccuggcaugggu

SEQ ID NO: 193825 - RNA, 20 nt, Human
ugucagcaauuaggagaaaa

SEQ ID NO: 193826 - RNA, 22 nt, Human
aggcucagcaucugauucauau

SEQ ID NO: 193827 - RNA, 22 nt, Human
gguucaguggaauguguugacc

SEQ ID NO: 193828 - RNA, 22 nt, Human
agggacccugaugacugaggag

SEQ ID NO: 193829 - RNA, 22 nt, Human
aucauaacuguaauucaucuac

SEQ ID NO: 193830 - RNA, 19 nt, Human
agcuggcacuagaauccag

SEQ ID NO: 193831 - RNA, 22 nt, Human
aggccaaguagccgcuguccua

SEQ ID NO: 193832 - RNA, 22 nt, Human
guuuccuauguccauugaggga

SEQ ID NO: 193833 - RNA, 19 nt, Human
ucuccaggcaggugagcga

SEQ ID NO: 193834 - RNA, 22 nt, Human
uucauguuucauuuguuacuau

SEQ ID NO: 193835 - RNA, 22 nt, Human
aagcacuuuaugucaauguccu

SEQ ID NO: 193836 - RNA, 22 nt, Human
gccaccauguagcccauuagag

SEQ ID NO: 193837 - RNA, 22 nt, Human
gacaauuagguuaagagcaaga

SEQ ID NO: 193838 - RNA, 18 nt, Human
acacugcagcagucugcu

SEQ ID NO: 193839 - RNA, 22 nt, Human
aaagccaaaugaaagaugguuc

SEQ ID NO: 193840 - RNA, 22 nt, Human
acaguaccugcucucaagcaaa

SEQ ID NO: 193841 - RNA, 22 nt, Human
agcccaaaccugcgagcagagc

SEQ ID NO: 193842 - RNA, 22 nt, Human
ugaggccagugacauauauuaa

SEQ ID NO: 193843 - RNA, 22 nt, Human
aggagacucagagaccuggccg

SEQ ID NO: 193844 - RNA, 22 nt, Human
uggcccugacagguccugggca

SEQ ID NO: 193845 - RNA, 22 nt, Human
guggucagagaugacagugggu

SEQ ID NO: 193846 - RNA, 22 nt, Human
uucuaguuuccauuuuaagaca

SEQ ID NO: 193847 - RNA, 22 nt, Human
aaacauuguuaugauaaauuac

SEQ ID NO: 193848 - RNA, 22 nt, Human
uggggcuagaauccugcaggaa

SEQ ID NO: 193849 - RNA, 22 nt, Human
auuuacugagcagcuaccaugu

SEQ ID NO: 193850 - RNA, 22 nt, Human
agagggcauaaaauagagcacg

SEQ ID NO: 193851 - RNA, 20 nt, Human
cucucuccaucucaguggcc

SEQ ID NO: 193852 - RNA, 22 nt, Human
uauccauuauguuggcuagucu

SEQ ID NO: 193853 - RNA, 19 nt, Human
accaggaacuucccuaggc

SEQ ID NO: 193854 - RNA, 22 nt, Human
ugggcaggauaauaucucaugu

SEQ ID NO: 193855 - RNA, 22 nt, Human
aacaugauggggaagaacaaga

SEQ ID NO: 193856 - RNA, 22 nt, Human
cgccugggaguccacaccugcu

SEQ ID NO: 193857 - RNA, 22 nt, Human
ugggcucauggcccagcacugg

SEQ ID NO: 193858 - RNA, 22 nt, Human
auagauauuagcaaaauuuuau

SEQ ID NO: 193859 - RNA, 22 nt, Human
guuuauaaauucugcuuuuguu

SEQ ID NO: 193860 - RNA, 22 nt, Human
aggcacagagaaugcccuccau

SEQ ID NO: 193861 - RNA, 22 nt, Human
ccugacaguuaauuguccugua

SEQ ID NO: 193862 - RNA, 22 nt, Human
ugagaagcccacacucuuuccu

SEQ ID NO: 193863 - RNA, 22 nt, Human
acaugccagcacugcuuuucag

SEQ ID NO: 193864 - RNA, 22 nt, Human
guauuaguuaucuacugcugug

SEQ ID NO: 193865 - RNA, 22 nt, Human
cugcccugcuucugagggaagc

SEQ ID NO: 193866 - RNA, 22 nt, Human
uaggcugaaaggagaggugaag

SEQ ID NO: 193867 - RNA, 22 nt, Human
gcuuucuugguucugcaggggc

SEQ ID NO: 193868 - RNA, 19 nt, Human
ugggugugaccaucucugc

SEQ ID NO: 193869 - RNA, 22 nt, Human
cucaggcugcccugacagcccc

SEQ ID NO: 193870 - RNA, 22 nt, Human
ggcuuugcuuuggcuguuucag

SEQ ID NO: 193871 - RNA, 22 nt, Human
aaacaugaguuaaaaguaacug

SEQ ID NO: 193872 - RNA, 22 nt, Human
ggcagcugagcauggcuaccuu

SEQ ID NO: 193873 - RNA, 22 nt, Human
aggcaucuauacauuauguuca

SEQ ID NO: 193874 - RNA, 22 nt, Human
gagaggaacucccagugccugg

SEQ ID NO: 193875 - RNA, 22 nt, Human
aauagaucugugugcacauuug

SEQ ID NO: 193876 - RNA, 22 nt, Human
gacaagacaccucucuccaucc

SEQ ID NO: 193877 - RNA, 18 nt, Human
agucuuuaaagauguuac

SEQ ID NO: 193878 - RNA, 22 nt, Human
gcugagcugaggcagggcuggg

SEQ ID NO: 193879 - RNA, 22 nt, Human
aaccagcucugcaaaaugucau

SEQ ID NO: 193880 - RNA, 22 nt, Human
augacuucguuuucucucugca

SEQ ID NO: 193881 - RNA, 22 nt, Human
accugccagaauccaagccaca

SEQ ID NO: 193882 - RNA, 22 nt, Human
ucacaugcccuaccuaaucuua

SEQ ID NO: 193883 - RNA, 22 nt, Human
gcuguggucccucuguccucau

SEQ ID NO: 193884 - RNA, 22 nt, Human
ucugaggguaagguuaagguag

SEQ ID NO: 193885 - RNA, 17 nt, Human
uucugggucccagggcc

SEQ ID NO: 193886 - RNA, 23 nt, Human
uguauuacagaugcaucagugau

SEQ ID NO: 193887 - RNA, 22 nt, Human
agcuccuccugagugucuggga

SEQ ID NO: 193888 - RNA, 22 nt, Human
aauucccacuauaugccaagca

SEQ ID NO: 193889 - RNA, 22 nt, Human
ucuggcucauacaagccugcaa

SEQ ID NO: 193890 - RNA, 22 nt, Human
uaugcauacaaugagauauucc

SEQ ID NO: 193891 - RNA, 22 nt, Human
agaaguaucaggaagauucuca

SEQ ID NO: 193892 - RNA, 22 nt, Human
ugacauuuuuaaaaccacuagu

SEQ ID NO: 193893 - RNA, 22 nt, Human
agggcugccccaguccagccgg

SEQ ID NO: 193894 - RNA, 22 nt, Human
uccugggccuguacuccauccg

SEQ ID NO: 193895 - RNA, 22 nt, Human
gagggcucacugagaaagcagu

SEQ ID NO: 193896 - RNA, 22 nt, Human
ucugccuuucccaggcuacugu

SEQ ID NO: 193897 - RNA, 22 nt, Human
gcagccaggaagccuuucccuc

SEQ ID NO: 193898 - RNA, 22 nt, Human
ccucagcuugauuucugcagag

SEQ ID NO: 193899 - RNA, 22 nt, Human
cuugggaaugcuaacagaugac

SEQ ID NO: 193900 - RNA, 22 nt, Human
aggcccagagagccaguuagug

SEQ ID NO: 193901 - RNA, 22 nt, Human
acacaguuuuucagacagagau

SEQ ID NO: 193902 - RNA, 22 nt, Human
uggcagggagccaccggucaug

SEQ ID NO: 193903 - RNA, 22 nt, Human
uggggcuaaacacgccuggccu

SEQ ID NO: 193904 - RNA, 22 nt, Human
aagugaauaaaauuguguucuu

SEQ ID NO: 193905 - RNA, 22 nt, Human
gcagagcacccugcagugguau

SEQ ID NO: 193906 - RNA, 23 nt, Human
uguguucucacacagaugcagua

SEQ ID NO: 193907 - RNA, 22 nt, Human
agggagcucuaaguagagggac

SEQ ID NO: 193908 - RNA, 22 nt, Human
aauuaggaauaaaugaguacuu

SEQ ID NO: 193909 - RNA, 22 nt, Human
auaacagagagcuacugaacug

SEQ ID NO: 193910 - RNA, 22 nt, Human
gcucagguguuaccuccucuag

SEQ ID NO: 193911 - RNA, 22 nt, Human
caagaacaguuugccaaauugg

SEQ ID NO: 193912 - RNA, 22 nt, Human
acacacaugguauuguucagaa

SEQ ID NO: 193913 - RNA, 22 nt, Human
agucagcugcagcagcuuuggu

SEQ ID NO: 193914 - RNA, 22 nt, Human
acagacugucccaccacaugga

SEQ ID NO: 193915 - RNA, 22 nt, Human
acccaggggcagccuugcugug

SEQ ID NO: 193916 - RNA, 22 nt, Human
auucuucauguugaagcuguca

SEQ ID NO: 193917 - RNA, 22 nt, Human
ucagguggcuuggagggggacg

SEQ ID NO: 193918 - RNA, 22 nt, Human
cagcagcagagauacugguuuc

SEQ ID NO: 193919 - RNA, 22 nt, Human
uccugagcuacaguaguaugau

SEQ ID NO: 193920 - RNA, 22 nt, Human
uuucagugaaagcuacuguuag

SEQ ID NO: 193921 - RNA, 22 nt, Human
auaguguuguauguacagucug

SEQ ID NO: 193922 - RNA, 22 nt, Human
gcaggcaccgcggcggcagguu

SEQ ID NO: 193923 - RNA, 22 nt, Human
ccaggguaccccaagggcaggu

SEQ ID NO: 193924 - RNA, 22 nt, Human
cugugggagcagcaccaaggac

SEQ ID NO: 193925 - RNA, 22 nt, Human
ucugaaauaacugaugccagau

SEQ ID NO: 193926 - RNA, 22 nt, Human
cugggcagugguggcccuuccc

SEQ ID NO: 193927 - RNA, 22 nt, Human
uggggcuccuccuggcaggagg

SEQ ID NO: 193928 - RNA, 22 nt, Human
aucugggccuguucccucaccu

SEQ ID NO: 193929 - RNA, 22 nt, Human
ggcaugggccgaggugccuccu

SEQ ID NO: 193930 - RNA, 22 nt, Human
cucaggauagauuguccucuca

SEQ ID NO: 193931 - RNA, 22 nt, Human
agugcaacuucacguagaguac

SEQ ID NO: 193932 - RNA, 22 nt, Human
cccaggcugugcaaacuucaaa

SEQ ID NO: 193933 - RNA, 22 nt, Human
caaggccagagccagcgauaag

SEQ ID NO: 193934 - RNA, 17 nt, Human
uuauugcuauaagcuga

SEQ ID NO: 193935 - RNA, 22 nt, Human
ggcugagaaggagugggugagg

SEQ ID NO: 193936 - RNA, 22 nt, Human
uuaauagauaugccucuagagu

SEQ ID NO: 193937 - RNA, 22 nt, Human
uaugaaaugguaguaggaaggg

SEQ ID NO: 193938 - RNA, 22 nt, Human
ugggggagccuucacaguagcu

SEQ ID NO: 193939 - RNA, 22 nt, Human
uugcuuauagagaguuucauac

SEQ ID NO: 193940 - RNA, 22 nt, Human
gaggucuugucugauagggaaa

SEQ ID NO: 193941 - RNA, 18 nt, Human
ucuuuguuuccuucuugc

SEQ ID NO: 193942 - RNA, 22 nt, Human
gagucuggaaugaugaagaccu

SEQ ID NO: 193943 - RNA, 22 nt, Human
acuucaugcagaagagagcugu

SEQ ID NO: 193944 - RNA, 22 nt, Human
gcuggggcugggcugaggaaga

SEQ ID NO: 193945 - RNA, 22 nt, Human
uaucuagaguccugcugagaac

SEQ ID NO: 193946 - RNA, 22 nt, Human
uagggcuggcgugcucagggaa

SEQ ID NO: 193947 - RNA, 22 nt, Human
ugggccuggcccuguggaggag

SEQ ID NO: 193948 - RNA, 22 nt, Human
acuucuaugcacagagcuugga

SEQ ID NO: 193949 - RNA, 22 nt, Human
aucuguaacaucaguagcagaa

SEQ ID NO: 193950 - RNA, 22 nt, Human
ccucccucuguuagagcugucu

SEQ ID NO: 193951 - RNA, 22 nt, Human
uggcccuguccucauuucaucu

SEQ ID NO: 193952 - RNA, 19 nt, Human
uugcuggagaaaaaggaga

SEQ ID NO: 193953 - RNA, 22 nt, Human
gggaacagagugccagacugac

SEQ ID NO: 193954 - RNA, 22 nt, Human
uuaaagcaugcugcuuuuccau

SEQ ID NO: 193955 - RNA, 22 nt, Human
aggcagguagaaggaucuuuau

SEQ ID NO: 193956 - RNA, 22 nt, Human
ucaggacaguucccugcaaauu

SEQ ID NO: 193957 - RNA, 23 nt, Human
uuucucugagaagcaguucucua

SEQ ID NO: 193958 - RNA, 22 nt, Human
gaacaaauucucaucaacuugu

SEQ ID NO: 193959 - RNA, 22 nt, Human
gauagaguguugccucucaauu

SEQ ID NO: 193960 - RNA, 22 nt, Human
caccugggcuaaacuaugcagg

SEQ ID NO: 193961 - RNA, 22 nt, Human
uuagcaucugcuguaagcuuau

SEQ ID NO: 193962 - RNA, 22 nt, Human
agacacuuucagaaguguuugc

SEQ ID NO: 193963 - RNA, 19 nt, Human
ucucuggggacacuuucac

SEQ ID NO: 193964 - RNA, 22 nt, Human
gggggaagaaagaacauggcau

SEQ ID NO: 193965 - RNA, 22 nt, Human
aaauuguaggaucacaugaccu

SEQ ID NO: 193966 - RNA, 22 nt, Human
gaggcugaguagcuuugugcuc

SEQ ID NO: 193967 - RNA, 22 nt, Human
gcagcucuggggcaggccugag

SEQ ID NO: 193968 - RNA, 22 nt, Human
cagagcugggaucccaugggcg

SEQ ID NO: 193969 - RNA, 22 nt, Human
gccaacuggcugaucucaaagc

SEQ ID NO: 193970 - RNA, 22 nt, Human
aggccagugccuuuccagggcu

SEQ ID NO: 193971 - RNA, 22 nt, Human
gggcuggcucccagguguugaa

SEQ ID NO: 193972 - RNA, 22 nt, Human
uacaugaagaugaauguauggc

SEQ ID NO: 193973 - RNA, 22 nt, Human
uuccuacauuugccucacuccc

SEQ ID NO: 193974 - RNA, 22 nt, Human
aguccagggagcccaggcuuug

SEQ ID NO: 193975 - RNA, 22 nt, Human
cagcuagcggugcuggcggcuc

SEQ ID NO: 193976 - RNA, 22 nt, Human
gagcagugaagacagaaguaca

SEQ ID NO: 193977 - RNA, 22 nt, Human
uugaaagauauguuaaucuuuc

SEQ ID NO: 193978 - RNA, 22 nt, Human
uugguuuugggauguacaaagg

SEQ ID NO: 193979 - RNA, 21 nt, Human
ugggugggcagagucucuuca

SEQ ID NO: 193980 - RNA, 22 nt, Human
ggaggagcacuugacggggucu

SEQ ID NO: 193981 - RNA, 22 nt, Human
auggcuucugucuuggaaauuu

SEQ ID NO: 193982 - RNA, 22 nt, Human
gggcugagauuggugcccuguc

SEQ ID NO: 193983 - RNA, 22 nt, Human
ucucuuucuauaugugagucuu

SEQ ID NO: 193984 - RNA, 22 nt, Human
ugacacaguugucgacucuaca

SEQ ID NO: 193985 - RNA, 22 nt, Human
acaugccaucacuuucauuccu

SEQ ID NO: 193986 - RNA, 22 nt, Human
agugcccugcuggggcaggaga

SEQ ID NO: 193987 - RNA, 22 nt, Human
ucucuaaauacagaugucaugg

SEQ ID NO: 193988 - RNA, 22 nt, Human
gcauguguucuugaaaggccac

SEQ ID NO: 193989 - RNA, 19 nt, Human
gaagcccugcauucuccgc

SEQ ID NO: 193990 - RNA, 22 nt, Human
caugccuguauuucugaucuau

SEQ ID NO: 193991 - RNA, 22 nt, Human
ccuucaaguuccuggucccugg

SEQ ID NO: 193992 - RNA, 22 nt, Human
caguuacagagccaguuagaga

SEQ ID NO: 193993 - RNA, 22 nt, Human
ugcaaagugcuagcccacacca

SEQ ID NO: 193994 - RNA, 22 nt, Human
ucuuggagacucuuguauauuu

SEQ ID NO: 193995 - RNA, 22 nt, Human
acucagagcuuggcuccuugcu

SEQ ID NO: 193996 - RNA, 22 nt, Human
uuagaucauuuugaacuaauuu

SEQ ID NO: 193997 - RNA, 22 nt, Human
agaggggcucaagcaguggucu

SEQ ID NO: 193998 - RNA, 22 nt, Human
cacugauuaagucugcuagagg

SEQ ID NO: 193999 - RNA, 22 nt, Human
uuuacacauaccucuuuaaagu

SEQ ID NO: 194000 - RNA, 22 nt, Human
agcagccacagucugggacagg

SEQ ID NO: 194001 - RNA, 22 nt, Human
acaggacauggcuucugugacg

SEQ ID NO: 194002 - RNA, 22 nt, Human
auugauuugaacaaagauauua

SEQ ID NO: 194003 - RNA, 22 nt, Human
uggcccgaccucugcucaugca

SEQ ID NO: 194004 - RNA, 22 nt, Human
uggcucagcugacucggcuucu

SEQ ID NO: 194005 - RNA, 22 nt, Human
ccugugacauuagaauuucauu

SEQ ID NO: 194006 - RNA, 22 nt, Human
aaagacuuggcuuaugauuugc

SEQ ID NO: 194007 - RNA, 22 nt, Human
gccaggcagcugggagggugcc

SEQ ID NO: 194008 - RNA, 22 nt, Human
cuuagaugaagucacagaaccc

SEQ ID NO: 194009 - RNA, 22 nt, Human
ucaagucuggagaucuggaacu

SEQ ID NO: 194010 - RNA, 20 nt, Human
auuugggacgauuggccacc

SEQ ID NO: 194011 - RNA, 22 nt, Human
augaggcaaggaucagguaagg

SEQ ID NO: 194012 - RNA, 22 nt, Human
cuacagaaacacuggacaugug

SEQ ID NO: 194013 - RNA, 22 nt, Human
cagagccugcucacgucucugu

SEQ ID NO: 194014 - RNA, 22 nt, Human
aggguccaucaaggacugcaca

SEQ ID NO: 194015 - RNA, 22 nt, Human
ugcugugagguugagaaggaag

SEQ ID NO: 194016 - RNA, 22 nt, Human
ugggugggagcgcccugucugg

SEQ ID NO: 194017 - RNA, 22 nt, Human
aaguggcaguucaggaagcaga

SEQ ID NO: 194018 - RNA, 22 nt, Human
ugaaagaaacagguauauuggg

SEQ ID NO: 194019 - RNA, 22 nt, Human
gucccaggcagagucaggaggg

SEQ ID NO: 194020 - RNA, 22 nt, Human
aaagcucacaguaauacaaggc

SEQ ID NO: 194021 - RNA, 22 nt, Human
auguagaggaguuucuggucug

SEQ ID NO: 194022 - RNA, 22 nt, Human
ucucaacaccacuugcugaaga

SEQ ID NO: 194023 - RNA, 22 nt, Human
uacaauguuaaggaaagagaga

SEQ ID NO: 194024 - RNA, 22 nt, Human
ugagucugggcauguucacuuu

SEQ ID NO: 194025 - RNA, 22 nt, Human
aaguaucucaaaaacaguaauc

SEQ ID NO: 194026 - RNA, 22 nt, Human
gcuuuuaauuaguugcuuccau

SEQ ID NO: 194027 - RNA, 22 nt, Human
cuucugugguaaacuuuguugu

SEQ ID NO: 194028 - RNA, 22 nt, Human
ugcaguuuugccaggcaaugga

SEQ ID NO: 194029 - RNA, 22 nt, Human
cagcuuuuaggacugugagaaa

SEQ ID NO: 194030 - RNA, 22 nt, Human
agaggucagagcaggaaaggca

SEQ ID NO: 194031 - RNA, 22 nt, Human
aaaacuuagcuaggcaaguuuu

SEQ ID NO: 194032 - RNA, 22 nt, Human
uuccugguuggauucugauuaa

SEQ ID NO: 194033 - RNA, 22 nt, Human
cagcuguugucaccucacaucc

SEQ ID NO: 194034 - RNA, 22 nt, Human
ucuggagaacuugcaagaggau

SEQ ID NO: 194035 - RNA, 22 nt, Human
uauugucaagaaguuuauagug

SEQ ID NO: 194036 - RNA, 19 nt, Human
uggugcuggccucccaugg

SEQ ID NO: 194037 - RNA, 22 nt, Human
aaagcacuuugagacugacagg

SEQ ID NO: 194038 - RNA, 22 nt, Human
uuuaguauccuaucucauuuaa

SEQ ID NO: 194039 - RNA, 22 nt, Human
ggccuuagugagguccugaugc

SEQ ID NO: 194040 - RNA, 20 nt, Human
gcugggggugugcugaguga

SEQ ID NO: 194041 - RNA, 22 nt, Human
ccuuucugauggccucccagcc

SEQ ID NO: 194042 - RNA, 22 nt, Human
uaagaaucaguagauauagauu

SEQ ID NO: 194043 - RNA, 22 nt, Human
ugcaaggcccagacaagagcuc

SEQ ID NO: 194044 - RNA, 22 nt, Human
gcauaucagcaucaaaacacag

SEQ ID NO: 194045 - RNA, 22 nt, Human
uccaaggagucuuaaguuacau

SEQ ID NO: 194046 - RNA, 22 nt, Human
cagaaacauguauaaaguugua

SEQ ID NO: 194047 - RNA, 22 nt, Human
ggaggaagcacacggcuuguau

SEQ ID NO: 194048 - RNA, 22 nt, Human
aguccaaagcagaugagggcca

SEQ ID NO: 194049 - RNA, 22 nt, Human
ucagugucugugggcaggaugg

SEQ ID NO: 194050 - RNA, 22 nt, Human
aagacauuuauuugaaucaauu

SEQ ID NO: 194051 - RNA, 22 nt, Human
caggugguugagagcuguaggc

SEQ ID NO: 194052 - RNA, 18 nt, Human
aggucugaggaagagccu

SEQ ID NO: 194053 - RNA, 22 nt, Human
guuuuauaggcuguugcuauau

SEQ ID NO: 194054 - RNA, 22 nt, Human
auguuacauaguccuuauuugu

SEQ ID NO: 194055 - RNA, 22 nt, Human
ugccaggcucagccccuaucuu

SEQ ID NO: 194056 - RNA, 22 nt, Human
aaauaaacugaagcacagagag

SEQ ID NO: 194057 - RNA, 19 nt, Human
gggcuuggggcugaagccu

SEQ ID NO: 194058 - RNA, 22 nt, Human
cugcaccacagccugaggcagc

SEQ ID NO: 194059 - RNA, 21 nt, Human
cagcccagcuucuuccccagu

SEQ ID NO: 194060 - RNA, 22 nt, Human
guggaaauuuuaggaucaucuu

SEQ ID NO: 194061 - RNA, 22 nt, Human
cuugaauccaaaugggagauga

SEQ ID NO: 194062 - RNA, 22 nt, Human
ucccacacuacacgguuguugg

SEQ ID NO: 194063 - RNA, 22 nt, Human
uggucauuaauucuuaccuuua

SEQ ID NO: 194064 - RNA, 22 nt, Human
agcaggagagcagugcgugguc

SEQ ID NO: 194065 - RNA, 23 nt, Human
gagcucagguagggcucgcccgc

SEQ ID NO: 194066 - RNA, 19 nt, Human
uacaugcagcaggcacgca

SEQ ID NO: 194067 - RNA, 22 nt, Human
gaagagcugacagugucauccu

SEQ ID NO: 194068 - RNA, 22 nt, Human
cagagggacaguaugaugaaag

SEQ ID NO: 194069 - RNA, 22 nt, Human
agacuggcuugcuuuacaagga

SEQ ID NO: 194070 - RNA, 18 nt, Human
caggaauggaugggauuu

SEQ ID NO: 194071 - RNA, 22 nt, Human
gugagucuuuggagacaguuca

SEQ ID NO: 194072 - RNA, 22 nt, Human
ccagcugugccuaggagcaggg

SEQ ID NO: 194073 - RNA, 22 nt, Human
uuuagagaauuagaacaguacu

SEQ ID NO: 194074 - RNA, 19 nt, Human
agaggcaagggcucaugac

SEQ ID NO: 194075 - RNA, 22 nt, Human
gcuuacagauaaugaggagacu

SEQ ID NO: 194076 - RNA, 23 nt, Human
uuccuuaacuguuaagauugucu

SEQ ID NO: 194077 - RNA, 22 nt, Human
uuccuguuagccauuauuagcu

SEQ ID NO: 194078 - RNA, 22 nt, Human
ugcuuagaaucuggacuuguug

SEQ ID NO: 194079 - RNA, 22 nt, Human
ugucugagucaugcagagauau

SEQ ID NO: 194080 - RNA, 22 nt, Human
uggcugagaccuucccaaauuc

SEQ ID NO: 194081 - RNA, 22 nt, Human
uuacacaacagugcaucagcag

SEQ ID NO: 194082 - RNA, 22 nt, Human
aauacauauggaauuccauguu

SEQ ID NO: 194083 - RNA, 22 nt, Human
agaaccuucagcuugcaacaag

SEQ ID NO: 194084 - RNA, 22 nt, Human
auuguuaaacugaagcauuacu

SEQ ID NO: 194085 - RNA, 22 nt, Human
agaaaagaggcuuucuaagcau

SEQ ID NO: 194086 - RNA, 22 nt, Human
aauguuaauuuacugucuucau

SEQ ID NO: 194087 - RNA, 22 nt, Human
ucuguggaguugaggaagguug

SEQ ID NO: 194088 - RNA, 23 nt, Human
ggagugcaauggcgccaucucgg

SEQ ID NO: 194089 - RNA, 22 nt, Human
agccuggguuuuuauuaaggag

SEQ ID NO: 194090 - RNA, 22 nt, Human
aggaggguacaauggguggaaa

SEQ ID NO: 194091 - RNA, 19 nt, Human
ugcccugcccgcagccuug

SEQ ID NO: 194092 - RNA, 22 nt, Human
uggcccaggugcacccagaggc

SEQ ID NO: 194093 - RNA, 22 nt, Human
cugggucuucagcagcaggcgg

SEQ ID NO: 194094 - RNA, 22 nt, Human
ggagaggagcuauugggggcuc

SEQ ID NO: 194095 - RNA, 22 nt, Human
uugaggaggccuuucagggcuu

SEQ ID NO: 194096 - RNA, 22 nt, Human
ccuggggccccgagccagaagc

SEQ ID NO: 194097 - RNA, 22 nt, Human
uguuuaauaauucuaugauagu

SEQ ID NO: 194098 - RNA, 22 nt, Human
gcacccagagggcagggucucc

SEQ ID NO: 194099 - RNA, 22 nt, Human
uugggggguugaggaguagaua

SEQ ID NO: 194100 - RNA, 22 nt, Human
aggacacaugcacacccugcgu

SEQ ID NO: 194101 - RNA, 22 nt, Human
ucaggaaguugaggcguagaga

SEQ ID NO: 194102 - RNA, 22 nt, Human
gaauaucccgcuaugcaaagua

SEQ ID NO: 194103 - RNA, 22 nt, Human
uagggaggaggguuuucaaauc

SEQ ID NO: 194104 - RNA, 22 nt, Human
uagccaugagcagaucacuaua

SEQ ID NO: 194105 - RNA, 22 nt, Human
cucuccacucagcgucaugucc

SEQ ID NO: 194106 - RNA, 22 nt, Human
guagggacuguucucaccugag

SEQ ID NO: 194107 - RNA, 22 nt, Human
ugaaaugcuguagagacuguau

SEQ ID NO: 194108 - RNA, 22 nt, Human
ugaggcagguggauuacaaggu

SEQ ID NO: 194109 - RNA, 22 nt, Human
gaggguccccaugcagagcuca

SEQ ID NO: 194110 - RNA, 22 nt, Human
ccucagagaaaugucuauucaa

SEQ ID NO: 194111 - RNA, 21 nt, Human
ucacaggcucagggagagagu

SEQ ID NO: 194112 - RNA, 22 nt, Human
uucuccugcgcaggcccaggga

SEQ ID NO: 194113 - RNA, 22 nt, Human
cucuagaggcuugaaugggcga

SEQ ID NO: 194114 - RNA, 23 nt, Human
cagaccuuucuguaucaguuauc

SEQ ID NO: 194115 - RNA, 22 nt, Human
gcugcgguggcuggcgauggga

SEQ ID NO: 194116 - RNA, 22 nt, Human
ugaugguuuuauuaauaggacc

SEQ ID NO: 194117 - RNA, 22 nt, Human
uuugaaaggagcuuuauccaga

SEQ ID NO: 194118 - RNA, 22 nt, Human
gaagugaagguuacucuagauu

SEQ ID NO: 194119 - RNA, 22 nt, Human
uuuagagcugugcugccacaug

SEQ ID NO: 194120 - RNA, 22 nt, Human
ugcuucuggaaacaguggcugu

SEQ ID NO: 194121 - RNA, 22 nt, Human
gggccaccuggauuccaugugu

SEQ ID NO: 194122 - RNA, 22 nt, Human
aaccccaaaaccucugaagugg

SEQ ID NO: 194123 - RNA, 17 nt, Human
agugucagaagacaguu

SEQ ID NO: 194124 - RNA, 22 nt, Human
cugcugucgccacggucgccgc

SEQ ID NO: 194125 - RNA, 22 nt, Human
aggcauggguagaagagaagcc

SEQ ID NO: 194126 - RNA, 22 nt, Human
uagcaucuaacaucuuaggacu

SEQ ID NO: 194127 - RNA, 20 nt, Human
uggguccugcacauucucca

SEQ ID NO: 194128 - RNA, 22 nt, Human
ucagguguggucaccacagggu

SEQ ID NO: 194129 - RNA, 19 nt, Human
uguagcaguuuaaaacaac

SEQ ID NO: 194130 - RNA, 22 nt, Human
acucugugugaguagagccugu

SEQ ID NO: 194131 - RNA, 22 nt, Human
cccaggcagcggggucuccuug

SEQ ID NO: 194132 - RNA, 22 nt, Human
uuuauacuucauaaugucuauu

SEQ ID NO: 194133 - RNA, 22 nt, Human
aagggcaggcagagaucauaua

SEQ ID NO: 194134 - RNA, 22 nt, Human
uguggcagucucacuggagggc

SEQ ID NO: 194135 - RNA, 20 nt, Human
uaccaacagcaggaagcaua

SEQ ID NO: 194136 - RNA, 22 nt, Human
agcuggcaucugaagucagggc

SEQ ID NO: 194137 - RNA, 22 nt, Human
cacauguguauaugugaggggg

SEQ ID NO: 194138 - RNA, 22 nt, Human
auuuccuauagauauggugagu

SEQ ID NO: 194139 - RNA, 22 nt, Human
uagcugaaugccuuggauuuuu

SEQ ID NO: 194140 - RNA, 22 nt, Human
ugacagaaagaauaugucaauc

SEQ ID NO: 194141 - RNA, 22 nt, Human
acacugucugggacucaggagu

SEQ ID NO: 194142 - RNA, 18 nt, Human
cuggauuaagacagugcu

SEQ ID NO: 194143 - RNA, 22 nt, Human
uuugcagaguaccugaagagga

SEQ ID NO: 194144 - RNA, 22 nt, Human
gcuggagucuggaggugugcca

SEQ ID NO: 194145 - RNA, 20 nt, Human
gucuccacuggggguuaacc

SEQ ID NO: 194146 - RNA, 22 nt, Human
aaaagggaaagcagaaugacuu

SEQ ID NO: 194147 - RNA, 18 nt, Human
gcuagggcaugcauggug

SEQ ID NO: 194148 - RNA, 22 nt, Human
uaaaugcaguuaguacuugcca

SEQ ID NO: 194149 - RNA, 22 nt, Human
gggcccagcccucugcucacug

SEQ ID NO: 194150 - RNA, 22 nt, Human
acuguccuuuuaaugcagccgu

SEQ ID NO: 194151 - RNA, 22 nt, Human
cagggaugguugagaauuggua

SEQ ID NO: 194152 - RNA, 22 nt, Human
uauuauuaugcauagcaugaaa

SEQ ID NO: 194153 - RNA, 22 nt, Human
cucucuggaccucaacuauuuu

SEQ ID NO: 194154 - RNA, 22 nt, Human
gcugccaggcccuggggcuaug

SEQ ID NO: 194155 - RNA, 22 nt, Human
uccaggcuggacaugaggcggg

SEQ ID NO: 194156 - RNA, 22 nt, Human
gagguuggagggcuggccugca

SEQ ID NO: 194157 - RNA, 22 nt, Human
agagauuaagucacuuggucag

SEQ ID NO: 194158 - RNA, 22 nt, Human
uguggcuggauugauuuuaccu

SEQ ID NO: 194159 - RNA, 22 nt, Human
ucuuguuaucaggaaaacagua

SEQ ID NO: 194160 - RNA, 22 nt, Human
ggcugcagauagccagccacca

SEQ ID NO: 194161 - RNA, 22 nt, Human
uagggcucuggugggcucuguu

SEQ ID NO: 194162 - RNA, 22 nt, Human
gggcugacgaaggccaugugug

SEQ ID NO: 194163 - RNA, 22 nt, Human
gcagaggaggacccaggaauua

SEQ ID NO: 194164 - RNA, 22 nt, Human
uucuuuuccuguggcucaucca

SEQ ID NO: 194165 - RNA, 22 nt, Human
agauguggccuuugggagauua

SEQ ID NO: 194166 - RNA, 22 nt, Human
acaggucugcaguaacugggaa

SEQ ID NO: 194167 - RNA, 22 nt, Human
aacaguagguguaaccaaacaa

SEQ ID NO: 194168 - RNA, 22 nt, Human
cagaaucucugggaguggauca

SEQ ID NO: 194169 - RNA, 22 nt, Human
uccaugcagagaacugaaguac

SEQ ID NO: 194170 - RNA, 22 nt, Human
uuuccagguaucaagcuucagg

SEQ ID NO: 194171 - RNA, 22 nt, Human
ggccagcccagugguccucucu

SEQ ID NO: 194172 - RNA, 22 nt, Human
uggcugagcugcagcguggcuu

SEQ ID NO: 194173 - RNA, 22 nt, Human
ucaaagcaauuucaccagugcc

SEQ ID NO: 194174 - RNA, 22 nt, Human
ucaggauggcuucugcaucaaa

SEQ ID NO: 194175 - RNA, 22 nt, Human
ugggccagagaguaagaaaggu

SEQ ID NO: 194176 - RNA, 22 nt, Human
auacagguaggggacauacauc

SEQ ID NO: 194177 - RNA, 22 nt, Human
agagaggcauucggugauccca

SEQ ID NO: 194178 - RNA, 22 nt, Human
ugccaggccaaugaaggcaggg

SEQ ID NO: 194179 - RNA, 22 nt, Human
gaaccacaaugugaagaaggag

SEQ ID NO: 194180 - RNA, 22 nt, Human
aagcugaagccggaucaaaaag

SEQ ID NO: 194181 - RNA, 22 nt, Human
auuucuagaggcagcuucuagg

SEQ ID NO: 194182 - RNA, 22 nt, Human
uuucauuauucaugcuaguuau

SEQ ID NO: 194183 - RNA, 22 nt, Human
gagcaagauuuuauaaguugug

SEQ ID NO: 194184 - RNA, 22 nt, Human
caggauggagagugagggguca

SEQ ID NO: 194185 - RNA, 22 nt, Human
aagaugugcugucuugccacuc

SEQ ID NO: 194186 - RNA, 22 nt, Human
ugauaucugaaguguauaaaca

SEQ ID NO: 194187 - RNA, 19 nt, Human
aacaucauggcucuuucca

SEQ ID NO: 194188 - RNA, 18 nt, Human
aggcuucuuggcucaguc

SEQ ID NO: 194189 - RNA, 22 nt, Human
gauucagugagggugagaagaa

SEQ ID NO: 194190 - RNA, 22 nt, Human
aaaguggucaccuucucauuuc

SEQ ID NO: 194191 - RNA, 18 nt, Human
uuuuacucauagcaggcc

SEQ ID NO: 194192 - RNA, 20 nt, Human
cucucccagcacagcuuccu

SEQ ID NO: 194193 - RNA, 22 nt, Human
gugugccaccagucaaggugaa

SEQ ID NO: 194194 - RNA, 22 nt, Human
cuguccuggugcuggggauccc

SEQ ID NO: 194195 - RNA, 22 nt, Human
cacagaaaggcucaaaucccaa

SEQ ID NO: 194196 - RNA, 22 nt, Human
gagacagaugcugcuggagcau

SEQ ID NO: 194197 - RNA, 22 nt, Human
ccaggcacuuguuugccaggca

SEQ ID NO: 194198 - RNA, 22 nt, Human
gacuacaacucccagaagacuu

SEQ ID NO: 194199 - RNA, 22 nt, Human
augcaacacauuugaugagcga

SEQ ID NO: 194200 - RNA, 22 nt, Human
gcaggcuucaagcacagcuuuu

SEQ ID NO: 194201 - RNA, 22 nt, Human
cuucauaggguuguaaggauua

SEQ ID NO: 194202 - RNA, 22 nt, Human
cagugguauuugagagaaugga

SEQ ID NO: 194203 - RNA, 22 nt, Human
uugcagagagguuaggaacuca

SEQ ID NO: 194204 - RNA, 22 nt, Human
caaguuuuagcaaguggaaagg

SEQ ID NO: 194205 - RNA, 21 nt, Human
cugccaggauagcaugcaggc

SEQ ID NO: 194206 - RNA, 22 nt, Human
auaauuuaauuuucacaguggu

SEQ ID NO: 194207 - RNA, 22 nt, Human
acuguaacacaaugguaucugu

SEQ ID NO: 194208 - RNA, 22 nt, Human
guucauguggaaauuuaaaaca

SEQ ID NO: 194209 - RNA, 22 nt, Human
ggcugcagggcagcuggugugg

SEQ ID NO: 194210 - RNA, 22 nt, Human
augcaaaugcuagagaauguug

SEQ ID NO: 194211 - RNA, 22 nt, Human
cggccgcagcagugucggccca

SEQ ID NO: 194212 - RNA, 22 nt, Human
cacuguacccauuuaaauaaau

SEQ ID NO: 194213 - RNA, 22 nt, Human
gucugugguagacaggaaggca

SEQ ID NO: 194214 - RNA, 22 nt, Human
gucaaauauaugcaaaacuauu

SEQ ID NO: 194215 - RNA, 22 nt, Human
gcccuguguauccccugugcuu

SEQ ID NO: 194216 - RNA, 22 nt, Human
acccaggaugauaauguucaca

SEQ ID NO: 194217 - RNA, 22 nt, Human
cuggugccauucuguggccuag

SEQ ID NO: 194218 - RNA, 22 nt, Human
gaaggaaaucugugauuuaugc

SEQ ID NO: 194219 - RNA, 22 nt, Human
auguuucaaauauauagaguug

SEQ ID NO: 194220 - RNA, 18 nt, Human
acacaguggaugccuggu

SEQ ID NO: 194221 - RNA, 22 nt, Human
aggcaguuguugcugagcagcu

SEQ ID NO: 194222 - RNA, 22 nt, Human
aaagccagagcaagcugucaca

SEQ ID NO: 194223 - RNA, 20 nt, Human
guuaaaagaguaauuugagg

SEQ ID NO: 194224 - RNA, 22 nt, Human
acuaaaguccuguuguagcaua

SEQ ID NO: 194225 - RNA, 22 nt, Human
ucucccaggcugcccuguggac

SEQ ID NO: 194226 - RNA, 22 nt, Human
gagauggggaauaggagcaagc

SEQ ID NO: 194227 - RNA, 22 nt, Human
ucaagacagauggguaacuugg

SEQ ID NO: 194228 - RNA, 20 nt, Human
uccacaucuuuugagaugug

SEQ ID NO: 194229 - RNA, 22 nt, Human
uucauucaucacaugcagcugg

SEQ ID NO: 194230 - RNA, 22 nt, Human
cagcagcucccauccgcugagc

SEQ ID NO: 194231 - RNA, 22 nt, Human
uuugcuuucuugauucagauua

SEQ ID NO: 194232 - RNA, 22 nt, Human
ucagcaggcaccggaaguguuu

SEQ ID NO: 194233 - RNA, 22 nt, Human
caggcauugccauuccuccaga

SEQ ID NO: 194234 - RNA, 22 nt, Human
cucuagaaugaauuagcgcagg

SEQ ID NO: 194235 - RNA, 22 nt, Human
gucauuuaucaucagaagucau

SEQ ID NO: 194236 - RNA, 22 nt, Human
agagucagaaccaagaugaggc

SEQ ID NO: 194237 - RNA, 22 nt, Human
aggggccaccuguggcacccug

SEQ ID NO: 194238 - RNA, 22 nt, Human
gcugcccauuccacuggauggu

SEQ ID NO: 194239 - RNA, 22 nt, Human
ccuuccagaguucagucugccc

SEQ ID NO: 194240 - RNA, 22 nt, Human
caaaacauucucugcagcaggg

SEQ ID NO: 194241 - RNA, 22 nt, Human
gccacaggcacuuaagggcugg

SEQ ID NO: 194242 - RNA, 22 nt, Human
cuuguauuaggaagaaugcuuu

SEQ ID NO: 194243 - RNA, 22 nt, Human
gugggagaaauuagcucuaguu

SEQ ID NO: 194244 - RNA, 22 nt, Human
cuggguaccucaccgcugcugc

SEQ ID NO: 194245 - RNA, 22 nt, Human
guguucugggaugauuguagug

SEQ ID NO: 194246 - RNA, 22 nt, Human
cagcagguucuacgggugagau

SEQ ID NO: 194247 - RNA, 22 nt, Human
cagaagcaagagccggagcuag

SEQ ID NO: 194248 - RNA, 22 nt, Human
cacccugggcugggccuguuaa

SEQ ID NO: 194249 - RNA, 22 nt, Human
gcccuccauggugauccaggcc

SEQ ID NO: 194250 - RNA, 19 nt, Human
agucuggaguaaaaggaau

SEQ ID NO: 194251 - RNA, 22 nt, Human
ccaaggcuguggggcugugcag

SEQ ID NO: 194252 - RNA, 22 nt, Human
gcaggcugugguauguugggca

SEQ ID NO: 194253 - RNA, 22 nt, Human
uuccccaggcggcuuuuucagc

SEQ ID NO: 194254 - RNA, 22 nt, Human
caggaagcuagauuuuguugcu

SEQ ID NO: 194255 - RNA, 22 nt, Human
cuguccugaaguuuucaugaga

SEQ ID NO: 194256 - RNA, 22 nt, Human
auccauuuuaacuguuagugca

SEQ ID NO: 194257 - RNA, 22 nt, Human
uugcuuuagggcaaauauuuca

SEQ ID NO: 194258 - RNA, 22 nt, Human
ugucauauagauauuagacagg

SEQ ID NO: 194259 - RNA, 22 nt, Human
gaaggcuucaaaagguguaauu

SEQ ID NO: 194260 - RNA, 21 nt, Human
agagggagaguggcccuucca

SEQ ID NO: 194261 - RNA, 20 nt, Human
cucugaggcugagaagggag

SEQ ID NO: 194262 - RNA, 22 nt, Human
uacuuuauauuguggcuggcca

SEQ ID NO: 194263 - RNA, 22 nt, Human
caucuuugggcugcauggaagg

SEQ ID NO: 194264 - RNA, 22 nt, Human
gcucuggggcccagggaucaca

SEQ ID NO: 194265 - RNA, 22 nt, Human
ugauuucuucuaauuuccauca

SEQ ID NO: 194266 - RNA, 22 nt, Human
uaagaugaccuuauaaagagca

SEQ ID NO: 194267 - RNA, 22 nt, Human
cuugaaagaagggucuuuuaau

SEQ ID NO: 194268 - RNA, 22 nt, Human
uggcuucugagcauugaaacgu

SEQ ID NO: 194269 - RNA, 22 nt, Human
cagauuuacucccugcugcugc

SEQ ID NO: 194270 - RNA, 22 nt, Human
agugacucacacaaacaugugu

SEQ ID NO: 194271 - RNA, 22 nt, Human
gguguccugucagcuagaguga

SEQ ID NO: 194272 - RNA, 22 nt, Human
gaaguuuucugaggcuguagcu

SEQ ID NO: 194273 - RNA, 22 nt, Human
cuccucgaagcaaccugcaggc

SEQ ID NO: 194274 - RNA, 22 nt, Human
gaggcaagagaagccagcuuuc

SEQ ID NO: 194275 - RNA, 22 nt, Human
aaaggccaugguuggaguguuu

SEQ ID NO: 194276 - RNA, 22 nt, Human
cuccuggacauggagcggagga

SEQ ID NO: 194277 - RNA, 22 nt, Human
gcagcuggagccagccagacac

SEQ ID NO: 194278 - RNA, 22 nt, Human
aaaaagacagaggaugaggcag

SEQ ID NO: 194279 - RNA, 22 nt, Human
agguugaaauagguuaucuaag

SEQ ID NO: 194280 - RNA, 22 nt, Human
ucaggugucuugugggauuuua

SEQ ID NO: 194281 - RNA, 21 nt, Human
aggagcuguguuagcuggucg

SEQ ID NO: 194282 - RNA, 22 nt, Human
ggcagccagcggguggacgcgc

SEQ ID NO: 194283 - RNA, 22 nt, Human
cauggcugcgagaagagugggu

SEQ ID NO: 194284 - RNA, 22 nt, Human
uggcccugcacccagagcaguu

SEQ ID NO: 194285 - RNA, 22 nt, Human
uugagggagaaaguuggaguag

SEQ ID NO: 194286 - RNA, 22 nt, Human
cuucuggcaaaacaggcagaaa

SEQ ID NO: 194287 - RNA, 22 nt, Human
uuguuucuucaggcuuuuagga

SEQ ID NO: 194288 - RNA, 22 nt, Human
uguuaacauaguggcgcaucug

SEQ ID NO: 194289 - RNA, 22 nt, Human
gaaagauauuuauuggcaacag

SEQ ID NO: 194290 - RNA, 22 nt, Human
acaaauggagaaacugaggccc

SEQ ID NO: 194291 - RNA, 22 nt, Human
acaugccaucuuugucaggagu

SEQ ID NO: 194292 - RNA, 22 nt, Human
aaagguuauuauuacuauuguc

SEQ ID NO: 194293 - RNA, 22 nt, Human
agaaggaaggaagcauucuguu

SEQ ID NO: 194294 - RNA, 22 nt, Human
ucuguguauuugugaccuguau

SEQ ID NO: 194295 - RNA, 19 nt, Human
acugcagggaggaggugug

SEQ ID NO: 194296 - RNA, 22 nt, Human
ucuccaagaaaagaucucagcu

SEQ ID NO: 194297 - RNA, 22 nt, Human
auagauguuuuaguaauacugu

SEQ ID NO: 194298 - RNA, 22 nt, Human
acaauagucaaugcacgucauu

SEQ ID NO: 194299 - RNA, 22 nt, Human
guacacauacuauucaaagaga

SEQ ID NO: 194300 - RNA, 22 nt, Human
ucuguacaacaaagggaugaga

SEQ ID NO: 194301 - RNA, 22 nt, Human
agagggugggcacgugauggau

SEQ ID NO: 194302 - RNA, 22 nt, Human
acuccugguucccaguugagau

SEQ ID NO: 194303 - RNA, 22 nt, Human
ucuguucagguuucagagaacu

SEQ ID NO: 194304 - RNA, 22 nt, Human
cugucccucaguucugggcaaa

SEQ ID NO: 194305 - RNA, 22 nt, Human
gcuggcagugugaaugacaagc

SEQ ID NO: 194306 - RNA, 22 nt, Human
auguguguguuuaauccucaaa

SEQ ID NO: 194307 - RNA, 22 nt, Human
uuucugcauauguauguaugga

SEQ ID NO: 194308 - RNA, 22 nt, Human
agggaaauuaaugugagcaaug

SEQ ID NO: 194309 - RNA, 23 nt, Human
cagguauugauuuuucuucuagg

SEQ ID NO: 194310 - RNA, 22 nt, Human
acagcuguggucuccuuagugu

SEQ ID NO: 194311 - RNA, 22 nt, Human
cagugcccuuccaggacugcag

SEQ ID NO: 194312 - RNA, 22 nt, Human
acauucucuccaugucuucuuu

SEQ ID NO: 194313 - RNA, 22 nt, Human
aucagcaggugcugguggagac

SEQ ID NO: 194314 - RNA, 22 nt, Human
gcugccaucuccugaggacagg

SEQ ID NO: 194315 - RNA, 22 nt, Human
uagcugugaaacagcagaagag

SEQ ID NO: 194316 - RNA, 22 nt, Human
acacugcuucucuggcagagcc

SEQ ID NO: 194317 - RNA, 18 nt, Human
uggcuucuugagcuaaca

SEQ ID NO: 194318 - RNA, 22 nt, Human
uacuuucuuguuccuuucauaa

SEQ ID NO: 194319 - RNA, 22 nt, Human
auuugaaccacucagaacucau

SEQ ID NO: 194320 - RNA, 22 nt, Human
cuggcuuugcgucuuugccaca

SEQ ID NO: 194321 - RNA, 19 nt, Human
gcacaggacaucugaugga

SEQ ID NO: 194322 - RNA, 22 nt, Human
uccaggccccccacgcuaaugg

SEQ ID NO: 194323 - RNA, 22 nt, Human
agucugggagaaggugagauua

SEQ ID NO: 194324 - RNA, 22 nt, Human
gccuuccuuuuaccaccagcca

SEQ ID NO: 194325 - RNA, 22 nt, Human
agggcugaccuaagcuccacuu

SEQ ID NO: 194326 - RNA, 22 nt, Human
ugguccuggggaucugcaguga

SEQ ID NO: 194327 - RNA, 22 nt, Human
uggcuucuggccaggcacagga

SEQ ID NO: 194328 - RNA, 22 nt, Human
cugguuuaugagggaagggaug

SEQ ID NO: 194329 - RNA, 22 nt, Human
gagggagggccaggucccaacc

SEQ ID NO: 194330 - RNA, 22 nt, Human
gagcucagauucuggugucaga

SEQ ID NO: 194331 - RNA, 20 nt, Human
ucuaaaguacaguuugugug

SEQ ID NO: 194332 - RNA, 22 nt, Human
agagugcaugacaugaucuugg

SEQ ID NO: 194333 - RNA, 22 nt, Human
aagugcuuaaaaggguggucua

SEQ ID NO: 194334 - RNA, 22 nt, Human
gcaguguuguuaaaagauuaga

SEQ ID NO: 194335 - RNA, 22 nt, Human
agcccagcacugggggcccagc

SEQ ID NO: 194336 - RNA, 22 nt, Human
ucugucaauauaugugcugcag

SEQ ID NO: 194337 - RNA, 18 nt, Human
aguuuuuaggaagaaaug

SEQ ID NO: 194338 - RNA, 17 nt, Human
gaacaguguaagacacu

SEQ ID NO: 194339 - RNA, 22 nt, Human
cauaaauuguacccauuccaac

SEQ ID NO: 194340 - RNA, 17 nt, Human
ucugugauaguguagau

SEQ ID NO: 194341 - RNA, 22 nt, Human
ccugggcagguguggcuucccc

SEQ ID NO: 194342 - RNA, 20 nt, Human
uccagggcuagggagcucau

SEQ ID NO: 194343 - RNA, 22 nt, Human
uucagaaaugaauauugguauu

SEQ ID NO: 194344 - RNA, 19 nt, Human
ggcuccuguggcugcagcc

SEQ ID NO: 194345 - RNA, 22 nt, Human
uucaugaagggugaauauaguc

SEQ ID NO: 194346 - RNA, 22 nt, Human
acuguucuuguaacacuuaaau

SEQ ID NO: 194347 - RNA, 22 nt, Human
cucagauguguuggauggaaaa

SEQ ID NO: 194348 - RNA, 22 nt, Human
caagggcagaggcagggccccg

SEQ ID NO: 194349 - RNA, 22 nt, Human
agcagggcuccauuucacugcc

SEQ ID NO: 194350 - RNA, 22 nt, Human
gcagacagacugcagugauuuu

SEQ ID NO: 194351 - RNA, 22 nt, Human
auccugggcaguuuugagugcu

SEQ ID NO: 194352 - RNA, 22 nt, Human
acagggcaaccucugggagacu

SEQ ID NO: 194353 - RNA, 22 nt, Human
agccauguuaaauggacuugau

SEQ ID NO: 194354 - RNA, 22 nt, Human
gauggcuuugccugcugugagg

SEQ ID NO: 194355 - RNA, 22 nt, Human
uguggaagugccaaugacaaau

SEQ ID NO: 194356 - RNA, 20 nt, Human
gccaggcacuguucucaaua

SEQ ID NO: 194357 - RNA, 22 nt, Human
aauagcuuauugacagugaauu

SEQ ID NO: 194358 - RNA, 22 nt, Human
cgcgguggcggccuccagcgcc

SEQ ID NO: 194359 - RNA, 22 nt, Human
acuggaaaguauucuuucacug

SEQ ID NO: 194360 - RNA, 22 nt, Human
gcuggcugccaauuucagagcu

SEQ ID NO: 194361 - RNA, 22 nt, Human
ugagaacauuugcagggagagu

SEQ ID NO: 194362 - RNA, 22 nt, Human
ucccagagacaucauuucuccg

SEQ ID NO: 194363 - RNA, 22 nt, Human
aaagccugucuggucauagcua

SEQ ID NO: 194364 - RNA, 19 nt, Human
acaaagugcgugcucuuuu

SEQ ID NO: 194365 - RNA, 22 nt, Human
uugguuuaggaacuggcuugga

SEQ ID NO: 194366 - RNA, 22 nt, Human
acacauaugguugcugcaguga

SEQ ID NO: 194367 - RNA, 22 nt, Human
uugagaagaaauaguuugcaau

SEQ ID NO: 194368 - RNA, 22 nt, Human
agacagugcaagaagagcaggc

SEQ ID NO: 194369 - RNA, 22 nt, Human
agcccugcgaucgugauuucuu

SEQ ID NO: 194370 - RNA, 22 nt, Human
agcugaggguucgguguccaca

SEQ ID NO: 194371 - RNA, 22 nt, Human
augacucuaagaauucuagaug

SEQ ID NO: 194372 - RNA, 22 nt, Human
uuugacuccacuccuaacuccu

SEQ ID NO: 194373 - RNA, 22 nt, Human
aggaggggcaaugauagucugg

SEQ ID NO: 194374 - RNA, 22 nt, Human
uagggggcuuugcugcuugaca

SEQ ID NO: 194375 - RNA, 22 nt, Human
ucaucagagcucccccaaacgu

SEQ ID NO: 194376 - RNA, 22 nt, Human
uaguguauguucagcuuauaug

SEQ ID NO: 194377 - RNA, 22 nt, Human
aguuuaaaucauguuuuguaac

SEQ ID NO: 194378 - RNA, 22 nt, Human
gaguauuuauauguaaguaccu

SEQ ID NO: 194379 - RNA, 22 nt, Human
uggagcugccuggcaccuacag

SEQ ID NO: 194380 - RNA, 22 nt, Human
gccugggagauuaauuaggaag

SEQ ID NO: 194381 - RNA, 22 nt, Human
aaaguuuaggcuuugaaaccag

SEQ ID NO: 194382 - RNA, 21 nt, Human
cacucaggguaugugccaggc

SEQ ID NO: 194383 - RNA, 22 nt, Human
caguguggugugcacagcuuag

SEQ ID NO: 194384 - RNA, 22 nt, Human
agaguccaugaagacagcugag

SEQ ID NO: 194385 - RNA, 22 nt, Human
uguuuauagauggccacaauga

SEQ ID NO: 194386 - RNA, 17 nt, Human
uaggugguugcuggucu

SEQ ID NO: 194387 - RNA, 22 nt, Human
auguguuuguccugcagaaaua

SEQ ID NO: 194388 - RNA, 19 nt, Human
gcagacagguccagagagg

SEQ ID NO: 194389 - RNA, 22 nt, Human
acacagccaggguaguaaggcu

SEQ ID NO: 194390 - RNA, 22 nt, Human
cuggccuggcaggggaccucua

SEQ ID NO: 194391 - RNA, 22 nt, Human
cugcggcucugcgggcagcugg

SEQ ID NO: 194392 - RNA, 22 nt, Human
cagcccugcuuccccgcuaguu

SEQ ID NO: 194393 - RNA, 22 nt, Human
uauuucacagcagcucauuuaa

SEQ ID NO: 194394 - RNA, 22 nt, Human
ugguaacacaggcauuaaaguu

SEQ ID NO: 194395 - RNA, 21 nt, Human
ccauucuuagucaagugucuc

SEQ ID NO: 194396 - RNA, 22 nt, Human
gauuucuaguaagucaugaagg

SEQ ID NO: 194397 - RNA, 22 nt, Human
uuagagcuucccaauuaaaacg

SEQ ID NO: 194398 - RNA, 22 nt, Human
ucaggucugggcacaugguaca

SEQ ID NO: 194399 - RNA, 22 nt, Human
uagagcaguguuguccaucaga

SEQ ID NO: 194400 - RNA, 19 nt, Human
uucucagagcuugcagcac

SEQ ID NO: 194401 - RNA, 22 nt, Human
gaguuacauuuggugacacuuc

SEQ ID NO: 194402 - RNA, 22 nt, Human
uguuaacacaauucuggagaga

SEQ ID NO: 194403 - RNA, 17 nt, Human
ucuguucaugcauaccu

SEQ ID NO: 194404 - RNA, 22 nt, Human
auggagugggccaauuuuagug

SEQ ID NO: 194405 - RNA, 22 nt, Human
aaggcuggggugcagacggccu

SEQ ID NO: 194406 - RNA, 22 nt, Human
cugccucuauucacugaggcag

SEQ ID NO: 194407 - RNA, 22 nt, Human
acagucuuugcaggagaaagga

SEQ ID NO: 194408 - RNA, 20 nt, Human
agaagucagcucagaaguga

SEQ ID NO: 194409 - RNA, 22 nt, Human
acagcuugcaugcagaggcacu

SEQ ID NO: 194410 - RNA, 22 nt, Human
aggccagggcacugcucuuuag

SEQ ID NO: 194411 - RNA, 22 nt, Human
gucuguggcaggggagaaguuu

SEQ ID NO: 194412 - RNA, 22 nt, Human
guuuaaauaauuaggggccugu

SEQ ID NO: 194413 - RNA, 22 nt, Human
uaaagaauaauacccauggagc

SEQ ID NO: 194414 - RNA, 22 nt, Human
acaagcuuugugauaguagaga

SEQ ID NO: 194415 - RNA, 22 nt, Human
aggguguguucuccuaugagaa

SEQ ID NO: 194416 - RNA, 22 nt, Human
acaguuaauaaguaguaaguca

SEQ ID NO: 194417 - RNA, 22 nt, Human
ucugucauaaacacacacaagc

SEQ ID NO: 194418 - RNA, 22 nt, Human
agacccagagggcugcugggag

SEQ ID NO: 194419 - RNA, 22 nt, Human
aaggcuggguaaccuguccacu

SEQ ID NO: 194420 - RNA, 22 nt, Human
uucucuuauucuggauaugcag

SEQ ID NO: 194421 - RNA, 22 nt, Human
agcuugaagccuuggcgagauu

SEQ ID NO: 194422 - RNA, 22 nt, Human
cagcauggcuugaguguuuccu

SEQ ID NO: 194423 - RNA, 22 nt, Human
cacagaauuaagggagaaauau

SEQ ID NO: 194424 - RNA, 23 nt, Human
uugguuuacaggaauaagcaggg

SEQ ID NO: 194425 - RNA, 20 nt, Human
ucuugagaacaauuucuggc

SEQ ID NO: 194426 - RNA, 21 nt, Human
uuccuggggaaggagcugccu

SEQ ID NO: 194427 - RNA, 22 nt, Human
aagaaacugaaaguggcuucau

SEQ ID NO: 194428 - RNA, 22 nt, Human
ccagcuggaagagugcagaacu

SEQ ID NO: 194429 - RNA, 22 nt, Human
ccagggugagaaaaggcuggau

SEQ ID NO: 194430 - RNA, 22 nt, Human
aggcugugcgaggucucagagu

SEQ ID NO: 194431 - RNA, 22 nt, Human
gggcagguggccucuuguacua

SEQ ID NO: 194432 - RNA, 20 nt, Human
ccaguccaccugagacaugu

SEQ ID NO: 194433 - RNA, 22 nt, Human
agagugggacacgggcgcuguc

SEQ ID NO: 194434 - RNA, 22 nt, Human
gagugugucggucagcguggcg

SEQ ID NO: 194435 - RNA, 22 nt, Human
ucugacagguguucuuccaggc

SEQ ID NO: 194436 - RNA, 22 nt, Human
gcucagagcccgaggcuugcau

SEQ ID NO: 194437 - RNA, 22 nt, Human
cuccuggcagcaacauuuauau

SEQ ID NO: 194438 - RNA, 22 nt, Human
auacagauugcuauacuuacaa

SEQ ID NO: 194439 - RNA, 22 nt, Human
acugugcacacaaaaauagauu

SEQ ID NO: 194440 - RNA, 22 nt, Human
ucuggaauagguccugaguauu

SEQ ID NO: 194441 - RNA, 22 nt, Human
uuguauuucuuccggucucauu

SEQ ID NO: 194442 - RNA, 22 nt, Human
aaagggaaguugcacauguucc

SEQ ID NO: 194443 - RNA, 22 nt, Human
cccaggcuucccaaucagaagg

SEQ ID NO: 194444 - RNA, 19 nt, Human
cuccaggauggcugggcga

SEQ ID NO: 194445 - RNA, 22 nt, Human
cagcaggugggcuuugcggaug

SEQ ID NO: 194446 - RNA, 22 nt, Human
cugaaggacuuggugauaguug

SEQ ID NO: 194447 - RNA, 21 nt, Human
ccucaaagaugaugggguuuc

SEQ ID NO: 194448 - RNA, 22 nt, Human
aauuagagaucgcaauaacggg

SEQ ID NO: 194449 - RNA, 22 nt, Human
agucuucacucuucacuacuau

SEQ ID NO: 194450 - RNA, 22 nt, Human
gcagggcucugcuguaguccua

SEQ ID NO: 194451 - RNA, 22 nt, Human
uguuccugguuccugcaugaug

SEQ ID NO: 194452 - RNA, 22 nt, Human
ggugggagagcucugucuccag

SEQ ID NO: 194453 - RNA, 21 nt, Human
aggguggcucugggucagaac

SEQ ID NO: 194454 - RNA, 22 nt, Human
aggccagugcagcuggaacaga

SEQ ID NO: 194455 - RNA, 22 nt, Human
ugcauacacuucaaaugagcau

SEQ ID NO: 194456 - RNA, 22 nt, Human
gggggucccaagcugggcugcu

SEQ ID NO: 194457 - RNA, 22 nt, Human
gccucagccggcggacgccagg

SEQ ID NO: 194458 - RNA, 22 nt, Human
ccugcagguuucccccggacgg

SEQ ID NO: 194459 - RNA, 22 nt, Human
uggggagagguaucauugagau

SEQ ID NO: 194460 - RNA, 22 nt, Human
ucuucacauggaacaugaagcu

SEQ ID NO: 194461 - RNA, 22 nt, Human
uuugaaucugauauggcagcau

SEQ ID NO: 194462 - RNA, 22 nt, Human
acauuaaaauggagaauuuuga

SEQ ID NO: 194463 - RNA, 18 nt, Human
agucaguugauggggacc

SEQ ID NO: 194464 - RNA, 22 nt, Human
agggggugaucaaggugcggcg

SEQ ID NO: 194465 - RNA, 22 nt, Human
auuuccugcaggggcugguggg

SEQ ID NO: 194466 - RNA, 16 nt, Human
gagggcagaggcggaa

SEQ ID NO: 194467 - RNA, 20 nt, Human
gccugccucagcuagcugag

SEQ ID NO: 194468 - RNA, 22 nt, Human
gagcugaaguuuccauuuguac

SEQ ID NO: 194469 - RNA, 22 nt, Human
cugcugugagugguucuugccu

SEQ ID NO: 194470 - RNA, 22 nt, Human
aaugaaauguagcuuauccaua

SEQ ID NO: 194471 - RNA, 22 nt, Human
uccugagacaucucugcugguc

SEQ ID NO: 194472 - RNA, 22 nt, Human
ucagaggaccuuacugagaacc

SEQ ID NO: 194473 - RNA, 19 nt, Human
uccaguguagcuggucauu

SEQ ID NO: 194474 - RNA, 22 nt, Human
augggacaauuugaacacagug

SEQ ID NO: 194475 - RNA, 22 nt, Human
gacagcuggcaguggaaaggug

SEQ ID NO: 194476 - RNA, 22 nt, Human
gaggcucagggaaacagcgcag

SEQ ID NO: 194477 - RNA, 22 nt, Human
aggguggcaccacauaucauag

SEQ ID NO: 194478 - RNA, 22 nt, Human
ggacuuggggaaggcacaguua

SEQ ID NO: 194479 - RNA, 22 nt, Human
gcucuguaguauuuaguaaaua

SEQ ID NO: 194480 - RNA, 19 nt, Human
cuggccacaccugcugguu

SEQ ID NO: 194481 - RNA, 22 nt, Human
cugcguguuugcacccugucug

SEQ ID NO: 194482 - RNA, 22 nt, Human
gggagccaugcuggucuucuuu

SEQ ID NO: 194483 - RNA, 22 nt, Human
ugcuuugcucucacuguaaggu

SEQ ID NO: 194484 - RNA, 22 nt, Human
gcuuccugaguacacccucauc

SEQ ID NO: 194485 - RNA, 22 nt, Human
uccuguuuaggcuguggucugg

SEQ ID NO: 194486 - RNA, 22 nt, Human
uaaucuacuguuuauaugaaau

SEQ ID NO: 194487 - RNA, 22 nt, Human
uucaaagcagagggucaauaca

SEQ ID NO: 194488 - RNA, 22 nt, Human
ugccugcauuuuguggcuggcu

SEQ ID NO: 194489 - RNA, 22 nt, Human
cagggacccuacuagcucacac

SEQ ID NO: 194490 - RNA, 22 nt, Human
auguuuacaaaaaggaggcuug

SEQ ID NO: 194491 - RNA, 22 nt, Human
gagcuguguaugcaucauucug

SEQ ID NO: 194492 - RNA, 22 nt, Human
ggguucccugccuggccacucu

SEQ ID NO: 194493 - RNA, 22 nt, Human
agcauuuaggagaauuugagaa

SEQ ID NO: 194494 - RNA, 22 nt, Human
acagccacucaaagggccgaag

SEQ ID NO: 194495 - RNA, 22 nt, Human
uaacaacuugcuuuuaucuuag

SEQ ID NO: 194496 - RNA, 22 nt, Human
auuuaucaccaguuagcugacu

SEQ ID NO: 194497 - RNA, 22 nt, Human
aauggccagcaacaggagugaa

SEQ ID NO: 194498 - RNA, 22 nt, Human
acagcagguuauuguuauggca

SEQ ID NO: 194499 - RNA, 22 nt, Human
auucaagguuggcucaggaauu

SEQ ID NO: 194500 - RNA, 18 nt, Human
aggcaggcggaucacaag

SEQ ID NO: 194501 - RNA, 22 nt, Human
agcuugaaccuaaaacaauaau

SEQ ID NO: 194502 - RNA, 22 nt, Human
aaucucuugggaggaaugaauu

SEQ ID NO: 194503 - RNA, 22 nt, Human
uuccugguccuauuauauacac

SEQ ID NO: 194504 - RNA, 22 nt, Human
accuacaucaagggagugguag

SEQ ID NO: 194505 - RNA, 22 nt, Human
uaaguguugaucugagugcuaa

SEQ ID NO: 194506 - RNA, 22 nt, Human
gaaucagauacugauuucaguc

SEQ ID NO: 194507 - RNA, 22 nt, Human
cuuuuucugauguuccaugauu

SEQ ID NO: 194508 - RNA, 22 nt, Human
uuucauguuggauacuguuuca

SEQ ID NO: 194509 - RNA, 22 nt, Human
gggcucaggccuggccucucac

SEQ ID NO: 194510 - RNA, 19 nt, Human
augcaacaaaaguguaaga

SEQ ID NO: 194511 - RNA, 22 nt, Human
ucugaaagcccuaguuuguaau

SEQ ID NO: 194512 - RNA, 20 nt, Human
ugccagggccagcagaggcu

SEQ ID NO: 194513 - RNA, 23 nt, Human
ucagaguagcaauuuuucucucc

SEQ ID NO: 194514 - RNA, 22 nt, Human
ccugggaggcggagguugcagu

SEQ ID NO: 194515 - RNA, 22 nt, Human
ccucuuuguucaggcugcuggc

SEQ ID NO: 194516 - RNA, 22 nt, Human
cuggcugcuggccugaggaugc

SEQ ID NO: 194517 - RNA, 22 nt, Human
gcuuuagauacucccaaugucc

SEQ ID NO: 194518 - RNA, 22 nt, Human
agaagcuugaaggagcagugac

SEQ ID NO: 194519 - RNA, 22 nt, Human
aaagacaucagaaccagcugag

SEQ ID NO: 194520 - RNA, 22 nt, Human
caaaaguaauugcaguuuuugc

SEQ ID NO: 194521 - RNA, 22 nt, Human
cugggaaauugacacugauaaa

SEQ ID NO: 194522 - RNA, 22 nt, Human
cacauuccuuacauucauagag

SEQ ID NO: 194523 - RNA, 22 nt, Human
uuaggagaugguccucuaggga

SEQ ID NO: 194524 - RNA, 22 nt, Human
agaggcaagggaccuuucuggg

SEQ ID NO: 194525 - RNA, 22 nt, Human
cuggcagucugguggaaggccu

SEQ ID NO: 194526 - RNA, 21 nt, Human
aaguaaugugucucuucuacc

SEQ ID NO: 194527 - RNA, 22 nt, Human
aguuagaagugugucaucugug

SEQ ID NO: 194528 - RNA, 22 nt, Human
ggcaucagagguguguucugcu

SEQ ID NO: 194529 - RNA, 22 nt, Human
acuugcaagguugcaguuagaa

SEQ ID NO: 194530 - RNA, 22 nt, Human
agaagucauuuauguuagauga

SEQ ID NO: 194531 - RNA, 22 nt, Human
agaggaauaaauuucuguagug

SEQ ID NO: 194532 - RNA, 22 nt, Human
cugcuguuuggugagugagaaa

SEQ ID NO: 194533 - RNA, 22 nt, Human
uguuauuuauuucaccuccaga

SEQ ID NO: 194534 - RNA, 20 nt, Human
caaggcagaccagagugagu

SEQ ID NO: 194535 - RNA, 22 nt, Human
uagagaauggccuugaaguagu

SEQ ID NO: 194536 - RNA, 22 nt, Human
acaaaguuauucuuucagagga

SEQ ID NO: 194537 - RNA, 17 nt, Human
gaaaguuucucucucuu

SEQ ID NO: 194538 - RNA, 20 nt, Human
gcuguugccaguacagaugg

SEQ ID NO: 194539 - RNA, 22 nt, Human
uggcucugggaaucuguugcuu

SEQ ID NO: 194540 - RNA, 22 nt, Human
uuuagucuaauaaaaguggagu

SEQ ID NO: 194541 - RNA, 22 nt, Human
auucuuuuaaauggcaguagua

SEQ ID NO: 194542 - RNA, 22 nt, Human
gcaugcaggagagaaagacggc

SEQ ID NO: 194543 - RNA, 22 nt, Human
aacugaggaauaacugaguugc

SEQ ID NO: 194544 - RNA, 22 nt, Human
auauggcagaccaauuagaagc

SEQ ID NO: 194545 - RNA, 22 nt, Human
agcauggcuuuggaggauagca

SEQ ID NO: 194546 - RNA, 22 nt, Human
agagcccagucuuugugugaag

SEQ ID NO: 194547 - RNA, 22 nt, Human
acccagcuaacccuacccugga

SEQ ID NO: 194548 - RNA, 22 nt, Human
auugaaaguccuaucuaaggga

SEQ ID NO: 194549 - RNA, 22 nt, Human
gagggaggugauacugaacgua

SEQ ID NO: 194550 - RNA, 22 nt, Human
uaaucuagucccacauggaauu

SEQ ID NO: 194551 - RNA, 22 nt, Human
gcccaaggucccauggcagcac

SEQ ID NO: 194552 - RNA, 22 nt, Human
aauuuuguuuaagugaucugcu

SEQ ID NO: 194553 - RNA, 22 nt, Human
acugcaggaugugcuccuauug

SEQ ID NO: 194554 - RNA, 22 nt, Human
uggaacugcuccaaaaccucca

SEQ ID NO: 194555 - RNA, 21 nt, Human
cuuugcauacagaugccaauu

SEQ ID NO: 194556 - RNA, 22 nt, Human
ucuuuuucugcacacguguccc

SEQ ID NO: 194557 - RNA, 22 nt, Human
cagcagaggaaagcaaaucuaa

SEQ ID NO: 194558 - RNA, 23 nt, Human
uuucuguuccucuagcuuugcau

SEQ ID NO: 194559 - RNA, 22 nt, Human
agcuucugaaagucuguuuucc

SEQ ID NO: 194560 - RNA, 22 nt, Human
gaggacacggccuuuuggaaaa

SEQ ID NO: 194561 - RNA, 22 nt, Human
auuacagaagauaugcucaaca

SEQ ID NO: 194562 - RNA, 22 nt, Human
augaugaaacuaggaacuagag

SEQ ID NO: 194563 - RNA, 22 nt, Human
agcacaggaccaaggaagcugu

SEQ ID NO: 194564 - RNA, 22 nt, Human
cuuaauuacccaaugugguagg

SEQ ID NO: 194565 - RNA, 22 nt, Human
uggccugccccgagauccuggc

SEQ ID NO: 194566 - RNA, 22 nt, Human
gcucuggcucaaaccaccggcu

SEQ ID NO: 194567 - RNA, 22 nt, Human
uccuggguucauguccuggugc

SEQ ID NO: 194568 - RNA, 22 nt, Human
gagcugcuggcuccucagguua

SEQ ID NO: 194569 - RNA, 23 nt, Human
aagugguuuugaacccggacccu

SEQ ID NO: 194570 - RNA, 22 nt, Human
uugcaaaaccauccuaaguaaa

SEQ ID NO: 194571 - RNA, 22 nt, Human
cagagcugagucuucaagguug

SEQ ID NO: 194572 - RNA, 22 nt, Human
ucaggaggccaccaggaccugu

SEQ ID NO: 194573 - RNA, 22 nt, Human
uucucaacucucaagagaagcu

SEQ ID NO: 194574 - RNA, 22 nt, Human
ggcuccuggaaagcccucgcuc

SEQ ID NO: 194575 - RNA, 20 nt, Human
uauugaguaccuacuguaua

SEQ ID NO: 194576 - RNA, 22 nt, Human
cugggagggguagccaauccua

SEQ ID NO: 194577 - RNA, 22 nt, Human
gaggcacaucacuuggugcauu

SEQ ID NO: 194578 - RNA, 22 nt, Human
ugcaagagacagacaugacuca

SEQ ID NO: 194579 - RNA, 22 nt, Human
cugggccucaaucucagaguuu

SEQ ID NO: 194580 - RNA, 22 nt, Human
gccagccagggaagggagagac

SEQ ID NO: 194581 - RNA, 22 nt, Human
uuggaauucagcuugcuuauaa

SEQ ID NO: 194582 - RNA, 22 nt, Human
guagcuuauuagggauaauagu

SEQ ID NO: 194583 - RNA, 22 nt, Human
gggcugagucaucuggggccuc

SEQ ID NO: 194584 - RNA, 22 nt, Human
agacaacaucacuaaagcugag

SEQ ID NO: 194585 - RNA, 20 nt, Human
aaguuuucuccaaauacagu

SEQ ID NO: 194586 - RNA, 22 nt, Human
ugccaaaauggccaaaagcuag

SEQ ID NO: 194587 - RNA, 22 nt, Human
ucccagggacuggaugaugcag

SEQ ID NO: 194588 - RNA, 22 nt, Human
agucuugaaagcacauuagagu

SEQ ID NO: 194589 - RNA, 22 nt, Human
gggacagaggcaaacuagcaga

SEQ ID NO: 194590 - RNA, 22 nt, Human
ggccagcuuauuagcucagagg

SEQ ID NO: 194591 - RNA, 22 nt, Human
ccagagaguaucauggagagua

SEQ ID NO: 194592 - RNA, 22 nt, Human
ugagauggggagggcugcagaa

SEQ ID NO: 194593 - RNA, 22 nt, Human
uccaggaguggggcagaggucu

SEQ ID NO: 194594 - RNA, 23 nt, Human
gccagcuuuggucugucuccuag

SEQ ID NO: 194595 - RNA, 22 nt, Human
ggcuuccuuucacuacccucag

SEQ ID NO: 194596 - RNA, 19 nt, Human
ugggaugaugcagaaggua

SEQ ID NO: 194597 - RNA, 22 nt, Human
caaaugcaugagaaauaagagg

SEQ ID NO: 194598 - RNA, 22 nt, Human
gaauauauuucucuuaccuuua

SEQ ID NO: 194599 - RNA, 22 nt, Human
ggcucucuggaggagcucaccc

SEQ ID NO: 194600 - RNA, 22 nt, Human
gaacauaacuauugugaauagu

SEQ ID NO: 194601 - RNA, 23 nt, Human
cagggcugggcuugguguuaggc

SEQ ID NO: 194602 - RNA, 22 nt, Human
ucagaauaaguuaugaaaugaa

SEQ ID NO: 194603 - RNA, 22 nt, Human
aauuaggaaaugagaguauuug

SEQ ID NO: 194604 - RNA, 22 nt, Human
acaagucuguuaugcaccugga

SEQ ID NO: 194605 - RNA, 22 nt, Human
uagcugcccaucuuuccuuuag

SEQ ID NO: 194606 - RNA, 22 nt, Human
gggcagcucuggcugugggaag

SEQ ID NO: 194607 - RNA, 22 nt, Human
uauauguagauuguaccaaugu

SEQ ID NO: 194608 - RNA, 22 nt, Human
agucaguuuucuuaaagggaag

SEQ ID NO: 194609 - RNA, 22 nt, Human
ccagcaucuaugugcuguugau

SEQ ID NO: 194610 - RNA, 22 nt, Human
cagcuccagcucugggcgccuc

SEQ ID NO: 194611 - RNA, 22 nt, Human
uauucaugacauugcauaugca

SEQ ID NO: 194612 - RNA, 22 nt, Human
gagaggagguggcuaugacagc

SEQ ID NO: 194613 - RNA, 20 nt, Human
uucuaauuugauggaguagc

SEQ ID NO: 194614 - RNA, 22 nt, Human
uugguuuauuucuuccuaugag

SEQ ID NO: 194615 - RNA, 22 nt, Human
cuuuuucauuggcuuuaggaca

SEQ ID NO: 194616 - RNA, 22 nt, Human
cucagagcaaugaacaugcaaa

SEQ ID NO: 194617 - RNA, 22 nt, Human
cacuucaacaguuauuucuuag

SEQ ID NO: 194618 - RNA, 22 nt, Human
aguguuuuucaggagcagaaca

SEQ ID NO: 194619 - RNA, 21 nt, Human
cccgcaucuuccucuccagca

SEQ ID NO: 194620 - RNA, 22 nt, Human
uuucuaggucuuccauacugcc

SEQ ID NO: 194621 - RNA, 22 nt, Human
ucagcucugcacuccacugugg

SEQ ID NO: 194622 - RNA, 22 nt, Human
aucagguagauuuaauauucug

SEQ ID NO: 194623 - RNA, 22 nt, Human
ugggacaggaggccucuggaga

SEQ ID NO: 194624 - RNA, 22 nt, Human
uguccagcugacauucccuucc

SEQ ID NO: 194625 - RNA, 23 nt, Human
gugacccaaggaccuuccagaau

SEQ ID NO: 194626 - RNA, 21 nt, Human
aucagaaguuuuggucaguag

SEQ ID NO: 194627 - RNA, 22 nt, Human
uaauaauuuuaaagaaggcuag

SEQ ID NO: 194628 - RNA, 22 nt, Human
uggcuggggagccccgacuccc

SEQ ID NO: 194629 - RNA, 22 nt, Human
ggcauuugagccauuggccugu

SEQ ID NO: 194630 - RNA, 20 nt, Human
aggguucccuuguucagcag

SEQ ID NO: 194631 - RNA, 22 nt, Human
cuggagcucuccagagccccgu

SEQ ID NO: 194632 - RNA, 22 nt, Human
ucaggccuuguccugaccuccu

SEQ ID NO: 194633 - RNA, 22 nt, Human
gccucagggauaggaugagcau

SEQ ID NO: 194634 - RNA, 22 nt, Human
uuguauuuuguuaugcuacugc

SEQ ID NO: 194635 - RNA, 22 nt, Human
caggggcuuaagugacagaagg

SEQ ID NO: 194636 - RNA, 22 nt, Human
ucucagugguguuuugagucca

SEQ ID NO: 194637 - RNA, 22 nt, Human
cugaggucagaguuuagucugg

SEQ ID NO: 194638 - RNA, 22 nt, Human
aaucagaaauucuacaucacaa

SEQ ID NO: 194639 - RNA, 22 nt, Human
aaggcaguuaccgcaauggagg

SEQ ID NO: 194640 - RNA, 22 nt, Human
agcaagauuuaaacccagguca

SEQ ID NO: 194641 - RNA, 22 nt, Human
aagaucagaacuuuauacagga

SEQ ID NO: 194642 - RNA, 22 nt, Human
gcuugggagaggguccccagga

SEQ ID NO: 194643 - RNA, 17 nt, Human
aggcaggagauuggaga

SEQ ID NO: 194644 - RNA, 22 nt, Human
uuauuauuuuguguacagcaaa

SEQ ID NO: 194645 - RNA, 16 nt, Human
gcagagcucagggacu

SEQ ID NO: 194646 - RNA, 22 nt, Human
uccaggcaaggauaauaaacau

SEQ ID NO: 194647 - RNA, 22 nt, Human
cccaggcagccugcagggaagg

SEQ ID NO: 194648 - RNA, 22 nt, Human
agagcagcugacagccugccau

SEQ ID NO: 194649 - RNA, 22 nt, Human
acuggcaauagcaaaugcuugg

SEQ ID NO: 194650 - RNA, 22 nt, Human
uaaguucauaagcuuauucuua

SEQ ID NO: 194651 - RNA, 22 nt, Human
ucuuuggucagaaagauuacac

SEQ ID NO: 194652 - RNA, 22 nt, Human
gagacagcuuaauuggugguca

SEQ ID NO: 194653 - RNA, 22 nt, Human
ucaggcuggagugcaguggcgc

SEQ ID NO: 194654 - RNA, 22 nt, Human
ugccuugcacauaauauacauu

SEQ ID NO: 194655 - RNA, 22 nt, Human
auuuuccuccaugugagcaguu

SEQ ID NO: 194656 - RNA, 22 nt, Human
agcccaggugacucauacaccc

SEQ ID NO: 194657 - RNA, 22 nt, Human
uuuggagauagggccuagcaau

SEQ ID NO: 194658 - RNA, 22 nt, Human
augucaaacacaacaccagugg

SEQ ID NO: 194659 - RNA, 22 nt, Human
uugcaaagaauuuuacauucua

SEQ ID NO: 194660 - RNA, 22 nt, Human
aaaagcucuuucugcuguagau

SEQ ID NO: 194661 - RNA, 22 nt, Human
acaacaaaaugaggaagugguc

SEQ ID NO: 194662 - RNA, 22 nt, Human
ugcccagcuucuuacuuuuaaa

SEQ ID NO: 194663 - RNA, 22 nt, Human
aaagcaugauuagauagaugau

SEQ ID NO: 194664 - RNA, 22 nt, Human
ucuuagauggcagcuagagcuc

SEQ ID NO: 194665 - RNA, 22 nt, Human
cugguuuacucugcacugcuca

SEQ ID NO: 194666 - RNA, 22 nt, Human
cugggccuccacgggccaucac

SEQ ID NO: 194667 - RNA, 22 nt, Human
gcagacagaagcuaaguagaca

SEQ ID NO: 194668 - RNA, 22 nt, Human
ucuggguccgggggugaauuga

SEQ ID NO: 194669 - RNA, 22 nt, Human
ugugugaguaaggcugagagag

SEQ ID NO: 194670 - RNA, 22 nt, Human
uacagggaaugggacauaaauc

SEQ ID NO: 194671 - RNA, 22 nt, Human
ugaaacaauuagaauguaauga

SEQ ID NO: 194672 - RNA, 22 nt, Human
cuucuggguugcaggucuuggc

SEQ ID NO: 194673 - RNA, 22 nt, Human
acaguaaaaagccuuagaauuu

SEQ ID NO: 194674 - RNA, 22 nt, Human
ugcagauacaguauguggaagc

SEQ ID NO: 194675 - RNA, 22 nt, Human
ugguccaguagcagggauacca

SEQ ID NO: 194676 - RNA, 22 nt, Human
gccugaagaacagcugugagga

SEQ ID NO: 194677 - RNA, 22 nt, Human
uccugggaggaacauuuaccua

SEQ ID NO: 194678 - RNA, 22 nt, Human
guggcugcaucggggugaccag

SEQ ID NO: 194679 - RNA, 22 nt, Human
ucaggagcagggucuguuacca

SEQ ID NO: 194680 - RNA, 22 nt, Human
gagcuggaggcagugcugaggu

SEQ ID NO: 194681 - RNA, 22 nt, Human
accauuuuggguauuuucagag

SEQ ID NO: 194682 - RNA, 22 nt, Human
aagucucuuuggguacuuuauu

SEQ ID NO: 194683 - RNA, 22 nt, Human
uucauucagugcauuugggaga

SEQ ID NO: 194684 - RNA, 22 nt, Human
aaaagugaugggauggcacuuc

SEQ ID NO: 194685 - RNA, 22 nt, Human
ugacagaaauaguucuuaauuu

SEQ ID NO: 194686 - RNA, 22 nt, Human
ucuccaggcuuaaucucagcuu

SEQ ID NO: 194687 - RNA, 22 nt, Human
acucucacugcuuggcuccugc

SEQ ID NO: 194688 - RNA, 22 nt, Human
auuccaguuggguucuaauaca

SEQ ID NO: 194689 - RNA, 22 nt, Human
guuguuuauaaaaauaucuagc

SEQ ID NO: 194690 - RNA, 22 nt, Human
ccauuacuuuccaauauaucag

SEQ ID NO: 194691 - RNA, 22 nt, Human
aacaugaaacccaaacagaaua

SEQ ID NO: 194692 - RNA, 22 nt, Human
gcauucuucgaaguaaguagug

SEQ ID NO: 194693 - RNA, 20 nt, Human
agguggcuccugcugggggu

SEQ ID NO: 194694 - RNA, 22 nt, Human
aucuuguucucccuuguucuua

SEQ ID NO: 194695 - RNA, 22 nt, Human
augucacuguuguuauuguuau

SEQ ID NO: 194696 - RNA, 22 nt, Human
uuccaggcuccugcaguuucua

SEQ ID NO: 194697 - RNA, 22 nt, Human
auguaguuagaagauucaaaca

SEQ ID NO: 194698 - RNA, 20 nt, Human
acaggagaucugaggaaagg

SEQ ID NO: 194699 - RNA, 22 nt, Human
augccacauaaccaguucacuu

SEQ ID NO: 194700 - RNA, 22 nt, Human
cagagacagggcagggagugug

SEQ ID NO: 194701 - RNA, 22 nt, Human
acaccagccucgcccguguguu

SEQ ID NO: 194702 - RNA, 22 nt, Human
ggaacugagaagcagcuaugcc

SEQ ID NO: 194703 - RNA, 21 nt, Human
aucuggaaauucugccagaga

SEQ ID NO: 194704 - RNA, 22 nt, Human
ugggagcagcauugccaugugc

SEQ ID NO: 194705 - RNA, 22 nt, Human
ggcugaaaggugggaggauggc

SEQ ID NO: 194706 - RNA, 22 nt, Human
cuugccugcuggagcagggcuc

SEQ ID NO: 194707 - RNA, 22 nt, Human
ccuguuuauugugaagaaccca

SEQ ID NO: 194708 - RNA, 22 nt, Human
cugcccagaagcuuagagcuua

SEQ ID NO: 194709 - RNA, 22 nt, Human
accuuuauagcugauuaugaca

SEQ ID NO: 194710 - RNA, 22 nt, Human
uuucacaacguuguggugagag

SEQ ID NO: 194711 - RNA, 22 nt, Human
uuuagacagcggcucugaacca

SEQ ID NO: 194712 - RNA, 22 nt, Human
ucuaaauguaucacaucuggau

SEQ ID NO: 194713 - RNA, 22 nt, Human
guuagaaaugcagaaacuugac

SEQ ID NO: 194714 - RNA, 22 nt, Human
aagguugcuguuuugcuucaaa

SEQ ID NO: 194715 - RNA, 22 nt, Human
cugggacauuauaagaaacauu

SEQ ID NO: 194716 - RNA, 22 nt, Human
uaugcacaguuacaagaauauc

SEQ ID NO: 194717 - RNA, 22 nt, Human
uccagcagcccgaaggcccauc

SEQ ID NO: 194718 - RNA, 22 nt, Human
agcugcaguaugaggcuggugg

SEQ ID NO: 194719 - RNA, 22 nt, Human
uaaauacugaguuggaguuggc

SEQ ID NO: 194720 - RNA, 19 nt, Human
cagagcagugguuccugaa

SEQ ID NO: 194721 - RNA, 22 nt, Human
cugucuaguuaggaugccagca

SEQ ID NO: 194722 - RNA, 22 nt, Human
uggcagaaguucacuaguagcu

SEQ ID NO: 194723 - RNA, 22 nt, Human
uccagcuugacaaaugauuuua

SEQ ID NO: 194724 - RNA, 23 nt, Human
aaauucaguccuucaacucugag

SEQ ID NO: 194725 - RNA, 22 nt, Human
uccugaggaaaguucaugaaug

SEQ ID NO: 194726 - RNA, 17 nt, Human
ugggguccccgauggug

SEQ ID NO: 194727 - RNA, 22 nt, Human
ggggcugguggugguuucucca

SEQ ID NO: 194728 - RNA, 22 nt, Human
aggacuuuucaucagcuauccu

SEQ ID NO: 194729 - RNA, 21 nt, Human
ggccucagccaccuggcucug

SEQ ID NO: 194730 - RNA, 22 nt, Human
augagguuuugauuggcacagg

SEQ ID NO: 194731 - RNA, 22 nt, Human
agacacaucuuagguugucagg

SEQ ID NO: 194732 - RNA, 22 nt, Human
uuaauacaagcauaugcacaca

SEQ ID NO: 194733 - RNA, 22 nt, Human
gcugccugcucggcuccuggga

SEQ ID NO: 194734 - RNA, 22 nt, Human
uuacauucuuggaaucuuguuu

SEQ ID NO: 194735 - RNA, 22 nt, Human
aaaaacacaacugucuuucucu

SEQ ID NO: 194736 - RNA, 22 nt, Human
uaaaacuuaacuauccagauua

SEQ ID NO: 194737 - RNA, 22 nt, Human
uccagcccuguggcuuccaccc

SEQ ID NO: 194738 - RNA, 22 nt, Human
uguaaacaguaggacuaaagag

SEQ ID NO: 194739 - RNA, 22 nt, Human
cauggcaggaggcugcuggcag

SEQ ID NO: 194740 - RNA, 22 nt, Human
caggaaauaaaaaguaucuucu

SEQ ID NO: 194741 - RNA, 22 nt, Human
aagugauuguuccguugagugu

SEQ ID NO: 194742 - RNA, 22 nt, Human
aguuaacaaguuggcaaucaac

SEQ ID NO: 194743 - RNA, 22 nt, Human
cccuguuuaagaaaccuguaaa

SEQ ID NO: 194744 - RNA, 20 nt, Human
ucugcucagcccucaguggc

SEQ ID NO: 194745 - RNA, 22 nt, Human
uaagcaaauagcuagaucagag

SEQ ID NO: 194746 - RNA, 22 nt, Human
auauuaaauggauuuugggagc

SEQ ID NO: 194747 - RNA, 22 nt, Human
uuccaggaccaggaagagggga

SEQ ID NO: 194748 - RNA, 22 nt, Human
uucuuguauguaugcaaaauca

SEQ ID NO: 194749 - RNA, 22 nt, Human
ucuguaaacacccguaagcuuu

SEQ ID NO: 194750 - RNA, 22 nt, Human
ccucaggccucugccucauugg

SEQ ID NO: 194751 - RNA, 22 nt, Human
acuuucaagaacuucuuuaaug

SEQ ID NO: 194752 - RNA, 22 nt, Human
uauauucaacaggcuaauguca

SEQ ID NO: 194753 - RNA, 22 nt, Human
aacacagacauagugauuacag

SEQ ID NO: 194754 - RNA, 22 nt, Human
uccaucaccauuucugcgagcu

SEQ ID NO: 194755 - RNA, 22 nt, Human
cacccagcauuggcuaagagag

SEQ ID NO: 194756 - RNA, 18 nt, Human
uccaccagucaaucuguc

SEQ ID NO: 194757 - RNA, 22 nt, Human
ucuguguuuuacuccaauuaua

SEQ ID NO: 194758 - RNA, 22 nt, Human
gcaaaaguacagccggauuucu

SEQ ID NO: 194759 - RNA, 22 nt, Human
aggaauuaacaauauauuuagg

SEQ ID NO: 194760 - RNA, 22 nt, Human
cugcacccugcagguaccccug

SEQ ID NO: 194761 - RNA, 21 nt, Human
cagcccagcccauugacagug

SEQ ID NO: 194762 - RNA, 19 nt, Human
ugggcagcucccucugucc

SEQ ID NO: 194763 - RNA, 18 nt, Human
aggcuucccaggcaggcc

SEQ ID NO: 194764 - RNA, 22 nt, Human
uggcugaggcuuuucuuaaaga

SEQ ID NO: 194765 - RNA, 22 nt, Human
cuugggcccuccccuugugaau

SEQ ID NO: 194766 - RNA, 22 nt, Human
agacaaauuuccugcaaugaag

SEQ ID NO: 194767 - RNA, 22 nt, Human
uuauacauguguuuugagauga

SEQ ID NO: 194768 - RNA, 22 nt, Human
acuuuugguucuguaacuguga

SEQ ID NO: 194769 - RNA, 20 nt, Human
gagcccucugcacuagcgcc

SEQ ID NO: 194770 - RNA, 22 nt, Human
aagaacaugaacacaauguuua

SEQ ID NO: 194771 - RNA, 21 nt, Human
ugaaacauuugaucaaagcac

SEQ ID NO: 194772 - RNA, 22 nt, Human
acuuuggaaauugucuauaaga

SEQ ID NO: 194773 - RNA, 22 nt, Human
aacugauuguuggaugauagug

SEQ ID NO: 194774 - RNA, 22 nt, Human
gauguagacacuuggaggcuua

SEQ ID NO: 194775 - RNA, 22 nt, Human
aguuuggaaaaugagacaagga

SEQ ID NO: 194776 - RNA, 22 nt, Human
uccagagcugggucugugcuca

SEQ ID NO: 194777 - RNA, 22 nt, Human
gcuguguguucaauaaugugau

SEQ ID NO: 194778 - RNA, 22 nt, Human
ugcucccuugccagaggggaag

SEQ ID NO: 194779 - RNA, 22 nt, Human
ucugggaguuagaauacauggg

SEQ ID NO: 194780 - RNA, 22 nt, Human
cauaauuaaauucugggcaaga

SEQ ID NO: 194781 - RNA, 22 nt, Human
ugugggaaugacgaggaagagg

SEQ ID NO: 194782 - RNA, 22 nt, Human
augguggauuugugauucagcu

SEQ ID NO: 194783 - RNA, 22 nt, Human
uaguuuagcacuaagaaaaaca

SEQ ID NO: 194784 - RNA, 22 nt, Human
acacuggaggguccagggaugu

SEQ ID NO: 194785 - RNA, 22 nt, Human
aagguauuuucuaauguauacu

SEQ ID NO: 194786 - RNA, 22 nt, Human
gcaggcuugcccggccuccuuc

SEQ ID NO: 194787 - RNA, 22 nt, Human
gcuggcucuacauuugagguca

SEQ ID NO: 194788 - RNA, 19 nt, Human
gcugcagaggugaagaaga

SEQ ID NO: 194789 - RNA, 22 nt, Human
uguggaaaagaauaagggagau

SEQ ID NO: 194790 - RNA, 22 nt, Human
acacuguagacuguugaaguac

SEQ ID NO: 194791 - RNA, 19 nt, Human
ccucugugggagucaguga

SEQ ID NO: 194792 - RNA, 22 nt, Human
gagucagacagggucacccaga

SEQ ID NO: 194793 - RNA, 22 nt, Human
ugcuagugugugagauguucaa

SEQ ID NO: 194794 - RNA, 22 nt, Human
uuuauuguguugaaacugaauu

SEQ ID NO: 194795 - RNA, 22 nt, Human
ucauuauaaacauaugcuaaag

SEQ ID NO: 194796 - RNA, 22 nt, Human
ucccagccuccugacaguuuug

SEQ ID NO: 194797 - RNA, 20 nt, Human
agcaaacaggcuccaccaga

SEQ ID NO: 194798 - RNA, 22 nt, Human
ucuccagggcccccgagcguug

SEQ ID NO: 194799 - RNA, 20 nt, Human
ggucucugacagcugguugc

SEQ ID NO: 194800 - RNA, 22 nt, Human
agguggcaugccugagacauaa

SEQ ID NO: 194801 - RNA, 22 nt, Human
acccaggcuagggugcaguggc

SEQ ID NO: 194802 - RNA, 22 nt, Human
uacugcaugguggaguggagcu

SEQ ID NO: 194803 - RNA, 18 nt, Human
gguggcuggggacggaca

SEQ ID NO: 194804 - RNA, 22 nt, Human
ggcagcucaccucugguccagg

SEQ ID NO: 194805 - RNA, 22 nt, Human
cggcagugggcgccaggucucc

SEQ ID NO: 194806 - RNA, 22 nt, Human
caaggcaggucugaggagguug

SEQ ID NO: 194807 - RNA, 22 nt, Human
uuaguuuucccaucuuuauggu

SEQ ID NO: 194808 - RNA, 21 nt, Human
agcucagcaagauggaggcuc

SEQ ID NO: 194809 - RNA, 22 nt, Human
ggaacauuuccuggcagagagg

SEQ ID NO: 194810 - RNA, 22 nt, Human
ugcagccugguggucacuggag

SEQ ID NO: 194811 - RNA, 22 nt, Human
cagggggcucaaaggagagugc

SEQ ID NO: 194812 - RNA, 22 nt, Human
ugaacaugcuguugauggccug

SEQ ID NO: 194813 - RNA, 22 nt, Human
uaugaagacaaugauagcauga

SEQ ID NO: 194814 - RNA, 19 nt, Human
caaggccaccauuucuccg

SEQ ID NO: 194815 - RNA, 18 nt, Human
ggcugugcguggaggcug

SEQ ID NO: 194816 - RNA, 22 nt, Human
cucuaggcugcccaggagcuga

SEQ ID NO: 194817 - RNA, 22 nt, Human
uuguaaaguucuuaggaagcuc

SEQ ID NO: 194818 - RNA, 22 nt, Human
uggagggcucuuucaccuggua

SEQ ID NO: 194819 - RNA, 22 nt, Human
acaaaguuaacaguuggauagu

SEQ ID NO: 194820 - RNA, 22 nt, Human
ccagugccuuuuguggguuugu

SEQ ID NO: 194821 - RNA, 22 nt, Human
ugagauuucaggccaaggagug

SEQ ID NO: 194822 - RNA, 22 nt, Human
gguaaaaugcagauucuuagcc

SEQ ID NO: 194823 - RNA, 22 nt, Human
agugaguugaacauugauaaug

SEQ ID NO: 194824 - RNA, 22 nt, Human
acagguuuuggacuccagauuu

SEQ ID NO: 194825 - RNA, 22 nt, Human
uucauaguguuuccuuccagug

SEQ ID NO: 194826 - RNA, 22 nt, Human
ucacuggugugagaggagcaaa

SEQ ID NO: 194827 - RNA, 22 nt, Human
uguguccuuccaguuuuuccug

SEQ ID NO: 194828 - RNA, 18 nt, Human
gcagugccagccucuccu

SEQ ID NO: 194829 - RNA, 22 nt, Human
ccccaucuucccugagggauuu

SEQ ID NO: 194830 - RNA, 22 nt, Human
cacaagucuguggucuccaaca

SEQ ID NO: 194831 - RNA, 23 nt, Human
caaaccuguucuccccacaugca

SEQ ID NO: 194832 - RNA, 22 nt, Human
uuacaagcagcuacauaucaca

SEQ ID NO: 194833 - RNA, 22 nt, Human
ccacagagacucugcaggacug

SEQ ID NO: 194834 - RNA, 22 nt, Human
gggguccucggagccugggucu

SEQ ID NO: 194835 - RNA, 22 nt, Human
cccaggcagugcugaucccuca

SEQ ID NO: 194836 - RNA, 22 nt, Human
ucaacacaacagagaaaugcug

SEQ ID NO: 194837 - RNA, 22 nt, Human
ccuccuggaaaaauucccuggc

SEQ ID NO: 194838 - RNA, 22 nt, Human
ucccuuggaaaguagccucaca

SEQ ID NO: 194839 - RNA, 20 nt, Human
agagugagacuccaucucag

SEQ ID NO: 194840 - RNA, 22 nt, Human
ugguaccagcuguguguucacu

SEQ ID NO: 194841 - RNA, 22 nt, Human
agugugaguaauugagucuguc

SEQ ID NO: 194842 - RNA, 22 nt, Human
ggugagcaaagcuucaucugua

SEQ ID NO: 194843 - RNA, 22 nt, Human
agagaccuuuguuauucuagga

SEQ ID NO: 194844 - RNA, 22 nt, Human
uggaccugagccuggcccugcc

SEQ ID NO: 194845 - RNA, 23 nt, Human
ucuaaugcaauuagaaauuaggg

SEQ ID NO: 194846 - RNA, 22 nt, Human
uugcaaaucuuugccagaaggc

SEQ ID NO: 194847 - RNA, 20 nt, Human
uuugucuguuaaguguuucu

SEQ ID NO: 194848 - RNA, 19 nt, Human
agucucaguguacagaggc

SEQ ID NO: 194849 - RNA, 22 nt, Human
gacacagcuugaugagggcuuu

SEQ ID NO: 194850 - RNA, 22 nt, Human
ucaguguccaaaaagaggcaag

SEQ ID NO: 194851 - RNA, 22 nt, Human
ggaaggggugucgcccauggau

SEQ ID NO: 194852 - RNA, 23 nt, Human
gugagcagcccacuaggaaugcc

SEQ ID NO: 194853 - RNA, 17 nt, Human
uguuuucauucauugcu

SEQ ID NO: 194854 - RNA, 19 nt, Human
acucaggcuuccucugagg

SEQ ID NO: 194855 - RNA, 22 nt, Human
cugaggucuauuuugaaacugc

SEQ ID NO: 194856 - RNA, 22 nt, Human
cucuuuuaugugacguguguga

SEQ ID NO: 194857 - RNA, 22 nt, Human
uccaucuggguggggagaagga

SEQ ID NO: 194858 - RNA, 18 nt, Human
agacagcugaaaggaaaa

SEQ ID NO: 194859 - RNA, 22 nt, Human
cuuggaaucaaguuuuuggaga

SEQ ID NO: 194860 - RNA, 22 nt, Human
aggaauguuaaagauuaagagc

SEQ ID NO: 194861 - RNA, 22 nt, Human
ugggcucuggguggccugagca

SEQ ID NO: 194862 - RNA, 22 nt, Human
cuuucagucuuuacaagguugc

SEQ ID NO: 194863 - RNA, 22 nt, Human
gguccuggaugagacagguagu

SEQ ID NO: 194864 - RNA, 22 nt, Human
accccaagacaguagaagagaa

SEQ ID NO: 194865 - RNA, 22 nt, Human
gcugcccuguccggcucuccug

SEQ ID NO: 194866 - RNA, 22 nt, Human
uaauuuugucacagugacaugc

SEQ ID NO: 194867 - RNA, 22 nt, Human
uucuguuagaauuuugaaaaua

SEQ ID NO: 194868 - RNA, 22 nt, Human
acagaauagguacagucaguca

SEQ ID NO: 194869 - RNA, 22 nt, Human
auuuccauacacccauuucuga

SEQ ID NO: 194870 - RNA, 22 nt, Human
caugcacacugcaacaaggacu

SEQ ID NO: 194871 - RNA, 22 nt, Human
ggcuucugccacgagagggaag

SEQ ID NO: 194872 - RNA, 22 nt, Human
ccaggcugcuguugguguccgc

SEQ ID NO: 194873 - RNA, 22 nt, Human
ugcugaaggcaggggagguggc

SEQ ID NO: 194874 - RNA, 22 nt, Human
gaagaaggaagaucaugcuuga

SEQ ID NO: 194875 - RNA, 22 nt, Human
ucccucacugguucugcauccc

SEQ ID NO: 194876 - RNA, 22 nt, Human
caggaaugaggucguaaguguc

SEQ ID NO: 194877 - RNA, 22 nt, Human
caguggaauacgagcagauguc

SEQ ID NO: 194878 - RNA, 22 nt, Human
uuucugcauuguccucuugguu

SEQ ID NO: 194879 - RNA, 22 nt, Human
cucugccaguuucuggccucag

SEQ ID NO: 194880 - RNA, 22 nt, Human
ugggugggagcacccugucugg

SEQ ID NO: 194881 - RNA, 22 nt, Human
aagcaggcauuccagagacaau

SEQ ID NO: 194882 - RNA, 22 nt, Human
uuccuugguagagagaauauuu

SEQ ID NO: 194883 - RNA, 22 nt, Human
guauuaggagguggagccuuug

SEQ ID NO: 194884 - RNA, 22 nt, Human
agugcagagagcaauacucuac

SEQ ID NO: 194885 - RNA, 22 nt, Human
cccacacacauuuaugauagga

SEQ ID NO: 194886 - RNA, 22 nt, Human
cagcuccaaagccccacugucc

SEQ ID NO: 194887 - RNA, 22 nt, Human
gugcacagauucagagguuuug

SEQ ID NO: 194888 - RNA, 22 nt, Human
ggcacacagauggagcacuagc

SEQ ID NO: 194889 - RNA, 22 nt, Human
uuccuucuaauauucugccugu

SEQ ID NO: 194890 - RNA, 22 nt, Human
cugccagcucaaagcgcagcua

SEQ ID NO: 194891 - RNA, 22 nt, Human
uaaaaggagguugaagcuguca

SEQ ID NO: 194892 - RNA, 22 nt, Human
agcuaugugauuuaaacaaggu

SEQ ID NO: 194893 - RNA, 21 nt, Human
gcugcccaacccugcaucucc

SEQ ID NO: 194894 - RNA, 23 nt, Human
aaacaugcagcacaugaaugcua

SEQ ID NO: 194895 - RNA, 22 nt, Human
ugccaggcugcccuccagucug

SEQ ID NO: 194896 - RNA, 22 nt, Human
cuguggaguggggaguacuggu

SEQ ID NO: 194897 - RNA, 22 nt, Human
ggcuucaccugugcacucuacc

SEQ ID NO: 194898 - RNA, 22 nt, Human
agcagcucaagacuuaaauuug

SEQ ID NO: 194899 - RNA, 22 nt, Human
gugcaggagcuucuggccugac

SEQ ID NO: 194900 - RNA, 22 nt, Human
ggccagaggaccucucauagcc

SEQ ID NO: 194901 - RNA, 22 nt, Human
acuugggagggugugggcagcu

SEQ ID NO: 194902 - RNA, 22 nt, Human
uagaacuggcggcuagaccacu

SEQ ID NO: 194903 - RNA, 22 nt, Human
acagguggcacugcuguuacuc

SEQ ID NO: 194904 - RNA, 22 nt, Human
uucaaaaagguauguucaaguc

SEQ ID NO: 194905 - RNA, 22 nt, Human
gcuguucacagacucugcucug

SEQ ID NO: 194906 - RNA, 22 nt, Human
uuuuguguccuucacaucaugu

SEQ ID NO: 194907 - RNA, 22 nt, Human
ccugccagccagaucacucgcc

SEQ ID NO: 194908 - RNA, 22 nt, Human
gagcuccagggaacagcagcua

SEQ ID NO: 194909 - RNA, 19 nt, Human
uuugacuccucauuuuuau

SEQ ID NO: 194910 - RNA, 22 nt, Human
cugagcugggaguagagacucu

SEQ ID NO: 194911 - RNA, 22 nt, Human
cucucuggcacuucauugcugu

SEQ ID NO: 194912 - RNA, 21 nt, Human
cauuuacaugacagauugguu

SEQ ID NO: 194913 - RNA, 22 nt, Human
uuucuaaguaagauuaacuucu

SEQ ID NO: 194914 - RNA, 22 nt, Human
acaaggagaagaaauuggucau

SEQ ID NO: 194915 - RNA, 22 nt, Human
ugcuggcucaguuugcagacuc

SEQ ID NO: 194916 - RNA, 22 nt, Human
gucucucugcuaggccuccagu

SEQ ID NO: 194917 - RNA, 22 nt, Human
aaaguguuuuugagcuguaguu

SEQ ID NO: 194918 - RNA, 22 nt, Human
uauuucaccuaaaagugucaaa

SEQ ID NO: 194919 - RNA, 22 nt, Human
accaaggagacaaagguguauu

SEQ ID NO: 194920 - RNA, 22 nt, Human
ggagggaaccuuggcuggauug

SEQ ID NO: 194921 - RNA, 22 nt, Human
acucccuccaaaucugcacagu

SEQ ID NO: 194922 - RNA, 22 nt, Human
uccugcagagucccacugauuu

SEQ ID NO: 194923 - RNA, 22 nt, Human
cuucaagauauuucuagaauca

SEQ ID NO: 194924 - RNA, 22 nt, Human
aaguaaaagcuuuaccaugcgc

SEQ ID NO: 194925 - RNA, 22 nt, Human
auaauacaugguugaucuuuuc

SEQ ID NO: 194926 - RNA, 22 nt, Human
uacauagugaacauuuacagag

SEQ ID NO: 194927 - RNA, 22 nt, Human
ccugcccuguguuuggggacua

SEQ ID NO: 194928 - RNA, 19 nt, Human
gucuagaccaggcuccuua

SEQ ID NO: 194929 - RNA, 22 nt, Human
ccauuugugcuucuucaaagca

SEQ ID NO: 194930 - RNA, 22 nt, Human
gucaucuugcuguuuuagaucu

SEQ ID NO: 194931 - RNA, 22 nt, Human
ccugcagggaaucgaggcagaa

SEQ ID NO: 194932 - RNA, 22 nt, Human
cucuagacaacuugcugugggu

SEQ ID NO: 194933 - RNA, 22 nt, Human
uucaguguuaaauucaaagagu

SEQ ID NO: 194934 - RNA, 22 nt, Human
ugagcuggcaggggcucaggga

SEQ ID NO: 194935 - RNA, 22 nt, Human
guccaggcaccucccuugugcu

SEQ ID NO: 194936 - RNA, 22 nt, Human
agaguuuggagagggugaggca

SEQ ID NO: 194937 - RNA, 22 nt, Human
agcagacauaucucaugucaca

SEQ ID NO: 194938 - RNA, 22 nt, Human
aucuuugaugacuaaugcuuug

SEQ ID NO: 194939 - RNA, 21 nt, Human
agcugagcccagaagacuggu

SEQ ID NO: 194940 - RNA, 22 nt, Human
agaaaauauucauugagaggcu

SEQ ID NO: 194941 - RNA, 22 nt, Human
ggcagguguggugaccagagau

SEQ ID NO: 194942 - RNA, 22 nt, Human
agaucuuuaaaaguuauuauua

SEQ ID NO: 194943 - RNA, 22 nt, Human
uucugcuuauucuguagccuuu

SEQ ID NO: 194944 - RNA, 22 nt, Human
ugauugaauucaaaugcaaucu

SEQ ID NO: 194945 - RNA, 22 nt, Human
auuugaaguaaguaaugaguau

SEQ ID NO: 194946 - RNA, 20 nt, Human
aaaaucucccagaaacuuau

SEQ ID NO: 194947 - RNA, 22 nt, Human
agcagggcuggauuuggcaaga

SEQ ID NO: 194948 - RNA, 22 nt, Human
cuguggcccugugaucuggcac

SEQ ID NO: 194949 - RNA, 22 nt, Human
uuacucagucucccauacauug

SEQ ID NO: 194950 - RNA, 22 nt, Human
uccuggacuggcucagcacccu

SEQ ID NO: 194951 - RNA, 22 nt, Human
gaguccagagauuaagcaccuc

SEQ ID NO: 194952 - RNA, 22 nt, Human
gaucugguuucaucauggacuu

SEQ ID NO: 194953 - RNA, 20 nt, Human
ggaagccagggugcagggga

SEQ ID NO: 194954 - RNA, 22 nt, Human
auaguauuuccagaaauagucu

SEQ ID NO: 194955 - RNA, 22 nt, Human
gcugcucucauagauggcuuca

SEQ ID NO: 194956 - RNA, 22 nt, Human
uuauguguguacaugcauaugu

SEQ ID NO: 194957 - RNA, 22 nt, Human
agccagagacugugucuguaau

SEQ ID NO: 194958 - RNA, 22 nt, Human
gaaacccugagagguggucugg

SEQ ID NO: 194959 - RNA, 22 nt, Human
cagagcugcgcuuuuuccuggu

SEQ ID NO: 194960 - RNA, 22 nt, Human
ggaaggcugugcaguguuugca

SEQ ID NO: 194961 - RNA, 22 nt, Human
uaaaucaagaauaucagcuugu

SEQ ID NO: 194962 - RNA, 22 nt, Human
ucccucagauuggcaauuagau

SEQ ID NO: 194963 - RNA, 22 nt, Human
ucagcccuugauguuugggggu

SEQ ID NO: 194964 - RNA, 22 nt, Human
gguuccagaguauuucauuuca

SEQ ID NO: 194965 - RNA, 22 nt, Human
uguaauggaaaaacauuagcau

SEQ ID NO: 194966 - RNA, 22 nt, Human
uuucacauucuucugaaucuac

SEQ ID NO: 194967 - RNA, 22 nt, Human
uacaaaggcuuaaagagauuuc

SEQ ID NO: 194968 - RNA, 22 nt, Human
aauauauuugaaucaggaacaa

SEQ ID NO: 194969 - RNA, 20 nt, Human
uuacagugggaccuuccuga

SEQ ID NO: 194970 - RNA, 22 nt, Human
uaggaggcauuugcucccaggg

SEQ ID NO: 194971 - RNA, 22 nt, Human
gauguuuauaucuaacuuaagu

SEQ ID NO: 194972 - RNA, 23 nt, Human
gcuggcuggcaguaaagguuguu

SEQ ID NO: 194973 - RNA, 22 nt, Human
uuucuuuguaguagcauaauca

SEQ ID NO: 194974 - RNA, 22 nt, Human
ccucuggcaacuucacagccca

SEQ ID NO: 194975 - RNA, 21 nt, Human
uuaugucucuuuggugacugg

SEQ ID NO: 194976 - RNA, 22 nt, Human
cagagcugcacauucuaugaug

SEQ ID NO: 194977 - RNA, 22 nt, Human
uaaaagauaucuuagggauuug

SEQ ID NO: 194978 - RNA, 22 nt, Human
cagacaucuguacccagccugu

SEQ ID NO: 194979 - RNA, 22 nt, Human
cuccccacacacuaggccugau

SEQ ID NO: 194980 - RNA, 22 nt, Human
uaacauuauacagagaggacag

SEQ ID NO: 194981 - RNA, 22 nt, Human
gaauacaaagcagaacucauac

SEQ ID NO: 194982 - RNA, 20 nt, Human
acugccuuuagguauccuug

SEQ ID NO: 194983 - RNA, 21 nt, Human
gaguccuuccaauguccucag

SEQ ID NO: 194984 - RNA, 22 nt, Human
ggcugugcgggcagccguggga

SEQ ID NO: 194985 - RNA, 22 nt, Human
uccaggcucucaggugucagca

SEQ ID NO: 194986 - RNA, 22 nt, Human
guuaggaauuuguuacugugua

SEQ ID NO: 194987 - RNA, 22 nt, Human
uguggcugcaaaggaaggcugc

SEQ ID NO: 194988 - RNA, 22 nt, Human
uuccuugaaaguuugaacugac

SEQ ID NO: 194989 - RNA, 22 nt, Human
agcaguguuuaggcauucagua

SEQ ID NO: 194990 - RNA, 22 nt, Human
aucuguguguucaggaaguccu

SEQ ID NO: 194991 - RNA, 22 nt, Human
uuucuacuuuggaaugcacuga

SEQ ID NO: 194992 - RNA, 22 nt, Human
aggaccugccaggugcaaagca

SEQ ID NO: 194993 - RNA, 22 nt, Human
ccaggcagcaaauuuucugaau

SEQ ID NO: 194994 - RNA, 22 nt, Human
acauggcuaaauuagcuuuacu

SEQ ID NO: 194995 - RNA, 22 nt, Human
auucaagagcccauguuuccug

SEQ ID NO: 194996 - RNA, 22 nt, Human
aguuuuucugcuggucucacua

SEQ ID NO: 194997 - RNA, 22 nt, Human
gcucaggaaauaguuuaguguu

SEQ ID NO: 194998 - RNA, 22 nt, Human
uagcugcuucucacaugggcaa

SEQ ID NO: 194999 - RNA, 22 nt, Human
uuguguacuguugguugauauu

SEQ ID NO: 195000 - RNA, 22 nt, Human
uagcaacauaagaaacauuuug

SEQ ID NO: 195001 - RNA, 22 nt, Human
cugagaggugcugguggcugca

SEQ ID NO: 195002 - RNA, 18 nt, Human
ggcuucucacugaccuca

SEQ ID NO: 195003 - RNA, 22 nt, Human
ugccccagaccuacugaauggg

SEQ ID NO: 195004 - RNA, 22 nt, Human
gccuggcugaggccucugcuaa

SEQ ID NO: 195005 - RNA, 22 nt, Human
cuacagcagagcuacacuaacu

SEQ ID NO: 195006 - RNA, 22 nt, Human
ucucuaguugaggacugagcag

SEQ ID NO: 195007 - RNA, 23 nt, Human
agaguccacaagauuuuccagug

SEQ ID NO: 195008 - RNA, 22 nt, Human
augcaggguuauuucaaaaaua

SEQ ID NO: 195009 - RNA, 22 nt, Human
agaaaaguuuucugagacugac

SEQ ID NO: 195010 - RNA, 22 nt, Human
cuugcaggauuuugcugcugua

SEQ ID NO: 195011 - RNA, 22 nt, Human
cuggauccuucucuguguauuu

SEQ ID NO: 195012 - RNA, 22 nt, Human
auuaaauuggacgcugggggaa

SEQ ID NO: 195013 - RNA, 19 nt, Human
cucgugcacccaucaccug

SEQ ID NO: 195014 - RNA, 22 nt, Human
aguguccucaggcuuuguuccu

SEQ ID NO: 195015 - RNA, 17 nt, Human
ucaggauguagcaguag

SEQ ID NO: 195016 - RNA, 22 nt, Human
ucagugcuaaaagagcuggugu

SEQ ID NO: 195017 - RNA, 23 nt, Human
auucuucauuaucuucuagaaaa

SEQ ID NO: 195018 - RNA, 22 nt, Human
uuuaauuuucugggcccagcag

SEQ ID NO: 195019 - RNA, 19 nt, Human
gcagagucaagagcugcug

SEQ ID NO: 195020 - RNA, 22 nt, Human
uuccuggcugucaugcccuagu

SEQ ID NO: 195021 - RNA, 22 nt, Human
acaguggcagucguguucucua

SEQ ID NO: 195022 - RNA, 22 nt, Human
auggaacaugaauuaauauggu

SEQ ID NO: 195023 - RNA, 22 nt, Human
aguguuaagagaaaauucugcu

SEQ ID NO: 195024 - RNA, 22 nt, Human
uuugaaguaccugguucugacu

SEQ ID NO: 195025 - RNA, 22 nt, Human
acagaagaaguucaaggugaag

SEQ ID NO: 195026 - RNA, 22 nt, Human
ggagcuggccgccuaugugcag

SEQ ID NO: 195027 - RNA, 20 nt, Human
cuguccugaucuuuucagaa

SEQ ID NO: 195028 - RNA, 22 nt, Human
guucccauugcccuagcuugua

SEQ ID NO: 195029 - RNA, 22 nt, Human
acaagguucuuguggaggaauu

SEQ ID NO: 195030 - RNA, 22 nt, Human
uuccuggccagcuguggugagu

SEQ ID NO: 195031 - RNA, 22 nt, Human
uucaguaaaacacugcaauguc

SEQ ID NO: 195032 - RNA, 22 nt, Human
caggcccugcugcugagaccuu

SEQ ID NO: 195033 - RNA, 22 nt, Human
acugguuuuggaaaucaguaca

SEQ ID NO: 195034 - RNA, 22 nt, Human
ugcuggggucucuccggugccc

SEQ ID NO: 195035 - RNA, 22 nt, Human
agugccccaugggugccugggg

SEQ ID NO: 195036 - RNA, 22 nt, Human
caccagggacaaugcuaggggu

SEQ ID NO: 195037 - RNA, 22 nt, Human
auaugauuccacuauuguaugg

SEQ ID NO: 195038 - RNA, 22 nt, Human
ugaggggguuaauuaggagagu

SEQ ID NO: 195039 - RNA, 22 nt, Human
acuggcagagggaaaaccauuc

SEQ ID NO: 195040 - RNA, 22 nt, Human
ccuggcagacugugagggcagg

SEQ ID NO: 195041 - RNA, 22 nt, Human
ucuuuggcaucagggccagcua

SEQ ID NO: 195042 - RNA, 20 nt, Human
gcugucugacaguucccaga

SEQ ID NO: 195043 - RNA, 22 nt, Human
uuuuuguagucauuagaagagg

SEQ ID NO: 195044 - RNA, 22 nt, Human
ugccaggcccagcagggcggcc

SEQ ID NO: 195045 - RNA, 22 nt, Human
cccagugugaugagguugcuaa

SEQ ID NO: 195046 - RNA, 22 nt, Human
caggcuagcagggcccagggca

SEQ ID NO: 195047 - RNA, 22 nt, Human
gcuggccaguguggugaccacc

SEQ ID NO: 195048 - RNA, 22 nt, Human
ucagagcuuaucucuugcugga

SEQ ID NO: 195049 - RNA, 22 nt, Human
gcugucuugaugauuggaugcu

SEQ ID NO: 195050 - RNA, 22 nt, Human
uauucuuguauacuacaaucuu

SEQ ID NO: 195051 - RNA, 22 nt, Human
ucuauauaaccuccacuucuac

SEQ ID NO: 195052 - RNA, 22 nt, Human
uucuccugaguucccaggucua

SEQ ID NO: 195053 - RNA, 21 nt, Human
ugaggcucaucuuauguggcu

SEQ ID NO: 195054 - RNA, 22 nt, Human
gccggggcuggggagagacaug

SEQ ID NO: 195055 - RNA, 22 nt, Human
aagaguuuucuauaaucuuggc

SEQ ID NO: 195056 - RNA, 20 nt, Human
agucacauugagcuuuugga

SEQ ID NO: 195057 - RNA, 22 nt, Human
cucagcucaaaauucaccuuug

SEQ ID NO: 195058 - RNA, 22 nt, Human
uuauucaucagugcauuaauuu

SEQ ID NO: 195059 - RNA, 22 nt, Human
uugguggagucauuggcauaug

SEQ ID NO: 195060 - RNA, 22 nt, Human
cacagcaaagacacucucaacu

SEQ ID NO: 195061 - RNA, 20 nt, Human
guauuaggagguaaauguaa

SEQ ID NO: 195062 - RNA, 22 nt, Human
ggcuccaggguaccccuggaug

SEQ ID NO: 195063 - RNA, 22 nt, Human
auaauuacauuauacuguuaga

SEQ ID NO: 195064 - RNA, 20 nt, Human
ucucugaguuuccuaauuug

SEQ ID NO: 195065 - RNA, 22 nt, Human
ggccaggcgaugaccccuccac

SEQ ID NO: 195066 - RNA, 22 nt, Human
gagcccaggcugggguucagag

SEQ ID NO: 195067 - RNA, 22 nt, Human
gcauguguuauuuuauguauga

SEQ ID NO: 195068 - RNA, 22 nt, Human
aaagugaugccaggagucuggu

SEQ ID NO: 195069 - RNA, 22 nt, Human
ucauuucaaguucugacagcua

SEQ ID NO: 195070 - RNA, 22 nt, Human
aggggagaaaaaugccuucugu

SEQ ID NO: 195071 - RNA, 22 nt, Human
augacacuuggugauacuuugu

SEQ ID NO: 195072 - RNA, 22 nt, Human
ugauucuuugaccaaaaaauug

SEQ ID NO: 195073 - RNA, 22 nt, Human
uuucuaaguguguuucauagga

SEQ ID NO: 195074 - RNA, 22 nt, Human
gacagcagggacauguaggaag

SEQ ID NO: 195075 - RNA, 22 nt, Human
aucuugggaauuuuccaggagu

SEQ ID NO: 195076 - RNA, 22 nt, Human
ccauguguaaauuagauaacuc

SEQ ID NO: 195077 - RNA, 22 nt, Human
caaagcaguuuuaaucaaguag

SEQ ID NO: 195078 - RNA, 22 nt, Human
cagggagaaaucuccaggaggu

SEQ ID NO: 195079 - RNA, 22 nt, Human
auuaaugucuaccaguugugug

SEQ ID NO: 195080 - RNA, 22 nt, Human
uugaaaggugaacaugaugcac

SEQ ID NO: 195081 - RNA, 22 nt, Human
ucugaauucuuagaauuaaagg

SEQ ID NO: 195082 - RNA, 22 nt, Human
gucagagagggcacgugcacac

SEQ ID NO: 195083 - RNA, 17 nt, Human
ucagagggaugagcagg

SEQ ID NO: 195084 - RNA, 22 nt, Human
cuggagcuuauugggagcagaa

SEQ ID NO: 195085 - RNA, 17 nt, Human
ugcaaacaaucacauau

SEQ ID NO: 195086 - RNA, 22 nt, Human
cacugucuauuaauauaacuua

SEQ ID NO: 195087 - RNA, 22 nt, Human
ugcuggaggggaugccuucacu

SEQ ID NO: 195088 - RNA, 20 nt, Human
ucuuccagguacagucugca

SEQ ID NO: 195089 - RNA, 22 nt, Human
uuacagaguagggaauugaagu

SEQ ID NO: 195090 - RNA, 22 nt, Human
uggcagggaguucguucacaac

SEQ ID NO: 195091 - RNA, 22 nt, Human
aagugguuugauucaguuuaug

SEQ ID NO: 195092 - RNA, 22 nt, Human
agagguaugguauauuggaaga

SEQ ID NO: 195093 - RNA, 22 nt, Human
ucaugccaaacugaacacaguu

SEQ ID NO: 195094 - RNA, 23 nt, Human
ugcuggguaaauagcugaguaac

SEQ ID NO: 195095 - RNA, 22 nt, Human
uaaaggcucguauuguugugug

SEQ ID NO: 195096 - RNA, 22 nt, Human
auugucauuccagucauuguua

SEQ ID NO: 195097 - RNA, 20 nt, Human
agcauuugaaauaugacuau

SEQ ID NO: 195098 - RNA, 22 nt, Human
aguaagugagucacugugcugg

SEQ ID NO: 195099 - RNA, 22 nt, Human
gcucuguacgcaggaugagggg

SEQ ID NO: 195100 - RNA, 22 nt, Human
aggcccagggcugcucucugaa

SEQ ID NO: 195101 - RNA, 22 nt, Human
cagugcaguugguggcaggggu

SEQ ID NO: 195102 - RNA, 19 nt, Human
cuccggccagcaacugcau

SEQ ID NO: 195103 - RNA, 22 nt, Human
auucuucauuuacuguuacuug

SEQ ID NO: 195104 - RNA, 22 nt, Human
cucuguagaaacagggcagaag

SEQ ID NO: 195105 - RNA, 22 nt, Human
ugcagaagaaaacagcugugug

SEQ ID NO: 195106 - RNA, 22 nt, Human
ggcagggguggccuuccuuugg

SEQ ID NO: 195107 - RNA, 22 nt, Human
aggccaagauuuuggaucagcu

SEQ ID NO: 195108 - RNA, 22 nt, Human
uuguccuguuuagggauaagga

SEQ ID NO: 195109 - RNA, 22 nt, Human
gacauuuagcuguuuugcauuu

SEQ ID NO: 195110 - RNA, 22 nt, Human
aaaggccacacugcucuuucuc

SEQ ID NO: 195111 - RNA, 22 nt, Human
cauucauucagcaacuguuauu

SEQ ID NO: 195112 - RNA, 23 nt, Human
ccagucucacguauacaggauuu

SEQ ID NO: 195113 - RNA, 22 nt, Human
agggcgcugucuggccagcggu

SEQ ID NO: 195114 - RNA, 22 nt, Human
acagugaucaguuacugucugu

SEQ ID NO: 195115 - RNA, 22 nt, Human
uuccaaaguuauucaagcagua

SEQ ID NO: 195116 - RNA, 22 nt, Human
uacagaaagggaugauugaucu

SEQ ID NO: 195117 - RNA, 22 nt, Human
cuggaaugccucccugucagag

SEQ ID NO: 195118 - RNA, 22 nt, Human
uuccugaauugagcuuuagaaa

SEQ ID NO: 195119 - RNA, 18 nt, Human
cugaaggauccaggugua

SEQ ID NO: 195120 - RNA, 22 nt, Human
cuacaucagaacauuuacccua

SEQ ID NO: 195121 - RNA, 19 nt, Human
gcuacugaggcccaggacc

SEQ ID NO: 195122 - RNA, 22 nt, Human
gggucgagggucucgcccuucc

SEQ ID NO: 195123 - RNA, 22 nt, Human
gggaaguuugugggaggaauau

SEQ ID NO: 195124 - RNA, 22 nt, Human
gaggagagggcugcgggcccac

SEQ ID NO: 195125 - RNA, 22 nt, Human
augacaaccugugagcugguau

SEQ ID NO: 195126 - RNA, 23 nt, Human
uuuguacugcauuaugagacaca

SEQ ID NO: 195127 - RNA, 22 nt, Human
ucuggccccuggcaguccugga

SEQ ID NO: 195128 - RNA, 22 nt, Human
aggccagacagcuagaaacagg

SEQ ID NO: 195129 - RNA, 22 nt, Human
ucuguaaagucuguguaaaguc

SEQ ID NO: 195130 - RNA, 22 nt, Human
cugacagaugcugcuggcagua

SEQ ID NO: 195131 - RNA, 22 nt, Human
uuggaaaugcaaauauauugaa

SEQ ID NO: 195132 - RNA, 22 nt, Human
gugcaaaaguaauugcaguuuu

SEQ ID NO: 195133 - RNA, 22 nt, Human
aucaucaugcccacuugagacu

SEQ ID NO: 195134 - RNA, 22 nt, Human
ucagagaaauaauugcugaguu

SEQ ID NO: 195135 - RNA, 22 nt, Human
ugcaagaggauuguaucaauaa

SEQ ID NO: 195136 - RNA, 22 nt, Human
ucugggcugguugugcuugcuu

SEQ ID NO: 195137 - RNA, 22 nt, Human
ccaaaugugccuguuucaacaa

SEQ ID NO: 195138 - RNA, 22 nt, Human
uuuggaaugaaacagcagagcc

SEQ ID NO: 195139 - RNA, 20 nt, Human
ccccuucaucuacagccuga

SEQ ID NO: 195140 - RNA, 20 nt, Human
agggcugagaagggacuagc

SEQ ID NO: 195141 - RNA, 22 nt, Human
cacgcauguggaucagaugaag

SEQ ID NO: 195142 - RNA, 22 nt, Human
gaaauacugcacacccuguaag

SEQ ID NO: 195143 - RNA, 22 nt, Human
cugucccagauguucucagcac

SEQ ID NO: 195144 - RNA, 22 nt, Human
uuucugaagauacagcuuugcu

SEQ ID NO: 195145 - RNA, 22 nt, Human
ugcugugcaucauaguguuugg

SEQ ID NO: 195146 - RNA, 22 nt, Human
uugcugugucauuuguuuaauc

SEQ ID NO: 195147 - RNA, 22 nt, Human
auguuuuaugcuucagaugagg

SEQ ID NO: 195148 - RNA, 20 nt, Human
gcucagagccugaacuucau

SEQ ID NO: 195149 - RNA, 22 nt, Human
uuguacauucugaaucuguccu

SEQ ID NO: 195150 - RNA, 22 nt, Human
uucuccugcccuuggacuucca

SEQ ID NO: 195151 - RNA, 22 nt, Human
uggagcuggaauuugagcugga

SEQ ID NO: 195152 - RNA, 22 nt, Human
uuuccagauuaagauaccacuu

SEQ ID NO: 195153 - RNA, 22 nt, Human
caggcuagauuggggccaguag

SEQ ID NO: 195154 - RNA, 22 nt, Human
ggcugccacgucgaggguccaa

SEQ ID NO: 195155 - RNA, 22 nt, Human
uuuccuuccagguuccuaaggc

SEQ ID NO: 195156 - RNA, 22 nt, Human
aacuguacgauaauaaauuugu

SEQ ID NO: 195157 - RNA, 22 nt, Human
aggcagggcugggauuagacuc

SEQ ID NO: 195158 - RNA, 22 nt, Human
gcuagaauauuggguaggcaag

SEQ ID NO: 195159 - RNA, 22 nt, Human
agugcucaccugucaggucaag

SEQ ID NO: 195160 - RNA, 22 nt, Human
ccugagagugcgugccuccuua

SEQ ID NO: 195161 - RNA, 17 nt, Human
uccuccccgcaguugca

SEQ ID NO: 195162 - RNA, 22 nt, Human
uugcuuuacauguucugguaaa

SEQ ID NO: 195163 - RNA, 22 nt, Human
ucuugagagauauacuacugaa

SEQ ID NO: 195164 - RNA, 22 nt, Human
uuugcaaagaaauuauugcugu

SEQ ID NO: 195165 - RNA, 22 nt, Human
uaaggcuuuccuugucaucuuu

SEQ ID NO: 195166 - RNA, 22 nt, Human
uuacagucagugaauggaaggg

SEQ ID NO: 195167 - RNA, 22 nt, Human
uaugaauucuguucauugauga

SEQ ID NO: 195168 - RNA, 22 nt, Human
uauguugagcauucagugaucu

SEQ ID NO: 195169 - RNA, 21 nt, Human
gcaggcuggucaaaccucagu

SEQ ID NO: 195170 - RNA, 22 nt, Human
uuuuuuaguuaggucagaaugu

SEQ ID NO: 195171 - RNA, 22 nt, Human
uguuacuuugauugguauucua

SEQ ID NO: 195172 - RNA, 22 nt, Human
augcuguguccuagugaaagaa

SEQ ID NO: 195173 - RNA, 21 nt, Human
uccaggacuugagaauuccag

SEQ ID NO: 195174 - RNA, 22 nt, Human
guuuccugucugcuuuacuaua

SEQ ID NO: 195175 - RNA, 22 nt, Human
aguugggaguuauagacucuau

SEQ ID NO: 195176 - RNA, 22 nt, Human
cuccaggaaaauagggaaugag

SEQ ID NO: 195177 - RNA, 22 nt, Human
uagguucucuauugcccccaaa

SEQ ID NO: 195178 - RNA, 22 nt, Human
gaggguggcuccucccugggcc

SEQ ID NO: 195179 - RNA, 22 nt, Human
ccaggaaggaagcagggguuuc

SEQ ID NO: 195180 - RNA, 22 nt, Human
acacuguaugaaaacaggaaau

SEQ ID NO: 195181 - RNA, 22 nt, Human
augaaugagaaagcugaaaucu

SEQ ID NO: 195182 - RNA, 22 nt, Human
uucuuuucuuggcaggaguaga

SEQ ID NO: 195183 - RNA, 22 nt, Human
gucucaagggggaacucacugu

SEQ ID NO: 195184 - RNA, 22 nt, Human
cacacauuaauaucaaaggcuc

SEQ ID NO: 195185 - RNA, 19 nt, Human
uuugcugguucaggaaaga

SEQ ID NO: 195186 - RNA, 21 nt, Human
aggcucucauccagggaccca

SEQ ID NO: 195187 - RNA, 22 nt, Human
uagaaagagcauaguauuauaa

SEQ ID NO: 195188 - RNA, 22 nt, Human
ccaucuccacugucccugucaa

SEQ ID NO: 195189 - RNA, 19 nt, Human
uggcccagaugguccuggg

SEQ ID NO: 195190 - RNA, 22 nt, Human
gggcugagucugcugccuguca

SEQ ID NO: 195191 - RNA, 22 nt, Human
uggagggauacaaagaugaaaa

SEQ ID NO: 195192 - RNA, 22 nt, Human
aaagcagcaaauacuuuugcac

SEQ ID NO: 195193 - RNA, 22 nt, Human
aucaucuugaaagucuauguuu

SEQ ID NO: 195194 - RNA, 22 nt, Human
auuagcauugcuacucucaaga

SEQ ID NO: 195195 - RNA, 22 nt, Human
acaaagcuagagaagagaauug

SEQ ID NO: 195196 - RNA, 21 nt, Human
caggucuggugaacacucuca

SEQ ID NO: 195197 - RNA, 22 nt, Human
ccaacucugaaaauccagauau

SEQ ID NO: 195198 - RNA, 22 nt, Human
uucccucccuggcugccauuuc

SEQ ID NO: 195199 - RNA, 22 nt, Human
gcuuucccugcccucagaagga

SEQ ID NO: 195200 - RNA, 22 nt, Human
auggagcuguagggagcagugg

SEQ ID NO: 195201 - RNA, 22 nt, Human
uaaacagcuacugugucaaagg

SEQ ID NO: 195202 - RNA, 22 nt, Human
uggcugccaugacgccugggga

SEQ ID NO: 195203 - RNA, 22 nt, Human
cccaggcugguccugaacuccu

SEQ ID NO: 195204 - RNA, 22 nt, Human
acuagaaagcaaaagccauuuc

SEQ ID NO: 195205 - RNA, 22 nt, Human
ugaaugaauccuaacaaagaca

SEQ ID NO: 195206 - RNA, 22 nt, Human
cacuugaacuguuugaaugaga

SEQ ID NO: 195207 - RNA, 22 nt, Human
cuagaauugcauucuaugaaua

SEQ ID NO: 195208 - RNA, 22 nt, Human
gcccugcuguuuagagagcuac

SEQ ID NO: 195209 - RNA, 22 nt, Human
cuucuucaaccugaaaguuuca

SEQ ID NO: 195210 - RNA, 22 nt, Human
caucucuccacggcagcucucg

SEQ ID NO: 195211 - RNA, 22 nt, Human
ccaggagcagggcuggcugcac

SEQ ID NO: 195212 - RNA, 22 nt, Human
gucuagaaaucauguacuguga

SEQ ID NO: 195213 - RNA, 22 nt, Human
cuaaaucaucauuuauguuugu

SEQ ID NO: 195214 - RNA, 22 nt, Human
uucacuuauagggauguuauug

SEQ ID NO: 195215 - RNA, 20 nt, Human
guggccucucacauucugag

SEQ ID NO: 195216 - RNA, 22 nt, Human
agcccagcaaagggagguucag

SEQ ID NO: 195217 - RNA, 22 nt, Human
gcaggccacaguggagucucug

SEQ ID NO: 195218 - RNA, 22 nt, Human
ggaaggcuuuguagaagugcca

SEQ ID NO: 195219 - RNA, 22 nt, Human
auggcuggauaguugaagcucu

SEQ ID NO: 195220 - RNA, 21 nt, Human
uggcccuggccacggcugcca

SEQ ID NO: 195221 - RNA, 23 nt, Human
agguggucuuguggaugcugcaa

SEQ ID NO: 195222 - RNA, 22 nt, Human
ucuggcucggauuugucuagca

SEQ ID NO: 195223 - RNA, 22 nt, Human
cauaauuagagaauucauguua

SEQ ID NO: 195224 - RNA, 22 nt, Human
agucuuuacauguguuauauau

SEQ ID NO: 195225 - RNA, 22 nt, Human
auuugccuuggugauuuguaaa

SEQ ID NO: 195226 - RNA, 22 nt, Human
ucucuuggggaaagagaagaau

SEQ ID NO: 195227 - RNA, 22 nt, Human
acagccagggucucaggaggcg

SEQ ID NO: 195228 - RNA, 22 nt, Human
ccaaggcugucauucaguagcu

SEQ ID NO: 195229 - RNA, 22 nt, Human
acaggaagcuggagacccuuga

SEQ ID NO: 195230 - RNA, 22 nt, Human
agagucuguuacuuguccccua

SEQ ID NO: 195231 - RNA, 22 nt, Human
guuagcaccagugcucauaaca

SEQ ID NO: 195232 - RNA, 22 nt, Human
cugggccucaagcucagauuuc

SEQ ID NO: 195233 - RNA, 22 nt, Human
uucuuguuuugcccaaguugua

SEQ ID NO: 195234 - RNA, 22 nt, Human
ccuggcugagggaccucgggua

SEQ ID NO: 195235 - RNA, 22 nt, Human
aguggaaggucaggggacagug

SEQ ID NO: 195236 - RNA, 22 nt, Human
cuuagagccuuacucuucuugu

SEQ ID NO: 195237 - RNA, 22 nt, Human
ggaagaaagcacacaaacuuga

SEQ ID NO: 195238 - RNA, 21 nt, Human
agaguaauuccugcuggaaag

SEQ ID NO: 195239 - RNA, 22 nt, Human
uuagcuuuucacuugcauuauc

SEQ ID NO: 195240 - RNA, 22 nt, Human
cuacaaaaguaauugugguuuu

SEQ ID NO: 195241 - RNA, 22 nt, Human
gucugggcagcagcauuucuua

SEQ ID NO: 195242 - RNA, 22 nt, Human
guguuuauaggagugaaugcug

SEQ ID NO: 195243 - RNA, 19 nt, Human
ggcagaagguguaggggga

SEQ ID NO: 195244 - RNA, 22 nt, Human
cagaggccccauuggcugugcg

SEQ ID NO: 195245 - RNA, 22 nt, Human
gcucccaggaugaggagccagg

SEQ ID NO: 195246 - RNA, 19 nt, Human
uggaggagaggaaaaguca

SEQ ID NO: 195247 - RNA, 22 nt, Human
uguuuuucaaauauugcucugu

SEQ ID NO: 195248 - RNA, 22 nt, Human
ugggccucggggaagcccgugu

SEQ ID NO: 195249 - RNA, 22 nt, Human
ugacacaggggaaggagucugg

SEQ ID NO: 195250 - RNA, 22 nt, Human
aggcaguguguagcuggaagag

SEQ ID NO: 195251 - RNA, 22 nt, Human
uggcauuucuggccauuugugu

SEQ ID NO: 195252 - RNA, 22 nt, Human
ucucccauucagcuugcaguca

SEQ ID NO: 195253 - RNA, 22 nt, Human
auuugucacugagagaguuaga

SEQ ID NO: 195254 - RNA, 22 nt, Human
gacaaaugaaugaugaacacca

SEQ ID NO: 195255 - RNA, 22 nt, Human
ggcaggcagccuccauccacag

SEQ ID NO: 195256 - RNA, 22 nt, Human
uggccaugggauagugcagggg

SEQ ID NO: 195257 - RNA, 22 nt, Human
ucugcagguguuggaaggguca

SEQ ID NO: 195258 - RNA, 22 nt, Human
ucccuuucacuuaacuagccca

SEQ ID NO: 195259 - RNA, 22 nt, Human
aaacaugaugucauauaugcca

SEQ ID NO: 195260 - RNA, 22 nt, Human
acccagcuggaugcauggaggc

SEQ ID NO: 195261 - RNA, 22 nt, Human
ggcugccuccucgagacaggau

SEQ ID NO: 195262 - RNA, 22 nt, Human
auuaauuuuaccuuuguaaaca

SEQ ID NO: 195263 - RNA, 22 nt, Human
aguccuuccggcagauuucacu

SEQ ID NO: 195264 - RNA, 22 nt, Human
cuuuauguucaguacaaugcuu

SEQ ID NO: 195265 - RNA, 22 nt, Human
ggugacugguuuaucuggcagu

SEQ ID NO: 195266 - RNA, 22 nt, Human
uggcuucuggcuggugagaaau

SEQ ID NO: 195267 - RNA, 22 nt, Human
uaagacauagccaagagcaucc

SEQ ID NO: 195268 - RNA, 20 nt, Human
ucccucagcacuucuaccuc

SEQ ID NO: 195269 - RNA, 19 nt, Human
gaaaacaugggugaggguc

SEQ ID NO: 195270 - RNA, 22 nt, Human
ugaggccagcuucagcagugga

SEQ ID NO: 195271 - RNA, 22 nt, Human
cugggcuccuaaccauccaggu

SEQ ID NO: 195272 - RNA, 22 nt, Human
ugcagaagcagagccgguggcc

SEQ ID NO: 195273 - RNA, 22 nt, Human
uuuguacaauuagcagaggcua

SEQ ID NO: 195274 - RNA, 22 nt, Human
acuguuugcugauagauauuua

SEQ ID NO: 195275 - RNA, 23 nt, Human
ucacaucugccguaguguauucu

SEQ ID NO: 195276 - RNA, 22 nt, Human
agcccuuaguacauuucucaag

SEQ ID NO: 195277 - RNA, 18 nt, Human
gccuucagacugcaugcu

SEQ ID NO: 195278 - RNA, 18 nt, Human
ggagagugacagagucgu

SEQ ID NO: 195279 - RNA, 22 nt, Human
accugggaaagccguggaaagg

SEQ ID NO: 195280 - RNA, 22 nt, Human
uugaggaguugugacagauacu

SEQ ID NO: 195281 - RNA, 22 nt, Human
auacuuaugauaaauaauugcu

SEQ ID NO: 195282 - RNA, 22 nt, Human
ucucuucugaaaccugucuuua

SEQ ID NO: 195283 - RNA, 23 nt, Human
ggagacaagguaccacguuaaca

SEQ ID NO: 195284 - RNA, 22 nt, Human
cugcucuguuucuuagcugggu

SEQ ID NO: 195285 - RNA, 22 nt, Human
uguccagcugaaggcagccuca

SEQ ID NO: 195286 - RNA, 22 nt, Human
gcuggagaaacaggaggaggaa

SEQ ID NO: 195287 - RNA, 22 nt, Human
aggaaacuuucuuuugcuucau

SEQ ID NO: 195288 - RNA, 22 nt, Human
cucuccagggguagaugccuuc

SEQ ID NO: 195289 - RNA, 22 nt, Human
ucagauuuuauuuuccuguuac

SEQ ID NO: 195290 - RNA, 22 nt, Human
gaaaguuauaucaugauuuuag

SEQ ID NO: 195291 - RNA, 22 nt, Human
agcaggcaagguccgugccucg

SEQ ID NO: 195292 - RNA, 22 nt, Human
uuaaauagucaaaucaguggca

SEQ ID NO: 195293 - RNA, 22 nt, Human
agguggggugagcugcagacua

SEQ ID NO: 195294 - RNA, 19 nt, Human
gucaggcacgugagagcau

SEQ ID NO: 195295 - RNA, 22 nt, Human
auugagaaugcaaucuacuaug

SEQ ID NO: 195296 - RNA, 22 nt, Human
acaugauuugcaugauuuguaa

SEQ ID NO: 195297 - RNA, 22 nt, Human
uggcaugaagucagcagcuggg

SEQ ID NO: 195298 - RNA, 22 nt, Human
uaaacucucaacagagaaccac

SEQ ID NO: 195299 - RNA, 22 nt, Human
acauaugugucugcacaugccc

SEQ ID NO: 195300 - RNA, 23 nt, Human
uuuauauuccuaaugucuugagc

SEQ ID NO: 195301 - RNA, 22 nt, Human
gugcagagaggaccuuggggag

SEQ ID NO: 195302 - RNA, 22 nt, Human
ggagugacucacagcugggaca

SEQ ID NO: 195303 - RNA, 22 nt, Human
uuaauaauaaugagcccauuuu

SEQ ID NO: 195304 - RNA, 22 nt, Human
gacaagacauugguaaagauau

SEQ ID NO: 195305 - RNA, 22 nt, Human
aaacuuuuccugcucuuguccu

SEQ ID NO: 195306 - RNA, 22 nt, Human
cagaggaagggugcugcgaaag

SEQ ID NO: 195307 - RNA, 22 nt, Human
gagggaccuuuacacagacauu

SEQ ID NO: 195308 - RNA, 19 nt, Human
ucaucucacagggccuggc

SEQ ID NO: 195309 - RNA, 22 nt, Human
gucuggaggcacuuucucauga

SEQ ID NO: 195310 - RNA, 22 nt, Human
agguuuaugccuuggagcuggg

SEQ ID NO: 195311 - RNA, 22 nt, Human
cauuugcauaugaagaaguaag

SEQ ID NO: 195312 - RNA, 22 nt, Human
gggaucugaugcacugcugaaa

SEQ ID NO: 195313 - RNA, 22 nt, Human
aggcuaggcugaugccucuucc

SEQ ID NO: 195314 - RNA, 20 nt, Human
cugaagaguggccugaucug

SEQ ID NO: 195315 - RNA, 22 nt, Human
uauuagguuggugcaaaauuaa

SEQ ID NO: 195316 - RNA, 22 nt, Human
cauaaguuggguaauauaauga

SEQ ID NO: 195317 - RNA, 22 nt, Human
ugccaggcacgugagaguggcc

SEQ ID NO: 195318 - RNA, 22 nt, Human
gaugaucugagguacaugaaac

SEQ ID NO: 195319 - RNA, 22 nt, Human
caguuucuccaaacgcaggcug

SEQ ID NO: 195320 - RNA, 22 nt, Human
ugaggcucugcuucuguggcuc

SEQ ID NO: 195321 - RNA, 22 nt, Human
gcugcagggaauguauggauuu

SEQ ID NO: 195322 - RNA, 22 nt, Human
agaaacuaagucauaacucuuu

SEQ ID NO: 195323 - RNA, 22 nt, Human
cacauuguagagauuagaaaga

SEQ ID NO: 195324 - RNA, 22 nt, Human
gaggagcuguucccucaccucu

SEQ ID NO: 195325 - RNA, 22 nt, Human
gacaccagaagacauaagcaga

SEQ ID NO: 195326 - RNA, 22 nt, Human
uggcgaggccaggccagggccu

SEQ ID NO: 195327 - RNA, 19 nt, Human
cugcucuccuugacuugga

SEQ ID NO: 195328 - RNA, 22 nt, Human
ggcuugaucacauaggucuccc

SEQ ID NO: 195329 - RNA, 22 nt, Human
acugguuugucuauugucauuc

SEQ ID NO: 195330 - RNA, 22 nt, Human
ucacagcaggguaacaggaaga

SEQ ID NO: 195331 - RNA, 22 nt, Human
uuucucagcuguggagccuauc

SEQ ID NO: 195332 - RNA, 22 nt, Human
acacugucucauaugaggggac

SEQ ID NO: 195333 - RNA, 19 nt, Human
uggcuucuucgguguuccc

SEQ ID NO: 195334 - RNA, 21 nt, Human
ucauauuucucuugcuauugu

SEQ ID NO: 195335 - RNA, 22 nt, Human
ucuuggaauaccccgaagguca

SEQ ID NO: 195336 - RNA, 22 nt, Human
ggcugccuucccugagccccgg

SEQ ID NO: 195337 - RNA, 18 nt, Human
agggucagugucacuggc

SEQ ID NO: 195338 - RNA, 22 nt, Human
accugggaggcagagguugcag

SEQ ID NO: 195339 - RNA, 22 nt, Human
ucaggcagaaaaaucacuaauu

SEQ ID NO: 195340 - RNA, 22 nt, Human
cagcucuggcagagcccaaccc

SEQ ID NO: 195341 - RNA, 22 nt, Human
uucaaucauuagaaucucaggc

SEQ ID NO: 195342 - RNA, 22 nt, Human
acacauuuuggcuagguggaga

SEQ ID NO: 195343 - RNA, 22 nt, Human
gaggccuggaccagccacagag

SEQ ID NO: 195344 - RNA, 17 nt, Human
aguggcaggcagauggg

SEQ ID NO: 195345 - RNA, 22 nt, Human
aaggugcucguuauggccagug

SEQ ID NO: 195346 - RNA, 22 nt, Human
ccagucagggcaggagccuggu

SEQ ID NO: 195347 - RNA, 22 nt, Human
cagaggccuuucuacagugaua

SEQ ID NO: 195348 - RNA, 22 nt, Human
caggcagaggaagucugggucu

SEQ ID NO: 195349 - RNA, 22 nt, Human
cuuggagucaauaagaucuaga

SEQ ID NO: 195350 - RNA, 22 nt, Human
accaggcuguugggcccagugu

SEQ ID NO: 195351 - RNA, 22 nt, Human
aauuuccaaauuucugucacac

SEQ ID NO: 195352 - RNA, 22 nt, Human
ggcaggcacugugcuaggcgcu

SEQ ID NO: 195353 - RNA, 22 nt, Human
caugugucacagccuuuuauug

SEQ ID NO: 195354 - RNA, 22 nt, Human
cagccagguaugggcgugcggg

SEQ ID NO: 195355 - RNA, 22 nt, Human
cagcuucugagcaagccagggg

SEQ ID NO: 195356 - RNA, 22 nt, Human
gcaggugguggcgcgcgcccug

SEQ ID NO: 195357 - RNA, 22 nt, Human
agguccagcuguugcagccucc

SEQ ID NO: 195358 - RNA, 22 nt, Human
uacacugugacaaucaugacag

SEQ ID NO: 195359 - RNA, 22 nt, Human
gcucuagcaaggcuggccuggg

SEQ ID NO: 195360 - RNA, 21 nt, Human
ucucugggaggacuugugaga

SEQ ID NO: 195361 - RNA, 22 nt, Human
uugagggauuuuaaaugaacaa

SEQ ID NO: 195362 - RNA, 22 nt, Human
uggcuggaguauaggaguagga

SEQ ID NO: 195363 - RNA, 22 nt, Human
agucuuaggcuccauuaguaga

SEQ ID NO: 195364 - RNA, 22 nt, Human
aguuugaagcacaugaauggca

SEQ ID NO: 195365 - RNA, 22 nt, Human
aaggcagugguuggguggagga

SEQ ID NO: 195366 - RNA, 22 nt, Human
uucuaguucccacauaguugcc

SEQ ID NO: 195367 - RNA, 22 nt, Human
ggccaggagcugcacagggcuc

SEQ ID NO: 195368 - RNA, 22 nt, Human
aacagguagggacucuaacuug

SEQ ID NO: 195369 - RNA, 22 nt, Human
gauauauuuuccauggucugca

SEQ ID NO: 195370 - RNA, 20 nt, Human
agaaacauuucuugagaacu

SEQ ID NO: 195371 - RNA, 22 nt, Human
gggucuccauguuaacaucacu

SEQ ID NO: 195372 - RNA, 23 nt, Human
acuacagauacuccugcuguuug

SEQ ID NO: 195373 - RNA, 22 nt, Human
aagggggcccagcacuaaguug

SEQ ID NO: 195374 - RNA, 22 nt, Human
agcaaauacuugaauaaaaaga

SEQ ID NO: 195375 - RNA, 22 nt, Human
cugguuuaaccauguauccugg

SEQ ID NO: 195376 - RNA, 22 nt, Human
uggcagccaucagagcaggggu

SEQ ID NO: 195377 - RNA, 22 nt, Human
acaguagcuaauauugcauuau

SEQ ID NO: 195378 - RNA, 19 nt, Human
auagaaaggguuaaagaca

SEQ ID NO: 195379 - RNA, 22 nt, Human
ucaguccauaggugggccugag

SEQ ID NO: 195380 - RNA, 22 nt, Human
cagaugcacauucucaucagca

SEQ ID NO: 195381 - RNA, 22 nt, Human
ugaggcucauucugcaugccaa

SEQ ID NO: 195382 - RNA, 22 nt, Human
gagcaggcaaagaugaaaggag

SEQ ID NO: 195383 - RNA, 22 nt, Human
agcaggcagccauuuggaaggc

SEQ ID NO: 195384 - RNA, 22 nt, Human
uuuauuaugauggacaccuucg

SEQ ID NO: 195385 - RNA, 22 nt, Human
aagauacacguuguauugaaua

SEQ ID NO: 195386 - RNA, 22 nt, Human
ugccuggcugggcugcucaugg

SEQ ID NO: 195387 - RNA, 20 nt, Human
gggaggccagccucagagaa

SEQ ID NO: 195388 - RNA, 22 nt, Human
gucauuccuauccauuugauac

SEQ ID NO: 195389 - RNA, 22 nt, Human
gaguuugauagagaggaaccgg

SEQ ID NO: 195390 - RNA, 22 nt, Human
uguguggauucaucucaaagag

SEQ ID NO: 195391 - RNA, 21 nt, Human
caucuuagguuguacauauau

SEQ ID NO: 195392 - RNA, 22 nt, Human
cuugcugagauaaaugcugucu

SEQ ID NO: 195393 - RNA, 22 nt, Human
caccaggaugggcagguagguc

SEQ ID NO: 195394 - RNA, 22 nt, Human
uuugcaaauacagaggucuugc

SEQ ID NO: 195395 - RNA, 22 nt, Human
agcugcagagaaaagaggcugg

SEQ ID NO: 195396 - RNA, 22 nt, Human
agccuccacagaugcaaagggc

SEQ ID NO: 195397 - RNA, 22 nt, Human
gugccccagacacgcauguggg

SEQ ID NO: 195398 - RNA, 22 nt, Human
ggaagagggaaccacgacugua

SEQ ID NO: 195399 - RNA, 19 nt, Human
ucaaaggcaaggaggaacu

SEQ ID NO: 195400 - RNA, 17 nt, Human
ccugucuuguuucugcc

SEQ ID NO: 195401 - RNA, 22 nt, Human
uccaggcugcaaggccacaggg

SEQ ID NO: 195402 - RNA, 22 nt, Human
aauaaaaugaacugguagaguu

SEQ ID NO: 195403 - RNA, 22 nt, Human
uggcuccagguugaacuuuggg

SEQ ID NO: 195404 - RNA, 22 nt, Human
uacccucucccgguccagcuuu

SEQ ID NO: 195405 - RNA, 22 nt, Human
ccaggcucaggccugcucguug

SEQ ID NO: 195406 - RNA, 22 nt, Human
cugcuguguuggcauuggauag

SEQ ID NO: 195407 - RNA, 22 nt, Human
agggggcccuugcaggugagcg

SEQ ID NO: 195408 - RNA, 22 nt, Human
augcaacauccaauuccuuuug

SEQ ID NO: 195409 - RNA, 22 nt, Human
uugcuguuacaauuauuuaccc

SEQ ID NO: 195410 - RNA, 22 nt, Human
acugcaccuugcgguccugugg

SEQ ID NO: 195411 - RNA, 22 nt, Human
uuucacaaacugaggagacaau

SEQ ID NO: 195412 - RNA, 22 nt, Human
ucuaaauuacuuugggcaguau

SEQ ID NO: 195413 - RNA, 19 nt, Human
gagcccucuccauggccac

SEQ ID NO: 195414 - RNA, 22 nt, Human
ugggaggagcccucugggaagg

SEQ ID NO: 195415 - RNA, 18 nt, Human
gggcccuggcguccgccc

SEQ ID NO: 195416 - RNA, 22 nt, Human
uggaagaaggcagagaggcauu

SEQ ID NO: 195417 - RNA, 23 nt, Human
agcugaggcagaggggcauucuc

SEQ ID NO: 195418 - RNA, 22 nt, Human
agcaguuaucgaagaaucaggu

SEQ ID NO: 195419 - RNA, 22 nt, Human
auuuacauuuauuugagaaggu

SEQ ID NO: 195420 - RNA, 21 nt, Human
uuuuauugaugaauggccacu

SEQ ID NO: 195421 - RNA, 22 nt, Human
cugcucuguucccccaucaucu

SEQ ID NO: 195422 - RNA, 22 nt, Human
cagccugucggcuccuucauuc

SEQ ID NO: 195423 - RNA, 22 nt, Human
cucuuuuacaccaaaaggccua

SEQ ID NO: 195424 - RNA, 22 nt, Human
uuacaguuuauccaggaagagc

SEQ ID NO: 195425 - RNA, 22 nt, Human
acauuaaaauugggugggguaa

SEQ ID NO: 195426 - RNA, 22 nt, Human
caauucuuucagcugcauuugu

SEQ ID NO: 195427 - RNA, 22 nt, Human
ccugcuggacguggaggagggg

SEQ ID NO: 195428 - RNA, 22 nt, Human
aucuuggggaauccucugugua

SEQ ID NO: 195429 - RNA, 22 nt, Human
gaaggccuagggaugcucugcg

SEQ ID NO: 195430 - RNA, 22 nt, Human
cuccuccacagaccuacugaau

SEQ ID NO: 195431 - RNA, 22 nt, Human
cuggaaagugcauguaaugagg

SEQ ID NO: 195432 - RNA, 22 nt, Human
gagggaagaaagaauugaugcg

SEQ ID NO: 195433 - RNA, 22 nt, Human
gcucugaggcugugaggugcug

SEQ ID NO: 195434 - RNA, 22 nt, Human
cucuggaccucagcuacagacu

SEQ ID NO: 195435 - RNA, 22 nt, Human
aaggaggguucccagguccugg

SEQ ID NO: 195436 - RNA, 22 nt, Human
gcugcccuccaguucccacagu

SEQ ID NO: 195437 - RNA, 22 nt, Human
aaggccagaguugaacugcucc

SEQ ID NO: 195438 - RNA, 22 nt, Human
uggccaccuucccacuucugcc

SEQ ID NO: 195439 - RNA, 22 nt, Human
gacugccucaguuucccugcag

SEQ ID NO: 195440 - RNA, 22 nt, Human
agggccagggaaacgaucagca

SEQ ID NO: 195441 - RNA, 22 nt, Human
cacaggggcaaacuguagggga

SEQ ID NO: 195442 - RNA, 22 nt, Human
aggcugugcacagggcaccugc

SEQ ID NO: 195443 - RNA, 22 nt, Human
gcaucucuacaacgaagacagu

SEQ ID NO: 195444 - RNA, 22 nt, Human
uauuucugucagccagauaugg

SEQ ID NO: 195445 - RNA, 22 nt, Human
accaggaacucacccgcagagg

SEQ ID NO: 195446 - RNA, 22 nt, Human
ugcccugcccuugcuauuucua

SEQ ID NO: 195447 - RNA, 22 nt, Human
uuguagaauuuggaucucggca

SEQ ID NO: 195448 - RNA, 22 nt, Human
gacaacugccccauuuuaaaug

SEQ ID NO: 195449 - RNA, 22 nt, Human
gcuguaggaagacagaaugcag

SEQ ID NO: 195450 - RNA, 22 nt, Human
uggcucugcugaaccuagugca

SEQ ID NO: 195451 - RNA, 22 nt, Human
gcacaggcacagagggccacug

SEQ ID NO: 195452 - RNA, 22 nt, Human
uuguaagucacaccagggcagg

SEQ ID NO: 195453 - RNA, 22 nt, Human
auuguacaaugcugagguuugg

SEQ ID NO: 195454 - RNA, 22 nt, Human
agugcugggauugcaggcauga

SEQ ID NO: 195455 - RNA, 22 nt, Human
agggagcaaagguuucaggguu

SEQ ID NO: 195456 - RNA, 22 nt, Human
agugcugggauuacaggcauaa

SEQ ID NO: 195457 - RNA, 22 nt, Human
gagcuuuacuucugacuggugc

SEQ ID NO: 195458 - RNA, 20 nt, Human
auuccucagccccagccuca

SEQ ID NO: 195459 - RNA, 22 nt, Human
ucugucaucuguaacaggaggg

SEQ ID NO: 195460 - RNA, 22 nt, Human
augcuucuguguauguuucagg

SEQ ID NO: 195461 - RNA, 22 nt, Human
ucagaggaagccuuggugggag

SEQ ID NO: 195462 - RNA, 17 nt, Human
gcuccuucuaacuucca

SEQ ID NO: 195463 - RNA, 20 nt, Human
ugcagaagaacguucugguu

SEQ ID NO: 195464 - RNA, 22 nt, Human
cauaaacucucuguaccaauau

SEQ ID NO: 195465 - RNA, 22 nt, Human
aauuucagauauuaaagaauga

SEQ ID NO: 195466 - RNA, 22 nt, Human
ucccaagcaaugagucagggcc

SEQ ID NO: 195467 - RNA, 21 nt, Human
gcccagagggagccaagccca

SEQ ID NO: 195468 - RNA, 22 nt, Human
gcuguucaagacuaggaaauuu

SEQ ID NO: 195469 - RNA, 22 nt, Human
uucuucuugucugcccucacau

SEQ ID NO: 195470 - RNA, 22 nt, Human
aaggaggcacucgcucucaggg

SEQ ID NO: 195471 - RNA, 22 nt, Human
cugaccagaccccaggaggcug

SEQ ID NO: 195472 - RNA, 22 nt, Human
cugcugugggcaggguagcugg

SEQ ID NO: 195473 - RNA, 22 nt, Human
gggcucuggauggagccugcag

SEQ ID NO: 195474 - RNA, 22 nt, Human
aaauaaucaauuuuuguagaua

SEQ ID NO: 195475 - RNA, 22 nt, Human
agcaagauuuuucagguuagua

SEQ ID NO: 195476 - RNA, 22 nt, Human
cccaggccccagggcuugucag

SEQ ID NO: 195477 - RNA, 18 nt, Human
acaaaggucugcaagacc

SEQ ID NO: 195478 - RNA, 22 nt, Human
agagucuuuugucaguaauguu

SEQ ID NO: 195479 - RNA, 22 nt, Human
aagccaggccauucucugguuc

SEQ ID NO: 195480 - RNA, 22 nt, Human
guuuccugacuguggaauuaua

SEQ ID NO: 195481 - RNA, 20 nt, Human
cccaggagcugugccccauc

SEQ ID NO: 195482 - RNA, 22 nt, Human
cuuuggaagccaggcaguucac

SEQ ID NO: 195483 - RNA, 22 nt, Human
gaaaaggcucucacucccuccg

SEQ ID NO: 195484 - RNA, 22 nt, Human
cccaggagaccugugaaaggac

SEQ ID NO: 195485 - RNA, 19 nt, Human
cauuuucucauugugcccc

SEQ ID NO: 195486 - RNA, 20 nt, Human
uccaggcagacagcuauggg

SEQ ID NO: 195487 - RNA, 22 nt, Human
gggaggaaggcuugggugagua

SEQ ID NO: 195488 - RNA, 22 nt, Human
uggcauuuuccaaugauauguu

SEQ ID NO: 195489 - RNA, 22 nt, Human
uuggaauuccuguuguuucguc

SEQ ID NO: 195490 - RNA, 22 nt, Human
agugaaauugcuguaagaggaa

SEQ ID NO: 195491 - RNA, 22 nt, Human
uguggggccucgugcuagcugg

SEQ ID NO: 195492 - RNA, 22 nt, Human
caucucaugggcaugccaagcu

SEQ ID NO: 195493 - RNA, 23 nt, Human
auaaacugucaaaagccagcccu

SEQ ID NO: 195494 - RNA, 22 nt, Human
ggcaucaguauggccauagggu

SEQ ID NO: 195495 - RNA, 22 nt, Human
aaaugcagguaguauuuauuuu

SEQ ID NO: 195496 - RNA, 22 nt, Human
cuguugucuucauugucauauc

SEQ ID NO: 195497 - RNA, 22 nt, Human
uugacuucagccuguacuugua

SEQ ID NO: 195498 - RNA, 22 nt, Human
cuccacagcucaggcucagagu

SEQ ID NO: 195499 - RNA, 22 nt, Human
aggccucagcucagugugacag

SEQ ID NO: 195500 - RNA, 22 nt, Human
gaaaggagaggguuaaggagcu

SEQ ID NO: 195501 - RNA, 19 nt, Human
ccagucccauacaggagau

SEQ ID NO: 195502 - RNA, 22 nt, Human
uucucuguaguugccuggugga

SEQ ID NO: 195503 - RNA, 22 nt, Human
uuccaaaguuaguuauuagaaa

SEQ ID NO: 195504 - RNA, 22 nt, Human
cuacagucuggcaggaauguua

SEQ ID NO: 195505 - RNA, 22 nt, Human
cauaauccuguccuggauucuu

SEQ ID NO: 195506 - RNA, 22 nt, Human
ugcaaauguguggugaggcauu

SEQ ID NO: 195507 - RNA, 22 nt, Human
ugggaggaucgcuugagcccag

SEQ ID NO: 195508 - RNA, 22 nt, Human
gguaagcacuucauguacauga

SEQ ID NO: 195509 - RNA, 22 nt, Human
agucugugugaaugugggcuuu

SEQ ID NO: 195510 - RNA, 22 nt, Human
cuuguucaguugccucuccugc

SEQ ID NO: 195511 - RNA, 22 nt, Human
agccucuguagaaagcagugug

SEQ ID NO: 195512 - RNA, 22 nt, Human
aauuagaguggcgagugauuua

SEQ ID NO: 195513 - RNA, 22 nt, Human
uucacaaacuucaugauggcac

SEQ ID NO: 195514 - RNA, 21 nt, Human
auucaacuagaugauuauuuc

SEQ ID NO: 195515 - RNA, 22 nt, Human
cugccuguuuccucuugcuccc

SEQ ID NO: 195516 - RNA, 22 nt, Human
ggcugccucagauuugcugacu

SEQ ID NO: 195517 - RNA, 22 nt, Human
ucuucuuccucauuuauacaua

SEQ ID NO: 195518 - RNA, 22 nt, Human
uggaggaaguggcuggccagaa

SEQ ID NO: 195519 - RNA, 22 nt, Human
gaaggcugagcagacaggccaa

SEQ ID NO: 195520 - RNA, 22 nt, Human
guccugaggcaggauggguuuc

SEQ ID NO: 195521 - RNA, 22 nt, Human
cauauucuuuaagcaaugcucu

SEQ ID NO: 195522 - RNA, 22 nt, Human
acccagaggugucuagcaagcu

SEQ ID NO: 195523 - RNA, 22 nt, Human
aacaggcagcagacugaaucug

SEQ ID NO: 195524 - RNA, 22 nt, Human
gggaaacucacaggugcagggg

SEQ ID NO: 195525 - RNA, 22 nt, Human
ggugagcacugcccugggucuc

SEQ ID NO: 195526 - RNA, 22 nt, Human
gcccaugggccugaggcccuag

SEQ ID NO: 195527 - RNA, 23 nt, Human
ugggucucuaguacaggcaggca

SEQ ID NO: 195528 - RNA, 22 nt, Human
ccuuggagaccugggucugugc

SEQ ID NO: 195529 - RNA, 22 nt, Human
gcccaguaguucaagguugcag

SEQ ID NO: 195530 - RNA, 22 nt, Human
acaggccuggguucaaauuugg

SEQ ID NO: 195531 - RNA, 22 nt, Human
gaguccuuuguuccuugccaca

SEQ ID NO: 195532 - RNA, 22 nt, Human
uguucucucuccuuuugaagug

SEQ ID NO: 195533 - RNA, 20 nt, Human
ggggcagguuuuuauggcua

SEQ ID NO: 195534 - RNA, 22 nt, Human
uucuuacagauuuggugaauga

SEQ ID NO: 195535 - RNA, 22 nt, Human
ucaguuaagacugcacuggacu

SEQ ID NO: 195536 - RNA, 22 nt, Human
gggcucugagcucugggaauua

SEQ ID NO: 195537 - RNA, 22 nt, Human
agacaauggagggaaauacuuc

SEQ ID NO: 195538 - RNA, 22 nt, Human
aauaagaacuugucucuggcag

SEQ ID NO: 195539 - RNA, 19 nt, Human
aguguucugaguacuccuc

SEQ ID NO: 195540 - RNA, 20 nt, Human
agcaggaaaagugccagucu

SEQ ID NO: 195541 - RNA, 22 nt, Human
uuuacuguuacaccuaccuucu

SEQ ID NO: 195542 - RNA, 22 nt, Human
aaaccauugcaucuuucuuaau

SEQ ID NO: 195543 - RNA, 22 nt, Human
caggcugcggccgugugagcau

SEQ ID NO: 195544 - RNA, 23 nt, Human
ugaaacauuuaggguagaauuuc

SEQ ID NO: 195545 - RNA, 22 nt, Human
aucaacaugaauuucucugaag

SEQ ID NO: 195546 - RNA, 22 nt, Human
auugcaaagcauugugagcgca

SEQ ID NO: 195547 - RNA, 22 nt, Human
ugaggaagggugugacggcacc

SEQ ID NO: 195548 - RNA, 22 nt, Human
cuggugagacucagggaugcuu

SEQ ID NO: 195549 - RNA, 22 nt, Human
aggcugugcaauuaggguaaga

SEQ ID NO: 195550 - RNA, 22 nt, Human
cucaggccauucuuccagcugc

SEQ ID NO: 195551 - RNA, 22 nt, Human
aguuacaucuguuauguguguu

SEQ ID NO: 195552 - RNA, 22 nt, Human
ggguggaagccagagaggucau

SEQ ID NO: 195553 - RNA, 22 nt, Human
cucaugucaggggugucaaugu

SEQ ID NO: 195554 - RNA, 22 nt, Human
uucaagaaagaguggcuauucc

SEQ ID NO: 195555 - RNA, 22 nt, Human
auacacauuacuuucugucuga

SEQ ID NO: 195556 - RNA, 23 nt, Human
uuuuaauuuggacauaagaagau

SEQ ID NO: 195557 - RNA, 22 nt, Human
cgggcuccgggucuuugcaguc

SEQ ID NO: 195558 - RNA, 22 nt, Human
gcaaauacauguugagcaccua

SEQ ID NO: 195559 - RNA, 22 nt, Human
ucauuuucaaguuugaacagga

SEQ ID NO: 195560 - RNA, 22 nt, Human
uggcuacauuuauacucucauu

SEQ ID NO: 195561 - RNA, 22 nt, Human
aguguguucucaaugaaaagaa

SEQ ID NO: 195562 - RNA, 22 nt, Human
gcagacaauuuauuagcagauu

SEQ ID NO: 195563 - RNA, 22 nt, Human
aauuucaaacuaauaggaacca

SEQ ID NO: 195564 - RNA, 22 nt, Human
ggacccugggcucugggccuau

SEQ ID NO: 195565 - RNA, 22 nt, Human
uuugcaguagacaucuuauuuu

SEQ ID NO: 195566 - RNA, 22 nt, Human
uacuacauacagaauuuagaga

SEQ ID NO: 195567 - RNA, 22 nt, Human
cucccagagaccaagcugagaa

SEQ ID NO: 195568 - RNA, 22 nt, Human
aaugguuucaaacacacuaagu

SEQ ID NO: 195569 - RNA, 22 nt, Human
caggaaacaaagccuugcucau

SEQ ID NO: 195570 - RNA, 22 nt, Human
cuuuggaaguaaagucagcagg

SEQ ID NO: 195571 - RNA, 22 nt, Human
gcucuggaagcaucugagagga

SEQ ID NO: 195572 - RNA, 19 nt, Human
ccaacaguacugaagcacu

SEQ ID NO: 195573 - RNA, 17 nt, Human
aggccagaugaggcaag

SEQ ID NO: 195574 - RNA, 22 nt, Human
caagauggagaagcagcaaggg

SEQ ID NO: 195575 - RNA, 22 nt, Human
cacuugauguugucacuauugc

SEQ ID NO: 195576 - RNA, 22 nt, Human
aggcucagggacucccucccuc

SEQ ID NO: 195577 - RNA, 20 nt, Human
agauuauuccuaagauuucu

SEQ ID NO: 195578 - RNA, 18 nt, Human
gggaagaggaucuggccc

SEQ ID NO: 195579 - RNA, 20 nt, Human
uugcugggaccuuuuucaac

SEQ ID NO: 195580 - RNA, 22 nt, Human
acaagacugugcucuaagagug

SEQ ID NO: 195581 - RNA, 22 nt, Human
gacuuuauuauaguggcaauag

SEQ ID NO: 195582 - RNA, 22 nt, Human
ugcugagggagcaucaaagaaa

SEQ ID NO: 195583 - RNA, 22 nt, Human
uugccuggagggacauggagac

SEQ ID NO: 195584 - RNA, 22 nt, Human
uucuaagucacucagauuuugg

SEQ ID NO: 195585 - RNA, 22 nt, Human
agggcagccugagugcuggccc

SEQ ID NO: 195586 - RNA, 22 nt, Human
gcucaaaucccagcgggcuccu

SEQ ID NO: 195587 - RNA, 22 nt, Human
ccugcuggccaguggagggcug

SEQ ID NO: 195588 - RNA, 20 nt, Human
agggccuggaguacagcagg

SEQ ID NO: 195589 - RNA, 22 nt, Human
uccccagguccugucggcuccu

SEQ ID NO: 195590 - RNA, 22 nt, Human
uagggcugccauuugcuuuucu

SEQ ID NO: 195591 - RNA, 22 nt, Human
gucucagauucagacaucuaca

SEQ ID NO: 195592 - RNA, 22 nt, Human
gccugagccgccugagcggcgg

SEQ ID NO: 195593 - RNA, 22 nt, Human
cagucccagaagagccugggag

SEQ ID NO: 195594 - RNA, 22 nt, Human
uuucaugccucuugagaaagau

SEQ ID NO: 195595 - RNA, 22 nt, Human
ggcuccaggagaugcugggcag

SEQ ID NO: 195596 - RNA, 22 nt, Human
cugacuuugcucauaggucaaa

SEQ ID NO: 195597 - RNA, 22 nt, Human
cucuguggcuugccuuucuguc

SEQ ID NO: 195598 - RNA, 22 nt, Human
agggucagugaugagggagccc

SEQ ID NO: 195599 - RNA, 22 nt, Human
auggagauuuuuagaauuacag

SEQ ID NO: 195600 - RNA, 22 nt, Human
caugcaggugaccagguguggg

SEQ ID NO: 195601 - RNA, 23 nt, Human
acaguuauagcugugaauaacau

SEQ ID NO: 195602 - RNA, 22 nt, Human
uuucauguggcgaugucucugg

SEQ ID NO: 195603 - RNA, 22 nt, Human
ucaggcuuccaggcucugcuga

SEQ ID NO: 195604 - RNA, 22 nt, Human
agacgagggcccccaggacagc

SEQ ID NO: 195605 - RNA, 22 nt, Human
ugcuucucaaaaggagguaggu

SEQ ID NO: 195606 - RNA, 22 nt, Human
cagcuguggagggaggaaaugc

SEQ ID NO: 195607 - RNA, 22 nt, Human
uuugaaaggaaguuaauacuuu

SEQ ID NO: 195608 - RNA, 22 nt, Human
aacacagggcagcugcugggaa

SEQ ID NO: 195609 - RNA, 22 nt, Human
uugucugugaaauggaaauagu

SEQ ID NO: 195610 - RNA, 18 nt, Human
uggacaggguggagaaaa

SEQ ID NO: 195611 - RNA, 22 nt, Human
acauucaaaaagcaucugucac

SEQ ID NO: 195612 - RNA, 22 nt, Human
ccaggguggcguagaugcuggg

SEQ ID NO: 195613 - RNA, 22 nt, Human
ucucaguguuaucuaucugccu

SEQ ID NO: 195614 - RNA, 20 nt, Human
cuccaguguucaggggagug

SEQ ID NO: 195615 - RNA, 22 nt, Human
acucaucagccucuaggaaaga

SEQ ID NO: 195616 - RNA, 18 nt, Human
uccuaacuuagauacucc

SEQ ID NO: 195617 - RNA, 22 nt, Human
acaggugucuaaggcagacagc

SEQ ID NO: 195618 - RNA, 22 nt, Human
cccaggaccgcgcggcugagcg

SEQ ID NO: 195619 - RNA, 22 nt, Human
uccaagucuuccuucccaaacc

SEQ ID NO: 195620 - RNA, 22 nt, Human
aggcagggucuugcuauguugc

SEQ ID NO: 195621 - RNA, 22 nt, Human
aguuuccaaagcauguucacac

SEQ ID NO: 195622 - RNA, 22 nt, Human
guuuagaauggcaaaauuaagu

SEQ ID NO: 195623 - RNA, 22 nt, Human
uuuacagaugaggauacugagg

SEQ ID NO: 195624 - RNA, 22 nt, Human
cacauuuagagguuagcauggu

SEQ ID NO: 195625 - RNA, 22 nt, Human
acagaaaugauguuuggcaaua

SEQ ID NO: 195626 - RNA, 22 nt, Human
agaggcggagcuugcagugagc

SEQ ID NO: 195627 - RNA, 22 nt, Human
cagaaguuugacauguuuagcu

SEQ ID NO: 195628 - RNA, 22 nt, Human
auauucacaguaaguguagcag

SEQ ID NO: 195629 - RNA, 22 nt, Human
cuccccuucuugccagauccuu

SEQ ID NO: 195630 - RNA, 22 nt, Human
cagcuuuaguaacccacugcuc

SEQ ID NO: 195631 - RNA, 22 nt, Human
caggaagucgcagagcuggggg

SEQ ID NO: 195632 - RNA, 22 nt, Human
auauuuaaacaggguaccaaua

SEQ ID NO: 195633 - RNA, 22 nt, Human
uuguuucucuggucuugaguga

SEQ ID NO: 195634 - RNA, 22 nt, Human
gcuuuuccugacuuuccauuag

SEQ ID NO: 195635 - RNA, 22 nt, Human
uguauguaugcaucuuuuaugu

SEQ ID NO: 195636 - RNA, 22 nt, Human
uacauaguauucacauuguuuu

SEQ ID NO: 195637 - RNA, 21 nt, Human
agcacagcuuuaagccaugug

SEQ ID NO: 195638 - RNA, 22 nt, Human
gcugcagagacagcugccgaug

SEQ ID NO: 195639 - RNA, 22 nt, Human
agcaggcugccuuccaaagccu

SEQ ID NO: 195640 - RNA, 22 nt, Human
caauacugaguuuacauucauc

SEQ ID NO: 195641 - RNA, 18 nt, Human
agcugguggggagacagc

SEQ ID NO: 195642 - RNA, 22 nt, Human
uugcaaaggggaauaaagcaau

SEQ ID NO: 195643 - RNA, 22 nt, Human
acacauuugcauaauaccucau

SEQ ID NO: 195644 - RNA, 22 nt, Human
gcccuccagcuguugcgcgucg

SEQ ID NO: 195645 - RNA, 22 nt, Human
gaagcaguauccugacagcacc

SEQ ID NO: 195646 - RNA, 22 nt, Human
aaggaggaauguagccagcucc

SEQ ID NO: 195647 - RNA, 22 nt, Human
uagauaaaagggcaaagggcau

SEQ ID NO: 195648 - RNA, 22 nt, Human
uaugucacauuguaacagugug

SEQ ID NO: 195649 - RNA, 22 nt, Human
agaaauguggaucguuuuaaaa

SEQ ID NO: 195650 - RNA, 22 nt, Human
gcacacauucggauucuuaacc

SEQ ID NO: 195651 - RNA, 22 nt, Human
cuuggcccaguugccaaggaaa

SEQ ID NO: 195652 - RNA, 22 nt, Human
ggcccugcgauuagguggcagg

SEQ ID NO: 195653 - RNA, 22 nt, Human
agggcagcagcugucccugaga

SEQ ID NO: 195654 - RNA, 22 nt, Human
cuuucagagguuacucaggaaa

SEQ ID NO: 195655 - RNA, 22 nt, Human
cagcuuugugcaaugcagucuc

SEQ ID NO: 195656 - RNA, 22 nt, Human
aaagacagagcuguaggggaaa

SEQ ID NO: 195657 - RNA, 22 nt, Human
ccucagucuauuuccagcaggu

SEQ ID NO: 195658 - RNA, 22 nt, Human
caguguuucugaguuccagcuc

SEQ ID NO: 195659 - RNA, 22 nt, Human
aagucuguuugagugucacacu

SEQ ID NO: 195660 - RNA, 22 nt, Human
aagucguggcaggcuugcacga

SEQ ID NO: 195661 - RNA, 22 nt, Human
ucuucauguauacucaugguac

SEQ ID NO: 195662 - RNA, 23 nt, Human
acacauauauucagauacagaug

SEQ ID NO: 195663 - RNA, 22 nt, Human
aggccuggcuuugguuugcuga

SEQ ID NO: 195664 - RNA, 22 nt, Human
gggcuucuguaccuaccuggaa

SEQ ID NO: 195665 - RNA, 22 nt, Human
auuggaauggcuuugcaugucc

SEQ ID NO: 195666 - RNA, 19 nt, Human
ugggcuuccccagggcaga

SEQ ID NO: 195667 - RNA, 22 nt, Human
gaugagcugugauuaauaagua

SEQ ID NO: 195668 - RNA, 22 nt, Human
ugccugucucugacugccauua

SEQ ID NO: 195669 - RNA, 22 nt, Human
ggcucccuggcccuggggacac

SEQ ID NO: 195670 - RNA, 22 nt, Human
acacagcucagugccuccaaga

SEQ ID NO: 195671 - RNA, 22 nt, Human
ggcuucugaaaucucugugcgu

SEQ ID NO: 195672 - RNA, 22 nt, Human
aaugcaaugcagcaccuccuug

SEQ ID NO: 195673 - RNA, 22 nt, Human
aaagugccuucuauuuuaguga

SEQ ID NO: 195674 - RNA, 22 nt, Human
auucucagcuuucaaauagaca

SEQ ID NO: 195675 - RNA, 22 nt, Human
aaagacauuagcuuagauguca

SEQ ID NO: 195676 - RNA, 22 nt, Human
cuuuuucuaaucauaauugucu

SEQ ID NO: 195677 - RNA, 22 nt, Human
accaggccaaaaucauauuuac

SEQ ID NO: 195678 - RNA, 22 nt, Human
ugcggaaggcagcgcagggugg

SEQ ID NO: 195679 - RNA, 22 nt, Human
cacccacauuccucuaguaugu

SEQ ID NO: 195680 - RNA, 22 nt, Human
cucucagaagcuuccaguaugg

SEQ ID NO: 195681 - RNA, 22 nt, Human
gcugauuuugagaagcacaguc

SEQ ID NO: 195682 - RNA, 22 nt, Human
aaagccaugggucuuuggcaua

SEQ ID NO: 195683 - RNA, 22 nt, Human
ugucccugauccacuggacccc

SEQ ID NO: 195684 - RNA, 22 nt, Human
ucugucugccuugugagggcac

SEQ ID NO: 195685 - RNA, 22 nt, Human
gcccugagccaccaaugccauu

SEQ ID NO: 195686 - RNA, 23 nt, Human
agccuucaggcaaugucaguaga

SEQ ID NO: 195687 - RNA, 22 nt, Human
cucagagagggcaccagggcca

SEQ ID NO: 195688 - RNA, 22 nt, Human
ucaggaaauuaaacacuugaaa

SEQ ID NO: 195689 - RNA, 22 nt, Human
gaccauuuuuacagagcauuca

SEQ ID NO: 195690 - RNA, 22 nt, Human
guuuauaugugugccacucuua

SEQ ID NO: 195691 - RNA, 22 nt, Human
gaauaauauugacuuugcaggc

SEQ ID NO: 195692 - RNA, 22 nt, Human
ugcuuugugacagauuaguuuu

SEQ ID NO: 195693 - RNA, 22 nt, Human
uucaguuucuaaaugcuccucu

SEQ ID NO: 195694 - RNA, 22 nt, Human
gagaugguugcaauaguuuaaa

SEQ ID NO: 195695 - RNA, 22 nt, Human
ggcucugccucugacccucugg

SEQ ID NO: 195696 - RNA, 22 nt, Human
uggcucagcuuuccccaucugg

SEQ ID NO: 195697 - RNA, 22 nt, Human
ggugaaggcacaagagggcaag

SEQ ID NO: 195698 - RNA, 22 nt, Human
uugcagaacuuaaagacagagu

SEQ ID NO: 195699 - RNA, 22 nt, Human
ugcucaguauagaaaaugauau

SEQ ID NO: 195700 - RNA, 22 nt, Human
cccuguacagucucuguggcac

SEQ ID NO: 195701 - RNA, 22 nt, Human
aaguuacauaaauguccucuag

SEQ ID NO: 195702 - RNA, 22 nt, Human
cccuagggcuaagcaggacugc

SEQ ID NO: 195703 - RNA, 22 nt, Human
ucuguggcuugggccugccugu

SEQ ID NO: 195704 - RNA, 22 nt, Human
aggaccagaccgaacuagcuaa

SEQ ID NO: 195705 - RNA, 22 nt, Human
aaacaagcugcagacaagccau

SEQ ID NO: 195706 - RNA, 22 nt, Human
uuucagaagucacaguugacug

SEQ ID NO: 195707 - RNA, 22 nt, Human
acauuucuuucuauucaguagc

SEQ ID NO: 195708 - RNA, 22 nt, Human
uucucacaauucuuguauuugc

SEQ ID NO: 195709 - RNA, 22 nt, Human
ucuggcagugaagucaugaggu

SEQ ID NO: 195710 - RNA, 22 nt, Human
ucugggcucugucagcaccucu

SEQ ID NO: 195711 - RNA, 22 nt, Human
uggcccagacucugcucuuauc

SEQ ID NO: 195712 - RNA, 22 nt, Human
ccagagcccgggaccuggacuu

SEQ ID NO: 195713 - RNA, 22 nt, Human
ccagguguagcacugcucacag

SEQ ID NO: 195714 - RNA, 22 nt, Human
uagcaaccuauggauagagaag

SEQ ID NO: 195715 - RNA, 19 nt, Human
uuguacagcaaccaacccu

SEQ ID NO: 195716 - RNA, 23 nt, Human
agcucaaggcaguccacauuucc

SEQ ID NO: 195717 - RNA, 22 nt, Human
gguaccaccaauucagcugcca

SEQ ID NO: 195718 - RNA, 22 nt, Human
agcuaacaugacuagaagcuuc

SEQ ID NO: 195719 - RNA, 22 nt, Human
ccucuccccucccaaggcggga

SEQ ID NO: 195720 - RNA, 16 nt, Human
gucuuuauucacuuag

SEQ ID NO: 195721 - RNA, 22 nt, Human
guucuuaagaccacaauaaaaa

SEQ ID NO: 195722 - RNA, 22 nt, Human
caggacuggcucgcagugggug

SEQ ID NO: 195723 - RNA, 22 nt, Human
uacaaauuaaugggcauguuua

SEQ ID NO: 195724 - RNA, 22 nt, Human
uucuaagucugcugucuucauc

SEQ ID NO: 195725 - RNA, 22 nt, Human
cagugggauugggauuggaacc

SEQ ID NO: 195726 - RNA, 22 nt, Human
gaaugcuauuauuucugugugu

SEQ ID NO: 195727 - RNA, 22 nt, Human
cauuucaaugccuucaacauag

SEQ ID NO: 195728 - RNA, 22 nt, Human
gaaccucuuuagugcauccuuc

SEQ ID NO: 195729 - RNA, 22 nt, Human
uguggggcuuacaaaggcagau

SEQ ID NO: 195730 - RNA, 22 nt, Human
gggcaggugaccucuuguccug

SEQ ID NO: 195731 - RNA, 22 nt, Human
gugcugagcugcagaugcgcuc

SEQ ID NO: 195732 - RNA, 22 nt, Human
ugucaauaacauuuacuucuau

SEQ ID NO: 195733 - RNA, 22 nt, Human
uguccagcggccuggcugcuga

SEQ ID NO: 195734 - RNA, 22 nt, Human
ucaguccaggggcugugauguc

SEQ ID NO: 195735 - RNA, 22 nt, Human
aagggcucugcugucucucccc

SEQ ID NO: 195736 - RNA, 22 nt, Human
ggcuccuggcaucuggugggua

SEQ ID NO: 195737 - RNA, 22 nt, Human
cagaugcuucgugggugagcac

SEQ ID NO: 195738 - RNA, 22 nt, Human
uccaugagacagauacuguaag

SEQ ID NO: 195739 - RNA, 22 nt, Human
ugguggggcuuuccuucugcuu

SEQ ID NO: 195740 - RNA, 22 nt, Human
ccaggaggugcuggaagaaagc

SEQ ID NO: 195741 - RNA, 22 nt, Human
aaauaucauucuggugcacaga

SEQ ID NO: 195742 - RNA, 22 nt, Human
acuucccauuucucugcuuuag

SEQ ID NO: 195743 - RNA, 22 nt, Human
acuuccuugucaggugcaucau

SEQ ID NO: 195744 - RNA, 22 nt, Human
ucuggccacuaauaggucucac

SEQ ID NO: 195745 - RNA, 22 nt, Human
acuggcagugucguuuacauga

SEQ ID NO: 195746 - RNA, 22 nt, Human
ugaaaucuccucuuuauauauc

SEQ ID NO: 195747 - RNA, 22 nt, Human
ugaggggcagagagguguccag

SEQ ID NO: 195748 - RNA, 22 nt, Human
cuccuccacagaguccuugcca

SEQ ID NO: 195749 - RNA, 22 nt, Human
uaacaguugguguaauuucuug

SEQ ID NO: 195750 - RNA, 22 nt, Human
uugagauggagucucacucugu

SEQ ID NO: 195751 - RNA, 22 nt, Human
ucugucugacuaccaugaggca

SEQ ID NO: 195752 - RNA, 22 nt, Human
gcuccaggcagcauaguggaug

SEQ ID NO: 195753 - RNA, 22 nt, Human
ugagaugaauaacuccugcuaa

SEQ ID NO: 195754 - RNA, 19 nt, Human
aggguccaggcccugugga

SEQ ID NO: 195755 - RNA, 22 nt, Human
auggacauuugaguuauuucca

SEQ ID NO: 195756 - RNA, 22 nt, Human
ugaagggcaaccccaggcccag

SEQ ID NO: 195757 - RNA, 22 nt, Human
ugucuucagcaaaugccuuucu

SEQ ID NO: 195758 - RNA, 22 nt, Human
acacaggcauagccauacaugu

SEQ ID NO: 195759 - RNA, 22 nt, Human
aagagacaugaauacucgaagg

SEQ ID NO: 195760 - RNA, 22 nt, Human
acuucaugaacauguggccugu

SEQ ID NO: 195761 - RNA, 22 nt, Human
auuugcuucugcuaaacaacuu

SEQ ID NO: 195762 - RNA, 22 nt, Human
uagcuguccagugagucccuuu

SEQ ID NO: 195763 - RNA, 17 nt, Human
gccugcaggcccgcaga

SEQ ID NO: 195764 - RNA, 22 nt, Human
aaagccaguuugucucuuuaaa

SEQ ID NO: 195765 - RNA, 22 nt, Human
agcacuguggggaacucacaga

SEQ ID NO: 195766 - RNA, 22 nt, Human
acacauauauuauuuguggcuc

SEQ ID NO: 195767 - RNA, 22 nt, Human
ugaacuuucacaagaauaugcu

SEQ ID NO: 195768 - RNA, 22 nt, Human
uggagggcgcuuagauggaggg

SEQ ID NO: 195769 - RNA, 22 nt, Human
gcaggaguucaauugcccauga

SEQ ID NO: 195770 - RNA, 22 nt, Human
aauguuaauguguuugcuuaug

SEQ ID NO: 195771 - RNA, 22 nt, Human
agcuggcuuugagcugggaggu

SEQ ID NO: 195772 - RNA, 22 nt, Human
gggacuucauagcuaggcacuu

SEQ ID NO: 195773 - RNA, 22 nt, Human
aagcaagaggaaauguggaccu

SEQ ID NO: 195774 - RNA, 22 nt, Human
cacuugaaugagaauuuccugg

SEQ ID NO: 195775 - RNA, 23 nt, Human
aggcagcagguuguccaggguga

SEQ ID NO: 195776 - RNA, 22 nt, Human
aagugauuucugccugcauguu

SEQ ID NO: 195777 - RNA, 19 nt, Human
agugagcauccagagaggu

SEQ ID NO: 195778 - RNA, 22 nt, Human
ccucugcucugguccaugugcu

SEQ ID NO: 195779 - RNA, 22 nt, Human
uccugcagaccucagucagguc

SEQ ID NO: 195780 - RNA, 22 nt, Human
auuuuagagcuccaaguacagc

SEQ ID NO: 195781 - RNA, 22 nt, Human
gaauuucagaucagagaccauu

SEQ ID NO: 195782 - RNA, 22 nt, Human
caggaaguagaguuggccagcc

SEQ ID NO: 195783 - RNA, 22 nt, Human
uccuggaggagauccaaucuga

SEQ ID NO: 195784 - RNA, 21 nt, Human
ugaaacagauggaaguauuug

SEQ ID NO: 195785 - RNA, 22 nt, Human
acacauuuucuaacagggauca

SEQ ID NO: 195786 - RNA, 22 nt, Human
uacuguuagagcgauuuguccu

SEQ ID NO: 195787 - RNA, 22 nt, Human
uugcuuuauuccuagcccuugu

SEQ ID NO: 195788 - RNA, 22 nt, Human
aggagcccagccugggcucgga

SEQ ID NO: 195789 - RNA, 22 nt, Human
gccaccuccuuauuccaccugu

SEQ ID NO: 195790 - RNA, 22 nt, Human
accuaaaucuaccucauguuuu

SEQ ID NO: 195791 - RNA, 22 nt, Human
cagagucaguauugaauugaaa

SEQ ID NO: 195792 - RNA, 22 nt, Human
aucuccagaugccuggaaauga

SEQ ID NO: 195793 - RNA, 22 nt, Human
uugcuuuaggauuuaaguggca

SEQ ID NO: 195794 - RNA, 22 nt, Human
aauuauauguuaaucuucaauu

SEQ ID NO: 195795 - RNA, 22 nt, Human
caguccagccaguagggugugg

SEQ ID NO: 195796 - RNA, 22 nt, Human
gagacaggcagcuaguggguca

SEQ ID NO: 195797 - RNA, 22 nt, Human
uugaauaauuaauuacacucag

SEQ ID NO: 195798 - RNA, 22 nt, Human
aggcaggugcuuaugacuugcu

SEQ ID NO: 195799 - RNA, 22 nt, Human
aaguuacaguuacagaauggag

SEQ ID NO: 195800 - RNA, 22 nt, Human
uccaggauugcaggugcacaac

SEQ ID NO: 195801 - RNA, 22 nt, Human
uggcuccaggggacacgcagua

SEQ ID NO: 195802 - RNA, 22 nt, Human
cuguuuauuacguaauuaauau

SEQ ID NO: 195803 - RNA, 18 nt, Human
caugucugcgccacaagg

SEQ ID NO: 195804 - RNA, 22 nt, Human
uagcauaauuuguagaaaauca

SEQ ID NO: 195805 - RNA, 22 nt, Human
aaggaacuuggugcccgugccc

SEQ ID NO: 195806 - RNA, 22 nt, Human
aauuucagagguagagauucua

SEQ ID NO: 195807 - RNA, 22 nt, Human
acagggcagagggcaguuggua

SEQ ID NO: 195808 - RNA, 22 nt, Human
agggccagaugaagccacaagc

SEQ ID NO: 195809 - RNA, 22 nt, Human
gcagggugacguugcccaccuc

SEQ ID NO: 195810 - RNA, 22 nt, Human
ccacagcugaccgcaggugagc

SEQ ID NO: 195811 - RNA, 22 nt, Human
aucagaaaucuaggauucagaa

SEQ ID NO: 195812 - RNA, 22 nt, Human
uuccuagggcagagccgcuggg

SEQ ID NO: 195813 - RNA, 22 nt, Human
ccagagaaagcucacaggcagu

SEQ ID NO: 195814 - RNA, 22 nt, Human
cugggcucuucccagauccaga

SEQ ID NO: 195815 - RNA, 22 nt, Human
gaaagcugaaccaggaaccaug

SEQ ID NO: 195816 - RNA, 22 nt, Human
uacaguaaccuuauuugucauu

SEQ ID NO: 195817 - RNA, 22 nt, Human
cuucaggauuuaggaagaugaa

SEQ ID NO: 195818 - RNA, 23 nt, Human
uggucucagccugugagagcuga

SEQ ID NO: 195819 - RNA, 22 nt, Human
gcuggcucugccccaccuguuc

SEQ ID NO: 195820 - RNA, 22 nt, Human
ggagagagaugccgccuugcuc

SEQ ID NO: 195821 - RNA, 22 nt, Human
ucucuggccccauggcugagcu

SEQ ID NO: 195822 - RNA, 22 nt, Human
ucagugauuucuggggugaggg

SEQ ID NO: 195823 - RNA, 22 nt, Human
cccuuagaauuuuguaguuauu

SEQ ID NO: 195824 - RNA, 22 nt, Human
auggcuggugauacuggaguga

SEQ ID NO: 195825 - RNA, 22 nt, Human
aucauucagccuaagcaaguac

SEQ ID NO: 195826 - RNA, 22 nt, Human
ucuuccucaugaauucucguau

SEQ ID NO: 195827 - RNA, 22 nt, Human
ugugcucuucuguuacuuguag

SEQ ID NO: 195828 - RNA, 22 nt, Human
agguaaaauagauaguauuucu

SEQ ID NO: 195829 - RNA, 22 nt, Human
cugggaaauggcuucgagcuca

SEQ ID NO: 195830 - RNA, 21 nt, Human
ugguccuucuuuacugccucc

SEQ ID NO: 195831 - RNA, 22 nt, Human
aaagaguucacggaggccaaag

SEQ ID NO: 195832 - RNA, 20 nt, Human
auguaaaagacagggaguag

SEQ ID NO: 195833 - RNA, 22 nt, Human
aauaauacuucguaaaguuguu

SEQ ID NO: 195834 - RNA, 22 nt, Human
cugcugugcagacagacucucu

SEQ ID NO: 195835 - RNA, 22 nt, Human
cuugacuuugccuuuuaaaugu

SEQ ID NO: 195836 - RNA, 22 nt, Human
ugcuggggcagaagagccaaga

SEQ ID NO: 195837 - RNA, 22 nt, Human
ucagcaaaggaccagcacaggc

SEQ ID NO: 195838 - RNA, 22 nt, Human
cugccugcaggacaccucgcua

SEQ ID NO: 195839 - RNA, 22 nt, Human
cauagaaaucaggugagaaucu

SEQ ID NO: 195840 - RNA, 22 nt, Human
gucuagaaaaugccgagggaug

SEQ ID NO: 195841 - RNA, 22 nt, Human
uggcugaggucuggggcuucug

SEQ ID NO: 195842 - RNA, 22 nt, Human
ggcccagcaucuugugaaguuu

SEQ ID NO: 195843 - RNA, 22 nt, Human
agaacacugcuaguauaaucac

SEQ ID NO: 195844 - RNA, 22 nt, Human
gcuccuggagagauugagaaag

SEQ ID NO: 195845 - RNA, 22 nt, Human
ucuauauuuugaaagguauuua

SEQ ID NO: 195846 - RNA, 22 nt, Human
ucuuaaagagcgcaauuugagg

SEQ ID NO: 195847 - RNA, 22 nt, Human
agcccugcacaguucgggagga

SEQ ID NO: 195848 - RNA, 22 nt, Human
gcaaggagccuggaggugagug

SEQ ID NO: 195849 - RNA, 22 nt, Human
gccacagcccgagcaccaugag

SEQ ID NO: 195850 - RNA, 20 nt, Human
uacaagaauccccaguuguc

SEQ ID NO: 195851 - RNA, 22 nt, Human
gugcaguguguaauccaggaac

SEQ ID NO: 195852 - RNA, 22 nt, Human
uaggauuuuuuggauucuggau

SEQ ID NO: 195853 - RNA, 22 nt, Human
uugugaauagugccgcuauaaa

SEQ ID NO: 195854 - RNA, 22 nt, Human
agcagcugguucccgagggcgu

SEQ ID NO: 195855 - RNA, 22 nt, Human
uuuagccaacuauaugacuagu

SEQ ID NO: 195856 - RNA, 22 nt, Human
uugaaauggcagcagcugaccu

SEQ ID NO: 195857 - RNA, 22 nt, Human
ggcucagguuaccagucccucc

SEQ ID NO: 195858 - RNA, 22 nt, Human
accuugggcaaguuggaaacug

SEQ ID NO: 195859 - RNA, 22 nt, Human
cugcuguguaucauuuuagaug

SEQ ID NO: 195860 - RNA, 22 nt, Human
auacacuacuaagcacagauug

SEQ ID NO: 195861 - RNA, 22 nt, Human
uauccaaagagauucauguucu

SEQ ID NO: 195862 - RNA, 22 nt, Human
uagcaauccguugaucccuugc

SEQ ID NO: 195863 - RNA, 22 nt, Human
aggagggcuaggaaaaccagga

SEQ ID NO: 195864 - RNA, 22 nt, Human
aguaaucugauuuuauagcuau

SEQ ID NO: 195865 - RNA, 22 nt, Human
uggcugagcucccuguguguug

SEQ ID NO: 195866 - RNA, 22 nt, Human
ccagcagagcuggaagugugcu

SEQ ID NO: 195867 - RNA, 22 nt, Human
uuuccucuccggggccuccagg

SEQ ID NO: 195868 - RNA, 22 nt, Human
uuucuauuggcgucacuguugu

SEQ ID NO: 195869 - RNA, 22 nt, Human
aggcagcagucaugaggaaaga

SEQ ID NO: 195870 - RNA, 22 nt, Human
uacagagggauuaucuaagggu

SEQ ID NO: 195871 - RNA, 22 nt, Human
cacaggaagagguauacaauuc

SEQ ID NO: 195872 - RNA, 22 nt, Human
ccugagucuuggcuucuuggcu

SEQ ID NO: 195873 - RNA, 22 nt, Human
uucuauugacauucacuguaac

SEQ ID NO: 195874 - RNA, 22 nt, Human
cagagcuucugacagcugcugc

SEQ ID NO: 195875 - RNA, 22 nt, Human
aaauaaguuagcagauuccagu

SEQ ID NO: 195876 - RNA, 22 nt, Human
ucuguucaugucuuuuuaagug

SEQ ID NO: 195877 - RNA, 22 nt, Human
ccucugcagcagagagccagag

SEQ ID NO: 195878 - RNA, 22 nt, Human
ugguuccucaagcgcuggcggc

SEQ ID NO: 195879 - RNA, 22 nt, Human
gugacagucaaagacaugacuu

SEQ ID NO: 195880 - RNA, 22 nt, Human
cacccccaggagcuccagggac

SEQ ID NO: 195881 - RNA, 22 nt, Human
cagaggcuguguaggcagacug

SEQ ID NO: 195882 - RNA, 22 nt, Human
caaaggcuuugcuaugaugcau

SEQ ID NO: 195883 - RNA, 23 nt, Human
uaggugucuaguguccacuaugu

SEQ ID NO: 195884 - RNA, 22 nt, Human
uccuggagaaacucagagaucu

SEQ ID NO: 195885 - RNA, 22 nt, Human
cagcaacuccuguagcuuaugc

SEQ ID NO: 195886 - RNA, 20 nt, Human
aaugagaugacuuagaggaa

SEQ ID NO: 195887 - RNA, 22 nt, Human
cugcccacaguucucugccaug

SEQ ID NO: 195888 - RNA, 22 nt, Human
uuucacauggaagcucucgaga

SEQ ID NO: 195889 - RNA, 22 nt, Human
auggcagccugagcagaggaau

SEQ ID NO: 195890 - RNA, 22 nt, Human
acauggugagcggcaggccuau

SEQ ID NO: 195891 - RNA, 22 nt, Human
agcugcaggcgccggggccgau

SEQ ID NO: 195892 - RNA, 22 nt, Human
agagccuguuuugugggagaug

SEQ ID NO: 195893 - RNA, 22 nt, Human
agaggccagggacacugcucaa

SEQ ID NO: 195894 - RNA, 22 nt, Human
uguucucuaagaaaagaagcau

SEQ ID NO: 195895 - RNA, 21 nt, Human
agcugcagccauguacauggc

SEQ ID NO: 195896 - RNA, 22 nt, Human
agcgcugugggcgugcgaggag

SEQ ID NO: 195897 - RNA, 22 nt, Human
uaguucuagccagugaaaugua

SEQ ID NO: 195898 - RNA, 22 nt, Human
gagccacagcaaccucaaagga

SEQ ID NO: 195899 - RNA, 22 nt, Human
augcuccaccuuuugcaggaac

SEQ ID NO: 195900 - RNA, 18 nt, Human
ugaacuuuggugucucuc

SEQ ID NO: 195901 - RNA, 22 nt, Human
cugcagggguguccuguauugg

SEQ ID NO: 195902 - RNA, 22 nt, Human
aaagaagagcuggaaggagucu

SEQ ID NO: 195903 - RNA, 22 nt, Human
gggcuccuggcagucaugcuca

SEQ ID NO: 195904 - RNA, 22 nt, Human
aucaggauggguuuggcuuagg

SEQ ID NO: 195905 - RNA, 21 nt, Human
agauccagugccauaaggccc

SEQ ID NO: 195906 - RNA, 22 nt, Human
ccuuacacugccuggggccacg

SEQ ID NO: 195907 - RNA, 22 nt, Human
guucuacuuucugugucuuuga

SEQ ID NO: 195908 - RNA, 22 nt, Human
aaagcagagguugcagugagcu

SEQ ID NO: 195909 - RNA, 22 nt, Human
uccucuuucucaacauuaguua

SEQ ID NO: 195910 - RNA, 22 nt, Human
ucaguguuggcauucagaaaug

SEQ ID NO: 195911 - RNA, 22 nt, Human
caacauuucaaggucuuuagga

SEQ ID NO: 195912 - RNA, 22 nt, Human
agacauguccacaaagcauuca

SEQ ID NO: 195913 - RNA, 22 nt, Human
uucaacaaacuguucacgaaug

SEQ ID NO: 195914 - RNA, 22 nt, Human
ugagaugguucacagagaaggc

SEQ ID NO: 195915 - RNA, 22 nt, Human
ugccucagagaccugacaguac

SEQ ID NO: 195916 - RNA, 22 nt, Human
ucugucugagggagugacauuu

SEQ ID NO: 195917 - RNA, 22 nt, Human
ugucagugucugagguuuuaua

SEQ ID NO: 195918 - RNA, 22 nt, Human
ugccauccuugaggaagggcaa

SEQ ID NO: 195919 - RNA, 22 nt, Human
agaagcaggccucacagaucug

SEQ ID NO: 195920 - RNA, 20 nt, Human
gucuuuauguuuuaugaccu

SEQ ID NO: 195921 - RNA, 22 nt, Human
caggcuuuacuuucucucugaa

SEQ ID NO: 195922 - RNA, 22 nt, Human
agcccagagccccggccauguu

SEQ ID NO: 195923 - RNA, 22 nt, Human
uggcucugugucucccagcagc

SEQ ID NO: 195924 - RNA, 22 nt, Human
gagaaaugcaugcaugucauca

SEQ ID NO: 195925 - RNA, 22 nt, Human
uucacagucacccuucuccaug

SEQ ID NO: 195926 - RNA, 22 nt, Human
gucagagcacugaguugugggc

SEQ ID NO: 195927 - RNA, 22 nt, Human
uugucaaggcuuuuaauauucu

SEQ ID NO: 195928 - RNA, 22 nt, Human
cugcuuuaacagaugauggugu

SEQ ID NO: 195929 - RNA, 22 nt, Human
cagcuggguggcucuucugcuc

SEQ ID NO: 195930 - RNA, 22 nt, Human
gcacacguagaagaacuugacu

SEQ ID NO: 195931 - RNA, 22 nt, Human
aacuguaagagaauaaaugugu

SEQ ID NO: 195932 - RNA, 22 nt, Human
agggcagcggugcuuguguuau

SEQ ID NO: 195933 - RNA, 22 nt, Human
augcauaucuccuaucuccuca

SEQ ID NO: 195934 - RNA, 22 nt, Human
ucuucagugcaccugaugucuu

SEQ ID NO: 195935 - RNA, 22 nt, Human
uuccagccacuuuauacugcua

SEQ ID NO: 195936 - RNA, 22 nt, Human
agccccacacucucucugagaa

SEQ ID NO: 195937 - RNA, 22 nt, Human
auuggcuuucuuuugugaaaau

SEQ ID NO: 195938 - RNA, 22 nt, Human
ucugcucuaguugcuuccugcc

SEQ ID NO: 195939 - RNA, 22 nt, Human
agggcagaaguacagacacuua

SEQ ID NO: 195940 - RNA, 22 nt, Human
ggcaguuucucaggcaggggua

SEQ ID NO: 195941 - RNA, 23 nt, Human
acaugggagggacauggaggcug

SEQ ID NO: 195942 - RNA, 22 nt, Human
cugggacaugauagaaacagau

SEQ ID NO: 195943 - RNA, 22 nt, Human
uggaggcauaggccugggcccu

SEQ ID NO: 195944 - RNA, 22 nt, Human
uuuauugggccuggaggaucua

SEQ ID NO: 195945 - RNA, 22 nt, Human
gcagaggcauuucugacgcugc

SEQ ID NO: 195946 - RNA, 22 nt, Human
agcugugccuauucguggcaag

SEQ ID NO: 195947 - RNA, 16 nt, Human
aggaauguggcggaac

SEQ ID NO: 195948 - RNA, 22 nt, Human
agucagcagccuggccaggaga

SEQ ID NO: 195949 - RNA, 22 nt, Human
cuuauuuaugucugucucuaau

SEQ ID NO: 195950 - RNA, 22 nt, Human
uccuuggaucuuuccuaugauu

SEQ ID NO: 195951 - RNA, 22 nt, Human
ucuggaugcucugagcccaagg

SEQ ID NO: 195952 - RNA, 22 nt, Human
auaaggaaaugaaacucuaaua

SEQ ID NO: 195953 - RNA, 22 nt, Human
gcacacacaugugaguacaugc

SEQ ID NO: 195954 - RNA, 22 nt, Human
ucugagcugggucuugacagcu

SEQ ID NO: 195955 - RNA, 22 nt, Human
caugaaacuuccaaagcugacc

SEQ ID NO: 195956 - RNA, 22 nt, Human
aggucagguaucagcagguauu

SEQ ID NO: 195957 - RNA, 17 nt, Human
ugagauggaagaagacu

SEQ ID NO: 195958 - RNA, 22 nt, Human
aucaggaucacugggagucuug

SEQ ID NO: 195959 - RNA, 22 nt, Human
gcuuccagaccccagucccuca

SEQ ID NO: 195960 - RNA, 22 nt, Human
agauucuacucuagauccaugg

SEQ ID NO: 195961 - RNA, 22 nt, Human
ccuuccaggagucucugcaggu

SEQ ID NO: 195962 - RNA, 22 nt, Human
acacauaagccuaaucaucucc

SEQ ID NO: 195963 - RNA, 22 nt, Human
uaggguccucaucuguaaauga

SEQ ID NO: 195964 - RNA, 19 nt, Human
uggcagccuccacuuuugc

SEQ ID NO: 195965 - RNA, 22 nt, Human
agccacagagagggagcugcaa

SEQ ID NO: 195966 - RNA, 22 nt, Human
agcuuuaugaggagaccuuagu

SEQ ID NO: 195967 - RNA, 22 nt, Human
ggucucuggccuuggagauuga

SEQ ID NO: 195968 - RNA, 22 nt, Human
ugugacagaauuggucuguucu

SEQ ID NO: 195969 - RNA, 23 nt, Human
auguuacuuaaccucucugugcc

SEQ ID NO: 195970 - RNA, 22 nt, Human
guucagcccacagagggggccg

SEQ ID NO: 195971 - RNA, 17 nt, Human
uucauuaauaaaagcaa

SEQ ID NO: 195972 - RNA, 22 nt, Human
uucagagagaccaaguggcgug

SEQ ID NO: 195973 - RNA, 22 nt, Human
uuucaguugcagugguugucua

SEQ ID NO: 195974 - RNA, 22 nt, Human
ccuggcucaaggcgaggacucc

SEQ ID NO: 195975 - RNA, 22 nt, Human
gcccagccagagcugugugaug

SEQ ID NO: 195976 - RNA, 22 nt, Human
ugcaucuguucagagcugucga

SEQ ID NO: 195977 - RNA, 22 nt, Human
uggcuccacaggccagggugug

SEQ ID NO: 195978 - RNA, 22 nt, Human
uggagcccagggugagaaggag

SEQ ID NO: 195979 - RNA, 22 nt, Human
gcuggaguuaggugggcuugaa

SEQ ID NO: 195980 - RNA, 22 nt, Human
uauuauugacauuuacuuggug

SEQ ID NO: 195981 - RNA, 22 nt, Human
uuucuuucucguaaacuuaguu

SEQ ID NO: 195982 - RNA, 22 nt, Human
acaggggcuccgaaggugaggg

SEQ ID NO: 195983 - RNA, 22 nt, Human
auauaacucuuguucuuauagu

SEQ ID NO: 195984 - RNA, 22 nt, Human
acugaaaugaaaucuaucaucu

SEQ ID NO: 195985 - RNA, 22 nt, Human
acauagaacuucgaugucuuuu

SEQ ID NO: 195986 - RNA, 22 nt, Human
acaugacuauaauuacuuaaau

SEQ ID NO: 195987 - RNA, 22 nt, Human
cagggccuucguaaguguccgg

SEQ ID NO: 195988 - RNA, 22 nt, Human
guguccugccacccugggcuuu

SEQ ID NO: 195989 - RNA, 22 nt, Human
aaaugcuacacaggaauucuca

SEQ ID NO: 195990 - RNA, 22 nt, Human
gccuggcacauugcaguggauu

SEQ ID NO: 195991 - RNA, 22 nt, Human
gcugucuuggguagaaagaggu

SEQ ID NO: 195992 - RNA, 22 nt, Human
augaacagaggaauagaauucu

SEQ ID NO: 195993 - RNA, 22 nt, Human
aagaccuaaaauucccucagau

SEQ ID NO: 195994 - RNA, 22 nt, Human
gucuuucuaugaugaacuguug

SEQ ID NO: 195995 - RNA, 22 nt, Human
gccuagugcacuggcagggcuc

SEQ ID NO: 195996 - RNA, 22 nt, Human
uuuuauacuuaagacagaguuu

SEQ ID NO: 195997 - RNA, 22 nt, Human
ugaggcaauuggaaauuuuaac

SEQ ID NO: 195998 - RNA, 22 nt, Human
uacaauguaauucugauuaugu

SEQ ID NO: 195999 - RNA, 22 nt, Human
cuauagaaaauuguaucacacg

SEQ ID NO: 196000 - RNA, 22 nt, Human
uuuauauuguaaaaaugguucu

SEQ ID NO: 196001 - RNA, 22 nt, Human
uguacaggagaacaaugagaaa

SEQ ID NO: 196002 - RNA, 22 nt, Human
ugggccuccuccgacagccggg

SEQ ID NO: 196003 - RNA, 22 nt, Human
uucagcaaauggacuguucagg

SEQ ID NO: 196004 - RNA, 22 nt, Human
acugggcuguuuuuugagugga

SEQ ID NO: 196005 - RNA, 22 nt, Human
gacuuucugauguaaacauuua

SEQ ID NO: 196006 - RNA, 22 nt, Human
gacagcugugcaggagaagggg

SEQ ID NO: 196007 - RNA, 17 nt, Human
uccuguuuaucauugau

SEQ ID NO: 196008 - RNA, 22 nt, Human
ggccagcuuugagcugcaggaa

SEQ ID NO: 196009 - RNA, 22 nt, Human
ugagguggguggcuucuguuau

SEQ ID NO: 196010 - RNA, 22 nt, Human
caauucaucuggguagguagcc

SEQ ID NO: 196011 - RNA, 22 nt, Human
ucauuguuauguuuugcugucu

SEQ ID NO: 196012 - RNA, 22 nt, Human
acuuucugccuuacaggagucc

SEQ ID NO: 196013 - RNA, 22 nt, Human
uucauucaagggguuccugauu

SEQ ID NO: 196014 - RNA, 22 nt, Human
cagauggcacagauuuagagug

SEQ ID NO: 196015 - RNA, 21 nt, Human
cacaagacacauaggguguuu

SEQ ID NO: 196016 - RNA, 22 nt, Human
ggcuggcuuggugagcugucac

SEQ ID NO: 196017 - RNA, 21 nt, Human
uccuggcccacucuaucccca

SEQ ID NO: 196018 - RNA, 17 nt, Human
uucugugcuuccuggcu

SEQ ID NO: 196019 - RNA, 22 nt, Human
gccaggcuguggggaacuugaa

SEQ ID NO: 196020 - RNA, 22 nt, Human
uacauucagaauugggaggcaa

SEQ ID NO: 196021 - RNA, 22 nt, Human
uagauuuuacuucugucauuac

SEQ ID NO: 196022 - RNA, 22 nt, Human
aucugucuggaggccuggcaug

SEQ ID NO: 196023 - RNA, 22 nt, Human
ugugucuuuggcgaugucugga

SEQ ID NO: 196024 - RNA, 22 nt, Human
cagucuuugaugcauccuagcc

SEQ ID NO: 196025 - RNA, 22 nt, Human
ggcaccuguguaagaucuggaa

SEQ ID NO: 196026 - RNA, 20 nt, Human
aggcagcuggccaggcaggu

SEQ ID NO: 196027 - RNA, 21 nt, Human
guccuucagcaaguuaguggc

SEQ ID NO: 196028 - RNA, 22 nt, Human
gaaggccaguuuugagauaggu

SEQ ID NO: 196029 - RNA, 22 nt, Human
ucaggcugugggcacuggccau

SEQ ID NO: 196030 - RNA, 18 nt, Human
aggcaggugcuaauauuu

SEQ ID NO: 196031 - RNA, 22 nt, Human
cagguccuggcagcugacucag

SEQ ID NO: 196032 - RNA, 22 nt, Human
ccugaguagcuggaauuaaagg

SEQ ID NO: 196033 - RNA, 20 nt, Human
ggcauccuuuuggucacagc

SEQ ID NO: 196034 - RNA, 22 nt, Human
uggcuucugggauguguugaca

SEQ ID NO: 196035 - RNA, 22 nt, Human
ucaguuaaucaauguggucuaa

SEQ ID NO: 196036 - RNA, 22 nt, Human
uuucacauuuaggcgugaauug

SEQ ID NO: 196037 - RNA, 22 nt, Human
cuacauuauguuuauugggacu

SEQ ID NO: 196038 - RNA, 22 nt, Human
ggcugcuggggacgugggagag

SEQ ID NO: 196039 - RNA, 22 nt, Human
acauaauaggugccugaauauu

SEQ ID NO: 196040 - RNA, 22 nt, Human
gaaggcuagaaacgaugcuuau

SEQ ID NO: 196041 - RNA, 22 nt, Human
gcucuguaugagggugagagau

SEQ ID NO: 196042 - RNA, 22 nt, Human
auagcaaagaugucaauucccc

SEQ ID NO: 196043 - RNA, 18 nt, Human
guucaaggucaagagaga

SEQ ID NO: 196044 - RNA, 22 nt, Human
acuguggcacuaggcaccuuac

SEQ ID NO: 196045 - RNA, 23 nt, Human
ugucucagacugagggguuuccc

SEQ ID NO: 196046 - RNA, 22 nt, Human
ugcuugggaauguggagucaga

SEQ ID NO: 196047 - RNA, 22 nt, Human
aauguauucugggaaaauguua

SEQ ID NO: 196048 - RNA, 22 nt, Human
ucagcuggcagguucugggaag

SEQ ID NO: 196049 - RNA, 22 nt, Human
augcaugagucacucagugcag

SEQ ID NO: 196050 - RNA, 22 nt, Human
ucaguucuuuauuucacaguga

SEQ ID NO: 196051 - RNA, 22 nt, Human
gagaggcucagggacuugcuga

SEQ ID NO: 196052 - RNA, 22 nt, Human
aggagguggcaacugucgacag

SEQ ID NO: 196053 - RNA, 20 nt, Human
cucugcugcgcaucccacuu

SEQ ID NO: 196054 - RNA, 22 nt, Human
cugggaaagcaagguuguggau

SEQ ID NO: 196055 - RNA, 22 nt, Human
uuucaagacucauugaguauug

SEQ ID NO: 196056 - RNA, 22 nt, Human
agacauuauggcuuucacuggg

SEQ ID NO: 196057 - RNA, 22 nt, Human
ccucuggcucacagcaccaacu

SEQ ID NO: 196058 - RNA, 22 nt, Human
gggcuccaccuagggacacugg

SEQ ID NO: 196059 - RNA, 22 nt, Human
aguguccugugucccagacugu

SEQ ID NO: 196060 - RNA, 22 nt, Human
uccuggagaagaggggcuugga

SEQ ID NO: 196061 - RNA, 22 nt, Human
ucaggacagacuagacuagcgu

SEQ ID NO: 196062 - RNA, 22 nt, Human
acugggcugguuaguuuuacua

SEQ ID NO: 196063 - RNA, 18 nt, Human
gguggcaggucagaugcc

SEQ ID NO: 196064 - RNA, 22 nt, Human
caaggccagggaauuuuucugg

SEQ ID NO: 196065 - RNA, 22 nt, Human
cuuagaaauuguuacucauuca

SEQ ID NO: 196066 - RNA, 22 nt, Human
agagcagucaggcuaggacacu

SEQ ID NO: 196067 - RNA, 22 nt, Human
uuucagauuaucucaacuuugg

SEQ ID NO: 196068 - RNA, 22 nt, Human
uuccugccccugagagcuccca

SEQ ID NO: 196069 - RNA, 22 nt, Human
uuuucauuguuacuaugagcua

SEQ ID NO: 196070 - RNA, 22 nt, Human
uuaaagaugcagcuuuagagaa

SEQ ID NO: 196071 - RNA, 22 nt, Human
agagcuguucaacguagcaaug

SEQ ID NO: 196072 - RNA, 22 nt, Human
gguuucucaccuucagcacuac

SEQ ID NO: 196073 - RNA, 22 nt, Human
accugggagucacaccugagaa

SEQ ID NO: 196074 - RNA, 22 nt, Human
auaugugugaugcauggacuaa

SEQ ID NO: 196075 - RNA, 22 nt, Human
uauuuauaaucugccaaagaga

SEQ ID NO: 196076 - RNA, 22 nt, Human
uuguagaaucauuauuucuagu

SEQ ID NO: 196077 - RNA, 22 nt, Human
cccaggcagggacgugcucugg

SEQ ID NO: 196078 - RNA, 22 nt, Human
aauccauugcugugcugccagg

SEQ ID NO: 196079 - RNA, 22 nt, Human
uagagcuauacacugaguaaaa

SEQ ID NO: 196080 - RNA, 22 nt, Human
gcagagccagaauggccaggac

SEQ ID NO: 196081 - RNA, 22 nt, Human
aaaguucucuaugguguaaaaa

SEQ ID NO: 196082 - RNA, 22 nt, Human
ugcuuucauugugauaggaagc

SEQ ID NO: 196083 - RNA, 22 nt, Human
cagaugaggcaaccucauugcu

SEQ ID NO: 196084 - RNA, 22 nt, Human
cauggcuggccagugggagugg

SEQ ID NO: 196085 - RNA, 22 nt, Human
auggcuugcuuuuagagagauc

SEQ ID NO: 196086 - RNA, 22 nt, Human
cugggucccggcuucuauccac

SEQ ID NO: 196087 - RNA, 22 nt, Human
augggcagacagggagcucacg

SEQ ID NO: 196088 - RNA, 22 nt, Human
acagcagauuucccugggcucc

SEQ ID NO: 196089 - RNA, 22 nt, Human
ugcuggagagcuaguucugcag

SEQ ID NO: 196090 - RNA, 22 nt, Human
aucaaguuuucuuaguugacug

SEQ ID NO: 196091 - RNA, 22 nt, Human
ucugguaaccuuuaucccuccu

SEQ ID NO: 196092 - RNA, 22 nt, Human
guguggcccugcguccugaguc

SEQ ID NO: 196093 - RNA, 22 nt, Human
cuggccugugggcugucuccgg

SEQ ID NO: 196094 - RNA, 22 nt, Human
agaaagcaucuccauuguaggu

SEQ ID NO: 196095 - RNA, 19 nt, Human
uggcagugugggguaugaa

SEQ ID NO: 196096 - RNA, 22 nt, Human
uuggaacacagcagcugauuuu

SEQ ID NO: 196097 - RNA, 22 nt, Human
ucccuggccuggaaggauauca

SEQ ID NO: 196098 - RNA, 22 nt, Human
acuuuggaggguguuguagaug

SEQ ID NO: 196099 - RNA, 22 nt, Human
agauuuacucagcuccuggaaa

SEQ ID NO: 196100 - RNA, 22 nt, Human
cugcuacaccggaauagugaca

SEQ ID NO: 196101 - RNA, 20 nt, Human
gagugcuuuggcuugcucuc

SEQ ID NO: 196102 - RNA, 22 nt, Human
ucucugcacuugcacauaagcu

SEQ ID NO: 196103 - RNA, 18 nt, Human
agcugcuugcaggccuuc

SEQ ID NO: 196104 - RNA, 22 nt, Human
ugcuagaauuugcagaagcaua

SEQ ID NO: 196105 - RNA, 22 nt, Human
ugagggaauccucacaucaauc

SEQ ID NO: 196106 - RNA, 22 nt, Human
auauagaaggugcuauuuacau

SEQ ID NO: 196107 - RNA, 22 nt, Human
gcccaagcagcuucccgagcuu

SEQ ID NO: 196108 - RNA, 22 nt, Human
cuuccucugccucccgugcuca

SEQ ID NO: 196109 - RNA, 22 nt, Human
uucuuguaauuuggagaaauga

SEQ ID NO: 196110 - RNA, 22 nt, Human
cugugggccuagucuggccuag

SEQ ID NO: 196111 - RNA, 22 nt, Human
uguuaaaaccacaggugaggac

SEQ ID NO: 196112 - RNA, 22 nt, Human
ccaggaugacccccacuuuccu

SEQ ID NO: 196113 - RNA, 22 nt, Human
ucaggaaggagcuggccugcca

SEQ ID NO: 196114 - RNA, 22 nt, Human
ucccugagcugagcucaacagc

SEQ ID NO: 196115 - RNA, 22 nt, Human
agagacuggagaugggcagugu

SEQ ID NO: 196116 - RNA, 22 nt, Human
ucucagaaaaaggagaaacugg

SEQ ID NO: 196117 - RNA, 22 nt, Human
agaggucagaacaggaaagugu

SEQ ID NO: 196118 - RNA, 22 nt, Human
gcugccuucaguucugauucau

SEQ ID NO: 196119 - RNA, 19 nt, Human
uuccaggugcuguggggag

SEQ ID NO: 196120 - RNA, 22 nt, Human
cucccuucaggagaggcucaca

SEQ ID NO: 196121 - RNA, 22 nt, Human
ggagcccaagucugcacucggc

SEQ ID NO: 196122 - RNA, 22 nt, Human
ggagagguguauucaguggguc

SEQ ID NO: 196123 - RNA, 22 nt, Human
ugucagcagaucuccugcagcc

SEQ ID NO: 196124 - RNA, 23 nt, Human
uggcauuucuauacuggcaagug

SEQ ID NO: 196125 - RNA, 22 nt, Human
augacaaauucagaccauagca

SEQ ID NO: 196126 - RNA, 20 nt, Human
ggcaggugcucgcuuggucu

SEQ ID NO: 196127 - RNA, 22 nt, Human
aaguaagucuuacauucacauu

SEQ ID NO: 196128 - RNA, 22 nt, Human
auagauacuggguauggagaug

SEQ ID NO: 196129 - RNA, 22 nt, Human
cccuguuuuaaguugauauuga

SEQ ID NO: 196130 - RNA, 18 nt, Human
ucuggcucaggacugaac

SEQ ID NO: 196131 - RNA, 22 nt, Human
gcuguagggugucauaugaagc

SEQ ID NO: 196132 - RNA, 22 nt, Human
uggcauggcauuuagagaauua

SEQ ID NO: 196133 - RNA, 22 nt, Human
cuugggucuguccugcugugca

SEQ ID NO: 196134 - RNA, 22 nt, Human
gcagacagccagacugcacugg

SEQ ID NO: 196135 - RNA, 22 nt, Human
cccugugcacacacuucacucu

SEQ ID NO: 196136 - RNA, 22 nt, Human
uucugggcuaccuucccggcag

SEQ ID NO: 196137 - RNA, 22 nt, Human
ugcccagcugucaaaguagaua

SEQ ID NO: 196138 - RNA, 22 nt, Human
ucaggagaaucagggcuguccu

SEQ ID NO: 196139 - RNA, 20 nt, Human
uccuccagaagggcagggug

SEQ ID NO: 196140 - RNA, 22 nt, Human
agggcugccauuucuggcccaa

SEQ ID NO: 196141 - RNA, 22 nt, Human
cuguagaggaacaagagcucuu

SEQ ID NO: 196142 - RNA, 17 nt, Human
ucugaggccucuaggag

SEQ ID NO: 196143 - RNA, 22 nt, Human
ccugggaagaccggcagugggg

SEQ ID NO: 196144 - RNA, 22 nt, Human
ucugccuugauggcauugagaa

SEQ ID NO: 196145 - RNA, 22 nt, Human
gcacuggauuuugaucugcaag

SEQ ID NO: 196146 - RNA, 22 nt, Human
acacacaugcaugcuugccauu

SEQ ID NO: 196147 - RNA, 22 nt, Human
aaaauccuuagccgagugaggu

SEQ ID NO: 196148 - RNA, 17 nt, Human
caggcagacauguaagc

SEQ ID NO: 196149 - RNA, 23 nt, Human
uccuuugucuuugcauagauggu

SEQ ID NO: 196150 - RNA, 22 nt, Human
aaguggagucccuacaaccagc

SEQ ID NO: 196151 - RNA, 22 nt, Human
uggccugaguugucugcaggcc

SEQ ID NO: 196152 - RNA, 22 nt, Human
acugcccuggcaccacacaugc

SEQ ID NO: 196153 - RNA, 22 nt, Human
uaucuuuugaguucucaagaug

SEQ ID NO: 196154 - RNA, 22 nt, Human
ucccagccugacagugcaucaa

SEQ ID NO: 196155 - RNA, 22 nt, Human
aaauucuuuggccuacuuugaa

SEQ ID NO: 196156 - RNA, 16 nt, Human
ucccaggccaggugga

SEQ ID NO: 196157 - RNA, 22 nt, Human
ucuccacaagcugaugcuagga

SEQ ID NO: 196158 - RNA, 23 nt, Human
cuugaaugggauggaauucacug

SEQ ID NO: 196159 - RNA, 22 nt, Human
aagaaagcugaauauucugugu

SEQ ID NO: 196160 - RNA, 20 nt, Human
ucuccuggucugguccgugc

SEQ ID NO: 196161 - RNA, 18 nt, Human
ugagacagcuaccacuug

SEQ ID NO: 196162 - RNA, 22 nt, Human
gcaggccacugucuccucuggg

SEQ ID NO: 196163 - RNA, 22 nt, Human
uuggagguuugaaaauaugugu

SEQ ID NO: 196164 - RNA, 22 nt, Human
augcaaucauauggcauacagc

SEQ ID NO: 196165 - RNA, 22 nt, Human
ggcccagauuagaagcugaaug

SEQ ID NO: 196166 - RNA, 22 nt, Human
gaugggggccagggccugcuuu

SEQ ID NO: 196167 - RNA, 22 nt, Human
aaacuuuggauugugauugugc

SEQ ID NO: 196168 - RNA, 22 nt, Human
uacaucauaauaauacuuagaa

SEQ ID NO: 196169 - RNA, 22 nt, Human
cuuugcuuuacucccacugugu

SEQ ID NO: 196170 - RNA, 22 nt, Human
aggaaugucaaguagaugugcg

SEQ ID NO: 196171 - RNA, 22 nt, Human
cucagugucacguuuugccuua

SEQ ID NO: 196172 - RNA, 17 nt, Human
ucaggcugggugcagug

SEQ ID NO: 196173 - RNA, 17 nt, Human
gugaagagucauugaau

SEQ ID NO: 196174 - RNA, 22 nt, Human
uaaaggaagaauucucugugau

SEQ ID NO: 196175 - RNA, 22 nt, Human
uccuggcuuuucuuggcucauc

SEQ ID NO: 196176 - RNA, 22 nt, Human
aggcucagauccuuguguccug

SEQ ID NO: 196177 - RNA, 22 nt, Human
ucagaggacuaccuucuccagu

SEQ ID NO: 196178 - RNA, 22 nt, Human
ugggccuggaguuuguccagag

SEQ ID NO: 196179 - RNA, 22 nt, Human
auguggaaugaacaaaggaggc

SEQ ID NO: 196180 - RNA, 22 nt, Human
ucucugagcuggauuuguucuu

SEQ ID NO: 196181 - RNA, 21 nt, Human
gaaggagaaagcaagugcugc

SEQ ID NO: 196182 - RNA, 22 nt, Human
uauuccaaaaucccaaacugcc

SEQ ID NO: 196183 - RNA, 22 nt, Human
gcuggcuuccuucugcagcuag

SEQ ID NO: 196184 - RNA, 22 nt, Human
caucaugaagaugagaaagcau

SEQ ID NO: 196185 - RNA, 22 nt, Human
acaucuucccacacuugcaaaa

SEQ ID NO: 196186 - RNA, 22 nt, Human
ucaguuacucaacagaggugga

SEQ ID NO: 196187 - RNA, 22 nt, Human
ucaucucuuuuguauugggguu

SEQ ID NO: 196188 - RNA, 22 nt, Human
gucugggcucccagggucggcg

SEQ ID NO: 196189 - RNA, 22 nt, Human
gcagaggguccugugccagcag

SEQ ID NO: 196190 - RNA, 22 nt, Human
ucccagccuggacccugccagu

SEQ ID NO: 196191 - RNA, 22 nt, Human
cugagcccucuguuuucccucu

SEQ ID NO: 196192 - RNA, 22 nt, Human
gccugugguuugauuaagcauu

SEQ ID NO: 196193 - RNA, 22 nt, Human
uccaugggaagauuuugagugg

SEQ ID NO: 196194 - RNA, 22 nt, Human
aggcugugacuacgcagggaag

SEQ ID NO: 196195 - RNA, 23 nt, Human
auauuagggagauuagcccucua

SEQ ID NO: 196196 - RNA, 22 nt, Human
uagcauauggaggguaagaggg

SEQ ID NO: 196197 - RNA, 22 nt, Human
cagcuuggauuuuggcacgugu

SEQ ID NO: 196198 - RNA, 22 nt, Human
gaggcagcauucgcauagacag

SEQ ID NO: 196199 - RNA, 23 nt, Human
ugagucuugagcuuuggauucug

SEQ ID NO: 196200 - RNA, 22 nt, Human
uucucugggcuuuucggauccg

SEQ ID NO: 196201 - RNA, 22 nt, Human
uccugccaccugcacagcuccc

SEQ ID NO: 196202 - RNA, 22 nt, Human
uuccuggcacccuggacccggc

SEQ ID NO: 196203 - RNA, 22 nt, Human
acaugugugacaacagagguga

SEQ ID NO: 196204 - RNA, 22 nt, Human
uggcaggaaccaggaggcucuc

SEQ ID NO: 196205 - RNA, 22 nt, Human
cacccaggcagguggcugagaa

SEQ ID NO: 196206 - RNA, 22 nt, Human
ucccugaaacauaauagaugcc

SEQ ID NO: 196207 - RNA, 22 nt, Human
ugaaggccacuuccugugagcu

SEQ ID NO: 196208 - RNA, 22 nt, Human
uauguacauggagagcaauuga

SEQ ID NO: 196209 - RNA, 22 nt, Human
uggcccugggcagaggcaacau

SEQ ID NO: 196210 - RNA, 22 nt, Human
uuugauccguugcuggugagga

SEQ ID NO: 196211 - RNA, 22 nt, Human
acaagguuugguccuauauuuu

SEQ ID NO: 196212 - RNA, 21 nt, Human
ucuccccauucuuauucccau

SEQ ID NO: 196213 - RNA, 22 nt, Human
auggccaugccaguuuacagcc

SEQ ID NO: 196214 - RNA, 22 nt, Human
uagauuaagaugccaguuuuga

SEQ ID NO: 196215 - RNA, 22 nt, Human
ucaaaaauaagauauucuggac

SEQ ID NO: 196216 - RNA, 22 nt, Human
ccacauuucuucacuuguccca

SEQ ID NO: 196217 - RNA, 22 nt, Human
guuuucuuccugcaauuggcau

SEQ ID NO: 196218 - RNA, 22 nt, Human
ucaggcugguggucagauggcu

SEQ ID NO: 196219 - RNA, 22 nt, Human
accacaggggaggaaugaugcc

SEQ ID NO: 196220 - RNA, 22 nt, Human
cacugcagcaccaugcagggcu

SEQ ID NO: 196221 - RNA, 22 nt, Human
uaacuguaguuauaaagcuauc

SEQ ID NO: 196222 - RNA, 22 nt, Human
ccugagagugagugccuccuua

SEQ ID NO: 196223 - RNA, 20 nt, Human
aaacaagguugcucugagga

SEQ ID NO: 196224 - RNA, 22 nt, Human
cagggccauuggaacaaagagg

SEQ ID NO: 196225 - RNA, 22 nt, Human
ggcuccuggggaggugagcuug

SEQ ID NO: 196226 - RNA, 22 nt, Human
ugagaaagccuuuagucccagg

SEQ ID NO: 196227 - RNA, 22 nt, Human
aguuuauguaaaauuaguaaug

SEQ ID NO: 196228 - RNA, 22 nt, Human
agugucuggucucugaacuaaa

SEQ ID NO: 196229 - RNA, 22 nt, Human
gugcccuggcucacagugucuc

SEQ ID NO: 196230 - RNA, 22 nt, Human
aaagcucuuauagcagagugug

SEQ ID NO: 196231 - RNA, 22 nt, Human
caucagugaaagugaauguucu

SEQ ID NO: 196232 - RNA, 22 nt, Human
uuggccuuguacaucauauuaa

SEQ ID NO: 196233 - RNA, 19 nt, Human
ugaaauggcaguugcuaaa

SEQ ID NO: 196234 - RNA, 22 nt, Human
ugccucucuaacccaugcccaa

SEQ ID NO: 196235 - RNA, 22 nt, Human
cggcugagacggccauagacac

SEQ ID NO: 196236 - RNA, 22 nt, Human
aagggagaaaacuuguggcuua

SEQ ID NO: 196237 - RNA, 22 nt, Human
cagguacauucguagacccauu

SEQ ID NO: 196238 - RNA, 22 nt, Human
uggaaccaucaaagagauccug

SEQ ID NO: 196239 - RNA, 22 nt, Human
gaaggcacugaacuccuucugg

SEQ ID NO: 196240 - RNA, 22 nt, Human
cuucauguacaguuauuggaga

SEQ ID NO: 196241 - RNA, 22 nt, Human
gaggaagaaucaggguggugag

SEQ ID NO: 196242 - RNA, 22 nt, Human
uagaagauaagacaagugcugc

SEQ ID NO: 196243 - RNA, 22 nt, Human
gagaggaguagacacuuugguu

SEQ ID NO: 196244 - RNA, 22 nt, Human
ugcagaauguggacaguggguu

SEQ ID NO: 196245 - RNA, 19 nt, Human
aagagcagggaaagaauug

SEQ ID NO: 196246 - RNA, 22 nt, Human
cuggugcaggaaggagcuggca

SEQ ID NO: 196247 - RNA, 22 nt, Human
cagcuccuagaucggcgaagug

SEQ ID NO: 196248 - RNA, 22 nt, Human
gcugcccucucuggccccacac

SEQ ID NO: 196249 - RNA, 22 nt, Human
uggccacacugcccccacuggg

SEQ ID NO: 196250 - RNA, 18 nt, Human
aggugcagccucugaggc

SEQ ID NO: 196251 - RNA, 22 nt, Human
ucugggcagcagcagcuaguag

SEQ ID NO: 196252 - RNA, 19 nt, Human
agcagcuggagguggagug

SEQ ID NO: 196253 - RNA, 22 nt, Human
uacaguguauguauuuguaggu

SEQ ID NO: 196254 - RNA, 22 nt, Human
uaggaaaagucuagauugauga

SEQ ID NO: 196255 - RNA, 22 nt, Human
caugugcagacggugggcugga

SEQ ID NO: 196256 - RNA, 22 nt, Human
cucugggaccauggcaagugcg

SEQ ID NO: 196257 - RNA, 22 nt, Human
ugcuuaaacauacuauuuauau

SEQ ID NO: 196258 - RNA, 22 nt, Human
cacagcugccaugcagucagug

SEQ ID NO: 196259 - RNA, 22 nt, Human
cucuccagggaagcaguguacu

SEQ ID NO: 196260 - RNA, 22 nt, Human
agucuuuauacagaaauauaug

SEQ ID NO: 196261 - RNA, 21 nt, Human
ucugugguauggccaucuucc

SEQ ID NO: 196262 - RNA, 22 nt, Human
aacacaggcauacuggcuccag

SEQ ID NO: 196263 - RNA, 22 nt, Human
cauucccuuggggaguucaugc

SEQ ID NO: 196264 - RNA, 22 nt, Human
uucuuuaucaguuacucauagg

SEQ ID NO: 196265 - RNA, 22 nt, Human
agcaggugagcacagccaggcu

SEQ ID NO: 196266 - RNA, 22 nt, Human
guucuacaguuccuauuacuua

SEQ ID NO: 196267 - RNA, 22 nt, Human
ugagucuuuucauuguguggau

SEQ ID NO: 196268 - RNA, 22 nt, Human
agaguuuacagaaauaagcugu

SEQ ID NO: 196269 - RNA, 22 nt, Human
gcaggugggagccgcugccuga

SEQ ID NO: 196270 - RNA, 22 nt, Human
cacaaggcacauuccuugucca

SEQ ID NO: 196271 - RNA, 20 nt, Human
acaaaauagguacuggguag

SEQ ID NO: 196272 - RNA, 19 nt, Human
ccagguggaacugagguag

SEQ ID NO: 196273 - RNA, 22 nt, Human
cagggcucaggaaaucagacgu

SEQ ID NO: 196274 - RNA, 22 nt, Human
acaguauaccauugugacuuug

SEQ ID NO: 196275 - RNA, 22 nt, Human
uggccugggccugccggugcaa

SEQ ID NO: 196276 - RNA, 22 nt, Human
aauucccauuugcagaaaauca

SEQ ID NO: 196277 - RNA, 22 nt, Human
uugucuaaugagcuccacuuca

SEQ ID NO: 196278 - RNA, 21 nt, Human
uccacccucucugcucccagu

SEQ ID NO: 196279 - RNA, 18 nt, Human
caggccuuugagacagaa

SEQ ID NO: 196280 - RNA, 19 nt, Human
uuuauucaccuuuaccuug

SEQ ID NO: 196281 - RNA, 22 nt, Human
uuuaugcaucucuaggaagggc

SEQ ID NO: 196282 - RNA, 22 nt, Human
uagaauaugugguguauacuuu

SEQ ID NO: 196283 - RNA, 22 nt, Human
ccuggggcuuucuuuguaucau

SEQ ID NO: 196284 - RNA, 21 nt, Human
acagauuuuauaucucugcug

SEQ ID NO: 196285 - RNA, 22 nt, Human
cacaaaugugcagaaaugugag

SEQ ID NO: 196286 - RNA, 22 nt, Human
gcugccaggggcagcugucuca

SEQ ID NO: 196287 - RNA, 22 nt, Human
uauugcugacugucuucugagu

SEQ ID NO: 196288 - RNA, 22 nt, Human
cugcuugaccuguuguucucac

SEQ ID NO: 196289 - RNA, 22 nt, Human
uguuuaaucuauaaaauggaga

SEQ ID NO: 196290 - RNA, 22 nt, Human
ugaugaggacccaucaccuggu

SEQ ID NO: 196291 - RNA, 22 nt, Human
uaaugaauaaacuugagaguca

SEQ ID NO: 196292 - RNA, 22 nt, Human
cucugagcccgcugcagcccca

SEQ ID NO: 196293 - RNA, 22 nt, Human
cacccacauuccaucacucugc

SEQ ID NO: 196294 - RNA, 22 nt, Human
ucucaguggacgugucugucuu

SEQ ID NO: 196295 - RNA, 22 nt, Human
gaaaugaacugauuaucauugc

SEQ ID NO: 196296 - RNA, 22 nt, Human
aaugccaacuuggauauacauu

SEQ ID NO: 196297 - RNA, 22 nt, Human
aagcaggagagccugggcgagc

SEQ ID NO: 196298 - RNA, 22 nt, Human
gccugcagccucaagggcugag

SEQ ID NO: 196299 - RNA, 22 nt, Human
gcagagugguuucagaguugag

SEQ ID NO: 196300 - RNA, 22 nt, Human
auaaacucaugcugaaaaccca

SEQ ID NO: 196301 - RNA, 22 nt, Human
uuccugugaagccgguggucuc

SEQ ID NO: 196302 - RNA, 20 nt, Human
cuccagggaacagacuggag

SEQ ID NO: 196303 - RNA, 22 nt, Human
aacaauguucuuuuagcuugaa

SEQ ID NO: 196304 - RNA, 22 nt, Human
ucugccagaagccagggucugg

SEQ ID NO: 196305 - RNA, 22 nt, Human
aaggauuaguagguacaguuca

SEQ ID NO: 196306 - RNA, 22 nt, Human
aaauccuaagcagaggaauuua

SEQ ID NO: 196307 - RNA, 22 nt, Human
aaugaggucauuaaugguggga

SEQ ID NO: 196308 - RNA, 22 nt, Human
ggcucaggccagaccacgacuc

SEQ ID NO: 196309 - RNA, 21 nt, Human
aaagcaguucuuccugccucu

SEQ ID NO: 196310 - RNA, 22 nt, Human
ugccauuuauaaccaguggccu

SEQ ID NO: 196311 - RNA, 22 nt, Human
gguggcaccuugaucuuggacu

SEQ ID NO: 196312 - RNA, 22 nt, Human
ugaggcaaaaacacugauuagg

SEQ ID NO: 196313 - RNA, 22 nt, Human
gccacugucaucuugugaagca

SEQ ID NO: 196314 - RNA, 22 nt, Human
caggcucuuccauccugcugag

SEQ ID NO: 196315 - RNA, 22 nt, Human
caggucugagucacauguucau

SEQ ID NO: 196316 - RNA, 22 nt, Human
aggcccuuggguccucuccaca

SEQ ID NO: 196317 - RNA, 22 nt, Human
uuauuugugaaucauuuaucua

SEQ ID NO: 196318 - RNA, 22 nt, Human
guucauauucuaaguaacuggc

SEQ ID NO: 196319 - RNA, 22 nt, Human
agugucugagccagaauuagaa

SEQ ID NO: 196320 - RNA, 20 nt, Human
ucagagaaggagcuuuccug

SEQ ID NO: 196321 - RNA, 22 nt, Human
agcugcaguaaagcucuccagg

SEQ ID NO: 196322 - RNA, 22 nt, Human
cuccaggacacuaacccaggcu

SEQ ID NO: 196323 - RNA, 22 nt, Human
uucacaauuaacuuuauacuua

SEQ ID NO: 196324 - RNA, 22 nt, Human
ggcucugccgugugcucacaug

SEQ ID NO: 196325 - RNA, 22 nt, Human
cccugccugugggcaucaacau

SEQ ID NO: 196326 - RNA, 22 nt, Human
gaaaguauuagccuagaaguca

SEQ ID NO: 196327 - RNA, 22 nt, Human
acaguguagaauccuguacuua

SEQ ID NO: 196328 - RNA, 17 nt, Human
uggggaagcucagauuu

SEQ ID NO: 196329 - RNA, 22 nt, Human
acauacaugggauuaaaaaauu

SEQ ID NO: 196330 - RNA, 22 nt, Human
aacuccugaggaaauggucuca

SEQ ID NO: 196331 - RNA, 22 nt, Human
uagccgggugugguggaacucc

SEQ ID NO: 196332 - RNA, 22 nt, Human
uucuggauaugggagagggagc

SEQ ID NO: 196333 - RNA, 22 nt, Human
cccagcugcaccucuauggccu

SEQ ID NO: 196334 - RNA, 22 nt, Human
aggaauguauuauuccuucugg

SEQ ID NO: 196335 - RNA, 22 nt, Human
ucuuuuauagugaauuuucuug

SEQ ID NO: 196336 - RNA, 22 nt, Human
ggcagugcccggugccuccucu

SEQ ID NO: 196337 - RNA, 22 nt, Human
cauaauuugauaugcuugaugg

SEQ ID NO: 196338 - RNA, 22 nt, Human
augcugaagagugcacaggcua

SEQ ID NO: 196339 - RNA, 22 nt, Human
agacagacuugaaaauguucuu

SEQ ID NO: 196340 - RNA, 22 nt, Human
uguuaaauguuccuuuacugga

SEQ ID NO: 196341 - RNA, 22 nt, Human
gcugaggcucaagucauggguc

SEQ ID NO: 196342 - RNA, 22 nt, Human
gcugcaggcggccgugguggcg

SEQ ID NO: 196343 - RNA, 22 nt, Human
gccugcagacguguuuuccuca

SEQ ID NO: 196344 - RNA, 22 nt, Human
ggagaugcuucuuguguuuauu

SEQ ID NO: 196345 - RNA, 22 nt, Human
uuagcaccuugaacagacccug

SEQ ID NO: 196346 - RNA, 22 nt, Human
agcuccugcgcacggugcacac

SEQ ID NO: 196347 - RNA, 22 nt, Human
acaguuuauugcacagguaacc

SEQ ID NO: 196348 - RNA, 22 nt, Human
uuugucaaguuugcaaauacgu

SEQ ID NO: 196349 - RNA, 22 nt, Human
ccagggaugccaagcuuuacca

SEQ ID NO: 196350 - RNA, 22 nt, Human
gaagcagcuagcccacuaguca

SEQ ID NO: 196351 - RNA, 22 nt, Human
ccugggugacagagugagaccu

SEQ ID NO: 196352 - RNA, 21 nt, Human
gaaaagcaagggaguagaaca

SEQ ID NO: 196353 - RNA, 22 nt, Human
caaggcugaucauuuucccaua

SEQ ID NO: 196354 - RNA, 22 nt, Human
caauguaucaagaagcaucagu

SEQ ID NO: 196355 - RNA, 21 nt, Human
ucuugaaaauuguagcaguuu

SEQ ID NO: 196356 - RNA, 22 nt, Human
ccuuuagaugaucucuuggaca

SEQ ID NO: 196357 - RNA, 22 nt, Human
agaguacacuguacacacaauu

SEQ ID NO: 196358 - RNA, 22 nt, Human
cucuucuuuccaucccuagcca

SEQ ID NO: 196359 - RNA, 19 nt, Human
acacaugaggagggacccc

SEQ ID NO: 196360 - RNA, 22 nt, Human
gcucaaagguugauagcugugc

SEQ ID NO: 196361 - RNA, 23 nt, Human
uggaaucuucgauauugauucag

SEQ ID NO: 196362 - RNA, 22 nt, Human
aaagcaaacagaaccccaagcu

SEQ ID NO: 196363 - RNA, 22 nt, Human
uuugauuuacuggauauucuca

SEQ ID NO: 196364 - RNA, 22 nt, Human
caggaguccaucuggccuggug

SEQ ID NO: 196365 - RNA, 18 nt, Human
uggacacauggccugggu

SEQ ID NO: 196366 - RNA, 22 nt, Human
agcugcugagccauguccugcu

SEQ ID NO: 196367 - RNA, 22 nt, Human
ccuuaggggugacagaaauacc

SEQ ID NO: 196368 - RNA, 22 nt, Human
acuuuacuccccaacauaaaug

SEQ ID NO: 196369 - RNA, 22 nt, Human
ucagugucacaggaugcuaugc

SEQ ID NO: 196370 - RNA, 22 nt, Human
ccugggugaaauaguccucaag

SEQ ID NO: 196371 - RNA, 22 nt, Human
ucauugaaugagaugcaauaga

SEQ ID NO: 196372 - RNA, 22 nt, Human
auucuucaccauggauaauuug

SEQ ID NO: 196373 - RNA, 22 nt, Human
agacagacuuugaucuggaugu

SEQ ID NO: 196374 - RNA, 22 nt, Human
aaggcauauauucuaaacagga

SEQ ID NO: 196375 - RNA, 22 nt, Human
ccagcuuuggaguguuguugcu

SEQ ID NO: 196376 - RNA, 22 nt, Human
auuuuccagccuuucuagaacu

SEQ ID NO: 196377 - RNA, 22 nt, Human
uggcacaugguuaaucauaauu

SEQ ID NO: 196378 - RNA, 22 nt, Human
auucucuguucaaggaugguga

SEQ ID NO: 196379 - RNA, 22 nt, Human
uuugcuuccuaguuggguaaua

SEQ ID NO: 196380 - RNA, 22 nt, Human
ggaacuggagaaugcccucuuu

SEQ ID NO: 196381 - RNA, 18 nt, Human
ggcuuugcugggguuucu

SEQ ID NO: 196382 - RNA, 22 nt, Human
aaucuuaaagaauauucuacca

SEQ ID NO: 196383 - RNA, 22 nt, Human
accugcuuuguaguguuugcug

SEQ ID NO: 196384 - RNA, 22 nt, Human
cucaggacagauuccagagaaa

SEQ ID NO: 196385 - RNA, 22 nt, Human
ugaguggagaacagaggcucuc

SEQ ID NO: 196386 - RNA, 22 nt, Human
aaagccaggcuggccugggguu

SEQ ID NO: 196387 - RNA, 21 nt, Human
agcuccaggcuccugggguuc

SEQ ID NO: 196388 - RNA, 22 nt, Human
ggcacaggaaucugugaagugc

SEQ ID NO: 196389 - RNA, 21 nt, Human
auuauuauaaagaccacaggg

SEQ ID NO: 196390 - RNA, 22 nt, Human
agaaugcucuucaaaaucuagc

SEQ ID NO: 196391 - RNA, 22 nt, Human
uuacuugaaugcugugaucuca

SEQ ID NO: 196392 - RNA, 22 nt, Human
ucagguggcuucggggaguggc

SEQ ID NO: 196393 - RNA, 22 nt, Human
aaagcaauuacaaaagggauaa

SEQ ID NO: 196394 - RNA, 22 nt, Human
uggcucugugaacagacgacug

SEQ ID NO: 196395 - RNA, 22 nt, Human
uugggcugaaguagagggcaga

SEQ ID NO: 196396 - RNA, 22 nt, Human
agccagcaggaacgucuagguu

SEQ ID NO: 196397 - RNA, 20 nt, Human
agcuguuuacauggauuucu

SEQ ID NO: 196398 - RNA, 22 nt, Human
agagggagcccagucauagcug

SEQ ID NO: 196399 - RNA, 22 nt, Human
cuccccuuccgccagcucuuga

SEQ ID NO: 196400 - RNA, 22 nt, Human
uggugcugccaccuccucugcu

SEQ ID NO: 196401 - RNA, 23 nt, Human
agcuucauugaccuccgcagggg

SEQ ID NO: 196402 - RNA, 22 nt, Human
ugccuggcuaauuuuuguaucc

SEQ ID NO: 196403 - RNA, 22 nt, Human
aaguguuuggggaucauuuuaa

SEQ ID NO: 196404 - RNA, 22 nt, Human
uucugauaacaaacaccaauuu

SEQ ID NO: 196405 - RNA, 22 nt, Human
acagauuugacugguaccuggc

SEQ ID NO: 196406 - RNA, 22 nt, Human
cagagagcaugggaggcccgag

SEQ ID NO: 196407 - RNA, 22 nt, Human
ccagcccaaacaagccgccuuc

SEQ ID NO: 196408 - RNA, 22 nt, Human
gugagacacgugugugaccugg

SEQ ID NO: 196409 - RNA, 21 nt, Human
auuuucauuaauucagugugg

SEQ ID NO: 196410 - RNA, 18 nt, Human
cagggcuguggggucacu

SEQ ID NO: 196411 - RNA, 22 nt, Human
aagagcaucuauuucacagugg

SEQ ID NO: 196412 - RNA, 22 nt, Human
auugaaagagaauguagcucuu

SEQ ID NO: 196413 - RNA, 22 nt, Human
ucucagcaacgauccggaguaa

SEQ ID NO: 196414 - RNA, 22 nt, Human
accagcuccaggccccugcuga

SEQ ID NO: 196415 - RNA, 22 nt, Human
ucucaagaucucaagauggccc

SEQ ID NO: 196416 - RNA, 22 nt, Human
uuauugagagcuguuuuauggc

SEQ ID NO: 196417 - RNA, 22 nt, Human
ucaguagcagaaagcaaugagu

SEQ ID NO: 196418 - RNA, 22 nt, Human
uuggcugcucuguguuuaguau

SEQ ID NO: 196419 - RNA, 22 nt, Human
uucuuagaugauuaaugauggg

SEQ ID NO: 196420 - RNA, 22 nt, Human
gcacacaugcaugugugcaucc

SEQ ID NO: 196421 - RNA, 22 nt, Human
agcccagaugguagcccuagaa

SEQ ID NO: 196422 - RNA, 22 nt, Human
aagaacugguuauguuaucuug

SEQ ID NO: 196423 - RNA, 17 nt, Human
ggcuggagcagcucccc

SEQ ID NO: 196424 - RNA, 22 nt, Human
cacaguauucacugggcagauu

SEQ ID NO: 196425 - RNA, 22 nt, Human
acuuagauaacaaaccuguggu

SEQ ID NO: 196426 - RNA, 20 nt, Human
ucacagcuggcuaugacagg

SEQ ID NO: 196427 - RNA, 22 nt, Human
cuguccacauggagaaccuggu

SEQ ID NO: 196428 - RNA, 22 nt, Human
uggcuucuugaucuuggacuug

SEQ ID NO: 196429 - RNA, 22 nt, Human
gaaaggaacuugugagugggag

SEQ ID NO: 196430 - RNA, 22 nt, Human
caaaggcaguuacugaaugaag

SEQ ID NO: 196431 - RNA, 22 nt, Human
aggacacaccagguccagcugu

SEQ ID NO: 196432 - RNA, 22 nt, Human
uuuguugguugcacuggugggu

SEQ ID NO: 196433 - RNA, 22 nt, Human
ucugcgccaccuugugcuugug

SEQ ID NO: 196434 - RNA, 22 nt, Human
agccagcaggugagugcagccu

SEQ ID NO: 196435 - RNA, 22 nt, Human
cuggcaggaucuaaccagggaa

SEQ ID NO: 196436 - RNA, 22 nt, Human
augcaaaaguaauugcaauuuu

SEQ ID NO: 196437 - RNA, 22 nt, Human
uuggcagacugacaaucuguuu

SEQ ID NO: 196438 - RNA, 22 nt, Human
uucuguacaaguuguggcugcu

SEQ ID NO: 196439 - RNA, 22 nt, Human
caggagacaguguuauuuuauu

SEQ ID NO: 196440 - RNA, 22 nt, Human
agucucugucguagaucagcgu

SEQ ID NO: 196441 - RNA, 22 nt, Human
ucaggauguccaaaauccagcc

SEQ ID NO: 196442 - RNA, 22 nt, Human
aaggcauaccugaauguuugug

SEQ ID NO: 196443 - RNA, 22 nt, Human
aucuggcuauugacauguuaua

SEQ ID NO: 196444 - RNA, 22 nt, Human
ccagcauccucagcucacuucu

SEQ ID NO: 196445 - RNA, 22 nt, Human
ccugugugucugucacugcaca

SEQ ID NO: 196446 - RNA, 22 nt, Human
ccagauguuccccuggaggccu

SEQ ID NO: 196447 - RNA, 22 nt, Human
acaauaugggauauacauuuua

SEQ ID NO: 196448 - RNA, 22 nt, Human
gucucuguggcuggcuccuucc

SEQ ID NO: 196449 - RNA, 22 nt, Human
uacagacaaagugcuauagggu

SEQ ID NO: 196450 - RNA, 22 nt, Human
gccaggugcauggcugagucuc

SEQ ID NO: 196451 - RNA, 22 nt, Human
uuucacagcuagugagcuucua

SEQ ID NO: 196452 - RNA, 22 nt, Human
agagcuggcagcagcuucuccu

SEQ ID NO: 196453 - RNA, 22 nt, Human
ccucccuucaguagagcccaau

SEQ ID NO: 196454 - RNA, 22 nt, Human
cuggcaggcagacuucugcaag

SEQ ID NO: 196455 - RNA, 22 nt, Human
ucaggucugaugccucauccau

SEQ ID NO: 196456 - RNA, 22 nt, Human
ucaagacagugugauacuggcc

SEQ ID NO: 196457 - RNA, 22 nt, Human
uucauuugccaucaguguaaug

SEQ ID NO: 196458 - RNA, 22 nt, Human
cagcuuuccagagaccugcccc

SEQ ID NO: 196459 - RNA, 19 nt, Human
ugucucugaaagaugagcu

SEQ ID NO: 196460 - RNA, 22 nt, Human
aguaacaugcuaauuugauuau

SEQ ID NO: 196461 - RNA, 22 nt, Human
auaggcguguuuaggaggacgu

SEQ ID NO: 196462 - RNA, 22 nt, Human
ugcaugaaauauuuucuguagg

SEQ ID NO: 196463 - RNA, 22 nt, Human
aacaugcccgcuguaugccauu

SEQ ID NO: 196464 - RNA, 22 nt, Human
cuuggcccggagccccaugaag

SEQ ID NO: 196465 - RNA, 22 nt, Human
ggcaagugugagaagggacugg

SEQ ID NO: 196466 - RNA, 23 nt, Human
ccuccucauaucuuugacuagug

SEQ ID NO: 196467 - RNA, 22 nt, Human
uaggugucugcucuuauuuaac

SEQ ID NO: 196468 - RNA, 22 nt, Human
auaauaaugaaagccacugugu

SEQ ID NO: 196469 - RNA, 22 nt, Human
uccagcccaucccuagccuggg

SEQ ID NO: 196470 - RNA, 22 nt, Human
caggcccauucuaggcuugcua

SEQ ID NO: 196471 - RNA, 22 nt, Human
acaaauuauagaaaauugagcu

SEQ ID NO: 196472 - RNA, 22 nt, Human
cagcagaaauggauuuugagau

SEQ ID NO: 196473 - RNA, 22 nt, Human
agccuauuccaggaugagcuca

SEQ ID NO: 196474 - RNA, 22 nt, Human
agauggcuuugcuuuuagaagc

SEQ ID NO: 196475 - RNA, 22 nt, Human
guggaaggaauuaacagacuag

SEQ ID NO: 196476 - RNA, 22 nt, Human
uggaaagaggaagugcccagca

SEQ ID NO: 196477 - RNA, 22 nt, Human
acaagguacaaaacagagcaca

SEQ ID NO: 196478 - RNA, 22 nt, Human
ggcuccagaggccuuaccugca

SEQ ID NO: 196479 - RNA, 22 nt, Human
gugugcagcagagacaggacuc

SEQ ID NO: 196480 - RNA, 22 nt, Human
ccagcuuucucagaggcuucua

SEQ ID NO: 196481 - RNA, 22 nt, Human
gcuuggcuggaaauagguugag

SEQ ID NO: 196482 - RNA, 22 nt, Human
acacugugagcugaagggcugc

SEQ ID NO: 196483 - RNA, 22 nt, Human
cugagggaggagaauugcuuga

SEQ ID NO: 196484 - RNA, 23 nt, Human
agugagcagcuguagggcaagga

SEQ ID NO: 196485 - RNA, 22 nt, Human
gugcccugcaugccccggguau

SEQ ID NO: 196486 - RNA, 22 nt, Human
uguauuuaagcuuuaccuaaaa

SEQ ID NO: 196487 - RNA, 22 nt, Human
cuguggaccugcucuuagagac

SEQ ID NO: 196488 - RNA, 22 nt, Human
uacaaguagcucagguuuucug

SEQ ID NO: 196489 - RNA, 21 nt, Human
gcaggugugguaucagcuucc

SEQ ID NO: 196490 - RNA, 22 nt, Human
agccugagagccaagcugugca

SEQ ID NO: 196491 - RNA, 18 nt, Human
gggagcugggaagcuggu

SEQ ID NO: 196492 - RNA, 19 nt, Human
cuggaaggagggacuguuc

SEQ ID NO: 196493 - RNA, 17 nt, Human
cucagcagggcucacuu

SEQ ID NO: 196494 - RNA, 22 nt, Human
aggacacacugcaagagccugg

SEQ ID NO: 196495 - RNA, 22 nt, Human
aggcuugguuaauucuguguga

SEQ ID NO: 196496 - RNA, 22 nt, Human
gcuggucuccgccgcucccuga

SEQ ID NO: 196497 - RNA, 22 nt, Human
gaacaaggauucccaaagaaga

SEQ ID NO: 196498 - RNA, 22 nt, Human
ucugggcucugcgaagcccuuc

SEQ ID NO: 196499 - RNA, 22 nt, Human
cugagagguaagcagcgcagug

SEQ ID NO: 196500 - RNA, 22 nt, Human
uuucagaaccgcuaaaauaaau

SEQ ID NO: 196501 - RNA, 22 nt, Human
agccaggacaucucuagcugcu

SEQ ID NO: 196502 - RNA, 22 nt, Human
caggaaggggcucacucuggcc

SEQ ID NO: 196503 - RNA, 22 nt, Human
auauaaagagcuuaguauagug

SEQ ID NO: 196504 - RNA, 22 nt, Human
acauuuguauauaugcagcaua

SEQ ID NO: 196505 - RNA, 22 nt, Human
acugagguuuacuugaaggaga

SEQ ID NO: 196506 - RNA, 23 nt, Human
ggucccugacagcgggcaaguug

SEQ ID NO: 196507 - RNA, 22 nt, Human
uuuccagugauugcugcucuca

SEQ ID NO: 196508 - RNA, 17 nt, Human
cugaagauaauggcaac

SEQ ID NO: 196509 - RNA, 22 nt, Human
cagcauucuacuuugugaacug

SEQ ID NO: 196510 - RNA, 22 nt, Human
gcuuuagaaauguaggagauac

SEQ ID NO: 196511 - RNA, 22 nt, Human
ucuuaaugaaagugaaauauca

SEQ ID NO: 196512 - RNA, 21 nt, Human
cagcagguggagccucuuguc

SEQ ID NO: 196513 - RNA, 22 nt, Human
ggccucucuggcauggcugccc

SEQ ID NO: 196514 - RNA, 22 nt, Human
uuguguguagacucagccauug

SEQ ID NO: 196515 - RNA, 22 nt, Human
ucuggggagucaaagagaccug

SEQ ID NO: 196516 - RNA, 22 nt, Human
auguuuaugaccuccauaagga

SEQ ID NO: 196517 - RNA, 22 nt, Human
aacuucaccuuuuugccacacu

SEQ ID NO: 196518 - RNA, 22 nt, Human
aucagcagaugcucaaugaaca

SEQ ID NO: 196519 - RNA, 22 nt, Human
uagagcaguuggcagcuguauu

SEQ ID NO: 196520 - RNA, 22 nt, Human
aauggcaagcugaacucagaag

SEQ ID NO: 196521 - RNA, 22 nt, Human
cagaggcaaaagagguggaggu

SEQ ID NO: 196522 - RNA, 22 nt, Human
uuuccuaguucuaagaaaugua

SEQ ID NO: 196523 - RNA, 22 nt, Human
agucucuuuugguuccaaaaau

SEQ ID NO: 196524 - RNA, 22 nt, Human
gagcuccugcugcauccugccu

SEQ ID NO: 196525 - RNA, 22 nt, Human
cugugaauugaauaugacuaug

SEQ ID NO: 196526 - RNA, 22 nt, Human
auauuuucacugaaccaaagua

SEQ ID NO: 196527 - RNA, 22 nt, Human
caggugucagcagcacuguacu

SEQ ID NO: 196528 - RNA, 22 nt, Human
uuacagcagcagggacagacua

SEQ ID NO: 196529 - RNA, 22 nt, Human
gagugucaaggcucucuuuggc

SEQ ID NO: 196530 - RNA, 22 nt, Human
caugugucaaaugauguagcug

SEQ ID NO: 196531 - RNA, 22 nt, Human
uuucauugaugggugauagaaa

SEQ ID NO: 196532 - RNA, 22 nt, Human
ggaggccagggacccagucagc

SEQ ID NO: 196533 - RNA, 22 nt, Human
uuaguuaauaggucuucagcuu

SEQ ID NO: 196534 - RNA, 22 nt, Human
ucacacacauaaucuaagauua

SEQ ID NO: 196535 - RNA, 22 nt, Human
auggcagccuguggacagucaa

SEQ ID NO: 196536 - RNA, 22 nt, Human
aauauucauuugcagaagaagu

SEQ ID NO: 196537 - RNA, 22 nt, Human
aacuagaacgucuaguugcugg

SEQ ID NO: 196538 - RNA, 22 nt, Human
gcuggagguagggagguccugu

SEQ ID NO: 196539 - RNA, 22 nt, Human
cucuguggguauuuauauguau

SEQ ID NO: 196540 - RNA, 22 nt, Human
uugaggagugugaggucuccca

SEQ ID NO: 196541 - RNA, 22 nt, Human
cuccagggagcuguggagguuu

SEQ ID NO: 196542 - RNA, 22 nt, Human
uuggaugaagucuagcuuuagu

SEQ ID NO: 196543 - RNA, 22 nt, Human
gcuugucauaguuguuacaaau

SEQ ID NO: 196544 - RNA, 23 nt, Human
uccaguagggagucugcuuacuu

SEQ ID NO: 196545 - RNA, 22 nt, Human
ugccucagcugaggccgcucca

SEQ ID NO: 196546 - RNA, 22 nt, Human
caguauuuauggcuugaguauu

SEQ ID NO: 196547 - RNA, 22 nt, Human
aagcagacaucccauacuuuug

SEQ ID NO: 196548 - RNA, 18 nt, Human
aaaaagugcucaggccua

SEQ ID NO: 196549 - RNA, 22 nt, Human
acugggcucccaggcuugucau

SEQ ID NO: 196550 - RNA, 22 nt, Human
ugccagccagguucugaggcua

SEQ ID NO: 196551 - RNA, 22 nt, Human
agggcugaagggaggugcucau

SEQ ID NO: 196552 - RNA, 22 nt, Human
gagcuggcaaugacuuguguau

SEQ ID NO: 196553 - RNA, 22 nt, Human
cugcucuugagggacugcgguc

SEQ ID NO: 196554 - RNA, 22 nt, Human
gacucuuucaaacagaaagcca

SEQ ID NO: 196555 - RNA, 22 nt, Human
acuuccaaauaccaucacauug

SEQ ID NO: 196556 - RNA, 22 nt, Human
augaggcaggauauuaacuuuu

SEQ ID NO: 196557 - RNA, 22 nt, Human
guccaggcugaccccuagagga

SEQ ID NO: 196558 - RNA, 22 nt, Human
cucuggaauuaaggaagccugu

SEQ ID NO: 196559 - RNA, 22 nt, Human
gagauauguuggcagcugguau

SEQ ID NO: 196560 - RNA, 22 nt, Human
ccuccuggccugugcagagccc

SEQ ID NO: 196561 - RNA, 22 nt, Human
ggaagugguagagccaugagug

SEQ ID NO: 196562 - RNA, 22 nt, Human
aaauacuagaauucagaguuga

SEQ ID NO: 196563 - RNA, 22 nt, Human
uaugcuaaugacacucuagaaa

SEQ ID NO: 196564 - RNA, 22 nt, Human
uuccuucuggaggcuccagggg

SEQ ID NO: 196565 - RNA, 22 nt, Human
ugucucaucucuuaaccccacu

SEQ ID NO: 196566 - RNA, 22 nt, Human
uauacaagugagaagaagaguu

SEQ ID NO: 196567 - RNA, 22 nt, Human
uucugggugccaccuaagacau

SEQ ID NO: 196568 - RNA, 22 nt, Human
uguacaguggaaaauggauucg

SEQ ID NO: 196569 - RNA, 22 nt, Human
agucaggaagcuggagcugggg

SEQ ID NO: 196570 - RNA, 22 nt, Human
acugggcugcuugagugccuuc

SEQ ID NO: 196571 - RNA, 22 nt, Human
uacaugcucaguaacuuucagu

SEQ ID NO: 196572 - RNA, 22 nt, Human
ucugggcuggugcucaugaauu

SEQ ID NO: 196573 - RNA, 22 nt, Human
acagacugugagucucauuuuc

SEQ ID NO: 196574 - RNA, 17 nt, Human
uuugaaaggaugucagu

SEQ ID NO: 196575 - RNA, 22 nt, Human
acagcagggggagcuguuggac

SEQ ID NO: 196576 - RNA, 22 nt, Human
gcccaggagaggccagggcuga

SEQ ID NO: 196577 - RNA, 22 nt, Human
cagcugaguguuggcauguuca

SEQ ID NO: 196578 - RNA, 22 nt, Human
agccagucucucucccuggaga

SEQ ID NO: 196579 - RNA, 22 nt, Human
aagucugggccuccuucccaga

SEQ ID NO: 196580 - RNA, 22 nt, Human
gcugcucucagagcucaugcug

SEQ ID NO: 196581 - RNA, 22 nt, Human
agugcaacagaagcaggcuggc

SEQ ID NO: 196582 - RNA, 22 nt, Human
ucugugucccuucuaauuucag

SEQ ID NO: 196583 - RNA, 22 nt, Human
ugagcugauggcaucccuguuu

SEQ ID NO: 196584 - RNA, 18 nt, Human
caugcagagggaucugug

SEQ ID NO: 196585 - RNA, 22 nt, Human
gcuuccagaucccaugcucuua

SEQ ID NO: 196586 - RNA, 22 nt, Human
gacccugccaugagugacaggg

SEQ ID NO: 196587 - RNA, 20 nt, Human
uccaugaguuagagacuaua

SEQ ID NO: 196588 - RNA, 22 nt, Human
ugcaggguagaugcaggcugug

SEQ ID NO: 196589 - RNA, 22 nt, Human
aggucaggguauucacgucugu

SEQ ID NO: 196590 - RNA, 21 nt, Human
ccaagagcaaugcuaaggaga

SEQ ID NO: 196591 - RNA, 20 nt, Human
aguguuuagaauacuauuau

SEQ ID NO: 196592 - RNA, 22 nt, Human
gucuguggaguugcuugcugga

SEQ ID NO: 196593 - RNA, 22 nt, Human
uguguucaaucaccaaagguau

SEQ ID NO: 196594 - RNA, 22 nt, Human
ucuccaggaaagacacuggacu

SEQ ID NO: 196595 - RNA, 22 nt, Human
gcagccagggcuaagcugggga

SEQ ID NO: 196596 - RNA, 22 nt, Human
caggaagcuggucagauccugu

SEQ ID NO: 196597 - RNA, 22 nt, Human
cagccugcucucagauguugag

SEQ ID NO: 196598 - RNA, 18 nt, Human
ugccagccgacuggccug

SEQ ID NO: 196599 - RNA, 22 nt, Human
uggaaacuagccuuuuagguug

SEQ ID NO: 196600 - RNA, 22 nt, Human
uucaaaguugcaugacagcuua

SEQ ID NO: 196601 - RNA, 23 nt, Human
ucagggacaugaugugucauauc

SEQ ID NO: 196602 - RNA, 22 nt, Human
gugugccacugccugaggaccc

SEQ ID NO: 196603 - RNA, 22 nt, Human
gcucagagcagaugguacucag

SEQ ID NO: 196604 - RNA, 22 nt, Human
ucugagcuguggccauucuucc

SEQ ID NO: 196605 - RNA, 19 nt, Human
ccagagguuugcugggccu

SEQ ID NO: 196606 - RNA, 22 nt, Human
gucauuccuuauguugauucag

SEQ ID NO: 196607 - RNA, 22 nt, Human
acaauaguaagguauauuguca

SEQ ID NO: 196608 - RNA, 22 nt, Human
uugcauguacguacagagagag

SEQ ID NO: 196609 - RNA, 20 nt, Human
uccccagggcaucaggagca

SEQ ID NO: 196610 - RNA, 22 nt, Human
gagcucagcaaaggucugugug

SEQ ID NO: 196611 - RNA, 22 nt, Human
ggaugaggaaaccacagugucc

SEQ ID NO: 196612 - RNA, 22 nt, Human
cugagguguggucugggaguau

SEQ ID NO: 196613 - RNA, 19 nt, Human
cucugggcaagucacuuaa

SEQ ID NO: 196614 - RNA, 22 nt, Human
gaagccuugaacugcaaacccc

SEQ ID NO: 196615 - RNA, 22 nt, Human
aguauuugaucagaugauagua

SEQ ID NO: 196616 - RNA, 22 nt, Human
gacuuucuguccagugauuucu

SEQ ID NO: 196617 - RNA, 22 nt, Human
uccuggcagagggcggccucga

SEQ ID NO: 196618 - RNA, 22 nt, Human
uccuuggggacgcugacaucgu

SEQ ID NO: 196619 - RNA, 19 nt, Human
uauugguaugugugaggca

SEQ ID NO: 196620 - RNA, 22 nt, Human
cuccuacaguguuugaguccag

SEQ ID NO: 196621 - RNA, 19 nt, Human
ccucugccagcccgccucu

SEQ ID NO: 196622 - RNA, 22 nt, Human
uuuacaagucagggacuguucu

SEQ ID NO: 196623 - RNA, 20 nt, Human
ucugaauugagugaaugucu

SEQ ID NO: 196624 - RNA, 22 nt, Human
gaagucuggcugacgagaguua

SEQ ID NO: 196625 - RNA, 22 nt, Human
ugacauuuaaucccuaaauauu

SEQ ID NO: 196626 - RNA, 22 nt, Human
aaacacauuagcccuguggaaa

SEQ ID NO: 196627 - RNA, 22 nt, Human
gaccugagauuuugaggcucau

SEQ ID NO: 196628 - RNA, 22 nt, Human
ccagggcaggagaaagacucac

SEQ ID NO: 196629 - RNA, 22 nt, Human
uuacuuuugcaccaaacuaaua

SEQ ID NO: 196630 - RNA, 22 nt, Human
accuucaaacuagauagaaguu

SEQ ID NO: 196631 - RNA, 22 nt, Human
agcacaaugugaaaagagcucu

SEQ ID NO: 196632 - RNA, 22 nt, Human
aauaacuucaucuucaggauag

SEQ ID NO: 196633 - RNA, 21 nt, Human
cucugggacauuucuuagcag

SEQ ID NO: 196634 - RNA, 23 nt, Human
cagcucagcacauaggagguacu

SEQ ID NO: 196635 - RNA, 22 nt, Human
cacagggccuugugugacugca

SEQ ID NO: 196636 - RNA, 22 nt, Human
ggcucaccauuuucacucucug

SEQ ID NO: 196637 - RNA, 22 nt, Human
ugaaucaauugucuuaagacau

SEQ ID NO: 196638 - RNA, 19 nt, Human
aggcuugguguugaauggg

SEQ ID NO: 196639 - RNA, 19 nt, Human
gaggcgaggcgugcaggag

SEQ ID NO: 196640 - RNA, 22 nt, Human
gcaguggcagagacagcaccaa

SEQ ID NO: 196641 - RNA, 22 nt, Human
uuuugaauaauucagaaacagc

SEQ ID NO: 196642 - RNA, 22 nt, Human
ugguaauauaugccagauaaaa

SEQ ID NO: 196643 - RNA, 17 nt, Human
ggcaggugacagacacc

SEQ ID NO: 196644 - RNA, 22 nt, Human
ucagggagauuuggggacucaa

SEQ ID NO: 196645 - RNA, 22 nt, Human
cugcccugggugcuggggaucc

SEQ ID NO: 196646 - RNA, 22 nt, Human
aguguguuuggagcgagggagg

SEQ ID NO: 196647 - RNA, 22 nt, Human
cuuucagaagccggaagggcag

SEQ ID NO: 196648 - RNA, 22 nt, Human
ccuguucaaugcccuggcuuca

SEQ ID NO: 196649 - RNA, 22 nt, Human
ccaguguuuccccagaagagag

SEQ ID NO: 196650 - RNA, 22 nt, Human
ccagucugcagccccuggggac

SEQ ID NO: 196651 - RNA, 22 nt, Human
aguauacauagugcuuccucuu

SEQ ID NO: 196652 - RNA, 22 nt, Human
uuuuguuuucuuagaaaccugg

SEQ ID NO: 196653 - RNA, 22 nt, Human
aggagauggagcucagugggca

SEQ ID NO: 196654 - RNA, 22 nt, Human
acaguauaaacuccuaaaagcc

SEQ ID NO: 196655 - RNA, 22 nt, Human
uuuauaguagcaugauuuauaa

SEQ ID NO: 196656 - RNA, 18 nt, Human
ggcagugcagucucaggg

SEQ ID NO: 196657 - RNA, 22 nt, Human
ggcuugcuucaccuacccccag

SEQ ID NO: 196658 - RNA, 21 nt, Human
agcagcagcaguggggcuucu

SEQ ID NO: 196659 - RNA, 22 nt, Human
ugucuggggaacugugcaucca

SEQ ID NO: 196660 - RNA, 22 nt, Human
cuggcacaugcucccugagugg

SEQ ID NO: 196661 - RNA, 22 nt, Human
gucauggaggauugugaguggu

SEQ ID NO: 196662 - RNA, 22 nt, Human
cugcuguaaugagucagcaucu

SEQ ID NO: 196663 - RNA, 22 nt, Human
acacuuuagauauucccuucug

SEQ ID NO: 196664 - RNA, 22 nt, Human
gaguccaggauuugagcucugu

SEQ ID NO: 196665 - RNA, 22 nt, Human
cuugugaaaugccagauaaucu

SEQ ID NO: 196666 - RNA, 22 nt, Human
agugucuguugaguuucaaaag

SEQ ID NO: 196667 - RNA, 22 nt, Human
ggaccugcauuuuaacaagauc

SEQ ID NO: 196668 - RNA, 20 nt, Human
ggcuuucugugauccucagu

SEQ ID NO: 196669 - RNA, 18 nt, Human
aagcugcccucaggcagg

SEQ ID NO: 196670 - RNA, 22 nt, Human
agugucugccagcugccaggug

SEQ ID NO: 196671 - RNA, 22 nt, Human
auucuucagaauaucuggcacu

SEQ ID NO: 196672 - RNA, 22 nt, Human
ccguggcuucccaggcggaugu

SEQ ID NO: 196673 - RNA, 22 nt, Human
acacugugacaagaaagagcug

SEQ ID NO: 196674 - RNA, 23 nt, Human
aggcagugucucuuauccugucc

SEQ ID NO: 196675 - RNA, 22 nt, Human
uaagacauguccaggcugugag

SEQ ID NO: 196676 - RNA, 22 nt, Human
aaaggcuuaauguuguuguaau

SEQ ID NO: 196677 - RNA, 22 nt, Human
gugcaaaaguaauugcuguuuu

SEQ ID NO: 196678 - RNA, 22 nt, Human
ccaguguucugguguucauuuc

SEQ ID NO: 196679 - RNA, 19 nt, Human
acauuugucaagagaaggu

SEQ ID NO: 196680 - RNA, 22 nt, Human
aggccaggguagggcccauugu

SEQ ID NO: 196681 - RNA, 22 nt, Human
acuugguugaugucauaagguu

SEQ ID NO: 196682 - RNA, 22 nt, Human
ccacagagacaggguccuugcu

SEQ ID NO: 196683 - RNA, 22 nt, Human
cagcccuugaugauaauuuauc

SEQ ID NO: 196684 - RNA, 22 nt, Human
gaaccacaagauucaaaggggu

SEQ ID NO: 196685 - RNA, 20 nt, Human
agcugcagaacccacuggac

SEQ ID NO: 196686 - RNA, 17 nt, Human
acauuuccuaacugaag

SEQ ID NO: 196687 - RNA, 22 nt, Human
ucuggagcuugaagcuuugguu

SEQ ID NO: 196688 - RNA, 22 nt, Human
gcuguguccucacacagccuuu

SEQ ID NO: 196689 - RNA, 22 nt, Human
ugcaaggauauuuagucuagug

SEQ ID NO: 196690 - RNA, 22 nt, Human
aaagcaauugugguuuuuguca

SEQ ID NO: 196691 - RNA, 22 nt, Human
ucauuuucacacauaaauagca

SEQ ID NO: 196692 - RNA, 22 nt, Human
uguggggcagcuagccggccug

SEQ ID NO: 196693 - RNA, 22 nt, Human
gguggcagggagugucccuggg

SEQ ID NO: 196694 - RNA, 22 nt, Human
cauccaaagcaaauaucuuaaa

SEQ ID NO: 196695 - RNA, 22 nt, Human
agcaugcaggaaccacauggca

SEQ ID NO: 196696 - RNA, 22 nt, Human
gcuggcagcauuagacccuggg

SEQ ID NO: 196697 - RNA, 22 nt, Human
aaggaaagacauauaaaugacu

SEQ ID NO: 196698 - RNA, 22 nt, Human
aauguuuucucugugaacacau

SEQ ID NO: 196699 - RNA, 22 nt, Human
accaggcaacugugaaugggcu

SEQ ID NO: 196700 - RNA, 22 nt, Human
acugucuuguguuaaagaacca

SEQ ID NO: 196701 - RNA, 22 nt, Human
uguguccucaugagguuugcag

SEQ ID NO: 196702 - RNA, 22 nt, Human
agccuucuaggaugucaucugc

SEQ ID NO: 196703 - RNA, 18 nt, Human
auguucauauuuuuaggg

SEQ ID NO: 196704 - RNA, 22 nt, Human
ggcaagucaggaaguugacauu

SEQ ID NO: 196705 - RNA, 22 nt, Human
uuggcugcugaaauauguucug

SEQ ID NO: 196706 - RNA, 22 nt, Human
aacaguacuggacaaggaguca

SEQ ID NO: 196707 - RNA, 22 nt, Human
ugaguaggugguuaagcaugga

SEQ ID NO: 196708 - RNA, 22 nt, Human
augguggaagagcaucagaaag

SEQ ID NO: 196709 - RNA, 22 nt, Human
caaggcuagaaguccaacauca

SEQ ID NO: 196710 - RNA, 22 nt, Human
cuccccaaagauaacggcuucu

SEQ ID NO: 196711 - RNA, 22 nt, Human
ggacaguagucacuaaacuaga

SEQ ID NO: 196712 - RNA, 22 nt, Human
ugaagccauuacuguguuaggg

SEQ ID NO: 196713 - RNA, 22 nt, Human
uaggacaguggagauaaccaga

SEQ ID NO: 196714 - RNA, 22 nt, Human
auacauuagaaucugguacuca

SEQ ID NO: 196715 - RNA, 22 nt, Human
uuuuccuuucaucaggacaaag

SEQ ID NO: 196716 - RNA, 22 nt, Human
uaucagugauugcuguauacaa

SEQ ID NO: 196717 - RNA, 22 nt, Human
gggagguucuguucgcacuuga

SEQ ID NO: 196718 - RNA, 22 nt, Human
guuaaugucuuccuauucuaca

SEQ ID NO: 196719 - RNA, 22 nt, Human
uuaucuguuguuuuaguacaau

SEQ ID NO: 196720 - RNA, 22 nt, Human
cagccacugaacuccuggcuau

SEQ ID NO: 196721 - RNA, 18 nt, Human
ucuguggagagggcaguu

SEQ ID NO: 196722 - RNA, 22 nt, Human
ugacaagaggcagaaucagcug

SEQ ID NO: 196723 - RNA, 22 nt, Human
agaauauugaaaguucuugaca

SEQ ID NO: 196724 - RNA, 22 nt, Human
cccugaggggaguggugaggug

SEQ ID NO: 196725 - RNA, 22 nt, Human
agcucagggcaaagacucaaau

SEQ ID NO: 196726 - RNA, 20 nt, Human
ggcugucccgcggcugccgg

SEQ ID NO: 196727 - RNA, 22 nt, Human
aaagcagucuguuuuaaccuga

SEQ ID NO: 196728 - RNA, 22 nt, Human
gcucagagauguucaguagcuu

SEQ ID NO: 196729 - RNA, 21 nt, Human
gcucaaagggcuugccaugcu

SEQ ID NO: 196730 - RNA, 22 nt, Human
caggcuccucacucaugcuccc

SEQ ID NO: 196731 - RNA, 22 nt, Human
gccagccaagauugagaaggua

SEQ ID NO: 196732 - RNA, 22 nt, Human
ccaggagccugggccaggcugg

SEQ ID NO: 196733 - RNA, 22 nt, Human
gagaaggcuucuuuuccucuga

SEQ ID NO: 196734 - RNA, 22 nt, Human
ucacaggcuaaauuuaugcagg

SEQ ID NO: 196735 - RNA, 19 nt, Human
uuugucucugaauaauauu

SEQ ID NO: 196736 - RNA, 22 nt, Human
aucuagaaaaggugacuaaaau

SEQ ID NO: 196737 - RNA, 22 nt, Human
guccagucacugucaauguucc

SEQ ID NO: 196738 - RNA, 22 nt, Human
ucugggcuauauggucucugcu

SEQ ID NO: 196739 - RNA, 22 nt, Human
accaggaguuuugaccaggggc

SEQ ID NO: 196740 - RNA, 22 nt, Human
caaauggucauuucucuuuugu

SEQ ID NO: 196741 - RNA, 22 nt, Human
gggcacugacagggucccaacu

SEQ ID NO: 196742 - RNA, 22 nt, Human
aggggagagaacauaaggaagu

SEQ ID NO: 196743 - RNA, 22 nt, Human
uccuuaccucaagcuugugguc

SEQ ID NO: 196744 - RNA, 22 nt, Human
uacauguuugguaaaugauggc

SEQ ID NO: 196745 - RNA, 22 nt, Human
acuaaagcucacagaguugaac

SEQ ID NO: 196746 - RNA, 22 nt, Human
ugaauaaucuuggguauuaaua

SEQ ID NO: 196747 - RNA, 22 nt, Human
augcaugaugaacuugcuuuca

SEQ ID NO: 196748 - RNA, 23 nt, Human
ggcagauuugguuuguuuuaaua

SEQ ID NO: 196749 - RNA, 22 nt, Human
caggaaaugggguuuaguuauu

SEQ ID NO: 196750 - RNA, 22 nt, Human
cagaaucugagucgugauugua

SEQ ID NO: 196751 - RNA, 22 nt, Human
gccaccagccccaugcgcugug

SEQ ID NO: 196752 - RNA, 23 nt, Human
agcugcagaugcucagcgggcag

SEQ ID NO: 196753 - RNA, 22 nt, Human
caggcucagucagaaaauguau

SEQ ID NO: 196754 - RNA, 22 nt, Human
uccuuuguuaaggagguuuguu

SEQ ID NO: 196755 - RNA, 22 nt, Human
ugucugaagcagccagugcugu

SEQ ID NO: 196756 - RNA, 22 nt, Human
cuggucaccuccuucccagcua

SEQ ID NO: 196757 - RNA, 17 nt, Human
cugcuuugugcaacgcu

SEQ ID NO: 196758 - RNA, 22 nt, Human
ucagugucuugggcuugaaugc

SEQ ID NO: 196759 - RNA, 22 nt, Human
ugauuuugucauguuucugaua

SEQ ID NO: 196760 - RNA, 22 nt, Human
uacuucuguuagcucugagagu

SEQ ID NO: 196761 - RNA, 22 nt, Human
aacuuucuccagugccaacuau

SEQ ID NO: 196762 - RNA, 22 nt, Human
auggacagcaacuggaagcuuc

SEQ ID NO: 196763 - RNA, 22 nt, Human
agccuugaucuugguaacagga

SEQ ID NO: 196764 - RNA, 22 nt, Human
ccuggucagguaacugggcuga

SEQ ID NO: 196765 - RNA, 22 nt, Human
uuauaacuuuggauaugacaag

SEQ ID NO: 196766 - RNA, 22 nt, Human
ggagcucaccuuggagucucug

SEQ ID NO: 196767 - RNA, 20 nt, Human
uuauuucaguugcuagauug

SEQ ID NO: 196768 - RNA, 22 nt, Human
uuuccagguauuaauacuguau

SEQ ID NO: 196769 - RNA, 22 nt, Human
cucugugagggucuguacagaa

SEQ ID NO: 196770 - RNA, 22 nt, Human
uuugcagugauucuugcaguga

SEQ ID NO: 196771 - RNA, 19 nt, Human
ggucagagagauccaggcu

SEQ ID NO: 196772 - RNA, 22 nt, Human
acagggaaggauuuagugggaa

SEQ ID NO: 196773 - RNA, 22 nt, Human
uuguuuccauugcagacugugu

SEQ ID NO: 196774 - RNA, 22 nt, Human
aggagcugggagaaggacuaaa

SEQ ID NO: 196775 - RNA, 22 nt, Human
gacccuuagaaugugaucuuau

SEQ ID NO: 196776 - RNA, 22 nt, Human
aggagcucacaucuuuauuucu

SEQ ID NO: 196777 - RNA, 22 nt, Human
agcuacagucggaaggacagac

SEQ ID NO: 196778 - RNA, 23 nt, Human
uugcugccugagccuuccucugg

SEQ ID NO: 196779 - RNA, 22 nt, Human
gggcacugcuggaggcucccug

SEQ ID NO: 196780 - RNA, 22 nt, Human
uagacuagaggaucagcaaggg

SEQ ID NO: 196781 - RNA, 22 nt, Human
gcugggugauucauuuccauaa

SEQ ID NO: 196782 - RNA, 22 nt, Human
gggaucugacuugcuggugggu

SEQ ID NO: 196783 - RNA, 22 nt, Human
uacccagggcuuuucugaugca

SEQ ID NO: 196784 - RNA, 22 nt, Human
uguguauguuuugagguugcua

SEQ ID NO: 196785 - RNA, 22 nt, Human
ccagcugguguuccuuaggacc

SEQ ID NO: 196786 - RNA, 22 nt, Human
caaaggcaaucuuguucucugg

SEQ ID NO: 196787 - RNA, 22 nt, Human
ugucuccauuuucaaguagcag

SEQ ID NO: 196788 - RNA, 22 nt, Human
aauaaacugcucaauugcauca

SEQ ID NO: 196789 - RNA, 22 nt, Human
ucugugcaccuucuaaugagua

SEQ ID NO: 196790 - RNA, 22 nt, Human
ugggcagaggacagggaagauc

SEQ ID NO: 196791 - RNA, 22 nt, Human
uggggcuggcuauugucucccu

SEQ ID NO: 196792 - RNA, 22 nt, Human
uggccuuuucuuucacaggcaa

SEQ ID NO: 196793 - RNA, 21 nt, Human
uggccagcuggagucuccaca

SEQ ID NO: 196794 - RNA, 22 nt, Human
cuccugagaggaucucuguugu

SEQ ID NO: 196795 - RNA, 22 nt, Human
guaucuggugaggguuccccug

SEQ ID NO: 196796 - RNA, 20 nt, Human
ggggcugcaugcagagaaga

SEQ ID NO: 196797 - RNA, 21 nt, Human
gcugccaccgcgugcuccagg

SEQ ID NO: 196798 - RNA, 22 nt, Human
aaagagucguguuccagguuug

SEQ ID NO: 196799 - RNA, 22 nt, Human
augaagucugccaaggaaaggc

SEQ ID NO: 196800 - RNA, 22 nt, Human
uuccaauuuguggugaguuaau

SEQ ID NO: 196801 - RNA, 22 nt, Human
cccagcuggccagguggcuuug

SEQ ID NO: 196802 - RNA, 22 nt, Human
uggcccagcucagggugggcgg

SEQ ID NO: 196803 - RNA, 19 nt, Human
ccaggccaucccaguuccc

SEQ ID NO: 196804 - RNA, 22 nt, Human
guaaaacaagcuuuaugguucc

SEQ ID NO: 196805 - RNA, 22 nt, Human
caugugucuaaucuacuaauau

SEQ ID NO: 196806 - RNA, 22 nt, Human
ggaauguucuggaacaccgcuu

SEQ ID NO: 196807 - RNA, 22 nt, Human
uugguuuacucuggggauaucu

SEQ ID NO: 196808 - RNA, 22 nt, Human
gucaaaaaguagucauuucugu

SEQ ID NO: 196809 - RNA, 22 nt, Human
gcuccucugucaaaugagagug

SEQ ID NO: 196810 - RNA, 22 nt, Human
acauggaucaaccuauuuucuu

SEQ ID NO: 196811 - RNA, 19 nt, Human
uccuggcaucuuccucccu

SEQ ID NO: 196812 - RNA, 22 nt, Human
cacauguccuggcgcugagccc

SEQ ID NO: 196813 - RNA, 22 nt, Human
uucuuuuaauguucugaaguuu

SEQ ID NO: 196814 - RNA, 22 nt, Human
uacaaagucccauugccaugga

SEQ ID NO: 196815 - RNA, 18 nt, Human
ggguccugugggagacag

SEQ ID NO: 196816 - RNA, 22 nt, Human
ucauuuguucucauucucuacu

SEQ ID NO: 196817 - RNA, 22 nt, Human
augugucugguuauugacaugc

SEQ ID NO: 196818 - RNA, 22 nt, Human
cugagcugcucccgcugcagcg

SEQ ID NO: 196819 - RNA, 22 nt, Human
cuggcugccacuucagggucuu

SEQ ID NO: 196820 - RNA, 22 nt, Human
guuaggaacacuggagccuaaa

SEQ ID NO: 196821 - RNA, 22 nt, Human
agcuggcugccuucuccuuagg

SEQ ID NO: 196822 - RNA, 20 nt, Human
acauggcauucccacguggu

SEQ ID NO: 196823 - RNA, 22 nt, Human
cucucuggucccagauuccaga

SEQ ID NO: 196824 - RNA, 17 nt, Human
ugaaggccaugaccacg

SEQ ID NO: 196825 - RNA, 22 nt, Human
guaauagaacacucagcaugga

SEQ ID NO: 196826 - RNA, 22 nt, Human
ugugaaaucacaggcuauuuag

SEQ ID NO: 196827 - RNA, 22 nt, Human
cauuugauuacuaaagauaauu

SEQ ID NO: 196828 - RNA, 19 nt, Human
aaauacagcagcuguuucc

SEQ ID NO: 196829 - RNA, 22 nt, Human
caagcuuuccauuacacacauu

SEQ ID NO: 196830 - RNA, 22 nt, Human
aaaguauuugugauuuuuacca

SEQ ID NO: 196831 - RNA, 22 nt, Human
auguggcuagugcaacugagaa

SEQ ID NO: 196832 - RNA, 22 nt, Human
gggcaagaagcuggaagcauuc

SEQ ID NO: 196833 - RNA, 22 nt, Human
acugccauuuugaauaauuacu

SEQ ID NO: 196834 - RNA, 22 nt, Human
gggucagagccguaacaggacu

SEQ ID NO: 196835 - RNA, 22 nt, Human
uuuaucaucuuguuuuuaaagc

SEQ ID NO: 196836 - RNA, 22 nt, Human
cccuggacuguucagggccuga

SEQ ID NO: 196837 - RNA, 22 nt, Human
ugaugugugauucauucucaaa

SEQ ID NO: 196838 - RNA, 22 nt, Human
ugugcaggugcaggaagggggc

SEQ ID NO: 196839 - RNA, 22 nt, Human
gaacauuuggauuuguaaauuu

SEQ ID NO: 196840 - RNA, 22 nt, Human
acagcugugagggucacuugua

SEQ ID NO: 196841 - RNA, 22 nt, Human
gccuccuguuaugccaugugcc

SEQ ID NO: 196842 - RNA, 22 nt, Human
ucaggccuggagaaaggaauga

SEQ ID NO: 196843 - RNA, 22 nt, Human
auacacuuguacauuuuuuaau

SEQ ID NO: 196844 - RNA, 22 nt, Human
uucuugccugcccugugucgua

SEQ ID NO: 196845 - RNA, 22 nt, Human
gggcuggcgggaaaggcaauuc

SEQ ID NO: 196846 - RNA, 22 nt, Human
guacacuugacucauaggaaau

SEQ ID NO: 196847 - RNA, 22 nt, Human
aacauuuaugguagucauugca

SEQ ID NO: 196848 - RNA, 22 nt, Human
aauucauugccagaaucuauga

SEQ ID NO: 196849 - RNA, 22 nt, Human
ucugcccagccagacccaaggu

SEQ ID NO: 196850 - RNA, 22 nt, Human
agaucacaguggcaacucccuu

SEQ ID NO: 196851 - RNA, 22 nt, Human
uuucagaaggggagaaagguca

SEQ ID NO: 196852 - RNA, 22 nt, Human
auuuacagguagaauuuuaagu

SEQ ID NO: 196853 - RNA, 18 nt, Human
agacagacagguuugugc

SEQ ID NO: 196854 - RNA, 22 nt, Human
aauucuauaggcaagcuauuuu

SEQ ID NO: 196855 - RNA, 22 nt, Human
uaaaguguuguacaaauguaug

SEQ ID NO: 196856 - RNA, 22 nt, Human
ccuuucugguauuuaaccaaag

SEQ ID NO: 196857 - RNA, 22 nt, Human
gccuguuuguuugcaaaggagc

SEQ ID NO: 196858 - RNA, 22 nt, Human
accaggacauuuuagucaucuu

SEQ ID NO: 196859 - RNA, 22 nt, Human
aguaaacauuucagauuuauuu

SEQ ID NO: 196860 - RNA, 22 nt, Human
agugcucauaaaaaugugaaac

SEQ ID NO: 196861 - RNA, 22 nt, Human
uuucacuggaauuuuaacauuu

SEQ ID NO: 196862 - RNA, 22 nt, Human
uguggccaggccccugauggug

SEQ ID NO: 196863 - RNA, 22 nt, Human
gccucagagggcccuagggaca

SEQ ID NO: 196864 - RNA, 22 nt, Human
uucccuccgaaccucagugcug

SEQ ID NO: 196865 - RNA, 22 nt, Human
cuaauagauaccacauuggaca

SEQ ID NO: 196866 - RNA, 22 nt, Human
uaucacaucaauguuuuaaaau

SEQ ID NO: 196867 - RNA, 22 nt, Human
gcucaggaaaacagucuaguaa

SEQ ID NO: 196868 - RNA, 22 nt, Human
cugcucagaggaaggaaugucu

SEQ ID NO: 196869 - RNA, 22 nt, Human
uucacugcuacauccaggugcc

SEQ ID NO: 196870 - RNA, 22 nt, Human
cagccugacuauggcugcaggu

SEQ ID NO: 196871 - RNA, 22 nt, Human
aaacaccaagagcuagcuauua

SEQ ID NO: 196872 - RNA, 22 nt, Human
uugcaaaugugguuagggcuuu

SEQ ID NO: 196873 - RNA, 22 nt, Human
cauuuguauagugcuuagacca

SEQ ID NO: 196874 - RNA, 22 nt, Human
ucucuaggggagccccguuugu

SEQ ID NO: 196875 - RNA, 18 nt, Human
aggaaagaaaggcaggug

SEQ ID NO: 196876 - RNA, 22 nt, Human
uagcaaaaaaacuggcaucucc

SEQ ID NO: 196877 - RNA, 22 nt, Human
uaaacuguguaauaugaugucu

SEQ ID NO: 196878 - RNA, 22 nt, Human
gggcaggugauuuuggcuccau

SEQ ID NO: 196879 - RNA, 22 nt, Human
caggaagcucuuagcagucacc

SEQ ID NO: 196880 - RNA, 22 nt, Human
ccagccuggacugggucuugug

SEQ ID NO: 196881 - RNA, 22 nt, Human
uccacagugguugaacuaguuu

SEQ ID NO: 196882 - RNA, 22 nt, Human
ggcaagaaggcuucagguagcu

SEQ ID NO: 196883 - RNA, 22 nt, Human
aggacagugguguucuggagug

SEQ ID NO: 196884 - RNA, 21 nt, Human
gccagccuguuuaccuguggu

SEQ ID NO: 196885 - RNA, 22 nt, Human
gcuccuccaauauggacuccuc

SEQ ID NO: 196886 - RNA, 22 nt, Human
acaugcauucucuaaaagcaaa

SEQ ID NO: 196887 - RNA, 19 nt, Human
cuuccccuguuaccucacu

SEQ ID NO: 196888 - RNA, 22 nt, Human
ucugggucuaucccaugccuuu

SEQ ID NO: 196889 - RNA, 22 nt, Human
ccuuucccgcuuugagggcaag

SEQ ID NO: 196890 - RNA, 22 nt, Human
ccuagaaugugcagacuuaggg

SEQ ID NO: 196891 - RNA, 22 nt, Human
uacaguuuuuauucaugacaag

SEQ ID NO: 196892 - RNA, 22 nt, Human
gggaaacuggggacugaaucug

SEQ ID NO: 196893 - RNA, 22 nt, Human
uuugauuuucagcaauaguggc

SEQ ID NO: 196894 - RNA, 19 nt, Human
agcuggggcgguguguguu

SEQ ID NO: 196895 - RNA, 22 nt, Human
cagggccucgaagccucugggc

SEQ ID NO: 196896 - RNA, 22 nt, Human
gggacccugggaggcuggcgca

SEQ ID NO: 196897 - RNA, 22 nt, Human
ugaaacauuugaugaucuuugg

SEQ ID NO: 196898 - RNA, 22 nt, Human
gcagcccaaaaaagagguagau

SEQ ID NO: 196899 - RNA, 22 nt, Human
agaacacucuccugaaaauuaa

SEQ ID NO: 196900 - RNA, 22 nt, Human
cacaggugugugccuuaucaaa

SEQ ID NO: 196901 - RNA, 22 nt, Human
aguuaagagugugaaaauguua

SEQ ID NO: 196902 - RNA, 20 nt, Human
uguaaaacaaggugaauccu

SEQ ID NO: 196903 - RNA, 22 nt, Human
gggcaugcaggacuguggcaga

SEQ ID NO: 196904 - RNA, 22 nt, Human
uccaggcuacuuggauuccugg

SEQ ID NO: 196905 - RNA, 22 nt, Human
agcuggcugggugccagucucc

SEQ ID NO: 196906 - RNA, 22 nt, Human
uaaaugauuuauguaugugaaa

SEQ ID NO: 196907 - RNA, 22 nt, Human
agcuccagggaaagaguggauc

SEQ ID NO: 196908 - RNA, 22 nt, Human
uaccaggcagcugcacagaggc

SEQ ID NO: 196909 - RNA, 22 nt, Human
uuccuggcuggcgguuuuggug

SEQ ID NO: 196910 - RNA, 22 nt, Human
uuuauugcccuguaguacagga

SEQ ID NO: 196911 - RNA, 22 nt, Human
cacauccuucauacucagcucu

SEQ ID NO: 196912 - RNA, 22 nt, Human
gaggcuucccgcccaugcugga

SEQ ID NO: 196913 - RNA, 22 nt, Human
acaagugcauggaaucagcugu

SEQ ID NO: 196914 - RNA, 22 nt, Human
ggggaacaccgggcagaggcgc

SEQ ID NO: 196915 - RNA, 22 nt, Human
uaacaguauagccuaacauuuc

SEQ ID NO: 196916 - RNA, 22 nt, Human
uacaugcacaugaacaugugug

SEQ ID NO: 196917 - RNA, 22 nt, Human
uuccuggaaauuaugcucaccu

SEQ ID NO: 196918 - RNA, 22 nt, Human
agccagagauccaucccuagga

SEQ ID NO: 196919 - RNA, 19 nt, Human
uccuggggauguggucacc

SEQ ID NO: 196920 - RNA, 22 nt, Human
uacagcuggacugguagcugug

SEQ ID NO: 196921 - RNA, 22 nt, Human
aaguauucuggcagucauucag

SEQ ID NO: 196922 - RNA, 18 nt, Human
uuaugcaaaacuguuuuc

SEQ ID NO: 196923 - RNA, 22 nt, Human
aaggccagcuuguagggcuggu

SEQ ID NO: 196924 - RNA, 23 nt, Human
ugcagagggacugaagccagcuu

SEQ ID NO: 196925 - RNA, 22 nt, Human
uagaaggcuuugagagauacuu

SEQ ID NO: 196926 - RNA, 22 nt, Human
ggcuuuauaggguagaggauca

SEQ ID NO: 196927 - RNA, 22 nt, Human
agcagaaagcuuauuuugacug

SEQ ID NO: 196928 - RNA, 22 nt, Human
ugcuggcuuuagugauuggggu

SEQ ID NO: 196929 - RNA, 23 nt, Human
guguguggaaagugcaugggccu

SEQ ID NO: 196930 - RNA, 22 nt, Human
cucucuggcuuggcacggagau

SEQ ID NO: 196931 - RNA, 22 nt, Human
ggcugccaggagaagcucagug

SEQ ID NO: 196932 - RNA, 22 nt, Human
cacaugagguggagaugaauga

SEQ ID NO: 196933 - RNA, 22 nt, Human
ggggagaauuaccaaaagcgcu

SEQ ID NO: 196934 - RNA, 22 nt, Human
aguaucauguuggaauuaauca

SEQ ID NO: 196935 - RNA, 22 nt, Human
ccaggacaaguguggccauggc

SEQ ID NO: 196936 - RNA, 22 nt, Human
uaaacauguugacaucuuaccu

SEQ ID NO: 196937 - RNA, 22 nt, Human
ggccaggcugcccugggagcag

SEQ ID NO: 196938 - RNA, 22 nt, Human
ucaggagcuugguagugugauu

SEQ ID NO: 196939 - RNA, 22 nt, Human
agcuggaagugcauuucucacu

SEQ ID NO: 196940 - RNA, 22 nt, Human
caaauucucuuacuguuugaca

SEQ ID NO: 196941 - RNA, 22 nt, Human
cguggggcggguggacacuugc

SEQ ID NO: 196942 - RNA, 22 nt, Human
ugaaagcagcaccaauaccauu

SEQ ID NO: 196943 - RNA, 22 nt, Human
uugaggcugcacaguacaggcu

SEQ ID NO: 196944 - RNA, 22 nt, Human
uacauauucaacguucaguauu

SEQ ID NO: 196945 - RNA, 20 nt, Human
augcacccucagggucccug

SEQ ID NO: 196946 - RNA, 22 nt, Human
gacagacacuauugguaugccu

SEQ ID NO: 196947 - RNA, 22 nt, Human
auggcagcaaaugucuggcugg

SEQ ID NO: 196948 - RNA, 22 nt, Human
ggucacagggaagggcucucaa

SEQ ID NO: 196949 - RNA, 22 nt, Human
ccuguggcugccacuuggguga

SEQ ID NO: 196950 - RNA, 22 nt, Human
uaauuuugucccccugcacaua

SEQ ID NO: 196951 - RNA, 22 nt, Human
uucaaucauugcaaaguaaugg

SEQ ID NO: 196952 - RNA, 22 nt, Human
ucugagcuucugcauuuccaac

SEQ ID NO: 196953 - RNA, 20 nt, Human
uccagggcccuggcuccucu

SEQ ID NO: 196954 - RNA, 22 nt, Human
caucagagugguggccuggugu

SEQ ID NO: 196955 - RNA, 22 nt, Human
cuuccucacggugcaacaggaa

SEQ ID NO: 196956 - RNA, 22 nt, Human
agcugcagccgcagcuguggcc

SEQ ID NO: 196957 - RNA, 22 nt, Human
ucacacguccuugcuacuccuc

SEQ ID NO: 196958 - RNA, 22 nt, Human
gcucagggccuggcugcggacu

SEQ ID NO: 196959 - RNA, 22 nt, Human
gcccuucacgaugguaucuuag

SEQ ID NO: 196960 - RNA, 22 nt, Human
cugggccugucccugauugagg

SEQ ID NO: 196961 - RNA, 22 nt, Human
ucuggguggcugccaaucugcc

SEQ ID NO: 196962 - RNA, 22 nt, Human
auaaaaccaaagcagcaguguu

SEQ ID NO: 196963 - RNA, 22 nt, Human
agacacagugcugggugcugag

SEQ ID NO: 196964 - RNA, 22 nt, Human
cuugcaugcauuugaagaucau

SEQ ID NO: 196965 - RNA, 22 nt, Human
gcuggugguaaggaggaaaaag

SEQ ID NO: 196966 - RNA, 22 nt, Human
cccugcugcagagagcuuucca

SEQ ID NO: 196967 - RNA, 22 nt, Human
ucucuuggagguucuuccuguu

SEQ ID NO: 196968 - RNA, 22 nt, Human
ucucugagcccaauguagcaau

SEQ ID NO: 196969 - RNA, 22 nt, Human
cugauacaaugcuaauaaauuu

SEQ ID NO: 196970 - RNA, 22 nt, Human
ggugcugauaguaacaauaaua

SEQ ID NO: 196971 - RNA, 22 nt, Human
gcaggcuuauggggagacagag

SEQ ID NO: 196972 - RNA, 22 nt, Human
gauacauuucaaggaggacugg

SEQ ID NO: 196973 - RNA, 22 nt, Human
cauuuacacacagaggugugcu

SEQ ID NO: 196974 - RNA, 22 nt, Human
uuuucuguauuauugugcuuca

SEQ ID NO: 196975 - RNA, 22 nt, Human
aagcaauuugacaguacauauc

SEQ ID NO: 196976 - RNA, 22 nt, Human
acugcugagagcaaucccaaac

SEQ ID NO: 196977 - RNA, 22 nt, Human
aaaguguuuugauuuaguggua

SEQ ID NO: 196978 - RNA, 22 nt, Human
agaaaguuguuuuagccaaacc

SEQ ID NO: 196979 - RNA, 22 nt, Human
aucuaaaaggagcucuuuaucu

SEQ ID NO: 196980 - RNA, 22 nt, Human
cagccaaaugagucauaaaugu

SEQ ID NO: 196981 - RNA, 22 nt, Human
agggauguugucaaggaugugg

SEQ ID NO: 196982 - RNA, 22 nt, Human
ggcaagagggcagauggagugc

SEQ ID NO: 196983 - RNA, 22 nt, Human
ugugcaugacagcauacaaacg

SEQ ID NO: 196984 - RNA, 22 nt, Human
uauauuguaggugcuauuugaa

SEQ ID NO: 196985 - RNA, 19 nt, Human
uggagacugagagugagca

SEQ ID NO: 196986 - RNA, 22 nt, Human
ugugacugagcugcagaguguc

SEQ ID NO: 196987 - RNA, 22 nt, Human
uuggaaaggagauucuauugug

SEQ ID NO: 196988 - RNA, 22 nt, Human
uuuccccagguagauagauaau

SEQ ID NO: 196989 - RNA, 22 nt, Human
ucccagcacagggcagauguga

SEQ ID NO: 196990 - RNA, 22 nt, Human
ccuggagguggagguugcagug

SEQ ID NO: 196991 - RNA, 22 nt, Human
ucaaagcaucagucaauuuagg

SEQ ID NO: 196992 - RNA, 22 nt, Human
ugaaaucaauugcaauguuuau

SEQ ID NO: 196993 - RNA, 22 nt, Human
aaagaggcucaaggugggccag

SEQ ID NO: 196994 - RNA, 22 nt, Human
ugagcccuaccugcucaucucc

SEQ ID NO: 196995 - RNA, 22 nt, Human
uagcuuuagugaaaaauaucag

SEQ ID NO: 196996 - RNA, 22 nt, Human
cagaguggcgacccccucagcu

SEQ ID NO: 196997 - RNA, 22 nt, Human
aggaaaauggaccagaguuguu

SEQ ID NO: 196998 - RNA, 22 nt, Human
gagccaugagauaguugguucg

SEQ ID NO: 196999 - RNA, 22 nt, Human
acaaaaaccguggauucagcau

SEQ ID NO: 197000 - RNA, 17 nt, Human
uccaggagaggcaaugg

SEQ ID NO: 197001 - RNA, 22 nt, Human
auucucugaagucuuucagggc

SEQ ID NO: 197002 - RNA, 22 nt, Human
uggccaguagagcucagauagu

SEQ ID NO: 197003 - RNA, 22 nt, Human
auuuccauagagcgucucacag

SEQ ID NO: 197004 - RNA, 22 nt, Human
uagucaguaugaaauugcucaa

SEQ ID NO: 197005 - RNA, 21 nt, Human
agcucccuguuuccucacucu

SEQ ID NO: 197006 - RNA, 21 nt, Human
aaacugaagagacaggaacuu

SEQ ID NO: 197007 - RNA, 22 nt, Human
agaaucaaggugaagcccacag

SEQ ID NO: 197008 - RNA, 22 nt, Human
uugcugaaaucuaugacauccu

SEQ ID NO: 197009 - RNA, 22 nt, Human
uuguuuauguaauuggcacacu

SEQ ID NO: 197010 - RNA, 22 nt, Human
gcccucagaguuccccacagug

SEQ ID NO: 197011 - RNA, 22 nt, Human
gaauucaguuaucuaauucaag

SEQ ID NO: 197012 - RNA, 22 nt, Human
uaggaaacaaaguggaugaaau

SEQ ID NO: 197013 - RNA, 22 nt, Human
uucuguuugccauauauaguag

SEQ ID NO: 197014 - RNA, 22 nt, Human
ucccugcaggugggguggccag

SEQ ID NO: 197015 - RNA, 22 nt, Human
uccaggccuugacaggucaguu

SEQ ID NO: 197016 - RNA, 22 nt, Human
ugaaaaaacaaguuggcccauu

SEQ ID NO: 197017 - RNA, 22 nt, Human
guggggugcagcaguacugugu

SEQ ID NO: 197018 - RNA, 22 nt, Human
uuacacacaauuagcauaguaa

SEQ ID NO: 197019 - RNA, 21 nt, Human
uucuagaaaaguaugggacug

SEQ ID NO: 197020 - RNA, 22 nt, Human
uucucuggggacuugguuggag

SEQ ID NO: 197021 - RNA, 22 nt, Human
ucugucaucuguucagugcuca

SEQ ID NO: 197022 - RNA, 22 nt, Human
gccuucaggaaaucaguccuug

SEQ ID NO: 197023 - RNA, 22 nt, Human
gaauggcugaaugucuuaaauu

SEQ ID NO: 197024 - RNA, 22 nt, Human
uacuguauuugauaagugaagu

SEQ ID NO: 197025 - RNA, 22 nt, Human
uuacaaagcaggucagcugaaa

SEQ ID NO: 197026 - RNA, 22 nt, Human
ugucccuggagcuucugucccc

SEQ ID NO: 197027 - RNA, 22 nt, Human
aacaugugucuugcauuucuug

SEQ ID NO: 197028 - RNA, 22 nt, Human
agacaucucuaugcaggaucuc

SEQ ID NO: 197029 - RNA, 22 nt, Human
agucucugccagcuuguccucu

SEQ ID NO: 197030 - RNA, 19 nt, Human
ucagugucccuguuaauau

SEQ ID NO: 197031 - RNA, 22 nt, Human
ccaguggccaugcacgagcagc

SEQ ID NO: 197032 - RNA, 20 nt, Human
cagauggcacgucagggcau

SEQ ID NO: 197033 - RNA, 22 nt, Human
aaacaguuaauugcuuucaguu

SEQ ID NO: 197034 - RNA, 20 nt, Human
aaguuucugguuuauaucuu

SEQ ID NO: 197035 - RNA, 22 nt, Human
cagucccagcugcucagaaggc

SEQ ID NO: 197036 - RNA, 22 nt, Human
uguaaaagacauuucuaagcaa

SEQ ID NO: 197037 - RNA, 22 nt, Human
ugggcuucuggaguggggcaga

SEQ ID NO: 197038 - RNA, 22 nt, Human
ugcucgagguccccaccggcuc

SEQ ID NO: 197039 - RNA, 22 nt, Human
uagcagcaagaaugggaugugu

SEQ ID NO: 197040 - RNA, 22 nt, Human
ccuggcucccggaacagggucu

SEQ ID NO: 197041 - RNA, 22 nt, Human
ugaggcaaaaguuaugugguag

SEQ ID NO: 197042 - RNA, 22 nt, Human
caaaugaauagggagugugaug

SEQ ID NO: 197043 - RNA, 22 nt, Human
uuacaauggguauacuuccauu

SEQ ID NO: 197044 - RNA, 22 nt, Human
uugggacaucuggcauacaguu

SEQ ID NO: 197045 - RNA, 22 nt, Human
ugcaagagauucaaaccauaaa

SEQ ID NO: 197046 - RNA, 22 nt, Human
uucacagauguauuggaacucc

SEQ ID NO: 197047 - RNA, 22 nt, Human
aaauggcaguagaaaagaaucc

SEQ ID NO: 197048 - RNA, 22 nt, Human
ucccuggggcaguggcucggag

SEQ ID NO: 197049 - RNA, 22 nt, Human
uccugguggcuuucccugccuu

SEQ ID NO: 197050 - RNA, 22 nt, Human
ggacacaguggaagacagcuug

SEQ ID NO: 197051 - RNA, 22 nt, Human
cacaugcauuggcaaaagugua

SEQ ID NO: 197052 - RNA, 22 nt, Human
uaguuaaagauucuguuaagag

SEQ ID NO: 197053 - RNA, 22 nt, Human
uuuuguuuaaaauccuggaugg

SEQ ID NO: 197054 - RNA, 22 nt, Human
gaggacacaaaguggcugagau

SEQ ID NO: 197055 - RNA, 17 nt, Human
agcagaagucagaggga

SEQ ID NO: 197056 - RNA, 19 nt, Human
gagcaacauauguaaacuc

SEQ ID NO: 197057 - RNA, 22 nt, Human
aagaggccuuggucugaccuga

SEQ ID NO: 197058 - RNA, 22 nt, Human
gcaggcucuucuuucugcccag

SEQ ID NO: 197059 - RNA, 22 nt, Human
gccucuggucccucaugcugug

SEQ ID NO: 197060 - RNA, 22 nt, Human
cucucugucuuggcauuugguc

SEQ ID NO: 197061 - RNA, 17 nt, Human
acucaggaucugggagu

SEQ ID NO: 197062 - RNA, 22 nt, Human
uuguuuuggaagaacuuacucu

SEQ ID NO: 197063 - RNA, 22 nt, Human
uucauguuggauucacugugag

SEQ ID NO: 197064 - RNA, 22 nt, Human
agaccuuuauuucaugauagga

SEQ ID NO: 197065 - RNA, 22 nt, Human
acauaucuguuagacacagcag

SEQ ID NO: 197066 - RNA, 22 nt, Human
cuggaggcugaguugggucucc

SEQ ID NO: 197067 - RNA, 22 nt, Human
aaguuacagucugcuugcugac

SEQ ID NO: 197068 - RNA, 22 nt, Human
ugaaggcugguaguuugggcug

SEQ ID NO: 197069 - RNA, 22 nt, Human
uccaguuucauagcuaaggaac

SEQ ID NO: 197070 - RNA, 22 nt, Human
gccucaggacuggcauacucau

SEQ ID NO: 197071 - RNA, 22 nt, Human
uccuguggucuggaaggaaugg

SEQ ID NO: 197072 - RNA, 22 nt, Human
uccauguuucagcaucuacauc

SEQ ID NO: 197073 - RNA, 22 nt, Human
auugaaaggcaaaguaggaagc

SEQ ID NO: 197074 - RNA, 22 nt, Human
gcuggggacuccccaccauagc

SEQ ID NO: 197075 - RNA, 22 nt, Human
aaacugguuucugagauggaac

SEQ ID NO: 197076 - RNA, 22 nt, Human
auuucagaguagaucguuauuu

SEQ ID NO: 197077 - RNA, 22 nt, Human
augaucaagaauuuuguauucc

SEQ ID NO: 197078 - RNA, 22 nt, Human
agcagcagggcucugcccgugc

SEQ ID NO: 197079 - RNA, 22 nt, Human
cuggugacauuuccggcugcca

SEQ ID NO: 197080 - RNA, 22 nt, Human
ugguaucugugaaugugacauu

SEQ ID NO: 197081 - RNA, 21 nt, Human
ggcuggucgcgugcaugucuc

SEQ ID NO: 197082 - RNA, 22 nt, Human
guggauggauuuugaggaaugg

SEQ ID NO: 197083 - RNA, 22 nt, Human
uguguucuccaacuguagauuu

SEQ ID NO: 197084 - RNA, 22 nt, Human
agcuaggggaccaagguggccc

SEQ ID NO: 197085 - RNA, 22 nt, Human
uagacagagugaagacaagugg

SEQ ID NO: 197086 - RNA, 22 nt, Human
cccuauuagugaccacaucaua

SEQ ID NO: 197087 - RNA, 22 nt, Human
cagcuucaccagggccaugguu

SEQ ID NO: 197088 - RNA, 22 nt, Human
aggccccaucaggaaggaggcc

SEQ ID NO: 197089 - RNA, 22 nt, Human
gccucagaaucauuuaucaucu

SEQ ID NO: 197090 - RNA, 22 nt, Human
uggaaggggagcuggaaagggg

SEQ ID NO: 197091 - RNA, 22 nt, Human
gcuggcuggaacuagcaguugg

SEQ ID NO: 197092 - RNA, 22 nt, Human
guccucugcuucaugcccugau

SEQ ID NO: 197093 - RNA, 22 nt, Human
uuacagauacuuuguaggcaag

SEQ ID NO: 197094 - RNA, 22 nt, Human
uggcuccagaucugucuccugu

SEQ ID NO: 197095 - RNA, 22 nt, Human
cuggugaccggaccucaguuuu

SEQ ID NO: 197096 - RNA, 22 nt, Human
aagaauguggcauuuauuuaua

SEQ ID NO: 197097 - RNA, 22 nt, Human
uuuggcucgauggacuuugaau

SEQ ID NO: 197098 - RNA, 22 nt, Human
gccuguguggaugcgccggugc

SEQ ID NO: 197099 - RNA, 23 nt, Human
gagcaccagggcuuuugagacau

SEQ ID NO: 197100 - RNA, 22 nt, Human
gcuuagaaguuccuauaaaaug

SEQ ID NO: 197101 - RNA, 22 nt, Human
uaagccacugagauuugggguu

SEQ ID NO: 197102 - RNA, 22 nt, Human
cuuucauaagggguuuuauaau

SEQ ID NO: 197103 - RNA, 22 nt, Human
agacagacauucuagagccacc

SEQ ID NO: 197104 - RNA, 22 nt, Human
agguggucuuaaacugcucugg

SEQ ID NO: 197105 - RNA, 22 nt, Human
agaggcuccuucacucuggcac

SEQ ID NO: 197106 - RNA, 22 nt, Human
agacauuuauguuucucuagga

SEQ ID NO: 197107 - RNA, 22 nt, Human
ccugccuggcuuccagaagaga

SEQ ID NO: 197108 - RNA, 22 nt, Human
ucucuuccucagccuggggccu

SEQ ID NO: 197109 - RNA, 22 nt, Human
aagucacuugauuguugacaga

SEQ ID NO: 197110 - RNA, 22 nt, Human
accccaaaagaguaauagaauu

SEQ ID NO: 197111 - RNA, 22 nt, Human
ggcaggcaagucugcucuguga

SEQ ID NO: 197112 - RNA, 22 nt, Human
ugaguucaaguccaaguugcug

SEQ ID NO: 197113 - RNA, 22 nt, Human
ugugugcaagugacauuagaaa

SEQ ID NO: 197114 - RNA, 19 nt, Human
uaguggagugacaaguucu

SEQ ID NO: 197115 - RNA, 22 nt, Human
gaggugccuggcgaugucucug

SEQ ID NO: 197116 - RNA, 22 nt, Human
gugcugggcccugagaccaggg

SEQ ID NO: 197117 - RNA, 22 nt, Human
caguuucugagcccugucauuu

SEQ ID NO: 197118 - RNA, 20 nt, Human
acaguguuuuugaguagagc

SEQ ID NO: 197119 - RNA, 22 nt, Human
uaaugucuaugggccagauaau

SEQ ID NO: 197120 - RNA, 22 nt, Human
ucugaggaagcagcaggaagug

SEQ ID NO: 197121 - RNA, 21 nt, Human
cacuuuaaaaauaucuuuaua

SEQ ID NO: 197122 - RNA, 22 nt, Human
ucuuccagcuucugguggcugc

SEQ ID NO: 197123 - RNA, 22 nt, Human
aauuggaagaauugauuugcuu

SEQ ID NO: 197124 - RNA, 22 nt, Human
gcuaaaaggagcacuagagauu

SEQ ID NO: 197125 - RNA, 22 nt, Human
ugccaauucgcagugaguauuu

SEQ ID NO: 197126 - RNA, 22 nt, Human
guuuauaugaacuucauaccca

SEQ ID NO: 197127 - RNA, 19 nt, Human
uguggggagucagggggcu

SEQ ID NO: 197128 - RNA, 22 nt, Human
augacaauacuucaauaagcug

SEQ ID NO: 197129 - RNA, 22 nt, Human
cccagcccccgagugucuggaa

SEQ ID NO: 197130 - RNA, 22 nt, Human
uguguuucagaaccuucuuuca

SEQ ID NO: 197131 - RNA, 23 nt, Human
agaugagccaacaccuccaugcc

SEQ ID NO: 197132 - RNA, 22 nt, Human
cuuaggaaugcguuuccugggu

SEQ ID NO: 197133 - RNA, 22 nt, Human
ccauguggugggaaggagaaug

SEQ ID NO: 197134 - RNA, 22 nt, Human
uguacacaguaugaggcaucuu

SEQ ID NO: 197135 - RNA, 22 nt, Human
ucccacauuacccugacugaca

SEQ ID NO: 197136 - RNA, 22 nt, Human
uugguaaauaacaaucacagug

SEQ ID NO: 197137 - RNA, 22 nt, Human
auuucccaugugaaucaauugg

SEQ ID NO: 197138 - RNA, 19 nt, Human
ugggccucacaaugcuccc

SEQ ID NO: 197139 - RNA, 22 nt, Human
caggcagagugagaagcccuug

SEQ ID NO: 197140 - RNA, 22 nt, Human
augcccugcaucaagugacacu

SEQ ID NO: 197141 - RNA, 22 nt, Human
gccagaggaacgcugcgcgccc

SEQ ID NO: 197142 - RNA, 22 nt, Human
aaugucaaaggcuauacauuca

SEQ ID NO: 197143 - RNA, 22 nt, Human
uggugcagauagugguguagua

SEQ ID NO: 197144 - RNA, 21 nt, Human
agaggcccucggacugggcgu

SEQ ID NO: 197145 - RNA, 22 nt, Human
gcaggagagccagcaggcuucc

SEQ ID NO: 197146 - RNA, 22 nt, Human
ccuugcaguuguuacuguagcc

SEQ ID NO: 197147 - RNA, 22 nt, Human
ggcacugacacuagcauggcac

SEQ ID NO: 197148 - RNA, 22 nt, Human
agaggacaaaaugagaagugcu

SEQ ID NO: 197149 - RNA, 22 nt, Human
ucuuuguggcgggcuuaaauac

SEQ ID NO: 197150 - RNA, 22 nt, Human
uugggaaggcguggaagcagaa

SEQ ID NO: 197151 - RNA, 22 nt, Human
acuuauauuugcuuuaugcuuc

SEQ ID NO: 197152 - RNA, 22 nt, Human
uuuugccugcacuguauauaua

SEQ ID NO: 197153 - RNA, 22 nt, Human
ucugugcuggacugauuucaua

SEQ ID NO: 197154 - RNA, 22 nt, Human
aaauagcagcuuugacagcaca

SEQ ID NO: 197155 - RNA, 23 nt, Human
ugucuuugaaugggcuguagaca

SEQ ID NO: 197156 - RNA, 22 nt, Human
ucugggugccacugucuguaca

SEQ ID NO: 197157 - RNA, 22 nt, Human
caggagcuggaucuccuugcgg

SEQ ID NO: 197158 - RNA, 22 nt, Human
guccuuccugcagggauggaug

SEQ ID NO: 197159 - RNA, 20 nt, Human
uaucuaaaugcuuacauuac

SEQ ID NO: 197160 - RNA, 22 nt, Human
cagugauguuucugcaucagag

SEQ ID NO: 197161 - RNA, 22 nt, Human
aggcugaggcagguggaucauu

SEQ ID NO: 197162 - RNA, 20 nt, Human
acaggggcagcacaauaaug

SEQ ID NO: 197163 - RNA, 23 nt, Human
ugcuguagucucuacagcugguc

SEQ ID NO: 197164 - RNA, 22 nt, Human
uccagccaugcaugacaaucac

SEQ ID NO: 197165 - RNA, 22 nt, Human
uuuuugcuccacaacuuugaag

SEQ ID NO: 197166 - RNA, 18 nt, Human
ccuggcagccaugcgcgc

SEQ ID NO: 197167 - RNA, 22 nt, Human
aaucugcuuuugucauuuauga

SEQ ID NO: 197168 - RNA, 22 nt, Human
acaggucugugugcacagugcu

SEQ ID NO: 197169 - RNA, 22 nt, Human
caggucccugcgccccggccuc

SEQ ID NO: 197170 - RNA, 22 nt, Human
auucauuagccacuaacuagca

SEQ ID NO: 197171 - RNA, 22 nt, Human
aggcagcagugauaagauagga

SEQ ID NO: 197172 - RNA, 22 nt, Human
aacaucuagguucucaucgaua

SEQ ID NO: 197173 - RNA, 22 nt, Human
uggcccugcagaacuagccugg

SEQ ID NO: 197174 - RNA, 22 nt, Human
ucccauggucuauauagaggca

SEQ ID NO: 197175 - RNA, 22 nt, Human
gaagccacuauagauauucuaa

SEQ ID NO: 197176 - RNA, 20 nt, Human
auucucugacaccgcccccg

SEQ ID NO: 197177 - RNA, 22 nt, Human
gccagggagucugggccacaga

SEQ ID NO: 197178 - RNA, 22 nt, Human
aagcacaauuuaggacugaaau

SEQ ID NO: 197179 - RNA, 22 nt, Human
gauuuuucaguauaaaauauau

SEQ ID NO: 197180 - RNA, 22 nt, Human
aaaguaucugaccgauuauaaa

SEQ ID NO: 197181 - RNA, 22 nt, Human
gcaggcauggucgcugccaggu

SEQ ID NO: 197182 - RNA, 22 nt, Human
ccaggcaggcagcguucucagg

SEQ ID NO: 197183 - RNA, 22 nt, Human
uacaguaggauuuucagggucu

SEQ ID NO: 197184 - RNA, 22 nt, Human
ggcagugucaaaauaggcagaa

SEQ ID NO: 197185 - RNA, 22 nt, Human
cuuccucaggcauuagcuggac

SEQ ID NO: 197186 - RNA, 23 nt, Human
gccagccagaauuucuccacugu

SEQ ID NO: 197187 - RNA, 22 nt, Human
ccuagaugggauggcggccggg

SEQ ID NO: 197188 - RNA, 22 nt, Human
cugcugccauuagggcacagac

SEQ ID NO: 197189 - RNA, 22 nt, Human
gggaaauagagcuggaaccuug

SEQ ID NO: 197190 - RNA, 22 nt, Human
cugagcaggacagugggagacc

SEQ ID NO: 197191 - RNA, 22 nt, Human
ucauguguccuaguucauauaa

SEQ ID NO: 197192 - RNA, 22 nt, Human
gaaaguuucucacacaugcaga

SEQ ID NO: 197193 - RNA, 22 nt, Human
gaguuacagagaggauuauggu

SEQ ID NO: 197194 - RNA, 22 nt, Human
agccuuccacccagauccccuu

SEQ ID NO: 197195 - RNA, 22 nt, Human
aggcuguguggucaugguggcu

SEQ ID NO: 197196 - RNA, 22 nt, Human
gaauucuaggguaaauauccua

SEQ ID NO: 197197 - RNA, 22 nt, Human
acuuugcacuucaauauaacuu

SEQ ID NO: 197198 - RNA, 22 nt, Human
ccaaggaguagagcaggaagcu

SEQ ID NO: 197199 - RNA, 22 nt, Human
acagccagugacuggacaagcu

SEQ ID NO: 197200 - RNA, 22 nt, Human
guggucagaauggagcccagga

SEQ ID NO: 197201 - RNA, 20 nt, Human
ucaaaggcaaaggugggugu

SEQ ID NO: 197202 - RNA, 22 nt, Human
cugcaggaaucugugcuaggug

SEQ ID NO: 197203 - RNA, 22 nt, Human
uuccugguuuauggaaagcaug

SEQ ID NO: 197204 - RNA, 22 nt, Human
uugcuuuuaauuaaucauugcu

SEQ ID NO: 197205 - RNA, 22 nt, Human
uaucuugugcagaugaaagaau

SEQ ID NO: 197206 - RNA, 22 nt, Human
uuaacacugauuguagagacac

SEQ ID NO: 197207 - RNA, 22 nt, Human
uucuacagguacugaaguacau

SEQ ID NO: 197208 - RNA, 22 nt, Human
cugcccaggaaggagaggaugg

SEQ ID NO: 197209 - RNA, 22 nt, Human
guccucugacucagccuuggga

SEQ ID NO: 197210 - RNA, 22 nt, Human
aaacacagguacugcagaagug

SEQ ID NO: 197211 - RNA, 22 nt, Human
ugaggccuggagggaggaguuu

SEQ ID NO: 197212 - RNA, 22 nt, Human
ucuuugggagaaggggucccag

SEQ ID NO: 197213 - RNA, 22 nt, Human
auucagaaauagaaaauuugau

SEQ ID NO: 197214 - RNA, 15 nt, Human
uacauucauuuccac

SEQ ID NO: 197215 - RNA, 22 nt, Human
gcucaggagcugacagccucaa

SEQ ID NO: 197216 - RNA, 22 nt, Human
acuguacaacugcugagcagaa

SEQ ID NO: 197217 - RNA, 20 nt, Human
uauagaucacaucuucuagc

SEQ ID NO: 197218 - RNA, 22 nt, Human
caucucuguguccccacaccca

SEQ ID NO: 197219 - RNA, 22 nt, Human
uucagagacagcaaccaggaca

SEQ ID NO: 197220 - RNA, 23 nt, Human
aaggccagagagaggcuaguguc

SEQ ID NO: 197221 - RNA, 22 nt, Human
gcagccacuaguuuuccuguuu

SEQ ID NO: 197222 - RNA, 22 nt, Human
aauuauacaauugucaaguucu

SEQ ID NO: 197223 - RNA, 22 nt, Human
cagcacauuuacucagcccuca

SEQ ID NO: 197224 - RNA, 22 nt, Human
ugcccugggaggcuuuccuguu

SEQ ID NO: 197225 - RNA, 22 nt, Human
aggccaugggauuuccaauugg

SEQ ID NO: 197226 - RNA, 19 nt, Human
ugaauuagaauuauccucu

SEQ ID NO: 197227 - RNA, 22 nt, Human
cugcaggaaggggacggagugg

SEQ ID NO: 197228 - RNA, 22 nt, Human
agaggcaggaagagcugauuuu

SEQ ID NO: 197229 - RNA, 18 nt, Human
ucagagagaauaguaauu

SEQ ID NO: 197230 - RNA, 22 nt, Human
ucacaucugaaaaaauauugag

SEQ ID NO: 197231 - RNA, 22 nt, Human
ccaggcuguaagagugauguug

SEQ ID NO: 197232 - RNA, 22 nt, Human
uguguuaaguauuugauacacu

SEQ ID NO: 197233 - RNA, 22 nt, Human
uaaggccaaguucauauacaac

SEQ ID NO: 197234 - RNA, 22 nt, Human
uagagaaacagaaccaacaggg

SEQ ID NO: 197235 - RNA, 21 nt, Human
ggaguuuuucuggaagggacu

SEQ ID NO: 197236 - RNA, 22 nt, Human
gcucucacuuuagguuggaccg

SEQ ID NO: 197237 - RNA, 22 nt, Human
ucucuguauucuucguaaugcc

SEQ ID NO: 197238 - RNA, 23 nt, Human
acugggcugaaauuaaagguguc

SEQ ID NO: 197239 - RNA, 22 nt, Human
cugggccuuugggaguucggug

SEQ ID NO: 197240 - RNA, 22 nt, Human
ucugggcagccucaggccaggg

SEQ ID NO: 197241 - RNA, 16 nt, Human
acccucagaaacugcu

SEQ ID NO: 197242 - RNA, 22 nt, Human
agggccagagucuguguagaua

SEQ ID NO: 197243 - RNA, 22 nt, Human
cacucacuuauuucuaacagaa

SEQ ID NO: 197244 - RNA, 22 nt, Human
gcuucugcaggguccucgcugu

SEQ ID NO: 197245 - RNA, 22 nt, Human
uucacauuaucaggauuguuuc

SEQ ID NO: 197246 - RNA, 21 nt, Human
auuucagagcacacaaguaaa

SEQ ID NO: 197247 - RNA, 22 nt, Human
guccugagcccucagcacagca

SEQ ID NO: 197248 - RNA, 22 nt, Human
ugccuucucccuuggacccuga

SEQ ID NO: 197249 - RNA, 22 nt, Human
cauuuguugggacaaugaaaag

SEQ ID NO: 197250 - RNA, 22 nt, Human
acccagggaccccgcugacgcc

SEQ ID NO: 197251 - RNA, 22 nt, Human
cagaaauggagcccaggaaucu

SEQ ID NO: 197252 - RNA, 22 nt, Human
uucuggaagccccagagucaga

SEQ ID NO: 197253 - RNA, 22 nt, Human
aggauagaagccccauguucuu

SEQ ID NO: 197254 - RNA, 22 nt, Human
ugcuggaggccagaagucugag

SEQ ID NO: 197255 - RNA, 22 nt, Human
uaagugaugagcacaguaauua

SEQ ID NO: 197256 - RNA, 22 nt, Human
aaauggaaaaugcuguuuuggu

SEQ ID NO: 197257 - RNA, 17 nt, Human
ggagccaggagcccacc

SEQ ID NO: 197258 - RNA, 22 nt, Human
ucugggucaugacucagcguga

SEQ ID NO: 197259 - RNA, 22 nt, Human
ggcuguauauacuguauacagu

SEQ ID NO: 197260 - RNA, 22 nt, Human
ccaggcaaagcccaugcaagag

SEQ ID NO: 197261 - RNA, 17 nt, Human
cucugggcagccugggg

SEQ ID NO: 197262 - RNA, 17 nt, Human
ugccagccugucccagg

SEQ ID NO: 197263 - RNA, 20 nt, Human
ggugucagggccaugccugg

SEQ ID NO: 197264 - RNA, 22 nt, Human
ucuuuuagaaaaguugaaugua

SEQ ID NO: 197265 - RNA, 22 nt, Human
uagggauguggugagaacugag

SEQ ID NO: 197266 - RNA, 22 nt, Human
ccauuuaguaaggaagaacagc

SEQ ID NO: 197267 - RNA, 22 nt, Human
caauguacuacaaagauuguca

SEQ ID NO: 197268 - RNA, 22 nt, Human
cuuccccaaccccgacugugug

SEQ ID NO: 197269 - RNA, 22 nt, Human
ugagcugaguggcaggucucag

SEQ ID NO: 197270 - RNA, 22 nt, Human
aagccagugggcauagcaguug

SEQ ID NO: 197271 - RNA, 22 nt, Human
aaagucaagguuuagacuagag

SEQ ID NO: 197272 - RNA, 22 nt, Human
cucuccucagaacaggcccucu

SEQ ID NO: 197273 - RNA, 23 nt, Human
aucuagaaaccugaugacucugu

SEQ ID NO: 197274 - RNA, 22 nt, Human
gauuuugucaaauuccaaaugu

SEQ ID NO: 197275 - RNA, 22 nt, Human
uucaauuuagugauguuguugg

SEQ ID NO: 197276 - RNA, 22 nt, Human
guacauuucucccaacacuaaa

SEQ ID NO: 197277 - RNA, 19 nt, Human
uagaagcacuaggcaaacu

SEQ ID NO: 197278 - RNA, 22 nt, Human
caggucugcagacagggccaug

SEQ ID NO: 197279 - RNA, 22 nt, Human
ugacuuccugcacucaggugau

SEQ ID NO: 197280 - RNA, 22 nt, Human
ucccugggaauuaauauuugga

SEQ ID NO: 197281 - RNA, 22 nt, Human
cucagaaaggugccauuuaugu

SEQ ID NO: 197282 - RNA, 22 nt, Human
aaauuagauaugugugagacuc

SEQ ID NO: 197283 - RNA, 22 nt, Human
ucccugggaccggcagcucaca

SEQ ID NO: 197284 - RNA, 22 nt, Human
ccuggagggacccuggcccugu

SEQ ID NO: 197285 - RNA, 22 nt, Human
ucccacccauccugcaucucuu

SEQ ID NO: 197286 - RNA, 22 nt, Human
uaccauuucauucuuuccucau

SEQ ID NO: 197287 - RNA, 22 nt, Human
ggccugugagcccuugcaugua

SEQ ID NO: 197288 - RNA, 22 nt, Human
cauaaacucuugagauucuugu

SEQ ID NO: 197289 - RNA, 22 nt, Human
agacacaguuugggauggguug

SEQ ID NO: 197290 - RNA, 22 nt, Human
ccaggaccacacgacaggagag

SEQ ID NO: 197291 - RNA, 22 nt, Human
acuaaagugcaccccuuugaga

SEQ ID NO: 197292 - RNA, 22 nt, Human
aguggcagacacaaugugggca

SEQ ID NO: 197293 - RNA, 22 nt, Human
acuuagaaauucaguuuuguca

SEQ ID NO: 197294 - RNA, 22 nt, Human
aaacuucagacuccccacuucu

SEQ ID NO: 197295 - RNA, 22 nt, Human
agguccagacuguguacccuag

SEQ ID NO: 197296 - RNA, 22 nt, Human
cuggccaggcggccccugcaug

SEQ ID NO: 197297 - RNA, 22 nt, Human
agcagcugauggggaaggaguu

SEQ ID NO: 197298 - RNA, 22 nt, Human
uagcaggcuugugaauggagcc

SEQ ID NO: 197299 - RNA, 20 nt, Human
gugcugagggcugggcaaug

SEQ ID NO: 197300 - RNA, 22 nt, Human
uuaggaauuuaucacagacugg

SEQ ID NO: 197301 - RNA, 22 nt, Human
cauuaaauuccuuguucucaaa

SEQ ID NO: 197302 - RNA, 22 nt, Human
uuggaacuggauuucauguagc

SEQ ID NO: 197303 - RNA, 18 nt, Human
uggagcugagugcugugc

SEQ ID NO: 197304 - RNA, 22 nt, Human
gggaagaguaacuagcccaugu

SEQ ID NO: 197305 - RNA, 22 nt, Human
caggcuucaugaauuaugcacc

SEQ ID NO: 197306 - RNA, 22 nt, Human
uccugaggaugguugaagugca

SEQ ID NO: 197307 - RNA, 20 nt, Human
augccuuugauagucaggcu

SEQ ID NO: 197308 - RNA, 22 nt, Human
uccaugguuucagucuggcugg

SEQ ID NO: 197309 - RNA, 22 nt, Human
gauaaacacaaggugauuucau

SEQ ID NO: 197310 - RNA, 23 nt, Human
aaagacucuccagagggaaguag

SEQ ID NO: 197311 - RNA, 22 nt, Human
gaggcucagagagguccacaua

SEQ ID NO: 197312 - RNA, 22 nt, Human
cuuggcugucuauaggaaagag

SEQ ID NO: 197313 - RNA, 22 nt, Human
gggggcucugacucccucagcu

SEQ ID NO: 197314 - RNA, 22 nt, Human
ggcagccaugucccagggcuuc

SEQ ID NO: 197315 - RNA, 22 nt, Human
ucaauguucaaguaugacaaug

SEQ ID NO: 197316 - RNA, 22 nt, Human
auuuuguggcagaugcagaacc

SEQ ID NO: 197317 - RNA, 22 nt, Human
uccugguguuacuaaauugaaa

SEQ ID NO: 197318 - RNA, 17 nt, Human
gcucugccaggaaagag

SEQ ID NO: 197319 - RNA, 22 nt, Human
cagggcagggagcuuagaauga

SEQ ID NO: 197320 - RNA, 22 nt, Human
uccaugagcuagcuuuccaaag

SEQ ID NO: 197321 - RNA, 22 nt, Human
uugucuuuggaaauuuaauguu

SEQ ID NO: 197322 - RNA, 22 nt, Human
ugugauauuugaguauugucaa

SEQ ID NO: 197323 - RNA, 22 nt, Human
cagcagcuagaggaagggcaga

SEQ ID NO: 197324 - RNA, 22 nt, Human
caagagcuuuagaaaugcucau

SEQ ID NO: 197325 - RNA, 22 nt, Human
ccaggcuuuuagcugcauggca

SEQ ID NO: 197326 - RNA, 22 nt, Human
aaggaagugauuuucaugucaa

SEQ ID NO: 197327 - RNA, 22 nt, Human
aggugauuuucuccuuacgauu

SEQ ID NO: 197328 - RNA, 22 nt, Human
ccccuggggaucagcuggaauu

SEQ ID NO: 197329 - RNA, 22 nt, Human
aaagauuuaugaaguucaauua

SEQ ID NO: 197330 - RNA, 19 nt, Human
acagcacagaaauauuuca

SEQ ID NO: 197331 - RNA, 22 nt, Human
caggucagcuggugccccaggu

SEQ ID NO: 197332 - RNA, 22 nt, Human
gcucagcugagcgaaggacaug

SEQ ID NO: 197333 - RNA, 22 nt, Human
caggagccccaggcugacaaua

SEQ ID NO: 197334 - RNA, 22 nt, Human
uugauucaaaggggacaagugg

SEQ ID NO: 197335 - RNA, 21 nt, Human
aaaggccauaaucacggagca

SEQ ID NO: 197336 - RNA, 22 nt, Human
uagggaugaagaugguauuucu

SEQ ID NO: 197337 - RNA, 22 nt, Human
cacugaaacagguauugcuggu

SEQ ID NO: 197338 - RNA, 21 nt, Human
uuacuggcagcagaaaccuga

SEQ ID NO: 197339 - RNA, 22 nt, Human
ugagugcuaagaauaaucugca

SEQ ID NO: 197340 - RNA, 22 nt, Human
uccagccccgaggccggcgacg

SEQ ID NO: 197341 - RNA, 22 nt, Human
uacuuaaauaauugcugcuauu

SEQ ID NO: 197342 - RNA, 22 nt, Human
ugaggccuuuucugucuggcua

SEQ ID NO: 197343 - RNA, 22 nt, Human
aauugcuuuaguuaccauagug

SEQ ID NO: 197344 - RNA, 22 nt, Human
uucuggaaaagaaaguuaagau

SEQ ID NO: 197345 - RNA, 22 nt, Human
ucuucccagcugcugcgaugcc

SEQ ID NO: 197346 - RNA, 22 nt, Human
ugcuuucagauaucuguuucaa

SEQ ID NO: 197347 - RNA, 22 nt, Human
uugccauuuauacugcaaguca

SEQ ID NO: 197348 - RNA, 22 nt, Human
guuugcuaauuuaaagcuauuu

SEQ ID NO: 197349 - RNA, 22 nt, Human
cuugccuucagugucccuuugc

SEQ ID NO: 197350 - RNA, 22 nt, Human
ugagcaggauucgccucuugca

SEQ ID NO: 197351 - RNA, 22 nt, Human
uagucagagucuucucuguugu

SEQ ID NO: 197352 - RNA, 22 nt, Human
cucacagcagccagucugccuu

SEQ ID NO: 197353 - RNA, 18 nt, Human
acaggcuauugcaggaga

SEQ ID NO: 197354 - RNA, 22 nt, Human
cuaggaaaugaauacaguacac

SEQ ID NO: 197355 - RNA, 20 nt, Human
cccugagacgacugagcucc

SEQ ID NO: 197356 - RNA, 22 nt, Human
gcaaacaugcugagaaauaaga

SEQ ID NO: 197357 - RNA, 20 nt, Human
gcaauauaugagugcaauaa

SEQ ID NO: 197358 - RNA, 22 nt, Human
cuccagguuuuacaaggucuau

SEQ ID NO: 197359 - RNA, 22 nt, Human
gucuucuuuucagucugcuugu

SEQ ID NO: 197360 - RNA, 22 nt, Human
aagauuuaccacuuuauucaag

SEQ ID NO: 197361 - RNA, 22 nt, Human
ugcauucaauacaguaagaaua

SEQ ID NO: 197362 - RNA, 22 nt, Human
gauguuaagaaggaauugaagu

SEQ ID NO: 197363 - RNA, 22 nt, Human
gagugcugcuaaugcaagggug

SEQ ID NO: 197364 - RNA, 22 nt, Human
uuccauacgacugaggucucgg

SEQ ID NO: 197365 - RNA, 22 nt, Human
uaguacaguuccaucaaagcag

SEQ ID NO: 197366 - RNA, 22 nt, Human
uccaggcuugagaccaggcucu

SEQ ID NO: 197367 - RNA, 22 nt, Human
ucaggcuguagggccccuggag

SEQ ID NO: 197368 - RNA, 22 nt, Human
cuguggcuuucucugccuccuu

SEQ ID NO: 197369 - RNA, 22 nt, Human
agcauugucuccaagcaggucu

SEQ ID NO: 197370 - RNA, 22 nt, Human
ugaugagguggauucaaagcag

SEQ ID NO: 197371 - RNA, 22 nt, Human
ucccagagguugagucacuuau

SEQ ID NO: 197372 - RNA, 22 nt, Human
cagaauucgaaugagcagaauc

SEQ ID NO: 197373 - RNA, 22 nt, Human
gaagcagcuuucuggugaggag

SEQ ID NO: 197374 - RNA, 22 nt, Human
ugcccagcacugugccagucac

SEQ ID NO: 197375 - RNA, 20 nt, Human
aggggucuagcagcagugcu

SEQ ID NO: 197376 - RNA, 22 nt, Human
augguuuacuucauccaaucua

SEQ ID NO: 197377 - RNA, 22 nt, Human
cucccagggucuaggcugcugg

SEQ ID NO: 197378 - RNA, 22 nt, Human
acugaggagaaauuugagugaa

SEQ ID NO: 197379 - RNA, 22 nt, Human
caggcccaugagggcagccaca

SEQ ID NO: 197380 - RNA, 22 nt, Human
aaauuucaagcaaaguagcuau

SEQ ID NO: 197381 - RNA, 22 nt, Human
aauuuguuacacagcaauauaa

SEQ ID NO: 197382 - RNA, 22 nt, Human
aagcauuuuguuuuaagaauga

SEQ ID NO: 197383 - RNA, 22 nt, Human
ccaggcugggcggggaaccugg

SEQ ID NO: 197384 - RNA, 22 nt, Human
uccaggacuagcauuucugaua

SEQ ID NO: 197385 - RNA, 22 nt, Human
guguugacacagccaucuuguc

SEQ ID NO: 197386 - RNA, 22 nt, Human
cugggcaggagggcucuaugga

SEQ ID NO: 197387 - RNA, 21 nt, Human
accaucuuccaugcauuauau

SEQ ID NO: 197388 - RNA, 22 nt, Human
uucauucuuugaaucugaggua

SEQ ID NO: 197389 - RNA, 22 nt, Human
agggggaggcugugcugcgucu

SEQ ID NO: 197390 - RNA, 21 nt, Human
uucucuggcuucuguagcugg

SEQ ID NO: 197391 - RNA, 22 nt, Human
gcccuguuuugaaacuugcaua

SEQ ID NO: 197392 - RNA, 21 nt, Human
uucauucauggcauaauauag

SEQ ID NO: 197393 - RNA, 23 nt, Human
ucccugggcccgugccagcggug

SEQ ID NO: 197394 - RNA, 22 nt, Human
ucaggcuuuucuucccucagug

SEQ ID NO: 197395 - RNA, 22 nt, Human
uccagggaagagcagaggcuac

SEQ ID NO: 197396 - RNA, 22 nt, Human
auucacuagguugcaaaacugu

SEQ ID NO: 197397 - RNA, 22 nt, Human
ucacuugacuuuccagucuugg

SEQ ID NO: 197398 - RNA, 22 nt, Human
uucauauauaugcacuacguac

SEQ ID NO: 197399 - RNA, 22 nt, Human
guucucucagcgauagugaugg

SEQ ID NO: 197400 - RNA, 22 nt, Human
aaguacuguaucacuuacuccu

SEQ ID NO: 197401 - RNA, 22 nt, Human
ucagccucucugaguccagacc

SEQ ID NO: 197402 - RNA, 22 nt, Human
gcaggcagagucaauuugaucc

SEQ ID NO: 197403 - RNA, 22 nt, Human
cuucaguuagccaauucagguc

SEQ ID NO: 197404 - RNA, 22 nt, Human
ucuguggcaugaggaaauaggc

SEQ ID NO: 197405 - RNA, 22 nt, Human
ucaaaacaacacucagguguaa

SEQ ID NO: 197406 - RNA, 22 nt, Human
cagcuucucgggagcgcaugug

SEQ ID NO: 197407 - RNA, 22 nt, Human
acauauauuacuaguaaagaca

SEQ ID NO: 197408 - RNA, 22 nt, Human
uaagaaacauuuuuaugacagu

SEQ ID NO: 197409 - RNA, 22 nt, Human
ugggcuggcguggagaguuuag

SEQ ID NO: 197410 - RNA, 22 nt, Human
ggaggccaggugggagucaucu

SEQ ID NO: 197411 - RNA, 22 nt, Human
acugccuguagcccugagaugu

SEQ ID NO: 197412 - RNA, 22 nt, Human
ucaaucaaugugucaguuccca

SEQ ID NO: 197413 - RNA, 22 nt, Human
gggagugguugauggugaaaau

SEQ ID NO: 197414 - RNA, 22 nt, Human
cugaggaguuggugaauaagcc

SEQ ID NO: 197415 - RNA, 22 nt, Human
gaggcuggaauauuagaaaugu

SEQ ID NO: 197416 - RNA, 22 nt, Human
uauuuagcuggagucagugcuu

SEQ ID NO: 197417 - RNA, 23 nt, Human
gcugacugugaaauucuggagcu

SEQ ID NO: 197418 - RNA, 22 nt, Human
caggcccagugaucagggcucu

SEQ ID NO: 197419 - RNA, 22 nt, Human
gaggccuggugcuguguccaca

SEQ ID NO: 197420 - RNA, 22 nt, Human
caaggcuacccuuucaccaaaa

SEQ ID NO: 197421 - RNA, 22 nt, Human
acacugaauguuuaagaacuug

SEQ ID NO: 197422 - RNA, 22 nt, Human
cccugccccaggcggcuucacu

SEQ ID NO: 197423 - RNA, 21 nt, Human
gcagugucaugguuucaaguu

SEQ ID NO: 197424 - RNA, 22 nt, Human
ggacaaaaaucagccaucucua

SEQ ID NO: 197425 - RNA, 22 nt, Human
gaggcugauucggggaacagca

SEQ ID NO: 197426 - RNA, 19 nt, Human
ugccuuggcugccaggaaa

SEQ ID NO: 197427 - RNA, 22 nt, Human
agggaugacucuuggcugauuc

SEQ ID NO: 197428 - RNA, 22 nt, Human
acacaguguccuucuacuugcc

SEQ ID NO: 197429 - RNA, 21 nt, Human
ugggaccuagcuuugcacagg

SEQ ID NO: 197430 - RNA, 22 nt, Human
gcauacaaagguuuacaacuga

SEQ ID NO: 197431 - RNA, 22 nt, Human
ggacagcauucuacuguaggca

SEQ ID NO: 197432 - RNA, 22 nt, Human
uaggaacuagacucaugacuca

SEQ ID NO: 197433 - RNA, 22 nt, Human
ugcagggauuagaggccgggga

SEQ ID NO: 197434 - RNA, 22 nt, Human
uacacaucuggugugacugcca

SEQ ID NO: 197435 - RNA, 22 nt, Human
ccagagggccuuuggaguuauc

SEQ ID NO: 197436 - RNA, 22 nt, Human
aagcagccaccucaucuccacu

SEQ ID NO: 197437 - RNA, 22 nt, Human
gacacagagcucacagucuccu

SEQ ID NO: 197438 - RNA, 22 nt, Human
gaggccuguagucauggaugua

SEQ ID NO: 197439 - RNA, 22 nt, Human
ccuagagcucugcuuuaucuaa

SEQ ID NO: 197440 - RNA, 22 nt, Human
agcaggagcccuuaucaccagg

SEQ ID NO: 197441 - RNA, 22 nt, Human
aauucagauggaagauucuggc

SEQ ID NO: 197442 - RNA, 22 nt, Human
auauuucacguagguuguuuuc

SEQ ID NO: 197443 - RNA, 22 nt, Human
cugcuuuaaaacugauacauga

SEQ ID NO: 197444 - RNA, 22 nt, Human
caguuggaggaaugaggcugua

SEQ ID NO: 197445 - RNA, 22 nt, Human
gauggugcaggugaagugcugg

SEQ ID NO: 197446 - RNA, 22 nt, Human
uauuagguaaaggacuugcagg

SEQ ID NO: 197447 - RNA, 22 nt, Human
guccaggcucaaaagguuguua

SEQ ID NO: 197448 - RNA, 22 nt, Human
uccaaggaaguuugcacuauug

SEQ ID NO: 197449 - RNA, 22 nt, Human
uguuagaaauuauuaguaauau

SEQ ID NO: 197450 - RNA, 22 nt, Human
ugcuuggcuagcuuggcagcuc

SEQ ID NO: 197451 - RNA, 22 nt, Human
cagcaggucaugaaagaaaacc

SEQ ID NO: 197452 - RNA, 22 nt, Human
auaguacaaucaguuaauuagu

SEQ ID NO: 197453 - RNA, 22 nt, Human
uugaggagguaguacagaguau

SEQ ID NO: 197454 - RNA, 22 nt, Human
agccagugaugaagacucugga

SEQ ID NO: 197455 - RNA, 22 nt, Human
gaauagcuguaggcuagugucu

SEQ ID NO: 197456 - RNA, 22 nt, Human
ccagagcagggcagcagggcuc

SEQ ID NO: 197457 - RNA, 22 nt, Human
aauaguuugaauuuaucagaug

SEQ ID NO: 197458 - RNA, 22 nt, Human
agucacauaguguuuuggaauc

SEQ ID NO: 197459 - RNA, 22 nt, Human
auccugggcugcacccucagcc

SEQ ID NO: 197460 - RNA, 22 nt, Human
ucacagacauggugagguaaca

SEQ ID NO: 197461 - RNA, 22 nt, Human
guaggcagguggaggagugaag

SEQ ID NO: 197462 - RNA, 19 nt, Human
aggugugggggcugcagac

SEQ ID NO: 197463 - RNA, 22 nt, Human
uuuguucugaaaacucaagucc

SEQ ID NO: 197464 - RNA, 22 nt, Human
ucagagcuccuaagggcugauu

SEQ ID NO: 197465 - RNA, 22 nt, Human
cagucucugugccagauccugg

SEQ ID NO: 197466 - RNA, 22 nt, Human
gcagggugaaggucacauagaa

SEQ ID NO: 197467 - RNA, 22 nt, Human
ugcagggcauaggguccaguuu

SEQ ID NO: 197468 - RNA, 22 nt, Human
ccugaggcuuaaucugucccaa

SEQ ID NO: 197469 - RNA, 18 nt, Human
uguuuccuccuggaggcu

SEQ ID NO: 197470 - RNA, 22 nt, Human
agaguggagagaaacaacucug

SEQ ID NO: 197471 - RNA, 23 nt, Human
auagucauguaaaauauuugaag

SEQ ID NO: 197472 - RNA, 22 nt, Human
gagcaguuauuuuuagacauga

SEQ ID NO: 197473 - RNA, 22 nt, Human
ccuggcagaauauuaaagugca

SEQ ID NO: 197474 - RNA, 22 nt, Human
gagcuggucaguuucagggcca

SEQ ID NO: 197475 - RNA, 22 nt, Human
aguuccagcugugaccagaaaa

SEQ ID NO: 197476 - RNA, 22 nt, Human
gcugggcuggaaggccaaggca

SEQ ID NO: 197477 - RNA, 22 nt, Human
ccuguggcacaugcagggauuc

SEQ ID NO: 197478 - RNA, 22 nt, Human
gaauacaaacuuaaggcuuuac

SEQ ID NO: 197479 - RNA, 22 nt, Human
acugucuucaaaugaauauauu

SEQ ID NO: 197480 - RNA, 22 nt, Human
aguucuuugugaguaauacaga

SEQ ID NO: 197481 - RNA, 22 nt, Human
cagaggccaggcugccugacug

SEQ ID NO: 197482 - RNA, 22 nt, Human
guacuucuuuagucaauaugua

SEQ ID NO: 197483 - RNA, 22 nt, Human
aaacagagggccacugaggcuc

SEQ ID NO: 197484 - RNA, 22 nt, Human
aggagcugguagucucauuggg

SEQ ID NO: 197485 - RNA, 20 nt, Human
cuguuuauuagaaguggauu

SEQ ID NO: 197486 - RNA, 19 nt, Human
ccagaggacuguuaaugaa

SEQ ID NO: 197487 - RNA, 22 nt, Human
auguaacacccacuuuuauagc

SEQ ID NO: 197488 - RNA, 22 nt, Human
aggaccagaggccagagucagc

SEQ ID NO: 197489 - RNA, 22 nt, Human
cuauugcuaucauucugguggu

SEQ ID NO: 197490 - RNA, 19 nt, Human
ccagcccugucacuucuug

SEQ ID NO: 197491 - RNA, 22 nt, Human
uggcuccaucauccaugcaaga

SEQ ID NO: 197492 - RNA, 22 nt, Human
cagcugugagcagccaguugcc

SEQ ID NO: 197493 - RNA, 22 nt, Human
gugcuggggagauaggaagaga

SEQ ID NO: 197494 - RNA, 22 nt, Human
gccagggcucgcggucccucgu

SEQ ID NO: 197495 - RNA, 22 nt, Human
cugcccaggaaccagaggggca

SEQ ID NO: 197496 - RNA, 22 nt, Human
aaaaaggcuaagcaucuugugc

SEQ ID NO: 197497 - RNA, 22 nt, Human
uauuaacauuuuaugaaaauaa

SEQ ID NO: 197498 - RNA, 22 nt, Human
gagaaaccuguaaggaaggaag

SEQ ID NO: 197499 - RNA, 22 nt, Human
uugaagauuauucuauuaaaag

SEQ ID NO: 197500 - RNA, 22 nt, Human
cagccacuguggaauagccccc

SEQ ID NO: 197501 - RNA, 22 nt, Human
gaggaaugucagcacaggccuc

SEQ ID NO: 197502 - RNA, 22 nt, Human
aaggcuucuuuaguguccuaau

SEQ ID NO: 197503 - RNA, 22 nt, Human
acaggcagguccugucccagcu

SEQ ID NO: 197504 - RNA, 22 nt, Human
ggcugaggcucaugccaucuug

SEQ ID NO: 197505 - RNA, 22 nt, Human
uuuuuuggauaauaaacgaucu

SEQ ID NO: 197506 - RNA, 22 nt, Human
agcaggaaggcuuuggggguuc

SEQ ID NO: 197507 - RNA, 22 nt, Human
uggagggcaugcuguccauggg

SEQ ID NO: 197508 - RNA, 23 nt, Human
augaaacucaagccagauccaag

SEQ ID NO: 197509 - RNA, 22 nt, Human
agaauccuugacucaggcugag

SEQ ID NO: 197510 - RNA, 20 nt, Human
ugaagaggaagaggacggcc

SEQ ID NO: 197511 - RNA, 20 nt, Human
auguucuucauuuaauguuc

SEQ ID NO: 197512 - RNA, 22 nt, Human
caggaggacauacuggcucaca

SEQ ID NO: 197513 - RNA, 22 nt, Human
caaggcuuaucagccaggagcc

SEQ ID NO: 197514 - RNA, 22 nt, Human
augcaacagaaaauugccuggg

SEQ ID NO: 197515 - RNA, 22 nt, Human
uacuuuggggacaauauggaau

SEQ ID NO: 197516 - RNA, 22 nt, Human
uacagacauuuacuccacuccu

SEQ ID NO: 197517 - RNA, 22 nt, Human
ucaugaacaucucaaauaacca

SEQ ID NO: 197518 - RNA, 22 nt, Human
gcccaagguauaucagagacag

SEQ ID NO: 197519 - RNA, 22 nt, Human
auacagguaauuugaauaauag

SEQ ID NO: 197520 - RNA, 22 nt, Human
ccuuggcuaggcagcggcuguc

SEQ ID NO: 197521 - RNA, 22 nt, Human
cuuuagaauuugauauaaucaa

SEQ ID NO: 197522 - RNA, 22 nt, Human
caaagggcggcugucggagggu

SEQ ID NO: 197523 - RNA, 21 nt, Human
ugggauagaaauauggcugcu

SEQ ID NO: 197524 - RNA, 22 nt, Human
gagcugagccuggguggaccgc

SEQ ID NO: 197525 - RNA, 22 nt, Human
gccucugcaugcucagcaccca

SEQ ID NO: 197526 - RNA, 22 nt, Human
uggcagguggagacagcagagc

SEQ ID NO: 197527 - RNA, 20 nt, Human
uccuggccuucucgggcagu

SEQ ID NO: 197528 - RNA, 22 nt, Human
gcucagagaaauuauaggaauu

SEQ ID NO: 197529 - RNA, 22 nt, Human
uuaacaauagaguuucuucagg

SEQ ID NO: 197530 - RNA, 22 nt, Human
uagauucuuaguuucauagaau

SEQ ID NO: 197531 - RNA, 22 nt, Human
gccaagccuguagacacaagcu

SEQ ID NO: 197532 - RNA, 22 nt, Human
augguggagguguauucuggau

SEQ ID NO: 197533 - RNA, 22 nt, Human
cagauucuccaggggcugcaga

SEQ ID NO: 197534 - RNA, 22 nt, Human
agugucuuuagcaaguuuaguc

SEQ ID NO: 197535 - RNA, 22 nt, Human
cagaguguggcaucuuccaacu

SEQ ID NO: 197536 - RNA, 22 nt, Human
uaccagccugacccugucugac

SEQ ID NO: 197537 - RNA, 22 nt, Human
gggcagaggggcgcuucccucu

SEQ ID NO: 197538 - RNA, 22 nt, Human
ucugaagagucuugcaagaaag

SEQ ID NO: 197539 - RNA, 22 nt, Human
uagaaagugguugagaguuuag

SEQ ID NO: 197540 - RNA, 22 nt, Human
uggcagcuggcucugcgcaggc

SEQ ID NO: 197541 - RNA, 22 nt, Human
aagggcuggaauaucucuuaga

SEQ ID NO: 197542 - RNA, 22 nt, Human
gugauacaaauaaacauaugcu

SEQ ID NO: 197543 - RNA, 22 nt, Human
gagucugaugucccccaggcca

SEQ ID NO: 197544 - RNA, 22 nt, Human
aguguccuuaguuagcuuuggg

SEQ ID NO: 197545 - RNA, 22 nt, Human
ccuggcuccgugucacgugccc

SEQ ID NO: 197546 - RNA, 22 nt, Human
gagcagcucgagaaggaagcag

SEQ ID NO: 197547 - RNA, 22 nt, Human
agggcucccgcgguguccggga

SEQ ID NO: 197548 - RNA, 22 nt, Human
uugcagggaccugcagaaagcu

SEQ ID NO: 197549 - RNA, 22 nt, Human
uuuguacaccuaccuaauacag

SEQ ID NO: 197550 - RNA, 20 nt, Human
uucaaagacccucaggucca

SEQ ID NO: 197551 - RNA, 22 nt, Human
gacuguggucuguucuccaggu

SEQ ID NO: 197552 - RNA, 22 nt, Human
gggcacuguguucagagugcag

SEQ ID NO: 197553 - RNA, 19 nt, Human
aguguccuagucauuugcc

SEQ ID NO: 197554 - RNA, 22 nt, Human
guccucuguuagaaaugugcuu

SEQ ID NO: 197555 - RNA, 23 nt, Human
ccaaaagcgagucuguuguuccc

SEQ ID NO: 197556 - RNA, 22 nt, Human
cauccauaugaggcacauuggu

SEQ ID NO: 197557 - RNA, 22 nt, Human
uggcuuccaaauuaucccuaga

SEQ ID NO: 197558 - RNA, 22 nt, Human
ccaggguggggcaggcccacug

SEQ ID NO: 197559 - RNA, 22 nt, Human
ucccugcccucagugcacccgg

SEQ ID NO: 197560 - RNA, 22 nt, Human
ugagcucucagggacagacuau

SEQ ID NO: 197561 - RNA, 22 nt, Human
caggaaauuuauguucuacuua

SEQ ID NO: 197562 - RNA, 22 nt, Human
uuauagcagcaugauuuauagu

SEQ ID NO: 197563 - RNA, 22 nt, Human
acugccuugauugccaguuucc

SEQ ID NO: 197564 - RNA, 22 nt, Human
uaaaagaucacuggcugcuuua

SEQ ID NO: 197565 - RNA, 21 nt, Human
ucuguucaaggaacuacggau

SEQ ID NO: 197566 - RNA, 22 nt, Human
cugggccacaagccugugugau

SEQ ID NO: 197567 - RNA, 23 nt, Human
aggagccaugaguuggauauguu

SEQ ID NO: 197568 - RNA, 23 nt, Human
uggaaucagccuuuuuuccaagg

SEQ ID NO: 197569 - RNA, 22 nt, Human
uucuagacaaauguguucauuc

SEQ ID NO: 197570 - RNA, 20 nt, Human
ugugagcagaugcugaguga

SEQ ID NO: 197571 - RNA, 22 nt, Human
caauuacuuuugcaccaauaua

SEQ ID NO: 197572 - RNA, 22 nt, Human
ggagcagccgcgucucagggca

SEQ ID NO: 197573 - RNA, 22 nt, Human
guguuacucaagagauagcuuu

SEQ ID NO: 197574 - RNA, 18 nt, Human
gggcuaggcaaggaccac

SEQ ID NO: 197575 - RNA, 22 nt, Human
guaaacaucgacccaacagggg

SEQ ID NO: 197576 - RNA, 23 nt, Human
acagagacugccaagauauucuc

SEQ ID NO: 197577 - RNA, 22 nt, Human
acagguggcauaggcaguuuga

SEQ ID NO: 197578 - RNA, 22 nt, Human
gagccaccuucaacucaggaau

SEQ ID NO: 197579 - RNA, 22 nt, Human
ggcuuugccuggaauuuccuug

SEQ ID NO: 197580 - RNA, 22 nt, Human
ggagcugggacccugucaucug

SEQ ID NO: 197581 - RNA, 22 nt, Human
ggacaaaauccaaacuucuuag

SEQ ID NO: 197582 - RNA, 22 nt, Human
gggaugagagcugggacagaag

SEQ ID NO: 197583 - RNA, 22 nt, Human
acuccagggguugcuauuuaca

SEQ ID NO: 197584 - RNA, 22 nt, Human
ggagaugcgacucgcggggcug

SEQ ID NO: 197585 - RNA, 22 nt, Human
cgaggcagacaaaaguuggaag

SEQ ID NO: 197586 - RNA, 22 nt, Human
uccaggucccagacugggcagc

SEQ ID NO: 197587 - RNA, 21 nt, Human
guucuguugacugugggcauc

SEQ ID NO: 197588 - RNA, 22 nt, Human
acaccagggauaugaggaagga

SEQ ID NO: 197589 - RNA, 22 nt, Human
ccauuugugguuuauuugcucu

SEQ ID NO: 197590 - RNA, 22 nt, Human
guguacaguaagugaaucuagg

SEQ ID NO: 197591 - RNA, 22 nt, Human
cugaggcaguuuaauuuuugaa

SEQ ID NO: 197592 - RNA, 22 nt, Human
uaccauuuugaggauggagaga

SEQ ID NO: 197593 - RNA, 21 nt, Human
uaugugucuguggaaaacuag

SEQ ID NO: 197594 - RNA, 22 nt, Human
agugaaggaaacaauugguuga

SEQ ID NO: 197595 - RNA, 22 nt, Human
uggcacagcccauucagagaag

SEQ ID NO: 197596 - RNA, 22 nt, Human
uuuauugggugcagugcccaca

SEQ ID NO: 197597 - RNA, 22 nt, Human
uuauagugggcccaacauggcg

SEQ ID NO: 197598 - RNA, 22 nt, Human
cugggcucaaauccuaucucca

SEQ ID NO: 197599 - RNA, 18 nt, Human
gauggaaaguguaugagu

SEQ ID NO: 197600 - RNA, 16 nt, Human
cagaguguaaacagga

SEQ ID NO: 197601 - RNA, 22 nt, Human
uccuggcauugugcagggugug

SEQ ID NO: 197602 - RNA, 22 nt, Human
agagcuguguuaagaacaggcc

SEQ ID NO: 197603 - RNA, 22 nt, Human
aauuaaaaaaggagagcuugcu

SEQ ID NO: 197604 - RNA, 22 nt, Human
guauuacaaauaaauguuacug

SEQ ID NO: 197605 - RNA, 22 nt, Human
aagggcuguagacaagauugcu

SEQ ID NO: 197606 - RNA, 22 nt, Human
gugcaaaaguaauugcaguacu

SEQ ID NO: 197607 - RNA, 21 nt, Human
ucugugcugccgucaacaucc

SEQ ID NO: 197608 - RNA, 20 nt, Human
acugacagggaacuaaggcu

SEQ ID NO: 197609 - RNA, 22 nt, Human
acucaguacaucuggaguuggc

SEQ ID NO: 197610 - RNA, 22 nt, Human
gucagagcccccagcggcgcgg

SEQ ID NO: 197611 - RNA, 22 nt, Human
aggcagcagacuguuaaucaga

SEQ ID NO: 197612 - RNA, 22 nt, Human
ugccugggagugaccaagacuc

SEQ ID NO: 197613 - RNA, 22 nt, Human
aaaguggucugcaucccuucug

SEQ ID NO: 197614 - RNA, 22 nt, Human
gggacacagagaaacuggagaa

SEQ ID NO: 197615 - RNA, 22 nt, Human
gacuccaggugcaggaggagcc

SEQ ID NO: 197616 - RNA, 22 nt, Human
aaggcugauuagacugauagcu

SEQ ID NO: 197617 - RNA, 22 nt, Human
uuacauucaauuucuagaggua

SEQ ID NO: 197618 - RNA, 22 nt, Human
gaguccuugucauaauucagug

SEQ ID NO: 197619 - RNA, 22 nt, Human
aguuaacacaaguaagauucca

SEQ ID NO: 197620 - RNA, 22 nt, Human
gggcucucgauuagacccuggg

SEQ ID NO: 197621 - RNA, 22 nt, Human
cuuggaggaaggggcucuucug

SEQ ID NO: 197622 - RNA, 22 nt, Human
ugggugcucugcuucccugcac

SEQ ID NO: 197623 - RNA, 22 nt, Human
cagaagaguagcugaacaaguu

SEQ ID NO: 197624 - RNA, 22 nt, Human
agguguggcuggggcagaggcc

SEQ ID NO: 197625 - RNA, 22 nt, Human
uguuaacauguguauuguauga

SEQ ID NO: 197626 - RNA, 22 nt, Human
caggccugaguguggaagucuu

SEQ ID NO: 197627 - RNA, 22 nt, Human
agacagcucuggguuccacacu

SEQ ID NO: 197628 - RNA, 22 nt, Human
cccuccugugccugaggccagc

SEQ ID NO: 197629 - RNA, 22 nt, Human
ucaaggcacuucaugucucagu

SEQ ID NO: 197630 - RNA, 22 nt, Human
cagauccacccuuguagugaca

SEQ ID NO: 197631 - RNA, 22 nt, Human
ggucucugacuuagagauggau

SEQ ID NO: 197632 - RNA, 22 nt, Human
gcaaaugcuaaaguguagagac

SEQ ID NO: 197633 - RNA, 22 nt, Human
ccuggcugcuuccucugccaug

SEQ ID NO: 197634 - RNA, 22 nt, Human
ccugaaaaucaagguaguuugg

SEQ ID NO: 197635 - RNA, 22 nt, Human
auggaaauacagccagagcaga

SEQ ID NO: 197636 - RNA, 22 nt, Human
gccaggcaguucaaguacacca

SEQ ID NO: 197637 - RNA, 22 nt, Human
gaacuuggaacuggggcuacug

SEQ ID NO: 197638 - RNA, 22 nt, Human
ggcugagcguggcugccguggg

SEQ ID NO: 197639 - RNA, 19 nt, Human
aggauuuauuaugugcuca

SEQ ID NO: 197640 - RNA, 22 nt, Human
cuuuacuugcuuuguuacaaaa

SEQ ID NO: 197641 - RNA, 22 nt, Human
acauuucuaguuguucaucucc

SEQ ID NO: 197642 - RNA, 22 nt, Human
aaaucccacucagaaacugcca

SEQ ID NO: 197643 - RNA, 22 nt, Human
cuuuguuaucuguaaaugguua

SEQ ID NO: 197644 - RNA, 22 nt, Human
ccagcccuuugugguucacuga

SEQ ID NO: 197645 - RNA, 21 nt, Human
uguuuuccaccuugaggcaag

SEQ ID NO: 197646 - RNA, 22 nt, Human
caggcugauaggguccaaaguu

SEQ ID NO: 197647 - RNA, 22 nt, Human
ucaggagaguguucaguggagg

SEQ ID NO: 197648 - RNA, 22 nt, Human
agaacuuaggaacaacagcuua

SEQ ID NO: 197649 - RNA, 23 nt, Human
acagcuugccaauuagccuuccg

SEQ ID NO: 197650 - RNA, 22 nt, Human
augaguaaaaccacuauuuaca

SEQ ID NO: 197651 - RNA, 22 nt, Human
uccccagggucccugcuuccau

SEQ ID NO: 197652 - RNA, 22 nt, Human
agaagccauguuuaguaggaug

SEQ ID NO: 197653 - RNA, 22 nt, Human
uccagcuugccuggucuuuugg

SEQ ID NO: 197654 - RNA, 22 nt, Human
caggcauggugagaacucagcc

SEQ ID NO: 197655 - RNA, 22 nt, Human
aauaccuuuccugccauucacu

SEQ ID NO: 197656 - RNA, 22 nt, Human
uccauauauauuagucuuccuu

SEQ ID NO: 197657 - RNA, 22 nt, Human
ugcccuguggguaucugauggc

SEQ ID NO: 197658 - RNA, 22 nt, Human
uguaaaaccaaaucaaucuagu

SEQ ID NO: 197659 - RNA, 22 nt, Human
uuugugcaagacaugcuaagag

SEQ ID NO: 197660 - RNA, 20 nt, Human
gcagcugugcauucuuagga

SEQ ID NO: 197661 - RNA, 22 nt, Human
augugguugaagaauuacaucu

SEQ ID NO: 197662 - RNA, 22 nt, Human
ucagggcacaggccuguggguu

SEQ ID NO: 197663 - RNA, 22 nt, Human
guuuucauuacugcugugauuu

SEQ ID NO: 197664 - RNA, 22 nt, Human
ucaggaggccugaguagcucua

SEQ ID NO: 197665 - RNA, 22 nt, Human
uggagagaaaaaagacaguucu

SEQ ID NO: 197666 - RNA, 22 nt, Human
acaggacaaaaaucuggauggc

SEQ ID NO: 197667 - RNA, 22 nt, Human
aauucauauggauaugcuagua

SEQ ID NO: 197668 - RNA, 22 nt, Human
uuucuagggcucuugucuucug

SEQ ID NO: 197669 - RNA, 22 nt, Human
gugggagcccucagggaggugc

SEQ ID NO: 197670 - RNA, 22 nt, Human
aggccucacacaacagaugcau

SEQ ID NO: 197671 - RNA, 22 nt, Human
gccacagggcagaugcgcagag

SEQ ID NO: 197672 - RNA, 22 nt, Human
uuauuacagucccagggaguag

SEQ ID NO: 197673 - RNA, 22 nt, Human
aggcaggggagcuggaagggua

SEQ ID NO: 197674 - RNA, 22 nt, Human
cuccagcugcuggucugagacu

SEQ ID NO: 197675 - RNA, 20 nt, Human
ugucagugccugaggcacag

SEQ ID NO: 197676 - RNA, 22 nt, Human
agugcagagaccuggucaggca

SEQ ID NO: 197677 - RNA, 22 nt, Human
aaauacacguacauguguaaaa

SEQ ID NO: 197678 - RNA, 22 nt, Human
aucuccagaauggcuuguuaau

SEQ ID NO: 197679 - RNA, 22 nt, Human
auugugaauagugccgcaguaa

SEQ ID NO: 197680 - RNA, 22 nt, Human
gaaucuuaaaucggaaucuuaa

SEQ ID NO: 197681 - RNA, 21 nt, Human
ggcugcucaccuaggucccaa

SEQ ID NO: 197682 - RNA, 22 nt, Human
cauuuacaauguacagguugug

SEQ ID NO: 197683 - RNA, 22 nt, Human
auggggggaugaaggaguccaa

SEQ ID NO: 197684 - RNA, 22 nt, Human
agucuggucuguucauggguca

SEQ ID NO: 197685 - RNA, 21 nt, Human
aacagugcuuaguagauguuc

SEQ ID NO: 197686 - RNA, 22 nt, Human
auccugggcagugugucacucu

SEQ ID NO: 197687 - RNA, 23 nt, Human
agcugcaagacucccugucugag

SEQ ID NO: 197688 - RNA, 22 nt, Human
cagcccugagagaaccaucuau

SEQ ID NO: 197689 - RNA, 22 nt, Human
caguguaagcucuagacuagaa

SEQ ID NO: 197690 - RNA, 22 nt, Human
ugcagccuuuagaaguucagau

SEQ ID NO: 197691 - RNA, 22 nt, Human
gucauaaagcuuguugcauuua

SEQ ID NO: 197692 - RNA, 22 nt, Human
auauuuuguaacuuggaauagg

SEQ ID NO: 197693 - RNA, 22 nt, Human
uggcugccuuucaccucaucuc

SEQ ID NO: 197694 - RNA, 22 nt, Human
cugggucuuuuucuuccauuga

SEQ ID NO: 197695 - RNA, 16 nt, Human
gcuguaaaaggauuca

SEQ ID NO: 197696 - RNA, 22 nt, Human
gaacuggugaagugaagggcag

SEQ ID NO: 197697 - RNA, 22 nt, Human
agaagccaagaacagacagugc

SEQ ID NO: 197698 - RNA, 22 nt, Human
auucucuguagauggcuugaga

SEQ ID NO: 197699 - RNA, 22 nt, Human
aaguuucuggaccuuaccugcu

SEQ ID NO: 197700 - RNA, 20 nt, Human
uagagagaggauauuaaagu

SEQ ID NO: 197701 - RNA, 22 nt, Human
uuccuggggggauagauuucac

SEQ ID NO: 197702 - RNA, 22 nt, Human
aacacuggaagggacaucaagu

SEQ ID NO: 197703 - RNA, 22 nt, Human
ucuuuuuuuccugugcagagcu

SEQ ID NO: 197704 - RNA, 21 nt, Human
uccuuccuugagguccuuucc

SEQ ID NO: 197705 - RNA, 22 nt, Human
uucacagugugaucuaugggca

SEQ ID NO: 197706 - RNA, 22 nt, Human
aauuagaguagagccuaagaau

SEQ ID NO: 197707 - RNA, 22 nt, Human
agcagcuggguccggcggagca

SEQ ID NO: 197708 - RNA, 17 nt, Human
cauccgugagcucggca

SEQ ID NO: 197709 - RNA, 22 nt, Human
cucccuggcuuuguccugaggc

SEQ ID NO: 197710 - RNA, 22 nt, Human
uugcuauuuugagagucauagu

SEQ ID NO: 197711 - RNA, 22 nt, Human
aaauguuuugcucccauguggu

SEQ ID NO: 197712 - RNA, 22 nt, Human
aucauuuuauggcugagaggac

SEQ ID NO: 197713 - RNA, 22 nt, Human
augacaaaaugaaugcagcuag

SEQ ID NO: 197714 - RNA, 22 nt, Human
auauaguuggguuucauucuac

SEQ ID NO: 197715 - RNA, 22 nt, Human
gcugggacggcucaguaagaag

SEQ ID NO: 197716 - RNA, 22 nt, Human
ccuuagaucaggcugucuaggg

SEQ ID NO: 197717 - RNA, 22 nt, Human
agacaggaugcauacucuuggu

SEQ ID NO: 197718 - RNA, 22 nt, Human
ccugagcaucagcgccuccuua

SEQ ID NO: 197719 - RNA, 22 nt, Human
uuucccagagguaugaauaagu

SEQ ID NO: 197720 - RNA, 22 nt, Human
cagcccagaacucacgucucca

SEQ ID NO: 197721 - RNA, 22 nt, Human
gggcagagaaauggacaguugg

SEQ ID NO: 197722 - RNA, 22 nt, Human
ucacaucacaugagugcaagga

SEQ ID NO: 197723 - RNA, 22 nt, Human
ggccaggcacugugugagauau

SEQ ID NO: 197724 - RNA, 22 nt, Human
ugaaagcacucacuucugcucu

SEQ ID NO: 197725 - RNA, 22 nt, Human
gacagacaggaggccaccugcu

SEQ ID NO: 197726 - RNA, 22 nt, Human
accacaucgggcggacacuggg

SEQ ID NO: 197727 - RNA, 18 nt, Human
gagacacaagggccugga

SEQ ID NO: 197728 - RNA, 22 nt, Human
gugcagaggacguggcggccuc

SEQ ID NO: 197729 - RNA, 22 nt, Human
uggcccugucugcacacaggau

SEQ ID NO: 197730 - RNA, 22 nt, Human
ggcucccacccauagggcgagu

SEQ ID NO: 197731 - RNA, 18 nt, Human
uagggcucuagggaguga

SEQ ID NO: 197732 - RNA, 22 nt, Human
acaaugcaccagcaucuucacc

SEQ ID NO: 197733 - RNA, 22 nt, Human
aguuuauuuuugauaagucuug

SEQ ID NO: 197734 - RNA, 22 nt, Human
ccaggccugauugggaaucuug

SEQ ID NO: 197735 - RNA, 22 nt, Human
ucaggaaggcgccccaucagga

SEQ ID NO: 197736 - RNA, 22 nt, Human
aguggcagagcugugucuugaa

SEQ ID NO: 197737 - RNA, 23 nt, Human
ugcaggugugcagagggcucuug

SEQ ID NO: 197738 - RNA, 22 nt, Human
gggaaacuguccaguucucccc

SEQ ID NO: 197739 - RNA, 22 nt, Human
aagcauaaaacguuacaacaug

SEQ ID NO: 197740 - RNA, 22 nt, Human
auuccacuccaauaagugucaa

SEQ ID NO: 197741 - RNA, 22 nt, Human
cccacaggcaggugcaugggcu

SEQ ID NO: 197742 - RNA, 22 nt, Human
aggguagggcccggagacagac

SEQ ID NO: 197743 - RNA, 22 nt, Human
gcacagagacaguccugagauc

SEQ ID NO: 197744 - RNA, 22 nt, Human
ugguuguauaaugucacuaagc

SEQ ID NO: 197745 - RNA, 22 nt, Human
cagcaugguuggguucugggga

SEQ ID NO: 197746 - RNA, 22 nt, Human
caccaucagcagcaggugucaa

SEQ ID NO: 197747 - RNA, 22 nt, Human
ugagccagccucagaagucacg

SEQ ID NO: 197748 - RNA, 22 nt, Human
uauuaugcauaggcaauaaugg

SEQ ID NO: 197749 - RNA, 22 nt, Human
cacagguaauagccuaggcuau

SEQ ID NO: 197750 - RNA, 22 nt, Human
uuuacagcaacagugcagaggu

SEQ ID NO: 197751 - RNA, 22 nt, Human
ucuucagagcauuucugaggua

SEQ ID NO: 197752 - RNA, 22 nt, Human
uggcuucugcuuucaguggagg

SEQ ID NO: 197753 - RNA, 22 nt, Human
ucucacagugagccugaggucg

SEQ ID NO: 197754 - RNA, 22 nt, Human
gcugucuuuccccugcuccaga

SEQ ID NO: 197755 - RNA, 22 nt, Human
aggcuggaguguagcagugcag

SEQ ID NO: 197756 - RNA, 21 nt, Human
ugucauauuucaauacaguuu

SEQ ID NO: 197757 - RNA, 17 nt, Human
uccuggcucugccacug

SEQ ID NO: 197758 - RNA, 22 nt, Human
uuacacuaugaaugagaauaua

SEQ ID NO: 197759 - RNA, 22 nt, Human
acaguaccaggccaaaccauga

SEQ ID NO: 197760 - RNA, 22 nt, Human
uagcccucagcuuggagcgugg

SEQ ID NO: 197761 - RNA, 22 nt, Human
aagaacaugauggccaugugca

SEQ ID NO: 197762 - RNA, 20 nt, Human
gccucagaggguuugaguuu

SEQ ID NO: 197763 - RNA, 20 nt, Human
uggcaggagccacuggaagc

SEQ ID NO: 197764 - RNA, 22 nt, Human
ccuggccaggcuccaaguacug

SEQ ID NO: 197765 - RNA, 22 nt, Human
gccagccccuccauccuguuca

SEQ ID NO: 197766 - RNA, 22 nt, Human
ucaggaugguguggaggaaaua

SEQ ID NO: 197767 - RNA, 22 nt, Human
cagggaugcugcuuaggcaguu

SEQ ID NO: 197768 - RNA, 22 nt, Human
ccagcuuuauagcuucaaagga

SEQ ID NO: 197769 - RNA, 22 nt, Human
uacaaacucuuuauauuucaua

SEQ ID NO: 197770 - RNA, 22 nt, Human
uuauauguuucuguuuggaggc

SEQ ID NO: 197771 - RNA, 22 nt, Human
ucugagcucuaucugugggaau

SEQ ID NO: 197772 - RNA, 22 nt, Human
caccagcagaagacugagggug

SEQ ID NO: 197773 - RNA, 22 nt, Human
uaagacacauugagaaacacaa

SEQ ID NO: 197774 - RNA, 22 nt, Human
aggauaacuauaggauaaugcu

SEQ ID NO: 197775 - RNA, 22 nt, Human
caacuuggcucucuggcuaucc

SEQ ID NO: 197776 - RNA, 22 nt, Human
acagauguuagcaaugaugaug

SEQ ID NO: 197777 - RNA, 22 nt, Human
guguuuuauuggugcagucaga

SEQ ID NO: 197778 - RNA, 22 nt, Human
gaagccaguacugugcucugca

SEQ ID NO: 197779 - RNA, 22 nt, Human
cugugucugccugggauccauu

SEQ ID NO: 197780 - RNA, 22 nt, Human
gucuacuuuugucaucauugca

SEQ ID NO: 197781 - RNA, 22 nt, Human
uucaggaaaugucugccuacca

SEQ ID NO: 197782 - RNA, 22 nt, Human
gcuucaugggugugcaaccugu

SEQ ID NO: 197783 - RNA, 23 nt, Human
uaggccagggugaccuggggaga

SEQ ID NO: 197784 - RNA, 22 nt, Human
ggcuccuguccccucagcugcu

SEQ ID NO: 197785 - RNA, 22 nt, Human
uucugggcccaacccuagagug

SEQ ID NO: 197786 - RNA, 22 nt, Human
gccaggcaauguguuagaagcg

SEQ ID NO: 197787 - RNA, 22 nt, Human
cucucugguuucagcgaagggg

SEQ ID NO: 197788 - RNA, 15 nt, Human
uugcuuuaagacaug

SEQ ID NO: 197789 - RNA, 22 nt, Human
aaucuugaguaucagaccaaga

SEQ ID NO: 197790 - RNA, 22 nt, Human
auggcagcggagcuggaaauga

SEQ ID NO: 197791 - RNA, 22 nt, Human
ugaggugacaauucauucucca

SEQ ID NO: 197792 - RNA, 19 nt, Human
ugugaccccagacaagcug

SEQ ID NO: 197793 - RNA, 22 nt, Human
uagaaacucaggauacucuucc

SEQ ID NO: 197794 - RNA, 22 nt, Human
ggguccagauggugagaguuaa

SEQ ID NO: 197795 - RNA, 22 nt, Human
aguaaaacagagaaaucacuca

SEQ ID NO: 197796 - RNA, 20 nt, Human
uaggaaauauguuuuuaccc

SEQ ID NO: 197797 - RNA, 22 nt, Human
ucuucuguggcucucaccaccc

SEQ ID NO: 197798 - RNA, 23 nt, Human
uuccagaguccacaucugccacc

SEQ ID NO: 197799 - RNA, 20 nt, Human
acuagaaagucacugggggg

SEQ ID NO: 197800 - RNA, 22 nt, Human
ucugugaacaucacauugacag

SEQ ID NO: 197801 - RNA, 22 nt, Human
cagcaaagguagaagcacagga

SEQ ID NO: 197802 - RNA, 22 nt, Human
gcuuuagaucugacuuucugug

SEQ ID NO: 197803 - RNA, 22 nt, Human
gcuuuggucagguguccagccc

SEQ ID NO: 197804 - RNA, 22 nt, Human
uuucucaacagaguaugcccuu

SEQ ID NO: 197805 - RNA, 22 nt, Human
auaaauagugugucauaaaguc

SEQ ID NO: 197806 - RNA, 22 nt, Human
ucuuagauguuagcucugugug

SEQ ID NO: 197807 - RNA, 22 nt, Human
augacacucgaaaaauugaugc

SEQ ID NO: 197808 - RNA, 22 nt, Human
uaaagacauaggaucagggaga

SEQ ID NO: 197809 - RNA, 22 nt, Human
uugcagggaaauagaaauaaac

SEQ ID NO: 197810 - RNA, 22 nt, Human
uauagaagagacaugugcauag

SEQ ID NO: 197811 - RNA, 22 nt, Human
ugaagccacacuagcuuguccu

SEQ ID NO: 197812 - RNA, 22 nt, Human
ccaaaaagcucagagauauguu

SEQ ID NO: 197813 - RNA, 22 nt, Human
auguaaauuguacugacacacg

SEQ ID NO: 197814 - RNA, 22 nt, Human
uuacuguacuagugagacuagg

SEQ ID NO: 197815 - RNA, 22 nt, Human
gcuggcagguaaagccccgggg

SEQ ID NO: 197816 - RNA, 22 nt, Human
auaguuuucuaugcacuguuau

SEQ ID NO: 197817 - RNA, 22 nt, Human
ucucugugaauggcgucaccug

SEQ ID NO: 197818 - RNA, 22 nt, Human
uagagcaguggguaccauggca

SEQ ID NO: 197819 - RNA, 22 nt, Human
agaccaagugcaggugccacua

SEQ ID NO: 197820 - RNA, 20 nt, Human
ugaaggccauuuguuccaga

SEQ ID NO: 197821 - RNA, 22 nt, Human
uucugugacuccucagagauuu

SEQ ID NO: 197822 - RNA, 22 nt, Human
uuggcuucccagagcuuacgcu

SEQ ID NO: 197823 - RNA, 22 nt, Human
cuggcaggaagaggaaagguca

SEQ ID NO: 197824 - RNA, 22 nt, Human
aggcaggcaaguucauaugagg

SEQ ID NO: 197825 - RNA, 22 nt, Human
ucauggcuggaagcucaguuag

SEQ ID NO: 197826 - RNA, 22 nt, Human
cucucagacacccauuuggaaa

SEQ ID NO: 197827 - RNA, 22 nt, Human
aacaaucaaguuucuaaaugac

SEQ ID NO: 197828 - RNA, 22 nt, Human
ucauggcacuuagcacaguccu

SEQ ID NO: 197829 - RNA, 22 nt, Human
gcucccugcacucugcagcccu

SEQ ID NO: 197830 - RNA, 22 nt, Human
guucuauuacucccugcuucuu

SEQ ID NO: 197831 - RNA, 22 nt, Human
uggagagugguuugggggacau

SEQ ID NO: 197832 - RNA, 22 nt, Human
ucaggaagucucaauuagcuac

SEQ ID NO: 197833 - RNA, 22 nt, Human
agagccuggacuuuucugagcc

SEQ ID NO: 197834 - RNA, 22 nt, Human
ugcaaauaagcuauuauggaau

SEQ ID NO: 197835 - RNA, 22 nt, Human
acccagcaugacaccugcacau

SEQ ID NO: 197836 - RNA, 22 nt, Human
ugggaaccauguagcugagaug

SEQ ID NO: 197837 - RNA, 20 nt, Human
uccagggcaaacucaucacc

SEQ ID NO: 197838 - RNA, 22 nt, Human
uuauagaaugguggauuuucug

SEQ ID NO: 197839 - RNA, 22 nt, Human
gggcacagucuaaaguugggcc

SEQ ID NO: 197840 - RNA, 21 nt, Human
ucucugugucuuuaagcugga

SEQ ID NO: 197841 - RNA, 22 nt, Human
gcugacaaacaaggugguguca

SEQ ID NO: 197842 - RNA, 22 nt, Human
ccaaaggccaggcacugagguu

SEQ ID NO: 197843 - RNA, 22 nt, Human
uagcaaacucauacaugugggu

SEQ ID NO: 197844 - RNA, 22 nt, Human
uaacugccuacugugcaaauau

SEQ ID NO: 197845 - RNA, 20 nt, Human
uuccaacucacaucucuaca

SEQ ID NO: 197846 - RNA, 22 nt, Human
agcagcugccacuggaauagga

SEQ ID NO: 197847 - RNA, 22 nt, Human
auacuaaaguauagaacuuagu

SEQ ID NO: 197848 - RNA, 19 nt, Human
cccagcuugaccaccugcu

SEQ ID NO: 197849 - RNA, 21 nt, Human
acagcuaagcaacaacuacug

SEQ ID NO: 197850 - RNA, 22 nt, Human
auagcaaaaggcaccagaguga

SEQ ID NO: 197851 - RNA, 22 nt, Human
aggaauguaauaguguggcuca

SEQ ID NO: 197852 - RNA, 22 nt, Human
aaaggcuuuccagcgcgcggac

SEQ ID NO: 197853 - RNA, 22 nt, Human
ugcuuugccagacaguucccuu

SEQ ID NO: 197854 - RNA, 22 nt, Human
ugcucagagcucuggugcaggu

SEQ ID NO: 197855 - RNA, 22 nt, Human
ucaccuugugaucucccugccu

SEQ ID NO: 197856 - RNA, 22 nt, Human
cccaggaugucgaggcugcagu

SEQ ID NO: 197857 - RNA, 22 nt, Human
gagaggcuggcagugccagguu

SEQ ID NO: 197858 - RNA, 22 nt, Human
gccucuagggcuguugggaauu

SEQ ID NO: 197859 - RNA, 19 nt, Human
aaggcagaaguuggauaug

SEQ ID NO: 197860 - RNA, 22 nt, Human
caggacacaggguguggcugau

SEQ ID NO: 197861 - RNA, 22 nt, Human
ugcugguaccgcgccuccgcca

SEQ ID NO: 197862 - RNA, 22 nt, Human
uucucugcagcuuaggcccagu

SEQ ID NO: 197863 - RNA, 22 nt, Human
agucauaugacccuucacaaac

SEQ ID NO: 197864 - RNA, 19 nt, Human
uccaguuuggcaggaagac

SEQ ID NO: 197865 - RNA, 22 nt, Human
ucugcuguugagcacaagugaa

SEQ ID NO: 197866 - RNA, 22 nt, Human
cagcaguggcugcaggcagcug

SEQ ID NO: 197867 - RNA, 20 nt, Human
uuccaaggucuaugcuucuu

SEQ ID NO: 197868 - RNA, 22 nt, Human
aauuuuaugccuugcacguugg

SEQ ID NO: 197869 - RNA, 22 nt, Human
ucaugcucaucauuagagugac

SEQ ID NO: 197870 - RNA, 22 nt, Human
cagagcauaauugacaugaggu

SEQ ID NO: 197871 - RNA, 22 nt, Human
gcccucagugaccacugauuca

SEQ ID NO: 197872 - RNA, 23 nt, Human
uuugaaaguaucaacucgccuga

SEQ ID NO: 197873 - RNA, 22 nt, Human
ggcagagacuggguuggcagag

SEQ ID NO: 197874 - RNA, 21 nt, Human
agaguuacugucauccuaggu

SEQ ID NO: 197875 - RNA, 22 nt, Human
uggaggaauaacagcaaccuua

SEQ ID NO: 197876 - RNA, 22 nt, Human
caaggacacugauguucauccu

SEQ ID NO: 197877 - RNA, 22 nt, Human
gauugcugggucccacucccag

SEQ ID NO: 197878 - RNA, 22 nt, Human
ucagagucuaaauagaagaaua

SEQ ID NO: 197879 - RNA, 19 nt, Human
gcucugagaggggcauggg

SEQ ID NO: 197880 - RNA, 22 nt, Human
gaagggugcauggagggaaguc

SEQ ID NO: 197881 - RNA, 22 nt, Human
cuuucccacgcaguggaugaga

SEQ ID NO: 197882 - RNA, 21 nt, Human
uccuggcuuuaugcuaccucu

SEQ ID NO: 197883 - RNA, 20 nt, Human
agcaguguggggagacugug

SEQ ID NO: 197884 - RNA, 22 nt, Human
ugucuccauagaguagcuugau

SEQ ID NO: 197885 - RNA, 22 nt, Human
agcuguuuuugucugcugaucc

SEQ ID NO: 197886 - RNA, 22 nt, Human
uuccuggcucacagcagugggg

SEQ ID NO: 197887 - RNA, 21 nt, Human
auucucugugaugggauuagg

SEQ ID NO: 197888 - RNA, 22 nt, Human
ggucuggccuggcauucuaugg

SEQ ID NO: 197889 - RNA, 22 nt, Human
caugaaggcugccagcaggcau

SEQ ID NO: 197890 - RNA, 22 nt, Human
ggcugccagcacugguguagag

SEQ ID NO: 197891 - RNA, 22 nt, Human
uagcccagagagccaggggcuu

SEQ ID NO: 197892 - RNA, 18 nt, Human
gcugggguugagcucucc

SEQ ID NO: 197893 - RNA, 22 nt, Human
caguuaaaaugugcuauaagaa

SEQ ID NO: 197894 - RNA, 22 nt, Human
ucugaaggucugagaaccagga

SEQ ID NO: 197895 - RNA, 22 nt, Human
cuccuuccugcagaucugagau

SEQ ID NO: 197896 - RNA, 23 nt, Human
gcagauggccccagagugcugcc

SEQ ID NO: 197897 - RNA, 22 nt, Human
uacacuuuucaauguagucugu

SEQ ID NO: 197898 - RNA, 22 nt, Human
cuggcuuucugaacaucaguga

SEQ ID NO: 197899 - RNA, 22 nt, Human
gugugggaaggcuaggaugcug

SEQ ID NO: 197900 - RNA, 22 nt, Human
gugcucuguggauugaguugaa

SEQ ID NO: 197901 - RNA, 22 nt, Human
gccuggcaguggggcccuggga

SEQ ID NO: 197902 - RNA, 22 nt, Human
ccugcuggcgcuugucugggag

SEQ ID NO: 197903 - RNA, 22 nt, Human
caguuaaagcugcaugugucag

SEQ ID NO: 197904 - RNA, 22 nt, Human
uucuggguuuacaucugacuuc

SEQ ID NO: 197905 - RNA, 22 nt, Human
uccccuccaacuccaacuaugg

SEQ ID NO: 197906 - RNA, 18 nt, Human
gagcugggagaaggaagg

SEQ ID NO: 197907 - RNA, 22 nt, Human
agccaugcaccuuacucuugcu

SEQ ID NO: 197908 - RNA, 22 nt, Human
agcaaaguggcuuuccaaacca

SEQ ID NO: 197909 - RNA, 22 nt, Human
ucugcacccugaccucuguuuc

SEQ ID NO: 197910 - RNA, 23 nt, Human
ucaagcaauaauugguaauagug

SEQ ID NO: 197911 - RNA, 22 nt, Human
uugggagguaauggagccaagu

SEQ ID NO: 197912 - RNA, 20 nt, Human
gcccaagcgccggccgcaga

SEQ ID NO: 197913 - RNA, 22 nt, Human
aguccaggccucccucuccugc

SEQ ID NO: 197914 - RNA, 22 nt, Human
agcugagagguggcaagcugua

SEQ ID NO: 197915 - RNA, 22 nt, Human
gcuggccugagggccgaggcuc

SEQ ID NO: 197916 - RNA, 22 nt, Human
caggcuuggcagggaggcuggu

SEQ ID NO: 197917 - RNA, 22 nt, Human
augucagagcuuccacaauagu

SEQ ID NO: 197918 - RNA, 22 nt, Human
ugcccagcacccagcaugaugc

SEQ ID NO: 197919 - RNA, 22 nt, Human
cacauaauaaauguuccugaug

SEQ ID NO: 197920 - RNA, 22 nt, Human
gaaggcuuagaaacaagggagc

SEQ ID NO: 197921 - RNA, 22 nt, Human
agcccugcccugccauguggca

SEQ ID NO: 197922 - RNA, 22 nt, Human
aggagagaauuacuggguguca

SEQ ID NO: 197923 - RNA, 22 nt, Human
cuugugcaaauccucgagcaca

SEQ ID NO: 197924 - RNA, 22 nt, Human
ucuuuggaagcuuucagagaag

SEQ ID NO: 197925 - RNA, 22 nt, Human
gguguccuuugggggcuccgag

SEQ ID NO: 197926 - RNA, 22 nt, Human
cagcugccccgcuggcugacca

SEQ ID NO: 197927 - RNA, 22 nt, Human
cucugagggcugucaggaaagg

SEQ ID NO: 197928 - RNA, 22 nt, Human
ggugggaggcaggcugcuccca

SEQ ID NO: 197929 - RNA, 23 nt, Human
ucagagaaguuguaggcugggga

SEQ ID NO: 197930 - RNA, 22 nt, Human
ugcugaaugguaaagaaguaua

SEQ ID NO: 197931 - RNA, 22 nt, Human
ccaaaguauuaaaucuuagcaa

SEQ ID NO: 197932 - RNA, 22 nt, Human
cccaggcuggagugcaauggug

SEQ ID NO: 197933 - RNA, 22 nt, Human
cucagcagcugcugcugguggg

SEQ ID NO: 197934 - RNA, 21 nt, Human
agccaagccuugggagccagg

SEQ ID NO: 197935 - RNA, 22 nt, Human
ucuguaggguaguaguggagau

SEQ ID NO: 197936 - RNA, 21 nt, Human
ccugggcugugguuuggagac

SEQ ID NO: 197937 - RNA, 22 nt, Human
agcuguaugcccaagaugcuau

SEQ ID NO: 197938 - RNA, 22 nt, Human
uggccuccccuaacagccucuu

SEQ ID NO: 197939 - RNA, 22 nt, Human
ucagggacugcagagggaagcu

SEQ ID NO: 197940 - RNA, 22 nt, Human
augucuguuuucauaucagaua

SEQ ID NO: 197941 - RNA, 22 nt, Human
uugcaguuugcuuuuaauggga

SEQ ID NO: 197942 - RNA, 22 nt, Human
ugucagugccaacuuugcuggu

SEQ ID NO: 197943 - RNA, 22 nt, Human
ugccuggauucgguuguuguca

SEQ ID NO: 197944 - RNA, 22 nt, Human
cccuuggaagguagcuggcagu

SEQ ID NO: 197945 - RNA, 22 nt, Human
ggagaagcagcuucuugaugaa

SEQ ID NO: 197946 - RNA, 22 nt, Human
agacuucuuugugagcauuuuc

SEQ ID NO: 197947 - RNA, 22 nt, Human
ugaggaaguuguuucucuucua

SEQ ID NO: 197948 - RNA, 22 nt, Human
aaagggcugucaaauaagcaac

SEQ ID NO: 197949 - RNA, 22 nt, Human
uucaacuaauguuuauuuuaug

SEQ ID NO: 197950 - RNA, 22 nt, Human
ugcugccaauuucuggucuuga

SEQ ID NO: 197951 - RNA, 22 nt, Human
uuggcugcugggaacucaaaca

SEQ ID NO: 197952 - RNA, 22 nt, Human
gaggcuccgugcugcugcccug

SEQ ID NO: 197953 - RNA, 22 nt, Human
aaacugcagccuugaguucagg

SEQ ID NO: 197954 - RNA, 22 nt, Human
uccccacacagauacagaguag

SEQ ID NO: 197955 - RNA, 22 nt, Human
auuaaaauuccaagguaugcca

SEQ ID NO: 197956 - RNA, 22 nt, Human
caguuugugcuaggcacuauuu

SEQ ID NO: 197957 - RNA, 22 nt, Human
ggcaguggaggacccugugucu

SEQ ID NO: 197958 - RNA, 22 nt, Human
ccaggcuggagugcaauggugc

SEQ ID NO: 197959 - RNA, 22 nt, Human
agcaggugucggcgagggucuu

SEQ ID NO: 197960 - RNA, 22 nt, Human
cugggaccuccucacuguucua

SEQ ID NO: 197961 - RNA, 22 nt, Human
agcugagagcugugucaagaua

SEQ ID NO: 197962 - RNA, 22 nt, Human
ucauucaucaguugguagagau

SEQ ID NO: 197963 - RNA, 22 nt, Human
ccauggccgccgcugcucagga

SEQ ID NO: 197964 - RNA, 20 nt, Human
ucuggccccuuccuguccug

SEQ ID NO: 197965 - RNA, 22 nt, Human
cugugcaagcccaagauaaaac

SEQ ID NO: 197966 - RNA, 22 nt, Human
guccacagcuggccagggccuc

SEQ ID NO: 197967 - RNA, 22 nt, Human
uguuauauaacuuacaaccugu

SEQ ID NO: 197968 - RNA, 22 nt, Human
guccuuucgagggugagugaaa

SEQ ID NO: 197969 - RNA, 22 nt, Human
caagcaggaugaagcccaggga

SEQ ID NO: 197970 - RNA, 22 nt, Human
uguuuuaaucucccauugcucu

SEQ ID NO: 197971 - RNA, 22 nt, Human
cgccaggcuugguagcucaugc

SEQ ID NO: 197972 - RNA, 22 nt, Human
uuucucugcagagccccaagga

SEQ ID NO: 197973 - RNA, 22 nt, Human
cuaaaucuagucuuuacugauu

SEQ ID NO: 197974 - RNA, 22 nt, Human
gguuucaacuaaaucaagaagg

SEQ ID NO: 197975 - RNA, 22 nt, Human
ugggaaagacucaggacaggag

SEQ ID NO: 197976 - RNA, 22 nt, Human
ccuucucugcagguaguuggcu

SEQ ID NO: 197977 - RNA, 22 nt, Human
uuuggccucguuuagaaauggc

SEQ ID NO: 197978 - RNA, 22 nt, Human
gcccuguggauuaaugagcagg

SEQ ID NO: 197979 - RNA, 22 nt, Human
agcccugagcuggccugggcuu

SEQ ID NO: 197980 - RNA, 21 nt, Human
ugacauuuggauucauaguaa

SEQ ID NO: 197981 - RNA, 20 nt, Human
aagaggugauaacaggugag

SEQ ID NO: 197982 - RNA, 22 nt, Human
gcagcaguacucaauauccugg

SEQ ID NO: 197983 - RNA, 22 nt, Human
caaagcccuggaaagaugaaga

SEQ ID NO: 197984 - RNA, 22 nt, Human
aucugccugcaguggagguggg

SEQ ID NO: 197985 - RNA, 22 nt, Human
uacaggcucuugucagacguau

SEQ ID NO: 197986 - RNA, 21 nt, Human
gcaggguccuuuccauuccua

SEQ ID NO: 197987 - RNA, 22 nt, Human
ccucagaugucuuaaggcacug

SEQ ID NO: 197988 - RNA, 22 nt, Human
ugccauacuauaaggcugucaa

SEQ ID NO: 197989 - RNA, 16 nt, Human
cuggacagaaaaaccu

SEQ ID NO: 197990 - RNA, 22 nt, Human
caugucaauaaauauaacugca

SEQ ID NO: 197991 - RNA, 20 nt, Human
acacagacucagcuuggaug

SEQ ID NO: 197992 - RNA, 22 nt, Human
gagcacagugcaguuucugcua

SEQ ID NO: 197993 - RNA, 22 nt, Human
aaauuguugaucuacaguaagg

SEQ ID NO: 197994 - RNA, 22 nt, Human
uugugcaaaggggguuaaucau

SEQ ID NO: 197995 - RNA, 22 nt, Human
uaguccaggaagguggggcaga

SEQ ID NO: 197996 - RNA, 22 nt, Human
ucucucucagccauuacagaac

SEQ ID NO: 197997 - RNA, 22 nt, Human
gacuguggccuuggaccauggg

SEQ ID NO: 197998 - RNA, 22 nt, Human
cagaggccuggcuuggacaccu

SEQ ID NO: 197999 - RNA, 22 nt, Human
gucacugccucuuaacuuuuuc

SEQ ID NO: 198000 - RNA, 22 nt, Human
ggucacauucugaggaaucagg

SEQ ID NO: 198001 - RNA, 22 nt, Human
caguggccgcggggcugugggu

SEQ ID NO: 198002 - RNA, 22 nt, Human
acugcugauuuuaggacuguua

SEQ ID NO: 198003 - RNA, 22 nt, Human
ugggaauguagaauguaaacca

SEQ ID NO: 198004 - RNA, 22 nt, Human
cuggucccugcagugugcuggg

SEQ ID NO: 198005 - RNA, 22 nt, Human
uugaaugaagggaugaccgaag

SEQ ID NO: 198006 - RNA, 22 nt, Human
agcuugaaccacaugaaauugc

SEQ ID NO: 198007 - RNA, 22 nt, Human
cauguccuucucauugccucau

SEQ ID NO: 198008 - RNA, 22 nt, Human
cuaugaaaugucagauucugca

SEQ ID NO: 198009 - RNA, 22 nt, Human
acaauguguuuuuauacauuug

SEQ ID NO: 198010 - RNA, 22 nt, Human
cauuauauuacagcacuguuaa

SEQ ID NO: 198011 - RNA, 22 nt, Human
gcagguggugggggagccguuc

SEQ ID NO: 198012 - RNA, 22 nt, Human
uacacaaaggcacucuguuguu

SEQ ID NO: 198013 - RNA, 22 nt, Human
uucuuuuggacucaaagagaac

SEQ ID NO: 198014 - RNA, 22 nt, Human
ccuggccuccuggccuucucau

SEQ ID NO: 198015 - RNA, 22 nt, Human
uggcagugggaauggacaaaca

SEQ ID NO: 198016 - RNA, 22 nt, Human
cagacuggccacaucugcacug

SEQ ID NO: 198017 - RNA, 22 nt, Human
uuagaaagguuuugcucugaaa

SEQ ID NO: 198018 - RNA, 22 nt, Human
gcagcugggccccagccucucc

SEQ ID NO: 198019 - RNA, 20 nt, Human
cugcccacuagaacuaccug

SEQ ID NO: 198020 - RNA, 22 nt, Human
gaugcugauaauucaugagaag

SEQ ID NO: 198021 - RNA, 22 nt, Human
uaagacugugagcucagagacu

SEQ ID NO: 198022 - RNA, 22 nt, Human
gaggcucaguuaugucaucagg

SEQ ID NO: 198023 - RNA, 22 nt, Human
agcuggcauacuuugcuaggaa

SEQ ID NO: 198024 - RNA, 22 nt, Human
acccugagaaagucacaugcau

SEQ ID NO: 198025 - RNA, 22 nt, Human
cugggcagcugugcaaacaaua

SEQ ID NO: 198026 - RNA, 22 nt, Human
augcacccuuaugaauaugauc

SEQ ID NO: 198027 - RNA, 22 nt, Human
aagugaccucaugguuucuccu

SEQ ID NO: 198028 - RNA, 22 nt, Human
acccaggccauuggcaagaguc

SEQ ID NO: 198029 - RNA, 21 nt, Human
ugaggcaggggugcuuuuguc

SEQ ID NO: 198030 - RNA, 22 nt, Human
gcacagaggaugaggcagcucu

SEQ ID NO: 198031 - RNA, 22 nt, Human
aauugcuuugaagaagggagcg

SEQ ID NO: 198032 - RNA, 22 nt, Human
uccagcagaaccagagaccugg

SEQ ID NO: 198033 - RNA, 22 nt, Human
cccugugcauuggaggguguuu

SEQ ID NO: 198034 - RNA, 19 nt, Human
uagguguccgccggaggug

SEQ ID NO: 198035 - RNA, 23 nt, Human
uggcugagcccacuaucuuggcc

SEQ ID NO: 198036 - RNA, 22 nt, Human
aguauuucugaauauuaucaua

SEQ ID NO: 198037 - RNA, 22 nt, Human
agaaccaugaguuugaguaucu

SEQ ID NO: 198038 - RNA, 22 nt, Human
gcugggcagcugaggccucuca

SEQ ID NO: 198039 - RNA, 22 nt, Human
aaagcuuaagguagguacagag

SEQ ID NO: 198040 - RNA, 22 nt, Human
gccugagauucccggagccgug

SEQ ID NO: 198041 - RNA, 22 nt, Human
uggcccaguauguauaaucuua

SEQ ID NO: 198042 - RNA, 22 nt, Human
ucuucagaagaucacaucagug

SEQ ID NO: 198043 - RNA, 22 nt, Human
acaugagagaaaaguauucuga

SEQ ID NO: 198044 - RNA, 22 nt, Human
gcccauggcuucccuaggcaca

SEQ ID NO: 198045 - RNA, 22 nt, Human
gucccuuccucauuccacuuua

SEQ ID NO: 198046 - RNA, 22 nt, Human
agaaguuaauuccugaaauucu

SEQ ID NO: 198047 - RNA, 22 nt, Human
uguacacaacgugcagguuugu

SEQ ID NO: 198048 - RNA, 22 nt, Human
guugcugaaauuaauauuggag

SEQ ID NO: 198049 - RNA, 22 nt, Human
ucaucacauguguagucauccc

SEQ ID NO: 198050 - RNA, 22 nt, Human
cacaguuugguuuugcuguaau

SEQ ID NO: 198051 - RNA, 22 nt, Human
ugccucugccuccauuguuagu

SEQ ID NO: 198052 - RNA, 22 nt, Human
uucacauuguuuuaaugugaau

SEQ ID NO: 198053 - RNA, 22 nt, Human
aaauccaggagaauuuccacuu

SEQ ID NO: 198054 - RNA, 22 nt, Human
aucaaagugaaaagugcugaug

SEQ ID NO: 198055 - RNA, 22 nt, Human
acgugcauauguauacacacau

SEQ ID NO: 198056 - RNA, 22 nt, Human
agaggaguauuuucuaagggaa

SEQ ID NO: 198057 - RNA, 22 nt, Human
cucucuggaagggggagcugau

SEQ ID NO: 198058 - RNA, 22 nt, Human
ggacaggugcaaagggcacaug

SEQ ID NO: 198059 - RNA, 20 nt, Human
aacuuuagacauaaucucuu

SEQ ID NO: 198060 - RNA, 22 nt, Human
ugcuggcucugggccaagcagg

SEQ ID NO: 198061 - RNA, 19 nt, Human
uucacauuuugcucugagg

SEQ ID NO: 198062 - RNA, 22 nt, Human
cugccugcaugcugccauagcu

SEQ ID NO: 198063 - RNA, 20 nt, Human
gcugaggggucuauggcaua

SEQ ID NO: 198064 - RNA, 22 nt, Human
gcuggccucaucacugacuucu

SEQ ID NO: 198065 - RNA, 23 nt, Human
ucucuguacagaugaggacacac

SEQ ID NO: 198066 - RNA, 22 nt, Human
gcaugggcuuucucagaguucu

SEQ ID NO: 198067 - RNA, 22 nt, Human
uagaacaugacuuauuuuugga

SEQ ID NO: 198068 - RNA, 22 nt, Human
ccaggucuuuggccuuggcacu

SEQ ID NO: 198069 - RNA, 17 nt, Human
uuuuguucaucuucaaa

SEQ ID NO: 198070 - RNA, 18 nt, Human
caaauacuguugucuuau

SEQ ID NO: 198071 - RNA, 22 nt, Human
cacaucauagagacucaaucca

SEQ ID NO: 198072 - RNA, 22 nt, Human
uuacacaucuagacccauuuuu

SEQ ID NO: 198073 - RNA, 22 nt, Human
cugagcuguggaauaaacacug

SEQ ID NO: 198074 - RNA, 21 nt, Human
agaauuaaauuggauuugugu

SEQ ID NO: 198075 - RNA, 22 nt, Human
uauuccaccagagaugugaauu

SEQ ID NO: 198076 - RNA, 22 nt, Human
ugaguucuccaggaagcagacu

SEQ ID NO: 198077 - RNA, 22 nt, Human
uuagaagugaaauagcuguaca

SEQ ID NO: 198078 - RNA, 22 nt, Human
ccuggcucuucgggaguuuguu

SEQ ID NO: 198079 - RNA, 22 nt, Human
gaggaguggguuagugcuuauu

SEQ ID NO: 198080 - RNA, 22 nt, Human
uggccuggaagagaggucgagg

SEQ ID NO: 198081 - RNA, 22 nt, Human
guguccugggucucugauucuu

SEQ ID NO: 198082 - RNA, 22 nt, Human
uaagaaacccaggaauuucuua

SEQ ID NO: 198083 - RNA, 20 nt, Human
uauuugaaauggccaagugu

SEQ ID NO: 198084 - RNA, 22 nt, Human
uggccacaguguccagcagcag

SEQ ID NO: 198085 - RNA, 22 nt, Human
acacaagauuguguauugaauu

SEQ ID NO: 198086 - RNA, 22 nt, Human
gaagcacauggcugugagcaac

SEQ ID NO: 198087 - RNA, 20 nt, Human
gccacugugcuuacacugcu

SEQ ID NO: 198088 - RNA, 22 nt, Human
agaccaggaaggccuacagaua

SEQ ID NO: 198089 - RNA, 22 nt, Human
agcaauuauggaguuguugacg

SEQ ID NO: 198090 - RNA, 22 nt, Human
ucucaggccccugaguuucucu

SEQ ID NO: 198091 - RNA, 22 nt, Human
ucaugcagaggaaggcuaguuu

SEQ ID NO: 198092 - RNA, 22 nt, Human
aacacucucuguugguaaggcu

SEQ ID NO: 198093 - RNA, 22 nt, Human
cuacaguaugaaaccuuuacuc

SEQ ID NO: 198094 - RNA, 22 nt, Human
uuacaugaugauuucauaaaca

SEQ ID NO: 198095 - RNA, 22 nt, Human
uuagaauccaugguugcagugg

SEQ ID NO: 198096 - RNA, 22 nt, Human
aagacaugcaguuuguuccauu

SEQ ID NO: 198097 - RNA, 22 nt, Human
uggucaaagaccaggaaaugcu

SEQ ID NO: 198098 - RNA, 20 nt, Human
agcaguuuccuaacucagcu

SEQ ID NO: 198099 - RNA, 22 nt, Human
aguaaacauagaauguucuucc

SEQ ID NO: 198100 - RNA, 22 nt, Human
gcagaggagaugaagauacuuu

SEQ ID NO: 198101 - RNA, 22 nt, Human
cugaaggcuaaaauggacugaa

SEQ ID NO: 198102 - RNA, 22 nt, Human
gccuguccccaggagaguccgg

SEQ ID NO: 198103 - RNA, 22 nt, Human
agucucucacagaggauucucc

SEQ ID NO: 198104 - RNA, 19 nt, Human
auggcugcugauuggggau

SEQ ID NO: 198105 - RNA, 22 nt, Human
uucacaguuugcugggacagga

SEQ ID NO: 198106 - RNA, 22 nt, Human
gagccaggaggcagagacugca

SEQ ID NO: 198107 - RNA, 22 nt, Human
guuccucauccagucaugacua

SEQ ID NO: 198108 - RNA, 22 nt, Human
uccuagaacagcccaccuggaa

SEQ ID NO: 198109 - RNA, 22 nt, Human
uaaguguuauuauucucacuuu

SEQ ID NO: 198110 - RNA, 22 nt, Human
uccacagguaugaggccccacc

SEQ ID NO: 198111 - RNA, 22 nt, Human
caagggcuucaaguggccaaga

SEQ ID NO: 198112 - RNA, 22 nt, Human
uggccugcccagagcagcucug

SEQ ID NO: 198113 - RNA, 22 nt, Human
acucuugucucaacuuuuguau

SEQ ID NO: 198114 - RNA, 17 nt, Human
ggcuggaggggacccgg

SEQ ID NO: 198115 - RNA, 16 nt, Human
caugagucaguaagca

SEQ ID NO: 198116 - RNA, 22 nt, Human
caaauguguuuuuucuucuaca

SEQ ID NO: 198117 - RNA, 22 nt, Human
ggucacauucugagguauuagg

SEQ ID NO: 198118 - RNA, 22 nt, Human
agcaguuacgggccuaucuagg

SEQ ID NO: 198119 - RNA, 22 nt, Human
agaccuggguucgaguccuaac

SEQ ID NO: 198120 - RNA, 22 nt, Human
uggauaaaugugcagaugacau

SEQ ID NO: 198121 - RNA, 22 nt, Human
ggagcugaggacacuacauuuu

SEQ ID NO: 198122 - RNA, 22 nt, Human
gcuguggaguacagagcugguu

SEQ ID NO: 198123 - RNA, 22 nt, Human
aggcugaggcggguagaucacc

SEQ ID NO: 198124 - RNA, 22 nt, Human
gcugggccagagcagcagcacu

SEQ ID NO: 198125 - RNA, 22 nt, Human
gaggcauaaaucacaguguuca

SEQ ID NO: 198126 - RNA, 22 nt, Human
auuuucaucgcuagguuggccu

SEQ ID NO: 198127 - RNA, 22 nt, Human
cucuggaggccuaaggaagugg

SEQ ID NO: 198128 - RNA, 22 nt, Human
ggcuuucuccuugccuuagucu

SEQ ID NO: 198129 - RNA, 22 nt, Human
augcugugccuggaaagcggcu

SEQ ID NO: 198130 - RNA, 22 nt, Human
uuuuauucucagcuccagagag

SEQ ID NO: 198131 - RNA, 20 nt, Human
cugccaugauugauagagug

SEQ ID NO: 198132 - RNA, 22 nt, Human
ucaggcucugccaccuagauua

SEQ ID NO: 198133 - RNA, 19 nt, Human
gaaggcuuuugguauguuu

SEQ ID NO: 198134 - RNA, 22 nt, Human
agagggaaggacagauguuuca

SEQ ID NO: 198135 - RNA, 22 nt, Human
cguauacaugaagacauugcug

SEQ ID NO: 198136 - RNA, 22 nt, Human
agucagugggcuuggcacagaa

SEQ ID NO: 198137 - RNA, 22 nt, Human
ugggaggaucucuugaggccag

SEQ ID NO: 198138 - RNA, 22 nt, Human
gguugguaacucccugugcagu

SEQ ID NO: 198139 - RNA, 22 nt, Human
gcagcuggucuggccuagagua

SEQ ID NO: 198140 - RNA, 22 nt, Human
cggccaagccggggccccgaag

SEQ ID NO: 198141 - RNA, 22 nt, Human
uuauuccauucaguucaacaag

SEQ ID NO: 198142 - RNA, 20 nt, Human
uagaaucuacuauuuggccc

SEQ ID NO: 198143 - RNA, 22 nt, Human
agugcuggaaagggacggagga

SEQ ID NO: 198144 - RNA, 22 nt, Human
gcagguguggauuugcauccag

SEQ ID NO: 198145 - RNA, 22 nt, Human
gcucagggccauggaccagcag

SEQ ID NO: 198146 - RNA, 22 nt, Human
cugccccagccuggggccuucu

SEQ ID NO: 198147 - RNA, 22 nt, Human
gugugcagaagacacaagacau

SEQ ID NO: 198148 - RNA, 22 nt, Human
gaaggggaaaguugagcaaaua

SEQ ID NO: 198149 - RNA, 22 nt, Human
guacccaggcacgccuugcuga

SEQ ID NO: 198150 - RNA, 22 nt, Human
auguuucaccagcaaauuaccu

SEQ ID NO: 198151 - RNA, 22 nt, Human
gaauuucagagguaacaucauc

SEQ ID NO: 198152 - RNA, 22 nt, Human
cagagagagucaaaucuuugcu

SEQ ID NO: 198153 - RNA, 22 nt, Human
caggcaccugugugucucaggg

SEQ ID NO: 198154 - RNA, 22 nt, Human
caggcugggcagccuccccggc

SEQ ID NO: 198155 - RNA, 22 nt, Human
gagagucuaggaaccucauaua

SEQ ID NO: 198156 - RNA, 22 nt, Human
ugauggaaauaaaagcauagcu

SEQ ID NO: 198157 - RNA, 22 nt, Human
cuggcugugcugacugagaggg

SEQ ID NO: 198158 - RNA, 22 nt, Human
ucuuucuggucucgccuuauuc

SEQ ID NO: 198159 - RNA, 22 nt, Human
aguggcagagugcacucaggca

SEQ ID NO: 198160 - RNA, 22 nt, Human
cucagaggcaagcaaggagcug

SEQ ID NO: 198161 - RNA, 22 nt, Human
uuccuggugaccucacugguag

SEQ ID NO: 198162 - RNA, 22 nt, Human
agagcuggggccagagucaagg

SEQ ID NO: 198163 - RNA, 22 nt, Human
gagcaggcaacucugcagugcc

SEQ ID NO: 198164 - RNA, 23 nt, Human
aggaagcuaaguguggcugcgga

SEQ ID NO: 198165 - RNA, 22 nt, Human
ugccuggcacuccuggagcuca

SEQ ID NO: 198166 - RNA, 22 nt, Human
caggaggaaaugugacccugcu

SEQ ID NO: 198167 - RNA, 23 nt, Human
uuucuguuggguauauauccaag

SEQ ID NO: 198168 - RNA, 22 nt, Human
uuuacauugcauuagguauuau

SEQ ID NO: 198169 - RNA, 22 nt, Human
agggacagucuacuguucacug

SEQ ID NO: 198170 - RNA, 22 nt, Human
accugaggaagggcgagaagcu

SEQ ID NO: 198171 - RNA, 22 nt, Human
auucugggugacuacgugauca

SEQ ID NO: 198172 - RNA, 22 nt, Human
augauggagguguccuggauuu

SEQ ID NO: 198173 - RNA, 22 nt, Human
uagaaaauagggccuguggagc

SEQ ID NO: 198174 - RNA, 22 nt, Human
cccuuccucccaggcuucugug

SEQ ID NO: 198175 - RNA, 16 nt, Human
gugagggacauagcuu

SEQ ID NO: 198176 - RNA, 22 nt, Human
uggaugaaaaaugagaauuuuc

SEQ ID NO: 198177 - RNA, 22 nt, Human
gaaaggcuaaaauuauaagggu

SEQ ID NO: 198178 - RNA, 22 nt, Human
agaugaaauuuguguugaguug

SEQ ID NO: 198179 - RNA, 22 nt, Human
ccaggaggaugguuguuaggug

SEQ ID NO: 198180 - RNA, 22 nt, Human
ggucccaguugcccaggucagg

SEQ ID NO: 198181 - RNA, 22 nt, Human
guaacugguuuucuucccucuc

SEQ ID NO: 198182 - RNA, 22 nt, Human
cucuguagacuccaccuuugag

SEQ ID NO: 198183 - RNA, 22 nt, Human
ucagcaggcucugguugaccau

SEQ ID NO: 198184 - RNA, 22 nt, Human
auuaauauacacuguuagcaug

SEQ ID NO: 198185 - RNA, 17 nt, Human
ugaugcaaagucagcug

SEQ ID NO: 198186 - RNA, 23 nt, Human
cuggcccuggcucugugaucaug

SEQ ID NO: 198187 - RNA, 22 nt, Human
cuuagaagugggcuauaauuag

SEQ ID NO: 198188 - RNA, 22 nt, Human
gcuucccaaacuuguggauaga

SEQ ID NO: 198189 - RNA, 19 nt, Human
aggagaaguagcagaaauu

SEQ ID NO: 198190 - RNA, 22 nt, Human
aggcuaggcaugugcuaccaca

SEQ ID NO: 198191 - RNA, 22 nt, Human
caguccaggccuggaggagcca

SEQ ID NO: 198192 - RNA, 22 nt, Human
ucacaucuccauguguuguuca

SEQ ID NO: 198193 - RNA, 18 nt, Human
uccaggccugaagugucc

SEQ ID NO: 198194 - RNA, 22 nt, Human
auucagcauucauuaugcgcca

SEQ ID NO: 198195 - RNA, 22 nt, Human
ccagacagcaguuaaaggacau

SEQ ID NO: 198196 - RNA, 22 nt, Human
caaggagaguaauugaaugaga

SEQ ID NO: 198197 - RNA, 22 nt, Human
ugaggaaacugaggcacagaug

SEQ ID NO: 198198 - RNA, 20 nt, Human
ccuggcugguggaggaaagg

SEQ ID NO: 198199 - RNA, 23 nt, Human
uuacuacacaaguaacgauuccc

SEQ ID NO: 198200 - RNA, 22 nt, Human
ugugucuuacauaauuacaugu

SEQ ID NO: 198201 - RNA, 22 nt, Human
ggccuuccauugcucuuuucua

SEQ ID NO: 198202 - RNA, 22 nt, Human
cagaggguugaugugaggcuua

SEQ ID NO: 198203 - RNA, 22 nt, Human
ggaccugcucucccaguucucu

SEQ ID NO: 198204 - RNA, 22 nt, Human
uaggaaauuggaaacucuucac

SEQ ID NO: 198205 - RNA, 22 nt, Human
aaggcagccgugugacugcaug

SEQ ID NO: 198206 - RNA, 22 nt, Human
agcugugcuguggucaucuggg

SEQ ID NO: 198207 - RNA, 22 nt, Human
agucacauagaaguggguuuaa

SEQ ID NO: 198208 - RNA, 22 nt, Human
ucucaggcuaccuugcacaagg

SEQ ID NO: 198209 - RNA, 22 nt, Human
ccaggcaucacgggcauguggc

SEQ ID NO: 198210 - RNA, 22 nt, Human
ucagggcauggcugcacuuggc

SEQ ID NO: 198211 - RNA, 22 nt, Human
ucuaggguggagcugggaaucc

SEQ ID NO: 198212 - RNA, 23 nt, Human
gcuuuuaaaccugugacugccgc

SEQ ID NO: 198213 - RNA, 22 nt, Human
aaggaaagauucucucucuaga

SEQ ID NO: 198214 - RNA, 22 nt, Human
gaagcaguagcaacugugucuu

SEQ ID NO: 198215 - RNA, 22 nt, Human
ccuguaggcgagggauggacag

SEQ ID NO: 198216 - RNA, 20 nt, Human
aauccauuggucuauauguc

SEQ ID NO: 198217 - RNA, 22 nt, Human
acuguacauauggauucuaaga

SEQ ID NO: 198218 - RNA, 22 nt, Human
gguccaggggguagauauguga

SEQ ID NO: 198219 - RNA, 22 nt, Human
gcacacaggcaguuuccagcca

SEQ ID NO: 198220 - RNA, 22 nt, Human
cuuuccaaugcauuuccaaugu

SEQ ID NO: 198221 - RNA, 22 nt, Human
cagaggcaggaagaugggcagu

SEQ ID NO: 198222 - RNA, 22 nt, Human
auggcucucuagggcccagguu

SEQ ID NO: 198223 - RNA, 22 nt, Human
uuacuaagagaaguaaauauuu

SEQ ID NO: 198224 - RNA, 22 nt, Human
agcucaguggcucaguggguau

SEQ ID NO: 198225 - RNA, 22 nt, Human
aaggaacuaaauaguucuggaa

SEQ ID NO: 198226 - RNA, 22 nt, Human
uaaagcuuguauugcaauauuu

SEQ ID NO: 198227 - RNA, 22 nt, Human
uuaacauacaucaugaacaaug

SEQ ID NO: 198228 - RNA, 22 nt, Human
cacaggagggagcgggcagcca

SEQ ID NO: 198229 - RNA, 22 nt, Human
gaaaguuauugaaccuuauuua

SEQ ID NO: 198230 - RNA, 22 nt, Human
agccaacucccucucauugagc

SEQ ID NO: 198231 - RNA, 22 nt, Human
auagaagcugauaaacuacuuc

SEQ ID NO: 198232 - RNA, 22 nt, Human
agcaggcaggcccagcggcugg

SEQ ID NO: 198233 - RNA, 22 nt, Human
ugucaguucaauuauaguaauu

SEQ ID NO: 198234 - RNA, 22 nt, Human
gcagcuuuaaaggaggcucuga

SEQ ID NO: 198235 - RNA, 22 nt, Human
ugaagaauguugcagugagcau

SEQ ID NO: 198236 - RNA, 22 nt, Human
uuaaauauuauguugucugcaa

SEQ ID NO: 198237 - RNA, 22 nt, Human
cagcagccagacaagauacauc

SEQ ID NO: 198238 - RNA, 22 nt, Human
cacagaggagugcacacucucu

SEQ ID NO: 198239 - RNA, 19 nt, Human
gacuuuggaaaugcuguuu

SEQ ID NO: 198240 - RNA, 21 nt, Human
acaggagaccgccuggcaguc

SEQ ID NO: 198241 - RNA, 23 nt, Human
uaucaguaagcaucccugaaccc

SEQ ID NO: 198242 - RNA, 22 nt, Human
gaagcaguucgaaagcaguugg

SEQ ID NO: 198243 - RNA, 22 nt, Human
acaucuuugcucuuauagagcu

SEQ ID NO: 198244 - RNA, 22 nt, Human
gaaggcuucccaccugauauuu

SEQ ID NO: 198245 - RNA, 22 nt, Human
ccaagcuggauuuagcugcaca

SEQ ID NO: 198246 - RNA, 22 nt, Human
accacugcccauggugaaaacu

SEQ ID NO: 198247 - RNA, 22 nt, Human
ucacauaaauuauacaauuuca

SEQ ID NO: 198248 - RNA, 22 nt, Human
aguguauuaaugcuccaggagu

SEQ ID NO: 198249 - RNA, 22 nt, Human
uccugggauuaagguggugauu

SEQ ID NO: 198250 - RNA, 22 nt, Human
cugagaggcggagcuugcagug

SEQ ID NO: 198251 - RNA, 22 nt, Human
ugcucugucaagaaaagaugcc

SEQ ID NO: 198252 - RNA, 22 nt, Human
acucucugggcaugccccacca

SEQ ID NO: 198253 - RNA, 19 nt, Human
guggcugccgaucgcggcu

SEQ ID NO: 198254 - RNA, 22 nt, Human
gauagauaaaacuauauuuuca

SEQ ID NO: 198255 - RNA, 21 nt, Human
aucucacagcccagagaagcc

SEQ ID NO: 198256 - RNA, 21 nt, Human
acacaacaggcagucauuuuc

SEQ ID NO: 198257 - RNA, 22 nt, Human
gcucuggcuuggggcacucguc

SEQ ID NO: 198258 - RNA, 22 nt, Human
gcugcccagcaggccccagggg

SEQ ID NO: 198259 - RNA, 22 nt, Human
cuggccagguuuugaacaguug

SEQ ID NO: 198260 - RNA, 22 nt, Human
ugguaccaugacaaaugucagg

SEQ ID NO: 198261 - RNA, 22 nt, Human
ugguaucguguuggcacucagu

SEQ ID NO: 198262 - RNA, 22 nt, Human
caggcugcugacaggcuuggag

SEQ ID NO: 198263 - RNA, 22 nt, Human
uaaagcagccagggucuaagcc

SEQ ID NO: 198264 - RNA, 20 nt, Human
acacaagcacuucugguauu

SEQ ID NO: 198265 - RNA, 22 nt, Human
uccugccugagcguggaggagg

SEQ ID NO: 198266 - RNA, 22 nt, Human
augggcagcugcagcaguggug

SEQ ID NO: 198267 - RNA, 22 nt, Human
aaggaggaauucugaguucaug

SEQ ID NO: 198268 - RNA, 22 nt, Human
ugucagaccugugauuucagca

SEQ ID NO: 198269 - RNA, 22 nt, Human
aguccagucucacucuuggcag

SEQ ID NO: 198270 - RNA, 22 nt, Human
gggagaagaaugugucaauugu

SEQ ID NO: 198271 - RNA, 22 nt, Human
guccagccaggcugcagcaccc

SEQ ID NO: 198272 - RNA, 18 nt, Human
gagaaaccugugaaugcu

SEQ ID NO: 198273 - RNA, 22 nt, Human
aggucucugaguacugcuggac

SEQ ID NO: 198274 - RNA, 22 nt, Human
uaucagauuuagaggagucaua

SEQ ID NO: 198275 - RNA, 22 nt, Human
uucauguuguaguauguaucag

SEQ ID NO: 198276 - RNA, 22 nt, Human
gccuguuucuccuccuuggccc

SEQ ID NO: 198277 - RNA, 22 nt, Human
gcuggaaaucaaagaaguggau

SEQ ID NO: 198278 - RNA, 22 nt, Human
uugaaaagcaaaugauggguag

SEQ ID NO: 198279 - RNA, 22 nt, Human
uagauaauuuggcaucauauug

SEQ ID NO: 198280 - RNA, 22 nt, Human
augagauuuuaaaacuucacuu

SEQ ID NO: 198281 - RNA, 22 nt, Human
ggagucugagcuuguguccugg

SEQ ID NO: 198282 - RNA, 22 nt, Human
uggagagaacagugucugaaag

SEQ ID NO: 198283 - RNA, 23 nt, Human
ugacaggcuuugcuccuucugcc

SEQ ID NO: 198284 - RNA, 22 nt, Human
aaaauuauucauggcuuuugga

SEQ ID NO: 198285 - RNA, 22 nt, Human
auguuaaaaaccaguacaguug

SEQ ID NO: 198286 - RNA, 22 nt, Human
cuauaaaucuacccagcauugg

SEQ ID NO: 198287 - RNA, 22 nt, Human
gacaugcuaauuacugguucaa

SEQ ID NO: 198288 - RNA, 22 nt, Human
ucuggcuguuguuagguuccug

SEQ ID NO: 198289 - RNA, 23 nt, Human
agcaaugcugggagacucuguaa

SEQ ID NO: 198290 - RNA, 22 nt, Human
gaggggcaagaaguuggccucu

SEQ ID NO: 198291 - RNA, 22 nt, Human
aggaagcuuguguguauugguc

SEQ ID NO: 198292 - RNA, 22 nt, Human
ucucaacuaauggugcaagaug

SEQ ID NO: 198293 - RNA, 22 nt, Human
ugcuucugggcaaaugugugug

SEQ ID NO: 198294 - RNA, 22 nt, Human
aauucuuaaucccauaaaguga

SEQ ID NO: 198295 - RNA, 22 nt, Human
ucaggcuguggcuucaguucuu

SEQ ID NO: 198296 - RNA, 22 nt, Human
aacauggcucaugagagauuug

SEQ ID NO: 198297 - RNA, 22 nt, Human
ggaggagacggagugauuagug

SEQ ID NO: 198298 - RNA, 22 nt, Human
ugguuagacacaugcaugucau

SEQ ID NO: 198299 - RNA, 22 nt, Human
gaaucuaaaaacgggcuugguu

SEQ ID NO: 198300 - RNA, 22 nt, Human
ugccagggccauagggagucua

SEQ ID NO: 198301 - RNA, 21 nt, Human
ggcugggucaugcagcuggcc

SEQ ID NO: 198302 - RNA, 22 nt, Human
gacccuggaguuaguccugugu

SEQ ID NO: 198303 - RNA, 22 nt, Human
ugagcagagaugacugggcauu

SEQ ID NO: 198304 - RNA, 22 nt, Human
uucugagagcugaagaaauguu

SEQ ID NO: 198305 - RNA, 23 nt, Human
caguuggagguacagagacacug

SEQ ID NO: 198306 - RNA, 21 nt, Human
aaucugcuucccugugacuug

SEQ ID NO: 198307 - RNA, 22 nt, Human
gagggaugguaguugacacuga

SEQ ID NO: 198308 - RNA, 22 nt, Human
auuauucaaauucccacuauac

SEQ ID NO: 198309 - RNA, 22 nt, Human
aagugugacacuguguuaauua

SEQ ID NO: 198310 - RNA, 22 nt, Human
caagagcucaccggagagcauu

SEQ ID NO: 198311 - RNA, 22 nt, Human
uuuguucacugauguaucccaa

SEQ ID NO: 198312 - RNA, 22 nt, Human
ccauggccucgcucuacguggg

SEQ ID NO: 198313 - RNA, 22 nt, Human
ucuuugaaagcuguucuagagu

SEQ ID NO: 198314 - RNA, 22 nt, Human
gagaggcugcauaugcacacug

SEQ ID NO: 198315 - RNA, 22 nt, Human
cuggcucugggcuaagcuccca

SEQ ID NO: 198316 - RNA, 22 nt, Human
agcuuuaucagaggagucucua

SEQ ID NO: 198317 - RNA, 23 nt, Human
acaagcagcccagugcucugccu

SEQ ID NO: 198318 - RNA, 22 nt, Human
aaucacaaaugcaaguugucac

SEQ ID NO: 198319 - RNA, 22 nt, Human
agcaugaaaacaugaaacagca

SEQ ID NO: 198320 - RNA, 22 nt, Human
acacaugugauucuaagacagc

SEQ ID NO: 198321 - RNA, 22 nt, Human
uggaggcaucagagugcuuggc

SEQ ID NO: 198322 - RNA, 22 nt, Human
cucacagcaaggagguaaggua

SEQ ID NO: 198323 - RNA, 22 nt, Human
gucaccucgcugucuuccugag

SEQ ID NO: 198324 - RNA, 22 nt, Human
ugcagagaaaccaguggaggac

SEQ ID NO: 198325 - RNA, 22 nt, Human
auccugggaaugggagggucau

SEQ ID NO: 198326 - RNA, 22 nt, Human
uggcucagccauucguguugcc

SEQ ID NO: 198327 - RNA, 22 nt, Human
aacagaauuguacaccagggag

SEQ ID NO: 198328 - RNA, 22 nt, Human
auaguuuuauagauauugugua

SEQ ID NO: 198329 - RNA, 22 nt, Human
ucuuagucacagaggugagaaa

SEQ ID NO: 198330 - RNA, 22 nt, Human
agagggaucacccuguuucugg

SEQ ID NO: 198331 - RNA, 22 nt, Human
gagggugggcuccuaucugggu

SEQ ID NO: 198332 - RNA, 17 nt, Human
auggaggcagacagguc

SEQ ID NO: 198333 - RNA, 22 nt, Human
augcuacuauccuucugcuuaa

SEQ ID NO: 198334 - RNA, 22 nt, Human
guguccuuauaagaagagaugc

SEQ ID NO: 198335 - RNA, 22 nt, Human
gggcacagagggucuugaagaa

SEQ ID NO: 198336 - RNA, 22 nt, Human
cagcuugggggcgcuggccuca

SEQ ID NO: 198337 - RNA, 22 nt, Human
gauguacacucagaaaagucau

SEQ ID NO: 198338 - RNA, 22 nt, Human
aaaaguguucaggaagaauaau

SEQ ID NO: 198339 - RNA, 22 nt, Human
acagguguguucccggaaagcc

SEQ ID NO: 198340 - RNA, 21 nt, Human
ugucagcaacaauacuuucuc

SEQ ID NO: 198341 - RNA, 21 nt, Human
uccuuauauuugaauacuuua

SEQ ID NO: 198342 - RNA, 20 nt, Human
agcccaucucccacagcuac

SEQ ID NO: 198343 - RNA, 22 nt, Human
gggcuggaccgcucgccucccu

SEQ ID NO: 198344 - RNA, 22 nt, Human
acacaugcuccagucuccagga

SEQ ID NO: 198345 - RNA, 21 nt, Human
uucaaugaaaacaaagugagg

SEQ ID NO: 198346 - RNA, 22 nt, Human
gaagacaagcugaguguugucc

SEQ ID NO: 198347 - RNA, 22 nt, Human
ucugugcugucucagauaagca

SEQ ID NO: 198348 - RNA, 22 nt, Human
gugggaguggagcucagcaugu

SEQ ID NO: 198349 - RNA, 22 nt, Human
cugccccuggcuggugaagcag

SEQ ID NO: 198350 - RNA, 22 nt, Human
gggcagugguuacacagcugag

SEQ ID NO: 198351 - RNA, 22 nt, Human
cugaauuaagcauuacauacau

SEQ ID NO: 198352 - RNA, 22 nt, Human
ucaucucuccccagugucuuua

SEQ ID NO: 198353 - RNA, 22 nt, Human
acaaaugucuccucuuuuguua

SEQ ID NO: 198354 - RNA, 22 nt, Human
acaguuuaggaugagagaacac

SEQ ID NO: 198355 - RNA, 22 nt, Human
ccaaaauauuagugcuuaagua

SEQ ID NO: 198356 - RNA, 22 nt, Human
uacugucuuuagggguagaaau

SEQ ID NO: 198357 - RNA, 22 nt, Human
ugggcagggaucucuuuugcaa

SEQ ID NO: 198358 - RNA, 22 nt, Human
acacaagaaguuaaugggcaaa

SEQ ID NO: 198359 - RNA, 22 nt, Human
gagggucccgagcccugucaga

SEQ ID NO: 198360 - RNA, 22 nt, Human
aacaguaggcaucacauaauga

SEQ ID NO: 198361 - RNA, 22 nt, Human
cgcaggcaagagaguacaguua

SEQ ID NO: 198362 - RNA, 22 nt, Human
aggcuguggugaugauuggguc

SEQ ID NO: 198363 - RNA, 22 nt, Human
gaggcucaccuagggagcacug

SEQ ID NO: 198364 - RNA, 22 nt, Human
gacucuuucccugugacagagu

SEQ ID NO: 198365 - RNA, 22 nt, Human
cauggccaaggaugcucaacca

SEQ ID NO: 198366 - RNA, 22 nt, Human
gcaggcugaguauuacccuagu

SEQ ID NO: 198367 - RNA, 22 nt, Human
agagggggaaaauagagguguu

SEQ ID NO: 198368 - RNA, 17 nt, Human
gucucugucuugcuuuu

SEQ ID NO: 198369 - RNA, 22 nt, Human
uacagcaaugguucuaagaguc

SEQ ID NO: 198370 - RNA, 22 nt, Human
ugggagcuccuggagggcagga

SEQ ID NO: 198371 - RNA, 22 nt, Human
auuuuguugaugguggaguagc

SEQ ID NO: 198372 - RNA, 22 nt, Human
ucagaguccucacccugaggau

SEQ ID NO: 198373 - RNA, 22 nt, Human
ugcauuuaccuggaggucauuu

SEQ ID NO: 198374 - RNA, 22 nt, Human
cccucugccugcgcccuggugu

SEQ ID NO: 198375 - RNA, 22 nt, Human
ugagggacucccggcccugcca

SEQ ID NO: 198376 - RNA, 19 nt, Human
uucuccaggcugcagaggg

SEQ ID NO: 198377 - RNA, 22 nt, Human
cugugccauccuagggcugcug

SEQ ID NO: 198378 - RNA, 22 nt, Human
gaguggcagaacuggggguccu

SEQ ID NO: 198379 - RNA, 22 nt, Human
agguggagugaaggaaaggcag

SEQ ID NO: 198380 - RNA, 22 nt, Human
cuggcagguccagcuggacuca

SEQ ID NO: 198381 - RNA, 22 nt, Human
ucucugagcuuaagguguuuca

SEQ ID NO: 198382 - RNA, 22 nt, Human
gcagggcucauucuaguacaau

SEQ ID NO: 198383 - RNA, 22 nt, Human
aaagccuugggauuugugauca

SEQ ID NO: 198384 - RNA, 22 nt, Human
agcacagaaugagguggaagug

SEQ ID NO: 198385 - RNA, 19 nt, Human
aguagcagaaagugcagug

SEQ ID NO: 198386 - RNA, 22 nt, Human
gcuguggcuguacagagaccau

SEQ ID NO: 198387 - RNA, 21 nt, Human
agagaagggauuccaggcccu

SEQ ID NO: 198388 - RNA, 22 nt, Human
cuucacaguauaggucccugag

SEQ ID NO: 198389 - RNA, 22 nt, Human
auguauuucuauguagugaaga

SEQ ID NO: 198390 - RNA, 22 nt, Human
aagaagguguggaaagaugcuc

SEQ ID NO: 198391 - RNA, 22 nt, Human
gcuggcuuuaucgucagacucc

SEQ ID NO: 198392 - RNA, 22 nt, Human
cuucucugcccauaggaaaugc

SEQ ID NO: 198393 - RNA, 20 nt, Human
ccuguucacugcgcaguuuc

SEQ ID NO: 198394 - RNA, 22 nt, Human
gauguccagcgucuggcugccu

SEQ ID NO: 198395 - RNA, 22 nt, Human
agcuguggggaggaggcuagca

SEQ ID NO: 198396 - RNA, 22 nt, Human
gaccuccagcggcccugcagag

SEQ ID NO: 198397 - RNA, 22 nt, Human
agagacaggaauggcauuaaga

SEQ ID NO: 198398 - RNA, 20 nt, Human
gcaaauggaucccacaagcc

SEQ ID NO: 198399 - RNA, 22 nt, Human
uugcccugcggguccugcgcaa

SEQ ID NO: 198400 - RNA, 22 nt, Human
ugugcuuuucucugcuccugga

SEQ ID NO: 198401 - RNA, 18 nt, Human
cuccagagcugugagaca

SEQ ID NO: 198402 - RNA, 22 nt, Human
uggagcagagaugguggccuuc

SEQ ID NO: 198403 - RNA, 22 nt, Human
guaagcacaugugugugcaugg

SEQ ID NO: 198404 - RNA, 22 nt, Human
gcucugagaucauucacuguaa

SEQ ID NO: 198405 - RNA, 22 nt, Human
uccaggucagacuucugugccc

SEQ ID NO: 198406 - RNA, 22 nt, Human
ucauucccccauaaugguauuu

SEQ ID NO: 198407 - RNA, 22 nt, Human
gucccauaaguagugcaacuug

SEQ ID NO: 198408 - RNA, 22 nt, Human
caguagcuugcuuaggcuuuua

SEQ ID NO: 198409 - RNA, 22 nt, Human
aggcaauccccugaggauacuu

SEQ ID NO: 198410 - RNA, 19 nt, Human
ucucccggcacuccugccc

SEQ ID NO: 198411 - RNA, 22 nt, Human
ggcugcugaguuggccaggaga

SEQ ID NO: 198412 - RNA, 22 nt, Human
uuuccucugucaugacagcuga

SEQ ID NO: 198413 - RNA, 22 nt, Human
uaguuuaauggucaacuaauga

SEQ ID NO: 198414 - RNA, 22 nt, Human
caguggccuugaugccucauuc

SEQ ID NO: 198415 - RNA, 22 nt, Human
caagcuggcucuuaugcaaaaa

SEQ ID NO: 198416 - RNA, 22 nt, Human
cuucaaaagccagaagccugcg

SEQ ID NO: 198417 - RNA, 22 nt, Human
cagcaggugcugccugucaccc

SEQ ID NO: 198418 - RNA, 22 nt, Human
uaauaauuaguuauugaucgug

SEQ ID NO: 198419 - RNA, 22 nt, Human
auuuaugacuggugaauagaac

SEQ ID NO: 198420 - RNA, 20 nt, Human
ucaauguaaucauaucauca

SEQ ID NO: 198421 - RNA, 22 nt, Human
cagcaguuuccuaugguucagc

SEQ ID NO: 198422 - RNA, 22 nt, Human
gcugccugccuugccuggagga

SEQ ID NO: 198423 - RNA, 22 nt, Human
uuuuagaaguucacuuggguuu

SEQ ID NO: 198424 - RNA, 22 nt, Human
gaauucugggagagaucugaca

SEQ ID NO: 198425 - RNA, 20 nt, Human
ucagugauuuugaagaggaa

SEQ ID NO: 198426 - RNA, 22 nt, Human
ucaucugucuguucaacagccu

SEQ ID NO: 198427 - RNA, 22 nt, Human
ucacugugaauguuaucaucuu

SEQ ID NO: 198428 - RNA, 22 nt, Human
aagcaggcaugggaggccaucc

SEQ ID NO: 198429 - RNA, 22 nt, Human
uagcuguggagcagaggucucc

SEQ ID NO: 198430 - RNA, 19 nt, Human
uccagaugauauggauuac

SEQ ID NO: 198431 - RNA, 22 nt, Human
acuuucugcaguguuggaaaug

SEQ ID NO: 198432 - RNA, 22 nt, Human
aggagaaggaagugcaucacua

SEQ ID NO: 198433 - RNA, 21 nt, Human
acacugugucauaaugcuuaa

SEQ ID NO: 198434 - RNA, 22 nt, Human
ccacuggcaguuggcuagccuu

SEQ ID NO: 198435 - RNA, 22 nt, Human
ucccgcaugccgccggugaaca

SEQ ID NO: 198436 - RNA, 22 nt, Human
gcggggggaggaacaucuugca

SEQ ID NO: 198437 - RNA, 22 nt, Human
guggcugcagcucugaacggac

SEQ ID NO: 198438 - RNA, 22 nt, Human
cuguacaaaguagcugcuggga

SEQ ID NO: 198439 - RNA, 22 nt, Human
gcuucucuuguccaagggcagg

SEQ ID NO: 198440 - RNA, 22 nt, Human
aucugagguauaugacuggcua

SEQ ID NO: 198441 - RNA, 22 nt, Human
guucugaguccuccuuugaagg

SEQ ID NO: 198442 - RNA, 22 nt, Human
cucuggaguggguggccgggag

SEQ ID NO: 198443 - RNA, 22 nt, Human
agaagaaaugaggccguucugc

SEQ ID NO: 198444 - RNA, 22 nt, Human
acuguggcaaaagaacauugga

SEQ ID NO: 198445 - RNA, 22 nt, Human
ggaagccaguugcuuggugugg

SEQ ID NO: 198446 - RNA, 22 nt, Human
guuuggauagugagagauacuu

SEQ ID NO: 198447 - RNA, 22 nt, Human
gccaaauuugugagcccccaag

SEQ ID NO: 198448 - RNA, 19 nt, Human
ccugugcacauguguccuu

SEQ ID NO: 198449 - RNA, 22 nt, Human
uugcuguagcucauuucacucu

SEQ ID NO: 198450 - RNA, 22 nt, Human
gccuggagacagcagaggcggc

SEQ ID NO: 198451 - RNA, 21 nt, Human
agcagccauggaugguaugua

SEQ ID NO: 198452 - RNA, 22 nt, Human
agccccaggcccggacgccucu

SEQ ID NO: 198453 - RNA, 22 nt, Human
gggcagguacuggguggugagc

SEQ ID NO: 198454 - RNA, 22 nt, Human
uuuaucuauuguauuguugaug

SEQ ID NO: 198455 - RNA, 22 nt, Human
cagcucagucuugaagcacugg

SEQ ID NO: 198456 - RNA, 22 nt, Human
gcucucagggugauggcauacu

SEQ ID NO: 198457 - RNA, 22 nt, Human
uuuaugauuauuuuaaagcagc

SEQ ID NO: 198458 - RNA, 22 nt, Human
acacagugguguuuacaaaauu

SEQ ID NO: 198459 - RNA, 22 nt, Human
cauuagggccaccauaacaaaa

SEQ ID NO: 198460 - RNA, 22 nt, Human
uaaugucaaggugauagauuug

SEQ ID NO: 198461 - RNA, 16 nt, Human
ggguccagaucugcuc

SEQ ID NO: 198462 - RNA, 22 nt, Human
gccuguuuggaaucuguuuaau

SEQ ID NO: 198463 - RNA, 22 nt, Human
cuggcuggguuccaggauucca

SEQ ID NO: 198464 - RNA, 22 nt, Human
cuguagcaaguuauucaauaaa

SEQ ID NO: 198465 - RNA, 22 nt, Human
uguaaagagaagaaacgugagc

SEQ ID NO: 198466 - RNA, 22 nt, Human
auuucaggguaaaaaguguuca

SEQ ID NO: 198467 - RNA, 22 nt, Human
uaguuacagaucuaggacuguu

SEQ ID NO: 198468 - RNA, 22 nt, Human
aggcaagcccaggcacuuggag

SEQ ID NO: 198469 - RNA, 22 nt, Human
cuggcuguaugcuggccucaga

SEQ ID NO: 198470 - RNA, 22 nt, Human
ugagcugcauuacagccucugu

SEQ ID NO: 198471 - RNA, 22 nt, Human
aaggcauaugcuguguacaguu

SEQ ID NO: 198472 - RNA, 22 nt, Human
aacugcaaagccaaucucagga

SEQ ID NO: 198473 - RNA, 22 nt, Human
acagugcauuauugcugaaugc

SEQ ID NO: 198474 - RNA, 22 nt, Human
auuucucacugagcagauaaaa

SEQ ID NO: 198475 - RNA, 22 nt, Human
cagcuugaaauauuaggagaug

SEQ ID NO: 198476 - RNA, 22 nt, Human
auuuggaaaaucugguuauaga

SEQ ID NO: 198477 - RNA, 23 nt, Human
uccuugggccugcccagaguggu

SEQ ID NO: 198478 - RNA, 22 nt, Human
ucaggagcucuucccuggugug

SEQ ID NO: 198479 - RNA, 22 nt, Human
gccuggcugguagagggggcuc

SEQ ID NO: 198480 - RNA, 22 nt, Human
uuaccuuuuaggcaagcaucuu

SEQ ID NO: 198481 - RNA, 22 nt, Human
ucacacacauggauaguauuuu

SEQ ID NO: 198482 - RNA, 23 nt, Human
agcauggaauaggaaagaggcag

SEQ ID NO: 198483 - RNA, 22 nt, Human
guuuuacaaaugacggcauuca

SEQ ID NO: 198484 - RNA, 22 nt, Human
ugcauauaucuuauuuuucugu

SEQ ID NO: 198485 - RNA, 22 nt, Human
ugauucugagggagcauucugc

SEQ ID NO: 198486 - RNA, 22 nt, Human
cuaguguuuggaagucauagcc

SEQ ID NO: 198487 - RNA, 22 nt, Human
ccagagggaacugggccucauu

SEQ ID NO: 198488 - RNA, 22 nt, Human
ucucagggugaggaaagaauuu

SEQ ID NO: 198489 - RNA, 21 nt, Human
cauuucuaagccuggcuauag

SEQ ID NO: 198490 - RNA, 22 nt, Human
ucugggcuuggauuggcucugc

SEQ ID NO: 198491 - RNA, 22 nt, Human
agagugaaaagcuagagcagua

SEQ ID NO: 198492 - RNA, 22 nt, Human
ggguccaggucuucaggcagag

SEQ ID NO: 198493 - RNA, 22 nt, Human
uaaauucugaucaaguuccuuc

SEQ ID NO: 198494 - RNA, 22 nt, Human
caugaagcuugaagcaguccac

SEQ ID NO: 198495 - RNA, 22 nt, Human
acacaugaggaaggccucaccc

SEQ ID NO: 198496 - RNA, 22 nt, Human
aagcccugggguugcacaaggc

SEQ ID NO: 198497 - RNA, 22 nt, Human
gcugggagccccgagccagcgc

SEQ ID NO: 198498 - RNA, 22 nt, Human
ccucccacauugaggacaugcu

SEQ ID NO: 198499 - RNA, 22 nt, Human
uuccagagaaaagguuuauuuc

SEQ ID NO: 198500 - RNA, 22 nt, Human
gagugaggcuggaaucauggcu

SEQ ID NO: 198501 - RNA, 22 nt, Human
auacucuuuaugacauuccagc

SEQ ID NO: 198502 - RNA, 21 nt, Human
uccagccuuucccucacuucc

SEQ ID NO: 198503 - RNA, 22 nt, Human
cuuccaguaguaucauucucau

SEQ ID NO: 198504 - RNA, 22 nt, Human
gaaagugccucaguccucuuau

SEQ ID NO: 198505 - RNA, 22 nt, Human
cuuagaaauaaugguuucaguu

SEQ ID NO: 198506 - RNA, 22 nt, Human
ggucccagcuggucacugucag

SEQ ID NO: 198507 - RNA, 22 nt, Human
ccuuuagaaagucaguaguugc

SEQ ID NO: 198508 - RNA, 22 nt, Human
cagcaguggaacuacccaggga

SEQ ID NO: 198509 - RNA, 22 nt, Human
gggagccacagugaggugcaug

SEQ ID NO: 198510 - RNA, 22 nt, Human
gcuggcccagggucaccuagga

SEQ ID NO: 198511 - RNA, 22 nt, Human
caagauuugccaguggccaacu

SEQ ID NO: 198512 - RNA, 22 nt, Human
aagacaaagggguccuuggaug

SEQ ID NO: 198513 - RNA, 22 nt, Human
agggucaacauuucauugauuc

SEQ ID NO: 198514 - RNA, 22 nt, Human
cagggcauaagaugaggcugua

SEQ ID NO: 198515 - RNA, 22 nt, Human
aaucaguuguccaaaguucaca

SEQ ID NO: 198516 - RNA, 22 nt, Human
gaggcagcucuucugaaugggg

SEQ ID NO: 198517 - RNA, 22 nt, Human
aagacauuuaugaaaagugcug

SEQ ID NO: 198518 - RNA, 22 nt, Human
cacuagaugauaaucagcugga

SEQ ID NO: 198519 - RNA, 22 nt, Human
ucccucagcuugucuccaugca

SEQ ID NO: 198520 - RNA, 22 nt, Human
cuuacaagcaaaacaacuguag

SEQ ID NO: 198521 - RNA, 22 nt, Human
uucauuuaauuuguguauuaac

SEQ ID NO: 198522 - RNA, 22 nt, Human
ccagugcuucuuugcuagcugg

SEQ ID NO: 198523 - RNA, 22 nt, Human
gaagcagcgaaguggaagggac

SEQ ID NO: 198524 - RNA, 22 nt, Human
aggaagcccaagucucaucuuc

SEQ ID NO: 198525 - RNA, 22 nt, Human
caggacaucgucaucaugggga

SEQ ID NO: 198526 - RNA, 22 nt, Human
gcuugggaaacguaguuccuag

SEQ ID NO: 198527 - RNA, 22 nt, Human
gccuggcuuuugccucauguuc

SEQ ID NO: 198528 - RNA, 17 nt, Human
ugauaguucauuuuaag

SEQ ID NO: 198529 - RNA, 22 nt, Human
auuucuaaagagggugguuugg

SEQ ID NO: 198530 - RNA, 22 nt, Human
acuagaaauuacucagaauaaa

SEQ ID NO: 198531 - RNA, 19 nt, Human
ggaaggagagaaaugcaug

SEQ ID NO: 198532 - RNA, 22 nt, Human
ggugcuggacacguggcacucc

SEQ ID NO: 198533 - RNA, 22 nt, Human
ucagcacugaaauucuucacau

SEQ ID NO: 198534 - RNA, 22 nt, Human
aaucacauuuacauugcuaauu

SEQ ID NO: 198535 - RNA, 22 nt, Human
aacugagacacgaacuaugauu

SEQ ID NO: 198536 - RNA, 22 nt, Human
cugaugaggauauagauacaca

SEQ ID NO: 198537 - RNA, 22 nt, Human
cagagggaguuucugagguugc

SEQ ID NO: 198538 - RNA, 22 nt, Human
uauucacuguaacucagcaaua

SEQ ID NO: 198539 - RNA, 22 nt, Human
accucuuaauauugcaccuucu

SEQ ID NO: 198540 - RNA, 22 nt, Human
cacaugcaucugucauguuugg

SEQ ID NO: 198541 - RNA, 22 nt, Human
gcugagggauagcugcucacug

SEQ ID NO: 198542 - RNA, 22 nt, Human
ugggcucugguuuccuggcugg

SEQ ID NO: 198543 - RNA, 22 nt, Human
ucuuccaggagggugggcaaac

SEQ ID NO: 198544 - RNA, 22 nt, Human
uuugaugaugaugauaaaguuu

SEQ ID NO: 198545 - RNA, 21 nt, Human
aggcccagcuuuccucuugcu

SEQ ID NO: 198546 - RNA, 22 nt, Human
ccuggaaucuggaguuggaauc

SEQ ID NO: 198547 - RNA, 21 nt, Human
cuuuggcaagggagaagucac

SEQ ID NO: 198548 - RNA, 22 nt, Human
cuucccacagaauucaaucagu

SEQ ID NO: 198549 - RNA, 22 nt, Human
cauucauuuacuuucaacagcu

SEQ ID NO: 198550 - RNA, 22 nt, Human
gggagcuguaguccagauaccg

SEQ ID NO: 198551 - RNA, 22 nt, Human
cugguuggugccacaugguggc

SEQ ID NO: 198552 - RNA, 22 nt, Human
aauagacauuauuucucuauga

SEQ ID NO: 198553 - RNA, 22 nt, Human
ugaggcucagagcaccugcucc

SEQ ID NO: 198554 - RNA, 22 nt, Human
gcaguaucuaugugauggguug

SEQ ID NO: 198555 - RNA, 22 nt, Human
auggcagaguccuaagccuuua

SEQ ID NO: 198556 - RNA, 22 nt, Human
uuccugggcugcagagagcacc

SEQ ID NO: 198557 - RNA, 22 nt, Human
gccuggagggcucuagagaggc

SEQ ID NO: 198558 - RNA, 22 nt, Human
ccuggaggcucugggagggcag

SEQ ID NO: 198559 - RNA, 22 nt, Human
gcugggcugagaaguuaagcaa

SEQ ID NO: 198560 - RNA, 22 nt, Human
ucagcacugauguuucagaaga

SEQ ID NO: 198561 - RNA, 23 nt, Human
uccuggugacaugccugagcauc

SEQ ID NO: 198562 - RNA, 22 nt, Human
aaguccugugugcuuacacuug

SEQ ID NO: 198563 - RNA, 22 nt, Human
cagcuauugauaaauguugggg

SEQ ID NO: 198564 - RNA, 22 nt, Human
ucauagaaauggaaaguauauu

SEQ ID NO: 198565 - RNA, 22 nt, Human
ugcuggcugucccuaccuggcu

SEQ ID NO: 198566 - RNA, 22 nt, Human
auguccagagaacauuugcuuu

SEQ ID NO: 198567 - RNA, 22 nt, Human
guguaaagaugccaggaaucuu

SEQ ID NO: 198568 - RNA, 21 nt, Human
aagcaggacauaugaugcccu

SEQ ID NO: 198569 - RNA, 22 nt, Human
ggcacuggaagucccauugucu

SEQ ID NO: 198570 - RNA, 22 nt, Human
cuguggaaauaaacaaugcuaa

SEQ ID NO: 198571 - RNA, 22 nt, Human
uccuggcacaacccuuuaccag

SEQ ID NO: 198572 - RNA, 22 nt, Human
uuuucaaagacuggaggcugau

SEQ ID NO: 198573 - RNA, 22 nt, Human
ucaucuaagagucuuacauuua

SEQ ID NO: 198574 - RNA, 22 nt, Human
caagcagguccugaaucugguc

SEQ ID NO: 198575 - RNA, 22 nt, Human
ucaaaggcugcuugucuucugg

SEQ ID NO: 198576 - RNA, 22 nt, Human
gauugcugugcgccccaggugu

SEQ ID NO: 198577 - RNA, 22 nt, Human
ucugacauuagauuaauuggaa

SEQ ID NO: 198578 - RNA, 22 nt, Human
ucuagacaaugcacuguaagga

SEQ ID NO: 198579 - RNA, 22 nt, Human
gccagccagagaggcaugguua

SEQ ID NO: 198580 - RNA, 22 nt, Human
gagcugcuugcccagaagcaga

SEQ ID NO: 198581 - RNA, 22 nt, Human
ugcaauauguugcauuguaugg

SEQ ID NO: 198582 - RNA, 22 nt, Human
aauaugaauuauuguuacaagu

SEQ ID NO: 198583 - RNA, 22 nt, Human
aaacugcacuuuauuuugucaa

SEQ ID NO: 198584 - RNA, 22 nt, Human
guacaacaugauuuuacucucu

SEQ ID NO: 198585 - RNA, 22 nt, Human
gugcauuccaccgugcagguug

SEQ ID NO: 198586 - RNA, 22 nt, Human
auuucucaguaggugcacagug

SEQ ID NO: 198587 - RNA, 17 nt, Human
gucaacaggauuucuuu

SEQ ID NO: 198588 - RNA, 22 nt, Human
uggucagaacucagcgugcuug

SEQ ID NO: 198589 - RNA, 22 nt, Human
aggcccugcccagagcuccucg

SEQ ID NO: 198590 - RNA, 22 nt, Human
cagguggcaugacugccuacaa

SEQ ID NO: 198591 - RNA, 22 nt, Human
ccauuuacauuguacucuguga

SEQ ID NO: 198592 - RNA, 22 nt, Human
gggcuccagaguccauguucuu

SEQ ID NO: 198593 - RNA, 22 nt, Human
gauuuuuauauaaagugagaaa

SEQ ID NO: 198594 - RNA, 22 nt, Human
gaguucuuaggcaaacaacucu

SEQ ID NO: 198595 - RNA, 22 nt, Human
guucuucaguaaaauuaaaugu

SEQ ID NO: 198596 - RNA, 22 nt, Human
uuucaguuuaugucuugaauua

SEQ ID NO: 198597 - RNA, 22 nt, Human
gucugcagagggaaggcuucag

SEQ ID NO: 198598 - RNA, 22 nt, Human
ugcaggugugugcaagggaggg

SEQ ID NO: 198599 - RNA, 22 nt, Human
ucucugcagcuaagaaauuaau

SEQ ID NO: 198600 - RNA, 22 nt, Human
uagcaggguccaaugugaggca

SEQ ID NO: 198601 - RNA, 22 nt, Human
uuuuguguuguaaugucagcua

SEQ ID NO: 198602 - RNA, 22 nt, Human
cagggcugaaaucaagguguag

SEQ ID NO: 198603 - RNA, 22 nt, Human
uggcccagggucuacagccuca

SEQ ID NO: 198604 - RNA, 22 nt, Human
aggucucaauuccugcuccugu

SEQ ID NO: 198605 - RNA, 22 nt, Human
uugagggaaauaacugaugcuu

SEQ ID NO: 198606 - RNA, 22 nt, Human
ccaggaaggccuggaugccccc

SEQ ID NO: 198607 - RNA, 22 nt, Human
gaauacaugaacccuccugugg

SEQ ID NO: 198608 - RNA, 19 nt, Human
ucuccaguuuauucuucca

SEQ ID NO: 198609 - RNA, 22 nt, Human
agacaccuaauagaugaauuca

SEQ ID NO: 198610 - RNA, 22 nt, Human
cuggguucucugcuuagggccu

SEQ ID NO: 198611 - RNA, 22 nt, Human
acugggccagaucagagcaacu

SEQ ID NO: 198612 - RNA, 22 nt, Human
gaaaggcuacugucaucaauua

SEQ ID NO: 198613 - RNA, 19 nt, Human
gagacauguagauagaaga

SEQ ID NO: 198614 - RNA, 22 nt, Human
cuuaggaaugucccuucccaca

SEQ ID NO: 198615 - RNA, 22 nt, Human
uuauaacaacaguuuacuuuaa

SEQ ID NO: 198616 - RNA, 22 nt, Human
cagaagaauggugucugagcuc

SEQ ID NO: 198617 - RNA, 22 nt, Human
acagguggcagaagcauuuacu

SEQ ID NO: 198618 - RNA, 22 nt, Human
cuggcuggaacgccgaggcggc

SEQ ID NO: 198619 - RNA, 17 nt, Human
gagagucuaaugggaga

SEQ ID NO: 198620 - RNA, 22 nt, Human
uggugcaguagaaggccgacuu

SEQ ID NO: 198621 - RNA, 22 nt, Human
ucagugcuuuugagaagcuccu

SEQ ID NO: 198622 - RNA, 22 nt, Human
aauucugagaacaaaagguacu

SEQ ID NO: 198623 - RNA, 22 nt, Human
aacuguagugcuuauagacucu

SEQ ID NO: 198624 - RNA, 22 nt, Human
ucucuggcuuagguugagugca

SEQ ID NO: 198625 - RNA, 22 nt, Human
ccuuuucugaaccacuuaaaua

SEQ ID NO: 198626 - RNA, 22 nt, Human
cugcgugagcgugcccgucuug

SEQ ID NO: 198627 - RNA, 22 nt, Human
uuugacucaagcccucauguua

SEQ ID NO: 198628 - RNA, 22 nt, Human
ccagguguggggaggacucaca

SEQ ID NO: 198629 - RNA, 22 nt, Human
gugaaaauaaggcugguucuug

SEQ ID NO: 198630 - RNA, 22 nt, Human
uaaggccagccagcaaaucugu

SEQ ID NO: 198631 - RNA, 22 nt, Human
gcgagggcacgcgguugaaggc

SEQ ID NO: 198632 - RNA, 22 nt, Human
uuagaaaugucacagaucugau

SEQ ID NO: 198633 - RNA, 22 nt, Human
aauguacacugaaagccuauca

SEQ ID NO: 198634 - RNA, 22 nt, Human
uaggcuaggcugaagguuuugg

SEQ ID NO: 198635 - RNA, 22 nt, Human
gcagggaccaaaagaggcagua

SEQ ID NO: 198636 - RNA, 22 nt, Human
ggcaggucagguccaugaccaa

SEQ ID NO: 198637 - RNA, 22 nt, Human
ccuccuggagcauuggugagga

SEQ ID NO: 198638 - RNA, 22 nt, Human
ugguuuugcuaaaauagaaaga

SEQ ID NO: 198639 - RNA, 22 nt, Human
aaggccucccugugugcaggug

SEQ ID NO: 198640 - RNA, 22 nt, Human
ucuucaaguuccaaagugcagg

SEQ ID NO: 198641 - RNA, 22 nt, Human
ccuccagucaccuggaugagaa

SEQ ID NO: 198642 - RNA, 22 nt, Human
aggagcuucagagagaaccugg

SEQ ID NO: 198643 - RNA, 22 nt, Human
gcagauggugggggaggaguac

SEQ ID NO: 198644 - RNA, 20 nt, Human
gaauguuucacuugcuccau

SEQ ID NO: 198645 - RNA, 22 nt, Human
guuggcuaugagagcuuuagug

SEQ ID NO: 198646 - RNA, 22 nt, Human
cugucagguuucccaucugcaa

SEQ ID NO: 198647 - RNA, 22 nt, Human
auccagagacuggggcugggau

SEQ ID NO: 198648 - RNA, 22 nt, Human
uuauacaccaucacugccuugg

SEQ ID NO: 198649 - RNA, 22 nt, Human
agaggcaaguucagagcuagga

SEQ ID NO: 198650 - RNA, 20 nt, Human
ccugcuguuuccauggggcc

SEQ ID NO: 198651 - RNA, 22 nt, Human
ucucccaggcuggagugcagug

SEQ ID NO: 198652 - RNA, 22 nt, Human
cagucucuggugaguugacagu

SEQ ID NO: 198653 - RNA, 22 nt, Human
uuucauguuaguugguucuugg

SEQ ID NO: 198654 - RNA, 22 nt, Human
uccugcagugugucuccugcac

SEQ ID NO: 198655 - RNA, 22 nt, Human
uagacauuuucucaacaucucu

SEQ ID NO: 198656 - RNA, 22 nt, Human
agcagcuggggccugugacgau

SEQ ID NO: 198657 - RNA, 22 nt, Human
uugggcucaggaguuugagacc

SEQ ID NO: 198658 - RNA, 22 nt, Human
aguccaggaagcaucauggucu

SEQ ID NO: 198659 - RNA, 22 nt, Human
auuccuucuaaaacgcugcccu

SEQ ID NO: 198660 - RNA, 22 nt, Human
aucuguggcagugaugagucuu

SEQ ID NO: 198661 - RNA, 22 nt, Human
uuucuucucuaaucucaaugau

SEQ ID NO: 198662 - RNA, 22 nt, Human
gugcuggggguuucuguagguc

SEQ ID NO: 198663 - RNA, 20 nt, Human
ugcaaacauuacuugggugu

SEQ ID NO: 198664 - RNA, 22 nt, Human
uuacagugagggugacauuuac

SEQ ID NO: 198665 - RNA, 22 nt, Human
uuaagcauaauuaaagugaaau

SEQ ID NO: 198666 - RNA, 22 nt, Human
aaagacaguggauucaaaaucc

SEQ ID NO: 198667 - RNA, 20 nt, Human
cuuugccuauucucugccug

SEQ ID NO: 198668 - RNA, 22 nt, Human
auuaguguguaggcuggaaaaa

SEQ ID NO: 198669 - RNA, 22 nt, Human
aacuccuuaaugcauuucagag

SEQ ID NO: 198670 - RNA, 22 nt, Human
ggcuccaggagggccuuggcca

SEQ ID NO: 198671 - RNA, 22 nt, Human
auuagaauuaugcuugcuaaug

SEQ ID NO: 198672 - RNA, 22 nt, Human
gagagugagauccuccugggga

SEQ ID NO: 198673 - RNA, 22 nt, Human
cagugcugacagggaggaaccu

SEQ ID NO: 198674 - RNA, 19 nt, Human
uaucuuuaugcaguggugg

SEQ ID NO: 198675 - RNA, 22 nt, Human
uguauucucucaauauuucaua

SEQ ID NO: 198676 - RNA, 22 nt, Human
acuucugauuaaggaugaaugc

SEQ ID NO: 198677 - RNA, 22 nt, Human
aucaaaguucguaacugauaac

SEQ ID NO: 198678 - RNA, 22 nt, Human
acacauuaaaacgucuacaaug

SEQ ID NO: 198679 - RNA, 22 nt, Human
cugcaggguuuuucaaggacaa

SEQ ID NO: 198680 - RNA, 22 nt, Human
cucugagguucccuggguccca

SEQ ID NO: 198681 - RNA, 22 nt, Human
cucccagauuccugcuguggga

SEQ ID NO: 198682 - RNA, 19 nt, Human
uggcauugguccagauaaa

SEQ ID NO: 198683 - RNA, 22 nt, Human
ucuccuggcucuaaaaggcugu

SEQ ID NO: 198684 - RNA, 22 nt, Human
cauuagaaaagcagcugggacc

SEQ ID NO: 198685 - RNA, 22 nt, Human
cuucucuggcuccucagcgccc

SEQ ID NO: 198686 - RNA, 22 nt, Human
gcugggcucguucccacacgcg

SEQ ID NO: 198687 - RNA, 22 nt, Human
uccccaggggcaucucucugcu

SEQ ID NO: 198688 - RNA, 20 nt, Human
agacaaugagugacagaguu

SEQ ID NO: 198689 - RNA, 22 nt, Human
caaaugcagauucaggaguucu

SEQ ID NO: 198690 - RNA, 22 nt, Human
uuauuugcccauguuuagcaga

SEQ ID NO: 198691 - RNA, 22 nt, Human
auuucagauucagaaauguagg

SEQ ID NO: 198692 - RNA, 22 nt, Human
ccugagagagugagcccugaca

SEQ ID NO: 198693 - RNA, 22 nt, Human
acucugugccaggcacuuuggg

SEQ ID NO: 198694 - RNA, 22 nt, Human
auguacaaccugcaugacaguc

SEQ ID NO: 198695 - RNA, 22 nt, Human
uugaaacaguagcucauagacc

SEQ ID NO: 198696 - RNA, 20 nt, Human
ugugucuuccuuucuuuaug

SEQ ID NO: 198697 - RNA, 22 nt, Human
gccaacaggccuugcucugcuc

SEQ ID NO: 198698 - RNA, 22 nt, Human
ggagcuguugauuguuugagga

SEQ ID NO: 198699 - RNA, 22 nt, Human
ugaaugauguauaauauugaga

SEQ ID NO: 198700 - RNA, 22 nt, Human
aacaugaaaagcccagagaggu

SEQ ID NO: 198701 - RNA, 22 nt, Human
guuauauauaguauuucucuga

SEQ ID NO: 198702 - RNA, 19 nt, Human
cacagccacagccaaccuc

SEQ ID NO: 198703 - RNA, 22 nt, Human
accccccagauaaucccuugag

SEQ ID NO: 198704 - RNA, 18 nt, Human
ucagcuuuugaaaaccaa

SEQ ID NO: 198705 - RNA, 22 nt, Human
uucauuuauucagcagguauuu

SEQ ID NO: 198706 - RNA, 22 nt, Human
ggaaggcucuguuccuugacuu

SEQ ID NO: 198707 - RNA, 21 nt, Human
uugcauuccuguuaguauaag

SEQ ID NO: 198708 - RNA, 22 nt, Human
agcuggcuggccccuuccugcc

SEQ ID NO: 198709 - RNA, 22 nt, Human
uacaagcucgggcagcucauua

SEQ ID NO: 198710 - RNA, 22 nt, Human
caaauguuaaauguguuaagac

SEQ ID NO: 198711 - RNA, 22 nt, Human
acccuuucuuacucacacgcuc

SEQ ID NO: 198712 - RNA, 22 nt, Human
ccagccuggagggcaguggugg

SEQ ID NO: 198713 - RNA, 22 nt, Human
uuacuucuuacaaaagaaauau

SEQ ID NO: 198714 - RNA, 22 nt, Human
gcuguccaggagugcagagauu

SEQ ID NO: 198715 - RNA, 22 nt, Human
aaggccagcuggagggaugagg

SEQ ID NO: 198716 - RNA, 22 nt, Human
augagcaauuaggaagaaaaca

SEQ ID NO: 198717 - RNA, 22 nt, Human
ccaaggcaaugugcagcuggug

SEQ ID NO: 198718 - RNA, 22 nt, Human
acucuguagaucucccgggagc

SEQ ID NO: 198719 - RNA, 22 nt, Human
cggagccugcuuguugcagcug

SEQ ID NO: 198720 - RNA, 22 nt, Human
uagaaagacagagguuuugucu

SEQ ID NO: 198721 - RNA, 22 nt, Human
agugaguggagagcucuagguu

SEQ ID NO: 198722 - RNA, 20 nt, Human
ugggguccuggaggggaucc

SEQ ID NO: 198723 - RNA, 22 nt, Human
ugaggcaaaguucaagcugaaa

SEQ ID NO: 198724 - RNA, 22 nt, Human
uccuggccaaguagauguggcg

SEQ ID NO: 198725 - RNA, 22 nt, Human
caggaagcacagugaggagacc

SEQ ID NO: 198726 - RNA, 22 nt, Human
aggcaacaugggccaggcagaa

SEQ ID NO: 198727 - RNA, 22 nt, Human
uguaucugacaguggagcggag

SEQ ID NO: 198728 - RNA, 22 nt, Human
cuagaacagucaaagugagcuc

SEQ ID NO: 198729 - RNA, 22 nt, Human
gagggcugccacguugggcgag

SEQ ID NO: 198730 - RNA, 22 nt, Human
uugcaaauauuguuuaccuuuc

SEQ ID NO: 198731 - RNA, 23 nt, Human
aaacuacaacgccaggcacugag

SEQ ID NO: 198732 - RNA, 23 nt, Human
uggccacaguccaugcaugccca

SEQ ID NO: 198733 - RNA, 22 nt, Human
gcuugaaaauucauagguauuu

SEQ ID NO: 198734 - RNA, 22 nt, Human
gagaugggcgagaagguggacu

SEQ ID NO: 198735 - RNA, 22 nt, Human
auguuuguugaaugaagaaagg

SEQ ID NO: 198736 - RNA, 22 nt, Human
agaaaugucaggaaagaagucc

SEQ ID NO: 198737 - RNA, 22 nt, Human
cagaguuuugugaacaacuugg

SEQ ID NO: 198738 - RNA, 22 nt, Human
cagacagcaggccuggaugugu

SEQ ID NO: 198739 - RNA, 22 nt, Human
gcagccacccucaaggcugaau

SEQ ID NO: 198740 - RNA, 22 nt, Human
ugacauguauguauuuguuuau

SEQ ID NO: 198741 - RNA, 23 nt, Human
ucaggugugcggacugcugaguc

SEQ ID NO: 198742 - RNA, 22 nt, Human
ccucaggcaggaaacugucccg

SEQ ID NO: 198743 - RNA, 22 nt, Human
gacauaaaugaaguuugacuau

SEQ ID NO: 198744 - RNA, 22 nt, Human
gaggaggcacuaguuagugaca

SEQ ID NO: 198745 - RNA, 18 nt, Human
ccucagggagagagacgc

SEQ ID NO: 198746 - RNA, 18 nt, Human
cgcccugcuauaaaugac

SEQ ID NO: 198747 - RNA, 22 nt, Human
aagcugauucuaaaauuuauua

SEQ ID NO: 198748 - RNA, 22 nt, Human
uggcugugaacaaagagaauaa

SEQ ID NO: 198749 - RNA, 22 nt, Human
cucccagccuucgccagucuga

SEQ ID NO: 198750 - RNA, 22 nt, Human
cccugugcagauggcagcuggg

SEQ ID NO: 198751 - RNA, 22 nt, Human
agugcacaccuuaguacaaagu

SEQ ID NO: 198752 - RNA, 22 nt, Human
cagagucuggacugcaggcucc

SEQ ID NO: 198753 - RNA, 22 nt, Human
ccucaggcugcucacacuuguc

SEQ ID NO: 198754 - RNA, 22 nt, Human
uaaacaagaaacauuuucuguu

SEQ ID NO: 198755 - RNA, 22 nt, Human
agagggugaaugagauagaaaa

SEQ ID NO: 198756 - RNA, 22 nt, Human
agcugaggcaugaugcuaucag

SEQ ID NO: 198757 - RNA, 22 nt, Human
aguguacaaaaugauagauaaa

SEQ ID NO: 198758 - RNA, 22 nt, Human
ccaggcuuccuaaugugugcag

SEQ ID NO: 198759 - RNA, 22 nt, Human
auauauaagcugaugagccaca

SEQ ID NO: 198760 - RNA, 22 nt, Human
uggcucagaagaaaagguaaac

SEQ ID NO: 198761 - RNA, 20 nt, Human
cccucccagaugcuucccaa

SEQ ID NO: 198762 - RNA, 22 nt, Human
uguuaugaacuucuagaaaaca

SEQ ID NO: 198763 - RNA, 22 nt, Human
gagagaaaagggggaauugauu

SEQ ID NO: 198764 - RNA, 22 nt, Human
gagcacguugaagcgcacuguc

SEQ ID NO: 198765 - RNA, 23 nt, Human
acagaggcuuaaaugaguggcag

SEQ ID NO: 198766 - RNA, 22 nt, Human
ggcagggcuugucucugugaug

SEQ ID NO: 198767 - RNA, 22 nt, Human
accaggcagcacuuuccuugca

SEQ ID NO: 198768 - RNA, 22 nt, Human
aggaggaauugacacagaagcc

SEQ ID NO: 198769 - RNA, 22 nt, Human
aagagcuggaguuugcagcccu

SEQ ID NO: 198770 - RNA, 22 nt, Human
aguuuuauguagacaauucauu

SEQ ID NO: 198771 - RNA, 22 nt, Human
gggcauggccaggugagggguc

SEQ ID NO: 198772 - RNA, 22 nt, Human
uguccauggagaagcucagggc

SEQ ID NO: 198773 - RNA, 22 nt, Human
gggcugcugcugccagcgacac

SEQ ID NO: 198774 - RNA, 22 nt, Human
aggcuccuagccuguggcuggu

SEQ ID NO: 198775 - RNA, 22 nt, Human
ugucucuccacacagccagugc

SEQ ID NO: 198776 - RNA, 22 nt, Human
aaguuccugggccaaguccagg

SEQ ID NO: 198777 - RNA, 22 nt, Human
ucuucuuuuauuucaagggugu

SEQ ID NO: 198778 - RNA, 22 nt, Human
ucacagaaagcuguguccugac

SEQ ID NO: 198779 - RNA, 22 nt, Human
cagcaccuguuagcauuaaaua

SEQ ID NO: 198780 - RNA, 22 nt, Human
ugggaaggcguggaaguagaag

SEQ ID NO: 198781 - RNA, 22 nt, Human
agucuuuuauucaaggcuaagu

SEQ ID NO: 198782 - RNA, 20 nt, Human
uggcggggaugagggaguua

SEQ ID NO: 198783 - RNA, 22 nt, Human
gauucuuacuucuaagcaagcu

SEQ ID NO: 198784 - RNA, 22 nt, Human
uuccucagcucagcgagagaga

SEQ ID NO: 198785 - RNA, 22 nt, Human
cacauuuacauauaaaacuuuc

SEQ ID NO: 198786 - RNA, 22 nt, Human
aggaagaggugugcaauggugu

SEQ ID NO: 198787 - RNA, 22 nt, Human
gcucagagauaaaacugaucag

SEQ ID NO: 198788 - RNA, 22 nt, Human
cucugcagauucaucccuucac

SEQ ID NO: 198789 - RNA, 20 nt, Human
gacaggagaguuagguaggu

SEQ ID NO: 198790 - RNA, 22 nt, Human
ggagaaggaagaaagcuacuau

SEQ ID NO: 198791 - RNA, 22 nt, Human
ucucaucauuccuucaaagccc

SEQ ID NO: 198792 - RNA, 22 nt, Human
agauggcugggccccaccccag

SEQ ID NO: 198793 - RNA, 22 nt, Human
aaagggaggggcgauaagccgg

SEQ ID NO: 198794 - RNA, 22 nt, Human
augguuuaagggagaauauuga

SEQ ID NO: 198795 - RNA, 22 nt, Human
uggucacacauguaucucaaug

SEQ ID NO: 198796 - RNA, 22 nt, Human
ugaccuuucuuugagauuccug

SEQ ID NO: 198797 - RNA, 22 nt, Human
cagagaaaaaauccugcucuca

SEQ ID NO: 198798 - RNA, 22 nt, Human
gugggcagcaccagggaagugu

SEQ ID NO: 198799 - RNA, 20 nt, Human
cccaggagugagcagcuuua

SEQ ID NO: 198800 - RNA, 22 nt, Human
ggagaugacacaauuuauuuau

SEQ ID NO: 198801 - RNA, 22 nt, Human
aagccaagguuuuggucacagc

SEQ ID NO: 198802 - RNA, 22 nt, Human
aggcucugugauccacaaugag

SEQ ID NO: 198803 - RNA, 22 nt, Human
gagcaugguuccauagguuggu

SEQ ID NO: 198804 - RNA, 22 nt, Human
ggcucaguguuuguggaacaua

SEQ ID NO: 198805 - RNA, 22 nt, Human
ucaggcccagagucacggaucc

SEQ ID NO: 198806 - RNA, 22 nt, Human
caucugcugcugaagccagcau

SEQ ID NO: 198807 - RNA, 18 nt, Human
ugagagaauguucaugcu

SEQ ID NO: 198808 - RNA, 19 nt, Human
cuuggcuuagcuucuuagc

SEQ ID NO: 198809 - RNA, 22 nt, Human
ccugcaccuucaagaaaauaau

SEQ ID NO: 198810 - RNA, 22 nt, Human
ccugcucagagcgucuugugug

SEQ ID NO: 198811 - RNA, 22 nt, Human
agagacagaucugagggaccuc

SEQ ID NO: 198812 - RNA, 22 nt, Human
aacugguauggugagaagagag

SEQ ID NO: 198813 - RNA, 22 nt, Human
auauuagggucucuaaauucua

SEQ ID NO: 198814 - RNA, 22 nt, Human
uuuccucacacagaagaucuug

SEQ ID NO: 198815 - RNA, 22 nt, Human
uccagcuuauagguagauuuaa

SEQ ID NO: 198816 - RNA, 22 nt, Human
aaacuuucauguaucucuuuca

SEQ ID NO: 198817 - RNA, 22 nt, Human
gcucagagaaguuaaggaauuu

SEQ ID NO: 198818 - RNA, 22 nt, Human
uuacaaguucagauuuucucau

SEQ ID NO: 198819 - RNA, 22 nt, Human
ucagcaggucugaggcggggcc

SEQ ID NO: 198820 - RNA, 22 nt, Human
uccuccucuaucagacagugcc

SEQ ID NO: 198821 - RNA, 17 nt, Human
uguauuuaucaugucag

SEQ ID NO: 198822 - RNA, 22 nt, Human
cugccuuuggggaguuagaggg

SEQ ID NO: 198823 - RNA, 22 nt, Human
agcuucucccuuuccuauuggu

SEQ ID NO: 198824 - RNA, 22 nt, Human
agagucuuagccucauuaguca

SEQ ID NO: 198825 - RNA, 22 nt, Human
gaggcagcuuggggcugugggu

SEQ ID NO: 198826 - RNA, 21 nt, Human
uggagcugccacuugagcugc

SEQ ID NO: 198827 - RNA, 22 nt, Human
ugcaggugcuccgggggugccc

SEQ ID NO: 198828 - RNA, 22 nt, Human
uccccucucugcgcucccaggu

SEQ ID NO: 198829 - RNA, 22 nt, Human
aagcauuucuguuuaucuaucg

SEQ ID NO: 198830 - RNA, 22 nt, Human
cccagugugccccuccugcagc

SEQ ID NO: 198831 - RNA, 22 nt, Human
cugcuucugggaugauggagua

SEQ ID NO: 198832 - RNA, 22 nt, Human
aggaaggggagaaguuaaagcu

SEQ ID NO: 198833 - RNA, 22 nt, Human
agucacuucuauucuauuaagu

SEQ ID NO: 198834 - RNA, 22 nt, Human
cuaaacuucauauguugcuuua

SEQ ID NO: 198835 - RNA, 22 nt, Human
gaggaacccagcugggguugcc

SEQ ID NO: 198836 - RNA, 22 nt, Human
aucccaugagaccacguuggcu

SEQ ID NO: 198837 - RNA, 22 nt, Human
guaauaaugguccccaaacacu

SEQ ID NO: 198838 - RNA, 21 nt, Human
augcacaaaaagacucuuucu

SEQ ID NO: 198839 - RNA, 22 nt, Human
gacaugugucugcaaguugauc

SEQ ID NO: 198840 - RNA, 22 nt, Human
auuauucauggucuuccacaau

SEQ ID NO: 198841 - RNA, 22 nt, Human
ccugagagccagugccugccca

SEQ ID NO: 198842 - RNA, 22 nt, Human
accacccucagcagagcugaaa

SEQ ID NO: 198843 - RNA, 20 nt, Human
acaguuuauuuuacuugguu

SEQ ID NO: 198844 - RNA, 22 nt, Human
uugaaacauucuccuauugauu

SEQ ID NO: 198845 - RNA, 22 nt, Human
aagggcacagggaaagagugca

SEQ ID NO: 198846 - RNA, 22 nt, Human
gccugugacccagggcccagga

SEQ ID NO: 198847 - RNA, 23 nt, Human
ucauucaaggcugguaucuuuca

SEQ ID NO: 198848 - RNA, 22 nt, Human
uuggccagugcuugugauuuuc

SEQ ID NO: 198849 - RNA, 22 nt, Human
ggcuuucucacagcauggcagc

SEQ ID NO: 198850 - RNA, 22 nt, Human
ucuucaauuagauuuaccaauu

SEQ ID NO: 198851 - RNA, 23 nt, Human
ggaaagagaggaguugugcauag

SEQ ID NO: 198852 - RNA, 22 nt, Human
aaguuacaguuauuauuuaaaa

SEQ ID NO: 198853 - RNA, 22 nt, Human
uuguguuaaggugcaucuagug

SEQ ID NO: 198854 - RNA, 22 nt, Human
gcuggcugggucccugagaggc

SEQ ID NO: 198855 - RNA, 22 nt, Human
cuguauuugaaagaaaagauuu

SEQ ID NO: 198856 - RNA, 22 nt, Human
uagaggcacagucuauguagag

SEQ ID NO: 198857 - RNA, 22 nt, Human
cuccagccagagugccucuguu

SEQ ID NO: 198858 - RNA, 21 nt, Human
gcugagacgcaaccucaguga

SEQ ID NO: 198859 - RNA, 22 nt, Human
cugugugcugaaaugcagugag

SEQ ID NO: 198860 - RNA, 22 nt, Human
ggcuggcuggcuuagcagagga

SEQ ID NO: 198861 - RNA, 20 nt, Human
cugcagggugagugggcgau

SEQ ID NO: 198862 - RNA, 22 nt, Human
ggaugucuuuacuuugggauuu

SEQ ID NO: 198863 - RNA, 22 nt, Human
acugggccaggggcuuuggagc

SEQ ID NO: 198864 - RNA, 22 nt, Human
gggaccugaggcccugcuccac

SEQ ID NO: 198865 - RNA, 22 nt, Human
ccugggcugaagucaagugugg

SEQ ID NO: 198866 - RNA, 17 nt, Human
cucccccccacgugucc

SEQ ID NO: 198867 - RNA, 22 nt, Human
agggcagagagaugaaugggau

SEQ ID NO: 198868 - RNA, 22 nt, Human
cagggcuguuagcugcugcucu

SEQ ID NO: 198869 - RNA, 22 nt, Human
cugggucucaggaguucugagg

SEQ ID NO: 198870 - RNA, 20 nt, Human
cuaagcacuuugauaaacug

SEQ ID NO: 198871 - RNA, 22 nt, Human
cucccaggcagggcugcccacu

SEQ ID NO: 198872 - RNA, 22 nt, Human
cagcagcugggaaggaggcuga

SEQ ID NO: 198873 - RNA, 22 nt, Human
ccuuuggagcaacugagagcua

SEQ ID NO: 198874 - RNA, 22 nt, Human
uuccaaagaaguucacauuuac

SEQ ID NO: 198875 - RNA, 22 nt, Human
ucugggagguguuuugagaacu

SEQ ID NO: 198876 - RNA, 22 nt, Human
agagucuuaucuuuuacaagua

SEQ ID NO: 198877 - RNA, 16 nt, Human
uaugugucucaucuac

SEQ ID NO: 198878 - RNA, 22 nt, Human
ccaggcucugagaggaauguga

SEQ ID NO: 198879 - RNA, 22 nt, Human
ccuuugguaauucuguguagag

SEQ ID NO: 198880 - RNA, 22 nt, Human
gcugccucccagagcccugcag

SEQ ID NO: 198881 - RNA, 22 nt, Human
auuucaaggacuacuuuucaau

SEQ ID NO: 198882 - RNA, 22 nt, Human
gugcaaaaggcauugugguuuu

SEQ ID NO: 198883 - RNA, 17 nt, Human
uuccugugguuugaucu

SEQ ID NO: 198884 - RNA, 22 nt, Human
aacuguuuggaacucuuccaca

SEQ ID NO: 198885 - RNA, 22 nt, Human
gccuggcagccuccaaccuuca

SEQ ID NO: 198886 - RNA, 22 nt, Human
uuucacauaaauauuaugccua

SEQ ID NO: 198887 - RNA, 22 nt, Human
uagcaccaugauggaagagcug

SEQ ID NO: 198888 - RNA, 22 nt, Human
uaauuacagguccaaaacaauc

SEQ ID NO: 198889 - RNA, 22 nt, Human
ggcucuggggccuccucccuug

SEQ ID NO: 198890 - RNA, 22 nt, Human
cagcuaggaaaccagagggcag

SEQ ID NO: 198891 - RNA, 22 nt, Human
ucagccaguauuugagugcuca

SEQ ID NO: 198892 - RNA, 22 nt, Human
ugccugccucuggcagcccugc

SEQ ID NO: 198893 - RNA, 22 nt, Human
uaaaugugaccuucauuuuaua

SEQ ID NO: 198894 - RNA, 22 nt, Human
guacaaguucuacucuauaaau

SEQ ID NO: 198895 - RNA, 22 nt, Human
uguugcugacaagagaggagca

SEQ ID NO: 198896 - RNA, 22 nt, Human
aggacacacuucugaggucuuu

SEQ ID NO: 198897 - RNA, 23 nt, Human
ccauaaucaggguuguggggucc

SEQ ID NO: 198898 - RNA, 22 nt, Human
ggccagggggcuucagacucca

SEQ ID NO: 198899 - RNA, 22 nt, Human
ucugggaaaugcuguuccuugu

SEQ ID NO: 198900 - RNA, 22 nt, Human
ugucaccucuuuggcugcagcu

SEQ ID NO: 198901 - RNA, 21 nt, Human
ucugccugagacuuugcuggu

SEQ ID NO: 198902 - RNA, 22 nt, Human
caaguccucgcuucuagcugug

SEQ ID NO: 198903 - RNA, 22 nt, Human
uuucucucuggcccugauuguc

SEQ ID NO: 198904 - RNA, 22 nt, Human
agaacaaggcuguuuccaaugc

SEQ ID NO: 198905 - RNA, 22 nt, Human
ugaggucaagcccagagcagca

SEQ ID NO: 198906 - RNA, 22 nt, Human
uugagaaaauaguucgaauguu

SEQ ID NO: 198907 - RNA, 22 nt, Human
cagucuuugacaagcccuuuca

SEQ ID NO: 198908 - RNA, 22 nt, Human
uagggauggaaacuaggaaucu

SEQ ID NO: 198909 - RNA, 22 nt, Human
agcagagccaggucucucugua

SEQ ID NO: 198910 - RNA, 22 nt, Human
uauccauaguuuauagaucaag

SEQ ID NO: 198911 - RNA, 22 nt, Human
gcucuggcccaaacccuuucua

SEQ ID NO: 198912 - RNA, 22 nt, Human
ucaggcugaaggaggccuaucu

SEQ ID NO: 198913 - RNA, 22 nt, Human
ucugccuucgcugcucccugaa

SEQ ID NO: 198914 - RNA, 22 nt, Human
gauuagaugacuaaugagcugu

SEQ ID NO: 198915 - RNA, 22 nt, Human
acacaacagaagagcaauugca

SEQ ID NO: 198916 - RNA, 22 nt, Human
ucaggcugguccccacagugga

SEQ ID NO: 198917 - RNA, 22 nt, Human
agacacuggugaagaaaucagg

SEQ ID NO: 198918 - RNA, 22 nt, Human
gguguccuacagggccgcaggc

SEQ ID NO: 198919 - RNA, 22 nt, Human
agcacagaguugcagagagcgu

SEQ ID NO: 198920 - RNA, 22 nt, Human
acucacuuuccauucaagcacc

SEQ ID NO: 198921 - RNA, 22 nt, Human
agcaaagcuaucucuauggaga

SEQ ID NO: 198922 - RNA, 22 nt, Human
guauuacauuuaguaauuaggc

SEQ ID NO: 198923 - RNA, 22 nt, Human
acccaggguagaaccucagagc

SEQ ID NO: 198924 - RNA, 22 nt, Human
augcaagaaacagagacgcuga

SEQ ID NO: 198925 - RNA, 20 nt, Human
uuucuuguacuuggagaagg

SEQ ID NO: 198926 - RNA, 22 nt, Human
ccugccugcggcccgcggggag

SEQ ID NO: 198927 - RNA, 23 nt, Human
auguccaguuuacuucaggauga

SEQ ID NO: 198928 - RNA, 22 nt, Human
uggcagagguauauugggagga

SEQ ID NO: 198929 - RNA, 22 nt, Human
ccaggcuuuaagagguggaaac

SEQ ID NO: 198930 - RNA, 22 nt, Human
gagcuuggccucuugaacgugg

SEQ ID NO: 198931 - RNA, 22 nt, Human
caggcucccugcaggccaguga

SEQ ID NO: 198932 - RNA, 22 nt, Human
uauccuguuuugcacaauuaua

SEQ ID NO: 198933 - RNA, 23 nt, Human
ugguccugccaacggugccccuc

SEQ ID NO: 198934 - RNA, 22 nt, Human
gacagcugccucuguguagauc

SEQ ID NO: 198935 - RNA, 22 nt, Human
gcugagguuucaggaguggcag

SEQ ID NO: 198936 - RNA, 17 nt, Human
gagugcagacacaagca

SEQ ID NO: 198937 - RNA, 22 nt, Human
cuguccccgcgaguccagagcu

SEQ ID NO: 198938 - RNA, 20 nt, Human
uuggcucagauuuuuauggg

SEQ ID NO: 198939 - RNA, 22 nt, Human
ggaaauacaaagauacaccacu

SEQ ID NO: 198940 - RNA, 22 nt, Human
uccaggcuagguuuacaggaca

SEQ ID NO: 198941 - RNA, 22 nt, Human
aaauuucuaagucaagaagaac

SEQ ID NO: 198942 - RNA, 22 nt, Human
cacagcugcccuaacuguacuc

SEQ ID NO: 198943 - RNA, 22 nt, Human
agguauaugaagaugaaauaac

SEQ ID NO: 198944 - RNA, 22 nt, Human
cauuuguacagaacagcuuuau

SEQ ID NO: 198945 - RNA, 18 nt, Human
aggagacagccucaccug

SEQ ID NO: 198946 - RNA, 22 nt, Human
gcugcagguugggcaacagagu

SEQ ID NO: 198947 - RNA, 22 nt, Human
cagccagagaaagggcacugcc

SEQ ID NO: 198948 - RNA, 22 nt, Human
gaaggagacccugaagaugcug

SEQ ID NO: 198949 - RNA, 22 nt, Human
uccuguuuaucugugugacucg

SEQ ID NO: 198950 - RNA, 22 nt, Human
cagaggcucagauggcccuggc

SEQ ID NO: 198951 - RNA, 22 nt, Human
uaacacugguuaucccugugca

SEQ ID NO: 198952 - RNA, 22 nt, Human
caaggccaagguuuugugaacu

SEQ ID NO: 198953 - RNA, 22 nt, Human
uagcaagaccaauauguagaua

SEQ ID NO: 198954 - RNA, 22 nt, Human
ugcauucaguuggucagcuuuu

SEQ ID NO: 198955 - RNA, 22 nt, Human
uguacauacauagauauacaca

SEQ ID NO: 198956 - RNA, 22 nt, Human
accaaaggcagagcugaacacu

SEQ ID NO: 198957 - RNA, 22 nt, Human
uauguauccguguguguacaga

SEQ ID NO: 198958 - RNA, 22 nt, Human
ucuugggauagugucucauggc

SEQ ID NO: 198959 - RNA, 22 nt, Human
ugacagagccaagaucaguacu

SEQ ID NO: 198960 - RNA, 22 nt, Human
acagaauaguagcuuaaaguca

SEQ ID NO: 198961 - RNA, 22 nt, Human
uugacaaaaaccucauuucacc

SEQ ID NO: 198962 - RNA, 22 nt, Human
uggggaaaggagagcauuauuu

SEQ ID NO: 198963 - RNA, 22 nt, Human
caggggaaggagccuugaaacu

SEQ ID NO: 198964 - RNA, 22 nt, Human
aggguccauucuuugccuuuuc

SEQ ID NO: 198965 - RNA, 22 nt, Human
guggccauaggaggucagauga

SEQ ID NO: 198966 - RNA, 22 nt, Human
cugcuuuaauuuagacaaggca

SEQ ID NO: 198967 - RNA, 22 nt, Human
auucuuuagccagcagguauau

SEQ ID NO: 198968 - RNA, 22 nt, Human
acauuucagcgugcaugacaug

SEQ ID NO: 198969 - RNA, 22 nt, Human
augaaaacagccuccugugaua

SEQ ID NO: 198970 - RNA, 22 nt, Human
ugaguccaagagccagugggaa

SEQ ID NO: 198971 - RNA, 22 nt, Human
uuauauaacucaggugggcuca

SEQ ID NO: 198972 - RNA, 22 nt, Human
ccacaggcugcugcaggucccg

SEQ ID NO: 198973 - RNA, 22 nt, Human
ugagcuggucuugaguguagcu

SEQ ID NO: 198974 - RNA, 22 nt, Human
auugugaauugagaguacuucu

SEQ ID NO: 198975 - RNA, 22 nt, Human
aaaaugagcauauugauccuuu

SEQ ID NO: 198976 - RNA, 22 nt, Human
ggcugagccuggagcaucuggu

SEQ ID NO: 198977 - RNA, 22 nt, Human
uccaagcauguggucaggagcc

SEQ ID NO: 198978 - RNA, 22 nt, Human
acaaguggguccuacauaaagc

SEQ ID NO: 198979 - RNA, 22 nt, Human
ccugagaagagcuuaugaguga

SEQ ID NO: 198980 - RNA, 22 nt, Human
auguccuuuguaucccuaggca

SEQ ID NO: 198981 - RNA, 22 nt, Human
auguaacauugaauuauauagu

SEQ ID NO: 198982 - RNA, 22 nt, Human
aagagcacuaacagagcugaua

SEQ ID NO: 198983 - RNA, 22 nt, Human
ucccagagcccaaguuggagag

SEQ ID NO: 198984 - RNA, 22 nt, Human
uagcagggagggccagugucaa

SEQ ID NO: 198985 - RNA, 22 nt, Human
cucaggauauugggcuggagca

SEQ ID NO: 198986 - RNA, 22 nt, Human
acugggccuugugugucucauc

SEQ ID NO: 198987 - RNA, 22 nt, Human
ugcugcaggccuuggcugggaa

SEQ ID NO: 198988 - RNA, 22 nt, Human
aagcucagcaugucuccuagaa

SEQ ID NO: 198989 - RNA, 22 nt, Human
cuggcagcaggucacacgcaga

SEQ ID NO: 198990 - RNA, 22 nt, Human
gagcuguggaaggcagggacca

SEQ ID NO: 198991 - RNA, 22 nt, Human
cagcuucuaaagugugaagcca

SEQ ID NO: 198992 - RNA, 22 nt, Human
acaguaaauaaugcauguugau

SEQ ID NO: 198993 - RNA, 22 nt, Human
aucugccuccaaguccaugugu

SEQ ID NO: 198994 - RNA, 22 nt, Human
uuuaagagcuaguaugucauuu

SEQ ID NO: 198995 - RNA, 21 nt, Human
ugggcgcuugaccucugcacu

SEQ ID NO: 198996 - RNA, 22 nt, Human
augacaagggaggguccugcua

SEQ ID NO: 198997 - RNA, 22 nt, Human
uauaucauggagauuaacauuc

SEQ ID NO: 198998 - RNA, 22 nt, Human
guuuauuccagcaaucugcuua

SEQ ID NO: 198999 - RNA, 22 nt, Human
uuugcaaauaccaugaaacuug

SEQ ID NO: 199000 - RNA, 19 nt, Human
uccaggccauucccagagc

SEQ ID NO: 199001 - RNA, 22 nt, Human
gcagugcaugucggaacucauu

SEQ ID NO: 199002 - RNA, 22 nt, Human
ugucauuuucauccuaaggagc

SEQ ID NO: 199003 - RNA, 23 nt, Human
auuuaaugcugaguugaauguua

SEQ ID NO: 199004 - RNA, 22 nt, Human
cagcuuuagagaaaacauauuu

SEQ ID NO: 199005 - RNA, 22 nt, Human
ucucagugauggcccauuugga

SEQ ID NO: 199006 - RNA, 22 nt, Human
ucucuuuaaaaauagugaaaua

SEQ ID NO: 199007 - RNA, 21 nt, Human
aucacugaaugccuucaagga

SEQ ID NO: 199008 - RNA, 18 nt, Human
agacaaacuucuucugcc

SEQ ID NO: 199009 - RNA, 22 nt, Human
aggagcagauugguaagaucau

SEQ ID NO: 199010 - RNA, 22 nt, Human
uugugucuaugguuugagcauc

SEQ ID NO: 199011 - RNA, 22 nt, Human
gcugcaggagauuuugagaguc

SEQ ID NO: 199012 - RNA, 22 nt, Human
agaaccaguuuaagauuugggu

SEQ ID NO: 199013 - RNA, 23 nt, Human
acucaaaauuuggcauuugagga

SEQ ID NO: 199014 - RNA, 22 nt, Human
ggcuccaguuugugccuucagc

SEQ ID NO: 199015 - RNA, 21 nt, Human
gcucagcugcuugguuccugu

SEQ ID NO: 199016 - RNA, 22 nt, Human
uuaaauuuuagaaacagacucu

SEQ ID NO: 199017 - RNA, 22 nt, Human
ggcacuggaaggaucaugugag

SEQ ID NO: 199018 - RNA, 22 nt, Human
cccucaccaggcuccaggcaug

SEQ ID NO: 199019 - RNA, 22 nt, Human
cauucacaaaaccacaugccau

SEQ ID NO: 199020 - RNA, 22 nt, Human
cuccagagucacacugccuggg

SEQ ID NO: 199021 - RNA, 22 nt, Human
ucaaacacuguaacauggaaaa

SEQ ID NO: 199022 - RNA, 22 nt, Human
auguaccucugcauuccugccu

SEQ ID NO: 199023 - RNA, 17 nt, Human
guaaggcuugcagaugc

SEQ ID NO: 199024 - RNA, 22 nt, Human
cacauucacuucucuguccacc

SEQ ID NO: 199025 - RNA, 22 nt, Human
aaaaucuggcaacacuaaguuu

SEQ ID NO: 199026 - RNA, 22 nt, Human
auuaggaaguaaguaucacaag

SEQ ID NO: 199027 - RNA, 22 nt, Human
agccuuguagaccauuuuaagg

SEQ ID NO: 199028 - RNA, 22 nt, Human
uagagucuaguguauacaaagu

SEQ ID NO: 199029 - RNA, 22 nt, Human
cauaauccuugauucaaauaau

SEQ ID NO: 199030 - RNA, 22 nt, Human
acaguggaauuuguagaugugu

SEQ ID NO: 199031 - RNA, 22 nt, Human
acccuccaggcugcagcuccug

SEQ ID NO: 199032 - RNA, 22 nt, Human
uaaagcauguguuagaagugca

SEQ ID NO: 199033 - RNA, 22 nt, Human
acaaguuuauuugauuagaaca

SEQ ID NO: 199034 - RNA, 22 nt, Human
ucuguggcugugcugggccaga

SEQ ID NO: 199035 - RNA, 19 nt, Human
ggaagcccugggucagagc

SEQ ID NO: 199036 - RNA, 22 nt, Human
ucaggaaaguguucucagagga

SEQ ID NO: 199037 - RNA, 15 nt, Human
ccaggcucugcacuc

SEQ ID NO: 199038 - RNA, 22 nt, Human
gucucugucuuaggccaggccu

SEQ ID NO: 199039 - RNA, 22 nt, Human
agcuccucuagaucugccacuu

SEQ ID NO: 199040 - RNA, 20 nt, Human
uucuaaacuguuaggcuugc

SEQ ID NO: 199041 - RNA, 22 nt, Human
gggcagguaggugaaauaauga

SEQ ID NO: 199042 - RNA, 22 nt, Human
uccaggcucagcacuugcuacu

SEQ ID NO: 199043 - RNA, 19 nt, Human
cugcugggugcugagggag

SEQ ID NO: 199044 - RNA, 22 nt, Human
gggggcuguccugugcauugua

SEQ ID NO: 199045 - RNA, 22 nt, Human
cagcaggucugcauuugagguc

SEQ ID NO: 199046 - RNA, 22 nt, Human
gauuauuuugugcaauaaucgg

SEQ ID NO: 199047 - RNA, 22 nt, Human
agucugguagaggaagaggccu

SEQ ID NO: 199048 - RNA, 22 nt, Human
gugcugaggagagggggugguc

SEQ ID NO: 199049 - RNA, 22 nt, Human
ugagccagcaggccuccagugg

SEQ ID NO: 199050 - RNA, 23 nt, Human
agccucagccgguggcagaagug

SEQ ID NO: 199051 - RNA, 22 nt, Human
ucuaccuggaguccguuguuaa

SEQ ID NO: 199052 - RNA, 22 nt, Human
ccaguuaguuaaaggcgcagua

SEQ ID NO: 199053 - RNA, 22 nt, Human
uccagugcuggaccagagcacc

SEQ ID NO: 199054 - RNA, 22 nt, Human
aucuggcuuaccuagggugccu

SEQ ID NO: 199055 - RNA, 22 nt, Human
uuccagaaaaaaauguauaucu

SEQ ID NO: 199056 - RNA, 22 nt, Human
ugcugugggcaguacauaagcu

SEQ ID NO: 199057 - RNA, 22 nt, Human
ccucucagcgauuccucuugga

SEQ ID NO: 199058 - RNA, 20 nt, Human
cacagaacaaauugcaggac

SEQ ID NO: 199059 - RNA, 22 nt, Human
gacagacaggugugguaggcac

SEQ ID NO: 199060 - RNA, 22 nt, Human
uacagggauuccugccgcucgc

SEQ ID NO: 199061 - RNA, 22 nt, Human
uggggaagcacuuugaacuuaa

SEQ ID NO: 199062 - RNA, 22 nt, Human
agaaugcaucuaaaagcagaga

SEQ ID NO: 199063 - RNA, 22 nt, Human
gucaucugugcuuuugguagga

SEQ ID NO: 199064 - RNA, 22 nt, Human
cucugaaaaugugguggggaaa

SEQ ID NO: 199065 - RNA, 22 nt, Human
uguaauuauuucugugcaguca

SEQ ID NO: 199066 - RNA, 22 nt, Human
ugucuuuuauaacugacauaua

SEQ ID NO: 199067 - RNA, 22 nt, Human
uaaggaggcugcugugaagaaa

SEQ ID NO: 199068 - RNA, 22 nt, Human
aaugucaauaacuuuaucccuc

SEQ ID NO: 199069 - RNA, 22 nt, Human
aagugauuauuguuuucagguu

SEQ ID NO: 199070 - RNA, 22 nt, Human
gcuuucugguuugugcuacagg

SEQ ID NO: 199071 - RNA, 22 nt, Human
cuguuggccuuucaucaguaau

SEQ ID NO: 199072 - RNA, 22 nt, Human
acuagaaaguuuccagaguuau

SEQ ID NO: 199073 - RNA, 22 nt, Human
uggcaggugaaguuguuaggga

SEQ ID NO: 199074 - RNA, 22 nt, Human
uggcuccucaucacaguuggug

SEQ ID NO: 199075 - RNA, 22 nt, Human
uagggcagccuuauagcuccca

SEQ ID NO: 199076 - RNA, 22 nt, Human
uugaggcacacacagguugcau

SEQ ID NO: 199077 - RNA, 22 nt, Human
augaauaaaacauuuuaaucag

SEQ ID NO: 199078 - RNA, 22 nt, Human
aaggcuuucagcuaacuugauu

SEQ ID NO: 199079 - RNA, 22 nt, Human
cuggguggaaagugcugagaau

SEQ ID NO: 199080 - RNA, 19 nt, Human
ggagaggcuggagggaugc

SEQ ID NO: 199081 - RNA, 22 nt, Human
ggagucugauuuuuuaugggug

SEQ ID NO: 199082 - RNA, 22 nt, Human
ccaccagcuucagcagccgcgg

SEQ ID NO: 199083 - RNA, 22 nt, Human
cuggaaggcggagguuguagug

SEQ ID NO: 199084 - RNA, 22 nt, Human
ucugacuugcaucuuaaaggag

SEQ ID NO: 199085 - RNA, 22 nt, Human
acacuucucuuugaagaacaau

SEQ ID NO: 199086 - RNA, 22 nt, Human
aagucuuuuugaaucuauaacu

SEQ ID NO: 199087 - RNA, 22 nt, Human
uucaggaucauuuguuuuaucu

SEQ ID NO: 199088 - RNA, 22 nt, Human
aucagacaauuguugaguacug

SEQ ID NO: 199089 - RNA, 22 nt, Human
ugaugacaaacuuuccugaugc

SEQ ID NO: 199090 - RNA, 22 nt, Human
ucuccaggggcugcugugccac

SEQ ID NO: 199091 - RNA, 18 nt, Human
ugagaggcuauuuuuugc

SEQ ID NO: 199092 - RNA, 22 nt, Human
gcucccuguucucagccaugau

SEQ ID NO: 199093 - RNA, 22 nt, Human
acuuaaaaacagauccagcagg

SEQ ID NO: 199094 - RNA, 22 nt, Human
gggagggaucugcuaggcaaug

SEQ ID NO: 199095 - RNA, 22 nt, Human
caaggcaugcaaugucuucagg

SEQ ID NO: 199096 - RNA, 22 nt, Human
acagagaccagcaucuucugcc

SEQ ID NO: 199097 - RNA, 22 nt, Human
uuccugugaagaucugggugcu

SEQ ID NO: 199098 - RNA, 22 nt, Human
gaucuuuagccaagacacacca

SEQ ID NO: 199099 - RNA, 23 nt, Human
uggcacagcaggugugcuuuguu

SEQ ID NO: 199100 - RNA, 22 nt, Human
cuucugagaggggcuaggagca

SEQ ID NO: 199101 - RNA, 22 nt, Human
uuucacagucaauuuggaguca

SEQ ID NO: 199102 - RNA, 22 nt, Human
gggagucugggcuagacuccuu

SEQ ID NO: 199103 - RNA, 22 nt, Human
ccuccuggauggauuuggugga

SEQ ID NO: 199104 - RNA, 15 nt, Human
gcaggcaggucaccu

SEQ ID NO: 199105 - RNA, 22 nt, Human
gagcuccucccaggguagcacu

SEQ ID NO: 199106 - RNA, 22 nt, Human
gacaugugagagcucgguuuuc

SEQ ID NO: 199107 - RNA, 22 nt, Human
aacuuugagucauugccucuuu

SEQ ID NO: 199108 - RNA, 22 nt, Human
aacaagucuaagagaauggcag

SEQ ID NO: 199109 - RNA, 22 nt, Human
cccaggagguggaguucacagu

SEQ ID NO: 199110 - RNA, 22 nt, Human
ugacaaauucauauuucagagg

SEQ ID NO: 199111 - RNA, 22 nt, Human
gcacuagauacuguucaggaaa

SEQ ID NO: 199112 - RNA, 22 nt, Human
ucugcagacaggaagcugaggc

SEQ ID NO: 199113 - RNA, 22 nt, Human
auuugccucugcuuucaaggau

SEQ ID NO: 199114 - RNA, 22 nt, Human
caggaaauucuuuuguuugugc

SEQ ID NO: 199115 - RNA, 22 nt, Human
uucauagguuugcugugaacau

SEQ ID NO: 199116 - RNA, 22 nt, Human
caaggccaugagcagcgagugu

SEQ ID NO: 199117 - RNA, 20 nt, Human
gggaggcgagggcugagcag

SEQ ID NO: 199118 - RNA, 22 nt, Human
cuuaaagaugucaaggcuguuu

SEQ ID NO: 199119 - RNA, 22 nt, Human
ugaaaugcuugggaccagaagu

SEQ ID NO: 199120 - RNA, 22 nt, Human
cuuuggaacaagaagaaauggc

SEQ ID NO: 199121 - RNA, 22 nt, Human
gcacuuuguggauuguauuucc

SEQ ID NO: 199122 - RNA, 22 nt, Human
cacagggaggcggucacuggcu

SEQ ID NO: 199123 - RNA, 22 nt, Human
agcacuguaguuauagcuaaca

SEQ ID NO: 199124 - RNA, 22 nt, Human
ugcagaaauaacucauauugca

SEQ ID NO: 199125 - RNA, 22 nt, Human
uacacauguuuggcaaguaugu

SEQ ID NO: 199126 - RNA, 22 nt, Human
uucuuacaaguauuccaggucc

SEQ ID NO: 199127 - RNA, 22 nt, Human
uugcaggguuaaaguaagguag

SEQ ID NO: 199128 - RNA, 20 nt, Human
acugguggacuguucauuga

SEQ ID NO: 199129 - RNA, 22 nt, Human
gugugcagaacagggagugggu

SEQ ID NO: 199130 - RNA, 23 nt, Human
agcaggcaucuguggcacaaggc

SEQ ID NO: 199131 - RNA, 22 nt, Human
ugaaggcccuaucuccauauac

SEQ ID NO: 199132 - RNA, 20 nt, Human
gggugugugcagggccuggu

SEQ ID NO: 199133 - RNA, 22 nt, Human
ucucuucacaugcuugcuccaa

SEQ ID NO: 199134 - RNA, 22 nt, Human
caggagugucuccacacagcaa

SEQ ID NO: 199135 - RNA, 22 nt, Human
aacccacaagcagcuguagccc

SEQ ID NO: 199136 - RNA, 18 nt, Human
gcugccuucccagucaag

SEQ ID NO: 199137 - RNA, 22 nt, Human
ucaagcaaaguuuagcugguua

SEQ ID NO: 199138 - RNA, 22 nt, Human
ccuggcagcagcacaugccuuc

SEQ ID NO: 199139 - RNA, 22 nt, Human
acacagcaaggucugacuuugg

SEQ ID NO: 199140 - RNA, 22 nt, Human
aucuuugugaaucucaacuugg

SEQ ID NO: 199141 - RNA, 22 nt, Human
agcugcaaguaagcuugcuccu

SEQ ID NO: 199142 - RNA, 22 nt, Human
cugagaggcagccagagaaaau

SEQ ID NO: 199143 - RNA, 21 nt, Human
gaucuagacuugggcccagua

SEQ ID NO: 199144 - RNA, 22 nt, Human
cagcuccuauuagacacugaau

SEQ ID NO: 199145 - RNA, 22 nt, Human
uugguacauuacaguuugauug

SEQ ID NO: 199146 - RNA, 22 nt, Human
ucuccuggcaugugggucaucu

SEQ ID NO: 199147 - RNA, 22 nt, Human
cugccacuuuggagugcucaga

SEQ ID NO: 199148 - RNA, 22 nt, Human
agaaaacuugucacagcucuca

SEQ ID NO: 199149 - RNA, 20 nt, Human
cugagcccagaucccagguc

SEQ ID NO: 199150 - RNA, 22 nt, Human
uggcacuuuacacccauuuggc

SEQ ID NO: 199151 - RNA, 22 nt, Human
ugaguucuaggcuuaaaacuaa

SEQ ID NO: 199152 - RNA, 22 nt, Human
aauggcacuuuauaaauguuaa

SEQ ID NO: 199153 - RNA, 22 nt, Human
ucagaaucuuucuagagucuag

SEQ ID NO: 199154 - RNA, 22 nt, Human
caggacagacagaaugccuaac

SEQ ID NO: 199155 - RNA, 22 nt, Human
uuguuucugaguuuucauguau

SEQ ID NO: 199156 - RNA, 22 nt, Human
acccagagcagagcuuggcuuc

SEQ ID NO: 199157 - RNA, 22 nt, Human
auaacuucaucaaauaggcaca

SEQ ID NO: 199158 - RNA, 22 nt, Human
cagagaaacucagauagcugau

SEQ ID NO: 199159 - RNA, 22 nt, Human
ucaggaagggugguccacaggg

SEQ ID NO: 199160 - RNA, 22 nt, Human
acacauauaccacuguaaauga

SEQ ID NO: 199161 - RNA, 22 nt, Human
uucagucuuguugaaaacuugg

SEQ ID NO: 199162 - RNA, 22 nt, Human
gcacacaucuuguaauccugag

SEQ ID NO: 199163 - RNA, 22 nt, Human
uggcugcugagaaggcagcugu

SEQ ID NO: 199164 - RNA, 22 nt, Human
ucuacugugguccuuguaacca

SEQ ID NO: 199165 - RNA, 22 nt, Human
caggcacaaauuucuagauaag

SEQ ID NO: 199166 - RNA, 22 nt, Human
cagggcacggagaagucacccc

SEQ ID NO: 199167 - RNA, 22 nt, Human
cagaaggcaaacaaaaggauuu

SEQ ID NO: 199168 - RNA, 22 nt, Human
agcugugggauuugggugugcc

SEQ ID NO: 199169 - RNA, 22 nt, Human
uucuuagugguagucaucuuug

SEQ ID NO: 199170 - RNA, 22 nt, Human
ugagcaucuuuuuacagguuua

SEQ ID NO: 199171 - RNA, 22 nt, Human
agcagcuggaacauaugaagaa

SEQ ID NO: 199172 - RNA, 22 nt, Human
gucccaggggagcucucugauu

SEQ ID NO: 199173 - RNA, 22 nt, Human
gccaggcagcagcgaggauggu

SEQ ID NO: 199174 - RNA, 22 nt, Human
uagggcucagcucuagcuccug

SEQ ID NO: 199175 - RNA, 22 nt, Human
gaggaaaugguuguucaggugg

SEQ ID NO: 199176 - RNA, 22 nt, Human
caauagcaggucuacagagaga

SEQ ID NO: 199177 - RNA, 22 nt, Human
ugaucaguguugguucuaucua

SEQ ID NO: 199178 - RNA, 22 nt, Human
ucagugucagucuuuuagauau

SEQ ID NO: 199179 - RNA, 22 nt, Human
acaugagaggcuguggaguaca

SEQ ID NO: 199180 - RNA, 22 nt, Human
uuccucagcuuuagacuaugaa

SEQ ID NO: 199181 - RNA, 22 nt, Human
ucaaaauuagugaccaaaggca

SEQ ID NO: 199182 - RNA, 20 nt, Human
auuccacuuguuugagguac

SEQ ID NO: 199183 - RNA, 22 nt, Human
uucaaugcuuauauggacuaau

SEQ ID NO: 199184 - RNA, 22 nt, Human
gggacaggcugagacuugagcu

SEQ ID NO: 199185 - RNA, 22 nt, Human
acugaauuagggaacacugaac

SEQ ID NO: 199186 - RNA, 20 nt, Human
cagaggcaaggagacuugga

SEQ ID NO: 199187 - RNA, 22 nt, Human
acacuugagguuuuuaggugcg

SEQ ID NO: 199188 - RNA, 22 nt, Human
uuguagaaaauuagaugcaugg

SEQ ID NO: 199189 - RNA, 23 nt, Human
uccucagcauguuuugucaugua

SEQ ID NO: 199190 - RNA, 22 nt, Human
agggccaccucucuggguuccc

SEQ ID NO: 199191 - RNA, 22 nt, Human
ucucugagccccugccucuuuc

SEQ ID NO: 199192 - RNA, 22 nt, Human
ccauggccugaaggagugcauc

SEQ ID NO: 199193 - RNA, 22 nt, Human
uaacagaaguuguucauugugg

SEQ ID NO: 199194 - RNA, 22 nt, Human
aaggagucugggccauucagag

SEQ ID NO: 199195 - RNA, 22 nt, Human
gcucagagaaguugugccuggc

SEQ ID NO: 199196 - RNA, 22 nt, Human
ccuggccagccagggcuggggu

SEQ ID NO: 199197 - RNA, 22 nt, Human
ugcacuuuaaaaaauggugaug

SEQ ID NO: 199198 - RNA, 22 nt, Human
aagagacaaugucuuuuggaua

SEQ ID NO: 199199 - RNA, 22 nt, Human
aaguacauccuagucucuuuca

SEQ ID NO: 199200 - RNA, 22 nt, Human
auucaacauauucugaguaaaa

SEQ ID NO: 199201 - RNA, 22 nt, Human
aauguucagggcagcccugcua

SEQ ID NO: 199202 - RNA, 22 nt, Human
auguuuacugguuuauagaaua

SEQ ID NO: 199203 - RNA, 19 nt, Human
uggccagguacugucugcu

SEQ ID NO: 199204 - RNA, 22 nt, Human
uccagagaucacacugggcagg

SEQ ID NO: 199205 - RNA, 22 nt, Human
ugcuuucuuuagcuccugaguc

SEQ ID NO: 199206 - RNA, 22 nt, Human
uaaggagggggaaugauuggca

SEQ ID NO: 199207 - RNA, 22 nt, Human
auggcagggcagccucucagag

SEQ ID NO: 199208 - RNA, 22 nt, Human
cacauuucugugagucaauauu

SEQ ID NO: 199209 - RNA, 22 nt, Human
uugagaacaggaguguucuuuu

SEQ ID NO: 199210 - RNA, 22 nt, Human
gcuggccauggggagugaggag

SEQ ID NO: 199211 - RNA, 22 nt, Human
cugcuccuguccagcagggcca

SEQ ID NO: 199212 - RNA, 22 nt, Human
ugucuccauagaagagacugca

SEQ ID NO: 199213 - RNA, 18 nt, Human
acucugggaccuguuauu

SEQ ID NO: 199214 - RNA, 22 nt, Human
gaggugugaugcagaguggugg

SEQ ID NO: 199215 - RNA, 22 nt, Human
acucaucugccauuccuguacc

SEQ ID NO: 199216 - RNA, 22 nt, Human
ugaaaacuugacaagugaggua

SEQ ID NO: 199217 - RNA, 22 nt, Human
gcagacagggcuacagagguac

SEQ ID NO: 199218 - RNA, 22 nt, Human
gugggggcuggcucguccugug

SEQ ID NO: 199219 - RNA, 22 nt, Human
aaaauucauggcuugggaaaag

SEQ ID NO: 199220 - RNA, 22 nt, Human
gaggccaggggagucagcgucc

SEQ ID NO: 199221 - RNA, 22 nt, Human
gaugagggccugguggcugugc

SEQ ID NO: 199222 - RNA, 22 nt, Human
uacagaacugaaguagugaaaa

SEQ ID NO: 199223 - RNA, 22 nt, Human
ccuggcagguggcgcccucggc

SEQ ID NO: 199224 - RNA, 22 nt, Human
gcuguggcccuuggcaucugcg

SEQ ID NO: 199225 - RNA, 22 nt, Human
gcaugcagucaaccaguaaggg

SEQ ID NO: 199226 - RNA, 22 nt, Human
guggcucuccauugacauggaa

SEQ ID NO: 199227 - RNA, 22 nt, Human
cagugccucaggccagccugca

SEQ ID NO: 199228 - RNA, 22 nt, Human
acaguaaccucuccucugaagg

SEQ ID NO: 199229 - RNA, 22 nt, Human
ucccaggacaugggcucugcuc

SEQ ID NO: 199230 - RNA, 22 nt, Human
uuucacauguauauaggcauua

SEQ ID NO: 199231 - RNA, 22 nt, Human
gcaacaaguguaaacaugcauu

SEQ ID NO: 199232 - RNA, 22 nt, Human
aacuucuggauguuucaaaugu

SEQ ID NO: 199233 - RNA, 22 nt, Human
uguaauaaugaggcauccagcc

SEQ ID NO: 199234 - RNA, 21 nt, Human
ggccucugucauccugggaag

SEQ ID NO: 199235 - RNA, 22 nt, Human
caugccauucccugauccuaac

SEQ ID NO: 199236 - RNA, 22 nt, Human
cauugauuauugaagggucuuu

SEQ ID NO: 199237 - RNA, 22 nt, Human
ggguccagguuuagucauuugu

SEQ ID NO: 199238 - RNA, 22 nt, Human
cagcccagcagucuuagccugc

SEQ ID NO: 199239 - RNA, 22 nt, Human
ucuguuuaaugggaaugauacu

SEQ ID NO: 199240 - RNA, 22 nt, Human
agucucaagggaugucucuaua

SEQ ID NO: 199241 - RNA, 21 nt, Human
gggcuuuuuauuuagcacugu

SEQ ID NO: 199242 - RNA, 22 nt, Human
uuagaaagggugucugaaucug

SEQ ID NO: 199243 - RNA, 20 nt, Human
cuuagaaauuuuuacccugg

SEQ ID NO: 199244 - RNA, 22 nt, Human
ccuggcagguagcauugaggag

SEQ ID NO: 199245 - RNA, 22 nt, Human
ccucucccaggcgcggcggcag

SEQ ID NO: 199246 - RNA, 22 nt, Human
ucagcagauggguuguguuggc

SEQ ID NO: 199247 - RNA, 22 nt, Human
cagacagggguaaccuuccuca

SEQ ID NO: 199248 - RNA, 22 nt, Human
acagaaacccagaaaaccucuc

SEQ ID NO: 199249 - RNA, 22 nt, Human
cucagcaccccgacaggacauu

SEQ ID NO: 199250 - RNA, 22 nt, Human
aucuuacagcagcaaggaagua

SEQ ID NO: 199251 - RNA, 22 nt, Human
uucagugugugauaccugcugu

SEQ ID NO: 199252 - RNA, 22 nt, Human
agucacucugcuacaugacagc

SEQ ID NO: 199253 - RNA, 22 nt, Human
ucaguuuaauacccagaugccu

SEQ ID NO: 199254 - RNA, 22 nt, Human
ugauuucucuccguuauuucag

SEQ ID NO: 199255 - RNA, 22 nt, Human
cagccccuuccuggcaucugga

SEQ ID NO: 199256 - RNA, 20 nt, Human
aaugaguccugcuggaucac

SEQ ID NO: 199257 - RNA, 22 nt, Human
agugagcaucuucaggagccaa

SEQ ID NO: 199258 - RNA, 22 nt, Human
aucagagcacugagcaggacac

SEQ ID NO: 199259 - RNA, 22 nt, Human
guuuuuaucuaauagcaguuau

SEQ ID NO: 199260 - RNA, 22 nt, Human
caggcccuggcagggcugaguc

SEQ ID NO: 199261 - RNA, 22 nt, Human
uaacauuagguagacauaagcc

SEQ ID NO: 199262 - RNA, 23 nt, Human
auauucacgccgccagagguccc

SEQ ID NO: 199263 - RNA, 22 nt, Human
ucacagaagcaucauacccgga

SEQ ID NO: 199264 - RNA, 22 nt, Human
gcugugcaucuucauucuggac

SEQ ID NO: 199265 - RNA, 22 nt, Human
uggcuucucuggcauccccauc

SEQ ID NO: 199266 - RNA, 22 nt, Human
gaaguuauuuccugguguugga

SEQ ID NO: 199267 - RNA, 22 nt, Human
uggggccagggaggaccagaca

SEQ ID NO: 199268 - RNA, 22 nt, Human
caggucuggguugauggccugg

SEQ ID NO: 199269 - RNA, 22 nt, Human
acucaggaaaugaagacugguu

SEQ ID NO: 199270 - RNA, 21 nt, Human
aaaaaugaaguuguucaggaa

SEQ ID NO: 199271 - RNA, 22 nt, Human
ugggagaagacguacuuuagac

SEQ ID NO: 199272 - RNA, 22 nt, Human
uccugcagacauuuacaccuuu

SEQ ID NO: 199273 - RNA, 22 nt, Human
uuucucugugccauuuccauaa

SEQ ID NO: 199274 - RNA, 22 nt, Human
uaaaaugacuuccuccaacauc

SEQ ID NO: 199275 - RNA, 22 nt, Human
uaguggagaguuguuuugugca

SEQ ID NO: 199276 - RNA, 19 nt, Human
ucugucauuucuucuguac

SEQ ID NO: 199277 - RNA, 22 nt, Human
guccugggccugcugaggcuga

SEQ ID NO: 199278 - RNA, 22 nt, Human
auugacagaaaauuggauggca

SEQ ID NO: 199279 - RNA, 22 nt, Human
ucccucagagaccguggugcag

SEQ ID NO: 199280 - RNA, 22 nt, Human
cuguaaauaugaagaauauaug

SEQ ID NO: 199281 - RNA, 18 nt, Human
cucucuuuccacucuuug

SEQ ID NO: 199282 - RNA, 22 nt, Human
ucccauauaugcaaaaauguaa

SEQ ID NO: 199283 - RNA, 22 nt, Human
aguaacucuccuuugacauauu

SEQ ID NO: 199284 - RNA, 22 nt, Human
aaagcacaggagaguucaguaa

SEQ ID NO: 199285 - RNA, 22 nt, Human
ugguuugacaaugaggacuggu

SEQ ID NO: 199286 - RNA, 22 nt, Human
ugcaaauagccuauauuuauag

SEQ ID NO: 199287 - RNA, 22 nt, Human
uacuuucaugucuauacauauu

SEQ ID NO: 199288 - RNA, 22 nt, Human
uugcuuuacggcaaggccccag

SEQ ID NO: 199289 - RNA, 22 nt, Human
ccucuuccugcacugacauuuu

SEQ ID NO: 199290 - RNA, 22 nt, Human
acauguuagaaaugcagaaucu

SEQ ID NO: 199291 - RNA, 22 nt, Human
gcccagcccugaggucacagcu

SEQ ID NO: 199292 - RNA, 20 nt, Human
uccuccaaccagcugcuaau

SEQ ID NO: 199293 - RNA, 19 nt, Human
agcacagacaagaccagca

SEQ ID NO: 199294 - RNA, 22 nt, Human
uagaauccaccuacacaagaga

SEQ ID NO: 199295 - RNA, 22 nt, Human
uucuagaugcuuauaggcauau

SEQ ID NO: 199296 - RNA, 22 nt, Human
acuacauucaugcucguguugg

SEQ ID NO: 199297 - RNA, 22 nt, Human
ugggagauauugcuguggcugu

SEQ ID NO: 199298 - RNA, 22 nt, Human
uguuuuggaacaaaagcuauuc

SEQ ID NO: 199299 - RNA, 22 nt, Human
uuugucauaucacacaauuuug

SEQ ID NO: 199300 - RNA, 22 nt, Human
auuuccuguaggggcuugcgaa

SEQ ID NO: 199301 - RNA, 22 nt, Human
cugagaguguggcuuccaggcc

SEQ ID NO: 199302 - RNA, 22 nt, Human
acaaaaguguaggaauuccuua

SEQ ID NO: 199303 - RNA, 22 nt, Human
aaagcaguauaguggaagggcu

SEQ ID NO: 199304 - RNA, 22 nt, Human
cuuugaaaggaagccacacagc

SEQ ID NO: 199305 - RNA, 22 nt, Human
uugguuacaaguuugcucugcc

SEQ ID NO: 199306 - RNA, 22 nt, Human
uaaaggcucagggaaccagauc

SEQ ID NO: 199307 - RNA, 22 nt, Human
gcagcccugcagcuccacaccg

SEQ ID NO: 199308 - RNA, 22 nt, Human
gacaucauaucaggaggcaugu

SEQ ID NO: 199309 - RNA, 22 nt, Human
uugcuuuaaugagauuuugcca

SEQ ID NO: 199310 - RNA, 22 nt, Human
ggaccaggcaagcugaggcggg

SEQ ID NO: 199311 - RNA, 22 nt, Human
gacagcagacagccuggccccu

SEQ ID NO: 199312 - RNA, 22 nt, Human
auacacuaaucaugugcucagu

SEQ ID NO: 199313 - RNA, 22 nt, Human
uuucuagucucgaucucuuaau

SEQ ID NO: 199314 - RNA, 22 nt, Human
ggcacugggugagggucacugg

SEQ ID NO: 199315 - RNA, 22 nt, Human
ccagcaucuaacgcuccuggga

SEQ ID NO: 199316 - RNA, 22 nt, Human
acauuguuugagaauacagaug

SEQ ID NO: 199317 - RNA, 18 nt, Human
gccagagguacuacugau

SEQ ID NO: 199318 - RNA, 22 nt, Human
cugucuguguggacacggcugc

SEQ ID NO: 199319 - RNA, 22 nt, Human
ugaggaauggcuuaauguggga

SEQ ID NO: 199320 - RNA, 23 nt, Human
uagaaugucauucaaugauaugg

SEQ ID NO: 199321 - RNA, 22 nt, Human
agaaagcuggagucaagcagag

SEQ ID NO: 199322 - RNA, 22 nt, Human
gagaggccaaaaucccugcccc

SEQ ID NO: 199323 - RNA, 22 nt, Human
uuggaaauacgaguaguaucau

SEQ ID NO: 199324 - RNA, 22 nt, Human
uggcucugagucugcccuuggc

SEQ ID NO: 199325 - RNA, 22 nt, Human
ccugcaccacacucacugcuca

SEQ ID NO: 199326 - RNA, 22 nt, Human
uuagaauuucugcucacuuuga

SEQ ID NO: 199327 - RNA, 22 nt, Human
uugcucaggcuuagagcuacua

SEQ ID NO: 199328 - RNA, 22 nt, Human
gaugugucuccauacaccaccc

SEQ ID NO: 199329 - RNA, 22 nt, Human
aggguggcuuaauuccaaaggg

SEQ ID NO: 199330 - RNA, 22 nt, Human
ggguaggaaauccagagguggc

SEQ ID NO: 199331 - RNA, 22 nt, Human
cuagaaacauuacauguguuaa

SEQ ID NO: 199332 - RNA, 22 nt, Human
cauuuccugucuggaggucaaa

SEQ ID NO: 199333 - RNA, 22 nt, Human
auacaugacucacacauucugc

SEQ ID NO: 199334 - RNA, 22 nt, Human
ggcagcuguuuguccuccuguu

SEQ ID NO: 199335 - RNA, 22 nt, Human
aucuccagggugcccuuguucu

SEQ ID NO: 199336 - RNA, 20 nt, Human
guguuucaugugauacaaug

SEQ ID NO: 199337 - RNA, 22 nt, Human
gcuucagcuuugucuccuuggg

SEQ ID NO: 199338 - RNA, 22 nt, Human
caguccugggcacagcccuggg

SEQ ID NO: 199339 - RNA, 22 nt, Human
gggcuucucucagaaacuauca

SEQ ID NO: 199340 - RNA, 22 nt, Human
gcccaggacucagggugucgcg

SEQ ID NO: 199341 - RNA, 22 nt, Human
ucugcuuucuuacuaaaaauga

SEQ ID NO: 199342 - RNA, 22 nt, Human
cccugccaaucccgucucucug

SEQ ID NO: 199343 - RNA, 22 nt, Human
cugccagaagguuccugcugca

SEQ ID NO: 199344 - RNA, 22 nt, Human
cucuccagccaggggcuuccug

SEQ ID NO: 199345 - RNA, 22 nt, Human
uuagaggcaugauucaguaaag

SEQ ID NO: 199346 - RNA, 22 nt, Human
uuaauuaugagaaagggaaaag

SEQ ID NO: 199347 - RNA, 22 nt, Human
uuauacagcauugcuagugaug

SEQ ID NO: 199348 - RNA, 22 nt, Human
cucagagaaaugucacaacaau

SEQ ID NO: 199349 - RNA, 22 nt, Human
gaggcacauauauacagagccc

SEQ ID NO: 199350 - RNA, 22 nt, Human
uggguacuccuauuaguucagu

SEQ ID NO: 199351 - RNA, 20 nt, Human
acagugcauggggggacagc

SEQ ID NO: 199352 - RNA, 22 nt, Human
cagaaguucuagauuugagucc

SEQ ID NO: 199353 - RNA, 20 nt, Human
augauuuugcacuaacuuca

SEQ ID NO: 199354 - RNA, 22 nt, Human
gccaggcugguuauuuaaugag

SEQ ID NO: 199355 - RNA, 22 nt, Human
ucuacuguagugaugcugcagu

SEQ ID NO: 199356 - RNA, 22 nt, Human
cugugccaggcccagcugacuu

SEQ ID NO: 199357 - RNA, 22 nt, Human
ucucuccaacaugguggugcug

SEQ ID NO: 199358 - RNA, 22 nt, Human
cuggcucaugugaugagggcaa

SEQ ID NO: 199359 - RNA, 22 nt, Human
cuggaagaccccccaggacuca

SEQ ID NO: 199360 - RNA, 22 nt, Human
cugcacagaggucggucugcca

SEQ ID NO: 199361 - RNA, 22 nt, Human
auuaaggugucaauguauuugg

SEQ ID NO: 199362 - RNA, 22 nt, Human
gaaguuccagugauauaaaacu

SEQ ID NO: 199363 - RNA, 22 nt, Human
cacagaaaaaggcuugaaaauc

SEQ ID NO: 199364 - RNA, 22 nt, Human
aggacuuagaacauuauguacu

SEQ ID NO: 199365 - RNA, 22 nt, Human
uaacagaguaacagguauguaa

SEQ ID NO: 199366 - RNA, 22 nt, Human
gacuguggcaggcucagcacug

SEQ ID NO: 199367 - RNA, 22 nt, Human
gcccagcccagaaagguucgga

SEQ ID NO: 199368 - RNA, 22 nt, Human
ccugcagaaaggguccccagga

SEQ ID NO: 199369 - RNA, 22 nt, Human
acucugggagaggacaaacaaa

SEQ ID NO: 199370 - RNA, 22 nt, Human
cucagcauucaauguccagucc

SEQ ID NO: 199371 - RNA, 22 nt, Human
caugcauguuuacuacagugac

SEQ ID NO: 199372 - RNA, 20 nt, Human
ugacacaaauugcuuucuca

SEQ ID NO: 199373 - RNA, 22 nt, Human
cauuuuaccuagaagcugaaag

SEQ ID NO: 199374 - RNA, 22 nt, Human
augcaggagcccucuugagggc

SEQ ID NO: 199375 - RNA, 18 nt, Human
ccugugacagaggcauca

SEQ ID NO: 199376 - RNA, 22 nt, Human
auauaacucuccauuaagggcc

SEQ ID NO: 199377 - RNA, 22 nt, Human
gagaaccuacuguauacuauau

SEQ ID NO: 199378 - RNA, 18 nt, Human
uguagcuggaggccaggc

SEQ ID NO: 199379 - RNA, 21 nt, Human
cagacaugagucucagcuuug

SEQ ID NO: 199380 - RNA, 20 nt, Human
uccucagaagacauuugggg

SEQ ID NO: 199381 - RNA, 22 nt, Human
ugugaaggagaugaagggagug

SEQ ID NO: 199382 - RNA, 22 nt, Human
auucuucagcaggggacacuau

SEQ ID NO: 199383 - RNA, 22 nt, Human
ccagugggagggagcuaggcca

SEQ ID NO: 199384 - RNA, 22 nt, Human
guggccugugcugucuccccaa

SEQ ID NO: 199385 - RNA, 22 nt, Human
uugaaagauagugaagccagcc

SEQ ID NO: 199386 - RNA, 22 nt, Human
gcaccaggaagcuguuauagca

SEQ ID NO: 199387 - RNA, 22 nt, Human
cuagggaccucagcuccuggag

SEQ ID NO: 199388 - RNA, 22 nt, Human
uugauuaaacaggcauauucaa

SEQ ID NO: 199389 - RNA, 22 nt, Human
ugguggcaauucaaagacagca

SEQ ID NO: 199390 - RNA, 22 nt, Human
gcccuccugcaggggcuucugg

SEQ ID NO: 199391 - RNA, 22 nt, Human
uuauuuacuggauggccuuggg

SEQ ID NO: 199392 - RNA, 22 nt, Human
aaaaccacaaugacuuuugcac

SEQ ID NO: 199393 - RNA, 22 nt, Human
caggcagcugcgacaagagagc

SEQ ID NO: 199394 - RNA, 22 nt, Human
ucacaggagucauaauuacagu

SEQ ID NO: 199395 - RNA, 22 nt, Human
cagggcuguaaauuagugcuga

SEQ ID NO: 199396 - RNA, 22 nt, Human
gccaggcucuuccauuuggguc

SEQ ID NO: 199397 - RNA, 22 nt, Human
uauuucugaggcccaggaagug

SEQ ID NO: 199398 - RNA, 22 nt, Human
gccucaggugcaucucucauuc

SEQ ID NO: 199399 - RNA, 22 nt, Human
uccaggaagccacacugggccu

SEQ ID NO: 199400 - RNA, 22 nt, Human
uggcaaagugacuccuuggggc

SEQ ID NO: 199401 - RNA, 22 nt, Human
ucuguggcuggagaacuugucu

SEQ ID NO: 199402 - RNA, 22 nt, Human
agggccucugacgcccccagcc

SEQ ID NO: 199403 - RNA, 22 nt, Human
cuguuauuuuccucugaacucu

SEQ ID NO: 199404 - RNA, 22 nt, Human
auauuuguugaguucuuaugau

SEQ ID NO: 199405 - RNA, 22 nt, Human
cucucuguucauugagucaaaa

SEQ ID NO: 199406 - RNA, 22 nt, Human
ugggagauaauucauuguguuc

SEQ ID NO: 199407 - RNA, 22 nt, Human
aaaguauucuugacuguuuuuc

SEQ ID NO: 199408 - RNA, 22 nt, Human
augcugaagaguucaugauuau

SEQ ID NO: 199409 - RNA, 22 nt, Human
ucugggucuuuacccauggaau

SEQ ID NO: 199410 - RNA, 22 nt, Human
uugcuuagagccaaucuugauu

SEQ ID NO: 199411 - RNA, 22 nt, Human
uuuuaauccaucugguaaaccu

SEQ ID NO: 199412 - RNA, 22 nt, Human
uggcucagagccuugagagcug

SEQ ID NO: 199413 - RNA, 23 nt, Human
uguuuucuuguccugguauaauu

SEQ ID NO: 199414 - RNA, 22 nt, Human
auguuacaaauccuacagguag

SEQ ID NO: 199415 - RNA, 22 nt, Human
gcagaauugauggagaacuuaa

SEQ ID NO: 199416 - RNA, 22 nt, Human
accccuuggaguccgcgcccag

SEQ ID NO: 199417 - RNA, 22 nt, Human
ucacaucacccugcucuuaauu

SEQ ID NO: 199418 - RNA, 22 nt, Human
agauggcuauagauagccuuuc

SEQ ID NO: 199419 - RNA, 22 nt, Human
uuuagagaggcucuguaaaaug

SEQ ID NO: 199420 - RNA, 22 nt, Human
auguaucagauaaagcaugugg

SEQ ID NO: 199421 - RNA, 22 nt, Human
agaugagaauuuuuagagugcu

SEQ ID NO: 199422 - RNA, 22 nt, Human
auagacaaacacgaagaugaca

SEQ ID NO: 199423 - RNA, 22 nt, Human
gacauaaaguucuugcuugaau

SEQ ID NO: 199424 - RNA, 22 nt, Human
uuccucagggaggcuagcagua

SEQ ID NO: 199425 - RNA, 22 nt, Human
uacauaauaaggggcauggugu

SEQ ID NO: 199426 - RNA, 22 nt, Human
aggcugcucugcgaagucagcu

SEQ ID NO: 199427 - RNA, 22 nt, Human
gcaguaagaaagucaagcaguu

SEQ ID NO: 199428 - RNA, 22 nt, Human
agguccagccugcccucucucc

SEQ ID NO: 199429 - RNA, 22 nt, Human
cuauuucagcugccuuugacug

SEQ ID NO: 199430 - RNA, 21 nt, Human
uccaggccaugguggggaggc

SEQ ID NO: 199431 - RNA, 22 nt, Human
ccagcugcugugcagggaggcu

SEQ ID NO: 199432 - RNA, 22 nt, Human
guuaucuucuauuucucauacu

SEQ ID NO: 199433 - RNA, 22 nt, Human
ggaccuuccuggcuccuggggu

SEQ ID NO: 199434 - RNA, 22 nt, Human
aggcaggccgugucccuccuca

SEQ ID NO: 199435 - RNA, 22 nt, Human
ccugucuggccaccagggcgau

SEQ ID NO: 199436 - RNA, 22 nt, Human
ucugcuggaaaaccagggaauu

SEQ ID NO: 199437 - RNA, 21 nt, Human
cagugaggcccuccuguuccc

SEQ ID NO: 199438 - RNA, 22 nt, Human
ucaauucaacacaugcacauug

SEQ ID NO: 199439 - RNA, 22 nt, Human
cccagccuuccacccuggacua

SEQ ID NO: 199440 - RNA, 21 nt, Human
ggauggauagggaagagauuu

SEQ ID NO: 199441 - RNA, 22 nt, Human
caguugcagcugugacauugcg

SEQ ID NO: 199442 - RNA, 22 nt, Human
gcucagaggccacuguuggaaa

SEQ ID NO: 199443 - RNA, 22 nt, Human
gcugcuuuacugaagagauaug

SEQ ID NO: 199444 - RNA, 22 nt, Human
acagaauugaaaguauaaucug

SEQ ID NO: 199445 - RNA, 22 nt, Human
uacagacauucaauuuugaccc

SEQ ID NO: 199446 - RNA, 22 nt, Human
uacuuccuguuuccaugucugu

SEQ ID NO: 199447 - RNA, 22 nt, Human
cuaaucaucuuucucuuaaagc

SEQ ID NO: 199448 - RNA, 22 nt, Human
ccuggacuguguccugugguca

SEQ ID NO: 199449 - RNA, 22 nt, Human
gaauccaggguuguuugagcua

SEQ ID NO: 199450 - RNA, 22 nt, Human
aaagugcauucgaaaguccauc

SEQ ID NO: 199451 - RNA, 22 nt, Human
aauguguucaguuaaaugaacu

SEQ ID NO: 199452 - RNA, 22 nt, Human
ucucugcuaagauugugucuag

SEQ ID NO: 199453 - RNA, 22 nt, Human
ccaacacagauguguuaguguu

SEQ ID NO: 199454 - RNA, 22 nt, Human
uugacacaguuuucucauuaag

SEQ ID NO: 199455 - RNA, 22 nt, Human
cuuuaguucuaaugcauugaaa

SEQ ID NO: 199456 - RNA, 22 nt, Human
caacuguuauaaaucaacagag

SEQ ID NO: 199457 - RNA, 23 nt, Human
auaaugcaaguggugguaaucug

SEQ ID NO: 199458 - RNA, 22 nt, Human
agaacaaaauuagaggagugca

SEQ ID NO: 199459 - RNA, 22 nt, Human
uggaugagggcugagcacuggg

SEQ ID NO: 199460 - RNA, 22 nt, Human
cuuaauuuaaaauaguucaggc

SEQ ID NO: 199461 - RNA, 22 nt, Human
gaguagcauucuagaguaugcu

SEQ ID NO: 199462 - RNA, 22 nt, Human
cugaggcagagagaacccgggc

SEQ ID NO: 199463 - RNA, 22 nt, Human
cugugccuggggggcagagcug

SEQ ID NO: 199464 - RNA, 22 nt, Human
uagaggguuauuaggacagaag

SEQ ID NO: 199465 - RNA, 17 nt, Human
aagacccuagucuaccc

SEQ ID NO: 199466 - RNA, 22 nt, Human
aaaggcuugguauuuuggaguu

SEQ ID NO: 199467 - RNA, 22 nt, Human
uggcuucuucauaugugaucuu

SEQ ID NO: 199468 - RNA, 22 nt, Human
agcugcaauuaaagacugugaa

SEQ ID NO: 199469 - RNA, 22 nt, Human
cauccauucauuaauucuaaag

SEQ ID NO: 199470 - RNA, 21 nt, Human
caggcuugaggaaugugccug

SEQ ID NO: 199471 - RNA, 22 nt, Human
ugcuuuauguggcugauacuca

SEQ ID NO: 199472 - RNA, 22 nt, Human
gcugggcaccggagagacccca

SEQ ID NO: 199473 - RNA, 22 nt, Human
caggaggccaacugugggacuu

SEQ ID NO: 199474 - RNA, 22 nt, Human
caggcacagcuaagacuggcca

SEQ ID NO: 199475 - RNA, 23 nt, Human
cugcuuucccacuccaugcucuu

SEQ ID NO: 199476 - RNA, 19 nt, Human
ugcauaaauuauauacuuu

SEQ ID NO: 199477 - RNA, 19 nt, Human
agaaucaucuugaagugau

SEQ ID NO: 199478 - RNA, 22 nt, Human
ccucccucuuucagucccacag

SEQ ID NO: 199479 - RNA, 17 nt, Human
agcagcuggguugaucu

SEQ ID NO: 199480 - RNA, 22 nt, Human
ugucccagcacuuugggagucu

SEQ ID NO: 199481 - RNA, 22 nt, Human
aguccggggucuggacaccugg

SEQ ID NO: 199482 - RNA, 19 nt, Human
uccuccuuacuuccucuug

SEQ ID NO: 199483 - RNA, 22 nt, Human
uugagauggagcuucacucuug

SEQ ID NO: 199484 - RNA, 22 nt, Human
cuuguagcugcuucuucugaag

SEQ ID NO: 199485 - RNA, 23 nt, Human
agcuggaaauggccgagcucugc

SEQ ID NO: 199486 - RNA, 22 nt, Human
ugucugaguggugcaaggcuga

SEQ ID NO: 199487 - RNA, 22 nt, Human
gagauuuaauuggauuaacuua

SEQ ID NO: 199488 - RNA, 22 nt, Human
acucagaaugacugaugcugug

SEQ ID NO: 199489 - RNA, 22 nt, Human
gggccggagcugggucccgcgc

SEQ ID NO: 199490 - RNA, 22 nt, Human
aucuguggaaauuggcaagugc

SEQ ID NO: 199491 - RNA, 17 nt, Human
uuucugcaugauuggac

SEQ ID NO: 199492 - RNA, 22 nt, Human
auuuugaaucaccuuggaagaa

SEQ ID NO: 199493 - RNA, 22 nt, Human
ccaggugugucuggccccgaag

SEQ ID NO: 199494 - RNA, 22 nt, Human
cauaauaucuccgauuacuugc

SEQ ID NO: 199495 - RNA, 22 nt, Human
ugagacagucccaugaucugca

SEQ ID NO: 199496 - RNA, 22 nt, Human
ugccagcccaccuuggggccuc

SEQ ID NO: 199497 - RNA, 22 nt, Human
uccuagaggaugguaggaagcu

SEQ ID NO: 199498 - RNA, 22 nt, Human
acuuguuugaaucucucuagag

SEQ ID NO: 199499 - RNA, 22 nt, Human
agagcuggguggacuuguaguu

SEQ ID NO: 199500 - RNA, 22 nt, Human
uagcuuuaaaaaucaucaaagc

SEQ ID NO: 199501 - RNA, 22 nt, Human
ccagagaccagaacauggggau

SEQ ID NO: 199502 - RNA, 18 nt, Human
gagcccugagucugcaca

SEQ ID NO: 199503 - RNA, 22 nt, Human
aucacaaaggcugcuucaugau

SEQ ID NO: 199504 - RNA, 22 nt, Human
uuuagagagaaauaaaugagau

SEQ ID NO: 199505 - RNA, 22 nt, Human
uucaaaaugcacaaagggcuag

SEQ ID NO: 199506 - RNA, 22 nt, Human
aacacaguccugcucacuuauu

SEQ ID NO: 199507 - RNA, 22 nt, Human
ccugugcaauguugagguuuca

SEQ ID NO: 199508 - RNA, 22 nt, Human
cagaagguuugaaagaugucuu

SEQ ID NO: 199509 - RNA, 22 nt, Human
agcagggcuuugcagacuuggg

SEQ ID NO: 199510 - RNA, 22 nt, Human
acugugcauuugucaugggguu

SEQ ID NO: 199511 - RNA, 22 nt, Human
agggagaaaauuggaugcacaa

SEQ ID NO: 199512 - RNA, 23 nt, Human
ucucugcauguccugagcacauc

SEQ ID NO: 199513 - RNA, 23 nt, Human
aagcaucuuuuccuagcuccauc

SEQ ID NO: 199514 - RNA, 22 nt, Human
uaaagcuguucagugcagaaag

SEQ ID NO: 199515 - RNA, 22 nt, Human
aggcauggacauuucggcagcu

SEQ ID NO: 199516 - RNA, 22 nt, Human
gggcagauggggcacaggcuga

SEQ ID NO: 199517 - RNA, 22 nt, Human
uuucuaaaauagauuuuauggu

SEQ ID NO: 199518 - RNA, 22 nt, Human
uccuagggauucaacacugaac

SEQ ID NO: 199519 - RNA, 23 nt, Human
agagagaguuugugucagguacc

SEQ ID NO: 199520 - RNA, 22 nt, Human
uucuuuaaaugaauucucugua

SEQ ID NO: 199521 - RNA, 22 nt, Human
augcuaaagcuuugcuuucauu

SEQ ID NO: 199522 - RNA, 22 nt, Human
ccugcccuaauccagagacuag

SEQ ID NO: 199523 - RNA, 22 nt, Human
aguuuccuugggcauuuguuua

SEQ ID NO: 199524 - RNA, 22 nt, Human
acauuugacucuguucauauua

SEQ ID NO: 199525 - RNA, 22 nt, Human
ccugcaggggagagacuucuag

SEQ ID NO: 199526 - RNA, 22 nt, Human
aauaugcauuauacagacugau

SEQ ID NO: 199527 - RNA, 22 nt, Human
cagcugguguccagggaagugg

SEQ ID NO: 199528 - RNA, 22 nt, Human
ucccugcacagccgagccaugc

SEQ ID NO: 199529 - RNA, 22 nt, Human
ugugagguaacgcugcucuguu

SEQ ID NO: 199530 - RNA, 22 nt, Human
gucucuguuauuuccaggguca

SEQ ID NO: 199531 - RNA, 22 nt, Human
ucagggacagggugcugcugcg

SEQ ID NO: 199532 - RNA, 22 nt, Human
acagugucuccugguacccagu

SEQ ID NO: 199533 - RNA, 22 nt, Human
gugcccucacaaaguggaaaga

SEQ ID NO: 199534 - RNA, 22 nt, Human
aguggaauguagaaaaaagaug

SEQ ID NO: 199535 - RNA, 19 nt, Human
ucuguggcaccugggaggg

SEQ ID NO: 199536 - RNA, 22 nt, Human
guuucucacuuaccaacacaug

SEQ ID NO: 199537 - RNA, 22 nt, Human
ugcccuggaaccaucuacaguc

SEQ ID NO: 199538 - RNA, 22 nt, Human
agggagaggcugaacuauccua

SEQ ID NO: 199539 - RNA, 22 nt, Human
cucucagguagagcccaagaau

SEQ ID NO: 199540 - RNA, 22 nt, Human
gcaccugccugggacugaagau

SEQ ID NO: 199541 - RNA, 20 nt, Human
cuggcuucgggaacuaguuu

SEQ ID NO: 199542 - RNA, 22 nt, Human
uucuauugggaagugugagagu

SEQ ID NO: 199543 - RNA, 22 nt, Human
uagaggaaauuuccaaggugag

SEQ ID NO: 199544 - RNA, 20 nt, Human
uaacaggaagcauuauuuua

SEQ ID NO: 199545 - RNA, 22 nt, Human
gaugcugauuauuucuugcuag

SEQ ID NO: 199546 - RNA, 22 nt, Human
cuacaacauuaugcuuucuguc

SEQ ID NO: 199547 - RNA, 22 nt, Human
cugcagggaacugaggcccaga

SEQ ID NO: 199548 - RNA, 22 nt, Human
caggccucuauggucagcugag

SEQ ID NO: 199549 - RNA, 22 nt, Human
auucucaauuuugccaaagggu

SEQ ID NO: 199550 - RNA, 22 nt, Human
gugaggcaagggcauacuaggc

SEQ ID NO: 199551 - RNA, 22 nt, Human
ccaugaguagcgauuucauuuu

SEQ ID NO: 199552 - RNA, 22 nt, Human
caggccagugggaaauagggau

SEQ ID NO: 199553 - RNA, 22 nt, Human
augcacaggugcugaugcacgc

SEQ ID NO: 199554 - RNA, 22 nt, Human
agguagaaggaccagaauuuau

SEQ ID NO: 199555 - RNA, 22 nt, Human
caguucaggccggcugacucag

SEQ ID NO: 199556 - RNA, 20 nt, Human
acuuuacugagcuguaauuc

SEQ ID NO: 199557 - RNA, 22 nt, Human
cuguggcuuuggggcggaggac

SEQ ID NO: 199558 - RNA, 22 nt, Human
agucuucuuucauuuacucagu

SEQ ID NO: 199559 - RNA, 22 nt, Human
acuuccuuuugggaaacuguuu

SEQ ID NO: 199560 - RNA, 22 nt, Human
auucucugugucugcuuuccca

SEQ ID NO: 199561 - RNA, 22 nt, Human
gcugccuguguggccacucacu

SEQ ID NO: 199562 - RNA, 17 nt, Human
gcacagugauauuauuu

SEQ ID NO: 199563 - RNA, 22 nt, Human
cagugauauuuauccuacucac

SEQ ID NO: 199564 - RNA, 22 nt, Human
caguggcaaugggacagagcac

SEQ ID NO: 199565 - RNA, 22 nt, Human
agaccauagggaccucagguug

SEQ ID NO: 199566 - RNA, 22 nt, Human
cucaccugggucagacaguugu

SEQ ID NO: 199567 - RNA, 22 nt, Human
caggacagugcagguccauccu

SEQ ID NO: 199568 - RNA, 22 nt, Human
agagauuugucaaugauuucca

SEQ ID NO: 199569 - RNA, 21 nt, Human
ucacagacuggucagugaggc

SEQ ID NO: 199570 - RNA, 22 nt, Human
gcccagggugaagugcaguugu

SEQ ID NO: 199571 - RNA, 22 nt, Human
uggcugaguuucaugcaucaug

SEQ ID NO: 199572 - RNA, 22 nt, Human
gauguguccccagaggauugaa

SEQ ID NO: 199573 - RNA, 18 nt, Human
acaggccucaguccugca

SEQ ID NO: 199574 - RNA, 19 nt, Human
cugcagggaugugcagagu

SEQ ID NO: 199575 - RNA, 22 nt, Human
gagggcagaaaauuaugcggug

SEQ ID NO: 199576 - RNA, 22 nt, Human
ggcaggcuagcacugauguccu

SEQ ID NO: 199577 - RNA, 22 nt, Human
augagcucauccgagucacacu

SEQ ID NO: 199578 - RNA, 22 nt, Human
gggcuccaacuacaucagccuu

SEQ ID NO: 199579 - RNA, 21 nt, Human
gauuuaguggcuguucuaccu

SEQ ID NO: 199580 - RNA, 22 nt, Human
cuccaggcuggauccaagucaa

SEQ ID NO: 199581 - RNA, 22 nt, Human
augauuacucccauuugauaga

SEQ ID NO: 199582 - RNA, 22 nt, Human
cuauaacuggguauuagacuac

SEQ ID NO: 199583 - RNA, 22 nt, Human
gcaaagugaaauggggcagaga

SEQ ID NO: 199584 - RNA, 22 nt, Human
uauauguuucuuacaaaauauu

SEQ ID NO: 199585 - RNA, 22 nt, Human
aacaguuuaucaaguuuuuaca

SEQ ID NO: 199586 - RNA, 22 nt, Human
uugcagggcaucuaugucuggu

SEQ ID NO: 199587 - RNA, 22 nt, Human
aggcagcccugugcuggaugcu

SEQ ID NO: 199588 - RNA, 22 nt, Human
uaauugaacuaacaugcaaaca

SEQ ID NO: 199589 - RNA, 22 nt, Human
uccagcauuuuucaauagaauu

SEQ ID NO: 199590 - RNA, 22 nt, Human
cucugaaagcaaaacuagagaa

SEQ ID NO: 199591 - RNA, 22 nt, Human
ucucaggaagauuagggcuaag

SEQ ID NO: 199592 - RNA, 22 nt, Human
gguaacaguuacaguaacagua

SEQ ID NO: 199593 - RNA, 15 nt, Human
cauaucacugggaau

SEQ ID NO: 199594 - RNA, 22 nt, Human
uacaguaauaaaaugagcuaca

SEQ ID NO: 199595 - RNA, 22 nt, Human
aaacugugagcuaguaaauagg

SEQ ID NO: 199596 - RNA, 22 nt, Human
augcuuucucuuaguucauuga

SEQ ID NO: 199597 - RNA, 22 nt, Human
aucuccaguuagcaguacugau

SEQ ID NO: 199598 - RNA, 22 nt, Human
uuucuuauauucugucauuguu

SEQ ID NO: 199599 - RNA, 22 nt, Human
ugacagacuacugccucuauug

SEQ ID NO: 199600 - RNA, 23 nt, Human
uggcucagcuaguuuuccauuuc

SEQ ID NO: 199601 - RNA, 22 nt, Human
gaacaguaacugucugcugugu

SEQ ID NO: 199602 - RNA, 22 nt, Human
aaacuuuguucguccagacuca

SEQ ID NO: 199603 - RNA, 22 nt, Human
uagguguccauauaugugugua

SEQ ID NO: 199604 - RNA, 22 nt, Human
gcacuggagaauggcuguauuc

SEQ ID NO: 199605 - RNA, 22 nt, Human
cucugcugcuuugccaguggaa

SEQ ID NO: 199606 - RNA, 22 nt, Human
agggccaguaaauguuuccuca

SEQ ID NO: 199607 - RNA, 22 nt, Human
uaccucaugcuguacagcacgu

SEQ ID NO: 199608 - RNA, 22 nt, Human
agauccauuuuggugucaacuc

SEQ ID NO: 199609 - RNA, 23 nt, Human
ugcaacaaugaggaaagcuacug

SEQ ID NO: 199610 - RNA, 22 nt, Human
aagaguuugucagaucugcacg

SEQ ID NO: 199611 - RNA, 22 nt, Human
ggcucuggcguccaauggagcg

SEQ ID NO: 199612 - RNA, 20 nt, Human
uccuaauaaccugaagaaau

SEQ ID NO: 199613 - RNA, 22 nt, Human
cucucugaggcaggccuguggg

SEQ ID NO: 199614 - RNA, 22 nt, Human
uggcucaaguaacaaaaauaua

SEQ ID NO: 199615 - RNA, 22 nt, Human
uaguuuaugauuuuuuggaagg

SEQ ID NO: 199616 - RNA, 16 nt, Human
agccaggcugccucgg

SEQ ID NO: 199617 - RNA, 22 nt, Human
augaaauucaucugagaaugcu

SEQ ID NO: 199618 - RNA, 22 nt, Human
gugaggugccuaauaccgugac

SEQ ID NO: 199619 - RNA, 22 nt, Human
acacuuucuggagcugcacaua

SEQ ID NO: 199620 - RNA, 22 nt, Human
cugggaaggggaagguccucuc

SEQ ID NO: 199621 - RNA, 22 nt, Human
uccaggcacuauauauacuuuu

SEQ ID NO: 199622 - RNA, 22 nt, Human
gauuuucauuugcacucuagaa

SEQ ID NO: 199623 - RNA, 19 nt, Human
gcucagcagacccagugcu

SEQ ID NO: 199624 - RNA, 22 nt, Human
auucauguagugauugagucac

SEQ ID NO: 199625 - RNA, 22 nt, Human
ugaggaugagaugagauaacac

SEQ ID NO: 199626 - RNA, 22 nt, Human
ucacucugcugcccgagggcug

SEQ ID NO: 199627 - RNA, 22 nt, Human
uuuguacauauauaaaaucugu

SEQ ID NO: 199628 - RNA, 22 nt, Human
uacauccaaaugaauuagaauu

SEQ ID NO: 199629 - RNA, 22 nt, Human
aauuucagaugucauaaauaua

SEQ ID NO: 199630 - RNA, 22 nt, Human
ccauuuggcaagaaagagucau

SEQ ID NO: 199631 - RNA, 22 nt, Human
ugcagcagagugggccugggug

SEQ ID NO: 199632 - RNA, 22 nt, Human
gccugcuuccuuuucauagaug

SEQ ID NO: 199633 - RNA, 22 nt, Human
auuagggaaggauuuggccuga

SEQ ID NO: 199634 - RNA, 22 nt, Human
guauuuuucaguuaggagcuua

SEQ ID NO: 199635 - RNA, 22 nt, Human
cuccaggcuggggugcagguug

SEQ ID NO: 199636 - RNA, 22 nt, Human
ccuccaggaggaaauggaacac

SEQ ID NO: 199637 - RNA, 22 nt, Human
acuuagaagaugcaguaaagca

SEQ ID NO: 199638 - RNA, 22 nt, Human
ucaauuucuugguuugauaaua

SEQ ID NO: 199639 - RNA, 22 nt, Human
auggaguucugccagcgcugcu

SEQ ID NO: 199640 - RNA, 22 nt, Human
uugugaauggugccgcaauaaa

SEQ ID NO: 199641 - RNA, 22 nt, Human
caagauggguguugugaugguu

SEQ ID NO: 199642 - RNA, 22 nt, Human
uggcccagggaguucauggugu

SEQ ID NO: 199643 - RNA, 22 nt, Human
ugguuagaggcuucuugcuugg

SEQ ID NO: 199644 - RNA, 22 nt, Human
ccacauuuuugauacucucacu

SEQ ID NO: 199645 - RNA, 22 nt, Human
aggaaaaugaaacagcaacugu

SEQ ID NO: 199646 - RNA, 23 nt, Human
ugagagccuggcagccuggguuc

SEQ ID NO: 199647 - RNA, 22 nt, Human
aucacaauguacguuaaaaugu

SEQ ID NO: 199648 - RNA, 22 nt, Human
uccuucaaaaguugagagagcc

SEQ ID NO: 199649 - RNA, 22 nt, Human
ucuaggaauguucuuagggauu

SEQ ID NO: 199650 - RNA, 22 nt, Human
gugcagcucaguugaaaugcag

SEQ ID NO: 199651 - RNA, 22 nt, Human
uauaugcaauuuuuuagugcaa

SEQ ID NO: 199652 - RNA, 22 nt, Human
uuauuccaauuucuccuacaaa

SEQ ID NO: 199653 - RNA, 22 nt, Human
cucugggcaggaccaguggacc

SEQ ID NO: 199654 - RNA, 22 nt, Human
cugcuaaaccucucugagagcu

SEQ ID NO: 199655 - RNA, 22 nt, Human
aagugcaggucucagcuacucu

SEQ ID NO: 199656 - RNA, 22 nt, Human
aauagugaacaggaacaugcuu

SEQ ID NO: 199657 - RNA, 18 nt, Human
ggucacugagaugcuacu

SEQ ID NO: 199658 - RNA, 17 nt, Human
aggugcuggagcaucag

SEQ ID NO: 199659 - RNA, 22 nt, Human
cauggaggacccucagggagcu

SEQ ID NO: 199660 - RNA, 22 nt, Human
gaggugucaucaggcagcucug

SEQ ID NO: 199661 - RNA, 22 nt, Human
agcacagacuggucccaggucu

SEQ ID NO: 199662 - RNA, 22 nt, Human
cagggcaggacagauacauuac

SEQ ID NO: 199663 - RNA, 22 nt, Human
cccaggucuccugcuucccagg

SEQ ID NO: 199664 - RNA, 22 nt, Human
aauuuaagagcauagcuccaac

SEQ ID NO: 199665 - RNA, 22 nt, Human
uggcuggcaguaggcuaguggc

SEQ ID NO: 199666 - RNA, 22 nt, Human
uccugggacccugggugcagag

SEQ ID NO: 199667 - RNA, 22 nt, Human
auuccauuguauguguagacua

SEQ ID NO: 199668 - RNA, 22 nt, Human
ucccucucccuauugccuggag

SEQ ID NO: 199669 - RNA, 22 nt, Human
agaccuggauuccaauccuacc

SEQ ID NO: 199670 - RNA, 23 nt, Human
cagagcuggcucagagcugccug

SEQ ID NO: 199671 - RNA, 22 nt, Human
ucuagggagcucuagcaguggu

SEQ ID NO: 199672 - RNA, 22 nt, Human
caggccugugaguugaggcccc

SEQ ID NO: 199673 - RNA, 16 nt, Human
ugagugggagaagggg

SEQ ID NO: 199674 - RNA, 20 nt, Human
gcauguguauggaaggggga

SEQ ID NO: 199675 - RNA, 22 nt, Human
aauacuugugaauucaaagucu

SEQ ID NO: 199676 - RNA, 22 nt, Human
ggaaggaggggcaaagcaguuc

SEQ ID NO: 199677 - RNA, 22 nt, Human
ucaggcucuacacuugacacac

SEQ ID NO: 199678 - RNA, 22 nt, Human
cuggaauugcauaauauguccu

SEQ ID NO: 199679 - RNA, 21 nt, Human
ccuggccaaucugauaggguu

SEQ ID NO: 199680 - RNA, 22 nt, Human
aggcuuggcuggcagcccuggg

SEQ ID NO: 199681 - RNA, 22 nt, Human
uaaaugucuuugucacguuggg

SEQ ID NO: 199682 - RNA, 22 nt, Human
uggcagggugggcuucagcccc

SEQ ID NO: 199683 - RNA, 22 nt, Human
aaagcacugcacauauauuugc

SEQ ID NO: 199684 - RNA, 22 nt, Human
aaaucuagaaguuuaaaaggau

SEQ ID NO: 199685 - RNA, 22 nt, Human
gcagggcaugggcccugucugc

SEQ ID NO: 199686 - RNA, 19 nt, Human
cuggggcuuugguacugcc

SEQ ID NO: 199687 - RNA, 22 nt, Human
ccugucuguccucucaugagcc

SEQ ID NO: 199688 - RNA, 22 nt, Human
ccacaucucccuauugcucuuu

SEQ ID NO: 199689 - RNA, 20 nt, Human
aagauucauuguaauuaggg

SEQ ID NO: 199690 - RNA, 22 nt, Human
uggauuucuccagcucuccauu

SEQ ID NO: 199691 - RNA, 22 nt, Human
gauacacacccuugauaggacu

SEQ ID NO: 199692 - RNA, 22 nt, Human
agcuuccugacuggugcucuua

SEQ ID NO: 199693 - RNA, 22 nt, Human
uuucugauauacuguagaaucc

SEQ ID NO: 199694 - RNA, 22 nt, Human
uccagcccugugucugggagag

SEQ ID NO: 199695 - RNA, 22 nt, Human
uggaagagcaggcagacaaugc

SEQ ID NO: 199696 - RNA, 22 nt, Human
gggucccuggaauuacuugaca

SEQ ID NO: 199697 - RNA, 22 nt, Human
aaguuaacccaguauuucuuuu

SEQ ID NO: 199698 - RNA, 22 nt, Human
guauuuuuaguagagucggggu

SEQ ID NO: 199699 - RNA, 22 nt, Human
gucuggugggauuccaaguggc

SEQ ID NO: 199700 - RNA, 22 nt, Human
gcauggcucuggccucagugug

SEQ ID NO: 199701 - RNA, 22 nt, Human
ccuugcucucccaagcccgcag

SEQ ID NO: 199702 - RNA, 22 nt, Human
cacagcgugaugaauguagcgu

SEQ ID NO: 199703 - RNA, 22 nt, Human
gcaggagcccuggcauguucuu

SEQ ID NO: 199704 - RNA, 22 nt, Human
agcaggugacccaagcaggcug

SEQ ID NO: 199705 - RNA, 22 nt, Human
acucugcuguuuacucucuaua

SEQ ID NO: 199706 - RNA, 22 nt, Human
cagaagccugccucagaugcac

SEQ ID NO: 199707 - RNA, 22 nt, Human
cacaucugaaaagaugcacaag

SEQ ID NO: 199708 - RNA, 22 nt, Human
aagcaggauggagguugaguua

SEQ ID NO: 199709 - RNA, 22 nt, Human
acugagacugaaucugaaugau

SEQ ID NO: 199710 - RNA, 23 nt, Human
ucaaacagguuucagagcaucuu

SEQ ID NO: 199711 - RNA, 22 nt, Human
guuggcuauagggagauggggc

SEQ ID NO: 199712 - RNA, 22 nt, Human
ccccagccagcaggaccucuga

SEQ ID NO: 199713 - RNA, 22 nt, Human
ggacccugggcuugcuccuggg

SEQ ID NO: 199714 - RNA, 22 nt, Human
uuuuagauaguuuaacugcacu

SEQ ID NO: 199715 - RNA, 22 nt, Human
ucuccagggcagagaauagcaa

SEQ ID NO: 199716 - RNA, 22 nt, Human
aggaccagugagucuggcaagu

SEQ ID NO: 199717 - RNA, 22 nt, Human
uccuucccaggugucgccgccu

SEQ ID NO: 199718 - RNA, 22 nt, Human
caugaaauaugcuaccugucuu

SEQ ID NO: 199719 - RNA, 22 nt, Human
uuggcugcuggucuuuggauau

SEQ ID NO: 199720 - RNA, 22 nt, Human
guggcauuaggccaggugcaua

SEQ ID NO: 199721 - RNA, 22 nt, Human
aaucagaaaauucaguggaauu

SEQ ID NO: 199722 - RNA, 22 nt, Human
cuccagugucucagagcagaug

SEQ ID NO: 199723 - RNA, 22 nt, Human
cccaggcagagagcuggugagc

SEQ ID NO: 199724 - RNA, 22 nt, Human
auguuuccagauaugucacccu

SEQ ID NO: 199725 - RNA, 22 nt, Human
cauuucacaguaaagugauuuc

SEQ ID NO: 199726 - RNA, 22 nt, Human
ucugaggcccugcaggcagugu

SEQ ID NO: 199727 - RNA, 22 nt, Human
guuuuccugaaacugauggugu

SEQ ID NO: 199728 - RNA, 22 nt, Human
uauuaacaugaacugacuuuuc

SEQ ID NO: 199729 - RNA, 22 nt, Human
ggggugugaguagagcugggga

SEQ ID NO: 199730 - RNA, 22 nt, Human
augauuuguuaacagacuuaau

SEQ ID NO: 199731 - RNA, 22 nt, Human
ucacuacaaccgcuaccugaca

SEQ ID NO: 199732 - RNA, 22 nt, Human
cuccaggaaagccugaggcccg

SEQ ID NO: 199733 - RNA, 22 nt, Human
gaaggcaucacagaggcuguga

SEQ ID NO: 199734 - RNA, 22 nt, Human
gcugccuugaacuuggccuggg

SEQ ID NO: 199735 - RNA, 22 nt, Human
ugccuuuaacuuaaagcaugac

SEQ ID NO: 199736 - RNA, 22 nt, Human
aggcagguguugggagacacca

SEQ ID NO: 199737 - RNA, 22 nt, Human
gcagagugaagcauuucuuucu

SEQ ID NO: 199738 - RNA, 22 nt, Human
uaagugauuuguaguauacuau

SEQ ID NO: 199739 - RNA, 22 nt, Human
ucaccaggauuccuaucaguag

SEQ ID NO: 199740 - RNA, 22 nt, Human
caggacaggaguggggucaaag

SEQ ID NO: 199741 - RNA, 22 nt, Human
gccagugugucuugcaggcucc

SEQ ID NO: 199742 - RNA, 21 nt, Human
ucagagagucacagugaacug

SEQ ID NO: 199743 - RNA, 22 nt, Human
cacauuucucuaccucacacaa

SEQ ID NO: 199744 - RNA, 22 nt, Human
augcuagaagggagcacuaugu

SEQ ID NO: 199745 - RNA, 22 nt, Human
caauuuuauugguccaaauaca

SEQ ID NO: 199746 - RNA, 20 nt, Human
ucauguguguccuacagaga

SEQ ID NO: 199747 - RNA, 20 nt, Human
ucagagucaucaaagauggu

SEQ ID NO: 199748 - RNA, 22 nt, Human
aggucuggcucuucuccacaga

SEQ ID NO: 199749 - RNA, 22 nt, Human
uggcucaguuucaguccugguu

SEQ ID NO: 199750 - RNA, 22 nt, Human
ucaagcagcuuuuacagaagag

SEQ ID NO: 199751 - RNA, 22 nt, Human
aagucugagugucagugcaagu

SEQ ID NO: 199752 - RNA, 22 nt, Human
agaaggcaucagaaguguguag

SEQ ID NO: 199753 - RNA, 21 nt, Human
cuuguuccaagcaugucugag

SEQ ID NO: 199754 - RNA, 22 nt, Human
auauuuguuagagucuaugugu

SEQ ID NO: 199755 - RNA, 22 nt, Human
uaugcaacaucugguagaaauc

SEQ ID NO: 199756 - RNA, 19 nt, Human
uagugaguagugaauuaga

SEQ ID NO: 199757 - RNA, 21 nt, Human
aggcucagagaucaaacagua

SEQ ID NO: 199758 - RNA, 22 nt, Human
ugcaggaauuuuuugcagaaag

SEQ ID NO: 199759 - RNA, 22 nt, Human
uacaguaagaugaaauagcaau

SEQ ID NO: 199760 - RNA, 22 nt, Human
aaaugcaaggauuuuguuaggc

SEQ ID NO: 199761 - RNA, 22 nt, Human
uucaguguucuuuucuguuagc

SEQ ID NO: 199762 - RNA, 22 nt, Human
ucaggaaagaguaauguauaca

SEQ ID NO: 199763 - RNA, 22 nt, Human
cucucaaaugucauuccucuau

SEQ ID NO: 199764 - RNA, 22 nt, Human
auuuuacuuugugaauauugac

SEQ ID NO: 199765 - RNA, 22 nt, Human
cauaaaguaaagaugucuucca

SEQ ID NO: 199766 - RNA, 22 nt, Human
uuucuccuccagagagacacag

SEQ ID NO: 199767 - RNA, 22 nt, Human
cuaaauuauuugcacauuagag

SEQ ID NO: 199768 - RNA, 21 nt, Human
uugacaggaaagaggggagau

SEQ ID NO: 199769 - RNA, 22 nt, Human
guuguaaauacagcagauaauu

SEQ ID NO: 199770 - RNA, 22 nt, Human
ccucauggccuugagcugaggg

SEQ ID NO: 199771 - RNA, 22 nt, Human
ggucuccagcugggacccugca

SEQ ID NO: 199772 - RNA, 22 nt, Human
guaacacuagcucugucacuuu

SEQ ID NO: 199773 - RNA, 17 nt, Human
ccaggugggaggugggg

SEQ ID NO: 199774 - RNA, 22 nt, Human
auucucugucuuuuugaaaaca

SEQ ID NO: 199775 - RNA, 22 nt, Human
cugggcaguuuauucaguucug

SEQ ID NO: 199776 - RNA, 22 nt, Human
caucuccagguuuagggagcac

SEQ ID NO: 199777 - RNA, 22 nt, Human
agcagggcuuugucucugugaa

SEQ ID NO: 199778 - RNA, 22 nt, Human
gcaggggcuaaggacacagaga

SEQ ID NO: 199779 - RNA, 21 nt, Human
aaaugcuuuguauauaucugu

SEQ ID NO: 199780 - RNA, 22 nt, Human
auggccugcagugcugccacag

SEQ ID NO: 199781 - RNA, 22 nt, Human
acaggaaauuggcauaucaguu

SEQ ID NO: 199782 - RNA, 22 nt, Human
cagagucuuguguguucagccc

SEQ ID NO: 199783 - RNA, 22 nt, Human
cagagcccuuggcuggagccca

SEQ ID NO: 199784 - RNA, 22 nt, Human
cuucuugugcugggccagcuuc

SEQ ID NO: 199785 - RNA, 22 nt, Human
gagcaagaguguuggacuuuga

SEQ ID NO: 199786 - RNA, 22 nt, Human
ugcaguggaaucuggagagcag

SEQ ID NO: 199787 - RNA, 22 nt, Human
uucugauaauaccacaucgcag

SEQ ID NO: 199788 - RNA, 22 nt, Human
uugacccagcuuuccccacaau

SEQ ID NO: 199789 - RNA, 22 nt, Human
aagcccaguuucacacugagac

SEQ ID NO: 199790 - RNA, 22 nt, Human
ugacaggggcugguggauaaau

SEQ ID NO: 199791 - RNA, 22 nt, Human
gcucugggaaguccuuuaccau

SEQ ID NO: 199792 - RNA, 22 nt, Human
augaaauaucuugaagaaauuc

SEQ ID NO: 199793 - RNA, 20 nt, Human
uggaagaagaacucaggcuu

SEQ ID NO: 199794 - RNA, 22 nt, Human
ugucagcaguaucucuaucuca

SEQ ID NO: 199795 - RNA, 22 nt, Human
uggagaaggccggccaggagug

SEQ ID NO: 199796 - RNA, 22 nt, Human
uaguuacagaagauaaggguau

SEQ ID NO: 199797 - RNA, 22 nt, Human
aaagcagugcugugagaacacu

SEQ ID NO: 199798 - RNA, 22 nt, Human
cacagggcuaaaugaaggguug

SEQ ID NO: 199799 - RNA, 22 nt, Human
uauggaaagggaguuuaauuug

SEQ ID NO: 199800 - RNA, 22 nt, Human
aaagccauaagccuaauacuaa

SEQ ID NO: 199801 - RNA, 22 nt, Human
cuguggcuggccugucugacau

SEQ ID NO: 199802 - RNA, 22 nt, Human
guccuuggcuugaggcaccuca

SEQ ID NO: 199803 - RNA, 22 nt, Human
guaacauuauucaugagauaca

SEQ ID NO: 199804 - RNA, 22 nt, Human
gcacaguaggcucagcucuauc

SEQ ID NO: 199805 - RNA, 22 nt, Human
cccaaguauuccuccucugccc

SEQ ID NO: 199806 - RNA, 22 nt, Human
auuucgauagaccuaacaauug

SEQ ID NO: 199807 - RNA, 22 nt, Human
auuuccaucaucauuaggccua

SEQ ID NO: 199808 - RNA, 22 nt, Human
agacacauuuucagcucugcca

SEQ ID NO: 199809 - RNA, 22 nt, Human
guuuauaaggcccaauauuucu

SEQ ID NO: 199810 - RNA, 22 nt, Human
ugaaugaguuuggcugcuguuc

SEQ ID NO: 199811 - RNA, 22 nt, Human
aauguacagcugcugcugaagg

SEQ ID NO: 199812 - RNA, 19 nt, Human
acacaaugacacauauaua

SEQ ID NO: 199813 - RNA, 22 nt, Human
aaauagcagccuuuaguuaaca

SEQ ID NO: 199814 - RNA, 22 nt, Human
agggagccuuccuggcuguggu

SEQ ID NO: 199815 - RNA, 23 nt, Human
uuuguucaucauuagagucuagc

SEQ ID NO: 199816 - RNA, 22 nt, Human
ugagccaggucucacucaccuu

SEQ ID NO: 199817 - RNA, 22 nt, Human
uuuucucuauauugucugugaa

SEQ ID NO: 199818 - RNA, 17 nt, Human
ccccuaccuccguuuga

SEQ ID NO: 199819 - RNA, 22 nt, Human
ucuucagaaaauuaucacuugu

SEQ ID NO: 199820 - RNA, 22 nt, Human
ccagcugguaagugauggagcc

SEQ ID NO: 199821 - RNA, 22 nt, Human
uccaauguuccugcuuucagcu

SEQ ID NO: 199822 - RNA, 22 nt, Human
agaggauugaucaaacacugca

SEQ ID NO: 199823 - RNA, 22 nt, Human
uggcucaguuaggucagaaaca

SEQ ID NO: 199824 - RNA, 22 nt, Human
uuuacagcauugcugaaaguuc

SEQ ID NO: 199825 - RNA, 22 nt, Human
ugggagagagaauucccagugg

SEQ ID NO: 199826 - RNA, 22 nt, Human
ggcacagggagccgcaguugca

SEQ ID NO: 199827 - RNA, 22 nt, Human
cagcuauugguccacagguaug

SEQ ID NO: 199828 - RNA, 22 nt, Human
ggcaggagcucuccaguuugcc

SEQ ID NO: 199829 - RNA, 22 nt, Human
auggccaaauaacagcuugcau

SEQ ID NO: 199830 - RNA, 22 nt, Human
gacaacugagcagaggaaauga

SEQ ID NO: 199831 - RNA, 22 nt, Human
aauuuuauuaacuggauguagc

SEQ ID NO: 199832 - RNA, 20 nt, Human
cuuagaagggacauccuggg

SEQ ID NO: 199833 - RNA, 22 nt, Human
uuguguccuaagcaccagaugg

SEQ ID NO: 199834 - RNA, 22 nt, Human
uguuuuaaagccauugccuuuc

SEQ ID NO: 199835 - RNA, 22 nt, Human
agggccagccccacccucucug

SEQ ID NO: 199836 - RNA, 22 nt, Human
caggaaaucagaacucaagugg

SEQ ID NO: 199837 - RNA, 22 nt, Human
cauuugauccucacaacaaucu

SEQ ID NO: 199838 - RNA, 22 nt, Human
uuacuacaagauucuguuuuau

SEQ ID NO: 199839 - RNA, 22 nt, Human
gagccaagggcgugcuggagag

SEQ ID NO: 199840 - RNA, 22 nt, Human
ugcuuuauggagcccaucucau

SEQ ID NO: 199841 - RNA, 16 nt, Human
uugaaugacugugugc

SEQ ID NO: 199842 - RNA, 22 nt, Human
cugggacagcugagacaggaga

SEQ ID NO: 199843 - RNA, 22 nt, Human
uuggaaaugauuucuauuauua

SEQ ID NO: 199844 - RNA, 22 nt, Human
gcacugcaucuacuggcaagua

SEQ ID NO: 199845 - RNA, 22 nt, Human
uccugcagccuugggcuggagc

SEQ ID NO: 199846 - RNA, 22 nt, Human
aguguccuugagguuccuagga

SEQ ID NO: 199847 - RNA, 22 nt, Human
guuguacauaugaggauaaguu

SEQ ID NO: 199848 - RNA, 22 nt, Human
uggucagguaccucuggcuguc

SEQ ID NO: 199849 - RNA, 22 nt, Human
ggggucugggcuuagcuggaau

SEQ ID NO: 199850 - RNA, 22 nt, Human
gcuauguucccuuuugcuauaa

SEQ ID NO: 199851 - RNA, 18 nt, Human
ucuggagggaagcuuuga

SEQ ID NO: 199852 - RNA, 22 nt, Human
ugcagagaccacugugccuucc

SEQ ID NO: 199853 - RNA, 20 nt, Human
cucagugcuuucauugccuc

SEQ ID NO: 199854 - RNA, 22 nt, Human
uugcucauacucauguugugau

SEQ ID NO: 199855 - RNA, 22 nt, Human
ucugggcugugccaaagcucuu

SEQ ID NO: 199856 - RNA, 22 nt, Human
ugucagagagcaggcaguagaa

SEQ ID NO: 199857 - RNA, 22 nt, Human
ugaccugucacauuuugaugaa

SEQ ID NO: 199858 - RNA, 22 nt, Human
aaacuggugucacugagggcug

SEQ ID NO: 199859 - RNA, 22 nt, Human
gggaagggacuuguuuaagguc

SEQ ID NO: 199860 - RNA, 22 nt, Human
guccuuugaaggcaaaaggaga

SEQ ID NO: 199861 - RNA, 23 nt, Human
aggacugcucacuugaggcuucc

SEQ ID NO: 199862 - RNA, 22 nt, Human
aaggccaggggcuggcgccucc

SEQ ID NO: 199863 - RNA, 22 nt, Human
agcagugagugggaggaccaug

SEQ ID NO: 199864 - RNA, 22 nt, Human
uuuaaauaggacuccugggggu

SEQ ID NO: 199865 - RNA, 22 nt, Human
uccccaccuaagauacccaucu

SEQ ID NO: 199866 - RNA, 19 nt, Human
ccugugacuaucuuuguaa

SEQ ID NO: 199867 - RNA, 22 nt, Human
auucuggccuuggcucugucac

SEQ ID NO: 199868 - RNA, 22 nt, Human
auuacacaggcuggcucuuuga

SEQ ID NO: 199869 - RNA, 22 nt, Human
uggggacccggacuccuggguc

SEQ ID NO: 199870 - RNA, 22 nt, Human
uuuacugugcauuagaaucacc

SEQ ID NO: 199871 - RNA, 22 nt, Human
ucucagagcucacaccuccugg

SEQ ID NO: 199872 - RNA, 23 nt, Human
uucuuucaagaaguucacagugc

SEQ ID NO: 199873 - RNA, 21 nt, Human
uccugggagucugagauccug

SEQ ID NO: 199874 - RNA, 23 nt, Human
uggaagaaaaugguuuggcugug

SEQ ID NO: 199875 - RNA, 22 nt, Human
uuguguccuauaugcauguucu

SEQ ID NO: 199876 - RNA, 22 nt, Human
ugcagggagcucuggggugcag

SEQ ID NO: 199877 - RNA, 22 nt, Human
gcagagccaggcuggggcaggu

SEQ ID NO: 199878 - RNA, 22 nt, Human
gugugagagcaaaacugcagga

SEQ ID NO: 199879 - RNA, 18 nt, Human
uguuuauucuccugacag

SEQ ID NO: 199880 - RNA, 22 nt, Human
ccugggcucaccaugccuugga

SEQ ID NO: 199881 - RNA, 22 nt, Human
uccagcagccacaccucuggac

SEQ ID NO: 199882 - RNA, 22 nt, Human
gacacagaauuccccuccaagu

SEQ ID NO: 199883 - RNA, 22 nt, Human
ugucugagcuuuaugauggaag

SEQ ID NO: 199884 - RNA, 22 nt, Human
auugaaagcacaaagaacaagu

SEQ ID NO: 199885 - RNA, 17 nt, Human
uaaguuauagcagaaga

SEQ ID NO: 199886 - RNA, 22 nt, Human
agaguggcagcaaaaagugugc

SEQ ID NO: 199887 - RNA, 22 nt, Human
gagucagaugaagauaaaaggg

SEQ ID NO: 199888 - RNA, 22 nt, Human
ggagaaggcgaagucauucuuu

SEQ ID NO: 199889 - RNA, 22 nt, Human
aaggcuuuaugugaccaaaaga

SEQ ID NO: 199890 - RNA, 22 nt, Human
uccagagagccacggacagggg

SEQ ID NO: 199891 - RNA, 22 nt, Human
ugguggcaucacucagccuccc

SEQ ID NO: 199892 - RNA, 22 nt, Human
aggaaaaaagucugugauuaua

SEQ ID NO: 199893 - RNA, 22 nt, Human
ugccucugugggcagagcugcc

SEQ ID NO: 199894 - RNA, 22 nt, Human
aagugaaauugccauucuuaua

SEQ ID NO: 199895 - RNA, 18 nt, Human
aguccaugcauggcuaua

SEQ ID NO: 199896 - RNA, 22 nt, Human
aguuguaagagacagauauaaa

SEQ ID NO: 199897 - RNA, 22 nt, Human
cacaggagugcugcuauuguug

SEQ ID NO: 199898 - RNA, 19 nt, Human
uggcugggugccaauggcc

SEQ ID NO: 199899 - RNA, 22 nt, Human
cguguccuuuuagcuucagguc

SEQ ID NO: 199900 - RNA, 22 nt, Human
uugcagggcaggaccauggaca

SEQ ID NO: 199901 - RNA, 22 nt, Human
aacuggaagagugaauauaacu

SEQ ID NO: 199902 - RNA, 22 nt, Human
uuccaugccuagaacaggauuc

SEQ ID NO: 199903 - RNA, 22 nt, Human
acaggcugguuuguaaaagaug

SEQ ID NO: 199904 - RNA, 22 nt, Human
gcaugcagacagucugagacca

SEQ ID NO: 199905 - RNA, 22 nt, Human
uuaauaaaguaugaauuggaaa

SEQ ID NO: 199906 - RNA, 22 nt, Human
ugagcagggacuuugaguguag

SEQ ID NO: 199907 - RNA, 22 nt, Human
ucccugggguaacauuagaggg

SEQ ID NO: 199908 - RNA, 22 nt, Human
uuuguguggauggaaggcagua

SEQ ID NO: 199909 - RNA, 22 nt, Human
ccucaggcccugucccugcgcc

SEQ ID NO: 199910 - RNA, 22 nt, Human
cuggcuggccggagcgaggcgg

SEQ ID NO: 199911 - RNA, 22 nt, Human
uggcaaggcugugggggcagag

SEQ ID NO: 199912 - RNA, 22 nt, Human
gcagaauacugagagcugauug

SEQ ID NO: 199913 - RNA, 22 nt, Human
aaacccugcucuuauggaacuu

SEQ ID NO: 199914 - RNA, 22 nt, Human
ucaaucaaagcacugggcuuug

SEQ ID NO: 199915 - RNA, 19 nt, Human
aggcuuggcuagauuuacu

SEQ ID NO: 199916 - RNA, 21 nt, Human
ccuuuacaauuuugcauuccu

SEQ ID NO: 199917 - RNA, 22 nt, Human
uuuggaguuuaacaacuugaag

SEQ ID NO: 199918 - RNA, 22 nt, Human
agucucaagcaccgaaagcugu

SEQ ID NO: 199919 - RNA, 22 nt, Human
ucucagugacacucuucauaca

SEQ ID NO: 199920 - RNA, 22 nt, Human
uauguacaagcacacaugugac

SEQ ID NO: 199921 - RNA, 22 nt, Human
agaaucucuacucaaguacuug

SEQ ID NO: 199922 - RNA, 22 nt, Human
cugcaaaauuguucuuugcucc

SEQ ID NO: 199923 - RNA, 22 nt, Human
augucacagcaggaguauucuu

SEQ ID NO: 199924 - RNA, 22 nt, Human
cuuagaaggaacaguuuagugc

SEQ ID NO: 199925 - RNA, 22 nt, Human
aagaggaaaugauugacuauau

SEQ ID NO: 199926 - RNA, 22 nt, Human
aagcccuguccggggggaagaa

SEQ ID NO: 199927 - RNA, 18 nt, Human
gucagaggauggggaaau

SEQ ID NO: 199928 - RNA, 22 nt, Human
uagaaagcaaaauccuaccaag

SEQ ID NO: 199929 - RNA, 22 nt, Human
uggguccuugccaucuuggagu

SEQ ID NO: 199930 - RNA, 22 nt, Human
ccagugugaaaggucauuuauc

SEQ ID NO: 199931 - RNA, 22 nt, Human
auauauuuacucuccuguugca

SEQ ID NO: 199932 - RNA, 21 nt, Human
agcucagccgggcacaguggc

SEQ ID NO: 199933 - RNA, 17 nt, Human
uuuucucucuuggauuc

SEQ ID NO: 199934 - RNA, 22 nt, Human
aguccaggccuccucuuuuccu

SEQ ID NO: 199935 - RNA, 22 nt, Human
caauaacuaguaauuauuccgg

SEQ ID NO: 199936 - RNA, 22 nt, Human
uucugugcccauuuuaaaaugg

SEQ ID NO: 199937 - RNA, 22 nt, Human
cagcucagugaugccuucacag

SEQ ID NO: 199938 - RNA, 18 nt, Human
ucauuuugucugccuuug

SEQ ID NO: 199939 - RNA, 22 nt, Human
cacccccagcagggaaaggagg

SEQ ID NO: 199940 - RNA, 22 nt, Human
caccccagcuucucaggauaga

SEQ ID NO: 199941 - RNA, 22 nt, Human
gcugcccuacccgaggcacucu

SEQ ID NO: 199942 - RNA, 22 nt, Human
aagagucagcuucuguaugggu

SEQ ID NO: 199943 - RNA, 22 nt, Human
uaaaaccauuccugcuuucaug

SEQ ID NO: 199944 - RNA, 22 nt, Human
aagcacauuuuccagcagcucu

SEQ ID NO: 199945 - RNA, 22 nt, Human
gacagcagauaagaccucauca

SEQ ID NO: 199946 - RNA, 23 nt, Human
ucuagaaaaugaaagaaugcagu

SEQ ID NO: 199947 - RNA, 22 nt, Human
aggaaggacugcagcauuuggu

SEQ ID NO: 199948 - RNA, 22 nt, Human
agccagacucauuuggaaguau

SEQ ID NO: 199949 - RNA, 22 nt, Human
cacuggucagucggucagucuc

SEQ ID NO: 199950 - RNA, 19 nt, Human
auacagauguauccaugau

SEQ ID NO: 199951 - RNA, 22 nt, Human
cagccagcugaauguaccauga

SEQ ID NO: 199952 - RNA, 22 nt, Human
agcacugcuuuagagccucugc

SEQ ID NO: 199953 - RNA, 22 nt, Human
cuguggaagguuuagauaggua

SEQ ID NO: 199954 - RNA, 22 nt, Human
aaauacuguugaaugaaguaag

SEQ ID NO: 199955 - RNA, 22 nt, Human
gagcuggugaucagcuggagga

SEQ ID NO: 199956 - RNA, 22 nt, Human
uggcucuggggacaguaagucc

SEQ ID NO: 199957 - RNA, 22 nt, Human
aagcucagagucucggagggaa

SEQ ID NO: 199958 - RNA, 22 nt, Human
caugaaugcuggguucauguaa

SEQ ID NO: 199959 - RNA, 19 nt, Human
ucagcucuggggucagugg

SEQ ID NO: 199960 - RNA, 22 nt, Human
ucuucagauugcacugagcaag

SEQ ID NO: 199961 - RNA, 22 nt, Human
ggacccuggagacccacuggga

SEQ ID NO: 199962 - RNA, 22 nt, Human
cacccccaccugugggcuccug

SEQ ID NO: 199963 - RNA, 22 nt, Human
cuaugaaaggauuuggaguugu

SEQ ID NO: 199964 - RNA, 22 nt, Human
uggagcaggugccaggugugug

SEQ ID NO: 199965 - RNA, 22 nt, Human
cuguggaaggccuguccugaaa

SEQ ID NO: 199966 - RNA, 22 nt, Human
acacaguucaggaucaaauagc

SEQ ID NO: 199967 - RNA, 22 nt, Human
agcaucugcauaaugccuuccc

SEQ ID NO: 199968 - RNA, 22 nt, Human
uugagggucuggaucugcugcu

SEQ ID NO: 199969 - RNA, 23 nt, Human
ucaaaguaguuuuauccaauaaa

SEQ ID NO: 199970 - RNA, 22 nt, Human
cuucaguuagaguuuacaaagu

SEQ ID NO: 199971 - RNA, 21 nt, Human
acuuucuguggguucaagcau

SEQ ID NO: 199972 - RNA, 22 nt, Human
aauauaaauuccugggcccagc

SEQ ID NO: 199973 - RNA, 22 nt, Human
uuccuggggcuuagcaauggag

SEQ ID NO: 199974 - RNA, 22 nt, Human
ugaggcagugugagauaauaaa

SEQ ID NO: 199975 - RNA, 22 nt, Human
uuuggaaauacgcguaggcaga

SEQ ID NO: 199976 - RNA, 21 nt, Human
acauaacugucaaguaacguu

SEQ ID NO: 199977 - RNA, 22 nt, Human
ccaaaguccauaguuuacauaa

SEQ ID NO: 199978 - RNA, 22 nt, Human
caggaugcacuaggaaccaggg

SEQ ID NO: 199979 - RNA, 22 nt, Human
uucacaguggcugugccauuug

SEQ ID NO: 199980 - RNA, 22 nt, Human
uaagcaagauuuauugaauuuu

SEQ ID NO: 199981 - RNA, 22 nt, Human
agggcagcauugccuuucucca

SEQ ID NO: 199982 - RNA, 22 nt, Human
agagccuugaagaucuggaaaa

SEQ ID NO: 199983 - RNA, 22 nt, Human
cuuaaacugggcauucagagaa

SEQ ID NO: 199984 - RNA, 19 nt, Human
ccaggucuggggccagauu

SEQ ID NO: 199985 - RNA, 22 nt, Human
agacuacauuaugacagcauuu

SEQ ID NO: 199986 - RNA, 22 nt, Human
acucugggccccagguggagcu

SEQ ID NO: 199987 - RNA, 22 nt, Human
aggcaggcccucuggaaaggua

SEQ ID NO: 199988 - RNA, 22 nt, Human
gcccagcuggcuuccagcacau

SEQ ID NO: 199989 - RNA, 22 nt, Human
gggggcggagcacgugaccacg

SEQ ID NO: 199990 - RNA, 19 nt, Human
ccucuuccucugacacuau

SEQ ID NO: 199991 - RNA, 22 nt, Human
ucauucauugcuuacccugugu

SEQ ID NO: 199992 - RNA, 22 nt, Human
uauugcugaggauugaggcuug

SEQ ID NO: 199993 - RNA, 22 nt, Human
cccuccagagccuggacauucu

SEQ ID NO: 199994 - RNA, 22 nt, Human
gagggcucuaccaaguaacucu

SEQ ID NO: 199995 - RNA, 22 nt, Human
gaauguuuaaggaaggcguggc

SEQ ID NO: 199996 - RNA, 22 nt, Human
uugauucaguaaagcuaaauuu

SEQ ID NO: 199997 - RNA, 22 nt, Human
caggagccacauuccaccuuga

SEQ ID NO: 199998 - RNA, 22 nt, Human
ucaggccugcaggcuuccugga

SEQ ID NO: 199999 - RNA, 22 nt, Human
ccaagcagaaccauucaggcac

SEQ ID NO: 200000 - RNA, 22 nt, Human
agaggccagaaggcgcaccccg

SEQ ID NO: 200001 - RNA, 22 nt, Human
auacaugaucacuguauuauaa

SEQ ID NO: 200002 - RNA, 22 nt, Human
uauguuuacgcugguagaauua

SEQ ID NO: 200003 - RNA, 21 nt, Human
uggacauuauggagagaguag

SEQ ID NO: 200004 - RNA, 22 nt, Human
ugucuccauggugaagcagggu

SEQ ID NO: 200005 - RNA, 22 nt, Human
aauagugcuuuuguacauagga

SEQ ID NO: 200006 - RNA, 22 nt, Human
ucucagggcgcagugaggcagu

SEQ ID NO: 200007 - RNA, 22 nt, Human
cacugggaccuaggacugagcu

SEQ ID NO: 200008 - RNA, 22 nt, Human
gggagaaguggaaaucucauua

SEQ ID NO: 200009 - RNA, 22 nt, Human
ggcucuggugaggguaggagau

SEQ ID NO: 200010 - RNA, 22 nt, Human
aagaacauuuaugauggcauuu

SEQ ID NO: 200011 - RNA, 19 nt, Human
ggcaagcacaaaagcuuug

SEQ ID NO: 200012 - RNA, 22 nt, Human
ggagucugcggcagacacugua

SEQ ID NO: 200013 - RNA, 22 nt, Human
agaaaugaagagagucaagguu

SEQ ID NO: 200014 - RNA, 20 nt, Human
agggccugcucugugguguc

SEQ ID NO: 200015 - RNA, 22 nt, Human
cagaggaacguuuggauugauu

SEQ ID NO: 200016 - RNA, 22 nt, Human
gaggacagcuuagggcuuccug

SEQ ID NO: 200017 - RNA, 22 nt, Human
uuuuccucaccuaacucaaggu

SEQ ID NO: 200018 - RNA, 22 nt, Human
uccugggagagugggacuguau

SEQ ID NO: 200019 - RNA, 22 nt, Human
uaguuaggguucugcagagaca

SEQ ID NO: 200020 - RNA, 22 nt, Human
ucuggccucuugggaugcuccc

SEQ ID NO: 200021 - RNA, 23 nt, Human
ugaaugauuguacugagcuuuua

SEQ ID NO: 200022 - RNA, 22 nt, Human
auguuuaaucggcugccuuucc

SEQ ID NO: 200023 - RNA, 22 nt, Human
aguccaggcucuuccugaagaa

SEQ ID NO: 200024 - RNA, 22 nt, Human
caauuuucaauuccuucagaua

SEQ ID NO: 200025 - RNA, 22 nt, Human
ugggggcuccaggcuccaggga

SEQ ID NO: 200026 - RNA, 23 nt, Human
uguuuuucauucacaugggcugu

SEQ ID NO: 200027 - RNA, 22 nt, Human
gcggcuccgaagccaggccgcg

SEQ ID NO: 200028 - RNA, 22 nt, Human
ugaaauguuaaacaaguggcuc

SEQ ID NO: 200029 - RNA, 22 nt, Human
ugaaggcugggcucagccagcu

SEQ ID NO: 200030 - RNA, 22 nt, Human
ucucuuaauuuuggaauagugu

SEQ ID NO: 200031 - RNA, 22 nt, Human
agcugucugugaacacagcauu

SEQ ID NO: 200032 - RNA, 23 nt, Human
cccugcagucagggugagauggu

SEQ ID NO: 200033 - RNA, 18 nt, Human
ugaggcagucagugaugg

SEQ ID NO: 200034 - RNA, 20 nt, Human
ucuuggaaaaaguucagaau

SEQ ID NO: 200035 - RNA, 22 nt, Human
aggguagggccguagggccaug

SEQ ID NO: 200036 - RNA, 22 nt, Human
agguucuggcauugcucaguaa

SEQ ID NO: 200037 - RNA, 22 nt, Human
uuacuuacaaaggcaaaggaag

SEQ ID NO: 200038 - RNA, 22 nt, Human
ccaaaguccauaguuuacauua

SEQ ID NO: 200039 - RNA, 22 nt, Human
cuuaucagauuaucugggcugu

SEQ ID NO: 200040 - RNA, 22 nt, Human
ucaggaaagaagaugcucagug

SEQ ID NO: 200041 - RNA, 21 nt, Human
agggcucaaaugugcuugcug

SEQ ID NO: 200042 - RNA, 22 nt, Human
aaggccucaggugaggcugccc

SEQ ID NO: 200043 - RNA, 22 nt, Human
gagcccugcuuccaagggggca

SEQ ID NO: 200044 - RNA, 22 nt, Human
caacaguguugcaaucugaaaa

SEQ ID NO: 200045 - RNA, 22 nt, Human
uccuguguugauagagaugguu

SEQ ID NO: 200046 - RNA, 22 nt, Human
agggugcagucacaggaaaugu

SEQ ID NO: 200047 - RNA, 22 nt, Human
ucugagggcuugaggggaagua

SEQ ID NO: 200048 - RNA, 22 nt, Human
guggcccacacagacagcaucu

SEQ ID NO: 200049 - RNA, 22 nt, Human
gacuuuaaaaguuugugcuugg

SEQ ID NO: 200050 - RNA, 22 nt, Human
agcuggaacgucacaggagcag

SEQ ID NO: 200051 - RNA, 19 nt, Human
caggccagugucagggggc

SEQ ID NO: 200052 - RNA, 22 nt, Human
ucugccaggcuuggugcuagau

SEQ ID NO: 200053 - RNA, 22 nt, Human
guccagagaggcaggaggcuac

SEQ ID NO: 200054 - RNA, 22 nt, Human
ggccagaggugguacauagcuu

SEQ ID NO: 200055 - RNA, 23 nt, Human
ucccuguguacagccugcaugag

SEQ ID NO: 200056 - RNA, 22 nt, Human
ucaggagcugcauuauccugug

SEQ ID NO: 200057 - RNA, 22 nt, Human
uuuauugucuaugaacugcuug

SEQ ID NO: 200058 - RNA, 22 nt, Human
uauauauucuuaaguaguguag

SEQ ID NO: 200059 - RNA, 22 nt, Human
uggguccuggaaggcgacaggu

SEQ ID NO: 200060 - RNA, 19 nt, Human
gaaggcugaaaugaagcac

SEQ ID NO: 200061 - RNA, 22 nt, Human
uaccauuugagagagaacauaa

SEQ ID NO: 200062 - RNA, 22 nt, Human
auguucuuugaaauauuuuaga

SEQ ID NO: 200063 - RNA, 22 nt, Human
auggcugcccacguuggugcuu

SEQ ID NO: 200064 - RNA, 22 nt, Human
uggcagcuacagacagagguga

SEQ ID NO: 200065 - RNA, 18 nt, Human
cucagagaugcccuuauu

SEQ ID NO: 200066 - RNA, 22 nt, Human
uugggucuguuuagcugagaag

SEQ ID NO: 200067 - RNA, 22 nt, Human
aagaaucuccaucugauucacu

SEQ ID NO: 200068 - RNA, 22 nt, Human
gggccugggaacuugcauuuag

SEQ ID NO: 200069 - RNA, 22 nt, Human
cugcagccacgagucacagccc

SEQ ID NO: 200070 - RNA, 22 nt, Human
gcagagcugucuaagucacuuc

SEQ ID NO: 200071 - RNA, 22 nt, Human
gcucagaggccaagugcccgcc

SEQ ID NO: 200072 - RNA, 22 nt, Human
gugguggaugucuguaaucuca

SEQ ID NO: 200073 - RNA, 22 nt, Human
ugacauguggcuuugacccagg

SEQ ID NO: 200074 - RNA, 22 nt, Human
auagaaccuguugugaaauuca

SEQ ID NO: 200075 - RNA, 22 nt, Human
gaaagaaugcuauagugacuuc

SEQ ID NO: 200076 - RNA, 21 nt, Human
uccagggcuuugauucucuca

SEQ ID NO: 200077 - RNA, 22 nt, Human
ccuuagaaaaucauggaauauu

SEQ ID NO: 200078 - RNA, 22 nt, Human
gccuggcucacagagcagccuu

SEQ ID NO: 200079 - RNA, 22 nt, Human
ugcuggccaagcagaggucaau

SEQ ID NO: 200080 - RNA, 22 nt, Human
ccuaaggaaagccaaagaggcc

SEQ ID NO: 200081 - RNA, 22 nt, Human
gacaucaugucacuaacugcua

SEQ ID NO: 200082 - RNA, 22 nt, Human
auuaaagugaaguucucagaug

SEQ ID NO: 200083 - RNA, 22 nt, Human
cuccuggcccugagcucccagg

SEQ ID NO: 200084 - RNA, 22 nt, Human
aggguggcugugaagugcuugg

SEQ ID NO: 200085 - RNA, 22 nt, Human
uccuggccaaguuacucucugc

SEQ ID NO: 200086 - RNA, 22 nt, Human
ugucacaaaaaucaguaauugc

SEQ ID NO: 200087 - RNA, 18 nt, Human
uggcuucucaaagcccag

SEQ ID NO: 200088 - RNA, 20 nt, Human
cguguccuuggcgggagagc

SEQ ID NO: 200089 - RNA, 22 nt, Human
uucucucccaugaagcuucuau

SEQ ID NO: 200090 - RNA, 22 nt, Human
agguguccaauccugguuggau

SEQ ID NO: 200091 - RNA, 22 nt, Human
gcugagaauguuccuacuggua

SEQ ID NO: 200092 - RNA, 22 nt, Human
ccaucccuucucuggccagcag

SEQ ID NO: 200093 - RNA, 22 nt, Human
ccugcccuaugaccagcuucac

SEQ ID NO: 200094 - RNA, 19 nt, Human
gggucccacugcccgucug

SEQ ID NO: 200095 - RNA, 22 nt, Human
uuaaaaaccaucuuccuuuccu

SEQ ID NO: 200096 - RNA, 22 nt, Human
gccagcaguccugcugugugcc

SEQ ID NO: 200097 - RNA, 22 nt, Human
gcugagacuuccacugccaucu

SEQ ID NO: 200098 - RNA, 22 nt, Human
uccagccaaucagagcugaggc

SEQ ID NO: 200099 - RNA, 22 nt, Human
aaguaaaccacagagaagccac

SEQ ID NO: 200100 - RNA, 22 nt, Human
uaggcuggaggaagcagugccu

SEQ ID NO: 200101 - RNA, 22 nt, Human
gccucagcuguugcaggggccc

SEQ ID NO: 200102 - RNA, 22 nt, Human
ucacacaggguucuggucucau

SEQ ID NO: 200103 - RNA, 22 nt, Human
ccucaggcugggcugccccugg

SEQ ID NO: 200104 - RNA, 22 nt, Human
gagacacacacaggagguggca

SEQ ID NO: 200105 - RNA, 22 nt, Human
cuuaauaauaggugaggcuaug

SEQ ID NO: 200106 - RNA, 22 nt, Human
auauuacauaaacaugagugaa

SEQ ID NO: 200107 - RNA, 22 nt, Human
gaucaugugauuugaaguaaug

SEQ ID NO: 200108 - RNA, 22 nt, Human
cuuuucugagagggccaagauu

SEQ ID NO: 200109 - RNA, 22 nt, Human
ccuuuagaauucugccccuccu

SEQ ID NO: 200110 - RNA, 22 nt, Human
gccugcugaaccucaugcaguc

SEQ ID NO: 200111 - RNA, 22 nt, Human
gggcugagcacauacugacagc

SEQ ID NO: 200112 - RNA, 18 nt, Human
ucugagggugcgggagcu

SEQ ID NO: 200113 - RNA, 22 nt, Human
ccagcuguuggaguuucacugc

SEQ ID NO: 200114 - RNA, 22 nt, Human
cagagccagggcuaggaacugg

SEQ ID NO: 200115 - RNA, 22 nt, Human
cugcuuggguccuggcaugggu

SEQ ID NO: 200116 - RNA, 22 nt, Human
cagaaagcaaaauggaucucug

SEQ ID NO: 200117 - RNA, 22 nt, Human
ccacugcucugccaggagcugg

SEQ ID NO: 200118 - RNA, 22 nt, Human
gaugaagucauuauccuuuugg

SEQ ID NO: 200119 - RNA, 22 nt, Human
aguggcugaauauauuuuacua

SEQ ID NO: 200120 - RNA, 22 nt, Human
ucuggaggcucugagggugagu

SEQ ID NO: 200121 - RNA, 22 nt, Human
ucaggauuauuucaguggcuuu

SEQ ID NO: 200122 - RNA, 18 nt, Human
cugaggccaacuacacug

SEQ ID NO: 200123 - RNA, 22 nt, Human
acugggcuagaguggaagcugg

SEQ ID NO: 200124 - RNA, 22 nt, Human
aucuccgccaucgcgaacgccu

SEQ ID NO: 200125 - RNA, 20 nt, Human
cgcccaggagggcccaugug

SEQ ID NO: 200126 - RNA, 22 nt, Human
gggcaggcugagcaugucaccu

SEQ ID NO: 200127 - RNA, 22 nt, Human
ucaaacauaggcacacauucag

SEQ ID NO: 200128 - RNA, 20 nt, Human
gcaugaggaaucauugcagc

SEQ ID NO: 200129 - RNA, 22 nt, Human
gugaggggaguaaagccauguu

SEQ ID NO: 200130 - RNA, 22 nt, Human
uauuucacaugugggaaacaua

SEQ ID NO: 200131 - RNA, 22 nt, Human
ggaagaggcucucauugagggc

SEQ ID NO: 200132 - RNA, 22 nt, Human
cuguuuauugagcaaucugcca

SEQ ID NO: 200133 - RNA, 22 nt, Human
cucaggaaaauauugaagaagu

SEQ ID NO: 200134 - RNA, 22 nt, Human
aauaacuuuuaaaagacccugg

SEQ ID NO: 200135 - RNA, 22 nt, Human
aaagauugaaagagaauuuguc

SEQ ID NO: 200136 - RNA, 22 nt, Human
uauauucaaugauuaguaucag

SEQ ID NO: 200137 - RNA, 22 nt, Human
ugaggguagaggcaggagugca

SEQ ID NO: 200138 - RNA, 22 nt, Human
uucuguauguacauauguguau

SEQ ID NO: 200139 - RNA, 22 nt, Human
ggaaaacugaggcucucagcag

SEQ ID NO: 200140 - RNA, 22 nt, Human
uauacaauggcugaaucaucca

SEQ ID NO: 200141 - RNA, 22 nt, Human
uccugaaaaauuacauguucag

SEQ ID NO: 200142 - RNA, 22 nt, Human
guucccaugccuccaagcuuca

SEQ ID NO: 200143 - RNA, 22 nt, Human
gaaagccaucuggcugcuggga

SEQ ID NO: 200144 - RNA, 22 nt, Human
agagugagggggcacugagacg

SEQ ID NO: 200145 - RNA, 22 nt, Human
uuucuacauuuguaaccagauu

SEQ ID NO: 200146 - RNA, 22 nt, Human
uaaaggaaucaguuuuagagau

SEQ ID NO: 200147 - RNA, 22 nt, Human
augagacaagagucuaaauuca

SEQ ID NO: 200148 - RNA, 22 nt, Human
ugacauuuaucaaagaaauggu

SEQ ID NO: 200149 - RNA, 22 nt, Human
gaaggagcuaccaagacugaau

SEQ ID NO: 200150 - RNA, 22 nt, Human
acccuguaugcuauaucccuaa

SEQ ID NO: 200151 - RNA, 22 nt, Human
gcaguaagauguaagugcuaua

SEQ ID NO: 200152 - RNA, 20 nt, Human
ucugugugccaucaccuaac

SEQ ID NO: 200153 - RNA, 22 nt, Human
caguauacgacuaacgcaugac

SEQ ID NO: 200154 - RNA, 22 nt, Human
uuucagaaaacuuaucaucagu

SEQ ID NO: 200155 - RNA, 22 nt, Human
gcuccuggcuccaggcagccaa

SEQ ID NO: 200156 - RNA, 22 nt, Human
acagguuuuuggauaauccuuu

SEQ ID NO: 200157 - RNA, 22 nt, Human
agcaagcagaauucuguccucu

SEQ ID NO: 200158 - RNA, 22 nt, Human
ucucucagucagaugcuaaaga

SEQ ID NO: 200159 - RNA, 22 nt, Human
uacaugcaugauacaaaguugc

SEQ ID NO: 200160 - RNA, 22 nt, Human
aguccagggcuuagucagcggg

SEQ ID NO: 200161 - RNA, 22 nt, Human
gaggagcugaggcugaggccuc

SEQ ID NO: 200162 - RNA, 22 nt, Human
cagucccaguuugagacucugg

SEQ ID NO: 200163 - RNA, 22 nt, Human
uugcaaauugcaagaguuggau

SEQ ID NO: 200164 - RNA, 22 nt, Human
ugcaaggcugccucugaggacc

SEQ ID NO: 200165 - RNA, 22 nt, Human
auaagcauguuagaauauuuga

SEQ ID NO: 200166 - RNA, 22 nt, Human
cagagccugccucuggcugugg

SEQ ID NO: 200167 - RNA, 22 nt, Human
cuuugugucuguuaauaauuau

SEQ ID NO: 200168 - RNA, 22 nt, Human
uuggaaauacagcaguuacuuu

SEQ ID NO: 200169 - RNA, 21 nt, Human
aagcuguguuccacugauagc

SEQ ID NO: 200170 - RNA, 22 nt, Human
uauuuuacuauuuggcaaaguc

SEQ ID NO: 200171 - RNA, 23 nt, Human
ccagcccuccaccagcucuaggc

SEQ ID NO: 200172 - RNA, 22 nt, Human
ccaggcccguucccuucuccag

SEQ ID NO: 200173 - RNA, 22 nt, Human
auuugcaaugauuucagugcuu

SEQ ID NO: 200174 - RNA, 22 nt, Human
gccagcagcucuugggcgggca

SEQ ID NO: 200175 - RNA, 22 nt, Human
acucagaggcagcugcucaccc

SEQ ID NO: 200176 - RNA, 22 nt, Human
ugggaaggauacguuacaagau

SEQ ID NO: 200177 - RNA, 22 nt, Human
uauuagguagauuuuacugauu

SEQ ID NO: 200178 - RNA, 22 nt, Human
uaugugucccuugguguagcaa

SEQ ID NO: 200179 - RNA, 22 nt, Human
ggcaggugaguucauuaucugc

SEQ ID NO: 200180 - RNA, 22 nt, Human
cucccaggguagggagagacua

SEQ ID NO: 200181 - RNA, 22 nt, Human
uuagagagaaccaucaggaucu

SEQ ID NO: 200182 - RNA, 22 nt, Human
ggcccagcgaggccaccuacag

SEQ ID NO: 200183 - RNA, 22 nt, Human
uggcaugauaggaggugcagaa

SEQ ID NO: 200184 - RNA, 22 nt, Human
cugcuuugacuguuaagaacca

SEQ ID NO: 200185 - RNA, 22 nt, Human
uauguacaccggggaagguggg

SEQ ID NO: 200186 - RNA, 22 nt, Human
accaggcugugaagugagacua

SEQ ID NO: 200187 - RNA, 22 nt, Human
caggagaagguuuggagugcag

SEQ ID NO: 200188 - RNA, 22 nt, Human
cauuucaauuauuugcucuucu

SEQ ID NO: 200189 - RNA, 22 nt, Human
ucuuuggcuugucuccucaguu

SEQ ID NO: 200190 - RNA, 20 nt, Human
aagcaauauagugcaaaugu

SEQ ID NO: 200191 - RNA, 22 nt, Human
acagcagguuuuaacuuugaag

SEQ ID NO: 200192 - RNA, 22 nt, Human
acaagcaguaaaggccacaguc

SEQ ID NO: 200193 - RNA, 22 nt, Human
ggaugggagcagaggacgacca

SEQ ID NO: 200194 - RNA, 22 nt, Human
acagucauuagauacaaugucu

SEQ ID NO: 200195 - RNA, 22 nt, Human
aagaguuucugauucaguaggu

SEQ ID NO: 200196 - RNA, 22 nt, Human
acaggcagugauuuccucuggu

SEQ ID NO: 200197 - RNA, 22 nt, Human
ugcaaacagaaaagcuacuuug

SEQ ID NO: 200198 - RNA, 22 nt, Human
cagaggaaguuccuugaugaga

SEQ ID NO: 200199 - RNA, 22 nt, Human
agcuucucagcuucagaacugu

SEQ ID NO: 200200 - RNA, 22 nt, Human
uuucuggaaacggguucaagcu

SEQ ID NO: 200201 - RNA, 22 nt, Human
cuugaaagcacuuaguaaauua

SEQ ID NO: 200202 - RNA, 22 nt, Human
acaggacaggcugggcuagacu

SEQ ID NO: 200203 - RNA, 22 nt, Human
ggcaggugggaacccuccccac

SEQ ID NO: 200204 - RNA, 22 nt, Human
uuaugcaacaggugagcagaca

SEQ ID NO: 200205 - RNA, 22 nt, Human
uacuuuuuagcacagugugugc

SEQ ID NO: 200206 - RNA, 22 nt, Human
augcaauauguguuucuguuua

SEQ ID NO: 200207 - RNA, 22 nt, Human
aucagagaaguuucacuggcau

SEQ ID NO: 200208 - RNA, 22 nt, Human
aaagauuauggcauugaaauac

SEQ ID NO: 200209 - RNA, 22 nt, Human
gccugcagcaugcuaggucuug

SEQ ID NO: 200210 - RNA, 22 nt, Human
ggucucagagguuucugcucag

SEQ ID NO: 200211 - RNA, 22 nt, Human
ucagcuggaagauggugcagaa

SEQ ID NO: 200212 - RNA, 22 nt, Human
cucugugaaccccuccuuucuu

SEQ ID NO: 200213 - RNA, 22 nt, Human
acauguauugacauuauauucu

SEQ ID NO: 200214 - RNA, 22 nt, Human
ugcagccuagacauucugguca

SEQ ID NO: 200215 - RNA, 22 nt, Human
caagauuuaagagucagccuug

SEQ ID NO: 200216 - RNA, 22 nt, Human
aacuuguaaugaaaggcaauag

SEQ ID NO: 200217 - RNA, 23 nt, Human
agcagucagggugguaagccauc

SEQ ID NO: 200218 - RNA, 21 nt, Human
aguacaaaaauuccuuucuca

SEQ ID NO: 200219 - RNA, 22 nt, Human
cccaggcuccugacucauucua

SEQ ID NO: 200220 - RNA, 22 nt, Human
aaguggagcuauaggcucagau

SEQ ID NO: 200221 - RNA, 22 nt, Human
uaaugcuuaauuuucacaagcc

SEQ ID NO: 200222 - RNA, 22 nt, Human
ucccuguccaaagucuuccuau

SEQ ID NO: 200223 - RNA, 22 nt, Human
ggcagggcaggaaagucaggaa

SEQ ID NO: 200224 - RNA, 22 nt, Human
aaguuuaacuugaauucuuucu

SEQ ID NO: 200225 - RNA, 16 nt, Human
ugggaccuguggccaa

SEQ ID NO: 200226 - RNA, 19 nt, Human
ggccuugaugaguggggag

SEQ ID NO: 200227 - RNA, 22 nt, Human
cagggcucagggacugcagaaa

SEQ ID NO: 200228 - RNA, 22 nt, Human
ucagcagggaggcucugugccc

SEQ ID NO: 200229 - RNA, 22 nt, Human
gggcacaggagaaggaucuggc

SEQ ID NO: 200230 - RNA, 21 nt, Human
cucagagacaaaugccauccc

SEQ ID NO: 200231 - RNA, 22 nt, Human
uuacagguggagaaguaaggcu

SEQ ID NO: 200232 - RNA, 22 nt, Human
ggcucugaagggugacagguuu

SEQ ID NO: 200233 - RNA, 22 nt, Human
uggagauggguuaauggagaga

SEQ ID NO: 200234 - RNA, 22 nt, Human
caggcagcguccugcuuccugu

SEQ ID NO: 200235 - RNA, 22 nt, Human
gccuggcugggcugaaugcuua

SEQ ID NO: 200236 - RNA, 22 nt, Human
ggaggacacuggcucugccuuc

SEQ ID NO: 200237 - RNA, 22 nt, Human
gacaucauggagaggauaaaua

SEQ ID NO: 200238 - RNA, 22 nt, Human
ugcuuaggaugcuagcaggcau

SEQ ID NO: 200239 - RNA, 22 nt, Human
gcagaauagugacuuuccuuaa

SEQ ID NO: 200240 - RNA, 22 nt, Human
gaaggcuuuucuaccagaucuu

SEQ ID NO: 200241 - RNA, 22 nt, Human
uccaagaucuacagcaguuuag

SEQ ID NO: 200242 - RNA, 22 nt, Human
uccaggucugguuggacagguu

SEQ ID NO: 200243 - RNA, 22 nt, Human
cugucauugagccugucagggc

SEQ ID NO: 200244 - RNA, 22 nt, Human
uaggaaugauuggaauuccagg

SEQ ID NO: 200245 - RNA, 22 nt, Human
gucaggaucucccaguacauau

SEQ ID NO: 200246 - RNA, 18 nt, Human
aaugugaauauuuacuuc

SEQ ID NO: 200247 - RNA, 22 nt, Human
agacacagaacacaaaagcaua

SEQ ID NO: 200248 - RNA, 22 nt, Human
ugcuccagcaacaggcuuagcu

SEQ ID NO: 200249 - RNA, 22 nt, Human
uagaaauggagaacagauuaau

SEQ ID NO: 200250 - RNA, 22 nt, Human
agucaggagcugcugcauugua

SEQ ID NO: 200251 - RNA, 15 nt, Human
uuucaaaaugaggcc

SEQ ID NO: 200252 - RNA, 22 nt, Human
cuguggcucagcacggggucag

SEQ ID NO: 200253 - RNA, 22 nt, Human
acugugcaucuauugccauuua

SEQ ID NO: 200254 - RNA, 22 nt, Human
gcuggggagcuagaccucagca

SEQ ID NO: 200255 - RNA, 22 nt, Human
uguggagaagaaggccacugca

SEQ ID NO: 200256 - RNA, 22 nt, Human
caggagcucaagaccacccugg

SEQ ID NO: 200257 - RNA, 20 nt, Human
ucucuggccagaaacaacag

SEQ ID NO: 200258 - RNA, 20 nt, Human
uuaagaaaagcacauccugc

SEQ ID NO: 200259 - RNA, 22 nt, Human
uucaaaauccgggaggcgcccc

SEQ ID NO: 200260 - RNA, 21 nt, Human
aacugcaaaugaugcuggaga

SEQ ID NO: 200261 - RNA, 21 nt, Human
ucuggucugcuguggaccugg

SEQ ID NO: 200262 - RNA, 19 nt, Human
aguguauuuuuuucuguag

SEQ ID NO: 200263 - RNA, 23 nt, Human
gcucagagguuuuucucuggaug

SEQ ID NO: 200264 - RNA, 22 nt, Human
uucugcuuuuagcuaaacuaua

SEQ ID NO: 200265 - RNA, 22 nt, Human
cuggagggggaaauguucauug

SEQ ID NO: 200266 - RNA, 22 nt, Human
ccuugaaagccaggcagaggaa

SEQ ID NO: 200267 - RNA, 22 nt, Human
aagaguuugaccugugccaucc

SEQ ID NO: 200268 - RNA, 22 nt, Human
auacauguucguguacauguuc

SEQ ID NO: 200269 - RNA, 22 nt, Human
augugaggcagcacggagauua

SEQ ID NO: 200270 - RNA, 22 nt, Human
uuuauccagaaucaggauuuuu

SEQ ID NO: 200271 - RNA, 22 nt, Human
aaagggccuccgccugggcagg

SEQ ID NO: 200272 - RNA, 22 nt, Human
cuggcaggcggcagagcccagg

SEQ ID NO: 200273 - RNA, 22 nt, Human
acaugcaagccccugaacacau

SEQ ID NO: 200274 - RNA, 22 nt, Human
cuuuccuaguuggucccagcac

SEQ ID NO: 200275 - RNA, 22 nt, Human
uaaggccaauuacauauguuca

SEQ ID NO: 200276 - RNA, 22 nt, Human
aggguccugagccuggggcgca

SEQ ID NO: 200277 - RNA, 22 nt, Human
cagaacagaaucguguggugag

SEQ ID NO: 200278 - RNA, 22 nt, Human
uuuccuuccauguugggcaaaa

SEQ ID NO: 200279 - RNA, 21 nt, Human
ucucugguuggaguugugcca

SEQ ID NO: 200280 - RNA, 22 nt, Human
gccuggcuuggggcucaguggu

SEQ ID NO: 200281 - RNA, 22 nt, Human
ucuuuugagggccagaggaaga

SEQ ID NO: 200282 - RNA, 22 nt, Human
ugauauuuaagcaaaaauaugg

SEQ ID NO: 200283 - RNA, 22 nt, Human
cagugguuauacuuacuguuuc

SEQ ID NO: 200284 - RNA, 22 nt, Human
gggagccagccuuugccuauaa

SEQ ID NO: 200285 - RNA, 22 nt, Human
gguucaguuuacauuaaaaucu

SEQ ID NO: 200286 - RNA, 22 nt, Human
uaggacaggaucaugaugcugg

SEQ ID NO: 200287 - RNA, 22 nt, Human
cuguuacuaaucuuuucugcua

SEQ ID NO: 200288 - RNA, 22 nt, Human
uggcugugauuugcacgagaug

SEQ ID NO: 200289 - RNA, 22 nt, Human
ucugggugcuacaaacaguauu

SEQ ID NO: 200290 - RNA, 22 nt, Human
gcagaaggauccgcaggugcaa

SEQ ID NO: 200291 - RNA, 22 nt, Human
ugagggacaccagggcuggagc

SEQ ID NO: 200292 - RNA, 22 nt, Human
uggcugagagaagacggggaag

SEQ ID NO: 200293 - RNA, 22 nt, Human
gcagcaucuagggcacuggccu

SEQ ID NO: 200294 - RNA, 18 nt, Human
agagcagcggcaucacac

SEQ ID NO: 200295 - RNA, 17 nt, Human
cagucgaggaggaccug

SEQ ID NO: 200296 - RNA, 22 nt, Human
ggcuccuuaucucuccuaugcc

SEQ ID NO: 200297 - RNA, 22 nt, Human
guucuucaguucaggcuguuca

SEQ ID NO: 200298 - RNA, 22 nt, Human
uaacuguauagcuuggacuaaa

SEQ ID NO: 200299 - RNA, 19 nt, Human
auucuucagcagugagacc

SEQ ID NO: 200300 - RNA, 23 nt, Human
ucuguuuugcaacaugugacaag

SEQ ID NO: 200301 - RNA, 19 nt, Human
ucuccaguugcuuucaggg

SEQ ID NO: 200302 - RNA, 22 nt, Human
ucaugaaaauagaucagaaauu

SEQ ID NO: 200303 - RNA, 22 nt, Human
ggccuggaagaggacagagaaa

SEQ ID NO: 200304 - RNA, 22 nt, Human
uagcugacagauacaaucagau

SEQ ID NO: 200305 - RNA, 22 nt, Human
gcugugugacccuagccaguag

SEQ ID NO: 200306 - RNA, 22 nt, Human
ggaggugacuggaucaugggca

SEQ ID NO: 200307 - RNA, 22 nt, Human
ucugucuuugagaucucagccu

SEQ ID NO: 200308 - RNA, 22 nt, Human
aucucagucagguugaauuugg

SEQ ID NO: 200309 - RNA, 22 nt, Human
uaguggagguggucugugaacu

SEQ ID NO: 200310 - RNA, 20 nt, Human
ugucauuuauuuaucaaaug

SEQ ID NO: 200311 - RNA, 22 nt, Human
agaauuagucacaauuauagga

SEQ ID NO: 200312 - RNA, 23 nt, Human
agacacuguaaagaauugcaguu

SEQ ID NO: 200313 - RNA, 22 nt, Human
ucagaaagcuuuuacuuaaaca

SEQ ID NO: 200314 - RNA, 22 nt, Human
uagaaacuagauugauagcgga

SEQ ID NO: 200315 - RNA, 22 nt, Human
ccaucuugggucacugcccccc

SEQ ID NO: 200316 - RNA, 22 nt, Human
cuugggcucuaaaugccaguga

SEQ ID NO: 200317 - RNA, 19 nt, Human
gugucugccuuugugccac

SEQ ID NO: 200318 - RNA, 22 nt, Human
uggaaggaaagguagcagagaa

SEQ ID NO: 200319 - RNA, 22 nt, Human
auuuuacuacuccaauuaauga

SEQ ID NO: 200320 - RNA, 22 nt, Human
gccuguuuggcaucauugguug

SEQ ID NO: 200321 - RNA, 19 nt, Human
ugcugggucauauggaaac

SEQ ID NO: 200322 - RNA, 22 nt, Human
uuuugccugugaauacuaucuu

SEQ ID NO: 200323 - RNA, 22 nt, Human
uggccuugaaccaggucuccac

SEQ ID NO: 200324 - RNA, 22 nt, Human
ucagaaggaugugcagguggca

SEQ ID NO: 200325 - RNA, 22 nt, Human
caacaauuucccaguuucccau

SEQ ID NO: 200326 - RNA, 22 nt, Human
uggacaacauagugagaccuca

SEQ ID NO: 200327 - RNA, 22 nt, Human
uagagagccaguugucauaguu

SEQ ID NO: 200328 - RNA, 22 nt, Human
agcucagcccuccugugcagcu

SEQ ID NO: 200329 - RNA, 21 nt, Human
aaugucuuuguccaugcucug

SEQ ID NO: 200330 - RNA, 22 nt, Human
gaauacaagccaggcacaaggc

SEQ ID NO: 200331 - RNA, 22 nt, Human
agucauuguaugaaguguacuc

SEQ ID NO: 200332 - RNA, 22 nt, Human
uaauuuacucagauguucaauc

SEQ ID NO: 200333 - RNA, 22 nt, Human
uccaggccccagcaccuuggga

SEQ ID NO: 200334 - RNA, 22 nt, Human
ccugggcucaagugauccuccu

SEQ ID NO: 200335 - RNA, 22 nt, Human
gccuccggagucacagugucuu

SEQ ID NO: 200336 - RNA, 22 nt, Human
auuuauuaccucggaguuucug

SEQ ID NO: 200337 - RNA, 22 nt, Human
ugacauuuuaucaauaucacag

SEQ ID NO: 200338 - RNA, 18 nt, Human
ggcugcuccucucccuac

SEQ ID NO: 200339 - RNA, 22 nt, Human
aagaugacagaugcuuagaguc

SEQ ID NO: 200340 - RNA, 22 nt, Human
ugugugucagucuuguuuaggg

SEQ ID NO: 200341 - RNA, 22 nt, Human
uaauaauuaacagugauggguc

SEQ ID NO: 200342 - RNA, 23 nt, Human
uaugagucaucugcuacaaccca

SEQ ID NO: 200343 - RNA, 22 nt, Human
caacuaauauagggcaugagaa

SEQ ID NO: 200344 - RNA, 22 nt, Human
ucaagcaaguugcauauugcua

SEQ ID NO: 200345 - RNA, 22 nt, Human
cagcugcagaucauguuuacag

SEQ ID NO: 200346 - RNA, 22 nt, Human
gcaugcuuuuauaucuguuuaa

SEQ ID NO: 200347 - RNA, 22 nt, Human
aacauuucauuggaagcuaugu

SEQ ID NO: 200348 - RNA, 22 nt, Human
acuucuucuucagcugggggau

SEQ ID NO: 200349 - RNA, 22 nt, Human
caaggcauacuccuuucucagc

SEQ ID NO: 200350 - RNA, 19 nt, Human
auauauguauacaaugugg

SEQ ID NO: 200351 - RNA, 22 nt, Human
ggagaggggaacuuguugcuug

SEQ ID NO: 200352 - RNA, 22 nt, Human
agggugucagccacggaauggg

SEQ ID NO: 200353 - RNA, 22 nt, Human
acaugauuuuuaaagagauaau

SEQ ID NO: 200354 - RNA, 18 nt, Human
aaagaaggauuggagagc

SEQ ID NO: 200355 - RNA, 19 nt, Human
uucugcuguuccuaggcug

SEQ ID NO: 200356 - RNA, 22 nt, Human
gggaguggagagcaauggauga

SEQ ID NO: 200357 - RNA, 22 nt, Human
uauucugguuuccggaucucua

SEQ ID NO: 200358 - RNA, 22 nt, Human
ucuauagacuuggacauauagu

SEQ ID NO: 200359 - RNA, 23 nt, Human
acagccaguucaccucuccuugg

SEQ ID NO: 200360 - RNA, 22 nt, Human
aagaagagaaaugugcugcugg

SEQ ID NO: 200361 - RNA, 22 nt, Human
gaggaacagagggcaaggccag

SEQ ID NO: 200362 - RNA, 22 nt, Human
cacagcuuccauuagaaugaga

SEQ ID NO: 200363 - RNA, 22 nt, Human
gcuagaaacuguuuaaucucuu

SEQ ID NO: 200364 - RNA, 22 nt, Human
ccacccuggacaggccucugag

SEQ ID NO: 200365 - RNA, 22 nt, Human
ccaggaggcucuugucccuggu

SEQ ID NO: 200366 - RNA, 22 nt, Human
aguuguaauaacaauaccaaaa

SEQ ID NO: 200367 - RNA, 22 nt, Human
gagcuuggcuggaccucacgga

SEQ ID NO: 200368 - RNA, 22 nt, Human
agcugcugggagaagugagcca

SEQ ID NO: 200369 - RNA, 21 nt, Human
aaacaucucugcuuuuguguc

SEQ ID NO: 200370 - RNA, 22 nt, Human
agccccaggaugggccgcagga

SEQ ID NO: 200371 - RNA, 22 nt, Human
cuaaagaagcuagcaaucuaua

SEQ ID NO: 200372 - RNA, 22 nt, Human
auaaagcaucuagucugucacu

SEQ ID NO: 200373 - RNA, 22 nt, Human
uguauauguuuguauguacaca

SEQ ID NO: 200374 - RNA, 20 nt, Human
uacagacaugacaauaaugg

SEQ ID NO: 200375 - RNA, 22 nt, Human
aaucuagagaacuguggggcag

SEQ ID NO: 200376 - RNA, 22 nt, Human
agucuguguaccuuuggccuuc

SEQ ID NO: 200377 - RNA, 22 nt, Human
augcaugaaagaauccaagccu

SEQ ID NO: 200378 - RNA, 23 nt, Human
acucuguaggcuguccaugugca

SEQ ID NO: 200379 - RNA, 23 nt, Human
ucugggcugagacuuggaagguc

SEQ ID NO: 200380 - RNA, 23 nt, Human
ccaucaggccuccguguccagcc

SEQ ID NO: 200381 - RNA, 22 nt, Human
aaaagucuacaagcuucaacaa

SEQ ID NO: 200382 - RNA, 22 nt, Human
uuuuucuaauggcuuaggaugu

SEQ ID NO: 200383 - RNA, 22 nt, Human
uggagccaggguagaagcagag

SEQ ID NO: 200384 - RNA, 22 nt, Human
aggcagaggagaaugaucuucc

SEQ ID NO: 200385 - RNA, 18 nt, Human
auuuacccagcaacgugg

SEQ ID NO: 200386 - RNA, 21 nt, Human
ggcagugaugugaagugcauc

SEQ ID NO: 200387 - RNA, 22 nt, Human
aaaaagcuuaaaugagcaguuc

SEQ ID NO: 200388 - RNA, 22 nt, Human
uagguucaugaaauuuucagga

SEQ ID NO: 200389 - RNA, 22 nt, Human
cccagagcaugugcugccuuug

SEQ ID NO: 200390 - RNA, 22 nt, Human
ucaagagauugaauaauaacug

SEQ ID NO: 200391 - RNA, 22 nt, Human
aggguccaacugaggcugaacu

SEQ ID NO: 200392 - RNA, 22 nt, Human
caggguagacaguaggugucug

SEQ ID NO: 200393 - RNA, 22 nt, Human
ucauacaacuaagaguuucaga

SEQ ID NO: 200394 - RNA, 22 nt, Human
caugcugugcaucuugaugacc

SEQ ID NO: 200395 - RNA, 22 nt, Human
ucagugucuagggacaguaauc

SEQ ID NO: 200396 - RNA, 22 nt, Human
auuacagauuauaaauuugagc

SEQ ID NO: 200397 - RNA, 22 nt, Human
uuucuguaaggacuuaaugcaa

SEQ ID NO: 200398 - RNA, 22 nt, Human
ucuggcagagauauccauccca

SEQ ID NO: 200399 - RNA, 20 nt, Human
gaaucuuuccccaugcaaug

SEQ ID NO: 200400 - RNA, 22 nt, Human
cagugugaggaauuagugucca

SEQ ID NO: 200401 - RNA, 22 nt, Human
acauggagaccagauggaagua

SEQ ID NO: 200402 - RNA, 22 nt, Human
ucucuuugucugcucuuaguug

SEQ ID NO: 200403 - RNA, 22 nt, Human
gcugucuuguauguuguaggac

SEQ ID NO: 200404 - RNA, 22 nt, Human
gagcuugguguuauuucugugg

SEQ ID NO: 200405 - RNA, 22 nt, Human
gcagcucagggagagggcacca

SEQ ID NO: 200406 - RNA, 20 nt, Human
auaauuacauagagauugcc

SEQ ID NO: 200407 - RNA, 18 nt, Human
gcagagugcgucucugug

SEQ ID NO: 200408 - RNA, 22 nt, Human
cauguacaugccuacuaucaau

SEQ ID NO: 200409 - RNA, 22 nt, Human
gaggugguuuguggugacucau

SEQ ID NO: 200410 - RNA, 22 nt, Human
cacaggugccaucucuucaugg

SEQ ID NO: 200411 - RNA, 22 nt, Human
gagugcaguaugagaggcugcu

SEQ ID NO: 200412 - RNA, 22 nt, Human
uagcaaaagcucaacaggaagg

SEQ ID NO: 200413 - RNA, 22 nt, Human
gggcagugucggggcccaggga

SEQ ID NO: 200414 - RNA, 19 nt, Human
caugugcaugagcacagga

SEQ ID NO: 200415 - RNA, 22 nt, Human
augcuuguacuaaaaaaauauu

SEQ ID NO: 200416 - RNA, 20 nt, Human
uuccuggcucuaggaccuug

SEQ ID NO: 200417 - RNA, 22 nt, Human
uauacaguuugaguucuugcau

SEQ ID NO: 200418 - RNA, 22 nt, Human
aggaaggagggcagauauuaag

SEQ ID NO: 200419 - RNA, 22 nt, Human
agaaauuauuagugaauagucu

SEQ ID NO: 200420 - RNA, 22 nt, Human
cuggcucuugcgacucagcuug

SEQ ID NO: 200421 - RNA, 23 nt, Human
gucucuagaguguggagcaaaga

SEQ ID NO: 200422 - RNA, 22 nt, Human
ucuggucccugcucacuucuug

SEQ ID NO: 200423 - RNA, 22 nt, Human
cugugagggccagagucagggc

SEQ ID NO: 200424 - RNA, 22 nt, Human
ucacaggaaccaucagagaaau

SEQ ID NO: 200425 - RNA, 21 nt, Human
ucuggggaagacaucuaggau

SEQ ID NO: 200426 - RNA, 22 nt, Human
uguuuacuugagguggaaacaa

SEQ ID NO: 200427 - RNA, 22 nt, Human
cagguggcugagcugaccuuug

SEQ ID NO: 200428 - RNA, 22 nt, Human
uggcuucucccucugccugauu

SEQ ID NO: 200429 - RNA, 22 nt, Human
cagaaccaggaacugauggaga

SEQ ID NO: 200430 - RNA, 22 nt, Human
cagcuggguuuaguggggugug

SEQ ID NO: 200431 - RNA, 22 nt, Human
ggccuaggaaggggauguaacu

SEQ ID NO: 200432 - RNA, 22 nt, Human
ucugaaauaagggagaagggaa

SEQ ID NO: 200433 - RNA, 22 nt, Human
aauaacagauuuucaagcugug

SEQ ID NO: 200434 - RNA, 22 nt, Human
cuguugcucccagggagagggu

SEQ ID NO: 200435 - RNA, 23 nt, Human
cagcugaagcagccugggcugga

SEQ ID NO: 200436 - RNA, 18 nt, Human
auacagagaccucaagga

SEQ ID NO: 200437 - RNA, 22 nt, Human
aauuuuaucucuaagcaggcuu

SEQ ID NO: 200438 - RNA, 22 nt, Human
uccagccccuuuuacucauuca

SEQ ID NO: 200439 - RNA, 22 nt, Human
cugcugguaccaguggccguca

SEQ ID NO: 200440 - RNA, 22 nt, Human
uuuccaggugcauagaaaacag

SEQ ID NO: 200441 - RNA, 22 nt, Human
aggggcaggugcugcacuuaga

SEQ ID NO: 200442 - RNA, 22 nt, Human
aaagaggcaaucaauguagcaa

SEQ ID NO: 200443 - RNA, 22 nt, Human
uaacugaugugaacuuaccauu

SEQ ID NO: 200444 - RNA, 22 nt, Human
gcagagauuaugccauggaaag

SEQ ID NO: 200445 - RNA, 20 nt, Human
ccuguggcucuuguaauuca

SEQ ID NO: 200446 - RNA, 22 nt, Human
uugccuggaugguccccagaga

SEQ ID NO: 200447 - RNA, 19 nt, Human
caauauauagugaguggau

SEQ ID NO: 200448 - RNA, 22 nt, Human
cugcaaaaguaauugcagguuu

SEQ ID NO: 200449 - RNA, 22 nt, Human
cagggccaggcugauggccugg

SEQ ID NO: 200450 - RNA, 22 nt, Human
aaaggagacuucagaucuccuu

SEQ ID NO: 200451 - RNA, 21 nt, Human
aggcuuggauagauauucaua

SEQ ID NO: 200452 - RNA, 22 nt, Human
ccagguguaggacaccaaggga

SEQ ID NO: 200453 - RNA, 21 nt, Human
aucccagcacccaggagugca

SEQ ID NO: 200454 - RNA, 22 nt, Human
cugugacagggaucagaaugca

SEQ ID NO: 200455 - RNA, 22 nt, Human
ccagcagaagcucccgcugggu

SEQ ID NO: 200456 - RNA, 22 nt, Human
cucuucuugccugaugaggcag

SEQ ID NO: 200457 - RNA, 22 nt, Human
ggacauuugcaccuaccucagc

SEQ ID NO: 200458 - RNA, 22 nt, Human
auguuaaaagucugagugggag

SEQ ID NO: 200459 - RNA, 20 nt, Human
gggaggccccagaguccagg

SEQ ID NO: 200460 - RNA, 22 nt, Human
ccugagccucuugcacgcucag

SEQ ID NO: 200461 - RNA, 22 nt, Human
aucuguaacugcuaucaucucc

SEQ ID NO: 200462 - RNA, 22 nt, Human
cugggugaauuugaaggaaagg

SEQ ID NO: 200463 - RNA, 22 nt, Human
uauguacucaucaacuauugaa

SEQ ID NO: 200464 - RNA, 22 nt, Human
aucuuuggaaagccaagcacag

SEQ ID NO: 200465 - RNA, 22 nt, Human
ucaggucuugagccaucaggau

SEQ ID NO: 200466 - RNA, 22 nt, Human
guggcuuggaccagucacagug

SEQ ID NO: 200467 - RNA, 19 nt, Human
caccuacuuuuggauuugc

SEQ ID NO: 200468 - RNA, 22 nt, Human
gcaaggacucccugggucauuc

SEQ ID NO: 200469 - RNA, 22 nt, Human
cuacagugacagaauuaaacag

SEQ ID NO: 200470 - RNA, 22 nt, Human
ucuucaaauccuacagugucug

SEQ ID NO: 200471 - RNA, 22 nt, Human
aagacagccagcuccaugggau

SEQ ID NO: 200472 - RNA, 22 nt, Human
gcugguuagaaaacagagcuca

SEQ ID NO: 200473 - RNA, 22 nt, Human
agccugggcccugccucuucuc

SEQ ID NO: 200474 - RNA, 22 nt, Human
uaagagaacuggauagauagga

SEQ ID NO: 200475 - RNA, 21 nt, Human
cacagaggcgcuguauggcug

SEQ ID NO: 200476 - RNA, 22 nt, Human
ugucaguuuaguugaagaaaga

SEQ ID NO: 200477 - RNA, 22 nt, Human
aacagacaacuccuguggcuca

SEQ ID NO: 200478 - RNA, 22 nt, Human
cuggacagaaagggcugcugug

SEQ ID NO: 200479 - RNA, 22 nt, Human
gcuucauagcauucauugccug

SEQ ID NO: 200480 - RNA, 22 nt, Human
aguagaaauguaagaaggauua

SEQ ID NO: 200481 - RNA, 21 nt, Human
agugcugaaaaagcaugucuc

SEQ ID NO: 200482 - RNA, 22 nt, Human
uuuuauucaaauaguucacacu

SEQ ID NO: 200483 - RNA, 19 nt, Human
ccagcuggccugggaccuc

SEQ ID NO: 200484 - RNA, 19 nt, Human
ucccaggaagcaaauguca

SEQ ID NO: 200485 - RNA, 22 nt, Human
uccuccuuguuuuccuguuuac

SEQ ID NO: 200486 - RNA, 22 nt, Human
uugagcuguauaccuaugacug

SEQ ID NO: 200487 - RNA, 21 nt, Human
uggcaggcagcuggaagcuug

SEQ ID NO: 200488 - RNA, 17 nt, Human
ggcaguggaggaagaga

SEQ ID NO: 200489 - RNA, 22 nt, Human
uacaaggaggcuaaugaugaca

SEQ ID NO: 200490 - RNA, 22 nt, Human
gcuguauuuauaugaaggcaug

SEQ ID NO: 200491 - RNA, 22 nt, Human
gcucugagucucagcuaccaca

SEQ ID NO: 200492 - RNA, 22 nt, Human
accagcucucuagcccuggucc

SEQ ID NO: 200493 - RNA, 20 nt, Human
ugccaggcugcacgccugcc

SEQ ID NO: 200494 - RNA, 22 nt, Human
aaaccaucagauaauucauacu

SEQ ID NO: 200495 - RNA, 22 nt, Human
aggaauucaagaccagcugggc

SEQ ID NO: 200496 - RNA, 22 nt, Human
acauuaaauuucauagugauua

SEQ ID NO: 200497 - RNA, 22 nt, Human
gcccaggaggucaaguagcuau

SEQ ID NO: 200498 - RNA, 22 nt, Human
gaggcagcagggcugguuccuu

SEQ ID NO: 200499 - RNA, 22 nt, Human
caggagcucucaucgucagggc

SEQ ID NO: 200500 - RNA, 22 nt, Human
ucccuccuggugaugaugcaaa

SEQ ID NO: 200501 - RNA, 22 nt, Human
uuguuuacacugcagaauuggg

SEQ ID NO: 200502 - RNA, 22 nt, Human
agugcauguucacuggcauggu

SEQ ID NO: 200503 - RNA, 22 nt, Human
uaaagugguggugcuaauguau

SEQ ID NO: 200504 - RNA, 22 nt, Human
gcaucaagacgaugugaaaucg

SEQ ID NO: 200505 - RNA, 22 nt, Human
uggcuggcaaggcuggagucag

SEQ ID NO: 200506 - RNA, 22 nt, Human
agggagccaggggccagcuauu

SEQ ID NO: 200507 - RNA, 23 nt, Human
aggcagguuugggcucuucuugu

SEQ ID NO: 200508 - RNA, 22 nt, Human
uuauugagaccguaagucaggu

SEQ ID NO: 200509 - RNA, 17 nt, Human
ucagcaggggccaagcu

SEQ ID NO: 200510 - RNA, 19 nt, Human
accagcccacucccaguuu

SEQ ID NO: 200511 - RNA, 22 nt, Human
uccugguggucugugcuucuuc

SEQ ID NO: 200512 - RNA, 22 nt, Human
uacauacauguauguguguauu

SEQ ID NO: 200513 - RNA, 22 nt, Human
ccuuggggaauauccauucuuc

SEQ ID NO: 200514 - RNA, 23 nt, Human
uuccuggcagguacaacuuuuac

SEQ ID NO: 200515 - RNA, 22 nt, Human
uggcucuguggauguucugacc

SEQ ID NO: 200516 - RNA, 22 nt, Human
uuuggacaaaugucugacuuuc

SEQ ID NO: 200517 - RNA, 22 nt, Human
uaauagaaagguauuuuuugca

SEQ ID NO: 200518 - RNA, 22 nt, Human
ugucucagcugugcuucauugg

SEQ ID NO: 200519 - RNA, 22 nt, Human
uagcagcuaugccauuuugaca

SEQ ID NO: 200520 - RNA, 22 nt, Human
ucauuuguaccauuuuuuaaga

SEQ ID NO: 200521 - RNA, 19 nt, Human
aggcucuguaggagagggc

SEQ ID NO: 200522 - RNA, 22 nt, Human
caguucaaaauuuugaagaagg

SEQ ID NO: 200523 - RNA, 22 nt, Human
ucagugaaugagauaacuuuag

SEQ ID NO: 200524 - RNA, 22 nt, Human
gaaguauuucugaguugcccag

SEQ ID NO: 200525 - RNA, 22 nt, Human
uugcaacauuguaaguuuauau

SEQ ID NO: 200526 - RNA, 22 nt, Human
gccaggcauuauuccgaucccu

SEQ ID NO: 200527 - RNA, 22 nt, Human
acugguaaauuaugcgacuuug

SEQ ID NO: 200528 - RNA, 22 nt, Human
cagaacagucgccugcauggau

SEQ ID NO: 200529 - RNA, 22 nt, Human
gaguaaaauaggugagaaucaa

SEQ ID NO: 200530 - RNA, 22 nt, Human
cagugggaaagugaagagcauu

SEQ ID NO: 200531 - RNA, 22 nt, Human
acucagagaauaucuagaagga

SEQ ID NO: 200532 - RNA, 22 nt, Human
ggcagagcuuguuccuucuguu

SEQ ID NO: 200533 - RNA, 22 nt, Human
cagcuguuugggcauggccaga

SEQ ID NO: 200534 - RNA, 22 nt, Human
gcaggcucagagcagauuagca

SEQ ID NO: 200535 - RNA, 22 nt, Human
ggcaagagugaggagugucucu

SEQ ID NO: 200536 - RNA, 22 nt, Human
ugcucauuaggacugcaaauuc

SEQ ID NO: 200537 - RNA, 22 nt, Human
ggcuggcugugcccuguacucu

SEQ ID NO: 200538 - RNA, 22 nt, Human
aaaauucauuccucagacugcc

SEQ ID NO: 200539 - RNA, 22 nt, Human
acuccuggaaaagaacgcaggg

SEQ ID NO: 200540 - RNA, 22 nt, Human
aaugagauggaauucccgccua

SEQ ID NO: 200541 - RNA, 22 nt, Human
cuuccagcugauuacaggcuau

SEQ ID NO: 200542 - RNA, 22 nt, Human
ugccauuuaaaaaugaccaaau

SEQ ID NO: 200543 - RNA, 17 nt, Human
cugguuuaugggcagug

SEQ ID NO: 200544 - RNA, 22 nt, Human
aaggcugacguuuguguuuauu

SEQ ID NO: 200545 - RNA, 22 nt, Human
ucacagcuccagacugcaacuc

SEQ ID NO: 200546 - RNA, 22 nt, Human
ggcugccuucauagaccauggg

SEQ ID NO: 200547 - RNA, 22 nt, Human
gaacaccuggguccccuggggc

SEQ ID NO: 200548 - RNA, 22 nt, Human
acuuucaugcucugagcacugg

SEQ ID NO: 200549 - RNA, 22 nt, Human
agaaaucucaguaucucaggga

SEQ ID NO: 200550 - RNA, 22 nt, Human
cucauuuaacagauuaaaaagu

SEQ ID NO: 200551 - RNA, 22 nt, Human
aagucucuuaguaauauccaac

SEQ ID NO: 200552 - RNA, 22 nt, Human
ggggagcaggcugggcugucug

SEQ ID NO: 200553 - RNA, 22 nt, Human
uggccucaaccguccuaagcac

SEQ ID NO: 200554 - RNA, 22 nt, Human
acauuguagacuuuucauaugu

SEQ ID NO: 200555 - RNA, 22 nt, Human
caggagcccugguggguggaca

SEQ ID NO: 200556 - RNA, 22 nt, Human
cugcugugugaccauggacagg

SEQ ID NO: 200557 - RNA, 22 nt, Human
agagggaaaaacucaugucauu

SEQ ID NO: 200558 - RNA, 22 nt, Human
caggucugugugccauuuccaa

SEQ ID NO: 200559 - RNA, 22 nt, Human
caggcuugaugugucuauacuu

SEQ ID NO: 200560 - RNA, 22 nt, Human
gauucaaaaguuugagcuccaa

SEQ ID NO: 200561 - RNA, 22 nt, Human
uauuucaucuggaacaagguaa

SEQ ID NO: 200562 - RNA, 22 nt, Human
ccucagaagcucaaggacauug

SEQ ID NO: 200563 - RNA, 22 nt, Human
uacauguuuacuccaagucagg

SEQ ID NO: 200564 - RNA, 22 nt, Human
auaaacugaagggaacacugag

SEQ ID NO: 200565 - RNA, 22 nt, Human
uguccuggccaaggccuugcuu

SEQ ID NO: 200566 - RNA, 22 nt, Human
ccaaaggcggaacugagucucu

SEQ ID NO: 200567 - RNA, 22 nt, Human
acuuuagauauuccucuguaca

SEQ ID NO: 200568 - RNA, 22 nt, Human
uuuugcuguguccuugagccgg

SEQ ID NO: 200569 - RNA, 22 nt, Human
uccaguggcaccuuggcccuca

SEQ ID NO: 200570 - RNA, 22 nt, Human
ucacucugggcccuacugggcu

SEQ ID NO: 200571 - RNA, 20 nt, Human
ugugcaggagagugaggcug

SEQ ID NO: 200572 - RNA, 18 nt, Human
guuaacaauuacuaacgc

SEQ ID NO: 200573 - RNA, 22 nt, Human
gcaccagccugagccucuugca

SEQ ID NO: 200574 - RNA, 22 nt, Human
acagaagcucaagagagcagug

SEQ ID NO: 200575 - RNA, 22 nt, Human
ugcccagguuugagugcccaag

SEQ ID NO: 200576 - RNA, 22 nt, Human
aaauucacuugccugcuuagcu

SEQ ID NO: 200577 - RNA, 22 nt, Human
uguagauuuuggagucuacaag

SEQ ID NO: 200578 - RNA, 22 nt, Human
caugaggauccaggugacaggc

SEQ ID NO: 200579 - RNA, 22 nt, Human
ucucuagacauggggaauguca

SEQ ID NO: 200580 - RNA, 22 nt, Human
agcagcagggucauugcucuuu

SEQ ID NO: 200581 - RNA, 22 nt, Human
ccacaggaggauguucagacaa

SEQ ID NO: 200582 - RNA, 20 nt, Human
gggcagccucgggagugggu

SEQ ID NO: 200583 - RNA, 22 nt, Human
aguaggacuagggguugaggca

SEQ ID NO: 200584 - RNA, 22 nt, Human
cucaucugucugggcugguuuu

SEQ ID NO: 200585 - RNA, 22 nt, Human
acauuuauauaacucacuagga

SEQ ID NO: 200586 - RNA, 22 nt, Human
ucuuacauauacgucauuuagu

SEQ ID NO: 200587 - RNA, 22 nt, Human
ggcccagcugggcggggacacg

SEQ ID NO: 200588 - RNA, 22 nt, Human
gcuggcuucccuaccugcaccu

SEQ ID NO: 200589 - RNA, 22 nt, Human
agugccuggaccccaugacaua

SEQ ID NO: 200590 - RNA, 22 nt, Human
ugggcuccguugccuggggcag

SEQ ID NO: 200591 - RNA, 22 nt, Human
gagagguccauuccccugucag

SEQ ID NO: 200592 - RNA, 22 nt, Human
uucaggcaucccuacaguuagg

SEQ ID NO: 200593 - RNA, 22 nt, Human
aaaauccacaacgcucauuuca

SEQ ID NO: 200594 - RNA, 22 nt, Human
uccaucugguaaaauucauuga

SEQ ID NO: 200595 - RNA, 22 nt, Human
cagugcagaggccagggaggau

SEQ ID NO: 200596 - RNA, 22 nt, Human
gucuggaggaggaagaaggcac

SEQ ID NO: 200597 - RNA, 22 nt, Human
uuauucaccauuuauuauguga

SEQ ID NO: 200598 - RNA, 22 nt, Human
cugggagaugacucagagcagg

SEQ ID NO: 200599 - RNA, 22 nt, Human
aaugaugaguucuaauagaccc

SEQ ID NO: 200600 - RNA, 22 nt, Human
cauccauucagugcaaaucaca

SEQ ID NO: 200601 - RNA, 22 nt, Human
gccugaccucuucugcccuggg

SEQ ID NO: 200602 - RNA, 22 nt, Human
aaccugcaguuuuuauucugag

SEQ ID NO: 200603 - RNA, 22 nt, Human
gcagagauggcugccucugagu

SEQ ID NO: 200604 - RNA, 22 nt, Human
aaacaugaugccuguacuaaga

SEQ ID NO: 200605 - RNA, 22 nt, Human
guauccuccccgcuggccuuca

SEQ ID NO: 200606 - RNA, 22 nt, Human
ugccuuggauugcagggaaccu

SEQ ID NO: 200607 - RNA, 23 nt, Human
ccacugaagaauccagggaguuu

SEQ ID NO: 200608 - RNA, 22 nt, Human
agcaucugcauauugggagacc

SEQ ID NO: 200609 - RNA, 22 nt, Human
gcugaaaugccuuguaaauauu

SEQ ID NO: 200610 - RNA, 22 nt, Human
gaauuacauaguuucuagguuc

SEQ ID NO: 200611 - RNA, 22 nt, Human
uaggcugggcauucuggccagg

SEQ ID NO: 200612 - RNA, 22 nt, Human
aaaggcuucacuuauuuauuuu

SEQ ID NO: 200613 - RNA, 21 nt, Human
ccagcuccaggaccuuggauc

SEQ ID NO: 200614 - RNA, 18 nt, Human
uggcagggaggaaauaua

SEQ ID NO: 200615 - RNA, 22 nt, Human
ccaugacauuuuaauuuucacu

SEQ ID NO: 200616 - RNA, 22 nt, Human
gagguggugguggaggcauagc

SEQ ID NO: 200617 - RNA, 22 nt, Human
agagccugcaguggagaccuug

SEQ ID NO: 200618 - RNA, 22 nt, Human
aguguauugauuggaacagccu

SEQ ID NO: 200619 - RNA, 22 nt, Human
uggcccugcuguaucaucugcu

SEQ ID NO: 200620 - RNA, 22 nt, Human
uuguaaauaguaguaagaugcc

SEQ ID NO: 200621 - RNA, 22 nt, Human
uauuggucaauuucaccuugau

SEQ ID NO: 200622 - RNA, 20 nt, Human
ccuuucuggagugcuguuca

SEQ ID NO: 200623 - RNA, 22 nt, Human
acaucuuuguuucuuaguguau

SEQ ID NO: 200624 - RNA, 22 nt, Human
uuauaacacugccuugucacca

SEQ ID NO: 200625 - RNA, 22 nt, Human
acaaggaggucuggggggcccu

SEQ ID NO: 200626 - RNA, 22 nt, Human
gcugugugcucacguaguggaa

SEQ ID NO: 200627 - RNA, 23 nt, Human
ggccacuuugugucaguaugugc

SEQ ID NO: 200628 - RNA, 22 nt, Human
ucuccugcagucagcagucuca

SEQ ID NO: 200629 - RNA, 22 nt, Human
gcucccagggacacuggccacu

SEQ ID NO: 200630 - RNA, 22 nt, Human
uccuggggcucugagcgagaca

SEQ ID NO: 200631 - RNA, 22 nt, Human
gaggccuccucugagacaucug

SEQ ID NO: 200632 - RNA, 18 nt, Human
cccagugcucacugccuc

SEQ ID NO: 200633 - RNA, 22 nt, Human
accaggcuggagugcaguggcg

SEQ ID NO: 200634 - RNA, 18 nt, Human
uccaggcuggauugauga

SEQ ID NO: 200635 - RNA, 22 nt, Human
gcagggcacacaagaaugauaa

SEQ ID NO: 200636 - RNA, 17 nt, Human
ccagaugcccugucucc

SEQ ID NO: 200637 - RNA, 22 nt, Human
uauuauuauauuggaugagacu

SEQ ID NO: 200638 - RNA, 20 nt, Human
ucuguucaaaucuuaguucc

SEQ ID NO: 200639 - RNA, 22 nt, Human
uacaucuaucuagaugcucaga

SEQ ID NO: 200640 - RNA, 22 nt, Human
gcuguucauagaaauggucuca

SEQ ID NO: 200641 - RNA, 22 nt, Human
ggaaggcugugccagaagaacu

SEQ ID NO: 200642 - RNA, 22 nt, Human
cugcacagccugucugggggcc

SEQ ID NO: 200643 - RNA, 22 nt, Human
uuaaaugucaauagauugcuug

SEQ ID NO: 200644 - RNA, 22 nt, Human
gcucugagugauuaaggagcuu

SEQ ID NO: 200645 - RNA, 22 nt, Human
caggcccacugcuugucuaguc

SEQ ID NO: 200646 - RNA, 21 nt, Human
aaucauacaaaacaugucagg

SEQ ID NO: 200647 - RNA, 22 nt, Human
ccagggcauguaacuaauggug

SEQ ID NO: 200648 - RNA, 22 nt, Human
gguccuggcagcucugugucca

SEQ ID NO: 200649 - RNA, 22 nt, Human
gaggcacaguguuuggucagug

SEQ ID NO: 200650 - RNA, 22 nt, Human
acagcuccuaacaaaggcucuc

SEQ ID NO: 200651 - RNA, 22 nt, Human
cuuauaguaugauguugagaau

SEQ ID NO: 200652 - RNA, 22 nt, Human
ccaggcaggcuagaauguaaau

SEQ ID NO: 200653 - RNA, 22 nt, Human
gcaggccuuuaucccugccuca

SEQ ID NO: 200654 - RNA, 22 nt, Human
uucuuacauauuuucauauggu

SEQ ID NO: 200655 - RNA, 22 nt, Human
caacaauaugccagacucaauu

SEQ ID NO: 200656 - RNA, 22 nt, Human
aggagagaauguuccaggcuug

SEQ ID NO: 200657 - RNA, 18 nt, Human
gccugagggucaagugug

SEQ ID NO: 200658 - RNA, 22 nt, Human
auucagcaaacauuuauugugu

SEQ ID NO: 200659 - RNA, 22 nt, Human
aagugaaucuccuuucuuuauu

SEQ ID NO: 200660 - RNA, 22 nt, Human
ugcaggugccucuugagcuugu

SEQ ID NO: 200661 - RNA, 22 nt, Human
ugcaucagugacugaauaugag

SEQ ID NO: 200662 - RNA, 22 nt, Human
uucucccaucucagucuuacau

SEQ ID NO: 200663 - RNA, 22 nt, Human
auacagaugggucagauuucau

SEQ ID NO: 200664 - RNA, 22 nt, Human
acuguaaagcuuuucucaugcg

SEQ ID NO: 200665 - RNA, 22 nt, Human
aaagccagcucugagcugcacc

SEQ ID NO: 200666 - RNA, 22 nt, Human
ggucacuccaccuucuccaccu

SEQ ID NO: 200667 - RNA, 22 nt, Human
uuuuccaaaguaccaugucccu

SEQ ID NO: 200668 - RNA, 22 nt, Human
uguuagagcuaagauaacaucu

SEQ ID NO: 200669 - RNA, 21 nt, Human
aggcuucuccgugcaggaaga

SEQ ID NO: 200670 - RNA, 22 nt, Human
cuccucagcugggaggaguccc

SEQ ID NO: 200671 - RNA, 22 nt, Human
acugugcaguguuguaacccga

SEQ ID NO: 200672 - RNA, 22 nt, Human
agagucuucuggggccacuuuc

SEQ ID NO: 200673 - RNA, 22 nt, Human
aaugauauuuauugaauagaug

SEQ ID NO: 200674 - RNA, 22 nt, Human
ggaggccaucagggagggcauu

SEQ ID NO: 200675 - RNA, 22 nt, Human
gucuccagcccacucuagauau

SEQ ID NO: 200676 - RNA, 22 nt, Human
aaguuacaguuggaacugugaa

SEQ ID NO: 200677 - RNA, 22 nt, Human
ccacaucugcagucccuucugu

SEQ ID NO: 200678 - RNA, 22 nt, Human
uuccucagugcccccauacggu

SEQ ID NO: 200679 - RNA, 22 nt, Human
gcagaagcagggcaggggcaaa

SEQ ID NO: 200680 - RNA, 22 nt, Human
ucucuggagcugcagauccagg

SEQ ID NO: 200681 - RNA, 22 nt, Human
uucaaacaguugcacaacuuau

SEQ ID NO: 200682 - RNA, 22 nt, Human
aagguccuuuugcagugugauc

SEQ ID NO: 200683 - RNA, 22 nt, Human
gaauuaacuggcaguuagugcu

SEQ ID NO: 200684 - RNA, 22 nt, Human
uggaccacucuggugcccaugu

SEQ ID NO: 200685 - RNA, 22 nt, Human
ugguccugcccacgcccaucug

SEQ ID NO: 200686 - RNA, 21 nt, Human
aggcccuggaggucagagaaa

SEQ ID NO: 200687 - RNA, 18 nt, Human
aggaaagacgaagagggc

SEQ ID NO: 200688 - RNA, 22 nt, Human
agggcagccauugagggauucu

SEQ ID NO: 200689 - RNA, 22 nt, Human
cuccugggaauuuaguugugag

SEQ ID NO: 200690 - RNA, 22 nt, Human
uuaaauuccagccucauaauag

SEQ ID NO: 200691 - RNA, 22 nt, Human
gaaaggaaauugagggacgcau

SEQ ID NO: 200692 - RNA, 22 nt, Human
ucacagaaucucugauaagucu

SEQ ID NO: 200693 - RNA, 22 nt, Human
acccagcuguuucccgugucau

SEQ ID NO: 200694 - RNA, 22 nt, Human
agcuggccggccuccaggugga

SEQ ID NO: 200695 - RNA, 22 nt, Human
gaaucuagggccuagaucacag

SEQ ID NO: 200696 - RNA, 22 nt, Human
ccagagcugaugggcccagggu

SEQ ID NO: 200697 - RNA, 22 nt, Human
gcuagaaaucgacuucagaauu

SEQ ID NO: 200698 - RNA, 22 nt, Human
cuucuccucugaguccugggag

SEQ ID NO: 200699 - RNA, 22 nt, Human
aagauguaaaggcaauauaaag

SEQ ID NO: 200700 - RNA, 22 nt, Human
caaugauuuuuccauugcagga

SEQ ID NO: 200701 - RNA, 22 nt, Human
uaugaaaagguggccaauguag

SEQ ID NO: 200702 - RNA, 22 nt, Human
uucauugcaguucuucagguua

SEQ ID NO: 200703 - RNA, 22 nt, Human
ccaaguguuuuauaagggacag

SEQ ID NO: 200704 - RNA, 22 nt, Human
acacacuuuaaauuaaaccucu

SEQ ID NO: 200705 - RNA, 22 nt, Human
guggcugcagcccagcggcacg

SEQ ID NO: 200706 - RNA, 22 nt, Human
agggccucuggaacacugaggg

SEQ ID NO: 200707 - RNA, 22 nt, Human
caaaguuaucaacugcaacauu

SEQ ID NO: 200708 - RNA, 22 nt, Human
ucucaagcuuguugguauguuu

SEQ ID NO: 200709 - RNA, 22 nt, Human
cucugagggucuaaggagucac

SEQ ID NO: 200710 - RNA, 22 nt, Human
guggcgaggggagguccuggcg

SEQ ID NO: 200711 - RNA, 22 nt, Human
uaggaaauuagaacuuggaaac

SEQ ID NO: 200712 - RNA, 22 nt, Human
cagggccucuccuccaggaacu

SEQ ID NO: 200713 - RNA, 22 nt, Human
aggcaagauuaggaccagaaga

SEQ ID NO: 200714 - RNA, 22 nt, Human
ggccuaguuuuuucugguaggu

SEQ ID NO: 200715 - RNA, 22 nt, Human
cagugggggggccaugcugcag

SEQ ID NO: 200716 - RNA, 22 nt, Human
cagagccucagaauccugugga

SEQ ID NO: 200717 - RNA, 22 nt, Human
cuggagaguuggaagauggacu

SEQ ID NO: 200718 - RNA, 22 nt, Human
aguaaacauaauuuaccuguag

SEQ ID NO: 200719 - RNA, 22 nt, Human
aggcugugaaauguggcaagga

SEQ ID NO: 200720 - RNA, 22 nt, Human
cuguuuccccaugcccugacuc

SEQ ID NO: 200721 - RNA, 22 nt, Human
uccugaggcuaaagugcagugg

SEQ ID NO: 200722 - RNA, 22 nt, Human
aaaacauguccauacagaaacu

SEQ ID NO: 200723 - RNA, 20 nt, Human
uaacaguaagugauguuaca

SEQ ID NO: 200724 - RNA, 22 nt, Human
aaguauuucagcgguucuuugu

SEQ ID NO: 200725 - RNA, 22 nt, Human
acuccugugagguagguggcaa

SEQ ID NO: 200726 - RNA, 21 nt, Human
accuucaagccagaggugguc

SEQ ID NO: 200727 - RNA, 22 nt, Human
agcccuccaaagguugggggag

SEQ ID NO: 200728 - RNA, 22 nt, Human
uuaauagugcuaaaccauugac

SEQ ID NO: 200729 - RNA, 22 nt, Human
ucaaggaggugcuuggcuucac

SEQ ID NO: 200730 - RNA, 18 nt, Human
ggccuuaguaugugccuu

SEQ ID NO: 200731 - RNA, 22 nt, Human
uuuaaaauuuagaccucuccac

SEQ ID NO: 200732 - RNA, 22 nt, Human
gaguauucaauauauacaaaug

SEQ ID NO: 200733 - RNA, 22 nt, Human
gacgccucuucccugcugcacu

SEQ ID NO: 200734 - RNA, 20 nt, Human
guggccuguccuguuguggg

SEQ ID NO: 200735 - RNA, 22 nt, Human
gucuggagacuugggucaucaa

SEQ ID NO: 200736 - RNA, 17 nt, Human
acagaggcaggagugga

SEQ ID NO: 200737 - RNA, 22 nt, Human
ccuggcuggacuggaccguggc

SEQ ID NO: 200738 - RNA, 22 nt, Human
aggccucugggccugcggguuu

SEQ ID NO: 200739 - RNA, 22 nt, Human
ggcagaggaagcuggaaguggg

SEQ ID NO: 200740 - RNA, 22 nt, Human
uucagaaauucauggaguucag

SEQ ID NO: 200741 - RNA, 22 nt, Human
agaaaguacagaugagacacuu

SEQ ID NO: 200742 - RNA, 22 nt, Human
agucaaauaucuuaaaaggcua

SEQ ID NO: 200743 - RNA, 22 nt, Human
ugggcacaaacaucugccuguu

SEQ ID NO: 200744 - RNA, 22 nt, Human
aggaaggcacauuguuggcuaa

SEQ ID NO: 200745 - RNA, 22 nt, Human
acagggggucccauggccugga

SEQ ID NO: 200746 - RNA, 22 nt, Human
caggagaaacauaauuuucugg

SEQ ID NO: 200747 - RNA, 22 nt, Human
uccagcagaccaucaaggcuca

SEQ ID NO: 200748 - RNA, 22 nt, Human
gcuagccugcaguggcuauggu

SEQ ID NO: 200749 - RNA, 22 nt, Human
uuggaagcauucugaaugucca

SEQ ID NO: 200750 - RNA, 22 nt, Human
uacaugugguagggagggcagu

SEQ ID NO: 200751 - RNA, 22 nt, Human
ucccugagagcacuggggagcc

SEQ ID NO: 200752 - RNA, 22 nt, Human
gugagcauauauguaaucguuu

SEQ ID NO: 200753 - RNA, 19 nt, Human
uagcugauagcuacuuuau

SEQ ID NO: 200754 - RNA, 22 nt, Human
gcuggccuugugucugaggaag

SEQ ID NO: 200755 - RNA, 22 nt, Human
auugaaagauuuugggcucaug

SEQ ID NO: 200756 - RNA, 22 nt, Human
gcuccuggcauccugcuuuuaa

SEQ ID NO: 200757 - RNA, 22 nt, Human
ucacauuuauuucaaaguuacu

SEQ ID NO: 200758 - RNA, 22 nt, Human
cauccugcggggagcagagggc

SEQ ID NO: 200759 - RNA, 22 nt, Human
cagagcugucauuugccaguga

SEQ ID NO: 200760 - RNA, 22 nt, Human
aagauaaugugucugucuuugc

SEQ ID NO: 200761 - RNA, 22 nt, Human
uaggaaaugaaugcaggcuccc

SEQ ID NO: 200762 - RNA, 22 nt, Human
ggaggaugccaagcugugcaca

SEQ ID NO: 200763 - RNA, 22 nt, Human
cuaucucuccacaaugccagug

SEQ ID NO: 200764 - RNA, 22 nt, Human
uaacagaauuugcuaaacuccg

SEQ ID NO: 200765 - RNA, 22 nt, Human
ccugccaggagcuggugcugca

SEQ ID NO: 200766 - RNA, 22 nt, Human
agcagggggccacagucacagc

SEQ ID NO: 200767 - RNA, 23 nt, Human
cacuuccccuguggcgagccugc

SEQ ID NO: 200768 - RNA, 22 nt, Human
caggccugggcuucggggcuga

SEQ ID NO: 200769 - RNA, 22 nt, Human
uguggcaggcauucugaggcug

SEQ ID NO: 200770 - RNA, 22 nt, Human
gugagaagauaaguauugcaaa

SEQ ID NO: 200771 - RNA, 22 nt, Human
ugguaagaacccaucagagaag

SEQ ID NO: 200772 - RNA, 22 nt, Human
gcuuugugugaaguccauggcg

SEQ ID NO: 200773 - RNA, 22 nt, Human
aagccacugagauuucacugca

SEQ ID NO: 200774 - RNA, 22 nt, Human
caggcacuguguuaggcacugu

SEQ ID NO: 200775 - RNA, 22 nt, Human
ggcagaccucuccagccccaca

SEQ ID NO: 200776 - RNA, 22 nt, Human
aggacaugugccuccagggcag

SEQ ID NO: 200777 - RNA, 22 nt, Human
ugaggacaugagugggacagag

SEQ ID NO: 200778 - RNA, 22 nt, Human
aaguccaugaucaagauguggc

SEQ ID NO: 200779 - RNA, 22 nt, Human
agcaagcagugaaguugaaugu

SEQ ID NO: 200780 - RNA, 22 nt, Human
ucugagacccauacaggcccac

SEQ ID NO: 200781 - RNA, 22 nt, Human
gcacacagagaggugguauguc

SEQ ID NO: 200782 - RNA, 22 nt, Human
ggaaacaugccugcuggacagu

SEQ ID NO: 200783 - RNA, 22 nt, Human
uacagagacccacaagagacug

SEQ ID NO: 200784 - RNA, 22 nt, Human
uuguccagagccaggcugucgg

SEQ ID NO: 200785 - RNA, 22 nt, Human
aaagaaauaccuuucucagcuu

SEQ ID NO: 200786 - RNA, 22 nt, Human
uuggcauuuauucuaaggucaa

SEQ ID NO: 200787 - RNA, 22 nt, Human
accaguuauuagcccuacaacu

SEQ ID NO: 200788 - RNA, 22 nt, Human
aaaggucuuaagguuaagcagg

SEQ ID NO: 200789 - RNA, 22 nt, Human
aggcccaguccucugccgucug

SEQ ID NO: 200790 - RNA, 22 nt, Human
uacaguuccaggaucauagggu

SEQ ID NO: 200791 - RNA, 19 nt, Human
gccucugagggcaggacac

SEQ ID NO: 200792 - RNA, 22 nt, Human
cacaugaguccugccagguaug

SEQ ID NO: 200793 - RNA, 22 nt, Human
agacaucaaugaucagagguag

SEQ ID NO: 200794 - RNA, 22 nt, Human
uggcuaagcuggggaggccugg

SEQ ID NO: 200795 - RNA, 20 nt, Human
ccaagagcaugcaugaggaa

SEQ ID NO: 200796 - RNA, 22 nt, Human
uccagcacccaauguggcuaag

SEQ ID NO: 200797 - RNA, 22 nt, Human
gaggaaggucccaucagaauuu

SEQ ID NO: 200798 - RNA, 22 nt, Human
uaacugguuaagggugaaaucc

SEQ ID NO: 200799 - RNA, 22 nt, Human
cauuacaaccccaaauuacaaa

SEQ ID NO: 200800 - RNA, 22 nt, Human
uccaggcauagaaggcacgcac

SEQ ID NO: 200801 - RNA, 22 nt, Human
uagugucaggagggaaaugcaa

SEQ ID NO: 200802 - RNA, 22 nt, Human
guggguggaucaccugagguca

SEQ ID NO: 200803 - RNA, 22 nt, Human
gugcaguggcagauccuagcuc

SEQ ID NO: 200804 - RNA, 22 nt, Human
ccucccuccauugccaucgucu

SEQ ID NO: 200805 - RNA, 22 nt, Human
caggaucugcccaggccuuugg

SEQ ID NO: 200806 - RNA, 22 nt, Human
ccagccagcugguuggacgccu

SEQ ID NO: 200807 - RNA, 22 nt, Human
ucuauauuccagauacagauua

SEQ ID NO: 200808 - RNA, 22 nt, Human
ugccaggcugucaauucaccca

SEQ ID NO: 200809 - RNA, 22 nt, Human
auacacguguguguacaugcac

SEQ ID NO: 200810 - RNA, 22 nt, Human
cucaagaucaucaauauaccaa

SEQ ID NO: 200811 - RNA, 22 nt, Human
gguccagccaggugcucaugcc

SEQ ID NO: 200812 - RNA, 22 nt, Human
gaugugucuauucaacaugaaa

SEQ ID NO: 200813 - RNA, 22 nt, Human
ugggccaguccagccccaggga

SEQ ID NO: 200814 - RNA, 22 nt, Human
aacugagguaucugcuguguuu

SEQ ID NO: 200815 - RNA, 22 nt, Human
auccauauaggcagauggcaca

SEQ ID NO: 200816 - RNA, 22 nt, Human
auuuggaacaaauauuaguaaa

SEQ ID NO: 200817 - RNA, 22 nt, Human
cgguccuggcacuugcggcucc

SEQ ID NO: 200818 - RNA, 22 nt, Human
agacaggccacucuggucuggu

SEQ ID NO: 200819 - RNA, 22 nt, Human
gaggcuuuucucuaaauagugg

SEQ ID NO: 200820 - RNA, 22 nt, Human
aucagaaauagucauguuacuu

SEQ ID NO: 200821 - RNA, 22 nt, Human
agguucugguaagcuguugcuu

SEQ ID NO: 200822 - RNA, 19 nt, Human
gcagggcucucccagaugc

SEQ ID NO: 200823 - RNA, 22 nt, Human
ggucagggggaucugugaggua

SEQ ID NO: 200824 - RNA, 22 nt, Human
gcagugucagugccuggguggu

SEQ ID NO: 200825 - RNA, 22 nt, Human
cagcugucuaaguugagcagga

SEQ ID NO: 200826 - RNA, 22 nt, Human
agagccuugcucuaaauuucuc

SEQ ID NO: 200827 - RNA, 17 nt, Human
ccagagcuacugagacu

SEQ ID NO: 200828 - RNA, 22 nt, Human
cuccuggcaguuccccuuguca

SEQ ID NO: 200829 - RNA, 22 nt, Human
aucucugugccaucauugcccc

SEQ ID NO: 200830 - RNA, 22 nt, Human
auccacagucuuagccaucaaa

SEQ ID NO: 200831 - RNA, 22 nt, Human
accaaaaauuguggggcugaau

SEQ ID NO: 200832 - RNA, 22 nt, Human
ucaaggagacagaaagcaaugg

SEQ ID NO: 200833 - RNA, 22 nt, Human
auuaauaaaauaccacuuuguu

SEQ ID NO: 200834 - RNA, 22 nt, Human
gagcacagcugucuugcaagcu

SEQ ID NO: 200835 - RNA, 22 nt, Human
uauugauuccugcuuucugcuc

SEQ ID NO: 200836 - RNA, 22 nt, Human
ugugccuggagucccugaggag

SEQ ID NO: 200837 - RNA, 22 nt, Human
ggucagaaggauucugggaaau

SEQ ID NO: 200838 - RNA, 22 nt, Human
ggacugggagaauggaggcaag

SEQ ID NO: 200839 - RNA, 22 nt, Human
agcugcaguucguuccagcucu

SEQ ID NO: 200840 - RNA, 22 nt, Human
agcaguggcauacauuuugagu

SEQ ID NO: 200841 - RNA, 22 nt, Human
ccagggcaggggcuggaguuca

SEQ ID NO: 200842 - RNA, 22 nt, Human
uugcugaauugaauccuuuggu

SEQ ID NO: 200843 - RNA, 22 nt, Human
uccaggcugugcaugaguuuag

SEQ ID NO: 200844 - RNA, 19 nt, Human
acaggcagaauugggugug

SEQ ID NO: 200845 - RNA, 22 nt, Human
gcagggacaaggcagguguucu

SEQ ID NO: 200846 - RNA, 22 nt, Human
cuccuggagcagcaggcgcagg

SEQ ID NO: 200847 - RNA, 22 nt, Human
augcugugucaggaauuugaua

SEQ ID NO: 200848 - RNA, 22 nt, Human
acacauguuuguguagucaguu

SEQ ID NO: 200849 - RNA, 22 nt, Human
gggagcgggacugcgcaggcuu

SEQ ID NO: 200850 - RNA, 22 nt, Human
cagagcugauuggauccagaga

SEQ ID NO: 200851 - RNA, 22 nt, Human
cugcaccauccuucaugcucug

SEQ ID NO: 200852 - RNA, 22 nt, Human
ucgcugugaaaaccuuggacaa

SEQ ID NO: 200853 - RNA, 20 nt, Human
agugggagagggcagacugc

SEQ ID NO: 200854 - RNA, 22 nt, Human
gcacagcccuggucggggcccc

SEQ ID NO: 200855 - RNA, 22 nt, Human
acuggcuuugccucugccucuc

SEQ ID NO: 200856 - RNA, 22 nt, Human
gcagagcccuggggguauggug

SEQ ID NO: 200857 - RNA, 22 nt, Human
aaaacuuucagggauacagaaa

SEQ ID NO: 200858 - RNA, 22 nt, Human
agagacaggguuuugucguguu

SEQ ID NO: 200859 - RNA, 22 nt, Human
gacacaguuuuucucacggugg

SEQ ID NO: 200860 - RNA, 22 nt, Human
auagucagugucuauaucguug

SEQ ID NO: 200861 - RNA, 22 nt, Human
aagagguugucugugaugaguu

SEQ ID NO: 200862 - RNA, 22 nt, Human
aaacagaguuugguaaauagcc

SEQ ID NO: 200863 - RNA, 22 nt, Human
cagucccaccaggaucgcucuu

SEQ ID NO: 200864 - RNA, 17 nt, Human
cagacaggcugucaccc

SEQ ID NO: 200865 - RNA, 22 nt, Human
aaaggcaagcauuuauauagga

SEQ ID NO: 200866 - RNA, 22 nt, Human
cucccugggcagauguggcucu

SEQ ID NO: 200867 - RNA, 22 nt, Human
gcuggcagagacaagaagacua

SEQ ID NO: 200868 - RNA, 22 nt, Human
agcagccacccagcugcucauu

SEQ ID NO: 200869 - RNA, 22 nt, Human
uguacaugugucuguauaucuu

SEQ ID NO: 200870 - RNA, 18 nt, Human
aacaguuuccagauucuc

SEQ ID NO: 200871 - RNA, 22 nt, Human
uggaugucauaguuggauauac

SEQ ID NO: 200872 - RNA, 22 nt, Human
aucucagggcuggagcccugga

SEQ ID NO: 200873 - RNA, 22 nt, Human
accaugaugggaagcucagggc

SEQ ID NO: 200874 - RNA, 22 nt, Human
aacuuugggccuaaguacuguu

SEQ ID NO: 200875 - RNA, 23 nt, Human
cucaacccuaguaagggaguagg

SEQ ID NO: 200876 - RNA, 22 nt, Human
gcagcuuucugcaaugucaucc

SEQ ID NO: 200877 - RNA, 22 nt, Human
ugcacccacuuagcugaaguuc

SEQ ID NO: 200878 - RNA, 21 nt, Human
ggccccagcccauggguucuc

SEQ ID NO: 200879 - RNA, 22 nt, Human
ucccaggaaaacacucgaggac

SEQ ID NO: 200880 - RNA, 22 nt, Human
acuguaaaauacauaaguauug

SEQ ID NO: 200881 - RNA, 22 nt, Human
uacaagugcuagcagauauugu

SEQ ID NO: 200882 - RNA, 22 nt, Human
ugacagcaugaccacagggucu

SEQ ID NO: 200883 - RNA, 22 nt, Human
aaagccagaauucguccagccu

SEQ ID NO: 200884 - RNA, 22 nt, Human
ucucagaaaugacaggagguac

SEQ ID NO: 200885 - RNA, 22 nt, Human
uguauauauuucuuucauucua

SEQ ID NO: 200886 - RNA, 22 nt, Human
uaaaaguuagcuaggacaaagu

SEQ ID NO: 200887 - RNA, 22 nt, Human
augccaguaagucucagcuagg

SEQ ID NO: 200888 - RNA, 22 nt, Human
agcaggugggcaugaaagcuga

SEQ ID NO: 200889 - RNA, 22 nt, Human
ucaaugauaguacaaucagccu

SEQ ID NO: 200890 - RNA, 22 nt, Human
caaauaagcaauuccauucuuc

SEQ ID NO: 200891 - RNA, 22 nt, Human
uggcucccgcagacccugugcu

SEQ ID NO: 200892 - RNA, 22 nt, Human
ugccaggcugaacagggucuua

SEQ ID NO: 200893 - RNA, 22 nt, Human
caugaaaucugaguauguuucc

SEQ ID NO: 200894 - RNA, 22 nt, Human
aaggaagaugcuggccugggga

SEQ ID NO: 200895 - RNA, 23 nt, Human
ggcuccugcuucaugucccaccu

SEQ ID NO: 200896 - RNA, 22 nt, Human
gcugccuucccggaaugucauc

SEQ ID NO: 200897 - RNA, 23 nt, Human
aguggcugagaguguuucauaug

SEQ ID NO: 200898 - RNA, 22 nt, Human
acagaggguguggaggaagacg

SEQ ID NO: 200899 - RNA, 22 nt, Human
uccuguggagaggacuggaggu

SEQ ID NO: 200900 - RNA, 22 nt, Human
cagagucaauguccaagaagcu

SEQ ID NO: 200901 - RNA, 17 nt, Human
uuugguaauauauuaag

SEQ ID NO: 200902 - RNA, 22 nt, Human
ugccaggcuccggaacgacagu

SEQ ID NO: 200903 - RNA, 16 nt, Human
agccuuaggaacagcc

SEQ ID NO: 200904 - RNA, 22 nt, Human
auaugcaagcacauagaauacu

SEQ ID NO: 200905 - RNA, 22 nt, Human
ucagauauggagucuaaaacca

SEQ ID NO: 200906 - RNA, 22 nt, Human
gagaaucuccagaugaaguccu

SEQ ID NO: 200907 - RNA, 22 nt, Human
uccuccuuguucuuuugccuac

SEQ ID NO: 200908 - RNA, 22 nt, Human
uucucagagcacugcugacaaa

SEQ ID NO: 200909 - RNA, 22 nt, Human
cccaggauggggcugcaguuau

SEQ ID NO: 200910 - RNA, 22 nt, Human
ucugggaggggcugccauugcu

SEQ ID NO: 200911 - RNA, 22 nt, Human
ccuggcccagggacuuucgccu

SEQ ID NO: 200912 - RNA, 22 nt, Human
gcccaugccccuccuucuggca

SEQ ID NO: 200913 - RNA, 22 nt, Human
gcaaaguauuaaccaacaggau

SEQ ID NO: 200914 - RNA, 20 nt, Human
gaggcucugggcauggcgcc

SEQ ID NO: 200915 - RNA, 22 nt, Human
ggcuucuccuggaaguacagag

SEQ ID NO: 200916 - RNA, 22 nt, Human
cagcuucuagcaucggcuuuga

SEQ ID NO: 200917 - RNA, 19 nt, Human
gccuggcugggaugagccc

SEQ ID NO: 200918 - RNA, 22 nt, Human
cuggaggagagucugaaugaca

SEQ ID NO: 200919 - RNA, 22 nt, Human
cuggcccaggaagacguguccc

SEQ ID NO: 200920 - RNA, 22 nt, Human
acucagcacagcacugggaacc

SEQ ID NO: 200921 - RNA, 22 nt, Human
gagugggugacagaaggaggua

SEQ ID NO: 200922 - RNA, 18 nt, Human
cugggccagaguuucugc

SEQ ID NO: 200923 - RNA, 21 nt, Human
agccuggguauccuuugagga

SEQ ID NO: 200924 - RNA, 22 nt, Human
ugucagaacucuauugaugucc

SEQ ID NO: 200925 - RNA, 22 nt, Human
acuuccuggauucccaagggcu

SEQ ID NO: 200926 - RNA, 22 nt, Human
uaaggcuagugccugacugggu

SEQ ID NO: 200927 - RNA, 19 nt, Human
agcagcagaagugugccuu

SEQ ID NO: 200928 - RNA, 22 nt, Human
uucaggaagguccuauagcaga

SEQ ID NO: 200929 - RNA, 22 nt, Human
ccuguucaugaaacugcuuucc

SEQ ID NO: 200930 - RNA, 22 nt, Human
cuggccagagguuccucugccc

SEQ ID NO: 200931 - RNA, 19 nt, Human
ccuuccuccccagggccau

SEQ ID NO: 200932 - RNA, 22 nt, Human
cccagccaaggugcugguguug

SEQ ID NO: 200933 - RNA, 22 nt, Human
aggagcucccgugaggagacca

SEQ ID NO: 200934 - RNA, 22 nt, Human
uaggauuauuuguucuauuucu

SEQ ID NO: 200935 - RNA, 22 nt, Human
aaucuagaauuuuagggguaua

SEQ ID NO: 200936 - RNA, 22 nt, Human
ucagaguauuucauucuuaggu

SEQ ID NO: 200937 - RNA, 21 nt, Human
acagggcaugcagcuggcugu

SEQ ID NO: 200938 - RNA, 22 nt, Human
uucaugaauguuccaugugagu

SEQ ID NO: 200939 - RNA, 23 nt, Human
ugccucugccucccuagucugca

SEQ ID NO: 200940 - RNA, 22 nt, Human
cuccuccaguccuccaaggaca

SEQ ID NO: 200941 - RNA, 22 nt, Human
gacaaaacacauuaguuuaaaa

SEQ ID NO: 200942 - RNA, 22 nt, Human
uggcucagaggggaagugguuu

SEQ ID NO: 200943 - RNA, 19 nt, Human
aggaaggcggcggcugccc

SEQ ID NO: 200944 - RNA, 22 nt, Human
agggaggaucugcuccuugucu

SEQ ID NO: 200945 - RNA, 22 nt, Human
agaaccuuccaucacucccuac

SEQ ID NO: 200946 - RNA, 22 nt, Human
caggagcucacagucuuugggu

SEQ ID NO: 200947 - RNA, 22 nt, Human
ggcccagaauacaugaaguaua

SEQ ID NO: 200948 - RNA, 22 nt, Human
agucucuuggcauucugaaaca

SEQ ID NO: 200949 - RNA, 22 nt, Human
ccuggcugcuuucacuauggag

SEQ ID NO: 200950 - RNA, 22 nt, Human
cacagucuuaucccaaccacca

SEQ ID NO: 200951 - RNA, 16 nt, Human
caggaaacuuaaagac

SEQ ID NO: 200952 - RNA, 22 nt, Human
agaagcuaggcuagacaaguga

SEQ ID NO: 200953 - RNA, 22 nt, Human
cuggccaccaagagcuugcuca

SEQ ID NO: 200954 - RNA, 22 nt, Human
cucugggcacauuuuccaggac

SEQ ID NO: 200955 - RNA, 22 nt, Human
gcuaauaauuccuuugugaacu

SEQ ID NO: 200956 - RNA, 22 nt, Human
ucucagaaaagagcuucagaaa

SEQ ID NO: 200957 - RNA, 22 nt, Human
auguccagagccggccugcuga

SEQ ID NO: 200958 - RNA, 22 nt, Human
auuuccacauaagggaaauaag

SEQ ID NO: 200959 - RNA, 22 nt, Human
cuccaguaucuguaggaaaagg

SEQ ID NO: 200960 - RNA, 22 nt, Human
uguccaggacccuauucucacu

SEQ ID NO: 200961 - RNA, 22 nt, Human
cagagcagucuggagauccagc

SEQ ID NO: 200962 - RNA, 22 nt, Human
aucuuugacugccauucuugac

SEQ ID NO: 200963 - RNA, 22 nt, Human
aaagaaucagaagucucaaaca

SEQ ID NO: 200964 - RNA, 22 nt, Human
ccagccagaugauaagcucuau

SEQ ID NO: 200965 - RNA, 23 nt, Human
ucagucuuggcuucugauuuucc

SEQ ID NO: 200966 - RNA, 22 nt, Human
uuccuggggcgacuguaucuga

SEQ ID NO: 200967 - RNA, 22 nt, Human
uggaaagagaaacucuugcuaa

SEQ ID NO: 200968 - RNA, 22 nt, Human
acuguggccugcuguaugggcu

SEQ ID NO: 200969 - RNA, 22 nt, Human
agugaaauuccuggucuuuguu

SEQ ID NO: 200970 - RNA, 22 nt, Human
cucugcaugccuugcucagaca

SEQ ID NO: 200971 - RNA, 22 nt, Human
ugcugccagccaggccauggag

SEQ ID NO: 200972 - RNA, 22 nt, Human
aaggcagcaagaauuccagguu

SEQ ID NO: 200973 - RNA, 22 nt, Human
uugauucaaccacuuaauaauc

SEQ ID NO: 200974 - RNA, 22 nt, Human
ccuguacauggccaucuuuacc

SEQ ID NO: 200975 - RNA, 22 nt, Human
cuuaagaagcaagucucagcaa

SEQ ID NO: 200976 - RNA, 22 nt, Human
agcaaacagaugucuccuuuag

SEQ ID NO: 200977 - RNA, 22 nt, Human
cugucaggaagcugggcaucca

SEQ ID NO: 200978 - RNA, 22 nt, Human
ccuccugggcuccugucugcac

SEQ ID NO: 200979 - RNA, 22 nt, Human
ucugaagauggaggaacuuaga

SEQ ID NO: 200980 - RNA, 22 nt, Human
uccagguccuacuggcccauag

SEQ ID NO: 200981 - RNA, 22 nt, Human
auguaauuguagcaaaaugaug

SEQ ID NO: 200982 - RNA, 22 nt, Human
cacagguguguccuggucuugu

SEQ ID NO: 200983 - RNA, 22 nt, Human
caugaaauguuagaauuagaca

SEQ ID NO: 200984 - RNA, 21 nt, Human
uuugacuccucauuuuuauau

SEQ ID NO: 200985 - RNA, 22 nt, Human
ccaaaauuaagccucuuauguu

SEQ ID NO: 200986 - RNA, 22 nt, Human
aggcucuccuccccaggaccau

SEQ ID NO: 200987 - RNA, 22 nt, Human
gggaccucuggagucggccuua

SEQ ID NO: 200988 - RNA, 22 nt, Human
cacacaggagagugcuggaggu

SEQ ID NO: 200989 - RNA, 22 nt, Human
cauaauuauaaacgcaaguuca

SEQ ID NO: 200990 - RNA, 22 nt, Human
aguaaacauguaauuguucauu

SEQ ID NO: 200991 - RNA, 22 nt, Human
acagaugaguuaaagcagagug

SEQ ID NO: 200992 - RNA, 22 nt, Human
agauuaugcuggcugcuacaag

SEQ ID NO: 200993 - RNA, 22 nt, Human
uucuguacuucaggggcucugu

SEQ ID NO: 200994 - RNA, 22 nt, Human
ucagagagcuggugggcagagg

SEQ ID NO: 200995 - RNA, 22 nt, Human
acauucuauagcaagcugaucu

SEQ ID NO: 200996 - RNA, 22 nt, Human
uguguccuccagggagauguaa

SEQ ID NO: 200997 - RNA, 22 nt, Human
caguauaugcucuuucaucaaa

SEQ ID NO: 200998 - RNA, 22 nt, Human
acuuugcaaaaggaaaucaccu

SEQ ID NO: 200999 - RNA, 22 nt, Human
ucauuucugagccuuccaugau

SEQ ID NO: 201000 - RNA, 22 nt, Human
uguauacaugucugugugcaca

SEQ ID NO: 201001 - RNA, 22 nt, Human
caugaggucagggggagccggu

SEQ ID NO: 201002 - RNA, 22 nt, Human
aauaucuuggcccaacuccaga

SEQ ID NO: 201003 - RNA, 22 nt, Human
cacuccuguuccacuaaaugag

SEQ ID NO: 201004 - RNA, 22 nt, Human
gagugcagaugccagccccagu

SEQ ID NO: 201005 - RNA, 22 nt, Human
ucucugcauccccagggcucuc

SEQ ID NO: 201006 - RNA, 22 nt, Human
auggaaauaucuuuagagcuua

SEQ ID NO: 201007 - RNA, 22 nt, Human
gagacagaucucggcuccaugc

SEQ ID NO: 201008 - RNA, 21 nt, Human
uccuccuggccaggcggcccc

SEQ ID NO: 201009 - RNA, 22 nt, Human
aucucuggcaaugcagcaucgu

SEQ ID NO: 201010 - RNA, 22 nt, Human
uuguauuuggguaguauagaga

SEQ ID NO: 201011 - RNA, 22 nt, Human
gaccaagauacagcaucauaga

SEQ ID NO: 201012 - RNA, 22 nt, Human
ucugagccaauuucugugucca

SEQ ID NO: 201013 - RNA, 22 nt, Human
uacuucuggauauucagaacuu

SEQ ID NO: 201014 - RNA, 22 nt, Human
uggcugaguuacgaacagagca

SEQ ID NO: 201015 - RNA, 22 nt, Human
gccacuguugcuccucaggaaa

SEQ ID NO: 201016 - RNA, 22 nt, Human
gccgugucaucugcggguggca

SEQ ID NO: 201017 - RNA, 22 nt, Human
ucacucugagaggucacuggaa

SEQ ID NO: 201018 - RNA, 20 nt, Human
ugcugcaguuucaugggacu

SEQ ID NO: 201019 - RNA, 22 nt, Human
gcccuggagagggauauggcau

SEQ ID NO: 201020 - RNA, 22 nt, Human
acccucugagaggcacacuuug

SEQ ID NO: 201021 - RNA, 22 nt, Human
ugacauuuaagccucugauuuc

SEQ ID NO: 201022 - RNA, 22 nt, Human
aaaaguuugugcaaacacucag

SEQ ID NO: 201023 - RNA, 22 nt, Human
ggcugugcuuuguuagguuguc

SEQ ID NO: 201024 - RNA, 22 nt, Human
uaaauagagaaucagcuuggag

SEQ ID NO: 201025 - RNA, 22 nt, Human
uagcaagaucgugucucuaaaa

SEQ ID NO: 201026 - RNA, 22 nt, Human
uguuuuccuccugguuucugcc

SEQ ID NO: 201027 - RNA, 22 nt, Human
ucacagacgccuccccucgccu

SEQ ID NO: 201028 - RNA, 22 nt, Human
acccccacggaaggccguacgc

SEQ ID NO: 201029 - RNA, 22 nt, Human
guauccaugggggauugguucc

SEQ ID NO: 201030 - RNA, 22 nt, Human
ugguaauuuacgcauuucugua

SEQ ID NO: 201031 - RNA, 22 nt, Human
cugggccuggggcuguugagag

SEQ ID NO: 201032 - RNA, 17 nt, Human
gcauccaguaacaugcc

SEQ ID NO: 201033 - RNA, 22 nt, Human
cucccuggaggcccagaccugg

SEQ ID NO: 201034 - RNA, 22 nt, Human
uuucauugagaauauaagauuu

SEQ ID NO: 201035 - RNA, 22 nt, Human
uucugaggcacuggcucuccca

SEQ ID NO: 201036 - RNA, 22 nt, Human
cagugauggauauggagaaguc

SEQ ID NO: 201037 - RNA, 22 nt, Human
uaggccaggagucagacagauu

SEQ ID NO: 201038 - RNA, 22 nt, Human
gugaggagcucuuugacucacg

SEQ ID NO: 201039 - RNA, 22 nt, Human
ccugggucccugagagaugauu

SEQ ID NO: 201040 - RNA, 22 nt, Human
gagagcccugcauggcugauga

SEQ ID NO: 201041 - RNA, 22 nt, Human
uugcauuuuugagcacgaaguu

SEQ ID NO: 201042 - RNA, 22 nt, Human
ucucugugcuugacuuucccau

SEQ ID NO: 201043 - RNA, 22 nt, Human
gcugcccaauuacagggccgug

SEQ ID NO: 201044 - RNA, 22 nt, Human
auuuaguuuaggaaaaguaggu

SEQ ID NO: 201045 - RNA, 22 nt, Human
aggcucaguauagcuggcaagu

SEQ ID NO: 201046 - RNA, 22 nt, Human
gggacaggcaaagguaugcuuc

SEQ ID NO: 201047 - RNA, 22 nt, Human
aaagacuugggagcaguaugcu

SEQ ID NO: 201048 - RNA, 22 nt, Human
gcuguagguaaggauggcaaag

SEQ ID NO: 201049 - RNA, 22 nt, Human
aaguaguuggaaauaagacaga

SEQ ID NO: 201050 - RNA, 22 nt, Human
auauuaaugggauuuagucagg

SEQ ID NO: 201051 - RNA, 22 nt, Human
ucaaggaagauagcuauuauga

SEQ ID NO: 201052 - RNA, 22 nt, Human
uucuaagaaauggaaaacgauu

SEQ ID NO: 201053 - RNA, 22 nt, Human
acccauuccuuuacuucaucug

SEQ ID NO: 201054 - RNA, 23 nt, Human
cacagguguuucaucuucucagu

SEQ ID NO: 201055 - RNA, 22 nt, Human
agaggaauaugggugcacuaga

SEQ ID NO: 201056 - RNA, 22 nt, Human
acacauuucucuuuuuguaagu

SEQ ID NO: 201057 - RNA, 22 nt, Human
aucuaaagugucauaaguagcu

SEQ ID NO: 201058 - RNA, 22 nt, Human
ccacaggaccagaggagaucac

SEQ ID NO: 201059 - RNA, 22 nt, Human
caggaucuguuaaguuguucca

SEQ ID NO: 201060 - RNA, 22 nt, Human
ugaacaaacugcauucuucacu

SEQ ID NO: 201061 - RNA, 22 nt, Human
ugaacuuuguaguaauggagau

SEQ ID NO: 201062 - RNA, 22 nt, Human
uuccagugaugggcaauuuggu

SEQ ID NO: 201063 - RNA, 22 nt, Human
gaggccagacugccuuuuauga

SEQ ID NO: 201064 - RNA, 22 nt, Human
cugccugggccggccacccucu

SEQ ID NO: 201065 - RNA, 22 nt, Human
uuucaaauaccauaaaccuaau

SEQ ID NO: 201066 - RNA, 22 nt, Human
ggcugggccgcggcuacccaga

SEQ ID NO: 201067 - RNA, 22 nt, Human
gaguaguugcugcagagaauac

SEQ ID NO: 201068 - RNA, 22 nt, Human
aauuagaaccagaagccauauu

SEQ ID NO: 201069 - RNA, 22 nt, Human
aaggcucccucuucucgagugu

SEQ ID NO: 201070 - RNA, 22 nt, Human
caaggcuguguuagcugcccuc

SEQ ID NO: 201071 - RNA, 22 nt, Human
ugccaaauugcccuauaaauga

SEQ ID NO: 201072 - RNA, 22 nt, Human
ucccacccccuccaaggaggaa

SEQ ID NO: 201073 - RNA, 22 nt, Human
uacagaaacagcgugguuagaa

SEQ ID NO: 201074 - RNA, 22 nt, Human
ugaagaggccaaacuaucauug

SEQ ID NO: 201075 - RNA, 22 nt, Human
guuuucuggcaguuauuccuua

SEQ ID NO: 201076 - RNA, 22 nt, Human
uaguugacuucucuaucccagc

SEQ ID NO: 201077 - RNA, 22 nt, Human
auuuagaaguuggagggcaaga

SEQ ID NO: 201078 - RNA, 22 nt, Human
gaggccagugaaauguuauaaa

SEQ ID NO: 201079 - RNA, 22 nt, Human
ucaggaagcucuugcugauucu

SEQ ID NO: 201080 - RNA, 22 nt, Human
aagugauuuuccuacuugcuaa

SEQ ID NO: 201081 - RNA, 22 nt, Human
caagucauuguuuagucauguu

SEQ ID NO: 201082 - RNA, 22 nt, Human
ugcccagucuccgggccagccc

SEQ ID NO: 201083 - RNA, 20 nt, Human
uaaugucaaagucacaaggu

SEQ ID NO: 201084 - RNA, 22 nt, Human
ucuccuggcucaccaggcugga

SEQ ID NO: 201085 - RNA, 22 nt, Human
uauuugaagggagaaagugcca

SEQ ID NO: 201086 - RNA, 22 nt, Human
aguggcuaugcaugacuggaau

SEQ ID NO: 201087 - RNA, 22 nt, Human
uuccaggacuucauggcucuga

SEQ ID NO: 201088 - RNA, 22 nt, Human
caggacaaagcccuuugagaaa

SEQ ID NO: 201089 - RNA, 22 nt, Human
uuuagcagcaaauaaguagugc

SEQ ID NO: 201090 - RNA, 19 nt, Human
ucuguaacacucuagccuu

SEQ ID NO: 201091 - RNA, 22 nt, Human
aagggaggccagagguuuugca

SEQ ID NO: 201092 - RNA, 22 nt, Human
gaugaggcucaugcacccugcg

SEQ ID NO: 201093 - RNA, 22 nt, Human
ccagggcccacggccagaauag

SEQ ID NO: 201094 - RNA, 18 nt, Human
agaccagacaagaauggu

SEQ ID NO: 201095 - RNA, 22 nt, Human
ggccucuguuuggagccaggau

SEQ ID NO: 201096 - RNA, 22 nt, Human
aaggcuggagaugguuggaaug

SEQ ID NO: 201097 - RNA, 22 nt, Human
auccugggccucagaggugugu

SEQ ID NO: 201098 - RNA, 22 nt, Human
ggaggugguuugauuucuauau

SEQ ID NO: 201099 - RNA, 22 nt, Human
gaaauacuguaaaguuauuauu

SEQ ID NO: 201100 - RNA, 22 nt, Human
ccugcagagcaggagaggcauc

SEQ ID NO: 201101 - RNA, 22 nt, Human
ccagagagggcgccaccuggag

SEQ ID NO: 201102 - RNA, 22 nt, Human
aucuuguuaaaaagcagauucu

SEQ ID NO: 201103 - RNA, 22 nt, Human
agaaauacuaggaauauucaua

SEQ ID NO: 201104 - RNA, 22 nt, Human
ugguacaauggcaucuaucuau

SEQ ID NO: 201105 - RNA, 22 nt, Human
aguugcuggcaccugugaguau

SEQ ID NO: 201106 - RNA, 22 nt, Human
ucagucuuuugcccugaggagu

SEQ ID NO: 201107 - RNA, 22 nt, Human
cgguccagagcuaguucauugc

SEQ ID NO: 201108 - RNA, 18 nt, Human
gccugccaacuccugauc

SEQ ID NO: 201109 - RNA, 21 nt, Human
uucuucaugaugauuaauggc

SEQ ID NO: 201110 - RNA, 22 nt, Human
ugcaguuagccuaggauugagc

SEQ ID NO: 201111 - RNA, 22 nt, Human
ucauucaucugguguuaguccu

SEQ ID NO: 201112 - RNA, 22 nt, Human
uaacuuuaguguaugagguaag

SEQ ID NO: 201113 - RNA, 22 nt, Human
uauacacauaucuucuaggccu

SEQ ID NO: 201114 - RNA, 22 nt, Human
ugauuugcgucucauuugaaau

SEQ ID NO: 201115 - RNA, 22 nt, Human
uugcuauuuccugaaauaagca

SEQ ID NO: 201116 - RNA, 22 nt, Human
ccaggcuagagugcaauggcau

SEQ ID NO: 201117 - RNA, 22 nt, Human
guccuucagcuuuaucugaaca

SEQ ID NO: 201118 - RNA, 22 nt, Human
agucuucagcagccuucucagg

SEQ ID NO: 201119 - RNA, 22 nt, Human
agugucaauucucaaaucucgg

SEQ ID NO: 201120 - RNA, 22 nt, Human
aauuaucagauauaaaacugca

SEQ ID NO: 201121 - RNA, 22 nt, Human
caggaaaaucugcccacacaag

SEQ ID NO: 201122 - RNA, 22 nt, Human
uggcuuccgccgcgggccucgg

SEQ ID NO: 201123 - RNA, 22 nt, Human
aaauagcuacaugaucucuagg

SEQ ID NO: 201124 - RNA, 22 nt, Human
uuucugggacuggggagauucu

SEQ ID NO: 201125 - RNA, 22 nt, Human
ggcugcucggcagcuccugagc

SEQ ID NO: 201126 - RNA, 22 nt, Human
ggguaggcagugcguccugccu

SEQ ID NO: 201127 - RNA, 22 nt, Human
uaagcauuaacucugcugcaag

SEQ ID NO: 201128 - RNA, 22 nt, Human
cuggcacucauaggccaguuca

SEQ ID NO: 201129 - RNA, 22 nt, Human
auacagagaagggguagaggau

SEQ ID NO: 201130 - RNA, 21 nt, Human
gcccagcaaggugagaaggcc

SEQ ID NO: 201131 - RNA, 22 nt, Human
aaagugccugacucauaguuag

SEQ ID NO: 201132 - RNA, 22 nt, Human
uauuccaaaauaguuaagcacu

SEQ ID NO: 201133 - RNA, 22 nt, Human
gacuguacuugagagaggaacu

SEQ ID NO: 201134 - RNA, 22 nt, Human
cagaggcaggauaagaacugcg

SEQ ID NO: 201135 - RNA, 19 nt, Human
uggcaugaugauggauggg

SEQ ID NO: 201136 - RNA, 22 nt, Human
agcaguccaacugagguggcau

SEQ ID NO: 201137 - RNA, 22 nt, Human
caugaaugaguaauuuacaaag

SEQ ID NO: 201138 - RNA, 22 nt, Human
cugccugccuuggccuccagga

SEQ ID NO: 201139 - RNA, 22 nt, Human
uccugcuccaccgugggcugga

SEQ ID NO: 201140 - RNA, 22 nt, Human
cagugaaguucuacugaauggu

SEQ ID NO: 201141 - RNA, 22 nt, Human
cagagcuggccugugauuuuug

SEQ ID NO: 201142 - RNA, 22 nt, Human
ugcucagggagcuuccuggugg

SEQ ID NO: 201143 - RNA, 22 nt, Human
cuuuuuuccuaaggcaacauga

SEQ ID NO: 201144 - RNA, 22 nt, Human
auuauuuuaugugcggccugau

SEQ ID NO: 201145 - RNA, 22 nt, Human
cucugggcugccuuuuagcucu

SEQ ID NO: 201146 - RNA, 22 nt, Human
gcucugugccacaugcaguguu

SEQ ID NO: 201147 - RNA, 22 nt, Human
acugggcucaagugauuguccu

SEQ ID NO: 201148 - RNA, 19 nt, Human
gggagcugucugcccgugg

SEQ ID NO: 201149 - RNA, 23 nt, Human
ccuccaugguaagaagcuuagag

SEQ ID NO: 201150 - RNA, 22 nt, Human
aaggagcucuuaaaaucagaga

SEQ ID NO: 201151 - RNA, 22 nt, Human
gcacagaauaacacucugggcu

SEQ ID NO: 201152 - RNA, 22 nt, Human
uuucugaagguuaaggaauuag

SEQ ID NO: 201153 - RNA, 22 nt, Human
uucuuuguuguacuuuccuaca

SEQ ID NO: 201154 - RNA, 21 nt, Human
agccauccugaauggugccau

SEQ ID NO: 201155 - RNA, 22 nt, Human
uccagcccaguuuggugaauug

SEQ ID NO: 201156 - RNA, 22 nt, Human
aauuagggaggacaaagguaca

SEQ ID NO: 201157 - RNA, 22 nt, Human
gcaggugggggucggugcaucu

SEQ ID NO: 201158 - RNA, 22 nt, Human
ugcagagugggagaggugcggg

SEQ ID NO: 201159 - RNA, 22 nt, Human
ugagcccaggaggcagagguug

SEQ ID NO: 201160 - RNA, 22 nt, Human
cugugccacugccccaggccuc

SEQ ID NO: 201161 - RNA, 22 nt, Human
ucuucagauggccaguuguccc

SEQ ID NO: 201162 - RNA, 22 nt, Human
ucagaaguccccagucaaggag

SEQ ID NO: 201163 - RNA, 22 nt, Human
gcuuugcuggcuugaaaugcug

SEQ ID NO: 201164 - RNA, 22 nt, Human
ugguucauaauuugcacuacug

SEQ ID NO: 201165 - RNA, 22 nt, Human
uauucuugucuuuuccagaaau

SEQ ID NO: 201166 - RNA, 21 nt, Human
uaagcaaggaaagggcagccc

SEQ ID NO: 201167 - RNA, 22 nt, Human
gaggcugcccaacuggagugga

SEQ ID NO: 201168 - RNA, 20 nt, Human
aagagcugacucacaguggu

SEQ ID NO: 201169 - RNA, 22 nt, Human
cccaggaggugugcccaacucg

SEQ ID NO: 201170 - RNA, 22 nt, Human
cugaggaguuucuuauaugugu

SEQ ID NO: 201171 - RNA, 22 nt, Human
aaggggaaguagcaccagaggu

SEQ ID NO: 201172 - RNA, 21 nt, Human
ugggagagggcucagcuaccc

SEQ ID NO: 201173 - RNA, 22 nt, Human
aaccuugaauacuuaaauacau

SEQ ID NO: 201174 - RNA, 22 nt, Human
gcuuucuggagccugggggaac

SEQ ID NO: 201175 - RNA, 22 nt, Human
ugcucagcaaaaagcuugugag

SEQ ID NO: 201176 - RNA, 22 nt, Human
aaucagaaccuugggucauaac

SEQ ID NO: 201177 - RNA, 22 nt, Human
uuuuuauaccaccucucacuua

SEQ ID NO: 201178 - RNA, 22 nt, Human
ugacaaagcaugauggugacag

SEQ ID NO: 201179 - RNA, 22 nt, Human
uauuucagggagaauaaauuug

SEQ ID NO: 201180 - RNA, 19 nt, Human
gucuuguaacacauaagug

SEQ ID NO: 201181 - RNA, 23 nt, Human
ugagcaucacaggagaaccaggc

SEQ ID NO: 201182 - RNA, 22 nt, Human
ugaggcaggagaaucaccggaa

SEQ ID NO: 201183 - RNA, 22 nt, Human
ugguccgcuccuauucgccgca

SEQ ID NO: 201184 - RNA, 22 nt, Human
augugcccuuucugcuuugcag

SEQ ID NO: 201185 - RNA, 22 nt, Human
uccaugucuucaugugucuaac

SEQ ID NO: 201186 - RNA, 20 nt, Human
uuucacagucccuguuuccu

SEQ ID NO: 201187 - RNA, 22 nt, Human
uauuggugaugacuugaggcca

SEQ ID NO: 201188 - RNA, 22 nt, Human
agccacaaugccaaccucuacu

SEQ ID NO: 201189 - RNA, 22 nt, Human
guauauaagguaaagcgauugu

SEQ ID NO: 201190 - RNA, 22 nt, Human
ucucugagcucaggagcugcag

SEQ ID NO: 201191 - RNA, 22 nt, Human
aggaaacuaauuaguagaauaa

SEQ ID NO: 201192 - RNA, 22 nt, Human
gggcacagucugcagcccccca

SEQ ID NO: 201193 - RNA, 22 nt, Human
ugaggcaggacugagcgggaug

SEQ ID NO: 201194 - RNA, 22 nt, Human
ugucauuuuauguauguggucu

SEQ ID NO: 201195 - RNA, 22 nt, Human
ggcaaacaccaggcgagggagc

SEQ ID NO: 201196 - RNA, 22 nt, Human
agggaggaguccucaaagucau

SEQ ID NO: 201197 - RNA, 22 nt, Human
cauuuuccucugcugguguuca

SEQ ID NO: 201198 - RNA, 22 nt, Human
ugaauaaacuaugaggaggaau

SEQ ID NO: 201199 - RNA, 22 nt, Human
uguaaugauguacuuagaagga

SEQ ID NO: 201200 - RNA, 22 nt, Human
uuccugggaggcuguguacuug

SEQ ID NO: 201201 - RNA, 22 nt, Human
ucugugugguaguuucagugaa

SEQ ID NO: 201202 - RNA, 22 nt, Human
agaacgcuauucagaacacugg

SEQ ID NO: 201203 - RNA, 22 nt, Human
agagaugcauucagcauggaug

SEQ ID NO: 201204 - RNA, 22 nt, Human
cuuuccaggaauccucacagcc

SEQ ID NO: 201205 - RNA, 22 nt, Human
gacccuccugucuucuaaccaa

SEQ ID NO: 201206 - RNA, 22 nt, Human
uacauguggguuaaaaacacuc

SEQ ID NO: 201207 - RNA, 21 nt, Human
acaggcucacgauccauuucu

SEQ ID NO: 201208 - RNA, 22 nt, Human
agggcucugugacuaucacugc

SEQ ID NO: 201209 - RNA, 22 nt, Human
ugcuauuugugagugucuucgu

SEQ ID NO: 201210 - RNA, 22 nt, Human
cagacauaucccugcucccuua

SEQ ID NO: 201211 - RNA, 22 nt, Human
uaguuacaauuaugcauggaaa

SEQ ID NO: 201212 - RNA, 22 nt, Human
uugaaucucucugagauucagu

SEQ ID NO: 201213 - RNA, 22 nt, Human
cuggcagcuggaggcuagaggc

SEQ ID NO: 201214 - RNA, 22 nt, Human
gagcuggaagucuguggucaga

SEQ ID NO: 201215 - RNA, 22 nt, Human
uccugcagcugaagcucaugug

SEQ ID NO: 201216 - RNA, 23 nt, Human
aacacauugcuaauuacauucaa

SEQ ID NO: 201217 - RNA, 22 nt, Human
guccuucaagaguccccuacug

SEQ ID NO: 201218 - RNA, 22 nt, Human
agucucugcaugccugcugugc

SEQ ID NO: 201219 - RNA, 22 nt, Human
guguguccuguuuuaaaauagu

SEQ ID NO: 201220 - RNA, 22 nt, Human
aagaacuuuuggcaaguguuau

SEQ ID NO: 201221 - RNA, 22 nt, Human
ugacagggggcagagguggcug

SEQ ID NO: 201222 - RNA, 22 nt, Human
cagaagcaaaugccuugcugag

SEQ ID NO: 201223 - RNA, 22 nt, Human
aaacugcaauuacuuuugcacc

SEQ ID NO: 201224 - RNA, 21 nt, Human
ucacuacaauguucucuuaua

SEQ ID NO: 201225 - RNA, 22 nt, Human
uacaagaaugucuuaaaagcuc

SEQ ID NO: 201226 - RNA, 20 nt, Human
uuuuccucguguuuguucua

SEQ ID NO: 201227 - RNA, 22 nt, Human
ucuguucauaguaguguauaug

SEQ ID NO: 201228 - RNA, 22 nt, Human
cugaaaaacgggauuuggcugg

SEQ ID NO: 201229 - RNA, 22 nt, Human
augcaggauuagaaaguugccu

SEQ ID NO: 201230 - RNA, 22 nt, Human
uggcucaggaucuaagcagaau

SEQ ID NO: 201231 - RNA, 22 nt, Human
agucgcagacaugguccccuuu

SEQ ID NO: 201232 - RNA, 22 nt, Human
aucauucugauggucaaugcua

SEQ ID NO: 201233 - RNA, 22 nt, Human
aaacugcacaagggugcauagc

SEQ ID NO: 201234 - RNA, 22 nt, Human
uuccuggcacacuccugaaugu

SEQ ID NO: 201235 - RNA, 22 nt, Human
aaacauugagcacuugcuauuu

SEQ ID NO: 201236 - RNA, 22 nt, Human
ccaggcagagggaauagcaagu

SEQ ID NO: 201237 - RNA, 22 nt, Human
ugcagcugccuagggcuggcuu

SEQ ID NO: 201238 - RNA, 22 nt, Human
ucacacauuguugcuuaaguug

SEQ ID NO: 201239 - RNA, 22 nt, Human
guuucauuaccugacccaugag

SEQ ID NO: 201240 - RNA, 22 nt, Human
gggcugaggaacauauuuuguu

SEQ ID NO: 201241 - RNA, 22 nt, Human
guccucugaaguugugcaaugc

SEQ ID NO: 201242 - RNA, 22 nt, Human
gagcccucaccgccugaccagg

SEQ ID NO: 201243 - RNA, 22 nt, Human
gcugguggcagagcuccgcggc

SEQ ID NO: 201244 - RNA, 22 nt, Human
acagggcagugucuugaaaaau

SEQ ID NO: 201245 - RNA, 22 nt, Human
aggacagcagccauuggcaguc

SEQ ID NO: 201246 - RNA, 22 nt, Human
caaaugaagaaccuucucaccu

SEQ ID NO: 201247 - RNA, 22 nt, Human
aagucuggaaccucaugcuggc

SEQ ID NO: 201248 - RNA, 20 nt, Human
aacauugcuucaauguaacc

SEQ ID NO: 201249 - RNA, 22 nt, Human
ucuggcucuaacuaggcaucag

SEQ ID NO: 201250 - RNA, 22 nt, Human
aaauaguuguuuggaucaauaa

SEQ ID NO: 201251 - RNA, 20 nt, Human
ucucgcacucggagcagccg

SEQ ID NO: 201252 - RNA, 22 nt, Human
cauuacagaauauguaaugauc

SEQ ID NO: 201253 - RNA, 22 nt, Human
uagauuaacaguuuuguugaag

SEQ ID NO: 201254 - RNA, 22 nt, Human
ccaggacagugaacauguaaga

SEQ ID NO: 201255 - RNA, 22 nt, Human
cagcuccuaugaguaugauucc

SEQ ID NO: 201256 - RNA, 22 nt, Human
aggcagcauccagaggagaaug

SEQ ID NO: 201257 - RNA, 22 nt, Human
guucuuuaggggcccaauuucc

SEQ ID NO: 201258 - RNA, 22 nt, Human
gaaaguuucuucauuaagaugu

SEQ ID NO: 201259 - RNA, 22 nt, Human
gauuuagauucgcuggggcugg

SEQ ID NO: 201260 - RNA, 22 nt, Human
agcaacaggguggucuucagaa

SEQ ID NO: 201261 - RNA, 20 nt, Human
cugcuugggccccucuggcc

SEQ ID NO: 201262 - RNA, 23 nt, Human
agucucaagcuggagaauuaccu

SEQ ID NO: 201263 - RNA, 22 nt, Human
gaggagaaauuauccuuggugu

SEQ ID NO: 201264 - RNA, 22 nt, Human
ccaggucugcgggcggcaggca

SEQ ID NO: 201265 - RNA, 20 nt, Human
uucugcuugcaaauaucaag

SEQ ID NO: 201266 - RNA, 22 nt, Human
aacuacauuuuacagaagauga

SEQ ID NO: 201267 - RNA, 22 nt, Human
uugcaggggagaggaacaaaca

SEQ ID NO: 201268 - RNA, 22 nt, Human
acuguuuaggaggcuuauaugc

SEQ ID NO: 201269 - RNA, 23 nt, Human
agcucugaaauagggaaagagga

SEQ ID NO: 201270 - RNA, 22 nt, Human
aaauagaauuggaagcagaguu

SEQ ID NO: 201271 - RNA, 19 nt, Human
gcucagagacaccuguugc

SEQ ID NO: 201272 - RNA, 22 nt, Human
uuguguccccuguucuaccugu

SEQ ID NO: 201273 - RNA, 22 nt, Human
caagcugggugcgggcaguaua

SEQ ID NO: 201274 - RNA, 23 nt, Human
acaggcucuuaaucagugcuccu

SEQ ID NO: 201275 - RNA, 22 nt, Human
uggcccaagucugcuagaagag

SEQ ID NO: 201276 - RNA, 21 nt, Human
uuauugagacauuuguggaaa

SEQ ID NO: 201277 - RNA, 22 nt, Human
auucuagaaggcaaagcaaggg

SEQ ID NO: 201278 - RNA, 22 nt, Human
gaaggcuuauuuucuuuguaaa

SEQ ID NO: 201279 - RNA, 22 nt, Human
gugccagggaguggaggagcuu

SEQ ID NO: 201280 - RNA, 18 nt, Human
aggaagcaggaggaaggc

SEQ ID NO: 201281 - RNA, 16 nt, Human
uggcagagguucagcc

SEQ ID NO: 201282 - RNA, 22 nt, Human
cacagcuggugacagagcccag

SEQ ID NO: 201283 - RNA, 22 nt, Human
ugcauaggguucaaaggcugua

SEQ ID NO: 201284 - RNA, 22 nt, Human
cuguuaagcaacaugaguaagu

SEQ ID NO: 201285 - RNA, 22 nt, Human
uuuaauguuugagucaguauau

SEQ ID NO: 201286 - RNA, 22 nt, Human
ucagaucuggugaaguuauagu

SEQ ID NO: 201287 - RNA, 22 nt, Human
uuguuuuccugggauaccaacc

SEQ ID NO: 201288 - RNA, 23 nt, Human
auggaaauagcaugugucauuua

SEQ ID NO: 201289 - RNA, 22 nt, Human
uacugucuggaguugccaaagg

SEQ ID NO: 201290 - RNA, 22 nt, Human
gggauggaggguagagcaagug

SEQ ID NO: 201291 - RNA, 22 nt, Human
guuguacaaaauaucagugagg

SEQ ID NO: 201292 - RNA, 22 nt, Human
gcugcugggauccugggucuca

SEQ ID NO: 201293 - RNA, 22 nt, Human
ugacagguuguguagguggcca

SEQ ID NO: 201294 - RNA, 22 nt, Human
gagaagcagguuuagcagacaa

SEQ ID NO: 201295 - RNA, 22 nt, Human
uccuuggcuaguacuggccagc

SEQ ID NO: 201296 - RNA, 22 nt, Human
gcaguggcccagcuugcaggcu

SEQ ID NO: 201297 - RNA, 22 nt, Human
uggcagugaugcuuaugguuug

SEQ ID NO: 201298 - RNA, 23 nt, Human
ucuccuguccuaauuaccacccc

SEQ ID NO: 201299 - RNA, 22 nt, Human
aagcacaggagacgcacagcca

SEQ ID NO: 201300 - RNA, 22 nt, Human
gguccagguuugcucuacuugu

SEQ ID NO: 201301 - RNA, 22 nt, Human
gcacagagagcagugggggaca

SEQ ID NO: 201302 - RNA, 22 nt, Human
ucaggaagccgguuaaauagau

SEQ ID NO: 201303 - RNA, 22 nt, Human
ggguaggcugcuccuggggccc

SEQ ID NO: 201304 - RNA, 22 nt, Human
ggcugugcaccauccaccuccc

SEQ ID NO: 201305 - RNA, 22 nt, Human
ugaauagagcuuggcacuagaa

SEQ ID NO: 201306 - RNA, 22 nt, Human
acagugcucaugugacauggug

SEQ ID NO: 201307 - RNA, 22 nt, Human
ggcuggguacagggcagugugc

SEQ ID NO: 201308 - RNA, 22 nt, Human
aguugacauccagagacauucu

SEQ ID NO: 201309 - RNA, 22 nt, Human
ugugggaggauucagaauuggg

SEQ ID NO: 201310 - RNA, 22 nt, Human
gauggcagugggccucgagucc

SEQ ID NO: 201311 - RNA, 22 nt, Human
ccagugucuagcagaugacagg

SEQ ID NO: 201312 - RNA, 22 nt, Human
aguggcagagccaagauaugau

SEQ ID NO: 201313 - RNA, 22 nt, Human
aguaggaggcgggagcaugaag

SEQ ID NO: 201314 - RNA, 22 nt, Human
cagagcuggggacuguuggaug

SEQ ID NO: 201315 - RNA, 22 nt, Human
agauacaaaagauaagauuuag

SEQ ID NO: 201316 - RNA, 21 nt, Human
uuuuaacaaggauuucccuag

SEQ ID NO: 201317 - RNA, 23 nt, Human
ugcaggggaggcuuaaagcaggu

SEQ ID NO: 201318 - RNA, 22 nt, Human
aauuuguuagcauacucuaguu

SEQ ID NO: 201319 - RNA, 20 nt, Human
aagagucuuuacugagcuaa

SEQ ID NO: 201320 - RNA, 22 nt, Human
aggccuuaccauagcuguagca

SEQ ID NO: 201321 - RNA, 22 nt, Human
gcaagcaaaaugggagauuccc

SEQ ID NO: 201322 - RNA, 22 nt, Human
ugagcagugguguuuuucuauc

SEQ ID NO: 201323 - RNA, 22 nt, Human
gcuuagaaguacacaugccuuu

SEQ ID NO: 201324 - RNA, 22 nt, Human
uuagcauuucaguacacauguu

SEQ ID NO: 201325 - RNA, 20 nt, Human
ggcaggcuuuauauggaggg

SEQ ID NO: 201326 - RNA, 21 nt, Human
cuggcauuaugauagcguccu

SEQ ID NO: 201327 - RNA, 22 nt, Human
aagcaaaugugggugcagaauu

SEQ ID NO: 201328 - RNA, 22 nt, Human
agcaaugauguuuucaaguagg

SEQ ID NO: 201329 - RNA, 20 nt, Human
uguggacucaguuucuugcu

SEQ ID NO: 201330 - RNA, 21 nt, Human
cugcagagcaugcaaaauguu

SEQ ID NO: 201331 - RNA, 19 nt, Human
gcugugggacagcagggug

SEQ ID NO: 201332 - RNA, 22 nt, Human
gguggcaguggucucugacaga

SEQ ID NO: 201333 - RNA, 22 nt, Human
cugaggaguuuggguuguucaa

SEQ ID NO: 201334 - RNA, 21 nt, Human
uggcugccuggcucugugguu

SEQ ID NO: 201335 - RNA, 22 nt, Human
cugcagagcaaguucucuguug

SEQ ID NO: 201336 - RNA, 22 nt, Human
gagacacaggcacagaagaggc

SEQ ID NO: 201337 - RNA, 22 nt, Human
gcugagagugggugcagugcuu

SEQ ID NO: 201338 - RNA, 22 nt, Human
uuuacagucaccaaacuuugcu

SEQ ID NO: 201339 - RNA, 22 nt, Human
ccaggcauccauugcuuccucu

SEQ ID NO: 201340 - RNA, 22 nt, Human
ggcaccagggcaagggucuuuc

SEQ ID NO: 201341 - RNA, 22 nt, Human
agcaacagcaacgacauuucuc

SEQ ID NO: 201342 - RNA, 22 nt, Human
uuccuguggcugucacuccugg

SEQ ID NO: 201343 - RNA, 22 nt, Human
cagugcaauuacaagcuaauuc

SEQ ID NO: 201344 - RNA, 22 nt, Human
ucccaggccacacuuggggaac

SEQ ID NO: 201345 - RNA, 22 nt, Human
ugcagggcuccuggcuccaauc

SEQ ID NO: 201346 - RNA, 22 nt, Human
aagcugaauuuucuaaaagaau

SEQ ID NO: 201347 - RNA, 22 nt, Human
gcucuguauguaguucuugcuu

SEQ ID NO: 201348 - RNA, 21 nt, Human
cuguccucagauguggacgag

SEQ ID NO: 201349 - RNA, 22 nt, Human
cuucugcaauaaguuuuggucc

SEQ ID NO: 201350 - RNA, 22 nt, Human
agucacuguuucagaacugagu

SEQ ID NO: 201351 - RNA, 22 nt, Human
agcuggguuucuggcaggcuua

SEQ ID NO: 201352 - RNA, 22 nt, Human
ugggggugaaagucuggacagu

SEQ ID NO: 201353 - RNA, 22 nt, Human
guccugugagauucaugcucaa

SEQ ID NO: 201354 - RNA, 22 nt, Human
aagagaaggugaggaagccggu

SEQ ID NO: 201355 - RNA, 22 nt, Human
auccaggcugcuaugaggauga

SEQ ID NO: 201356 - RNA, 20 nt, Human
cagcaggcuauggggcaccc

SEQ ID NO: 201357 - RNA, 22 nt, Human
caacaguucucauagcagauuc

SEQ ID NO: 201358 - RNA, 22 nt, Human
ugcuggcugcagugcugucaaa

SEQ ID NO: 201359 - RNA, 22 nt, Human
aacuucuuugagcuccaguuuu

SEQ ID NO: 201360 - RNA, 22 nt, Human
gguggcugggauuaguagccca

SEQ ID NO: 201361 - RNA, 22 nt, Human
auugcaaaugguuuggucaucu

SEQ ID NO: 201362 - RNA, 22 nt, Human
caggaccccauauucacugaac

SEQ ID NO: 201363 - RNA, 22 nt, Human
aaaggcaguggguauguggauc

SEQ ID NO: 201364 - RNA, 22 nt, Human
aggcugugggaguugagagucu

SEQ ID NO: 201365 - RNA, 22 nt, Human
ucacagaaugucuagcauaauu

SEQ ID NO: 201366 - RNA, 22 nt, Human
ucuugacauuguuguuagcagg

SEQ ID NO: 201367 - RNA, 23 nt, Human
auuuccuaaaagauaaucauuac

SEQ ID NO: 201368 - RNA, 22 nt, Human
ccuugggagaaauugcagaguc

SEQ ID NO: 201369 - RNA, 22 nt, Human
aaaucagaaaauauggagagga

SEQ ID NO: 201370 - RNA, 23 nt, Human
ggguccagagaagccauuagggc

SEQ ID NO: 201371 - RNA, 22 nt, Human
acuuugcaauacuuaauacaaa

SEQ ID NO: 201372 - RNA, 22 nt, Human
ugagcaggugagucuagggcag

SEQ ID NO: 201373 - RNA, 22 nt, Human
cacaggcaggagguucuccagu

SEQ ID NO: 201374 - RNA, 22 nt, Human
ggcuucugcucagccugcacgc

SEQ ID NO: 201375 - RNA, 22 nt, Human
uagaaaucauuuagaaguauug

SEQ ID NO: 201376 - RNA, 22 nt, Human
agacagcugcucgcagagcuau

SEQ ID NO: 201377 - RNA, 22 nt, Human
aaauuguaaugacuucacuuga

SEQ ID NO: 201378 - RNA, 22 nt, Human
augaaggcaguuaaacgucauc

SEQ ID NO: 201379 - RNA, 20 nt, Human
agcuccugguauaggugccu

SEQ ID NO: 201380 - RNA, 20 nt, Human
agauggcugucauuucuguc

SEQ ID NO: 201381 - RNA, 22 nt, Human
cuguccagugcagagaacagag

SEQ ID NO: 201382 - RNA, 21 nt, Human
gagugcaggucugaugccauc

SEQ ID NO: 201383 - RNA, 22 nt, Human
auucuuuucccaacugcuuuaa

SEQ ID NO: 201384 - RNA, 22 nt, Human
auuguuuacacuaacuucauaa

SEQ ID NO: 201385 - RNA, 22 nt, Human
guuuuauuuccaugagagaccg

SEQ ID NO: 201386 - RNA, 22 nt, Human
ugaugagggggaacagagauuu

SEQ ID NO: 201387 - RNA, 22 nt, Human
ucuggccagugaaaugcagaau

SEQ ID NO: 201388 - RNA, 22 nt, Human
gaugauaacucuuuaugaugaa

SEQ ID NO: 201389 - RNA, 22 nt, Human
ugaaccuuuguguuggaccugg

SEQ ID NO: 201390 - RNA, 22 nt, Human
uucuaaguuucucaguuucagu

SEQ ID NO: 201391 - RNA, 22 nt, Human
augaccagccgagauaaacaga

SEQ ID NO: 201392 - RNA, 22 nt, Human
agggccugaggcugacggggag

SEQ ID NO: 201393 - RNA, 22 nt, Human
ucacauuuuaucugagauugac

SEQ ID NO: 201394 - RNA, 22 nt, Human
ugcaugcaugugagcaugcaua

SEQ ID NO: 201395 - RNA, 22 nt, Human
aaucucaagcuguaaauaccuc

SEQ ID NO: 201396 - RNA, 22 nt, Human
gaaggcuugguuuuuucaacac

SEQ ID NO: 201397 - RNA, 22 nt, Human
ugagcugagaacacuugggcua

SEQ ID NO: 201398 - RNA, 18 nt, Human
agagggaaagcaggcuga

SEQ ID NO: 201399 - RNA, 22 nt, Human
uccuuucccuuuccauccuggc

SEQ ID NO: 201400 - RNA, 22 nt, Human
acacuguguggucucucucgga

SEQ ID NO: 201401 - RNA, 21 nt, Human
gccugcagaccccaccaggcu

SEQ ID NO: 201402 - RNA, 22 nt, Human
ucagugcauucuaccaaaaggc

SEQ ID NO: 201403 - RNA, 22 nt, Human
gaggcagcaugguaccuuggag

SEQ ID NO: 201404 - RNA, 22 nt, Human
ugcaggugccaucgcugcucau

SEQ ID NO: 201405 - RNA, 21 nt, Human
auggaaauuggcaaaugcuac

SEQ ID NO: 201406 - RNA, 20 nt, Human
ggcugcccacuccagaguac

SEQ ID NO: 201407 - RNA, 22 nt, Human
aauguggaugauacuaguacuu

SEQ ID NO: 201408 - RNA, 22 nt, Human
caaauguuuuuauucuacaaca

SEQ ID NO: 201409 - RNA, 22 nt, Human
agucucugagguucagaugccu

SEQ ID NO: 201410 - RNA, 22 nt, Human
agcaguguggccuuagacccgg

SEQ ID NO: 201411 - RNA, 22 nt, Human
cuggcucccagcuuucagggag

SEQ ID NO: 201412 - RNA, 22 nt, Human
agauggcuuagccuggcuccca

SEQ ID NO: 201413 - RNA, 22 nt, Human
ugcccucagaauugcucccugc

SEQ ID NO: 201414 - RNA, 22 nt, Human
gagggcugcuggaaaaaugcag

SEQ ID NO: 201415 - RNA, 22 nt, Human
agaugguugucgcaaaugaaug

SEQ ID NO: 201416 - RNA, 22 nt, Human
aaucuggacuugucugugaaga

SEQ ID NO: 201417 - RNA, 22 nt, Human
caggguggggaaauagcgcccu

SEQ ID NO: 201418 - RNA, 20 nt, Human
uccaggcuccuccacuuagu

SEQ ID NO: 201419 - RNA, 22 nt, Human
acaucuggaaaguuacuugaga

SEQ ID NO: 201420 - RNA, 22 nt, Human
acagcucuuaggcagaaccaac

SEQ ID NO: 201421 - RNA, 23 nt, Human
ccugcucaggcgugugcccugcu

SEQ ID NO: 201422 - RNA, 22 nt, Human
cugggagauugcuagagaugca

SEQ ID NO: 201423 - RNA, 22 nt, Human
caccagcuucucauugcggguc

SEQ ID NO: 201424 - RNA, 22 nt, Human
cagaugaaggccugaaugucua

SEQ ID NO: 201425 - RNA, 22 nt, Human
gccuugggcacaggcagggccc

SEQ ID NO: 201426 - RNA, 22 nt, Human
aaggugucacugggacaggaaa

SEQ ID NO: 201427 - RNA, 22 nt, Human
uaaagugcuuccuaacccagag

SEQ ID NO: 201428 - RNA, 22 nt, Human
agcuaguucacugaagccuaug

SEQ ID NO: 201429 - RNA, 22 nt, Human
ugccugugcccuuugcugggag

SEQ ID NO: 201430 - RNA, 22 nt, Human
acuuucuguuagaugaauggau

SEQ ID NO: 201431 - RNA, 22 nt, Human
ucugaaauaggagccauguaga

SEQ ID NO: 201432 - RNA, 22 nt, Human
acaggcuguugggguccagggu

SEQ ID NO: 201433 - RNA, 22 nt, Human
gcauuuacauggagcuaucuaa

SEQ ID NO: 201434 - RNA, 22 nt, Human
gaggccaacuuuggagaacagg

SEQ ID NO: 201435 - RNA, 22 nt, Human
aggagcagaccguaguccugca

SEQ ID NO: 201436 - RNA, 22 nt, Human
aaguccagguccucauuccauc

SEQ ID NO: 201437 - RNA, 22 nt, Human
ggugggaguggaacguggaaga

SEQ ID NO: 201438 - RNA, 22 nt, Human
acaagaauuuacauguagugga

SEQ ID NO: 201439 - RNA, 22 nt, Human
ccagcccuuagauaaaccuggc

SEQ ID NO: 201440 - RNA, 22 nt, Human
uuuuauguuccucuuuaugcga

SEQ ID NO: 201441 - RNA, 22 nt, Human
cucaggagcuuccucagcccau

SEQ ID NO: 201442 - RNA, 22 nt, Human
auagaugucauugucauccauc

SEQ ID NO: 201443 - RNA, 22 nt, Human
gucaggauguuuauucuccagu

SEQ ID NO: 201444 - RNA, 22 nt, Human
ucaucacauaugucaugauuug

SEQ ID NO: 201445 - RNA, 19 nt, Human
acagugcaugggaccuggu

SEQ ID NO: 201446 - RNA, 22 nt, Human
gcagaggacacaggagggcaag

SEQ ID NO: 201447 - RNA, 19 nt, Human
ccuguucaugacucugucc

SEQ ID NO: 201448 - RNA, 22 nt, Human
agacagugauggacaggcagac

SEQ ID NO: 201449 - RNA, 22 nt, Human
gcauucuucacaguauuccucc

SEQ ID NO: 201450 - RNA, 22 nt, Human
aaggcugaccaguuuacacuuu

SEQ ID NO: 201451 - RNA, 22 nt, Human
uccaauaaccacaaucagauag

SEQ ID NO: 201452 - RNA, 22 nt, Human
ccuccugggccuugcucuguga

SEQ ID NO: 201453 - RNA, 22 nt, Human
caagggaaggcuaagggcaaca

SEQ ID NO: 201454 - RNA, 22 nt, Human
ccuugguccaacccugcacagc

SEQ ID NO: 201455 - RNA, 22 nt, Human
auuacaguucuacacauccuuu

SEQ ID NO: 201456 - RNA, 22 nt, Human
cagguaaggucacauucugaag

SEQ ID NO: 201457 - RNA, 21 nt, Human
caguguggugaccagggucuc

SEQ ID NO: 201458 - RNA, 22 nt, Human
cagcugaguggacccuagaggc

SEQ ID NO: 201459 - RNA, 22 nt, Human
aucaagaguauugacaagacca

SEQ ID NO: 201460 - RNA, 22 nt, Human
gagaaaccgauucugcauguca

SEQ ID NO: 201461 - RNA, 21 nt, Human
gggagggauggaaaugauguu

SEQ ID NO: 201462 - RNA, 22 nt, Human
cauuucaguguuauucuaauuu

SEQ ID NO: 201463 - RNA, 22 nt, Human
caauccaguuucugucagcuac

SEQ ID NO: 201464 - RNA, 22 nt, Human
aggcucaguucacgucaacuuu

SEQ ID NO: 201465 - RNA, 22 nt, Human
gcuggggccugaacagucagcu

SEQ ID NO: 201466 - RNA, 22 nt, Human
cugggucucuuaccaugugacu

SEQ ID NO: 201467 - RNA, 22 nt, Human
agcacugauuuaaacuggauuu

SEQ ID NO: 201468 - RNA, 22 nt, Human
uccuaggcccagccugagcugu

SEQ ID NO: 201469 - RNA, 22 nt, Human
uccaggccccagaccguacugc

SEQ ID NO: 201470 - RNA, 22 nt, Human
ucacuggguaggacaugcugau

SEQ ID NO: 201471 - RNA, 22 nt, Human
agaggccaggcagcccaaggug

SEQ ID NO: 201472 - RNA, 22 nt, Human
uacagcaauaaugacaccgcuc

SEQ ID NO: 201473 - RNA, 22 nt, Human
uggaaauagcuccaguuaagca

SEQ ID NO: 201474 - RNA, 22 nt, Human
ucaggaaggcaaauugcaugau

SEQ ID NO: 201475 - RNA, 22 nt, Human
uaucacaggugugauuuacauu

SEQ ID NO: 201476 - RNA, 22 nt, Human
aagcaaagaguuuaguggguga

SEQ ID NO: 201477 - RNA, 22 nt, Human
caugcuaaaccagaacauagga

SEQ ID NO: 201478 - RNA, 20 nt, Human
cccagggaccugagcuccau

SEQ ID NO: 201479 - RNA, 18 nt, Human
augcuucugauagaagca

SEQ ID NO: 201480 - RNA, 22 nt, Human
ucugagcuacgaugccugucac

SEQ ID NO: 201481 - RNA, 22 nt, Human
ggcucugaaggagacagcugcu

SEQ ID NO: 201482 - RNA, 22 nt, Human
agcucccaggcagucaugagga

SEQ ID NO: 201483 - RNA, 22 nt, Human
caggaaaugaaagcuagcuaau

SEQ ID NO: 201484 - RNA, 22 nt, Human
auggcccagaaguuuggaaagg

SEQ ID NO: 201485 - RNA, 22 nt, Human
acagcaggaagcuggagggaaa

SEQ ID NO: 201486 - RNA, 22 nt, Human
uaggcaaguugcccaaucucuc

SEQ ID NO: 201487 - RNA, 22 nt, Human
cucuucaguaaaugacacuguu

SEQ ID NO: 201488 - RNA, 22 nt, Human
caggcugcccuagcuuggacau

SEQ ID NO: 201489 - RNA, 22 nt, Human
uggaagaauauggggguacaga

SEQ ID NO: 201490 - RNA, 22 nt, Human
guccugggagaugggacccuga

SEQ ID NO: 201491 - RNA, 22 nt, Human
cugggcagaauuuuaggauggc

SEQ ID NO: 201492 - RNA, 20 nt, Human
ucagggcaugggacagcccc

SEQ ID NO: 201493 - RNA, 22 nt, Human
ugcuugggcggccagcauggcg

SEQ ID NO: 201494 - RNA, 22 nt, Human
gacuuagacccugucuuuauuc

SEQ ID NO: 201495 - RNA, 22 nt, Human
aggcacagcacaccuggccccc

SEQ ID NO: 201496 - RNA, 22 nt, Human
gcaggagagucugugccagguu

SEQ ID NO: 201497 - RNA, 22 nt, Human
acagaugaauuuuaauuguguu

SEQ ID NO: 201498 - RNA, 22 nt, Human
uaugagaaaggagaaugacuuu

SEQ ID NO: 201499 - RNA, 22 nt, Human
auaaucuggucuuuguaugagu

SEQ ID NO: 201500 - RNA, 22 nt, Human
aaggcaggagcuguaucuuauu

SEQ ID NO: 201501 - RNA, 22 nt, Human
ugagauuuuaauauugagaaaa

SEQ ID NO: 201502 - RNA, 22 nt, Human
gcagccagagggggugugauca

SEQ ID NO: 201503 - RNA, 22 nt, Human
gagcucuguucucguccugcug

SEQ ID NO: 201504 - RNA, 22 nt, Human
ggcuccuggaggcaccacuggu

SEQ ID NO: 201505 - RNA, 22 nt, Human
ggugugacucgcccucagggac

SEQ ID NO: 201506 - RNA, 22 nt, Human
ucacaauuuggauacagcuaug

SEQ ID NO: 201507 - RNA, 19 nt, Human
gcuggggccugaccagaca

SEQ ID NO: 201508 - RNA, 22 nt, Human
gcaggagaaaugaagauugggu

SEQ ID NO: 201509 - RNA, 22 nt, Human
gcagggaagacccggagcagcg

SEQ ID NO: 201510 - RNA, 22 nt, Human
ucucugggaaugggccugggua

SEQ ID NO: 201511 - RNA, 21 nt, Human
agagacugucacugcaguacc

SEQ ID NO: 201512 - RNA, 22 nt, Human
guguaugauuucaaauggcuag

SEQ ID NO: 201513 - RNA, 22 nt, Human
aaacagcuaaguacauucaagg

SEQ ID NO: 201514 - RNA, 22 nt, Human
gaauuugaaaagugaugggaau

SEQ ID NO: 201515 - RNA, 22 nt, Human
guuacagugcauguggcuucug

SEQ ID NO: 201516 - RNA, 22 nt, Human
uugguacaaaaguaacuguggu

SEQ ID NO: 201517 - RNA, 23 nt, Human
agagccugaaagacuucuggcac

SEQ ID NO: 201518 - RNA, 22 nt, Human
aggugaguccugggcacaggua

SEQ ID NO: 201519 - RNA, 22 nt, Human
auuucaguguuuuaagaguuca

SEQ ID NO: 201520 - RNA, 22 nt, Human
uccaggccugcaaugacaaagc

SEQ ID NO: 201521 - RNA, 22 nt, Human
ccugagaauguuuaacagagaa

SEQ ID NO: 201522 - RNA, 22 nt, Human
caggagcccagaguccucagcu

SEQ ID NO: 201523 - RNA, 22 nt, Human
uaguuuguagaaaucuagaaau

SEQ ID NO: 201524 - RNA, 20 nt, Human
auuuggcaugaaguauugau

SEQ ID NO: 201525 - RNA, 22 nt, Human
cuuuauguacuguguauuugaa

SEQ ID NO: 201526 - RNA, 22 nt, Human
caucuaccagaauugcuauaaa

SEQ ID NO: 201527 - RNA, 22 nt, Human
cuucauuaacuauuggaaugca

SEQ ID NO: 201528 - RNA, 22 nt, Human
auacaguauuaccuguucagga

SEQ ID NO: 201529 - RNA, 22 nt, Human
uggaggucgcgcgggugcugca

SEQ ID NO: 201530 - RNA, 23 nt, Human
agcacucaugcugcagaagucau

SEQ ID NO: 201531 - RNA, 18 nt, Human
uuugcaaaggaaguaugg

SEQ ID NO: 201532 - RNA, 22 nt, Human
guccugggcaugcagggcuuuc

SEQ ID NO: 201533 - RNA, 22 nt, Human
acugggccggugcagaguaguu

SEQ ID NO: 201534 - RNA, 22 nt, Human
agcaagauugaggcuuccucag

SEQ ID NO: 201535 - RNA, 22 nt, Human
acaggcaggagcuccccauucc

SEQ ID NO: 201536 - RNA, 22 nt, Human
uuucauaauagugcaguuuguu

SEQ ID NO: 201537 - RNA, 22 nt, Human
uaacacuggcuuuugcugaggc

SEQ ID NO: 201538 - RNA, 22 nt, Human
gauggccaaggaccacgcaucg

SEQ ID NO: 201539 - RNA, 22 nt, Human
ugcugcagggccuucccugcau

SEQ ID NO: 201540 - RNA, 22 nt, Human
ugcucagcugcucuguauucuu

SEQ ID NO: 201541 - RNA, 22 nt, Human
ccugaggcuccaccuccagaga

SEQ ID NO: 201542 - RNA, 19 nt, Human
uucuuuggugguggugacc

SEQ ID NO: 201543 - RNA, 22 nt, Human
ggugcaugguggaggugacccu

SEQ ID NO: 201544 - RNA, 22 nt, Human
ccagggaguuuccaaucugaga

SEQ ID NO: 201545 - RNA, 22 nt, Human
ucaggcccuuugcugcugcccc

SEQ ID NO: 201546 - RNA, 22 nt, Human
ucuuauuuagagaggacuagag

SEQ ID NO: 201547 - RNA, 19 nt, Human
gcucagagucccccugcgg

SEQ ID NO: 201548 - RNA, 22 nt, Human
cauggccucaaaggacugcaga

SEQ ID NO: 201549 - RNA, 22 nt, Human
agggggcucagcauggauggag

SEQ ID NO: 201550 - RNA, 22 nt, Human
accaaggaguuugguauuuuag

SEQ ID NO: 201551 - RNA, 22 nt, Human
caucucaggucugugguucacu

SEQ ID NO: 201552 - RNA, 22 nt, Human
uucuccagcacauuuucuuuga

SEQ ID NO: 201553 - RNA, 22 nt, Human
cucagcaggucuuggguagggg

SEQ ID NO: 201554 - RNA, 22 nt, Human
gaggaauguuauuaaaggagcu

SEQ ID NO: 201555 - RNA, 22 nt, Human
gcuucccagcagaggaaagacu

SEQ ID NO: 201556 - RNA, 22 nt, Human
augaguucauacuuucaguacc

SEQ ID NO: 201557 - RNA, 22 nt, Human
ggaaaaguguuaagguguugau

SEQ ID NO: 201558 - RNA, 22 nt, Human
auggcugccccaaauuguugcu

SEQ ID NO: 201559 - RNA, 22 nt, Human
aacaggcuaaguauuugguagc

SEQ ID NO: 201560 - RNA, 20 nt, Human
gagcuacacaaaugcugcuu

SEQ ID NO: 201561 - RNA, 17 nt, Human
cugcuggcuggggcuug

SEQ ID NO: 201562 - RNA, 22 nt, Human
ucaagaaagggcuucaccagga

SEQ ID NO: 201563 - RNA, 22 nt, Human
caaagacacgggaaacaacguu

SEQ ID NO: 201564 - RNA, 21 nt, Human
agucucucuaauaaaugcuug

SEQ ID NO: 201565 - RNA, 22 nt, Human
gggagccacucagcugagaguu

SEQ ID NO: 201566 - RNA, 22 nt, Human
gcaccagcugccuucugugccc

SEQ ID NO: 201567 - RNA, 22 nt, Human
gcccacaggggaccugguggcu

SEQ ID NO: 201568 - RNA, 18 nt, Human
aaagcuguuauuccagaa

SEQ ID NO: 201569 - RNA, 22 nt, Human
uaacaacugcugagguauuuga

SEQ ID NO: 201570 - RNA, 22 nt, Human
ugguacaagcagacucagcaga

SEQ ID NO: 201571 - RNA, 22 nt, Human
gcuuggccagcagccgggaugc

SEQ ID NO: 201572 - RNA, 22 nt, Human
ggacagagcagacgagcagcgg

SEQ ID NO: 201573 - RNA, 22 nt, Human
ccagguguuuggccugcaugau

SEQ ID NO: 201574 - RNA, 20 nt, Human
guuuuucucucuugccacua

SEQ ID NO: 201575 - RNA, 22 nt, Human
aucuuuuacauuacugcccaga

SEQ ID NO: 201576 - RNA, 23 nt, Human
cucagugugugacccauggccuc

SEQ ID NO: 201577 - RNA, 22 nt, Human
ugaggcuugauuugcccgagag

SEQ ID NO: 201578 - RNA, 22 nt, Human
gaagccaagggcugcuuuuccu

SEQ ID NO: 201579 - RNA, 20 nt, Human
aguggcaggcgaucauuacu

SEQ ID NO: 201580 - RNA, 22 nt, Human
auacagggacauccaguuuuuc

SEQ ID NO: 201581 - RNA, 22 nt, Human
ggcugcagcggauuggggauug

SEQ ID NO: 201582 - RNA, 22 nt, Human
ucugagauuuguauggugagac

SEQ ID NO: 201583 - RNA, 22 nt, Human
uggcccagcacuccaaguaggg

SEQ ID NO: 201584 - RNA, 22 nt, Human
caggugcugcguggcggagcug

SEQ ID NO: 201585 - RNA, 22 nt, Human
aagcaagcccaggcucagucaa

SEQ ID NO: 201586 - RNA, 22 nt, Human
agguccagugaaacuuuauuug

SEQ ID NO: 201587 - RNA, 17 nt, Human
uuacaacgucaucucug

SEQ ID NO: 201588 - RNA, 20 nt, Human
gcacaucugcuuuggauuuc

SEQ ID NO: 201589 - RNA, 22 nt, Human
agagacaccgcgcaucauggcu

SEQ ID NO: 201590 - RNA, 22 nt, Human
cuuagaaaucgaacucagguua

SEQ ID NO: 201591 - RNA, 22 nt, Human
cucccuggucuuucccaucauu

SEQ ID NO: 201592 - RNA, 20 nt, Human
uauuggaucuaagaaauggg

SEQ ID NO: 201593 - RNA, 22 nt, Human
ggcccagagcucccuggcaccu

SEQ ID NO: 201594 - RNA, 22 nt, Human
ucgccaucgucggacacaguga

SEQ ID NO: 201595 - RNA, 22 nt, Human
ugaaaauucaucucauagcaga

SEQ ID NO: 201596 - RNA, 22 nt, Human
ucugauaucgcacuaaacucug

SEQ ID NO: 201597 - RNA, 18 nt, Human
ggaaggaagaaugcauuu

SEQ ID NO: 201598 - RNA, 22 nt, Human
aggcccuauucaauggggccca

SEQ ID NO: 201599 - RNA, 22 nt, Human
cucagaagaacccaggguccca

SEQ ID NO: 201600 - RNA, 22 nt, Human
gagaugagugggggaucucuca

SEQ ID NO: 201601 - RNA, 22 nt, Human
cucaggcagugcccucuggccg

SEQ ID NO: 201602 - RNA, 22 nt, Human
ccucuuugacucucaggucuuu

SEQ ID NO: 201603 - RNA, 21 nt, Human
uucuucaaagaagaaggcaca

SEQ ID NO: 201604 - RNA, 22 nt, Human
agcaucucugggagucauccgu

SEQ ID NO: 201605 - RNA, 22 nt, Human
ugguccugucucaaggagccuu

SEQ ID NO: 201606 - RNA, 22 nt, Human
cacaauauuggccgggcugguc

SEQ ID NO: 201607 - RNA, 22 nt, Human
ucaggcacugcuuucugauaug

SEQ ID NO: 201608 - RNA, 22 nt, Human
gaaccauuguugaaaagaauag

SEQ ID NO: 201609 - RNA, 22 nt, Human
uauuauuuuagcacugaggauu

SEQ ID NO: 201610 - RNA, 22 nt, Human
ccucagaguaggucucagcugu

SEQ ID NO: 201611 - RNA, 22 nt, Human
auguucuuccaaaucuguaaca

SEQ ID NO: 201612 - RNA, 23 nt, Human
agugcugaauugaaagcuccagg

SEQ ID NO: 201613 - RNA, 23 nt, Human
uugcaaaaugagucuugagugaa

SEQ ID NO: 201614 - RNA, 22 nt, Human
ccagagguuacuuugccuugga

SEQ ID NO: 201615 - RNA, 22 nt, Human
cuggcccagguggucguugagg

SEQ ID NO: 201616 - RNA, 22 nt, Human
aagugccaucauagcauggcug

SEQ ID NO: 201617 - RNA, 22 nt, Human
cccugcagaucuaggguccuuc

SEQ ID NO: 201618 - RNA, 22 nt, Human
uuccuggguuuacguauugggu

SEQ ID NO: 201619 - RNA, 22 nt, Human
cacuggaauggauagagcagag

SEQ ID NO: 201620 - RNA, 22 nt, Human
agauauauuuccugcccaaggc

SEQ ID NO: 201621 - RNA, 19 nt, Human
ccacaaaauuauuuuaguu

SEQ ID NO: 201622 - RNA, 22 nt, Human
auaacagaauaagucauuaccg

SEQ ID NO: 201623 - RNA, 22 nt, Human
caguuuauagcucuagcagcuu

SEQ ID NO: 201624 - RNA, 22 nt, Human
acagcagagccuagcuuaaucu

SEQ ID NO: 201625 - RNA, 22 nt, Human
ugauaaacagcugaugaagacc

SEQ ID NO: 201626 - RNA, 22 nt, Human
aauagcuuaguccugauucugu

SEQ ID NO: 201627 - RNA, 22 nt, Human
gacuuuaucuuguccuuccugc

SEQ ID NO: 201628 - RNA, 22 nt, Human
agucugggcauuuaggauguug

SEQ ID NO: 201629 - RNA, 22 nt, Human
agaggcuuggaggugcaagguu

SEQ ID NO: 201630 - RNA, 22 nt, Human
acaugagaagcugcaacaugac

SEQ ID NO: 201631 - RNA, 22 nt, Human
aacaggcuauuucuuuacaaac

SEQ ID NO: 201632 - RNA, 22 nt, Human
ccuggguccuggcagccuccug

SEQ ID NO: 201633 - RNA, 22 nt, Human
augaaacaguguguauagcaaa

SEQ ID NO: 201634 - RNA, 22 nt, Human
aagcaaagugaauuuugccaag

SEQ ID NO: 201635 - RNA, 22 nt, Human
uuuacagaauguugaauuuggg

SEQ ID NO: 201636 - RNA, 22 nt, Human
gagcagagaauccagcuaagug

SEQ ID NO: 201637 - RNA, 22 nt, Human
cccagacucaucccugggagcu

SEQ ID NO: 201638 - RNA, 22 nt, Human
gggaccagugucugugagaaaa

SEQ ID NO: 201639 - RNA, 22 nt, Human
ugugcccagacugccucaguga

SEQ ID NO: 201640 - RNA, 22 nt, Human
ugcuggccugggcugcaccuug

SEQ ID NO: 201641 - RNA, 22 nt, Human
ucugagaacaugcuuugaucau

SEQ ID NO: 201642 - RNA, 20 nt, Human
aguguuugcucacagucucc

SEQ ID NO: 201643 - RNA, 22 nt, Human
agccuugacacuggggaaacug

SEQ ID NO: 201644 - RNA, 22 nt, Human
ggcugagacaaccugggaccca

SEQ ID NO: 201645 - RNA, 22 nt, Human
cuuggaggaaaggcagggagac

SEQ ID NO: 201646 - RNA, 22 nt, Human
acaguggaugacauccuuuugc

SEQ ID NO: 201647 - RNA, 22 nt, Human
agcggcugcucuuuucagaucc

SEQ ID NO: 201648 - RNA, 22 nt, Human
uuccaggauggcaauaaugaau

SEQ ID NO: 201649 - RNA, 22 nt, Human
ccugugacucugucugaugguc

SEQ ID NO: 201650 - RNA, 22 nt, Human
uacaagaugacaggugcaugau

SEQ ID NO: 201651 - RNA, 22 nt, Human
aaagcugcuuugguuucuggaa

SEQ ID NO: 201652 - RNA, 22 nt, Human
uuucaucuuccuuggcauaggu

SEQ ID NO: 201653 - RNA, 22 nt, Human
acugugcauuugaagggaucau

SEQ ID NO: 201654 - RNA, 22 nt, Human
agggcacaggcuggcaggaucu

SEQ ID NO: 201655 - RNA, 22 nt, Human
acucuguacgcaagagauggag

SEQ ID NO: 201656 - RNA, 22 nt, Human
uucacaaucuggcuuagcauug

SEQ ID NO: 201657 - RNA, 22 nt, Human
acagauggagcuacuagguaaa

SEQ ID NO: 201658 - RNA, 22 nt, Human
acuggcaggcugcuggccggcg

SEQ ID NO: 201659 - RNA, 15 nt, Human
uucaggauaugacuc

SEQ ID NO: 201660 - RNA, 22 nt, Human
gcugcagagugaugaagugggg

SEQ ID NO: 201661 - RNA, 22 nt, Human
uccugagagucaagaaugcagg

SEQ ID NO: 201662 - RNA, 22 nt, Human
uccuuagagauacugucuugaa

SEQ ID NO: 201663 - RNA, 22 nt, Human
uuacacagaaauuuuauugccu

SEQ ID NO: 201664 - RNA, 22 nt, Human
uggcagagugcagaagaggcau

SEQ ID NO: 201665 - RNA, 22 nt, Human
uuggaaguaaugaagagguggg

SEQ ID NO: 201666 - RNA, 22 nt, Human
uagggcucagagaaguggggcc

SEQ ID NO: 201667 - RNA, 22 nt, Human
uggccuuggagaggcacggccc

SEQ ID NO: 201668 - RNA, 20 nt, Human
aggcucaggguguuuaggaa

SEQ ID NO: 201669 - RNA, 22 nt, Human
cacggucacccaucagagucca

SEQ ID NO: 201670 - RNA, 22 nt, Human
ucuaggguccacagggucagcc

SEQ ID NO: 201671 - RNA, 22 nt, Human
uguucuucuagauugccuuuua

SEQ ID NO: 201672 - RNA, 22 nt, Human
uuaauacagucuccagaaguaa

SEQ ID NO: 201673 - RNA, 17 nt, Human
agggacagcaguuuagg

SEQ ID NO: 201674 - RNA, 22 nt, Human
ggcuucucugucuaguuucuac

SEQ ID NO: 201675 - RNA, 23 nt, Human
caugaagguagcacaaagccucu

SEQ ID NO: 201676 - RNA, 22 nt, Human
ugaaaugaaacagaacauauca

SEQ ID NO: 201677 - RNA, 22 nt, Human
acucuggguccugccauucacu

SEQ ID NO: 201678 - RNA, 22 nt, Human
uguacaaagccagaacucccaa

SEQ ID NO: 201679 - RNA, 22 nt, Human
aaaaguauuuauggcuauguaa

SEQ ID NO: 201680 - RNA, 22 nt, Human
aacucaguguguuucuuaguau

SEQ ID NO: 201681 - RNA, 22 nt, Human
gcugccacucugagcuugcuuc

SEQ ID NO: 201682 - RNA, 22 nt, Human
uauauugucucugccuugucug

SEQ ID NO: 201683 - RNA, 22 nt, Human
ucagagccccuccgcuguccca

SEQ ID NO: 201684 - RNA, 21 nt, Human
agagagggagaugaaacaucc

SEQ ID NO: 201685 - RNA, 22 nt, Human
ggccugugggaggacagcuggg

SEQ ID NO: 201686 - RNA, 20 nt, Human
agguccugggacuggcagag

SEQ ID NO: 201687 - RNA, 22 nt, Human
ucauuucccuccuacaaagagg

SEQ ID NO: 201688 - RNA, 22 nt, Human
ccuugcccugagcaggggucag

SEQ ID NO: 201689 - RNA, 22 nt, Human
uaaguguugguaauuacaauga

SEQ ID NO: 201690 - RNA, 22 nt, Human
caccagcccccucacgcuguca

SEQ ID NO: 201691 - RNA, 22 nt, Human
uccaggcccauggagcagagcu

SEQ ID NO: 201692 - RNA, 17 nt, Human
gcccucagcuuuaacca

SEQ ID NO: 201693 - RNA, 22 nt, Human
uagguucauauucuagaaucau

SEQ ID NO: 201694 - RNA, 22 nt, Human
aaagacauugaagaaggacuua

SEQ ID NO: 201695 - RNA, 22 nt, Human
gugcuggcuggacauggagcac

SEQ ID NO: 201696 - RNA, 21 nt, Human
uggagcugccacuuguccucc

SEQ ID NO: 201697 - RNA, 22 nt, Human
agcuccagaaagguacacacag

SEQ ID NO: 201698 - RNA, 22 nt, Human
guaggcagugguuggaagagaa

SEQ ID NO: 201699 - RNA, 22 nt, Human
ugagcugguucuugaggcauga

SEQ ID NO: 201700 - RNA, 22 nt, Human
acuguagagaaucugagaaaaa

SEQ ID NO: 201701 - RNA, 21 nt, Human
ucuuuuaacaccaggaauucc

SEQ ID NO: 201702 - RNA, 22 nt, Human
uuugaaugcaggacauacagaa

SEQ ID NO: 201703 - RNA, 22 nt, Human
cauuuguuaaccaguguggauu

SEQ ID NO: 201704 - RNA, 22 nt, Human
agaauucuuggugguuagaaua

SEQ ID NO: 201705 - RNA, 22 nt, Human
acugugcaagucaaagaugggc

SEQ ID NO: 201706 - RNA, 22 nt, Human
uugaacauuaacuucagucuau

SEQ ID NO: 201707 - RNA, 22 nt, Human
uggcagugccccuugaccagug

SEQ ID NO: 201708 - RNA, 22 nt, Human
ucauuucagaugcauuuagaau

SEQ ID NO: 201709 - RNA, 22 nt, Human
ucuagaaacagguuucuagaaa

SEQ ID NO: 201710 - RNA, 22 nt, Human
auaaaaaggacagauguggucu

SEQ ID NO: 201711 - RNA, 22 nt, Human
gcuuucugcucuguaaaauggg

SEQ ID NO: 201712 - RNA, 22 nt, Human
auggaucuaccuucaggcucug

SEQ ID NO: 201713 - RNA, 22 nt, Human
aaagccauuacaaaauuucaua

SEQ ID NO: 201714 - RNA, 20 nt, Human
gucugaggagcagugggaaa

SEQ ID NO: 201715 - RNA, 22 nt, Human
aauuucaguugcuaauaaguuc

SEQ ID NO: 201716 - RNA, 22 nt, Human
agagucugaggaggaccaacag

SEQ ID NO: 201717 - RNA, 22 nt, Human
agcccugccauucucuggagcu

SEQ ID NO: 201718 - RNA, 22 nt, Human
ggugccagugggucucaggaua

SEQ ID NO: 201719 - RNA, 22 nt, Human
aguggcaguagaugagcugguu

SEQ ID NO: 201720 - RNA, 22 nt, Human
acccagggccacagcccgcagu

SEQ ID NO: 201721 - RNA, 22 nt, Human
ccugugccagccccuucugcug

SEQ ID NO: 201722 - RNA, 22 nt, Human
gggagggaaagcuugaucuguc

SEQ ID NO: 201723 - RNA, 22 nt, Human
acuguccucgaaguaccugugc

SEQ ID NO: 201724 - RNA, 22 nt, Human
caggccagcuuccugacauccu

SEQ ID NO: 201725 - RNA, 22 nt, Human
guccuuccccagccagcucugg

SEQ ID NO: 201726 - RNA, 22 nt, Human
ccaggcugcuuuauuacucugu

SEQ ID NO: 201727 - RNA, 22 nt, Human
aaacaccagucccaguauacac

SEQ ID NO: 201728 - RNA, 22 nt, Human
gcagcaucagguucacugcgug

SEQ ID NO: 201729 - RNA, 20 nt, Human
uccugugugucucaucaacc

SEQ ID NO: 201730 - RNA, 22 nt, Human
gacuuucuaaugcucuguagau

SEQ ID NO: 201731 - RNA, 22 nt, Human
uaacuggugaguugguugagug

SEQ ID NO: 201732 - RNA, 21 nt, Human
cauuucaugauuauagaaaug

SEQ ID NO: 201733 - RNA, 22 nt, Human
gguguuaacuuguuuaugacaa

SEQ ID NO: 201734 - RNA, 22 nt, Human
ugaguuuugucuugcuagaagu

SEQ ID NO: 201735 - RNA, 22 nt, Human
caucacauguaggcagcaucac

SEQ ID NO: 201736 - RNA, 22 nt, Human
acugggauuacaggugggaguc

SEQ ID NO: 201737 - RNA, 22 nt, Human
ggcuccaggugcaugccaggcu

SEQ ID NO: 201738 - RNA, 22 nt, Human
accaggcacucuuguggcagug

SEQ ID NO: 201739 - RNA, 22 nt, Human
cuuuacagauaggaacuacuca

SEQ ID NO: 201740 - RNA, 22 nt, Human
aacaguaaagacagaauuuauc

SEQ ID NO: 201741 - RNA, 22 nt, Human
ccagugugguagguccacaggu

SEQ ID NO: 201742 - RNA, 22 nt, Human
uguccugucucuuuccuaauug

SEQ ID NO: 201743 - RNA, 22 nt, Human
aagaagcagagcuguggguguu

SEQ ID NO: 201744 - RNA, 22 nt, Human
uccagugccucacugaggauuc

SEQ ID NO: 201745 - RNA, 21 nt, Human
uauugauucaauuucuugagu

SEQ ID NO: 201746 - RNA, 22 nt, Human
aggucaaaaucaggcagggaag

SEQ ID NO: 201747 - RNA, 22 nt, Human
ugcaaauccuguuuggaguaag

SEQ ID NO: 201748 - RNA, 22 nt, Human
ucuagggaacaugggucaagcu

SEQ ID NO: 201749 - RNA, 22 nt, Human
uucccugguuaaccauuuucug

SEQ ID NO: 201750 - RNA, 22 nt, Human
uguucugagugcagcuuaauaa

SEQ ID NO: 201751 - RNA, 22 nt, Human
ccacaguacaggaaaucuuguu

SEQ ID NO: 201752 - RNA, 19 nt, Human
guguuuacugugugcagaa

SEQ ID NO: 201753 - RNA, 23 nt, Human
uugcaaauuucaguuaguucaug

SEQ ID NO: 201754 - RNA, 22 nt, Human
ugaguaauaaacugucuugcuc

SEQ ID NO: 201755 - RNA, 22 nt, Human
ugcugggucaggcaucugcaga

SEQ ID NO: 201756 - RNA, 22 nt, Human
ucccagaggucucugcugguuc

SEQ ID NO: 201757 - RNA, 19 nt, Human
ugcacacagauaaguaucu

SEQ ID NO: 201758 - RNA, 22 nt, Human
guguacaguuagccaccaaauu

SEQ ID NO: 201759 - RNA, 22 nt, Human
ucuauuuguucucaggaucauc

SEQ ID NO: 201760 - RNA, 22 nt, Human
caugcaggaggaaaaagcagcu

SEQ ID NO: 201761 - RNA, 22 nt, Human
acaucuuuauacuaguccuuga

SEQ ID NO: 201762 - RNA, 21 nt, Human
uuuaucaucacgagcuugagc

SEQ ID NO: 201763 - RNA, 22 nt, Human
aagcugucaggagguuaccuuu

SEQ ID NO: 201764 - RNA, 20 nt, Human
cacccucccagcaccuaugc

SEQ ID NO: 201765 - RNA, 21 nt, Human
aauuacagauggaauuacaga

SEQ ID NO: 201766 - RNA, 22 nt, Human
gcagcagaguuugggagauggu

SEQ ID NO: 201767 - RNA, 19 nt, Human
uugaaagauuagcuuucua

SEQ ID NO: 201768 - RNA, 22 nt, Human
aauuccuaguuguacuuaguga

SEQ ID NO: 201769 - RNA, 22 nt, Human
guuuaagaaaauucauguuguu

SEQ ID NO: 201770 - RNA, 22 nt, Human
accagaaaggaauaauagaauu

SEQ ID NO: 201771 - RNA, 20 nt, Human
uccugggguaagccaugguc

SEQ ID NO: 201772 - RNA, 22 nt, Human
ucucugggccucaguuuucuca

SEQ ID NO: 201773 - RNA, 22 nt, Human
aggacacagugguggggaaaag

SEQ ID NO: 201774 - RNA, 23 nt, Human
ugaauguuuauucucggugcaga

SEQ ID NO: 201775 - RNA, 22 nt, Human
guucuggguucaaaccccggcc

SEQ ID NO: 201776 - RNA, 22 nt, Human
cugccagcucaccggcucagac

SEQ ID NO: 201777 - RNA, 20 nt, Human
guaaugaauguaaacaguaa

SEQ ID NO: 201778 - RNA, 22 nt, Human
ggugagacuuuagaagagccag

SEQ ID NO: 201779 - RNA, 22 nt, Human
cugagucuccuggggaggugaa

SEQ ID NO: 201780 - RNA, 19 nt, Human
ugccuggacaaaugugggg

SEQ ID NO: 201781 - RNA, 21 nt, Human
acauaggcgaauguucgggag

SEQ ID NO: 201782 - RNA, 22 nt, Human
uuccccaggcuggagugcagug

SEQ ID NO: 201783 - RNA, 22 nt, Human
gcucaggacuggaggagcgggg

SEQ ID NO: 201784 - RNA, 22 nt, Human
ucagaaaugaucguuauucauu

SEQ ID NO: 201785 - RNA, 22 nt, Human
cuucucuggcauagcaagcagg

SEQ ID NO: 201786 - RNA, 22 nt, Human
acacauuugcuaaaaugagcuc

SEQ ID NO: 201787 - RNA, 22 nt, Human
cagauagaaugcaagaccucuc

SEQ ID NO: 201788 - RNA, 22 nt, Human
caccuagcauuccucuuccuca

SEQ ID NO: 201789 - RNA, 22 nt, Human
aggcugagacugugcauuagug

SEQ ID NO: 201790 - RNA, 17 nt, Human
uuccuccucaccauguu

SEQ ID NO: 201791 - RNA, 22 nt, Human
ugcagggcaguggagguugagu

SEQ ID NO: 201792 - RNA, 22 nt, Human
agcuccuggucuuuguccagag

SEQ ID NO: 201793 - RNA, 22 nt, Human
uuggaaggcugaauggccucuc

SEQ ID NO: 201794 - RNA, 22 nt, Human
cuuucuuucgaagacgugauua

SEQ ID NO: 201795 - RNA, 21 nt, Human
uccaaaucccauucuguaguc

SEQ ID NO: 201796 - RNA, 22 nt, Human
auuaggucauggggaggcccua

SEQ ID NO: 201797 - RNA, 22 nt, Human
gagcagugacuggagcaugaga

SEQ ID NO: 201798 - RNA, 22 nt, Human
gaauuuccucuaaaccccugag

SEQ ID NO: 201799 - RNA, 22 nt, Human
acccagccacagcauugaggga

SEQ ID NO: 201800 - RNA, 22 nt, Human
gauuagaagaacuuguuagccu

SEQ ID NO: 201801 - RNA, 22 nt, Human
acaggcugaaaguuaaguucug

SEQ ID NO: 201802 - RNA, 22 nt, Human
ccuccagguguuacauaugacu

SEQ ID NO: 201803 - RNA, 22 nt, Human
uggcccugaggggcugugcccc

SEQ ID NO: 201804 - RNA, 22 nt, Human
uggggauguagaaaugaacaac

SEQ ID NO: 201805 - RNA, 22 nt, Human
gcugggcuuguggccagcuggg

SEQ ID NO: 201806 - RNA, 22 nt, Human
auggucuugauuuuccauaggu

SEQ ID NO: 201807 - RNA, 22 nt, Human
aggcagugugggccaagcuucc

SEQ ID NO: 201808 - RNA, 22 nt, Human
uugauuacuauguguugaaagc

SEQ ID NO: 201809 - RNA, 22 nt, Human
auguuacaacccugaggagccg

SEQ ID NO: 201810 - RNA, 22 nt, Human
aaacuugacagugagacaguuu

SEQ ID NO: 201811 - RNA, 22 nt, Human
cagcugcucuucuggccuguca

SEQ ID NO: 201812 - RNA, 22 nt, Human
uuccaugaaauguguuaugcuu

SEQ ID NO: 201813 - RNA, 22 nt, Human
aacugcaacuucguaaagugag

SEQ ID NO: 201814 - RNA, 22 nt, Human
cagcugaagguaggaaccagga

SEQ ID NO: 201815 - RNA, 22 nt, Human
acaagguuguucugaggauuua

SEQ ID NO: 201816 - RNA, 22 nt, Human
uuccuucuucauuguguuacag

SEQ ID NO: 201817 - RNA, 22 nt, Human
agguggccggugccagccgggc

SEQ ID NO: 201818 - RNA, 22 nt, Human
ugagacuuccugaugaggcccg

SEQ ID NO: 201819 - RNA, 22 nt, Human
aacaugaaaacuaccugugauu

SEQ ID NO: 201820 - RNA, 22 nt, Human
acugucaucuuguaagcaaugu

SEQ ID NO: 201821 - RNA, 22 nt, Human
gcagaagucagaccaucugaau

SEQ ID NO: 201822 - RNA, 22 nt, Human
agagagcagucuggaagaaaca

SEQ ID NO: 201823 - RNA, 22 nt, Human
auuuucaucauggguuuaacau

SEQ ID NO: 201824 - RNA, 22 nt, Human
gggcucuguguucuagcucucg

SEQ ID NO: 201825 - RNA, 22 nt, Human
agccagugggauuagagccucu

SEQ ID NO: 201826 - RNA, 22 nt, Human
uacagaauguuaugaagcauag

SEQ ID NO: 201827 - RNA, 22 nt, Human
caggaaaaggagacuuuagcac

SEQ ID NO: 201828 - RNA, 22 nt, Human
aaggccacagagccucagagag

SEQ ID NO: 201829 - RNA, 22 nt, Human
gcuccucuauuccccacauuuu

SEQ ID NO: 201830 - RNA, 22 nt, Human
aggaaaagugugaaguauggag

SEQ ID NO: 201831 - RNA, 22 nt, Human
aaguaguuaguccgccugcucu

SEQ ID NO: 201832 - RNA, 22 nt, Human
ugggcucucuuuaccucauaac

SEQ ID NO: 201833 - RNA, 17 nt, Human
cugaagaguccuggcua

SEQ ID NO: 201834 - RNA, 22 nt, Human
uggcaguuggggaugaagugag

SEQ ID NO: 201835 - RNA, 22 nt, Human
agaaagccucaaucuucaggcc

SEQ ID NO: 201836 - RNA, 22 nt, Human
gauugcuguucccagggggcug

SEQ ID NO: 201837 - RNA, 22 nt, Human
aguucccaggugaugcugaugu

SEQ ID NO: 201838 - RNA, 22 nt, Human
cagcuucuccggccuggugcgg

SEQ ID NO: 201839 - RNA, 22 nt, Human
ccauacacacaccaaauuugua

SEQ ID NO: 201840 - RNA, 22 nt, Human
augagcagguuuaagagaggcc

SEQ ID NO: 201841 - RNA, 20 nt, Human
agguccugguucucugggau

SEQ ID NO: 201842 - RNA, 22 nt, Human
accuucaagaaacauuuccuug

SEQ ID NO: 201843 - RNA, 22 nt, Human
ucuagagauuggacuuccuaga

SEQ ID NO: 201844 - RNA, 22 nt, Human
ugaaaaugcacgcuggaaagca

SEQ ID NO: 201845 - RNA, 22 nt, Human
ugcacuuugcaggcauggaaac

SEQ ID NO: 201846 - RNA, 22 nt, Human
uguggccuccuguuccugggua

SEQ ID NO: 201847 - RNA, 22 nt, Human
ccaggagagcagaagcccaggc

SEQ ID NO: 201848 - RNA, 22 nt, Human
uuucauguuacauuuaaaaugu

SEQ ID NO: 201849 - RNA, 18 nt, Human
augcaagcuauggauuug

SEQ ID NO: 201850 - RNA, 22 nt, Human
ugaggcaaucccuaggguaagg

SEQ ID NO: 201851 - RNA, 22 nt, Human
caagagcuagacuuugucagga

SEQ ID NO: 201852 - RNA, 22 nt, Human
acucuucauucaaguaugcaaa

SEQ ID NO: 201853 - RNA, 22 nt, Human
agacaugcaauaaugugcacuc

SEQ ID NO: 201854 - RNA, 22 nt, Human
agauaaaaugguucaaaggcua

SEQ ID NO: 201855 - RNA, 22 nt, Human
uauuuguugcgggaauugcuau

SEQ ID NO: 201856 - RNA, 22 nt, Human
ccacauggagcaggaggugggg

SEQ ID NO: 201857 - RNA, 22 nt, Human
acaugccaauuugguuaguuca

SEQ ID NO: 201858 - RNA, 22 nt, Human
acacaucuccagaagugggcug

SEQ ID NO: 201859 - RNA, 22 nt, Human
agcagggcccacuaggggagau

SEQ ID NO: 201860 - RNA, 22 nt, Human
auuuccuugcaaguuucuguaa

SEQ ID NO: 201861 - RNA, 22 nt, Human
cauguaaagcacuucauaacag

SEQ ID NO: 201862 - RNA, 22 nt, Human
caucauuucacuuagaugaagu

SEQ ID NO: 201863 - RNA, 22 nt, Human
ucuaacuugugaguauagauga

SEQ ID NO: 201864 - RNA, 22 nt, Human
cugggaggcccacguugggaag

SEQ ID NO: 201865 - RNA, 18 nt, Human
ucugggcuucccgaggcu

SEQ ID NO: 201866 - RNA, 23 nt, Human
ccuggcagcaaacgaggagguua

SEQ ID NO: 201867 - RNA, 22 nt, Human
aggguccuucuguuccugagca

SEQ ID NO: 201868 - RNA, 22 nt, Human
agucagcagugaaagcacagcc

SEQ ID NO: 201869 - RNA, 22 nt, Human
cucugagcagaggccguggcua

SEQ ID NO: 201870 - RNA, 22 nt, Human
aaggggccucacagaugggcuu

SEQ ID NO: 201871 - RNA, 22 nt, Human
agagggaagaugguccaaucuu

SEQ ID NO: 201872 - RNA, 22 nt, Human
gagccagccuucuucugagguc

SEQ ID NO: 201873 - RNA, 22 nt, Human
uaaauuacccuuuagggaauug

SEQ ID NO: 201874 - RNA, 22 nt, Human
ugggugcucugcgaccguaggg

SEQ ID NO: 201875 - RNA, 20 nt, Human
uauacuaacauauaucuguu

SEQ ID NO: 201876 - RNA, 22 nt, Human
cccaggcaucccauuaaggagc

SEQ ID NO: 201877 - RNA, 22 nt, Human
aguguuugggggccuuguaaca

SEQ ID NO: 201878 - RNA, 22 nt, Human
uccuggcuccagcagcucuucc

SEQ ID NO: 201879 - RNA, 22 nt, Human
acagaauagagacugccugcuc

SEQ ID NO: 201880 - RNA, 17 nt, Human
agccaggcauaugaagu

SEQ ID NO: 201881 - RNA, 23 nt, Human
ugcuuauucaaaaggugcuuuca

SEQ ID NO: 201882 - RNA, 22 nt, Human
cauguguguggcugacaauuuu

SEQ ID NO: 201883 - RNA, 22 nt, Human
aucugcugucacauguuugaag

SEQ ID NO: 201884 - RNA, 22 nt, Human
acagugugaugggccugccuga

SEQ ID NO: 201885 - RNA, 22 nt, Human
ucaggaguaaagaagacuugac

SEQ ID NO: 201886 - RNA, 22 nt, Human
ucccuggggaagggcaagcaag

SEQ ID NO: 201887 - RNA, 22 nt, Human
uggucaaggcuuggagauagua

SEQ ID NO: 201888 - RNA, 22 nt, Human
cccuccccagggucauauugaa

SEQ ID NO: 201889 - RNA, 22 nt, Human
aaaggcuuaacagaagaccuuu

SEQ ID NO: 201890 - RNA, 22 nt, Human
agucugggagggaugccagugu

SEQ ID NO: 201891 - RNA, 22 nt, Human
uguuucugucuguuuucuacau

SEQ ID NO: 201892 - RNA, 21 nt, Human
gggcaggucucugaugucaac

SEQ ID NO: 201893 - RNA, 22 nt, Human
aggcuccacggcaggaugcugu

SEQ ID NO: 201894 - RNA, 22 nt, Human
aggccagcaccagagucaagaa

SEQ ID NO: 201895 - RNA, 22 nt, Human
ccuguucuguuaauuaaacuuu

SEQ ID NO: 201896 - RNA, 22 nt, Human
ucucaucuauucacauuaacug

SEQ ID NO: 201897 - RNA, 22 nt, Human
cugcugagagccccagcugaga

SEQ ID NO: 201898 - RNA, 17 nt, Human
ucuguucaagugagagg

SEQ ID NO: 201899 - RNA, 22 nt, Human
ugcacuucaaaaaugucacuga

SEQ ID NO: 201900 - RNA, 22 nt, Human
gcuguauuuauuuucuaggguu

SEQ ID NO: 201901 - RNA, 22 nt, Human
agcuggggguuggauaagggua

SEQ ID NO: 201902 - RNA, 22 nt, Human
cagugaaguuuaaaguguagau

SEQ ID NO: 201903 - RNA, 22 nt, Human
cagagcuggguuugggaaaccu

SEQ ID NO: 201904 - RNA, 22 nt, Human
ggccagggccaaggcuuuccca

SEQ ID NO: 201905 - RNA, 22 nt, Human
cuccucaaggucucaggaauaa

SEQ ID NO: 201906 - RNA, 22 nt, Human
uacagaccaguaguucucagcg

SEQ ID NO: 201907 - RNA, 22 nt, Human
ucucugggaucguuuugggcuc

SEQ ID NO: 201908 - RNA, 22 nt, Human
cagcaggucccacugagggccc

SEQ ID NO: 201909 - RNA, 22 nt, Human
uacaaagauaaaaucucaccau

SEQ ID NO: 201910 - RNA, 22 nt, Human
cugcccugagggccuguguguu

SEQ ID NO: 201911 - RNA, 22 nt, Human
cuggcacagagugagcauucaa

SEQ ID NO: 201912 - RNA, 19 nt, Human
cugggccugcaugguuguu

SEQ ID NO: 201913 - RNA, 22 nt, Human
agguggcagagugacaggcuga

SEQ ID NO: 201914 - RNA, 22 nt, Human
cagccagagaggaaggaaugca

SEQ ID NO: 201915 - RNA, 22 nt, Human
gguguccuuguugaacgaaaau

SEQ ID NO: 201916 - RNA, 22 nt, Human
caucuagaaaaaagaccuguug

SEQ ID NO: 201917 - RNA, 23 nt, Human
aaauccugccucuuguauuuauc

SEQ ID NO: 201918 - RNA, 22 nt, Human
aggaccaccgguccauccaccc

SEQ ID NO: 201919 - RNA, 22 nt, Human
guucagcagcagugauuuugug

SEQ ID NO: 201920 - RNA, 22 nt, Human
uugugcauuagggaaaggaacu

SEQ ID NO: 201921 - RNA, 22 nt, Human
ucauucggcaauaguguguuag

SEQ ID NO: 201922 - RNA, 22 nt, Human
uuuuaauacugcuauuguagga

SEQ ID NO: 201923 - RNA, 22 nt, Human
ugaccccacugugcucagaggu

SEQ ID NO: 201924 - RNA, 22 nt, Human
acauugaagcugugaaaucaaa

SEQ ID NO: 201925 - RNA, 22 nt, Human
aggcacagauuuggggaaagca

SEQ ID NO: 201926 - RNA, 22 nt, Human
uucaguaucccugcuuggacag

SEQ ID NO: 201927 - RNA, 22 nt, Human
acagauacaaauauacaaauac

SEQ ID NO: 201928 - RNA, 20 nt, Human
uagggaugccaguacuucuc

SEQ ID NO: 201929 - RNA, 22 nt, Human
agaggcagaaguguucaaaccc

SEQ ID NO: 201930 - RNA, 18 nt, Human
uggcagguccagcugugg

SEQ ID NO: 201931 - RNA, 22 nt, Human
augauuucuauauaaacuuaaa

SEQ ID NO: 201932 - RNA, 22 nt, Human
ggugacaucuagagacauccaa

SEQ ID NO: 201933 - RNA, 22 nt, Human
gcagccuguuguaccagccugu

SEQ ID NO: 201934 - RNA, 22 nt, Human
gaguccaguguuuaccaggggu

SEQ ID NO: 201935 - RNA, 22 nt, Human
ggagaagggcaugguaguuuua

SEQ ID NO: 201936 - RNA, 22 nt, Human
ccugggcaucucaugcaccugc

SEQ ID NO: 201937 - RNA, 22 nt, Human
cuucucccuggcuucugcacac

SEQ ID NO: 201938 - RNA, 23 nt, Human
uccaggcugggacuucaacuggc

SEQ ID NO: 201939 - RNA, 21 nt, Human
aggcccaggaauaugcauuuu

SEQ ID NO: 201940 - RNA, 22 nt, Human
caggaaggcgcggcugugccug

SEQ ID NO: 201941 - RNA, 22 nt, Human
uacugagggcaaagagugaagc

SEQ ID NO: 201942 - RNA, 22 nt, Human
aaguuuuugauucuaagagaga

SEQ ID NO: 201943 - RNA, 22 nt, Human
cacuuuggaugccacuggucua

SEQ ID NO: 201944 - RNA, 22 nt, Human
cagcagagacgguaagcagaac

SEQ ID NO: 201945 - RNA, 22 nt, Human
cuuaagauugucagcuucagcc

SEQ ID NO: 201946 - RNA, 22 nt, Human
gcuuccaggucauucucacccu

SEQ ID NO: 201947 - RNA, 22 nt, Human
uacagaaaaacuggcauugaag

SEQ ID NO: 201948 - RNA, 22 nt, Human
ucagaauauauucauguuguca

SEQ ID NO: 201949 - RNA, 22 nt, Human
acugggcuuaugcuguggagua

SEQ ID NO: 201950 - RNA, 21 nt, Human
agcaugucucagucaacaagg

SEQ ID NO: 201951 - RNA, 22 nt, Human
uuggcugaugcaagagcuuccu

SEQ ID NO: 201952 - RNA, 22 nt, Human
gcaauuauaucaccagagaucu

SEQ ID NO: 201953 - RNA, 22 nt, Human
uacuuuuugucucuuugaaugu

SEQ ID NO: 201954 - RNA, 22 nt, Human
ugagcaggacucacugcagccu

SEQ ID NO: 201955 - RNA, 22 nt, Human
acaugaagcaagaaagaugcua

SEQ ID NO: 201956 - RNA, 22 nt, Human
cacaugaauaaggcuuuauugu

SEQ ID NO: 201957 - RNA, 22 nt, Human
ucccaggaagaucccagggacc

SEQ ID NO: 201958 - RNA, 22 nt, Human
uuuucagaggccuaagagguuu

SEQ ID NO: 201959 - RNA, 22 nt, Human
ucuuuagagcucagaaauacag

SEQ ID NO: 201960 - RNA, 22 nt, Human
guuugcaaauuguguuaaagcu

SEQ ID NO: 201961 - RNA, 22 nt, Human
ggcuggcacugaggagagcucu

SEQ ID NO: 201962 - RNA, 22 nt, Human
cuggaaggucuguccccacugc

SEQ ID NO: 201963 - RNA, 20 nt, Human
agaaucugacccagagagac

SEQ ID NO: 201964 - RNA, 22 nt, Human
cccaaguuaaaauucagugcuc

SEQ ID NO: 201965 - RNA, 22 nt, Human
uuaaucugaaucaguaaacacu

SEQ ID NO: 201966 - RNA, 20 nt, Human
uaacagaaguagaagugggu

SEQ ID NO: 201967 - RNA, 21 nt, Human
agcugccacccuagcuucuga

SEQ ID NO: 201968 - RNA, 22 nt, Human
uuugaacaggaguaucuauagu

SEQ ID NO: 201969 - RNA, 22 nt, Human
auguuauuaaaguacagauucu

SEQ ID NO: 201970 - RNA, 22 nt, Human
cuggagucuuagguuaugguga

SEQ ID NO: 201971 - RNA, 22 nt, Human
accaugaucugcucugguguuu

SEQ ID NO: 201972 - RNA, 22 nt, Human
gcauccuggcucuaggugucau

SEQ ID NO: 201973 - RNA, 22 nt, Human
aaacuaaggugcuguggacuga

SEQ ID NO: 201974 - RNA, 22 nt, Human
gcccucagaggacagcugacuu

SEQ ID NO: 201975 - RNA, 22 nt, Human
aguauuucuucauaugauuacu

SEQ ID NO: 201976 - RNA, 22 nt, Human
cuggggaggcagggcugccccu

SEQ ID NO: 201977 - RNA, 22 nt, Human
uggcuucucugugguggcuccc

SEQ ID NO: 201978 - RNA, 22 nt, Human
cuggguguagauggaaguuugg

SEQ ID NO: 201979 - RNA, 22 nt, Human
cuggcccuguggccuaaggacu

SEQ ID NO: 201980 - RNA, 22 nt, Human
acacuucuauucccugcacaaa

SEQ ID NO: 201981 - RNA, 22 nt, Human
acaggcugccuaccaaguauca

SEQ ID NO: 201982 - RNA, 22 nt, Human
acugccuuagaacaaagcagga

SEQ ID NO: 201983 - RNA, 22 nt, Human
agggccugcucuaucacucuca

SEQ ID NO: 201984 - RNA, 22 nt, Human
aguccucugcugugcgucuuug

SEQ ID NO: 201985 - RNA, 22 nt, Human
cagugacacccagucuggccca

SEQ ID NO: 201986 - RNA, 22 nt, Human
cagacagguugcaaaacuucaa

SEQ ID NO: 201987 - RNA, 22 nt, Human
acauauauguaaaguacuuugu

SEQ ID NO: 201988 - RNA, 20 nt, Human
ggaggguggaagaaagcaag

SEQ ID NO: 201989 - RNA, 22 nt, Human
ggucagaggggauuccuuggga

SEQ ID NO: 201990 - RNA, 22 nt, Human
uguccuggggacaagaggcccu

SEQ ID NO: 201991 - RNA, 22 nt, Human
accaagugaguacuuggcagaa

SEQ ID NO: 201992 - RNA, 22 nt, Human
auuguauaauuguauugccaaa

SEQ ID NO: 201993 - RNA, 22 nt, Human
ucuccaggaaccaucaugguaa

SEQ ID NO: 201994 - RNA, 22 nt, Human
aacacaggggguuacaaauugu

SEQ ID NO: 201995 - RNA, 22 nt, Human
ugugcuucucacaucacuguug

SEQ ID NO: 201996 - RNA, 22 nt, Human
uccccucuggaggcugcagggg

SEQ ID NO: 201997 - RNA, 22 nt, Human
aaggaggagcggaggcuuguug

SEQ ID NO: 201998 - RNA, 22 nt, Human
uuucagaaagcugaacauauga

SEQ ID NO: 201999 - RNA, 22 nt, Human
uucuaacucuacacuagcuuug

SEQ ID NO: 202000 - RNA, 23 nt, Human
gccugugccuaugcccagcucug

SEQ ID NO: 202001 - RNA, 22 nt, Human
accucagagauacaaaccaugg

SEQ ID NO: 202002 - RNA, 22 nt, Human
uucuggcuuaguuguuguauau

SEQ ID NO: 202003 - RNA, 22 nt, Human
uacagugacccuauuuccaaau

SEQ ID NO: 202004 - RNA, 22 nt, Human
aaaaucuugacuguuuuuagaa

SEQ ID NO: 202005 - RNA, 22 nt, Human
uggguccugcacugcaagcacc

SEQ ID NO: 202006 - RNA, 22 nt, Human
cacaggugcaagaaguugcagu

SEQ ID NO: 202007 - RNA, 23 nt, Human
aaaaaaccauguaggcacucagu

SEQ ID NO: 202008 - RNA, 22 nt, Human
agcuccugggagcaggugguac

SEQ ID NO: 202009 - RNA, 20 nt, Human
uauucaacuuuaaaaacuua

SEQ ID NO: 202010 - RNA, 22 nt, Human
augaggcacagagauguuaaug

SEQ ID NO: 202011 - RNA, 19 nt, Human
ucccucagucugccaggcc

SEQ ID NO: 202012 - RNA, 22 nt, Human
uuaagugucauaauuuccaaga

SEQ ID NO: 202013 - RNA, 18 nt, Human
ugaggccucugcugggcc

SEQ ID NO: 202014 - RNA, 22 nt, Human
caggauggucuucauuuggcuc

SEQ ID NO: 202015 - RNA, 18 nt, Human
gugugcaguugcaggggu

SEQ ID NO: 202016 - RNA, 22 nt, Human
uggguccuucaaagcugggucu

SEQ ID NO: 202017 - RNA, 22 nt, Human
aggcacugacucaagggagcca

SEQ ID NO: 202018 - RNA, 22 nt, Human
accaguuuauagcgaucuguca

SEQ ID NO: 202019 - RNA, 22 nt, Human
gccccagcucugccacaacuag

SEQ ID NO: 202020 - RNA, 22 nt, Human
aguccaggcauuccagccauuc

SEQ ID NO: 202021 - RNA, 22 nt, Human
guggcuucuggcugggccucag

SEQ ID NO: 202022 - RNA, 22 nt, Human
cuucugugcuucacaguugcca

SEQ ID NO: 202023 - RNA, 22 nt, Human
auuguaacauguucagaucacu

SEQ ID NO: 202024 - RNA, 22 nt, Human
uccugggcagccucucuggaag

SEQ ID NO: 202025 - RNA, 23 nt, Human
agaaaccacugaagagauccagu

SEQ ID NO: 202026 - RNA, 22 nt, Human
ccugagcugaacuaagcaguuu

SEQ ID NO: 202027 - RNA, 22 nt, Human
cuggcuuccaugcuguaguggc

SEQ ID NO: 202028 - RNA, 22 nt, Human
acagcuuuugaaaaauuacugg

SEQ ID NO: 202029 - RNA, 20 nt, Human
ugcaggugggcccuucuggg

SEQ ID NO: 202030 - RNA, 22 nt, Human
guuacagucaggagauauuuug

SEQ ID NO: 202031 - RNA, 22 nt, Human
uggccuguugcuccuagggguc

SEQ ID NO: 202032 - RNA, 22 nt, Human
aggcugagcugguagugaguac

SEQ ID NO: 202033 - RNA, 22 nt, Human
uggcacuggaaucguagccuug

SEQ ID NO: 202034 - RNA, 19 nt, Human
ccugccugagcugucccuc

SEQ ID NO: 202035 - RNA, 22 nt, Human
ucugcaucucuuauaaaugaug

SEQ ID NO: 202036 - RNA, 22 nt, Human
auuuccaugaaggcagauuuua

SEQ ID NO: 202037 - RNA, 22 nt, Human
uuuccaaaaugaaucuaaugca

SEQ ID NO: 202038 - RNA, 22 nt, Human
acucuuuagagguacaucucuu

SEQ ID NO: 202039 - RNA, 22 nt, Human
ucugagaaauuucuuugugaug

SEQ ID NO: 202040 - RNA, 22 nt, Human
auucagagucugcacaacagca

SEQ ID NO: 202041 - RNA, 22 nt, Human
gaagauuugaaacacauagaca

SEQ ID NO: 202042 - RNA, 22 nt, Human
agcagcugagaugguaagauuc

SEQ ID NO: 202043 - RNA, 22 nt, Human
cacagugcuguuuguaaagaga

SEQ ID NO: 202044 - RNA, 22 nt, Human
ccagcugacgaugccuggucuc

SEQ ID NO: 202045 - RNA, 22 nt, Human
ccugagagugagggccuccuua

SEQ ID NO: 202046 - RNA, 23 nt, Human
uagucaguauguaagucuaauug

SEQ ID NO: 202047 - RNA, 22 nt, Human
gcagauguaauggcuggagguc

SEQ ID NO: 202048 - RNA, 22 nt, Human
gaacuuuguggggcugagagga

SEQ ID NO: 202049 - RNA, 22 nt, Human
agaauuguucuguagcuuggcu

SEQ ID NO: 202050 - RNA, 22 nt, Human
guccaucuguaggagggacaca

SEQ ID NO: 202051 - RNA, 22 nt, Human
ucaaaaauggucuuugagcugc

SEQ ID NO: 202052 - RNA, 22 nt, Human
caaggccauaagagauacaaaa

SEQ ID NO: 202053 - RNA, 22 nt, Human
ccucagcucccaugagaucugc

SEQ ID NO: 202054 - RNA, 22 nt, Human
ucugagacuuuaaccuggggcc

SEQ ID NO: 202055 - RNA, 22 nt, Human
gugcuuuuaaaggcaauuagua

SEQ ID NO: 202056 - RNA, 22 nt, Human
gcugucugacuccaaguuggag

SEQ ID NO: 202057 - RNA, 22 nt, Human
uaguaacugguugaacaacugu

SEQ ID NO: 202058 - RNA, 19 nt, Human
accugccaugacagccuga

SEQ ID NO: 202059 - RNA, 22 nt, Human
uuacauguacugguuugacuua

SEQ ID NO: 202060 - RNA, 18 nt, Human
cccugaggcuagcaugcu

SEQ ID NO: 202061 - RNA, 22 nt, Human
aagucagagaucaaggugucua

SEQ ID NO: 202062 - RNA, 22 nt, Human
auaugagaauuggaaaauauca

SEQ ID NO: 202063 - RNA, 22 nt, Human
aaaugcuugcucuugauuauuu

SEQ ID NO: 202064 - RNA, 22 nt, Human
ugaaaauuguuguacuugauaa

SEQ ID NO: 202065 - RNA, 19 nt, Human
augcuuuauguuauuucuu

SEQ ID NO: 202066 - RNA, 22 nt, Human
aucuguacuaauuaauuaaugu

SEQ ID NO: 202067 - RNA, 22 nt, Human
cuuagcccugagaguucugagc

SEQ ID NO: 202068 - RNA, 22 nt, Human
ccuggaucagucacuguugcug

SEQ ID NO: 202069 - RNA, 21 nt, Human
ucagaacuggugcagaugaau

SEQ ID NO: 202070 - RNA, 22 nt, Human
cuggcacugaguggcuuaugac

SEQ ID NO: 202071 - RNA, 22 nt, Human
uaucugauacaacagaauaaca

SEQ ID NO: 202072 - RNA, 22 nt, Human
gcucagagggaacaaggggcug

SEQ ID NO: 202073 - RNA, 22 nt, Human
aggaggccccuccuggguugcu

SEQ ID NO: 202074 - RNA, 22 nt, Human
agccugagcugccugccgccuc

SEQ ID NO: 202075 - RNA, 22 nt, Human
gguccuuugaaagggguguguc

SEQ ID NO: 202076 - RNA, 22 nt, Human
auuuccuaggugcucgagugcu

SEQ ID NO: 202077 - RNA, 22 nt, Human
ugucacaugaaacuugcucauc

SEQ ID NO: 202078 - RNA, 21 nt, Human
ucccugaguucucugagcauc

SEQ ID NO: 202079 - RNA, 22 nt, Human
gccugggugaauuugauccuaa

SEQ ID NO: 202080 - RNA, 22 nt, Human
uuacagaaggaacacuacucag

SEQ ID NO: 202081 - RNA, 16 nt, Human
gcagguggaucaccug

SEQ ID NO: 202082 - RNA, 22 nt, Human
uagaacagaguuccagugauca

SEQ ID NO: 202083 - RNA, 22 nt, Human
aagccagguuccauggaggagc

SEQ ID NO: 202084 - RNA, 22 nt, Human
aagcaaagacaguuugagugga

SEQ ID NO: 202085 - RNA, 22 nt, Human
ggccaggagauggacaccacau

SEQ ID NO: 202086 - RNA, 23 nt, Human
cccauuuucauguuaacuccugg

SEQ ID NO: 202087 - RNA, 22 nt, Human
cuuuagaaggguaacggaauua

SEQ ID NO: 202088 - RNA, 22 nt, Human
uacaaggaaaauuuuauaguaa

SEQ ID NO: 202089 - RNA, 22 nt, Human
acacacagcgccuaccaugugc

SEQ ID NO: 202090 - RNA, 22 nt, Human
ugaaacagugcuucacucagcc

SEQ ID NO: 202091 - RNA, 22 nt, Human
cugugcuggugaaacccacaga

SEQ ID NO: 202092 - RNA, 22 nt, Human
agcagcaggaggcuguccacca

SEQ ID NO: 202093 - RNA, 22 nt, Human
uugggggcauauugaguagugg

SEQ ID NO: 202094 - RNA, 22 nt, Human
cugucugucaaguucaucucca

SEQ ID NO: 202095 - RNA, 22 nt, Human
gcauucugugcuacagccauuc

SEQ ID NO: 202096 - RNA, 22 nt, Human
gagggagggaaaguuuaacacu

SEQ ID NO: 202097 - RNA, 22 nt, Human
agagccaaggcugagagcuauu

SEQ ID NO: 202098 - RNA, 21 nt, Human
cagagccuguguugacaguug

SEQ ID NO: 202099 - RNA, 22 nt, Human
ggucacaugugauuugagccaa

SEQ ID NO: 202100 - RNA, 22 nt, Human
ugcuauuugggggcuacaugau

SEQ ID NO: 202101 - RNA, 22 nt, Human
uacugcauaacuggcauguggg

SEQ ID NO: 202102 - RNA, 17 nt, Human
aggcaugaggcaucacu

SEQ ID NO: 202103 - RNA, 22 nt, Human
aaaagauuguuagggagaaugu

SEQ ID NO: 202104 - RNA, 22 nt, Human
aggcuggcagccaccucagcag

SEQ ID NO: 202105 - RNA, 22 nt, Human
cacugagcugauuucaggugcc

SEQ ID NO: 202106 - RNA, 22 nt, Human
acauuugauggaguuaguaggu

SEQ ID NO: 202107 - RNA, 22 nt, Human
cauuuccacuucugaaaacugg

SEQ ID NO: 202108 - RNA, 22 nt, Human
ucucuucacauuccuggcaaac

SEQ ID NO: 202109 - RNA, 22 nt, Human
uguuaaauguauuauguguucu

SEQ ID NO: 202110 - RNA, 22 nt, Human
gcagggcugacucagccacccu

SEQ ID NO: 202111 - RNA, 22 nt, Human
ccucuaggauguggcuggagga

SEQ ID NO: 202112 - RNA, 22 nt, Human
gucaggauuuacaaacuucagu

SEQ ID NO: 202113 - RNA, 22 nt, Human
uguuaucugguugucugauuac

SEQ ID NO: 202114 - RNA, 22 nt, Human
ggggaagggaguccaaguguua

SEQ ID NO: 202115 - RNA, 23 nt, Human
gcucuuuguucauguggaugccu

SEQ ID NO: 202116 - RNA, 22 nt, Human
ugucugagugcauaugugcugg

SEQ ID NO: 202117 - RNA, 22 nt, Human
cugagcagaccauggcagaggu

SEQ ID NO: 202118 - RNA, 22 nt, Human
gugugcaguagagaaagagcag

SEQ ID NO: 202119 - RNA, 23 nt, Human
gcucagaggugaaauguuuuggg

SEQ ID NO: 202120 - RNA, 22 nt, Human
gaggcaguuccugagugacaag

SEQ ID NO: 202121 - RNA, 22 nt, Human
cacaucagggcugcuugggggu

SEQ ID NO: 202122 - RNA, 22 nt, Human
gaggagcuugugagaagauguc

SEQ ID NO: 202123 - RNA, 22 nt, Human
acagugucucacugcugaaauc

SEQ ID NO: 202124 - RNA, 22 nt, Human
ugagagagcgccugggaucauu

SEQ ID NO: 202125 - RNA, 20 nt, Human
ugcauggcgcacaucugugg

SEQ ID NO: 202126 - RNA, 22 nt, Human
aaagugcuuucccacauuuguu

SEQ ID NO: 202127 - RNA, 22 nt, Human
gcugugcacuaccuauacaucc

SEQ ID NO: 202128 - RNA, 22 nt, Human
ucagcaggcugucagcaggggc

SEQ ID NO: 202129 - RNA, 22 nt, Human
ucugacuuuucucacuguugug

SEQ ID NO: 202130 - RNA, 22 nt, Human
ucucuucuauuugagacuauuu

SEQ ID NO: 202131 - RNA, 22 nt, Human
aguaacacuauuuucauaugua

SEQ ID NO: 202132 - RNA, 22 nt, Human
aacauguagcagaaacgacuaa

SEQ ID NO: 202133 - RNA, 22 nt, Human
ucucagaaggguggugcuggag

SEQ ID NO: 202134 - RNA, 22 nt, Human
agucuaguaggaucucugggcu

SEQ ID NO: 202135 - RNA, 22 nt, Human
aaggaaacagaggaugaccuug

SEQ ID NO: 202136 - RNA, 22 nt, Human
uagaggagaguugcuggaugga

SEQ ID NO: 202137 - RNA, 22 nt, Human
uagggaccuuagaauuguaugu

SEQ ID NO: 202138 - RNA, 23 nt, Human
uggcucugagcuuccugguggcc

SEQ ID NO: 202139 - RNA, 22 nt, Human
acauuucagugagcuauugaag

SEQ ID NO: 202140 - RNA, 22 nt, Human
auggcugcuucaguaccaguuc

SEQ ID NO: 202141 - RNA, 22 nt, Human
uuccuggcugaucuaccaaagu

SEQ ID NO: 202142 - RNA, 22 nt, Human
ugcagcugaaccuagagucugu

SEQ ID NO: 202143 - RNA, 22 nt, Human
aaggcauaugcauagaagacag

SEQ ID NO: 202144 - RNA, 20 nt, Human
aaaauauguauaacucuucu

SEQ ID NO: 202145 - RNA, 22 nt, Human
uagauuuguuuccuucucucca

SEQ ID NO: 202146 - RNA, 22 nt, Human
cucccucaggccuuagcccugc

SEQ ID NO: 202147 - RNA, 22 nt, Human
aggcuucaguagggagcauguc

SEQ ID NO: 202148 - RNA, 21 nt, Human
aguuggaggcaguuuggcaau

SEQ ID NO: 202149 - RNA, 22 nt, Human
ucccagagucagagguggggcc

SEQ ID NO: 202150 - RNA, 22 nt, Human
gcagaugcagaacucagugggu

SEQ ID NO: 202151 - RNA, 22 nt, Human
caaacugagcaucagaaaguuu

SEQ ID NO: 202152 - RNA, 18 nt, Human
uccaggucccaggggaag

SEQ ID NO: 202153 - RNA, 23 nt, Human
uaagacacccgacuccagagaug

SEQ ID NO: 202154 - RNA, 22 nt, Human
ucuggcaguaauaggggagaga

SEQ ID NO: 202155 - RNA, 18 nt, Human
ugcugugcacagcccuau

SEQ ID NO: 202156 - RNA, 21 nt, Human
cuggaggguagaguugggcug

SEQ ID NO: 202157 - RNA, 22 nt, Human
ugcugaggaauaauuguuccug

SEQ ID NO: 202158 - RNA, 22 nt, Human
cucuccagucauauucucaguc

SEQ ID NO: 202159 - RNA, 22 nt, Human
cuucucuguguagagauucaga

SEQ ID NO: 202160 - RNA, 22 nt, Human
guuuauuauucaacuucauguu

SEQ ID NO: 202161 - RNA, 22 nt, Human
ucauauuuaggccuuuaauuca

SEQ ID NO: 202162 - RNA, 22 nt, Human
cucccggcacuuggcaugucau

SEQ ID NO: 202163 - RNA, 22 nt, Human
ccaggcccugccugugguuccu

SEQ ID NO: 202164 - RNA, 22 nt, Human
uucacauguuggacauagagga

SEQ ID NO: 202165 - RNA, 22 nt, Human
guguuacuaaaauuugauucuu

SEQ ID NO: 202166 - RNA, 20 nt, Human
gaggcugaaguguuuuugcu

SEQ ID NO: 202167 - RNA, 22 nt, Human
uuacaaggaggauagcauuucc

SEQ ID NO: 202168 - RNA, 22 nt, Human
gagaggcugauccugcagagaa

SEQ ID NO: 202169 - RNA, 22 nt, Human
auuuuuucuguaaacuggccuu

SEQ ID NO: 202170 - RNA, 22 nt, Human
acaggugggcuuaagagucggc

SEQ ID NO: 202171 - RNA, 22 nt, Human
uccugucuuaaugaucucgugc

SEQ ID NO: 202172 - RNA, 22 nt, Human
cuggccccaggcagccugcugg

SEQ ID NO: 202173 - RNA, 22 nt, Human
gcagugcuuuagucuguccuuu

SEQ ID NO: 202174 - RNA, 22 nt, Human
uugacaauguccuuugaauuuc

SEQ ID NO: 202175 - RNA, 22 nt, Human
caagagcacgugcccuccauaa

SEQ ID NO: 202176 - RNA, 22 nt, Human
ucagagcucaugagcagagcca

SEQ ID NO: 202177 - RNA, 22 nt, Human
uuagccauugucagcacauggc

SEQ ID NO: 202178 - RNA, 22 nt, Human
ucuuuagugacaguugugcaag

SEQ ID NO: 202179 - RNA, 22 nt, Human
uggcugagugauauuugcaaag

SEQ ID NO: 202180 - RNA, 22 nt, Human
uuguuuuggagaugagcuaaaa

SEQ ID NO: 202181 - RNA, 22 nt, Human
aaagccagaguguguuagagac

SEQ ID NO: 202182 - RNA, 22 nt, Human
agaggccucuguuguucagacg

SEQ ID NO: 202183 - RNA, 22 nt, Human
aauauccacuucaauacaggca

SEQ ID NO: 202184 - RNA, 22 nt, Human
uugagggauuuacagagguggg

SEQ ID NO: 202185 - RNA, 23 nt, Human
aggagacagggaagugccuggcu

SEQ ID NO: 202186 - RNA, 22 nt, Human
aguggcuguaucagucaacccu

SEQ ID NO: 202187 - RNA, 17 nt, Human
aaggccauuuccaccca

SEQ ID NO: 202188 - RNA, 21 nt, Human
ugauacaggaaugguucuaug

SEQ ID NO: 202189 - RNA, 22 nt, Human
uuuguuuacaaaaauaagcagu

SEQ ID NO: 202190 - RNA, 22 nt, Human
ggcucagggaaugaggaagaau

SEQ ID NO: 202191 - RNA, 22 nt, Human
agccaggucagcucacccugcu

SEQ ID NO: 202192 - RNA, 22 nt, Human
ucuuagcacagcuauauaaguu

SEQ ID NO: 202193 - RNA, 22 nt, Human
ccuggcucugggaucuucgcuu

SEQ ID NO: 202194 - RNA, 22 nt, Human
acuuguuucaacuguacucuca

SEQ ID NO: 202195 - RNA, 22 nt, Human
ggccucuggucaagacaagcau

SEQ ID NO: 202196 - RNA, 22 nt, Human
ccccucauucucugagcuaguu

SEQ ID NO: 202197 - RNA, 22 nt, Human
gaggacaggagacucacuguuu

SEQ ID NO: 202198 - RNA, 22 nt, Human
ggaguagcugcauuccgagcac

SEQ ID NO: 202199 - RNA, 22 nt, Human
cagcuucugucugauuagcaag

SEQ ID NO: 202200 - RNA, 22 nt, Human
caaaaggccaguacuuuguuug

SEQ ID NO: 202201 - RNA, 22 nt, Human
gcccucuguguaacaauccaga

SEQ ID NO: 202202 - RNA, 22 nt, Human
gagagcuggccagcuucaguau

SEQ ID NO: 202203 - RNA, 22 nt, Human
accauauaacaaguuuaggaga

SEQ ID NO: 202204 - RNA, 22 nt, Human
cauucuuacacaauauuuuaau

SEQ ID NO: 202205 - RNA, 22 nt, Human
gaagcaaagagcuagugccgcu

SEQ ID NO: 202206 - RNA, 22 nt, Human
gagauccacuuaauuuuuuugc

SEQ ID NO: 202207 - RNA, 22 nt, Human
auuuauugagccuuuccuaugu

SEQ ID NO: 202208 - RNA, 20 nt, Human
cccuccagcaaccaggacuu

SEQ ID NO: 202209 - RNA, 22 nt, Human
aagccaauggauugguugcuuu

SEQ ID NO: 202210 - RNA, 22 nt, Human
caggcugggaacgccacccgcu

SEQ ID NO: 202211 - RNA, 22 nt, Human
aaugggaagccagaagacaagg

SEQ ID NO: 202212 - RNA, 22 nt, Human
aaagugacaaccauuuauuaag

SEQ ID NO: 202213 - RNA, 22 nt, Human
ugguccuguguucuuccugccu

SEQ ID NO: 202214 - RNA, 22 nt, Human
augaagcagcguuguagaguga

SEQ ID NO: 202215 - RNA, 22 nt, Human
gacuuuauucguuaacuguuaa

SEQ ID NO: 202216 - RNA, 22 nt, Human
cacaccuguaauaccagcuacu

SEQ ID NO: 202217 - RNA, 22 nt, Human
ccccagccuuccaugggaauug

SEQ ID NO: 202218 - RNA, 22 nt, Human
gugggugugagugacggcgucc

SEQ ID NO: 202219 - RNA, 22 nt, Human
uccaggccuuugcacauguugu

SEQ ID NO: 202220 - RNA, 22 nt, Human
ugagucucugcacuaaggagag

SEQ ID NO: 202221 - RNA, 22 nt, Human
aaacuuugguauguagcaaaac

SEQ ID NO: 202222 - RNA, 22 nt, Human
aaaaacugguaacuauucccca

SEQ ID NO: 202223 - RNA, 22 nt, Human
acauuugucuucuuucagauua

SEQ ID NO: 202224 - RNA, 22 nt, Human
aaggaaagacaggacggaauuc

SEQ ID NO: 202225 - RNA, 22 nt, Human
caggcagaaggaaguaccaggc

SEQ ID NO: 202226 - RNA, 22 nt, Human
aaauacuauugaccaggucucu

SEQ ID NO: 202227 - RNA, 20 nt, Human
aacuuucucccauuggacug

SEQ ID NO: 202228 - RNA, 22 nt, Human
caggcugagcucuggccugggc

SEQ ID NO: 202229 - RNA, 22 nt, Human
ucuaacuugaacucaugacugu

SEQ ID NO: 202230 - RNA, 22 nt, Human
cuauuagguaugugguugcuau

SEQ ID NO: 202231 - RNA, 22 nt, Human
aagcauguguauaagcugggca

SEQ ID NO: 202232 - RNA, 22 nt, Human
agacacuguucucacaugcuug

SEQ ID NO: 202233 - RNA, 22 nt, Human
cagggucuuauaaggccaauuu

SEQ ID NO: 202234 - RNA, 22 nt, Human
uccauacauaaaauguuuaaug

SEQ ID NO: 202235 - RNA, 22 nt, Human
ugucuuuaagcaaacaguguuu

SEQ ID NO: 202236 - RNA, 22 nt, Human
auuugcauuuacauagcauaga

SEQ ID NO: 202237 - RNA, 22 nt, Human
gagggcugcugccagauaugcc

SEQ ID NO: 202238 - RNA, 22 nt, Human
ucugaggaaucuugacacauuu

SEQ ID NO: 202239 - RNA, 22 nt, Human
cuaggaaagacacagagaguuu

SEQ ID NO: 202240 - RNA, 22 nt, Human
cugcagugaggauucuuaggug

SEQ ID NO: 202241 - RNA, 22 nt, Human
caugugugucuccaccagcugc

SEQ ID NO: 202242 - RNA, 22 nt, Human
uuccuggcaugaaaaauaucac

SEQ ID NO: 202243 - RNA, 22 nt, Human
uuuaaguuccuuuucaacaacu

SEQ ID NO: 202244 - RNA, 23 nt, Human
agcaggcugcuucuccacagcug

SEQ ID NO: 202245 - RNA, 22 nt, Human
cagggccuguacaagucccacc

SEQ ID NO: 202246 - RNA, 22 nt, Human
aucuguuauuuacccaucucug

SEQ ID NO: 202247 - RNA, 22 nt, Human
aggcuggcugagcugcagccug

SEQ ID NO: 202248 - RNA, 22 nt, Human
uaucuguuuauuguuacuguca

SEQ ID NO: 202249 - RNA, 21 nt, Human
uggaaaaauguggccuaguga

SEQ ID NO: 202250 - RNA, 22 nt, Human
ccuggcugguggcagcgacaag

SEQ ID NO: 202251 - RNA, 22 nt, Human
uggcagugguaccggcucucag

SEQ ID NO: 202252 - RNA, 22 nt, Human
acaguuuagaaugccacauagu

SEQ ID NO: 202253 - RNA, 22 nt, Human
acuacaguacuauaucuauagg

SEQ ID NO: 202254 - RNA, 22 nt, Human
ggaacaggaaaggagggaugcu

SEQ ID NO: 202255 - RNA, 22 nt, Human
uaaucuagaacauaugagagca

SEQ ID NO: 202256 - RNA, 22 nt, Human
aggaagagcauucacaugguag

SEQ ID NO: 202257 - RNA, 22 nt, Human
aacugcaaguggggcuugucau

SEQ ID NO: 202258 - RNA, 22 nt, Human
ugcauuaaaaugauggagaaau

SEQ ID NO: 202259 - RNA, 22 nt, Human
gaugugucuggcuccccugcaa

SEQ ID NO: 202260 - RNA, 22 nt, Human
uuacaacauaugauaggagucu

SEQ ID NO: 202261 - RNA, 22 nt, Human
ccagcagacacacaggcguggg

SEQ ID NO: 202262 - RNA, 22 nt, Human
ugcauuuauggagcaaggcagu

SEQ ID NO: 202263 - RNA, 21 nt, Human
gccugcccucugugauggcca

SEQ ID NO: 202264 - RNA, 22 nt, Human
uucuacuucugacacuguuugu

SEQ ID NO: 202265 - RNA, 22 nt, Human
ucaaugcaaucauuggacaagu

SEQ ID NO: 202266 - RNA, 22 nt, Human
aagauagaugucaucagcauau

SEQ ID NO: 202267 - RNA, 22 nt, Human
uggccugguuguugcugccguu

SEQ ID NO: 202268 - RNA, 22 nt, Human
uugaucagguugcuguggugua

SEQ ID NO: 202269 - RNA, 22 nt, Human
cgcugugccuggcacccagugu

SEQ ID NO: 202270 - RNA, 22 nt, Human
gaucaaaagcuggguucuaaaa

SEQ ID NO: 202271 - RNA, 22 nt, Human
ccucaaauuggcauuaauuaag

SEQ ID NO: 202272 - RNA, 22 nt, Human
ucucuggggguagaacucaggc

SEQ ID NO: 202273 - RNA, 22 nt, Human
cagcucaggcucuccaugcucc

SEQ ID NO: 202274 - RNA, 22 nt, Human
ucacuuagauggggaucaucac

SEQ ID NO: 202275 - RNA, 22 nt, Human
ggagggagggcuagaccaaaga

SEQ ID NO: 202276 - RNA, 22 nt, Human
aggcaggagcaagcccuacaag

SEQ ID NO: 202277 - RNA, 22 nt, Human
ucagcuuuugucagaaauugua

SEQ ID NO: 202278 - RNA, 19 nt, Human
ccaggaaccccuagcuacc

SEQ ID NO: 202279 - RNA, 22 nt, Human
gagccaggagauaccuaagggg

SEQ ID NO: 202280 - RNA, 22 nt, Human
uccccccagccuuucacaugag

SEQ ID NO: 202281 - RNA, 22 nt, Human
agggaggucuuugaggggcuua

SEQ ID NO: 202282 - RNA, 22 nt, Human
gucugaaaauaugauuuugccu

SEQ ID NO: 202283 - RNA, 22 nt, Human
uccuggcagaaauggggcugug

SEQ ID NO: 202284 - RNA, 22 nt, Human
ggugaggaauuggggacugacc

SEQ ID NO: 202285 - RNA, 23 nt, Human
acuauaaaguuguucugauuuac

SEQ ID NO: 202286 - RNA, 22 nt, Human
uguauucaacuucuuaaaaauu

SEQ ID NO: 202287 - RNA, 22 nt, Human
uccgggcaacugaagggagguu

SEQ ID NO: 202288 - RNA, 22 nt, Human
uguuugcuaggguugguauuua

SEQ ID NO: 202289 - RNA, 21 nt, Human
ucuuguauuggaucugugugu

SEQ ID NO: 202290 - RNA, 22 nt, Human
uuuagagaaguuaggaaauaaa

SEQ ID NO: 202291 - RNA, 22 nt, Human
accugggagagaggagccggcg

SEQ ID NO: 202292 - RNA, 22 nt, Human
ucucugguuaugucauuaagca

SEQ ID NO: 202293 - RNA, 22 nt, Human
cgcagguguucaguaaauguau

SEQ ID NO: 202294 - RNA, 22 nt, Human
uaauaacaauuguaggacauga

SEQ ID NO: 202295 - RNA, 22 nt, Human
caggcucagaugcccugcgcug

SEQ ID NO: 202296 - RNA, 22 nt, Human
agaggccucuagggccccucag

SEQ ID NO: 202297 - RNA, 22 nt, Human
ccugccagggccagaggccagc

SEQ ID NO: 202298 - RNA, 23 nt, Human
ggccuguguuuugucugaaguac

SEQ ID NO: 202299 - RNA, 22 nt, Human
aaggugguugcaauuaccauaa

SEQ ID NO: 202300 - RNA, 22 nt, Human
uugugaauagugcugcaauaaa

SEQ ID NO: 202301 - RNA, 22 nt, Human
cuccaggcgcuuaccaagcgcu

SEQ ID NO: 202302 - RNA, 22 nt, Human
uaaaaguaggaaugaaacgcau

SEQ ID NO: 202303 - RNA, 22 nt, Human
gccugcagauauauaggauggu

SEQ ID NO: 202304 - RNA, 22 nt, Human
ucugaaauuccuuccagacuuu

SEQ ID NO: 202305 - RNA, 22 nt, Human
aggguccugggugcaguugcuu

SEQ ID NO: 202306 - RNA, 22 nt, Human
agggccugugcuuccugagaua

SEQ ID NO: 202307 - RNA, 21 nt, Human
aggugcagagccagggaccag

SEQ ID NO: 202308 - RNA, 22 nt, Human
caggccucaugguguguccuuc

SEQ ID NO: 202309 - RNA, 22 nt, Human
uauucagaaaauaaauuggauu

SEQ ID NO: 202310 - RNA, 22 nt, Human
cauggcagagccugcagguggg

SEQ ID NO: 202311 - RNA, 22 nt, Human
acuagaaauguauugguagcug

SEQ ID NO: 202312 - RNA, 22 nt, Human
aggaagcuuggggcagggcuac

SEQ ID NO: 202313 - RNA, 20 nt, Human
ucaggcuccgcauuaacuua

SEQ ID NO: 202314 - RNA, 22 nt, Human
aucccuggacggcgccucccca

SEQ ID NO: 202315 - RNA, 22 nt, Human
cccacacaaaucauggggagaa

SEQ ID NO: 202316 - RNA, 21 nt, Human
agcugggugggcugagugaca

SEQ ID NO: 202317 - RNA, 22 nt, Human
gggaggugauggcaagcagcgg

SEQ ID NO: 202318 - RNA, 22 nt, Human
gagcccugcccacuugucugag

SEQ ID NO: 202319 - RNA, 19 nt, Human
ugagcuggcugagccucuc

SEQ ID NO: 202320 - RNA, 22 nt, Human
uuggaauagauuuguuagaaaa

SEQ ID NO: 202321 - RNA, 22 nt, Human
ucacagagagguuaagcaguug

SEQ ID NO: 202322 - RNA, 14 nt, Human
gcagguggaucacc

SEQ ID NO: 202323 - RNA, 14 nt, Human
gcaggcggaucacu

SEQ ID NO: 202324 - RNA, 22 nt, Human
acuucucuucauagguggcaau

SEQ ID NO: 202325 - RNA, 22 nt, Human
uggcagcaguagccaccccagc

SEQ ID NO: 202326 - RNA, 22 nt, Human
guauauaugugugaacauguau

SEQ ID NO: 202327 - RNA, 22 nt, Human
ggccucuggcaggcaggcccuc

SEQ ID NO: 202328 - RNA, 22 nt, Human
cagagggcucggcggccgcucc

SEQ ID NO: 202329 - RNA, 22 nt, Human
cacaaugauuugguucaaaaau

SEQ ID NO: 202330 - RNA, 18 nt, Human
gacaccagccucugcccc

SEQ ID NO: 202331 - RNA, 22 nt, Human
uuggaauuugagaccaagaaaa

SEQ ID NO: 202332 - RNA, 22 nt, Human
uucagaaaucgaguuucauguc

SEQ ID NO: 202333 - RNA, 22 nt, Human
uuuagcauauuuaaggaaugau

SEQ ID NO: 202334 - RNA, 22 nt, Human
cuccugagcucugaggaagcuu

SEQ ID NO: 202335 - RNA, 20 nt, Human
aauuauauaacuccaacauu

SEQ ID NO: 202336 - RNA, 22 nt, Human
gcagggaccuaugacgauggaa

SEQ ID NO: 202337 - RNA, 22 nt, Human
ucucccccagucucuacagcag

SEQ ID NO: 202338 - RNA, 23 nt, Human
uggcauuuuaguuagcuucagug

SEQ ID NO: 202339 - RNA, 22 nt, Human
ugucaucuggccugauuggugu

SEQ ID NO: 202340 - RNA, 22 nt, Human
auuucaaggcuauuaauauaaa

SEQ ID NO: 202341 - RNA, 22 nt, Human
gagccagaaaagcugccugacu

SEQ ID NO: 202342 - RNA, 22 nt, Human
uauuucacauaccacagagugu

SEQ ID NO: 202343 - RNA, 21 nt, Human
cuuugcaucuauauguucuca

SEQ ID NO: 202344 - RNA, 22 nt, Human
uaaugucuccaggguugaccua

SEQ ID NO: 202345 - RNA, 22 nt, Human
gccagcugcuggaacagcgcga

SEQ ID NO: 202346 - RNA, 23 nt, Human
cagggcccugcucaauuucucca

SEQ ID NO: 202347 - RNA, 22 nt, Human
cuucugagcagaccuccugggg

SEQ ID NO: 202348 - RNA, 22 nt, Human
caucuaaauuugacuccaagga

SEQ ID NO: 202349 - RNA, 22 nt, Human
auauugaucuuggaacugauuu

SEQ ID NO: 202350 - RNA, 22 nt, Human
ggcaggcucuuggccuuaugag

SEQ ID NO: 202351 - RNA, 22 nt, Human
caggaagggggauccuuggaag

SEQ ID NO: 202352 - RNA, 22 nt, Human
cuguuuucuagggcugagguga

SEQ ID NO: 202353 - RNA, 22 nt, Human
uggcugaguguuccaaggagca

SEQ ID NO: 202354 - RNA, 19 nt, Human
aauauuuuagccucuuccu

SEQ ID NO: 202355 - RNA, 22 nt, Human
gggagcuggaugauugaggcaa

SEQ ID NO: 202356 - RNA, 19 nt, Human
ccuuucagaacagaagcca

SEQ ID NO: 202357 - RNA, 19 nt, Human
agaaggcuccuguuggaga

SEQ ID NO: 202358 - RNA, 22 nt, Human
caggaaggcccaccuguccugu

SEQ ID NO: 202359 - RNA, 22 nt, Human
cuguguccugucuccuaaggug

SEQ ID NO: 202360 - RNA, 22 nt, Human
caugcauauuacuagcacagca

SEQ ID NO: 202361 - RNA, 22 nt, Human
ccugcaccaggcccagcauggu

SEQ ID NO: 202362 - RNA, 22 nt, Human
cugaaugaggaaaagagugagg

SEQ ID NO: 202363 - RNA, 22 nt, Human
aaaggcaugcauggucugcucc

SEQ ID NO: 202364 - RNA, 22 nt, Human
uuaaggaaagccaaaaugaauu

SEQ ID NO: 202365 - RNA, 22 nt, Human
gcaggaagccuuaccaagccca

SEQ ID NO: 202366 - RNA, 22 nt, Human
uggcagaggagaauuaagauua

SEQ ID NO: 202367 - RNA, 22 nt, Human
uauguacauacaugugcauacg

SEQ ID NO: 202368 - RNA, 22 nt, Human
gacacugugcuagcugggcuua

SEQ ID NO: 202369 - RNA, 22 nt, Human
uugcucauauuugcauguguuu

SEQ ID NO: 202370 - RNA, 22 nt, Human
gaauagcuuccuuuuuuccaaa

SEQ ID NO: 202371 - RNA, 22 nt, Human
aaggcugagggcuguaccuggc

SEQ ID NO: 202372 - RNA, 22 nt, Human
gugagguagcagagacagugaa

SEQ ID NO: 202373 - RNA, 22 nt, Human
augcaauaaauacuuuccagcu

SEQ ID NO: 202374 - RNA, 22 nt, Human
uuggaaggcccugccuagcagg

SEQ ID NO: 202375 - RNA, 22 nt, Human
acuuccaggaggugucacugaa

SEQ ID NO: 202376 - RNA, 22 nt, Human
gccuguccuugugaggucccag

SEQ ID NO: 202377 - RNA, 22 nt, Human
ccaaggcuucccagagaugcuc

SEQ ID NO: 202378 - RNA, 22 nt, Human
gcuggaggaggaagugugaggg

SEQ ID NO: 202379 - RNA, 22 nt, Human
ugaauuagcaguagacagacug

SEQ ID NO: 202380 - RNA, 22 nt, Human
acacaguggugagucuggaccu

SEQ ID NO: 202381 - RNA, 22 nt, Human
ccacccuaacaauccuuacugu

SEQ ID NO: 202382 - RNA, 22 nt, Human
acugugccuuucacuugcacuu

SEQ ID NO: 202383 - RNA, 22 nt, Human
acacuucucauuugauacuaac

SEQ ID NO: 202384 - RNA, 22 nt, Human
auaaggcaucucucaguuagca

SEQ ID NO: 202385 - RNA, 17 nt, Human
aggcagguaagaguuau

SEQ ID NO: 202386 - RNA, 22 nt, Human
acacagcuaugggguaggaaac

SEQ ID NO: 202387 - RNA, 22 nt, Human
ugagauccccaggaaggacaac

SEQ ID NO: 202388 - RNA, 19 nt, Human
uccagcuguuuugagucac

SEQ ID NO: 202389 - RNA, 22 nt, Human
augaggagucaaggagucggag

SEQ ID NO: 202390 - RNA, 22 nt, Human
uccaggaguuugaccugugggc

SEQ ID NO: 202391 - RNA, 18 nt, Human
ugcccagaaaagcaggga

SEQ ID NO: 202392 - RNA, 22 nt, Human
ggagucuuggccugcugagaaa

SEQ ID NO: 202393 - RNA, 22 nt, Human
ucaggcuugaggucuguaugug

SEQ ID NO: 202394 - RNA, 22 nt, Human
uagacaggguggcuuagaaaca

SEQ ID NO: 202395 - RNA, 21 nt, Human
uucagcaguccucuagagaua

SEQ ID NO: 202396 - RNA, 22 nt, Human
auuuacauaauagacuuuaggu

SEQ ID NO: 202397 - RNA, 22 nt, Human
ccaggugugcucugcaguggau

SEQ ID NO: 202398 - RNA, 22 nt, Human
acaaaauuuuuagacaaggcuu

SEQ ID NO: 202399 - RNA, 22 nt, Human
aguucucaagacaauuaccugu

SEQ ID NO: 202400 - RNA, 22 nt, Human
agaaaucuuaucaagaaaugcc

SEQ ID NO: 202401 - RNA, 22 nt, Human
acaugacaagguuuauaaggcu

SEQ ID NO: 202402 - RNA, 22 nt, Human
ggggaguguuuucaugggcuug

SEQ ID NO: 202403 - RNA, 22 nt, Human
aggcagcugcccucuccuuccu

SEQ ID NO: 202404 - RNA, 22 nt, Human
aguggcugcugacuuuaauaca

SEQ ID NO: 202405 - RNA, 22 nt, Human
caauaagccagguguuuguguu

SEQ ID NO: 202406 - RNA, 22 nt, Human
gcaauaaacauguuugaugcgc

SEQ ID NO: 202407 - RNA, 22 nt, Human
ccagcauucacacugguuccuu

SEQ ID NO: 202408 - RNA, 22 nt, Human
aguggcaggcagaagcuucuca

SEQ ID NO: 202409 - RNA, 22 nt, Human
ugaggcagcauucuucaagaca

SEQ ID NO: 202410 - RNA, 22 nt, Human
gcugggagccguaccugucacg

SEQ ID NO: 202411 - RNA, 22 nt, Human
uauacacauccuccaaagauag

SEQ ID NO: 202412 - RNA, 22 nt, Human
ucucaggaaauaggauuugagu

SEQ ID NO: 202413 - RNA, 23 nt, Human
cacacccaucacuaagagcuccu

SEQ ID NO: 202414 - RNA, 22 nt, Human
agcuucuggaaggcaaggcuug

SEQ ID NO: 202415 - RNA, 22 nt, Human
uugaaauuuuaggccuugcaau

SEQ ID NO: 202416 - RNA, 22 nt, Human
gccagcuggagugagagugggc

SEQ ID NO: 202417 - RNA, 22 nt, Human
ucucagagggaaacaugaguga

SEQ ID NO: 202418 - RNA, 22 nt, Human
agcaccaggucgcuggcacgcu

SEQ ID NO: 202419 - RNA, 18 nt, Human
gcagccccucuuccuucc

SEQ ID NO: 202420 - RNA, 22 nt, Human
gggcuucucuuuagugagcuga

SEQ ID NO: 202421 - RNA, 22 nt, Human
cuuccuggaugaacaguagaaa

SEQ ID NO: 202422 - RNA, 22 nt, Human
aaggaggcagaacucacaugga

SEQ ID NO: 202423 - RNA, 22 nt, Human
ucucugggagcaauuguuugcu

SEQ ID NO: 202424 - RNA, 21 nt, Human
ugccuggccuuugcuuuuccu

SEQ ID NO: 202425 - RNA, 22 nt, Human
aggcccagcuugaagugggaag

SEQ ID NO: 202426 - RNA, 22 nt, Human
gcagcagugucucccaucuugc

SEQ ID NO: 202427 - RNA, 22 nt, Human
aaaacauugaauugcacacuau

SEQ ID NO: 202428 - RNA, 22 nt, Human
cccugaggcacaggccacguau

SEQ ID NO: 202429 - RNA, 22 nt, Human
guagucuuggauuuuaaaaagu

SEQ ID NO: 202430 - RNA, 22 nt, Human
cagcaggcccaggugcugguga

SEQ ID NO: 202431 - RNA, 22 nt, Human
aauuuggcagugucuugaagua

SEQ ID NO: 202432 - RNA, 22 nt, Human
ucuccacaaguguugagaguac

SEQ ID NO: 202433 - RNA, 22 nt, Human
auggccugaugcaccuguccca

SEQ ID NO: 202434 - RNA, 22 nt, Human
cuauuagaaagcaucuucuaua

SEQ ID NO: 202435 - RNA, 22 nt, Human
uuugagaaaugggcucugugcu

SEQ ID NO: 202436 - RNA, 22 nt, Human
uaauuucuggagggagaaagag

SEQ ID NO: 202437 - RNA, 22 nt, Human
agagugauucuaguuagggaau

SEQ ID NO: 202438 - RNA, 22 nt, Human
cucccaggacuggcucuaacug

SEQ ID NO: 202439 - RNA, 22 nt, Human
ggauucagugucuguuaauagu

SEQ ID NO: 202440 - RNA, 22 nt, Human
gcccacagaggcaccaccaggc

SEQ ID NO: 202441 - RNA, 22 nt, Human
ugagguaggugucgagagaggu

SEQ ID NO: 202442 - RNA, 23 nt, Human
acucguggaauucucugcgaucg

SEQ ID NO: 202443 - RNA, 20 nt, Human
cugagcugagcuccaugggu

SEQ ID NO: 202444 - RNA, 22 nt, Human
agacaacaccaaaugcuagugu

SEQ ID NO: 202445 - RNA, 22 nt, Human
uaguuacacauggguagggaau

SEQ ID NO: 202446 - RNA, 22 nt, Human
gcugggagucgcgucuguggcc

SEQ ID NO: 202447 - RNA, 22 nt, Human
ugccuugcuuaacaagauggca

SEQ ID NO: 202448 - RNA, 22 nt, Human
agcccggcuuccccgguugcua

SEQ ID NO: 202449 - RNA, 22 nt, Human
acauugauugagcacccauuau

SEQ ID NO: 202450 - RNA, 22 nt, Human
gaggccacaguccugaggcauc

SEQ ID NO: 202451 - RNA, 22 nt, Human
cuaggcuagauaguauauuggu

SEQ ID NO: 202452 - RNA, 22 nt, Human
gucuccaguuacagcagccagg

SEQ ID NO: 202453 - RNA, 22 nt, Human
gcauucuuugaaugcuucuaau

SEQ ID NO: 202454 - RNA, 22 nt, Human
caggcccugcacuaggcccugg

SEQ ID NO: 202455 - RNA, 23 nt, Human
gaggagggucugacaaguguagc

SEQ ID NO: 202456 - RNA, 22 nt, Human
ucagucuucaaaucugagucgu

SEQ ID NO: 202457 - RNA, 22 nt, Human
uauuugcaaagaacuacacuag

SEQ ID NO: 202458 - RNA, 22 nt, Human
gcucucuggaggccauggacag

SEQ ID NO: 202459 - RNA, 22 nt, Human
aaucuucacagagaaaauuagg

SEQ ID NO: 202460 - RNA, 22 nt, Human
ccuggcaacauuucaaggucuu

SEQ ID NO: 202461 - RNA, 22 nt, Human
cuucuuuucauggcuugggaag

SEQ ID NO: 202462 - RNA, 22 nt, Human
ugcagcaguguuccuuggcuug

SEQ ID NO: 202463 - RNA, 22 nt, Human
agauaucuccagugaugcucgu

SEQ ID NO: 202464 - RNA, 22 nt, Human
uuauagaaggagcauucacuua

SEQ ID NO: 202465 - RNA, 22 nt, Human
ucugaggaccuacugaagaguu

SEQ ID NO: 202466 - RNA, 22 nt, Human
uuacagugaagauucagguucc

SEQ ID NO: 202467 - RNA, 22 nt, Human
aagguauuggcagggcugaguu

SEQ ID NO: 202468 - RNA, 18 nt, Human
ggucaggggcggagagaa

SEQ ID NO: 202469 - RNA, 22 nt, Human
cucccaggggaacuaucaagua

SEQ ID NO: 202470 - RNA, 22 nt, Human
aggacacagcucuucaguaaga

SEQ ID NO: 202471 - RNA, 22 nt, Human
cugaggcucaagggcagguggg

SEQ ID NO: 202472 - RNA, 22 nt, Human
ggacaggcaggugauuuccaga

SEQ ID NO: 202473 - RNA, 22 nt, Human
uggcagggugccaguugcgagu

SEQ ID NO: 202474 - RNA, 20 nt, Human
cagcaggaaaagugccucag

SEQ ID NO: 202475 - RNA, 22 nt, Human
ugguuaaaugggaagagcaaca

SEQ ID NO: 202476 - RNA, 22 nt, Human
cugcucuggggaagccagaugu

SEQ ID NO: 202477 - RNA, 22 nt, Human
gagagccuuugaagggaaguga

SEQ ID NO: 202478 - RNA, 20 nt, Human
uggcacagaacccuugccua

SEQ ID NO: 202479 - RNA, 22 nt, Human
aagagggagggcaaaggcacug

SEQ ID NO: 202480 - RNA, 22 nt, Human
ccuggcuguggcggugcucuca

SEQ ID NO: 202481 - RNA, 22 nt, Human
uuagcaggaagaguuggcugga

SEQ ID NO: 202482 - RNA, 22 nt, Human
agugccagcuccacacagcagc

SEQ ID NO: 202483 - RNA, 22 nt, Human
agcuucuccugguacagaacug

SEQ ID NO: 202484 - RNA, 20 nt, Human
cuuuggcaaugagaacaggg

SEQ ID NO: 202485 - RNA, 22 nt, Human
ugcaaacagaaaguuuauugug

SEQ ID NO: 202486 - RNA, 22 nt, Human
auacaugucaucauauguuugu

SEQ ID NO: 202487 - RNA, 22 nt, Human
agaauacuaggcuucagaaagg

SEQ ID NO: 202488 - RNA, 19 nt, Human
auggaaaauuguacucaau

SEQ ID NO: 202489 - RNA, 22 nt, Human
cauuccuauuaugucccuagug

SEQ ID NO: 202490 - RNA, 22 nt, Human
ccugcagagggacuggcaggaa

SEQ ID NO: 202491 - RNA, 22 nt, Human
aguccagugucaaggugccauu

SEQ ID NO: 202492 - RNA, 22 nt, Human
ugcaggugucuccagggcaggu

SEQ ID NO: 202493 - RNA, 22 nt, Human
ccaggacuucgaggcuacagug

SEQ ID NO: 202494 - RNA, 18 nt, Human
uccugccugugccccagg

SEQ ID NO: 202495 - RNA, 22 nt, Human
uaacuggugaguaggauuuaua

SEQ ID NO: 202496 - RNA, 22 nt, Human
agagccacaguggauaggagcc

SEQ ID NO: 202497 - RNA, 22 nt, Human
aaaagaggagugguuuaugaca

SEQ ID NO: 202498 - RNA, 22 nt, Human
uaccugcaaaguuccuuuugcc

SEQ ID NO: 202499 - RNA, 22 nt, Human
caggacacagaauaaggcaguu

SEQ ID NO: 202500 - RNA, 22 nt, Human
gacagcauggugucuguucagg

SEQ ID NO: 202501 - RNA, 22 nt, Human
aaacagcuggucucaaauguuc

SEQ ID NO: 202502 - RNA, 22 nt, Human
cucuuagagaguuguugaucag

SEQ ID NO: 202503 - RNA, 22 nt, Human
uuuuacaccucagaugagcaga

SEQ ID NO: 202504 - RNA, 22 nt, Human
uagaaccaccuucuccuuuacc

SEQ ID NO: 202505 - RNA, 22 nt, Human
ccagggagcggggcugggucuc

SEQ ID NO: 202506 - RNA, 22 nt, Human
caaauacuuacugaaccugugc

SEQ ID NO: 202507 - RNA, 22 nt, Human
agggcagaccacgugcaaggau

SEQ ID NO: 202508 - RNA, 22 nt, Human
gccucuccgagccacugccucu

SEQ ID NO: 202509 - RNA, 22 nt, Human
caaauagacuucaaucucuuga

SEQ ID NO: 202510 - RNA, 22 nt, Human
uuaaacacacugagauuuaugu

SEQ ID NO: 202511 - RNA, 22 nt, Human
cucuuuggauguuuaugauaag

SEQ ID NO: 202512 - RNA, 22 nt, Human
ucuucuuuuugucccacagaau

SEQ ID NO: 202513 - RNA, 22 nt, Human
ugcagugugagguccacaucug

SEQ ID NO: 202514 - RNA, 22 nt, Human
gcacagagagucccgggugccc

SEQ ID NO: 202515 - RNA, 22 nt, Human
auuggucugugagcuguugaca

SEQ ID NO: 202516 - RNA, 22 nt, Human
gcccuggccuccuggaacaggc

SEQ ID NO: 202517 - RNA, 22 nt, Human
ggcaggagaaaggucucuucuu

SEQ ID NO: 202518 - RNA, 22 nt, Human
ccuggagggcagcccauucugg

SEQ ID NO: 202519 - RNA, 20 nt, Human
cugagccaacucucuucuug

SEQ ID NO: 202520 - RNA, 22 nt, Human
uccugggaguaauugagucaug

SEQ ID NO: 202521 - RNA, 22 nt, Human
uggagcagaggaagaaggcuuu

SEQ ID NO: 202522 - RNA, 22 nt, Human
agggagcuuucagguagcuuaa

SEQ ID NO: 202523 - RNA, 22 nt, Human
ugcugaggucaccuugcugcua

SEQ ID NO: 202524 - RNA, 22 nt, Human
ucaggcuggaaugcaguggggc

SEQ ID NO: 202525 - RNA, 22 nt, Human
aauggaauucuccauuagaugu

SEQ ID NO: 202526 - RNA, 22 nt, Human
ucuagaacuucucuaaaaugaa

SEQ ID NO: 202527 - RNA, 22 nt, Human
gagcuggccgcagagagggcag

SEQ ID NO: 202528 - RNA, 22 nt, Human
ugaggggagguuggggcacauc

SEQ ID NO: 202529 - RNA, 22 nt, Human
auguguacacuggacuucugau

SEQ ID NO: 202530 - RNA, 19 nt, Human
gcauuucucuuuacagcca

SEQ ID NO: 202531 - RNA, 22 nt, Human
agaaagcacgggccccaggcuc

SEQ ID NO: 202532 - RNA, 22 nt, Human
uguuaacaaagguuggcugggc

SEQ ID NO: 202533 - RNA, 21 nt, Human
uaaaucucuguauucuucagu

SEQ ID NO: 202534 - RNA, 22 nt, Human
ugucaauaucaggcagaccuaa

SEQ ID NO: 202535 - RNA, 22 nt, Human
agaaaugaaaccaaagccuaga

SEQ ID NO: 202536 - RNA, 22 nt, Human
uaaaagcugagauauccuguac

SEQ ID NO: 202537 - RNA, 22 nt, Human
cagugcagaggugcaagcaugu

SEQ ID NO: 202538 - RNA, 22 nt, Human
aagcucugguuaaaaggccugg

SEQ ID NO: 202539 - RNA, 22 nt, Human
gccagaucugacauaguggaag

SEQ ID NO: 202540 - RNA, 22 nt, Human
uccaugaguuugaggaaaagag

SEQ ID NO: 202541 - RNA, 22 nt, Human
aauuaagaaaauguuuuaugau

SEQ ID NO: 202542 - RNA, 22 nt, Human
ugauuuacaauuguaaaaguuu

SEQ ID NO: 202543 - RNA, 22 nt, Human
accagggcccgggagagcucuc

SEQ ID NO: 202544 - RNA, 22 nt, Human
uaagacaucauuaaacagcaau

SEQ ID NO: 202545 - RNA, 19 nt, Human
ugacaggcuguugccuuga

SEQ ID NO: 202546 - RNA, 22 nt, Human
uuggaauccugccucugcuacu

SEQ ID NO: 202547 - RNA, 22 nt, Human
gcugggccuuccgauucucaag

SEQ ID NO: 202548 - RNA, 22 nt, Human
caaauauuccagguacaucccu

SEQ ID NO: 202549 - RNA, 22 nt, Human
uccugccuguuuaccuguacuu

SEQ ID NO: 202550 - RNA, 22 nt, Human
gucugcucaugcuaccgcgggc

SEQ ID NO: 202551 - RNA, 22 nt, Human
ccaccaggcucuguccgagcgg

SEQ ID NO: 202552 - RNA, 22 nt, Human
aaugucugagucucuguauccc

SEQ ID NO: 202553 - RNA, 22 nt, Human
gguggacaguguuagcucuggg

SEQ ID NO: 202554 - RNA, 21 nt, Human
agcaggugaaccuccaguaca

SEQ ID NO: 202555 - RNA, 22 nt, Human
acuucucuuuaguacuaaaugu

SEQ ID NO: 202556 - RNA, 22 nt, Human
acaguggcaguauuagggcaga

SEQ ID NO: 202557 - RNA, 22 nt, Human
caagcaggccuggcuggaccgu

SEQ ID NO: 202558 - RNA, 22 nt, Human
ccucagagcagcacccagauga

SEQ ID NO: 202559 - RNA, 22 nt, Human
aagccuggcacauuggagucug

SEQ ID NO: 202560 - RNA, 22 nt, Human
ucagaacaauuccuuuauaaca

SEQ ID NO: 202561 - RNA, 22 nt, Human
ucugccagugccagaguacaua

SEQ ID NO: 202562 - RNA, 23 nt, Human
cuggccaccaucuuucuggcuuc

SEQ ID NO: 202563 - RNA, 21 nt, Human
ccuccugcccgcaagcuaggg

SEQ ID NO: 202564 - RNA, 20 nt, Human
gugggcagcaggcauacugg

SEQ ID NO: 202565 - RNA, 22 nt, Human
guggauggcccugcacacaggu

SEQ ID NO: 202566 - RNA, 22 nt, Human
agccagaguugaaugugagucu

SEQ ID NO: 202567 - RNA, 22 nt, Human
ggccagcagaccucagggacuc

SEQ ID NO: 202568 - RNA, 22 nt, Human
ucuccaggcacuuggcugcuac

SEQ ID NO: 202569 - RNA, 21 nt, Human
ggcagcacuaccugaagcaua

SEQ ID NO: 202570 - RNA, 22 nt, Human
ucagugcauucauggguggcug

SEQ ID NO: 202571 - RNA, 22 nt, Human
cugagcccuggcucgccuggag

SEQ ID NO: 202572 - RNA, 22 nt, Human
caguguuugcuuaaguuauaug

SEQ ID NO: 202573 - RNA, 22 nt, Human
cauuugaauuguucugugggaa

SEQ ID NO: 202574 - RNA, 22 nt, Human
uggaauagaggugcugauauua

SEQ ID NO: 202575 - RNA, 22 nt, Human
agcugguaaguggcagagauuc

SEQ ID NO: 202576 - RNA, 22 nt, Human
uauucaugagauaggcaguuuu

SEQ ID NO: 202577 - RNA, 22 nt, Human
cauguaaagaauuucacacaag

SEQ ID NO: 202578 - RNA, 22 nt, Human
gagucaggcuagggugacaggc

SEQ ID NO: 202579 - RNA, 22 nt, Human
aagauauucaaagauuuauuag

SEQ ID NO: 202580 - RNA, 22 nt, Human
ccagcaggagacuagcaacaua

SEQ ID NO: 202581 - RNA, 22 nt, Human
gcugccugucccaggaugagga

SEQ ID NO: 202582 - RNA, 22 nt, Human
aaacugaauucaaguauccagu

SEQ ID NO: 202583 - RNA, 22 nt, Human
uuauuuuuaaaaguucacacag

SEQ ID NO: 202584 - RNA, 22 nt, Human
cuggaggcaaagcagaggcaug

SEQ ID NO: 202585 - RNA, 22 nt, Human
gcuggagugcuggagugcagug

SEQ ID NO: 202586 - RNA, 22 nt, Human
agagagcauggcacagaggggu

SEQ ID NO: 202587 - RNA, 22 nt, Human
ucucauggagucaggagcagaa

SEQ ID NO: 202588 - RNA, 22 nt, Human
uccagggagauggcagaggcug

SEQ ID NO: 202589 - RNA, 22 nt, Human
gcaccaggaggcccuucucauc

SEQ ID NO: 202590 - RNA, 22 nt, Human
gcauuuaaauuugaacuucaga

SEQ ID NO: 202591 - RNA, 22 nt, Human
uauccaaaggaacaaucacagc

SEQ ID NO: 202592 - RNA, 22 nt, Human
cacagggagaggaacagcgcag

SEQ ID NO: 202593 - RNA, 22 nt, Human
ugagccaggaguuugaggcugu

SEQ ID NO: 202594 - RNA, 22 nt, Human
agcccuggauucugagguccaa

SEQ ID NO: 202595 - RNA, 22 nt, Human
cagaccagaaggaagccgacaa

SEQ ID NO: 202596 - RNA, 22 nt, Human
auggacagagcugagcuccacc

SEQ ID NO: 202597 - RNA, 22 nt, Human
caaaugcaaaauauaacccugu

SEQ ID NO: 202598 - RNA, 22 nt, Human
ggcucuggugggaagguuagau

SEQ ID NO: 202599 - RNA, 22 nt, Human
uuccugugguccagagucaucc

SEQ ID NO: 202600 - RNA, 23 nt, Human
uacauucauuugcacagccagua

SEQ ID NO: 202601 - RNA, 22 nt, Human
uaggaggguuagagggaaauau

SEQ ID NO: 202602 - RNA, 22 nt, Human
agaaucauuauauuuauuaagc

SEQ ID NO: 202603 - RNA, 22 nt, Human
uggucucuucuuccaagauggc

SEQ ID NO: 202604 - RNA, 22 nt, Human
gugcagggcagguguccuucca

SEQ ID NO: 202605 - RNA, 22 nt, Human
uuggcuucugauguauuccuga

SEQ ID NO: 202606 - RNA, 22 nt, Human
aggagcugauaaaaggggguca

SEQ ID NO: 202607 - RNA, 19 nt, Human
cucucuggcggugucugcg

SEQ ID NO: 202608 - RNA, 22 nt, Human
gcccuggagcuagacuaggaca

SEQ ID NO: 202609 - RNA, 17 nt, Human
ucugcucugccaaucca

SEQ ID NO: 202610 - RNA, 22 nt, Human
gcugagacuggcagcaggaagu

SEQ ID NO: 202611 - RNA, 22 nt, Human
cugggcccacaaguggaaucgu

SEQ ID NO: 202612 - RNA, 22 nt, Human
gcugccugcccugggucaucug

SEQ ID NO: 202613 - RNA, 22 nt, Human
cucagucucuugggcugugaag

SEQ ID NO: 202614 - RNA, 22 nt, Human
uccuccaagcguggguguuuga

SEQ ID NO: 202615 - RNA, 22 nt, Human
gccucuuguuuccuuacaugga

SEQ ID NO: 202616 - RNA, 22 nt, Human
cuuccccaggaccucugcuaaa

SEQ ID NO: 202617 - RNA, 22 nt, Human
cagugagggcauucagugcugg

SEQ ID NO: 202618 - RNA, 22 nt, Human
auucuuuccagacacugauugc

SEQ ID NO: 202619 - RNA, 22 nt, Human
agaaggcuagagacuugcccaa

SEQ ID NO: 202620 - RNA, 22 nt, Human
ucauugcagaaauaaaggugaa

SEQ ID NO: 202621 - RNA, 22 nt, Human
cacagguuagguauuauacuau

SEQ ID NO: 202622 - RNA, 22 nt, Human
gauaccagacagggagggagaa

SEQ ID NO: 202623 - RNA, 22 nt, Human
ucucaaauauuuggagagagga

SEQ ID NO: 202624 - RNA, 22 nt, Human
uuuucagugggcaaugauguga

SEQ ID NO: 202625 - RNA, 21 nt, Human
gcucagaguauugcacuguuu

SEQ ID NO: 202626 - RNA, 22 nt, Human
cccagagaaucuuucagaaagg

SEQ ID NO: 202627 - RNA, 22 nt, Human
uuuaaaggccuugcugagccac

SEQ ID NO: 202628 - RNA, 22 nt, Human
uccuggacaagcccuucacccu

SEQ ID NO: 202629 - RNA, 22 nt, Human
cugagggucaacuugauuguau

SEQ ID NO: 202630 - RNA, 22 nt, Human
gagucuucuacgcucacacaaa

SEQ ID NO: 202631 - RNA, 22 nt, Human
aauaucucaccaugacaaagca

SEQ ID NO: 202632 - RNA, 22 nt, Human
aaacuguugugguuuaucauua

SEQ ID NO: 202633 - RNA, 22 nt, Human
acuaugaaaguauaauauugaa

SEQ ID NO: 202634 - RNA, 19 nt, Human
caguuacagcagcuaagac

SEQ ID NO: 202635 - RNA, 22 nt, Human
augaaggauagggcaaaauuuu

SEQ ID NO: 202636 - RNA, 22 nt, Human
agggaaaguaagcauuucauua

SEQ ID NO: 202637 - RNA, 22 nt, Human
gagguggccucaagcagucuuc

SEQ ID NO: 202638 - RNA, 23 nt, Human
ucuguucuuuuagcugaucauuu

SEQ ID NO: 202639 - RNA, 16 nt, Human
ggcaccagugaacaca

SEQ ID NO: 202640 - RNA, 22 nt, Human
caggagagauaugaguccccac

SEQ ID NO: 202641 - RNA, 22 nt, Human
cuggcccagagcucuggccuuu

SEQ ID NO: 202642 - RNA, 22 nt, Human
ugggaagaugaggugccauggg

SEQ ID NO: 202643 - RNA, 22 nt, Human
auugcagaacaugaggucuucu

SEQ ID NO: 202644 - RNA, 22 nt, Human
uccuggcacauugcaggggcuc

SEQ ID NO: 202645 - RNA, 22 nt, Human
caugagucauagugaagcagga

SEQ ID NO: 202646 - RNA, 22 nt, Human
aaggcauuaccuaaguuuggga

SEQ ID NO: 202647 - RNA, 22 nt, Human
auguuacaauucaaaaugcugc

SEQ ID NO: 202648 - RNA, 23 nt, Human
uggccaggcauaaaggugggugg

SEQ ID NO: 202649 - RNA, 18 nt, Human
aguaggcacugugggguu

SEQ ID NO: 202650 - RNA, 16 nt, Human
acccuggguaguccug

SEQ ID NO: 202651 - RNA, 22 nt, Human
uuaauaaguaguaguuauuguu

SEQ ID NO: 202652 - RNA, 22 nt, Human
uaacaugaaacuccaaauggua

SEQ ID NO: 202653 - RNA, 22 nt, Human
uauuacaguucgaguuucuagg

SEQ ID NO: 202654 - RNA, 22 nt, Human
cagcgucucguugugggccucg

SEQ ID NO: 202655 - RNA, 22 nt, Human
uguagcaccagucaccagccca

SEQ ID NO: 202656 - RNA, 22 nt, Human
uuucuccacgccagcuugcuua

SEQ ID NO: 202657 - RNA, 22 nt, Human
aagacauuggacaauccagagg

SEQ ID NO: 202658 - RNA, 22 nt, Human
uaggccuaugcagaaggugguu

SEQ ID NO: 202659 - RNA, 20 nt, Human
acucaucuacuccagacccu

SEQ ID NO: 202660 - RNA, 22 nt, Human
uuccucuuucucugugcuaugu

SEQ ID NO: 202661 - RNA, 22 nt, Human
ugucgauucagcucuucagaga

SEQ ID NO: 202662 - RNA, 22 nt, Human
aaugauuggcacuagauacaca

SEQ ID NO: 202663 - RNA, 22 nt, Human
gcaccugggguacacagcuaca

SEQ ID NO: 202664 - RNA, 22 nt, Human
cucuccagaauaugccgccgug

SEQ ID NO: 202665 - RNA, 22 nt, Human
cugcccagaaucacucacucga

SEQ ID NO: 202666 - RNA, 21 nt, Human
acagccaggaacaugaggggc

SEQ ID NO: 202667 - RNA, 22 nt, Human
agguucuugguguccagauuuc

SEQ ID NO: 202668 - RNA, 22 nt, Human
uauuucuuguucccuccaaguu

SEQ ID NO: 202669 - RNA, 22 nt, Human
cggcuggguucggcugcaggcc

SEQ ID NO: 202670 - RNA, 21 nt, Human
cucuugugucagagccagagg

SEQ ID NO: 202671 - RNA, 22 nt, Human
accuccuggcuuaucauggaca

SEQ ID NO: 202672 - RNA, 22 nt, Human
gccacagccucugggaaaacuc

SEQ ID NO: 202673 - RNA, 22 nt, Human
auagggcagucaggccgccacu

SEQ ID NO: 202674 - RNA, 22 nt, Human
aguuauaaucugcuacugauau

SEQ ID NO: 202675 - RNA, 22 nt, Human
acaugcaaagccacaggacccg

SEQ ID NO: 202676 - RNA, 22 nt, Human
uguccaggcuaaagugcagugg

SEQ ID NO: 202677 - RNA, 22 nt, Human
ggcagcagaacuggcccuguau

SEQ ID NO: 202678 - RNA, 22 nt, Human
acacaggacagggauguguuuu

SEQ ID NO: 202679 - RNA, 22 nt, Human
gaaaaccaccucccaucaagca

SEQ ID NO: 202680 - RNA, 22 nt, Human
ugucaaaaccagcaauuuuguu

SEQ ID NO: 202681 - RNA, 22 nt, Human
ccuggcuuccuggagcucacaa

SEQ ID NO: 202682 - RNA, 22 nt, Human
gagguguccucagccaacucug

SEQ ID NO: 202683 - RNA, 22 nt, Human
uccuguuucuccugcaaaaucc

SEQ ID NO: 202684 - RNA, 23 nt, Human
uugcacauuggagcuggucuucu

SEQ ID NO: 202685 - RNA, 22 nt, Human
uggaaugacagagagucugaau

SEQ ID NO: 202686 - RNA, 22 nt, Human
ggagucuuaaaaaucaaaugga

SEQ ID NO: 202687 - RNA, 22 nt, Human
aauuucagaacccaaauuagcg

SEQ ID NO: 202688 - RNA, 22 nt, Human
uugcuuuauuuggcaugccacu

SEQ ID NO: 202689 - RNA, 22 nt, Human
gcuuuagaagacacucuguuuu

SEQ ID NO: 202690 - RNA, 22 nt, Human
uguaaaauaccauuccuuguca

SEQ ID NO: 202691 - RNA, 22 nt, Human
uucaaucauuuuuacauagucc

SEQ ID NO: 202692 - RNA, 19 nt, Human
aauacaguguuauagaauu

SEQ ID NO: 202693 - RNA, 22 nt, Human
uggcaguucuaauugaccauuu

SEQ ID NO: 202694 - RNA, 22 nt, Human
auuacaguaacagcuacaaugc

SEQ ID NO: 202695 - RNA, 22 nt, Human
cccaggguagcugagcuggcag

SEQ ID NO: 202696 - RNA, 22 nt, Human
aacuagaaagaacauauuucca

SEQ ID NO: 202697 - RNA, 22 nt, Human
agauuucaauggauauugcaag

SEQ ID NO: 202698 - RNA, 22 nt, Human
agcuggugaggguugaggggua

SEQ ID NO: 202699 - RNA, 22 nt, Human
gcaccugcuggggcugaugaga

SEQ ID NO: 202700 - RNA, 22 nt, Human
uggcacugaccccaggccugug

SEQ ID NO: 202701 - RNA, 22 nt, Human
ccagacaggggcuguuccugcu

SEQ ID NO: 202702 - RNA, 22 nt, Human
uguaagaagggccagagcucca

SEQ ID NO: 202703 - RNA, 22 nt, Human
cuucauagaacagaaauuuaau

SEQ ID NO: 202704 - RNA, 22 nt, Human
ugggagaauauauuuaaaacuu

SEQ ID NO: 202705 - RNA, 22 nt, Human
aagcaucuucuaucaguuagac

SEQ ID NO: 202706 - RNA, 22 nt, Human
aaaugugcuucuuacucucaau

SEQ ID NO: 202707 - RNA, 22 nt, Human
caggcauaaguaauguuuuaug

SEQ ID NO: 202708 - RNA, 22 nt, Human
gcagucaguaaggcagccagaa

SEQ ID NO: 202709 - RNA, 22 nt, Human
ggcaugcuugccaugggccagu

SEQ ID NO: 202710 - RNA, 22 nt, Human
cagcaucuccauggcuuuggag

SEQ ID NO: 202711 - RNA, 22 nt, Human
ucacagagaacuauaauccauc

SEQ ID NO: 202712 - RNA, 22 nt, Human
aauucuuggaaacauuacugga

SEQ ID NO: 202713 - RNA, 22 nt, Human
ucuggucccuuuuccugcaguc

SEQ ID NO: 202714 - RNA, 22 nt, Human
agcuggguucagaggcacaugg

SEQ ID NO: 202715 - RNA, 22 nt, Human
agcccagcuuucaccccucugg

SEQ ID NO: 202716 - RNA, 22 nt, Human
ugauuucuuccuugucauuaga

SEQ ID NO: 202717 - RNA, 22 nt, Human
auaucuggggacugaauuuaga

SEQ ID NO: 202718 - RNA, 22 nt, Human
ccaaggagaaugacaccaugga

SEQ ID NO: 202719 - RNA, 23 nt, Human
agggaacaagcaagcugcuaguc

SEQ ID NO: 202720 - RNA, 22 nt, Human
cucugcccgugccuuucccagu

SEQ ID NO: 202721 - RNA, 22 nt, Human
acauuucgugcucuguuuuguu

SEQ ID NO: 202722 - RNA, 22 nt, Human
auuaaagaaacccagcauguga

SEQ ID NO: 202723 - RNA, 22 nt, Human
ccugggcccucaccgccggugg

SEQ ID NO: 202724 - RNA, 22 nt, Human
guggaauguccuugaucauaag

SEQ ID NO: 202725 - RNA, 22 nt, Human
gaaauaaccucaugcaccauga

SEQ ID NO: 202726 - RNA, 20 nt, Human
aaagucuguuuaucucugga

SEQ ID NO: 202727 - RNA, 22 nt, Human
aaacugaggaacaaggaaggau

SEQ ID NO: 202728 - RNA, 22 nt, Human
gucucuuagaaucgcauauugu

SEQ ID NO: 202729 - RNA, 22 nt, Human
gggcugagagcuggaaucugag

SEQ ID NO: 202730 - RNA, 22 nt, Human
augguuuacagaacuccuagca

SEQ ID NO: 202731 - RNA, 22 nt, Human
gcuccaggcagagccucuuucg

SEQ ID NO: 202732 - RNA, 19 nt, Human
agugugaguaauuggaguu

SEQ ID NO: 202733 - RNA, 22 nt, Human
auuagucuacugucuaauaaau

SEQ ID NO: 202734 - RNA, 22 nt, Human
agaacaauugccccaaagcuug

SEQ ID NO: 202735 - RNA, 21 nt, Human
cucugcugagcuccauuuuca

SEQ ID NO: 202736 - RNA, 19 nt, Human
ggacagacgcagagaucug

SEQ ID NO: 202737 - RNA, 22 nt, Human
aagccaguggugagaagauagc

SEQ ID NO: 202738 - RNA, 22 nt, Human
gccuccuggguucaugccauuc

SEQ ID NO: 202739 - RNA, 22 nt, Human
caguggcacccacgggcugggc

SEQ ID NO: 202740 - RNA, 22 nt, Human
gcaguggauggccagcaggggc

SEQ ID NO: 202741 - RNA, 22 nt, Human
auaauauuugcauuacugugau

SEQ ID NO: 202742 - RNA, 22 nt, Human
guuagagggaaaaaucauuugc

SEQ ID NO: 202743 - RNA, 22 nt, Human
agcucagcuuccucuccaugcu

SEQ ID NO: 202744 - RNA, 22 nt, Human
cccugaggggcuuacuuugccc

SEQ ID NO: 202745 - RNA, 22 nt, Human
cuuguauuccccuaucucuaaa

SEQ ID NO: 202746 - RNA, 22 nt, Human
auccacagagaggaagaauagu

SEQ ID NO: 202747 - RNA, 22 nt, Human
aggcagugagaaauagcaagau

SEQ ID NO: 202748 - RNA, 22 nt, Human
ccucagagguucugugugggaa

SEQ ID NO: 202749 - RNA, 22 nt, Human
cagauaaauagauagauaaacu

SEQ ID NO: 202750 - RNA, 22 nt, Human
uagaagcagcaggaguaaaggc

SEQ ID NO: 202751 - RNA, 22 nt, Human
ugcucugcaagcaggagcaaga

SEQ ID NO: 202752 - RNA, 22 nt, Human
ugaggccucauaaugagauuuc

SEQ ID NO: 202753 - RNA, 22 nt, Human
gagcccagcuugcacauggagc

SEQ ID NO: 202754 - RNA, 22 nt, Human
augcaacauacauucugaagcu

SEQ ID NO: 202755 - RNA, 22 nt, Human
cucagagcacaguuuaugacag

SEQ ID NO: 202756 - RNA, 22 nt, Human
guaaucguggugguuaauucca

SEQ ID NO: 202757 - RNA, 19 nt, Human
uggcuuggcugcagaugcu

SEQ ID NO: 202758 - RNA, 21 nt, Human
uaagugcaaagagacagauac

SEQ ID NO: 202759 - RNA, 22 nt, Human
ccccuguguuguucaaggguca

SEQ ID NO: 202760 - RNA, 22 nt, Human
aggcugagcugaccugguuugg

SEQ ID NO: 202761 - RNA, 22 nt, Human
uuuccuuuccaaaauucugccu

SEQ ID NO: 202762 - RNA, 22 nt, Human
acucuguaaagcauaacguuug

SEQ ID NO: 202763 - RNA, 22 nt, Human
gaggaaaucauuccagaaaagg

SEQ ID NO: 202764 - RNA, 22 nt, Human
aacugcuuagugauggaugacc

SEQ ID NO: 202765 - RNA, 22 nt, Human
ucauuucuguugugcaucacug

SEQ ID NO: 202766 - RNA, 22 nt, Human
caaaaggcaggggaaagagugc

SEQ ID NO: 202767 - RNA, 22 nt, Human
caagugggaccugucugauucc

SEQ ID NO: 202768 - RNA, 22 nt, Human
uuucuuuugcccuguggguuag

SEQ ID NO: 202769 - RNA, 22 nt, Human
agcacaguggcuucuaugucua

SEQ ID NO: 202770 - RNA, 20 nt, Human
aagucccuaagucucuggcc

SEQ ID NO: 202771 - RNA, 22 nt, Human
gauucuuuacaucucugcugac

SEQ ID NO: 202772 - RNA, 22 nt, Human
auagauauuugaguuguuucca

SEQ ID NO: 202773 - RNA, 22 nt, Human
uucugccaucugcagaagggga

SEQ ID NO: 202774 - RNA, 22 nt, Human
aucuguguaugaaaguauaacu

SEQ ID NO: 202775 - RNA, 22 nt, Human
cuccccagcucgcgggugacgg

SEQ ID NO: 202776 - RNA, 22 nt, Human
caaauccagaucccagucguag

SEQ ID NO: 202777 - RNA, 22 nt, Human
uuguacagacccugaaaagcuc

SEQ ID NO: 202778 - RNA, 22 nt, Human
uuccuucuuuuacaccauaaau

SEQ ID NO: 202779 - RNA, 22 nt, Human
gaauuccucugagcuaggagau

SEQ ID NO: 202780 - RNA, 22 nt, Human
acaggaggggcaugaaagacgg

SEQ ID NO: 202781 - RNA, 22 nt, Human
cuagagaaaacuguguaucuug

SEQ ID NO: 202782 - RNA, 22 nt, Human
cuuagugaggaaugaauuuguu

SEQ ID NO: 202783 - RNA, 22 nt, Human
acauguggaggaggcgagggua

SEQ ID NO: 202784 - RNA, 22 nt, Human
uccugggcugcagggaagagca

SEQ ID NO: 202785 - RNA, 22 nt, Human
ccuggcagcuaagugcuuugag

SEQ ID NO: 202786 - RNA, 22 nt, Human
uauuuauuggacaguguugcug

SEQ ID NO: 202787 - RNA, 22 nt, Human
ucucagagugguggucccucug

SEQ ID NO: 202788 - RNA, 22 nt, Human
caggaacaauguaagucucauu

SEQ ID NO: 202789 - RNA, 22 nt, Human
ucucuggggauggaccugggag

SEQ ID NO: 202790 - RNA, 22 nt, Human
auuuguagugaagugaaaauaa

SEQ ID NO: 202791 - RNA, 22 nt, Human
gcaggucucaaucugagcaggc

SEQ ID NO: 202792 - RNA, 22 nt, Human
ucuggcuguguaugagaguuuu

SEQ ID NO: 202793 - RNA, 22 nt, Human
cuugauugcuucuacgugacug

SEQ ID NO: 202794 - RNA, 22 nt, Human
gaccauuugcuaguaaauugca

SEQ ID NO: 202795 - RNA, 22 nt, Human
agcaagcagaaaugccauggca

SEQ ID NO: 202796 - RNA, 22 nt, Human
uuaugcaaaggggccucuuccu

SEQ ID NO: 202797 - RNA, 22 nt, Human
ugaggagcgggcagggaugcag

SEQ ID NO: 202798 - RNA, 22 nt, Human
ggcacagcacaguggacccagg

SEQ ID NO: 202799 - RNA, 18 nt, Human
auuuugaacaaugcugua

SEQ ID NO: 202800 - RNA, 22 nt, Human
caguuaaacgggccaugugagu

SEQ ID NO: 202801 - RNA, 22 nt, Human
ugucuaaaugaaaagagaugcc

SEQ ID NO: 202802 - RNA, 22 nt, Human
cggcuggugucgggcacagcaa

SEQ ID NO: 202803 - RNA, 22 nt, Human
cuccuacauuccaccuuggacu

SEQ ID NO: 202804 - RNA, 22 nt, Human
uccauccauaccacuuggagac

SEQ ID NO: 202805 - RNA, 22 nt, Human
uacaggugguaaaaauauuguu

SEQ ID NO: 202806 - RNA, 19 nt, Human
auguacccagugucaaucc

SEQ ID NO: 202807 - RNA, 22 nt, Human
cacaauuauuaucucuuucuac

SEQ ID NO: 202808 - RNA, 22 nt, Human
gugcaaaagucauugugguuuu

SEQ ID NO: 202809 - RNA, 22 nt, Human
ucccucucuagccuguucagua

SEQ ID NO: 202810 - RNA, 23 nt, Human
uuuguacauugaggaggcagaau

SEQ ID NO: 202811 - RNA, 22 nt, Human
agucagagagcucucagcauag

SEQ ID NO: 202812 - RNA, 22 nt, Human
aaaaguauuuugagcacuuuau

SEQ ID NO: 202813 - RNA, 22 nt, Human
uugugcugagcuucuagcugug

SEQ ID NO: 202814 - RNA, 22 nt, Human
gaaggcuuccugaugccaacca

SEQ ID NO: 202815 - RNA, 21 nt, Human
uucuucuuggacuguuuuggc

SEQ ID NO: 202816 - RNA, 22 nt, Human
uuuccuguugccaucaagaaug

SEQ ID NO: 202817 - RNA, 22 nt, Human
ccugagaauaauucuccauagc

SEQ ID NO: 202818 - RNA, 22 nt, Human
uggguccucugagagggcagcg

SEQ ID NO: 202819 - RNA, 22 nt, Human
gucuccagggcugcuggcgccu

SEQ ID NO: 202820 - RNA, 21 nt, Human
acagacagggccagugucccc

SEQ ID NO: 202821 - RNA, 22 nt, Human
guuuacauguaauguguuauug

SEQ ID NO: 202822 - RNA, 22 nt, Human
aaguaaucuggaauuugguuuu

SEQ ID NO: 202823 - RNA, 22 nt, Human
uuccuuucucuggacugcagcc

SEQ ID NO: 202824 - RNA, 22 nt, Human
ccuggcagcauugguagagauu

SEQ ID NO: 202825 - RNA, 22 nt, Human
cugggccuugcaucccagagcc

SEQ ID NO: 202826 - RNA, 20 nt, Human
acccagcucugugcccuggg

SEQ ID NO: 202827 - RNA, 22 nt, Human
uaagaaucuauuaggaauaugu

SEQ ID NO: 202828 - RNA, 22 nt, Human
uuugcaaagugcuugcagagua

SEQ ID NO: 202829 - RNA, 22 nt, Human
auuuagaaccccuuccaaccug

SEQ ID NO: 202830 - RNA, 22 nt, Human
caguuaaaagguaugcuaccaa

SEQ ID NO: 202831 - RNA, 22 nt, Human
aagcauuuuagauaaagcauca

SEQ ID NO: 202832 - RNA, 20 nt, Human
ucugggcagggcacauggaa

SEQ ID NO: 202833 - RNA, 22 nt, Human
uacagacaguuuuucagauauu

SEQ ID NO: 202834 - RNA, 22 nt, Human
ucuggccuuaucuguccaagcc

SEQ ID NO: 202835 - RNA, 22 nt, Human
gccuggcugcucagccacucac

SEQ ID NO: 202836 - RNA, 22 nt, Human
uagauccagcuguuauguuaug

SEQ ID NO: 202837 - RNA, 22 nt, Human
uucuauugggcagcauugcuuc

SEQ ID NO: 202838 - RNA, 22 nt, Human
aguuagcaucuccuccagucua

SEQ ID NO: 202839 - RNA, 22 nt, Human
ugcagccucucugcuucaggaa

SEQ ID NO: 202840 - RNA, 22 nt, Human
uccaauauuucucauauaugga

SEQ ID NO: 202841 - RNA, 21 nt, Human
gagauuuagaaggaucaauuu

SEQ ID NO: 202842 - RNA, 22 nt, Human
uucuucagagaguagaagcaag

SEQ ID NO: 202843 - RNA, 22 nt, Human
gauguacaaguaaaauaugugu

SEQ ID NO: 202844 - RNA, 22 nt, Human
cugccaccaaauagcugcauga

SEQ ID NO: 202845 - RNA, 22 nt, Human
aggcccuguccauggugcugaa

SEQ ID NO: 202846 - RNA, 22 nt, Human
ucacagaagguggccauagcug

SEQ ID NO: 202847 - RNA, 22 nt, Human
agugucugccuauuuuucaagc

SEQ ID NO: 202848 - RNA, 22 nt, Human
ccagaauaggaguaauaaaacc

SEQ ID NO: 202849 - RNA, 22 nt, Human
ucauguauugaaaagcauuuua

SEQ ID NO: 202850 - RNA, 19 nt, Human
agcuuuuacuaacagcaga

SEQ ID NO: 202851 - RNA, 22 nt, Human
cucuggcuuaguaugcuccaaa

SEQ ID NO: 202852 - RNA, 22 nt, Human
aauuucaauuacuuuugcacca

SEQ ID NO: 202853 - RNA, 22 nt, Human
uuuccaaauaaggucacacuca

SEQ ID NO: 202854 - RNA, 22 nt, Human
ccaguggguaggccauggugag

SEQ ID NO: 202855 - RNA, 22 nt, Human
cugagcugguggaagcaugcag

SEQ ID NO: 202856 - RNA, 22 nt, Human
gacagguggguucucguaucug

SEQ ID NO: 202857 - RNA, 22 nt, Human
uaguguucuaagaacauccaug

SEQ ID NO: 202858 - RNA, 22 nt, Human
uuuccuucuuagcgguguucuu

SEQ ID NO: 202859 - RNA, 23 nt, Human
acaaugcacuuuaaaugguuccc

SEQ ID NO: 202860 - RNA, 22 nt, Human
agacaauuaaaaaauuaugcuu

SEQ ID NO: 202861 - RNA, 22 nt, Human
acaaucuggaaaaguuaacuau

SEQ ID NO: 202862 - RNA, 22 nt, Human
uauuuagaaugcguguacgugu

SEQ ID NO: 202863 - RNA, 22 nt, Human
ucucaggcuuccuggugcugug

SEQ ID NO: 202864 - RNA, 22 nt, Human
ugagaggauauuuugggaggau

SEQ ID NO: 202865 - RNA, 22 nt, Human
gacagggaaacauugaaguguc

SEQ ID NO: 202866 - RNA, 22 nt, Human
uaauauaccaaacuguaauuuu

SEQ ID NO: 202867 - RNA, 23 nt, Human
gaagugucugagcuguauuuuuc

SEQ ID NO: 202868 - RNA, 21 nt, Human
ucagagucucaggagcaaggg

SEQ ID NO: 202869 - RNA, 22 nt, Human
uuacaggugggaaaacuaagcu

SEQ ID NO: 202870 - RNA, 22 nt, Human
gcagggacaucuucagaucacu

SEQ ID NO: 202871 - RNA, 22 nt, Human
ugaggcaggacauggacaacug

SEQ ID NO: 202872 - RNA, 22 nt, Human
uacaauacuuaaccuauuuugc

SEQ ID NO: 202873 - RNA, 22 nt, Human
gcagcccagguggaguaaucua

SEQ ID NO: 202874 - RNA, 23 nt, Human
agggagcuaaaaggcuggagcag

SEQ ID NO: 202875 - RNA, 22 nt, Human
gugggcagugguuugcgcgguc

SEQ ID NO: 202876 - RNA, 20 nt, Human
gaagcagcuucauguagaca

SEQ ID NO: 202877 - RNA, 22 nt, Human
auggggagagaagggcugagcu

SEQ ID NO: 202878 - RNA, 20 nt, Human
ucauuguguugccaauuccc

SEQ ID NO: 202879 - RNA, 22 nt, Human
agaggcaguauacaauccgagc

SEQ ID NO: 202880 - RNA, 21 nt, Human
ugguuucuaagcugucagucu

SEQ ID NO: 202881 - RNA, 22 nt, Human
agggcugaguggugcagucaaa

SEQ ID NO: 202882 - RNA, 22 nt, Human
acaguacaaaacccaccagagg

SEQ ID NO: 202883 - RNA, 18 nt, Human
acuguuaucugauaaggc

SEQ ID NO: 202884 - RNA, 22 nt, Human
ucaucugucccaggcuuuuuuc

SEQ ID NO: 202885 - RNA, 22 nt, Human
ucuuugcauuccugugugcuuu

SEQ ID NO: 202886 - RNA, 22 nt, Human
ucugugcucaugcaugugaauu

SEQ ID NO: 202887 - RNA, 22 nt, Human
uagugaaaugagaauguaugac

SEQ ID NO: 202888 - RNA, 22 nt, Human
ucauaaaugcagugucauaaau

SEQ ID NO: 202889 - RNA, 22 nt, Human
agcugccuccuggugccccauc

SEQ ID NO: 202890 - RNA, 22 nt, Human
ugagggggguaaucacuggguu

SEQ ID NO: 202891 - RNA, 22 nt, Human
uaaagcugaaaugauuaugaca

SEQ ID NO: 202892 - RNA, 21 nt, Human
ccuggacuaaaaccaggccac

SEQ ID NO: 202893 - RNA, 19 nt, Human
cccucauucacuuauucuc

SEQ ID NO: 202894 - RNA, 22 nt, Human
ugucuuuacuuaauaaauauac

SEQ ID NO: 202895 - RNA, 22 nt, Human
uuugacucuugcccaguuuggc

SEQ ID NO: 202896 - RNA, 22 nt, Human
uggcccugggcaucuuucguga

SEQ ID NO: 202897 - RNA, 22 nt, Human
uuggagaauguuuuccugcagu

SEQ ID NO: 202898 - RNA, 22 nt, Human
uucaagcaccaaauuaguaggc

SEQ ID NO: 202899 - RNA, 22 nt, Human
agaguuugaauuuugaaaagau

SEQ ID NO: 202900 - RNA, 22 nt, Human
uggcagccuucucugagaaggu

SEQ ID NO: 202901 - RNA, 22 nt, Human
ucagggaccccucugaguggag

SEQ ID NO: 202902 - RNA, 22 nt, Human
agccuuccagguagauggcaca

SEQ ID NO: 202903 - RNA, 22 nt, Human
ucacuuuggauuauguaauuuc

SEQ ID NO: 202904 - RNA, 22 nt, Human
cagaaucuguugggguugcaga

SEQ ID NO: 202905 - RNA, 22 nt, Human
ggcuuuugaauuccaaggcauu

SEQ ID NO: 202906 - RNA, 22 nt, Human
uuguuuuaucuuucuacagacu

SEQ ID NO: 202907 - RNA, 22 nt, Human
guggcagucgcugacagauaca

SEQ ID NO: 202908 - RNA, 22 nt, Human
ggggccagcuucgcgugcucuu

SEQ ID NO: 202909 - RNA, 21 nt, Human
cacauuccaugggucuauuua

SEQ ID NO: 202910 - RNA, 22 nt, Human
gguccugcgucuggcucgcccg

SEQ ID NO: 202911 - RNA, 22 nt, Human
gcuggcagcuggaaguugggcu

SEQ ID NO: 202912 - RNA, 17 nt, Human
gcucugccccagccucu

SEQ ID NO: 202913 - RNA, 22 nt, Human
uagaaagagcuuugcuuccuuu

SEQ ID NO: 202914 - RNA, 20 nt, Human
gagggcaggcacccauuuca

SEQ ID NO: 202915 - RNA, 22 nt, Human
uuaugaaaacaaucaguaggca

SEQ ID NO: 202916 - RNA, 22 nt, Human
ucuuuccacauucucuguuuag

SEQ ID NO: 202917 - RNA, 22 nt, Human
gcccuggaugcucauggcauca

SEQ ID NO: 202918 - RNA, 22 nt, Human
aagucuggaagucucaguuuuc

SEQ ID NO: 202919 - RNA, 22 nt, Human
cccugagcgugaggaggaagua

SEQ ID NO: 202920 - RNA, 22 nt, Human
uugguguugaacaaaacuaaau

SEQ ID NO: 202921 - RNA, 22 nt, Human
auucaagcugaauggugacaga

SEQ ID NO: 202922 - RNA, 22 nt, Human
ugucuucgcuacaaugaaaagg

SEQ ID NO: 202923 - RNA, 22 nt, Human
cggaaacuacgugacacccguu

SEQ ID NO: 202924 - RNA, 22 nt, Human
caguuuuaggacauguggaugu

SEQ ID NO: 202925 - RNA, 22 nt, Human
ccaggccagccuggagcauggc

SEQ ID NO: 202926 - RNA, 22 nt, Human
ggcacagggaggcccuggugug

SEQ ID NO: 202927 - RNA, 22 nt, Human
cagcccucaucccgccugcguu

SEQ ID NO: 202928 - RNA, 22 nt, Human
augaggauguuaguggacugga

SEQ ID NO: 202929 - RNA, 22 nt, Human
agaacaucuaaauaucugagac

SEQ ID NO: 202930 - RNA, 22 nt, Human
aauagcaaaguuaucaaauuaa

SEQ ID NO: 202931 - RNA, 21 nt, Human
uucuccuccaaguugcuccug

SEQ ID NO: 202932 - RNA, 22 nt, Human
uuuguguuaaauguuaaauuca

SEQ ID NO: 202933 - RNA, 22 nt, Human
augcagagcuuccaguggccug

SEQ ID NO: 202934 - RNA, 22 nt, Human
auauucacuggguacuaaaaag

SEQ ID NO: 202935 - RNA, 22 nt, Human
uuauuagcugggcuucagggug

SEQ ID NO: 202936 - RNA, 23 nt, Human
uggcucuguggaucccucaggag

SEQ ID NO: 202937 - RNA, 22 nt, Human
agugagcauucguuuggaaccc

SEQ ID NO: 202938 - RNA, 22 nt, Human
uggcugacaauguagcaguaac

SEQ ID NO: 202939 - RNA, 22 nt, Human
acacaugaaauaauauuaugca

SEQ ID NO: 202940 - RNA, 20 nt, Human
gaggagucuuguagaaaaug

SEQ ID NO: 202941 - RNA, 21 nt, Human
ucuugaaaaguuagauucucu

SEQ ID NO: 202942 - RNA, 22 nt, Human
uaagaaacuuaacugggaacua

SEQ ID NO: 202943 - RNA, 22 nt, Human
caaauuaaugugucucaaaaua

SEQ ID NO: 202944 - RNA, 22 nt, Human
aucaggaucugcaucauaagaa

SEQ ID NO: 202945 - RNA, 22 nt, Human
uucacauugugguucaugugaa

SEQ ID NO: 202946 - RNA, 22 nt, Human
cucuuuccaggguaccccaggu

SEQ ID NO: 202947 - RNA, 22 nt, Human
ccaggucuuguuugacaucaau

SEQ ID NO: 202948 - RNA, 22 nt, Human
uacaggaaguuacagacuauga

SEQ ID NO: 202949 - RNA, 22 nt, Human
caagaauccuguucuugaagau

SEQ ID NO: 202950 - RNA, 22 nt, Human
cugagccaugggucuaagcacu

SEQ ID NO: 202951 - RNA, 22 nt, Human
ggcaggugagagcucuuugaaa

SEQ ID NO: 202952 - RNA, 22 nt, Human
uuucccagccuccuuugcagcu

SEQ ID NO: 202953 - RNA, 22 nt, Human
aaacauagauaauagauagaug

SEQ ID NO: 202954 - RNA, 22 nt, Human
uuuccauguuggugaaaugagg

SEQ ID NO: 202955 - RNA, 23 nt, Human
uuccugugguauauuuuauaggg

SEQ ID NO: 202956 - RNA, 22 nt, Human
uucaguguggcccaugaagagg

SEQ ID NO: 202957 - RNA, 22 nt, Human
cugcacccucaaacuccugggc

SEQ ID NO: 202958 - RNA, 22 nt, Human
caaggaggcagugggacuugaa

SEQ ID NO: 202959 - RNA, 20 nt, Human
uuccacaucuuugcacaugc

SEQ ID NO: 202960 - RNA, 22 nt, Human
gagcacaggcugcugugaacug

SEQ ID NO: 202961 - RNA, 22 nt, Human
aacagacagaaaaaugugaucu

SEQ ID NO: 202962 - RNA, 22 nt, Human
uggaaauaugcuccauucuuuu

SEQ ID NO: 202963 - RNA, 22 nt, Human
ggagaugccagaauugcaaauu

SEQ ID NO: 202964 - RNA, 22 nt, Human
ggagaggugagagguacaaguu

SEQ ID NO: 202965 - RNA, 22 nt, Human
caggaggcccaaagggcgcaga

SEQ ID NO: 202966 - RNA, 22 nt, Human
gauggcagguaguggucucauc

SEQ ID NO: 202967 - RNA, 22 nt, Human
uuagauacauucucauuuguuu

SEQ ID NO: 202968 - RNA, 22 nt, Human
uuuucauugagcaccugaguaa

SEQ ID NO: 202969 - RNA, 22 nt, Human
uagcaacaugguuaucacauua

SEQ ID NO: 202970 - RNA, 22 nt, Human
cccccaccugaggacagucuua

SEQ ID NO: 202971 - RNA, 22 nt, Human
ccuccccacagcccaggagacu

SEQ ID NO: 202972 - RNA, 22 nt, Human
gaggcacaguucuuccuccaga

SEQ ID NO: 202973 - RNA, 22 nt, Human
gaacaaauuggagaaaucagga

SEQ ID NO: 202974 - RNA, 22 nt, Human
agcccuccuuuguucaugcugc

SEQ ID NO: 202975 - RNA, 22 nt, Human
aauuugcaugaugagaacaaua

SEQ ID NO: 202976 - RNA, 22 nt, Human
guuguauuugccugaaugcagu

SEQ ID NO: 202977 - RNA, 23 nt, Human
agcaaaguuguugcuaaccucau

SEQ ID NO: 202978 - RNA, 22 nt, Human
gaagucuuuuagcaaaacgaac

SEQ ID NO: 202979 - RNA, 22 nt, Human
auccaaaggugacacagaauac

SEQ ID NO: 202980 - RNA, 22 nt, Human
ccaaguacagauuccuccacug

SEQ ID NO: 202981 - RNA, 22 nt, Human
agcaaacacaagagguaauuuc

SEQ ID NO: 202982 - RNA, 22 nt, Human
ugggucagaaucagagaguugc

SEQ ID NO: 202983 - RNA, 22 nt, Human
uuucauuauacagcuucauaaa

SEQ ID NO: 202984 - RNA, 22 nt, Human
gaggcucacuaggcauccuggg

SEQ ID NO: 202985 - RNA, 22 nt, Human
agcuacaguggacaagugaacu

SEQ ID NO: 202986 - RNA, 22 nt, Human
gauaaagggggaccaaaugacu

SEQ ID NO: 202987 - RNA, 22 nt, Human
aagccaaguuggaagacugaau

SEQ ID NO: 202988 - RNA, 22 nt, Human
gccaucugcugcucuccagugu

SEQ ID NO: 202989 - RNA, 22 nt, Human
auggccuggggauuccugagca

SEQ ID NO: 202990 - RNA, 17 nt, Human
agcagcugaagcagcca

SEQ ID NO: 202991 - RNA, 22 nt, Human
ccagagaguaggaggcauuauu

SEQ ID NO: 202992 - RNA, 22 nt, Human
acaguggaaagaaacgaauuag

SEQ ID NO: 202993 - RNA, 20 nt, Human
uuagaaagagcgugauaaga

SEQ ID NO: 202994 - RNA, 22 nt, Human
uuguguccauuugagucaugug

SEQ ID NO: 202995 - RNA, 22 nt, Human
gaaggagaggauugugaggcug

SEQ ID NO: 202996 - RNA, 22 nt, Human
uagaaagugaagguuaauuaau

SEQ ID NO: 202997 - RNA, 22 nt, Human
uggcuucccauagcuugcuagu

SEQ ID NO: 202998 - RNA, 22 nt, Human
auuaggaaauguguugcaagca

SEQ ID NO: 202999 - RNA, 22 nt, Human
ugaguuuuuucaacauaugaag

SEQ ID NO: 203000 - RNA, 22 nt, Human
uacuguuuucuuuauaguacag

SEQ ID NO: 203001 - RNA, 22 nt, Human
gucugcccucacaugcacucuu

SEQ ID NO: 203002 - RNA, 22 nt, Human
uagaaaucagguuuuuagaaag

SEQ ID NO: 203003 - RNA, 22 nt, Human
ucccagccacaguuuccaccug

SEQ ID NO: 203004 - RNA, 22 nt, Human
uuuaguagaauaguauaucaaa

SEQ ID NO: 203005 - RNA, 22 nt, Human
uuuaccuucuuuuaacuacagu

SEQ ID NO: 203006 - RNA, 22 nt, Human
ugucagugguagacccagaggu

SEQ ID NO: 203007 - RNA, 22 nt, Human
cccuuccuggaguacccucugu

SEQ ID NO: 203008 - RNA, 21 nt, Human
agauguuucccccuuggcuuc

SEQ ID NO: 203009 - RNA, 22 nt, Human
cuguguccuccccaucacuucu

SEQ ID NO: 203010 - RNA, 23 nt, Human
aguguugguugggaagccaagca

SEQ ID NO: 203011 - RNA, 22 nt, Human
guggcugcagagccagcaagcu

SEQ ID NO: 203012 - RNA, 22 nt, Human
aaggcaggaugcggacccaucu

SEQ ID NO: 203013 - RNA, 22 nt, Human
uucuguaggcauggaacaggga

SEQ ID NO: 203014 - RNA, 22 nt, Human
ucacacacauuugcugucugau

SEQ ID NO: 203015 - RNA, 22 nt, Human
uuguuucuucauuuagaagcuu

SEQ ID NO: 203016 - RNA, 20 nt, Human
acauagaucagugauugaca

SEQ ID NO: 203017 - RNA, 22 nt, Human
gucauauacacugcauguaauc

SEQ ID NO: 203018 - RNA, 22 nt, Human
aaaggcuuuaaaauguacauau

SEQ ID NO: 203019 - RNA, 22 nt, Human
uuuaucuuuaggacuuugcaga

SEQ ID NO: 203020 - RNA, 22 nt, Human
uaauuucuagggacuaaggugc

SEQ ID NO: 203021 - RNA, 22 nt, Human
cgaggcaggcaggcggaggaua

SEQ ID NO: 203022 - RNA, 22 nt, Human
cagcucugguuccugggcccag

SEQ ID NO: 203023 - RNA, 22 nt, Human
uacuuucuuucccaagaggugg

SEQ ID NO: 203024 - RNA, 22 nt, Human
gagacagaguuucacucuuguu

SEQ ID NO: 203025 - RNA, 22 nt, Human
ccaggagagcucucguucagug

SEQ ID NO: 203026 - RNA, 22 nt, Human
uauacuucccugcagaguaaag

SEQ ID NO: 203027 - RNA, 22 nt, Human
acauucaaaauugugguuuaga

SEQ ID NO: 203028 - RNA, 22 nt, Human
gaggaagcuuuugaucgcccag

SEQ ID NO: 203029 - RNA, 22 nt, Human
uacuaguucucauaugaaauaa

SEQ ID NO: 203030 - RNA, 22 nt, Human
ucuuucaaugugaaaccaugua

SEQ ID NO: 203031 - RNA, 22 nt, Human
cagcacugugauaacugagcca

SEQ ID NO: 203032 - RNA, 22 nt, Human
aagggcucugggcuacgcacug

SEQ ID NO: 203033 - RNA, 22 nt, Human
gccuguggcccaacugucuguc

SEQ ID NO: 203034 - RNA, 19 nt, Human
cagagcugcuggccucguc

SEQ ID NO: 203035 - RNA, 22 nt, Human
gucuggaaauuuaagguaugag

SEQ ID NO: 203036 - RNA, 22 nt, Human
uaauuuuaauaguauguggcau

SEQ ID NO: 203037 - RNA, 22 nt, Human
guuauauucaaaaugaggcugu

SEQ ID NO: 203038 - RNA, 22 nt, Human
ugacuccaaacagaaaacgaau

SEQ ID NO: 203039 - RNA, 22 nt, Human
ugggaccagauaaagggagguc

SEQ ID NO: 203040 - RNA, 22 nt, Human
auuucuguugcuuauaaauuac

SEQ ID NO: 203041 - RNA, 22 nt, Human
uggcugggccgggccuugugcc

SEQ ID NO: 203042 - RNA, 20 nt, Human
ggauuuacaggggaaaagug

SEQ ID NO: 203043 - RNA, 22 nt, Human
cccugcagaccaaugccauaga

SEQ ID NO: 203044 - RNA, 22 nt, Human
auggccagcaaguucagaauuu

SEQ ID NO: 203045 - RNA, 22 nt, Human
caguucuggaggauagaagucu

SEQ ID NO: 203046 - RNA, 22 nt, Human
augugcuguaauccauugaagg

SEQ ID NO: 203047 - RNA, 22 nt, Human
aagcccuggcggguggagggcc

SEQ ID NO: 203048 - RNA, 22 nt, Human
cugaggcuuguccucucagcuu

SEQ ID NO: 203049 - RNA, 22 nt, Human
gugcgggccuggggguuucucu

SEQ ID NO: 203050 - RNA, 22 nt, Human
agaaccauuuugacagauauac

SEQ ID NO: 203051 - RNA, 22 nt, Human
ucuguucuucuccacuguaugu

SEQ ID NO: 203052 - RNA, 22 nt, Human
aagcugaggcccauggcaaggu

SEQ ID NO: 203053 - RNA, 22 nt, Human
auaacauggaguuugucauuua

SEQ ID NO: 203054 - RNA, 23 nt, Human
gccuucagcucgggaaggcuccc

SEQ ID NO: 203055 - RNA, 18 nt, Human
uggaggcagaguucuggc

SEQ ID NO: 203056 - RNA, 22 nt, Human
cucucugugcucacaagggcag

SEQ ID NO: 203057 - RNA, 22 nt, Human
ugcaggugguacuucuuuuucu

SEQ ID NO: 203058 - RNA, 22 nt, Human
ucugugcuaaugcuucacaaua

SEQ ID NO: 203059 - RNA, 22 nt, Human
ucacacagguuugcaaugauuu

SEQ ID NO: 203060 - RNA, 22 nt, Human
ucuuuaauuguggaagagcagc

SEQ ID NO: 203061 - RNA, 22 nt, Human
gucuguagaauaaauaugagua

SEQ ID NO: 203062 - RNA, 22 nt, Human
uacugugguaacauuuuaaauu

SEQ ID NO: 203063 - RNA, 22 nt, Human
aacaggccuuguuuuuguucau

SEQ ID NO: 203064 - RNA, 22 nt, Human
aaagugaggacuugaguacugu

SEQ ID NO: 203065 - RNA, 19 nt, Human
cucuggagcagacacugga

SEQ ID NO: 203066 - RNA, 22 nt, Human
agauccaugugauuuggaguuc

SEQ ID NO: 203067 - RNA, 22 nt, Human
aaagucauacauggugcuuacu

SEQ ID NO: 203068 - RNA, 22 nt, Human
gggcuucucugggaguccuggu

SEQ ID NO: 203069 - RNA, 22 nt, Human
acagguguagaaaacagauuau

SEQ ID NO: 203070 - RNA, 22 nt, Human
ggaccaggcugagcaccugccu

SEQ ID NO: 203071 - RNA, 22 nt, Human
uacagagaacucauagaaagaa

SEQ ID NO: 203072 - RNA, 21 nt, Human
gacaggugauucagagcaggg

SEQ ID NO: 203073 - RNA, 21 nt, Human
gugcugggacacagccaggcu

SEQ ID NO: 203074 - RNA, 22 nt, Human
ucagaacaucccagauaguaga

SEQ ID NO: 203075 - RNA, 22 nt, Human
auccauuuuuucagaaugcucu

SEQ ID NO: 203076 - RNA, 22 nt, Human
gcuggcaggauagaagucuaau

SEQ ID NO: 203077 - RNA, 22 nt, Human
aggucaagggagcugagggcca

SEQ ID NO: 203078 - RNA, 22 nt, Human
ccugccuguacuagagacccag

SEQ ID NO: 203079 - RNA, 22 nt, Human
gggcucuguuuagaucagagau

SEQ ID NO: 203080 - RNA, 22 nt, Human
ugucuagaggccaacaggaaag

SEQ ID NO: 203081 - RNA, 22 nt, Human
gcagauggcagcccaggcuggg

SEQ ID NO: 203082 - RNA, 22 nt, Human
agagaguugaggaagcaacacu

SEQ ID NO: 203083 - RNA, 22 nt, Human
aggguggggugcuacaucuuua

SEQ ID NO: 203084 - RNA, 22 nt, Human
uggcugagaaguucugguggga

SEQ ID NO: 203085 - RNA, 22 nt, Human
guagggcaacaugggcacuagg

SEQ ID NO: 203086 - RNA, 22 nt, Human
ugacagacuuuacuucuccuau

SEQ ID NO: 203087 - RNA, 22 nt, Human
gggcuuggccccagaagagcua

SEQ ID NO: 203088 - RNA, 22 nt, Human
gucucaguccgugcuguucagg

SEQ ID NO: 203089 - RNA, 22 nt, Human
uacauucaaacgauuuauugau

SEQ ID NO: 203090 - RNA, 22 nt, Human
ggcaccagcaggcaccgaugcc

SEQ ID NO: 203091 - RNA, 22 nt, Human
aagucccuuuaaucagugccuu

SEQ ID NO: 203092 - RNA, 22 nt, Human
uucacuguuaugaagcucuggg

SEQ ID NO: 203093 - RNA, 22 nt, Human
ugcuggcugccagguucccugu

SEQ ID NO: 203094 - RNA, 18 nt, Human
caauagaaacaguaggaa

SEQ ID NO: 203095 - RNA, 22 nt, Human
caaauaguuuuucauguauuau

SEQ ID NO: 203096 - RNA, 22 nt, Human
cuucuucauguauugauagucu

SEQ ID NO: 203097 - RNA, 22 nt, Human
uuccuggggacuuaccgucauu

SEQ ID NO: 203098 - RNA, 22 nt, Human
acaauuagcugugugucuaucu

SEQ ID NO: 203099 - RNA, 22 nt, Human
gaacugguuacagagggauguu

SEQ ID NO: 203100 - RNA, 22 nt, Human
cugaagcaauugagagauguuu

SEQ ID NO: 203101 - RNA, 22 nt, Human
cucuucuuuaguccagaccauc

SEQ ID NO: 203102 - RNA, 22 nt, Human
cugucucuguugccuguaggug

SEQ ID NO: 203103 - RNA, 22 nt, Human
guccuggggaauacagaagccg

SEQ ID NO: 203104 - RNA, 22 nt, Human
ccccagcagcaccuggggcagu

SEQ ID NO: 203105 - RNA, 19 nt, Human
cugguccugacugaggggu

SEQ ID NO: 203106 - RNA, 22 nt, Human
uuggaaaauguauuucuagaag

SEQ ID NO: 203107 - RNA, 22 nt, Human
guggcugcuaagucuccuuccu

SEQ ID NO: 203108 - RNA, 18 nt, Human
caggucagccuggccuca

SEQ ID NO: 203109 - RNA, 22 nt, Human
acaaaauagaguucuccccugg

SEQ ID NO: 203110 - RNA, 22 nt, Human
uggaaacuagagugugggaagc

SEQ ID NO: 203111 - RNA, 22 nt, Human
ucagggcauguauguuucuuua

SEQ ID NO: 203112 - RNA, 22 nt, Human
ggccuuccuguuguguccaccg

SEQ ID NO: 203113 - RNA, 22 nt, Human
cauagcaacagcaucaagucaa

SEQ ID NO: 203114 - RNA, 22 nt, Human
aggcucauccccacaaagcaaa

SEQ ID NO: 203115 - RNA, 22 nt, Human
cucucugaugucaggucgcuga

SEQ ID NO: 203116 - RNA, 22 nt, Human
agcaucagagagaaguuaacua

SEQ ID NO: 203117 - RNA, 22 nt, Human
cccaggaggcagaaguugcagu

SEQ ID NO: 203118 - RNA, 22 nt, Human
auguagucucuuugggaaacuc

SEQ ID NO: 203119 - RNA, 22 nt, Human
ucugcaggaggcuggcugcagg

SEQ ID NO: 203120 - RNA, 22 nt, Human
ggucagcaucugguugagggca

SEQ ID NO: 203121 - RNA, 22 nt, Human
acaaaauuguguuaaacuuuau

SEQ ID NO: 203122 - RNA, 22 nt, Human
gugaauuuaguuuguaagaagg

SEQ ID NO: 203123 - RNA, 22 nt, Human
aaacggaaugaguaagaguauc

SEQ ID NO: 203124 - RNA, 22 nt, Human
cacuugaacccgggaggcugag

SEQ ID NO: 203125 - RNA, 22 nt, Human
aauaacuucauguaacauuuaa

SEQ ID NO: 203126 - RNA, 22 nt, Human
auccugaggaaggugcagagau

SEQ ID NO: 203127 - RNA, 22 nt, Human
gguguucuuaguggcacuggca

SEQ ID NO: 203128 - RNA, 22 nt, Human
uccaggcccagacggggugagg

SEQ ID NO: 203129 - RNA, 22 nt, Human
caaagucauggggaugcagguc

SEQ ID NO: 203130 - RNA, 21 nt, Human
ccugggccaaauucccuggac

SEQ ID NO: 203131 - RNA, 22 nt, Human
agaaacaagguguagguugacc

SEQ ID NO: 203132 - RNA, 22 nt, Human
ugcccugccaagacugaguggu

SEQ ID NO: 203133 - RNA, 22 nt, Human
ccagugucagaaagauuauccu

SEQ ID NO: 203134 - RNA, 22 nt, Human
aaucuugaguguuacucucauu

SEQ ID NO: 203135 - RNA, 21 nt, Human
ggacaccagucacacuggauu

SEQ ID NO: 203136 - RNA, 22 nt, Human
cagacacuaggugacagagugc

SEQ ID NO: 203137 - RNA, 22 nt, Human
agcugagacacuugagagacua

SEQ ID NO: 203138 - RNA, 22 nt, Human
augguauucucagcaccuagca

SEQ ID NO: 203139 - RNA, 22 nt, Human
ccacccugugcaggcgugggua

SEQ ID NO: 203140 - RNA, 22 nt, Human
aggcaacaaggguagucaguga

SEQ ID NO: 203141 - RNA, 22 nt, Human
uugaaaaaauugguagaggaug

SEQ ID NO: 203142 - RNA, 19 nt, Human
agaaucaggucaggugaca

SEQ ID NO: 203143 - RNA, 19 nt, Human
uagaaagccagaaaacaga

SEQ ID NO: 203144 - RNA, 17 nt, Human
gaauuucuuggucaaaa

SEQ ID NO: 203145 - RNA, 18 nt, Human
ugagagccugcuuguccc

SEQ ID NO: 203146 - RNA, 22 nt, Human
uuccagauuucuacacaagacc

SEQ ID NO: 203147 - RNA, 22 nt, Human
uuuguauuuuucccagcuagcu

SEQ ID NO: 203148 - RNA, 22 nt, Human
aauguacaauaagacaaagagg

SEQ ID NO: 203149 - RNA, 22 nt, Human
gcuccuggcucucugagggcug

SEQ ID NO: 203150 - RNA, 22 nt, Human
agacaucuaccuuucauucaaa

SEQ ID NO: 203151 - RNA, 22 nt, Human
auguacaaucuaucacaagaag

SEQ ID NO: 203152 - RNA, 22 nt, Human
ccugaagagugaauguggcagu

SEQ ID NO: 203153 - RNA, 22 nt, Human
uauacacacaugcuccggccuu

SEQ ID NO: 203154 - RNA, 18 nt, Human
gagaggagccagaauuuu

SEQ ID NO: 203155 - RNA, 18 nt, Human
uaaaggaagugggagagg

SEQ ID NO: 203156 - RNA, 22 nt, Human
uagcauaacagguaagagugag

SEQ ID NO: 203157 - RNA, 22 nt, Human
cucuuucucauugucagcagaa

SEQ ID NO: 203158 - RNA, 22 nt, Human
ucauaaaacacaccagguaguu

SEQ ID NO: 203159 - RNA, 22 nt, Human
aaggaagagaauccuucucaga

SEQ ID NO: 203160 - RNA, 22 nt, Human
ggcaggcuugauauggggggac

SEQ ID NO: 203161 - RNA, 22 nt, Human
cucugggcaaguaugauagaaa

SEQ ID NO: 203162 - RNA, 22 nt, Human
ucuuuggaucccaacuggcugg

SEQ ID NO: 203163 - RNA, 22 nt, Human
aacuauguuaauaaguuucauu

SEQ ID NO: 203164 - RNA, 22 nt, Human
aaccuuugaggggagcucuuuc

SEQ ID NO: 203165 - RNA, 22 nt, Human
uucuguggaauaugaacuagca

SEQ ID NO: 203166 - RNA, 22 nt, Human
uaaaguuauaaauuaccuguca

SEQ ID NO: 203167 - RNA, 22 nt, Human
ugguccaguuuagcauugagug

SEQ ID NO: 203168 - RNA, 22 nt, Human
acuuuagaaaaggaacagagga

SEQ ID NO: 203169 - RNA, 22 nt, Human
gcuggcugcagauuuuagaggu

SEQ ID NO: 203170 - RNA, 22 nt, Human
gcucugagcacugugcggcugg

SEQ ID NO: 203171 - RNA, 22 nt, Human
gaccuggugcagguggacagag

SEQ ID NO: 203172 - RNA, 17 nt, Human
ucuuucccugggagaug

SEQ ID NO: 203173 - RNA, 22 nt, Human
cuguauuuaguuaaaaugcuaa

SEQ ID NO: 203174 - RNA, 22 nt, Human
gaguuagagccauagagcacgg

SEQ ID NO: 203175 - RNA, 22 nt, Human
gcagugcagugggacagggcgc

SEQ ID NO: 203176 - RNA, 22 nt, Human
ugucuuucugacccaagguagu

SEQ ID NO: 203177 - RNA, 22 nt, Human
aguaaaaucuuaagcacagugg

SEQ ID NO: 203178 - RNA, 19 nt, Human
cucagcaagauagaaaugg

SEQ ID NO: 203179 - RNA, 22 nt, Human
cagcugccuguauuguccucau

SEQ ID NO: 203180 - RNA, 22 nt, Human
ucaggaagaaauucuguaucuu

SEQ ID NO: 203181 - RNA, 22 nt, Human
gguguccucggauucagggcag

SEQ ID NO: 203182 - RNA, 22 nt, Human
ccugaggaugccagcaugggug

SEQ ID NO: 203183 - RNA, 22 nt, Human
uuuaauaucucacacuuccaug

SEQ ID NO: 203184 - RNA, 22 nt, Human
uaaagccaauauaccuagcaua

SEQ ID NO: 203185 - RNA, 22 nt, Human
caucaaagcuuuuuucuguguu

SEQ ID NO: 203186 - RNA, 22 nt, Human
uagcccagaaagcaaaugucuc

SEQ ID NO: 203187 - RNA, 22 nt, Human
agaaauacuuuguaaaucucac

SEQ ID NO: 203188 - RNA, 22 nt, Human
uuuccaaagguggcaggaacaa

SEQ ID NO: 203189 - RNA, 22 nt, Human
uggccacccagcugacgccuuc

SEQ ID NO: 203190 - RNA, 22 nt, Human
caaauagugucacauugugagg

SEQ ID NO: 203191 - RNA, 22 nt, Human
acacacugagugccauaggacc

SEQ ID NO: 203192 - RNA, 22 nt, Human
uggaaaaaaauuggcuagcuuc

SEQ ID NO: 203193 - RNA, 21 nt, Human
aagagacauuucucaucagca

SEQ ID NO: 203194 - RNA, 22 nt, Human
gugagcagggcaggacugggga

SEQ ID NO: 203195 - RNA, 22 nt, Human
cagagaccccuggcaugguggu

SEQ ID NO: 203196 - RNA, 22 nt, Human
caggcccugccuuggcaugugu

SEQ ID NO: 203197 - RNA, 22 nt, Human
ucauguuuuagcugcaaaauga

SEQ ID NO: 203198 - RNA, 22 nt, Human
gggcacaugcuuagggaggaaa

SEQ ID NO: 203199 - RNA, 22 nt, Human
auaauucagguuuucuggcaca

SEQ ID NO: 203200 - RNA, 22 nt, Human
cagcugaaucagugaguggaaa

SEQ ID NO: 203201 - RNA, 22 nt, Human
gccuguggguuggagcuuggcc

SEQ ID NO: 203202 - RNA, 22 nt, Human
ggcuaggcgggcacauggugga

SEQ ID NO: 203203 - RNA, 22 nt, Human
cucagcccggugcucgugccac

SEQ ID NO: 203204 - RNA, 23 nt, Human
uccuccuuuugcuugugcuuccc

SEQ ID NO: 203205 - RNA, 22 nt, Human
uuagccauucugauagguaugu

SEQ ID NO: 203206 - RNA, 22 nt, Human
acgcgcaaccaggcaugcacau

SEQ ID NO: 203207 - RNA, 22 nt, Human
uauuguacauuucaaaguagcu

SEQ ID NO: 203208 - RNA, 22 nt, Human
cugggcucuucucacccuguuu

SEQ ID NO: 203209 - RNA, 22 nt, Human
gagcuguuaagagggagugaca

SEQ ID NO: 203210 - RNA, 23 nt, Human
cagggcugguagggaagagcgug

SEQ ID NO: 203211 - RNA, 22 nt, Human
aggggaugccugaggaucugua

SEQ ID NO: 203212 - RNA, 22 nt, Human
agcagguggauuuagacgggag

SEQ ID NO: 203213 - RNA, 21 nt, Human
cuguuucuugugaagugacac

SEQ ID NO: 203214 - RNA, 22 nt, Human
uaaacugcuucucucagucugu

SEQ ID NO: 203215 - RNA, 22 nt, Human
augccuggucccaccucuaggu

SEQ ID NO: 203216 - RNA, 18 nt, Human
caggcccugucuggccuc

SEQ ID NO: 203217 - RNA, 22 nt, Human
uacaugcuccacuuucuccugu

SEQ ID NO: 203218 - RNA, 22 nt, Human
ugggcaccugaggccuggcagg

SEQ ID NO: 203219 - RNA, 22 nt, Human
ugcagcuguaacagaggccuca

SEQ ID NO: 203220 - RNA, 22 nt, Human
aaggcacucauucaaggagaua

SEQ ID NO: 203221 - RNA, 22 nt, Human
ugcacacaggucuaggacaugg

SEQ ID NO: 203222 - RNA, 22 nt, Human
cucagcuccagcccucagcagc

SEQ ID NO: 203223 - RNA, 22 nt, Human
ggcuucugguaaagaccacacc

SEQ ID NO: 203224 - RNA, 22 nt, Human
aauacacuauuuugugcucagu

SEQ ID NO: 203225 - RNA, 22 nt, Human
gaagacauguuuuuaauaugua

SEQ ID NO: 203226 - RNA, 22 nt, Human
uccccaguaagccugcacugug

SEQ ID NO: 203227 - RNA, 22 nt, Human
agguagggaagaaggcaugaaa

SEQ ID NO: 203228 - RNA, 22 nt, Human
gcucucugcagccuccuuggag

SEQ ID NO: 203229 - RNA, 22 nt, Human
uuucaaagucaagaaggauacu

SEQ ID NO: 203230 - RNA, 22 nt, Human
gcuuccucccugcugcucacua

SEQ ID NO: 203231 - RNA, 22 nt, Human
acugccaaugguaguuugaugg

SEQ ID NO: 203232 - RNA, 22 nt, Human
acucuguaauucuauaugcagu

SEQ ID NO: 203233 - RNA, 22 nt, Human
augaggcaaagguggagguggg

SEQ ID NO: 203234 - RNA, 22 nt, Human
uccauuuuguagguaugcuaca

SEQ ID NO: 203235 - RNA, 19 nt, Human
uuagccauccacagugaaa

SEQ ID NO: 203236 - RNA, 22 nt, Human
aaggguccaaggcuuugcguuu

SEQ ID NO: 203237 - RNA, 22 nt, Human
gaguccuggcguccaauuuccu

SEQ ID NO: 203238 - RNA, 22 nt, Human
cucuuagauauggagaauuacc

SEQ ID NO: 203239 - RNA, 22 nt, Human
agagcacagccaccauuuacaa

SEQ ID NO: 203240 - RNA, 22 nt, Human
auguuucugaaguuuacagaua

SEQ ID NO: 203241 - RNA, 20 nt, Human
ucacaauaugagcucauaca

SEQ ID NO: 203242 - RNA, 22 nt, Human
cuggcccauugccuucucucuc

SEQ ID NO: 203243 - RNA, 22 nt, Human
ugaucuuuucaaagacaagcuu

SEQ ID NO: 203244 - RNA, 22 nt, Human
agaggccuaauugcuacccuuu

SEQ ID NO: 203245 - RNA, 22 nt, Human
agauauaauaauuuacaagugu

SEQ ID NO: 203246 - RNA, 18 nt, Human
guucaucuuuuucuaaag

SEQ ID NO: 203247 - RNA, 22 nt, Human
aagaggcgccggguacguggcg

SEQ ID NO: 203248 - RNA, 22 nt, Human
uucagaaaaaacuucaauaagu

SEQ ID NO: 203249 - RNA, 22 nt, Human
agucugugaaaagauaggaagu

SEQ ID NO: 203250 - RNA, 22 nt, Human
gagugcauggacuacuggcuug

SEQ ID NO: 203251 - RNA, 22 nt, Human
uggccaggccucuuggugccca

SEQ ID NO: 203252 - RNA, 22 nt, Human
ucugaagguuacuucugcucag

SEQ ID NO: 203253 - RNA, 22 nt, Human
uaaauagaaucuaaacugcuca

SEQ ID NO: 203254 - RNA, 21 nt, Human
cucccagggugacuguucaac

SEQ ID NO: 203255 - RNA, 22 nt, Human
uggcuucaagucuagguucuac

SEQ ID NO: 203256 - RNA, 21 nt, Human
agugccaguagguauggagga

SEQ ID NO: 203257 - RNA, 21 nt, Human
gcucaggcucuugacagagca

SEQ ID NO: 203258 - RNA, 21 nt, Human
gccaaggaggcuagagaacau

SEQ ID NO: 203259 - RNA, 22 nt, Human
ggugcugacugaggauggcuug

SEQ ID NO: 203260 - RNA, 22 nt, Human
ucugggauuuuugacacugaag

SEQ ID NO: 203261 - RNA, 22 nt, Human
ccuuccuuucagggcuaugccu

SEQ ID NO: 203262 - RNA, 22 nt, Human
accaguuuguaaccuguuuuca

SEQ ID NO: 203263 - RNA, 22 nt, Human
cuuauagaauuagagagauuuu

SEQ ID NO: 203264 - RNA, 22 nt, Human
agauggaguuaguaccagaguc

SEQ ID NO: 203265 - RNA, 22 nt, Human
gugaacaggagaaagugaugga

SEQ ID NO: 203266 - RNA, 19 nt, Human
gcuaggguugguggcgugc

SEQ ID NO: 203267 - RNA, 21 nt, Human
aggcagccagucaugcucccu

SEQ ID NO: 203268 - RNA, 22 nt, Human
cuuguauuaugguucgcuuagu

SEQ ID NO: 203269 - RNA, 22 nt, Human
cucauuuacuguagaacaguua

SEQ ID NO: 203270 - RNA, 18 nt, Human
cucuagaaugggagauuu

SEQ ID NO: 203271 - RNA, 22 nt, Human
ucaggcaggcagagggcaaaug

SEQ ID NO: 203272 - RNA, 22 nt, Human
auggauaaucaugaacuuugag

SEQ ID NO: 203273 - RNA, 22 nt, Human
auggcagagggauugaacagcu

SEQ ID NO: 203274 - RNA, 22 nt, Human
cguggcaguggaaggcugggug

SEQ ID NO: 203275 - RNA, 22 nt, Human
gagggccagcagccucagcaug

SEQ ID NO: 203276 - RNA, 22 nt, Human
ggggugggguuacucauugugc

SEQ ID NO: 203277 - RNA, 22 nt, Human
uuuuaaacugcagaauuuagaa

SEQ ID NO: 203278 - RNA, 23 nt, Human
agacugaggcugccagggucaga

SEQ ID NO: 203279 - RNA, 22 nt, Human
gcacaggcaauagauacagcua

SEQ ID NO: 203280 - RNA, 22 nt, Human
gcacagcuccugguaagcuggg

SEQ ID NO: 203281 - RNA, 22 nt, Human
uuuuggcucuugguaggucaga

SEQ ID NO: 203282 - RNA, 22 nt, Human
cucaggcuugggaggaggccca

SEQ ID NO: 203283 - RNA, 22 nt, Human
uggcuccuuuccgggucuccag

SEQ ID NO: 203284 - RNA, 22 nt, Human
gaugaguaauagcuaaugguuc

SEQ ID NO: 203285 - RNA, 22 nt, Human
ugguccugggcacaguauaugc

SEQ ID NO: 203286 - RNA, 22 nt, Human
ucauagaaugaguuaaugaacu

SEQ ID NO: 203287 - RNA, 20 nt, Human
ggcucaucuugucugcugac

SEQ ID NO: 203288 - RNA, 22 nt, Human
uaguggaggccuguugugugca

SEQ ID NO: 203289 - RNA, 22 nt, Human
agucacuuugcuacucugccuu

SEQ ID NO: 203290 - RNA, 22 nt, Human
ggccugggcccacugucaagag

SEQ ID NO: 203291 - RNA, 22 nt, Human
uagcaccacuucaugcuuucag

SEQ ID NO: 203292 - RNA, 22 nt, Human
uagggcucacugagaugaauau

SEQ ID NO: 203293 - RNA, 22 nt, Human
uucuaagaggcuaaugaagaau

SEQ ID NO: 203294 - RNA, 22 nt, Human
auucaaaagaccaugcagacuc

SEQ ID NO: 203295 - RNA, 22 nt, Human
uuauaugauugagcaucuuggu

SEQ ID NO: 203296 - RNA, 22 nt, Human
aaagccaguuucuggaaguacc

SEQ ID NO: 203297 - RNA, 22 nt, Human
gugcaaaauuuggccaauaaca

SEQ ID NO: 203298 - RNA, 21 nt, Human
cucuuuauauaguaaagauau

SEQ ID NO: 203299 - RNA, 22 nt, Human
ccaggcagucaggguugugugu

SEQ ID NO: 203300 - RNA, 22 nt, Human
ggcugagggccagggcuagucu

SEQ ID NO: 203301 - RNA, 22 nt, Human
ucugagcuccaugcaggaggcu

SEQ ID NO: 203302 - RNA, 22 nt, Human
uaguacacucuguaaguuuaaa

SEQ ID NO: 203303 - RNA, 22 nt, Human
uucuguuacuguuggucauaac

SEQ ID NO: 203304 - RNA, 22 nt, Human
uagugaaaguauuaaacagcug

SEQ ID NO: 203305 - RNA, 22 nt, Human
uacaacauguaaagugguuuaa

SEQ ID NO: 203306 - RNA, 22 nt, Human
agagaugccaccuuuuugcugu

SEQ ID NO: 203307 - RNA, 22 nt, Human
cagagcucugacagcuacagcc

SEQ ID NO: 203308 - RNA, 22 nt, Human
caggcugccgugaagcaggccu

SEQ ID NO: 203309 - RNA, 23 nt, Human
uagauguauuaagugcauuuuca

SEQ ID NO: 203310 - RNA, 22 nt, Human
agcagggguaacagaaggaaag

SEQ ID NO: 203311 - RNA, 22 nt, Human
gucugagggguuucccaggaca

SEQ ID NO: 203312 - RNA, 22 nt, Human
uggaaagagguagaggaucugg

SEQ ID NO: 203313 - RNA, 22 nt, Human
caccagggcucugagcucugaa

SEQ ID NO: 203314 - RNA, 22 nt, Human
gagggcguucagucagugucuc

SEQ ID NO: 203315 - RNA, 21 nt, Human
agguuccagcagccagagaau

SEQ ID NO: 203316 - RNA, 22 nt, Human
uucuuuggcuuacgucuggccu

SEQ ID NO: 203317 - RNA, 22 nt, Human
augguauucucuaacucagcuu

SEQ ID NO: 203318 - RNA, 22 nt, Human
uacaguaaucuggacaugauuu

SEQ ID NO: 203319 - RNA, 21 nt, Human
agaauaaugguaucauuugcu

SEQ ID NO: 203320 - RNA, 22 nt, Human
aauaauauuccucugugugcgu

SEQ ID NO: 203321 - RNA, 22 nt, Human
ugguaagaauaggggcuuugga

SEQ ID NO: 203322 - RNA, 22 nt, Human
aggcagcaagauuauuuaaucc

SEQ ID NO: 203323 - RNA, 22 nt, Human
cacaggagagcugggaggugcc

SEQ ID NO: 203324 - RNA, 22 nt, Human
aggacacagacugauugcagca

SEQ ID NO: 203325 - RNA, 22 nt, Human
acagagcuaaauuucaauccca

SEQ ID NO: 203326 - RNA, 22 nt, Human
aaggugucucucugcuucuugg

SEQ ID NO: 203327 - RNA, 18 nt, Human
agcaguguggcaagcaga

SEQ ID NO: 203328 - RNA, 22 nt, Human
aaggcagaggaaggucuaguuu

SEQ ID NO: 203329 - RNA, 22 nt, Human
uuuaauacagaacuugucaggg

SEQ ID NO: 203330 - RNA, 22 nt, Human
agaguuauggacuuaaugcagg

SEQ ID NO: 203331 - RNA, 17 nt, Human
ggcagccucaggcguuu

SEQ ID NO: 203332 - RNA, 22 nt, Human
agugucugcgggcagaggagcg

SEQ ID NO: 203333 - RNA, 22 nt, Human
gaauuauaggcaaagcagucau

SEQ ID NO: 203334 - RNA, 22 nt, Human
cccagggauguggcagauguua

SEQ ID NO: 203335 - RNA, 22 nt, Human
gccugugcuuaacugacgugag

SEQ ID NO: 203336 - RNA, 22 nt, Human
augaacaaucuggcaagaacuu

SEQ ID NO: 203337 - RNA, 22 nt, Human
gcuauucauggagcauguacug

SEQ ID NO: 203338 - RNA, 18 nt, Human
cucugggagaggcauaca

SEQ ID NO: 203339 - RNA, 22 nt, Human
uuccagcccgcgacuuguucag

SEQ ID NO: 203340 - RNA, 21 nt, Human
ugcagaggcacaaacaagccc

SEQ ID NO: 203341 - RNA, 22 nt, Human
auaacagacuuagaguuacaag

SEQ ID NO: 203342 - RNA, 22 nt, Human
gcagccucugaugauggccgua

SEQ ID NO: 203343 - RNA, 19 nt, Human
ugguccagcuucuucuccu

SEQ ID NO: 203344 - RNA, 22 nt, Human
auucagcagccauggcuucuga

SEQ ID NO: 203345 - RNA, 22 nt, Human
guucaauuuagaaagcacaguu

SEQ ID NO: 203346 - RNA, 22 nt, Human
ccugcaagagcggagaagccag

SEQ ID NO: 203347 - RNA, 22 nt, Human
ucugccuuuucacugccacuaa

SEQ ID NO: 203348 - RNA, 22 nt, Human
gccugcagaacugugaggcaau

SEQ ID NO: 203349 - RNA, 22 nt, Human
gcugcccugucugcagcaggac

SEQ ID NO: 203350 - RNA, 22 nt, Human
gcuucaggguuaugcaagagug

SEQ ID NO: 203351 - RNA, 22 nt, Human
cagcagcuguuuacggaacacc

SEQ ID NO: 203352 - RNA, 21 nt, Human
cuccucaggaccagccacagg

SEQ ID NO: 203353 - RNA, 22 nt, Human
guguccuuauuucugucucuca

SEQ ID NO: 203354 - RNA, 22 nt, Human
ggugacagccgcuugcccugua

SEQ ID NO: 203355 - RNA, 18 nt, Human
cagagcagagguggagcg

SEQ ID NO: 203356 - RNA, 22 nt, Human
gaauguaauagucaguagaaca

SEQ ID NO: 203357 - RNA, 22 nt, Human
uauagaacaaguuauuuaugcu

SEQ ID NO: 203358 - RNA, 22 nt, Human
uuauuguuuacuaguuugcaga

SEQ ID NO: 203359 - RNA, 22 nt, Human
caguggcagaucaccaacugga

SEQ ID NO: 203360 - RNA, 20 nt, Human
ggcaggcaggagguuuccag

SEQ ID NO: 203361 - RNA, 17 nt, Human
uggcaucuuuugcucau

SEQ ID NO: 203362 - RNA, 16 nt, Human
augcugcuauuagagg

SEQ ID NO: 203363 - RNA, 22 nt, Human
ucugugcaccagaaugauauuu

SEQ ID NO: 203364 - RNA, 22 nt, Human
ccuggacucagaggugcuggug

SEQ ID NO: 203365 - RNA, 22 nt, Human
cucucagaaguuuaugucagaa

SEQ ID NO: 203366 - RNA, 22 nt, Human
uucaauucuaaacuaauauucu

SEQ ID NO: 203367 - RNA, 22 nt, Human
uaaauuacucaaugcacauaaa

SEQ ID NO: 203368 - RNA, 19 nt, Human
uuuagcuuacguuucauug

SEQ ID NO: 203369 - RNA, 22 nt, Human
cacagacuccccgccauagugg

SEQ ID NO: 203370 - RNA, 22 nt, Human
gucuguagaugagucuuaagaa

SEQ ID NO: 203371 - RNA, 22 nt, Human
ggcaggcacugugauagauucu

SEQ ID NO: 203372 - RNA, 22 nt, Human
uccaggagguugagacugcagu

SEQ ID NO: 203373 - RNA, 22 nt, Human
uaacaguauccccauuugcaag

SEQ ID NO: 203374 - RNA, 22 nt, Human
gggcaggugugcagagcuguug

SEQ ID NO: 203375 - RNA, 22 nt, Human
ccugggcucaggcuugggcagc

SEQ ID NO: 203376 - RNA, 19 nt, Human
aauuagggagucgguuaag

SEQ ID NO: 203377 - RNA, 21 nt, Human
auuuuguacauagaauuuguc

SEQ ID NO: 203378 - RNA, 22 nt, Human
agaaaucuuuccugaaguguuu

SEQ ID NO: 203379 - RNA, 22 nt, Human
gagcucagguggucaaaacaau

SEQ ID NO: 203380 - RNA, 22 nt, Human
cugccguguuuuucauguuaaa

SEQ ID NO: 203381 - RNA, 22 nt, Human
ccacaugaugaggaagcugaac

SEQ ID NO: 203382 - RNA, 22 nt, Human
cagaauccagaauugcugaggu

SEQ ID NO: 203383 - RNA, 20 nt, Human
guuuagcauggcagugaaag

SEQ ID NO: 203384 - RNA, 22 nt, Human
gcuugggacuggagaauagggu

SEQ ID NO: 203385 - RNA, 22 nt, Human
guccagccacucaccuuccagc

SEQ ID NO: 203386 - RNA, 22 nt, Human
guccagccagcugguccuugcc

SEQ ID NO: 203387 - RNA, 22 nt, Human
aaauucauauguugaaaugcua

SEQ ID NO: 203388 - RNA, 22 nt, Human
agcuuugcagcugugggaggag

SEQ ID NO: 203389 - RNA, 22 nt, Human
cuccugggcucauaucauucag

SEQ ID NO: 203390 - RNA, 22 nt, Human
gccuccggaguugcagugucuu

SEQ ID NO: 203391 - RNA, 22 nt, Human
gcacugcuccagguguggcuug

SEQ ID NO: 203392 - RNA, 22 nt, Human
auuguauaacagcauguauuuu

SEQ ID NO: 203393 - RNA, 22 nt, Human
uugaaugaccaugaugcaaggg

SEQ ID NO: 203394 - RNA, 18 nt, Human
cuguccaguagacucugc

SEQ ID NO: 203395 - RNA, 22 nt, Human
augcaacagucaguacauccgg

SEQ ID NO: 203396 - RNA, 21 nt, Human
uguuucaugcuauuuucuugu

SEQ ID NO: 203397 - RNA, 22 nt, Human
cugguacauaguaagaacacaa

SEQ ID NO: 203398 - RNA, 22 nt, Human
ccuuuggagaguuuguuagggg

SEQ ID NO: 203399 - RNA, 22 nt, Human
acugguaacaauggaagcuucu

SEQ ID NO: 203400 - RNA, 22 nt, Human
ucagucuucuaaagggaugcaa

SEQ ID NO: 203401 - RNA, 22 nt, Human
uuagagcaggaguugacagauu

SEQ ID NO: 203402 - RNA, 22 nt, Human
guaauagucucaaacuccugga

SEQ ID NO: 203403 - RNA, 22 nt, Human
gaaucauuuagcucugcaugga

SEQ ID NO: 203404 - RNA, 22 nt, Human
ucacaaugcaaguguucagugg

SEQ ID NO: 203405 - RNA, 22 nt, Human
cagccaccauacagcagaagcu

SEQ ID NO: 203406 - RNA, 21 nt, Human
cucagggcuugguguccucau

SEQ ID NO: 203407 - RNA, 22 nt, Human
agguucuuuuggccaaccucau

SEQ ID NO: 203408 - RNA, 22 nt, Human
gccagggcugugcagguuuguu

SEQ ID NO: 203409 - RNA, 22 nt, Human
gugcuuuaguucuugcaacugg

SEQ ID NO: 203410 - RNA, 22 nt, Human
aaguguggggucucagagcuga

SEQ ID NO: 203411 - RNA, 22 nt, Human
auagggcuguugugaggauuaa

SEQ ID NO: 203412 - RNA, 22 nt, Human
ggucugaggcuccaaggaggug

SEQ ID NO: 203413 - RNA, 17 nt, Human
gugcagggaugaaggau

SEQ ID NO: 203414 - RNA, 22 nt, Human
ugcagguggauaucucaucaga

SEQ ID NO: 203415 - RNA, 22 nt, Human
agugauuugaggauuauugcuc

SEQ ID NO: 203416 - RNA, 22 nt, Human
ggcuggagugggcuccagaguu

SEQ ID NO: 203417 - RNA, 22 nt, Human
uagugaaaccugacagaucaug

SEQ ID NO: 203418 - RNA, 22 nt, Human
cuagaaucugggauuucugacu

SEQ ID NO: 203419 - RNA, 22 nt, Human
ccagagggcuugguuugggcca

SEQ ID NO: 203420 - RNA, 22 nt, Human
ggcagcccaccagcccacgucu

SEQ ID NO: 203421 - RNA, 22 nt, Human
uagugucaugaaaaguacacua

SEQ ID NO: 203422 - RNA, 22 nt, Human
guccagccacccuggaggcacg

SEQ ID NO: 203423 - RNA, 19 nt, Human
acacugaauguagaauugg

SEQ ID NO: 203424 - RNA, 22 nt, Human
uuuauaugugaagguuugcaga

SEQ ID NO: 203425 - RNA, 19 nt, Human
ucaguggagaaaggggaag

SEQ ID NO: 203426 - RNA, 23 nt, Human
cugagcacagcucugugggccuc

SEQ ID NO: 203427 - RNA, 22 nt, Human
auguuuauggagcagguauuag

SEQ ID NO: 203428 - RNA, 22 nt, Human
cuuccuggcaugggucucauga

SEQ ID NO: 203429 - RNA, 22 nt, Human
aggagcucugggcagggccucc

SEQ ID NO: 203430 - RNA, 22 nt, Human
agcuguggggcaggcagcgagg

SEQ ID NO: 203431 - RNA, 22 nt, Human
cagacaggagacuggaucaugg

SEQ ID NO: 203432 - RNA, 22 nt, Human
uuuccaggaaguaaggauaauc

SEQ ID NO: 203433 - RNA, 22 nt, Human
uauuugcaggacauagauaugg

SEQ ID NO: 203434 - RNA, 22 nt, Human
ugcugcauuugcaguccuuuaa

SEQ ID NO: 203435 - RNA, 22 nt, Human
cacucugagcccaagcaggcug

SEQ ID NO: 203436 - RNA, 21 nt, Human
aggccucuucauggccaugau

SEQ ID NO: 203437 - RNA, 22 nt, Human
ccacaucucgguccccucuuug

SEQ ID NO: 203438 - RNA, 22 nt, Human
acaguauuugcgauacugauga

SEQ ID NO: 203439 - RNA, 22 nt, Human
agacucaagacugcagaagacg

SEQ ID NO: 203440 - RNA, 18 nt, Human
acugcaggagaggugagg

SEQ ID NO: 203441 - RNA, 22 nt, Human
agauguggaacacuagacugcu

SEQ ID NO: 203442 - RNA, 22 nt, Human
aaacugccuccugggcaacuaa

SEQ ID NO: 203443 - RNA, 22 nt, Human
acugugcauuccccaaccugug

SEQ ID NO: 203444 - RNA, 22 nt, Human
ccugguggcgaauggugguagg

SEQ ID NO: 203445 - RNA, 17 nt, Human
acagcagggaaguguug

SEQ ID NO: 203446 - RNA, 22 nt, Human
auuucucauuaagaucuuccaa

SEQ ID NO: 203447 - RNA, 22 nt, Human
cugguuuauaaaucuguggcca

SEQ ID NO: 203448 - RNA, 22 nt, Human
gugguaauuuaauccuacacug

SEQ ID NO: 203449 - RNA, 22 nt, Human
ccuccuggggugaaggauggga

SEQ ID NO: 203450 - RNA, 22 nt, Human
ucucagagauuuauggaaaacu

SEQ ID NO: 203451 - RNA, 22 nt, Human
cacaugaguguaggaagaggga

SEQ ID NO: 203452 - RNA, 22 nt, Human
ucaggagcagggggaagcucug

SEQ ID NO: 203453 - RNA, 22 nt, Human
uguggacuuuauuuuagggagg

SEQ ID NO: 203454 - RNA, 22 nt, Human
uuucuucuugauuuaaacaggg

SEQ ID NO: 203455 - RNA, 22 nt, Human
ucuacaaagaagaauuaauguc

SEQ ID NO: 203456 - RNA, 22 nt, Human
ugguggacaccgcagccaugaa

SEQ ID NO: 203457 - RNA, 22 nt, Human
ucucacagugcaggucugucuc

SEQ ID NO: 203458 - RNA, 22 nt, Human
cuagaaaucucuguuuacauca

SEQ ID NO: 203459 - RNA, 22 nt, Human
cugagaggugacagcgugcugg

SEQ ID NO: 203460 - RNA, 22 nt, Human
agcuucuggaagccuggcagca

SEQ ID NO: 203461 - RNA, 22 nt, Human
gaggcuccagcgacaccuaggc

SEQ ID NO: 203462 - RNA, 22 nt, Human
ucuuuccuagaggcugaugagu

SEQ ID NO: 203463 - RNA, 22 nt, Human
uguuuacuucaucgaguacuuc

SEQ ID NO: 203464 - RNA, 22 nt, Human
ucagugcagcggcagcagcucu

SEQ ID NO: 203465 - RNA, 22 nt, Human
acugccuucuuuaauccuaguu

SEQ ID NO: 203466 - RNA, 22 nt, Human
acguuugcuuucuuuggccugg

SEQ ID NO: 203467 - RNA, 22 nt, Human
ucucuggcagaggcccuauccc

SEQ ID NO: 203468 - RNA, 22 nt, Human
uggggaaagggauggcucccgc

SEQ ID NO: 203469 - RNA, 22 nt, Human
agaagagccuggggaccauggc

SEQ ID NO: 203470 - RNA, 22 nt, Human
acagagagggagugauaaaucc

SEQ ID NO: 203471 - RNA, 22 nt, Human
auagcugacuccagacauagcu

SEQ ID NO: 203472 - RNA, 22 nt, Human
cugcagggauugcuucuguaua

SEQ ID NO: 203473 - RNA, 22 nt, Human
gccuggcuccuaagagcacaac

SEQ ID NO: 203474 - RNA, 22 nt, Human
aaacucuagcuacuaggauaac

SEQ ID NO: 203475 - RNA, 22 nt, Human
aauguauuccucaugcaagagu

SEQ ID NO: 203476 - RNA, 22 nt, Human
caagggcucuaagucacaagau

SEQ ID NO: 203477 - RNA, 22 nt, Human
cugccaucugagccaaaagugc

SEQ ID NO: 203478 - RNA, 22 nt, Human
acauucaaaauauuucugaugu

SEQ ID NO: 203479 - RNA, 22 nt, Human
uucuucuccuaaggagaguccu

SEQ ID NO: 203480 - RNA, 19 nt, Human
ccuguggcagaguggaaac

SEQ ID NO: 203481 - RNA, 22 nt, Human
ucuagaauacugugacaugcca

SEQ ID NO: 203482 - RNA, 21 nt, Human
gagauggcccaguagcgggcc

SEQ ID NO: 203483 - RNA, 22 nt, Human
acccucugccuugagcagugcc

SEQ ID NO: 203484 - RNA, 19 nt, Human
caggacaguuugccaagaa

SEQ ID NO: 203485 - RNA, 22 nt, Human
uugaaaggaauacagaggccua

SEQ ID NO: 203486 - RNA, 23 nt, Human
ugacaggccagaagagcagcugg

SEQ ID NO: 203487 - RNA, 22 nt, Human
aggcagcuuucagugucucuca

SEQ ID NO: 203488 - RNA, 22 nt, Human
uguagauaaguaaaagcccagu

SEQ ID NO: 203489 - RNA, 19 nt, Human
ugcuuugcaucugauuguu

SEQ ID NO: 203490 - RNA, 22 nt, Human
ucugggcuuuguaaugggaggu

SEQ ID NO: 203491 - RNA, 22 nt, Human
ucacaggacccugaggguggcg

SEQ ID NO: 203492 - RNA, 22 nt, Human
aucagagcugcauuuuagagcc

SEQ ID NO: 203493 - RNA, 22 nt, Human
uacaggaagucucaguacagua

SEQ ID NO: 203494 - RNA, 22 nt, Human
ugggagcagcagggagaugcgg

SEQ ID NO: 203495 - RNA, 22 nt, Human
aaaguauuuuugacaggcauua

SEQ ID NO: 203496 - RNA, 21 nt, Human
uggcugccuacaugcugcagg

SEQ ID NO: 203497 - RNA, 22 nt, Human
caagcguggcugcucugaugga

SEQ ID NO: 203498 - RNA, 22 nt, Human
ccaggcuuuucucauggaguca

SEQ ID NO: 203499 - RNA, 22 nt, Human
cuucaguuuaucccaucaucca

SEQ ID NO: 203500 - RNA, 22 nt, Human
auuacuaugauuugaucauuac

SEQ ID NO: 203501 - RNA, 22 nt, Human
auguguucacgugcacaugugc

SEQ ID NO: 203502 - RNA, 22 nt, Human
uggaaaauuaguagugaaaggc

SEQ ID NO: 203503 - RNA, 22 nt, Human
gaugcauagugaagcugacaga

SEQ ID NO: 203504 - RNA, 22 nt, Human
cugcagggcccgccugagcccu

SEQ ID NO: 203505 - RNA, 22 nt, Human
ucucccaguggugcagaaagca

SEQ ID NO: 203506 - RNA, 20 nt, Human
uauuucugggcaaccauuua

SEQ ID NO: 203507 - RNA, 22 nt, Human
uucuucaaaacaacacuggccu

SEQ ID NO: 203508 - RNA, 18 nt, Human
cagagcuccuggaugcag

SEQ ID NO: 203509 - RNA, 22 nt, Human
gcugccuuaugucuauuaguau

SEQ ID NO: 203510 - RNA, 22 nt, Human
caugucaagcuuaucucugugg

SEQ ID NO: 203511 - RNA, 22 nt, Human
uuuuccucaggaaugcuaagcu

SEQ ID NO: 203512 - RNA, 22 nt, Human
auguccagaguguccuggaaag

SEQ ID NO: 203513 - RNA, 22 nt, Human
ucuggaugaaagggcuauauau

SEQ ID NO: 203514 - RNA, 20 nt, Human
cccuggagagaagcuccacg

SEQ ID NO: 203515 - RNA, 22 nt, Human
ccaggcucuaucccuccuucuu

SEQ ID NO: 203516 - RNA, 22 nt, Human
ggcuggccucaggguccucgcu

SEQ ID NO: 203517 - RNA, 22 nt, Human
ucauuuguacuugugugcuugu

SEQ ID NO: 203518 - RNA, 22 nt, Human
agcauaaguugguacagccacu

SEQ ID NO: 203519 - RNA, 21 nt, Human
uucaguaugcgucaugcuguu

SEQ ID NO: 203520 - RNA, 22 nt, Human
uccuuucucccagguuaguugu

SEQ ID NO: 203521 - RNA, 22 nt, Human
gaggccagggaugcaaugagag

SEQ ID NO: 203522 - RNA, 22 nt, Human
aacauugaauuuaaaauacagu

SEQ ID NO: 203523 - RNA, 23 nt, Human
cuggggcuuucaaaucugggcag

SEQ ID NO: 203524 - RNA, 22 nt, Human
gaagacacaauuggugggucca

SEQ ID NO: 203525 - RNA, 22 nt, Human
gggagccaaggagagaggccuu

SEQ ID NO: 203526 - RNA, 22 nt, Human
agggagaguagauaucaggugu

SEQ ID NO: 203527 - RNA, 22 nt, Human
gauuuucaugauaaacuuguga

SEQ ID NO: 203528 - RNA, 22 nt, Human
uacagguggaucacuaguauag

SEQ ID NO: 203529 - RNA, 22 nt, Human
ugaaaauauaguuuuccagacu

SEQ ID NO: 203530 - RNA, 20 nt, Human
ccacaagggaauauuguuga

SEQ ID NO: 203531 - RNA, 22 nt, Human
augggaagguuuugagagcggg

SEQ ID NO: 203532 - RNA, 22 nt, Human
aagugguuuuaagagguuccuu

SEQ ID NO: 203533 - RNA, 22 nt, Human
ucugcagggaugugagggguga

SEQ ID NO: 203534 - RNA, 22 nt, Human
uccugacccaccaagucuguaa

SEQ ID NO: 203535 - RNA, 22 nt, Human
acccuguugguggaucagauug

SEQ ID NO: 203536 - RNA, 22 nt, Human
cuuggucuugggagcagggaca

SEQ ID NO: 203537 - RNA, 22 nt, Human
gaauaauugugaugcuugaagu

SEQ ID NO: 203538 - RNA, 22 nt, Human
cauuuccuuccugcugcuccuc

SEQ ID NO: 203539 - RNA, 22 nt, Human
uuuuccucuguauuugaaaugc

SEQ ID NO: 203540 - RNA, 22 nt, Human
ucuccacaagcuuucuccuuuu

SEQ ID NO: 203541 - RNA, 22 nt, Human
gaguuuguaaacuauucacuaa

SEQ ID NO: 203542 - RNA, 22 nt, Human
cucugcaaucugagcacuugua

SEQ ID NO: 203543 - RNA, 22 nt, Human
aguagauuuuugaauguaaguu

SEQ ID NO: 203544 - RNA, 22 nt, Human
uugguuuacuaggauucaaauu

SEQ ID NO: 203545 - RNA, 22 nt, Human
cugaaggcugaggcuguguugu

SEQ ID NO: 203546 - RNA, 20 nt, Human
ccucagagcgcaggcccccu

SEQ ID NO: 203547 - RNA, 22 nt, Human
acagcuacucugcagauaaauc

SEQ ID NO: 203548 - RNA, 22 nt, Human
cugggccugugggcacacggac

SEQ ID NO: 203549 - RNA, 22 nt, Human
guccuuggagguguggaaucug

SEQ ID NO: 203550 - RNA, 22 nt, Human
agcaggcaggaaugguggaaca

SEQ ID NO: 203551 - RNA, 22 nt, Human
uuccuucuuugugguagaaagu

SEQ ID NO: 203552 - RNA, 22 nt, Human
ugagacagcagucagggaaaua

SEQ ID NO: 203553 - RNA, 22 nt, Human
uggcucaggggucuggcucugu

SEQ ID NO: 203554 - RNA, 22 nt, Human
auuaguguuguaagaagcugcc

SEQ ID NO: 203555 - RNA, 22 nt, Human
ugccuucauccauguuauagug

SEQ ID NO: 203556 - RNA, 22 nt, Human
ugaggcucacaaaucugcauuu

SEQ ID NO: 203557 - RNA, 22 nt, Human
uugauucauggacaggccaggu

SEQ ID NO: 203558 - RNA, 22 nt, Human
uuugacucuucuagcaagugug

SEQ ID NO: 203559 - RNA, 22 nt, Human
aacaguaucuuuuaucagaaau

SEQ ID NO: 203560 - RNA, 22 nt, Human
aagaagcagcugccaggccagu

SEQ ID NO: 203561 - RNA, 22 nt, Human
uagcagaggcugucugacuuaa

SEQ ID NO: 203562 - RNA, 22 nt, Human
caagagagaugcagcucacuca

SEQ ID NO: 203563 - RNA, 22 nt, Human
accaggcuugaugauuugcuua

SEQ ID NO: 203564 - RNA, 22 nt, Human
uaaaaggcaauacuagaugagu

SEQ ID NO: 203565 - RNA, 22 nt, Human
ucacagaaggaccuuguuucau

SEQ ID NO: 203566 - RNA, 22 nt, Human
ucaguuaacggaaaggggugug

SEQ ID NO: 203567 - RNA, 22 nt, Human
agcuuugguugaggggagugug

SEQ ID NO: 203568 - RNA, 22 nt, Human
ccaggugugagcauucugucuu

SEQ ID NO: 203569 - RNA, 22 nt, Human
uuucuuuugaauaguguguggu

SEQ ID NO: 203570 - RNA, 19 nt, Human
uucuagaacuguucucuca

SEQ ID NO: 203571 - RNA, 22 nt, Human
uucagggcagagaguucaggga

SEQ ID NO: 203572 - RNA, 22 nt, Human
accaggaaaaacacuguguugg

SEQ ID NO: 203573 - RNA, 22 nt, Human
uauaauuaguaaauggcagauu

SEQ ID NO: 203574 - RNA, 22 nt, Human
ccagcuggcaggagagucaggg

SEQ ID NO: 203575 - RNA, 22 nt, Human
caguaaaagauggaaauagaau

SEQ ID NO: 203576 - RNA, 22 nt, Human
auaucuguguuucccuuuugcu

SEQ ID NO: 203577 - RNA, 22 nt, Human
ucacagaauuuuugcuuccagu

SEQ ID NO: 203578 - RNA, 22 nt, Human
aauauccauugggagcaaaugg

SEQ ID NO: 203579 - RNA, 22 nt, Human
uggagccaaugaacauuugcug

SEQ ID NO: 203580 - RNA, 22 nt, Human
cagugaaaucacaacuuuaguu

SEQ ID NO: 203581 - RNA, 22 nt, Human
agcccuccucacaucagcgucc

SEQ ID NO: 203582 - RNA, 22 nt, Human
ugggguggaacccuucugcugg

SEQ ID NO: 203583 - RNA, 22 nt, Human
uccugggcagaaugggauggcu

SEQ ID NO: 203584 - RNA, 22 nt, Human
acuuggcuuaaaguagugaucg

SEQ ID NO: 203585 - RNA, 18 nt, Human
uccugggaacuugcuagc

SEQ ID NO: 203586 - RNA, 22 nt, Human
ggccccagcagacccuccucug

SEQ ID NO: 203587 - RNA, 23 nt, Human
cagaucauauauccagcuguaag

SEQ ID NO: 203588 - RNA, 22 nt, Human
aaucuguuuaguucugcguaug

SEQ ID NO: 203589 - RNA, 22 nt, Human
uggcuuggcuaagaucuaagcu

SEQ ID NO: 203590 - RNA, 22 nt, Human
ugaauucuuaaugaaaucuacu

SEQ ID NO: 203591 - RNA, 22 nt, Human
uggcagagcuggcugcggauga

SEQ ID NO: 203592 - RNA, 22 nt, Human
cacugugcuccuaacuagcugu

SEQ ID NO: 203593 - RNA, 20 nt, Human
auacacauucauagaaaaau

SEQ ID NO: 203594 - RNA, 22 nt, Human
cccagcaucccagugggcagca

SEQ ID NO: 203595 - RNA, 22 nt, Human
ugagucugauuuuucuagcauu

SEQ ID NO: 203596 - RNA, 22 nt, Human
gcagagcugcagcgaggccugg

SEQ ID NO: 203597 - RNA, 22 nt, Human
cuguccuggagggcauaggacg

SEQ ID NO: 203598 - RNA, 22 nt, Human
uccagggaaggugugaggcugg

SEQ ID NO: 203599 - RNA, 22 nt, Human
uccucagcauggaaucuggacu

SEQ ID NO: 203600 - RNA, 22 nt, Human
auuuaauuuggagagagaaacc

SEQ ID NO: 203601 - RNA, 22 nt, Human
guacuacaguuucucauuaaau

SEQ ID NO: 203602 - RNA, 22 nt, Human
cuccagauguauacuuuccaag

SEQ ID NO: 203603 - RNA, 22 nt, Human
aggcagacaaguccagaacugg

SEQ ID NO: 203604 - RNA, 22 nt, Human
aagaaaacaugaucuaauuuaa

SEQ ID NO: 203605 - RNA, 22 nt, Human
agcuguggccagaugugagcgg

SEQ ID NO: 203606 - RNA, 22 nt, Human
cagucccaucucccagguggcu

SEQ ID NO: 203607 - RNA, 22 nt, Human
ucaguggauuggaugagaucug

SEQ ID NO: 203608 - RNA, 19 nt, Human
agacagagacugaaauaga

SEQ ID NO: 203609 - RNA, 22 nt, Human
uggaauguuuuccuaaaucaga

SEQ ID NO: 203610 - RNA, 22 nt, Human
aagaagaaguguuauuuuuaga

SEQ ID NO: 203611 - RNA, 22 nt, Human
uugggacagcaaccaucugcua

SEQ ID NO: 203612 - RNA, 22 nt, Human
uuuauuuaaagucguguguuaa

SEQ ID NO: 203613 - RNA, 22 nt, Human
gaaaaaugcuccaaaucugugg

SEQ ID NO: 203614 - RNA, 23 nt, Human
gcuuuauaguucucccaacauua

SEQ ID NO: 203615 - RNA, 22 nt, Human
agaucauaugaaaaauuucaag

SEQ ID NO: 203616 - RNA, 22 nt, Human
caggcccacgaggcacacagag

SEQ ID NO: 203617 - RNA, 22 nt, Human
ccauuggagaguuuuaagaagg

SEQ ID NO: 203618 - RNA, 22 nt, Human
gauuuuauauggcauacugugg

SEQ ID NO: 203619 - RNA, 22 nt, Human
acacugaauaauugagaguuga

SEQ ID NO: 203620 - RNA, 21 nt, Human
ucucuggaguuagcagagaga

SEQ ID NO: 203621 - RNA, 22 nt, Human
ugagagccaggaucugcucuau

SEQ ID NO: 203622 - RNA, 22 nt, Human
uccuggagagugggcgagcaca

SEQ ID NO: 203623 - RNA, 22 nt, Human
acagcacuuuacuucucaguga

SEQ ID NO: 203624 - RNA, 22 nt, Human
aagaacauuuuguagaaugaca

SEQ ID NO: 203625 - RNA, 22 nt, Human
cagcaugaaacaauugagccca

SEQ ID NO: 203626 - RNA, 22 nt, Human
ugaugaguuuacucuuuucuaa

SEQ ID NO: 203627 - RNA, 22 nt, Human
ugagccugggagauggaggcug

SEQ ID NO: 203628 - RNA, 22 nt, Human
gagggcugauguugccaccuca

SEQ ID NO: 203629 - RNA, 22 nt, Human
gagaaggcugauccuuggaguu

SEQ ID NO: 203630 - RNA, 22 nt, Human
cuugaaagucagcagaguggau

SEQ ID NO: 203631 - RNA, 22 nt, Human
cagaaugggaaggacugcaguu

SEQ ID NO: 203632 - RNA, 22 nt, Human
ucaggaagccacuccacagaga

SEQ ID NO: 203633 - RNA, 22 nt, Human
ucaggccaagguagacaugacu

SEQ ID NO: 203634 - RNA, 22 nt, Human
agagcccugaagcagagcuaaa

SEQ ID NO: 203635 - RNA, 22 nt, Human
aaagcauuacuagacuggauuu

SEQ ID NO: 203636 - RNA, 22 nt, Human
ccacaguuauucauuugugaca

SEQ ID NO: 203637 - RNA, 22 nt, Human
aauaucuggagaugcuuuuugu

SEQ ID NO: 203638 - RNA, 22 nt, Human
uuuaucacagaauaagaaguca

SEQ ID NO: 203639 - RNA, 22 nt, Human
ggcagcaacucggagagaagag

SEQ ID NO: 203640 - RNA, 22 nt, Human
cuggcaggagcuguggccguag

SEQ ID NO: 203641 - RNA, 22 nt, Human
augauucuggcaaauuuauuau

SEQ ID NO: 203642 - RNA, 22 nt, Human
uucuuuuccuacacagcgauuu

SEQ ID NO: 203643 - RNA, 22 nt, Human
accuggaagugggugcuauggc

SEQ ID NO: 203644 - RNA, 20 nt, Human
auacacaugcagacagaugc

SEQ ID NO: 203645 - RNA, 22 nt, Human
uagaaacucucaaucugggaug

SEQ ID NO: 203646 - RNA, 23 nt, Human
auuucuaggggauuuucuggugc

SEQ ID NO: 203647 - RNA, 22 nt, Human
uagcacccauggaaucugcugg

SEQ ID NO: 203648 - RNA, 22 nt, Human
cagggacagcgggacucugaca

SEQ ID NO: 203649 - RNA, 22 nt, Human
caaggcagucccuacucccugc

SEQ ID NO: 203650 - RNA, 22 nt, Human
gcugccuucugagaaguuaaau

SEQ ID NO: 203651 - RNA, 22 nt, Human
ucagggugaaccaggcaggaau

SEQ ID NO: 203652 - RNA, 22 nt, Human
ucacugggagagcugacaagga

SEQ ID NO: 203653 - RNA, 22 nt, Human
aauguacagcugucuuuccucc

SEQ ID NO: 203654 - RNA, 22 nt, Human
cuggcuccacucccugccugac

SEQ ID NO: 203655 - RNA, 22 nt, Human
gugcuuccuguauugauuccau

SEQ ID NO: 203656 - RNA, 22 nt, Human
cauauauucugguuuucacugg

SEQ ID NO: 203657 - RNA, 22 nt, Human
gugugcugagugacugucauca

SEQ ID NO: 203658 - RNA, 22 nt, Human
uuuccagagcaugucugcucag

SEQ ID NO: 203659 - RNA, 22 nt, Human
aagguuaguaauauuucuauau

SEQ ID NO: 203660 - RNA, 22 nt, Human
ggauugagagcacugguagcug

SEQ ID NO: 203661 - RNA, 22 nt, Human
gccagaaacauacacaucacuu

SEQ ID NO: 203662 - RNA, 22 nt, Human
cuguauuucuuggacaguugcu

SEQ ID NO: 203663 - RNA, 22 nt, Human
ucucagaguuugaaucuggagu

SEQ ID NO: 203664 - RNA, 22 nt, Human
acagcugugauuucuaucauga

SEQ ID NO: 203665 - RNA, 22 nt, Human
uucccucucuccagggcugccu

SEQ ID NO: 203666 - RNA, 22 nt, Human
uugugucccuggagcuucugug

SEQ ID NO: 203667 - RNA, 22 nt, Human
gccuggcuggucacugccuggc

SEQ ID NO: 203668 - RNA, 22 nt, Human
uagaaucaagcaguagagcaga

SEQ ID NO: 203669 - RNA, 22 nt, Human
acagucucuugcuugaauacua

SEQ ID NO: 203670 - RNA, 22 nt, Human
uucacauuccgcggcuauuuuc

SEQ ID NO: 203671 - RNA, 22 nt, Human
ugccagaguuacaugaggguca

SEQ ID NO: 203672 - RNA, 22 nt, Human
uugaaagucacaauggcauuaa

SEQ ID NO: 203673 - RNA, 22 nt, Human
gagacacaagaagacaugcaca

SEQ ID NO: 203674 - RNA, 22 nt, Human
cuggaggagcauggacuggagu

SEQ ID NO: 203675 - RNA, 22 nt, Human
acaaggaggauauguuuaaggg

SEQ ID NO: 203676 - RNA, 22 nt, Human
ugcugggcugcacccccagagu

SEQ ID NO: 203677 - RNA, 22 nt, Human
cagaggacuucccacucaucug

SEQ ID NO: 203678 - RNA, 22 nt, Human
ccugggaggcugugggucugcu

SEQ ID NO: 203679 - RNA, 22 nt, Human
uuaguagaagacagauaacaaa

SEQ ID NO: 203680 - RNA, 22 nt, Human
ucucaguguuuaaaaagauuuc

SEQ ID NO: 203681 - RNA, 22 nt, Human
uggcagugugggaggaagguac

SEQ ID NO: 203682 - RNA, 22 nt, Human
cacugcccaggcacccaucuug

SEQ ID NO: 203683 - RNA, 22 nt, Human
ggaguaggccccgggagagagu

SEQ ID NO: 203684 - RNA, 22 nt, Human
aggcuucagguuugcuuugcag

SEQ ID NO: 203685 - RNA, 22 nt, Human
uccuggcuucugucuccuuauu

SEQ ID NO: 203686 - RNA, 22 nt, Human
aagaagugguccuuuucuuucu

SEQ ID NO: 203687 - RNA, 22 nt, Human
agaggccugugugcuccagugg

SEQ ID NO: 203688 - RNA, 22 nt, Human
uguguguggggaggcagcagau

SEQ ID NO: 203689 - RNA, 22 nt, Human
ccagguguuacacgaguguuaa

SEQ ID NO: 203690 - RNA, 22 nt, Human
ccugccagcgcuuaucucucgg

SEQ ID NO: 203691 - RNA, 22 nt, Human
agccaaagaucagugugcaagu

SEQ ID NO: 203692 - RNA, 22 nt, Human
aggacaguauaggcuuuaggag

SEQ ID NO: 203693 - RNA, 22 nt, Human
acagauccugguuacagccauu

SEQ ID NO: 203694 - RNA, 22 nt, Human
ggcuuuauuaacucauccguaa

SEQ ID NO: 203695 - RNA, 22 nt, Human
ugcugaggaaagaggauaaaag

SEQ ID NO: 203696 - RNA, 22 nt, Human
aauaugaugccaaauugcuaca

SEQ ID NO: 203697 - RNA, 22 nt, Human
uccuuucugucuuuacucugga

SEQ ID NO: 203698 - RNA, 22 nt, Human
uccucacagcugguucauucag

SEQ ID NO: 203699 - RNA, 22 nt, Human
cucuggagaacuccuugugucu

SEQ ID NO: 203700 - RNA, 22 nt, Human
gccagcugcuucuccagaauuu

SEQ ID NO: 203701 - RNA, 22 nt, Human
gcauggccuugcuguaguggua

SEQ ID NO: 203702 - RNA, 22 nt, Human
gugggggcagugggcuucgagc

SEQ ID NO: 203703 - RNA, 22 nt, Human
guuccacaaaauguacccaguu

SEQ ID NO: 203704 - RNA, 22 nt, Human
uagccagugagacccagaaaua

SEQ ID NO: 203705 - RNA, 22 nt, Human
uggcccugguggcacagccugc

SEQ ID NO: 203706 - RNA, 22 nt, Human
aaggaacuagcaugauguguag

SEQ ID NO: 203707 - RNA, 22 nt, Human
ugauugacuuuagaauagcacu

SEQ ID NO: 203708 - RNA, 22 nt, Human
guuuuucuuugugugaagacaa

SEQ ID NO: 203709 - RNA, 19 nt, Human
uaccauguugacuuuccug

SEQ ID NO: 203710 - RNA, 19 nt, Human
gugagcuucuuguaagagg

SEQ ID NO: 203711 - RNA, 22 nt, Human
agcuuugggggagguagucugu

SEQ ID NO: 203712 - RNA, 22 nt, Human
uacuuuaauauaugugaaguuc

SEQ ID NO: 203713 - RNA, 22 nt, Human
ucaggccugcccugaaagcaca

SEQ ID NO: 203714 - RNA, 22 nt, Human
ggaauaggauuuaccucuguaa

SEQ ID NO: 203715 - RNA, 22 nt, Human
uuguuacagcagcaauagaaaa

SEQ ID NO: 203716 - RNA, 22 nt, Human
uuugcaauuugugcugcaaaug

SEQ ID NO: 203717 - RNA, 22 nt, Human
uauaucuaaguguauguaagag

SEQ ID NO: 203718 - RNA, 22 nt, Human
ggucacugagcuguaauucugu

SEQ ID NO: 203719 - RNA, 22 nt, Human
acuucucucauucagacauagc

SEQ ID NO: 203720 - RNA, 22 nt, Human
ccccaaaacuuggugacuucca

SEQ ID NO: 203721 - RNA, 22 nt, Human
ugaaucaugccacugagcuccc

SEQ ID NO: 203722 - RNA, 22 nt, Human
uccugggaagacugugaggaca

SEQ ID NO: 203723 - RNA, 22 nt, Human
gccugagauucugcauuucuaa

SEQ ID NO: 203724 - RNA, 19 nt, Human
cucuuaaauugucucuugc

SEQ ID NO: 203725 - RNA, 22 nt, Human
uaagcaagugguagaaggacaa

SEQ ID NO: 203726 - RNA, 22 nt, Human
uuuccuucaucaucugagagcu

SEQ ID NO: 203727 - RNA, 22 nt, Human
guacaaauuuugacaucuagga

SEQ ID NO: 203728 - RNA, 20 nt, Human
ucacuaguaaccaucugcuu

SEQ ID NO: 203729 - RNA, 22 nt, Human
aaaccuuuucagcugaauggag

SEQ ID NO: 203730 - RNA, 22 nt, Human
ucaaauacauggucaaucaacu

SEQ ID NO: 203731 - RNA, 22 nt, Human
uucauugacugguucguuaagu

SEQ ID NO: 203732 - RNA, 22 nt, Human
guggaggacaaaagaagccuuu

SEQ ID NO: 203733 - RNA, 22 nt, Human
augcuguguuugagaaccuagg

SEQ ID NO: 203734 - RNA, 22 nt, Human
uucaggaucacuaaacccucca

SEQ ID NO: 203735 - RNA, 22 nt, Human
gaaggaaaaauacucuguaagg

SEQ ID NO: 203736 - RNA, 22 nt, Human
auacacauaucagguguauaca

SEQ ID NO: 203737 - RNA, 22 nt, Human
gacccagugacucgucucugug

SEQ ID NO: 203738 - RNA, 22 nt, Human
agcuguuuucuaaugcauuuga

SEQ ID NO: 203739 - RNA, 22 nt, Human
uaacagaaauagaaaugagagu

SEQ ID NO: 203740 - RNA, 22 nt, Human
ccacugggcguuucuguccaau

SEQ ID NO: 203741 - RNA, 18 nt, Human
uccagagagggagaagug

SEQ ID NO: 203742 - RNA, 22 nt, Human
uccuugggaaacaucauguaau

SEQ ID NO: 203743 - RNA, 22 nt, Human
ccacagaaaauaaagcacgauu

SEQ ID NO: 203744 - RNA, 22 nt, Human
gcugcagcucgccuuccggccu

SEQ ID NO: 203745 - RNA, 22 nt, Human
guacuaaacagagaaccaauau

SEQ ID NO: 203746 - RNA, 22 nt, Human
uaacagaagagcaggcagcccu

SEQ ID NO: 203747 - RNA, 22 nt, Human
agggcagcuagcuguagaaaga

SEQ ID NO: 203748 - RNA, 22 nt, Human
ccucccugucuaccuguugugg

SEQ ID NO: 203749 - RNA, 22 nt, Human
uuuuauaagcaagaaagggaaa

SEQ ID NO: 203750 - RNA, 22 nt, Human
aggugucugggcuuuggaguca

SEQ ID NO: 203751 - RNA, 22 nt, Human
acuagaaugcaagcuccacaag

SEQ ID NO: 203752 - RNA, 21 nt, Human
uccuggcaggcccaggacccu

SEQ ID NO: 203753 - RNA, 19 nt, Human
agguccucaggaugacccu

SEQ ID NO: 203754 - RNA, 22 nt, Human
ugggugccaaccucugguggcc

SEQ ID NO: 203755 - RNA, 22 nt, Human
gacuucuucaugucuuuuccac

SEQ ID NO: 203756 - RNA, 22 nt, Human
gagcucuugcuucuaguccagg

SEQ ID NO: 203757 - RNA, 22 nt, Human
aagcaucucuauguggagagug

SEQ ID NO: 203758 - RNA, 22 nt, Human
agaggcuucucggauggggcag

SEQ ID NO: 203759 - RNA, 22 nt, Human
uuaaaugugauccugguaugca

SEQ ID NO: 203760 - RNA, 19 nt, Human
gauauaaagagauggugaa

SEQ ID NO: 203761 - RNA, 22 nt, Human
gucuugaaauucuguuaaagga

SEQ ID NO: 203762 - RNA, 21 nt, Human
ucuuuucucagcuuugugguu

SEQ ID NO: 203763 - RNA, 22 nt, Human
ggcagcuguaagaugagugaau

SEQ ID NO: 203764 - RNA, 22 nt, Human
uaaauuauggcuggcagagcag

SEQ ID NO: 203765 - RNA, 22 nt, Human
caacugguaaucuccacgguca

SEQ ID NO: 203766 - RNA, 21 nt, Human
ucuagaagagguugagaauau

SEQ ID NO: 203767 - RNA, 22 nt, Human
gggagcuguaagggacagguag

SEQ ID NO: 203768 - RNA, 22 nt, Human
ugugaggauguuaaggggauga

SEQ ID NO: 203769 - RNA, 22 nt, Human
accugaauuuuggaugagcugu

SEQ ID NO: 203770 - RNA, 22 nt, Human
cuggggcuguaggaggacuuau

SEQ ID NO: 203771 - RNA, 22 nt, Human
aaauugaauuugggaaacauug

SEQ ID NO: 203772 - RNA, 22 nt, Human
ugcuggcuacugauggcaggcc

SEQ ID NO: 203773 - RNA, 22 nt, Human
gcuggcucuuuuugccgggcuc

SEQ ID NO: 203774 - RNA, 22 nt, Human
cacagugcuuuaugagagaucu

SEQ ID NO: 203775 - RNA, 22 nt, Human
uguuucauuaguacugacaaua

SEQ ID NO: 203776 - RNA, 22 nt, Human
cuuauacacgaacacaaggugu

SEQ ID NO: 203777 - RNA, 22 nt, Human
cugaauaauuuucuguuguaug

SEQ ID NO: 203778 - RNA, 21 nt, Human
ugcacagccauacccuccuug

SEQ ID NO: 203779 - RNA, 22 nt, Human
acauucuuucgaugucugauuu

SEQ ID NO: 203780 - RNA, 22 nt, Human
acgaugcucaacuauaugaauu

SEQ ID NO: 203781 - RNA, 22 nt, Human
cuuuauuagauguagacuuucu

SEQ ID NO: 203782 - RNA, 21 nt, Human
agcugccugcucuggaccugg

SEQ ID NO: 203783 - RNA, 22 nt, Human
auggcuuuucacagaggguucu

SEQ ID NO: 203784 - RNA, 22 nt, Human
acagcacagagugguauggcug

SEQ ID NO: 203785 - RNA, 22 nt, Human
auuauagaggguuacaguuaau

SEQ ID NO: 203786 - RNA, 22 nt, Human
ccacgagggaaccagguggggu

SEQ ID NO: 203787 - RNA, 22 nt, Human
acagccaggaggaacucaguga

SEQ ID NO: 203788 - RNA, 22 nt, Human
uccagccuaauguucuucccac

SEQ ID NO: 203789 - RNA, 22 nt, Human
agcacauucugccuugcuuugc

SEQ ID NO: 203790 - RNA, 22 nt, Human
ucugggaacagccuggcugugu

SEQ ID NO: 203791 - RNA, 22 nt, Human
caggaguguugauugcucagga

SEQ ID NO: 203792 - RNA, 20 nt, Human
caucuccugccuccauguuc

SEQ ID NO: 203793 - RNA, 22 nt, Human
aaaugcaaggcacauuccuuuu

SEQ ID NO: 203794 - RNA, 22 nt, Human
uuucuuaggcucuaaaaugacu

SEQ ID NO: 203795 - RNA, 22 nt, Human
auugaaauugaugaaauucuug

SEQ ID NO: 203796 - RNA, 21 nt, Human
cugcaucugagucauuaugcc

SEQ ID NO: 203797 - RNA, 20 nt, Human
gcccaagguccagaaggggg

SEQ ID NO: 203798 - RNA, 19 nt, Human
aaaugcuguggagggcucc

SEQ ID NO: 203799 - RNA, 19 nt, Human
gcugugugaccuugggcaa

SEQ ID NO: 203800 - RNA, 22 nt, Human
aaaguagaggcauugaucaggu

SEQ ID NO: 203801 - RNA, 22 nt, Human
uugagcaggauggcuaugcaca

SEQ ID NO: 203802 - RNA, 22 nt, Human
uggcugagguaacuaugaauaa

SEQ ID NO: 203803 - RNA, 22 nt, Human
uuuagauaaugcucaagcaauu

SEQ ID NO: 203804 - RNA, 22 nt, Human
aggccacggcggguggauuacu

SEQ ID NO: 203805 - RNA, 22 nt, Human
cuuugauauaaguauacauagu

SEQ ID NO: 203806 - RNA, 22 nt, Human
guaguuacccagaacacuggaa

SEQ ID NO: 203807 - RNA, 22 nt, Human
aagcuuguagaguuugacuucc

SEQ ID NO: 203808 - RNA, 22 nt, Human
guuauucaauggcuuauaagga

SEQ ID NO: 203809 - RNA, 22 nt, Human
cagagcucucuuugcuacuaca

SEQ ID NO: 203810 - RNA, 22 nt, Human
gaaggcuuuagagagauauaaa

SEQ ID NO: 203811 - RNA, 22 nt, Human
uuucagaaauuauauuagaugc

SEQ ID NO: 203812 - RNA, 22 nt, Human
gcccucagcuccuggacacaug

SEQ ID NO: 203813 - RNA, 22 nt, Human
auguuuauguugggcuauauuu

SEQ ID NO: 203814 - RNA, 22 nt, Human
aggagggagcuuaagccaggca

SEQ ID NO: 203815 - RNA, 22 nt, Human
aaucagaacuccuaccacagag

SEQ ID NO: 203816 - RNA, 22 nt, Human
ugguuagacucaccuuauaguu

SEQ ID NO: 203817 - RNA, 22 nt, Human
gggcugugaggugagaacuuac

SEQ ID NO: 203818 - RNA, 22 nt, Human
acagguggggaggcugagguuc

SEQ ID NO: 203819 - RNA, 22 nt, Human
ucagagcugggugcuucuuccu

SEQ ID NO: 203820 - RNA, 22 nt, Human
ccaguuuuuccagugcuuucug

SEQ ID NO: 203821 - RNA, 22 nt, Human
aguuacucacugaggguuuauu

SEQ ID NO: 203822 - RNA, 22 nt, Human
uaaaugauaauaaugcuagugu

SEQ ID NO: 203823 - RNA, 22 nt, Human
gcucugggccauccuggccggg

SEQ ID NO: 203824 - RNA, 22 nt, Human
agaggaagccauugcuuacuga

SEQ ID NO: 203825 - RNA, 22 nt, Human
aacaaguguauuaauggaaaua

SEQ ID NO: 203826 - RNA, 22 nt, Human
cucagcaauuaccugugucucu

SEQ ID NO: 203827 - RNA, 22 nt, Human
ugcuauuuuggucuacagcacu

SEQ ID NO: 203828 - RNA, 22 nt, Human
agcucuggaacucccggcugcu

SEQ ID NO: 203829 - RNA, 22 nt, Human
gcaagaacgaauccuacuugcu

SEQ ID NO: 203830 - RNA, 22 nt, Human
ugucccagcagcuggguucucu

SEQ ID NO: 203831 - RNA, 19 nt, Human
uucucuggacuagaugcug

SEQ ID NO: 203832 - RNA, 20 nt, Human
cugcugugauucccuccucc

SEQ ID NO: 203833 - RNA, 22 nt, Human
cagggccacccucugcugggug

SEQ ID NO: 203834 - RNA, 22 nt, Human
auuucaguagaaaaucuugauu

SEQ ID NO: 203835 - RNA, 22 nt, Human
uagaaguuaggaaauaggaaua

SEQ ID NO: 203836 - RNA, 22 nt, Human
guauucauauuaaacauaucaa

SEQ ID NO: 203837 - RNA, 22 nt, Human
auccacaggguguguuaagaug

SEQ ID NO: 203838 - RNA, 22 nt, Human
gugagucugccuagcacaucac

SEQ ID NO: 203839 - RNA, 22 nt, Human
accuuccucuaagacauuuagc

SEQ ID NO: 203840 - RNA, 22 nt, Human
cagaggcugccagccaugugca

SEQ ID NO: 203841 - RNA, 22 nt, Human
acaaugucaccucucauguuuu

SEQ ID NO: 203842 - RNA, 23 nt, Human
cuguccugccauccacagcggcc

SEQ ID NO: 203843 - RNA, 22 nt, Human
aggcccagcuggacaaacugcu

SEQ ID NO: 203844 - RNA, 22 nt, Human
ggagacugaucugagugauaac

SEQ ID NO: 203845 - RNA, 22 nt, Human
cugcacaguggacagugaagau

SEQ ID NO: 203846 - RNA, 22 nt, Human
ucccagggugaaaugcaguagg

SEQ ID NO: 203847 - RNA, 22 nt, Human
uuacaaagaaaauuaggcauuu

SEQ ID NO: 203848 - RNA, 22 nt, Human
ugcagguguaaauuuucaagag

SEQ ID NO: 203849 - RNA, 22 nt, Human
aaguguauaacgaccuacagga

SEQ ID NO: 203850 - RNA, 20 nt, Human
ucuuggcugugugaggacac

SEQ ID NO: 203851 - RNA, 23 nt, Human
aguauucaaaaggcaagcuauau

SEQ ID NO: 203852 - RNA, 23 nt, Human
ucccugagaugcugcucuguccc

SEQ ID NO: 203853 - RNA, 23 nt, Human
gaaaggcucugggacccccaacu

SEQ ID NO: 203854 - RNA, 22 nt, Human
aagcaggagagccugggugagc

SEQ ID NO: 203855 - RNA, 22 nt, Human
ggcagguggacgugcuaaagcu

SEQ ID NO: 203856 - RNA, 22 nt, Human
cuguccucuguccucagcagga

SEQ ID NO: 203857 - RNA, 22 nt, Human
aaguuacauuuuggucuaauug

SEQ ID NO: 203858 - RNA, 22 nt, Human
cucagggccaaggaugcuguug

SEQ ID NO: 203859 - RNA, 22 nt, Human
gaggcagagucacaaagagucu

SEQ ID NO: 203860 - RNA, 22 nt, Human
gaccuccauucugucaugacug

SEQ ID NO: 203861 - RNA, 22 nt, Human
acacaucuccagccagcaggag

SEQ ID NO: 203862 - RNA, 22 nt, Human
uugagaugggcuuuauguucag

SEQ ID NO: 203863 - RNA, 22 nt, Human
aagaacuguuuacaauuuucac

SEQ ID NO: 203864 - RNA, 22 nt, Human
uuugcuuucccuuguagaaagu

SEQ ID NO: 203865 - RNA, 23 nt, Human
ccugcaaagaaacaagccaccug

SEQ ID NO: 203866 - RNA, 22 nt, Human
gagcccugacacugagggaguu

SEQ ID NO: 203867 - RNA, 22 nt, Human
acagggcugaggcuggcuucuu

SEQ ID NO: 203868 - RNA, 22 nt, Human
uaaaucuccuguuuuucaucua

SEQ ID NO: 203869 - RNA, 22 nt, Human
ggaaacagcaaauuauggcaau

SEQ ID NO: 203870 - RNA, 21 nt, Human
agucacauuggggguuuaggg

SEQ ID NO: 203871 - RNA, 22 nt, Human
uauggaaagcucuuuuugauug

SEQ ID NO: 203872 - RNA, 22 nt, Human
auaaagacaugcuuacuugccc

SEQ ID NO: 203873 - RNA, 23 nt, Human
aaauaugucugagggcaaagaau

SEQ ID NO: 203874 - RNA, 22 nt, Human
auuucuacugugagaaacauga

SEQ ID NO: 203875 - RNA, 22 nt, Human
guauaagcccauucucagagac

SEQ ID NO: 203876 - RNA, 22 nt, Human
agcagggcuggggcacgagcca

SEQ ID NO: 203877 - RNA, 22 nt, Human
acuuagauuccugguaccuccg

SEQ ID NO: 203878 - RNA, 22 nt, Human
aggcgcagacauacagggucug

SEQ ID NO: 203879 - RNA, 22 nt, Human
gcucaggcccagcggcuggugu

SEQ ID NO: 203880 - RNA, 22 nt, Human
guggugaagccccaucucugcu

SEQ ID NO: 203881 - RNA, 22 nt, Human
cagagaugggucgcagagaugg

SEQ ID NO: 203882 - RNA, 22 nt, Human
cucccugcuuguuucccuucag

SEQ ID NO: 203883 - RNA, 22 nt, Human
aguguucaggaucugaggccag

SEQ ID NO: 203884 - RNA, 22 nt, Human
ugaggaagcaaaggcuugugug

SEQ ID NO: 203885 - RNA, 22 nt, Human
ugugggaagagcaguggcagca

SEQ ID NO: 203886 - RNA, 22 nt, Human
ucauuuuuagcgcgcaaaaguu

SEQ ID NO: 203887 - RNA, 17 nt, Human
accaggcaacacgccca

SEQ ID NO: 203888 - RNA, 22 nt, Human
uccugggagcaugaagagggau

SEQ ID NO: 203889 - RNA, 22 nt, Human
aaaguuuuauucaagcauuagu

SEQ ID NO: 203890 - RNA, 22 nt, Human
cuuuaagacuaaauuagaguuu

SEQ ID NO: 203891 - RNA, 22 nt, Human
gguuccuucugaggucccugua

SEQ ID NO: 203892 - RNA, 22 nt, Human
ucagaggaaagggaacauaguc

SEQ ID NO: 203893 - RNA, 22 nt, Human
ucagaggccuaugucuacaacu

SEQ ID NO: 203894 - RNA, 18 nt, Human
cuuccucaucgcucuccc

SEQ ID NO: 203895 - RNA, 22 nt, Human
acagcagaguaguuuuccaacu

SEQ ID NO: 203896 - RNA, 19 nt, Human
aggguccagggagcggcuc

SEQ ID NO: 203897 - RNA, 22 nt, Human
augcagggaaaagagauauuau

SEQ ID NO: 203898 - RNA, 22 nt, Human
ucuuuguuauugcuuuaucuau

SEQ ID NO: 203899 - RNA, 22 nt, Human
gcugggcucugucaugccuucc

SEQ ID NO: 203900 - RNA, 22 nt, Human
ucagaggauugccucagcgagc

SEQ ID NO: 203901 - RNA, 22 nt, Human
cauuuuacgacauagggcaggc

SEQ ID NO: 203902 - RNA, 22 nt, Human
ucagagacuggucugcagaugc

SEQ ID NO: 203903 - RNA, 22 nt, Human
gguuugguuuuggccaucuucc

SEQ ID NO: 203904 - RNA, 22 nt, Human
uaaauucagugaguaauuucug

SEQ ID NO: 203905 - RNA, 22 nt, Human
aaugagcugcugcuguuccacc

SEQ ID NO: 203906 - RNA, 22 nt, Human
uguuuaugcaucguuaauacca

SEQ ID NO: 203907 - RNA, 22 nt, Human
guccucugauuucuagguauau

SEQ ID NO: 203908 - RNA, 22 nt, Human
acccaggcuagaagugaauuau

SEQ ID NO: 203909 - RNA, 20 nt, Human
ccuggccaaugagauaggaa

SEQ ID NO: 203910 - RNA, 22 nt, Human
ugggagagugcucaaugugcaa

SEQ ID NO: 203911 - RNA, 22 nt, Human
ccuguucuguagugaguuugag

SEQ ID NO: 203912 - RNA, 22 nt, Human
cgcuggucaccauggcguccug

SEQ ID NO: 203913 - RNA, 22 nt, Human
agcaaaagauagauuaacaaga

SEQ ID NO: 203914 - RNA, 22 nt, Human
cagaauuuaaguggauuauucu

SEQ ID NO: 203915 - RNA, 22 nt, Human
aacuuccuucuaguucauaugu

SEQ ID NO: 203916 - RNA, 22 nt, Human
cuguggaaggacuuagcgauac

SEQ ID NO: 203917 - RNA, 22 nt, Human
uccagccuaggggaacagcugc

SEQ ID NO: 203918 - RNA, 22 nt, Human
uccauacaguccacacggugca

SEQ ID NO: 203919 - RNA, 22 nt, Human
gugaggcagcaggagccucugu

SEQ ID NO: 203920 - RNA, 22 nt, Human
agagagagggaaacugcuaaac

SEQ ID NO: 203921 - RNA, 22 nt, Human
aacaggcuaaauuguccauuuc

SEQ ID NO: 203922 - RNA, 22 nt, Human
gccacauccuucagaaagcuuu

SEQ ID NO: 203923 - RNA, 22 nt, Human
cuggguguucaggagcugggcu

SEQ ID NO: 203924 - RNA, 22 nt, Human
gagaaucuacaggaaaccgaag

SEQ ID NO: 203925 - RNA, 22 nt, Human
guggaaggugcuagaacaagga

SEQ ID NO: 203926 - RNA, 22 nt, Human
gagcucugcuuggguucuuagg

SEQ ID NO: 203927 - RNA, 22 nt, Human
augaagcaacagcccuccuauu

SEQ ID NO: 203928 - RNA, 22 nt, Human
caaaggcaucggcaauuaggga

SEQ ID NO: 203929 - RNA, 22 nt, Human
cucagaguccccacaucugggu

SEQ ID NO: 203930 - RNA, 22 nt, Human
gaggcacagagcccuaggagcu

SEQ ID NO: 203931 - RNA, 22 nt, Human
aagacagugaucucugagagau

SEQ ID NO: 203932 - RNA, 22 nt, Human
uuuggcauagcucuuuguuccu

SEQ ID NO: 203933 - RNA, 22 nt, Human
ucauucagagagaauguuccag

SEQ ID NO: 203934 - RNA, 22 nt, Human
gcacgugcacacauguguacaa

SEQ ID NO: 203935 - RNA, 22 nt, Human
agacaagaaacugggagucucu

SEQ ID NO: 203936 - RNA, 22 nt, Human
guccugagaccauggccuuagu

SEQ ID NO: 203937 - RNA, 22 nt, Human
agcaacagggggauggccacug

SEQ ID NO: 203938 - RNA, 22 nt, Human
cucuccaggcugggacaggacc

SEQ ID NO: 203939 - RNA, 19 nt, Human
gcuguauuaaagauacaug

SEQ ID NO: 203940 - RNA, 22 nt, Human
ugggccuguggcuuggcucuag

SEQ ID NO: 203941 - RNA, 22 nt, Human
cagcuguggagauggggugcau

SEQ ID NO: 203942 - RNA, 22 nt, Human
uccaggccacugcagaggcucu

SEQ ID NO: 203943 - RNA, 22 nt, Human
ugaagccaccgaaccagaagag

SEQ ID NO: 203944 - RNA, 22 nt, Human
uacauauguaaacauguauaaa

SEQ ID NO: 203945 - RNA, 22 nt, Human
aucucagaaacauaucuaaucc

SEQ ID NO: 203946 - RNA, 22 nt, Human
acaaggagagcacacaugggga

SEQ ID NO: 203947 - RNA, 22 nt, Human
uuuguccucuccauguacaaua

SEQ ID NO: 203948 - RNA, 22 nt, Human
ugcaaacauccgacugaaagcc

SEQ ID NO: 203949 - RNA, 20 nt, Human
ccucaagcagacugacagcu

SEQ ID NO: 203950 - RNA, 22 nt, Human
aauuaagagagaguugaagcaa

SEQ ID NO: 203951 - RNA, 22 nt, Human
uuacaucagcaagaguguaugu

SEQ ID NO: 203952 - RNA, 22 nt, Human
gccucuccuggagaaggcaggg

SEQ ID NO: 203953 - RNA, 22 nt, Human
agcaggugaucgcgugugcucc

SEQ ID NO: 203954 - RNA, 16 nt, Human
uuuauuuacuaguguu

SEQ ID NO: 203955 - RNA, 22 nt, Human
ucugucauugcaauaaaauuuc

SEQ ID NO: 203956 - RNA, 22 nt, Human
ucagcagaaaggcacuagauga

SEQ ID NO: 203957 - RNA, 22 nt, Human
uuggcuucuuauaaugcaauag

SEQ ID NO: 203958 - RNA, 22 nt, Human
ggucacauauccucgguuugga

SEQ ID NO: 203959 - RNA, 22 nt, Human
aaauuccauuaugauaauuucg

SEQ ID NO: 203960 - RNA, 22 nt, Human
uacgugcacucauaccugaaau

SEQ ID NO: 203961 - RNA, 22 nt, Human
ccugggcucaagugaugguccc

SEQ ID NO: 203962 - RNA, 22 nt, Human
uggcugagagcaauugacucug

SEQ ID NO: 203963 - RNA, 22 nt, Human
aacuauacucuguaaaugugcu

SEQ ID NO: 203964 - RNA, 22 nt, Human
gacuacucaaacuuucucuaua

SEQ ID NO: 203965 - RNA, 22 nt, Human
uucuuguauauaaaaaucauuu

SEQ ID NO: 203966 - RNA, 22 nt, Human
cggcuccuccgcccuugcucac

SEQ ID NO: 203967 - RNA, 22 nt, Human
acacugugcagauucccuguga

SEQ ID NO: 203968 - RNA, 22 nt, Human
ggccucugcccucacuccuguc

SEQ ID NO: 203969 - RNA, 22 nt, Human
acaguggaugugauguccaggu

SEQ ID NO: 203970 - RNA, 22 nt, Human
gcccugcuucuggcaugcagaa

SEQ ID NO: 203971 - RNA, 22 nt, Human
ucagaagucaugcucagucugu

SEQ ID NO: 203972 - RNA, 22 nt, Human
uugcucugauuagguggaaaca

SEQ ID NO: 203973 - RNA, 22 nt, Human
aaugcacaugccacauguggua

SEQ ID NO: 203974 - RNA, 22 nt, Human
aucuagacaucugaaacauuua

SEQ ID NO: 203975 - RNA, 19 nt, Human
ugcaaauucuaaaaacuga

SEQ ID NO: 203976 - RNA, 17 nt, Human
agccagcaguagcuggu

SEQ ID NO: 203977 - RNA, 22 nt, Human
uggcccugcccucuucaucuuu

SEQ ID NO: 203978 - RNA, 22 nt, Human
gggcuggaggugagcaggacag

SEQ ID NO: 203979 - RNA, 22 nt, Human
cccccagaugcgagccauagcc

SEQ ID NO: 203980 - RNA, 22 nt, Human
uguguugugacauucuuggaug

SEQ ID NO: 203981 - RNA, 20 nt, Human
uuuccacuguaauguaugau

SEQ ID NO: 203982 - RNA, 22 nt, Human
cuagaaauauuuuacagucaag

SEQ ID NO: 203983 - RNA, 22 nt, Human
ucaaagccuguggauaguuugg

SEQ ID NO: 203984 - RNA, 22 nt, Human
caggccucagggcuguccguag

SEQ ID NO: 203985 - RNA, 22 nt, Human
cuguuaaauagacugcagugca

SEQ ID NO: 203986 - RNA, 22 nt, Human
cccucccaggaguggccagaga

SEQ ID NO: 203987 - RNA, 22 nt, Human
cucuguaugaaucauauggagu

SEQ ID NO: 203988 - RNA, 19 nt, Human
agaggccucagcagcuggc

SEQ ID NO: 203989 - RNA, 22 nt, Human
ggcaaaaaucaccccugguuca

SEQ ID NO: 203990 - RNA, 22 nt, Human
acaggccuugguccugaccuaa

SEQ ID NO: 203991 - RNA, 22 nt, Human
gcagagaggauauuauugucca

SEQ ID NO: 203992 - RNA, 22 nt, Human
guaacacucuaaagggaugcac

SEQ ID NO: 203993 - RNA, 22 nt, Human
cccacccacucugaccagaagc

SEQ ID NO: 203994 - RNA, 22 nt, Human
ugaaagcuuugggacaguguga

SEQ ID NO: 203995 - RNA, 22 nt, Human
acaugccagcccauuuaaaugg

SEQ ID NO: 203996 - RNA, 22 nt, Human
agggcagcacagcugugcuccu

SEQ ID NO: 203997 - RNA, 23 nt, Human
ucugagaagguuucagccagacu

SEQ ID NO: 203998 - RNA, 22 nt, Human
cagcuggcccuuugguagccuu

SEQ ID NO: 203999 - RNA, 19 nt, Human
ccaugcagccugggggcag

SEQ ID NO: 204000 - RNA, 22 nt, Human
gcuggcucuucaguggagauag

SEQ ID NO: 204001 - RNA, 22 nt, Human
ugccaggcccugugcuggaugc

SEQ ID NO: 204002 - RNA, 22 nt, Human
auugagaucugcaucauaagcu

SEQ ID NO: 204003 - RNA, 22 nt, Human
uggucucccagagcagggacgc

SEQ ID NO: 204004 - RNA, 22 nt, Human
uuugguuuuuaccugcugagag

SEQ ID NO: 204005 - RNA, 22 nt, Human
acucaggaaaaauguagugaua

SEQ ID NO: 204006 - RNA, 18 nt, Human
auugcuuuuguaccaacc

SEQ ID NO: 204007 - RNA, 22 nt, Human
augcagcuucaggauuaugaug

SEQ ID NO: 204008 - RNA, 22 nt, Human
gcugccugcuucaugugggaga

SEQ ID NO: 204009 - RNA, 22 nt, Human
cauguauacaguagaauacuau

SEQ ID NO: 204010 - RNA, 22 nt, Human
cauauuuaguguuuggagaucg

SEQ ID NO: 204011 - RNA, 21 nt, Human
ggaauagcuuaaagugagggg

SEQ ID NO: 204012 - RNA, 22 nt, Human
cagcuucuauuuaucuuugugu

SEQ ID NO: 204013 - RNA, 22 nt, Human
agcugugcugccaaguugcuga

SEQ ID NO: 204014 - RNA, 22 nt, Human
gcaggccugacuguagggggca

SEQ ID NO: 204015 - RNA, 22 nt, Human
ccucugcccuuuuccuguauca

SEQ ID NO: 204016 - RNA, 22 nt, Human
cugccugugaacauacuggggg

SEQ ID NO: 204017 - RNA, 20 nt, Human
ucucccaggcucagggaaga

SEQ ID NO: 204018 - RNA, 22 nt, Human
gacagcugcauccucagacaca

SEQ ID NO: 204019 - RNA, 22 nt, Human
agacauuuauugaacaccuagc

SEQ ID NO: 204020 - RNA, 22 nt, Human
uacuucugaaugugaguuuguu

SEQ ID NO: 204021 - RNA, 22 nt, Human
ccauccugcaggaccuccauau

SEQ ID NO: 204022 - RNA, 22 nt, Human
gccagcucaguuucaaaguagg

SEQ ID NO: 204023 - RNA, 22 nt, Human
augguaaaagauauacugugca

SEQ ID NO: 204024 - RNA, 22 nt, Human
ugacaagaucacagucaagugu

SEQ ID NO: 204025 - RNA, 22 nt, Human
ccaggccuggacggguggccug

SEQ ID NO: 204026 - RNA, 22 nt, Human
aagccuucagaguuggcugguc

SEQ ID NO: 204027 - RNA, 22 nt, Human
auguacaguggaaacuaacaaa

SEQ ID NO: 204028 - RNA, 18 nt, Human
ggcaggggugaaccacag

SEQ ID NO: 204029 - RNA, 22 nt, Human
ugccacagaggugaagcccacu

SEQ ID NO: 204030 - RNA, 21 nt, Human
ugacagguuuaggauuaaaau

SEQ ID NO: 204031 - RNA, 21 nt, Human
ucauuucucuauguauuucac

SEQ ID NO: 204032 - RNA, 22 nt, Human
ugcuuaaacauccagacaguau

SEQ ID NO: 204033 - RNA, 22 nt, Human
ccuggcugcuauagcagcaugu

SEQ ID NO: 204034 - RNA, 22 nt, Human
ugaucuuugguaguacgauaau

SEQ ID NO: 204035 - RNA, 22 nt, Human
gaggcagcaauaaaaagaauuu

SEQ ID NO: 204036 - RNA, 22 nt, Human
uaugaaaauuuagcugaagcau

SEQ ID NO: 204037 - RNA, 22 nt, Human
ggcuucucucccccagcuccac

SEQ ID NO: 204038 - RNA, 22 nt, Human
ggaggacaggggcugcagcaca

SEQ ID NO: 204039 - RNA, 20 nt, Human
aaagugcacagauacagcuc

SEQ ID NO: 204040 - RNA, 22 nt, Human
cacaugaacaugcuggaaaagc

SEQ ID NO: 204041 - RNA, 22 nt, Human
agccagggagguggagguugca

SEQ ID NO: 204042 - RNA, 22 nt, Human
aguuagagacacaugcacaugc

SEQ ID NO: 204043 - RNA, 22 nt, Human
caguuuuucaaaauuacaugau

SEQ ID NO: 204044 - RNA, 23 nt, Human
uuuugacaggaggaagguguuga

SEQ ID NO: 204045 - RNA, 22 nt, Human
ucagagcacuggugcuaccuug

SEQ ID NO: 204046 - RNA, 22 nt, Human
uucuguauggaaacauccucca

SEQ ID NO: 204047 - RNA, 22 nt, Human
cagggagcuuugucuucucauu

SEQ ID NO: 204048 - RNA, 22 nt, Human
aagcccagcaucccugcaccag

SEQ ID NO: 204049 - RNA, 22 nt, Human
ugguccaggguguaguacagag

SEQ ID NO: 204050 - RNA, 22 nt, Human
aaauuccaguucuuuuaccugc

SEQ ID NO: 204051 - RNA, 22 nt, Human
caggcaaggaggcacugaggga

SEQ ID NO: 204052 - RNA, 22 nt, Human
gcagcugagagaagaacagggc

SEQ ID NO: 204053 - RNA, 22 nt, Human
ugauucaagccaccacauacug

SEQ ID NO: 204054 - RNA, 22 nt, Human
ugggcagggucucuguuaucag

SEQ ID NO: 204055 - RNA, 22 nt, Human
gccacagcucacguuccccauu

SEQ ID NO: 204056 - RNA, 22 nt, Human
aagcagaggccacagagugggc

SEQ ID NO: 204057 - RNA, 23 nt, Human
ugggucagcugccuccaggacaa

SEQ ID NO: 204058 - RNA, 22 nt, Human
ucaugccagcuuugcuuguccc

SEQ ID NO: 204059 - RNA, 22 nt, Human
aggucuuaggagcauggugcug

SEQ ID NO: 204060 - RNA, 22 nt, Human
cacaaaugacugaaacgacugu

SEQ ID NO: 204061 - RNA, 22 nt, Human
auggcuggaggccgggcuuccu

SEQ ID NO: 204062 - RNA, 22 nt, Human
agcuaggacagguagagauggg

SEQ ID NO: 204063 - RNA, 22 nt, Human
ucagaggaagcaucaaguucuc

SEQ ID NO: 204064 - RNA, 22 nt, Human
uguauucagugccuagcauaug

SEQ ID NO: 204065 - RNA, 22 nt, Human
gcugccucugcacagcucacuc

SEQ ID NO: 204066 - RNA, 22 nt, Human
ggcaaaaaccgcaauaacuucu

SEQ ID NO: 204067 - RNA, 22 nt, Human
ugggcuccaauuuguccuuuca

SEQ ID NO: 204068 - RNA, 22 nt, Human
gaauacaucugaaggcuaugaa

SEQ ID NO: 204069 - RNA, 22 nt, Human
cugagaggggaccaggguguuu

SEQ ID NO: 204070 - RNA, 22 nt, Human
ggcagcucugaugaugcucugg

SEQ ID NO: 204071 - RNA, 22 nt, Human
agaauucugacaauagaauugg

SEQ ID NO: 204072 - RNA, 22 nt, Human
guucaucuuccucccagugccu

SEQ ID NO: 204073 - RNA, 23 nt, Human
ugacaacagcucucagccauguc

SEQ ID NO: 204074 - RNA, 22 nt, Human
cuggcauguguuuggcuccugu

SEQ ID NO: 204075 - RNA, 22 nt, Human
aaguuuuacugaggacacaugu

SEQ ID NO: 204076 - RNA, 22 nt, Human
agaaaugacaagacugaucagg

SEQ ID NO: 204077 - RNA, 22 nt, Human
ccagccuucaccugcucugguc

SEQ ID NO: 204078 - RNA, 22 nt, Human
agggggcuccuccggugcuucc

SEQ ID NO: 204079 - RNA, 22 nt, Human
acauuaaaaaauguugcaugaa

SEQ ID NO: 204080 - RNA, 22 nt, Human
agggaauucacuggaacgcccu

SEQ ID NO: 204081 - RNA, 22 nt, Human
cugauugagaaggaaggggauc

SEQ ID NO: 204082 - RNA, 21 nt, Human
gcugugcaggugccccugcuc

SEQ ID NO: 204083 - RNA, 22 nt, Human
agugaaaugauaguguaaauac

SEQ ID NO: 204084 - RNA, 22 nt, Human
accuagaacugcaggcuauuuu

SEQ ID NO: 204085 - RNA, 22 nt, Human
cugagggguauccaagggguaa

SEQ ID NO: 204086 - RNA, 22 nt, Human
ugaucuuugggccauuaauaaa

SEQ ID NO: 204087 - RNA, 22 nt, Human
aacauuugagaaaaauacucuu

SEQ ID NO: 204088 - RNA, 22 nt, Human
gauuagaauggauagaucccca

SEQ ID NO: 204089 - RNA, 22 nt, Human
ugaaggagauuuuuagggaggc

SEQ ID NO: 204090 - RNA, 22 nt, Human
uagcuuuacaaagugcugcacc

SEQ ID NO: 204091 - RNA, 22 nt, Human
uaccagccucaguugugagccc

SEQ ID NO: 204092 - RNA, 22 nt, Human
acagugcuuagcacagaguaga

SEQ ID NO: 204093 - RNA, 21 nt, Human
ucccagggucuuaugggaugu

SEQ ID NO: 204094 - RNA, 22 nt, Human
uuucaguucaguuuauuauauc

SEQ ID NO: 204095 - RNA, 22 nt, Human
uuucccaggcuggaaugcagug

SEQ ID NO: 204096 - RNA, 22 nt, Human
uaaauuagagccagguaaguuu

SEQ ID NO: 204097 - RNA, 21 nt, Human
uucugggccaugcugcuucuc

SEQ ID NO: 204098 - RNA, 22 nt, Human
agagacaaacacugcaacuucu

SEQ ID NO: 204099 - RNA, 22 nt, Human
cagaaucucgacuucuggcccc

SEQ ID NO: 204100 - RNA, 22 nt, Human
caaacauuugacuucucucagg

SEQ ID NO: 204101 - RNA, 19 nt, Human
uggcaggcccaggauggac

SEQ ID NO: 204102 - RNA, 22 nt, Human
ucuguaggacagagaaaugggg

SEQ ID NO: 204103 - RNA, 22 nt, Human
acucugaggagugacuagaggu

SEQ ID NO: 204104 - RNA, 22 nt, Human
aaauacagauucugacucagag

SEQ ID NO: 204105 - RNA, 20 nt, Human
aguacaauguaugauucaga

SEQ ID NO: 204106 - RNA, 22 nt, Human
gcugaaaggggugacauucuuu

SEQ ID NO: 204107 - RNA, 18 nt, Human
uuggcuuugagaacuggu

SEQ ID NO: 204108 - RNA, 22 nt, Human
uucuagaagugucuaugucugu

SEQ ID NO: 204109 - RNA, 22 nt, Human
uacagugaggugguuuccuuua

SEQ ID NO: 204110 - RNA, 22 nt, Human
ucagagaacuccacaccuuagg

SEQ ID NO: 204111 - RNA, 22 nt, Human
aggggugugcauccuggaggau

SEQ ID NO: 204112 - RNA, 22 nt, Human
ugaaaacuccaaguuucaucag

SEQ ID NO: 204113 - RNA, 21 nt, Human
ucccucagaagcucuugguca

SEQ ID NO: 204114 - RNA, 22 nt, Human
gccuacauuucccaguugaaug

SEQ ID NO: 204115 - RNA, 22 nt, Human
uuuaaaaaacuagucugagucu

SEQ ID NO: 204116 - RNA, 22 nt, Human
ugaaauguuaaucacacaaagg

SEQ ID NO: 204117 - RNA, 22 nt, Human
ggcuggcuugccaagcucaggg

SEQ ID NO: 204118 - RNA, 22 nt, Human
agaaaucauugaauuauuugcu

SEQ ID NO: 204119 - RNA, 22 nt, Human
acugggagucaugaggaaggag

SEQ ID NO: 204120 - RNA, 22 nt, Human
acuauauacacauuaucuuguu

SEQ ID NO: 204121 - RNA, 22 nt, Human
aagugauuuucuucuuaguuau

SEQ ID NO: 204122 - RNA, 22 nt, Human
cugcuuuagguggaauguucua

SEQ ID NO: 204123 - RNA, 22 nt, Human
aaagaagguagggcuggugacu

SEQ ID NO: 204124 - RNA, 22 nt, Human
cuucaauuuuugguaugaugga

SEQ ID NO: 204125 - RNA, 22 nt, Human
uugcugaucugaaacguuacug

SEQ ID NO: 204126 - RNA, 22 nt, Human
ugagcuuauucauaaaagugca

SEQ ID NO: 204127 - RNA, 22 nt, Human
uccuuuguugagauaaauuggg

SEQ ID NO: 204128 - RNA, 22 nt, Human
ggagcugaugacgucaccaugg

SEQ ID NO: 204129 - RNA, 21 nt, Human
ucccugagcccaaggggcucc

SEQ ID NO: 204130 - RNA, 22 nt, Human
ucugggucuauuccuacuguga

SEQ ID NO: 204131 - RNA, 22 nt, Human
cacagcuaugagcagccuagcu

SEQ ID NO: 204132 - RNA, 22 nt, Human
aggugcaugaugcagagugcag

SEQ ID NO: 204133 - RNA, 22 nt, Human
uuaaagggccgauuuccaggcc

SEQ ID NO: 204134 - RNA, 22 nt, Human
gaggcacaccagggagucuugu

SEQ ID NO: 204135 - RNA, 19 nt, Human
ucuguucacauuguuucgc

SEQ ID NO: 204136 - RNA, 22 nt, Human
ugaaagcacaaguucuaacagg

SEQ ID NO: 204137 - RNA, 22 nt, Human
ucagugcugcuuuaugacaguu

SEQ ID NO: 204138 - RNA, 22 nt, Human
agcuggagccagugugaggcuu

SEQ ID NO: 204139 - RNA, 22 nt, Human
gguggcugcuuccucaagagga

SEQ ID NO: 204140 - RNA, 22 nt, Human
cucuggucauuuggaagagcau

SEQ ID NO: 204141 - RNA, 22 nt, Human
ucugggccucaguuucuucauc

SEQ ID NO: 204142 - RNA, 22 nt, Human
cauguuuaauugcgauguuuga

SEQ ID NO: 204143 - RNA, 22 nt, Human
cuuuccaagaaugcagauaccu

SEQ ID NO: 204144 - RNA, 15 nt, Human
uguuaacagcuggga

SEQ ID NO: 204145 - RNA, 17 nt, Human
agcuacaaggcaguuca

SEQ ID NO: 204146 - RNA, 22 nt, Human
uccaggagucuagccucaggcc

SEQ ID NO: 204147 - RNA, 22 nt, Human
auucuaaauguaauuuagaauu

SEQ ID NO: 204148 - RNA, 22 nt, Human
gccaaaggaccugugggugaca

SEQ ID NO: 204149 - RNA, 23 nt, Human
caggagggaaugaaguuagacaa

SEQ ID NO: 204150 - RNA, 22 nt, Human
ucauggcuuuuucacuguucgc

SEQ ID NO: 204151 - RNA, 22 nt, Human
uauuuccauguuagaacuaagu

SEQ ID NO: 204152 - RNA, 22 nt, Human
acagaugaguuagaauaggcag

SEQ ID NO: 204153 - RNA, 22 nt, Human
acauucuucuugugaauuuacu

SEQ ID NO: 204154 - RNA, 22 nt, Human
ggcaagugcuuccccaaccaca

SEQ ID NO: 204155 - RNA, 22 nt, Human
cagcuuguuaccgagggagggu

SEQ ID NO: 204156 - RNA, 17 nt, Human
ggaaaagaagaguagga

SEQ ID NO: 204157 - RNA, 22 nt, Human
uccaggcacagaguuggucagu

SEQ ID NO: 204158 - RNA, 22 nt, Human
caggaaauguauaauuuuauaa

SEQ ID NO: 204159 - RNA, 22 nt, Human
auuaauuuuucugacagccaca

SEQ ID NO: 204160 - RNA, 20 nt, Human
ggagagccacauagucuccc

SEQ ID NO: 204161 - RNA, 22 nt, Human
ugaaaucuuagccauucugccu

SEQ ID NO: 204162 - RNA, 22 nt, Human
agucugguauuggucuuuaauc

SEQ ID NO: 204163 - RNA, 22 nt, Human
gagugucagcagggcagagcac

SEQ ID NO: 204164 - RNA, 22 nt, Human
ccaggaagcucugcuccacggg

SEQ ID NO: 204165 - RNA, 22 nt, Human
cagcuuucuaccuuaggcagug

SEQ ID NO: 204166 - RNA, 22 nt, Human
cuuuacuucucaaaauaaagca

SEQ ID NO: 204167 - RNA, 22 nt, Human
agcugccaccucugccuuuggg

SEQ ID NO: 204168 - RNA, 22 nt, Human
uuuugccugagauccgagucug

SEQ ID NO: 204169 - RNA, 22 nt, Human
ucauaaauaguugugccugaau

SEQ ID NO: 204170 - RNA, 22 nt, Human
ucaucauccuuuuuugaagagu

SEQ ID NO: 204171 - RNA, 22 nt, Human
cuguuauauugguauauuuaca

SEQ ID NO: 204172 - RNA, 22 nt, Human
gaggggaaagugugaggcugcg

SEQ ID NO: 204173 - RNA, 20 nt, Human
caggucuucauguggcuguc

SEQ ID NO: 204174 - RNA, 22 nt, Human
aagcaagaguuggagugauguu

SEQ ID NO: 204175 - RNA, 22 nt, Human
cugccuccucacguccacagug

SEQ ID NO: 204176 - RNA, 22 nt, Human
aagugaauagccuauuuacuag

SEQ ID NO: 204177 - RNA, 21 nt, Human
uacaguaaguugggugguccu

SEQ ID NO: 204178 - RNA, 22 nt, Human
gauguuuggcucaaacgagugu

SEQ ID NO: 204179 - RNA, 22 nt, Human
gacacuuuggugcuuugugguu

SEQ ID NO: 204180 - RNA, 22 nt, Human
uuucagaagucaacuagguaaa

SEQ ID NO: 204181 - RNA, 22 nt, Human
uauaauccugcuucacauugaa

SEQ ID NO: 204182 - RNA, 22 nt, Human
uccagcccacaccugaagcugg

SEQ ID NO: 204183 - RNA, 22 nt, Human
aggcugugagcaagaacaccua

SEQ ID NO: 204184 - RNA, 22 nt, Human
caggccucagagaguggcgggg

SEQ ID NO: 204185 - RNA, 22 nt, Human
gugccugggguugagcuaugaa

SEQ ID NO: 204186 - RNA, 22 nt, Human
gcagagauuggugcacugauga

SEQ ID NO: 204187 - RNA, 19 nt, Human
acaaauaguuacauauccu

SEQ ID NO: 204188 - RNA, 22 nt, Human
uuucuuuuccaauaucccuacu

SEQ ID NO: 204189 - RNA, 22 nt, Human
ucugagagcaaggcauuagcag

SEQ ID NO: 204190 - RNA, 22 nt, Human
aauccacacaucuggcauguga

SEQ ID NO: 204191 - RNA, 22 nt, Human
ccuaguuuucauucagcagccu

SEQ ID NO: 204192 - RNA, 22 nt, Human
uggacaggaucugagacugaga

SEQ ID NO: 204193 - RNA, 22 nt, Human
agagccaggcucccauggggca

SEQ ID NO: 204194 - RNA, 22 nt, Human
aggcuggcccuacuggcugccu

SEQ ID NO: 204195 - RNA, 22 nt, Human
ucagagcauucgggugacaaau

SEQ ID NO: 204196 - RNA, 22 nt, Human
cugcccgucccuuugcucucgc

SEQ ID NO: 204197 - RNA, 22 nt, Human
ggagaagguggcucagcaaagg

SEQ ID NO: 204198 - RNA, 22 nt, Human
uuugaaaccuaguuauaugacu

SEQ ID NO: 204199 - RNA, 22 nt, Human
gccagccacuucccagacuggc

SEQ ID NO: 204200 - RNA, 22 nt, Human
uggcaacaugucgaagugcugu

SEQ ID NO: 204201 - RNA, 22 nt, Human
uauuagggaacugcaagacuaa

SEQ ID NO: 204202 - RNA, 22 nt, Human
guggcuuuggaauuguagacuc

SEQ ID NO: 204203 - RNA, 22 nt, Human
aaagcaguccuucccuuaaggu

SEQ ID NO: 204204 - RNA, 22 nt, Human
aacaggacacugggauggcuac

SEQ ID NO: 204205 - RNA, 22 nt, Human
aguccuggugacacuccucuuc

SEQ ID NO: 204206 - RNA, 22 nt, Human
ccagguguccccgucacugcag

SEQ ID NO: 204207 - RNA, 22 nt, Human
acauuuagcuguacaaucuaug

SEQ ID NO: 204208 - RNA, 22 nt, Human
acagcaggaauuaacauauaag

SEQ ID NO: 204209 - RNA, 22 nt, Human
aacaaauuaguugcaagacugg

SEQ ID NO: 204210 - RNA, 23 nt, Human
uuuggcauguuaacuucacuuac

SEQ ID NO: 204211 - RNA, 22 nt, Human
aguucuagaagacuuuuccauu

SEQ ID NO: 204212 - RNA, 22 nt, Human
cuuccucaugugcaaugcaagc

SEQ ID NO: 204213 - RNA, 19 nt, Human
ccuuuggauuuguuuaguc

SEQ ID NO: 204214 - RNA, 22 nt, Human
ucaguuacucugauguccugug

SEQ ID NO: 204215 - RNA, 22 nt, Human
cugguuuaaaauuacugguuaa

SEQ ID NO: 204216 - RNA, 22 nt, Human
cuugcuggugucgugccuucac

SEQ ID NO: 204217 - RNA, 22 nt, Human
caaaggcuuccacugcauccuu

SEQ ID NO: 204218 - RNA, 22 nt, Human
caguaggaaggaugcagaaaaa

SEQ ID NO: 204219 - RNA, 23 nt, Human
ucugccagugugugccaggagcc

SEQ ID NO: 204220 - RNA, 22 nt, Human
ugaggaagugguuguaugguuu

SEQ ID NO: 204221 - RNA, 22 nt, Human
agggagaagguuuagcugugag

SEQ ID NO: 204222 - RNA, 22 nt, Human
aguucuuuuaccaaggcaaaug

SEQ ID NO: 204223 - RNA, 22 nt, Human
uguuuagaugcaaagucucaca

SEQ ID NO: 204224 - RNA, 22 nt, Human
uuggcugcuagaugguguuaga

SEQ ID NO: 204225 - RNA, 22 nt, Human
gugcagggagcccagaaggucc

SEQ ID NO: 204226 - RNA, 22 nt, Human
uucuccaggcuugggccagguc

SEQ ID NO: 204227 - RNA, 22 nt, Human
ggcuguggccagcggggcugag

SEQ ID NO: 204228 - RNA, 22 nt, Human
ucccaguguggcaggccaugga

SEQ ID NO: 204229 - RNA, 18 nt, Human
ccugugcuccagcaucug

SEQ ID NO: 204230 - RNA, 22 nt, Human
gucuugaucuccugaccuugug

SEQ ID NO: 204231 - RNA, 22 nt, Human
ucugccuuugcuuuggcuguca

SEQ ID NO: 204232 - RNA, 22 nt, Human
gccuggcaggccuguuggggcu

SEQ ID NO: 204233 - RNA, 22 nt, Human
uggcagagagagugcagucgac

SEQ ID NO: 204234 - RNA, 22 nt, Human
cagggcuguggaaaacuggugc

SEQ ID NO: 204235 - RNA, 22 nt, Human
ggcuguggucugggugcucccc

SEQ ID NO: 204236 - RNA, 22 nt, Human
aguggcaguggaaagcacacgg

SEQ ID NO: 204237 - RNA, 22 nt, Human
auaggacagcagacaauuagua

SEQ ID NO: 204238 - RNA, 19 nt, Human
caggagagcaugcacuuug

SEQ ID NO: 204239 - RNA, 22 nt, Human
acagugauuuuaggauagaugg

SEQ ID NO: 204240 - RNA, 22 nt, Human
aaucucuucccaguaaaaaugg

SEQ ID NO: 204241 - RNA, 22 nt, Human
ggauuuacuaucuugaaauaua

SEQ ID NO: 204242 - RNA, 22 nt, Human
auauauuugagaauauucauga

SEQ ID NO: 204243 - RNA, 22 nt, Human
auuugccuugugauuuguaagu

SEQ ID NO: 204244 - RNA, 20 nt, Human
aaccaacagaaucaugucuc

SEQ ID NO: 204245 - RNA, 22 nt, Human
gggcaggagagaacagucaugg

SEQ ID NO: 204246 - RNA, 22 nt, Human
uccuccuucgggacugcuugac

SEQ ID NO: 204247 - RNA, 22 nt, Human
gcaucucuuuagaaucagaugg

SEQ ID NO: 204248 - RNA, 22 nt, Human
ucaggcugcaguggcaaaagac

SEQ ID NO: 204249 - RNA, 21 nt, Human
cuugaaagguagagucuacag

SEQ ID NO: 204250 - RNA, 22 nt, Human
acaaaggcauagugaauguuuu

SEQ ID NO: 204251 - RNA, 22 nt, Human
gcuggccuugaggugucuuuau

SEQ ID NO: 204252 - RNA, 22 nt, Human
ugggaaaguaauugucauccuu

SEQ ID NO: 204253 - RNA, 22 nt, Human
auccagccaguguggaugacuu

SEQ ID NO: 204254 - RNA, 22 nt, Human
gccaccucuuugucucugccgc

SEQ ID NO: 204255 - RNA, 22 nt, Human
cauggcugaggcagaggacuga

SEQ ID NO: 204256 - RNA, 22 nt, Human
gucuagaaaugccauacgugcc

SEQ ID NO: 204257 - RNA, 22 nt, Human
agggccugguucuguguaggga

SEQ ID NO: 204258 - RNA, 22 nt, Human
gguccagucuuucccuucuaga

SEQ ID NO: 204259 - RNA, 22 nt, Human
cccagagccgguggugcucaca

SEQ ID NO: 204260 - RNA, 22 nt, Human
ucuuccaggaccuggggcucca

SEQ ID NO: 204261 - RNA, 22 nt, Human
uuagcaauuccagguaaguuau

SEQ ID NO: 204262 - RNA, 22 nt, Human
ggcucucuuaacuggccauccu

SEQ ID NO: 204263 - RNA, 22 nt, Human
uuucaaggauguuauauaaaug

SEQ ID NO: 204264 - RNA, 22 nt, Human
ugcaauuaauuuacaugcuuaa

SEQ ID NO: 204265 - RNA, 22 nt, Human
agaguaaaguacuuggaauacc

SEQ ID NO: 204266 - RNA, 22 nt, Human
augguauuggaguaggacuugc

SEQ ID NO: 204267 - RNA, 22 nt, Human
agcccucugcaaacaccugaua

SEQ ID NO: 204268 - RNA, 22 nt, Human
auaaugguagauguccacgcag

SEQ ID NO: 204269 - RNA, 22 nt, Human
gcagggagguuugcugaccugg

SEQ ID NO: 204270 - RNA, 20 nt, Human
uuucauugucagaaucuuau

SEQ ID NO: 204271 - RNA, 18 nt, Human
ggccucagccuggccgga

SEQ ID NO: 204272 - RNA, 22 nt, Human
gcccugccugucugcugggagg

SEQ ID NO: 204273 - RNA, 22 nt, Human
cagcaggcagccauuucacugu

SEQ ID NO: 204274 - RNA, 22 nt, Human
auaacuuagaguaggcaaaagu

SEQ ID NO: 204275 - RNA, 22 nt, Human
ucuguggcaguucugguucauc

SEQ ID NO: 204276 - RNA, 20 nt, Human
cagagcccacuuucuuauca

SEQ ID NO: 204277 - RNA, 22 nt, Human
ccuugccuugguccuucgcagg

SEQ ID NO: 204278 - RNA, 22 nt, Human
uuucauguguugaauguguaca

SEQ ID NO: 204279 - RNA, 22 nt, Human
aaguaaaagcaggugugcuggg

SEQ ID NO: 204280 - RNA, 22 nt, Human
cuggcccugccuaauguacuug

SEQ ID NO: 204281 - RNA, 22 nt, Human
ugaaggcacguggguggauacu

SEQ ID NO: 204282 - RNA, 22 nt, Human
ugcugggggugucucaccaggc

SEQ ID NO: 204283 - RNA, 21 nt, Human
uucuguuuuuuguaccagggc

SEQ ID NO: 204284 - RNA, 22 nt, Human
aggcugagguaggaggaucgcu

SEQ ID NO: 204285 - RNA, 22 nt, Human
uuauuccauagaagucaaggaa

SEQ ID NO: 204286 - RNA, 22 nt, Human
agggucugacuccucuggcaag

SEQ ID NO: 204287 - RNA, 18 nt, Human
aucuuguuuuuggauuaa

SEQ ID NO: 204288 - RNA, 22 nt, Human
aucuaagaguuaacaucaagaa

SEQ ID NO: 204289 - RNA, 22 nt, Human
uggaucucggcaaugcgggacu

SEQ ID NO: 204290 - RNA, 22 nt, Human
uggaggaaguggacaguugugu

SEQ ID NO: 204291 - RNA, 22 nt, Human
uccaggcuggaaaugucaaacu

SEQ ID NO: 204292 - RNA, 21 nt, Human
ccacagcuggucucugagccc

SEQ ID NO: 204293 - RNA, 21 nt, Human
ucagaagugcagcccaggaau

SEQ ID NO: 204294 - RNA, 22 nt, Human
ucucagagaggggccgggccuu

SEQ ID NO: 204295 - RNA, 22 nt, Human
acauguuugccugcaggcuuag

SEQ ID NO: 204296 - RNA, 22 nt, Human
agccaggcgcaguggcuuaugc

SEQ ID NO: 204297 - RNA, 22 nt, Human
auuaaugacgcagauaauaauu

SEQ ID NO: 204298 - RNA, 21 nt, Human
gucagagaugcccaacugccu

SEQ ID NO: 204299 - RNA, 21 nt, Human
ggggaugcgaccacaggcucc

SEQ ID NO: 204300 - RNA, 22 nt, Human
cagcaucucauucauucauguu

SEQ ID NO: 204301 - RNA, 22 nt, Human
augcugagauaaggcuuuaguc

SEQ ID NO: 204302 - RNA, 22 nt, Human
ccucagucugucugaucugcca

SEQ ID NO: 204303 - RNA, 19 nt, Human
acauuuaaauucagaucuc

SEQ ID NO: 204304 - RNA, 22 nt, Human
ucucuggguucucacucagcac

SEQ ID NO: 204305 - RNA, 22 nt, Human
agagauggcgucucagagccug

SEQ ID NO: 204306 - RNA, 22 nt, Human
uguggcugggaagaagguaacu

SEQ ID NO: 204307 - RNA, 22 nt, Human
ucucuggguugagaacuaggac

SEQ ID NO: 204308 - RNA, 22 nt, Human
agaucuuuugguuauuauaaga

SEQ ID NO: 204309 - RNA, 20 nt, Human
agucacaugcauacacaagu

SEQ ID NO: 204310 - RNA, 22 nt, Human
gcuuggcagcaacaggcauccc

SEQ ID NO: 204311 - RNA, 20 nt, Human
aucugggcaucaauuuugug

SEQ ID NO: 204312 - RNA, 19 nt, Human
cugggucuuauucugugaa

SEQ ID NO: 204313 - RNA, 18 nt, Human
guauuaguuuucagagag

SEQ ID NO: 204314 - RNA, 22 nt, Human
aacucacagcuguuuggauuag

SEQ ID NO: 204315 - RNA, 23 nt, Human
ugccuuaguuagcacauuucuaa

SEQ ID NO: 204316 - RNA, 22 nt, Human
uggcaggaggaugaggcggcua

SEQ ID NO: 204317 - RNA, 22 nt, Human
ucauuucucugagucugauaau

SEQ ID NO: 204318 - RNA, 22 nt, Human
uccagccccggcuuccuuacag

SEQ ID NO: 204319 - RNA, 20 nt, Human
agauuuaccuuugagccuuc

SEQ ID NO: 204320 - RNA, 22 nt, Human
gcccaggauucuuucuuccuua

SEQ ID NO: 204321 - RNA, 22 nt, Human
ccagagaggccaaggucguggu

SEQ ID NO: 204322 - RNA, 22 nt, Human
gugguaucugucucccccacug

SEQ ID NO: 204323 - RNA, 22 nt, Human
aggcagaggaaggguggauuug

SEQ ID NO: 204324 - RNA, 22 nt, Human
aaacuagaugauuaugaagcau

SEQ ID NO: 204325 - RNA, 22 nt, Human
ucuuuguaaaugccuagcauaa

SEQ ID NO: 204326 - RNA, 22 nt, Human
cagagugggcugucagccacca

SEQ ID NO: 204327 - RNA, 17 nt, Human
uccuuggcaaccaguuc

SEQ ID NO: 204328 - RNA, 22 nt, Human
uuuagcuucaguucuagcuucu

SEQ ID NO: 204329 - RNA, 22 nt, Human
ggagagaggagcccacugcugu

SEQ ID NO: 204330 - RNA, 22 nt, Human
aguguagacauaggucuggucu

SEQ ID NO: 204331 - RNA, 22 nt, Human
agugcuuuuauuauauacagga

SEQ ID NO: 204332 - RNA, 19 nt, Human
ucuguggcuguggggagga

SEQ ID NO: 204333 - RNA, 21 nt, Human
guggcucugccaggacugaaa

SEQ ID NO: 204334 - RNA, 22 nt, Human
ucuuucaaugagcauucuuucc

SEQ ID NO: 204335 - RNA, 22 nt, Human
caggcugcuccaggguaggaaa

SEQ ID NO: 204336 - RNA, 22 nt, Human
gaguuaaaguaccuuuguaugu

SEQ ID NO: 204337 - RNA, 22 nt, Human
agagggugagcagguacacaug

SEQ ID NO: 204338 - RNA, 20 nt, Human
auuccacuuauaugaggucc

SEQ ID NO: 204339 - RNA, 22 nt, Human
cauuugaaaauacucuuuucca

SEQ ID NO: 204340 - RNA, 22 nt, Human
uuucauaauacuguacaugaaa

SEQ ID NO: 204341 - RNA, 22 nt, Human
uccaauauucauuaaaaugcag

SEQ ID NO: 204342 - RNA, 22 nt, Human
uguuuguagagacagcugaugc

SEQ ID NO: 204343 - RNA, 22 nt, Human
ugagaaccucgaagauuuugcc

SEQ ID NO: 204344 - RNA, 21 nt, Human
ugcuccaggagggggcagucc

SEQ ID NO: 204345 - RNA, 22 nt, Human
uucugagggcuaauguacugua

SEQ ID NO: 204346 - RNA, 19 nt, Human
uuugaauccagcugguaac

SEQ ID NO: 204347 - RNA, 22 nt, Human
uagcagaggaaaagagaacauu

SEQ ID NO: 204348 - RNA, 22 nt, Human
aaauauacggucccuaacaguc

SEQ ID NO: 204349 - RNA, 22 nt, Human
aaaguuuuguugauuguggaau

SEQ ID NO: 204350 - RNA, 22 nt, Human
aguuugaaaguauugacagaag

SEQ ID NO: 204351 - RNA, 22 nt, Human
ggcucagaguuaggacccaugu

SEQ ID NO: 204352 - RNA, 22 nt, Human
gggaaagaagaagagccauuuu

SEQ ID NO: 204353 - RNA, 22 nt, Human
uuagccauauagaaaaagagcu

SEQ ID NO: 204354 - RNA, 22 nt, Human
uuauucaccgcaggugcuuccc

SEQ ID NO: 204355 - RNA, 22 nt, Human
aaauuucuguuguuuugagcca

SEQ ID NO: 204356 - RNA, 22 nt, Human
ucucauuugccucaucuauaaa

SEQ ID NO: 204357 - RNA, 22 nt, Human
cuggacagugcugcuugagaug

SEQ ID NO: 204358 - RNA, 22 nt, Human
auaugugugccauuucagcagu

SEQ ID NO: 204359 - RNA, 22 nt, Human
cccaggacucuucacugcagcc

SEQ ID NO: 204360 - RNA, 22 nt, Human
uuagaaaugauuucaccucuuu

SEQ ID NO: 204361 - RNA, 22 nt, Human
auaugacagcggauucacauau

SEQ ID NO: 204362 - RNA, 22 nt, Human
acuuuucuaagcaauggucuug

SEQ ID NO: 204363 - RNA, 22 nt, Human
aagcccuguucuuucucucacc

SEQ ID NO: 204364 - RNA, 22 nt, Human
gggccaggaguggagauauggg

SEQ ID NO: 204365 - RNA, 22 nt, Human
ucucuggcuccugccgggucca

SEQ ID NO: 204366 - RNA, 22 nt, Human
ugcugccaucucaacugcccuu

SEQ ID NO: 204367 - RNA, 22 nt, Human
ucagacagcuugcagggaggug

SEQ ID NO: 204368 - RNA, 22 nt, Human
caggaaauuggcuauuugggau

SEQ ID NO: 204369 - RNA, 23 nt, Human
ucaucaaacagcugcucaagaaa

SEQ ID NO: 204370 - RNA, 22 nt, Human
guaugcaucgacucaagucuga

SEQ ID NO: 204371 - RNA, 22 nt, Human
ucagcagacauuauuuucuggc

SEQ ID NO: 204372 - RNA, 22 nt, Human
aggcuuuggggcauucuguguu

SEQ ID NO: 204373 - RNA, 19 nt, Human
ggccagcugucuccugcua

SEQ ID NO: 204374 - RNA, 22 nt, Human
ugucaucagcauauaagacagu

SEQ ID NO: 204375 - RNA, 22 nt, Human
agugacuucuccguggcaggau

SEQ ID NO: 204376 - RNA, 22 nt, Human
aauaacuugaagaucucuucca

SEQ ID NO: 204377 - RNA, 22 nt, Human
ugccuuccuggagcugaaggcu

SEQ ID NO: 204378 - RNA, 22 nt, Human
ucuguacauuuguguugugaau

SEQ ID NO: 204379 - RNA, 20 nt, Human
cagagccaagagcagcaucu

SEQ ID NO: 204380 - RNA, 22 nt, Human
ucugguccucucugugaugcua

SEQ ID NO: 204381 - RNA, 22 nt, Human
auccugggcaagucaauguccc

SEQ ID NO: 204382 - RNA, 22 nt, Human
auuucucucauuguuagcuagg

SEQ ID NO: 204383 - RNA, 20 nt, Human
aggcuccuguaccugaggaa

SEQ ID NO: 204384 - RNA, 22 nt, Human
agguccagaguugagauacaga

SEQ ID NO: 204385 - RNA, 22 nt, Human
aaagcugggcuagguuuguuuc

SEQ ID NO: 204386 - RNA, 22 nt, Human
ucuucuccauaaucaacacucu

SEQ ID NO: 204387 - RNA, 22 nt, Human
cuucccugauaagagccucaga

SEQ ID NO: 204388 - RNA, 22 nt, Human
ugaggcaggagguugagaacug

SEQ ID NO: 204389 - RNA, 22 nt, Human
acugucacuaacuaagucuagu

SEQ ID NO: 204390 - RNA, 22 nt, Human
accagcucuuucuuuucacuau

SEQ ID NO: 204391 - RNA, 22 nt, Human
acauauugagcucuaaaaguac

SEQ ID NO: 204392 - RNA, 22 nt, Human
gggucaggccucaaggugggcu

SEQ ID NO: 204393 - RNA, 22 nt, Human
ucaguguuuguggcaaauguua

SEQ ID NO: 204394 - RNA, 22 nt, Human
guuagggaucaggaacaagagc

SEQ ID NO: 204395 - RNA, 22 nt, Human
cugaggccuggugaggugguga

SEQ ID NO: 204396 - RNA, 22 nt, Human
gaacauuccuggaagagugcuu

SEQ ID NO: 204397 - RNA, 22 nt, Human
uuuuggcacugcgucuacaugg

SEQ ID NO: 204398 - RNA, 22 nt, Human
cucagccugugaagagcagagg

SEQ ID NO: 204399 - RNA, 22 nt, Human
aaacaguuucuaaucauggaga

SEQ ID NO: 204400 - RNA, 22 nt, Human
uuucacauaugguuguugauug

SEQ ID NO: 204401 - RNA, 21 nt, Human
uagaagcacauagguucaaag

SEQ ID NO: 204402 - RNA, 22 nt, Human
uuauuguaggccuauuguagaa

SEQ ID NO: 204403 - RNA, 22 nt, Human
uggcuguggguggaaggaaacc

SEQ ID NO: 204404 - RNA, 22 nt, Human
cuggcugguugucucaauccag

SEQ ID NO: 204405 - RNA, 22 nt, Human
uguuuacuggcuccugugguuc

SEQ ID NO: 204406 - RNA, 22 nt, Human
ggcaggguggcccuccagugag

SEQ ID NO: 204407 - RNA, 22 nt, Human
aggugcugugcuaugcacuugu

SEQ ID NO: 204408 - RNA, 21 nt, Human
uuguaaagguuuagaagaaug

SEQ ID NO: 204409 - RNA, 22 nt, Human
cugggccugguguggcaccugc

SEQ ID NO: 204410 - RNA, 22 nt, Human
auuaagacugcccauguuuuua

SEQ ID NO: 204411 - RNA, 22 nt, Human
cuugccagcacuuggccagcug

SEQ ID NO: 204412 - RNA, 22 nt, Human
gcugcucuccauggccgugagu

SEQ ID NO: 204413 - RNA, 19 nt, Human
uugagcagugcuuagcacc

SEQ ID NO: 204414 - RNA, 21 nt, Human
agucuggggaagggaucccag

SEQ ID NO: 204415 - RNA, 22 nt, Human
gccacugcacuccagcccaggc

SEQ ID NO: 204416 - RNA, 22 nt, Human
auaucuuggccccaggauuuua

SEQ ID NO: 204417 - RNA, 22 nt, Human
cccuagaaaugaaagcauacgu

SEQ ID NO: 204418 - RNA, 22 nt, Human
cuuaauuuaagccuagaaugca

SEQ ID NO: 204419 - RNA, 22 nt, Human
gacuucaaaggucaaacaucgc

SEQ ID NO: 204420 - RNA, 18 nt, Human
aagggcuggccuuuggag

SEQ ID NO: 204421 - RNA, 22 nt, Human
cuguccuguacuuugaggcccu

SEQ ID NO: 204422 - RNA, 21 nt, Human
uuuagggaccaggucauaggc

SEQ ID NO: 204423 - RNA, 22 nt, Human
gccuggcauauaguaguugugc

SEQ ID NO: 204424 - RNA, 23 nt, Human
aacuuuuagaguuuaacaguguu

SEQ ID NO: 204425 - RNA, 22 nt, Human
ccagggcuggaccagugcuugg

SEQ ID NO: 204426 - RNA, 22 nt, Human
cagugagcacggccagagggga

SEQ ID NO: 204427 - RNA, 22 nt, Human
gagggcugauaacaggaauaca

SEQ ID NO: 204428 - RNA, 22 nt, Human
uggagccuguucugagaagccg

SEQ ID NO: 204429 - RNA, 22 nt, Human
caggacucacuucucacauccc

SEQ ID NO: 204430 - RNA, 22 nt, Human
auaaucuuguauuuccuaaagu

SEQ ID NO: 204431 - RNA, 22 nt, Human
ugaagguaauggaaucuccuga

SEQ ID NO: 204432 - RNA, 22 nt, Human
gagaugcugucaggcuaucugu

SEQ ID NO: 204433 - RNA, 22 nt, Human
guagggcagaaguucaaugugg

SEQ ID NO: 204434 - RNA, 22 nt, Human
agacaaaugaacaaauauguga

SEQ ID NO: 204435 - RNA, 22 nt, Human
cuccagugcgucuuaguaaacc

SEQ ID NO: 204436 - RNA, 22 nt, Human
guuuuauaauugcuucauaaga

SEQ ID NO: 204437 - RNA, 22 nt, Human
gggccuggggacaccaccauga

SEQ ID NO: 204438 - RNA, 22 nt, Human
cucaggccugaguggcaguccc

SEQ ID NO: 204439 - RNA, 19 nt, Human
ugccaggaauacuccagaa

SEQ ID NO: 204440 - RNA, 21 nt, Human
uuggaauuugggagcuaugug

SEQ ID NO: 204441 - RNA, 22 nt, Human
uccuggccacacauuaauagug

SEQ ID NO: 204442 - RNA, 22 nt, Human
caguuccuugagaaugguugcu

SEQ ID NO: 204443 - RNA, 22 nt, Human
aggcuggcggugacugcucuga

SEQ ID NO: 204444 - RNA, 22 nt, Human
aguggcuggucuaaggucacag

SEQ ID NO: 204445 - RNA, 22 nt, Human
caggggccuguccuggcuucug

SEQ ID NO: 204446 - RNA, 20 nt, Human
gggaugagaguccuagcucu

SEQ ID NO: 204447 - RNA, 22 nt, Human
aaagcacauuacaagcucaguc

SEQ ID NO: 204448 - RNA, 22 nt, Human
cuccuggaucuuagccagauuc

SEQ ID NO: 204449 - RNA, 22 nt, Human
agagccaggaaguggcgugggg

SEQ ID NO: 204450 - RNA, 22 nt, Human
auaucaguaucuauguauuugu

SEQ ID NO: 204451 - RNA, 22 nt, Human
ucagcagggagaggagaaugca

SEQ ID NO: 204452 - RNA, 22 nt, Human
ggaagaggcugagccagguccc

SEQ ID NO: 204453 - RNA, 22 nt, Human
gcugccuugguagugaccaucu

SEQ ID NO: 204454 - RNA, 22 nt, Human
uccucagaauggauggcagggg

SEQ ID NO: 204455 - RNA, 22 nt, Human
uucagagaagugcacaaaauca

SEQ ID NO: 204456 - RNA, 22 nt, Human
uuucaggagagaccagaaauga

SEQ ID NO: 204457 - RNA, 22 nt, Human
uugaaucuauguauucagugua

SEQ ID NO: 204458 - RNA, 22 nt, Human
ccucugccaccucccacgaggc

SEQ ID NO: 204459 - RNA, 22 nt, Human
aguaccugauuucacagaccag

SEQ ID NO: 204460 - RNA, 22 nt, Human
cagugcagguuuagggcugggg

SEQ ID NO: 204461 - RNA, 22 nt, Human
gcccagccccuggguggacgug

SEQ ID NO: 204462 - RNA, 22 nt, Human
uggaaacucuaccucucuaaga

SEQ ID NO: 204463 - RNA, 22 nt, Human
uucaguuuccacuuacauuuaa

SEQ ID NO: 204464 - RNA, 22 nt, Human
ggcuccugaggaccaggcacag

SEQ ID NO: 204465 - RNA, 22 nt, Human
cucguugcugaagccaaaguca

SEQ ID NO: 204466 - RNA, 22 nt, Human
gaaccuuaugguaaaucuagag

SEQ ID NO: 204467 - RNA, 22 nt, Human
uggagcagaaauuugaagccau

SEQ ID NO: 204468 - RNA, 22 nt, Human
cucagagccccaggagggugug

SEQ ID NO: 204469 - RNA, 22 nt, Human
uacaguuuagaaccauagaugg

SEQ ID NO: 204470 - RNA, 22 nt, Human
cugccaugugugaaaggggagg

SEQ ID NO: 204471 - RNA, 18 nt, Human
cugggccuuuguauuuuu

SEQ ID NO: 204472 - RNA, 22 nt, Human
cagaugcuaaacaaaggacuuu

SEQ ID NO: 204473 - RNA, 20 nt, Human
aauguauuguuuuguuucag

SEQ ID NO: 204474 - RNA, 22 nt, Human
ugugggaaaugggaguggaaga

SEQ ID NO: 204475 - RNA, 22 nt, Human
uggcauugacgcugaccugcac

SEQ ID NO: 204476 - RNA, 17 nt, Human
gcagugaaaagagauca

SEQ ID NO: 204477 - RNA, 20 nt, Human
guccagugggccuucauuuc

SEQ ID NO: 204478 - RNA, 22 nt, Human
cuguccagucagaacgucauua

SEQ ID NO: 204479 - RNA, 22 nt, Human
gggcuggcaucgguugcugaga

SEQ ID NO: 204480 - RNA, 22 nt, Human
uuuauuuggcauccagggagaa

SEQ ID NO: 204481 - RNA, 22 nt, Human
uuaagcauggaagugaaauaau

SEQ ID NO: 204482 - RNA, 21 nt, Human
agcugaaaaguuguuuacaag

SEQ ID NO: 204483 - RNA, 19 nt, Human
ggcugcugaagagaauuac

SEQ ID NO: 204484 - RNA, 22 nt, Human
acauggaaaacuaacugcuuuu

SEQ ID NO: 204485 - RNA, 21 nt, Human
ucaggcagugcaaauacaugg

SEQ ID NO: 204486 - RNA, 22 nt, Human
uuaauuaaauucaugagcauug

SEQ ID NO: 204487 - RNA, 22 nt, Human
uucaauucugcucugaucuuag

SEQ ID NO: 204488 - RNA, 22 nt, Human
ugcagggaggccccgcagcccu

SEQ ID NO: 204489 - RNA, 22 nt, Human
cugugacccaguuccuggcacc

SEQ ID NO: 204490 - RNA, 22 nt, Human
gccugggaaaugguggggucag

SEQ ID NO: 204491 - RNA, 22 nt, Human
uuagauaaauuaagacuuuaca

SEQ ID NO: 204492 - RNA, 22 nt, Human
aucauucuagcuguuguguuga

SEQ ID NO: 204493 - RNA, 22 nt, Human
uggcugagccacuuguucagau

SEQ ID NO: 204494 - RNA, 22 nt, Human
uguggcagaggaggcagcgucc

SEQ ID NO: 204495 - RNA, 22 nt, Human
uucagagcagauauugaagggu

SEQ ID NO: 204496 - RNA, 22 nt, Human
auuaguaguaguuagcagccuc

SEQ ID NO: 204497 - RNA, 22 nt, Human
uuuuaaaggauagcucugguug

SEQ ID NO: 204498 - RNA, 22 nt, Human
ccagaacugagaaaauaaauuu

SEQ ID NO: 204499 - RNA, 19 nt, Human
gucccuucacuccugcugg

SEQ ID NO: 204500 - RNA, 22 nt, Human
uccagggcuggguuggcucagc

SEQ ID NO: 204501 - RNA, 20 nt, Human
ugcccagcaagagugcaguu

SEQ ID NO: 204502 - RNA, 22 nt, Human
uuacuguucauguuguacacuu

SEQ ID NO: 204503 - RNA, 22 nt, Human
cuuucuggaguggaaagguauu

SEQ ID NO: 204504 - RNA, 22 nt, Human
cagcucuuggagaaaccagagc

SEQ ID NO: 204505 - RNA, 22 nt, Human
ugugucaauuuucauuccuacu

SEQ ID NO: 204506 - RNA, 22 nt, Human
gaagacacucugcagaguuauc

SEQ ID NO: 204507 - RNA, 22 nt, Human
acuaacauuuguguaugucuug

SEQ ID NO: 204508 - RNA, 22 nt, Human
caggcagcauuuacucugauga

SEQ ID NO: 204509 - RNA, 17 nt, Human
aauguggaaguacaugc

SEQ ID NO: 204510 - RNA, 22 nt, Human
gcacuucuggccuggccugugu

SEQ ID NO: 204511 - RNA, 22 nt, Human
gcagguggucacucauccccag

SEQ ID NO: 204512 - RNA, 22 nt, Human
cacaucagguagaccuacagag

SEQ ID NO: 204513 - RNA, 19 nt, Human
cuguuauugucagagcucc

SEQ ID NO: 204514 - RNA, 17 nt, Human
cuacaguguguuuccug

SEQ ID NO: 204515 - RNA, 22 nt, Human
gugcuuuuaacuuuugaaagga

SEQ ID NO: 204516 - RNA, 23 nt, Human
aaagcaaggaauuggcaacagag

SEQ ID NO: 204517 - RNA, 22 nt, Human
cuuaaagaguauuuaauauaau

SEQ ID NO: 204518 - RNA, 20 nt, Human
agcuucuucugucuaauuuu

SEQ ID NO: 204519 - RNA, 19 nt, Human
ugagaaggcaguggggagc

SEQ ID NO: 204520 - RNA, 19 nt, Human
caguggccuggaggucucu

SEQ ID NO: 204521 - RNA, 22 nt, Human
ucacauucuuuauuugccaucc

SEQ ID NO: 204522 - RNA, 22 nt, Human
ugcaggugaaaauuaugaggau

SEQ ID NO: 204523 - RNA, 22 nt, Human
ugcaggcucaccugccagggcc

SEQ ID NO: 204524 - RNA, 22 nt, Human
ucaagcugcaucagugcaguga

SEQ ID NO: 204525 - RNA, 19 nt, Human
uccuuaaaaaagcaguucu

SEQ ID NO: 204526 - RNA, 19 nt, Human
cagcagccagggggccccu

SEQ ID NO: 204527 - RNA, 22 nt, Human
caucccugcccucaugccuaua

SEQ ID NO: 204528 - RNA, 22 nt, Human
gggaagcaggugcagcucgccu

SEQ ID NO: 204529 - RNA, 22 nt, Human
ugcagggacacgaagacaaaua

SEQ ID NO: 204530 - RNA, 22 nt, Human
uaggcaggugugcacugcccac

SEQ ID NO: 204531 - RNA, 22 nt, Human
uuccugggcaggacgagagucu

SEQ ID NO: 204532 - RNA, 22 nt, Human
agaccacuuggauaagaaacag

SEQ ID NO: 204533 - RNA, 22 nt, Human
agcaggcuccuuccuucucugg

SEQ ID NO: 204534 - RNA, 22 nt, Human
auacacuucauguuuucaucug

SEQ ID NO: 204535 - RNA, 22 nt, Human
ugaucugguccuacugugggca

SEQ ID NO: 204536 - RNA, 22 nt, Human
gaauacauggcagggagucauc

SEQ ID NO: 204537 - RNA, 22 nt, Human
caugcaaaggucaagaucagga

SEQ ID NO: 204538 - RNA, 22 nt, Human
acaucuguuugagaaaaagaag

SEQ ID NO: 204539 - RNA, 22 nt, Human
ugggagaagcagcagccaagug

SEQ ID NO: 204540 - RNA, 22 nt, Human
cauaauuacugauaugcugauu

SEQ ID NO: 204541 - RNA, 22 nt, Human
uagaugaagggguucagcaugg

SEQ ID NO: 204542 - RNA, 20 nt, Human
accagaggaaagagcaguga

SEQ ID NO: 204543 - RNA, 18 nt, Human
acagcagguuucauucuu

SEQ ID NO: 204544 - RNA, 20 nt, Human
uuggaagguggagaagagga

SEQ ID NO: 204545 - RNA, 22 nt, Human
uucauacauguguacuguucca

SEQ ID NO: 204546 - RNA, 22 nt, Human
uagcagaaacuguuacagaagg

SEQ ID NO: 204547 - RNA, 22 nt, Human
ccagggaggagcauuucauggu

SEQ ID NO: 204548 - RNA, 22 nt, Human
gcuuuaaaccucuacucugucc

SEQ ID NO: 204549 - RNA, 22 nt, Human
uuuguucaauccagacaauagc

SEQ ID NO: 204550 - RNA, 22 nt, Human
cuguuacugcuggagccauuga

SEQ ID NO: 204551 - RNA, 22 nt, Human
aggcuagcuguuucagggcuag

SEQ ID NO: 204552 - RNA, 22 nt, Human
gcugguggugggccaguucugu

SEQ ID NO: 204553 - RNA, 22 nt, Human
aggagccuggcuggcccacagg

SEQ ID NO: 204554 - RNA, 22 nt, Human
auuauuguacuuucaauaaggu

SEQ ID NO: 204555 - RNA, 21 nt, Human
ugcagcagaguaagcagggga

SEQ ID NO: 204556 - RNA, 22 nt, Human
ucaggucuuuugucuccuagaa

SEQ ID NO: 204557 - RNA, 22 nt, Human
uauuuaagaugugucauaaaga

SEQ ID NO: 204558 - RNA, 22 nt, Human
gagaaagacguaggcugggagg

SEQ ID NO: 204559 - RNA, 22 nt, Human
auucucaguucacuaguuucuu

SEQ ID NO: 204560 - RNA, 22 nt, Human
ccucccaccguaucucaguggc

SEQ ID NO: 204561 - RNA, 22 nt, Human
ucuuuggauuaaaauauuugua

SEQ ID NO: 204562 - RNA, 22 nt, Human
uagggcugcugcagaugacagg

SEQ ID NO: 204563 - RNA, 22 nt, Human
cuggaucuucagagaucaccag

SEQ ID NO: 204564 - RNA, 22 nt, Human
ugucucugucuuccagggcugu

SEQ ID NO: 204565 - RNA, 22 nt, Human
ugcagaggugaaagacuagcaa

SEQ ID NO: 204566 - RNA, 22 nt, Human
ggcugugccucuggcagcacau

SEQ ID NO: 204567 - RNA, 20 nt, Human
uuguauuccuugaaucaggu

SEQ ID NO: 204568 - RNA, 22 nt, Human
ugcaggagcaccagcucacccu

SEQ ID NO: 204569 - RNA, 21 nt, Human
agcagagugcuuugacuuugu

SEQ ID NO: 204570 - RNA, 22 nt, Human
aggcuccuugcucacaggcuca

SEQ ID NO: 204571 - RNA, 22 nt, Human
gaggccuggaauuccagccugg

SEQ ID NO: 204572 - RNA, 22 nt, Human
uagcuuuaaugaguugguaaga

SEQ ID NO: 204573 - RNA, 21 nt, Human
ccugggugggaccccucuucc

SEQ ID NO: 204574 - RNA, 22 nt, Human
caaauuguguuugcuuuucucu

SEQ ID NO: 204575 - RNA, 22 nt, Human
uauuucaggggguacaagaaga

SEQ ID NO: 204576 - RNA, 22 nt, Human
gguagaaagauggaacguugaa

SEQ ID NO: 204577 - RNA, 22 nt, Human
cccaggacuaaugagcucuacg

SEQ ID NO: 204578 - RNA, 22 nt, Human
aaggagaauuuggcuugugaug

SEQ ID NO: 204579 - RNA, 19 nt, Human
uuuaagcauagaggccaga

SEQ ID NO: 204580 - RNA, 23 nt, Human
aaagagacugauacggaaguucc

SEQ ID NO: 204581 - RNA, 22 nt, Human
agcucuuccugcaccuguggcu

SEQ ID NO: 204582 - RNA, 22 nt, Human
uuucuuuauccuccuuugcaca

SEQ ID NO: 204583 - RNA, 22 nt, Human
uuucauguuacaguguaaaagu

SEQ ID NO: 204584 - RNA, 22 nt, Human
ugagcauggugggugcagagca

SEQ ID NO: 204585 - RNA, 19 nt, Human
ucaguggaugaacauguuu

SEQ ID NO: 204586 - RNA, 22 nt, Human
gcaugaaaugagcgaauauaau

SEQ ID NO: 204587 - RNA, 22 nt, Human
cagggccagccauccugcuggg

SEQ ID NO: 204588 - RNA, 22 nt, Human
cccaggcugauguucagcgggu

SEQ ID NO: 204589 - RNA, 22 nt, Human
agaugcagacuugguucaggca

SEQ ID NO: 204590 - RNA, 22 nt, Human
aguagcaguuuggcugaauuua

SEQ ID NO: 204591 - RNA, 22 nt, Human
cucacugugaccucagcagaca

SEQ ID NO: 204592 - RNA, 22 nt, Human
gaauguuugacuaaagguagcu

SEQ ID NO: 204593 - RNA, 22 nt, Human
augggaggcagcagagcccagc

SEQ ID NO: 204594 - RNA, 22 nt, Human
cagaggaggcgguauacacugc

SEQ ID NO: 204595 - RNA, 20 nt, Human
ccucuguguccugugucaua

SEQ ID NO: 204596 - RNA, 22 nt, Human
ggcacugggagaggugagacgg

SEQ ID NO: 204597 - RNA, 22 nt, Human
ugacccauuugcuuuuccugua

SEQ ID NO: 204598 - RNA, 22 nt, Human
cuugucugggcagcuugggagu

SEQ ID NO: 204599 - RNA, 22 nt, Human
aagcuggacucugccauuuacu

SEQ ID NO: 204600 - RNA, 22 nt, Human
uugcaacagguguguuuuggug

SEQ ID NO: 204601 - RNA, 22 nt, Human
acagcagaucuguggagcuuau

SEQ ID NO: 204602 - RNA, 19 nt, Human
ugugugguuggugaaacuc

SEQ ID NO: 204603 - RNA, 22 nt, Human
ugauuuuauugaaacuucacuu

SEQ ID NO: 204604 - RNA, 22 nt, Human
acccugggaccuggagguggau

SEQ ID NO: 204605 - RNA, 22 nt, Human
gcaguccuagggugcucugcag

SEQ ID NO: 204606 - RNA, 22 nt, Human
uccugaaauucugguugucacu

SEQ ID NO: 204607 - RNA, 22 nt, Human
ggugggggagacuuggucaaga

SEQ ID NO: 204608 - RNA, 22 nt, Human
gcugaggacaucauggaaggaa

SEQ ID NO: 204609 - RNA, 22 nt, Human
uccuggugucgccuggucaguu

SEQ ID NO: 204610 - RNA, 22 nt, Human
ugccaggcuuuggucaaaggcu

SEQ ID NO: 204611 - RNA, 22 nt, Human
uuccugguuuauaccuguauca

SEQ ID NO: 204612 - RNA, 22 nt, Human
ugcuuuauuaagagagaaauuu

SEQ ID NO: 204613 - RNA, 22 nt, Human
uguguacacacagauauauaca

SEQ ID NO: 204614 - RNA, 22 nt, Human
uuucaguuaaguggcuaguccc

SEQ ID NO: 204615 - RNA, 22 nt, Human
ugcagggcuaagucagagccug

SEQ ID NO: 204616 - RNA, 22 nt, Human
gggaggcacgaggcgcgcagug

SEQ ID NO: 204617 - RNA, 22 nt, Human
uaaaggcuucugcagggacuga

SEQ ID NO: 204618 - RNA, 22 nt, Human
ccauuccaugugcuacacauaa

SEQ ID NO: 204619 - RNA, 22 nt, Human
cuccagcuuuuucccaguuggc

SEQ ID NO: 204620 - RNA, 22 nt, Human
uccugaaaauaauuucacaaga

SEQ ID NO: 204621 - RNA, 22 nt, Human
uggcagcugccauguccacgug

SEQ ID NO: 204622 - RNA, 22 nt, Human
uuguacaacguuuuaaauuuga

SEQ ID NO: 204623 - RNA, 22 nt, Human
ggucuggcacucaugcagcagg

SEQ ID NO: 204624 - RNA, 22 nt, Human
ucaggaagaagacggggcagga

SEQ ID NO: 204625 - RNA, 22 nt, Human
ugcagagagaccccugggccag

SEQ ID NO: 204626 - RNA, 22 nt, Human
uugggaagaaacauguccauca

SEQ ID NO: 204627 - RNA, 22 nt, Human
guggauggcuaguugagaaggg

SEQ ID NO: 204628 - RNA, 22 nt, Human
cugggcacugcagcaggcauca

SEQ ID NO: 204629 - RNA, 22 nt, Human
gauaagcacuauauaaguauuu

SEQ ID NO: 204630 - RNA, 22 nt, Human
guuagggagggugcauaugugu

SEQ ID NO: 204631 - RNA, 22 nt, Human
cuuacaaauacacuuaggagag

SEQ ID NO: 204632 - RNA, 22 nt, Human
uaagguuucuaguuucuaaacu

SEQ ID NO: 204633 - RNA, 22 nt, Human
cuccacagagaugcugauugua

SEQ ID NO: 204634 - RNA, 22 nt, Human
gcaggugucaguccccaaggug

SEQ ID NO: 204635 - RNA, 22 nt, Human
ucaaggaaggucuguugcucca

SEQ ID NO: 204636 - RNA, 22 nt, Human
ccagaggcuggguucaccucag

SEQ ID NO: 204637 - RNA, 22 nt, Human
uugugaauagugccgcaauaaa

SEQ ID NO: 204638 - RNA, 22 nt, Human
ggaggcaucucuguggcugucu

SEQ ID NO: 204639 - RNA, 22 nt, Human
agagagcccgggccagggcaca

SEQ ID NO: 204640 - RNA, 22 nt, Human
cuucucagucuugguuagagag

SEQ ID NO: 204641 - RNA, 22 nt, Human
uacaggagcugcucugugauac

SEQ ID NO: 204642 - RNA, 22 nt, Human
gccucucuccuuggcuugcagu

SEQ ID NO: 204643 - RNA, 22 nt, Human
uuggaggauaaggauauugauu

SEQ ID NO: 204644 - RNA, 22 nt, Human
ggcuggcuggaugaauggauua

SEQ ID NO: 204645 - RNA, 22 nt, Human
aucuuuaguagaggaauauauu

SEQ ID NO: 204646 - RNA, 22 nt, Human
acagcaggcaugaagaaauguu

SEQ ID NO: 204647 - RNA, 22 nt, Human
caucacauuagucucaagagaa

SEQ ID NO: 204648 - RNA, 22 nt, Human
acaugcauaggagaagucuuua

SEQ ID NO: 204649 - RNA, 23 nt, Human
accuacauuauagggauaugggu

SEQ ID NO: 204650 - RNA, 20 nt, Human
gggugggagagucugagggu

SEQ ID NO: 204651 - RNA, 22 nt, Human
uucucugguuugcuguuucuga

SEQ ID NO: 204652 - RNA, 22 nt, Human
ugccaggaggaggugggacaga

SEQ ID NO: 204653 - RNA, 22 nt, Human
gugagcaggauaggggcucccu

SEQ ID NO: 204654 - RNA, 22 nt, Human
uccugggucugggugucugagg

SEQ ID NO: 204655 - RNA, 22 nt, Human
uucuuuagguagauccaguuuu

SEQ ID NO: 204656 - RNA, 22 nt, Human
uaguuuuuaaguguacaauuuc

SEQ ID NO: 204657 - RNA, 22 nt, Human
ugcaaccugcacucugucuuua

SEQ ID NO: 204658 - RNA, 22 nt, Human
uuaguacaagagauuaauuacu

SEQ ID NO: 204659 - RNA, 22 nt, Human
aggcuggagacccgccaagaaa

SEQ ID NO: 204660 - RNA, 22 nt, Human
ucucaaauuugcuggaccagua

SEQ ID NO: 204661 - RNA, 22 nt, Human
acaguacaagcaugauacauaa

SEQ ID NO: 204662 - RNA, 22 nt, Human
gagggcacgaaacaaccacuuc

SEQ ID NO: 204663 - RNA, 22 nt, Human
cagguauuuucaaggcuugugu

SEQ ID NO: 204664 - RNA, 22 nt, Human
uacaggcacugaaaugcuuauu

SEQ ID NO: 204665 - RNA, 22 nt, Human
uaauuuaugaugcaaagaaaag

SEQ ID NO: 204666 - RNA, 22 nt, Human
acuuggcaaguaucuauaaagu

SEQ ID NO: 204667 - RNA, 22 nt, Human
uggcacagacugggccaaggaa

SEQ ID NO: 204668 - RNA, 23 nt, Human
ugucuggggcgccagaagagaga

SEQ ID NO: 204669 - RNA, 22 nt, Human
uggcuggggccacaguuuuccu

SEQ ID NO: 204670 - RNA, 22 nt, Human
gucucugugccuucuccccacc

SEQ ID NO: 204671 - RNA, 22 nt, Human
gaggaacaagcugcuuuaucuu

SEQ ID NO: 204672 - RNA, 22 nt, Human
acacagagggcagaagauacau

SEQ ID NO: 204673 - RNA, 17 nt, Human
aagagaggcugagcugg

SEQ ID NO: 204674 - RNA, 22 nt, Human
agcagcaguccuuuguguaauu

SEQ ID NO: 204675 - RNA, 22 nt, Human
gcacagcucuccccaagacgaa

SEQ ID NO: 204676 - RNA, 22 nt, Human
uucaucuguaguuuuuccaagg

SEQ ID NO: 204677 - RNA, 22 nt, Human
agaccgagaaguucuccaggcc

SEQ ID NO: 204678 - RNA, 22 nt, Human
ucagcuccucaugcaggggaua

SEQ ID NO: 204679 - RNA, 19 nt, Human
acuguucuaacuugcagcu

SEQ ID NO: 204680 - RNA, 22 nt, Human
aaugggcuuuggccaguaggag

SEQ ID NO: 204681 - RNA, 22 nt, Human
aaggaggacacccaggacuggg

SEQ ID NO: 204682 - RNA, 22 nt, Human
caguggcuucuuccuagagcca

SEQ ID NO: 204683 - RNA, 21 nt, Human
agaagcuagucacuaaaucca

SEQ ID NO: 204684 - RNA, 22 nt, Human
ugugaaagauacuaggcagagg

SEQ ID NO: 204685 - RNA, 22 nt, Human
ugauugaagaggugaggaaguu

SEQ ID NO: 204686 - RNA, 22 nt, Human
gauagaaagagugguucuuuuu

SEQ ID NO: 204687 - RNA, 22 nt, Human
aucacugucgucaucugagauu

SEQ ID NO: 204688 - RNA, 22 nt, Human
uucccacaguguugaauccucu

SEQ ID NO: 204689 - RNA, 22 nt, Human
ucagcuuucucaaagaagcugg

SEQ ID NO: 204690 - RNA, 22 nt, Human
aaggcagcaccgccuccugaaa

SEQ ID NO: 204691 - RNA, 22 nt, Human
cuccuggaagcccgcccugcug

SEQ ID NO: 204692 - RNA, 22 nt, Human
ucacagugcaggaucaguuaau

SEQ ID NO: 204693 - RNA, 22 nt, Human
uucauacaugagacuagaugca

SEQ ID NO: 204694 - RNA, 22 nt, Human
cuucugaagagguuaucauaga

SEQ ID NO: 204695 - RNA, 22 nt, Human
aacccaggucuuuggcuuccag

SEQ ID NO: 204696 - RNA, 17 nt, Human
ccaggcuccaucacugu

SEQ ID NO: 204697 - RNA, 22 nt, Human
agauggagaccuuggaugaacu

SEQ ID NO: 204698 - RNA, 22 nt, Human
cugacugucucuucucccauga

SEQ ID NO: 204699 - RNA, 22 nt, Human
cuugccugggacugaggcauuu

SEQ ID NO: 204700 - RNA, 22 nt, Human
uucuuuauguuaaugaaucuau

SEQ ID NO: 204701 - RNA, 22 nt, Human
ucaucuguuaugggaguuuuug

SEQ ID NO: 204702 - RNA, 22 nt, Human
agggccaggaucacagccaaga

SEQ ID NO: 204703 - RNA, 22 nt, Human
uucaggauaugugauaucugaa

SEQ ID NO: 204704 - RNA, 22 nt, Human
ugggaagaagcagagaacugga

SEQ ID NO: 204705 - RNA, 21 nt, Human
cugugaccuuucuuuccuccu

SEQ ID NO: 204706 - RNA, 17 nt, Human
ggcucugggugucacau

SEQ ID NO: 204707 - RNA, 22 nt, Human
gaugaauuguuauggcuacgag

SEQ ID NO: 204708 - RNA, 17 nt, Human
ugucuucugaagagagc

SEQ ID NO: 204709 - RNA, 22 nt, Human
uccauucuaugcuuacauuuau

SEQ ID NO: 204710 - RNA, 23 nt, Human
ugggaaauguagccuuggcauga

SEQ ID NO: 204711 - RNA, 21 nt, Human
ugacaggcacccuggcuguga

SEQ ID NO: 204712 - RNA, 22 nt, Human
aaggccaggccagaugacaguc

SEQ ID NO: 204713 - RNA, 22 nt, Human
gauuuuaucuuugugugcagua

SEQ ID NO: 204714 - RNA, 19 nt, Human
auuuuucuuccucugugca

SEQ ID NO: 204715 - RNA, 22 nt, Human
cuugagaacaggguuagguaac

SEQ ID NO: 204716 - RNA, 22 nt, Human
acuugguguauuagcucucacu

SEQ ID NO: 204717 - RNA, 22 nt, Human
aacaaaguguacuuccauacug

SEQ ID NO: 204718 - RNA, 22 nt, Human
gaaaugaaauagcaccaagguu

SEQ ID NO: 204719 - RNA, 22 nt, Human
uuucugaaaucucuuuugagga

SEQ ID NO: 204720 - RNA, 22 nt, Human
uucacaaagcuggagcauuucc

SEQ ID NO: 204721 - RNA, 23 nt, Human
cauguacagaguuugauaaagug

SEQ ID NO: 204722 - RNA, 22 nt, Human
cagcuggcuggucagugcacaa

SEQ ID NO: 204723 - RNA, 22 nt, Human
uguuuucaucacagaauguaac

SEQ ID NO: 204724 - RNA, 22 nt, Human
caugugaauuccaaagcuaggu

SEQ ID NO: 204725 - RNA, 22 nt, Human
ucagaaguaagguucucccaag

SEQ ID NO: 204726 - RNA, 22 nt, Human
agcagcaaguguaacugaauau

SEQ ID NO: 204727 - RNA, 22 nt, Human
aaggaccuauauugucagagga

SEQ ID NO: 204728 - RNA, 22 nt, Human
acuguauucuagucauguuugu

SEQ ID NO: 204729 - RNA, 22 nt, Human
aauauugagaaccagcauguuu

SEQ ID NO: 204730 - RNA, 22 nt, Human
cacagaacaccaaagaaccuuc

SEQ ID NO: 204731 - RNA, 22 nt, Human
gacuccuggcuuucccucuuag

SEQ ID NO: 204732 - RNA, 22 nt, Human
augcacaauuaggauauagcuu

SEQ ID NO: 204733 - RNA, 22 nt, Human
ucugugcugcaggagucugcau

SEQ ID NO: 204734 - RNA, 22 nt, Human
ugccaaguuucucucagggacu

SEQ ID NO: 204735 - RNA, 22 nt, Human
aucaguauacaggggacauuca

SEQ ID NO: 204736 - RNA, 22 nt, Human
gauauaaauuaaucaagugcaa

SEQ ID NO: 204737 - RNA, 22 nt, Human
uuucuauugaucuaauaaacau

SEQ ID NO: 204738 - RNA, 22 nt, Human
ugucaauauguaauaacugaau

SEQ ID NO: 204739 - RNA, 22 nt, Human
ucuggcaguggaugagggcagc

SEQ ID NO: 204740 - RNA, 22 nt, Human
cuggcccuugacuuacagcagg

SEQ ID NO: 204741 - RNA, 22 nt, Human
uuucuagucuucccuaccuccc

SEQ ID NO: 204742 - RNA, 22 nt, Human
auugucuuuccacugagaaguu

SEQ ID NO: 204743 - RNA, 22 nt, Human
acacaaacugcuagaaaauugg

SEQ ID NO: 204744 - RNA, 22 nt, Human
ggccucucuccagucagugcag

SEQ ID NO: 204745 - RNA, 22 nt, Human
augacaaggguugacacauguc

SEQ ID NO: 204746 - RNA, 21 nt, Human
cugggcucaagcaauccuuuc

SEQ ID NO: 204747 - RNA, 22 nt, Human
ugccaggcuguccugggccugg

SEQ ID NO: 204748 - RNA, 22 nt, Human
agccaacacauguaaaugcacc

SEQ ID NO: 204749 - RNA, 22 nt, Human
agcaaucaccaccucuauauuu

SEQ ID NO: 204750 - RNA, 22 nt, Human
ccaguguucauaauuuuacacu

SEQ ID NO: 204751 - RNA, 22 nt, Human
ugcagggcccuugggguugaac

SEQ ID NO: 204752 - RNA, 22 nt, Human
ccaugcugugacacaguaguua

SEQ ID NO: 204753 - RNA, 22 nt, Human
acagcugggaacucacacagca

SEQ ID NO: 204754 - RNA, 22 nt, Human
uaaaggcaaauguguguuugug

SEQ ID NO: 204755 - RNA, 22 nt, Human
cugggcucuaggaaccauuccu

SEQ ID NO: 204756 - RNA, 22 nt, Human
gcacaggaggccgaugcucaug

SEQ ID NO: 204757 - RNA, 22 nt, Human
gggcuggacaucuaagguagcu

SEQ ID NO: 204758 - RNA, 22 nt, Human
auugguauguauucugaaaacu

SEQ ID NO: 204759 - RNA, 22 nt, Human
ggagaaagcuguaguggaaugu

SEQ ID NO: 204760 - RNA, 22 nt, Human
uucugacagcaaaacucagccu

SEQ ID NO: 204761 - RNA, 22 nt, Human
gguccagguccugugacagcag

SEQ ID NO: 204762 - RNA, 22 nt, Human
cccuggagcuagucugagcaga

SEQ ID NO: 204763 - RNA, 22 nt, Human
gaggcuggucagcccuaagauc

SEQ ID NO: 204764 - RNA, 22 nt, Human
gggucagggcugccugggcuca

SEQ ID NO: 204765 - RNA, 22 nt, Human
ugcuggcuuuuccuucaggcag

SEQ ID NO: 204766 - RNA, 22 nt, Human
ccaggcaccauguucuuaggac

SEQ ID NO: 204767 - RNA, 22 nt, Human
ccuuuucuggccaccaagcgcu

SEQ ID NO: 204768 - RNA, 22 nt, Human
aaacugcagagccaugguucaa

SEQ ID NO: 204769 - RNA, 20 nt, Human
aggcucugccugcaggccca

SEQ ID NO: 204770 - RNA, 22 nt, Human
uuuaucuggacugugauauaaa

SEQ ID NO: 204771 - RNA, 22 nt, Human
uuagaagcaucaccuguucugg

SEQ ID NO: 204772 - RNA, 22 nt, Human
cucaggagagucuuauaucucc

SEQ ID NO: 204773 - RNA, 22 nt, Human
guaaauaacugguaauuggggu

SEQ ID NO: 204774 - RNA, 22 nt, Human
aguguauuacagaacugacauu

SEQ ID NO: 204775 - RNA, 22 nt, Human
ccugggcuguugcaucauccuu

SEQ ID NO: 204776 - RNA, 22 nt, Human
gaggauggaggcaguuagggcc

SEQ ID NO: 204777 - RNA, 22 nt, Human
cucuguugucaguggaagcagc

SEQ ID NO: 204778 - RNA, 22 nt, Human
agggcaugcuggaggagagaca

SEQ ID NO: 204779 - RNA, 22 nt, Human
uaggguccauauggaugaaugg

SEQ ID NO: 204780 - RNA, 22 nt, Human
gccacaugcaauugcagcacgu

SEQ ID NO: 204781 - RNA, 18 nt, Human
ggaagaaaaggaacucag

SEQ ID NO: 204782 - RNA, 22 nt, Human
ugcagagagcccugccuuccuc

SEQ ID NO: 204783 - RNA, 22 nt, Human
uggucugaggaacaccagcacu

SEQ ID NO: 204784 - RNA, 22 nt, Human
ggggucugcgccacugucugcg

SEQ ID NO: 204785 - RNA, 22 nt, Human
acaauuccugagaauacuuguu

SEQ ID NO: 204786 - RNA, 18 nt, Human
uuacuguuaucaaaacag

SEQ ID NO: 204787 - RNA, 22 nt, Human
cagcuccuguuggucuugagga

SEQ ID NO: 204788 - RNA, 22 nt, Human
auuuggaagcuugaagauuauu

SEQ ID NO: 204789 - RNA, 22 nt, Human
cuccaggacccaguggcuccag

SEQ ID NO: 204790 - RNA, 22 nt, Human
gccucccuguucuuccacaaua

SEQ ID NO: 204791 - RNA, 22 nt, Human
cuagggacugggaccuuaguua

SEQ ID NO: 204792 - RNA, 22 nt, Human
ggcuuucaaggaaaggccucau

SEQ ID NO: 204793 - RNA, 22 nt, Human
auggcuuggcaccaucuccuug

SEQ ID NO: 204794 - RNA, 21 nt, Human
gcagcaugagaaagccccaaa

SEQ ID NO: 204795 - RNA, 22 nt, Human
gccuucaguaguauccucauga

SEQ ID NO: 204796 - RNA, 22 nt, Human
uccuggcaaagcaaguuaugaa

SEQ ID NO: 204797 - RNA, 22 nt, Human
uuccucagacccucauugugag

SEQ ID NO: 204798 - RNA, 22 nt, Human
cugagacauuaugacaagugga

SEQ ID NO: 204799 - RNA, 22 nt, Human
cagcaucauacuaccuaaauga

SEQ ID NO: 204800 - RNA, 22 nt, Human
agcugccacugagggugcacag

SEQ ID NO: 204801 - RNA, 22 nt, Human
cuauucaguaagccaaaaccau

SEQ ID NO: 204802 - RNA, 22 nt, Human
acacaucuuagacugaaauaug

SEQ ID NO: 204803 - RNA, 22 nt, Human
ugcuggguuaccuaagccuaaa

SEQ ID NO: 204804 - RNA, 22 nt, Human
ucucugggcccagaccuuccuu

SEQ ID NO: 204805 - RNA, 22 nt, Human
acaucuguccucugcagagcuc

SEQ ID NO: 204806 - RNA, 22 nt, Human
guuugcauaucugugaaaugga

SEQ ID NO: 204807 - RNA, 22 nt, Human
uacuucauucaaguucgcuaua

SEQ ID NO: 204808 - RNA, 22 nt, Human
uggcugcacuucaacacauccu

SEQ ID NO: 204809 - RNA, 22 nt, Human
cccaucaggaacccaggagccc

SEQ ID NO: 204810 - RNA, 22 nt, Human
ucuacagcugcugcuucucaug

SEQ ID NO: 204811 - RNA, 22 nt, Human
cagcagguuaacagaggcuggu

SEQ ID NO: 204812 - RNA, 22 nt, Human
ugugccuggcauucugggcuuc

SEQ ID NO: 204813 - RNA, 22 nt, Human
uuccucagcuguuugggcucau

SEQ ID NO: 204814 - RNA, 22 nt, Human
cacagcaggcagaacgugggca

SEQ ID NO: 204815 - RNA, 22 nt, Human
augucagaaucuacauucuacu

SEQ ID NO: 204816 - RNA, 22 nt, Human
ccugggcagggcuggacucuca

SEQ ID NO: 204817 - RNA, 22 nt, Human
caacaguauagcuuuugacugc

SEQ ID NO: 204818 - RNA, 22 nt, Human
gcacugguuacccugaguggcu

SEQ ID NO: 204819 - RNA, 22 nt, Human
acucaggaaaugagaggcucuc

SEQ ID NO: 204820 - RNA, 22 nt, Human
uacuagaaauuaccuucucacu

SEQ ID NO: 204821 - RNA, 22 nt, Human
auauacacuccacugauacagg

SEQ ID NO: 204822 - RNA, 22 nt, Human
cacagguccuuccugcccuggg

SEQ ID NO: 204823 - RNA, 22 nt, Human
accagugcuuccugcuggagcu

SEQ ID NO: 204824 - RNA, 22 nt, Human
augaggcagcuggcuuucuccc

SEQ ID NO: 204825 - RNA, 22 nt, Human
aaaugcauuucacuaauguuuc

SEQ ID NO: 204826 - RNA, 22 nt, Human
gguggcugcacccuggcuaacu

SEQ ID NO: 204827 - RNA, 22 nt, Human
augagaaauuuauuacaagcua

SEQ ID NO: 204828 - RNA, 22 nt, Human
ucugugcauccuuaacgccugc

SEQ ID NO: 204829 - RNA, 22 nt, Human
aagaaagugcuuuguaaauuau

SEQ ID NO: 204830 - RNA, 22 nt, Human
uuucucaguaauguccuggaau

SEQ ID NO: 204831 - RNA, 22 nt, Human
uauccaaacauauagucucucu

SEQ ID NO: 204832 - RNA, 22 nt, Human
acugguguugauuuggaagggg

SEQ ID NO: 204833 - RNA, 22 nt, Human
ggagaugcuacaguucagcucu

SEQ ID NO: 204834 - RNA, 22 nt, Human
agucccagaucuacaggaggga

SEQ ID NO: 204835 - RNA, 22 nt, Human
cauguuguaucauucuguuccu

SEQ ID NO: 204836 - RNA, 22 nt, Human
gcgugggcuggacugggaugaa

SEQ ID NO: 204837 - RNA, 21 nt, Human
gaagagaguccucauccugag

SEQ ID NO: 204838 - RNA, 22 nt, Human
uggcagcaauuugugauguuga

SEQ ID NO: 204839 - RNA, 22 nt, Human
cccuuggccacugcgccaguga

SEQ ID NO: 204840 - RNA, 22 nt, Human
ucuaaaaaagucuguucacuug

SEQ ID NO: 204841 - RNA, 22 nt, Human
ucugcaggucacgcuccagccu

SEQ ID NO: 204842 - RNA, 22 nt, Human
gcagcugagcgugaggaagagu

SEQ ID NO: 204843 - RNA, 22 nt, Human
uguaaauaaugcauguaaauca

SEQ ID NO: 204844 - RNA, 22 nt, Human
gauaauuuuagucugaaaauug

SEQ ID NO: 204845 - RNA, 22 nt, Human
agcacagagcucggggaaugga

SEQ ID NO: 204846 - RNA, 21 nt, Human
uccaagccuucaacacauuca

SEQ ID NO: 204847 - RNA, 23 nt, Human
ccagggccccuacaccacugucc

SEQ ID NO: 204848 - RNA, 23 nt, Human
acaggcaggcauggccaaaugug

SEQ ID NO: 204849 - RNA, 22 nt, Human
ccaggaggugaaacuucaccag

SEQ ID NO: 204850 - RNA, 22 nt, Human
uggcaagagggaugcaagguuu

SEQ ID NO: 204851 - RNA, 22 nt, Human
guuuuuacuaagguugcuaagu

SEQ ID NO: 204852 - RNA, 22 nt, Human
uuucucugaguuguuacaaaac

SEQ ID NO: 204853 - RNA, 22 nt, Human
ucuuuguaguuauaaacgacuu

SEQ ID NO: 204854 - RNA, 22 nt, Human
caucuuuggagaaacuuccguu

SEQ ID NO: 204855 - RNA, 22 nt, Human
ggauuaagaccugucaguacac

SEQ ID NO: 204856 - RNA, 22 nt, Human
uaagaacuucggacauguuauc

SEQ ID NO: 204857 - RNA, 22 nt, Human
gucuuauaguacaauuugaagu

SEQ ID NO: 204858 - RNA, 22 nt, Human
ugcugaggacaccuagccuucu

SEQ ID NO: 204859 - RNA, 22 nt, Human
aauaauguacauacauauuucg

SEQ ID NO: 204860 - RNA, 21 nt, Human
gagcugggcgaggcuccgggg

SEQ ID NO: 204861 - RNA, 22 nt, Human
gccaggcuggcaaaaggaaacc

SEQ ID NO: 204862 - RNA, 22 nt, Human
aggaagccacugaaugaaaguu

SEQ ID NO: 204863 - RNA, 22 nt, Human
gcauagucaguaggauucucaa

SEQ ID NO: 204864 - RNA, 22 nt, Human
ccaggaagccugugucucugga

SEQ ID NO: 204865 - RNA, 18 nt, Human
uccaggcuccaggcuaac

SEQ ID NO: 204866 - RNA, 17 nt, Human
agacagaccucugcauc

SEQ ID NO: 204867 - RNA, 22 nt, Human
aaugucaguguuacugcuauug

SEQ ID NO: 204868 - RNA, 22 nt, Human
gggcugagugucccaggccgaa

SEQ ID NO: 204869 - RNA, 22 nt, Human
ucucagaguuuacggggcugaa

SEQ ID NO: 204870 - RNA, 22 nt, Human
ucccugggcggacauucuccca

SEQ ID NO: 204871 - RNA, 22 nt, Human
cuuagaaaugcagauucucagg

SEQ ID NO: 204872 - RNA, 22 nt, Human
agugaaauuuguuuagauaggu

SEQ ID NO: 204873 - RNA, 22 nt, Human
cagggccugcuuccuucuuguu

SEQ ID NO: 204874 - RNA, 22 nt, Human
caaauaguaugagcaaugauuc

SEQ ID NO: 204875 - RNA, 22 nt, Human
agugcaugccuuccuguggaug

SEQ ID NO: 204876 - RNA, 22 nt, Human
uggcucaggauaauuuucccaa

SEQ ID NO: 204877 - RNA, 22 nt, Human
aucacauuguuagcauagacug

SEQ ID NO: 204878 - RNA, 18 nt, Human
caucaguauccacuaggu

SEQ ID NO: 204879 - RNA, 19 nt, Human
agagucugugcucuuccua

SEQ ID NO: 204880 - RNA, 22 nt, Human
gaggcacagucccgaggcaagg

SEQ ID NO: 204881 - RNA, 22 nt, Human
cugggcugcagcgggagcgacg

SEQ ID NO: 204882 - RNA, 22 nt, Human
ugagacagcagauuagcaauga

SEQ ID NO: 204883 - RNA, 22 nt, Human
auaaaugauucagcaggaaaua

SEQ ID NO: 204884 - RNA, 23 nt, Human
aaagauguucccaaaguucacgu

SEQ ID NO: 204885 - RNA, 22 nt, Human
uuuggaaugacagauaucaaua

SEQ ID NO: 204886 - RNA, 22 nt, Human
aggccucuucagggagcaugga

SEQ ID NO: 204887 - RNA, 20 nt, Human
uccaggccuuguucucagau

SEQ ID NO: 204888 - RNA, 22 nt, Human
ucucugugacagcuggguaugu

SEQ ID NO: 204889 - RNA, 21 nt, Human
gcugcucgagauccagugcuu

SEQ ID NO: 204890 - RNA, 22 nt, Human
caguggugaagagcaggggcuc

SEQ ID NO: 204891 - RNA, 22 nt, Human
uuucuucagagagagcuuuccc

SEQ ID NO: 204892 - RNA, 17 nt, Human
uuucuggaaugggcaaa

SEQ ID NO: 204893 - RNA, 22 nt, Human
gacaguuuagguucaaaucuca

SEQ ID NO: 204894 - RNA, 22 nt, Human
ucugggucuggcugcuggugca

SEQ ID NO: 204895 - RNA, 22 nt, Human
ucucaugugauucccgugcaug

SEQ ID NO: 204896 - RNA, 22 nt, Human
aagugauuuagucuuauaaagg

SEQ ID NO: 204897 - RNA, 22 nt, Human
ucugguggcacgugucuugcau

SEQ ID NO: 204898 - RNA, 22 nt, Human
auuuccaugaauucccacucau

SEQ ID NO: 204899 - RNA, 22 nt, Human
uccuuuaugugaguuguuuccc

SEQ ID NO: 204900 - RNA, 22 nt, Human
ugaaaggaagagggcuacuccu

SEQ ID NO: 204901 - RNA, 22 nt, Human
uagcugggucucuguuuucuca

SEQ ID NO: 204902 - RNA, 22 nt, Human
ggaccaggccagccucccugcg

SEQ ID NO: 204903 - RNA, 22 nt, Human
ccuggcucuucugugucagccc

SEQ ID NO: 204904 - RNA, 22 nt, Human
gucaggauuuuaaaaucccagu

SEQ ID NO: 204905 - RNA, 22 nt, Human
acugcagggcauccuggccaag

SEQ ID NO: 204906 - RNA, 22 nt, Human
ugaggacauuggucaggacaug

SEQ ID NO: 204907 - RNA, 22 nt, Human
ucuggcaggaccaugaagcgua

SEQ ID NO: 204908 - RNA, 22 nt, Human
cauguuaauaugcauugaguac

SEQ ID NO: 204909 - RNA, 22 nt, Human
ucauccaguaugacuggugucu

SEQ ID NO: 204910 - RNA, 22 nt, Human
agagucuuguuaacuugcuaag

SEQ ID NO: 204911 - RNA, 22 nt, Human
auuagagagagcauauuacugg

SEQ ID NO: 204912 - RNA, 22 nt, Human
agugaucugacucccaguuaga

SEQ ID NO: 204913 - RNA, 22 nt, Human
cagcacaggccugucuuugucu

SEQ ID NO: 204914 - RNA, 22 nt, Human
gacaggugugaugauuuaggcu

SEQ ID NO: 204915 - RNA, 22 nt, Human
ggagugaaguggcgcgaucucg

SEQ ID NO: 204916 - RNA, 22 nt, Human
uauuacagaaucaggcauaacu

SEQ ID NO: 204917 - RNA, 22 nt, Human
agcucuagggaagaaaggcaca

SEQ ID NO: 204918 - RNA, 19 nt, Human
ugcuagaaauucugugacu

SEQ ID NO: 204919 - RNA, 22 nt, Human
ccaugcauauaauagugccugg

SEQ ID NO: 204920 - RNA, 22 nt, Human
aagaacuuugauuucauugcau

SEQ ID NO: 204921 - RNA, 22 nt, Human
ucagguguguggcucuggacca

SEQ ID NO: 204922 - RNA, 22 nt, Human
aggucuggugggcuuuagauug

SEQ ID NO: 204923 - RNA, 22 nt, Human
uuugguuaauuuaggcuugcau

SEQ ID NO: 204924 - RNA, 22 nt, Human
ggucccaaucuaaucacaugag

SEQ ID NO: 204925 - RNA, 22 nt, Human
gacacaggaaaagcuccagccc

SEQ ID NO: 204926 - RNA, 22 nt, Human
uccaaggcuccggcccuggcgu

SEQ ID NO: 204927 - RNA, 22 nt, Human
cugagccaugagccugcgccca

SEQ ID NO: 204928 - RNA, 22 nt, Human
ggcuacuagguaccauuuagaa

SEQ ID NO: 204929 - RNA, 22 nt, Human
agaagacagagucuacauucua

SEQ ID NO: 204930 - RNA, 22 nt, Human
guccaggcuaagucccuucugc

SEQ ID NO: 204931 - RNA, 19 nt, Human
aaggaauggcuuuaaguag

SEQ ID NO: 204932 - RNA, 22 nt, Human
uucuaggaagggaagcauggca

SEQ ID NO: 204933 - RNA, 22 nt, Human
uauuggucuucuguucccuauu

SEQ ID NO: 204934 - RNA, 22 nt, Human
aaggcuuuuaaacugucaagga

SEQ ID NO: 204935 - RNA, 22 nt, Human
uuagaaucagaagagagguauu

SEQ ID NO: 204936 - RNA, 22 nt, Human
ucccugggcaaguuuacucuuc

SEQ ID NO: 204937 - RNA, 22 nt, Human
ucaaaggcaccaaggucacugc

SEQ ID NO: 204938 - RNA, 22 nt, Human
gagcccucauugaaucugcauu

SEQ ID NO: 204939 - RNA, 22 nt, Human
acagucuaaucuuguguucugu

SEQ ID NO: 204940 - RNA, 22 nt, Human
cuucagcuaggaucccugcagc

SEQ ID NO: 204941 - RNA, 23 nt, Human
uggaaacauucugaauguccauc

SEQ ID NO: 204942 - RNA, 19 nt, Human
aagcugagggcuguccacc

SEQ ID NO: 204943 - RNA, 22 nt, Human
uucuggaucugagggggaagau

SEQ ID NO: 204944 - RNA, 22 nt, Human
aaugggagguaguaugggaggu

SEQ ID NO: 204945 - RNA, 22 nt, Human
cagaagcaaguagugauucuuu

SEQ ID NO: 204946 - RNA, 22 nt, Human
cucuggcacacuccuuccaggu

SEQ ID NO: 204947 - RNA, 22 nt, Human
guauuuucaagagcaguaguau

SEQ ID NO: 204948 - RNA, 22 nt, Human
aaccuggaggcuguguagucuu

SEQ ID NO: 204949 - RNA, 22 nt, Human
uuagagguucuaugugucugga

SEQ ID NO: 204950 - RNA, 22 nt, Human
acugugauguuugugaucaucu

SEQ ID NO: 204951 - RNA, 22 nt, Human
ccaaagcaagucacaugaucaa

SEQ ID NO: 204952 - RNA, 22 nt, Human
ccucuggcuguaccacuggcac

SEQ ID NO: 204953 - RNA, 22 nt, Human
ucugcagagccucaggagaaca

SEQ ID NO: 204954 - RNA, 22 nt, Human
cagagacaggaaucagcugcag

SEQ ID NO: 204955 - RNA, 22 nt, Human
cagcuguccuuccuggugggcg

SEQ ID NO: 204956 - RNA, 22 nt, Human
aucagcaaucaaauugcagagu

SEQ ID NO: 204957 - RNA, 22 nt, Human
guggucuggggucaggccugag

SEQ ID NO: 204958 - RNA, 22 nt, Human
cgucacuucuuagucuauuuuc

SEQ ID NO: 204959 - RNA, 22 nt, Human
uguacagugccaugcaguuugc

SEQ ID NO: 204960 - RNA, 19 nt, Human
acaaaugauguugcacuga

SEQ ID NO: 204961 - RNA, 22 nt, Human
cauuucagugucuugugaugaa

SEQ ID NO: 204962 - RNA, 22 nt, Human
cugggaggugaacagaaaaacu

SEQ ID NO: 204963 - RNA, 22 nt, Human
cuggagguaauguuauuuuugu

SEQ ID NO: 204964 - RNA, 19 nt, Human
caggugguaaucugagccu

SEQ ID NO: 204965 - RNA, 22 nt, Human
ccucaguguuaggauaagagaa

SEQ ID NO: 204966 - RNA, 22 nt, Human
auaaagauuucuuuuucucuac

SEQ ID NO: 204967 - RNA, 22 nt, Human
cuggagcugcuguccuugggug

SEQ ID NO: 204968 - RNA, 22 nt, Human
auuucucauguacaaaaacacu

SEQ ID NO: 204969 - RNA, 22 nt, Human
agaguugcuauagaaggaugga

SEQ ID NO: 204970 - RNA, 22 nt, Human
uauguguccuaagcaaucaucc

SEQ ID NO: 204971 - RNA, 20 nt, Human
uccuucugaggugaggagga

SEQ ID NO: 204972 - RNA, 22 nt, Human
ucugcagauuuaucagcagcug

SEQ ID NO: 204973 - RNA, 23 nt, Human
agcucugcucgggcaugcccugc

SEQ ID NO: 204974 - RNA, 23 nt, Human
cccaggagccugaguccucucug

SEQ ID NO: 204975 - RNA, 22 nt, Human
acuacauuugcagagaagcaau

SEQ ID NO: 204976 - RNA, 22 nt, Human
cccucaugccagacagcaugca

SEQ ID NO: 204977 - RNA, 22 nt, Human
uauaguuucaugagcuuuuuaa

SEQ ID NO: 204978 - RNA, 20 nt, Human
acaguggaaauugaugucug

SEQ ID NO: 204979 - RNA, 20 nt, Human
cugccgaccacagccaugga

SEQ ID NO: 204980 - RNA, 22 nt, Human
uauuuauucauucagcaagcau

SEQ ID NO: 204981 - RNA, 22 nt, Human
cacaggaaguggucagugccag

SEQ ID NO: 204982 - RNA, 20 nt, Human
gggugugggcccggccaggc

SEQ ID NO: 204983 - RNA, 22 nt, Human
cuggaaggagaaggaggcugug

SEQ ID NO: 204984 - RNA, 22 nt, Human
gucugcccugcugaucucaccc

SEQ ID NO: 204985 - RNA, 22 nt, Human
uagagcuuagagaaugaguuug

SEQ ID NO: 204986 - RNA, 22 nt, Human
gcaggcuuugacuuggggcaac

SEQ ID NO: 204987 - RNA, 22 nt, Human
guagcugauccugaggacaggg

SEQ ID NO: 204988 - RNA, 22 nt, Human
auuucuuccucugucaguaacu

SEQ ID NO: 204989 - RNA, 22 nt, Human
uaccuucuaggugaugguuaca

SEQ ID NO: 204990 - RNA, 21 nt, Human
gauugaaaccauggcagugag

SEQ ID NO: 204991 - RNA, 22 nt, Human
gccaggcacaguucuaggugcu

SEQ ID NO: 204992 - RNA, 22 nt, Human
cugacucccuccccaaagcugg

SEQ ID NO: 204993 - RNA, 22 nt, Human
caaucacaaagagacaaguguc

SEQ ID NO: 204994 - RNA, 22 nt, Human
cggcagagcccugagucagccu

SEQ ID NO: 204995 - RNA, 18 nt, Human
uggcugcuggaguagggu

SEQ ID NO: 204996 - RNA, 22 nt, Human
agauaggagccaggacuuaaca

SEQ ID NO: 204997 - RNA, 21 nt, Human
agaaaauggcguuuuagauuu

SEQ ID NO: 204998 - RNA, 22 nt, Human
uacacauguccaaggugucacc

SEQ ID NO: 204999 - RNA, 22 nt, Human
cagggccuuguucaggagugaa

SEQ ID NO: 205000 - RNA, 22 nt, Human
aauaagcaagccugugugcaag

SEQ ID NO: 205001 - RNA, 22 nt, Human
augagaugugucuaauggaacc

SEQ ID NO: 205002 - RNA, 22 nt, Human
gucaggaaguggcauuggagaa

SEQ ID NO: 205003 - RNA, 22 nt, Human
aaagcaagaugcauccgucaag

SEQ ID NO: 205004 - RNA, 22 nt, Human
gucuuuaguugaaacauguggu

SEQ ID NO: 205005 - RNA, 22 nt, Human
cucacuggcaagacuacaggug

SEQ ID NO: 205006 - RNA, 21 nt, Human
acucauuugucugcaucuaau

SEQ ID NO: 205007 - RNA, 22 nt, Human
ucauguaaaguguagguuuaga

SEQ ID NO: 205008 - RNA, 22 nt, Human
ggaugucuaggguuuaugugcc

SEQ ID NO: 205009 - RNA, 22 nt, Human
gcgcucaggugccaggccugcg

SEQ ID NO: 205010 - RNA, 19 nt, Human
gggguggcuggggcuccag

SEQ ID NO: 205011 - RNA, 22 nt, Human
auuagaaaaucuggaggugggg

SEQ ID NO: 205012 - RNA, 21 nt, Human
ugcaggagucugugagucagg

SEQ ID NO: 205013 - RNA, 19 nt, Human
ugcuuugcucuuggacuca

SEQ ID NO: 205014 - RNA, 22 nt, Human
augaacaacuugaagcuccaug

SEQ ID NO: 205015 - RNA, 22 nt, Human
ggccugacuugaucggcucucu

SEQ ID NO: 205016 - RNA, 22 nt, Human
aaagacauuagauuaacguaca

SEQ ID NO: 205017 - RNA, 21 nt, Human
ggccugaguauaggacaggcc

SEQ ID NO: 205018 - RNA, 22 nt, Human
gggagacaguucagauaguuuc

SEQ ID NO: 205019 - RNA, 22 nt, Human
aggcagaugguaacugugauau

SEQ ID NO: 205020 - RNA, 21 nt, Human
ugacagcauagagcagggagg

SEQ ID NO: 205021 - RNA, 20 nt, Human
ggggcaguggcucaugccug

SEQ ID NO: 205022 - RNA, 22 nt, Human
uuaugugcuucaacugagccua

SEQ ID NO: 205023 - RNA, 22 nt, Human
agggcagcaaugcagcugcugc

SEQ ID NO: 205024 - RNA, 19 nt, Human
agucugucugcuuucccuc

SEQ ID NO: 205025 - RNA, 22 nt, Human
cucugcauuuuaacagaugauu

SEQ ID NO: 205026 - RNA, 19 nt, Human
ugccuguggcgagcaucuu

SEQ ID NO: 205027 - RNA, 21 nt, Human
gagugggacaugggagugguu

SEQ ID NO: 205028 - RNA, 22 nt, Human
uccagcucaggguuggcucaag

SEQ ID NO: 205029 - RNA, 22 nt, Human
uuccaggacucguucuggcuca

SEQ ID NO: 205030 - RNA, 22 nt, Human
acuuuguuuucaugaaacagcu

SEQ ID NO: 205031 - RNA, 22 nt, Human
ugcuggagcaacauuauugugc

SEQ ID NO: 205032 - RNA, 22 nt, Human
ugcagaguccucuggagggacu

SEQ ID NO: 205033 - RNA, 22 nt, Human
ccaggcucagggcagacuuuca

SEQ ID NO: 205034 - RNA, 22 nt, Human
uagaaucuggaaggggcuauuc

SEQ ID NO: 205035 - RNA, 22 nt, Human
gagaaacuuggaguuauucugg

SEQ ID NO: 205036 - RNA, 22 nt, Human
aaaauucauagaacuguacgcu

SEQ ID NO: 205037 - RNA, 22 nt, Human
aguuugaaagcuuaacaguaca

SEQ ID NO: 205038 - RNA, 22 nt, Human
cagggacaauggcagagccuga

SEQ ID NO: 205039 - RNA, 22 nt, Human
gggcucugggauucagagcaag

SEQ ID NO: 205040 - RNA, 22 nt, Human
ucccucagcaggaacuggccug

SEQ ID NO: 205041 - RNA, 22 nt, Human
caagucugucugcuccugugug

SEQ ID NO: 205042 - RNA, 22 nt, Human
caugcaaaauguauuuuauuag

SEQ ID NO: 205043 - RNA, 22 nt, Human
uuaguacauagaugaugguuga

SEQ ID NO: 205044 - RNA, 22 nt, Human
uaaaacagcagggcagagaagu

SEQ ID NO: 205045 - RNA, 22 nt, Human
agaggcaugcacagaugugcug

SEQ ID NO: 205046 - RNA, 22 nt, Human
aaauuggaugcacauuuagaaa

SEQ ID NO: 205047 - RNA, 22 nt, Human
cagggccuccuaaggcaucuaa

SEQ ID NO: 205048 - RNA, 18 nt, Human
cagugcuguuaacaguga

SEQ ID NO: 205049 - RNA, 22 nt, Human
ccaggcacugcucgaggugcua

SEQ ID NO: 205050 - RNA, 22 nt, Human
ugggacaugcuuggaaucuaga

SEQ ID NO: 205051 - RNA, 22 nt, Human
gaagguucuguguacacuacuu

SEQ ID NO: 205052 - RNA, 22 nt, Human
uccuuagaccuggcaaaugggg

SEQ ID NO: 205053 - RNA, 20 nt, Human
ucugguccaggucuucaugg

SEQ ID NO: 205054 - RNA, 22 nt, Human
uguccaggucagcagcagggac

SEQ ID NO: 205055 - RNA, 23 nt, Human
uuacuuuugcaccaaccuaauau

SEQ ID NO: 205056 - RNA, 20 nt, Human
cagagaccugucuucacaga

SEQ ID NO: 205057 - RNA, 22 nt, Human
aauuagaaucuuauuuggggaa

SEQ ID NO: 205058 - RNA, 22 nt, Human
cagcaacucuccugugcucaaa

SEQ ID NO: 205059 - RNA, 22 nt, Human
gagcucauuguggauggauggg

SEQ ID NO: 205060 - RNA, 22 nt, Human
ggugcugaggccuuggcaggga

SEQ ID NO: 205061 - RNA, 22 nt, Human
cuccuggcuuucccagaccagg

SEQ ID NO: 205062 - RNA, 22 nt, Human
agagcucaagacgcucacagua

SEQ ID NO: 205063 - RNA, 22 nt, Human
auccuucuucaaagagggaaaa

SEQ ID NO: 205064 - RNA, 22 nt, Human
ucugccugugguggaggaaguu

SEQ ID NO: 205065 - RNA, 22 nt, Human
ugccuggcacagagcagguggc

SEQ ID NO: 205066 - RNA, 22 nt, Human
cccaggacccuucaauggcucc

SEQ ID NO: 205067 - RNA, 22 nt, Human
gccucugcccuccugggacugc

SEQ ID NO: 205068 - RNA, 22 nt, Human
ugaagacaagaaaacacugggg

SEQ ID NO: 205069 - RNA, 22 nt, Human
gaaggcugcgaggggagugccg

SEQ ID NO: 205070 - RNA, 22 nt, Human
cuggcccuggagggcugugcga

SEQ ID NO: 205071 - RNA, 22 nt, Human
caggugaguuuuccuccuuggu

SEQ ID NO: 205072 - RNA, 22 nt, Human
uggucucugugcucgggcaugg

SEQ ID NO: 205073 - RNA, 22 nt, Human
ucugcuggucaaggcugggucc

SEQ ID NO: 205074 - RNA, 22 nt, Human
ggcccugggcagaggagugggc

SEQ ID NO: 205075 - RNA, 22 nt, Human
auuucuagcaaaggcucugcua

SEQ ID NO: 205076 - RNA, 22 nt, Human
gacaugggaugagaugaagcau

SEQ ID NO: 205077 - RNA, 22 nt, Human
gcccuccaugagacacagugua

SEQ ID NO: 205078 - RNA, 22 nt, Human
auuuucuucucucccuggcugc

SEQ ID NO: 205079 - RNA, 22 nt, Human
gagcacugagcuggaauuggag

SEQ ID NO: 205080 - RNA, 22 nt, Human
ucacacuaagacaaaauaauuu

SEQ ID NO: 205081 - RNA, 22 nt, Human
uagcccucaucugcucaaaagg

SEQ ID NO: 205082 - RNA, 22 nt, Human
cagugccuggauagcaacauga

SEQ ID NO: 205083 - RNA, 22 nt, Human
cacuguacuggguugaaggacg

SEQ ID NO: 205084 - RNA, 22 nt, Human
ugcaaaaacugcaauugcuuuu

SEQ ID NO: 205085 - RNA, 22 nt, Human
aucuaaacagguguucuuuaga

SEQ ID NO: 205086 - RNA, 22 nt, Human
gagccaagcaauauacccaacc

SEQ ID NO: 205087 - RNA, 20 nt, Human
ucugagacuuguagugugga

SEQ ID NO: 205088 - RNA, 21 nt, Human
agaaaaguauuugaaucaaga

SEQ ID NO: 205089 - RNA, 22 nt, Human
uggaaccuggcauuagggacac

SEQ ID NO: 205090 - RNA, 22 nt, Human
agauaacuuuuggguauucaug

SEQ ID NO: 205091 - RNA, 22 nt, Human
aaugucuuucucauaacagaua

SEQ ID NO: 205092 - RNA, 22 nt, Human
gggccaugagagguucaucaac

SEQ ID NO: 205093 - RNA, 22 nt, Human
agcccugcaggaugagggaggu

SEQ ID NO: 205094 - RNA, 22 nt, Human
gauauuuaacucucacaggucc

SEQ ID NO: 205095 - RNA, 22 nt, Human
aggcucuggcuacuacagagcu

SEQ ID NO: 205096 - RNA, 22 nt, Human
auuagcaugccaagcuuuuaga

SEQ ID NO: 205097 - RNA, 22 nt, Human
uagcagcccaguuucuggccaa

SEQ ID NO: 205098 - RNA, 22 nt, Human
ucagagucuuggcaauagguua

SEQ ID NO: 205099 - RNA, 22 nt, Human
cuuuauuguccuucuuaggugg

SEQ ID NO: 205100 - RNA, 22 nt, Human
agaagccaccagcugaggaaga

SEQ ID NO: 205101 - RNA, 22 nt, Human
ccaggaagggcucuuuaaagac

SEQ ID NO: 205102 - RNA, 22 nt, Human
uguaaagguaggugcaaaauga

SEQ ID NO: 205103 - RNA, 22 nt, Human
agagccagaccauugccgugca

SEQ ID NO: 205104 - RNA, 22 nt, Human
cccuccagggagccaugcuggg

SEQ ID NO: 205105 - RNA, 22 nt, Human
uguguauuaauguuuguauaug

SEQ ID NO: 205106 - RNA, 22 nt, Human
ucccagcacuguaauucuuugg

SEQ ID NO: 205107 - RNA, 22 nt, Human
ccagugucugugguauagaaag

SEQ ID NO: 205108 - RNA, 22 nt, Human
ugggccacuaccuucucuggau

SEQ ID NO: 205109 - RNA, 22 nt, Human
cuuggagacaggacaggcagaa

SEQ ID NO: 205110 - RNA, 21 nt, Human
cagugagguccccagccuagg

SEQ ID NO: 205111 - RNA, 22 nt, Human
caagacauugauuuuguacaga

SEQ ID NO: 205112 - RNA, 22 nt, Human
cugucccucaucaccucugggu

SEQ ID NO: 205113 - RNA, 22 nt, Human
ggcacagcuacuugcucacucu

SEQ ID NO: 205114 - RNA, 22 nt, Human
ccuggccaguuuccaggcccug

SEQ ID NO: 205115 - RNA, 22 nt, Human
uaggcaggcugaauguagauuu

SEQ ID NO: 205116 - RNA, 22 nt, Human
ggagagggggcucccugcuugg

SEQ ID NO: 205117 - RNA, 22 nt, Human
aagugcauacacuaguuaauug

SEQ ID NO: 205118 - RNA, 22 nt, Human
ggccccucagcaucugagucag

SEQ ID NO: 205119 - RNA, 22 nt, Human
ggcagcugcugcauuacguugu

SEQ ID NO: 205120 - RNA, 21 nt, Human
uuucuuucuggcucucacagu

SEQ ID NO: 205121 - RNA, 22 nt, Human
agaccugguuuaucaccagcau

SEQ ID NO: 205122 - RNA, 22 nt, Human
auuagguuagugugcaagagaa

SEQ ID NO: 205123 - RNA, 22 nt, Human
aauaauguugacgauagucuua

SEQ ID NO: 205124 - RNA, 20 nt, Human
acagguucauucugugugac

SEQ ID NO: 205125 - RNA, 22 nt, Human
agaagcugacagaugcagcagg

SEQ ID NO: 205126 - RNA, 22 nt, Human
ucucagggcucagagcucaggc

SEQ ID NO: 205127 - RNA, 22 nt, Human
uuuuggaauuuauacaguaaug

SEQ ID NO: 205128 - RNA, 22 nt, Human
guauaacugcuaccaccugaug

SEQ ID NO: 205129 - RNA, 22 nt, Human
cagggccuuauccugccauuga

SEQ ID NO: 205130 - RNA, 22 nt, Human
aucuccaggauuuucacacuca

SEQ ID NO: 205131 - RNA, 22 nt, Human
ucccucagcaggaauguggcag

SEQ ID NO: 205132 - RNA, 22 nt, Human
gagccccuucugcagucagguu

SEQ ID NO: 205133 - RNA, 22 nt, Human
agggauggaucuuggcccugga

SEQ ID NO: 205134 - RNA, 22 nt, Human
acuccagggcugaacgaggccc

SEQ ID NO: 205135 - RNA, 22 nt, Human
aggcugaggugugcugugaucg

SEQ ID NO: 205136 - RNA, 19 nt, Human
uuucccagcccuugcugug

SEQ ID NO: 205137 - RNA, 22 nt, Human
caggccugguugagcccugaga

SEQ ID NO: 205138 - RNA, 22 nt, Human
uacuaggcaauuauguaaauaa

SEQ ID NO: 205139 - RNA, 22 nt, Human
ucuggagggguuuagagggaca

SEQ ID NO: 205140 - RNA, 22 nt, Human
auucucugaugcagguggaaga

SEQ ID NO: 205141 - RNA, 22 nt, Human
caauuucucuuuauaucucaca

SEQ ID NO: 205142 - RNA, 22 nt, Human
acacaucuaucucuacacaagg

SEQ ID NO: 205143 - RNA, 23 nt, Human
aucuguucaucugacacagauuc

SEQ ID NO: 205144 - RNA, 22 nt, Human
ugggcuauuaggaccaggccau

SEQ ID NO: 205145 - RNA, 21 nt, Human
cucagacagggaggcucuggg

SEQ ID NO: 205146 - RNA, 22 nt, Human
cuuucccuuagccccauucuau

SEQ ID NO: 205147 - RNA, 22 nt, Human
ucauuuuucucuuacacguaga

SEQ ID NO: 205148 - RNA, 22 nt, Human
aauguuacgaucaacaacacau

SEQ ID NO: 205149 - RNA, 22 nt, Human
gugucauuacugaaagauugaa

SEQ ID NO: 205150 - RNA, 22 nt, Human
ccuccuuccugggacagagcug

SEQ ID NO: 205151 - RNA, 21 nt, Human
ucuggcaggcacgggcccagc

SEQ ID NO: 205152 - RNA, 22 nt, Human
uggagcugagcaccuccagggc

SEQ ID NO: 205153 - RNA, 22 nt, Human
aguuacugcuuucaggaaguuu

SEQ ID NO: 205154 - RNA, 22 nt, Human
gccaggcuggaaagaacagaca

SEQ ID NO: 205155 - RNA, 22 nt, Human
caugcuuuucaaucuaucuuaa

SEQ ID NO: 205156 - RNA, 22 nt, Human
guuggcagagagaagccuagca

SEQ ID NO: 205157 - RNA, 22 nt, Human
uuuuggcuuuuccucagcaagc

SEQ ID NO: 205158 - RNA, 22 nt, Human
gccuucccucucauccugcugg

SEQ ID NO: 205159 - RNA, 17 nt, Human
ccagguggaaucgugga

SEQ ID NO: 205160 - RNA, 20 nt, Human
acauuugaagucgcauuucu

SEQ ID NO: 205161 - RNA, 22 nt, Human
ggguggagaggcuaaguccagu

SEQ ID NO: 205162 - RNA, 22 nt, Human
uggcuuccugcacagugucugc

SEQ ID NO: 205163 - RNA, 22 nt, Human
acuugaauucaaagcgaaagca

SEQ ID NO: 205164 - RNA, 22 nt, Human
gcauucuuuuuaggagguuccu

SEQ ID NO: 205165 - RNA, 22 nt, Human
ucagugcagugaaagguuuacu

SEQ ID NO: 205166 - RNA, 22 nt, Human
uuuauucaucaucuguucauau

SEQ ID NO: 205167 - RNA, 22 nt, Human
cacugggaguacaaagaauggg

SEQ ID NO: 205168 - RNA, 22 nt, Human
uuauuaaaaugcggauuuggcu

SEQ ID NO: 205169 - RNA, 22 nt, Human
uagcugguccucagcuccagcc

SEQ ID NO: 205170 - RNA, 22 nt, Human
uucugagagugccagaaguucu

SEQ ID NO: 205171 - RNA, 18 nt, Human
gucacuguguuucugagc

SEQ ID NO: 205172 - RNA, 21 nt, Human
cagugcucaggaauagagaga

SEQ ID NO: 205173 - RNA, 21 nt, Human
ggccuaggggcagauggugcu

SEQ ID NO: 205174 - RNA, 21 nt, Human
aaacugaggcuucaagcagug

SEQ ID NO: 205175 - RNA, 22 nt, Human
ugguacuuggaggcagaaaaau

SEQ ID NO: 205176 - RNA, 22 nt, Human
gagaccuggaggauguggaugg

SEQ ID NO: 205177 - RNA, 22 nt, Human
ucauagaagcaccagaagauau

SEQ ID NO: 205178 - RNA, 22 nt, Human
caggacaguauaggcuuuagga

SEQ ID NO: 205179 - RNA, 22 nt, Human
gaggcauggccugaggcuagga

SEQ ID NO: 205180 - RNA, 22 nt, Human
uaaaaguuuuaguuguacauaa

SEQ ID NO: 205181 - RNA, 22 nt, Human
ccuguauuugcuuccuucugca

SEQ ID NO: 205182 - RNA, 16 nt, Human
gaccucagugcuggcu

SEQ ID NO: 205183 - RNA, 22 nt, Human
ggggugggcgugcagggacacc

SEQ ID NO: 205184 - RNA, 22 nt, Human
uugcuuuugugugcucucugga

SEQ ID NO: 205185 - RNA, 22 nt, Human
ggcuucacaguuguagcagcuc

SEQ ID NO: 205186 - RNA, 19 nt, Human
ugugccucuauagcaugug

SEQ ID NO: 205187 - RNA, 22 nt, Human
agaagcugagaaugaauuaaga

SEQ ID NO: 205188 - RNA, 22 nt, Human
acagggcuuuuaaucaguaguu

SEQ ID NO: 205189 - RNA, 22 nt, Human
auuauauuugaaagguuggaag

SEQ ID NO: 205190 - RNA, 22 nt, Human
guguccugguuccuuguggcug

SEQ ID NO: 205191 - RNA, 22 nt, Human
aauagauggguuaaacagcaaa

SEQ ID NO: 205192 - RNA, 23 nt, Human
acagcuguugaaauuucaguggg

SEQ ID NO: 205193 - RNA, 22 nt, Human
cuuugaauuaacgacacaagug

SEQ ID NO: 205194 - RNA, 22 nt, Human
cccaggcuggagugcaauggca

SEQ ID NO: 205195 - RNA, 22 nt, Human
cucagaagaaucagcagcuauu

SEQ ID NO: 205196 - RNA, 22 nt, Human
uuagggaaggacagugaagaaa

SEQ ID NO: 205197 - RNA, 22 nt, Human
ucugcaggagcagggcguggag

SEQ ID NO: 205198 - RNA, 22 nt, Human
uuucagaugugugucucugaag

SEQ ID NO: 205199 - RNA, 22 nt, Human
cucagcagagaccagggaggaa

SEQ ID NO: 205200 - RNA, 22 nt, Human
gaggugucccugacccuuugca

SEQ ID NO: 205201 - RNA, 22 nt, Human
aaaggaagaugccaggacucug

SEQ ID NO: 205202 - RNA, 22 nt, Human
ugggcuaauucuuugauuguuu

SEQ ID NO: 205203 - RNA, 22 nt, Human
uagcaguauauuuuaaggaagc

SEQ ID NO: 205204 - RNA, 22 nt, Human
aucucuggccccugggguccga

SEQ ID NO: 205205 - RNA, 22 nt, Human
ucugaggccccugggcaggaug

SEQ ID NO: 205206 - RNA, 22 nt, Human
uguauuuauauuagaaugguug

SEQ ID NO: 205207 - RNA, 22 nt, Human
gcacauccaaugauuguuuuga

SEQ ID NO: 205208 - RNA, 21 nt, Human
acaggcucuggggaugcuggg

SEQ ID NO: 205209 - RNA, 22 nt, Human
agcaggagacauggggguggug

SEQ ID NO: 205210 - RNA, 22 nt, Human
aggaaaaagaguugcugccuuc

SEQ ID NO: 205211 - RNA, 22 nt, Human
auagcuuuuugucauagagucu

SEQ ID NO: 205212 - RNA, 19 nt, Human
acucugagcuugcucuauc

SEQ ID NO: 205213 - RNA, 22 nt, Human
guguguguacucuguauauaaa

SEQ ID NO: 205214 - RNA, 22 nt, Human
gcuuuagauagauuuagucuuu

SEQ ID NO: 205215 - RNA, 22 nt, Human
aaggccagauucucucuagggg

SEQ ID NO: 205216 - RNA, 22 nt, Human
ugucccucugaggcuucccugg

SEQ ID NO: 205217 - RNA, 22 nt, Human
aaagcaagucucuacaaaguac

SEQ ID NO: 205218 - RNA, 22 nt, Human
ucugggcugcugugcagugacc

SEQ ID NO: 205219 - RNA, 22 nt, Human
aggccagcacgacagccgcagg

SEQ ID NO: 205220 - RNA, 22 nt, Human
aaugagacacgugaagcagaug

SEQ ID NO: 205221 - RNA, 22 nt, Human
cugagcaccccaggaccugcgc

SEQ ID NO: 205222 - RNA, 22 nt, Human
guggaagggacugccuagagga

SEQ ID NO: 205223 - RNA, 22 nt, Human
gccaaggaaggcuuccuggaag

SEQ ID NO: 205224 - RNA, 22 nt, Human
guuuuauaggugaaauauuacu

SEQ ID NO: 205225 - RNA, 22 nt, Human
acagagcugggugcccccugga

SEQ ID NO: 205226 - RNA, 22 nt, Human
gugcccagcuccaccucacaga

SEQ ID NO: 205227 - RNA, 22 nt, Human
gugguuuaggggaaagaacugu

SEQ ID NO: 205228 - RNA, 22 nt, Human
aaacaaagcaucuugcuaugca

SEQ ID NO: 205229 - RNA, 22 nt, Human
ugguuauaaaaguccucucauu

SEQ ID NO: 205230 - RNA, 21 nt, Human
aucuuuagccauccaaucaga

SEQ ID NO: 205231 - RNA, 22 nt, Human
uagcagugcacaguaggacacc

SEQ ID NO: 205232 - RNA, 23 nt, Human
uugcacaguuucggaaacugagg

SEQ ID NO: 205233 - RNA, 22 nt, Human
gcccugagggguggugucugua

SEQ ID NO: 205234 - RNA, 17 nt, Human
agacagguuauaguuga

SEQ ID NO: 205235 - RNA, 22 nt, Human
augaggagcccucauuuagguu

SEQ ID NO: 205236 - RNA, 22 nt, Human
aacaggcuggccuugaagcagu

SEQ ID NO: 205237 - RNA, 21 nt, Human
uggcagggguaguaguacagc

SEQ ID NO: 205238 - RNA, 22 nt, Human
guuuauaauccaacucugcucc

SEQ ID NO: 205239 - RNA, 22 nt, Human
ggcuggcuacauuggaggaagg

SEQ ID NO: 205240 - RNA, 22 nt, Human
cagugcaggcuuguggccgcag

SEQ ID NO: 205241 - RNA, 22 nt, Human
cugauacacucccuaaaauaua

SEQ ID NO: 205242 - RNA, 22 nt, Human
ugcaagcaaguuuuugaagugg

SEQ ID NO: 205243 - RNA, 23 nt, Human
aagcugaacuuguuugcugggag

SEQ ID NO: 205244 - RNA, 22 nt, Human
cagcugagaaauggggaaaggg

SEQ ID NO: 205245 - RNA, 22 nt, Human
agagcuuuucuguaauaacauc

SEQ ID NO: 205246 - RNA, 17 nt, Human
aggccucaggugaaacc

SEQ ID NO: 205247 - RNA, 22 nt, Human
uggcaggggaggugcuugcuua

SEQ ID NO: 205248 - RNA, 22 nt, Human
uucuccagaguuucucucacug

SEQ ID NO: 205249 - RNA, 22 nt, Human
gaaaauguuuguccggagcuga

SEQ ID NO: 205250 - RNA, 22 nt, Human
cucucagugccugcccuaggcu

SEQ ID NO: 205251 - RNA, 22 nt, Human
gaggcaugcagagcuggagcag

SEQ ID NO: 205252 - RNA, 22 nt, Human
gguccugaggggagcugaaggu

SEQ ID NO: 205253 - RNA, 17 nt, Human
agugugugaaauggugg

SEQ ID NO: 205254 - RNA, 22 nt, Human
auuuccuauuucuuguccccua

SEQ ID NO: 205255 - RNA, 22 nt, Human
agagcagccugugaugaugcac

SEQ ID NO: 205256 - RNA, 22 nt, Human
ucauaaacacacuaguaugauu

SEQ ID NO: 205257 - RNA, 22 nt, Human
ucugucugaggaguuuuugacc

SEQ ID NO: 205258 - RNA, 22 nt, Human
uuugauauccuauacaaguaaa

SEQ ID NO: 205259 - RNA, 22 nt, Human
ucuacagacagagcagguggga

SEQ ID NO: 205260 - RNA, 20 nt, Human
uggccucugagaugccacgg

SEQ ID NO: 205261 - RNA, 22 nt, Human
ucuggcagcucuccucggcgga

SEQ ID NO: 205262 - RNA, 22 nt, Human
gggugggagaaaugaguaucua

SEQ ID NO: 205263 - RNA, 22 nt, Human
auguagaauuccuucuacuuug

SEQ ID NO: 205264 - RNA, 22 nt, Human
aauaacuuguaugguuauucca

SEQ ID NO: 205265 - RNA, 22 nt, Human
ucagggaacuacuucucccuau

SEQ ID NO: 205266 - RNA, 21 nt, Human
uccagaccucccucuccuagc

SEQ ID NO: 205267 - RNA, 22 nt, Human
cuccagugcugucaucccuucc

SEQ ID NO: 205268 - RNA, 22 nt, Human
gggcucugaaucccaggucugc

SEQ ID NO: 205269 - RNA, 20 nt, Human
guggaugaucaguguagugg

SEQ ID NO: 205270 - RNA, 20 nt, Human
accaggagauggaggcaggg

SEQ ID NO: 205271 - RNA, 22 nt, Human
uguaagaaaaguaaauagugac

SEQ ID NO: 205272 - RNA, 22 nt, Human
aagggcuggaucucucugagca

SEQ ID NO: 205273 - RNA, 22 nt, Human
ugcugcagggauuucagagaca

SEQ ID NO: 205274 - RNA, 22 nt, Human
uucuuuucaagaggggcaagga

SEQ ID NO: 205275 - RNA, 22 nt, Human
uccugggauucugcauuucuaa

SEQ ID NO: 205276 - RNA, 22 nt, Human
ugacagaggagcuggaaugauu

SEQ ID NO: 205277 - RNA, 22 nt, Human
uagggcucugcucaucaguugu

SEQ ID NO: 205278 - RNA, 22 nt, Human
uauguagcaauagcaucauacu

SEQ ID NO: 205279 - RNA, 22 nt, Human
uacaagaaauuucugcauauau

SEQ ID NO: 205280 - RNA, 20 nt, Human
cagaacaugagcaucgagcc

SEQ ID NO: 205281 - RNA, 22 nt, Human
aacucugauuagcucaaguuaa

SEQ ID NO: 205282 - RNA, 22 nt, Human
cuccucuggaaauuccucugcc

SEQ ID NO: 205283 - RNA, 16 nt, Human
augaggcauaggcugc

SEQ ID NO: 205284 - RNA, 22 nt, Human
gugugucagagcucagagaagu

SEQ ID NO: 205285 - RNA, 22 nt, Human
aaacacugguaugauguauagu

SEQ ID NO: 205286 - RNA, 22 nt, Human
agugucauuccagggacccucg

SEQ ID NO: 205287 - RNA, 22 nt, Human
caacuuuugacacgugugcuaa

SEQ ID NO: 205288 - RNA, 22 nt, Human
ggcagccaugcuccaggugcag

SEQ ID NO: 205289 - RNA, 22 nt, Human
cucugggcaaguuucuucauga

SEQ ID NO: 205290 - RNA, 21 nt, Human
uccuggccagggcacuaggca

SEQ ID NO: 205291 - RNA, 22 nt, Human
ucuaugaaaagucuauucauuc

SEQ ID NO: 205292 - RNA, 22 nt, Human
uuaauacagaagcaagacacug

SEQ ID NO: 205293 - RNA, 21 nt, Human
ccuucuccacagggucuccgg

SEQ ID NO: 205294 - RNA, 22 nt, Human
aggcuucucugcaagauguuaa

SEQ ID NO: 205295 - RNA, 22 nt, Human
aucaggaugcugucaguuacca

SEQ ID NO: 205296 - RNA, 22 nt, Human
uacaccagauuauuuauaacau

SEQ ID NO: 205297 - RNA, 22 nt, Human
ucaggcucugagcugaugcuaa

SEQ ID NO: 205298 - RNA, 22 nt, Human
uggcucugaccagguagaggag

SEQ ID NO: 205299 - RNA, 22 nt, Human
uuuauuguuaucaugggugagu

SEQ ID NO: 205300 - RNA, 22 nt, Human
agcuccugucucaagggagccu

SEQ ID NO: 205301 - RNA, 22 nt, Human
aaacugaggaaugacagcauua

SEQ ID NO: 205302 - RNA, 20 nt, Human
gcuccuguccugguggaggg

SEQ ID NO: 205303 - RNA, 22 nt, Human
gaaauauacaugaagucggcug

SEQ ID NO: 205304 - RNA, 22 nt, Human
gccugggacugcagauccccag

SEQ ID NO: 205305 - RNA, 22 nt, Human
ucaggaagcauccugagguguc

SEQ ID NO: 205306 - RNA, 22 nt, Human
cagcccuggugccaagguuccc

SEQ ID NO: 205307 - RNA, 22 nt, Human
ucacauucauggugcuaauaaa

SEQ ID NO: 205308 - RNA, 22 nt, Human
uauuucagacacugaucuugca

SEQ ID NO: 205309 - RNA, 22 nt, Human
acaguuaaauauuucuacuggg

SEQ ID NO: 205310 - RNA, 22 nt, Human
gcauggcuguugaagucagcuc

SEQ ID NO: 205311 - RNA, 22 nt, Human
cuccacagguguacuguaccuu

SEQ ID NO: 205312 - RNA, 19 nt, Human
ggccucugcaggccgcccc

SEQ ID NO: 205313 - RNA, 22 nt, Human
ggccucagugggccgcugcagg

SEQ ID NO: 205314 - RNA, 18 nt, Human
aagaaguuggccaaagag

SEQ ID NO: 205315 - RNA, 22 nt, Human
ucuuucccaguagcucucccag

SEQ ID NO: 205316 - RNA, 22 nt, Human
uccugagcuuuacaguaaggac

SEQ ID NO: 205317 - RNA, 22 nt, Human
ucagaacaguucuuaauauugc

SEQ ID NO: 205318 - RNA, 22 nt, Human
aaggccaacuaggaugagcuag

SEQ ID NO: 205319 - RNA, 22 nt, Human
ccaggaaggaucguuugggagu

SEQ ID NO: 205320 - RNA, 22 nt, Human
auuagaaaauacaugggcuguc

SEQ ID NO: 205321 - RNA, 22 nt, Human
ucauccagccucaucaggagcu

SEQ ID NO: 205322 - RNA, 22 nt, Human
cucauaaaagcuuuguuuacac

SEQ ID NO: 205323 - RNA, 22 nt, Human
ugaaaucauugccaaguauuga

SEQ ID NO: 205324 - RNA, 22 nt, Human
uacacaguuccauuuaagccag

SEQ ID NO: 205325 - RNA, 22 nt, Human
ucaagaugaaagauguagccau

SEQ ID NO: 205326 - RNA, 21 nt, Human
acacugcuguagcauauuggg

SEQ ID NO: 205327 - RNA, 22 nt, Human
gcuuucugugcagugaacacua

SEQ ID NO: 205328 - RNA, 22 nt, Human
uaacagcaggguuacaggcauu

SEQ ID NO: 205329 - RNA, 22 nt, Human
aagggagacaguugugugagga

SEQ ID NO: 205330 - RNA, 22 nt, Human
ggcuucccuguuugcugugccu

SEQ ID NO: 205331 - RNA, 21 nt, Human
aggcugcucuuucuuguggua

SEQ ID NO: 205332 - RNA, 22 nt, Human
aaggcagucaguuguuuugaaa

SEQ ID NO: 205333 - RNA, 22 nt, Human
cgcccagggcaggaggccgcuc

SEQ ID NO: 205334 - RNA, 22 nt, Human
cacaguuuugucuugguuucca

SEQ ID NO: 205335 - RNA, 22 nt, Human
ucugagacugcagugagccgcu

SEQ ID NO: 205336 - RNA, 22 nt, Human
acaggcagauuaaggguaggca

SEQ ID NO: 205337 - RNA, 22 nt, Human
ggcugcuggcauugagguaggu

SEQ ID NO: 205338 - RNA, 22 nt, Human
guuugcauguguacuuaauugg

SEQ ID NO: 205339 - RNA, 23 nt, Human
ucccuggccgcaauggccgccuu

SEQ ID NO: 205340 - RNA, 22 nt, Human
cugucccaggauccugacucca

SEQ ID NO: 205341 - RNA, 22 nt, Human
acagacaucaucaacaucuucc

SEQ ID NO: 205342 - RNA, 22 nt, Human
caaugauagauuuuacaaauua

SEQ ID NO: 205343 - RNA, 23 nt, Human
cuucaugagagcccugaggaaaa

SEQ ID NO: 205344 - RNA, 22 nt, Human
gucuagaaauguucucaggggu

SEQ ID NO: 205345 - RNA, 22 nt, Human
agugcacagcgugauguauugg

SEQ ID NO: 205346 - RNA, 22 nt, Human
acaaaugaacauauaagcuuga

SEQ ID NO: 205347 - RNA, 22 nt, Human
uccagggaccucccugagagcu

SEQ ID NO: 205348 - RNA, 22 nt, Human
guccugggggcagcugugucca

SEQ ID NO: 205349 - RNA, 22 nt, Human
uccaggaggcagggcugugccc

SEQ ID NO: 205350 - RNA, 22 nt, Human
gaguuuuaaccucagcucucug

SEQ ID NO: 205351 - RNA, 22 nt, Human
cucuccccgguacgagcggccg

SEQ ID NO: 205352 - RNA, 22 nt, Human
uguauuuuuagaccuuuagacc

SEQ ID NO: 205353 - RNA, 22 nt, Human
gugcaaaagcaguugugguuuu

SEQ ID NO: 205354 - RNA, 22 nt, Human
gcucccugcauuucccacccuu

SEQ ID NO: 205355 - RNA, 19 nt, Human
auguuuuaugcugauggga

SEQ ID NO: 205356 - RNA, 22 nt, Human
uguuuucugaugguuaaugagu

SEQ ID NO: 205357 - RNA, 22 nt, Human
uucuguacccucgcgauucucc

SEQ ID NO: 205358 - RNA, 22 nt, Human
aucgccaauggggaggaaagaa

SEQ ID NO: 205359 - RNA, 22 nt, Human
ucugaagccaccucugcuuguc

SEQ ID NO: 205360 - RNA, 22 nt, Human
cuauuucauugugcugagucug

SEQ ID NO: 205361 - RNA, 22 nt, Human
cuggcugguuacuauuucuggu

SEQ ID NO: 205362 - RNA, 22 nt, Human
acagagacuuggagcaggcuga

SEQ ID NO: 205363 - RNA, 22 nt, Human
gagcaccgccuccacgaugccc

SEQ ID NO: 205364 - RNA, 22 nt, Human
ugcaaauuugacuucacacauc

SEQ ID NO: 205365 - RNA, 22 nt, Human
gagcuggucaguuucaggagag

SEQ ID NO: 205366 - RNA, 22 nt, Human
agcccugcgcucacguucugca

SEQ ID NO: 205367 - RNA, 22 nt, Human
uuucaaguggcgagauaaggaa

SEQ ID NO: 205368 - RNA, 22 nt, Human
ggguccagagccucagcccaga

SEQ ID NO: 205369 - RNA, 22 nt, Human
gcaaccauuuggaauguaaaaa

SEQ ID NO: 205370 - RNA, 22 nt, Human
uaauacagaaguguauuaaaau

SEQ ID NO: 205371 - RNA, 22 nt, Human
guuguuuuuguucucuauagcu

SEQ ID NO: 205372 - RNA, 22 nt, Human
ucuuuggccuuaggagcccuug

SEQ ID NO: 205373 - RNA, 22 nt, Human
gagacugguguuugcugggcug

SEQ ID NO: 205374 - RNA, 22 nt, Human
gcuggagguggugagaaaaggu

SEQ ID NO: 205375 - RNA, 22 nt, Human
auauaauaguuucauaaaggcu

SEQ ID NO: 205376 - RNA, 22 nt, Human
uggaaccuggccugagcuacca

SEQ ID NO: 205377 - RNA, 23 nt, Human
ucugcccucugccuguuuuugua

SEQ ID NO: 205378 - RNA, 22 nt, Human
agaggucagaggucgccagguc

SEQ ID NO: 205379 - RNA, 22 nt, Human
cggcagagcuuccugcucagcg

SEQ ID NO: 205380 - RNA, 22 nt, Human
ggacauguuccuuuucaucuuu

SEQ ID NO: 205381 - RNA, 22 nt, Human
acagcuguggggacucuugccc

SEQ ID NO: 205382 - RNA, 22 nt, Human
cagagcccagggccuacguccc

SEQ ID NO: 205383 - RNA, 22 nt, Human
aggcugugagagguggcuccca

SEQ ID NO: 205384 - RNA, 22 nt, Human
ggggacagucgaucuagugauu

SEQ ID NO: 205385 - RNA, 20 nt, Human
ugucuguaugcagucauaua

SEQ ID NO: 205386 - RNA, 22 nt, Human
aucauacauguaacuaaguaaa

SEQ ID NO: 205387 - RNA, 22 nt, Human
caugcuuucuguccaaauguua

SEQ ID NO: 205388 - RNA, 22 nt, Human
uauaggauugguucccauuuua

SEQ ID NO: 205389 - RNA, 22 nt, Human
cagagcaacacccuuuacaucg

SEQ ID NO: 205390 - RNA, 22 nt, Human
cuugaagaaauggagacaggau

SEQ ID NO: 205391 - RNA, 22 nt, Human
gaugagguguguggccacuaga

SEQ ID NO: 205392 - RNA, 22 nt, Human
uuuacagcacugaagccagggg

SEQ ID NO: 205393 - RNA, 22 nt, Human
cugggccuuaugaguaccugga

SEQ ID NO: 205394 - RNA, 18 nt, Human
gccucccuggcuacacuu

SEQ ID NO: 205395 - RNA, 22 nt, Human
gcaugugucaucugccuuucgu

SEQ ID NO: 205396 - RNA, 22 nt, Human
caauuacugguccacagaaauu

SEQ ID NO: 205397 - RNA, 22 nt, Human
uaggucugauuuccauucaguc

SEQ ID NO: 205398 - RNA, 22 nt, Human
aacaucuuugauaaacuuagug

SEQ ID NO: 205399 - RNA, 22 nt, Human
auugauucuaccagcuacuuug

SEQ ID NO: 205400 - RNA, 22 nt, Human
uugccagggccagugggggugu

SEQ ID NO: 205401 - RNA, 22 nt, Human
ucccagcauaacaaacugcccg

SEQ ID NO: 205402 - RNA, 22 nt, Human
ccuggaaaaugccacuuucaca

SEQ ID NO: 205403 - RNA, 23 nt, Human
uuuauccaacucuguaaucucuc

SEQ ID NO: 205404 - RNA, 20 nt, Human
gccagcccugacacaggagc

SEQ ID NO: 205405 - RNA, 22 nt, Human
cuuauucauauauucucgguag

SEQ ID NO: 205406 - RNA, 22 nt, Human
uugcacagaugagggugaugcu

SEQ ID NO: 205407 - RNA, 22 nt, Human
cucaguuugugugauauugucu

SEQ ID NO: 205408 - RNA, 22 nt, Human
ucucuguagaccugaccagcac

SEQ ID NO: 205409 - RNA, 22 nt, Human
uuaaguacuucccuguuggaca

SEQ ID NO: 205410 - RNA, 22 nt, Human
ccagagaggcaaaacuccuucc

SEQ ID NO: 205411 - RNA, 22 nt, Human
gcaacuuaggaguuagagcaug

SEQ ID NO: 205412 - RNA, 22 nt, Human
ugcugcucaagcugcagcaaaa

SEQ ID NO: 205413 - RNA, 22 nt, Human
aaagagcaagcugagauuugaa

SEQ ID NO: 205414 - RNA, 22 nt, Human
uuaauagauuugauuuuaaagg

SEQ ID NO: 205415 - RNA, 22 nt, Human
gcuuccaccuacuaaaugccac

SEQ ID NO: 205416 - RNA, 22 nt, Human
cuggacagaaaaggccacugga

SEQ ID NO: 205417 - RNA, 18 nt, Human
ggcagccuggacaugcuc

SEQ ID NO: 205418 - RNA, 16 nt, Human
agcagccagcacugga

SEQ ID NO: 205419 - RNA, 22 nt, Human
aaauacagaguugcuuaaaagc

SEQ ID NO: 205420 - RNA, 22 nt, Human
uguuugcucugacuaucuugcg

SEQ ID NO: 205421 - RNA, 22 nt, Human
acuguggccaaagccucuggga

SEQ ID NO: 205422 - RNA, 22 nt, Human
ggcaccagggacaauccucuuc

SEQ ID NO: 205423 - RNA, 22 nt, Human
uagaaucuguguucaaaccuac

SEQ ID NO: 205424 - RNA, 22 nt, Human
cagagacccuaggcaggugaca

SEQ ID NO: 205425 - RNA, 22 nt, Human
caacuauagaucaaaugaguuu

SEQ ID NO: 205426 - RNA, 22 nt, Human
ggugcccuguaaaagccaugca

SEQ ID NO: 205427 - RNA, 22 nt, Human
ccuguucaauauucuuccuugu

SEQ ID NO: 205428 - RNA, 22 nt, Human
aaguaugucuuuggguauuauu

SEQ ID NO: 205429 - RNA, 22 nt, Human
cagcuugugcaaagguccuggg

SEQ ID NO: 205430 - RNA, 22 nt, Human
cuucagagaguccagggacugc

SEQ ID NO: 205431 - RNA, 18 nt, Human
ugucuuuggaccacugaa

SEQ ID NO: 205432 - RNA, 22 nt, Human
gccugggauagaggcaaugcau

SEQ ID NO: 205433 - RNA, 21 nt, Human
ugaaugaggaggauggcauuu

SEQ ID NO: 205434 - RNA, 22 nt, Human
uucuagaagcugaaaaggggga

SEQ ID NO: 205435 - RNA, 22 nt, Human
ucugaaauaggcuucuuuuggu

SEQ ID NO: 205436 - RNA, 22 nt, Human
cacaguuuuaucuuauacugau

SEQ ID NO: 205437 - RNA, 22 nt, Human
augccuuauuguaaucuuucca

SEQ ID NO: 205438 - RNA, 22 nt, Human
gugguaauagagcuccaaacua

SEQ ID NO: 205439 - RNA, 22 nt, Human
ucucacagccauuucucccucu

SEQ ID NO: 205440 - RNA, 22 nt, Human
gaggaagaauugguuauuggag

SEQ ID NO: 205441 - RNA, 22 nt, Human
auccaguuccaaagaucauuua

SEQ ID NO: 205442 - RNA, 22 nt, Human
gcugccuagucugcugagcaga

SEQ ID NO: 205443 - RNA, 22 nt, Human
aagauuuacuuucuuuguaaua

SEQ ID NO: 205444 - RNA, 22 nt, Human
caggccagcguccagaacaagc

SEQ ID NO: 205445 - RNA, 22 nt, Human
gccuggaggggccaggguggua

SEQ ID NO: 205446 - RNA, 22 nt, Human
cugagggagacagugcggacua

SEQ ID NO: 205447 - RNA, 22 nt, Human
uauagaucuugcuauuuaagga

SEQ ID NO: 205448 - RNA, 22 nt, Human
cuggagccugcaguuuucacuu

SEQ ID NO: 205449 - RNA, 22 nt, Human
uugagggaacaugagaaucauc

SEQ ID NO: 205450 - RNA, 22 nt, Human
uuccaaacugccaauucagaag

SEQ ID NO: 205451 - RNA, 22 nt, Human
ucuccaaacucagacuaaguau

SEQ ID NO: 205452 - RNA, 22 nt, Human
gcuugggaggcaagcauuccau

SEQ ID NO: 205453 - RNA, 21 nt, Human
gagaaucuguuuucuugucuu

SEQ ID NO: 205454 - RNA, 23 nt, Human
uggcugagauccuacuguuugcu

SEQ ID NO: 205455 - RNA, 22 nt, Human
gaaaaguacacagcccaaacau

SEQ ID NO: 205456 - RNA, 22 nt, Human
ucccagaguuuccuguguccca

SEQ ID NO: 205457 - RNA, 22 nt, Human
guccugggaaggaagccaggga

SEQ ID NO: 205458 - RNA, 22 nt, Human
guguccagcguggaaugagggu

SEQ ID NO: 205459 - RNA, 22 nt, Human
agacucaagcagauaggaauua

SEQ ID NO: 205460 - RNA, 22 nt, Human
uuacuuacagacaguagacucu

SEQ ID NO: 205461 - RNA, 22 nt, Human
agugcauucucuaauuacaggu

SEQ ID NO: 205462 - RNA, 22 nt, Human
aucuucuucaaggaucuggagc

SEQ ID NO: 205463 - RNA, 22 nt, Human
aggcagcuagagagugaaacug

SEQ ID NO: 205464 - RNA, 22 nt, Human
gccagagcugagacacgagucc

SEQ ID NO: 205465 - RNA, 22 nt, Human
uuuguaaaggccugaauuucag

SEQ ID NO: 205466 - RNA, 22 nt, Human
acagguguacaaugcaugacag

SEQ ID NO: 205467 - RNA, 22 nt, Human
gaacagagcugacuacaaggca

SEQ ID NO: 205468 - RNA, 22 nt, Human
auaagugacugcagggaauuca

SEQ ID NO: 205469 - RNA, 22 nt, Human
gggugggaugccgcugucucca

SEQ ID NO: 205470 - RNA, 22 nt, Human
ccucagucuugaauuagccaga

SEQ ID NO: 205471 - RNA, 21 nt, Human
ucucuguguacagucucaccc

SEQ ID NO: 205472 - RNA, 22 nt, Human
aaaggcuuuugguauauaggag

SEQ ID NO: 205473 - RNA, 22 nt, Human
gauauuuacauuaagcacauug

SEQ ID NO: 205474 - RNA, 23 nt, Human
ccacagagcugccaauuccugug

SEQ ID NO: 205475 - RNA, 22 nt, Human
acuaucaacaucauugcucuag

SEQ ID NO: 205476 - RNA, 22 nt, Human
gcugcaccagcuccaccagggc

SEQ ID NO: 205477 - RNA, 22 nt, Human
gccagccugugggggcucugug

SEQ ID NO: 205478 - RNA, 22 nt, Human
gaacagaguugaaacaaggcug

SEQ ID NO: 205479 - RNA, 22 nt, Human
ugaguccauaguggauccuuca

SEQ ID NO: 205480 - RNA, 22 nt, Human
agugacuacugauuuuuacuuu

SEQ ID NO: 205481 - RNA, 22 nt, Human
agugcacuggcaccaucucagc

SEQ ID NO: 205482 - RNA, 22 nt, Human
ggguaggagaggugucugugug

SEQ ID NO: 205483 - RNA, 22 nt, Human
caagcuggaguuccucagagug

SEQ ID NO: 205484 - RNA, 22 nt, Human
caacaacaugggauucauuucu

SEQ ID NO: 205485 - RNA, 21 nt, Human
ucuuccuccacagcgugccac

SEQ ID NO: 205486 - RNA, 22 nt, Human
gaaaucaauuucuugguugaua

SEQ ID NO: 205487 - RNA, 22 nt, Human
gcagaggagcaagcuggacacc

SEQ ID NO: 205488 - RNA, 22 nt, Human
gccuugggauucuuggaugcuc

SEQ ID NO: 205489 - RNA, 22 nt, Human
ugucuucaguaaaauacacuau

SEQ ID NO: 205490 - RNA, 22 nt, Human
uuuauacauggagaauuuuugc

SEQ ID NO: 205491 - RNA, 22 nt, Human
cacugucuucaguuucacugca

SEQ ID NO: 205492 - RNA, 22 nt, Human
cucagcuccaggugugcaucuu

SEQ ID NO: 205493 - RNA, 22 nt, Human
augaggcauuccacucaaacuc

SEQ ID NO: 205494 - RNA, 22 nt, Human
uuucaaaggaggcugagaggau

SEQ ID NO: 205495 - RNA, 22 nt, Human
gucucaaacuccuaggcuaaag

SEQ ID NO: 205496 - RNA, 22 nt, Human
gugcaaaaugauauccugaagc

SEQ ID NO: 205497 - RNA, 23 nt, Human
agucagugcgggauggucagggg

SEQ ID NO: 205498 - RNA, 22 nt, Human
cucucagauggagugugaaugg

SEQ ID NO: 205499 - RNA, 22 nt, Human
ucuauuuuuauaguugaagugc

SEQ ID NO: 205500 - RNA, 22 nt, Human
uaagauguuuugguuugauaag

SEQ ID NO: 205501 - RNA, 22 nt, Human
cuccucugucuaccacgagggu

SEQ ID NO: 205502 - RNA, 22 nt, Human
caggaaguggcugggcuggguu

SEQ ID NO: 205503 - RNA, 22 nt, Human
agagacaggguuuugccauguu

SEQ ID NO: 205504 - RNA, 22 nt, Human
cagaggaagagauacaagcccu

SEQ ID NO: 205505 - RNA, 22 nt, Human
cuccaggccauggcugcggagg

SEQ ID NO: 205506 - RNA, 22 nt, Human
uuacaagguaaguuguuaaguc

SEQ ID NO: 205507 - RNA, 22 nt, Human
uuaugggagcaauuggggaggu

SEQ ID NO: 205508 - RNA, 22 nt, Human
ggcagccuggagacuuugugaa

SEQ ID NO: 205509 - RNA, 21 nt, Human
aagccagcccacagugguuug

SEQ ID NO: 205510 - RNA, 22 nt, Human
uuucaaauggagucgugaaaug

SEQ ID NO: 205511 - RNA, 22 nt, Human
uugcaaauuauuuuagucccuu

SEQ ID NO: 205512 - RNA, 22 nt, Human
gcagaaguaccucguucuaguu

SEQ ID NO: 205513 - RNA, 22 nt, Human
ugccuguguccccuucuuggca

SEQ ID NO: 205514 - RNA, 22 nt, Human
cuggaagugggguuggcuugaa

SEQ ID NO: 205515 - RNA, 22 nt, Human
gucagugcuugaagggcagaga

SEQ ID NO: 205516 - RNA, 22 nt, Human
cagcaggcaggugggccaaguc

SEQ ID NO: 205517 - RNA, 22 nt, Human
cagcugucugaagcaggagucc

SEQ ID NO: 205518 - RNA, 22 nt, Human
cuggcccucggaguccagcugc

SEQ ID NO: 205519 - RNA, 22 nt, Human
cauaucuggagacuccuggucu

SEQ ID NO: 205520 - RNA, 22 nt, Human
aggccaggacacuuaaguaaga

SEQ ID NO: 205521 - RNA, 22 nt, Human
augucccugagggucucucuga

SEQ ID NO: 205522 - RNA, 22 nt, Human
uaaauccagcuucuaauuuaga

SEQ ID NO: 205523 - RNA, 22 nt, Human
ggaggccaucuggcuggaggcu

SEQ ID NO: 205524 - RNA, 22 nt, Human
aggugcuagguguguaguggag

SEQ ID NO: 205525 - RNA, 22 nt, Human
uagaugaacagaaagccacugu

SEQ ID NO: 205526 - RNA, 22 nt, Human
cucugcccgcggaugccacguc

SEQ ID NO: 205527 - RNA, 22 nt, Human
augaaucuguuuuuugucaaua

SEQ ID NO: 205528 - RNA, 22 nt, Human
ccugggcuggaguacagcagug

SEQ ID NO: 205529 - RNA, 22 nt, Human
cagaaagccgacuuacaaugga

SEQ ID NO: 205530 - RNA, 22 nt, Human
uaaacaucugucauguguuuau

SEQ ID NO: 205531 - RNA, 22 nt, Human
ggcaccaggggauguaaugucc

SEQ ID NO: 205532 - RNA, 16 nt, Human
ugccuugcugucaguc

SEQ ID NO: 205533 - RNA, 22 nt, Human
ggcagcuggccuccucgcccac

SEQ ID NO: 205534 - RNA, 22 nt, Human
agucugguaauguagcucaacc

SEQ ID NO: 205535 - RNA, 22 nt, Human
ccagguguucuuugucccuguu

SEQ ID NO: 205536 - RNA, 22 nt, Human
uucagagaguuugugaguccuu

SEQ ID NO: 205537 - RNA, 22 nt, Human
ccaguuugaggaagaaguagau

SEQ ID NO: 205538 - RNA, 22 nt, Human
ccuguacauuagcugugaauug

SEQ ID NO: 205539 - RNA, 21 nt, Human
auuuccaaggguaccuaagau

SEQ ID NO: 205540 - RNA, 22 nt, Human
ggagaggugaauggcugcucua

SEQ ID NO: 205541 - RNA, 22 nt, Human
cuuccaggguccaggaagagcc

SEQ ID NO: 205542 - RNA, 22 nt, Human
aauaauagcagaguuuacaauc

SEQ ID NO: 205543 - RNA, 22 nt, Human
cagagccagucagucagaaacu

SEQ ID NO: 205544 - RNA, 22 nt, Human
cacaguuuugcccagggcuucu

SEQ ID NO: 205545 - RNA, 22 nt, Human
gggcuccagaggcucacccugg

SEQ ID NO: 205546 - RNA, 22 nt, Human
uuggaggauggaguuagcaucu

SEQ ID NO: 205547 - RNA, 22 nt, Human
uaaagacaaaugacauuacggc

SEQ ID NO: 205548 - RNA, 22 nt, Human
uaacaucuuuagcagcucgaac

SEQ ID NO: 205549 - RNA, 22 nt, Human
agguccugacuccacguucuag

SEQ ID NO: 205550 - RNA, 22 nt, Human
acuucuaagcucaaauugguau

SEQ ID NO: 205551 - RNA, 22 nt, Human
augcugugauuguagaaauauu

SEQ ID NO: 205552 - RNA, 22 nt, Human
accucaguucaauucaguuaga

SEQ ID NO: 205553 - RNA, 22 nt, Human
uaugucuuuugcuugcaaauag

SEQ ID NO: 205554 - RNA, 22 nt, Human
ugucucagauacgccaucaagg

SEQ ID NO: 205555 - RNA, 22 nt, Human
uaugauauucuaaauugacacc

SEQ ID NO: 205556 - RNA, 22 nt, Human
uuccagaagccuccauauuacu

SEQ ID NO: 205557 - RNA, 22 nt, Human
acagaucucaaagccuggaccc

SEQ ID NO: 205558 - RNA, 22 nt, Human
cuuuuugucucuguccugauga

SEQ ID NO: 205559 - RNA, 22 nt, Human
agaaaaagucaaggaauuggac

SEQ ID NO: 205560 - RNA, 22 nt, Human
caagauuuagccugcugccugu

SEQ ID NO: 205561 - RNA, 22 nt, Human
aagcucuuaugauauuuauuua

SEQ ID NO: 205562 - RNA, 22 nt, Human
uagcaucuugauuucagaccag

SEQ ID NO: 205563 - RNA, 21 nt, Human
gcaugugugggacuggauccu

SEQ ID NO: 205564 - RNA, 22 nt, Human
agaaggaagccaggagggugca

SEQ ID NO: 205565 - RNA, 22 nt, Human
ucaguuuauaaauuguauuuag

SEQ ID NO: 205566 - RNA, 22 nt, Human
gugcuuuuucaaucagaaggga

SEQ ID NO: 205567 - RNA, 22 nt, Human
cagcccuggccccagguggucu

SEQ ID NO: 205568 - RNA, 22 nt, Human
acauguaacauauauguagcau

SEQ ID NO: 205569 - RNA, 22 nt, Human
auuucuguaguccacauucuuu

SEQ ID NO: 205570 - RNA, 22 nt, Human
ucugccuggauuccauucucca

SEQ ID NO: 205571 - RNA, 22 nt, Human
auguuaacagcugcuucuggug

SEQ ID NO: 205572 - RNA, 22 nt, Human
cugugaaacuggacagcacuug

SEQ ID NO: 205573 - RNA, 22 nt, Human
cucugggaauucugagcaagca

SEQ ID NO: 205574 - RNA, 22 nt, Human
cuggguggcgucuggggccagu

SEQ ID NO: 205575 - RNA, 22 nt, Human
gagcuccugaaacguuccugcc

SEQ ID NO: 205576 - RNA, 22 nt, Human
ggucacaugcggggcuguagcc

SEQ ID NO: 205577 - RNA, 22 nt, Human
ugagcagggacuuuggagucug

SEQ ID NO: 205578 - RNA, 22 nt, Human
acucuggguucuuucacuugac

SEQ ID NO: 205579 - RNA, 22 nt, Human
auuugaagucuucaugauuucu

SEQ ID NO: 205580 - RNA, 22 nt, Human
guugauacaccucaugguuacu

SEQ ID NO: 205581 - RNA, 22 nt, Human
ugucuuuuggagcaucuuucuu

SEQ ID NO: 205582 - RNA, 22 nt, Human
aggagggugauccgggcugguc

SEQ ID NO: 205583 - RNA, 21 nt, Human
agaugcaguuaugagaugcag

SEQ ID NO: 205584 - RNA, 19 nt, Human
guaacaguggacauuuuag

SEQ ID NO: 205585 - RNA, 22 nt, Human
guagcugccuuucuggcccagg

SEQ ID NO: 205586 - RNA, 18 nt, Human
ucuccuggguaggggccu

SEQ ID NO: 205587 - RNA, 22 nt, Human
cuguggcauugccgaggcuggc

SEQ ID NO: 205588 - RNA, 22 nt, Human
uuccugggcuuuccccucuggu

SEQ ID NO: 205589 - RNA, 22 nt, Human
gccucugggcucugccccuggc

SEQ ID NO: 205590 - RNA, 22 nt, Human
ucccagcacgucugcuguuucu

SEQ ID NO: 205591 - RNA, 22 nt, Human
auacacauauguguguauaugu

SEQ ID NO: 205592 - RNA, 22 nt, Human
gggcccucugcagcugcccagg

SEQ ID NO: 205593 - RNA, 22 nt, Human
uggcucuggugcgggcuccugc

SEQ ID NO: 205594 - RNA, 22 nt, Human
gaagcccagcaaacugugauca

SEQ ID NO: 205595 - RNA, 22 nt, Human
cuucccuucugugcagggcaga

SEQ ID NO: 205596 - RNA, 22 nt, Human
cucagaggguacaggugaaccc

SEQ ID NO: 205597 - RNA, 22 nt, Human
auguuaacugaagccauucucg

SEQ ID NO: 205598 - RNA, 22 nt, Human
caggcuggucccagagcauugc

SEQ ID NO: 205599 - RNA, 22 nt, Human
aagugaauucauuguguuauau

SEQ ID NO: 205600 - RNA, 22 nt, Human
accaggagaggcacuugcaaug

SEQ ID NO: 205601 - RNA, 22 nt, Human
gugcaagcaguacacucaaagc

SEQ ID NO: 205602 - RNA, 22 nt, Human
aggagccccucuucaguccugg

SEQ ID NO: 205603 - RNA, 19 nt, Human
uuagguauuauugcuuucc

SEQ ID NO: 205604 - RNA, 22 nt, Human
aguuuacagaugcuacaggagc

SEQ ID NO: 205605 - RNA, 22 nt, Human
aguguggcugcguagggcucuc

SEQ ID NO: 205606 - RNA, 22 nt, Human
uuuaguguggcacugauguuca

SEQ ID NO: 205607 - RNA, 22 nt, Human
uucugggacaucuggacaguuu

SEQ ID NO: 205608 - RNA, 22 nt, Human
agucuccuuggccucaaugccu

SEQ ID NO: 205609 - RNA, 22 nt, Human
gccaggaagcaguuagaugggu

SEQ ID NO: 205610 - RNA, 22 nt, Human
aagacacaauguagcccagcac

SEQ ID NO: 205611 - RNA, 22 nt, Human
ucucccagugucuggcagucag

SEQ ID NO: 205612 - RNA, 22 nt, Human
aaagccauugaacuguacuuua

SEQ ID NO: 205613 - RNA, 22 nt, Human
caggcucuagguuaguaggaga

SEQ ID NO: 205614 - RNA, 22 nt, Human
gcuucccauaguggaauucggg

SEQ ID NO: 205615 - RNA, 22 nt, Human
acuagaaaauuccuagaaacua

SEQ ID NO: 205616 - RNA, 22 nt, Human
gacaguuuugcugaaauugagc

SEQ ID NO: 205617 - RNA, 22 nt, Human
uauaucugggaaccaaaggggg

SEQ ID NO: 205618 - RNA, 22 nt, Human
uuacauguucucauacacagag

SEQ ID NO: 205619 - RNA, 22 nt, Human
ucuggagggcccacauccacaa

SEQ ID NO: 205620 - RNA, 22 nt, Human
uggacauguaaaggcucaaggu

SEQ ID NO: 205621 - RNA, 22 nt, Human
ugcccagccccuaucccuggga

SEQ ID NO: 205622 - RNA, 22 nt, Human
ccaggccaaauucagucagcag

SEQ ID NO: 205623 - RNA, 22 nt, Human
ugaaccuuuugaauaaggacca

SEQ ID NO: 205624 - RNA, 22 nt, Human
uucucugguaaacacaugcgua

SEQ ID NO: 205625 - RNA, 22 nt, Human
auuugcuucugugaaaucaagu

SEQ ID NO: 205626 - RNA, 22 nt, Human
ucugugaaugugaccuuauuug

SEQ ID NO: 205627 - RNA, 22 nt, Human
cuccugaggacuucuauugggu

SEQ ID NO: 205628 - RNA, 22 nt, Human
ucucccaggucauacacagaga

SEQ ID NO: 205629 - RNA, 20 nt, Human
gucuucuauucccagaaagu

SEQ ID NO: 205630 - RNA, 22 nt, Human
uuuguacuucauugguucuacu

SEQ ID NO: 205631 - RNA, 20 nt, Human
cugggaggucuuccaaauca

SEQ ID NO: 205632 - RNA, 22 nt, Human
uagcaagaugucacuccaaguu

SEQ ID NO: 205633 - RNA, 20 nt, Human
cugggcagguguuugaucuc

SEQ ID NO: 205634 - RNA, 22 nt, Human
uccaggagacacaagguacaua

SEQ ID NO: 205635 - RNA, 22 nt, Human
uaucuagagcagugguucucaa

SEQ ID NO: 205636 - RNA, 22 nt, Human
ccauggccaggaaagccaaggu

SEQ ID NO: 205637 - RNA, 22 nt, Human
uucuuuucuuuaggcauugugu

SEQ ID NO: 205638 - RNA, 22 nt, Human
uuauuucauguaaaauuuaugu

SEQ ID NO: 205639 - RNA, 22 nt, Human
ucugagagucucugaggcagau

SEQ ID NO: 205640 - RNA, 22 nt, Human
guagaauauaugguuaguauug

SEQ ID NO: 205641 - RNA, 22 nt, Human
auuauaugugggauagaauuua

SEQ ID NO: 205642 - RNA, 22 nt, Human
uucugcagcccaacaguaguuu

SEQ ID NO: 205643 - RNA, 22 nt, Human
uaauggcagagucaugcuuucu

SEQ ID NO: 205644 - RNA, 22 nt, Human
caggcacacaggcucccugggc

SEQ ID NO: 205645 - RNA, 22 nt, Human
uuauaauucuggcauaggcugu

SEQ ID NO: 205646 - RNA, 22 nt, Human
ggacuccucuagaaguugaggc

SEQ ID NO: 205647 - RNA, 22 nt, Human
aucugguucuucuuaggcauca

SEQ ID NO: 205648 - RNA, 22 nt, Human
uccuggguagccuguccaagau

SEQ ID NO: 205649 - RNA, 22 nt, Human
ucaggcagagggagaagccaag

SEQ ID NO: 205650 - RNA, 22 nt, Human
aucuuuuugacauggugauggu

SEQ ID NO: 205651 - RNA, 22 nt, Human
agugacuaaagguuuuaauggc

SEQ ID NO: 205652 - RNA, 19 nt, Human
uggcuucuguuuucauguu

SEQ ID NO: 205653 - RNA, 22 nt, Human
uggagcucugauuaaauuggaa

SEQ ID NO: 205654 - RNA, 22 nt, Human
caaggcauuguguaagcacuug

SEQ ID NO: 205655 - RNA, 22 nt, Human
ugcuggcccuggcucagggaac

SEQ ID NO: 205656 - RNA, 22 nt, Human
cugccaggugccagggcgcggc

SEQ ID NO: 205657 - RNA, 22 nt, Human
gcucccagggaccgcagggcag

SEQ ID NO: 205658 - RNA, 22 nt, Human
acaaauugaccgcaagauucau

SEQ ID NO: 205659 - RNA, 23 nt, Human
acugggucuaucuccagagaaga

SEQ ID NO: 205660 - RNA, 22 nt, Human
aauuaugauuggucuaaaccag

SEQ ID NO: 205661 - RNA, 22 nt, Human
ccuuucagaugggcauggaccg

SEQ ID NO: 205662 - RNA, 18 nt, Human
cccacacagcaguagcuc

SEQ ID NO: 205663 - RNA, 21 nt, Human
uggcucuggguaggagagugc

SEQ ID NO: 205664 - RNA, 22 nt, Human
aagugcauaguaauggagucaa

SEQ ID NO: 205665 - RNA, 22 nt, Human
cuucugagggccuuugcuucca

SEQ ID NO: 205666 - RNA, 22 nt, Human
cuuugaaaccugcucugcagaa

SEQ ID NO: 205667 - RNA, 22 nt, Human
uccuuaggcaauuugggagagu

SEQ ID NO: 205668 - RNA, 22 nt, Human
guucaagguuuuacagagugua

SEQ ID NO: 205669 - RNA, 22 nt, Human
caauucaauggcaaaguauugu

SEQ ID NO: 205670 - RNA, 22 nt, Human
caggcagcugcuggguucagcc

SEQ ID NO: 205671 - RNA, 22 nt, Human
ucuuccuucuuugaugacaagg

SEQ ID NO: 205672 - RNA, 22 nt, Human
ugccuucuugaauaugguucuu

SEQ ID NO: 205673 - RNA, 22 nt, Human
ccagcuuuccugcgaguugauu

SEQ ID NO: 205674 - RNA, 22 nt, Human
ugugcuugucguggagccaggc

SEQ ID NO: 205675 - RNA, 22 nt, Human
uaucuuuauuaugucuaucugc

SEQ ID NO: 205676 - RNA, 22 nt, Human
ccugggccucacccagcucuug

SEQ ID NO: 205677 - RNA, 22 nt, Human
gggccugccaggcuuucagcau

SEQ ID NO: 205678 - RNA, 22 nt, Human
augucacauuggagcugcugga

SEQ ID NO: 205679 - RNA, 22 nt, Human
guuuauuggguauuguggagcc

SEQ ID NO: 205680 - RNA, 22 nt, Human
auuggucucugcuaaagggagg

SEQ ID NO: 205681 - RNA, 22 nt, Human
agcugggcaccccgcugcgucu

SEQ ID NO: 205682 - RNA, 19 nt, Human
ucccucccuguaaucucac

SEQ ID NO: 205683 - RNA, 22 nt, Human
gcuugaaaaugacucuugugaa

SEQ ID NO: 205684 - RNA, 22 nt, Human
ucuaaaugucaguacagaauga

SEQ ID NO: 205685 - RNA, 22 nt, Human
acagcugugaaaauccacagga

SEQ ID NO: 205686 - RNA, 22 nt, Human
acucugggcccacccucagagu

SEQ ID NO: 205687 - RNA, 22 nt, Human
uccaggucccuggggagauuuu

SEQ ID NO: 205688 - RNA, 22 nt, Human
cacauggccuguguggccagac

SEQ ID NO: 205689 - RNA, 22 nt, Human
caacaccuugaucuuggacuuc

SEQ ID NO: 205690 - RNA, 22 nt, Human
gccaaggauaccagcugugaga

SEQ ID NO: 205691 - RNA, 22 nt, Human
uuccacggggcuccccgcucuu

SEQ ID NO: 205692 - RNA, 22 nt, Human
uaaugcaacgugagauaauuaa

SEQ ID NO: 205693 - RNA, 22 nt, Human
ggcucaggaccugggauugcca

SEQ ID NO: 205694 - RNA, 22 nt, Human
guggcuauauuugaggauacgu

SEQ ID NO: 205695 - RNA, 22 nt, Human
ugcacaggugagacucaggaag

SEQ ID NO: 205696 - RNA, 22 nt, Human
gcaggugguccccguggagugg

SEQ ID NO: 205697 - RNA, 22 nt, Human
gccugaugagcuuccagcugag

SEQ ID NO: 205698 - RNA, 22 nt, Human
ggagcugcucagagccaguccc

SEQ ID NO: 205699 - RNA, 22 nt, Human
caggcagagcaacugguccaga

SEQ ID NO: 205700 - RNA, 22 nt, Human
ucccucucuggcuggggugcgg

SEQ ID NO: 205701 - RNA, 22 nt, Human
uccugggacuuucaaggcuagg

SEQ ID NO: 205702 - RNA, 22 nt, Human
ggcuuuauuaagcaggguaagu

SEQ ID NO: 205703 - RNA, 22 nt, Human
cacuuaaaacuccuggaauugu

SEQ ID NO: 205704 - RNA, 22 nt, Human
aagcugugaaaucucuagugca

SEQ ID NO: 205705 - RNA, 20 nt, Human
uuugacucaggccuuuagcc

SEQ ID NO: 205706 - RNA, 22 nt, Human
ugcugggggcuuucuggauacc

SEQ ID NO: 205707 - RNA, 22 nt, Human
agcagagaccauauagcccaga

SEQ ID NO: 205708 - RNA, 22 nt, Human
ggucaguggcaggggguacuuc

SEQ ID NO: 205709 - RNA, 22 nt, Human
aggcaguguauugcuagcggcu

SEQ ID NO: 205710 - RNA, 22 nt, Human
ugaaauagaaaaacaggcuucu

SEQ ID NO: 205711 - RNA, 22 nt, Human
ucaggauccauagacucccaaa

SEQ ID NO: 205712 - RNA, 23 nt, Human
ccaaagucgaagucuaguccaga

SEQ ID NO: 205713 - RNA, 22 nt, Human
agaauuagguaaguucaucuga

SEQ ID NO: 205714 - RNA, 22 nt, Human
ucuguaggggccggcggagccc

SEQ ID NO: 205715 - RNA, 22 nt, Human
acugaugaguaggcagacaagg

SEQ ID NO: 205716 - RNA, 22 nt, Human
guaaagaaguuuuugaaugcau

SEQ ID NO: 205717 - RNA, 22 nt, Human
auccacaguggggguggcggaa

SEQ ID NO: 205718 - RNA, 21 nt, Human
ccauaaucuuaggaucaaaau

SEQ ID NO: 205719 - RNA, 22 nt, Human
gaccaaggaagaggggagccag

SEQ ID NO: 205720 - RNA, 22 nt, Human
gaaguggaagccaucggcaguc

SEQ ID NO: 205721 - RNA, 22 nt, Human
ugcuggcuguucuagggaggcc

SEQ ID NO: 205722 - RNA, 22 nt, Human
gagcgauugcgggggucagagg

SEQ ID NO: 205723 - RNA, 22 nt, Human
aggccugggacgggagccguga

SEQ ID NO: 205724 - RNA, 22 nt, Human
aaagcauguugggucccucuuu

SEQ ID NO: 205725 - RNA, 22 nt, Human
aacugcaauuacuuuugcacua

SEQ ID NO: 205726 - RNA, 22 nt, Human
aaguguguugacugaauugggg

SEQ ID NO: 205727 - RNA, 19 nt, Human
uuuaaagugacugguauuu

SEQ ID NO: 205728 - RNA, 22 nt, Human
cugagcugggagccuggcacca

SEQ ID NO: 205729 - RNA, 22 nt, Human
ugucuccaaaacaaucucagau

SEQ ID NO: 205730 - RNA, 22 nt, Human
ugcugcaggcagccccucuacu

SEQ ID NO: 205731 - RNA, 22 nt, Human
gcugagguggcugccuuaguaa

SEQ ID NO: 205732 - RNA, 22 nt, Human
ugcagggaagcaaggguggcuc

SEQ ID NO: 205733 - RNA, 19 nt, Human
gaacaaacuuaaacuuuuc

SEQ ID NO: 205734 - RNA, 21 nt, Human
uguggcugacacccuuuggga

SEQ ID NO: 205735 - RNA, 22 nt, Human
uccagccaagccuugguagcug

SEQ ID NO: 205736 - RNA, 22 nt, Human
caggaaauugcaacagucugag

SEQ ID NO: 205737 - RNA, 22 nt, Human
uccagggcucauucccucugca

SEQ ID NO: 205738 - RNA, 22 nt, Human
uucccuggcucuucuacaucgu

SEQ ID NO: 205739 - RNA, 19 nt, Human
ggagaagcccaggaauccu

SEQ ID NO: 205740 - RNA, 22 nt, Human
uuugauaauuaaaaauuguagu

SEQ ID NO: 205741 - RNA, 22 nt, Human
aaaaccacaguuacuuuugcac

SEQ ID NO: 205742 - RNA, 19 nt, Human
ugcuuccucaccaucuccc

SEQ ID NO: 205743 - RNA, 22 nt, Human
uaagacaccucucugcccuuca

SEQ ID NO: 205744 - RNA, 22 nt, Human
gggacagaaggaagugagcaca

SEQ ID NO: 205745 - RNA, 22 nt, Human
ccauccuuggcucgcucucugu

SEQ ID NO: 205746 - RNA, 22 nt, Human
aggaguuuggggauuagucagg

SEQ ID NO: 205747 - RNA, 22 nt, Human
cuggcugguagaauugugaccu

SEQ ID NO: 205748 - RNA, 22 nt, Human
cccagcucugcagaccugcccu

SEQ ID NO: 205749 - RNA, 22 nt, Human
gagaguucuugccuggguauua

SEQ ID NO: 205750 - RNA, 22 nt, Human
auguuuguagguaagugacacu

SEQ ID NO: 205751 - RNA, 22 nt, Human
agcuuagaagugugcugagagg

SEQ ID NO: 205752 - RNA, 22 nt, Human
gugcccuccugaagccaucaca

SEQ ID NO: 205753 - RNA, 22 nt, Human
uagcuuaacagcaaaacuguug

SEQ ID NO: 205754 - RNA, 22 nt, Human
cugugggagaggugccuggauu

SEQ ID NO: 205755 - RNA, 22 nt, Human
uggcagccugcgugaaggagcu

SEQ ID NO: 205756 - RNA, 18 nt, Human
uaacugguuucuucccau

SEQ ID NO: 205757 - RNA, 22 nt, Human
cagccagguuagugcuaauugu

SEQ ID NO: 205758 - RNA, 22 nt, Human
acagacagauuuugucugaugu

SEQ ID NO: 205759 - RNA, 22 nt, Human
guacaugucaaaaaaugcauaa

SEQ ID NO: 205760 - RNA, 22 nt, Human
gguuucacaauuuagagcagug

SEQ ID NO: 205761 - RNA, 22 nt, Human
aguaaggcauuuuucauguuua

SEQ ID NO: 205762 - RNA, 22 nt, Human
ugucuuuagccagcagucuucu

SEQ ID NO: 205763 - RNA, 22 nt, Human
acaguuuauaaaaauaaugagg

SEQ ID NO: 205764 - RNA, 23 nt, Human
acacugucucauggauagacugc

SEQ ID NO: 205765 - RNA, 22 nt, Human
uaaagcaaggaauagaguaguc

SEQ ID NO: 205766 - RNA, 22 nt, Human
aaagcagacugauuugcaucac

SEQ ID NO: 205767 - RNA, 22 nt, Human
ucuccagggagguagcccagug

SEQ ID NO: 205768 - RNA, 22 nt, Human
uguccugggaggcgggguccag

SEQ ID NO: 205769 - RNA, 19 nt, Human
acucaggcaaugagaaaca

SEQ ID NO: 205770 - RNA, 22 nt, Human
uggaccagggucccagaguaug

SEQ ID NO: 205771 - RNA, 22 nt, Human
ucaggcuggggugcuaaggugu

SEQ ID NO: 205772 - RNA, 22 nt, Human
cauuauggcagccaggauauug

SEQ ID NO: 205773 - RNA, 22 nt, Human
ugcuggaggaguuuacuguggc

SEQ ID NO: 205774 - RNA, 21 nt, Human
agaaggcaaaagcagacaucu

SEQ ID NO: 205775 - RNA, 22 nt, Human
ugagccagcuccuugccuguca

SEQ ID NO: 205776 - RNA, 22 nt, Human
aauguuaguaacuugaguauuu

SEQ ID NO: 205777 - RNA, 22 nt, Human
acuuggcuuuaguaguaacuga

SEQ ID NO: 205778 - RNA, 22 nt, Human
ucaguguguacacugagcauuu

SEQ ID NO: 205779 - RNA, 22 nt, Human
acugucaugugcuaacugucca

SEQ ID NO: 205780 - RNA, 22 nt, Human
uucaaaccuucacuugcagagu

SEQ ID NO: 205781 - RNA, 22 nt, Human
uggcuucuagcaguguugauuu

SEQ ID NO: 205782 - RNA, 22 nt, Human
uuugucuuguguccuuaggacc

SEQ ID NO: 205783 - RNA, 22 nt, Human
ccugcaccucugugcuuggaac

SEQ ID NO: 205784 - RNA, 22 nt, Human
uggcccaggaggccagagggca

SEQ ID NO: 205785 - RNA, 22 nt, Human
ugcagagggacagccacagcuc

SEQ ID NO: 205786 - RNA, 22 nt, Human
uggccaggcuggucuggaacgc

SEQ ID NO: 205787 - RNA, 22 nt, Human
gagggccaggcagcaagaaggc

SEQ ID NO: 205788 - RNA, 22 nt, Human
ucugggccagaucuagggaucu

SEQ ID NO: 205789 - RNA, 22 nt, Human
cucaggucgcuauuucucuuac

SEQ ID NO: 205790 - RNA, 23 nt, Human
cccagagcacagccuccagaugc

SEQ ID NO: 205791 - RNA, 22 nt, Human
gccagcccugggagacuuaugg

SEQ ID NO: 205792 - RNA, 22 nt, Human
ucugcagaagcucacuaaaucc

SEQ ID NO: 205793 - RNA, 21 nt, Human
acccuggguucuccauacccu

SEQ ID NO: 205794 - RNA, 18 nt, Human
aucuuuccauagcauguu

SEQ ID NO: 205795 - RNA, 22 nt, Human
ugagcccuggagcccucuguua

SEQ ID NO: 205796 - RNA, 22 nt, Human
aguacaugugguccuggccaga

SEQ ID NO: 205797 - RNA, 22 nt, Human
acuggcuggacucugaccucuu

SEQ ID NO: 205798 - RNA, 22 nt, Human
ccucccaucccugcaagagagc

SEQ ID NO: 205799 - RNA, 22 nt, Human
uccuguccacagcccugaccuc

SEQ ID NO: 205800 - RNA, 22 nt, Human
auucaacuagugauuguguuau

SEQ ID NO: 205801 - RNA, 22 nt, Human
ccaugcugacccugugcaggca

SEQ ID NO: 205802 - RNA, 22 nt, Human
ggguguagacacauguucaucu

SEQ ID NO: 205803 - RNA, 22 nt, Human
ggcuuggcugucucccagccca

SEQ ID NO: 205804 - RNA, 22 nt, Human
ccugcuggacagggguguucau

SEQ ID NO: 205805 - RNA, 21 nt, Human
ccaggcuggccaugguauuga

SEQ ID NO: 205806 - RNA, 22 nt, Human
aucuacaacaucacauggcauu

SEQ ID NO: 205807 - RNA, 22 nt, Human
uggaagcagagagcuaucacca

SEQ ID NO: 205808 - RNA, 22 nt, Human
cugcaugucacucugcuguccc

SEQ ID NO: 205809 - RNA, 22 nt, Human
uaagauguacaaccacuucucu

SEQ ID NO: 205810 - RNA, 22 nt, Human
gagcuuggugcugccuguuguc

SEQ ID NO: 205811 - RNA, 22 nt, Human
gauggcuuccuucucacugugu

SEQ ID NO: 205812 - RNA, 22 nt, Human
ucugggcugcuaugaggcagag

SEQ ID NO: 205813 - RNA, 21 nt, Human
gccacugcacuccagccuggg

SEQ ID NO: 205814 - RNA, 22 nt, Human
gauacaaaauauaaauggagag

SEQ ID NO: 205815 - RNA, 22 nt, Human
ugagcccuccaaacccaggauu

SEQ ID NO: 205816 - RNA, 22 nt, Human
gggcagcucucacagcagccaa

SEQ ID NO: 205817 - RNA, 22 nt, Human
auucuuuaguuggcuucuugcc

SEQ ID NO: 205818 - RNA, 20 nt, Human
uucuuuguuccuuacauuug

SEQ ID NO: 205819 - RNA, 23 nt, Human
aagaaguuaccuaaaguuguacu

SEQ ID NO: 205820 - RNA, 22 nt, Human
uuuucauuguuccucgagcauu

SEQ ID NO: 205821 - RNA, 22 nt, Human
gcaaaucaccaccuagcuggau

SEQ ID NO: 205822 - RNA, 17 nt, Human
uggcuucagauguacau

SEQ ID NO: 205823 - RNA, 22 nt, Human
ccuggcacaugauagaugcuca

SEQ ID NO: 205824 - RNA, 22 nt, Human
gcaggcaccggguugcuccccu

SEQ ID NO: 205825 - RNA, 22 nt, Human
uacauucagcaaaagaaugguu

SEQ ID NO: 205826 - RNA, 22 nt, Human
cuguucuuuaguuccacugcaa

SEQ ID NO: 205827 - RNA, 22 nt, Human
cucugugccucaguuuucuucu

SEQ ID NO: 205828 - RNA, 22 nt, Human
ugacaguauugauggcaggauu

SEQ ID NO: 205829 - RNA, 22 nt, Human
gcacacagaauugauucacugu

SEQ ID NO: 205830 - RNA, 22 nt, Human
gcuggccuccugcuagauggaa

SEQ ID NO: 205831 - RNA, 22 nt, Human
uuccaggaacaaacucaccuua

SEQ ID NO: 205832 - RNA, 22 nt, Human
cuuggcuguaaaaucagaggcu

SEQ ID NO: 205833 - RNA, 22 nt, Human
caguucuuuguggggaguucuc

SEQ ID NO: 205834 - RNA, 22 nt, Human
uacuuuauucaggaaggcuggu

SEQ ID NO: 205835 - RNA, 22 nt, Human
ccugagccuggcucaugcacuc

SEQ ID NO: 205836 - RNA, 22 nt, Human
uugccaggcuuguuucuaggcu

SEQ ID NO: 205837 - RNA, 22 nt, Human
ugacauguccugagaagauggc

SEQ ID NO: 205838 - RNA, 22 nt, Human
aguuagagcgcauauuuuauua

SEQ ID NO: 205839 - RNA, 22 nt, Human
ugaggccacaggaaagggcccg

SEQ ID NO: 205840 - RNA, 22 nt, Human
cgaggcagaggcugaaacggcu

SEQ ID NO: 205841 - RNA, 19 nt, Human
cuugaaaugagacugaagg

SEQ ID NO: 205842 - RNA, 22 nt, Human
aaacacugugggacaucuuacu

SEQ ID NO: 205843 - RNA, 22 nt, Human
uggguggaauaaaucaguucug

SEQ ID NO: 205844 - RNA, 22 nt, Human
auggguuuauagguggacuuuu

SEQ ID NO: 205845 - RNA, 22 nt, Human
ugcaaggcacccacucugcuuu

SEQ ID NO: 205846 - RNA, 22 nt, Human
gaggagagaagcuaacggugcu

SEQ ID NO: 205847 - RNA, 22 nt, Human
cagggagcucugggccggacuc

SEQ ID NO: 205848 - RNA, 22 nt, Human
acagaguauuggaaaggcagug

SEQ ID NO: 205849 - RNA, 22 nt, Human
gauucuugggccuucugaaguu

SEQ ID NO: 205850 - RNA, 22 nt, Human
cugcaagguauauguuaucaua

SEQ ID NO: 205851 - RNA, 22 nt, Human
guuguuuuauaauugauugcaa

SEQ ID NO: 205852 - RNA, 22 nt, Human
acauuucucuugaugucucuau

SEQ ID NO: 205853 - RNA, 22 nt, Human
ucagagacuguaggagcagccu

SEQ ID NO: 205854 - RNA, 16 nt, Human
ccucugggccugcaag

SEQ ID NO: 205855 - RNA, 20 nt, Human
uucuggcaaacagaguucuu

SEQ ID NO: 205856 - RNA, 22 nt, Human
cccaaggcagggauuuucugcu

SEQ ID NO: 205857 - RNA, 22 nt, Human
gugcagggcccuccuaacaucu

SEQ ID NO: 205858 - RNA, 22 nt, Human
cagggcuagugacaccccaguc

SEQ ID NO: 205859 - RNA, 22 nt, Human
cuggauuuaauuaacuguugcu

SEQ ID NO: 205860 - RNA, 17 nt, Human
cucuuuauaaagaguua

SEQ ID NO: 205861 - RNA, 22 nt, Human
gcagcugucgcuaggagcugug

SEQ ID NO: 205862 - RNA, 18 nt, Human
acuguucucuccugcccu

SEQ ID NO: 205863 - RNA, 22 nt, Human
uccugggaggcaggaccccuuu

SEQ ID NO: 205864 - RNA, 22 nt, Human
acucauugaaacuuaagaucua

SEQ ID NO: 205865 - RNA, 22 nt, Human
uccaggaccucccaggcuagag

SEQ ID NO: 205866 - RNA, 22 nt, Human
cuguggcucaauugccuacuga

SEQ ID NO: 205867 - RNA, 22 nt, Human
ucuuuagagcacgggaaaaaca

SEQ ID NO: 205868 - RNA, 22 nt, Human
gccagcugaagggaagcuccug

SEQ ID NO: 205869 - RNA, 22 nt, Human
ugcacagcgggugucugucagg

SEQ ID NO: 205870 - RNA, 22 nt, Human
caggcccucaggcaagggcucu

SEQ ID NO: 205871 - RNA, 22 nt, Human
cugcuccuccccaucaggcagc

SEQ ID NO: 205872 - RNA, 18 nt, Human
cugggcucgagagauccu

SEQ ID NO: 205873 - RNA, 22 nt, Human
agugauuucaucauuuuaucaa

SEQ ID NO: 205874 - RNA, 22 nt, Human
uauuacaauuuacauugcacuu

SEQ ID NO: 205875 - RNA, 22 nt, Human
acagcuggaguguuggugaggu

SEQ ID NO: 205876 - RNA, 22 nt, Human
gccaggcuggugucacaacucu

SEQ ID NO: 205877 - RNA, 22 nt, Human
caggggaagaugccaagggaga

SEQ ID NO: 205878 - RNA, 22 nt, Human
ggccuucugccuuucagcaaug

SEQ ID NO: 205879 - RNA, 22 nt, Human
cacccacauggaaauucacagu

SEQ ID NO: 205880 - RNA, 22 nt, Human
cagcugccugucuggaggcaau

SEQ ID NO: 205881 - RNA, 22 nt, Human
gucugcccuuggcucagccaua

SEQ ID NO: 205882 - RNA, 22 nt, Human
uugagauggagccucagucuug

SEQ ID NO: 205883 - RNA, 21 nt, Human
guucaaauggguagauucaca

SEQ ID NO: 205884 - RNA, 22 nt, Human
caggccacgccccggcguguga

SEQ ID NO: 205885 - RNA, 22 nt, Human
ucacacaugaguaaauacaggg

SEQ ID NO: 205886 - RNA, 22 nt, Human
ugcugggccuuuaccuccaggg

SEQ ID NO: 205887 - RNA, 22 nt, Human
gucuagaaauagguuucagaaa

SEQ ID NO: 205888 - RNA, 22 nt, Human
ugccacagacaggacagaacag

SEQ ID NO: 205889 - RNA, 22 nt, Human
auuucuggauuuuggaugcugc

SEQ ID NO: 205890 - RNA, 22 nt, Human
aguugcagacgcagagauguug

SEQ ID NO: 205891 - RNA, 20 nt, Human
acacuugacaccagaaaugg

SEQ ID NO: 205892 - RNA, 20 nt, Human
accuccuggaagcaggugcc

SEQ ID NO: 205893 - RNA, 21 nt, Human
ucagagaacccggcaggcaag

SEQ ID NO: 205894 - RNA, 22 nt, Human
gcagcugguuaaugggagaauu

SEQ ID NO: 205895 - RNA, 22 nt, Human
caaaugcauaguuuauaagaag

SEQ ID NO: 205896 - RNA, 22 nt, Human
uucuuuauggaauggugauagu

SEQ ID NO: 205897 - RNA, 22 nt, Human
ugcagggaaaguguuggcagca

SEQ ID NO: 205898 - RNA, 22 nt, Human
uggcacagacagaucaggaguc

SEQ ID NO: 205899 - RNA, 23 nt, Human
gcagacagagcagacuaagacaa

SEQ ID NO: 205900 - RNA, 19 nt, Human
uaacuggugccuucaguca

SEQ ID NO: 205901 - RNA, 22 nt, Human
caggucuuuucuacugguggag

SEQ ID NO: 205902 - RNA, 19 nt, Human
ucuccaggugccccaaaca

SEQ ID NO: 205903 - RNA, 22 nt, Human
gcuggggagcaagaguagugag

SEQ ID NO: 205904 - RNA, 20 nt, Human
agcuaacccuacuuucuuug

SEQ ID NO: 205905 - RNA, 22 nt, Human
agggagcugcucugcuuccgug

SEQ ID NO: 205906 - RNA, 22 nt, Human
gaaugaguagaguauaaacaaa

SEQ ID NO: 205907 - RNA, 22 nt, Human
aagaacuguaucaagauguagu

SEQ ID NO: 205908 - RNA, 22 nt, Human
ucauguguugcacugaggaccu

SEQ ID NO: 205909 - RNA, 22 nt, Human
uauacacaaacaagggguuaag

SEQ ID NO: 205910 - RNA, 22 nt, Human
agggcaguguggugggacugac

SEQ ID NO: 205911 - RNA, 22 nt, Human
gcucuggguucugauuuaugag

SEQ ID NO: 205912 - RNA, 22 nt, Human
agagcacuuucgagagccggag

SEQ ID NO: 205913 - RNA, 21 nt, Human
agcugcaagagcaacaucuuu

SEQ ID NO: 205914 - RNA, 22 nt, Human
uccaggcuccccugcgugcucc

SEQ ID NO: 205915 - RNA, 22 nt, Human
aaaaaauuccauucugugccuu

SEQ ID NO: 205916 - RNA, 22 nt, Human
ugcagggauuauguagggguug

SEQ ID NO: 205917 - RNA, 22 nt, Human
auacagaaguuuuccacuuauu

SEQ ID NO: 205918 - RNA, 22 nt, Human
gauacacuggagcuuccugaca

SEQ ID NO: 205919 - RNA, 22 nt, Human
uuagugcaauucagagaacaau

SEQ ID NO: 205920 - RNA, 22 nt, Human
gcucugggauuaccagccuuag

SEQ ID NO: 205921 - RNA, 22 nt, Human
aggggcuccaaggaaguuuggg

SEQ ID NO: 205922 - RNA, 22 nt, Human
aggaagccuggggcugcccucg

SEQ ID NO: 205923 - RNA, 22 nt, Human
aaaagagcaaacauguaauagu

SEQ ID NO: 205924 - RNA, 22 nt, Human
ugucuuuaauucuacauaucuc

SEQ ID NO: 205925 - RNA, 22 nt, Human
caauaacugcugaggagaagca

SEQ ID NO: 205926 - RNA, 22 nt, Human
cagaugagaguggccaggguuc

SEQ ID NO: 205927 - RNA, 22 nt, Human
cugucucugauaagcucgaggg

SEQ ID NO: 205928 - RNA, 22 nt, Human
cuugaaugaaaccaacugauga

SEQ ID NO: 205929 - RNA, 22 nt, Human
cagcuugggaguuugguuuuau

SEQ ID NO: 205930 - RNA, 20 nt, Human
caaaagcaaugaaguuauga

SEQ ID NO: 205931 - RNA, 22 nt, Human
aacaaguaaguuuauauauauu

SEQ ID NO: 205932 - RNA, 22 nt, Human
caggccugacccugagcuucac

SEQ ID NO: 205933 - RNA, 22 nt, Human
ugaucauuaucaaacuggucau

SEQ ID NO: 205934 - RNA, 22 nt, Human
agaguaaauaggagaugacagc

SEQ ID NO: 205935 - RNA, 22 nt, Human
acagagcaugcucaguguguga

SEQ ID NO: 205936 - RNA, 22 nt, Human
cuggcccugguaaggacaccca

SEQ ID NO: 205937 - RNA, 22 nt, Human
uccagcagugcucaggacucac

SEQ ID NO: 205938 - RNA, 22 nt, Human
ucaucuuuccucaaaagaucca

SEQ ID NO: 205939 - RNA, 22 nt, Human
ccucacugcuauguguuugcuc

SEQ ID NO: 205940 - RNA, 22 nt, Human
uuagcauucucugugugcauaa

SEQ ID NO: 205941 - RNA, 20 nt, Human
uuccagagaucugcauuuua

SEQ ID NO: 205942 - RNA, 22 nt, Human
aaauuagaagugcucaggaaua

SEQ ID NO: 205943 - RNA, 22 nt, Human
uauucacuuugggagagccauu

SEQ ID NO: 205944 - RNA, 22 nt, Human
aucaggaucacagaaacuuuua

SEQ ID NO: 205945 - RNA, 22 nt, Human
cauccaaacucucauuaucugu

SEQ ID NO: 205946 - RNA, 22 nt, Human
uaggguacaugugcacaacaug

SEQ ID NO: 205947 - RNA, 22 nt, Human
agaaugcuuccuuugaaacuga

SEQ ID NO: 205948 - RNA, 22 nt, Human
uauauauaugcacacacaccua

SEQ ID NO: 205949 - RNA, 22 nt, Human
cccugcagagccagcccugacc

SEQ ID NO: 205950 - RNA, 22 nt, Human
cucaggagguuuccugucuagg

SEQ ID NO: 205951 - RNA, 22 nt, Human
auauacaggugguauguguaaa

SEQ ID NO: 205952 - RNA, 19 nt, Human
uagaaugcccacuuaaaaa

SEQ ID NO: 205953 - RNA, 22 nt, Human
cuuugccuccuagagcacguuc

SEQ ID NO: 205954 - RNA, 22 nt, Human
aucugaagaggucauggcugac

SEQ ID NO: 205955 - RNA, 22 nt, Human
gagcccuggcagucugggaugg

SEQ ID NO: 205956 - RNA, 19 nt, Human
ucaggacugacuugaaguc

SEQ ID NO: 205957 - RNA, 22 nt, Human
ucucugguuauuaacuaacucc

SEQ ID NO: 205958 - RNA, 22 nt, Human
cugccaaaaggugcaccugcug

SEQ ID NO: 205959 - RNA, 22 nt, Human
acauagaacuucccagugagca

SEQ ID NO: 205960 - RNA, 22 nt, Human
ucuuaguuguuugcugucuaac

SEQ ID NO: 205961 - RNA, 22 nt, Human
aagaaacuggaauauagagagc

SEQ ID NO: 205962 - RNA, 22 nt, Human
ugcugagguuucgucugcuugc

SEQ ID NO: 205963 - RNA, 22 nt, Human
cagagccagcccacuguucccg

SEQ ID NO: 205964 - RNA, 22 nt, Human
aucaagcagugaaaaaugcuag

SEQ ID NO: 205965 - RNA, 22 nt, Human
gggcucuguggaugugagagcu

SEQ ID NO: 205966 - RNA, 22 nt, Human
uccuguuucaacccuuacacug

SEQ ID NO: 205967 - RNA, 21 nt, Human
caaaagagacugauucuugga

SEQ ID NO: 205968 - RNA, 22 nt, Human
aaauguuucuacuugugagcau

SEQ ID NO: 205969 - RNA, 22 nt, Human
auaguugguccaugaaaaaagu

SEQ ID NO: 205970 - RNA, 22 nt, Human
gcauucuuuccacgaggaggua

SEQ ID NO: 205971 - RNA, 22 nt, Human
auauaucaugaguaaaacuuga

SEQ ID NO: 205972 - RNA, 22 nt, Human
uuauuguagcacuuuggcagug

SEQ ID NO: 205973 - RNA, 22 nt, Human
cagggcuggcucaugaaaaguu

SEQ ID NO: 205974 - RNA, 22 nt, Human
ucagguguauugaugucuguga

SEQ ID NO: 205975 - RNA, 22 nt, Human
cugaggagaacaaugagaucaa

SEQ ID NO: 205976 - RNA, 22 nt, Human
acaaaugagaauguagacagag

SEQ ID NO: 205977 - RNA, 22 nt, Human
cugcuguguuucacaccucugg

SEQ ID NO: 205978 - RNA, 22 nt, Human
ggugaaauguagucuugugaga

SEQ ID NO: 205979 - RNA, 22 nt, Human
cagaagaggacuggguagcuca

SEQ ID NO: 205980 - RNA, 22 nt, Human
cccauggcaauaaggucacagg

SEQ ID NO: 205981 - RNA, 22 nt, Human
ugcuuuauucaggguuuacccc

SEQ ID NO: 205982 - RNA, 19 nt, Human
gcaggacucccagcuccuc

SEQ ID NO: 205983 - RNA, 22 nt, Human
ccauuuguaccauuucuuugua

SEQ ID NO: 205984 - RNA, 22 nt, Human
uucugagaaugcuucuggaauc

SEQ ID NO: 205985 - RNA, 22 nt, Human
uuaguuaaaauucugcugacau

SEQ ID NO: 205986 - RNA, 22 nt, Human
agcuuuaugcuuccuacaagcu

SEQ ID NO: 205987 - RNA, 22 nt, Human
agcugcagaucaauaggcucac

SEQ ID NO: 205988 - RNA, 17 nt, Human
agacacugagccaagua

SEQ ID NO: 205989 - RNA, 22 nt, Human
ucacuccucauugcugcccauu

SEQ ID NO: 205990 - RNA, 22 nt, Human
agcugugugcccaugguggagg

SEQ ID NO: 205991 - RNA, 22 nt, Human
ggccucugguucguggugaccu

SEQ ID NO: 205992 - RNA, 22 nt, Human
ugagaagcugcuugugcuguau

SEQ ID NO: 205993 - RNA, 22 nt, Human
uuucucaaggugucauguauuu

SEQ ID NO: 205994 - RNA, 22 nt, Human
uauuuaaaauaagccccagugg

SEQ ID NO: 205995 - RNA, 22 nt, Human
ggcucccugccuguccucaguc

SEQ ID NO: 205996 - RNA, 22 nt, Human
uacuucaaacaaugguacaaac

SEQ ID NO: 205997 - RNA, 22 nt, Human
ucuggcugcugcgugagugcuu

SEQ ID NO: 205998 - RNA, 22 nt, Human
acauggcacccagaucucaaaa

SEQ ID NO: 205999 - RNA, 22 nt, Human
uuuugcuguuauaugcuauuau

SEQ ID NO: 206000 - RNA, 22 nt, Human
uuuuaugugugaaaugcugucu

SEQ ID NO: 206001 - RNA, 22 nt, Human
agacccuugcagucugguuguc

SEQ ID NO: 206002 - RNA, 22 nt, Human
ucuucagacuguuguucuuuug

SEQ ID NO: 206003 - RNA, 18 nt, Human
uguagagccagguuugcc

SEQ ID NO: 206004 - RNA, 22 nt, Human
aggcuuagaaauucagcugagu

SEQ ID NO: 206005 - RNA, 22 nt, Human
aagcugucagugucaggcuaaa

SEQ ID NO: 206006 - RNA, 22 nt, Human
uuguggcagaccaugagucuaa

SEQ ID NO: 206007 - RNA, 22 nt, Human
uucaggauucuuucagacuggg

SEQ ID NO: 206008 - RNA, 22 nt, Human
ugaaugauacagaauuauguag

SEQ ID NO: 206009 - RNA, 21 nt, Human
accaguuuggggggcuuccug

SEQ ID NO: 206010 - RNA, 20 nt, Human
cagcacagagcuuggcucua

SEQ ID NO: 206011 - RNA, 22 nt, Human
ccugucaguugcugucagggau

SEQ ID NO: 206012 - RNA, 22 nt, Human
cuggcuucugggccagggcaga

SEQ ID NO: 206013 - RNA, 22 nt, Human
uccuucuuucaccucauaguca

SEQ ID NO: 206014 - RNA, 22 nt, Human
gccaggucuggguagcagagga

SEQ ID NO: 206015 - RNA, 22 nt, Human
uggagggaacaaaggaguccca

SEQ ID NO: 206016 - RNA, 22 nt, Human
aggagccaaauuuuagacucug

SEQ ID NO: 206017 - RNA, 22 nt, Human
caggcagaguuagugauuuagg

SEQ ID NO: 206018 - RNA, 22 nt, Human
gccaugcuugguaugcugugag

SEQ ID NO: 206019 - RNA, 22 nt, Human
uguuugcuuacuuguaugcugc

SEQ ID NO: 206020 - RNA, 22 nt, Human
gucagccugcacucagggagcg

SEQ ID NO: 206021 - RNA, 21 nt, Human
uggcucaguugcugggcacag

SEQ ID NO: 206022 - RNA, 22 nt, Human
cuggacccuguuucccuagguc

SEQ ID NO: 206023 - RNA, 22 nt, Human
augccccagugugugcuuccuu

SEQ ID NO: 206024 - RNA, 22 nt, Human
ggcaggcagaggcugagacagg

SEQ ID NO: 206025 - RNA, 22 nt, Human
uucauucauguauugucuaugg

SEQ ID NO: 206026 - RNA, 22 nt, Human
ucacagaaguugaauuugcaug

SEQ ID NO: 206027 - RNA, 19 nt, Human
ccuguucuuggcugaggcu

SEQ ID NO: 206028 - RNA, 22 nt, Human
aaugucaaacagagcagagcua

SEQ ID NO: 206029 - RNA, 22 nt, Human
aguggcagggcuggcugcugca

SEQ ID NO: 206030 - RNA, 22 nt, Human
gaaaagagaacaucugaggauc

SEQ ID NO: 206031 - RNA, 22 nt, Human
aguggcaguaacauuccacaau

SEQ ID NO: 206032 - RNA, 22 nt, Human
uccacaucucucgccaaccaau

SEQ ID NO: 206033 - RNA, 22 nt, Human
auuuaagacugacuucaccagu

SEQ ID NO: 206034 - RNA, 22 nt, Human
gcggcaggaagagcgcagcccc

SEQ ID NO: 206035 - RNA, 22 nt, Human
caggaaugacugcagauggggc

SEQ ID NO: 206036 - RNA, 22 nt, Human
aucucugcaucccucaagguug

SEQ ID NO: 206037 - RNA, 22 nt, Human
cgcaggugaacuguucugcagu

SEQ ID NO: 206038 - RNA, 23 nt, Human
cuguccuguaguucacguuggcc

SEQ ID NO: 206039 - RNA, 22 nt, Human
cccaggaguuugaguucagcau

SEQ ID NO: 206040 - RNA, 20 nt, Human
uuucaguuaucuugaccuuc

SEQ ID NO: 206041 - RNA, 22 nt, Human
gcacaauaauuuuuuuaagagg

SEQ ID NO: 206042 - RNA, 22 nt, Human
ccugugggcuugaguguagggu

SEQ ID NO: 206043 - RNA, 22 nt, Human
uaguuugcgaaauuccugccuc

SEQ ID NO: 206044 - RNA, 22 nt, Human
caguaacagugaucaccugugg

SEQ ID NO: 206045 - RNA, 22 nt, Human
gcagaagcugggcagcgaggug

SEQ ID NO: 206046 - RNA, 17 nt, Human
uucagaagcauuuuggc

SEQ ID NO: 206047 - RNA, 22 nt, Human
uugcccugaagaacgucccaga

SEQ ID NO: 206048 - RNA, 22 nt, Human
auugugauuagagaauauagag

SEQ ID NO: 206049 - RNA, 22 nt, Human
aaaagaguguuucaacuuuggc

SEQ ID NO: 206050 - RNA, 22 nt, Human
agacagaccauggcuauucaga

SEQ ID NO: 206051 - RNA, 22 nt, Human
uuauacacaauucuuuuacuac

SEQ ID NO: 206052 - RNA, 22 nt, Human
acucucugucuaaaugcaguuu

SEQ ID NO: 206053 - RNA, 22 nt, Human
uucagaaauaaaauaucccaac

SEQ ID NO: 206054 - RNA, 22 nt, Human
ucaggugggcguuccggugcgg

SEQ ID NO: 206055 - RNA, 22 nt, Human
uacaaagucacauugaaaugaa

SEQ ID NO: 206056 - RNA, 22 nt, Human
gaaaaggccuccccauaggaau

SEQ ID NO: 206057 - RNA, 22 nt, Human
ugaguuauauauacuggcucug

SEQ ID NO: 206058 - RNA, 22 nt, Human
gggccacuucuagugccucaga

SEQ ID NO: 206059 - RNA, 22 nt, Human
gcaggggaguccacucuaugca

SEQ ID NO: 206060 - RNA, 22 nt, Human
auaaaaguuuccaaucaugccu

SEQ ID NO: 206061 - RNA, 22 nt, Human
gccugagcuuuaauuuucuugu

SEQ ID NO: 206062 - RNA, 23 nt, Human
gagaaaccucgguaagcaggagg

SEQ ID NO: 206063 - RNA, 22 nt, Human
aaaauguguuuaugcauuucgu

SEQ ID NO: 206064 - RNA, 22 nt, Human
acugugcacaauucuaaguccu

SEQ ID NO: 206065 - RNA, 22 nt, Human
ugacagagagguaaguuaugaa

SEQ ID NO: 206066 - RNA, 20 nt, Human
ugcagcugguuucacaggga

SEQ ID NO: 206067 - RNA, 22 nt, Human
uggcuuccagagcugcuccacc

SEQ ID NO: 206068 - RNA, 22 nt, Human
ugucuccaacucacuguauacu

SEQ ID NO: 206069 - RNA, 22 nt, Human
cucucugggggccaugccaaga

SEQ ID NO: 206070 - RNA, 22 nt, Human
auuuuuaugacaaaccauccuc

SEQ ID NO: 206071 - RNA, 21 nt, Human
agccaggcaagcacccccacu

SEQ ID NO: 206072 - RNA, 22 nt, Human
gcucccucugcucaggcacuug

SEQ ID NO: 206073 - RNA, 23 nt, Human
acagacaacacugaugagagaaa

SEQ ID NO: 206074 - RNA, 22 nt, Human
ucacagagaaaagcuaucacaa

SEQ ID NO: 206075 - RNA, 22 nt, Human
uugggcuuuaauuccagagagg

SEQ ID NO: 206076 - RNA, 22 nt, Human
cagagccaucccagccuguggu

SEQ ID NO: 206077 - RNA, 22 nt, Human
cuuagcuucucugcaucugugu

SEQ ID NO: 206078 - RNA, 22 nt, Human
uagaaccucauaagaaucgaaa

SEQ ID NO: 206079 - RNA, 20 nt, Human
ccagagcugauggcugcccg

SEQ ID NO: 206080 - RNA, 19 nt, Human
ugugauaguugaaccugcc

SEQ ID NO: 206081 - RNA, 22 nt, Human
ugaaggcagugaguuuguguuu

SEQ ID NO: 206082 - RNA, 22 nt, Human
caguucuggaggcuccacaucu

SEQ ID NO: 206083 - RNA, 22 nt, Human
ggcaggugaucuagagucaaua

SEQ ID NO: 206084 - RNA, 22 nt, Human
ucaggccugcaaggagaguccc

SEQ ID NO: 206085 - RNA, 22 nt, Human
uggucgaccaguuggaaaguaa

SEQ ID NO: 206086 - RNA, 22 nt, Human
aaugcuuauaccuaaugaucuu

SEQ ID NO: 206087 - RNA, 22 nt, Human
gucugcuguucagagauguugc

SEQ ID NO: 206088 - RNA, 22 nt, Human
cacagaacauccuuagcucaug

SEQ ID NO: 206089 - RNA, 23 nt, Human
aaauaccugaauuagauauuauc

SEQ ID NO: 206090 - RNA, 22 nt, Human
cuggucuguccgcaggucaccu

SEQ ID NO: 206091 - RNA, 22 nt, Human
acucuggcaagcuuccacuucc

SEQ ID NO: 206092 - RNA, 22 nt, Human
uacaugaauguuucaauauugu

SEQ ID NO: 206093 - RNA, 23 nt, Human
cuggccuccgacacuggccaaga

SEQ ID NO: 206094 - RNA, 22 nt, Human
aguggcuggagccccaggcugg

SEQ ID NO: 206095 - RNA, 23 nt, Human
acugauuaacaugugugauauuc

SEQ ID NO: 206096 - RNA, 22 nt, Human
ccagccuuacugcccuucagug

SEQ ID NO: 206097 - RNA, 22 nt, Human
uuggaaaaugaggcacagagag

SEQ ID NO: 206098 - RNA, 22 nt, Human
uaccugaauuaccaaaagcuuu

SEQ ID NO: 206099 - RNA, 22 nt, Human
uacaggagcacaaaagaguuga

SEQ ID NO: 206100 - RNA, 22 nt, Human
caggaguguuugcuacaguuuc

SEQ ID NO: 206101 - RNA, 22 nt, Human
aguguauuaguuguccagcagu

SEQ ID NO: 206102 - RNA, 20 nt, Human
agguuccagccacaaccagc

SEQ ID NO: 206103 - RNA, 22 nt, Human
gggagccuugggagugccagcc

SEQ ID NO: 206104 - RNA, 22 nt, Human
cuuauuuugcugaugacccagg

SEQ ID NO: 206105 - RNA, 21 nt, Human
agcagaggcagaauguaugca

SEQ ID NO: 206106 - RNA, 22 nt, Human
cauguuaacuaagauuaacuau

SEQ ID NO: 206107 - RNA, 22 nt, Human
uuccuauagaaagcuguguaga

SEQ ID NO: 206108 - RNA, 22 nt, Human
uggaaaggacaguugcugauag

SEQ ID NO: 206109 - RNA, 22 nt, Human
ucucaggcacugggugccaacu

SEQ ID NO: 206110 - RNA, 19 nt, Human
uuuggacagaguguccagg

SEQ ID NO: 206111 - RNA, 22 nt, Human
gggcuucuugagcugccggccc

SEQ ID NO: 206112 - RNA, 20 nt, Human
caaaugaagcuguuggccuc

SEQ ID NO: 206113 - RNA, 22 nt, Human
ugcaggugugguuccucagcca

SEQ ID NO: 206114 - RNA, 22 nt, Human
aggcagcauuugaauccagguc

SEQ ID NO: 206115 - RNA, 22 nt, Human
guccaggccugccucugaggag

SEQ ID NO: 206116 - RNA, 20 nt, Human
ucacagaaugccugaagaag

SEQ ID NO: 206117 - RNA, 22 nt, Human
uaacuugguuggugggcaggag

SEQ ID NO: 206118 - RNA, 22 nt, Human
uuauuuguaaagguccauagua

SEQ ID NO: 206119 - RNA, 22 nt, Human
agaugaaaauacgugacuuuaa

SEQ ID NO: 206120 - RNA, 22 nt, Human
ugauuguuuuaguucccugaug

SEQ ID NO: 206121 - RNA, 22 nt, Human
uuagaaaggaaucuucauuuca

SEQ ID NO: 206122 - RNA, 22 nt, Human
uucucugaaggccaugcucacu

SEQ ID NO: 206123 - RNA, 22 nt, Human
uuacagugacaguugcuaugau

SEQ ID NO: 206124 - RNA, 22 nt, Human
ugaaacagaguggauacaguga

SEQ ID NO: 206125 - RNA, 19 nt, Human
uggucccauacugcuggcc

SEQ ID NO: 206126 - RNA, 22 nt, Human
agcccagagacaaugcucagua

SEQ ID NO: 206127 - RNA, 22 nt, Human
aggaccaguaugagagcaucug

SEQ ID NO: 206128 - RNA, 22 nt, Human
acucaggcacucagcccucgcc

SEQ ID NO: 206129 - RNA, 22 nt, Human
cuggcccagucucagaguguca

SEQ ID NO: 206130 - RNA, 20 nt, Human
acaacaaacuugcuuaagga

SEQ ID NO: 206131 - RNA, 20 nt, Human
uaugugauuuucucaucaau

SEQ ID NO: 206132 - RNA, 19 nt, Human
ugcagaagacacaguggug

SEQ ID NO: 206133 - RNA, 21 nt, Human
gcagaugggagucaucaggcu

SEQ ID NO: 206134 - RNA, 20 nt, Human
guuuuucuugggcgagcuau

SEQ ID NO: 206135 - RNA, 22 nt, Human
guguccucuuauugcucuuggc

SEQ ID NO: 206136 - RNA, 22 nt, Human
cuuuggaaaagcauaccaagga

SEQ ID NO: 206137 - RNA, 22 nt, Human
uugcaauuaguuacaaaagugg

SEQ ID NO: 206138 - RNA, 22 nt, Human
ccucuguguccuggucauugaa

SEQ ID NO: 206139 - RNA, 22 nt, Human
agaaacaucgcuuaguccucau

SEQ ID NO: 206140 - RNA, 22 nt, Human
uguacacaaccuacagucugcu

SEQ ID NO: 206141 - RNA, 22 nt, Human
gccugccuguuggcugaggugc

SEQ ID NO: 206142 - RNA, 17 nt, Human
aguuuugauauaauggc

SEQ ID NO: 206143 - RNA, 22 nt, Human
uagcuuuccuuguugccugugc

SEQ ID NO: 206144 - RNA, 22 nt, Human
agugcauucugucaucuugguu

SEQ ID NO: 206145 - RNA, 22 nt, Human
ucucagucuuugcaaggaugcu

SEQ ID NO: 206146 - RNA, 22 nt, Human
ugcagggcccucauuccugucc

SEQ ID NO: 206147 - RNA, 22 nt, Human
uucuccucuguuggccuucccu

SEQ ID NO: 206148 - RNA, 21 nt, Human
ucuuuuccuuucugugugcaa

SEQ ID NO: 206149 - RNA, 22 nt, Human
ccagcccuucccaacuggccag

SEQ ID NO: 206150 - RNA, 22 nt, Human
uccaggagagguguggggacug

SEQ ID NO: 206151 - RNA, 22 nt, Human
cucucccagucaggcucaggau

SEQ ID NO: 206152 - RNA, 22 nt, Human
ggagcuggcuacagagaacucc

SEQ ID NO: 206153 - RNA, 22 nt, Human
ugucagguugguuuucagagaa

SEQ ID NO: 206154 - RNA, 22 nt, Human
ucaggcuugcgauggaagucac

SEQ ID NO: 206155 - RNA, 22 nt, Human
aauaauuacccaucuuuuugua

SEQ ID NO: 206156 - RNA, 22 nt, Human
cuucagcucuugguaaauguuu

SEQ ID NO: 206157 - RNA, 22 nt, Human
cucuuagaaagaaacacacugg

SEQ ID NO: 206158 - RNA, 22 nt, Human
cauccacuagaaugacagaguu

SEQ ID NO: 206159 - RNA, 22 nt, Human
agcaccaggaaagaaggggcca

SEQ ID NO: 206160 - RNA, 22 nt, Human
ccaggaaguaugacccaacaga

SEQ ID NO: 206161 - RNA, 22 nt, Human
aaagaacuuauccuagaauuug

SEQ ID NO: 206162 - RNA, 18 nt, Human
gugccaggaggcgcagcc

SEQ ID NO: 206163 - RNA, 22 nt, Human
ugccuggcccugacagcccugg

SEQ ID NO: 206164 - RNA, 22 nt, Human
uuagaagugguaaguagaaaga

SEQ ID NO: 206165 - RNA, 22 nt, Human
uagcuuuaagacauggugaaug

SEQ ID NO: 206166 - RNA, 22 nt, Human
aacagaaaucauuuagggcucu

SEQ ID NO: 206167 - RNA, 22 nt, Human
cuccuggcuaugacuacauuuc

SEQ ID NO: 206168 - RNA, 22 nt, Human
caaagaagagauuuacagagcu

SEQ ID NO: 206169 - RNA, 22 nt, Human
caggauggccccggggcugugc

SEQ ID NO: 206170 - RNA, 22 nt, Human
ccaguccugugugacccugcac

SEQ ID NO: 206171 - RNA, 22 nt, Human
cuuuguugugccugagugcacc

SEQ ID NO: 206172 - RNA, 22 nt, Human
caggcacaguguugcuguucaa

SEQ ID NO: 206173 - RNA, 22 nt, Human
aguucaggcauaaggcaugaac

SEQ ID NO: 206174 - RNA, 22 nt, Human
aagcuacaauguguuuuugaaa

SEQ ID NO: 206175 - RNA, 22 nt, Human
uuccuguguacguguuucgcug

SEQ ID NO: 206176 - RNA, 22 nt, Human
uuaggcugggcuacaacaacug

SEQ ID NO: 206177 - RNA, 23 nt, Human
ucuuuuuaagagaucuagugacg

SEQ ID NO: 206178 - RNA, 22 nt, Human
aacuuucuuggaugucucaaca

SEQ ID NO: 206179 - RNA, 22 nt, Human
uaucuagauaguuuagccaucu

SEQ ID NO: 206180 - RNA, 19 nt, Human
ccugugcuaggagcugacc

SEQ ID NO: 206181 - RNA, 22 nt, Human
uccugccuucauacugcuguau

SEQ ID NO: 206182 - RNA, 23 nt, Human
aagguguucuguauuuaacucag

SEQ ID NO: 206183 - RNA, 22 nt, Human
acugcagguggauggcacuuua

SEQ ID NO: 206184 - RNA, 22 nt, Human
uaacacauaagcugagaccaug

SEQ ID NO: 206185 - RNA, 22 nt, Human
guucugggaagguggaccuguu

SEQ ID NO: 206186 - RNA, 22 nt, Human
agcuguggcagcagccguggca

SEQ ID NO: 206187 - RNA, 22 nt, Human
ucugugcagucagggcucaguc

SEQ ID NO: 206188 - RNA, 22 nt, Human
ucccaggcagcuucuuucauca

SEQ ID NO: 206189 - RNA, 20 nt, Human
agccuggcaaacacccccag

SEQ ID NO: 206190 - RNA, 22 nt, Human
ugaaaaacugaauaguugagua

SEQ ID NO: 206191 - RNA, 22 nt, Human
aacuucugggcuguccaaaacu

SEQ ID NO: 206192 - RNA, 22 nt, Human
ucugaggggguguuuauaagcu

SEQ ID NO: 206193 - RNA, 22 nt, Human
ugauuuacacaccuaugauuua

SEQ ID NO: 206194 - RNA, 22 nt, Human
acaagaauguagauuaguuaag

SEQ ID NO: 206195 - RNA, 22 nt, Human
cacugggcuuuguaguuagcau

SEQ ID NO: 206196 - RNA, 22 nt, Human
uguggcagcugcugcaggagcu

SEQ ID NO: 206197 - RNA, 22 nt, Human
acuuuccuagacuucagugaca

SEQ ID NO: 206198 - RNA, 14 nt, Human
gcaggcagaucacc

SEQ ID NO: 206199 - RNA, 22 nt, Human
ccugccucccagagguccucua

SEQ ID NO: 206200 - RNA, 22 nt, Human
aaagcugggggcccuggucuag

SEQ ID NO: 206201 - RNA, 22 nt, Human
uuuuaagaaauguaugacuguc

SEQ ID NO: 206202 - RNA, 22 nt, Human
uggucccuaaagaugucuacau

SEQ ID NO: 206203 - RNA, 22 nt, Human
gaagaagacauggaacaauagu

SEQ ID NO: 206204 - RNA, 22 nt, Human
auucaugugccacuggugaaca

SEQ ID NO: 206205 - RNA, 18 nt, Human
ggguccuguucuuggaag

SEQ ID NO: 206206 - RNA, 22 nt, Human
auuugcuuucagguauaaaagg

SEQ ID NO: 206207 - RNA, 22 nt, Human
auagcaauuugcccaauuaccu

SEQ ID NO: 206208 - RNA, 22 nt, Human
uauuuguauguguguacauaua

SEQ ID NO: 206209 - RNA, 22 nt, Human
ugcuggcuccaaccuggcaucu

SEQ ID NO: 206210 - RNA, 22 nt, Human
auugacaaaucugaacauacgg

SEQ ID NO: 206211 - RNA, 22 nt, Human
uguccucacaggaaugaacuuu

SEQ ID NO: 206212 - RNA, 22 nt, Human
agaucagacuuugugacuagga

SEQ ID NO: 206213 - RNA, 22 nt, Human
ucugggcuuuacacugugcuua

SEQ ID NO: 206214 - RNA, 22 nt, Human
auguggaucuguuauucuagau

SEQ ID NO: 206215 - RNA, 22 nt, Human
uccagggacaguauagaggauc

SEQ ID NO: 206216 - RNA, 22 nt, Human
ccucaugguacuuacuguagcu

SEQ ID NO: 206217 - RNA, 22 nt, Human
uaacacugguauuucauuuagu

SEQ ID NO: 206218 - RNA, 22 nt, Human
gcugguggcagagacaucaggu

SEQ ID NO: 206219 - RNA, 19 nt, Human
cugagccucaguuuccuag

SEQ ID NO: 206220 - RNA, 22 nt, Human
gccuggcugcugguucugagga

SEQ ID NO: 206221 - RNA, 22 nt, Human
acuguucaagcaaaugacauug

SEQ ID NO: 206222 - RNA, 22 nt, Human
uuucaaacugcccagcacaccu

SEQ ID NO: 206223 - RNA, 22 nt, Human
cuggaucuaaagguggauguag

SEQ ID NO: 206224 - RNA, 19 nt, Human
uucacauuuuuguggcacu

SEQ ID NO: 206225 - RNA, 22 nt, Human
uaaauguuaugcccaucaucca

SEQ ID NO: 206226 - RNA, 19 nt, Human
ucucuggaugacagacacu

SEQ ID NO: 206227 - RNA, 21 nt, Human
uauacaugugugcauacgugu

SEQ ID NO: 206228 - RNA, 22 nt, Human
augucagauccucagaaagucu

SEQ ID NO: 206229 - RNA, 22 nt, Human
aaacucaagucuaugaacaagg

SEQ ID NO: 206230 - RNA, 22 nt, Human
aauaagauuacugguugucuga

SEQ ID NO: 206231 - RNA, 22 nt, Human
gccugagaaggauaggaagcga

SEQ ID NO: 206232 - RNA, 22 nt, Human
gaagccacagagauuguggggg

SEQ ID NO: 206233 - RNA, 22 nt, Human
aguaaaaucaccaucucuuugu

SEQ ID NO: 206234 - RNA, 22 nt, Human
aaucgcuugguaauuuuaaaag

SEQ ID NO: 206235 - RNA, 22 nt, Human
cuuacagugaucaacacaaaga

SEQ ID NO: 206236 - RNA, 22 nt, Human
auuaauuuccaggcacugugcu

SEQ ID NO: 206237 - RNA, 22 nt, Human
aaggccaggucccugcagugca

SEQ ID NO: 206238 - RNA, 22 nt, Human
ggaaagaaagugugaacaacuu

SEQ ID NO: 206239 - RNA, 22 nt, Human
agucuccacaacagcccugaua

SEQ ID NO: 206240 - RNA, 21 nt, Human
agauggcucccaggucucugg

SEQ ID NO: 206241 - RNA, 22 nt, Human
cuucuucaagagaaugggagac

SEQ ID NO: 206242 - RNA, 22 nt, Human
accagcucuggacaggcauuuc

SEQ ID NO: 206243 - RNA, 21 nt, Human
ucucaggcgagaauucuuuua

SEQ ID NO: 206244 - RNA, 22 nt, Human
aaagccaucugcugguucgcau

SEQ ID NO: 206245 - RNA, 22 nt, Human
augguuuauugcuuuaaugaaa

SEQ ID NO: 206246 - RNA, 22 nt, Human
cugccagggcauccuguggugg

SEQ ID NO: 206247 - RNA, 22 nt, Human
accugggaagaucuuugaagcu

SEQ ID NO: 206248 - RNA, 22 nt, Human
ggcaggaggaagaguuagcacc

SEQ ID NO: 206249 - RNA, 22 nt, Human
aagcaggcgagggccuggagca

SEQ ID NO: 206250 - RNA, 22 nt, Human
aaguagugugcuccagcgguga

SEQ ID NO: 206251 - RNA, 22 nt, Human
uuuuauaaagagagucaguugg

SEQ ID NO: 206252 - RNA, 22 nt, Human
ugucugggagggacagggcuac

SEQ ID NO: 206253 - RNA, 22 nt, Human
aguguucuuguuucuaagcaaa

SEQ ID NO: 206254 - RNA, 22 nt, Human
cucuuuggccagaaaauguuuu

SEQ ID NO: 206255 - RNA, 22 nt, Human
cuucuucagcacaauauugaug

SEQ ID NO: 206256 - RNA, 22 nt, Human
uuucucaaccucaacacuauuu

SEQ ID NO: 206257 - RNA, 22 nt, Human
uuuccagugaauuagucuguuu

SEQ ID NO: 206258 - RNA, 16 nt, Human
acagugucucaagcac

SEQ ID NO: 206259 - RNA, 22 nt, Human
guguccugcacagcaccuugca

SEQ ID NO: 206260 - RNA, 22 nt, Human
ccagggcagccaacccagaugc

SEQ ID NO: 206261 - RNA, 19 nt, Human
cagucccaaauucuuguca

SEQ ID NO: 206262 - RNA, 22 nt, Human
ucacacauucuagguauguuga

SEQ ID NO: 206263 - RNA, 22 nt, Human
gcacccaggccggcgacugcag

SEQ ID NO: 206264 - RNA, 22 nt, Human
caaagcugacgaggucagcauc

SEQ ID NO: 206265 - RNA, 22 nt, Human
augcaauauagggaagauagau

SEQ ID NO: 206266 - RNA, 22 nt, Human
agucugucagucauucuaacaa

SEQ ID NO: 206267 - RNA, 22 nt, Human
uucuggaaagcauuugaggccc

SEQ ID NO: 206268 - RNA, 22 nt, Human
ucuguauauauuaaugaaauuc

SEQ ID NO: 206269 - RNA, 22 nt, Human
caugugugugagggaaacaugu

SEQ ID NO: 206270 - RNA, 21 nt, Human
uucuggguuguuaaucugaac

SEQ ID NO: 206271 - RNA, 22 nt, Human
aucauguguaauuucaagcuac

SEQ ID NO: 206272 - RNA, 22 nt, Human
auugaugagcauuacucucuaa

SEQ ID NO: 206273 - RNA, 22 nt, Human
aacuguuggaggauuauuuugc

SEQ ID NO: 206274 - RNA, 22 nt, Human
gugcacaaucuucauauggcgu

SEQ ID NO: 206275 - RNA, 22 nt, Human
ucugagaauggagcuaaaaauc

SEQ ID NO: 206276 - RNA, 22 nt, Human
cccacacacuggcugcugccaa

SEQ ID NO: 206277 - RNA, 22 nt, Human
uggcaggagacacauggcauag

SEQ ID NO: 206278 - RNA, 22 nt, Human
ucccagcaagaaaggggguggc

SEQ ID NO: 206279 - RNA, 22 nt, Human
cccaggagagggaaccaaaugu

SEQ ID NO: 206280 - RNA, 22 nt, Human
gggcccugggauucagagcaag

SEQ ID NO: 206281 - RNA, 22 nt, Human
gcugcuccgucugagcucuggu

SEQ ID NO: 206282 - RNA, 22 nt, Human
uguacauuuagagcucaauaga

SEQ ID NO: 206283 - RNA, 22 nt, Human
aagaauaagaggauuuagaaca

SEQ ID NO: 206284 - RNA, 22 nt, Human
ccucaggcugucuuccuucugg

SEQ ID NO: 206285 - RNA, 22 nt, Human
uuucuaaggaaaguaccuggga

SEQ ID NO: 206286 - RNA, 22 nt, Human
ugcccagcagggagcuaccugg

SEQ ID NO: 206287 - RNA, 22 nt, Human
aagaugcacaauguggcaauua

SEQ ID NO: 206288 - RNA, 22 nt, Human
gcaaauaauauacuuugaucuc

SEQ ID NO: 206289 - RNA, 22 nt, Human
uuuuauucauagggauggagag

SEQ ID NO: 206290 - RNA, 22 nt, Human
gaaguggggaagcaacaggaga

SEQ ID NO: 206291 - RNA, 22 nt, Human
gcugggucucucccugguccug

SEQ ID NO: 206292 - RNA, 22 nt, Human
gguaggaguauuuugcagcagu

SEQ ID NO: 206293 - RNA, 22 nt, Human
gggaagccaugcucagagguac

SEQ ID NO: 206294 - RNA, 22 nt, Human
uaguccagccuuggguguagcc

SEQ ID NO: 206295 - RNA, 22 nt, Human
gaauacauguuguuucccugga

SEQ ID NO: 206296 - RNA, 20 nt, Human
cugcuugggacacugccaga

SEQ ID NO: 206297 - RNA, 22 nt, Human
gccuggcugagguggggaggca

SEQ ID NO: 206298 - RNA, 22 nt, Human
uuuauauguuuguacaauuaag

SEQ ID NO: 206299 - RNA, 22 nt, Human
ccaggugucuguggccagcccu

SEQ ID NO: 206300 - RNA, 19 nt, Human
acuggcagcuguagucugu

SEQ ID NO: 206301 - RNA, 22 nt, Human
caccagcuccaccagggcaggu

SEQ ID NO: 206302 - RNA, 20 nt, Human
ucccaaaauucuacuuuauc

SEQ ID NO: 206303 - RNA, 22 nt, Human
ccaacaguccagaugagauggu

SEQ ID NO: 206304 - RNA, 22 nt, Human
agcagccuugcaggggucgcac

SEQ ID NO: 206305 - RNA, 22 nt, Human
ugcagggccuucuagaccaugg

SEQ ID NO: 206306 - RNA, 22 nt, Human
ucagagaauucucagaugacuc

SEQ ID NO: 206307 - RNA, 22 nt, Human
caguaaguauucgagucuccau

SEQ ID NO: 206308 - RNA, 22 nt, Human
gaggcuccucauucaguaugcu

SEQ ID NO: 206309 - RNA, 22 nt, Human
agcuccugcccaggaaggcucu

SEQ ID NO: 206310 - RNA, 22 nt, Human
ugucagcauuuaaggaguaagg

SEQ ID NO: 206311 - RNA, 22 nt, Human
cauauauuauggacugcagaau

SEQ ID NO: 206312 - RNA, 22 nt, Human
ucugcaggauggaugcucagaa

SEQ ID NO: 206313 - RNA, 22 nt, Human
ugagacaguaucgccccaaggc

SEQ ID NO: 206314 - RNA, 22 nt, Human
auuuccauuuucagccauuacu

SEQ ID NO: 206315 - RNA, 22 nt, Human
auuuauauuuugggagcuccug

SEQ ID NO: 206316 - RNA, 22 nt, Human
agagccaggcaggcaauguuga

SEQ ID NO: 206317 - RNA, 22 nt, Human
aagaaguuaaauaaauggacca

SEQ ID NO: 206318 - RNA, 22 nt, Human
uguccauggauagagcugcucg

SEQ ID NO: 206319 - RNA, 22 nt, Human
cugcugcccuagacccaguccu

SEQ ID NO: 206320 - RNA, 22 nt, Human
aggcuuccucgugccuuagaua

SEQ ID NO: 206321 - RNA, 22 nt, Human
agacugaaauagugcacaccaa

SEQ ID NO: 206322 - RNA, 22 nt, Human
cucaaauauguggucagaaagc

SEQ ID NO: 206323 - RNA, 22 nt, Human
cccagaaggucgaggcugcagu

SEQ ID NO: 206324 - RNA, 22 nt, Human
uguaaagagaaggcuuauaaag

SEQ ID NO: 206325 - RNA, 19 nt, Human
aaucuagaaauauguguuc

SEQ ID NO: 206326 - RNA, 22 nt, Human
aggcugaugcuggcugaggcug

SEQ ID NO: 206327 - RNA, 22 nt, Human
uccagccuucucaaggcuggcu

SEQ ID NO: 206328 - RNA, 22 nt, Human
agaaaccucacagcaauucuga

SEQ ID NO: 206329 - RNA, 22 nt, Human
guccaguguguuuaucuuggau

SEQ ID NO: 206330 - RNA, 22 nt, Human
cugggcucaaauccuggcccug

SEQ ID NO: 206331 - RNA, 22 nt, Human
acagaugaggaagagucagcca

SEQ ID NO: 206332 - RNA, 22 nt, Human
caugacaaaucagaggggcuug

SEQ ID NO: 206333 - RNA, 22 nt, Human
acugugcaugaaccgaaacaaa

SEQ ID NO: 206334 - RNA, 22 nt, Human
aaaugcuugcaacaucccaggu

SEQ ID NO: 206335 - RNA, 22 nt, Human
uaaauacuuuuacuccacugau

SEQ ID NO: 206336 - RNA, 22 nt, Human
gaaccuuuuuccaaguaaacaa

SEQ ID NO: 206337 - RNA, 22 nt, Human
gggcuccugccuccuggcaccu

SEQ ID NO: 206338 - RNA, 18 nt, Human
agcaugagagaggcugug

SEQ ID NO: 206339 - RNA, 19 nt, Human
gaugcucauucagguggaa

SEQ ID NO: 206340 - RNA, 22 nt, Human
uaauaucuacuucauagaguuu

SEQ ID NO: 206341 - RNA, 22 nt, Human
aaggguugaagauaaauaaggu

SEQ ID NO: 206342 - RNA, 22 nt, Human
agucccuucucaaagugugcgg

SEQ ID NO: 206343 - RNA, 22 nt, Human
gugggugugauaagaccaaggg

SEQ ID NO: 206344 - RNA, 22 nt, Human
uggaaggccuguuguguccuag

SEQ ID NO: 206345 - RNA, 22 nt, Human
agguaugccaauuaggucaagu

SEQ ID NO: 206346 - RNA, 22 nt, Human
agagcacaggguuuugugccgg

SEQ ID NO: 206347 - RNA, 22 nt, Human
ucucuuaggagaaauucauaaa

SEQ ID NO: 206348 - RNA, 22 nt, Human
acugaaagauaaaucaguuagc

SEQ ID NO: 206349 - RNA, 22 nt, Human
ggccuagggaguggccaugccu

SEQ ID NO: 206350 - RNA, 22 nt, Human
gaaagugcuuuugagugugugc

SEQ ID NO: 206351 - RNA, 22 nt, Human
ucaaaauuucagcacuagcccu

SEQ ID NO: 206352 - RNA, 22 nt, Human
auuaaauguuccuuaaauuaua

SEQ ID NO: 206353 - RNA, 19 nt, Human
uucuuacaacacccuggga

SEQ ID NO: 206354 - RNA, 19 nt, Human
uaaguguuggugaauuucu

SEQ ID NO: 206355 - RNA, 22 nt, Human
aagaacaugaagucacaaaugc

SEQ ID NO: 206356 - RNA, 22 nt, Human
agagaugcugacguuuacauuu

SEQ ID NO: 206357 - RNA, 21 nt, Human
acauuacagggugaugugucu

SEQ ID NO: 206358 - RNA, 22 nt, Human
aacacuucucaucacugcaagc

SEQ ID NO: 206359 - RNA, 22 nt, Human
ugccuugcuuuggcggaggcug

SEQ ID NO: 206360 - RNA, 22 nt, Human
gagcccucuucccuagugaucg

SEQ ID NO: 206361 - RNA, 22 nt, Human
auuuacaguuuagcauuucaag

SEQ ID NO: 206362 - RNA, 22 nt, Human
uggcuucuuugugacagcucuu

SEQ ID NO: 206363 - RNA, 22 nt, Human
gcccagguuggagagcaguggc

SEQ ID NO: 206364 - RNA, 20 nt, Human
uacaggagugaguggguggg

SEQ ID NO: 206365 - RNA, 22 nt, Human
ucauagaaauaucacgucuuuu

SEQ ID NO: 206366 - RNA, 22 nt, Human
cugugugugcuacaggcuucca

SEQ ID NO: 206367 - RNA, 22 nt, Human
gacaggcuuugagucccagaac

SEQ ID NO: 206368 - RNA, 22 nt, Human
acuguggcucagggaaugcaug

SEQ ID NO: 206369 - RNA, 22 nt, Human
ucagaacagcucucagauaucc

SEQ ID NO: 206370 - RNA, 22 nt, Human
caaaagaagcucuuggggcuag

SEQ ID NO: 206371 - RNA, 22 nt, Human
ugaaauaacuuuugggugaguu

SEQ ID NO: 206372 - RNA, 22 nt, Human
uauugcauaaaaucagguuaga

SEQ ID NO: 206373 - RNA, 22 nt, Human
aggugcaucucguagcucuucu

SEQ ID NO: 206374 - RNA, 22 nt, Human
guguuuacagauaaagugagcu

SEQ ID NO: 206375 - RNA, 22 nt, Human
uggcuggcugucaguaggcugu

SEQ ID NO: 206376 - RNA, 22 nt, Human
gcugcccugugguccagcaggu

SEQ ID NO: 206377 - RNA, 22 nt, Human
cagggcaguaacgggaacaucu

SEQ ID NO: 206378 - RNA, 22 nt, Human
auaguacagcauuuuuccugag

SEQ ID NO: 206379 - RNA, 22 nt, Human
acacagcuagugaguggcagag

SEQ ID NO: 206380 - RNA, 22 nt, Human
aguccaggaaaauaagcuaggu

SEQ ID NO: 206381 - RNA, 22 nt, Human
uccagccccuccugagccaagc

SEQ ID NO: 206382 - RNA, 22 nt, Human
gugauaacucaggcagagaaua

SEQ ID NO: 206383 - RNA, 22 nt, Human
agcuagaauauugaucugaaau

SEQ ID NO: 206384 - RNA, 22 nt, Human
uccagaggcucugagggagagu

SEQ ID NO: 206385 - RNA, 22 nt, Human
aggcaggucuguaucuagucuc

SEQ ID NO: 206386 - RNA, 20 nt, Human
ucagagcugcaggagagaaa

SEQ ID NO: 206387 - RNA, 22 nt, Human
auuggaaaugcuacaaguuaga

SEQ ID NO: 206388 - RNA, 22 nt, Human
guugaguggguuaggaugcuga

SEQ ID NO: 206389 - RNA, 22 nt, Human
accugcaagcauuacacuucua

SEQ ID NO: 206390 - RNA, 22 nt, Human
cugggugaguauaggaaaggga

SEQ ID NO: 206391 - RNA, 22 nt, Human
ccagcuggcccagcugugcucc

SEQ ID NO: 206392 - RNA, 22 nt, Human
ucauugaagugacugaaagauu

SEQ ID NO: 206393 - RNA, 20 nt, Human
auacacauauucuugcaacu

SEQ ID NO: 206394 - RNA, 22 nt, Human
cucccucccuacgugagcucac

SEQ ID NO: 206395 - RNA, 22 nt, Human
aagacauuggcauugacuguaa

SEQ ID NO: 206396 - RNA, 22 nt, Human
accccagguccagguuacagag

SEQ ID NO: 206397 - RNA, 22 nt, Human
aggagaggcucuaacucugugu

SEQ ID NO: 206398 - RNA, 22 nt, Human
agaggcugaaugaugucaucau

SEQ ID NO: 206399 - RNA, 22 nt, Human
acucaggcuucaggcacagcug

SEQ ID NO: 206400 - RNA, 22 nt, Human
uggaggcauuugauguucauaa

SEQ ID NO: 206401 - RNA, 22 nt, Human
gaaagcacaguucaugagacaa

SEQ ID NO: 206402 - RNA, 22 nt, Human
auguacaagcuguuuuacugca

SEQ ID NO: 206403 - RNA, 22 nt, Human
ugcagggaauccagucuagggu

SEQ ID NO: 206404 - RNA, 19 nt, Human
uggagcagggcccuuguuu

SEQ ID NO: 206405 - RNA, 22 nt, Human
ccuagaacacaaccuauauuag

SEQ ID NO: 206406 - RNA, 22 nt, Human
acaguuuauguaaagcugccaa

SEQ ID NO: 206407 - RNA, 22 nt, Human
gagugcuugcauauuuauuguc

SEQ ID NO: 206408 - RNA, 22 nt, Human
uauaugcagauuuucaucaucg

SEQ ID NO: 206409 - RNA, 22 nt, Human
gggcagcugccagaggccaugg

SEQ ID NO: 206410 - RNA, 22 nt, Human
ggguccaggcguggcccagaug

SEQ ID NO: 206411 - RNA, 22 nt, Human
aagugauuugcaugcuuaauuc

SEQ ID NO: 206412 - RNA, 22 nt, Human
agagccuggcucccagcuaccg

SEQ ID NO: 206413 - RNA, 22 nt, Human
cuuauucaaugcuggaaauguu

SEQ ID NO: 206414 - RNA, 23 nt, Human
auugccagacggccccugcucgc

SEQ ID NO: 206415 - RNA, 22 nt, Human
agccaugucacauauggucauc

SEQ ID NO: 206416 - RNA, 22 nt, Human
ggcugcccucggggucgcaggc

SEQ ID NO: 206417 - RNA, 22 nt, Human
ccugcagaggucaggccagaaa

SEQ ID NO: 206418 - RNA, 22 nt, Human
uaacacaugguucugucaggaa

SEQ ID NO: 206419 - RNA, 22 nt, Human
gaaaggcuugcuuuugcucggu

SEQ ID NO: 206420 - RNA, 20 nt, Human
agggccuguugcaagcguuu

SEQ ID NO: 206421 - RNA, 22 nt, Human
cuuaaauucuuaaugcccucau

SEQ ID NO: 206422 - RNA, 22 nt, Human
aaauuaguacauugcaaagucc

SEQ ID NO: 206423 - RNA, 22 nt, Human
gaaagugccagaauaggaggcc

SEQ ID NO: 206424 - RNA, 22 nt, Human
uuuggcaagugggaaauuagua

SEQ ID NO: 206425 - RNA, 22 nt, Human
gaggaaaaugcaacaggaaugc

SEQ ID NO: 206426 - RNA, 22 nt, Human
gaaggcuuuuuggguaauugua

SEQ ID NO: 206427 - RNA, 21 nt, Human
agacuguggauuuugacaugu

SEQ ID NO: 206428 - RNA, 22 nt, Human
gccagagcugagugagguucuu

SEQ ID NO: 206429 - RNA, 22 nt, Human
acaugauuuuaguaucauaaua

SEQ ID NO: 206430 - RNA, 22 nt, Human
ucuuuucugccacagccugagc

SEQ ID NO: 206431 - RNA, 22 nt, Human
gaggcaggcacuguuaucagca

SEQ ID NO: 206432 - RNA, 22 nt, Human
gugugccaggaacuggcugcug

SEQ ID NO: 206433 - RNA, 22 nt, Human
uguagaaauuaguaagaucaac

SEQ ID NO: 206434 - RNA, 22 nt, Human
gcugagggaggcugaacugagu

SEQ ID NO: 206435 - RNA, 22 nt, Human
uccuaggccuggccugguggau

SEQ ID NO: 206436 - RNA, 22 nt, Human
aagcugaggauacaugaagccu

SEQ ID NO: 206437 - RNA, 16 nt, Human
uucagagcggcucaua

SEQ ID NO: 206438 - RNA, 22 nt, Human
aacagugauaucaagacagaca

SEQ ID NO: 206439 - RNA, 22 nt, Human
aucuuagagagucguguuuugu

SEQ ID NO: 206440 - RNA, 22 nt, Human
ggccuuugcguccacgccgcuu

SEQ ID NO: 206441 - RNA, 22 nt, Human
agguucaaaugcaagagaugcu

SEQ ID NO: 206442 - RNA, 22 nt, Human
ccuccaguacuccaguccagcg

SEQ ID NO: 206443 - RNA, 22 nt, Human
gaauacaagccugccaccugga

SEQ ID NO: 206444 - RNA, 22 nt, Human
ggcugcaggcagaggcugucug

SEQ ID NO: 206445 - RNA, 22 nt, Human
cagcagagaaauuaaacuucug

SEQ ID NO: 206446 - RNA, 22 nt, Human
uugcaaaugugaguuuagacug

SEQ ID NO: 206447 - RNA, 22 nt, Human
gcagagccccucaagccagccu

SEQ ID NO: 206448 - RNA, 22 nt, Human
uuugaaagaaaccagugaguga

SEQ ID NO: 206449 - RNA, 22 nt, Human
auuaaauacugcaggcuaagca

SEQ ID NO: 206450 - RNA, 21 nt, Human
ccagaagcugcuugcaggcua

SEQ ID NO: 206451 - RNA, 22 nt, Human
gcuuucuguagguaguuacugu

SEQ ID NO: 206452 - RNA, 23 nt, Human
aaucuagaaugaccuacucaucu

SEQ ID NO: 206453 - RNA, 22 nt, Human
cagcgcaggcgugugaaggcgc

SEQ ID NO: 206454 - RNA, 22 nt, Human
cggcuucucgggucggauuccg

SEQ ID NO: 206455 - RNA, 16 nt, Human
cccaaggagcuccagg

SEQ ID NO: 206456 - RNA, 20 nt, Human
cuggacuugcugcucaccug

SEQ ID NO: 206457 - RNA, 22 nt, Human
ugcugggcucaaccuccagagc

SEQ ID NO: 206458 - RNA, 22 nt, Human
ugcucaggucguucugccccuu

SEQ ID NO: 206459 - RNA, 22 nt, Human
uuuuagcacuaagugauaugcu

SEQ ID NO: 206460 - RNA, 22 nt, Human
uuuggacuuagccugcagaauu

SEQ ID NO: 206461 - RNA, 22 nt, Human
ucacagaacacaaaugccacuu

SEQ ID NO: 206462 - RNA, 19 nt, Human
ggccccucucacaggaguu

SEQ ID NO: 206463 - RNA, 22 nt, Human
caagagcugaggcuggagaggu

SEQ ID NO: 206464 - RNA, 22 nt, Human
gagccagguuggaggcugcagu

SEQ ID NO: 206465 - RNA, 22 nt, Human
aaagugauuuaaguaccucagg

SEQ ID NO: 206466 - RNA, 23 nt, Human
ucuauacauacugcagccucugg

SEQ ID NO: 206467 - RNA, 22 nt, Human
acauacauauguuuaaaugcau

SEQ ID NO: 206468 - RNA, 22 nt, Human
auggaguucuuuaaauucacag

SEQ ID NO: 206469 - RNA, 22 nt, Human
gccugggagggcagcagugugg

SEQ ID NO: 206470 - RNA, 22 nt, Human
uuagccuuagaagcuuagcaaa

SEQ ID NO: 206471 - RNA, 22 nt, Human
auucagcaguuccugcuucagu

SEQ ID NO: 206472 - RNA, 22 nt, Human
gcagagcugggauuuguacugg

SEQ ID NO: 206473 - RNA, 22 nt, Human
aagacagagggaagcaaugaug

SEQ ID NO: 206474 - RNA, 22 nt, Human
cacaucuacugauauuccagga

SEQ ID NO: 206475 - RNA, 22 nt, Human
cuggagggcuggacuaaggaaa

SEQ ID NO: 206476 - RNA, 22 nt, Human
ugagcccuaagggucaagcagg

SEQ ID NO: 206477 - RNA, 22 nt, Human
gcuccaggcugcucugucccau

SEQ ID NO: 206478 - RNA, 22 nt, Human
cuuccuggcucggugccucacc

SEQ ID NO: 206479 - RNA, 22 nt, Human
cuggcugguuuuuaaagcuagg

SEQ ID NO: 206480 - RNA, 22 nt, Human
acugaaaaagacaucuugguaa

SEQ ID NO: 206481 - RNA, 22 nt, Human
cagucagaaggaagaugcuuaa

SEQ ID NO: 206482 - RNA, 22 nt, Human
cagagcucagagcugccaggca

SEQ ID NO: 206483 - RNA, 21 nt, Human
caggccccaggccuggggugc

SEQ ID NO: 206484 - RNA, 22 nt, Human
ugaacuuuuauuugaugacagg

SEQ ID NO: 206485 - RNA, 22 nt, Human
caaaugcauagaaagaugaaac

SEQ ID NO: 206486 - RNA, 22 nt, Human
ucagagcuucaccuguuacauu

SEQ ID NO: 206487 - RNA, 22 nt, Human
uuuguuuagaugguaaaucagu

SEQ ID NO: 206488 - RNA, 22 nt, Human
cuggcaugcuaauacagccugu

SEQ ID NO: 206489 - RNA, 22 nt, Human
ucccacaccugucuauuccuag

SEQ ID NO: 206490 - RNA, 22 nt, Human
aggaggacucucugagccagcc

SEQ ID NO: 206491 - RNA, 22 nt, Human
ucugucuucaucagcaugugau

SEQ ID NO: 206492 - RNA, 19 nt, Human
gcaucagagcagaaggggu

SEQ ID NO: 206493 - RNA, 22 nt, Human
acacauguuuacagucuucagu

SEQ ID NO: 206494 - RNA, 22 nt, Human
agaaucuuguuucuuguguguu

SEQ ID NO: 206495 - RNA, 20 nt, Human
ggccucugaggacaaggaga

SEQ ID NO: 206496 - RNA, 22 nt, Human
gcugaggccaguuuaaugagga

SEQ ID NO: 206497 - RNA, 22 nt, Human
guuauugacauguauuaagcac

SEQ ID NO: 206498 - RNA, 22 nt, Human
ccuccagcgcgauccacuccgg

SEQ ID NO: 206499 - RNA, 22 nt, Human
auuccugguggcagaaacauga

SEQ ID NO: 206500 - RNA, 22 nt, Human
gagucagaauguccuccugcgg

SEQ ID NO: 206501 - RNA, 22 nt, Human
uuagaacaccauucuauauuac

SEQ ID NO: 206502 - RNA, 22 nt, Human
uccagccaacugccuagggagc

SEQ ID NO: 206503 - RNA, 22 nt, Human
gaugauucuguguuuggaaugc

SEQ ID NO: 206504 - RNA, 22 nt, Human
caugucugaguagagugugauu

SEQ ID NO: 206505 - RNA, 20 nt, Human
uaguccaguaggggggcuuu

SEQ ID NO: 206506 - RNA, 22 nt, Human
gagagggccagggugagaacua

SEQ ID NO: 206507 - RNA, 22 nt, Human
gagcuggcacagaaggaucuua

SEQ ID NO: 206508 - RNA, 22 nt, Human
guauuuuucauuccaagugaga

SEQ ID NO: 206509 - RNA, 22 nt, Human
ucugagggacaauuuugauggu

SEQ ID NO: 206510 - RNA, 22 nt, Human
uucagccuguucaugcuguugc

SEQ ID NO: 206511 - RNA, 22 nt, Human
cugguacaaaaugcugauauca

SEQ ID NO: 206512 - RNA, 22 nt, Human
gaaacauuguguucuacagauu

SEQ ID NO: 206513 - RNA, 22 nt, Human
cuuugaaagcucccaggacuua

SEQ ID NO: 206514 - RNA, 22 nt, Human
gugaggcagaaguucccuuuua

SEQ ID NO: 206515 - RNA, 15 nt, Human
caggagaggaagguu

SEQ ID NO: 206516 - RNA, 22 nt, Human
ucagggcugacugcuacucucc

SEQ ID NO: 206517 - RNA, 22 nt, Human
uccuuugguucucuaagaugcu

SEQ ID NO: 206518 - RNA, 22 nt, Human
aucaggaaugaauacuuuugga

SEQ ID NO: 206519 - RNA, 22 nt, Human
ugcagaggcgccgugggugggg

SEQ ID NO: 206520 - RNA, 22 nt, Human
uagguuuaggagugaaggugaa

SEQ ID NO: 206521 - RNA, 22 nt, Human
auuuacagacguggauuagugc

SEQ ID NO: 206522 - RNA, 22 nt, Human
uuguacaaauaggaaccucuga

SEQ ID NO: 206523 - RNA, 22 nt, Human
uugcaaaucagaaguauagauu

SEQ ID NO: 206524 - RNA, 19 nt, Human
gcuggccacgccccaguug

SEQ ID NO: 206525 - RNA, 21 nt, Human
cagaggcagguccugggacgg

SEQ ID NO: 206526 - RNA, 22 nt, Human
guucccaggcccugggcucucc

SEQ ID NO: 206527 - RNA, 22 nt, Human
cuccaggaguggccuggacacc

SEQ ID NO: 206528 - RNA, 22 nt, Human
cuccauggcuuucgcaucugca

SEQ ID NO: 206529 - RNA, 22 nt, Human
caguggaagacucagcucuccc

SEQ ID NO: 206530 - RNA, 22 nt, Human
cuccugguucagagagcugaga

SEQ ID NO: 206531 - RNA, 22 nt, Human
cugaauuacugaaggucaacuu

SEQ ID NO: 206532 - RNA, 22 nt, Human
cuugaaugguaugagaguaauu

SEQ ID NO: 206533 - RNA, 22 nt, Human
caguuaacugagcucugugaga

SEQ ID NO: 206534 - RNA, 22 nt, Human
gagcccugauuugcagcauuug

SEQ ID NO: 206535 - RNA, 22 nt, Human
cuccuggcacugucuugaccca

SEQ ID NO: 206536 - RNA, 22 nt, Human
acagccuguuugaucuggugcu

SEQ ID NO: 206537 - RNA, 22 nt, Human
cugucagggggccuggccauca

SEQ ID NO: 206538 - RNA, 22 nt, Human
augcaacaaaugcuacgaaucg

SEQ ID NO: 206539 - RNA, 22 nt, Human
uuggauguuugaaaucacguac

SEQ ID NO: 206540 - RNA, 22 nt, Human
ggcccagcacagugcuuggggg

SEQ ID NO: 206541 - RNA, 22 nt, Human
uccuugagauuaauuaaucacc

SEQ ID NO: 206542 - RNA, 22 nt, Human
agcucugacauugauucucagc

SEQ ID NO: 206543 - RNA, 22 nt, Human
cuggugagacgguugacaggag

SEQ ID NO: 206544 - RNA, 22 nt, Human
uacaagcucacaaauuuuuaag

SEQ ID NO: 206545 - RNA, 22 nt, Human
aucagagccuuaugcuucucau

SEQ ID NO: 206546 - RNA, 22 nt, Human
uacauucagaagaauggacacg

SEQ ID NO: 206547 - RNA, 22 nt, Human
agcagccauagauagcaugcaa

SEQ ID NO: 206548 - RNA, 22 nt, Human
uccaggcccugggaugggagca

SEQ ID NO: 206549 - RNA, 22 nt, Human
aguguccucuauuaugacuuua

SEQ ID NO: 206550 - RNA, 22 nt, Human
uacauguacauugggcauuaau

SEQ ID NO: 206551 - RNA, 22 nt, Human
aguggcagcugucaugcccuag

SEQ ID NO: 206552 - RNA, 22 nt, Human
acagguggccccgagggagugg

SEQ ID NO: 206553 - RNA, 22 nt, Human
acagucuacuugagcuuguaua

SEQ ID NO: 206554 - RNA, 22 nt, Human
gaggcaagaaaggacuuucuag

SEQ ID NO: 206555 - RNA, 22 nt, Human
ugggguccagugccaccccaag

SEQ ID NO: 206556 - RNA, 22 nt, Human
aucuaagacaaugagugagacu

SEQ ID NO: 206557 - RNA, 22 nt, Human
gcugguucaccuggcuccuccc

SEQ ID NO: 206558 - RNA, 22 nt, Human
gucugcccucacgccagcuggg

SEQ ID NO: 206559 - RNA, 22 nt, Human
cuggcucaauuuguacugcugu

SEQ ID NO: 206560 - RNA, 22 nt, Human
gugcugaggauacagcugugaa

SEQ ID NO: 206561 - RNA, 22 nt, Human
cugggcagccucacacaauguu

SEQ ID NO: 206562 - RNA, 22 nt, Human
ucagaggguggcugggagcauc

SEQ ID NO: 206563 - RNA, 22 nt, Human
aaggcugacucaacagggggcc

SEQ ID NO: 206564 - RNA, 21 nt, Human
aggcucagcagguguauaaag

SEQ ID NO: 206565 - RNA, 22 nt, Human
guauacauagaugaugaacaag

SEQ ID NO: 206566 - RNA, 22 nt, Human
gaggcuguaacuugggcacugg

SEQ ID NO: 206567 - RNA, 22 nt, Human
guuuacauugcuguuugugucu

SEQ ID NO: 206568 - RNA, 22 nt, Human
uuuuagugccugauuaaugggu

SEQ ID NO: 206569 - RNA, 22 nt, Human
cuguaucuguguuggaugaguu

SEQ ID NO: 206570 - RNA, 22 nt, Human
aagagccaggacagauccagcu

SEQ ID NO: 206571 - RNA, 22 nt, Human
aagauuuucagugccuaaaaca

SEQ ID NO: 206572 - RNA, 22 nt, Human
ccuggcagcuccuccccggcgg

SEQ ID NO: 206573 - RNA, 22 nt, Human
cagaggguugucaggcgccuug

SEQ ID NO: 206574 - RNA, 22 nt, Human
cuggauccaacagaguuggguu

SEQ ID NO: 206575 - RNA, 20 nt, Human
gcauuagaguacuauaugcu

SEQ ID NO: 206576 - RNA, 22 nt, Human
auauacguauauuccaaagggu

SEQ ID NO: 206577 - RNA, 22 nt, Human
uucuccagaccuugugacuaug

SEQ ID NO: 206578 - RNA, 23 nt, Human
agaugaaagcuucccaucacagu

SEQ ID NO: 206579 - RNA, 22 nt, Human
gauccucuuuuccuaggaaggu

SEQ ID NO: 206580 - RNA, 22 nt, Human
cccaggcacucuuggucauuuu

SEQ ID NO: 206581 - RNA, 22 nt, Human
gcccagcagaucucagugucuc

SEQ ID NO: 206582 - RNA, 22 nt, Human
caggcccugaggauucggcggg

SEQ ID NO: 206583 - RNA, 22 nt, Human
aggcucaguucuguggugagcc

SEQ ID NO: 206584 - RNA, 22 nt, Human
uaaaugucaaugugauuuauaa

SEQ ID NO: 206585 - RNA, 22 nt, Human
ccugccaggcuuucagguuugg

SEQ ID NO: 206586 - RNA, 22 nt, Human
gagcugugauuggugucucacu

SEQ ID NO: 206587 - RNA, 22 nt, Human
agucacacacugucaguucugc

SEQ ID NO: 206588 - RNA, 22 nt, Human
aggcugcccugccgccaguggg

SEQ ID NO: 206589 - RNA, 22 nt, Human
uucucagaggagucgggagcug

SEQ ID NO: 206590 - RNA, 22 nt, Human
ggccugaggccaccagcagccc

SEQ ID NO: 206591 - RNA, 22 nt, Human
uuccaggaagcaguuagcagcc

SEQ ID NO: 206592 - RNA, 22 nt, Human
auguccaauuucagagucucau

SEQ ID NO: 206593 - RNA, 22 nt, Human
caaauuuaaguuagaaagcaau

SEQ ID NO: 206594 - RNA, 22 nt, Human
cccaugcugaguggccugagau

SEQ ID NO: 206595 - RNA, 18 nt, Human
agaggaugcaucuaagag

SEQ ID NO: 206596 - RNA, 22 nt, Human
uaauuuuguauugccauuguag

SEQ ID NO: 206597 - RNA, 22 nt, Human
ucagcauguucuuaggucacag

SEQ ID NO: 206598 - RNA, 22 nt, Human
uucaggugucaaggauaggcug

SEQ ID NO: 206599 - RNA, 22 nt, Human
aggccagcucuacccuuggacu

SEQ ID NO: 206600 - RNA, 22 nt, Human
uucuuugggauuguagcugucu

SEQ ID NO: 206601 - RNA, 22 nt, Human
cggccaggcacaguggcccacg

SEQ ID NO: 206602 - RNA, 22 nt, Human
ucacuggggagcacugacaugu

SEQ ID NO: 206603 - RNA, 15 nt, Human
auacacaugagggag

SEQ ID NO: 206604 - RNA, 19 nt, Human
auacuaggucaugauaauc

SEQ ID NO: 206605 - RNA, 22 nt, Human
ggguccuggaaucugcauuuua

SEQ ID NO: 206606 - RNA, 22 nt, Human
gcaauacaguagguuuauuggu

SEQ ID NO: 206607 - RNA, 22 nt, Human
auuacaguggguaaacagaauu

SEQ ID NO: 206608 - RNA, 22 nt, Human
ugcauaaagugccauaguauua

SEQ ID NO: 206609 - RNA, 22 nt, Human
uggaaagguaggauuucaagac

SEQ ID NO: 206610 - RNA, 22 nt, Human
uugguacaugcagauauuuagu

SEQ ID NO: 206611 - RNA, 22 nt, Human
ugugcugggagauagagggagg

SEQ ID NO: 206612 - RNA, 22 nt, Human
gggauaggagauugggaguguu

SEQ ID NO: 206613 - RNA, 22 nt, Human
ugcaauaacuacuuuaauguug

SEQ ID NO: 206614 - RNA, 22 nt, Human
gguuuaaaagccaugcaugggg

SEQ ID NO: 206615 - RNA, 22 nt, Human
agguggcaaggggcgccucucu

SEQ ID NO: 206616 - RNA, 22 nt, Human
cuggugguucaggagaauggcu

SEQ ID NO: 206617 - RNA, 22 nt, Human
acuccugggugcugaccagcgu

SEQ ID NO: 206618 - RNA, 22 nt, Human
uucucacaguaccuaacaugua

SEQ ID NO: 206619 - RNA, 22 nt, Human
uuguuacuugcauguagacuaa

SEQ ID NO: 206620 - RNA, 22 nt, Human
ucagcaggcccauccuccaggc

SEQ ID NO: 206621 - RNA, 22 nt, Human
uccugggcuucacagacucugu

SEQ ID NO: 206622 - RNA, 22 nt, Human
aggcuggaugugccucaccgag

SEQ ID NO: 206623 - RNA, 22 nt, Human
ucagcaggugcuuuguuuacuc

SEQ ID NO: 206624 - RNA, 22 nt, Human
ccucagagacaguaacuggaau

SEQ ID NO: 206625 - RNA, 22 nt, Human
ucagagguaaaaacucacugua

SEQ ID NO: 206626 - RNA, 22 nt, Human
aagacacuaagcuuucaggaua

SEQ ID NO: 206627 - RNA, 22 nt, Human
gaagauaauuccuacuuauaac

SEQ ID NO: 206628 - RNA, 22 nt, Human
aaggagcugggagggacacaug

SEQ ID NO: 206629 - RNA, 22 nt, Human
cagccaggcccccgagucguug

SEQ ID NO: 206630 - RNA, 22 nt, Human
auccuggacaguuuccccuauu

SEQ ID NO: 206631 - RNA, 22 nt, Human
cagccaagaaagcagugcucca

SEQ ID NO: 206632 - RNA, 23 nt, Human
cuccuugguaugccaugcccagc

SEQ ID NO: 206633 - RNA, 22 nt, Human
gccagcagggcggagccaucua

SEQ ID NO: 206634 - RNA, 22 nt, Human
gcuggcucaagugugcuuccca

SEQ ID NO: 206635 - RNA, 22 nt, Human
caugccauuucuucucuuuaug

SEQ ID NO: 206636 - RNA, 22 nt, Human
ggccuuccuucccagccuacug

SEQ ID NO: 206637 - RNA, 22 nt, Human
ggggugggagugccauccuuga

SEQ ID NO: 206638 - RNA, 22 nt, Human
ggcucuucuguggcagccaagg

SEQ ID NO: 206639 - RNA, 22 nt, Human
aguguccucaucuguaaaauga

SEQ ID NO: 206640 - RNA, 22 nt, Human
ucuuuucuucuuaaugguuaau

SEQ ID NO: 206641 - RNA, 22 nt, Human
uccuggcucuaaguccugagug

SEQ ID NO: 206642 - RNA, 22 nt, Human
uugcagagccaugaggcuggcu

SEQ ID NO: 206643 - RNA, 22 nt, Human
gcauggcuuacagaggcugcag

SEQ ID NO: 206644 - RNA, 22 nt, Human
ugaauagauuuuuaacauauaa

SEQ ID NO: 206645 - RNA, 22 nt, Human
cugccugcugccuguggagggu

SEQ ID NO: 206646 - RNA, 22 nt, Human
aagcacugggaggaggcugaga

SEQ ID NO: 206647 - RNA, 20 nt, Human
ucucuguaaaucuucuuuua

SEQ ID NO: 206648 - RNA, 22 nt, Human
gccucagacacugccugggugu

SEQ ID NO: 206649 - RNA, 22 nt, Human
gaggucuggaccaagucgcccc

SEQ ID NO: 206650 - RNA, 22 nt, Human
ggguuccuccaguuccuagagc

SEQ ID NO: 206651 - RNA, 22 nt, Human
uacauuccacaagcauugcuuu

SEQ ID NO: 206652 - RNA, 22 nt, Human
uucuccccugacccugaugagg

SEQ ID NO: 206653 - RNA, 22 nt, Human
cauuacauuucaaaauguuucc

SEQ ID NO: 206654 - RNA, 21 nt, Human
ggcuugucaccauagcuacug

SEQ ID NO: 206655 - RNA, 22 nt, Human
aaaugcugaguguuuagagauc

SEQ ID NO: 206656 - RNA, 22 nt, Human
guaggcagggcuguggggagaa

SEQ ID NO: 206657 - RNA, 22 nt, Human
cucuguggcuacacaaaccucc

SEQ ID NO: 206658 - RNA, 22 nt, Human
caggcauaaucucaucuuguuu

SEQ ID NO: 206659 - RNA, 22 nt, Human
ugugugcuaauguaugcucuaa

SEQ ID NO: 206660 - RNA, 22 nt, Human
agcagacaccaggaguaaagaa

SEQ ID NO: 206661 - RNA, 22 nt, Human
auuuccuagccucucuugcagu

SEQ ID NO: 206662 - RNA, 22 nt, Human
ucuauugcagauggaugcccuc

SEQ ID NO: 206663 - RNA, 22 nt, Human
gcugccuucuucugacucuauu

SEQ ID NO: 206664 - RNA, 22 nt, Human
gcauccaggacuauaugaugau

SEQ ID NO: 206665 - RNA, 20 nt, Human
cagcugccuggcucugggau

SEQ ID NO: 206666 - RNA, 22 nt, Human
aaauaauugaguuggucaauau

SEQ ID NO: 206667 - RNA, 22 nt, Human
agcuuucguuccuuagacacau

SEQ ID NO: 206668 - RNA, 22 nt, Human
ugacaggugauugugaacuaag

SEQ ID NO: 206669 - RNA, 22 nt, Human
cagaguggagaaagcauuuagu

SEQ ID NO: 206670 - RNA, 22 nt, Human
ccaggccuagccccugagggua

SEQ ID NO: 206671 - RNA, 22 nt, Human
acaguuaauaugugacagaacu

SEQ ID NO: 206672 - RNA, 22 nt, Human
uagucagucuuacauauuugaa

SEQ ID NO: 206673 - RNA, 22 nt, Human
cccuggcaaaaucccugguaca

SEQ ID NO: 206674 - RNA, 22 nt, Human
ugucaacaccaaagccucccag

SEQ ID NO: 206675 - RNA, 22 nt, Human
aaauguaccuugauaguuuggu

SEQ ID NO: 206676 - RNA, 21 nt, Human
aggagccagccugucagucua

SEQ ID NO: 206677 - RNA, 22 nt, Human
aggguggcaccuggaagggaug

SEQ ID NO: 206678 - RNA, 22 nt, Human
ccugagagugagugccaccuua

SEQ ID NO: 206679 - RNA, 20 nt, Human
acaaaguauugaggacaagu

SEQ ID NO: 206680 - RNA, 22 nt, Human
ugucuuuagaccucucuggccu

SEQ ID NO: 206681 - RNA, 22 nt, Human
uguacaaauucaguucuagggu

SEQ ID NO: 206682 - RNA, 22 nt, Human
aagccuuuuccaccuaauagag

SEQ ID NO: 206683 - RNA, 22 nt, Human
gcagcaggcauggccgcccugg

SEQ ID NO: 206684 - RNA, 22 nt, Human
aaaaagacuuccaacucaggag

SEQ ID NO: 206685 - RNA, 19 nt, Human
cuggugaggguuauugaua

SEQ ID NO: 206686 - RNA, 22 nt, Human
agucagacauaauucuaacauu

SEQ ID NO: 206687 - RNA, 22 nt, Human
ucaacuaaggcacaaucucuaa

SEQ ID NO: 206688 - RNA, 17 nt, Human
ugaggcaaccaucacua

SEQ ID NO: 206689 - RNA, 22 nt, Human
ccuguucacugcacaguuuccg

SEQ ID NO: 206690 - RNA, 22 nt, Human
agaaucauuagagagaaaacuu

SEQ ID NO: 206691 - RNA, 22 nt, Human
agcagcaggcuagggaacugcu

SEQ ID NO: 206692 - RNA, 22 nt, Human
uucggcauauuaauggugggug

SEQ ID NO: 206693 - RNA, 22 nt, Human
ccugugaggucaucugugguaa

SEQ ID NO: 206694 - RNA, 22 nt, Human
uugcaaaguucccuacacaugu

SEQ ID NO: 206695 - RNA, 22 nt, Human
cuggaaauuggagaugauguuu

SEQ ID NO: 206696 - RNA, 20 nt, Human
uguuaaaggacacuugcuuu

SEQ ID NO: 206697 - RNA, 22 nt, Human
caggcaagcacggugaaccugg

SEQ ID NO: 206698 - RNA, 22 nt, Human
cuucuuaaagauuacacaauga

SEQ ID NO: 206699 - RNA, 22 nt, Human
cagaggaggccaccgcauaggc

SEQ ID NO: 206700 - RNA, 22 nt, Human
cccagcagccuggauguucuuu

SEQ ID NO: 206701 - RNA, 22 nt, Human
gcugagcacaccuaggguagag

SEQ ID NO: 206702 - RNA, 19 nt, Human
ggcugucuacgaaccaguc

SEQ ID NO: 206703 - RNA, 22 nt, Human
caggcuggagugcagugucgcc

SEQ ID NO: 206704 - RNA, 22 nt, Human
uagaaucugaaaguggcuguga

SEQ ID NO: 206705 - RNA, 22 nt, Human
gcagcuccuucaaucucaccau

SEQ ID NO: 206706 - RNA, 19 nt, Human
uaggaauguagaauccuag

SEQ ID NO: 206707 - RNA, 22 nt, Human
ccaguucuuucugugugcaaca

SEQ ID NO: 206708 - RNA, 22 nt, Human
ucagcagggcugugguguggcu

SEQ ID NO: 206709 - RNA, 22 nt, Human
cccaggcuagaaaggccaacaa

SEQ ID NO: 206710 - RNA, 15 nt, Human
uccaggcauucauuc

SEQ ID NO: 206711 - RNA, 20 nt, Human
ugccuggccuuucucugccc

SEQ ID NO: 206712 - RNA, 22 nt, Human
uacugugcaaaaaugaauauug

SEQ ID NO: 206713 - RNA, 22 nt, Human
agggccagcugaugagaaugag

SEQ ID NO: 206714 - RNA, 22 nt, Human
uaagcacuuuauaugcuuuauc

SEQ ID NO: 206715 - RNA, 22 nt, Human
uauuuucaccauguaucccugu

SEQ ID NO: 206716 - RNA, 22 nt, Human
uugggacauguaagcuggaagu

SEQ ID NO: 206717 - RNA, 22 nt, Human
uaaagacaaacccacuaggguu

SEQ ID NO: 206718 - RNA, 22 nt, Human
uggaaacuaacaacagagcaga

SEQ ID NO: 206719 - RNA, 22 nt, Human
cccugccuuguuggagccuaug

SEQ ID NO: 206720 - RNA, 22 nt, Human
ucucugagggagauggccugcc

SEQ ID NO: 206721 - RNA, 22 nt, Human
aguuuaugucuuuacuucagcu

SEQ ID NO: 206722 - RNA, 22 nt, Human
acaaggacgucacuuccacggu

SEQ ID NO: 206723 - RNA, 21 nt, Human
cacugguagauggcccgcagg

SEQ ID NO: 206724 - RNA, 22 nt, Human
uuuguucuaacuucugcagaca

SEQ ID NO: 206725 - RNA, 22 nt, Human
auuucuguggcuucauucuccu

SEQ ID NO: 206726 - RNA, 22 nt, Human
acuguaaaaugagauauguaua

SEQ ID NO: 206727 - RNA, 22 nt, Human
aagcugugaagagcaagugagg

SEQ ID NO: 206728 - RNA, 22 nt, Human
cugggcaauaugcugggccugg

SEQ ID NO: 206729 - RNA, 19 nt, Human
ccaguccucuuugggccug

SEQ ID NO: 206730 - RNA, 22 nt, Human
aggucagaugggagaugggaug

SEQ ID NO: 206731 - RNA, 22 nt, Human
gucaccucucaucacaugcuac

SEQ ID NO: 206732 - RNA, 22 nt, Human
uagacacuguaugagcugggug

SEQ ID NO: 206733 - RNA, 22 nt, Human
guacacauagguuacugauuaa

SEQ ID NO: 206734 - RNA, 22 nt, Human
ucgcuugaacccaggaagugga

SEQ ID NO: 206735 - RNA, 22 nt, Human
ccagguggacuugauuugaaua

SEQ ID NO: 206736 - RNA, 21 nt, Human
agaggcaggcauuaaguacac

SEQ ID NO: 206737 - RNA, 22 nt, Human
cagcagcaugaauucgagccac

SEQ ID NO: 206738 - RNA, 22 nt, Human
caggcaggagacauuugguugg

SEQ ID NO: 206739 - RNA, 22 nt, Human
cucuggccgcagcucagcucug

SEQ ID NO: 206740 - RNA, 22 nt, Human
aggccuggccuuuauguucaag

SEQ ID NO: 206741 - RNA, 22 nt, Human
ugcuggagaacugcucuguguu

SEQ ID NO: 206742 - RNA, 22 nt, Human
ggcaguggguuccccaaggcac

SEQ ID NO: 206743 - RNA, 22 nt, Human
ccucagucuccgugcucaccuu

SEQ ID NO: 206744 - RNA, 22 nt, Human
acaauguaggaguaugacagua

SEQ ID NO: 206745 - RNA, 22 nt, Human
aagccaguggcuucucccugcu

SEQ ID NO: 206746 - RNA, 22 nt, Human
gggauccauccgugcagcagag

SEQ ID NO: 206747 - RNA, 22 nt, Human
gcugcccugacuccagcagccu

SEQ ID NO: 206748 - RNA, 22 nt, Human
caauucauguuaaacagaagca

SEQ ID NO: 206749 - RNA, 19 nt, Human
uuuacaaguucuuuguaug

SEQ ID NO: 206750 - RNA, 22 nt, Human
acaguccuagcugcaaagaagu

SEQ ID NO: 206751 - RNA, 22 nt, Human
gaaucaaaucaaguucuuuuga

SEQ ID NO: 206752 - RNA, 22 nt, Human
guaacauuuacaguuccuagag

SEQ ID NO: 206753 - RNA, 22 nt, Human
ugaaaugagauaauuuaagugc

SEQ ID NO: 206754 - RNA, 22 nt, Human
ccugcuguagggccccuggggc

SEQ ID NO: 206755 - RNA, 20 nt, Human
aaagucuuaugguuaauuuu

SEQ ID NO: 206756 - RNA, 22 nt, Human
agccucugcacuucuuacaggu

SEQ ID NO: 206757 - RNA, 21 nt, Human
ugggagagcguugcuguccuc

SEQ ID NO: 206758 - RNA, 22 nt, Human
uuagaaccaccuggagagcuuu

SEQ ID NO: 206759 - RNA, 22 nt, Human
cuggaucuguccccuuuuuguu

SEQ ID NO: 206760 - RNA, 22 nt, Human
aggcuucuaggguuggcagcgg

SEQ ID NO: 206761 - RNA, 22 nt, Human
caggaaaucacucugauuuugg

SEQ ID NO: 206762 - RNA, 18 nt, Human
aaguuccacaagagaucu

SEQ ID NO: 206763 - RNA, 22 nt, Human
cuguauuuguccucuauuuauu

SEQ ID NO: 206764 - RNA, 22 nt, Human
uagaugaaggcugagcaccugu

SEQ ID NO: 206765 - RNA, 22 nt, Human
guuugccuuuuagauaggaaug

SEQ ID NO: 206766 - RNA, 21 nt, Human
cucugcugucuaccagcuguu

SEQ ID NO: 206767 - RNA, 22 nt, Human
agggcagagaucugagugggca

SEQ ID NO: 206768 - RNA, 22 nt, Human
ccagcccuguaaggaugaggca

SEQ ID NO: 206769 - RNA, 22 nt, Human
cugugcaguggggcucuggguu

SEQ ID NO: 206770 - RNA, 22 nt, Human
ugauaaacauuuuaggaacuaa

SEQ ID NO: 206771 - RNA, 22 nt, Human
gugggaguggggaagcagagug

SEQ ID NO: 206772 - RNA, 22 nt, Human
acucuuuacuuaaacucuaagu

SEQ ID NO: 206773 - RNA, 22 nt, Human
gcugggucagaaucucccugug

SEQ ID NO: 206774 - RNA, 22 nt, Human
uuugaagacauuugaauacuuu

SEQ ID NO: 206775 - RNA, 22 nt, Human
cauuuaguuuugcaguagcagg

SEQ ID NO: 206776 - RNA, 22 nt, Human
ugccuguguugauuacuuuguc

SEQ ID NO: 206777 - RNA, 22 nt, Human
gacagacagagaaugggcuuga

SEQ ID NO: 206778 - RNA, 22 nt, Human
aggauuaaaguauauuuuugag

SEQ ID NO: 206779 - RNA, 22 nt, Human
uggaccugaagaauaggaagua

SEQ ID NO: 206780 - RNA, 22 nt, Human
ucaaaccugcugucuuguucau

SEQ ID NO: 206781 - RNA, 22 nt, Human
aacagcuguauacuguagcugu

SEQ ID NO: 206782 - RNA, 22 nt, Human
gcucugagccgggggccugucc

SEQ ID NO: 206783 - RNA, 22 nt, Human
ggcuguggggggagccugcccg

SEQ ID NO: 206784 - RNA, 22 nt, Human
aaaauuuugcccuauccuucau

SEQ ID NO: 206785 - RNA, 22 nt, Human
uaguccuugcugggcacagagu

SEQ ID NO: 206786 - RNA, 22 nt, Human
gcuucuuuggcaacccugacau

SEQ ID NO: 206787 - RNA, 22 nt, Human
acucacagucccuguaggagug

SEQ ID NO: 206788 - RNA, 22 nt, Human
agcagguggccacgaggaggag

SEQ ID NO: 206789 - RNA, 22 nt, Human
ggucuacauugagagagcugcu

SEQ ID NO: 206790 - RNA, 22 nt, Human
uucuuucugaauacaguugagu

SEQ ID NO: 206791 - RNA, 23 nt, Human
cuggcuccgaagacuccaggauc

SEQ ID NO: 206792 - RNA, 22 nt, Human
cagcccucaucucagcuucuuu

SEQ ID NO: 206793 - RNA, 20 nt, Human
ugccuuagagauaaaggcuu

SEQ ID NO: 206794 - RNA, 19 nt, Human
agcuccaggccuggaugcu

SEQ ID NO: 206795 - RNA, 22 nt, Human
ucuggcuccacaccucacugca

SEQ ID NO: 206796 - RNA, 22 nt, Human
ucauuuauauuguauucuguag

SEQ ID NO: 206797 - RNA, 22 nt, Human
cccacccugggaagcuaggcag

SEQ ID NO: 206798 - RNA, 22 nt, Human
ggcuuuaucaaaugagacccug

SEQ ID NO: 206799 - RNA, 22 nt, Human
acagcaggauuuggcgauguug

SEQ ID NO: 206800 - RNA, 22 nt, Human
aaggggcacaauuguacccaag

SEQ ID NO: 206801 - RNA, 22 nt, Human
agaaacugacaggaaaugaauu

SEQ ID NO: 206802 - RNA, 22 nt, Human
gagcugugaaaagugccugggg

SEQ ID NO: 206803 - RNA, 22 nt, Human
ugaucacaagucugaagaauga

SEQ ID NO: 206804 - RNA, 22 nt, Human
gcaggagccagggauuccagga

SEQ ID NO: 206805 - RNA, 22 nt, Human
uagggcaguuucauguuaucuu

SEQ ID NO: 206806 - RNA, 22 nt, Human
accagcuguuaucuguaguauc

SEQ ID NO: 206807 - RNA, 22 nt, Human
aucccagauagugacccucagg

SEQ ID NO: 206808 - RNA, 22 nt, Human
aucuugauuccauuaucuuugu

SEQ ID NO: 206809 - RNA, 22 nt, Human
aguguuaaugguguauauuagg

SEQ ID NO: 206810 - RNA, 17 nt, Human
gcaaaggugaggagaga

SEQ ID NO: 206811 - RNA, 22 nt, Human
uagcaacugcucuauucuagga

SEQ ID NO: 206812 - RNA, 22 nt, Human
uccucuccaugucucacgccac

SEQ ID NO: 206813 - RNA, 22 nt, Human
agacagcagaaacuagagcacu

SEQ ID NO: 206814 - RNA, 22 nt, Human
uuauccaagcagaagcugcaca

SEQ ID NO: 206815 - RNA, 22 nt, Human
uuuguuaaauauuuauugagug

SEQ ID NO: 206816 - RNA, 22 nt, Human
aggcugucucagccugcuugca

SEQ ID NO: 206817 - RNA, 22 nt, Human
guccaugcuuaaauaccuuaaa

SEQ ID NO: 206818 - RNA, 22 nt, Human
gcucagcuaucaguguuccuga

SEQ ID NO: 206819 - RNA, 22 nt, Human
aauaauauuugaagcuucaaag

SEQ ID NO: 206820 - RNA, 22 nt, Human
uguccagggauggggucaggga

SEQ ID NO: 206821 - RNA, 22 nt, Human
auccuucuaccuaggacuauuu

SEQ ID NO: 206822 - RNA, 21 nt, Human
ccaggcuccugaggcugguca

SEQ ID NO: 206823 - RNA, 22 nt, Human
gcaacacagaucuucuuuguug

SEQ ID NO: 206824 - RNA, 22 nt, Human
uacugucuuuuccuaaaugggu

SEQ ID NO: 206825 - RNA, 18 nt, Human
gauguaaaauaguagcuu

SEQ ID NO: 206826 - RNA, 22 nt, Human
uaagauaaggaacauucuguga

SEQ ID NO: 206827 - RNA, 22 nt, Human
cccaguguuccuugaggggcug

SEQ ID NO: 206828 - RNA, 22 nt, Human
accuagaguagucaaauucaua

SEQ ID NO: 206829 - RNA, 22 nt, Human
caugcagggagcagaggagaca

SEQ ID NO: 206830 - RNA, 22 nt, Human
gucuuuauuugagauugucauu

SEQ ID NO: 206831 - RNA, 22 nt, Human
uaaggcaaagaaccauaguaau

SEQ ID NO: 206832 - RNA, 22 nt, Human
augccuggacuguaucccagau

SEQ ID NO: 206833 - RNA, 22 nt, Human
uccuucuuugacaaguggcaga

SEQ ID NO: 206834 - RNA, 22 nt, Human
agaaggcuuaaaacauggaaua

SEQ ID NO: 206835 - RNA, 22 nt, Human
uagauuugugcaagaagggauu

SEQ ID NO: 206836 - RNA, 22 nt, Human
cccagccuggugcacugugggg

SEQ ID NO: 206837 - RNA, 22 nt, Human
guguugaugacauuuuagaaac

SEQ ID NO: 206838 - RNA, 22 nt, Human
uugcaauugcuauggagagcgu

SEQ ID NO: 206839 - RNA, 22 nt, Human
ggcuguagguuggugcuggaca

SEQ ID NO: 206840 - RNA, 22 nt, Human
acucuggcugccuugugagcau

SEQ ID NO: 206841 - RNA, 22 nt, Human
agcuggccuccgggugccuggg

SEQ ID NO: 206842 - RNA, 22 nt, Human
guuccucaugaguaccccuuaa

SEQ ID NO: 206843 - RNA, 22 nt, Human
uuaguguguuauauaccaagcu

SEQ ID NO: 206844 - RNA, 22 nt, Human
acuccaggauguagaaucagag

SEQ ID NO: 206845 - RNA, 22 nt, Human
ccucuuugacuauaguaguuaa

SEQ ID NO: 206846 - RNA, 22 nt, Human
cuggggacucauucagagcaua

SEQ ID NO: 206847 - RNA, 22 nt, Human
uagucagauauaugacuuacgu

SEQ ID NO: 206848 - RNA, 22 nt, Human
acccuggacuggggcugaggcu

SEQ ID NO: 206849 - RNA, 23 nt, Human
agcaggaaaccgagggugauguu

SEQ ID NO: 206850 - RNA, 22 nt, Human
acaugucuaaguacucaacaaa

SEQ ID NO: 206851 - RNA, 22 nt, Human
aggcuuuaauuaucuacaggag

SEQ ID NO: 206852 - RNA, 21 nt, Human
gccuccagccagauggccucc

SEQ ID NO: 206853 - RNA, 22 nt, Human
uccugcagcugcagaccugggg

SEQ ID NO: 206854 - RNA, 22 nt, Human
agcugagauuaugcucuucuca

SEQ ID NO: 206855 - RNA, 22 nt, Human
auagagcuauaagaauuuugug

SEQ ID NO: 206856 - RNA, 22 nt, Human
uuucucuguucucuaacuguaa

SEQ ID NO: 206857 - RNA, 23 nt, Human
ggagaugcuuaagagugguugag

SEQ ID NO: 206858 - RNA, 20 nt, Human
aggagccauugacugcagca

SEQ ID NO: 206859 - RNA, 22 nt, Human
ggcaggcaucaucaguugauca

SEQ ID NO: 206860 - RNA, 22 nt, Human
ccugcucuuauagcuguuucca

SEQ ID NO: 206861 - RNA, 22 nt, Human
gucuuugccacacuucuguaca

SEQ ID NO: 206862 - RNA, 22 nt, Human
ggcugagguguggggaacuaua

SEQ ID NO: 206863 - RNA, 22 nt, Human
ccaggaagguguuuaacuagag

SEQ ID NO: 206864 - RNA, 22 nt, Human
ugugcagcaaaauagaaucuuu

SEQ ID NO: 206865 - RNA, 22 nt, Human
uacaguguuucccccaggauag

SEQ ID NO: 206866 - RNA, 22 nt, Human
cauuucacaaauggccacauca

SEQ ID NO: 206867 - RNA, 19 nt, Human
gauagcugaugaccaucau

SEQ ID NO: 206868 - RNA, 22 nt, Human
agagggcugcugcacagugcuc

SEQ ID NO: 206869 - RNA, 22 nt, Human
ugggugcaggaugagugcuggc

SEQ ID NO: 206870 - RNA, 22 nt, Human
uuacagagguauguaugucucu

SEQ ID NO: 206871 - RNA, 22 nt, Human
ggaugaggaagauuacugagaa

SEQ ID NO: 206872 - RNA, 22 nt, Human
aagaaguuagguguaacaauau

SEQ ID NO: 206873 - RNA, 21 nt, Human
uggcacagcaagugggcucau

SEQ ID NO: 206874 - RNA, 22 nt, Human
gaaggugcaguggcuggaggcu

SEQ ID NO: 206875 - RNA, 22 nt, Human
agaaaucugacugcugugcaca

SEQ ID NO: 206876 - RNA, 22 nt, Human
agcuucaggaacaggcagccug

SEQ ID NO: 206877 - RNA, 22 nt, Human
aaagagcauggaaaguucagga

SEQ ID NO: 206878 - RNA, 21 nt, Human
ucagggcagcugcucuucaga

SEQ ID NO: 206879 - RNA, 22 nt, Human
gcaggggcuacucugagcuucc

SEQ ID NO: 206880 - RNA, 22 nt, Human
ggcaggcuccaagcauccuaug

SEQ ID NO: 206881 - RNA, 22 nt, Human
agagcuggaaucagaccucagg

SEQ ID NO: 206882 - RNA, 22 nt, Human
acaacugucuucuucaugcucc

SEQ ID NO: 206883 - RNA, 22 nt, Human
uccauuuggcacucuauuucca

SEQ ID NO: 206884 - RNA, 22 nt, Human
aacaaagaugggugggaaagag

SEQ ID NO: 206885 - RNA, 22 nt, Human
aauaacagagucuucaagauag

SEQ ID NO: 206886 - RNA, 21 nt, Human
gcauguguggugugcuccaca

SEQ ID NO: 206887 - RNA, 21 nt, Human
gcucuguacguuggugccuuc

SEQ ID NO: 206888 - RNA, 22 nt, Human
agcaacaggaaauagcugauua

SEQ ID NO: 206889 - RNA, 22 nt, Human
gcucugagacaguagagauggc

SEQ ID NO: 206890 - RNA, 22 nt, Human
uaagaaacaugauacuuuuccu

SEQ ID NO: 206891 - RNA, 22 nt, Human
aaucugguuugacaacuuuugu

SEQ ID NO: 206892 - RNA, 22 nt, Human
cagagccaggugguguuggggc

SEQ ID NO: 206893 - RNA, 22 nt, Human
ccugccagucacuaugucaccu

SEQ ID NO: 206894 - RNA, 22 nt, Human
uacaaggaaaaucuugaaguac

SEQ ID NO: 206895 - RNA, 22 nt, Human
gacccuggugggcacuggcacc

SEQ ID NO: 206896 - RNA, 23 nt, Human
uuucacauuaauguuuagcagga

SEQ ID NO: 206897 - RNA, 22 nt, Human
caugcugugguaaaucacugaa

SEQ ID NO: 206898 - RNA, 22 nt, Human
uccuggagccaaugugcugcug

SEQ ID NO: 206899 - RNA, 22 nt, Human
gagagggccgggggccagcucc

SEQ ID NO: 206900 - RNA, 20 nt, Human
gggcuggcucaacuggaucc

SEQ ID NO: 206901 - RNA, 22 nt, Human
gaccagcuacuuguacaguuca

SEQ ID NO: 206902 - RNA, 22 nt, Human
gugcaaagcuuaacauucugca

SEQ ID NO: 206903 - RNA, 22 nt, Human
gauguguccuuuucuccaucca

SEQ ID NO: 206904 - RNA, 22 nt, Human
uggugcugugauacgaggcacu

SEQ ID NO: 206905 - RNA, 19 nt, Human
cuccuggcucugucauuuu

SEQ ID NO: 206906 - RNA, 22 nt, Human
agacacugaaucagagggacau

SEQ ID NO: 206907 - RNA, 22 nt, Human
cacagcuaccugcaugccugcu

SEQ ID NO: 206908 - RNA, 21 nt, Human
aaggucuguaaagugacagga

SEQ ID NO: 206909 - RNA, 22 nt, Human
acaggugugcggaaagcuguga

SEQ ID NO: 206910 - RNA, 22 nt, Human
gcuuuagaaaugaguaaauuag

SEQ ID NO: 206911 - RNA, 19 nt, Human
ccuggccagacuucugccc

SEQ ID NO: 206912 - RNA, 22 nt, Human
cagaggagaauugcgggaucau

SEQ ID NO: 206913 - RNA, 22 nt, Human
acugauuaaaaacagacauuua

SEQ ID NO: 206914 - RNA, 17 nt, Human
ccagggaggggccgcgc

SEQ ID NO: 206915 - RNA, 22 nt, Human
ugggccucuguuuccucaucug

SEQ ID NO: 206916 - RNA, 22 nt, Human
ucugaggagugacccucuugca

SEQ ID NO: 206917 - RNA, 22 nt, Human
ugaguaaagggccagauaguaa

SEQ ID NO: 206918 - RNA, 19 nt, Human
uccaggcugagagucagcu

SEQ ID NO: 206919 - RNA, 22 nt, Human
aucaucaucaacaagaaacauu

SEQ ID NO: 206920 - RNA, 22 nt, Human
ccuuaccugauugcuggcaucc

SEQ ID NO: 206921 - RNA, 19 nt, Human
ucugcagaaggcauacaug

SEQ ID NO: 206922 - RNA, 22 nt, Human
uauccacacucaaggggagggg

SEQ ID NO: 206923 - RNA, 22 nt, Human
ucaggcagcuccaggaauggua

SEQ ID NO: 206924 - RNA, 22 nt, Human
augcauacagauuuaaaauuuu

SEQ ID NO: 206925 - RNA, 22 nt, Human
cucagggauggugaagcaccca

SEQ ID NO: 206926 - RNA, 22 nt, Human
agugcagauuuuuagucagcuu

SEQ ID NO: 206927 - RNA, 19 nt, Human
uccagaagucccugagcgg

SEQ ID NO: 206928 - RNA, 22 nt, Human
ucuuaaacuuugcuguaauucu

SEQ ID NO: 206929 - RNA, 22 nt, Human
cagcccagcgcaaacaacuggc

SEQ ID NO: 206930 - RNA, 22 nt, Human
cugaggcaccuacagucucggg

SEQ ID NO: 206931 - RNA, 22 nt, Human
uguaucuguaaucccagaucaa

SEQ ID NO: 206932 - RNA, 22 nt, Human
gaaugaauagguguccagaugg

SEQ ID NO: 206933 - RNA, 22 nt, Human
gaaacaauacuuguccucacua

SEQ ID NO: 206934 - RNA, 16 nt, Human
gcaggcagaucacaug

SEQ ID NO: 206935 - RNA, 22 nt, Human
acagagagaauuggguuuacag

SEQ ID NO: 206936 - RNA, 19 nt, Human
ugaucuggaaggaaccagg

SEQ ID NO: 206937 - RNA, 22 nt, Human
ggcugggagccccacagaguca

SEQ ID NO: 206938 - RNA, 22 nt, Human
ggcuggguacccuguuuccccu

SEQ ID NO: 206939 - RNA, 22 nt, Human
gcauggcauuugaagguagaag

SEQ ID NO: 206940 - RNA, 20 nt, Human
ugcacagggugggaagcaac

SEQ ID NO: 206941 - RNA, 22 nt, Human
uggcuucugcauauuuuuagag

SEQ ID NO: 206942 - RNA, 22 nt, Human
uacagaggcuggguuuucaggg

SEQ ID NO: 206943 - RNA, 22 nt, Human
uccugccagcuggggcugcuuc

SEQ ID NO: 206944 - RNA, 20 nt, Human
aagggcagagggaacagacu

SEQ ID NO: 206945 - RNA, 22 nt, Human
agcuggggcauuuauccacuaa

SEQ ID NO: 206946 - RNA, 22 nt, Human
ccugacaggagaagcgcagcau

SEQ ID NO: 206947 - RNA, 22 nt, Human
aacugaaacggugaucuuuuaa

SEQ ID NO: 206948 - RNA, 19 nt, Human
cccagucuagguccuagga

SEQ ID NO: 206949 - RNA, 19 nt, Human
uggggccuccugucccugg

SEQ ID NO: 206950 - RNA, 22 nt, Human
agccaguggaauucccaggggu

SEQ ID NO: 206951 - RNA, 22 nt, Human
agcuucagcuugcagcugugau

SEQ ID NO: 206952 - RNA, 22 nt, Human
cggcuggggcuguccccaugac

SEQ ID NO: 206953 - RNA, 22 nt, Human
uaaggccaauuaacaaccaggg

SEQ ID NO: 206954 - RNA, 21 nt, Human
gcagugcagcuuggaggguag

SEQ ID NO: 206955 - RNA, 22 nt, Human
ucucucuauaugucaacagggg

SEQ ID NO: 206956 - RNA, 22 nt, Human
uguccaggcucccuuggugcug

SEQ ID NO: 206957 - RNA, 22 nt, Human
ucucuggcuggcaccccaggga

SEQ ID NO: 206958 - RNA, 22 nt, Human
cacaagauggucacauaagugc

SEQ ID NO: 206959 - RNA, 23 nt, Human
auucagaauuguguguuuguaua

SEQ ID NO: 206960 - RNA, 19 nt, Human
uccugggcugggccagguc

SEQ ID NO: 206961 - RNA, 22 nt, Human
uggcagggccuaccccaauauc

SEQ ID NO: 206962 - RNA, 22 nt, Human
ccuggagccccucuggccagcc

SEQ ID NO: 206963 - RNA, 22 nt, Human
uggcucagugacauuccuccca

SEQ ID NO: 206964 - RNA, 22 nt, Human
cagggcuggauuucauuucuag

SEQ ID NO: 206965 - RNA, 22 nt, Human
gcgcaagccacacagccugggg

SEQ ID NO: 206966 - RNA, 22 nt, Human
uuaaaaugaauauugauuagca

SEQ ID NO: 206967 - RNA, 22 nt, Human
uaaagacaauuucgagcuguag

SEQ ID NO: 206968 - RNA, 22 nt, Human
uugucuguaaagacggccacca

SEQ ID NO: 206969 - RNA, 22 nt, Human
gugggcuccccuggcaugucca

SEQ ID NO: 206970 - RNA, 17 nt, Human
uuucagauucacuuucu

SEQ ID NO: 206971 - RNA, 22 nt, Human
ucuucauuuuauagcaucugug

SEQ ID NO: 206972 - RNA, 22 nt, Human
accuugaugccuuuccaagaug

SEQ ID NO: 206973 - RNA, 22 nt, Human
ccucaggguggcaucagaucuu

SEQ ID NO: 206974 - RNA, 22 nt, Human
cucuucccagcuccacgagagg

SEQ ID NO: 206975 - RNA, 21 nt, Human
uaagccaccaugugaaaccag

SEQ ID NO: 206976 - RNA, 22 nt, Human
aaggugucggcagagccgcuuc

SEQ ID NO: 206977 - RNA, 22 nt, Human
ugucaguuaccuagcacaagaa

SEQ ID NO: 206978 - RNA, 22 nt, Human
ggccuugcagccacagaacaca

SEQ ID NO: 206979 - RNA, 22 nt, Human
gucaggauuugaacucaggucu

SEQ ID NO: 206980 - RNA, 22 nt, Human
gaaaucuacgauuagugaaaau

SEQ ID NO: 206981 - RNA, 22 nt, Human
aaugacagagcacugaacuugg

SEQ ID NO: 206982 - RNA, 22 nt, Human
acaggaugauaaaggauggcca

SEQ ID NO: 206983 - RNA, 22 nt, Human
gugaagcagggaaggaaaggau

SEQ ID NO: 206984 - RNA, 22 nt, Human
gggcucaugauguaggcuggua

SEQ ID NO: 206985 - RNA, 22 nt, Human
ucccuggguucccguggaagug

SEQ ID NO: 206986 - RNA, 22 nt, Human
gaguccuuuugugccacaggga

SEQ ID NO: 206987 - RNA, 20 nt, Human
ugagaaggggucagcuguac

SEQ ID NO: 206988 - RNA, 22 nt, Human
ucugagggcuguacuaugcacg

SEQ ID NO: 206989 - RNA, 22 nt, Human
uuugcugaccccauucugaguc

SEQ ID NO: 206990 - RNA, 22 nt, Human
uggagaagucaaagugaacagg

SEQ ID NO: 206991 - RNA, 22 nt, Human
gccagcccagcuccaggggaaa

SEQ ID NO: 206992 - RNA, 22 nt, Human
caauuauauuuagaaugauaca

SEQ ID NO: 206993 - RNA, 22 nt, Human
uuucauggcuaggacuagagug

SEQ ID NO: 206994 - RNA, 22 nt, Human
gaaaucaaggcuacauucaggu

SEQ ID NO: 206995 - RNA, 22 nt, Human
guuuccuauggcugcugcagga

SEQ ID NO: 206996 - RNA, 22 nt, Human
uccuggguagagaccugaugaa

SEQ ID NO: 206997 - RNA, 22 nt, Human
ggcuuggaaauugcaggacaca

SEQ ID NO: 206998 - RNA, 22 nt, Human
uggggaaaggaaaguuaaccug

SEQ ID NO: 206999 - RNA, 22 nt, Human
cccagacagucaagaggccugc

SEQ ID NO: 207000 - RNA, 22 nt, Human
ggaauguucuggucugguucau

SEQ ID NO: 207001 - RNA, 22 nt, Human
uccccagcauugagggucucuc

SEQ ID NO: 207002 - RNA, 22 nt, Human
aaagccaguucuuagagaaagc

SEQ ID NO: 207003 - RNA, 22 nt, Human
uccucagacacccugcuggcuu

SEQ ID NO: 207004 - RNA, 22 nt, Human
uuguuucaaauauuucagaaua

SEQ ID NO: 207005 - RNA, 22 nt, Human
cagcacagaguauuuuauugau

SEQ ID NO: 207006 - RNA, 22 nt, Human
acagccagguaaaggcauggca

SEQ ID NO: 207007 - RNA, 22 nt, Human
aauacaguagguaauaguucau

SEQ ID NO: 207008 - RNA, 19 nt, Human
ccaggccuccugggagguc

SEQ ID NO: 207009 - RNA, 22 nt, Human
ccuagggauguguuagccagau

SEQ ID NO: 207010 - RNA, 17 nt, Human
agcaaaaguaucaaagc

SEQ ID NO: 207011 - RNA, 22 nt, Human
gaucauuugcaggaaacauuaa

SEQ ID NO: 207012 - RNA, 18 nt, Human
aagaaucucugacucuuu

SEQ ID NO: 207013 - RNA, 22 nt, Human
cacuggaauagcauugauucuu

SEQ ID NO: 207014 - RNA, 22 nt, Human
uuuauuguugggucuuaagcug

SEQ ID NO: 207015 - RNA, 22 nt, Human
gccaggggacgcggagcgacga

SEQ ID NO: 207016 - RNA, 22 nt, Human
agcuuugugacuuugagcuagu

SEQ ID NO: 207017 - RNA, 22 nt, Human
caauagaaggcacagauaggua

SEQ ID NO: 207018 - RNA, 22 nt, Human
aauauggcuuguuacuauguuu

SEQ ID NO: 207019 - RNA, 22 nt, Human
ugucauuuucugguuaguuaau

SEQ ID NO: 207020 - RNA, 22 nt, Human
uccuggccucugagucaagaac

SEQ ID NO: 207021 - RNA, 22 nt, Human
aagaauuuuccagcaugucagu

SEQ ID NO: 207022 - RNA, 22 nt, Human
ggcucacgcaauuaucccggcc

SEQ ID NO: 207023 - RNA, 22 nt, Human
uuaaagagggaaagacuucaga

SEQ ID NO: 207024 - RNA, 22 nt, Human
ugcaggagcccuugggcucugg

SEQ ID NO: 207025 - RNA, 22 nt, Human
ugggagagauaggcuucuggac

SEQ ID NO: 207026 - RNA, 22 nt, Human
acaauuugaggcuacucaauug

SEQ ID NO: 207027 - RNA, 22 nt, Human
acaucaguccaccacugcaguu

SEQ ID NO: 207028 - RNA, 22 nt, Human
ucccagccauuccuuuaggugu

SEQ ID NO: 207029 - RNA, 22 nt, Human
ucucuguaagcugccuucucgu

SEQ ID NO: 207030 - RNA, 22 nt, Human
cauucauccacuguuggaaauu

SEQ ID NO: 207031 - RNA, 22 nt, Human
ugaggccaaugacccugggcag

SEQ ID NO: 207032 - RNA, 22 nt, Human
ccuggcagaaagaguuacaccu

SEQ ID NO: 207033 - RNA, 22 nt, Human
aggagguggcugaacuugaggg

SEQ ID NO: 207034 - RNA, 22 nt, Human
ccagccacugggccacugccag

SEQ ID NO: 207035 - RNA, 22 nt, Human
uaugaagauugcggucuggaau

SEQ ID NO: 207036 - RNA, 22 nt, Human
ggcaccaggcugggcauaggcc

SEQ ID NO: 207037 - RNA, 22 nt, Human
uccugugauauuguuuguuaua

SEQ ID NO: 207038 - RNA, 22 nt, Human
aacauaauguggccaaagucac

SEQ ID NO: 207039 - RNA, 22 nt, Human
cugaggcacuaacaaggacaag

SEQ ID NO: 207040 - RNA, 22 nt, Human
ucuggaggcaggcugccaggau

SEQ ID NO: 207041 - RNA, 21 nt, Human
ggccagcucggaaggucccau

SEQ ID NO: 207042 - RNA, 22 nt, Human
aggagccaguggaguuccugcc

SEQ ID NO: 207043 - RNA, 22 nt, Human
auacuacauuugaaaauugcag

SEQ ID NO: 207044 - RNA, 22 nt, Human
cucugggucaccaucggggauu

SEQ ID NO: 207045 - RNA, 22 nt, Human
aucugaaaagcuuuaaugagcu

SEQ ID NO: 207046 - RNA, 22 nt, Human
aaacaucuauuaugugcugagc

SEQ ID NO: 207047 - RNA, 22 nt, Human
gucuccagccauucucugauca

SEQ ID NO: 207048 - RNA, 18 nt, Human
ccaggccaugaaccucug

SEQ ID NO: 207049 - RNA, 22 nt, Human
uaggugucuugucacuaccguu

SEQ ID NO: 207050 - RNA, 22 nt, Human
aaauccuaaugacaaguuuagu

SEQ ID NO: 207051 - RNA, 22 nt, Human
cuuuggaaaguaagcagcuaga

SEQ ID NO: 207052 - RNA, 22 nt, Human
augcaagacauaaauaaucuuu

SEQ ID NO: 207053 - RNA, 22 nt, Human
uucaguaugauuccuccaguag

SEQ ID NO: 207054 - RNA, 22 nt, Human
ggagaggcuuggcccagccugg

SEQ ID NO: 207055 - RNA, 22 nt, Human
ugacagggagguggaauaagua

SEQ ID NO: 207056 - RNA, 22 nt, Human
guuauucuaccacuauguacag

SEQ ID NO: 207057 - RNA, 22 nt, Human
uacuacaagggcccuaaaaggu

SEQ ID NO: 207058 - RNA, 23 nt, Human
cucagaggccuguccaggguggu

SEQ ID NO: 207059 - RNA, 22 nt, Human
ccucuggggucuagcaauagca

SEQ ID NO: 207060 - RNA, 22 nt, Human
gugagcuggaauaguggagaaa

SEQ ID NO: 207061 - RNA, 22 nt, Human
gcucagcuacuuacagguggcu

SEQ ID NO: 207062 - RNA, 22 nt, Human
gaggcagugucgguggcaggau

SEQ ID NO: 207063 - RNA, 20 nt, Human
ggcugcugguuuggcucugu

SEQ ID NO: 207064 - RNA, 22 nt, Human
acucuguaucccucucaaauug

SEQ ID NO: 207065 - RNA, 22 nt, Human
guucugggagaucuugagcuuc

SEQ ID NO: 207066 - RNA, 22 nt, Human
gcacauggcggccagcagguga

SEQ ID NO: 207067 - RNA, 22 nt, Human
gucuuuggauguaagauaaagu

SEQ ID NO: 207068 - RNA, 20 nt, Human
ccugucucacguuccgcccc

SEQ ID NO: 207069 - RNA, 19 nt, Human
uuuuggcuggagugaucug

SEQ ID NO: 207070 - RNA, 23 nt, Human
gaagcccucauugguucuccaga

SEQ ID NO: 207071 - RNA, 22 nt, Human
ggugagaaagggauuccuguuc

SEQ ID NO: 207072 - RNA, 22 nt, Human
aggccuggcaugagaccugaga

SEQ ID NO: 207073 - RNA, 22 nt, Human
ucuaggaaauuguuacuauauu

SEQ ID NO: 207074 - RNA, 18 nt, Human
gcccagaggucugggccc

SEQ ID NO: 207075 - RNA, 22 nt, Human
aaagcagagaucauggcuugua

SEQ ID NO: 207076 - RNA, 22 nt, Human
uucaucuggaauuuauguuaua

SEQ ID NO: 207077 - RNA, 22 nt, Human
uacaccauucccagguggauuu

SEQ ID NO: 207078 - RNA, 22 nt, Human
ccugugacgugucuccuggcac

SEQ ID NO: 207079 - RNA, 22 nt, Human
ucugcccucgaggagcuugugu

SEQ ID NO: 207080 - RNA, 22 nt, Human
uccaggcccacucgguggggcu

SEQ ID NO: 207081 - RNA, 22 nt, Human
caccagcgacugugaccagcaa

SEQ ID NO: 207082 - RNA, 22 nt, Human
gcaggugguuaaggucccaugu

SEQ ID NO: 207083 - RNA, 22 nt, Human
ugacagaacagguugggagcaa

SEQ ID NO: 207084 - RNA, 23 nt, Human
uguguauguaucuaugcauaggu

SEQ ID NO: 207085 - RNA, 19 nt, Human
gguggcucagggcccagcc

SEQ ID NO: 207086 - RNA, 22 nt, Human
aacauugccaugguuaauuuua

SEQ ID NO: 207087 - RNA, 22 nt, Human
caugaauauuuaguauuuacuu

SEQ ID NO: 207088 - RNA, 22 nt, Human
uagcuuccagaauuuaauguca

SEQ ID NO: 207089 - RNA, 22 nt, Human
ucauauaccugcaugugcaugu

SEQ ID NO: 207090 - RNA, 22 nt, Human
aauguuaaaaccuucagugcuu

SEQ ID NO: 207091 - RNA, 22 nt, Human
agguuuauuaaguaaauagagc

SEQ ID NO: 207092 - RNA, 22 nt, Human
aaaagcagaccacgcuuugugg

SEQ ID NO: 207093 - RNA, 23 nt, Human
aggauaaacuaaacucauuuugg

SEQ ID NO: 207094 - RNA, 22 nt, Human
auuagagcuguuagugaagugc

SEQ ID NO: 207095 - RNA, 22 nt, Human
aauucccaccuucucucuuuug

SEQ ID NO: 207096 - RNA, 22 nt, Human
agcccagguugaggcugcagug

SEQ ID NO: 207097 - RNA, 22 nt, Human
cugaggcucccucgggucugcu

SEQ ID NO: 207098 - RNA, 23 nt, Human
agcccugcugagacccagcuccc

SEQ ID NO: 207099 - RNA, 22 nt, Human
ucuuuggaugcguuacuuuuac

SEQ ID NO: 207100 - RNA, 22 nt, Human
augauucuggugagaaugagga

SEQ ID NO: 207101 - RNA, 22 nt, Human
ugcaaauugcgauuuuuauuag

SEQ ID NO: 207102 - RNA, 21 nt, Human
aaacuagaguguggcaaagcu

SEQ ID NO: 207103 - RNA, 22 nt, Human
ccacccagccagaugcaggaag

SEQ ID NO: 207104 - RNA, 22 nt, Human
acaaugucucauauucguguuc

SEQ ID NO: 207105 - RNA, 22 nt, Human
gcagcuuucuuuuugcaugucu

SEQ ID NO: 207106 - RNA, 22 nt, Human
auugaaagauauacuguucuca

SEQ ID NO: 207107 - RNA, 22 nt, Human
aaggcuggucagauguggugaa

SEQ ID NO: 207108 - RNA, 22 nt, Human
gucccuggggaaucagcuggag

SEQ ID NO: 207109 - RNA, 23 nt, Human
uggacagcagcagcagugucacc

SEQ ID NO: 207110 - RNA, 22 nt, Human
ugaggcuuagagaauuaaguga

SEQ ID NO: 207111 - RNA, 22 nt, Human
ggucccaaggaggaugaggcua

SEQ ID NO: 207112 - RNA, 22 nt, Human
uaauacauguauuccagagagu

SEQ ID NO: 207113 - RNA, 22 nt, Human
acagcaaucugagagacauagu

SEQ ID NO: 207114 - RNA, 22 nt, Human
cugugaaugcuaguaagagugc

SEQ ID NO: 207115 - RNA, 22 nt, Human
cuuccugcaacaccuguguugc

SEQ ID NO: 207116 - RNA, 22 nt, Human
gcugagcuagcuaucucagucu

SEQ ID NO: 207117 - RNA, 22 nt, Human
acuugaaacaucuuuaaaugua

SEQ ID NO: 207118 - RNA, 22 nt, Human
cagggccucauggccggggugc

SEQ ID NO: 207119 - RNA, 22 nt, Human
ugcucagacuuaagaagaucag

SEQ ID NO: 207120 - RNA, 22 nt, Human
caacagaggaguggccugaucc

SEQ ID NO: 207121 - RNA, 22 nt, Human
aucugaagggaaguggaaggca

SEQ ID NO: 207122 - RNA, 22 nt, Human
ggagcugucuguagggcacagg

SEQ ID NO: 207123 - RNA, 22 nt, Human
agagaauucuggugcuaacaag

SEQ ID NO: 207124 - RNA, 22 nt, Human
aggagacauaacuaugaugaga

SEQ ID NO: 207125 - RNA, 22 nt, Human
cuccuuccccuacucagcaucc

SEQ ID NO: 207126 - RNA, 22 nt, Human
ugccuccaccauugcucacuuu

SEQ ID NO: 207127 - RNA, 22 nt, Human
gcuacagugauaggaaacacau

SEQ ID NO: 207128 - RNA, 21 nt, Human
uggcugaguggaugcaugaau

SEQ ID NO: 207129 - RNA, 22 nt, Human
uggagaaggggcagggucucca

SEQ ID NO: 207130 - RNA, 23 nt, Human
uuggaauauauuguuugacauag

SEQ ID NO: 207131 - RNA, 22 nt, Human
agcagcaccuguccucgcugcu

SEQ ID NO: 207132 - RNA, 22 nt, Human
ucuggggaauguucauuucuga

SEQ ID NO: 207133 - RNA, 22 nt, Human
uccucuggaaccucacccuugc

SEQ ID NO: 207134 - RNA, 22 nt, Human
ucuucuggaugagagcggaggc

SEQ ID NO: 207135 - RNA, 22 nt, Human
aggcuccugcaggugaggugcu

SEQ ID NO: 207136 - RNA, 22 nt, Human
aagggugguguaggagaucaaa

SEQ ID NO: 207137 - RNA, 22 nt, Human
ggcuccagaugucuccuggcaa

SEQ ID NO: 207138 - RNA, 22 nt, Human
uauaucagcaaagcauuuaaaa

SEQ ID NO: 207139 - RNA, 22 nt, Human
uuccagugaaacaugaggugug

SEQ ID NO: 207140 - RNA, 22 nt, Human
aguggcuuaucugggacagcua

SEQ ID NO: 207141 - RNA, 22 nt, Human
acagugcuuuuguuccucuccu

SEQ ID NO: 207142 - RNA, 20 nt, Human
aaaguguaagcauauaauua

SEQ ID NO: 207143 - RNA, 22 nt, Human
guaaaacugucuaaugguauau

SEQ ID NO: 207144 - RNA, 22 nt, Human
uuuaaacaaauaggauugccua

SEQ ID NO: 207145 - RNA, 22 nt, Human
acaucucaugaaugauaaauca

SEQ ID NO: 207146 - RNA, 22 nt, Human
uagauuugccugggaaagcuca

SEQ ID NO: 207147 - RNA, 22 nt, Human
uggggcagccacauagacaaca

SEQ ID NO: 207148 - RNA, 22 nt, Human
ccucucccgggugccgcugggc

SEQ ID NO: 207149 - RNA, 22 nt, Human
uaguguuccagaagcaaacaag

SEQ ID NO: 207150 - RNA, 20 nt, Human
ucucaggcccccuccuugcu

SEQ ID NO: 207151 - RNA, 22 nt, Human
ucaggcuguuagccaccuccuc

SEQ ID NO: 207152 - RNA, 22 nt, Human
uuuugaaagaguccugcuacag

SEQ ID NO: 207153 - RNA, 20 nt, Human
acaugcaguggucauuucag

SEQ ID NO: 207154 - RNA, 22 nt, Human
accuuauuuugaaauagauugu

SEQ ID NO: 207155 - RNA, 22 nt, Human
uuuaaaagggguauuaagucca

SEQ ID NO: 207156 - RNA, 22 nt, Human
cuuuccuaguaguuacagaaug

SEQ ID NO: 207157 - RNA, 22 nt, Human
uggauuaguuuaacaauguggc

SEQ ID NO: 207158 - RNA, 22 nt, Human
ccugagagggggcccuagaaau

SEQ ID NO: 207159 - RNA, 22 nt, Human
uggaugugagaaggaucaggcu

SEQ ID NO: 207160 - RNA, 22 nt, Human
ggcccugcugaguggaguggag

SEQ ID NO: 207161 - RNA, 22 nt, Human
cccaggagacauauagaaggac

SEQ ID NO: 207162 - RNA, 19 nt, Human
gaguccugugcuccuuguu

SEQ ID NO: 207163 - RNA, 22 nt, Human
uucagagauggaaggcagaaug

SEQ ID NO: 207164 - RNA, 22 nt, Human
aaggcaguaaaaucuaccuugc

SEQ ID NO: 207165 - RNA, 22 nt, Human
cuguacagaagcuagagcaaau

SEQ ID NO: 207166 - RNA, 22 nt, Human
uagccauuuuuauuaaugcugg

SEQ ID NO: 207167 - RNA, 22 nt, Human
uucugcauuuaaaauauuacua

SEQ ID NO: 207168 - RNA, 22 nt, Human
ccucucuguguggccucuccau

SEQ ID NO: 207169 - RNA, 22 nt, Human
gagcccagcucuaccucagacu

SEQ ID NO: 207170 - RNA, 20 nt, Human
uauuuugcaauuaugguuca

SEQ ID NO: 207171 - RNA, 22 nt, Human
uugcauuguaggauguuagaag

SEQ ID NO: 207172 - RNA, 19 nt, Human
aucugccuguuaucacaua

SEQ ID NO: 207173 - RNA, 22 nt, Human
ucagcuuugcaaguuagaaaau

SEQ ID NO: 207174 - RNA, 20 nt, Human
aggcucagauacccagggaa

SEQ ID NO: 207175 - RNA, 22 nt, Human
cucuuccucucaugcggucaua

SEQ ID NO: 207176 - RNA, 22 nt, Human
gcugggucuggaugcucaggug

SEQ ID NO: 207177 - RNA, 22 nt, Human
auuucccuccagggaaagcuua

SEQ ID NO: 207178 - RNA, 21 nt, Human
gacauccaugugaguggcagu

SEQ ID NO: 207179 - RNA, 22 nt, Human
ucuuugguugcacugcaggugu

SEQ ID NO: 207180 - RNA, 22 nt, Human
uggggucccacucagcuccccu

SEQ ID NO: 207181 - RNA, 22 nt, Human
uucaaaccuaucuaagaaauag

SEQ ID NO: 207182 - RNA, 22 nt, Human
acugugcaaaugacaggcacac

SEQ ID NO: 207183 - RNA, 22 nt, Human
uccuuuggagcuugacugguag

SEQ ID NO: 207184 - RNA, 22 nt, Human
agggccucuaccauccaagguu

SEQ ID NO: 207185 - RNA, 22 nt, Human
aaaggacuggauauuaaagagu

SEQ ID NO: 207186 - RNA, 22 nt, Human
agguccaucguggaugaacugc

SEQ ID NO: 207187 - RNA, 22 nt, Human
ggugcauggaaagaguaaguaa

SEQ ID NO: 207188 - RNA, 22 nt, Human
gagcacagggaauagacagaua

SEQ ID NO: 207189 - RNA, 22 nt, Human
ucuccccagcugagcugcccuu

SEQ ID NO: 207190 - RNA, 22 nt, Human
uguuuacuuuccuucucacagg

SEQ ID NO: 207191 - RNA, 22 nt, Human
ucacuguugaccuggaaguggg

SEQ ID NO: 207192 - RNA, 22 nt, Human
agaaggggcccaaggaugucag

SEQ ID NO: 207193 - RNA, 21 nt, Human
ugcuauuuaauuuuucuguuc

SEQ ID NO: 207194 - RNA, 22 nt, Human
aaucaaaaccuacagagguaau

SEQ ID NO: 207195 - RNA, 22 nt, Human
auacaugauacuuaguacguag

SEQ ID NO: 207196 - RNA, 21 nt, Human
cucugggccauuuucuuccac

SEQ ID NO: 207197 - RNA, 22 nt, Human
ccauccugaauggucucagcca

SEQ ID NO: 207198 - RNA, 22 nt, Human
ugccaggggaccuagggauguc

SEQ ID NO: 207199 - RNA, 22 nt, Human
gacugucuuguuucuaagauga

SEQ ID NO: 207200 - RNA, 22 nt, Human
agagaaggucacuaaggaccca

SEQ ID NO: 207201 - RNA, 22 nt, Human
ucuggcccaucuucugccacca

SEQ ID NO: 207202 - RNA, 22 nt, Human
gaaguacaguuuuaucuagcca

SEQ ID NO: 207203 - RNA, 22 nt, Human
augcaauaguaauucuagucug

SEQ ID NO: 207204 - RNA, 22 nt, Human
ggcacagcaagaagggaaauga

SEQ ID NO: 207205 - RNA, 22 nt, Human
uugcuaggauucauucuauacu

SEQ ID NO: 207206 - RNA, 22 nt, Human
ucagaggagccaaaguucugag

SEQ ID NO: 207207 - RNA, 22 nt, Human
ucuccagguucagucgauggaa

SEQ ID NO: 207208 - RNA, 22 nt, Human
uggucaggggcuucugagcugu

SEQ ID NO: 207209 - RNA, 20 nt, Human
acacacuuugaucuugagcc

SEQ ID NO: 207210 - RNA, 23 nt, Human
ucuccuccuagauacagucaugg

SEQ ID NO: 207211 - RNA, 22 nt, Human
guacuaagucaggagaagaauu

SEQ ID NO: 207212 - RNA, 17 nt, Human
uccagagcacagagcuc

SEQ ID NO: 207213 - RNA, 22 nt, Human
uugagaagaggcuuuguaggaa

SEQ ID NO: 207214 - RNA, 22 nt, Human
ugggcagagucguggggaauag

SEQ ID NO: 207215 - RNA, 22 nt, Human
cuguagguuugcucugaccugg

SEQ ID NO: 207216 - RNA, 22 nt, Human
ugagccuggccugcagagacca

SEQ ID NO: 207217 - RNA, 22 nt, Human
aagaaauguagagccuaguaaa

SEQ ID NO: 207218 - RNA, 22 nt, Human
ugggagaagcagugggacagua

SEQ ID NO: 207219 - RNA, 22 nt, Human
cacaucugacuuccagugcagg

SEQ ID NO: 207220 - RNA, 22 nt, Human
uucuauguggcaucaagcucag

SEQ ID NO: 207221 - RNA, 22 nt, Human
ugcugagguuucugacuaugga

SEQ ID NO: 207222 - RNA, 22 nt, Human
uuuguacauccuaauucugagu

SEQ ID NO: 207223 - RNA, 22 nt, Human
cuggagugaagucuggcagcuu

SEQ ID NO: 207224 - RNA, 22 nt, Human
ucagcuuugccaccagcuguaa

SEQ ID NO: 207225 - RNA, 22 nt, Human
ucagugcauuaauaauaucagu

SEQ ID NO: 207226 - RNA, 22 nt, Human
auggcccaagugcccugaccug

SEQ ID NO: 207227 - RNA, 22 nt, Human
caaaggaagcuccuugauggcg

SEQ ID NO: 207228 - RNA, 22 nt, Human
cuccuuccugguuagcaccuua

SEQ ID NO: 207229 - RNA, 22 nt, Human
ucucaggcuguguguggaggac

SEQ ID NO: 207230 - RNA, 22 nt, Human
aaaguccuuuuugccaugcaag

SEQ ID NO: 207231 - RNA, 22 nt, Human
gucuuuauauuuacuaaagaau

SEQ ID NO: 207232 - RNA, 22 nt, Human
guuacaaaggacugggggccac

SEQ ID NO: 207233 - RNA, 22 nt, Human
ucagaggaggcauuuaaacaga

SEQ ID NO: 207234 - RNA, 22 nt, Human
ugaggcuuagagaagaugggau

SEQ ID NO: 207235 - RNA, 22 nt, Human
gggcugagccacagcuuuuguu

SEQ ID NO: 207236 - RNA, 22 nt, Human
uccuucucugguuuuuacugua

SEQ ID NO: 207237 - RNA, 22 nt, Human
ugucauuuacuccauacccuca

SEQ ID NO: 207238 - RNA, 22 nt, Human
acauuuugcccuuauuugcuga

SEQ ID NO: 207239 - RNA, 22 nt, Human
ugagcagggagcugggcugagc

SEQ ID NO: 207240 - RNA, 22 nt, Human
uaauuaacauacaaaacagcug

SEQ ID NO: 207241 - RNA, 22 nt, Human
cagcacaauuuucaggagucca

SEQ ID NO: 207242 - RNA, 22 nt, Human
ugccugugaucagcugaguuca

SEQ ID NO: 207243 - RNA, 22 nt, Human
acagguggcuuauuggcugauu

SEQ ID NO: 207244 - RNA, 22 nt, Human
cauguucuaauauugugacaua

SEQ ID NO: 207245 - RNA, 22 nt, Human
ugcacagagagaugagacacgu

SEQ ID NO: 207246 - RNA, 21 nt, Human
aaaaggaggcaggugaacagc

SEQ ID NO: 207247 - RNA, 22 nt, Human
ggaggaagcccucggugcccca

SEQ ID NO: 207248 - RNA, 22 nt, Human
cucuagaaggucucccugccag

SEQ ID NO: 207249 - RNA, 22 nt, Human
aggaauguuaguucuguauaca

SEQ ID NO: 207250 - RNA, 22 nt, Human
cacaccagcauggucucagugu

SEQ ID NO: 207251 - RNA, 18 nt, Human
uaggccaguauacuuuuc

SEQ ID NO: 207252 - RNA, 22 nt, Human
gaauacaugauuaaaguuugau

SEQ ID NO: 207253 - RNA, 21 nt, Human
gggcagaggggccuccugggu

SEQ ID NO: 207254 - RNA, 22 nt, Human
agugauuuuaucaauuuacuca

SEQ ID NO: 207255 - RNA, 22 nt, Human
caauuagaggaggaagcucaua

SEQ ID NO: 207256 - RNA, 22 nt, Human
gggacagacccaugggccaggu

SEQ ID NO: 207257 - RNA, 22 nt, Human
uccuggcaaagauguugguguu

SEQ ID NO: 207258 - RNA, 22 nt, Human
cuccaaucugggcaacagagca

SEQ ID NO: 207259 - RNA, 19 nt, Human
ccuggcugugaagccugca

SEQ ID NO: 207260 - RNA, 22 nt, Human
augccagaccauccaguuggga

SEQ ID NO: 207261 - RNA, 22 nt, Human
cuuccuccgaagaaguugcugg

SEQ ID NO: 207262 - RNA, 20 nt, Human
ucauacacaugagcaugcag

SEQ ID NO: 207263 - RNA, 23 nt, Human
ugcacuucuccauagaugcaucu

SEQ ID NO: 207264 - RNA, 22 nt, Human
uagaaaugaauguuuaaaaguc

SEQ ID NO: 207265 - RNA, 22 nt, Human
ucacagaaggcaucacagaaga

SEQ ID NO: 207266 - RNA, 22 nt, Human
accuucaagauugugggucaau

SEQ ID NO: 207267 - RNA, 22 nt, Human
gaggaggcuaucagcaaucagg

SEQ ID NO: 207268 - RNA, 22 nt, Human
ucagagugaggcccagcaaucu

SEQ ID NO: 207269 - RNA, 22 nt, Human
aguggcagccgagcaggagaug

SEQ ID NO: 207270 - RNA, 22 nt, Human
auuccacauaggccuucaugac

SEQ ID NO: 207271 - RNA, 22 nt, Human
acacuuuacagaauguuuugau

SEQ ID NO: 207272 - RNA, 22 nt, Human
gcagagaacccagcagauuggc

SEQ ID NO: 207273 - RNA, 22 nt, Human
auuugauuagcuguguaauuuu

SEQ ID NO: 207274 - RNA, 22 nt, Human
uucuuuauagcuauuggaugag

SEQ ID NO: 207275 - RNA, 22 nt, Human
cucagcucugacaggaggcauc

SEQ ID NO: 207276 - RNA, 22 nt, Human
acaaguaccaaaugcucaagua

SEQ ID NO: 207277 - RNA, 22 nt, Human
caggcugacaacugagcauuuu

SEQ ID NO: 207278 - RNA, 23 nt, Human
caugacaaaggaucucaugggcc

SEQ ID NO: 207279 - RNA, 22 nt, Human
auuuggaacuuauaauaaguuu

SEQ ID NO: 207280 - RNA, 22 nt, Human
agccagggacgcugcaggcuac

SEQ ID NO: 207281 - RNA, 22 nt, Human
cacauuucuuauggauguuggc

SEQ ID NO: 207282 - RNA, 22 nt, Human
uagcuuuaggaugguucucuug

SEQ ID NO: 207283 - RNA, 18 nt, Human
gaugggguccaggcauag

SEQ ID NO: 207284 - RNA, 22 nt, Human
ggcagaguggagugcggccucc

SEQ ID NO: 207285 - RNA, 22 nt, Human
gcucagaggaugcuccuuuaug

SEQ ID NO: 207286 - RNA, 22 nt, Human
ucagaacagugccuggcacuaa

SEQ ID NO: 207287 - RNA, 22 nt, Human
acuuccagaggguguggaaaua

SEQ ID NO: 207288 - RNA, 22 nt, Human
aagcauguacaaugagugucuc

SEQ ID NO: 207289 - RNA, 22 nt, Human
ugaguucuaguggcugcagauu

SEQ ID NO: 207290 - RNA, 22 nt, Human
guaagccuggaauuuuugacuu

SEQ ID NO: 207291 - RNA, 23 nt, Human
aaacuugcuauggcugaaaucau

SEQ ID NO: 207292 - RNA, 22 nt, Human
ugaaguucacugagaguucacc

SEQ ID NO: 207293 - RNA, 22 nt, Human
agcccuggcagagccagguagu

SEQ ID NO: 207294 - RNA, 20 nt, Human
agcacauuaaacauacuccu

SEQ ID NO: 207295 - RNA, 22 nt, Human
acuguaagguaaggauaaaacc

SEQ ID NO: 207296 - RNA, 22 nt, Human
caacauguguuagacaauagac

SEQ ID NO: 207297 - RNA, 22 nt, Human
cagagacaaccugguagagaaa

SEQ ID NO: 207298 - RNA, 22 nt, Human
ccugagagagaagcgaccuggu

SEQ ID NO: 207299 - RNA, 22 nt, Human
uggcagaauuucuagcagauuc

SEQ ID NO: 207300 - RNA, 22 nt, Human
uucaccccaaauucccagugga

SEQ ID NO: 207301 - RNA, 22 nt, Human
agucacauggcagagagaaguu

SEQ ID NO: 207302 - RNA, 22 nt, Human
cuuuggaaaaauaccuggcaua

SEQ ID NO: 207303 - RNA, 22 nt, Human
ugcaggcugggaagagggacaa

SEQ ID NO: 207304 - RNA, 21 nt, Human
caauuacagauggcucagggg

SEQ ID NO: 207305 - RNA, 22 nt, Human
agagcugcaauuucauguggug

SEQ ID NO: 207306 - RNA, 22 nt, Human
uucuauguaguagcagagccaa

SEQ ID NO: 207307 - RNA, 22 nt, Human
ucuuccagcccuucuaauggua

SEQ ID NO: 207308 - RNA, 22 nt, Human
gagggcugaugcuuacuuauuu

SEQ ID NO: 207309 - RNA, 22 nt, Human
gacacagggacgugcucugccu

SEQ ID NO: 207310 - RNA, 23 nt, Human
guauuucagcauucucaguuaaa

SEQ ID NO: 207311 - RNA, 22 nt, Human
agagucaaguagggcaugggcu

SEQ ID NO: 207312 - RNA, 22 nt, Human
ugagucuagguagagaaaugca

SEQ ID NO: 207313 - RNA, 22 nt, Human
cuaauuauguuguuauaaucaa

SEQ ID NO: 207314 - RNA, 22 nt, Human
uugcuuuauuggguuuacugcc

SEQ ID NO: 207315 - RNA, 22 nt, Human
ccaucagacaauucuuucucuu

SEQ ID NO: 207316 - RNA, 23 nt, Human
auaauaauuauggcagcaaagug

SEQ ID NO: 207317 - RNA, 22 nt, Human
uaagacuucauuaguaauaugg

SEQ ID NO: 207318 - RNA, 22 nt, Human
aacaggcuccaugaacaacgug

SEQ ID NO: 207319 - RNA, 22 nt, Human
uggaaucuugcgggcacauggc

SEQ ID NO: 207320 - RNA, 20 nt, Human
cuagaagugccucaucuaga

SEQ ID NO: 207321 - RNA, 22 nt, Human
uucuucaaagaugucuguugga

SEQ ID NO: 207322 - RNA, 22 nt, Human
auccugggcaaaguaugcuguc

SEQ ID NO: 207323 - RNA, 23 nt, Human
gcuucccagacaauacugcuucc

SEQ ID NO: 207324 - RNA, 22 nt, Human
guguccaucucuguaugcugcu

SEQ ID NO: 207325 - RNA, 22 nt, Human
gaggcugggaaguccaagauca

SEQ ID NO: 207326 - RNA, 21 nt, Human
cauucacagucuggcucuuga

SEQ ID NO: 207327 - RNA, 22 nt, Human
cauuuaagagaaauauuuaguu

SEQ ID NO: 207328 - RNA, 22 nt, Human
ucugggagaguagauaaaggaa

SEQ ID NO: 207329 - RNA, 22 nt, Human
cauguguguccaugugacuaag

SEQ ID NO: 207330 - RNA, 22 nt, Human
agagccuguacuuuucugugaa

SEQ ID NO: 207331 - RNA, 22 nt, Human
ggagucugucaccuguuucucu

SEQ ID NO: 207332 - RNA, 22 nt, Human
agaagccaugguaugcaacuac

SEQ ID NO: 207333 - RNA, 22 nt, Human
gccacaugucaugugcucagua

SEQ ID NO: 207334 - RNA, 22 nt, Human
uguaaagacagauaaaacagca

SEQ ID NO: 207335 - RNA, 22 nt, Human
caguuuuugccauuaagaguaa

SEQ ID NO: 207336 - RNA, 22 nt, Human
gaguguguucuuuaugcuguga

SEQ ID NO: 207337 - RNA, 22 nt, Human
cagauggaacacagaaaggaga

SEQ ID NO: 207338 - RNA, 22 nt, Human
ucccugcaguaguggcuaagau

SEQ ID NO: 207339 - RNA, 22 nt, Human
augauauuuuaguaaagugaua

SEQ ID NO: 207340 - RNA, 22 nt, Human
ugcagcuucuuguccugugauu

SEQ ID NO: 207341 - RNA, 22 nt, Human
ugggaagacuccucaggaggcg

SEQ ID NO: 207342 - RNA, 22 nt, Human
auauacaaagggcaaccucgcu

SEQ ID NO: 207343 - RNA, 22 nt, Human
uauuaaagggaaguuaugcaug

SEQ ID NO: 207344 - RNA, 22 nt, Human
ucugggcacugcugagccugua

SEQ ID NO: 207345 - RNA, 22 nt, Human
cugcccucuagaggaggacuga

SEQ ID NO: 207346 - RNA, 22 nt, Human
agaaccuuggugagucuaaccu

SEQ ID NO: 207347 - RNA, 22 nt, Human
cugcagagcaaguaacauccuc

SEQ ID NO: 207348 - RNA, 22 nt, Human
cauagugacucaugccuauaau

SEQ ID NO: 207349 - RNA, 22 nt, Human
aaggucugaguuuugccaggcc

SEQ ID NO: 207350 - RNA, 22 nt, Human
ucugggugacccugggcaaggc

SEQ ID NO: 207351 - RNA, 22 nt, Human
gcuccuguuuguuuguuccuga

SEQ ID NO: 207352 - RNA, 22 nt, Human
gccagggugagggcugagaggu

SEQ ID NO: 207353 - RNA, 22 nt, Human
ucuguuuuugaggcuaucuucu

SEQ ID NO: 207354 - RNA, 22 nt, Human
aggaagugcuaagagaacauca

SEQ ID NO: 207355 - RNA, 22 nt, Human
ccagguggacaaggcuuucaca

SEQ ID NO: 207356 - RNA, 22 nt, Human
aaacagucugaugccaucugcc

SEQ ID NO: 207357 - RNA, 22 nt, Human
ucucugggagccaggaugacac

SEQ ID NO: 207358 - RNA, 21 nt, Human
uacagugagguguuaggaugu

SEQ ID NO: 207359 - RNA, 22 nt, Human
aaaaguauccacagcucaggag

SEQ ID NO: 207360 - RNA, 22 nt, Human
gaggggcucuuuaauaguaaca

SEQ ID NO: 207361 - RNA, 22 nt, Human
uugcagggcaaauggucagaua

SEQ ID NO: 207362 - RNA, 22 nt, Human
cuuaaaaucuggcaguuagcua

SEQ ID NO: 207363 - RNA, 22 nt, Human
aguuugccccgucacccuggug

SEQ ID NO: 207364 - RNA, 22 nt, Human
uuuucuguaagaggacuuuaau

SEQ ID NO: 207365 - RNA, 22 nt, Human
ccagggcaucacauccaguguu

SEQ ID NO: 207366 - RNA, 22 nt, Human
uuccauaauaggcuuaagugaa

SEQ ID NO: 207367 - RNA, 22 nt, Human
agagguauuagauuugcauagg

SEQ ID NO: 207368 - RNA, 22 nt, Human
aguauuuagagacacaagaugg

SEQ ID NO: 207369 - RNA, 22 nt, Human
uccuugggucagugagugaggu

SEQ ID NO: 207370 - RNA, 22 nt, Human
aagcacaucauguuguucagac

SEQ ID NO: 207371 - RNA, 22 nt, Human
acucagagucuguuugguaccu

SEQ ID NO: 207372 - RNA, 21 nt, Human
uccugccuuaguccagagcag

SEQ ID NO: 207373 - RNA, 22 nt, Human
uuuucaucucugcuuuguaccu

SEQ ID NO: 207374 - RNA, 22 nt, Human
ggggcagcuaccggaaguaggg

SEQ ID NO: 207375 - RNA, 22 nt, Human
ccaggacuuuaaguccagcacu

SEQ ID NO: 207376 - RNA, 22 nt, Human
augauggaggccgugauggacg

SEQ ID NO: 207377 - RNA, 22 nt, Human
cagaaagcucuuucaaucuugc

SEQ ID NO: 207378 - RNA, 22 nt, Human
aaguuccuaaagucagggguca

SEQ ID NO: 207379 - RNA, 22 nt, Human
ugcuccagaaaaacuugagacu

SEQ ID NO: 207380 - RNA, 22 nt, Human
uucuggaaguguuagaaucugg

SEQ ID NO: 207381 - RNA, 22 nt, Human
gaaggggguugcagucuagggu

SEQ ID NO: 207382 - RNA, 22 nt, Human
agagaacagacagaugcaauga

SEQ ID NO: 207383 - RNA, 21 nt, Human
cacaccaggcaugucuugagc

SEQ ID NO: 207384 - RNA, 22 nt, Human
uuauauuguguaauaagugaag

SEQ ID NO: 207385 - RNA, 22 nt, Human
aggcacagccucccccaacucc

SEQ ID NO: 207386 - RNA, 22 nt, Human
gggaagauaguguugagggccc

SEQ ID NO: 207387 - RNA, 22 nt, Human
uccaugcagaggagcugguggc

SEQ ID NO: 207388 - RNA, 22 nt, Human
agccuggaauuaaggaaaugca

SEQ ID NO: 207389 - RNA, 22 nt, Human
ccugggcaaaugccagagacaa

SEQ ID NO: 207390 - RNA, 22 nt, Human
aaugaaacuaguagaaucuuug

SEQ ID NO: 207391 - RNA, 22 nt, Human
cagggcaaagucuucuagaacc

SEQ ID NO: 207392 - RNA, 22 nt, Human
gcccagcagcugguggagaagg

SEQ ID NO: 207393 - RNA, 22 nt, Human
caggcuccacaggggaauccgg

SEQ ID NO: 207394 - RNA, 22 nt, Human
cugaaauuauuguuuaaucaaa

SEQ ID NO: 207395 - RNA, 22 nt, Human
aaucuuuuaggggauccugagg

SEQ ID NO: 207396 - RNA, 22 nt, Human
auguacauaaaauguauaauga

SEQ ID NO: 207397 - RNA, 22 nt, Human
gccccagccaaggugacacgaa

SEQ ID NO: 207398 - RNA, 22 nt, Human
uggggccagguggcugcagguc

SEQ ID NO: 207399 - RNA, 18 nt, Human
gcagggacacagggucac

SEQ ID NO: 207400 - RNA, 22 nt, Human
auguuuaaaggguugagaaaua

SEQ ID NO: 207401 - RNA, 22 nt, Human
uaaggcuuggacuucuccaacc

SEQ ID NO: 207402 - RNA, 22 nt, Human
ucuccuggcccugucgccaucu

SEQ ID NO: 207403 - RNA, 22 nt, Human
aguuacaguguucuauuacucu

SEQ ID NO: 207404 - RNA, 22 nt, Human
uuagacaggauguaugaaagcu

SEQ ID NO: 207405 - RNA, 18 nt, Human
aucugcuggcaggucugg

SEQ ID NO: 207406 - RNA, 23 nt, Human
ugcagggcaaguuagagacccca

SEQ ID NO: 207407 - RNA, 22 nt, Human
ccagaggagcauggccuugaga

SEQ ID NO: 207408 - RNA, 19 nt, Human
auagaaccugcaguuucaa

SEQ ID NO: 207409 - RNA, 22 nt, Human
gaagaagguggcccagggguag

SEQ ID NO: 207410 - RNA, 22 nt, Human
uuccuucuaauuuuacaccuga

SEQ ID NO: 207411 - RNA, 22 nt, Human
agaaggcugagacugggaugaa

SEQ ID NO: 207412 - RNA, 20 nt, Human
ggcagagggccugggagaag

SEQ ID NO: 207413 - RNA, 22 nt, Human
aggcucagauucacauuugguu

SEQ ID NO: 207414 - RNA, 22 nt, Human
cugcagagaccuaggucagguu

SEQ ID NO: 207415 - RNA, 22 nt, Human
agugcuuuauguuguugugcaa

SEQ ID NO: 207416 - RNA, 22 nt, Human
augaagucucuuuuucaugaga

SEQ ID NO: 207417 - RNA, 22 nt, Human
gggcuggaucuccugcaggcag

SEQ ID NO: 207418 - RNA, 22 nt, Human
gcagccacucucauuccacgug

SEQ ID NO: 207419 - RNA, 19 nt, Human
cagagagaccaaggcgcca

SEQ ID NO: 207420 - RNA, 23 nt, Human
aaaugacuaaauguucuuauaga

SEQ ID NO: 207421 - RNA, 22 nt, Human
ccuggcacagauccuucauaca

SEQ ID NO: 207422 - RNA, 22 nt, Human
uugcaaaugaccauugccacau

SEQ ID NO: 207423 - RNA, 22 nt, Human
cacccagggcugugccugccca

SEQ ID NO: 207424 - RNA, 22 nt, Human
agcagcaggauuuucguuggga

SEQ ID NO: 207425 - RNA, 22 nt, Human
ggaggccaccugaccugcuguu

SEQ ID NO: 207426 - RNA, 21 nt, Human
ucucugggcccuccugugggg

SEQ ID NO: 207427 - RNA, 22 nt, Human
acucaggccuccuucuguccuu

SEQ ID NO: 207428 - RNA, 19 nt, Human
agagaugcuaagagucuuu

SEQ ID NO: 207429 - RNA, 22 nt, Human
ucacugcuuucaaaaauuauug

SEQ ID NO: 207430 - RNA, 22 nt, Human
guagccauuggcaaugaagccu

SEQ ID NO: 207431 - RNA, 22 nt, Human
augggaguccaacaucaaggac

SEQ ID NO: 207432 - RNA, 22 nt, Human
aaauauuauugcuuaaggggag

SEQ ID NO: 207433 - RNA, 22 nt, Human
cagauuuaggucacuagaauuu

SEQ ID NO: 207434 - RNA, 22 nt, Human
ucugagagcuguagaagccuau

SEQ ID NO: 207435 - RNA, 22 nt, Human
gccaggcagccacccucugcga

SEQ ID NO: 207436 - RNA, 22 nt, Human
guauuuuuagguaaggaaagua

SEQ ID NO: 207437 - RNA, 22 nt, Human
ggggccagcaauguugaggaau

SEQ ID NO: 207438 - RNA, 22 nt, Human
aagaaagggagaaggauggugu

SEQ ID NO: 207439 - RNA, 22 nt, Human
cuuagaacauucugccugggaa

SEQ ID NO: 207440 - RNA, 19 nt, Human
uccagcagugcuugaaauc

SEQ ID NO: 207441 - RNA, 22 nt, Human
uuggcuucuggcagucuggacg

SEQ ID NO: 207442 - RNA, 22 nt, Human
ugugaaaagcaggcuacuuucu

SEQ ID NO: 207443 - RNA, 22 nt, Human
ugcugggugguugcuccucccg

SEQ ID NO: 207444 - RNA, 22 nt, Human
auucaaguccagcuucucuaca

SEQ ID NO: 207445 - RNA, 22 nt, Human
caccagcuugggcuguggaaau

SEQ ID NO: 207446 - RNA, 22 nt, Human
aguauucagcaaacgugaacag

SEQ ID NO: 207447 - RNA, 22 nt, Human
uucauucauucaugaauguuaa

SEQ ID NO: 207448 - RNA, 22 nt, Human
ucacaugagucacuaucuuaau

SEQ ID NO: 207449 - RNA, 22 nt, Human
ggcauagcggcucagcguccag

SEQ ID NO: 207450 - RNA, 22 nt, Human
ugcaucuuacguuuugaaaggg

SEQ ID NO: 207451 - RNA, 22 nt, Human
gggcuggcuaagacuuuucugu

SEQ ID NO: 207452 - RNA, 19 nt, Human
uuuuccuucuauauguuuc

SEQ ID NO: 207453 - RNA, 22 nt, Human
gaagacacuaaggcccagggag

SEQ ID NO: 207454 - RNA, 22 nt, Human
ugggucccaaacuccuagaggu

SEQ ID NO: 207455 - RNA, 22 nt, Human
aggaggcagucugucccuuagc

SEQ ID NO: 207456 - RNA, 19 nt, Human
ggaaggccacggcaggcuu

SEQ ID NO: 207457 - RNA, 22 nt, Human
gaaggccauuuuuagguagaau

SEQ ID NO: 207458 - RNA, 22 nt, Human
uacauuucagagcuccucucug

SEQ ID NO: 207459 - RNA, 22 nt, Human
uugguaaauuauuucuuccaau

SEQ ID NO: 207460 - RNA, 22 nt, Human
ggcuccagcccuggcucuucac

SEQ ID NO: 207461 - RNA, 22 nt, Human
ccagcaggagaugccugugucu

SEQ ID NO: 207462 - RNA, 22 nt, Human
ugagguaaauucuggcccaaac

SEQ ID NO: 207463 - RNA, 21 nt, Human
agagccugagaucuuccagca

SEQ ID NO: 207464 - RNA, 22 nt, Human
agggucagagaucggccaugug

SEQ ID NO: 207465 - RNA, 22 nt, Human
cccacagguggaagccucggaa

SEQ ID NO: 207466 - RNA, 22 nt, Human
agacugggguucuggcaaggag

SEQ ID NO: 207467 - RNA, 22 nt, Human
uggcagggaauacagauguuua

SEQ ID NO: 207468 - RNA, 22 nt, Human
gcccaggaaagauagggccuca

SEQ ID NO: 207469 - RNA, 22 nt, Human
ggguuccaaugaugagcaagag

SEQ ID NO: 207470 - RNA, 22 nt, Human
gcagaggcacagccccagauga

SEQ ID NO: 207471 - RNA, 22 nt, Human
agguggcucugacagcucuggu

SEQ ID NO: 207472 - RNA, 22 nt, Human
cagaacagaaguaaaauuuacc

SEQ ID NO: 207473 - RNA, 22 nt, Human
ugucauuuggacuuugguauua

SEQ ID NO: 207474 - RNA, 22 nt, Human
caaggccaaagggccacuguca

SEQ ID NO: 207475 - RNA, 22 nt, Human
aaacuucagugaaugacuuaug

SEQ ID NO: 207476 - RNA, 22 nt, Human
uccuggaguuuguaaggugagc

SEQ ID NO: 207477 - RNA, 22 nt, Human
caggcacgggggcauggccucu

SEQ ID NO: 207478 - RNA, 22 nt, Human
ugauuucucauauuguucaaaa

SEQ ID NO: 207479 - RNA, 22 nt, Human
gcaggccugguuuacaugguag

SEQ ID NO: 207480 - RNA, 22 nt, Human
gaaacacauaugaacaguugau

SEQ ID NO: 207481 - RNA, 20 nt, Human
ggcagggcaucaacagcucu

SEQ ID NO: 207482 - RNA, 22 nt, Human
aaaguguuaacacuggcuacuu

SEQ ID NO: 207483 - RNA, 22 nt, Human
auccugugcaaugacugcaucu

SEQ ID NO: 207484 - RNA, 21 nt, Human
aacuuuagaaagacugggaag

SEQ ID NO: 207485 - RNA, 22 nt, Human
caggaacacaaugagucucaaa

SEQ ID NO: 207486 - RNA, 22 nt, Human
caugagcauuuuggucuaguuu

SEQ ID NO: 207487 - RNA, 22 nt, Human
uuuaaauuuguguuuagagggu

SEQ ID NO: 207488 - RNA, 22 nt, Human
ucaagaaggaguuauuuauuca

SEQ ID NO: 207489 - RNA, 22 nt, Human
ugguccuggucaucugggcugg

SEQ ID NO: 207490 - RNA, 22 nt, Human
uacaagcugacccugaagauga

SEQ ID NO: 207491 - RNA, 22 nt, Human
gcuggcuggaugguugguucgc

SEQ ID NO: 207492 - RNA, 22 nt, Human
uucuacauauauuuuucucacu

SEQ ID NO: 207493 - RNA, 22 nt, Human
gaaugagggagauguuggugca

SEQ ID NO: 207494 - RNA, 22 nt, Human
cacugucugcuucgacucuuca

SEQ ID NO: 207495 - RNA, 22 nt, Human
uccaggcuaauuuugcauuguu

SEQ ID NO: 207496 - RNA, 22 nt, Human
gucucuuuuauggugaguugau

SEQ ID NO: 207497 - RNA, 22 nt, Human
caagcagggauacugcagggag

SEQ ID NO: 207498 - RNA, 22 nt, Human
cgcaggugaaagaggcugggca

SEQ ID NO: 207499 - RNA, 22 nt, Human
cccagcuucugagggggccuug

SEQ ID NO: 207500 - RNA, 22 nt, Human
uugaauaguuuuggauagcaua

SEQ ID NO: 207501 - RNA, 22 nt, Human
uaguggagaggauguggagaaa

SEQ ID NO: 207502 - RNA, 22 nt, Human
aagaugcagcuuuacaauaagg

SEQ ID NO: 207503 - RNA, 22 nt, Human
gaugcagcagccagcuucugaa

SEQ ID NO: 207504 - RNA, 22 nt, Human
ugcaucaaccuaauaucagcuc

SEQ ID NO: 207505 - RNA, 21 nt, Human
agugacucugaaccacuugaa

SEQ ID NO: 207506 - RNA, 22 nt, Human
uggaaugaauuuggcuuccucc

SEQ ID NO: 207507 - RNA, 22 nt, Human
caggaagccuuccuugucugcu

SEQ ID NO: 207508 - RNA, 22 nt, Human
uuacuugaaaaccaccaguauu

SEQ ID NO: 207509 - RNA, 22 nt, Human
guauaagguauguaaacuauuu

SEQ ID NO: 207510 - RNA, 22 nt, Human
auggaacaagaacucagauuua

SEQ ID NO: 207511 - RNA, 20 nt, Human
cugcaaaaugacauuaggaa

SEQ ID NO: 207512 - RNA, 22 nt, Human
guauacagauacuuagacgugc

SEQ ID NO: 207513 - RNA, 23 nt, Human
ucucagugaaucucagaauucgc

SEQ ID NO: 207514 - RNA, 22 nt, Human
guauagguuuggcucucuccag

SEQ ID NO: 207515 - RNA, 22 nt, Human
ggaggcagaacuucccgucagu

SEQ ID NO: 207516 - RNA, 22 nt, Human
agggcugcugcuccgggcccag

SEQ ID NO: 207517 - RNA, 22 nt, Human
ggcuuucuaugaacucaaaggc

SEQ ID NO: 207518 - RNA, 22 nt, Human
aauuagaagcuguuagcaaaau

SEQ ID NO: 207519 - RNA, 22 nt, Human
augggggccugaacaggcaaaa

SEQ ID NO: 207520 - RNA, 22 nt, Human
ccugcccaggagucucucugug

SEQ ID NO: 207521 - RNA, 22 nt, Human
aggcuuccuggaggaagaggua

SEQ ID NO: 207522 - RNA, 22 nt, Human
gaaaggcuuaaauuguaagggc

SEQ ID NO: 207523 - RNA, 17 nt, Human
ucucaggcacguguggc

SEQ ID NO: 207524 - RNA, 22 nt, Human
cuuuccagaccuccuuguagcu

SEQ ID NO: 207525 - RNA, 22 nt, Human
acugagcaggguuccgcaugga

SEQ ID NO: 207526 - RNA, 22 nt, Human
cuccugucccggggaccgccga

SEQ ID NO: 207527 - RNA, 22 nt, Human
aaaggagaaaacauacaggacu

SEQ ID NO: 207528 - RNA, 22 nt, Human
uaggaaaagcacaggauguucu

SEQ ID NO: 207529 - RNA, 22 nt, Human
gcugagggaccauguuucagga

SEQ ID NO: 207530 - RNA, 20 nt, Human
auuugcaucugaauaacuua

SEQ ID NO: 207531 - RNA, 22 nt, Human
gcucucagcccacugaggggaa

SEQ ID NO: 207532 - RNA, 22 nt, Human
ugucuucagcagucaucugggg

SEQ ID NO: 207533 - RNA, 22 nt, Human
aaacaagucacuuuaucuugaa

SEQ ID NO: 207534 - RNA, 22 nt, Human
ccuggcaggcaagaggaaggga

SEQ ID NO: 207535 - RNA, 22 nt, Human
aacagcuuuuuuggucagcauu

SEQ ID NO: 207536 - RNA, 22 nt, Human
augagagguuucgucagaggaa

SEQ ID NO: 207537 - RNA, 22 nt, Human
ugcaguuuuggccauugaaggc

SEQ ID NO: 207538 - RNA, 22 nt, Human
caacaucaguccucaugagaca

SEQ ID NO: 207539 - RNA, 22 nt, Human
aagcucagagguagauaauguu

SEQ ID NO: 207540 - RNA, 22 nt, Human
ucaugucagcuguugaugugca

SEQ ID NO: 207541 - RNA, 22 nt, Human
caugcagcaggaucucauuccc

SEQ ID NO: 207542 - RNA, 22 nt, Human
cagcacguugaaguagaguaag

SEQ ID NO: 207543 - RNA, 22 nt, Human
ccugagaaauagcaucauuuuu

SEQ ID NO: 207544 - RNA, 22 nt, Human
gaugcugacugaccaaaaggau

SEQ ID NO: 207545 - RNA, 22 nt, Human
uagacagauguuuucuggcugu

SEQ ID NO: 207546 - RNA, 22 nt, Human
ugcugcuguaucaugccuucau

SEQ ID NO: 207547 - RNA, 17 nt, Human
gucuggaguggccuuca

SEQ ID NO: 207548 - RNA, 22 nt, Human
ugcaaacaggagaguaaguaua

SEQ ID NO: 207549 - RNA, 22 nt, Human
uauucagaguguagcaaauaga

SEQ ID NO: 207550 - RNA, 19 nt, Human
uucugggcauucauauuua

SEQ ID NO: 207551 - RNA, 20 nt, Human
gaacuugggcaaguggcuua

SEQ ID NO: 207552 - RNA, 22 nt, Human
ugcugcucacacacagugaaug

SEQ ID NO: 207553 - RNA, 18 nt, Human
ggcaugugagugcugagg

SEQ ID NO: 207554 - RNA, 22 nt, Human
ggcugcaggaugcccagccgug

SEQ ID NO: 207555 - RNA, 20 nt, Human
ugguccaggaccuggugucc

SEQ ID NO: 207556 - RNA, 22 nt, Human
acugaacauaugcaagaccauu

SEQ ID NO: 207557 - RNA, 19 nt, Human
uaucaaucacggcaucuuu

SEQ ID NO: 207558 - RNA, 22 nt, Human
ccugggucuccuccugcuggcu

SEQ ID NO: 207559 - RNA, 22 nt, Human
uggagcagggcaucacugugcg

SEQ ID NO: 207560 - RNA, 22 nt, Human
caucaaaucugacuuuucuucc

SEQ ID NO: 207561 - RNA, 22 nt, Human
aaguauauuuagcugagcuugu

SEQ ID NO: 207562 - RNA, 22 nt, Human
cacauuccugagcuucgaccug

SEQ ID NO: 207563 - RNA, 22 nt, Human
agccagccccugacuguguccu

SEQ ID NO: 207564 - RNA, 22 nt, Human
uguauuuucugaagauaaucaa

SEQ ID NO: 207565 - RNA, 22 nt, Human
aucuaaacuauaguaccuaguc

SEQ ID NO: 207566 - RNA, 22 nt, Human
gcuucccacagcuggacugggg

SEQ ID NO: 207567 - RNA, 22 nt, Human
ucugggcuggcuuuaugcugac

SEQ ID NO: 207568 - RNA, 22 nt, Human
cagcuucuucaguccuggagcu

SEQ ID NO: 207569 - RNA, 21 nt, Human
aaacagagcugaguaauagau

SEQ ID NO: 207570 - RNA, 22 nt, Human
aacugcaagaguaaaugucuag

SEQ ID NO: 207571 - RNA, 22 nt, Human
aggcuggauuuauggggacuuc

SEQ ID NO: 207572 - RNA, 22 nt, Human
aaaagagagcugaggagcucca

SEQ ID NO: 207573 - RNA, 22 nt, Human
aaaaauguuaucuacuguccga

SEQ ID NO: 207574 - RNA, 22 nt, Human
ugagaugcugcuguaacaaaua

SEQ ID NO: 207575 - RNA, 22 nt, Human
aaggcugagacagcacaggucc

SEQ ID NO: 207576 - RNA, 20 nt, Human
ggaaaaaugcaugcucaaga

SEQ ID NO: 207577 - RNA, 22 nt, Human
gaggccugggagccuguccucc

SEQ ID NO: 207578 - RNA, 22 nt, Human
aggcugagcggggucccagagc

SEQ ID NO: 207579 - RNA, 22 nt, Human
cccagccaagugaucugaccgc

SEQ ID NO: 207580 - RNA, 22 nt, Human
gcagacaggcccaguggaggga

SEQ ID NO: 207581 - RNA, 22 nt, Human
ugucugugacagaccuuugcua

SEQ ID NO: 207582 - RNA, 22 nt, Human
ucuggcuccguguccgcuccca

SEQ ID NO: 207583 - RNA, 22 nt, Human
caggaacuggaacccuggccga

SEQ ID NO: 207584 - RNA, 22 nt, Human
aaucuuuaaggacucagucucu

SEQ ID NO: 207585 - RNA, 21 nt, Human
auucaguuugacaucuagcag

SEQ ID NO: 207586 - RNA, 22 nt, Human
aauggcaaaaggauaacaagga

SEQ ID NO: 207587 - RNA, 22 nt, Human
aggcacaguggcucacaccugu

SEQ ID NO: 207588 - RNA, 22 nt, Human
augaauugaggaaaacagucgu

SEQ ID NO: 207589 - RNA, 22 nt, Human
gcucucucuuggggauucagca

SEQ ID NO: 207590 - RNA, 22 nt, Human
acaggcaguugagguuugugug

SEQ ID NO: 207591 - RNA, 22 nt, Human
uuaagauuuguagagaaaaagc

SEQ ID NO: 207592 - RNA, 22 nt, Human
aggcucuguuugcugugguacc

SEQ ID NO: 207593 - RNA, 22 nt, Human
uacacuuguucaaacagcaaaa

SEQ ID NO: 207594 - RNA, 22 nt, Human
augaggcagguggaggcugcca

SEQ ID NO: 207595 - RNA, 22 nt, Human
ccagggagccuggugugucagc

SEQ ID NO: 207596 - RNA, 22 nt, Human
uuuaggaucaaugagaaagucu

SEQ ID NO: 207597 - RNA, 21 nt, Human
auaucacaaacauauggucug

SEQ ID NO: 207598 - RNA, 22 nt, Human
cagagcaguccuugucaaucag

SEQ ID NO: 207599 - RNA, 22 nt, Human
uacuguacugucuuuuuugcug

SEQ ID NO: 207600 - RNA, 22 nt, Human
cuggucagagcaacugcucaca

SEQ ID NO: 207601 - RNA, 22 nt, Human
aagcagguuaugaaauauagaa

SEQ ID NO: 207602 - RNA, 22 nt, Human
aacaguuugcuuuaagaggcac

SEQ ID NO: 207603 - RNA, 22 nt, Human
cuuagaacauacuuagugugau

SEQ ID NO: 207604 - RNA, 22 nt, Human
uuggggaagaguugacuuugga

SEQ ID NO: 207605 - RNA, 22 nt, Human
caaguccauccuacugccuucu

SEQ ID NO: 207606 - RNA, 22 nt, Human
agagucuuggcauucaugcguu

SEQ ID NO: 207607 - RNA, 22 nt, Human
auacauucaaaggaaggauaga

SEQ ID NO: 207608 - RNA, 22 nt, Human
ugcagcuguuacggacccuguc

SEQ ID NO: 207609 - RNA, 22 nt, Human
cccagcaguacccaagcccuug

SEQ ID NO: 207610 - RNA, 22 nt, Human
ugcacaccucuccaccacucuc

SEQ ID NO: 207611 - RNA, 22 nt, Human
ugagacacucucgggcacauuu

SEQ ID NO: 207612 - RNA, 22 nt, Human
acacaugugucugcaugcagug

SEQ ID NO: 207613 - RNA, 22 nt, Human
gcugacagcaaggggcugcccu

SEQ ID NO: 207614 - RNA, 22 nt, Human
ggcagaggaaggaugaauucac

SEQ ID NO: 207615 - RNA, 22 nt, Human
agaaaauuacuccagagacaag

SEQ ID NO: 207616 - RNA, 22 nt, Human
uggcaaagaugguucucaccau

SEQ ID NO: 207617 - RNA, 22 nt, Human
ccuggcucugcagccacuccag

SEQ ID NO: 207618 - RNA, 20 nt, Human
ucucccugcccaucucagau

SEQ ID NO: 207619 - RNA, 22 nt, Human
auacaguaauugcauaggcuuc

SEQ ID NO: 207620 - RNA, 20 nt, Human
gauggauuucaacaccuuuc

SEQ ID NO: 207621 - RNA, 22 nt, Human
aaaggugacacucugccagcug

SEQ ID NO: 207622 - RNA, 22 nt, Human
gcuaaauaaucuucuucugaca

SEQ ID NO: 207623 - RNA, 23 nt, Human
acuuucccauagcauggcuuccu

SEQ ID NO: 207624 - RNA, 22 nt, Human
uaucuagauauuuggauaaaug

SEQ ID NO: 207625 - RNA, 22 nt, Human
aagaagcacuuuccuacauguu

SEQ ID NO: 207626 - RNA, 22 nt, Human
gcuccaguggacugggggaggc

SEQ ID NO: 207627 - RNA, 22 nt, Human
uuacagcagugggaaggaguca

SEQ ID NO: 207628 - RNA, 22 nt, Human
uugcaaguuccuuaugagaauc

SEQ ID NO: 207629 - RNA, 22 nt, Human
gaggcagccucaguggaccucg

SEQ ID NO: 207630 - RNA, 23 nt, Human
gcaagcaaggcaggguaaagaga

SEQ ID NO: 207631 - RNA, 22 nt, Human
aguuuguaaguucauuaugagu

SEQ ID NO: 207632 - RNA, 22 nt, Human
uaacaguaaaguaaguuagcuu

SEQ ID NO: 207633 - RNA, 21 nt, Human
ugucagcucccuguccugugu

SEQ ID NO: 207634 - RNA, 18 nt, Human
uaaguaaggucauauggg

SEQ ID NO: 207635 - RNA, 22 nt, Human
gcuggccucgcaggcaggaugu

SEQ ID NO: 207636 - RNA, 22 nt, Human
aaaguacuuacaguaugcuugg

SEQ ID NO: 207637 - RNA, 22 nt, Human
ggagcugggaacuauguaguau

SEQ ID NO: 207638 - RNA, 22 nt, Human
aaguguuuaugguuauuguuaa

SEQ ID NO: 207639 - RNA, 22 nt, Human
gcgacuguacagaauugccccu

SEQ ID NO: 207640 - RNA, 22 nt, Human
ucagcagaggagugucuugccc

SEQ ID NO: 207641 - RNA, 22 nt, Human
cucuuaaagcuuccaguuucaa

SEQ ID NO: 207642 - RNA, 22 nt, Human
ccagcaggaaagugacguuuga

SEQ ID NO: 207643 - RNA, 22 nt, Human
aggccuugccaaugagagaacu

SEQ ID NO: 207644 - RNA, 22 nt, Human
ucagaaagacgaaacagauggg

SEQ ID NO: 207645 - RNA, 20 nt, Human
uuucagagugucuuuccauu

SEQ ID NO: 207646 - RNA, 22 nt, Human
agcacccucagccuuauccaga

SEQ ID NO: 207647 - RNA, 22 nt, Human
agagcugaauuuggguggugga

SEQ ID NO: 207648 - RNA, 22 nt, Human
ugccaaguggagcucaggaauc

SEQ ID NO: 207649 - RNA, 22 nt, Human
acugcagagguggggugcagag

SEQ ID NO: 207650 - RNA, 22 nt, Human
ccuggcucuucagagguuccua

SEQ ID NO: 207651 - RNA, 22 nt, Human
ugcugcagauugcagauuaacu

SEQ ID NO: 207652 - RNA, 22 nt, Human
guugcugggagcagggauccug

SEQ ID NO: 207653 - RNA, 21 nt, Human
acaggcuacaugcaggagcug

SEQ ID NO: 207654 - RNA, 22 nt, Human
cuggcuagcaccucagcucaga

SEQ ID NO: 207655 - RNA, 22 nt, Human
gcucaggaaggcucaaccagga

SEQ ID NO: 207656 - RNA, 22 nt, Human
ugcugggcccagggagccucug

SEQ ID NO: 207657 - RNA, 22 nt, Human
auggcauuguuuauagauugca

SEQ ID NO: 207658 - RNA, 22 nt, Human
gcacacagcuagauuaccauuc

SEQ ID NO: 207659 - RNA, 22 nt, Human
ucagaggacaagcucccuggug

SEQ ID NO: 207660 - RNA, 22 nt, Human
ugcuuuauuggaaccucauccu

SEQ ID NO: 207661 - RNA, 22 nt, Human
cagcaccauuugcagccucuuu

SEQ ID NO: 207662 - RNA, 22 nt, Human
cugugcugaacaauucugcauu

SEQ ID NO: 207663 - RNA, 22 nt, Human
aggggcggccugccugaagcag

SEQ ID NO: 207664 - RNA, 22 nt, Human
cugccaggcacgugcagcauca

SEQ ID NO: 207665 - RNA, 22 nt, Human
gcugggaagagaugcacaugau

SEQ ID NO: 207666 - RNA, 22 nt, Human
augucuguggcaauuguugaug

SEQ ID NO: 207667 - RNA, 20 nt, Human
aggaggaaaaaaugacgagc

SEQ ID NO: 207668 - RNA, 22 nt, Human
gagagcccucacuccuucccug

SEQ ID NO: 207669 - RNA, 22 nt, Human
gcugggagggaggcuauacccu

SEQ ID NO: 207670 - RNA, 22 nt, Human
auucuuauuuaaauagagucug

SEQ ID NO: 207671 - RNA, 22 nt, Human
aaacaaugacaacacagcugcg

SEQ ID NO: 207672 - RNA, 22 nt, Human
cuucuagagcuggagcaaaugu

SEQ ID NO: 207673 - RNA, 22 nt, Human
aagugucuucugauggggugug

SEQ ID NO: 207674 - RNA, 22 nt, Human
ucuggagaagcagugagaguca

SEQ ID NO: 207675 - RNA, 22 nt, Human
uguccaaugcccuuuccacaug

SEQ ID NO: 207676 - RNA, 22 nt, Human
acucagaggcuggaaaucaaag

SEQ ID NO: 207677 - RNA, 22 nt, Human
ucagacagaggagcucgugcag

SEQ ID NO: 207678 - RNA, 22 nt, Human
uguuuacauggagguuuucagc

SEQ ID NO: 207679 - RNA, 23 nt, Human
uuuuccagaaucgacucuguaga

SEQ ID NO: 207680 - RNA, 22 nt, Human
auagcaaauauuuuaaugagca

SEQ ID NO: 207681 - RNA, 20 nt, Human
auauuucagguagugugccc

SEQ ID NO: 207682 - RNA, 22 nt, Human
ccucucucuuguagucccugcc

SEQ ID NO: 207683 - RNA, 22 nt, Human
ccuguucaagggaugauugacc

SEQ ID NO: 207684 - RNA, 23 nt, Human
ucagagaaugguaugcuuuuccu

SEQ ID NO: 207685 - RNA, 22 nt, Human
gugugcagaggcaggaggugcu

SEQ ID NO: 207686 - RNA, 22 nt, Human
ugcauguguuugccacagugag

SEQ ID NO: 207687 - RNA, 22 nt, Human
cuccaggcucguccaagaucga

SEQ ID NO: 207688 - RNA, 21 nt, Human
gugcaugcgccgcugagaugc

SEQ ID NO: 207689 - RNA, 22 nt, Human
ucucccagaggaucccagugga

SEQ ID NO: 207690 - RNA, 19 nt, Human
ggcucucccuugagagagc

SEQ ID NO: 207691 - RNA, 22 nt, Human
caaagcagaagguucuguggua

SEQ ID NO: 207692 - RNA, 22 nt, Human
cccaggguggaugcaagcagca

SEQ ID NO: 207693 - RNA, 22 nt, Human
uccuggcccaaucugcccauga

SEQ ID NO: 207694 - RNA, 18 nt, Human
gagcugagaagaggaugc

SEQ ID NO: 207695 - RNA, 22 nt, Human
cugagggagaagugaucucuac

SEQ ID NO: 207696 - RNA, 22 nt, Human
gcuggagaccucagagaaccca

SEQ ID NO: 207697 - RNA, 23 nt, Human
ccuccugggcacaggccugaugg

SEQ ID NO: 207698 - RNA, 22 nt, Human
acuuagaauauguucaagauuu

SEQ ID NO: 207699 - RNA, 22 nt, Human
uugaauuauauguauguccuuu

SEQ ID NO: 207700 - RNA, 22 nt, Human
aagaguuuuuggagugugaguu

SEQ ID NO: 207701 - RNA, 22 nt, Human
uccauauaaugggauuccuuau

SEQ ID NO: 207702 - RNA, 22 nt, Human
cagagacacuuaacaggaaugg

SEQ ID NO: 207703 - RNA, 22 nt, Human
agaaaaaucuuggcgcuugucu

SEQ ID NO: 207704 - RNA, 22 nt, Human
uaguggaggguguagcugcugg

SEQ ID NO: 207705 - RNA, 22 nt, Human
gaagugacagaagggaugggca

SEQ ID NO: 207706 - RNA, 20 nt, Human
uaucuuacuuuagucauuug

SEQ ID NO: 207707 - RNA, 22 nt, Human
gggaaacuagaagcaggguuau

SEQ ID NO: 207708 - RNA, 22 nt, Human
cagccucuuuccacaucaggca

SEQ ID NO: 207709 - RNA, 23 nt, Human
uagauccuauggcugugugcaga

SEQ ID NO: 207710 - RNA, 22 nt, Human
ugagcaccaggcaccacagcuc

SEQ ID NO: 207711 - RNA, 22 nt, Human
guuagaauaaaaggucagagag

SEQ ID NO: 207712 - RNA, 22 nt, Human
ucagacaggccucuccagccuc

SEQ ID NO: 207713 - RNA, 22 nt, Human
ccaggcucagcgcgcacgucug

SEQ ID NO: 207714 - RNA, 22 nt, Human
ucucaucuucauaucugaaaga

SEQ ID NO: 207715 - RNA, 22 nt, Human
aauuacugaugccuguguucca

SEQ ID NO: 207716 - RNA, 22 nt, Human
uguccuggaucaugccucugaa

SEQ ID NO: 207717 - RNA, 22 nt, Human
aacuggaaggauugcagauguc

SEQ ID NO: 207718 - RNA, 22 nt, Human
cacugcccaggaccugccaccc

SEQ ID NO: 207719 - RNA, 22 nt, Human
agugacagggaaaaugacacug

SEQ ID NO: 207720 - RNA, 22 nt, Human
guagggcauagagauguuggca

SEQ ID NO: 207721 - RNA, 18 nt, Human
gccagugcccuggcucac

SEQ ID NO: 207722 - RNA, 22 nt, Human
ugcugcaggaauucucaaggga

SEQ ID NO: 207723 - RNA, 22 nt, Human
uaaaggaacugcugcuauggaa

SEQ ID NO: 207724 - RNA, 22 nt, Human
ccuguacagugaaugaauguga

SEQ ID NO: 207725 - RNA, 22 nt, Human
cugagagaaucaugcugcaggu

SEQ ID NO: 207726 - RNA, 22 nt, Human
uaggaaauugccaauauaugac

SEQ ID NO: 207727 - RNA, 22 nt, Human
ugcauuuuuaacaaggcuaauu

SEQ ID NO: 207728 - RNA, 22 nt, Human
uagaaacaucagcuaaccaaaa

SEQ ID NO: 207729 - RNA, 22 nt, Human
cuccuuccaacaagagaaagag

SEQ ID NO: 207730 - RNA, 17 nt, Human
uccuuucuuuaccuguu

SEQ ID NO: 207731 - RNA, 22 nt, Human
acauuucuucccuuuagcagaa

SEQ ID NO: 207732 - RNA, 22 nt, Human
acugcccauuaaaggugcuuug

SEQ ID NO: 207733 - RNA, 22 nt, Human
aguguagaaggagaaauggauc

SEQ ID NO: 207734 - RNA, 22 nt, Human
acuccaaaaccugcggcuuggu

SEQ ID NO: 207735 - RNA, 22 nt, Human
ccaggcucugagccucacucuu

SEQ ID NO: 207736 - RNA, 22 nt, Human
aaaauuguaggaacugaaucaa

SEQ ID NO: 207737 - RNA, 22 nt, Human
gguggagcuggaccaggagagg

SEQ ID NO: 207738 - RNA, 22 nt, Human
uuguuuugcuaaagggucauca

SEQ ID NO: 207739 - RNA, 22 nt, Human
uagggcuccacucccagagauu

SEQ ID NO: 207740 - RNA, 22 nt, Human
ccuccugggacucauuagcacc

SEQ ID NO: 207741 - RNA, 22 nt, Human
gcguccagggaaggcccagcug

SEQ ID NO: 207742 - RNA, 22 nt, Human
gccaggcugaggcucuggaaga

SEQ ID NO: 207743 - RNA, 22 nt, Human
uuucagaaauuguuauuauucu

SEQ ID NO: 207744 - RNA, 22 nt, Human
ugccucugguuaucugguaccu

SEQ ID NO: 207745 - RNA, 22 nt, Human
ggaucugggguagagcaguggg

SEQ ID NO: 207746 - RNA, 22 nt, Human
caugacaauauguucuuucauu

SEQ ID NO: 207747 - RNA, 22 nt, Human
ccuagagugauugagagcauca

SEQ ID NO: 207748 - RNA, 22 nt, Human
agacagacguagugugagagua

SEQ ID NO: 207749 - RNA, 22 nt, Human
cauaaugucugacacaguaaga

SEQ ID NO: 207750 - RNA, 22 nt, Human
cucucagggacccagccagccu

SEQ ID NO: 207751 - RNA, 22 nt, Human
gcugacucagaugcagcuggau

SEQ ID NO: 207752 - RNA, 20 nt, Human
aaaagcagccagagauggua

SEQ ID NO: 207753 - RNA, 22 nt, Human
cagaggcagugggguugcuccu

SEQ ID NO: 207754 - RNA, 22 nt, Human
caucuguaggugacacaugagu

SEQ ID NO: 207755 - RNA, 19 nt, Human
ggccugaggccacagaucc

SEQ ID NO: 207756 - RNA, 22 nt, Human
augauugcagcccuacagcugu

SEQ ID NO: 207757 - RNA, 22 nt, Human
ggucuggcaggugaggacucag

SEQ ID NO: 207758 - RNA, 22 nt, Human
aguuguauacacuuaggcagau

SEQ ID NO: 207759 - RNA, 22 nt, Human
ugaaggcagcaugcacacuagu

SEQ ID NO: 207760 - RNA, 20 nt, Human
acuccagguggcaugaggac

SEQ ID NO: 207761 - RNA, 22 nt, Human
aaauacauuuacagucguggcu

SEQ ID NO: 207762 - RNA, 22 nt, Human
uccauuuuucaugacuccucaa

SEQ ID NO: 207763 - RNA, 22 nt, Human
uucucaggguagaggugacacu

SEQ ID NO: 207764 - RNA, 23 nt, Human
ugagcccaggaggucaaggcugc

SEQ ID NO: 207765 - RNA, 22 nt, Human
uaaugauauuucccauuucucu

SEQ ID NO: 207766 - RNA, 22 nt, Human
ggcagccauggacacuggcuag

SEQ ID NO: 207767 - RNA, 22 nt, Human
ugugagcuuaggacagggcuau

SEQ ID NO: 207768 - RNA, 22 nt, Human
cggggcagaaaguugucuuuug

SEQ ID NO: 207769 - RNA, 22 nt, Human
cuggaagaacuccaguucugug

SEQ ID NO: 207770 - RNA, 22 nt, Human
gcuggcagggugguugagagag

SEQ ID NO: 207771 - RNA, 22 nt, Human
auacuuucugaccaauuaauug

SEQ ID NO: 207772 - RNA, 22 nt, Human
guccuggaguggcauggcaugg

SEQ ID NO: 207773 - RNA, 22 nt, Human
agccccucuguggcucugccuc

SEQ ID NO: 207774 - RNA, 20 nt, Human
caccuggcugacugucucca

SEQ ID NO: 207775 - RNA, 22 nt, Human
uuuagaauuggcuagugggaau

SEQ ID NO: 207776 - RNA, 23 nt, Human
uugaaaaauauagucccauuguc

SEQ ID NO: 207777 - RNA, 22 nt, Human
cacagcugaaguagccaugugg

SEQ ID NO: 207778 - RNA, 22 nt, Human
uguguauguaagcaugugcaua

SEQ ID NO: 207779 - RNA, 20 nt, Human
aggcugaguucuaugcacuu

SEQ ID NO: 207780 - RNA, 22 nt, Human
cauaaaagguagcaguuugaaa

SEQ ID NO: 207781 - RNA, 22 nt, Human
auuacaauaauacaugcucauu

SEQ ID NO: 207782 - RNA, 22 nt, Human
aagaugaaucaguauguguccu

SEQ ID NO: 207783 - RNA, 22 nt, Human
gucagcaggguccccuugagug

SEQ ID NO: 207784 - RNA, 22 nt, Human
ccagcuuuuagugggcuuauua

SEQ ID NO: 207785 - RNA, 22 nt, Human
accaggagccacaggaggagcc

SEQ ID NO: 207786 - RNA, 21 nt, Human
ucaggcugucugcugguucca

SEQ ID NO: 207787 - RNA, 22 nt, Human
gcaggcugcccucuuguguuga

SEQ ID NO: 207788 - RNA, 22 nt, Human
uauccacacugggauguuuuga

SEQ ID NO: 207789 - RNA, 22 nt, Human
agcuccaagguugaggagugag

SEQ ID NO: 207790 - RNA, 22 nt, Human
aauuagaagggaguuauugaua

SEQ ID NO: 207791 - RNA, 22 nt, Human
gccugccuucggugcgcagcgg

SEQ ID NO: 207792 - RNA, 22 nt, Human
cccaggcuggggcuccuccagc

SEQ ID NO: 207793 - RNA, 22 nt, Human
aggagcaaaugaugagacagca

SEQ ID NO: 207794 - RNA, 22 nt, Human
gcuguucagaugcgauucagga

SEQ ID NO: 207795 - RNA, 17 nt, Human
gcugagaaggggaagag

SEQ ID NO: 207796 - RNA, 22 nt, Human
agcacagagguggaaguguaua

SEQ ID NO: 207797 - RNA, 22 nt, Human
aucuuuuaugagcguucugaca

SEQ ID NO: 207798 - RNA, 22 nt, Human
aagagaugauggcagccagagg

SEQ ID NO: 207799 - RNA, 22 nt, Human
ggcugucucugugacugccacc

SEQ ID NO: 207800 - RNA, 22 nt, Human
cuugagaagcauuaagagguag

SEQ ID NO: 207801 - RNA, 22 nt, Human
gagcaaacaucagugaugucug

SEQ ID NO: 207802 - RNA, 22 nt, Human
aaacaugcuggauuuagaauau

SEQ ID NO: 207803 - RNA, 19 nt, Human
accaggaguaucagagcug

SEQ ID NO: 207804 - RNA, 22 nt, Human
aguaucagaugugauuaaaggg

SEQ ID NO: 207805 - RNA, 22 nt, Human
gaccucagcuguggggaugcug

SEQ ID NO: 207806 - RNA, 22 nt, Human
ggaggugaucagaguuuugagg

SEQ ID NO: 207807 - RNA, 22 nt, Human
uuuaugagcaaugcugagggga

SEQ ID NO: 207808 - RNA, 22 nt, Human
aaagaaaccuaucagccacaug

SEQ ID NO: 207809 - RNA, 20 nt, Human
gcucaggugacagucaggag

SEQ ID NO: 207810 - RNA, 22 nt, Human
gaggcuggggucugccuuucug

SEQ ID NO: 207811 - RNA, 22 nt, Human
ugaaauaauaucuggaucaauc

SEQ ID NO: 207812 - RNA, 22 nt, Human
gauugucacucccuauauggua

SEQ ID NO: 207813 - RNA, 22 nt, Human
aggcuucuccacauaaaguuac

SEQ ID NO: 207814 - RNA, 22 nt, Human
gaaaaguauguuuauuuugacu

SEQ ID NO: 207815 - RNA, 22 nt, Human
ucacugcucuccaauguggagu

SEQ ID NO: 207816 - RNA, 22 nt, Human
uuugcauuguaauauuuaguuc

SEQ ID NO: 207817 - RNA, 22 nt, Human
gaggacagugugaucugccagc

SEQ ID NO: 207818 - RNA, 22 nt, Human
aaaguuuuagcuguccaguucc

SEQ ID NO: 207819 - RNA, 22 nt, Human
caccaggcugcccaggacaggg

SEQ ID NO: 207820 - RNA, 22 nt, Human
ggcagcaugggugccuuuguga

SEQ ID NO: 207821 - RNA, 23 nt, Human
ucuuuucaaugguucuuuaugug

SEQ ID NO: 207822 - RNA, 22 nt, Human
gugcuccauugucuagaacugg

SEQ ID NO: 207823 - RNA, 22 nt, Human
ccugugcauugaguuugcaccc

SEQ ID NO: 207824 - RNA, 22 nt, Human
cugcuguccaaccugcacucgc

SEQ ID NO: 207825 - RNA, 22 nt, Human
caguccagagcccaccagagga

SEQ ID NO: 207826 - RNA, 22 nt, Human
uccugggagaguuugauucauu

SEQ ID NO: 207827 - RNA, 22 nt, Human
cucuucaauagauuguugaggg

SEQ ID NO: 207828 - RNA, 20 nt, Human
cagaaagcauguuccagggc

SEQ ID NO: 207829 - RNA, 22 nt, Human
agagcugaauucaagugcuggc

SEQ ID NO: 207830 - RNA, 22 nt, Human
augcagaaggagccaugcuugc

SEQ ID NO: 207831 - RNA, 22 nt, Human
accucagagaccucucaggugc

SEQ ID NO: 207832 - RNA, 22 nt, Human
uggaagcaucacuucuugccug

SEQ ID NO: 207833 - RNA, 22 nt, Human
gaugggcguggcgcguuuggug

SEQ ID NO: 207834 - RNA, 22 nt, Human
gccagggggucagcaggcacuu

SEQ ID NO: 207835 - RNA, 22 nt, Human
cuugcuuuccaaaugacucacu

SEQ ID NO: 207836 - RNA, 22 nt, Human
aauccauuaaaaacaagcgcau

SEQ ID NO: 207837 - RNA, 23 nt, Human
gggaccugguaggaggugauugg

SEQ ID NO: 207838 - RNA, 22 nt, Human
ucuggcucaggagcuguguuca

SEQ ID NO: 207839 - RNA, 22 nt, Human
ccaguuucuuaaguaggaagaa

SEQ ID NO: 207840 - RNA, 22 nt, Human
ucuguagucucugauauaucug

SEQ ID NO: 207841 - RNA, 22 nt, Human
acucuuauggaaauuuuaacua

SEQ ID NO: 207842 - RNA, 22 nt, Human
guuucgucaggcuuauucuauc

SEQ ID NO: 207843 - RNA, 23 nt, Human
uuuuauugauauguagcuguugu

SEQ ID NO: 207844 - RNA, 22 nt, Human
auucagagauuguuauucagac

SEQ ID NO: 207845 - RNA, 22 nt, Human
cagcucuucagugccugagaua

SEQ ID NO: 207846 - RNA, 22 nt, Human
acagaugaggaauuuauuuggu

SEQ ID NO: 207847 - RNA, 22 nt, Human
accauguguuuuacacauggua

SEQ ID NO: 207848 - RNA, 22 nt, Human
ugcccuguggggauuuccagcc

SEQ ID NO: 207849 - RNA, 22 nt, Human
gcagugcugaucccauggcaga

SEQ ID NO: 207850 - RNA, 22 nt, Human
agcuccagagccacauccauca

SEQ ID NO: 207851 - RNA, 22 nt, Human
ucacacagauugguagagcuga

SEQ ID NO: 207852 - RNA, 18 nt, Human
ugagcaggggcugaccuu

SEQ ID NO: 207853 - RNA, 17 nt, Human
uaaauacacaaggguau

SEQ ID NO: 207854 - RNA, 22 nt, Human
gcugggcaacggaagagagaaa

SEQ ID NO: 207855 - RNA, 22 nt, Human
auucuaagucuuguucacauuc

SEQ ID NO: 207856 - RNA, 22 nt, Human
acugugugcuggacaugauguu

SEQ ID NO: 207857 - RNA, 22 nt, Human
gggcuccaucacaggcuccauc

SEQ ID NO: 207858 - RNA, 22 nt, Human
ugucaacugugaugucaacacu

SEQ ID NO: 207859 - RNA, 22 nt, Human
ucucugucugcacccaaucaau

SEQ ID NO: 207860 - RNA, 22 nt, Human
uaagcaaucuaaaagccuuacc

SEQ ID NO: 207861 - RNA, 15 nt, Human
agacagacaguggga

SEQ ID NO: 207862 - RNA, 22 nt, Human
gacacagacaguuagagguaau

SEQ ID NO: 207863 - RNA, 22 nt, Human
ggaggggaacuaaucccgugac

SEQ ID NO: 207864 - RNA, 22 nt, Human
uaggcucauuaaguccccaggg

SEQ ID NO: 207865 - RNA, 22 nt, Human
ccuguucacgguguguuguuag

SEQ ID NO: 207866 - RNA, 22 nt, Human
caaugucaaggagaccaaaacg

SEQ ID NO: 207867 - RNA, 22 nt, Human
ccuuggcccuagccucaggcaa

SEQ ID NO: 207868 - RNA, 22 nt, Human
agccuggccugggcaggcacau

SEQ ID NO: 207869 - RNA, 22 nt, Human
aagacauuguggagauguugcu

SEQ ID NO: 207870 - RNA, 22 nt, Human
aguuagaauauaauuauguuaa

SEQ ID NO: 207871 - RNA, 22 nt, Human
caguuuccugaagagaaagaau

SEQ ID NO: 207872 - RNA, 22 nt, Human
acaauaacuucuguuuccuugc

SEQ ID NO: 207873 - RNA, 22 nt, Human
uuguacagaaacugcauuugga

SEQ ID NO: 207874 - RNA, 21 nt, Human
caagacauaugaguacucugg

SEQ ID NO: 207875 - RNA, 22 nt, Human
gaaaggcuaugaguuugguaua

SEQ ID NO: 207876 - RNA, 22 nt, Human
gauugcugccagcguguccgug

SEQ ID NO: 207877 - RNA, 22 nt, Human
ccagcuggggaaguggggcaua

SEQ ID NO: 207878 - RNA, 22 nt, Human
ggaggcagaauagagugugggu

SEQ ID NO: 207879 - RNA, 22 nt, Human
agugcaggcucgcuugugaggc

SEQ ID NO: 207880 - RNA, 18 nt, Human
uaggagagaauuuauuua

SEQ ID NO: 207881 - RNA, 22 nt, Human
gauaaacaugaaguucugugua

SEQ ID NO: 207882 - RNA, 22 nt, Human
ucaaugagcuggggacguguac

SEQ ID NO: 207883 - RNA, 22 nt, Human
ucaggaagugccuaggcuggcc

SEQ ID NO: 207884 - RNA, 21 nt, Human
auuccacuuuuccuucaggga

SEQ ID NO: 207885 - RNA, 22 nt, Human
uauguuacucacauguucuugc

SEQ ID NO: 207886 - RNA, 22 nt, Human
guggcaggucccauuggagcag

SEQ ID NO: 207887 - RNA, 20 nt, Human
caaguguuauugugcauuua

SEQ ID NO: 207888 - RNA, 22 nt, Human
uagaacuugauagacaguacaa

SEQ ID NO: 207889 - RNA, 22 nt, Human
agcuuucucucagccaggcugc

SEQ ID NO: 207890 - RNA, 22 nt, Human
aaagaacaaaugauauaugguu

SEQ ID NO: 207891 - RNA, 22 nt, Human
cucaggcugguuuggguuguuu

SEQ ID NO: 207892 - RNA, 22 nt, Human
gaacuguguacauuguagauaa

SEQ ID NO: 207893 - RNA, 22 nt, Human
uuuggaaagugugauuucaagg

SEQ ID NO: 207894 - RNA, 22 nt, Human
uguggggacugaguggaggcuu

SEQ ID NO: 207895 - RNA, 22 nt, Human
gcagaggccuagguggaaggcc

SEQ ID NO: 207896 - RNA, 18 nt, Human
guuucaugcaugugaaac

SEQ ID NO: 207897 - RNA, 20 nt, Human
auuagcucaggugaggucau

SEQ ID NO: 207898 - RNA, 17 nt, Human
guccuacccauggucua

SEQ ID NO: 207899 - RNA, 22 nt, Human
uuccugagaaauuuguaccugg

SEQ ID NO: 207900 - RNA, 22 nt, Human
caggaagcugugaaggagacgg

SEQ ID NO: 207901 - RNA, 22 nt, Human
gaaggcuuccuggaggaggugg

SEQ ID NO: 207902 - RNA, 22 nt, Human
acacauuucuaaauuuuuaccg

SEQ ID NO: 207903 - RNA, 22 nt, Human
ugcugaggcagaugucugugac

SEQ ID NO: 207904 - RNA, 22 nt, Human
cagugcuguugggcccagagag

SEQ ID NO: 207905 - RNA, 22 nt, Human
aaaguguugggauuacaggugu

SEQ ID NO: 207906 - RNA, 23 nt, Human
uugagaacaggugugagaauggc

SEQ ID NO: 207907 - RNA, 22 nt, Human
uccuggauggagcugcccucgc

SEQ ID NO: 207908 - RNA, 22 nt, Human
gcuuguuugugccucugcagaa

SEQ ID NO: 207909 - RNA, 18 nt, Human
uccaaagccagagaaguu

SEQ ID NO: 207910 - RNA, 22 nt, Human
aggaaggaagagacaccauuug

SEQ ID NO: 207911 - RNA, 22 nt, Human
cccagugucauucuaagggagg

SEQ ID NO: 207912 - RNA, 20 nt, Human
ggguccugacuuggucuccu

SEQ ID NO: 207913 - RNA, 23 nt, Human
agguucaggagauggaggaacaa

SEQ ID NO: 207914 - RNA, 22 nt, Human
uaggcugggccugccuuccagg

SEQ ID NO: 207915 - RNA, 21 nt, Human
ucucuguauccauggguucca

SEQ ID NO: 207916 - RNA, 22 nt, Human
uauguuuguuaucacaacuagg

SEQ ID NO: 207917 - RNA, 22 nt, Human
auauugcaauagaugcaucauu

SEQ ID NO: 207918 - RNA, 22 nt, Human
cccaggcucuuaugugacuugc

SEQ ID NO: 207919 - RNA, 22 nt, Human
cucaggaggugguagaggcccu

SEQ ID NO: 207920 - RNA, 22 nt, Human
gaacuggguccuugagucuaga

SEQ ID NO: 207921 - RNA, 22 nt, Human
uugcaggguacauucuuagaau

SEQ ID NO: 207922 - RNA, 22 nt, Human
ugccuugcagguuuuaaauaca

SEQ ID NO: 207923 - RNA, 22 nt, Human
augacaugauugccauuugaua

SEQ ID NO: 207924 - RNA, 22 nt, Human
agguggcaggaggucagagaaa

SEQ ID NO: 207925 - RNA, 22 nt, Human
ugucugugauuuaggccagggc

SEQ ID NO: 207926 - RNA, 22 nt, Human
uuuaaagagaaugugaaggagu

SEQ ID NO: 207927 - RNA, 22 nt, Human
ugcagguguagaguugggcucc

SEQ ID NO: 207928 - RNA, 22 nt, Human
gagcugggacuuggaauccaca

SEQ ID NO: 207929 - RNA, 22 nt, Human
cccagaugcagguucaagagua

SEQ ID NO: 207930 - RNA, 22 nt, Human
aguggaguugaguugauggauu

SEQ ID NO: 207931 - RNA, 22 nt, Human
gugcccugaucgcuaggcuccc

SEQ ID NO: 207932 - RNA, 17 nt, Human
ucacugggccugcuccc

SEQ ID NO: 207933 - RNA, 22 nt, Human
uaaggcuuuggucaccauggag

SEQ ID NO: 207934 - RNA, 22 nt, Human
gggcucagccuccucacuucga

SEQ ID NO: 207935 - RNA, 22 nt, Human
cagucacuggaauagcugagga

SEQ ID NO: 207936 - RNA, 22 nt, Human
gugcagauccugauugcaguuc

SEQ ID NO: 207937 - RNA, 22 nt, Human
ucagcugccccaguggccccag

SEQ ID NO: 207938 - RNA, 22 nt, Human
acuauuagcauaucaugaaugg

SEQ ID NO: 207939 - RNA, 16 nt, Human
accuccagucaagggu

SEQ ID NO: 207940 - RNA, 22 nt, Human
ucagguggagaccuccuuggcc

SEQ ID NO: 207941 - RNA, 22 nt, Human
ugaggaugacgauggcaauggc

SEQ ID NO: 207942 - RNA, 22 nt, Human
uucuuuaaaauagugagaaaga

SEQ ID NO: 207943 - RNA, 22 nt, Human
gaugccuggcacccagcaagga

SEQ ID NO: 207944 - RNA, 22 nt, Human
agagagccugaguggcagcuau

SEQ ID NO: 207945 - RNA, 22 nt, Human
gucaucuucucucagcccaggc

SEQ ID NO: 207946 - RNA, 22 nt, Human
aggcacugaaagguggccagag

SEQ ID NO: 207947 - RNA, 22 nt, Human
auauuuuggcaaaugucuagau

SEQ ID NO: 207948 - RNA, 22 nt, Human
agggggcugccaaggaauguaa

SEQ ID NO: 207949 - RNA, 22 nt, Human
aggcaaaagaaugucauaaaug

SEQ ID NO: 207950 - RNA, 21 nt, Human
aagaaagauaauuaaggaccc

SEQ ID NO: 207951 - RNA, 22 nt, Human
aggucagcugcugauaggcagc

SEQ ID NO: 207952 - RNA, 22 nt, Human
ccaccagcuuugccacccugcu

SEQ ID NO: 207953 - RNA, 22 nt, Human
ucuguucagaaauggaagugcc

SEQ ID NO: 207954 - RNA, 22 nt, Human
uggagcagcucuagcgggcgcc

SEQ ID NO: 207955 - RNA, 22 nt, Human
ucugagacaacuuagcccucga

SEQ ID NO: 207956 - RNA, 22 nt, Human
gcugucuucacuuccugguuuc

SEQ ID NO: 207957 - RNA, 22 nt, Human
acagggagccccagcauuucca

SEQ ID NO: 207958 - RNA, 22 nt, Human
ugggagcugggguuggacgucu

SEQ ID NO: 207959 - RNA, 22 nt, Human
caccagcuaauuaaaacagcag

SEQ ID NO: 207960 - RNA, 22 nt, Human
ccuggcuuauuuuuauagcagu

SEQ ID NO: 207961 - RNA, 22 nt, Human
auuccacagccgauaccaugac

SEQ ID NO: 207962 - RNA, 22 nt, Human
uaauuauuugaagacauuagag

SEQ ID NO: 207963 - RNA, 22 nt, Human
ugccaggaggggacaccuccuc

SEQ ID NO: 207964 - RNA, 23 nt, Human
caugccaguuugugcaggcagau

SEQ ID NO: 207965 - RNA, 22 nt, Human
uauguacuacacuagaacauuu

SEQ ID NO: 207966 - RNA, 22 nt, Human
aaagagucaaaggcaugucucu

SEQ ID NO: 207967 - RNA, 22 nt, Human
acagcuaacuuaaacuaaccua

SEQ ID NO: 207968 - RNA, 22 nt, Human
aaucacaucucauucaacagcc

SEQ ID NO: 207969 - RNA, 22 nt, Human
ugcuggaggcaguggaggugcc

SEQ ID NO: 207970 - RNA, 22 nt, Human
cagauuuagaguggggcuugga

SEQ ID NO: 207971 - RNA, 22 nt, Human
gagcagugggaaggaacagggu

SEQ ID NO: 207972 - RNA, 22 nt, Human
uugcagggcaucgcguacuucu

SEQ ID NO: 207973 - RNA, 22 nt, Human
cuccagggaggagcacggguuc

SEQ ID NO: 207974 - RNA, 22 nt, Human
uuuacaguaagguggaugguac

SEQ ID NO: 207975 - RNA, 22 nt, Human
auuaauauugguucauuagcug

SEQ ID NO: 207976 - RNA, 22 nt, Human
ggauggagguucucagaugcuc

SEQ ID NO: 207977 - RNA, 22 nt, Human
uugcuuugguagcagcuauaga

SEQ ID NO: 207978 - RNA, 22 nt, Human
ucugagccacagauguccuguu

SEQ ID NO: 207979 - RNA, 22 nt, Human
ucugccugaaccacucuuggag

SEQ ID NO: 207980 - RNA, 22 nt, Human
ugucagcaucauuuguugaagg

SEQ ID NO: 207981 - RNA, 22 nt, Human
ugcuccaggccgccuggggcug

SEQ ID NO: 207982 - RNA, 22 nt, Human
uuccugugcuuaauucucacug

SEQ ID NO: 207983 - RNA, 22 nt, Human
cagagaggauggauuccauagc

SEQ ID NO: 207984 - RNA, 19 nt, Human
ugcaggaggacugagcaga

SEQ ID NO: 207985 - RNA, 22 nt, Human
auucagcaaacauuuauuaucu

SEQ ID NO: 207986 - RNA, 22 nt, Human
gaagcuuugagagcagaagccc

SEQ ID NO: 207987 - RNA, 16 nt, Human
ccugggcucuguugga

SEQ ID NO: 207988 - RNA, 22 nt, Human
ggccuugccucaauagcuccac

SEQ ID NO: 207989 - RNA, 22 nt, Human
ucuuucuguaagcuccauggaa

SEQ ID NO: 207990 - RNA, 22 nt, Human
uaauaagcguagaagguauauc

SEQ ID NO: 207991 - RNA, 22 nt, Human
aucauucuauuguugagcugcc

SEQ ID NO: 207992 - RNA, 22 nt, Human
cucauaaggagcucacaaccua

SEQ ID NO: 207993 - RNA, 22 nt, Human
uaucucuagcgcacagaagaaa

SEQ ID NO: 207994 - RNA, 22 nt, Human
uggaggaaguugcuggaaguca

SEQ ID NO: 207995 - RNA, 22 nt, Human
aagacaauuugauacuaguugc

SEQ ID NO: 207996 - RNA, 19 nt, Human
ggagccagcuguggaaggc

SEQ ID NO: 207997 - RNA, 22 nt, Human
cagugcucauagcuguuccucc

SEQ ID NO: 207998 - RNA, 22 nt, Human
aggcucuggcaacagcuggugu

SEQ ID NO: 207999 - RNA, 22 nt, Human
cagugcuguguuugcugccugg

SEQ ID NO: 208000 - RNA, 22 nt, Human
gaggcucagagggagcaugguc

SEQ ID NO: 208001 - RNA, 17 nt, Human
cugggccuccccugucc

SEQ ID NO: 208002 - RNA, 22 nt, Human
cauauuuauagaucuggcauuu

SEQ ID NO: 208003 - RNA, 22 nt, Human
aaggacaggcacagugguggag

SEQ ID NO: 208004 - RNA, 22 nt, Human
gcugcccugccucagacuccuc

SEQ ID NO: 208005 - RNA, 22 nt, Human
auuuuuucagauugaguguuaa

SEQ ID NO: 208006 - RNA, 22 nt, Human
cucuccagucaggaacucugac

SEQ ID NO: 208007 - RNA, 22 nt, Human
gcuccaggaagggaaaucucca

SEQ ID NO: 208008 - RNA, 22 nt, Human
guucugccuguggcuucugugg

SEQ ID NO: 208009 - RNA, 22 nt, Human
agaagccauagucugggaggca

SEQ ID NO: 208010 - RNA, 22 nt, Human
ugucauguaaagaguaaauggu

SEQ ID NO: 208011 - RNA, 22 nt, Human
ugagaggucaaagggcauggag

SEQ ID NO: 208012 - RNA, 22 nt, Human
caauagcuauguaaccugaaga

SEQ ID NO: 208013 - RNA, 22 nt, Human
uucucuggaacugaaacaagau

SEQ ID NO: 208014 - RNA, 22 nt, Human
cuagggccaaaggcugugaugc

SEQ ID NO: 208015 - RNA, 22 nt, Human
cacaucucagggcuacaggcag

SEQ ID NO: 208016 - RNA, 22 nt, Human
ugccuuuuccagcuuccagagg

SEQ ID NO: 208017 - RNA, 22 nt, Human
ggaccugaacauaaaacgaggc

SEQ ID NO: 208018 - RNA, 19 nt, Human
uccagcugguaugcccaga

SEQ ID NO: 208019 - RNA, 18 nt, Human
ccugccagucuggagcag

SEQ ID NO: 208020 - RNA, 20 nt, Human
gggcuuggaggacucgaggg

SEQ ID NO: 208021 - RNA, 22 nt, Human
augcuaauguuuguggaagaua

SEQ ID NO: 208022 - RNA, 22 nt, Human
uuguauuggcaaagaacuugag

SEQ ID NO: 208023 - RNA, 22 nt, Human
ugugccugugacagcgaccugg

SEQ ID NO: 208024 - RNA, 21 nt, Human
cugagcuggggugaagguugc

SEQ ID NO: 208025 - RNA, 22 nt, Human
cuggaaaaugaagaagcagagg

SEQ ID NO: 208026 - RNA, 22 nt, Human
uggcaguuuacagaguucugaa

SEQ ID NO: 208027 - RNA, 22 nt, Human
ccaggccuuccaguacgcagaa

SEQ ID NO: 208028 - RNA, 23 nt, Human
uugaaagguagcuggcagcuaga

SEQ ID NO: 208029 - RNA, 18 nt, Human
cugugcagcaaacugagc

SEQ ID NO: 208030 - RNA, 22 nt, Human
aguggcugcuggaguggagaug

SEQ ID NO: 208031 - RNA, 23 nt, Human
aggacaguggaauuuagggauug

SEQ ID NO: 208032 - RNA, 22 nt, Human
cauaguuuuagguagaaacugg

SEQ ID NO: 208033 - RNA, 22 nt, Human
acauuugagucauauuugcuua

SEQ ID NO: 208034 - RNA, 22 nt, Human
agugacuacuggauuuguuucu

SEQ ID NO: 208035 - RNA, 22 nt, Human
aucacaucgaggagcaaucaga

SEQ ID NO: 208036 - RNA, 22 nt, Human
agugaggggauucaggcaaggu

SEQ ID NO: 208037 - RNA, 22 nt, Human
auuugcauaaggaugcuacugu

SEQ ID NO: 208038 - RNA, 19 nt, Human
acagccuguugguggggcu

SEQ ID NO: 208039 - RNA, 22 nt, Human
uguacagucugcagcuugcugu

SEQ ID NO: 208040 - RNA, 23 nt, Human
agggcccaagccuggacagcagg

SEQ ID NO: 208041 - RNA, 22 nt, Human
ucaaaggagacacaaggagaaa

SEQ ID NO: 208042 - RNA, 22 nt, Human
gaccaggcuaguucagagcuuc

SEQ ID NO: 208043 - RNA, 22 nt, Human
cccaguccuaaagcagacgcca

SEQ ID NO: 208044 - RNA, 22 nt, Human
aaaaucucauuaucaggaaggg

SEQ ID NO: 208045 - RNA, 22 nt, Human
auuuugauaaucauguuagaga

SEQ ID NO: 208046 - RNA, 22 nt, Human
aaggcauguguccucagagaga

SEQ ID NO: 208047 - RNA, 22 nt, Human
gccugugucauguaguagcuuc

SEQ ID NO: 208048 - RNA, 21 nt, Human
ucugggcuuucuuauaaggca

SEQ ID NO: 208049 - RNA, 22 nt, Human
ggaaaagacagguuaacuguga

SEQ ID NO: 208050 - RNA, 22 nt, Human
guucuucagcauuagaagucau

SEQ ID NO: 208051 - RNA, 22 nt, Human
ccagggcauccucacaucgcag

SEQ ID NO: 208052 - RNA, 22 nt, Human
ggacaggcugcaucugagcaug

SEQ ID NO: 208053 - RNA, 22 nt, Human
acaguggaauggugggccugca

SEQ ID NO: 208054 - RNA, 22 nt, Human
uccucuggcccagcugccucug

SEQ ID NO: 208055 - RNA, 22 nt, Human
caguggcugguuagggacagga

SEQ ID NO: 208056 - RNA, 22 nt, Human
cagagggcuguguaaggauguu

SEQ ID NO: 208057 - RNA, 22 nt, Human
aaggggcucuugucaggcgcag

SEQ ID NO: 208058 - RNA, 22 nt, Human
cagaaaauaaaguuucuacgca

SEQ ID NO: 208059 - RNA, 22 nt, Human
cucucagacugaagggccugug

SEQ ID NO: 208060 - RNA, 22 nt, Human
cuguccugcaguugggggcagg

SEQ ID NO: 208061 - RNA, 22 nt, Human
acucugggauuguuucugguau

SEQ ID NO: 208062 - RNA, 22 nt, Human
ggcaggaggugaguggcgggug

SEQ ID NO: 208063 - RNA, 22 nt, Human
cacaggagguuaggaagugguc

SEQ ID NO: 208064 - RNA, 22 nt, Human
agcagcuuaucuuggagaggca

SEQ ID NO: 208065 - RNA, 21 nt, Human
uuucugaaggcaacaucuauc

SEQ ID NO: 208066 - RNA, 22 nt, Human
caggugguuaugaggaagguga

SEQ ID NO: 208067 - RNA, 22 nt, Human
ugagaggcgcucacucucaggu

SEQ ID NO: 208068 - RNA, 22 nt, Human
ucucauuguccaauugaauuua

SEQ ID NO: 208069 - RNA, 22 nt, Human
cagcuacaggacgggcaucugc

SEQ ID NO: 208070 - RNA, 22 nt, Human
ugaggaguaugguggggucauu

SEQ ID NO: 208071 - RNA, 22 nt, Human
ucucaggaucuaauacauggua

SEQ ID NO: 208072 - RNA, 22 nt, Human
cccaguuuucugauugaagagc

SEQ ID NO: 208073 - RNA, 18 nt, Human
ugcagccuguagucuugu

SEQ ID NO: 208074 - RNA, 23 nt, Human
agcuccagcugacgugggcagcc

SEQ ID NO: 208075 - RNA, 22 nt, Human
gcaggcaggaaggacuaaguaa

SEQ ID NO: 208076 - RNA, 22 nt, Human
uuauguaccugaauuaguaaag

SEQ ID NO: 208077 - RNA, 22 nt, Human
uggcucagucauggaugaguaa

SEQ ID NO: 208078 - RNA, 22 nt, Human
ugaugagggaacugguucauac

SEQ ID NO: 208079 - RNA, 22 nt, Human
cccaagccuuucaaaacucaga

SEQ ID NO: 208080 - RNA, 22 nt, Human
ccuggugggcaggagugagacc

SEQ ID NO: 208081 - RNA, 22 nt, Human
uugagggauugcaccagaagag

SEQ ID NO: 208082 - RNA, 22 nt, Human
gguuuuaaccauucacaaguga

SEQ ID NO: 208083 - RNA, 22 nt, Human
uucaacucuucaagaucacauc

SEQ ID NO: 208084 - RNA, 22 nt, Human
cagcauggugccagugagucca

SEQ ID NO: 208085 - RNA, 22 nt, Human
aggacaagacaaggaccagaga

SEQ ID NO: 208086 - RNA, 22 nt, Human
agagguauuagguaauucagua

SEQ ID NO: 208087 - RNA, 22 nt, Human
cuaaaugacuuccagugguuau

SEQ ID NO: 208088 - RNA, 22 nt, Human
cacaggcucuccagggccugga

SEQ ID NO: 208089 - RNA, 22 nt, Human
caagaagugucagcuuuuuaaa

SEQ ID NO: 208090 - RNA, 22 nt, Human
gucaauauagguuucaaacaug

SEQ ID NO: 208091 - RNA, 18 nt, Human
ggcggguguuuuauucac

SEQ ID NO: 208092 - RNA, 22 nt, Human
aauagauacuacuuagauguag

SEQ ID NO: 208093 - RNA, 22 nt, Human
gcuucuaucccuccacugcacu

SEQ ID NO: 208094 - RNA, 22 nt, Human
uucucaggacuccugccugcuu

SEQ ID NO: 208095 - RNA, 22 nt, Human
gaagcuaaaccacagcuaagaa

SEQ ID NO: 208096 - RNA, 22 nt, Human
cagaggaagcuggguguggagu

SEQ ID NO: 208097 - RNA, 22 nt, Human
cagacaggcuagccagacucac

SEQ ID NO: 208098 - RNA, 22 nt, Human
aauagcuugccuaauccucaug

SEQ ID NO: 208099 - RNA, 22 nt, Human
cauuugaaauucuuagaacaaa

SEQ ID NO: 208100 - RNA, 22 nt, Human
ccagcuuuucagaaucugccug

SEQ ID NO: 208101 - RNA, 22 nt, Human
ucugagcugugaguugcuuagg

SEQ ID NO: 208102 - RNA, 22 nt, Human
gagguucacaggcuaucacagu

SEQ ID NO: 208103 - RNA, 22 nt, Human
cauaacauguacauauaaaugc

SEQ ID NO: 208104 - RNA, 22 nt, Human
ugcuuuauaucucucuucuuag

SEQ ID NO: 208105 - RNA, 22 nt, Human
aggguucugccagugucuugag

SEQ ID NO: 208106 - RNA, 22 nt, Human
ucuuagaaguucauguuccagc

SEQ ID NO: 208107 - RNA, 22 nt, Human
agggacucccugggccgacacg

SEQ ID NO: 208108 - RNA, 22 nt, Human
agcaaggaaaguaggcacggaa

SEQ ID NO: 208109 - RNA, 17 nt, Human
aaacugaaaaauucacu

SEQ ID NO: 208110 - RNA, 19 nt, Human
caggaugaucccaugacac

SEQ ID NO: 208111 - RNA, 22 nt, Human
aagagcaggcugcuguggagua

SEQ ID NO: 208112 - RNA, 22 nt, Human
ggggcagccuccaggaaagcug

SEQ ID NO: 208113 - RNA, 20 nt, Human
agccaggguucuggaugcac

SEQ ID NO: 208114 - RNA, 22 nt, Human
ugugggagaaggaagcaagcug

SEQ ID NO: 208115 - RNA, 22 nt, Human
aaagaguucuuguagcuuugag

SEQ ID NO: 208116 - RNA, 22 nt, Human
cccugaggaccaggaaggaggg

SEQ ID NO: 208117 - RNA, 17 nt, Human
acuccuggucugaaggg

SEQ ID NO: 208118 - RNA, 22 nt, Human
uggccucaaucuguccuccagc

SEQ ID NO: 208119 - RNA, 22 nt, Human
cuugagaaucuucucugaagag

SEQ ID NO: 208120 - RNA, 22 nt, Human
acacaugaccuccgcagcagca

SEQ ID NO: 208121 - RNA, 22 nt, Human
gggaccaggucagggcucugac

SEQ ID NO: 208122 - RNA, 22 nt, Human
auuuuagagaaacaaacguagg

SEQ ID NO: 208123 - RNA, 22 nt, Human
ggaggugggagccuccaguggu

SEQ ID NO: 208124 - RNA, 22 nt, Human
uguccucagauaugucuacucu

SEQ ID NO: 208125 - RNA, 22 nt, Human
uugcagcuucuaccacuguuuc

SEQ ID NO: 208126 - RNA, 22 nt, Human
ucccugcauuugggagaguguc

SEQ ID NO: 208127 - RNA, 22 nt, Human
ccagguggauaagguuucugga

SEQ ID NO: 208128 - RNA, 22 nt, Human
aguuuuguaauucucaaaaaua

SEQ ID NO: 208129 - RNA, 22 nt, Human
cagggccucauccucagagauu

SEQ ID NO: 208130 - RNA, 22 nt, Human
acugucuuuauuagaaucuuau

SEQ ID NO: 208131 - RNA, 22 nt, Human
uaaaugucuguuaacaugaaug

SEQ ID NO: 208132 - RNA, 22 nt, Human
ggaagccccagcauggccuugg

SEQ ID NO: 208133 - RNA, 22 nt, Human
ucucuguguucccuguuuucuc

SEQ ID NO: 208134 - RNA, 22 nt, Human
agauuuuaguguagaggacuug

SEQ ID NO: 208135 - RNA, 22 nt, Human
cuucugggcagaaguuuugaga

SEQ ID NO: 208136 - RNA, 20 nt, Human
ugauuucucuucuauuccuu

SEQ ID NO: 208137 - RNA, 22 nt, Human
cagcaagacaguuuccuaagug

SEQ ID NO: 208138 - RNA, 22 nt, Human
gcauuagaagggaccucugggg

SEQ ID NO: 208139 - RNA, 22 nt, Human
cuggaagggaaaucucuuggca

SEQ ID NO: 208140 - RNA, 22 nt, Human
gguccagguauguggugugaau

SEQ ID NO: 208141 - RNA, 22 nt, Human
uuggaacagaaacagacaaaua

SEQ ID NO: 208142 - RNA, 22 nt, Human
acuauacauaaaacauuugggu

SEQ ID NO: 208143 - RNA, 22 nt, Human
ucugcaccuuucuuaaaaaucg

SEQ ID NO: 208144 - RNA, 22 nt, Human
ccucugaggugagcccagcugg

SEQ ID NO: 208145 - RNA, 22 nt, Human
ugggccugggcuggacagccug

SEQ ID NO: 208146 - RNA, 19 nt, Human
aauagauuaauuauccucu

SEQ ID NO: 208147 - RNA, 22 nt, Human
uccuggcucucuacaaaccaga

SEQ ID NO: 208148 - RNA, 22 nt, Human
auucuacacaaagcaagaagac

SEQ ID NO: 208149 - RNA, 22 nt, Human
cacaguuugggucuccggggca

SEQ ID NO: 208150 - RNA, 22 nt, Human
cuuuccaaugucacuaugaauc

SEQ ID NO: 208151 - RNA, 22 nt, Human
uuggcuuccaggggcuuuuaca

SEQ ID NO: 208152 - RNA, 22 nt, Human
uacuuucuuucugauccuuaug

SEQ ID NO: 208153 - RNA, 22 nt, Human
ccuugaaauguucucacugggg

SEQ ID NO: 208154 - RNA, 22 nt, Human
gaaauuaaccaccuuuggcuuu

SEQ ID NO: 208155 - RNA, 22 nt, Human
ugaggccagggauuccaucauu

SEQ ID NO: 208156 - RNA, 22 nt, Human
ggcugcagagcugggugggccu

SEQ ID NO: 208157 - RNA, 20 nt, Human
agagcugggaagcucccuau

SEQ ID NO: 208158 - RNA, 22 nt, Human
ugcaccagagcagggugcccaa

SEQ ID NO: 208159 - RNA, 22 nt, Human
uguuuccuaagugucucugaag

SEQ ID NO: 208160 - RNA, 22 nt, Human
ggauggcagucugcaugagaaa

SEQ ID NO: 208161 - RNA, 22 nt, Human
gccaccugccaacuugcuggaa

SEQ ID NO: 208162 - RNA, 22 nt, Human
auucugaugccuggguacugcc

SEQ ID NO: 208163 - RNA, 22 nt, Human
uauggaaaguguuuucuucugu

SEQ ID NO: 208164 - RNA, 22 nt, Human
cccaugcaucccucuccugggc

SEQ ID NO: 208165 - RNA, 22 nt, Human
aaugaaaauuggacccuagaac

SEQ ID NO: 208166 - RNA, 22 nt, Human
ucuuagaaugucaacugauguu

SEQ ID NO: 208167 - RNA, 22 nt, Human
auggcaagcaagcugaagagau

SEQ ID NO: 208168 - RNA, 18 nt, Human
acagacaaaauggaaaug

SEQ ID NO: 208169 - RNA, 22 nt, Human
uuugaagacauauuguuacaua

SEQ ID NO: 208170 - RNA, 22 nt, Human
cucuuuggauagaauuacaaag

SEQ ID NO: 208171 - RNA, 22 nt, Human
uuauucagucugucuagggagu

SEQ ID NO: 208172 - RNA, 19 nt, Human
uaccagccuccugccugau

SEQ ID NO: 208173 - RNA, 22 nt, Human
uggaagccaggcccgcuccuaa

SEQ ID NO: 208174 - RNA, 22 nt, Human
ugagcaguggcuccugcuggac

SEQ ID NO: 208175 - RNA, 20 nt, Human
gcuguucacauuauuaguag

SEQ ID NO: 208176 - RNA, 22 nt, Human
agauaucuggaaaaaauguaug

SEQ ID NO: 208177 - RNA, 23 nt, Human
uggcaggugguuagauguuuugu

SEQ ID NO: 208178 - RNA, 22 nt, Human
cugggagagguggugggaagua

SEQ ID NO: 208179 - RNA, 22 nt, Human
ucugccuugccgaauuccaggc

SEQ ID NO: 208180 - RNA, 21 nt, Human
acugccuggggugcuggccaa

SEQ ID NO: 208181 - RNA, 22 nt, Human
aaugcacauauauuuccuuauu

SEQ ID NO: 208182 - RNA, 22 nt, Human
cagcuuuauugagguauaauug

SEQ ID NO: 208183 - RNA, 22 nt, Human
aagcacuggguauagcaaugau

SEQ ID NO: 208184 - RNA, 22 nt, Human
ugcagggccccucugcaugagu

SEQ ID NO: 208185 - RNA, 22 nt, Human
agugcaggagccuggccagagc

SEQ ID NO: 208186 - RNA, 22 nt, Human
cuccugaggggacaggacucau

SEQ ID NO: 208187 - RNA, 22 nt, Human
uaugcacacaucgcagcaggaa

SEQ ID NO: 208188 - RNA, 22 nt, Human
cagggucccaggagcugcuuuc

SEQ ID NO: 208189 - RNA, 22 nt, Human
uauaagcaugcuucauauggau

SEQ ID NO: 208190 - RNA, 22 nt, Human
acuaucucuuuugucugcagcu

SEQ ID NO: 208191 - RNA, 22 nt, Human
gagguucagcugcugccuggua

SEQ ID NO: 208192 - RNA, 22 nt, Human
cacaggaaauauuaggagggau

SEQ ID NO: 208193 - RNA, 22 nt, Human
uugcagggccuuggcuucuucc

SEQ ID NO: 208194 - RNA, 22 nt, Human
cuccagaggaugcaggugaggg

SEQ ID NO: 208195 - RNA, 20 nt, Human
ucuccuggugacaguaccca

SEQ ID NO: 208196 - RNA, 22 nt, Human
auagcaaaaaugaacaaagcuu

SEQ ID NO: 208197 - RNA, 22 nt, Human
ucuguucaugaaauaucuuuuu

SEQ ID NO: 208198 - RNA, 22 nt, Human
gaggcugguuugccuuuuggca

SEQ ID NO: 208199 - RNA, 22 nt, Human
ugaaccuuuugcuaagaaguua

SEQ ID NO: 208200 - RNA, 22 nt, Human
cucuagaacagugcugagccuu

SEQ ID NO: 208201 - RNA, 22 nt, Human
agugcucccuagaguugugcaa

SEQ ID NO: 208202 - RNA, 22 nt, Human
ugcaaauuugagcagacuguuc

SEQ ID NO: 208203 - RNA, 22 nt, Human
ccagggccugagggcgacgccc

SEQ ID NO: 208204 - RNA, 22 nt, Human
aaugugcagaugaauaaacaaa

SEQ ID NO: 208205 - RNA, 22 nt, Human
gggcaagcacagcgagcgugcg

SEQ ID NO: 208206 - RNA, 20 nt, Human
gaaucuuacuacauucucuc

SEQ ID NO: 208207 - RNA, 22 nt, Human
agucaggggaucuagacuugaa

SEQ ID NO: 208208 - RNA, 22 nt, Human
uguuuucacaaugaugucagau

SEQ ID NO: 208209 - RNA, 22 nt, Human
ugcacuccaggcugggugacag

SEQ ID NO: 208210 - RNA, 22 nt, Human
gggcuucuauucuggcacaaga

SEQ ID NO: 208211 - RNA, 22 nt, Human
acuugaauuuaguuuuuccuaa

SEQ ID NO: 208212 - RNA, 22 nt, Human
agagcccucucauuggcuuauu

SEQ ID NO: 208213 - RNA, 22 nt, Human
aggacccugaggucuccuguga

SEQ ID NO: 208214 - RNA, 22 nt, Human
ucccagcagggccgaccagccu

SEQ ID NO: 208215 - RNA, 20 nt, Human
gucucagaauggauuugcau

SEQ ID NO: 208216 - RNA, 22 nt, Human
aggcugagccacggggcuggcu

SEQ ID NO: 208217 - RNA, 22 nt, Human
ucggagcuguagaugaaacccu

SEQ ID NO: 208218 - RNA, 22 nt, Human
ucucagugcagagaggcuaucu

SEQ ID NO: 208219 - RNA, 22 nt, Human
uuuaucugaaaaaacucuugga

SEQ ID NO: 208220 - RNA, 22 nt, Human
aucugucuuuuauucaugagcu

SEQ ID NO: 208221 - RNA, 22 nt, Human
ccagcagggcagugcccuggac

SEQ ID NO: 208222 - RNA, 22 nt, Human
uggcagguuggccuuugguuca

SEQ ID NO: 208223 - RNA, 22 nt, Human
uucuguuacaagugaaaaaaug

SEQ ID NO: 208224 - RNA, 22 nt, Human
gcugccaguuccuucuuacucc

SEQ ID NO: 208225 - RNA, 22 nt, Human
acagagccacuuuggugccuac

SEQ ID NO: 208226 - RNA, 22 nt, Human
uugcugaaaacaguggguauug

SEQ ID NO: 208227 - RNA, 22 nt, Human
aagagcaggacagaaucagaac

SEQ ID NO: 208228 - RNA, 22 nt, Human
ggaaggaaauuggggcaguugu

SEQ ID NO: 208229 - RNA, 22 nt, Human
uucuccugggagggguugccca

SEQ ID NO: 208230 - RNA, 23 nt, Human
agcuuugugaaagcagacauggg

SEQ ID NO: 208231 - RNA, 22 nt, Human
ugcuaaauaaguggaauagaca

SEQ ID NO: 208232 - RNA, 22 nt, Human
aggcaggcacuccggaaguguc

SEQ ID NO: 208233 - RNA, 22 nt, Human
ccuggguggcugccugccuuuc

SEQ ID NO: 208234 - RNA, 22 nt, Human
uaaaugcaagggaaaggcaaga

SEQ ID NO: 208235 - RNA, 22 nt, Human
ucagcacuuuuuaaagcagcau

SEQ ID NO: 208236 - RNA, 22 nt, Human
uuuacagaugaggaaacugaga

SEQ ID NO: 208237 - RNA, 22 nt, Human
caugugugagugagcagucuuc

SEQ ID NO: 208238 - RNA, 22 nt, Human
cacauaauugaacgugaugagu

SEQ ID NO: 208239 - RNA, 22 nt, Human
gacacaggggggcgcuagaaga

SEQ ID NO: 208240 - RNA, 22 nt, Human
gucaacauuuacugcccuggcc

SEQ ID NO: 208241 - RNA, 22 nt, Human
guggagcuggcccaagaagcug

SEQ ID NO: 208242 - RNA, 22 nt, Human
gucugcccggccuuccuccacc

SEQ ID NO: 208243 - RNA, 22 nt, Human
acauaugucuauuucauguaaa

SEQ ID NO: 208244 - RNA, 22 nt, Human
auuuaucucuggaaacuaagca

SEQ ID NO: 208245 - RNA, 22 nt, Human
gucauucagagaugcagguaga

SEQ ID NO: 208246 - RNA, 22 nt, Human
ccagagggcaaaaugaagcuua

SEQ ID NO: 208247 - RNA, 22 nt, Human
caucuuuuggccuauucugagg

SEQ ID NO: 208248 - RNA, 23 nt, Human
aggcaaggguguaaaggaaauga

SEQ ID NO: 208249 - RNA, 22 nt, Human
aauacuggcugucaaagaugga

SEQ ID NO: 208250 - RNA, 22 nt, Human
cagcccuggccucuucgcuuuc

SEQ ID NO: 208251 - RNA, 22 nt, Human
uacaagaaaguccaguggguuu

SEQ ID NO: 208252 - RNA, 22 nt, Human
caaagugagagaauggcagaaa

SEQ ID NO: 208253 - RNA, 22 nt, Human
accuccccugacucgaaaccca

SEQ ID NO: 208254 - RNA, 22 nt, Human
aucugcaggaaugugugcagag

SEQ ID NO: 208255 - RNA, 22 nt, Human
auggacaggcuuauaacagcaa

SEQ ID NO: 208256 - RNA, 22 nt, Human
aagcugccuugcugaggagaaa

SEQ ID NO: 208257 - RNA, 22 nt, Human
uuuaauauccaguggauacaaa

SEQ ID NO: 208258 - RNA, 18 nt, Human
ccgggcuuuggugacaca

SEQ ID NO: 208259 - RNA, 22 nt, Human
ggucuccaaagcuuaggacuac

SEQ ID NO: 208260 - RNA, 22 nt, Human
uaaaccuuauuugaauaccaac

SEQ ID NO: 208261 - RNA, 22 nt, Human
acucuggggcgcuacuccaacu

SEQ ID NO: 208262 - RNA, 22 nt, Human
uaguccaggacaaucuucauau

SEQ ID NO: 208263 - RNA, 22 nt, Human
cagggcccagucccugcuguca

SEQ ID NO: 208264 - RNA, 22 nt, Human
uaucuguauucugacagucacu

SEQ ID NO: 208265 - RNA, 22 nt, Human
guacacauauauuaaaaauugu

SEQ ID NO: 208266 - RNA, 22 nt, Human
ccuggggagagaaagcccagcc

SEQ ID NO: 208267 - RNA, 22 nt, Human
ggucuccuugggaaagcaggaa

SEQ ID NO: 208268 - RNA, 22 nt, Human
augcagaagacugaaaagcuga

SEQ ID NO: 208269 - RNA, 22 nt, Human
auagauuugaauuuaagacuug

SEQ ID NO: 208270 - RNA, 22 nt, Human
caguuuuaugucgaauguauac

SEQ ID NO: 208271 - RNA, 22 nt, Human
uucuaaaauaaguuuaucuggu

SEQ ID NO: 208272 - RNA, 22 nt, Human
ccagagcaugaagggcaaugac

SEQ ID NO: 208273 - RNA, 21 nt, Human
caaggcuuaaacauuaaucua

SEQ ID NO: 208274 - RNA, 22 nt, Human
ccagaggcagacuuacacucca

SEQ ID NO: 208275 - RNA, 16 nt, Human
uucuagaaaagaaggu

SEQ ID NO: 208276 - RNA, 22 nt, Human
ccucugagaacaccuggcgucc

SEQ ID NO: 208277 - RNA, 22 nt, Human
ucacagaagggaaagaugccaa

SEQ ID NO: 208278 - RNA, 22 nt, Human
guguggcaccuccuuuccagcu

SEQ ID NO: 208279 - RNA, 22 nt, Human
auggcugcuuacaaaaacugug

SEQ ID NO: 208280 - RNA, 22 nt, Human
ccuguucacuuugacuucucca

SEQ ID NO: 208281 - RNA, 22 nt, Human
ugcugggcuggggccucagacc

SEQ ID NO: 208282 - RNA, 22 nt, Human
auauuuucuggaacuaugccug

SEQ ID NO: 208283 - RNA, 22 nt, Human
cugcgugucucugucucauggc

SEQ ID NO: 208284 - RNA, 18 nt, Human
gcuccuggagucugacuc

SEQ ID NO: 208285 - RNA, 22 nt, Human
auuuaaauuuucugauggagag

SEQ ID NO: 208286 - RNA, 22 nt, Human
cugggacaguucagguagggca

SEQ ID NO: 208287 - RNA, 22 nt, Human
uguggccuugcagccuggaggu

SEQ ID NO: 208288 - RNA, 22 nt, Human
agcugaaaggguguuggagugu

SEQ ID NO: 208289 - RNA, 22 nt, Human
aaguauucauaaggacauaugu

SEQ ID NO: 208290 - RNA, 22 nt, Human
ucucuccuguguucugauguuu

SEQ ID NO: 208291 - RNA, 21 nt, Human
acuguucaucuguucagaagc

SEQ ID NO: 208292 - RNA, 22 nt, Human
auuguauucaguuacaggucuu

SEQ ID NO: 208293 - RNA, 22 nt, Human
caaaugaauauuuccauggguu

SEQ ID NO: 208294 - RNA, 22 nt, Human
gaggcuuugguuauaaaagauc

SEQ ID NO: 208295 - RNA, 22 nt, Human
cucaggauggaagccuacagga

SEQ ID NO: 208296 - RNA, 22 nt, Human
gcccauggucagggaggcaggg

SEQ ID NO: 208297 - RNA, 21 nt, Human
agcgucaauaucgucaacagg

SEQ ID NO: 208298 - RNA, 19 nt, Human
gcaugcagaguaagaaggu

SEQ ID NO: 208299 - RNA, 22 nt, Human
gcucagaguuaauuggaugggu

SEQ ID NO: 208300 - RNA, 22 nt, Human
ugggcuccggcggccucaggcu

SEQ ID NO: 208301 - RNA, 22 nt, Human
gcuccuggcaggcagugugugu

SEQ ID NO: 208302 - RNA, 22 nt, Human
ugggaguacuaugugauaggau

SEQ ID NO: 208303 - RNA, 22 nt, Human
aguggcuagaucaugagugagc

SEQ ID NO: 208304 - RNA, 22 nt, Human
gggcuccaaaaucuaugucuuc

SEQ ID NO: 208305 - RNA, 22 nt, Human
cuuagggaaucuuagagcugga

SEQ ID NO: 208306 - RNA, 22 nt, Human
agccucuggcccuagacugcuu

SEQ ID NO: 208307 - RNA, 22 nt, Human
ccuggcccuggaauagggcagg

SEQ ID NO: 208308 - RNA, 22 nt, Human
gucagaucuuuggggaugcugu

SEQ ID NO: 208309 - RNA, 22 nt, Human
cuuguauugcaaacuggccagg

SEQ ID NO: 208310 - RNA, 22 nt, Human
agcagaugaaucccagauaaag

SEQ ID NO: 208311 - RNA, 22 nt, Human
cuguugucuccucucagauuau

SEQ ID NO: 208312 - RNA, 22 nt, Human
uacagugcuagaaccugcugua

SEQ ID NO: 208313 - RNA, 22 nt, Human
auucugucuuuuuauacaucua

SEQ ID NO: 208314 - RNA, 18 nt, Human
gccagagggaagcaggug

SEQ ID NO: 208315 - RNA, 18 nt, Human
gauauauaggaggaaagu

SEQ ID NO: 208316 - RNA, 22 nt, Human
ucagggcauucaagaggccugg

SEQ ID NO: 208317 - RNA, 22 nt, Human
ggcacagggggcugaggacuag

SEQ ID NO: 208318 - RNA, 18 nt, Human
auccugggccagucuuuc

SEQ ID NO: 208319 - RNA, 22 nt, Human
cagagcugcucaugguggccag

SEQ ID NO: 208320 - RNA, 22 nt, Human
auggaugaaggcgaggaugagg

SEQ ID NO: 208321 - RNA, 22 nt, Human
gcaggcagagagggguuuccag

SEQ ID NO: 208322 - RNA, 20 nt, Human
gggguuggcuggcacaggga

SEQ ID NO: 208323 - RNA, 22 nt, Human
ucccuggggauguuggccugcc

SEQ ID NO: 208324 - RNA, 22 nt, Human
uccaaauauucaucuacuucug

SEQ ID NO: 208325 - RNA, 22 nt, Human
acauggugugcugagaaugaca

SEQ ID NO: 208326 - RNA, 22 nt, Human
acgaugcuggauuaucucaagg

SEQ ID NO: 208327 - RNA, 22 nt, Human
agaaucuacauuuuaacaagau

SEQ ID NO: 208328 - RNA, 22 nt, Human
ugcuggaauaauuucauguuaa

SEQ ID NO: 208329 - RNA, 22 nt, Human
agguaaggcuguaagcuaagcc

SEQ ID NO: 208330 - RNA, 21 nt, Human
ccugagccuguuuauccagaa

SEQ ID NO: 208331 - RNA, 22 nt, Human
ucaggcagaguuaauuugcucc

SEQ ID NO: 208332 - RNA, 22 nt, Human
aggccuggguguucaccagaag

SEQ ID NO: 208333 - RNA, 18 nt, Human
ucugcccugccauucacu

SEQ ID NO: 208334 - RNA, 22 nt, Human
uacacgugcaaauucaauguau

SEQ ID NO: 208335 - RNA, 22 nt, Human
gagcuagcuucuuccagguuuc

SEQ ID NO: 208336 - RNA, 22 nt, Human
gcugagcagguuugaugcuuuu

SEQ ID NO: 208337 - RNA, 22 nt, Human
ugaaggagcucaggagauaguc

SEQ ID NO: 208338 - RNA, 22 nt, Human
uggaaucucugguaucugggga

SEQ ID NO: 208339 - RNA, 22 nt, Human
uaaagcauguuucaguaagguu

SEQ ID NO: 208340 - RNA, 22 nt, Human
auacuuuggucacuauuauugg

SEQ ID NO: 208341 - RNA, 22 nt, Human
cagcugaagcucuugucaaagg

SEQ ID NO: 208342 - RNA, 22 nt, Human
ucagggagccuggacuucaagg

SEQ ID NO: 208343 - RNA, 22 nt, Human
gagcugaauugaagcaaggagc

SEQ ID NO: 208344 - RNA, 22 nt, Human
guuggugaguuucugaucacaa

SEQ ID NO: 208345 - RNA, 23 nt, Human
uuuauuuauuuaggcugagggau

SEQ ID NO: 208346 - RNA, 22 nt, Human
caguuucuacgaaggucaaccc

SEQ ID NO: 208347 - RNA, 20 nt, Human
gcucugggagggaugugaug

SEQ ID NO: 208348 - RNA, 22 nt, Human
acugagaacucaagagaaaagg

SEQ ID NO: 208349 - RNA, 22 nt, Human
aaacagcucaagaaguuacucu

SEQ ID NO: 208350 - RNA, 22 nt, Human
acaggucuggucugggugggac

SEQ ID NO: 208351 - RNA, 22 nt, Human
aacauuaauuacagucaaacau

SEQ ID NO: 208352 - RNA, 20 nt, Human
uucugggcagccauguacuu

SEQ ID NO: 208353 - RNA, 22 nt, Human
agaguguguuccccaagaaaga

SEQ ID NO: 208354 - RNA, 22 nt, Human
aauguuuucauuauccuaacug

SEQ ID NO: 208355 - RNA, 22 nt, Human
cugagggacccugugaguaccu

SEQ ID NO: 208356 - RNA, 22 nt, Human
acagcaugagagaugaacauuc

SEQ ID NO: 208357 - RNA, 22 nt, Human
uucucuucccacuuucuguauu

SEQ ID NO: 208358 - RNA, 22 nt, Human
ggguaggaugguagaagggacc

SEQ ID NO: 208359 - RNA, 20 nt, Human
cuguggugagcaggagagua

SEQ ID NO: 208360 - RNA, 21 nt, Human
gcagagaaugaacuuuggcuu

SEQ ID NO: 208361 - RNA, 22 nt, Human
augccaaauucuacuuucagca

SEQ ID NO: 208362 - RNA, 22 nt, Human
uacuuucauggguuuucuuuau

SEQ ID NO: 208363 - RNA, 22 nt, Human
aggcuucuggaauccaguuucu

SEQ ID NO: 208364 - RNA, 22 nt, Human
aguggcugauguaggcaguggg

SEQ ID NO: 208365 - RNA, 22 nt, Human
uguaaagauuagauuacaugaa

SEQ ID NO: 208366 - RNA, 22 nt, Human
ccugccugucccucaguccaca

SEQ ID NO: 208367 - RNA, 22 nt, Human
acaugauuaaaagauuuuaaag

SEQ ID NO: 208368 - RNA, 22 nt, Human
cagcccugucuaugacugauga

SEQ ID NO: 208369 - RNA, 22 nt, Human
uguuugaaaaguggagauuuau

SEQ ID NO: 208370 - RNA, 22 nt, Human
ccugaagaugcuguggccuggu

SEQ ID NO: 208371 - RNA, 22 nt, Human
acugaacuuggugaaugccaca

SEQ ID NO: 208372 - RNA, 22 nt, Human
ccugguugugaguugaguugag

SEQ ID NO: 208373 - RNA, 22 nt, Human
ucagcauaucuugagcuucaug

SEQ ID NO: 208374 - RNA, 23 nt, Human
ucuggcuuccaguggguucaacc

SEQ ID NO: 208375 - RNA, 22 nt, Human
caguauguucuuccaggacaga

SEQ ID NO: 208376 - RNA, 22 nt, Human
cccugaggaugucuccuuccug

SEQ ID NO: 208377 - RNA, 22 nt, Human
uugccuggcuuguagauggggg

SEQ ID NO: 208378 - RNA, 22 nt, Human
cccuggccuccaggcaguccug

SEQ ID NO: 208379 - RNA, 22 nt, Human
aaagacuaaccaguugucaaaa

SEQ ID NO: 208380 - RNA, 22 nt, Human
ccacugcccaccccgacgucua

SEQ ID NO: 208381 - RNA, 22 nt, Human
cugccacuuucacccagugcuc

SEQ ID NO: 208382 - RNA, 22 nt, Human
ucccagccuuucuuucuccagc

SEQ ID NO: 208383 - RNA, 22 nt, Human
gcaagaugguuauaaaaaaugu

SEQ ID NO: 208384 - RNA, 22 nt, Human
gagucuggugauggucauuguc

SEQ ID NO: 208385 - RNA, 22 nt, Human
ggaagggguuaggggucccuga

SEQ ID NO: 208386 - RNA, 22 nt, Human
aaaagagugacugauaaguaua

SEQ ID NO: 208387 - RNA, 22 nt, Human
agguucuccuuaucaaugaaga

SEQ ID NO: 208388 - RNA, 22 nt, Human
gagcccugcugggccuugucuc

SEQ ID NO: 208389 - RNA, 21 nt, Human
uggaacuggugaaaaccuccu

SEQ ID NO: 208390 - RNA, 22 nt, Human
caggguuauacagcugaacaaa

SEQ ID NO: 208391 - RNA, 22 nt, Human
caucuugugaggaccuucuugc

SEQ ID NO: 208392 - RNA, 22 nt, Human
ccuguucaccauggucacgugc

SEQ ID NO: 208393 - RNA, 22 nt, Human
ugucaaacugugacuucuaaug

SEQ ID NO: 208394 - RNA, 19 nt, Human
cccagaggaaugccuggaa

SEQ ID NO: 208395 - RNA, 22 nt, Human
gggcugcuguguuccugaggca

SEQ ID NO: 208396 - RNA, 22 nt, Human
cagagguguacagagggaggcc

SEQ ID NO: 208397 - RNA, 22 nt, Human
uauacacauuuuuaccuauagu

SEQ ID NO: 208398 - RNA, 22 nt, Human
aagaaacuguugcgugacagcg

SEQ ID NO: 208399 - RNA, 22 nt, Human
uggcuucuugucuaauuuguua

SEQ ID NO: 208400 - RNA, 22 nt, Human
agcuaaggacuggaggguuucu

SEQ ID NO: 208401 - RNA, 22 nt, Human
gugccugcuaccugacuuguuu

SEQ ID NO: 208402 - RNA, 22 nt, Human
acagucuaggccuaggucaaaa

SEQ ID NO: 208403 - RNA, 20 nt, Human
ucucaggguucagcaaagua

SEQ ID NO: 208404 - RNA, 22 nt, Human
aggaggggcauagaaauguaau

SEQ ID NO: 208405 - RNA, 22 nt, Human
gacagaggcaagaccagaagcc

SEQ ID NO: 208406 - RNA, 22 nt, Human
ccucugggcuggaaaauuaaug

SEQ ID NO: 208407 - RNA, 22 nt, Human
uugcccagagucacccagcuca

SEQ ID NO: 208408 - RNA, 22 nt, Human
aaaugcugcagcuaguguguuu

SEQ ID NO: 208409 - RNA, 22 nt, Human
agagcccagaaaguaugucaua

SEQ ID NO: 208410 - RNA, 22 nt, Human
cagggaggaugggcuguuuugc

SEQ ID NO: 208411 - RNA, 22 nt, Human
uuacauucuuaucucaguuauu

SEQ ID NO: 208412 - RNA, 22 nt, Human
gccugcagccccucugcaguag

SEQ ID NO: 208413 - RNA, 22 nt, Human
uucuccaguuucucccuucagu

SEQ ID NO: 208414 - RNA, 22 nt, Human
ugggccacggggguggagagcu

SEQ ID NO: 208415 - RNA, 23 nt, Human
ugagcugguauuguccaucucca

SEQ ID NO: 208416 - RNA, 22 nt, Human
uucauauuaugauuugaaaugc

SEQ ID NO: 208417 - RNA, 20 nt, Human
guacauuuucaggaggggau

SEQ ID NO: 208418 - RNA, 22 nt, Human
aaucaagagcugacuauauuuu

SEQ ID NO: 208419 - RNA, 22 nt, Human
guguccugagugaggccuggcc

SEQ ID NO: 208420 - RNA, 22 nt, Human
cuggcugggagcgagcugcuca

SEQ ID NO: 208421 - RNA, 22 nt, Human
acauguuuaaguuuguuauaug

SEQ ID NO: 208422 - RNA, 22 nt, Human
acacacgugcucaacacgcucc

SEQ ID NO: 208423 - RNA, 22 nt, Human
aggcuucagaugaccuuagcau

SEQ ID NO: 208424 - RNA, 22 nt, Human
gcucuggccagacccucagugg

SEQ ID NO: 208425 - RNA, 22 nt, Human
ggggcggggcucugagaagcau

SEQ ID NO: 208426 - RNA, 22 nt, Human
cuuauguauaauguuccacaua

SEQ ID NO: 208427 - RNA, 22 nt, Human
aucuccucgcaggccagaacac

SEQ ID NO: 208428 - RNA, 22 nt, Human
uuucacaugcagcagggaagug

SEQ ID NO: 208429 - RNA, 22 nt, Human
uggauuauuguaagacaaagua

SEQ ID NO: 208430 - RNA, 22 nt, Human
ccagagcuccagggcuacagaa

SEQ ID NO: 208431 - RNA, 22 nt, Human
ucccuguuuuauauccuaacaa

SEQ ID NO: 208432 - RNA, 18 nt, Human
acccucuggcuucugagc

SEQ ID NO: 208433 - RNA, 22 nt, Human
caugagaaguggccuucaaaaa

SEQ ID NO: 208434 - RNA, 22 nt, Human
auaaacagccugcccaaauugg

SEQ ID NO: 208435 - RNA, 21 nt, Human
uucacagaugggaaaacugag

SEQ ID NO: 208436 - RNA, 22 nt, Human
gcuuuugugagauuaagcuacu

SEQ ID NO: 208437 - RNA, 22 nt, Human
uuucaguuguccuguuaauagc

SEQ ID NO: 208438 - RNA, 22 nt, Human
augacuaagugcauuuuaauug

SEQ ID NO: 208439 - RNA, 22 nt, Human
ugcccacauucaaaaggugaug

SEQ ID NO: 208440 - RNA, 22 nt, Human
agucuuacaugagaaagaaccu

SEQ ID NO: 208441 - RNA, 22 nt, Human
agugcugagugauugcaaagga

SEQ ID NO: 208442 - RNA, 21 nt, Human
uccugcaggaggccugagagg

SEQ ID NO: 208443 - RNA, 22 nt, Human
cuucuuaaugacagauuaaaau

SEQ ID NO: 208444 - RNA, 22 nt, Human
aguuuacucuggugacaauuua

SEQ ID NO: 208445 - RNA, 22 nt, Human
ucugggauagggccagaacaug

SEQ ID NO: 208446 - RNA, 22 nt, Human
uugggaaagggauuaugaguag

SEQ ID NO: 208447 - RNA, 22 nt, Human
cacugagcaagucaguacagca

SEQ ID NO: 208448 - RNA, 20 nt, Human
cucaggauugucuagccccu

SEQ ID NO: 208449 - RNA, 22 nt, Human
ucaggcaggaagccccugcaca

SEQ ID NO: 208450 - RNA, 22 nt, Human
ucaauucaguccaacaguaauu

SEQ ID NO: 208451 - RNA, 22 nt, Human
cccaggaggcagauguugcagu

SEQ ID NO: 208452 - RNA, 22 nt, Human
cugugaugacaggcagggccaa

SEQ ID NO: 208453 - RNA, 22 nt, Human
ucuuugaugugguuaauuauga

SEQ ID NO: 208454 - RNA, 22 nt, Human
cagcuggcaaguggagcagggu

SEQ ID NO: 208455 - RNA, 23 nt, Human
aguuggaccuggguaagaaaaug

SEQ ID NO: 208456 - RNA, 22 nt, Human
gagagggugccuggaagccagg

SEQ ID NO: 208457 - RNA, 22 nt, Human
uaguucaggaagagaaacaaca

SEQ ID NO: 208458 - RNA, 22 nt, Human
gacagacacaauugauccauga

SEQ ID NO: 208459 - RNA, 22 nt, Human
augguauuaagaacaauuccaa

SEQ ID NO: 208460 - RNA, 22 nt, Human
ugcagaguaaaagcagaugcua

SEQ ID NO: 208461 - RNA, 21 nt, Human
ccuggcagaagccugauaugc

SEQ ID NO: 208462 - RNA, 22 nt, Human
ucuuuggaaaugcuuugagaau

SEQ ID NO: 208463 - RNA, 22 nt, Human
ucacuggggccaugugagggac

SEQ ID NO: 208464 - RNA, 22 nt, Human
aggcuugguuuauagaaguaau

SEQ ID NO: 208465 - RNA, 22 nt, Human
uagacuuuucaaaaucuagacc

SEQ ID NO: 208466 - RNA, 22 nt, Human
uacaguucuuugaaggaucuag

SEQ ID NO: 208467 - RNA, 22 nt, Human
ggcugaggcggcgaugcccuug

SEQ ID NO: 208468 - RNA, 22 nt, Human
aauuuccagaccccauccacag

SEQ ID NO: 208469 - RNA, 22 nt, Human
cagcuaggagaaaagguguuuu

SEQ ID NO: 208470 - RNA, 22 nt, Human
agcagggcacuggaaggcacug

SEQ ID NO: 208471 - RNA, 22 nt, Human
cugaggcuuggaggggucuggu

SEQ ID NO: 208472 - RNA, 22 nt, Human
agagcacggccaccauuuacaa

SEQ ID NO: 208473 - RNA, 22 nt, Human
uacuguacauuccguuuguugc

SEQ ID NO: 208474 - RNA, 22 nt, Human
ccagugccuauccuucuccugu

SEQ ID NO: 208475 - RNA, 22 nt, Human
uaauuacaaagcaagcacaggg

SEQ ID NO: 208476 - RNA, 22 nt, Human
ucucaaauguaaagcaugauuu

SEQ ID NO: 208477 - RNA, 22 nt, Human
aggcacagguggacuucacagu

SEQ ID NO: 208478 - RNA, 22 nt, Human
agcagggcugcggccccaccac

SEQ ID NO: 208479 - RNA, 22 nt, Human
aucuccaguccugguuuccugg

SEQ ID NO: 208480 - RNA, 22 nt, Human
cagcugggccuccugagcccug

SEQ ID NO: 208481 - RNA, 22 nt, Human
acaaaggacugaaacuggcugu

SEQ ID NO: 208482 - RNA, 22 nt, Human
aggcucucagaucagccacauu

SEQ ID NO: 208483 - RNA, 22 nt, Human
uuuaucugugguaaauaacauu

SEQ ID NO: 208484 - RNA, 22 nt, Human
agaggaauuucuggaaggaggc

SEQ ID NO: 208485 - RNA, 22 nt, Human
ucaaagagcuauucaguugugg

SEQ ID NO: 208486 - RNA, 22 nt, Human
ugcagaggagucagccugggca

SEQ ID NO: 208487 - RNA, 22 nt, Human
gagaggggaccugugugucuag

SEQ ID NO: 208488 - RNA, 22 nt, Human
caugacauccugaagcugcaca

SEQ ID NO: 208489 - RNA, 22 nt, Human
caaggcaguuccccagagggcu

SEQ ID NO: 208490 - RNA, 22 nt, Human
uggcagagcaaaaagauagaau

SEQ ID NO: 208491 - RNA, 22 nt, Human
agaggcucugccgccucaggua

SEQ ID NO: 208492 - RNA, 22 nt, Human
ggcacagggugauguugcaguu

SEQ ID NO: 208493 - RNA, 23 nt, Human
uguaacaauuucauauacaugca

SEQ ID NO: 208494 - RNA, 22 nt, Human
gcaggaggagcauuaacugagc

SEQ ID NO: 208495 - RNA, 22 nt, Human
ccuguucuguggcucucaaagg

SEQ ID NO: 208496 - RNA, 22 nt, Human
ucagcuuucucagaggccuaac

SEQ ID NO: 208497 - RNA, 22 nt, Human
ccacaaaacugugugucaaaga

SEQ ID NO: 208498 - RNA, 22 nt, Human
agggacccauagagagaccagu

SEQ ID NO: 208499 - RNA, 22 nt, Human
uuucagacuccaaauucauaag

SEQ ID NO: 208500 - RNA, 22 nt, Human
caagaggcuaaacugggcuauu

SEQ ID NO: 208501 - RNA, 22 nt, Human
uacaguaccugccacguuguug

SEQ ID NO: 208502 - RNA, 22 nt, Human
uuugcucaguucucuguauuuu

SEQ ID NO: 208503 - RNA, 22 nt, Human
cuuagcaaggcugccuggagaa

SEQ ID NO: 208504 - RNA, 22 nt, Human
ucugguacuagaggagugcugg

SEQ ID NO: 208505 - RNA, 22 nt, Human
cuccaguggcacaaaugggugc

SEQ ID NO: 208506 - RNA, 22 nt, Human
ucugcucacauggcuccaugca

SEQ ID NO: 208507 - RNA, 22 nt, Human
uguuugugcugccuggugggca

SEQ ID NO: 208508 - RNA, 19 nt, Human
uuagaacauccucuaggga

SEQ ID NO: 208509 - RNA, 22 nt, Human
uuccaucuuucagcuuuguugg

SEQ ID NO: 208510 - RNA, 22 nt, Human
aacuucauguaauuuaaaacag

SEQ ID NO: 208511 - RNA, 22 nt, Human
ugggccucggagcacaggagac

SEQ ID NO: 208512 - RNA, 22 nt, Human
guuuguaaccagaacagagagu

SEQ ID NO: 208513 - RNA, 22 nt, Human
gcacagcccugagcgcaugucu

SEQ ID NO: 208514 - RNA, 22 nt, Human
ugcagcaagaccggauaugucg

SEQ ID NO: 208515 - RNA, 22 nt, Human
aucuuuggccacuugugcugca

SEQ ID NO: 208516 - RNA, 22 nt, Human
ucagagagaaauaguuuuugac

SEQ ID NO: 208517 - RNA, 22 nt, Human
aaggauuuuuggaaugagaugg

SEQ ID NO: 208518 - RNA, 22 nt, Human
aagggagcggggagacccuaug

SEQ ID NO: 208519 - RNA, 23 nt, Human
agguucccccgccaggacccugc

SEQ ID NO: 208520 - RNA, 22 nt, Human
gugcccaggcccaaggcaccac

SEQ ID NO: 208521 - RNA, 19 nt, Human
ucaacaguggugcugugga

SEQ ID NO: 208522 - RNA, 22 nt, Human
acagcaacuccugcuucugagu

SEQ ID NO: 208523 - RNA, 22 nt, Human
gaagaguauauuuagugaaauc

SEQ ID NO: 208524 - RNA, 22 nt, Human
uugaaucucuugaaucucuguu

SEQ ID NO: 208525 - RNA, 22 nt, Human
uguaauggagcuuagaguuauc

SEQ ID NO: 208526 - RNA, 22 nt, Human
uggacccaccccagggccugcu

SEQ ID NO: 208527 - RNA, 22 nt, Human
ugggacacagaaaaggcagguu

SEQ ID NO: 208528 - RNA, 22 nt, Human
uggauucugggcuguuugcauu

SEQ ID NO: 208529 - RNA, 22 nt, Human
ucucugggucucaguuuguaca

SEQ ID NO: 208530 - RNA, 20 nt, Human
ucacaucuggcagcugauga

SEQ ID NO: 208531 - RNA, 22 nt, Human
cacuggugccagagaacagaau

SEQ ID NO: 208532 - RNA, 22 nt, Human
uccuggagaauccugccaccug

SEQ ID NO: 208533 - RNA, 22 nt, Human
uugaaucuauaauuucaguauu

SEQ ID NO: 208534 - RNA, 22 nt, Human
ccucagagguguggcaucucug

SEQ ID NO: 208535 - RNA, 21 nt, Human
ucuguggcagcaugaugaggu

SEQ ID NO: 208536 - RNA, 22 nt, Human
aaugaaacuguauauagacugu

SEQ ID NO: 208537 - RNA, 23 nt, Human
gaagccacacaaaggucgccaag

SEQ ID NO: 208538 - RNA, 22 nt, Human
ucugggaacacacgucacuuca

SEQ ID NO: 208539 - RNA, 22 nt, Human
gcugaaaugggcacugaaggcc

SEQ ID NO: 208540 - RNA, 22 nt, Human
aggggcugccuggcuuggcacu

SEQ ID NO: 208541 - RNA, 22 nt, Human
cagagccaggccugcccucuuu

SEQ ID NO: 208542 - RNA, 22 nt, Human
ccaggcagcucugauuuauguc

SEQ ID NO: 208543 - RNA, 22 nt, Human
ggcuggcagcuucaucccagau

SEQ ID NO: 208544 - RNA, 22 nt, Human
guuuaagaggguuucauuccca

SEQ ID NO: 208545 - RNA, 21 nt, Human
ugaugaggucauagcacccuc

SEQ ID NO: 208546 - RNA, 22 nt, Human
cuugaaagauuuggccucugug

SEQ ID NO: 208547 - RNA, 22 nt, Human
uauuuccaaaagccuauuauga

SEQ ID NO: 208548 - RNA, 18 nt, Human
ucaaaauauuucugugga

SEQ ID NO: 208549 - RNA, 22 nt, Human
caaagcuggaaaaggaggcugg

SEQ ID NO: 208550 - RNA, 22 nt, Human
acuacacuccaauuuucuaggu

SEQ ID NO: 208551 - RNA, 22 nt, Human
ggcagccagcaaugagaaguuu

SEQ ID NO: 208552 - RNA, 22 nt, Human
caggguugcaugcaucuguggg

SEQ ID NO: 208553 - RNA, 20 nt, Human
cccaggcagagcuagcggca

SEQ ID NO: 208554 - RNA, 22 nt, Human
uugucucugccaugcuugaggg

SEQ ID NO: 208555 - RNA, 22 nt, Human
agagccuggaccugagcuacaa

SEQ ID NO: 208556 - RNA, 23 nt, Human
aguuuuucugcaugguucuguau

SEQ ID NO: 208557 - RNA, 20 nt, Human
agcagcauuguucuagagca

SEQ ID NO: 208558 - RNA, 22 nt, Human
uucacauaaugauacaaagcuu

SEQ ID NO: 208559 - RNA, 22 nt, Human
aaugcuggaagccucaguagau

SEQ ID NO: 208560 - RNA, 22 nt, Human
gagucuuaggcaaaaauaaugg

SEQ ID NO: 208561 - RNA, 21 nt, Human
ucucuggaauuagaccauguu

SEQ ID NO: 208562 - RNA, 22 nt, Human
aaggcagaaauucaacuacugg

SEQ ID NO: 208563 - RNA, 22 nt, Human
uuacaugaauacauaaccauuc

SEQ ID NO: 208564 - RNA, 22 nt, Human
ggcugagggucccagacccuaa

SEQ ID NO: 208565 - RNA, 22 nt, Human
aauauaaugcuguuuuaugcca

SEQ ID NO: 208566 - RNA, 22 nt, Human
ucuguacuuccuuuaaacuuua

SEQ ID NO: 208567 - RNA, 23 nt, Human
aucuuagcauagacuugaguccc

SEQ ID NO: 208568 - RNA, 22 nt, Human
uccaguguuuuucuucacaggu

SEQ ID NO: 208569 - RNA, 22 nt, Human
aggaggcacucacucucagggu

SEQ ID NO: 208570 - RNA, 16 nt, Human
gcuggagggagggguu

SEQ ID NO: 208571 - RNA, 20 nt, Human
ucuuauugucuugaggaguu

SEQ ID NO: 208572 - RNA, 22 nt, Human
ucucaggaaaaaucccuagcuu

SEQ ID NO: 208573 - RNA, 19 nt, Human
aggcugcccagucucugcc

SEQ ID NO: 208574 - RNA, 22 nt, Human
caggaagugugccugagcaccu

SEQ ID NO: 208575 - RNA, 22 nt, Human
augcaaaaacugcacuuacgcu

SEQ ID NO: 208576 - RNA, 22 nt, Human
ccuaggcccuaggcuuccauca

SEQ ID NO: 208577 - RNA, 22 nt, Human
ggcuucucgugccgaagcaaga

SEQ ID NO: 208578 - RNA, 22 nt, Human
ccugcaccacaaggcuucagag

SEQ ID NO: 208579 - RNA, 22 nt, Human
acugugccacaauucaccaggg

SEQ ID NO: 208580 - RNA, 22 nt, Human
aaacaguaaguucuaguauuau

SEQ ID NO: 208581 - RNA, 22 nt, Human
gaccaggagauuugagcuaggc

SEQ ID NO: 208582 - RNA, 22 nt, Human
cagggcaguuugugccuaugag

SEQ ID NO: 208583 - RNA, 22 nt, Human
cucugaagccccaaauaguccg

SEQ ID NO: 208584 - RNA, 22 nt, Human
uuguuucuccagucuaggaaaa

SEQ ID NO: 208585 - RNA, 22 nt, Human
ggagacucggguucuagccuug

SEQ ID NO: 208586 - RNA, 20 nt, Human
uuucuauggggccagcacau

SEQ ID NO: 208587 - RNA, 22 nt, Human
ugagacaguucugcagcugggu

SEQ ID NO: 208588 - RNA, 22 nt, Human
gcccccagcucucaagcucaaa

SEQ ID NO: 208589 - RNA, 22 nt, Human
ccucccuuuuggugucugcaua

SEQ ID NO: 208590 - RNA, 22 nt, Human
guguucauggaugucaauuuga

SEQ ID NO: 208591 - RNA, 22 nt, Human
aaugagucaaaacagcauauag

SEQ ID NO: 208592 - RNA, 22 nt, Human
caggcccagcccagcccuucga

SEQ ID NO: 208593 - RNA, 22 nt, Human
gggagggccaggcucacccagg

SEQ ID NO: 208594 - RNA, 22 nt, Human
cagcacuggggccacuggaguu

SEQ ID NO: 208595 - RNA, 22 nt, Human
uuucauguaaucauuuaggugg

SEQ ID NO: 208596 - RNA, 22 nt, Human
uagaaacccaggauuuguauuu

SEQ ID NO: 208597 - RNA, 20 nt, Human
cugcacugaacaugucugag

SEQ ID NO: 208598 - RNA, 22 nt, Human
cuggaaggcucugcugccuguc

SEQ ID NO: 208599 - RNA, 22 nt, Human
ucucaaggaaaagugauggcau

SEQ ID NO: 208600 - RNA, 22 nt, Human
acaggcacuuugacaugccauc

SEQ ID NO: 208601 - RNA, 22 nt, Human
gccugggagagggauagugcag

SEQ ID NO: 208602 - RNA, 22 nt, Human
uuucucaaaagacagaagugaa

SEQ ID NO: 208603 - RNA, 22 nt, Human
auucaguaggucuagaauaaga

SEQ ID NO: 208604 - RNA, 22 nt, Human
uucuagaaacacaugcaaacag

SEQ ID NO: 208605 - RNA, 22 nt, Human
uuacauaguuaaauaguacagc

SEQ ID NO: 208606 - RNA, 22 nt, Human
cuaugaccccagcaugaauaag

SEQ ID NO: 208607 - RNA, 22 nt, Human
ucaggcucuggguacaccugac

SEQ ID NO: 208608 - RNA, 22 nt, Human
ucagaggauagaaauacuuauu

SEQ ID NO: 208609 - RNA, 22 nt, Human
acucagaggggacugguguggu

SEQ ID NO: 208610 - RNA, 22 nt, Human
uacuguuuuuuagacucauggu

SEQ ID NO: 208611 - RNA, 22 nt, Human
gaacauaugcauguuuguuuug

SEQ ID NO: 208612 - RNA, 20 nt, Human
acuguucaagggccuggugg

SEQ ID NO: 208613 - RNA, 22 nt, Human
aagcugaaaaugagacucuaca

SEQ ID NO: 208614 - RNA, 22 nt, Human
gauacacuggccaaguggagga

SEQ ID NO: 208615 - RNA, 22 nt, Human
caucuuuaaaggggagacaccc

SEQ ID NO: 208616 - RNA, 18 nt, Human
ucaugagguagaggcugg

SEQ ID NO: 208617 - RNA, 22 nt, Human
cuuugaaaacuuaaauaacagc

SEQ ID NO: 208618 - RNA, 22 nt, Human
aaauacaaaaauuagccaggca

SEQ ID NO: 208619 - RNA, 22 nt, Human
ugcagcugugaaagggaaccaa

SEQ ID NO: 208620 - RNA, 22 nt, Human
cucuguaccuggcauagcaacc

SEQ ID NO: 208621 - RNA, 22 nt, Human
aagguuaaauagguauuuucca

SEQ ID NO: 208622 - RNA, 22 nt, Human
agguccaggagauuuggcaauu

SEQ ID NO: 208623 - RNA, 22 nt, Human
gcuggcagaauuucuucuugcu

SEQ ID NO: 208624 - RNA, 23 nt, Human
uuggaaauggggagaacagauuc

SEQ ID NO: 208625 - RNA, 22 nt, Human
uacuguacucaacaugugaguu

SEQ ID NO: 208626 - RNA, 19 nt, Human
uacauugcugguggggaug

SEQ ID NO: 208627 - RNA, 22 nt, Human
ucaggcucucagaccaacagca

SEQ ID NO: 208628 - RNA, 22 nt, Human
uucuuuucccaauauuuugcug

SEQ ID NO: 208629 - RNA, 22 nt, Human
auuacaguggacagcuaugcac

SEQ ID NO: 208630 - RNA, 20 nt, Human
uggacacagcccuguugagu

SEQ ID NO: 208631 - RNA, 22 nt, Human
gcugaaggcccggaggacaggg

SEQ ID NO: 208632 - RNA, 22 nt, Human
augcagaaagagaauguaaugu

SEQ ID NO: 208633 - RNA, 22 nt, Human
caggcuggacauuagauacaua

SEQ ID NO: 208634 - RNA, 22 nt, Human
ugucuccaugugauaguggccu

SEQ ID NO: 208635 - RNA, 22 nt, Human
uuucucagagcacggggaguga

SEQ ID NO: 208636 - RNA, 22 nt, Human
aggccaggaccauuagcccaga

SEQ ID NO: 208637 - RNA, 22 nt, Human
gcagggacgcagcacucuccgu

SEQ ID NO: 208638 - RNA, 22 nt, Human
acagauaaagaaacaaucacag

SEQ ID NO: 208639 - RNA, 22 nt, Human
ucccagggccgcaaacgaguuu

SEQ ID NO: 208640 - RNA, 23 nt, Human
acauacauggagauaaagugaug

SEQ ID NO: 208641 - RNA, 19 nt, Human
gcuggcuggaggagggaca

SEQ ID NO: 208642 - RNA, 22 nt, Human
aauagcauccuaaaacauacuu

SEQ ID NO: 208643 - RNA, 22 nt, Human
agucacauagcucugguuucuu

SEQ ID NO: 208644 - RNA, 20 nt, Human
cuuuaguuauuaacagcacu

SEQ ID NO: 208645 - RNA, 22 nt, Human
ucuggcuuucauuuguuuaaag

SEQ ID NO: 208646 - RNA, 20 nt, Human
aaaugcuuuugacacauauu

SEQ ID NO: 208647 - RNA, 22 nt, Human
augugcaacuuuucugucuuuu

SEQ ID NO: 208648 - RNA, 22 nt, Human
ucccugagugggcugguaguau

SEQ ID NO: 208649 - RNA, 22 nt, Human
acuuagaauuaaauauuuuugg

SEQ ID NO: 208650 - RNA, 23 nt, Human
uaauuagauguugauuccugaga

SEQ ID NO: 208651 - RNA, 21 nt, Human
cuuauucacuguuauuuauca

SEQ ID NO: 208652 - RNA, 22 nt, Human
uggaaucucuuuggggacugaa

SEQ ID NO: 208653 - RNA, 22 nt, Human
uccagagccugcgcacuggcug

SEQ ID NO: 208654 - RNA, 22 nt, Human
ccaggcuguaaacaccuucaaa

SEQ ID NO: 208655 - RNA, 22 nt, Human
caugauuuacuaaaauuuguuu

SEQ ID NO: 208656 - RNA, 22 nt, Human
aggcuccauucaugugaaggca

SEQ ID NO: 208657 - RNA, 22 nt, Human
aaaggaggccacauggcuagga

SEQ ID NO: 208658 - RNA, 22 nt, Human
gcugccagcucacucuccugag

SEQ ID NO: 208659 - RNA, 22 nt, Human
ugcagaggcuggcucgccgggu

SEQ ID NO: 208660 - RNA, 22 nt, Human
uuugcgucuaugugugagccuu

SEQ ID NO: 208661 - RNA, 22 nt, Human
agucugaaccagauggcaaggu

SEQ ID NO: 208662 - RNA, 22 nt, Human
guccaaggauggggucucccag

SEQ ID NO: 208663 - RNA, 22 nt, Human
ccuggcugugcauugccggccc

SEQ ID NO: 208664 - RNA, 22 nt, Human
ugugggcuguacugagggcagg

SEQ ID NO: 208665 - RNA, 22 nt, Human
ggcagcuggggcagugcccugu

SEQ ID NO: 208666 - RNA, 22 nt, Human
aaaggugacugcagcagcuauu

SEQ ID NO: 208667 - RNA, 22 nt, Human
caacuuuucugugaauuuaagu

SEQ ID NO: 208668 - RNA, 22 nt, Human
aggaggugcuagagaagauguu

SEQ ID NO: 208669 - RNA, 22 nt, Human
agccauguaugaggguuuccag

SEQ ID NO: 208670 - RNA, 22 nt, Human
cuacagccagaugcagaaaguu

SEQ ID NO: 208671 - RNA, 22 nt, Human
gcuguagguuuuuccaggaguu

SEQ ID NO: 208672 - RNA, 22 nt, Human
agccaggcuacuccuugcugac

SEQ ID NO: 208673 - RNA, 22 nt, Human
ggcuucuuuguaacgugccagc

SEQ ID NO: 208674 - RNA, 22 nt, Human
caggaggcaguggguguugucu

SEQ ID NO: 208675 - RNA, 19 nt, Human
ggucucagugcagcugcag

SEQ ID NO: 208676 - RNA, 20 nt, Human
ccugucuccucuuaccuggc

SEQ ID NO: 208677 - RNA, 22 nt, Human
gccaggguugccaaugggggca

SEQ ID NO: 208678 - RNA, 22 nt, Human
gcccagaguucaaggcugcagu

SEQ ID NO: 208679 - RNA, 19 nt, Human
guacagugguaagcuauga

SEQ ID NO: 208680 - RNA, 19 nt, Human
guggagcuaagaaaaggaa

SEQ ID NO: 208681 - RNA, 22 nt, Human
auggcugcucuggauggagucc

SEQ ID NO: 208682 - RNA, 22 nt, Human
gaauucauuagggaagcuaucu

SEQ ID NO: 208683 - RNA, 22 nt, Human
cacgccagccggacacugggcc

SEQ ID NO: 208684 - RNA, 22 nt, Human
cuccaggagggcuuccugugau

SEQ ID NO: 208685 - RNA, 22 nt, Human
ugaugucuaguacauacaagag

SEQ ID NO: 208686 - RNA, 17 nt, Human
gcuuccucaugcaguuc

SEQ ID NO: 208687 - RNA, 22 nt, Human
augccaggcuguuuggccucag

SEQ ID NO: 208688 - RNA, 20 nt, Human
aauauaauucucugaauuua

SEQ ID NO: 208689 - RNA, 22 nt, Human
aaaccauuagguuuuaucuacu

SEQ ID NO: 208690 - RNA, 22 nt, Human
caagcugguaucagcuagagcg

SEQ ID NO: 208691 - RNA, 22 nt, Human
gcaaauggagugaagagcugga

SEQ ID NO: 208692 - RNA, 22 nt, Human
auuugcuuuaagguauaaaagg

SEQ ID NO: 208693 - RNA, 22 nt, Human
cacagguggcuccaaguuagag

SEQ ID NO: 208694 - RNA, 22 nt, Human
ucugcagguaagcguucuugga

SEQ ID NO: 208695 - RNA, 22 nt, Human
cugccuggaaggagcaagggga

SEQ ID NO: 208696 - RNA, 22 nt, Human
gaggguggccuuuagagcccau

SEQ ID NO: 208697 - RNA, 22 nt, Human
gcuggguuuccagcaggcagga

SEQ ID NO: 208698 - RNA, 22 nt, Human
auuuuucucuuuccacugagau

SEQ ID NO: 208699 - RNA, 22 nt, Human
agacaauuguucuaaguaaaaa

SEQ ID NO: 208700 - RNA, 22 nt, Human
acagcucucccucagagaaaug

SEQ ID NO: 208701 - RNA, 22 nt, Human
cccacacucugagaaaugcuga

SEQ ID NO: 208702 - RNA, 22 nt, Human
agguggggaaaccagcgauccc

SEQ ID NO: 208703 - RNA, 22 nt, Human
ggggagcaauaguugaggugug

SEQ ID NO: 208704 - RNA, 19 nt, Human
gaauuuaucucuucagucc

SEQ ID NO: 208705 - RNA, 22 nt, Human
ccaggugggaggaaagcagaga

SEQ ID NO: 208706 - RNA, 22 nt, Human
ucagggaguguuggcaggauca

SEQ ID NO: 208707 - RNA, 22 nt, Human
cuagggacagaaagaggguaga

SEQ ID NO: 208708 - RNA, 22 nt, Human
ccuuggcuugugggcugcagcc

SEQ ID NO: 208709 - RNA, 22 nt, Human
aggcuggguaccugucauaugc

SEQ ID NO: 208710 - RNA, 22 nt, Human
aagggcccauucucucagaaaa

SEQ ID NO: 208711 - RNA, 22 nt, Human
uuugagaagauguaauguuaag

SEQ ID NO: 208712 - RNA, 22 nt, Human
aacagcauauuucauauauuga

SEQ ID NO: 208713 - RNA, 22 nt, Human
agagcccucuucacugccccuu

SEQ ID NO: 208714 - RNA, 22 nt, Human
cacaagaaauaagcugccuuuc

SEQ ID NO: 208715 - RNA, 18 nt, Human
guuuacauuacugaauag

SEQ ID NO: 208716 - RNA, 22 nt, Human
ucuccagucucaagacauugag

SEQ ID NO: 208717 - RNA, 22 nt, Human
ugggucuccugugccugggagg

SEQ ID NO: 208718 - RNA, 22 nt, Human
uguggcuguugaggaccccaag

SEQ ID NO: 208719 - RNA, 22 nt, Human
aagcugccuuccaugugaggaa

SEQ ID NO: 208720 - RNA, 22 nt, Human
gucucugugucugagagagccc

SEQ ID NO: 208721 - RNA, 21 nt, Human
gcucaggcucagguucagguu

SEQ ID NO: 208722 - RNA, 22 nt, Human
ucuuuaaugugauuguaauuau

SEQ ID NO: 208723 - RNA, 22 nt, Human
acuuuagaccaucuuccacagu

SEQ ID NO: 208724 - RNA, 22 nt, Human
gcccaggauaaugcugucccug

SEQ ID NO: 208725 - RNA, 22 nt, Human
ucuccagaguaaccuuggagca

SEQ ID NO: 208726 - RNA, 22 nt, Human
ugauucaauaggaauugaguag

SEQ ID NO: 208727 - RNA, 18 nt, Human
gccuggcugccaacccag

SEQ ID NO: 208728 - RNA, 22 nt, Human
acuaaagaugucuaaauauauu

SEQ ID NO: 208729 - RNA, 22 nt, Human
uccugagcaccuaugccauggc

SEQ ID NO: 208730 - RNA, 22 nt, Human
ggccaggcugcugggaccccgc

SEQ ID NO: 208731 - RNA, 22 nt, Human
cuuguuuuggaacagagugaau

SEQ ID NO: 208732 - RNA, 22 nt, Human
guacauaagaaauuacuacaga

SEQ ID NO: 208733 - RNA, 22 nt, Human
aaagucuuuauuuuguaucuuu

SEQ ID NO: 208734 - RNA, 22 nt, Human
agcugguuuaggaaaagguagg

SEQ ID NO: 208735 - RNA, 22 nt, Human
uuacauuaagccaauggauucu

SEQ ID NO: 208736 - RNA, 18 nt, Human
cugaggcccagagagggc

SEQ ID NO: 208737 - RNA, 22 nt, Human
uaaaggcaguuggaguugagga

SEQ ID NO: 208738 - RNA, 22 nt, Human
agcuccugugugaagccucccu

SEQ ID NO: 208739 - RNA, 22 nt, Human
uucucagggucuugugcaaggg

SEQ ID NO: 208740 - RNA, 22 nt, Human
caauuacauuuauugagcauuc

SEQ ID NO: 208741 - RNA, 22 nt, Human
guuacaaaggaagcuucacugc

SEQ ID NO: 208742 - RNA, 22 nt, Human
uugcauuuguuugaguagaaug

SEQ ID NO: 208743 - RNA, 22 nt, Human
guugaaagaucauguggcugcc

SEQ ID NO: 208744 - RNA, 22 nt, Human
uuuaugcagccucaguaucaga

SEQ ID NO: 208745 - RNA, 22 nt, Human
caucugcuguuccuuggacuca

SEQ ID NO: 208746 - RNA, 19 nt, Human
ucugccucuggucaggcuc

SEQ ID NO: 208747 - RNA, 22 nt, Human
caggaggagcauuagcgucuca

SEQ ID NO: 208748 - RNA, 22 nt, Human
ccuguggaggcugcucagcugg

SEQ ID NO: 208749 - RNA, 19 nt, Human
ucacauucagccuugcuga

SEQ ID NO: 208750 - RNA, 22 nt, Human
cuguuuaaccagaucucauauc

SEQ ID NO: 208751 - RNA, 23 nt, Human
uuguccagcugguuugggccaca

SEQ ID NO: 208752 - RNA, 22 nt, Human
acagacaucuauccauuuaauu

SEQ ID NO: 208753 - RNA, 23 nt, Human
caggugguagagaaaaauccaga

SEQ ID NO: 208754 - RNA, 22 nt, Human
ugcugucuuccaggauggugaa

SEQ ID NO: 208755 - RNA, 21 nt, Human
ugggccagaucugaguuucua

SEQ ID NO: 208756 - RNA, 22 nt, Human
augcucagggcacacucuggac

SEQ ID NO: 208757 - RNA, 22 nt, Human
gcccaggccggagagcagugcu

SEQ ID NO: 208758 - RNA, 22 nt, Human
uggcccugccgcacuauccuca

SEQ ID NO: 208759 - RNA, 22 nt, Human
auuuagaacuuuguuugccaau

SEQ ID NO: 208760 - RNA, 22 nt, Human
uuuucucuccagguggggugau

SEQ ID NO: 208761 - RNA, 22 nt, Human
auuagguugagguacucagagc

SEQ ID NO: 208762 - RNA, 22 nt, Human
aucugggcucgaauccuagcuc

SEQ ID NO: 208763 - RNA, 22 nt, Human
gccaggguggcagaaggcccca

SEQ ID NO: 208764 - RNA, 20 nt, Human
gcaaauggacacucagggaa

SEQ ID NO: 208765 - RNA, 18 nt, Human
aagucucugaaagcuuuu

SEQ ID NO: 208766 - RNA, 22 nt, Human
aacuugguaaauugugucagau

SEQ ID NO: 208767 - RNA, 22 nt, Human
acccuugguuuugcagagcugu

SEQ ID NO: 208768 - RNA, 19 nt, Human
ggaaccuuagagcuucagc

SEQ ID NO: 208769 - RNA, 22 nt, Human
ccucagcugcuucccuggagcc

SEQ ID NO: 208770 - RNA, 22 nt, Human
gaguugaucauuauuugguuuc

SEQ ID NO: 208771 - RNA, 22 nt, Human
augcuuuauuauuuugcaggga

SEQ ID NO: 208772 - RNA, 22 nt, Human
ucaggcuucacuccuguccaag

SEQ ID NO: 208773 - RNA, 22 nt, Human
ucuuaugaaaagcacuuagaac

SEQ ID NO: 208774 - RNA, 22 nt, Human
auauuuuuccaugugggacucu

SEQ ID NO: 208775 - RNA, 22 nt, Human
caaaaaacacagaugucugugu

SEQ ID NO: 208776 - RNA, 22 nt, Human
agucuuaugguuaaauagaugc

SEQ ID NO: 208777 - RNA, 22 nt, Human
caaugaaauugagauccagaga

SEQ ID NO: 208778 - RNA, 22 nt, Human
uggaagcaaaauauccuuuaau

SEQ ID NO: 208779 - RNA, 22 nt, Human
uaggaaacaaaguaaugcaacu

SEQ ID NO: 208780 - RNA, 22 nt, Human
gcagggcagagggagaaucucu

SEQ ID NO: 208781 - RNA, 22 nt, Human
gcuggguggaucggaggcucug

SEQ ID NO: 208782 - RNA, 22 nt, Human
agaaaggguucucugaggugcu

SEQ ID NO: 208783 - RNA, 22 nt, Human
uagaaaagauaacauucugugc

SEQ ID NO: 208784 - RNA, 22 nt, Human
uuauugcucuauuauggccuaa

SEQ ID NO: 208785 - RNA, 22 nt, Human
ccaggguuggucucucugaggu

SEQ ID NO: 208786 - RNA, 22 nt, Human
ccagagccagagaggugccugc

SEQ ID NO: 208787 - RNA, 23 nt, Human
cuagaauuuugcuaaaagacuag

SEQ ID NO: 208788 - RNA, 22 nt, Human
ggagcugaggcugaggccucac

SEQ ID NO: 208789 - RNA, 22 nt, Human
uaagauuacagugagaaauaaa

SEQ ID NO: 208790 - RNA, 22 nt, Human
agaagagaaauagugccacugu

SEQ ID NO: 208791 - RNA, 22 nt, Human
uuccaaagcugcuuuauuuagu

SEQ ID NO: 208792 - RNA, 22 nt, Human
ugaagaaaggugugggauacuc

SEQ ID NO: 208793 - RNA, 22 nt, Human
aaagcagcagaaucucucaggg

SEQ ID NO: 208794 - RNA, 22 nt, Human
ugugaaagcaagucuaguucuc

SEQ ID NO: 208795 - RNA, 22 nt, Human
aggucugguguugggccugaaa

SEQ ID NO: 208796 - RNA, 22 nt, Human
gaaguucuuuauagcaguguga

SEQ ID NO: 208797 - RNA, 22 nt, Human
gaaucucaguggaagcaggaag

SEQ ID NO: 208798 - RNA, 22 nt, Human
aaaagcaaggcagucugucuga

SEQ ID NO: 208799 - RNA, 22 nt, Human
gugcacagaaauugguaagacu

SEQ ID NO: 208800 - RNA, 22 nt, Human
uggcaggcugaguuggccuggu

SEQ ID NO: 208801 - RNA, 22 nt, Human
aauauuuuaggcuuuccaggcu

SEQ ID NO: 208802 - RNA, 22 nt, Human
uuuuugcuaauccccagccacu

SEQ ID NO: 208803 - RNA, 23 nt, Human
ccaguagcacaguuacccagugg

SEQ ID NO: 208804 - RNA, 19 nt, Human
uagaacugaggacuugcau

SEQ ID NO: 208805 - RNA, 22 nt, Human
ugacauguccaggugguccugu

SEQ ID NO: 208806 - RNA, 22 nt, Human
uauacagucuuuugcuauauuc

SEQ ID NO: 208807 - RNA, 22 nt, Human
gcaaagcaagcugucagccuca

SEQ ID NO: 208808 - RNA, 22 nt, Human
ugcaaacacuucaacgugcauc

SEQ ID NO: 208809 - RNA, 22 nt, Human
caggaaauaucuccuggcagag

SEQ ID NO: 208810 - RNA, 22 nt, Human
acauuaagaugugcuguaggau

SEQ ID NO: 208811 - RNA, 17 nt, Human
uugggagagaaagguau

SEQ ID NO: 208812 - RNA, 22 nt, Human
acaaguuagguuuuaauccaaa

SEQ ID NO: 208813 - RNA, 22 nt, Human
ugaugaaaaccagaacucucau

SEQ ID NO: 208814 - RNA, 22 nt, Human
acauucauuccaggucagucag

SEQ ID NO: 208815 - RNA, 17 nt, Human
ggaagaaaaggaucauc

SEQ ID NO: 208816 - RNA, 22 nt, Human
cagggcccauggcucagguagg

SEQ ID NO: 208817 - RNA, 22 nt, Human
aguuuuuccguggcuacgauaa

SEQ ID NO: 208818 - RNA, 20 nt, Human
uccuguccgcgccuugcguc

SEQ ID NO: 208819 - RNA, 22 nt, Human
agcagggcaguuaaaggguccu

SEQ ID NO: 208820 - RNA, 22 nt, Human
ugggccuccugcccuggccuag

SEQ ID NO: 208821 - RNA, 22 nt, Human
agcaggcacaagaaagggaggu

SEQ ID NO: 208822 - RNA, 22 nt, Human
cuacagugucgugugguuucug

SEQ ID NO: 208823 - RNA, 22 nt, Human
aguuguaucugaaugcauguag

SEQ ID NO: 208824 - RNA, 22 nt, Human
uggaggacaggacuggacagcc

SEQ ID NO: 208825 - RNA, 22 nt, Human
agagggggcagcggaccaguga

SEQ ID NO: 208826 - RNA, 22 nt, Human
cguggcugguggaccugagggc

SEQ ID NO: 208827 - RNA, 22 nt, Human
aggaggaagggaagacaaguaa

SEQ ID NO: 208828 - RNA, 22 nt, Human
uccucugagacaucagguugag

SEQ ID NO: 208829 - RNA, 22 nt, Human
gagaguggauggagcugcgaag

SEQ ID NO: 208830 - RNA, 22 nt, Human
agguuccaggucuggguuaugu

SEQ ID NO: 208831 - RNA, 22 nt, Human
agucucuuuguauaaauaggca

SEQ ID NO: 208832 - RNA, 22 nt, Human
agcauucaaguaauucacuugg

SEQ ID NO: 208833 - RNA, 22 nt, Human
caggcucccgcuccacugggca

SEQ ID NO: 208834 - RNA, 22 nt, Human
agacauuuugcauucccugaag

SEQ ID NO: 208835 - RNA, 22 nt, Human
agaaaacauuacauaggugugu

SEQ ID NO: 208836 - RNA, 22 nt, Human
gggugugucuuuugcuccugga

SEQ ID NO: 208837 - RNA, 22 nt, Human
ugcucauuugcccauuagcauc

SEQ ID NO: 208838 - RNA, 19 nt, Human
cacaucagcagggcugugg

SEQ ID NO: 208839 - RNA, 20 nt, Human
gacaggugcuaaagaggggc

SEQ ID NO: 208840 - RNA, 22 nt, Human
aaguagcauuuucaaaauguau

SEQ ID NO: 208841 - RNA, 22 nt, Human
gccucagagcuacacacacgca

SEQ ID NO: 208842 - RNA, 22 nt, Human
uccuguggcguuaucaugugau

SEQ ID NO: 208843 - RNA, 22 nt, Human
auauauaauacuugcugugggc

SEQ ID NO: 208844 - RNA, 22 nt, Human
gagagccagcucacuccagggc

SEQ ID NO: 208845 - RNA, 22 nt, Human
gauuuuauuagcccaaacuuug

SEQ ID NO: 208846 - RNA, 22 nt, Human
aaugaacacagcccucuacuuu

SEQ ID NO: 208847 - RNA, 22 nt, Human
ggcccugcaagguacccaggcc

SEQ ID NO: 208848 - RNA, 22 nt, Human
uuuaccaaauagauuaugucag

SEQ ID NO: 208849 - RNA, 22 nt, Human
ugaggggagcuagcaugccuug

SEQ ID NO: 208850 - RNA, 22 nt, Human
cagccagaaaguauguuaggga

SEQ ID NO: 208851 - RNA, 22 nt, Human
uuucucugugggcuuuaugcau

SEQ ID NO: 208852 - RNA, 22 nt, Human
ugaaucaauaguugcaaguauu

SEQ ID NO: 208853 - RNA, 19 nt, Human
uauauuuguugaauaaaaa

SEQ ID NO: 208854 - RNA, 22 nt, Human
aaauucaaugaucacuggcuca

SEQ ID NO: 208855 - RNA, 22 nt, Human
aagccugcuuuguuccacagca

SEQ ID NO: 208856 - RNA, 20 nt, Human
gcaagcuuauuagugauauu

SEQ ID NO: 208857 - RNA, 21 nt, Human
uggcugcaagcagcugccucc

SEQ ID NO: 208858 - RNA, 22 nt, Human
agcugccaggccccugagaacc

SEQ ID NO: 208859 - RNA, 18 nt, Human
gcuggcugcacuucugcu

SEQ ID NO: 208860 - RNA, 22 nt, Human
ugaacccaggagguugcaguga

SEQ ID NO: 208861 - RNA, 22 nt, Human
acuguucuccagcauggcugua

SEQ ID NO: 208862 - RNA, 21 nt, Human
aacaggucccccacgggcuuu

SEQ ID NO: 208863 - RNA, 22 nt, Human
acacaggaacucaagcucgcuu

SEQ ID NO: 208864 - RNA, 22 nt, Human
uuagucuucucauaguaaaacu

SEQ ID NO: 208865 - RNA, 22 nt, Human
acugagggagagucuuagguug

SEQ ID NO: 208866 - RNA, 22 nt, Human
agaagccaauccuugucucucu

SEQ ID NO: 208867 - RNA, 22 nt, Human
acagccuggccugaguuaaggc

SEQ ID NO: 208868 - RNA, 22 nt, Human
agaguuuguacuuuacccugag

SEQ ID NO: 208869 - RNA, 22 nt, Human
cauuagggacugaggaauaagg

SEQ ID NO: 208870 - RNA, 22 nt, Human
cacaguuugguauagaagugau

SEQ ID NO: 208871 - RNA, 22 nt, Human
ucagaggagcaaaagaggggau

SEQ ID NO: 208872 - RNA, 18 nt, Human
gcugcaggcccuccgagg

SEQ ID NO: 208873 - RNA, 22 nt, Human
gggaaagacccugagucuuauu

SEQ ID NO: 208874 - RNA, 22 nt, Human
uaggcagagguaugguaaggac

SEQ ID NO: 208875 - RNA, 22 nt, Human
cuguaacucugccaagaaggcu

SEQ ID NO: 208876 - RNA, 22 nt, Human
ccugugcacuaucugcauuuuu

SEQ ID NO: 208877 - RNA, 22 nt, Human
gucuccagagguuacauccugu

SEQ ID NO: 208878 - RNA, 22 nt, Human
cagguggggcgcccucaggcag

SEQ ID NO: 208879 - RNA, 22 nt, Human
ccacagcaccugcagccaguug

SEQ ID NO: 208880 - RNA, 22 nt, Human
aguccagguggaccuuggccag

SEQ ID NO: 208881 - RNA, 22 nt, Human
caccugccugcaggggcuccac

SEQ ID NO: 208882 - RNA, 17 nt, Human
cucacggaggaugaauc

SEQ ID NO: 208883 - RNA, 22 nt, Human
caugccauuuacuuggaggaga

SEQ ID NO: 208884 - RNA, 21 nt, Human
uauaacacacuucagcuucuc

SEQ ID NO: 208885 - RNA, 22 nt, Human
ucagugcauuguucauuguagg

SEQ ID NO: 208886 - RNA, 22 nt, Human
gagguucacuuccuggauccuu

SEQ ID NO: 208887 - RNA, 21 nt, Human
aagugguuuacauccagcugu

SEQ ID NO: 208888 - RNA, 22 nt, Human
aaaugauggaaaugaggcugaa

SEQ ID NO: 208889 - RNA, 22 nt, Human
caaagcguccugccuccauuug

SEQ ID NO: 208890 - RNA, 22 nt, Human
acaaauuuguguaguuauggca

SEQ ID NO: 208891 - RNA, 22 nt, Human
guucacuguacuggugaugguu

SEQ ID NO: 208892 - RNA, 21 nt, Human
ggagcuggggagcuggcccca

SEQ ID NO: 208893 - RNA, 22 nt, Human
ucagcugguguuucuucuccuu

SEQ ID NO: 208894 - RNA, 22 nt, Human
uuucuuccuaaauaugauuucc

SEQ ID NO: 208895 - RNA, 22 nt, Human
ccugugcccucugcauagcagc

SEQ ID NO: 208896 - RNA, 22 nt, Human
gcagauguucugugucucacaa

SEQ ID NO: 208897 - RNA, 22 nt, Human
cagagccagcaguggggacagg

SEQ ID NO: 208898 - RNA, 22 nt, Human
acuagaacuucuaacuaagguc

SEQ ID NO: 208899 - RNA, 22 nt, Human
aacaugauuuaguauaaugcag

SEQ ID NO: 208900 - RNA, 22 nt, Human
gcacacagggauuuuugaaugg

SEQ ID NO: 208901 - RNA, 22 nt, Human
gaauagcuugacaauuauuuuu

SEQ ID NO: 208902 - RNA, 22 nt, Human
acuugguggcgaacgaggguca

SEQ ID NO: 208903 - RNA, 22 nt, Human
uugguaauuguguuuauuaaau

SEQ ID NO: 208904 - RNA, 22 nt, Human
gcaagcaguuacccaggauucg

SEQ ID NO: 208905 - RNA, 18 nt, Human
cucaggccuuucccugug

SEQ ID NO: 208906 - RNA, 20 nt, Human
ggugcugauaagaaagaagu

SEQ ID NO: 208907 - RNA, 21 nt, Human
gcucucagcugccugcugguu

SEQ ID NO: 208908 - RNA, 22 nt, Human
uugguacaaugugcuagguagg

SEQ ID NO: 208909 - RNA, 22 nt, Human
cagaaguuggagcuuuccauca

SEQ ID NO: 208910 - RNA, 22 nt, Human
aucuuucuccauauacaucuuu

SEQ ID NO: 208911 - RNA, 20 nt, Human
ucaagacagacauggaguuu

SEQ ID NO: 208912 - RNA, 22 nt, Human
ugguccuggugcaagugcauuu

SEQ ID NO: 208913 - RNA, 22 nt, Human
gcugggcagccuggccgcugcc

SEQ ID NO: 208914 - RNA, 22 nt, Human
auggcuccauagcuucguuuag

SEQ ID NO: 208915 - RNA, 22 nt, Human
agggagccaggaacgcaggucg

SEQ ID NO: 208916 - RNA, 22 nt, Human
gucuuucuuaaacaacagaaca

SEQ ID NO: 208917 - RNA, 22 nt, Human
auuugugauaauuuguuacagc

SEQ ID NO: 208918 - RNA, 22 nt, Human
ugaggcaagaguuugauuagag

SEQ ID NO: 208919 - RNA, 22 nt, Human
uccucccuaaauccuagacugu

SEQ ID NO: 208920 - RNA, 22 nt, Human
caugauaauuguuaacaaagua

SEQ ID NO: 208921 - RNA, 22 nt, Human
auagcauauaaguuauaaaacu

SEQ ID NO: 208922 - RNA, 22 nt, Human
caugcaugccgggcugacagag

SEQ ID NO: 208923 - RNA, 22 nt, Human
uugagaggcuguugacauucug

SEQ ID NO: 208924 - RNA, 22 nt, Human
augucaaaugcugcaaacucau

SEQ ID NO: 208925 - RNA, 22 nt, Human
caggcagaaauuuuguuucauu

SEQ ID NO: 208926 - RNA, 20 nt, Human
aagcagaagcugcucucagc

SEQ ID NO: 208927 - RNA, 22 nt, Human
cccagggacagaugggcagcua

SEQ ID NO: 208928 - RNA, 22 nt, Human
ugauuuccuaggucuggagaag

SEQ ID NO: 208929 - RNA, 22 nt, Human
gccccucccagucaggagcacu

SEQ ID NO: 208930 - RNA, 22 nt, Human
auuuuaguuuuagcauccaugc

SEQ ID NO: 208931 - RNA, 22 nt, Human
cuagaaauucugauucaguagg

SEQ ID NO: 208932 - RNA, 22 nt, Human
aaauauaccaguugccugcauc

SEQ ID NO: 208933 - RNA, 22 nt, Human
agaaguuauccaccuuagaugc

SEQ ID NO: 208934 - RNA, 22 nt, Human
ucugagaggugaauucagcaaa

SEQ ID NO: 208935 - RNA, 22 nt, Human
cagcagcugcgugcccaggccg

SEQ ID NO: 208936 - RNA, 22 nt, Human
auguggauuugggagugaucag

SEQ ID NO: 208937 - RNA, 22 nt, Human
uacaaacuccgaaguuuguacc

SEQ ID NO: 208938 - RNA, 22 nt, Human
guuccucacguggacagaugau

SEQ ID NO: 208939 - RNA, 22 nt, Human
aaaugcagcagcuaauugaaaa

SEQ ID NO: 208940 - RNA, 23 nt, Human
agaggcacagcacuuggcuggcc

SEQ ID NO: 208941 - RNA, 22 nt, Human
gcaggugucuucagcaggauga

SEQ ID NO: 208942 - RNA, 23 nt, Human
ucugggcaccuuguugacaugau

SEQ ID NO: 208943 - RNA, 22 nt, Human
aacagcuauuagaacuucaugg

SEQ ID NO: 208944 - RNA, 22 nt, Human
aagggcucacccaacucacuuc

SEQ ID NO: 208945 - RNA, 22 nt, Human
ugcauuauaacugaauguuguu

SEQ ID NO: 208946 - RNA, 22 nt, Human
ugaaggcuugacugaggcagga

SEQ ID NO: 208947 - RNA, 22 nt, Human
agggaccagccugcccagggcu

SEQ ID NO: 208948 - RNA, 22 nt, Human
cucaguuucugacauuaaaauc

SEQ ID NO: 208949 - RNA, 22 nt, Human
ugcugagggcagaugaauuaga

SEQ ID NO: 208950 - RNA, 22 nt, Human
ucuuacccggcaacgugugucg

SEQ ID NO: 208951 - RNA, 21 nt, Human
ccuuggcuggcaucuagcacc

SEQ ID NO: 208952 - RNA, 22 nt, Human
uugcuucaguagcucuuuaaag

SEQ ID NO: 208953 - RNA, 22 nt, Human
cugccccaggccuccuuuucuu

SEQ ID NO: 208954 - RNA, 22 nt, Human
augaacaaugacuacauauuga

SEQ ID NO: 208955 - RNA, 19 nt, Human
uguccucacagagcauaac

SEQ ID NO: 208956 - RNA, 20 nt, Human
agguggcucuuccugggcuu

SEQ ID NO: 208957 - RNA, 22 nt, Human
uggcagagaugaagaguuguuu

SEQ ID NO: 208958 - RNA, 22 nt, Human
ggcucagcaaugaugagccccu

SEQ ID NO: 208959 - RNA, 22 nt, Human
caguucuuauuuggccaguguc

SEQ ID NO: 208960 - RNA, 21 nt, Human
ucaugcaggcagaguuuggua

SEQ ID NO: 208961 - RNA, 22 nt, Human
ucagcacuuggauuucagagau

SEQ ID NO: 208962 - RNA, 18 nt, Human
uuaguauaacugccugug

SEQ ID NO: 208963 - RNA, 22 nt, Human
cagccugagccuucuguagcaa

SEQ ID NO: 208964 - RNA, 22 nt, Human
aacauucaccucuaccuccuuc

SEQ ID NO: 208965 - RNA, 19 nt, Human
uccugcccaccagccaggg

SEQ ID NO: 208966 - RNA, 22 nt, Human
gcacaucuggagcucuguggaa

SEQ ID NO: 208967 - RNA, 17 nt, Human
ccagagaguaguuagga

SEQ ID NO: 208968 - RNA, 22 nt, Human
aaggauaaaaaccacuucuaau

SEQ ID NO: 208969 - RNA, 22 nt, Human
aucuuuagcauuacuuuauuca

SEQ ID NO: 208970 - RNA, 22 nt, Human
uugagaagaauguguugaguuu

SEQ ID NO: 208971 - RNA, 16 nt, Human
uaucuagaguugaggu

SEQ ID NO: 208972 - RNA, 22 nt, Human
gagacacaauuuccccauccua

SEQ ID NO: 208973 - RNA, 22 nt, Human
agauuuacucccugcuuccgcc

SEQ ID NO: 208974 - RNA, 22 nt, Human
aacauucaauugaggaaguuaa

SEQ ID NO: 208975 - RNA, 19 nt, Human
ucauaaaaaugguaaccca

SEQ ID NO: 208976 - RNA, 22 nt, Human
uacacaucucugucaguaguga

SEQ ID NO: 208977 - RNA, 22 nt, Human
aacauugcauucucuaugagau

SEQ ID NO: 208978 - RNA, 22 nt, Human
uucuuauucuugaaauguggga

SEQ ID NO: 208979 - RNA, 18 nt, Human
ucucuuuccucaguggag

SEQ ID NO: 208980 - RNA, 22 nt, Human
gcagcagaugugggcccagagc

SEQ ID NO: 208981 - RNA, 22 nt, Human
ucuacauuccuuuuauaauauc

SEQ ID NO: 208982 - RNA, 22 nt, Human
acccaggagccgugagagguua

SEQ ID NO: 208983 - RNA, 22 nt, Human
uggagcccaggagaggauaaac

SEQ ID NO: 208984 - RNA, 22 nt, Human
aucuuuggggcauccaggaaaa

SEQ ID NO: 208985 - RNA, 22 nt, Human
ggcuuuauguuuuucauguggu

SEQ ID NO: 208986 - RNA, 20 nt, Human
aguguacagacacuagaaau

SEQ ID NO: 208987 - RNA, 22 nt, Human
aacccuggagaaggcuuuggau

SEQ ID NO: 208988 - RNA, 22 nt, Human
cugcaggguuuuaacaauggac

SEQ ID NO: 208989 - RNA, 22 nt, Human
guuggccauuaauuggaggaca

SEQ ID NO: 208990 - RNA, 22 nt, Human
augggaggcaaagaucgcagaa

SEQ ID NO: 208991 - RNA, 23 nt, Human
ucagugcaaaaauaggauuuugg

SEQ ID NO: 208992 - RNA, 22 nt, Human
gccuccagcuggggcauuucag

SEQ ID NO: 208993 - RNA, 22 nt, Human
uagucagugcacagacacuugu

SEQ ID NO: 208994 - RNA, 22 nt, Human
ucccauauauguuuauauugga

SEQ ID NO: 208995 - RNA, 22 nt, Human
cagcacauaagccgaagacugu

SEQ ID NO: 208996 - RNA, 22 nt, Human
ccagagccuaagaucugauccu

SEQ ID NO: 208997 - RNA, 22 nt, Human
uucuccagacaggcagagggaa

SEQ ID NO: 208998 - RNA, 22 nt, Human
ugcuggguggacuuggcucuca

SEQ ID NO: 208999 - RNA, 22 nt, Human
agguggcaguuguggaaccauc

SEQ ID NO: 209000 - RNA, 22 nt, Human
cagcccaggcucagauguuggg

SEQ ID NO: 209001 - RNA, 22 nt, Human
cucagagccaguuagcaggugc

SEQ ID NO: 209002 - RNA, 22 nt, Human
guacaguaguaaaagugaauga

SEQ ID NO: 209003 - RNA, 22 nt, Human
uuucuguaaagaccaagccagc

SEQ ID NO: 209004 - RNA, 22 nt, Human
gcagauggcucagacacugggg

SEQ ID NO: 209005 - RNA, 22 nt, Human
aagccuucaguccguugcagag

SEQ ID NO: 209006 - RNA, 22 nt, Human
cucccuggcagccgcacuccug

SEQ ID NO: 209007 - RNA, 22 nt, Human
aaggcagcucagcucauggcag

SEQ ID NO: 209008 - RNA, 22 nt, Human
acccuccacaccagucuuauuu

SEQ ID NO: 209009 - RNA, 22 nt, Human
aucauuagaccaaacuagagcu

SEQ ID NO: 209010 - RNA, 22 nt, Human
cugggucugggccuccuggagu

SEQ ID NO: 209011 - RNA, 22 nt, Human
ccagggcagugggagaaggugc

SEQ ID NO: 209012 - RNA, 22 nt, Human
gaugagucauucacagucguga

SEQ ID NO: 209013 - RNA, 22 nt, Human
guauaaaguauaagcuuguuuu

SEQ ID NO: 209014 - RNA, 22 nt, Human
aauuuguuaaaagugagugaca

SEQ ID NO: 209015 - RNA, 22 nt, Human
acagauuuggaggccucacccc

SEQ ID NO: 209016 - RNA, 22 nt, Human
gggaaaucucguccucuauuua

SEQ ID NO: 209017 - RNA, 22 nt, Human
ugaugagggagauuugagccca

SEQ ID NO: 209018 - RNA, 19 nt, Human
uucauucucuuauuguugu

SEQ ID NO: 209019 - RNA, 23 nt, Human
uccauacucuaaacauguuauuu

SEQ ID NO: 209020 - RNA, 22 nt, Human
aaguguagauuauggagugucu

SEQ ID NO: 209021 - RNA, 22 nt, Human
cugggagcccugacuagccugg

SEQ ID NO: 209022 - RNA, 22 nt, Human
cagggacagagacugcaccuug

SEQ ID NO: 209023 - RNA, 22 nt, Human
gcagguguggaguggggugagc

SEQ ID NO: 209024 - RNA, 22 nt, Human
gaacauuugaugaugacauugg

SEQ ID NO: 209025 - RNA, 22 nt, Human
augcaacaguucauaguuuuau

SEQ ID NO: 209026 - RNA, 22 nt, Human
uuuacaauugguuuucucuaau

SEQ ID NO: 209027 - RNA, 22 nt, Human
agaggcugugcccaccaggcaa

SEQ ID NO: 209028 - RNA, 22 nt, Human
accagagcuuacaugcuagaaa

SEQ ID NO: 209029 - RNA, 22 nt, Human
guauacaacuauuguuggguaa

SEQ ID NO: 209030 - RNA, 22 nt, Human
ugaggcaggagaauggcgggaa

SEQ ID NO: 209031 - RNA, 22 nt, Human
gucacuguuuccuauuauauuu

SEQ ID NO: 209032 - RNA, 22 nt, Human
agcaagauuuuccuugaauguu

SEQ ID NO: 209033 - RNA, 20 nt, Human
ccagcacccucucagcugaa

SEQ ID NO: 209034 - RNA, 22 nt, Human
cagcaggaggugaguagcaggu

SEQ ID NO: 209035 - RNA, 22 nt, Human
uaaguucaagucuuggauauaa

SEQ ID NO: 209036 - RNA, 18 nt, Human
uggcucugccacucaccg

SEQ ID NO: 209037 - RNA, 22 nt, Human
ccagaccacccuggccaugcac

SEQ ID NO: 209038 - RNA, 22 nt, Human
ccuguaggauauuguagaauac

SEQ ID NO: 209039 - RNA, 22 nt, Human
gccacugucauacccuggcaau

SEQ ID NO: 209040 - RNA, 22 nt, Human
ggagcccugcugacaugggugu

SEQ ID NO: 209041 - RNA, 20 nt, Human
aggcuccuccaggaugugug

SEQ ID NO: 209042 - RNA, 22 nt, Human
aagccaguaaguuuuugucauu

SEQ ID NO: 209043 - RNA, 22 nt, Human
aaugucucaccguaaauguaac

SEQ ID NO: 209044 - RNA, 22 nt, Human
uugugguuaaccgcacauuuuu

SEQ ID NO: 209045 - RNA, 22 nt, Human
agaugcagauuuggauucagga

SEQ ID NO: 209046 - RNA, 22 nt, Human
caguuacauaaaugauaaaaug

SEQ ID NO: 209047 - RNA, 22 nt, Human
agguauuauuagcaucucuauu

SEQ ID NO: 209048 - RNA, 22 nt, Human
gggucuucugauauagguccag

SEQ ID NO: 209049 - RNA, 22 nt, Human
ccaggcuggaaucaauauucug

SEQ ID NO: 209050 - RNA, 19 nt, Human
ucucuggcaguucagagca

SEQ ID NO: 209051 - RNA, 22 nt, Human
ugagcccagaagcccacucggc

SEQ ID NO: 209052 - RNA, 18 nt, Human
agggagcaucugguugcc

SEQ ID NO: 209053 - RNA, 22 nt, Human
ugaaauuagugaaguuacaguu

SEQ ID NO: 209054 - RNA, 22 nt, Human
ucugggcuuggguagaaaucac

SEQ ID NO: 209055 - RNA, 22 nt, Human
acaggggugcauggugcauggu

SEQ ID NO: 209056 - RNA, 22 nt, Human
aggccaggauagcauggaucag

SEQ ID NO: 209057 - RNA, 22 nt, Human
aaagacauggaacuagagaugg

SEQ ID NO: 209058 - RNA, 22 nt, Human
uuccugugucccgggcacccug

SEQ ID NO: 209059 - RNA, 22 nt, Human
uacaaagucagaauaacaggug

SEQ ID NO: 209060 - RNA, 22 nt, Human
cccugaccaccagcuccauuug

SEQ ID NO: 209061 - RNA, 22 nt, Human
guugggaagcagauggaugagc

SEQ ID NO: 209062 - RNA, 22 nt, Human
uucuuuuuaucuucccauaaga

SEQ ID NO: 209063 - RNA, 17 nt, Human
cagugcagauaagugag

SEQ ID NO: 209064 - RNA, 22 nt, Human
ucccaauuaacagguaucaggc

SEQ ID NO: 209065 - RNA, 22 nt, Human
ucaaauuaguggaauaauaaug

SEQ ID NO: 209066 - RNA, 22 nt, Human
cauguugaauggccuugauuuu

SEQ ID NO: 209067 - RNA, 18 nt, Human
cccagccucuccuuucua

SEQ ID NO: 209068 - RNA, 22 nt, Human
agauuuaaauuugcuacaauuc

SEQ ID NO: 209069 - RNA, 20 nt, Human
agaaggcuccuuuugccaag

SEQ ID NO: 209070 - RNA, 22 nt, Human
agcuauggaacagaguggcugu

SEQ ID NO: 209071 - RNA, 22 nt, Human
aggaccagccuccaggucucuu

SEQ ID NO: 209072 - RNA, 22 nt, Human
uuugggaugcuagacaccucag

SEQ ID NO: 209073 - RNA, 22 nt, Human
gaaggagggagcggcgcggauu

SEQ ID NO: 209074 - RNA, 20 nt, Human
agauuaggggcuuucuucuu

SEQ ID NO: 209075 - RNA, 22 nt, Human
ucaggccaggagaucagauuga

SEQ ID NO: 209076 - RNA, 22 nt, Human
uauaugcagugugucauucaag

SEQ ID NO: 209077 - RNA, 22 nt, Human
ucugggugggcccgagaaaucu

SEQ ID NO: 209078 - RNA, 22 nt, Human
agugcuccuauggaucaguugu

SEQ ID NO: 209079 - RNA, 22 nt, Human
uggcugcaguucacaggagcaa

SEQ ID NO: 209080 - RNA, 22 nt, Human
gcuguggcugacauugcagaca

SEQ ID NO: 209081 - RNA, 22 nt, Human
cugggccucucagcucccgcgg

SEQ ID NO: 209082 - RNA, 22 nt, Human
augucgauaggagugccaucgg

SEQ ID NO: 209083 - RNA, 22 nt, Human
uaaggaggugcccacucucagg

SEQ ID NO: 209084 - RNA, 22 nt, Human
cucugaccauucccuugauuuu

SEQ ID NO: 209085 - RNA, 22 nt, Human
ugagaaauuacuucagugaugg

SEQ ID NO: 209086 - RNA, 22 nt, Human
ucauguuuuaguaaagugaagg

SEQ ID NO: 209087 - RNA, 22 nt, Human
uucugggagagaaagggccuug

SEQ ID NO: 209088 - RNA, 22 nt, Human
accucagaggccagggaucuag

SEQ ID NO: 209089 - RNA, 22 nt, Human
aagagacagagccauguuucua

SEQ ID NO: 209090 - RNA, 22 nt, Human
cagccuggagccacagcccagg

SEQ ID NO: 209091 - RNA, 22 nt, Human
gaggcccaguggagggccaugg

SEQ ID NO: 209092 - RNA, 22 nt, Human
gcaggcucccuugcagagcagg

SEQ ID NO: 209093 - RNA, 22 nt, Human
aggcgcagaaggccaggggccu

SEQ ID NO: 209094 - RNA, 22 nt, Human
uuucuucaauugcuaacaagga

SEQ ID NO: 209095 - RNA, 22 nt, Human
ggugcugagugagcuagaggcu

SEQ ID NO: 209096 - RNA, 22 nt, Human
cauagacaaagaucagaagagu

SEQ ID NO: 209097 - RNA, 22 nt, Human
uccaggcuagaagucacaggcc

SEQ ID NO: 209098 - RNA, 22 nt, Human
uggcauguauacuugaguagga

SEQ ID NO: 209099 - RNA, 22 nt, Human
uguugacugguaacuuuaaaca

SEQ ID NO: 209100 - RNA, 22 nt, Human
aguuauuucaguaacauaauag

SEQ ID NO: 209101 - RNA, 22 nt, Human
cugacaaaggcaaggcaggggg

SEQ ID NO: 209102 - RNA, 21 nt, Human
agcaggugcuguuggaggaaa

SEQ ID NO: 209103 - RNA, 22 nt, Human
uauuuuacaugacagguguuua

SEQ ID NO: 209104 - RNA, 22 nt, Human
aaacauucacauuugcuaguaa

SEQ ID NO: 209105 - RNA, 23 nt, Human
gccugggacugguagugugaccu

SEQ ID NO: 209106 - RNA, 22 nt, Human
gacauuuauuagaaaacuauca

SEQ ID NO: 209107 - RNA, 22 nt, Human
aggagucacucagggcuucauc

SEQ ID NO: 209108 - RNA, 22 nt, Human
agccuucaguaagggcuuagca

SEQ ID NO: 209109 - RNA, 22 nt, Human
ggacacagguaaauaccacuga

SEQ ID NO: 209110 - RNA, 22 nt, Human
ggucuagaucaagaacagaacu

SEQ ID NO: 209111 - RNA, 22 nt, Human
gaggcuccccaugaggccccag

SEQ ID NO: 209112 - RNA, 22 nt, Human
aguccugguucugauucugaca

SEQ ID NO: 209113 - RNA, 22 nt, Human
gcagguggggcugcuaccagaa

SEQ ID NO: 209114 - RNA, 22 nt, Human
uuucuagaugcggggcuugugc

SEQ ID NO: 209115 - RNA, 22 nt, Human
aggcuucugcugauauuucauu

SEQ ID NO: 209116 - RNA, 22 nt, Human
auaaauuaggaucugggguucc

SEQ ID NO: 209117 - RNA, 22 nt, Human
acauuugugcaacguauccaca

SEQ ID NO: 209118 - RNA, 22 nt, Human
ugccugggugcccucugcuccu

SEQ ID NO: 209119 - RNA, 21 nt, Human
ccugaaauucucacuagcuua

SEQ ID NO: 209120 - RNA, 22 nt, Human
ccaggcacucacggggcacugg

SEQ ID NO: 209121 - RNA, 22 nt, Human
agucuuaguaugguuuuagguu

SEQ ID NO: 209122 - RNA, 22 nt, Human
aaguuacaguuaugaaacucac

SEQ ID NO: 209123 - RNA, 22 nt, Human
ugcagggccaugguggcggcug

SEQ ID NO: 209124 - RNA, 22 nt, Human
accauacauuaaaugacuuuca

SEQ ID NO: 209125 - RNA, 22 nt, Human
agcucuggaauaaugaugugau

SEQ ID NO: 209126 - RNA, 20 nt, Human
uccuuuggccuuagagcugu

SEQ ID NO: 209127 - RNA, 22 nt, Human
cccuggcuuggcacucuccacu

SEQ ID NO: 209128 - RNA, 22 nt, Human
ccauuggagccaagaguuuuac

SEQ ID NO: 209129 - RNA, 22 nt, Human
uaaagugcugggauuauaggcc

SEQ ID NO: 209130 - RNA, 17 nt, Human
acagagcuacauauucu

SEQ ID NO: 209131 - RNA, 22 nt, Human
uggcccaggugcaagagacaga

SEQ ID NO: 209132 - RNA, 22 nt, Human
cuguuacuccuuuggcagauua

SEQ ID NO: 209133 - RNA, 22 nt, Human
aaacaguacucgauuuuuguag

SEQ ID NO: 209134 - RNA, 22 nt, Human
gcccccucuuuggagccagcca

SEQ ID NO: 209135 - RNA, 22 nt, Human
aucuuacacgauaacuguuagu

SEQ ID NO: 209136 - RNA, 22 nt, Human
ccagccagaaguccgggcuucu

SEQ ID NO: 209137 - RNA, 22 nt, Human
guugcuuuacagcuggugacag

SEQ ID NO: 209138 - RNA, 22 nt, Human
caggcagugucccaggaagcca

SEQ ID NO: 209139 - RNA, 22 nt, Human
ggccuggagucagggaaagcaa

SEQ ID NO: 209140 - RNA, 22 nt, Human
agcuagagcugagaagcacuug

SEQ ID NO: 209141 - RNA, 20 nt, Human
ucuuuagauuuaucuuaugu

SEQ ID NO: 209142 - RNA, 22 nt, Human
aaaaugcaugagaaugugcucg

SEQ ID NO: 209143 - RNA, 22 nt, Human
ccuggguccacccugugaagua

SEQ ID NO: 209144 - RNA, 22 nt, Human
uggcacaggagcacugcccugg

SEQ ID NO: 209145 - RNA, 17 nt, Human
cuggagcuguguaaccu

SEQ ID NO: 209146 - RNA, 22 nt, Human
cagcucugaggaacacuccuuu

SEQ ID NO: 209147 - RNA, 22 nt, Human
uuucuguuaggcaucauuuuaa

SEQ ID NO: 209148 - RNA, 22 nt, Human
ugggucccaggaaggaccagca

SEQ ID NO: 209149 - RNA, 22 nt, Human
uuccauauuagacuaugugggg

SEQ ID NO: 209150 - RNA, 22 nt, Human
caauucaaguugaguacagcuu

SEQ ID NO: 209151 - RNA, 22 nt, Human
agggacuauuuacccaucucac

SEQ ID NO: 209152 - RNA, 22 nt, Human
uuucuuuuacaguguggcuauu

SEQ ID NO: 209153 - RNA, 23 nt, Human
cagagcugauuaaacuuaaucuc

SEQ ID NO: 209154 - RNA, 22 nt, Human
aacccagagcuggaggagagua

SEQ ID NO: 209155 - RNA, 22 nt, Human
ccuccugcacuugcuuuccuuc

SEQ ID NO: 209156 - RNA, 22 nt, Human
ucugaccaggcucagccaaggc

SEQ ID NO: 209157 - RNA, 22 nt, Human
cucagugucuuauuguacacau

SEQ ID NO: 209158 - RNA, 22 nt, Human
acaguuuaucgauucaccuacc

SEQ ID NO: 209159 - RNA, 22 nt, Human
ucacacgugagguucuauccug

SEQ ID NO: 209160 - RNA, 22 nt, Human
ugugaccucaucuuaacuggaa

SEQ ID NO: 209161 - RNA, 22 nt, Human
ugcuggaggccugacuguguuu

SEQ ID NO: 209162 - RNA, 19 nt, Human
guccucucaacaacccggg

SEQ ID NO: 209163 - RNA, 22 nt, Human
ugcaaacaacuguuuaaugcug

SEQ ID NO: 209164 - RNA, 22 nt, Human
guaauuacaugaguacuguaag

SEQ ID NO: 209165 - RNA, 22 nt, Human
acacagauuucacuggaauaga

SEQ ID NO: 209166 - RNA, 22 nt, Human
uuuacagucugucuagcaaugu

SEQ ID NO: 209167 - RNA, 22 nt, Human
uauggcaagaugacauguucuc

SEQ ID NO: 209168 - RNA, 23 nt, Human
cuggcucuguagguggcauccuu

SEQ ID NO: 209169 - RNA, 22 nt, Human
ucuuccagaaucucagagggcu

SEQ ID NO: 209170 - RNA, 20 nt, Human
gucugcccaggccaccacgg

SEQ ID NO: 209171 - RNA, 22 nt, Human
guuagaaagugucugcuugggu

SEQ ID NO: 209172 - RNA, 22 nt, Human
ucugucuucuguagcuaauaau

SEQ ID NO: 209173 - RNA, 22 nt, Human
acaugugaggugugagugauac

SEQ ID NO: 209174 - RNA, 22 nt, Human
agcucagggcuccaggaccgcu

SEQ ID NO: 209175 - RNA, 22 nt, Human
cagcugcccugccuugcccuua

SEQ ID NO: 209176 - RNA, 22 nt, Human
cacacagguaagccucuuucaa

SEQ ID NO: 209177 - RNA, 22 nt, Human
cucugcugagccagagucccca

SEQ ID NO: 209178 - RNA, 22 nt, Human
ucacaggaggacugaaagauau

SEQ ID NO: 209179 - RNA, 22 nt, Human
cuucuucaguugcauguauugg

SEQ ID NO: 209180 - RNA, 22 nt, Human
aaauccuaaggagaauaugauu

SEQ ID NO: 209181 - RNA, 22 nt, Human
acaggaacgaauguacauuguu

SEQ ID NO: 209182 - RNA, 22 nt, Human
uccugggauuugcccuuuucuc

SEQ ID NO: 209183 - RNA, 20 nt, Human
ugccugggaaggcguggagg

SEQ ID NO: 209184 - RNA, 22 nt, Human
uguuaacauacugcuuucuaau

SEQ ID NO: 209185 - RNA, 22 nt, Human
augauuuuuucuaacacagucg

SEQ ID NO: 209186 - RNA, 22 nt, Human
gcccugagcacugcugcugggg

SEQ ID NO: 209187 - RNA, 22 nt, Human
uauguguccuguuaccggcagc

SEQ ID NO: 209188 - RNA, 22 nt, Human
gacagacaaauguuuuuaacuu

SEQ ID NO: 209189 - RNA, 22 nt, Human
uggccugauacuuccagaguuc

SEQ ID NO: 209190 - RNA, 22 nt, Human
agccuucagcaguucaggugcc

SEQ ID NO: 209191 - RNA, 22 nt, Human
cagugcagaacacauggaaaau

SEQ ID NO: 209192 - RNA, 22 nt, Human
cuggcuguggucacagguaacu

SEQ ID NO: 209193 - RNA, 22 nt, Human
augugucuuggaguuuuaaugu

SEQ ID NO: 209194 - RNA, 22 nt, Human
uccuugcauaucugaaaauguu

SEQ ID NO: 209195 - RNA, 22 nt, Human
guaucuuuccacaucuucagua

SEQ ID NO: 209196 - RNA, 23 nt, Human
aggcugcuuacugguaucagagc

SEQ ID NO: 209197 - RNA, 22 nt, Human
aaauucaguuuuaauaaucacu

SEQ ID NO: 209198 - RNA, 22 nt, Human
gcucugugguggggcagaguuu

SEQ ID NO: 209199 - RNA, 22 nt, Human
uuaaauuauuucuagugaggug

SEQ ID NO: 209200 - RNA, 22 nt, Human
ggcagggguccugguguugacu

SEQ ID NO: 209201 - RNA, 22 nt, Human
aauguaaacagcaagagaaggg

SEQ ID NO: 209202 - RNA, 22 nt, Human
gggaggagggugcuggcuaaac

SEQ ID NO: 209203 - RNA, 22 nt, Human
aaucugcacaauucaguuucag

SEQ ID NO: 209204 - RNA, 20 nt, Human
gggcuggcgcauggggaaag

SEQ ID NO: 209205 - RNA, 22 nt, Human
gcaguccuccugccucagccuc

SEQ ID NO: 209206 - RNA, 22 nt, Human
ggguugaggcggaugucggcgg

SEQ ID NO: 209207 - RNA, 22 nt, Human
auuagagaaauguugccaagau

SEQ ID NO: 209208 - RNA, 21 nt, Human
agaagccuggggaauguggcu

SEQ ID NO: 209209 - RNA, 22 nt, Human
ugguucauagccucacaggaua

SEQ ID NO: 209210 - RNA, 22 nt, Human
uacauauagacaguuacucuag

SEQ ID NO: 209211 - RNA, 20 nt, Human
gcucccagccugcagucccc

SEQ ID NO: 209212 - RNA, 22 nt, Human
aggagcccuccguugcuucauc

SEQ ID NO: 209213 - RNA, 20 nt, Human
ugugcccagcagaggcugcc

SEQ ID NO: 209214 - RNA, 22 nt, Human
cuuuaauuaggaaguauaauga

SEQ ID NO: 209215 - RNA, 22 nt, Human
uggcuugggugucucagcucuu

SEQ ID NO: 209216 - RNA, 22 nt, Human
cacaucuauagggacagcaaca

SEQ ID NO: 209217 - RNA, 22 nt, Human
guuucacugcaaacugacuuuu

SEQ ID NO: 209218 - RNA, 22 nt, Human
gcacacagaacauuuggauccu

SEQ ID NO: 209219 - RNA, 22 nt, Human
aacagccucagugagauuagga

SEQ ID NO: 209220 - RNA, 22 nt, Human
cauuuagagaagauuacaagga

SEQ ID NO: 209221 - RNA, 22 nt, Human
gugcaaaaguaauugugguuuu

SEQ ID NO: 209222 - RNA, 22 nt, Human
cuggauccaucgggucccgagu

SEQ ID NO: 209223 - RNA, 22 nt, Human
accaggcccaccgcaugcuccu

SEQ ID NO: 209224 - RNA, 22 nt, Human
cugauuccaaagccaaagcuau

SEQ ID NO: 209225 - RNA, 22 nt, Human
guacaaaugcagguuuguuaca

SEQ ID NO: 209226 - RNA, 22 nt, Human
ugcagggaaaacccaggaugcu

SEQ ID NO: 209227 - RNA, 23 nt, Human
agucacaucuuagcagccagguc

SEQ ID NO: 209228 - RNA, 22 nt, Human
cagcuacaaauacuuuuguaug

SEQ ID NO: 209229 - RNA, 22 nt, Human
agggcuccgggcaggcgaugga

SEQ ID NO: 209230 - RNA, 22 nt, Human
ugaugacaugugggcuguggcu

SEQ ID NO: 209231 - RNA, 22 nt, Human
uucacagacauugcagacugaa

SEQ ID NO: 209232 - RNA, 22 nt, Human
gucucagaguccuacuuauucc

SEQ ID NO: 209233 - RNA, 22 nt, Human
ucucucuuuuuaaucauguaau

SEQ ID NO: 209234 - RNA, 22 nt, Human
gggagggaagguaccuguguga

SEQ ID NO: 209235 - RNA, 22 nt, Human
gcugaaaugaaaacacaggucg

SEQ ID NO: 209236 - RNA, 22 nt, Human
agaacucuuuaucuguggaaug

SEQ ID NO: 209237 - RNA, 22 nt, Human
ugguuacauauccuuuggagcc

SEQ ID NO: 209238 - RNA, 22 nt, Human
ugucuuuacuuagaaguucagg

SEQ ID NO: 209239 - RNA, 22 nt, Human
gggcaacagagcgagggccugu

SEQ ID NO: 209240 - RNA, 22 nt, Human
caggaggcuuugggauccaagu

SEQ ID NO: 209241 - RNA, 22 nt, Human
augaguucaauuguuucaguca

SEQ ID NO: 209242 - RNA, 22 nt, Human
guguguccucuuaacuauuaug

SEQ ID NO: 209243 - RNA, 22 nt, Human
ccugugacccuuccagucuacu

SEQ ID NO: 209244 - RNA, 22 nt, Human
cuauuucugccuaaugaccugu

SEQ ID NO: 209245 - RNA, 14 nt, Human
gcaggcagaucacu

SEQ ID NO: 209246 - RNA, 22 nt, Human
auucacaaaaugauauagauac

SEQ ID NO: 209247 - RNA, 20 nt, Human
cuggcccaggaugauggcgc

SEQ ID NO: 209248 - RNA, 22 nt, Human
uuuuuccuagcgauuugucagc

SEQ ID NO: 209249 - RNA, 22 nt, Human
acagcuggacaggggagaguuu

SEQ ID NO: 209250 - RNA, 22 nt, Human
ucaaaguaagaauuuauuacaa

SEQ ID NO: 209251 - RNA, 22 nt, Human
acagagcucccagccaucuccu

SEQ ID NO: 209252 - RNA, 22 nt, Human
uugucgggcuuacgcagggcca

SEQ ID NO: 209253 - RNA, 22 nt, Human
aagcccugagcacugcagagaa

SEQ ID NO: 209254 - RNA, 22 nt, Human
cuccugugguacucccagggcc

SEQ ID NO: 209255 - RNA, 22 nt, Human
uaaaugcuuagauucauagaaa

SEQ ID NO: 209256 - RNA, 22 nt, Human
guuuaucauuauuauuagcaac

SEQ ID NO: 209257 - RNA, 20 nt, Human
aauuuuaucuccauccuuug

SEQ ID NO: 209258 - RNA, 22 nt, Human
cagagcagacguugagauuaag

SEQ ID NO: 209259 - RNA, 22 nt, Human
aguguauuaaguuaugaaguua

SEQ ID NO: 209260 - RNA, 22 nt, Human
gcugccuuccauaauguacgua

SEQ ID NO: 209261 - RNA, 22 nt, Human
acuacaauacucuuaguaaaag

SEQ ID NO: 209262 - RNA, 22 nt, Human
gaaagcugggaaauaaauauua

SEQ ID NO: 209263 - RNA, 22 nt, Human
aagggcucucugcauugaaauu

SEQ ID NO: 209264 - RNA, 21 nt, Human
cagaaguaaggguaacuucuc

SEQ ID NO: 209265 - RNA, 22 nt, Human
cugaggcugggcugaggguaua

SEQ ID NO: 209266 - RNA, 22 nt, Human
gaaacaugucugacaauuuacc

SEQ ID NO: 209267 - RNA, 22 nt, Human
agcugcaaccuuagcuauaggc

SEQ ID NO: 209268 - RNA, 19 nt, Human
agcacaguuuccacaugca

SEQ ID NO: 209269 - RNA, 19 nt, Human
ucuccagcuuugggcuuuu

SEQ ID NO: 209270 - RNA, 19 nt, Human
ucugaaguccagggcauac

SEQ ID NO: 209271 - RNA, 22 nt, Human
guacauuuaggauucauugaaa

SEQ ID NO: 209272 - RNA, 22 nt, Human
uacagugugacauuucuacaaa

SEQ ID NO: 209273 - RNA, 20 nt, Human
ugaguggccacugggucgca

SEQ ID NO: 209274 - RNA, 22 nt, Human
cacuguacugugaauaaggagg

SEQ ID NO: 209275 - RNA, 22 nt, Human
ggggaccugggcuucaaggguu

SEQ ID NO: 209276 - RNA, 22 nt, Human
aaaagcuagucaaugauguauu

SEQ ID NO: 209277 - RNA, 22 nt, Human
caggaaugauauucgaggagau

SEQ ID NO: 209278 - RNA, 22 nt, Human
ucauguuuggaguuugcucacu

SEQ ID NO: 209279 - RNA, 22 nt, Human
uucagauaaacuacaaauaauu

SEQ ID NO: 209280 - RNA, 19 nt, Human
gagcaggccacacaugugu

SEQ ID NO: 209281 - RNA, 22 nt, Human
gaaagcaguaaaugggucccau

SEQ ID NO: 209282 - RNA, 22 nt, Human
aaaaccacaaugacuuuugcag

SEQ ID NO: 209283 - RNA, 22 nt, Human
uccagcuggcccggccaugaau

SEQ ID NO: 209284 - RNA, 19 nt, Human
cugagcagcggcagcacuu

SEQ ID NO: 209285 - RNA, 22 nt, Human
ugucaggagccaccagcacucc

SEQ ID NO: 209286 - RNA, 22 nt, Human
cuggaagacucaauggccugcc

SEQ ID NO: 209287 - RNA, 23 nt, Human
acagcaagaggaccagaugugag

SEQ ID NO: 209288 - RNA, 22 nt, Human
accucagaacggcguucuugaa

SEQ ID NO: 209289 - RNA, 22 nt, Human
cagacagacagccguggccacc

SEQ ID NO: 209290 - RNA, 22 nt, Human
gcauuuuauaaagaguuauuug

SEQ ID NO: 209291 - RNA, 22 nt, Human
aauauaacacagauggccuguu

SEQ ID NO: 209292 - RNA, 22 nt, Human
ucaucuugcaguguguguucug

SEQ ID NO: 209293 - RNA, 23 nt, Human
uuucugaaguugagauggacuuu

SEQ ID NO: 209294 - RNA, 22 nt, Human
ugugauucucagaagagggaag

SEQ ID NO: 209295 - RNA, 19 nt, Human
uggcagaggacaaggacuu

SEQ ID NO: 209296 - RNA, 22 nt, Human
ugccuggcaucuagcccuggga

SEQ ID NO: 209297 - RNA, 18 nt, Human
guguggcugagaugaggc

SEQ ID NO: 209298 - RNA, 22 nt, Human
uugcucugaacccagggcacca

SEQ ID NO: 209299 - RNA, 22 nt, Human
cacacgagcccuggagccagca

SEQ ID NO: 209300 - RNA, 22 nt, Human
aagguggucuuacugaugguau

SEQ ID NO: 209301 - RNA, 22 nt, Human
gcaggagaacaaagcaagcugc

SEQ ID NO: 209302 - RNA, 22 nt, Human
agugugucugaucacuugugag

SEQ ID NO: 209303 - RNA, 22 nt, Human
ugauuuacucccacuuagagcc

SEQ ID NO: 209304 - RNA, 17 nt, Human
agccagguacaagucca

SEQ ID NO: 209305 - RNA, 22 nt, Human
ccagagcugcauccagcagguu

SEQ ID NO: 209306 - RNA, 22 nt, Human
uucccucuuuuccaacaguugu

SEQ ID NO: 209307 - RNA, 22 nt, Human
agucagaguucuuggggagaca

SEQ ID NO: 209308 - RNA, 22 nt, Human
auggcuugguugguuaaagcac

SEQ ID NO: 209309 - RNA, 22 nt, Human
gaaaguuugccucucucuugag

SEQ ID NO: 209310 - RNA, 22 nt, Human
ccccaggcagggccuaacagag

SEQ ID NO: 209311 - RNA, 22 nt, Human
gcaggggcugagcaccagcggg

SEQ ID NO: 209312 - RNA, 20 nt, Human
agcuccucaucacuggaggu

SEQ ID NO: 209313 - RNA, 18 nt, Human
uacuguggaucagggguu

SEQ ID NO: 209314 - RNA, 22 nt, Human
ugggagauaaagcaucuguucu

SEQ ID NO: 209315 - RNA, 22 nt, Human
ugcaucagaguuugcugcugcu

SEQ ID NO: 209316 - RNA, 22 nt, Human
auucucuguggugaugcuggug

SEQ ID NO: 209317 - RNA, 22 nt, Human
ucagaggacagcagcuaaauaa

SEQ ID NO: 209318 - RNA, 22 nt, Human
caggcuugugucucagcugcag

SEQ ID NO: 209319 - RNA, 22 nt, Human
auacaaaauauauacuggagac

SEQ ID NO: 209320 - RNA, 22 nt, Human
ucuggacuaacagcagccucag

SEQ ID NO: 209321 - RNA, 22 nt, Human
ugacauguauguuguuggcaug

SEQ ID NO: 209322 - RNA, 22 nt, Human
gagggaaaauaaaauugcagua

SEQ ID NO: 209323 - RNA, 22 nt, Human
uucaggauuguguuuuuccuga

SEQ ID NO: 209324 - RNA, 22 nt, Human
ccagaagagaucacaguucuug

SEQ ID NO: 209325 - RNA, 22 nt, Human
cuggcuccauccuugagcucug

SEQ ID NO: 209326 - RNA, 22 nt, Human
ccucuggccauucuuugaugga

SEQ ID NO: 209327 - RNA, 22 nt, Human
uaacacuguccaaagaauucca

SEQ ID NO: 209328 - RNA, 22 nt, Human
cuggagagggagcccuggcagu

SEQ ID NO: 209329 - RNA, 22 nt, Human
ugcuuaucguuuaguacauugc

SEQ ID NO: 209330 - RNA, 22 nt, Human
agggccuggugaccuggguccu

SEQ ID NO: 209331 - RNA, 22 nt, Human
cagggcagagggaaacuccuuu

SEQ ID NO: 209332 - RNA, 22 nt, Human
ugagcagauuuguucuaggggu

SEQ ID NO: 209333 - RNA, 23 nt, Human
ugaagugaaauuucacaagggac

SEQ ID NO: 209334 - RNA, 22 nt, Human
cacaucauguuaauucauuaca

SEQ ID NO: 209335 - RNA, 22 nt, Human
cuccagugcucaugccguugac

SEQ ID NO: 209336 - RNA, 22 nt, Human
cuccaggagguugcugcuuccu

SEQ ID NO: 209337 - RNA, 22 nt, Human
uugaggcauuacuguaaugaga

SEQ ID NO: 209338 - RNA, 22 nt, Human
cagaugcagcaaaaugacaggc

SEQ ID NO: 209339 - RNA, 22 nt, Human
uagggguguuucgagagagguu

SEQ ID NO: 209340 - RNA, 22 nt, Human
gcagggcuccccaggcccgagg

SEQ ID NO: 209341 - RNA, 22 nt, Human
auaagcaugauuaccgggagca

SEQ ID NO: 209342 - RNA, 22 nt, Human
cagagacaggagugcucccagu

SEQ ID NO: 209343 - RNA, 22 nt, Human
cuguggcugcguaggucuggca

SEQ ID NO: 209344 - RNA, 22 nt, Human
acaagauugauaagucugcccu

SEQ ID NO: 209345 - RNA, 22 nt, Human
uuggcagaaugggcagcuugag

SEQ ID NO: 209346 - RNA, 22 nt, Human
uaaccauauuuuccauuaaguu

SEQ ID NO: 209347 - RNA, 22 nt, Human
aauaauuauuugagagcagacc

SEQ ID NO: 209348 - RNA, 22 nt, Human
ccugggaaucugcauugucagc

SEQ ID NO: 209349 - RNA, 22 nt, Human
ccugugaggucuugcaugugaa

SEQ ID NO: 209350 - RNA, 19 nt, Human
gcaggcagcugggguaucc

SEQ ID NO: 209351 - RNA, 22 nt, Human
uuggcugguuucaagaaggcau

SEQ ID NO: 209352 - RNA, 18 nt, Human
aggcaugguggugcgcac

SEQ ID NO: 209353 - RNA, 22 nt, Human
cuaaacuuuuauaacauugaga

SEQ ID NO: 209354 - RNA, 23 nt, Human
uccaaauaccugucaccuugucu

SEQ ID NO: 209355 - RNA, 22 nt, Human
cucuuuccucagccacagucua

SEQ ID NO: 209356 - RNA, 22 nt, Human
uacaugcuggugacuguagaca

SEQ ID NO: 209357 - RNA, 22 nt, Human
cuuucacagcacaagccugccu

SEQ ID NO: 209358 - RNA, 22 nt, Human
caggagucucucuugagcccag

SEQ ID NO: 209359 - RNA, 22 nt, Human
uaaaguuuauuggcaccaccau

SEQ ID NO: 209360 - RNA, 21 nt, Human
uuagaagcuaaugcagcuggu

SEQ ID NO: 209361 - RNA, 22 nt, Human
uaucaucugcaaagcacaucua

SEQ ID NO: 209362 - RNA, 22 nt, Human
gucuucugaucugguuagccau

SEQ ID NO: 209363 - RNA, 22 nt, Human
aguucuuuugugaacauaugcu

SEQ ID NO: 209364 - RNA, 22 nt, Human
agaaagugaacguguucaguuu

SEQ ID NO: 209365 - RNA, 22 nt, Human
uguaggcauauucauagaguug

SEQ ID NO: 209366 - RNA, 21 nt, Human
ugccaggccugagcugggguc

SEQ ID NO: 209367 - RNA, 18 nt, Human
gacccagcagaugggcuu

SEQ ID NO: 209368 - RNA, 22 nt, Human
uugcaagacacuuggaagcaca

SEQ ID NO: 209369 - RNA, 22 nt, Human
cagcauuuggaggagaggcuuu

SEQ ID NO: 209370 - RNA, 22 nt, Human
auccaggcugcuuucuaugccc

SEQ ID NO: 209371 - RNA, 22 nt, Human
uucucauguaaaugccaucauc

SEQ ID NO: 209372 - RNA, 22 nt, Human
aauuguaacuacauugagaaca

SEQ ID NO: 209373 - RNA, 18 nt, Human
aguguucucguuuuauaa

SEQ ID NO: 209374 - RNA, 22 nt, Human
cugcuccaggauuucaggccag

SEQ ID NO: 209375 - RNA, 23 nt, Human
agaauuguaaauagaauauaccu

SEQ ID NO: 209376 - RNA, 22 nt, Human
ggcagccuccagggcacuggug

SEQ ID NO: 209377 - RNA, 22 nt, Human
ccugggcagugcuggaguugaa

SEQ ID NO: 209378 - RNA, 21 nt, Human
uggcugagccaggugugugga

SEQ ID NO: 209379 - RNA, 23 nt, Human
ggcuccuggauucaaauccugcc

SEQ ID NO: 209380 - RNA, 22 nt, Human
cagcuguuaccaaucuuagggc

SEQ ID NO: 209381 - RNA, 22 nt, Human
caggaagcugaugucuagucau

SEQ ID NO: 209382 - RNA, 22 nt, Human
caucaaaauuagacauuguuga

SEQ ID NO: 209383 - RNA, 22 nt, Human
agccuuagggauugagguugcu

SEQ ID NO: 209384 - RNA, 22 nt, Human
guugaaauccuaacccccuagu

SEQ ID NO: 209385 - RNA, 22 nt, Human
caguguccucagccagcagcua

SEQ ID NO: 209386 - RNA, 22 nt, Human
aagcacagcuggaacagcagga

SEQ ID NO: 209387 - RNA, 22 nt, Human
uccacauccauugcuugacuuu

SEQ ID NO: 209388 - RNA, 22 nt, Human
ccuuuggucaccuccacucuua

SEQ ID NO: 209389 - RNA, 22 nt, Human
ucaggccagcaccaucccuauc

SEQ ID NO: 209390 - RNA, 22 nt, Human
agagugcaaccgaaacaagcag

SEQ ID NO: 209391 - RNA, 22 nt, Human
gaggggucuuuuguugucaggg

SEQ ID NO: 209392 - RNA, 22 nt, Human
ucaugccauccacaucuguuuc

SEQ ID NO: 209393 - RNA, 22 nt, Human
aucucagaucuacagaucuaca

SEQ ID NO: 209394 - RNA, 22 nt, Human
guauucuuaaggauugagcaaa

SEQ ID NO: 209395 - RNA, 22 nt, Human
uggcuuuuguugguaccaccuu

SEQ ID NO: 209396 - RNA, 19 nt, Human
aaugacugaguacauuguc

SEQ ID NO: 209397 - RNA, 22 nt, Human
ccagagccggauugugaagugc

SEQ ID NO: 209398 - RNA, 22 nt, Human
gugaagaaggcaauacaaagaa

SEQ ID NO: 209399 - RNA, 20 nt, Human
accagagacuggggacaagu

SEQ ID NO: 209400 - RNA, 22 nt, Human
uuugagaagauaggggaauacu

SEQ ID NO: 209401 - RNA, 21 nt, Human
accuccuggcauccuguuccc

SEQ ID NO: 209402 - RNA, 22 nt, Human
acagacuguuugguucaugucu

SEQ ID NO: 209403 - RNA, 22 nt, Human
cugcaguguucuggaaugcauu

SEQ ID NO: 209404 - RNA, 17 nt, Human
caucaaagaaauuucca

SEQ ID NO: 209405 - RNA, 18 nt, Human
ccaaggccccugcugggg

SEQ ID NO: 209406 - RNA, 22 nt, Human
cuagagcuuucugcugguguug

SEQ ID NO: 209407 - RNA, 22 nt, Human
acuguaaauuuugguugcaggu

SEQ ID NO: 209408 - RNA, 22 nt, Human
ccauucugacuucauugccuca

SEQ ID NO: 209409 - RNA, 22 nt, Human
caaggcuucagugugacaaaac

SEQ ID NO: 209410 - RNA, 22 nt, Human
aaauaucuuaggaguauaugag

SEQ ID NO: 209411 - RNA, 22 nt, Human
uacagugcauagaggcaugaua

SEQ ID NO: 209412 - RNA, 22 nt, Human
aguuuccucaucuguaaaauga

SEQ ID NO: 209413 - RNA, 22 nt, Human
gacagcauccaagagggaggga

SEQ ID NO: 209414 - RNA, 22 nt, Human
agcagauggugucaugggaugg

SEQ ID NO: 209415 - RNA, 20 nt, Human
ugcaaacacagaguguauga

SEQ ID NO: 209416 - RNA, 22 nt, Human
guggcagaacuaugugauugcu

SEQ ID NO: 209417 - RNA, 22 nt, Human
ugcguacuguuuauacaugugu

SEQ ID NO: 209418 - RNA, 22 nt, Human
acauauguauauguacacaguc

SEQ ID NO: 209419 - RNA, 22 nt, Human
cuuuauggaaucaaagacugga

SEQ ID NO: 209420 - RNA, 21 nt, Human
cagaaacuugcuuugccuucu

SEQ ID NO: 209421 - RNA, 22 nt, Human
uuuuuauacuuugcucaagauu

SEQ ID NO: 209422 - RNA, 22 nt, Human
aaugcuuuagcagugauuagug

SEQ ID NO: 209423 - RNA, 22 nt, Human
gcaugcaggauagguugagcuc

SEQ ID NO: 209424 - RNA, 22 nt, Human
aaacaguuuauaacaugauacu

SEQ ID NO: 209425 - RNA, 22 nt, Human
acauaauagcauuucuaauuug

SEQ ID NO: 209426 - RNA, 22 nt, Human
uuggcuucuugugaaaucugag

SEQ ID NO: 209427 - RNA, 22 nt, Human
uguaccaggaggaggacaaauu

SEQ ID NO: 209428 - RNA, 22 nt, Human
agugcauuauauguuucaaugg

SEQ ID NO: 209429 - RNA, 22 nt, Human
uggcugaaucugcagcaggaag

SEQ ID NO: 209430 - RNA, 22 nt, Human
agagccaguuaagcacuuacag

SEQ ID NO: 209431 - RNA, 22 nt, Human
acacaguauugugacuauaacu

SEQ ID NO: 209432 - RNA, 22 nt, Human
acagcuuuaucucagggaucag

SEQ ID NO: 209433 - RNA, 22 nt, Human
gggugcagggucuccagcagcu

SEQ ID NO: 209434 - RNA, 22 nt, Human
acaguguccuuguggucccugu

SEQ ID NO: 209435 - RNA, 22 nt, Human
cacaguaucuuuugaguaagca

SEQ ID NO: 209436 - RNA, 22 nt, Human
aaauuaccauuguaaaguauuu

SEQ ID NO: 209437 - RNA, 22 nt, Human
cagagcccuaguccugauggcc

SEQ ID NO: 209438 - RNA, 22 nt, Human
auacaacagaaaaugauuauuc

SEQ ID NO: 209439 - RNA, 22 nt, Human
caguauguacucuuaucaugua

SEQ ID NO: 209440 - RNA, 22 nt, Human
uuuugccugagagugaaaauaa

SEQ ID NO: 209441 - RNA, 22 nt, Human
uuaaagaauagugccccuauug

SEQ ID NO: 209442 - RNA, 22 nt, Human
cuccucagaacagccuuggcug

SEQ ID NO: 209443 - RNA, 22 nt, Human
cuagauuugcaugccuacacca

SEQ ID NO: 209444 - RNA, 22 nt, Human
auccauuugccgugcuaugugc

SEQ ID NO: 209445 - RNA, 22 nt, Human
uggcuggcuguccagcugggca

SEQ ID NO: 209446 - RNA, 22 nt, Human
gagcugugccaaucugucuggg

SEQ ID NO: 209447 - RNA, 22 nt, Human
cugcaggaauucaaagugagcu

SEQ ID NO: 209448 - RNA, 22 nt, Human
uguaaacauaccagagccaagu

SEQ ID NO: 209449 - RNA, 22 nt, Human
agugcuuggcaaccuucugacc

SEQ ID NO: 209450 - RNA, 20 nt, Human
ucagacccuacauuccucag

SEQ ID NO: 209451 - RNA, 19 nt, Human
guagggacagugguucuga

SEQ ID NO: 209452 - RNA, 22 nt, Human
caggccuggcccccggcacacc

SEQ ID NO: 209453 - RNA, 22 nt, Human
ucacagcuuucagauuguuccc

SEQ ID NO: 209454 - RNA, 22 nt, Human
ugggaaaguguagccugcaggc

SEQ ID NO: 209455 - RNA, 23 nt, Human
ugagcugggccugcaggggucuc

SEQ ID NO: 209456 - RNA, 21 nt, Human
uuucuguccuuuccaucagcu

SEQ ID NO: 209457 - RNA, 22 nt, Human
uacaaagauaguguuagaguaa

SEQ ID NO: 209458 - RNA, 22 nt, Human
acugggcuguaaagagaggcaa

SEQ ID NO: 209459 - RNA, 22 nt, Human
cagacucucuuccaugcaucac

SEQ ID NO: 209460 - RNA, 22 nt, Human
caaagucagccagcuaguaggu

SEQ ID NO: 209461 - RNA, 22 nt, Human
agcugagcauuugauccaccuc

SEQ ID NO: 209462 - RNA, 22 nt, Human
uacaauuacucagcucugcugu

SEQ ID NO: 209463 - RNA, 22 nt, Human
cuuucauucuuagauauuagug

SEQ ID NO: 209464 - RNA, 22 nt, Human
augguuuacaauguuuucaguu

SEQ ID NO: 209465 - RNA, 22 nt, Human
ggcuuucugagucaaacacuga

SEQ ID NO: 209466 - RNA, 22 nt, Human
ucuagggagaguuguuaugggu

SEQ ID NO: 209467 - RNA, 22 nt, Human
guguguccaggcgggagucaag

SEQ ID NO: 209468 - RNA, 22 nt, Human
auaacagugaccucucagcacc

SEQ ID NO: 209469 - RNA, 22 nt, Human
acacccaggcuggcgugcagug

SEQ ID NO: 209470 - RNA, 22 nt, Human
gucuuucuaugcauagagcaga

SEQ ID NO: 209471 - RNA, 22 nt, Human
aggaggccauucucucaguagc

SEQ ID NO: 209472 - RNA, 22 nt, Human
augcaaaugucaccacuucuaa

SEQ ID NO: 209473 - RNA, 22 nt, Human
gaagagaaaggcaaggaguuuu

SEQ ID NO: 209474 - RNA, 22 nt, Human
uggccugggccggcagauauac

SEQ ID NO: 209475 - RNA, 22 nt, Human
ccaggaagacacaugcucaucc

SEQ ID NO: 209476 - RNA, 22 nt, Human
agcugaaagcuugacuggggcu

SEQ ID NO: 209477 - RNA, 22 nt, Human
caaggcuugaauucugaugggu

SEQ ID NO: 209478 - RNA, 22 nt, Human
uuuaaucauaagaaggaaaaua

SEQ ID NO: 209479 - RNA, 22 nt, Human
gcuccuucaggugguagcuguu

SEQ ID NO: 209480 - RNA, 21 nt, Human
acagagcauaaugguguggca

SEQ ID NO: 209481 - RNA, 22 nt, Human
auuauuauuguugauguuaggg

SEQ ID NO: 209482 - RNA, 22 nt, Human
uuggccagacugaggugcuggg

SEQ ID NO: 209483 - RNA, 22 nt, Human
aagacauguuuuaagaauauuu

SEQ ID NO: 209484 - RNA, 22 nt, Human
ucugggccuuggaguggggaga

SEQ ID NO: 209485 - RNA, 19 nt, Human
uguuucuuccuccaucuga

SEQ ID NO: 209486 - RNA, 22 nt, Human
cacauucaucaguguuguacug

SEQ ID NO: 209487 - RNA, 22 nt, Human
gcuggucccaauguguuuccuu

SEQ ID NO: 209488 - RNA, 22 nt, Human
aauguguuaguauugauuuguc

SEQ ID NO: 209489 - RNA, 22 nt, Human
uccuccagcccucuaggaaaau

SEQ ID NO: 209490 - RNA, 22 nt, Human
cacaugcuuagauuucagugga

SEQ ID NO: 209491 - RNA, 22 nt, Human
aaaggcuaugagauagaagaua

SEQ ID NO: 209492 - RNA, 22 nt, Human
auuuuccuuguggguuagcgaa

SEQ ID NO: 209493 - RNA, 22 nt, Human
acaguuauucuuuaugcaacca

SEQ ID NO: 209494 - RNA, 22 nt, Human
agcuaagacuuagugacuuagu

SEQ ID NO: 209495 - RNA, 22 nt, Human
aagucaggacuuaugcuaccug

SEQ ID NO: 209496 - RNA, 22 nt, Human
aagugagguuucugcuuucaga

SEQ ID NO: 209497 - RNA, 15 nt, Human
cagucccagggaccc

SEQ ID NO: 209498 - RNA, 22 nt, Human
uuauuagguuuacauaaagguu

SEQ ID NO: 209499 - RNA, 22 nt, Human
gcccagcacuaaaagcuuugcu

SEQ ID NO: 209500 - RNA, 22 nt, Human
uggcucaguagcagugugguca

SEQ ID NO: 209501 - RNA, 22 nt, Human
uuguacagauuuuccucggucu

SEQ ID NO: 209502 - RNA, 22 nt, Human
uccagcaguccaugugagacac

SEQ ID NO: 209503 - RNA, 22 nt, Human
acaguuaacuggagagcgaguu

SEQ ID NO: 209504 - RNA, 22 nt, Human
cauauaaauacaacauguguua

SEQ ID NO: 209505 - RNA, 22 nt, Human
guggcaggagugggccuugaag

SEQ ID NO: 209506 - RNA, 22 nt, Human
agggccuggaacugugggcagg

SEQ ID NO: 209507 - RNA, 22 nt, Human
aggagacauggaauagugaggc

SEQ ID NO: 209508 - RNA, 22 nt, Human
agacuccaaaaguuugguggaa

SEQ ID NO: 209509 - RNA, 22 nt, Human
uagguucagagaacugaaaaua

SEQ ID NO: 209510 - RNA, 22 nt, Human
agauuagguaugguuuaaguag

SEQ ID NO: 209511 - RNA, 22 nt, Human
gaguccaguuagugaggcuggg

SEQ ID NO: 209512 - RNA, 22 nt, Human
uggaauuuuguauuagcuuuga

SEQ ID NO: 209513 - RNA, 22 nt, Human
guaggaagcucugaggcuaguu

SEQ ID NO: 209514 - RNA, 22 nt, Human
cugcaggauuucaugggcugac

SEQ ID NO: 209515 - RNA, 22 nt, Human
uaguuaaaauaauggagauguu

SEQ ID NO: 209516 - RNA, 22 nt, Human
gggccaggucggugaaugguca

SEQ ID NO: 209517 - RNA, 22 nt, Human
ggcuacagaggccgugagccug

SEQ ID NO: 209518 - RNA, 22 nt, Human
auaguaaauuaucguggagaga

SEQ ID NO: 209519 - RNA, 23 nt, Human
ucuccaggccuuacuccaggccu

SEQ ID NO: 209520 - RNA, 22 nt, Human
uggucccauuguucugcccagg

SEQ ID NO: 209521 - RNA, 20 nt, Human
ucuuuguuaauuuuaucucc

SEQ ID NO: 209522 - RNA, 22 nt, Human
cggcuucuucaucaggucagca

SEQ ID NO: 209523 - RNA, 22 nt, Human
uacagaggguaauugaucaagg

SEQ ID NO: 209524 - RNA, 21 nt, Human
ccacauucucauucugacugc

SEQ ID NO: 209525 - RNA, 22 nt, Human
ugacacacuaggaaaagcauuu

SEQ ID NO: 209526 - RNA, 22 nt, Human
ggauggagaugaccauggugac

SEQ ID NO: 209527 - RNA, 22 nt, Human
aacuacagaaaagguaagcucu

SEQ ID NO: 209528 - RNA, 22 nt, Human
gcccugagugguaccugugggu

SEQ ID NO: 209529 - RNA, 22 nt, Human
ucaugccacuuacaaaauaaug

SEQ ID NO: 209530 - RNA, 22 nt, Human
aguauuugauacagucuucuag

SEQ ID NO: 209531 - RNA, 22 nt, Human
uaacugguuucauaucauuucc

SEQ ID NO: 209532 - RNA, 22 nt, Human
ugucacauugaauaugauuuau

SEQ ID NO: 209533 - RNA, 22 nt, Human
aaagcaaucagauucagauguc

SEQ ID NO: 209534 - RNA, 22 nt, Human
ugugcugagugaucccauuccu

SEQ ID NO: 209535 - RNA, 23 nt, Human
ugaaggccuggaggacgcguugu

SEQ ID NO: 209536 - RNA, 22 nt, Human
gacagcaaccucaugagaaacu

SEQ ID NO: 209537 - RNA, 22 nt, Human
ucugaaaguaucuggaucuuuu

SEQ ID NO: 209538 - RNA, 22 nt, Human
agagaugcgguuccaugguuau

SEQ ID NO: 209539 - RNA, 22 nt, Human
aaacaaguuuguagacuagcca

SEQ ID NO: 209540 - RNA, 22 nt, Human
ucagcuuugaucucaggcaauc

SEQ ID NO: 209541 - RNA, 19 nt, Human
gagcugagaguagcacugg

SEQ ID NO: 209542 - RNA, 22 nt, Human
uggcccagucagcaggagaggg

SEQ ID NO: 209543 - RNA, 22 nt, Human
agguggggaguauauguaauug

SEQ ID NO: 209544 - RNA, 22 nt, Human
aguuagaaaguaaaucauuuga

SEQ ID NO: 209545 - RNA, 22 nt, Human
gaggcagcugggauacaaggga

SEQ ID NO: 209546 - RNA, 22 nt, Human
uuugaaguguaugaaaauacag

SEQ ID NO: 209547 - RNA, 22 nt, Human
agugggcugagcuugcugggug

SEQ ID NO: 209548 - RNA, 22 nt, Human
cuucagugaauguugaguaagg

SEQ ID NO: 209549 - RNA, 22 nt, Human
aggaauguguguccaccgggga

SEQ ID NO: 209550 - RNA, 22 nt, Human
aaaguaaccuaguaauaguguc

SEQ ID NO: 209551 - RNA, 22 nt, Human
gcagcuggccccuuuccuuguu

SEQ ID NO: 209552 - RNA, 22 nt, Human
uacagugcuuuuugguggagaa

SEQ ID NO: 209553 - RNA, 22 nt, Human
cagaagucacccucagaauaac

SEQ ID NO: 209554 - RNA, 22 nt, Human
uuugggaacaaugaggaucuga

SEQ ID NO: 209555 - RNA, 22 nt, Human
cuguggcuguauuuggccagag

SEQ ID NO: 209556 - RNA, 22 nt, Human
gagcaaaauaaauucugacaaa

SEQ ID NO: 209557 - RNA, 22 nt, Human
uuucacuagaacguucuuguuu

SEQ ID NO: 209558 - RNA, 22 nt, Human
ccagcucugauuuugaccucca

SEQ ID NO: 209559 - RNA, 22 nt, Human
uaaaguguguauauacauaugg

SEQ ID NO: 209560 - RNA, 22 nt, Human
aguuucucuuugacaccaaaau

SEQ ID NO: 209561 - RNA, 22 nt, Human
uggagcugggaguccugggcug

SEQ ID NO: 209562 - RNA, 22 nt, Human
guguggggaggagagagcccuu

SEQ ID NO: 209563 - RNA, 22 nt, Human
aacagauauaggcagaacuuug

SEQ ID NO: 209564 - RNA, 22 nt, Human
auuguucauuguacaccuagua

SEQ ID NO: 209565 - RNA, 22 nt, Human
aggcagcugugaggacuggauu

SEQ ID NO: 209566 - RNA, 22 nt, Human
auucagagcacuggguagaauu

SEQ ID NO: 209567 - RNA, 22 nt, Human
ucuuccagauacuuccugacuu

SEQ ID NO: 209568 - RNA, 22 nt, Human
agaacauuugucgaucaauuug

SEQ ID NO: 209569 - RNA, 21 nt, Human
uggcucugcucagagcagucc

SEQ ID NO: 209570 - RNA, 22 nt, Human
cugugcaaugccuaaucacaaa

SEQ ID NO: 209571 - RNA, 22 nt, Human
ccaccagagggcagacugugau

SEQ ID NO: 209572 - RNA, 22 nt, Human
cuucccaaguaaauuuguauuu

SEQ ID NO: 209573 - RNA, 22 nt, Human
cagcccuuaagagucaucccuc

SEQ ID NO: 209574 - RNA, 22 nt, Human
uacaugugaucagaaagugaaa

SEQ ID NO: 209575 - RNA, 22 nt, Human
ucaguaacccugcuguucagag

SEQ ID NO: 209576 - RNA, 22 nt, Human
uugcugauuuccccuugagugu

SEQ ID NO: 209577 - RNA, 22 nt, Human
uccagaauacucugaaaucauu

SEQ ID NO: 209578 - RNA, 22 nt, Human
acacuaguauuucuauaaguga

SEQ ID NO: 209579 - RNA, 22 nt, Human
uuuaauuuguauuucuagaggg

SEQ ID NO: 209580 - RNA, 22 nt, Human
cuguacaggucaaugauaagau

SEQ ID NO: 209581 - RNA, 22 nt, Human
uucauacaguggcugcacucca

SEQ ID NO: 209582 - RNA, 23 nt, Human
augguuuaugucacacuuuugau

SEQ ID NO: 209583 - RNA, 22 nt, Human
aggaggccaggcccucaagccu

SEQ ID NO: 209584 - RNA, 23 nt, Human
ccaggccucucagagggugugcc

SEQ ID NO: 209585 - RNA, 20 nt, Human
uucaugcuggaggggcuggc

SEQ ID NO: 209586 - RNA, 22 nt, Human
auuccauuguguaaggauaucg

SEQ ID NO: 209587 - RNA, 22 nt, Human
cacaggcugggaagccuaggcc

SEQ ID NO: 209588 - RNA, 22 nt, Human
acagccaagucuucuauuucag

SEQ ID NO: 209589 - RNA, 22 nt, Human
ggcagcucugcuaauugagccu

SEQ ID NO: 209590 - RNA, 22 nt, Human
uuggaauuaaaaggagaacuuc

SEQ ID NO: 209591 - RNA, 22 nt, Human
aaaaugauauccugacuuuuau

SEQ ID NO: 209592 - RNA, 22 nt, Human
acaaaguuugugguauuccaag

SEQ ID NO: 209593 - RNA, 22 nt, Human
gcagcagguccgcaucaucauc

SEQ ID NO: 209594 - RNA, 22 nt, Human
cagcagcaacaacggaagccuu

SEQ ID NO: 209595 - RNA, 22 nt, Human
aacacagaucaaaauauuuccu

SEQ ID NO: 209596 - RNA, 16 nt, Human
cagccugcagugguca

SEQ ID NO: 209597 - RNA, 22 nt, Human
gaagcuaaugauuuauuuucug

SEQ ID NO: 209598 - RNA, 20 nt, Human
cugcaggguuagaggcucca

SEQ ID NO: 209599 - RNA, 22 nt, Human
uuacaaguuucuggcuucaucc

SEQ ID NO: 209600 - RNA, 21 nt, Human
gacaaugcagucuuuuuugga

SEQ ID NO: 209601 - RNA, 22 nt, Human
ugcagcugguaucccauggauu

SEQ ID NO: 209602 - RNA, 22 nt, Human
ccagagagcuacaaggcauaaa

SEQ ID NO: 209603 - RNA, 22 nt, Human
uacaacaguaaucaagguuuuu

SEQ ID NO: 209604 - RNA, 22 nt, Human
cuucucucccuggcacucagac

SEQ ID NO: 209605 - RNA, 22 nt, Human
aagucuggggagaaaaggcuaa

SEQ ID NO: 209606 - RNA, 22 nt, Human
ccucaggcuagcuacugucccu

SEQ ID NO: 209607 - RNA, 22 nt, Human
cugaaacuggucaauuaaucug

SEQ ID NO: 209608 - RNA, 21 nt, Human
accauucugcacaugcuguca

SEQ ID NO: 209609 - RNA, 22 nt, Human
aggaaagcucccaguagggcuc

SEQ ID NO: 209610 - RNA, 22 nt, Human
ucauuuggagccuuccuguuuu

SEQ ID NO: 209611 - RNA, 22 nt, Human
uuccugugguguuucccagaca

SEQ ID NO: 209612 - RNA, 22 nt, Human
aauauagauuuacucaagagaa

SEQ ID NO: 209613 - RNA, 22 nt, Human
aaucagcaaaugcuuacucagg

SEQ ID NO: 209614 - RNA, 22 nt, Human
ggccuugauguucuugggagau

SEQ ID NO: 209615 - RNA, 22 nt, Human
ccucagaggcagaugguaagaa

SEQ ID NO: 209616 - RNA, 22 nt, Human
guaagauuuaaaauagcaauug

SEQ ID NO: 209617 - RNA, 21 nt, Human
caaaugcuggcuggaugagga

SEQ ID NO: 209618 - RNA, 22 nt, Human
gccaggcaggccacgcuguguu

SEQ ID NO: 209619 - RNA, 22 nt, Human
cauuguuuugagaacaaccuga

SEQ ID NO: 209620 - RNA, 22 nt, Human
gccagucagcuggccaggcugg

SEQ ID NO: 209621 - RNA, 22 nt, Human
cucccuugcuucuggcauuuug

SEQ ID NO: 209622 - RNA, 22 nt, Human
caaaugcuaacuucuuuccaaa

SEQ ID NO: 209623 - RNA, 22 nt, Human
aaaucaugugcagagaucagga

SEQ ID NO: 209624 - RNA, 22 nt, Human
ggagccagggaagcugcuuccu

SEQ ID NO: 209625 - RNA, 22 nt, Human
aucucagagaaauuugaaugca

SEQ ID NO: 209626 - RNA, 22 nt, Human
caggacaaucucgucggguccu

SEQ ID NO: 209627 - RNA, 22 nt, Human
cagcaaaugaguggcagggcag

SEQ ID NO: 209628 - RNA, 22 nt, Human
agugauuugacucuuuuauugu

SEQ ID NO: 209629 - RNA, 22 nt, Human
uacaggaaggcucuggaggugc

SEQ ID NO: 209630 - RNA, 19 nt, Human
gccaggcucuuauucugug

SEQ ID NO: 209631 - RNA, 22 nt, Human
acuuucaauucccuuagcaacu

SEQ ID NO: 209632 - RNA, 22 nt, Human
caaggccaguuucuccuaguca

SEQ ID NO: 209633 - RNA, 22 nt, Human
cuguagcaguguuccagcauug

SEQ ID NO: 209634 - RNA, 22 nt, Human
ucagggcuuuggcuuuuacucu

SEQ ID NO: 209635 - RNA, 22 nt, Human
uccaugagcuagggauucauca

SEQ ID NO: 209636 - RNA, 22 nt, Human
auaaggcacacauagauagggu

SEQ ID NO: 209637 - RNA, 22 nt, Human
gaacagcaugcaugcaagacua

SEQ ID NO: 209638 - RNA, 22 nt, Human
cccagguccccaccugucugcu

SEQ ID NO: 209639 - RNA, 22 nt, Human
cuuuggaggaccuaugugcaau

SEQ ID NO: 209640 - RNA, 22 nt, Human
agucaguggauuuaccaugcgu

SEQ ID NO: 209641 - RNA, 22 nt, Human
aaagagcaagggcuuugaggcu

SEQ ID NO: 209642 - RNA, 22 nt, Human
auccagcuuugucuggucuucg

SEQ ID NO: 209643 - RNA, 14 nt, Human
acaggcagauuucu

SEQ ID NO: 209644 - RNA, 22 nt, Human
aacaguauugguugaacucaag

SEQ ID NO: 209645 - RNA, 19 nt, Human
acagagcucucugcuucug

SEQ ID NO: 209646 - RNA, 22 nt, Human
uucuagaaggcaggcugggcca

SEQ ID NO: 209647 - RNA, 22 nt, Human
auucaacuauguauagucuucu

SEQ ID NO: 209648 - RNA, 22 nt, Human
uaagaaucugcauuuuaacaag

SEQ ID NO: 209649 - RNA, 22 nt, Human
gaaucuaugccucauauagacc

SEQ ID NO: 209650 - RNA, 18 nt, Human
gaggccugagaaccaggu

SEQ ID NO: 209651 - RNA, 22 nt, Human
cccugguggggccagacuugcu

SEQ ID NO: 209652 - RNA, 22 nt, Human
gcccuguguguuugcacugauu

SEQ ID NO: 209653 - RNA, 18 nt, Human
ggcuguggacaagauuag

SEQ ID NO: 209654 - RNA, 17 nt, Human
uggcuucaggcugagca

SEQ ID NO: 209655 - RNA, 20 nt, Human
cuuuuucuccagcucugagc

SEQ ID NO: 209656 - RNA, 22 nt, Human
gaauuucaagcagugcaauguu

SEQ ID NO: 209657 - RNA, 22 nt, Human
uacaugugcuauuuguuuugua

SEQ ID NO: 209658 - RNA, 22 nt, Human
ggaagaaaugcucuucuaugcg

SEQ ID NO: 209659 - RNA, 22 nt, Human
cugacuguuugcugaaaggucu

SEQ ID NO: 209660 - RNA, 22 nt, Human
ggcccucccggugaugaagagc

SEQ ID NO: 209661 - RNA, 22 nt, Human
gaggucaucaccaauauaugcc

SEQ ID NO: 209662 - RNA, 20 nt, Human
ugagccagucaagcuacauu

SEQ ID NO: 209663 - RNA, 23 nt, Human
cacaugaccugaccuaggcuagg

SEQ ID NO: 209664 - RNA, 22 nt, Human
uaauucuucaggccuuuugucu

SEQ ID NO: 209665 - RNA, 22 nt, Human
aauccauucagaaauugggaau

SEQ ID NO: 209666 - RNA, 17 nt, Human
caggucugaggccaggc

SEQ ID NO: 209667 - RNA, 22 nt, Human
cuggaaggcagagguugcagug

SEQ ID NO: 209668 - RNA, 22 nt, Human
cccccacuaaguugagggcccu

SEQ ID NO: 209669 - RNA, 23 nt, Human
gagagcccauuggcagggguacc

SEQ ID NO: 209670 - RNA, 22 nt, Human
ucuugauuacaaauaacaucau

SEQ ID NO: 209671 - RNA, 22 nt, Human
cucccaagauaaauaaggcagu

SEQ ID NO: 209672 - RNA, 22 nt, Human
gugacagggagugauauagcag

SEQ ID NO: 209673 - RNA, 22 nt, Human
augcuaaugagcuaaggagucc

SEQ ID NO: 209674 - RNA, 22 nt, Human
ccagaaaaggagcugcaggaug

SEQ ID NO: 209675 - RNA, 22 nt, Human
gagaggccauggggugggaugc

SEQ ID NO: 209676 - RNA, 22 nt, Human
uacagagauacucuagaucaaa

SEQ ID NO: 209677 - RNA, 21 nt, Human
agaguggcaaaguguccaaga

SEQ ID NO: 209678 - RNA, 22 nt, Human
agcuuuauauguuguuucucca

SEQ ID NO: 209679 - RNA, 22 nt, Human
ucauguuaucuuggcucuggga

SEQ ID NO: 209680 - RNA, 22 nt, Human
ccuggccagcagccccuuccuc

SEQ ID NO: 209681 - RNA, 22 nt, Human
cccuggcacuagcgacggccau

SEQ ID NO: 209682 - RNA, 22 nt, Human
aucuuugcccagagacucagcc

SEQ ID NO: 209683 - RNA, 22 nt, Human
agacaggcuuugcuguauauca

SEQ ID NO: 209684 - RNA, 22 nt, Human
ugcuuuaucugacuuggcgcug

SEQ ID NO: 209685 - RNA, 22 nt, Human
auucucuggucauugagcauau

SEQ ID NO: 209686 - RNA, 22 nt, Human
ugagugaaaaauuugccuggag

SEQ ID NO: 209687 - RNA, 22 nt, Human
acacauuaaccuuugaaauucu

SEQ ID NO: 209688 - RNA, 22 nt, Human
ugggcccuuaugaagcucaaga

SEQ ID NO: 209689 - RNA, 22 nt, Human
uuagauacccaaguggaucugu

SEQ ID NO: 209690 - RNA, 22 nt, Human
cuggccuuuagccccagugucu

SEQ ID NO: 209691 - RNA, 22 nt, Human
agcucaggucauuccagggaug

SEQ ID NO: 209692 - RNA, 22 nt, Human
cuucccacuaaagcccuuguug

SEQ ID NO: 209693 - RNA, 22 nt, Human
aucauuucccuuuagaucacaa

SEQ ID NO: 209694 - RNA, 22 nt, Human
gacccuccuacuacccuggaaa

SEQ ID NO: 209695 - RNA, 22 nt, Human
aagcaucuaggugacugacaua

SEQ ID NO: 209696 - RNA, 22 nt, Human
cagauauauuuuauuuggucaa

SEQ ID NO: 209697 - RNA, 22 nt, Human
aauauaauuuuauuccuagagu

SEQ ID NO: 209698 - RNA, 22 nt, Human
ccuggacaaugagaugucaggg

SEQ ID NO: 209699 - RNA, 22 nt, Human
ggaucugggcucugccaaucag

SEQ ID NO: 209700 - RNA, 22 nt, Human
gccaggcaugggcuucugggcg

SEQ ID NO: 209701 - RNA, 22 nt, Human
ugaagagauuaaguugguuuug

SEQ ID NO: 209702 - RNA, 22 nt, Human
guccuucaaguaaccugggacc

SEQ ID NO: 209703 - RNA, 22 nt, Human
ggcucagguugggucacaugac

SEQ ID NO: 209704 - RNA, 22 nt, Human
gcuguucacauuuugggccaaa

SEQ ID NO: 209705 - RNA, 22 nt, Human
cagcugccuucugcgggaaguc

SEQ ID NO: 209706 - RNA, 22 nt, Human
caggcagagaggagcauuuaau

SEQ ID NO: 209707 - RNA, 22 nt, Human
uuucugaaaugcuggcuuugga

SEQ ID NO: 209708 - RNA, 23 nt, Human
agacagcuuagaguuugccucuc

SEQ ID NO: 209709 - RNA, 22 nt, Human
agagcuccugcauucuucccug

SEQ ID NO: 209710 - RNA, 22 nt, Human
uucucuuaucuggcauuauugg

SEQ ID NO: 209711 - RNA, 22 nt, Human
aagacauuuuagagauagggaa

SEQ ID NO: 209712 - RNA, 22 nt, Human
gugagauuugaguggggauaca

SEQ ID NO: 209713 - RNA, 22 nt, Human
ggagucuucagauagaguauuu

SEQ ID NO: 209714 - RNA, 22 nt, Human
gcagugaagccagaucugaaau

SEQ ID NO: 209715 - RNA, 22 nt, Human
cugagccuugaugucccuuguc

SEQ ID NO: 209716 - RNA, 21 nt, Human
cggcuucugcauuccagagcu

SEQ ID NO: 209717 - RNA, 22 nt, Human
acagaaagauaggcacaagguc

SEQ ID NO: 209718 - RNA, 22 nt, Human
agaucauagcacaaaagugaca

SEQ ID NO: 209719 - RNA, 22 nt, Human
ugucugggauguuggcagccac

SEQ ID NO: 209720 - RNA, 22 nt, Human
agagaucugugcuuacuacaag

SEQ ID NO: 209721 - RNA, 22 nt, Human
auaaauaucacuguugucccuc

SEQ ID NO: 209722 - RNA, 22 nt, Human
acagucaguaucccaggcaaau

SEQ ID NO: 209723 - RNA, 22 nt, Human
cacauuccccagagcuggggcu

SEQ ID NO: 209724 - RNA, 23 nt, Human
cagggaggagauacuguguaucu

SEQ ID NO: 209725 - RNA, 22 nt, Human
acuggaggggaaaaugguagua

SEQ ID NO: 209726 - RNA, 22 nt, Human
ugcauaaacagauacuucaugu

SEQ ID NO: 209727 - RNA, 22 nt, Human
aagucaagauaaaggugcuggc

SEQ ID NO: 209728 - RNA, 20 nt, Human
uuucuguagcucaguauuca

SEQ ID NO: 209729 - RNA, 22 nt, Human
acuaguuugaaaauaucugauu

SEQ ID NO: 209730 - RNA, 22 nt, Human
uggcucagugaagagauaacuu

SEQ ID NO: 209731 - RNA, 21 nt, Human
cagcaaaucauugggcagacu

SEQ ID NO: 209732 - RNA, 22 nt, Human
acugcccucccaucuauugcaa

SEQ ID NO: 209733 - RNA, 22 nt, Human
guuacaaagcacuucaagugaa

SEQ ID NO: 209734 - RNA, 19 nt, Human
acauggcucuccagucugg

SEQ ID NO: 209735 - RNA, 22 nt, Human
uaacacacugaaggugagaugg

SEQ ID NO: 209736 - RNA, 22 nt, Human
cugggaagauggugacagaauu

SEQ ID NO: 209737 - RNA, 21 nt, Human
uuucuggguggcugcauagug

SEQ ID NO: 209738 - RNA, 21 nt, Human
guccucagcugaugggagcug

SEQ ID NO: 209739 - RNA, 22 nt, Human
gaggccacgguuuuccuugggg

SEQ ID NO: 209740 - RNA, 22 nt, Human
ucccaggauguuuauggcuggu

SEQ ID NO: 209741 - RNA, 22 nt, Human
cccuggccccucacuccgaggc

SEQ ID NO: 209742 - RNA, 18 nt, Human
agguucugacaguccaaa

SEQ ID NO: 209743 - RNA, 22 nt, Human
ucugggagguaaccaugcugau

SEQ ID NO: 209744 - RNA, 18 nt, Human
uugugaaauauuggaguc

SEQ ID NO: 209745 - RNA, 22 nt, Human
uaugaacauugaagaggagccc

SEQ ID NO: 209746 - RNA, 22 nt, Human
auaaucaaaguccuaugacauc

SEQ ID NO: 209747 - RNA, 22 nt, Human
cugguccccagacugggcuuag

SEQ ID NO: 209748 - RNA, 22 nt, Human
ucaaugagguaaucagucaccc

SEQ ID NO: 209749 - RNA, 22 nt, Human
cuccuucccaugagugugggca

SEQ ID NO: 209750 - RNA, 22 nt, Human
uuccaggagccacacaggggcg

SEQ ID NO: 209751 - RNA, 22 nt, Human
ucuccaggugaaacuugcaggg

SEQ ID NO: 209752 - RNA, 22 nt, Human
cuagugagucugaaugaguugc

SEQ ID NO: 209753 - RNA, 17 nt, Human
ggacacagcucauggcu

SEQ ID NO: 209754 - RNA, 22 nt, Human
gagagcuggauucuggauaggu

SEQ ID NO: 209755 - RNA, 19 nt, Human
agugguagaugagcaggag

SEQ ID NO: 209756 - RNA, 22 nt, Human
uucaaaugcaaguuacuacuuu

SEQ ID NO: 209757 - RNA, 22 nt, Human
ugaaggaagaauaggcaguguu

SEQ ID NO: 209758 - RNA, 22 nt, Human
auuuuaauaagauucccaagua

SEQ ID NO: 209759 - RNA, 22 nt, Human
aucucccaaauuagccucuuga

SEQ ID NO: 209760 - RNA, 22 nt, Human
gagagcacggucuugggcaugg

SEQ ID NO: 209761 - RNA, 22 nt, Human
uaaauuguguguugcuagggga

SEQ ID NO: 209762 - RNA, 22 nt, Human
agagaagggguaaagaguccug

SEQ ID NO: 209763 - RNA, 22 nt, Human
aucuuugggauauuugugauua

SEQ ID NO: 209764 - RNA, 22 nt, Human
gccucccuguagaggccagccu

SEQ ID NO: 209765 - RNA, 22 nt, Human
caugcuuuuuucuaguauaaau

SEQ ID NO: 209766 - RNA, 22 nt, Human
uggccuuuguugauagcuaugc

SEQ ID NO: 209767 - RNA, 22 nt, Human
ugcaaacaauuuccuauaaagu

SEQ ID NO: 209768 - RNA, 22 nt, Human
cuggucacuccuccaccugcuu

SEQ ID NO: 209769 - RNA, 22 nt, Human
accaaccagggacuuggcuccc

SEQ ID NO: 209770 - RNA, 22 nt, Human
uaggguccaagccuuauaauua

SEQ ID NO: 209771 - RNA, 23 nt, Human
uucuccugaggaagcagggacug

SEQ ID NO: 209772 - RNA, 22 nt, Human
ggcagagacaccgaaugacucu

SEQ ID NO: 209773 - RNA, 22 nt, Human
ucuaaguaaaauuugucauuuc

SEQ ID NO: 209774 - RNA, 22 nt, Human
gcucaggaaacagcagggcuug

SEQ ID NO: 209775 - RNA, 22 nt, Human
aggucgaguuucggggcuacuu

SEQ ID NO: 209776 - RNA, 22 nt, Human
aucccauuuccuguuuugucaa

SEQ ID NO: 209777 - RNA, 21 nt, Human
aggcauggaaauggcacacug

SEQ ID NO: 209778 - RNA, 22 nt, Human
agaauccuggagaagcuguacc

SEQ ID NO: 209779 - RNA, 22 nt, Human
aacauguaaauaucauuguacu

SEQ ID NO: 209780 - RNA, 22 nt, Human
uccaggcuggagugcaguggca

SEQ ID NO: 209781 - RNA, 22 nt, Human
ugggggagagugcaagcaugaa

SEQ ID NO: 209782 - RNA, 22 nt, Human
cacguuaacagcuaacagauga

SEQ ID NO: 209783 - RNA, 22 nt, Human
gggaucuuguuuaauauuguuu

SEQ ID NO: 209784 - RNA, 22 nt, Human
agcuccugcuugacagaagagg

SEQ ID NO: 209785 - RNA, 22 nt, Human
aguaggcauugugaaacugcau

SEQ ID NO: 209786 - RNA, 18 nt, Human
accaggaagcuucuuguc

SEQ ID NO: 209787 - RNA, 22 nt, Human
ccagcaggagagaacauuuccc

SEQ ID NO: 209788 - RNA, 22 nt, Human
cacagcagggaugaauggagug

SEQ ID NO: 209789 - RNA, 22 nt, Human
cacaugugugcugaggacugug

SEQ ID NO: 209790 - RNA, 22 nt, Human
agcccagccacuauuaaauguu

SEQ ID NO: 209791 - RNA, 22 nt, Human
cuuguauagggaaagauaaauc

SEQ ID NO: 209792 - RNA, 22 nt, Human
auguuucuguccuacgagauaa

SEQ ID NO: 209793 - RNA, 22 nt, Human
uugaaugauuaaagucaucuga

SEQ ID NO: 209794 - RNA, 22 nt, Human
acauagaaauuuauuucuuaca

SEQ ID NO: 209795 - RNA, 22 nt, Human
guggcccacuuacgucaugugu

SEQ ID NO: 209796 - RNA, 22 nt, Human
cuucucggccguguggaugcgc

SEQ ID NO: 209797 - RNA, 22 nt, Human
ugcucugugugugguuauuucc

SEQ ID NO: 209798 - RNA, 22 nt, Human
acugagauuuacauguucuagu

SEQ ID NO: 209799 - RNA, 22 nt, Human
auaacacuaaauguauguaaca

SEQ ID NO: 209800 - RNA, 22 nt, Human
cagaugaggggcauauaacaau

SEQ ID NO: 209801 - RNA, 22 nt, Human
ccacaucuguucuuaguucuga

SEQ ID NO: 209802 - RNA, 22 nt, Human
acaagaauuauuucuaguuaac

SEQ ID NO: 209803 - RNA, 22 nt, Human
uccagccuccuauuuacccuaa

SEQ ID NO: 209804 - RNA, 22 nt, Human
augcacaagguagauuauuauu

SEQ ID NO: 209805 - RNA, 22 nt, Human
gagggauggugugagaggcuca

SEQ ID NO: 209806 - RNA, 22 nt, Human
ucccagaaucuccagugcuaca

SEQ ID NO: 209807 - RNA, 22 nt, Human
ccugggcuuacgaccucugacu

SEQ ID NO: 209808 - RNA, 22 nt, Human
gcagcuuuuuggaugucaguua

SEQ ID NO: 209809 - RNA, 22 nt, Human
aggccuugggccauagucuccu

SEQ ID NO: 209810 - RNA, 22 nt, Human
aaguccagaacuccugugauag

SEQ ID NO: 209811 - RNA, 22 nt, Human
cuccugcugaauggccaggagc

SEQ ID NO: 209812 - RNA, 22 nt, Human
ugcugaggcaguccuaacagga

SEQ ID NO: 209813 - RNA, 22 nt, Human
agcauuuucugagaguauagau

SEQ ID NO: 209814 - RNA, 22 nt, Human
uagcuccuacaaguacagcaaa

SEQ ID NO: 209815 - RNA, 22 nt, Human
gccaggaggcugcuguguaggc

SEQ ID NO: 209816 - RNA, 22 nt, Human
acagugaaaaguagcuaacaca

SEQ ID NO: 209817 - RNA, 22 nt, Human
uuccuguguccuauuucgacuu

SEQ ID NO: 209818 - RNA, 22 nt, Human
aauuaguucaauggaugauaga

SEQ ID NO: 209819 - RNA, 22 nt, Human
aggggaagagcccuuuacaugg

SEQ ID NO: 209820 - RNA, 22 nt, Human
cagucuggaucugugcugcugu

SEQ ID NO: 209821 - RNA, 22 nt, Human
ccugggcugcucauggggauga

SEQ ID NO: 209822 - RNA, 22 nt, Human
cagcugcuuacuagcuguguga

SEQ ID NO: 209823 - RNA, 19 nt, Human
cucucuccaguggcuggcu

SEQ ID NO: 209824 - RNA, 22 nt, Human
uuguguccucuaaucucaccac

SEQ ID NO: 209825 - RNA, 22 nt, Human
ugaguggguuaucaggaaaggu

SEQ ID NO: 209826 - RNA, 22 nt, Human
acagaauuaucaggaaauguua

SEQ ID NO: 209827 - RNA, 22 nt, Human
cagagacuggagugcaguggcg

SEQ ID NO: 209828 - RNA, 22 nt, Human
ucagcacuuugaagcagaagga

SEQ ID NO: 209829 - RNA, 22 nt, Human
uggcccaggcgaggugggcaga

SEQ ID NO: 209830 - RNA, 22 nt, Human
uauugcugccaggacccuaucc

SEQ ID NO: 209831 - RNA, 22 nt, Human
cuucuuaaugcauaaacugugu

SEQ ID NO: 209832 - RNA, 22 nt, Human
uggaagggaacagguggguguu

SEQ ID NO: 209833 - RNA, 22 nt, Human
uucaguuugaauucuguagaac

SEQ ID NO: 209834 - RNA, 22 nt, Human
uugggugguggggagaguucag

SEQ ID NO: 209835 - RNA, 22 nt, Human
ucagcuuauauuuuuaguguaa

SEQ ID NO: 209836 - RNA, 18 nt, Human
gcaaggcucaggccaggc

SEQ ID NO: 209837 - RNA, 22 nt, Human
gcaaauucuuaacuggacugug

SEQ ID NO: 209838 - RNA, 18 nt, Human
cucucugggugaggacaa

SEQ ID NO: 209839 - RNA, 22 nt, Human
agcagggccugagugaccuaac

SEQ ID NO: 209840 - RNA, 22 nt, Human
gcugaaauguuuaauuugggag

SEQ ID NO: 209841 - RNA, 22 nt, Human
ugugugacacauugauaugugc

SEQ ID NO: 209842 - RNA, 22 nt, Human
uaacugaauguauuacaacaga

SEQ ID NO: 209843 - RNA, 22 nt, Human
gcagcagggagcagggguguca

SEQ ID NO: 209844 - RNA, 22 nt, Human
uguggcugcagacacuggagcc

SEQ ID NO: 209845 - RNA, 22 nt, Human
ucugaagauuaccagcuaaaug

SEQ ID NO: 209846 - RNA, 22 nt, Human
ucagaggaucaugucccuacuc

SEQ ID NO: 209847 - RNA, 22 nt, Human
ucugggagcagcucagcagauu

SEQ ID NO: 209848 - RNA, 22 nt, Human
auguucuuuggaauuuaugaaa

SEQ ID NO: 209849 - RNA, 22 nt, Human
guagaaauuccauuuacuuuga

SEQ ID NO: 209850 - RNA, 22 nt, Human
uccuagaaagaugucuuuucac

SEQ ID NO: 209851 - RNA, 22 nt, Human
ucugcuggugaugaccucauaa

SEQ ID NO: 209852 - RNA, 22 nt, Human
aggcgcaggguuuggacccagg

SEQ ID NO: 209853 - RNA, 22 nt, Human
ccucuccaguuuuaacgugacc

SEQ ID NO: 209854 - RNA, 22 nt, Human
aggcaagugcauuagaagagca

SEQ ID NO: 209855 - RNA, 22 nt, Human
cuuuaguuauuuagacuacagu

SEQ ID NO: 209856 - RNA, 22 nt, Human
ugaugagggcaguucuuguugc

SEQ ID NO: 209857 - RNA, 22 nt, Human
caugucuguguacacaugcaca

SEQ ID NO: 209858 - RNA, 22 nt, Human
uugaggcagguccggguccuuc

SEQ ID NO: 209859 - RNA, 22 nt, Human
cauuaauauuguucuucuuuag

SEQ ID NO: 209860 - RNA, 22 nt, Human
uagggacccucccugcucuaac

SEQ ID NO: 209861 - RNA, 22 nt, Human
auuuuuuagccaagacucugca

SEQ ID NO: 209862 - RNA, 22 nt, Human
agccugugugcuuuggacaggg

SEQ ID NO: 209863 - RNA, 22 nt, Human
agggcagcugugagccacugug

SEQ ID NO: 209864 - RNA, 22 nt, Human
aggcccuguaagguguggagau

SEQ ID NO: 209865 - RNA, 22 nt, Human
uuccagaacaauguggacguau

SEQ ID NO: 209866 - RNA, 22 nt, Human
uccuggcuuccacaccugucau

SEQ ID NO: 209867 - RNA, 22 nt, Human
cuucacagucacccugcugugu

SEQ ID NO: 209868 - RNA, 22 nt, Human
agagucaaaauuuaccagaaug

SEQ ID NO: 209869 - RNA, 22 nt, Human
acacagaguccuuacugaggua

SEQ ID NO: 209870 - RNA, 22 nt, Human
agcugccaaguuucucaguuua

SEQ ID NO: 209871 - RNA, 21 nt, Human
aggaaaauugaggguuguugu

SEQ ID NO: 209872 - RNA, 22 nt, Human
auguuagugauaguaaauagug

SEQ ID NO: 209873 - RNA, 22 nt, Human
aaacuuuguagagaaugcuggc

SEQ ID NO: 209874 - RNA, 22 nt, Human
gcuguacauucugcacaggccc

SEQ ID NO: 209875 - RNA, 22 nt, Human
cuagagaaaccccaugagcuuu

SEQ ID NO: 209876 - RNA, 22 nt, Human
aacagcagcugaggagcugggc

SEQ ID NO: 209877 - RNA, 22 nt, Human
ucaggaucaggggccuuuccuu

SEQ ID NO: 209878 - RNA, 22 nt, Human
auuucaguguugguuagcaagc

SEQ ID NO: 209879 - RNA, 22 nt, Human
caggcucccgaaaucacccaug

SEQ ID NO: 209880 - RNA, 22 nt, Human
aauugcuuuacaagccguuuaa

SEQ ID NO: 209881 - RNA, 22 nt, Human
uuggucagcuaauaaggacagg

SEQ ID NO: 209882 - RNA, 22 nt, Human
caagauggaguccgggaaugug

SEQ ID NO: 209883 - RNA, 22 nt, Human
augguaaccagaagacuaugac

SEQ ID NO: 209884 - RNA, 22 nt, Human
gcagcaggugugcuuuuaauga

SEQ ID NO: 209885 - RNA, 22 nt, Human
agcugaggccacgagugaaggg

SEQ ID NO: 209886 - RNA, 22 nt, Human
gcagaaguggauucuacaauuu

SEQ ID NO: 209887 - RNA, 22 nt, Human
ucuccaggccuuucccaucuua

SEQ ID NO: 209888 - RNA, 22 nt, Human
caggcagcccugcaccaagugu

SEQ ID NO: 209889 - RNA, 22 nt, Human
cagggaugcuguuaaacauccu

SEQ ID NO: 209890 - RNA, 22 nt, Human
aggaggaggcuggaguacaccc

SEQ ID NO: 209891 - RNA, 20 nt, Human
cuggccagaacgccuacaca

SEQ ID NO: 209892 - RNA, 22 nt, Human
caggcugugggagucaggaccc

SEQ ID NO: 209893 - RNA, 22 nt, Human
agcugcagcguucauuuuucca

SEQ ID NO: 209894 - RNA, 22 nt, Human
ugcuuaaaggauaguuuaaacu

SEQ ID NO: 209895 - RNA, 22 nt, Human
cucuccaggggaacauuguucc

SEQ ID NO: 209896 - RNA, 22 nt, Human
uaacagagugaaaaucagcaca

SEQ ID NO: 209897 - RNA, 22 nt, Human
ugcagaagcagagaguugccaa

SEQ ID NO: 209898 - RNA, 22 nt, Human
uuccucagccaaggcugggauc

SEQ ID NO: 209899 - RNA, 22 nt, Human
cagauguaauuacucaagucaa

SEQ ID NO: 209900 - RNA, 22 nt, Human
uuauggaaaauacaauuauaag

SEQ ID NO: 209901 - RNA, 22 nt, Human
ccugugucaucagcuguggcua

SEQ ID NO: 209902 - RNA, 19 nt, Human
aggcagcaggccagggaug

SEQ ID NO: 209903 - RNA, 22 nt, Human
auucuuuauugcugaugguuau

SEQ ID NO: 209904 - RNA, 17 nt, Human
ccacagccuggcacuug

SEQ ID NO: 209905 - RNA, 22 nt, Human
gaugaucugcaagaacuacaug

SEQ ID NO: 209906 - RNA, 19 nt, Human
gguagaagggaaguguuuu

SEQ ID NO: 209907 - RNA, 22 nt, Human
gauggauacuauaggaggcaca

SEQ ID NO: 209908 - RNA, 22 nt, Human
guccagaguagucgaguauucu

SEQ ID NO: 209909 - RNA, 22 nt, Human
ucagauggcacacagagccugc

SEQ ID NO: 209910 - RNA, 22 nt, Human
uuauuuaggaggaaacugaggu

SEQ ID NO: 209911 - RNA, 22 nt, Human
ugcccauggaccaagcaagggg

SEQ ID NO: 209912 - RNA, 22 nt, Human
cagggccagcgcccaggcccag

SEQ ID NO: 209913 - RNA, 20 nt, Human
aauuagauguuuaaucaaua

SEQ ID NO: 209914 - RNA, 22 nt, Human
auccagggauaaaaguaagguu

SEQ ID NO: 209915 - RNA, 22 nt, Human
agggcccuagggaaugagacau

SEQ ID NO: 209916 - RNA, 22 nt, Human
acucuuauuuugaaguaauaau

SEQ ID NO: 209917 - RNA, 22 nt, Human
acagcuguguuuuauaaucagc

SEQ ID NO: 209918 - RNA, 22 nt, Human
accaggcacuccugaggucuga

SEQ ID NO: 209919 - RNA, 22 nt, Human
acaguacucuaaugaaaagugc

SEQ ID NO: 209920 - RNA, 22 nt, Human
gcauguguuagagugugcaugc

SEQ ID NO: 209921 - RNA, 22 nt, Human
agcugccucucuugagguuacg

SEQ ID NO: 209922 - RNA, 19 nt, Human
ugagacagggauucaggug

SEQ ID NO: 209923 - RNA, 23 nt, Human
uugaggcaaacucuuuucugaaa

SEQ ID NO: 209924 - RNA, 22 nt, Human
cugagcucagucccagcucuac

SEQ ID NO: 209925 - RNA, 22 nt, Human
gccugugcauagcagcggacuc

SEQ ID NO: 209926 - RNA, 22 nt, Human
gaagcagaacccacuccccaac

SEQ ID NO: 209927 - RNA, 19 nt, Human
agaagcccagaucccagcc

SEQ ID NO: 209928 - RNA, 22 nt, Human
ugaggcaguauucuccauucca

SEQ ID NO: 209929 - RNA, 22 nt, Human
ucuguggcuuucguguaagaug

SEQ ID NO: 209930 - RNA, 22 nt, Human
ugagucuucuuccgggauugcu

SEQ ID NO: 209931 - RNA, 22 nt, Human
ucaggggcagccggggaagcca

SEQ ID NO: 209932 - RNA, 22 nt, Human
caaaaguaauguaugcucaucg

SEQ ID NO: 209933 - RNA, 22 nt, Human
ugagggcugcuuccagagcuag

SEQ ID NO: 209934 - RNA, 22 nt, Human
ccuggcugggguagaagugagg

SEQ ID NO: 209935 - RNA, 22 nt, Human
uucacauugaaggugcuuucuu

SEQ ID NO: 209936 - RNA, 22 nt, Human
cagccaucaguaaagacagcuu

SEQ ID NO: 209937 - RNA, 22 nt, Human
uccauagaaugcaguguaaauu

SEQ ID NO: 209938 - RNA, 22 nt, Human
ugagagccagaagggccugagg

SEQ ID NO: 209939 - RNA, 22 nt, Human
uugugcagcuauaaagaaaugg

SEQ ID NO: 209940 - RNA, 22 nt, Human
uaauuuuaugacaguguauuuu

SEQ ID NO: 209941 - RNA, 22 nt, Human
aguuacaaacacuaucaguucu

SEQ ID NO: 209942 - RNA, 22 nt, Human
acauucuguuuccccaaagaga

SEQ ID NO: 209943 - RNA, 22 nt, Human
caaauacucuggauguguuugu

SEQ ID NO: 209944 - RNA, 20 nt, Human
agugauuuguuaguacauug

SEQ ID NO: 209945 - RNA, 22 nt, Human
auuauuagauucuuaauuguaa

SEQ ID NO: 209946 - RNA, 22 nt, Human
aggccaggaauccuugucccag

SEQ ID NO: 209947 - RNA, 22 nt, Human
agcugccugccaugccgcuggu

SEQ ID NO: 209948 - RNA, 22 nt, Human
gcugggcuguaguuugcugacc

SEQ ID NO: 209949 - RNA, 22 nt, Human
caugaguuuuuuaguucaugca

SEQ ID NO: 209950 - RNA, 22 nt, Human
uugguuuguucaccaucaagca

SEQ ID NO: 209951 - RNA, 22 nt, Human
acccugggagggagaaaucaga

SEQ ID NO: 209952 - RNA, 22 nt, Human
guguggcagggcguuugcagac

SEQ ID NO: 209953 - RNA, 22 nt, Human
accucagagggauguuacaggc

SEQ ID NO: 209954 - RNA, 22 nt, Human
uccuucagggggccgccugcac

SEQ ID NO: 209955 - RNA, 22 nt, Human
uccugagguggauugagcagag

SEQ ID NO: 209956 - RNA, 22 nt, Human
caaaauuagggagugagcugga

SEQ ID NO: 209957 - RNA, 22 nt, Human
uugcaaggagccacucugccug

SEQ ID NO: 209958 - RNA, 22 nt, Human
ccugugcaugccaggguacacc

SEQ ID NO: 209959 - RNA, 22 nt, Human
aaaaugagacacaugugacucc

SEQ ID NO: 209960 - RNA, 22 nt, Human
gggauuugugggauggccagug

SEQ ID NO: 209961 - RNA, 21 nt, Human
gugguucuagagaaacagaau

SEQ ID NO: 209962 - RNA, 19 nt, Human
cagccucaaucccucgggc

SEQ ID NO: 209963 - RNA, 22 nt, Human
gugcugagauuggagugagcag

SEQ ID NO: 209964 - RNA, 22 nt, Human
caguuacaugcucaugucauca

SEQ ID NO: 209965 - RNA, 22 nt, Human
ccagucagccaagcugcagcgg

SEQ ID NO: 209966 - RNA, 22 nt, Human
ucuggcuccuggcuccacugcc

SEQ ID NO: 209967 - RNA, 22 nt, Human
caucuuuaaaaugggaacaaca

SEQ ID NO: 209968 - RNA, 22 nt, Human
gacauuucuagcccauaaaacu

SEQ ID NO: 209969 - RNA, 22 nt, Human
uguggcuguggaugcuuuccag

SEQ ID NO: 209970 - RNA, 17 nt, Human
aaccagcuguccccucc

SEQ ID NO: 209971 - RNA, 22 nt, Human
agcuucccggcaggcacguccu

SEQ ID NO: 209972 - RNA, 22 nt, Human
auugcaaauaacuguacugaau

SEQ ID NO: 209973 - RNA, 22 nt, Human
auagcaauuaagcuccagaauu

SEQ ID NO: 209974 - RNA, 22 nt, Human
cugcugggucccccugcugauu

SEQ ID NO: 209975 - RNA, 22 nt, Human
agggcugcaccggggcuucgcg

SEQ ID NO: 209976 - RNA, 19 nt, Human
aggaaggaaccugagucug

SEQ ID NO: 209977 - RNA, 22 nt, Human
guccucuguguaggcugcagac

SEQ ID NO: 209978 - RNA, 22 nt, Human
aacuuucugucugagcugcaga

SEQ ID NO: 209979 - RNA, 22 nt, Human
aagccaaaggcuccagugaccu

SEQ ID NO: 209980 - RNA, 22 nt, Human
ugguggacaucccagggugaaa

SEQ ID NO: 209981 - RNA, 22 nt, Human
ugcagggagggcccagcaaucu

SEQ ID NO: 209982 - RNA, 22 nt, Human
ccacuuucugagggaacagcag

SEQ ID NO: 209983 - RNA, 22 nt, Human
cagaaauuggaauagagaaaua

SEQ ID NO: 209984 - RNA, 20 nt, Human
uuucacaucugucccuuuaa

SEQ ID NO: 209985 - RNA, 22 nt, Human
cucuccagguuagagcacuuau

SEQ ID NO: 209986 - RNA, 22 nt, Human
ugcaggaauauugaugaacuua

SEQ ID NO: 209987 - RNA, 20 nt, Human
auauaauaaauuuugguuac

SEQ ID NO: 209988 - RNA, 22 nt, Human
caagggcagauagcugguccaa

SEQ ID NO: 209989 - RNA, 22 nt, Human
ucugcucugagagggccaucag

SEQ ID NO: 209990 - RNA, 22 nt, Human
ggauuuacaaguuuaacucuca

SEQ ID NO: 209991 - RNA, 22 nt, Human
uacacagggagagauuggaaac

SEQ ID NO: 209992 - RNA, 22 nt, Human
uugccaggcucugguuccagcc

SEQ ID NO: 209993 - RNA, 22 nt, Human
uggauaaaaugacauuaccuga

SEQ ID NO: 209994 - RNA, 22 nt, Human
guguucauugcuagugaggugu

SEQ ID NO: 209995 - RNA, 21 nt, Human
ugucagagcuuguaggacauu

SEQ ID NO: 209996 - RNA, 22 nt, Human
uccucagagcauagcgcugucu

SEQ ID NO: 209997 - RNA, 22 nt, Human
uccauacacauuuauuuggccu

SEQ ID NO: 209998 - RNA, 22 nt, Human
uccacagggauguugaguucuu

SEQ ID NO: 209999 - RNA, 22 nt, Human
augcaggagagcauguuuaaga

SEQ ID NO: 210000 - RNA, 22 nt, Human
cagggcagaaggcacucuacuc

SEQ ID NO: 210001 - RNA, 22 nt, Human
aaucaggacccacucuacaguu

SEQ ID NO: 210002 - RNA, 21 nt, Human
cuugagaauuaacuguucauu

SEQ ID NO: 210003 - RNA, 22 nt, Human
uacccagcaaucccuagagguu

SEQ ID NO: 210004 - RNA, 21 nt, Human
uggagcugaauuuuuggcauc

SEQ ID NO: 210005 - RNA, 22 nt, Human
gugggcucaggccucugugggg

SEQ ID NO: 210006 - RNA, 22 nt, Human
gggccucaggccuugcucugug

SEQ ID NO: 210007 - RNA, 22 nt, Human
ucuccugggugcuuuaucagaa

SEQ ID NO: 210008 - RNA, 22 nt, Human
ugcuuuauagacaaggaaguag

SEQ ID NO: 210009 - RNA, 22 nt, Human
cagaggcacagcuucuuuuaau

SEQ ID NO: 210010 - RNA, 22 nt, Human
ucauuugugugagugauuugac

SEQ ID NO: 210011 - RNA, 22 nt, Human
aauauaguucugguauuguuaa

SEQ ID NO: 210012 - RNA, 22 nt, Human
agacugggauucucccugauca

SEQ ID NO: 210013 - RNA, 22 nt, Human
aggacaguggcaaggcaggaca

SEQ ID NO: 210014 - RNA, 22 nt, Human
uugacuucccagacuuguguuu

SEQ ID NO: 210015 - RNA, 22 nt, Human
ugccccagacucugcucaccuc

SEQ ID NO: 210016 - RNA, 21 nt, Human
ucucuuugggaacauuaauca

SEQ ID NO: 210017 - RNA, 22 nt, Human
uauugauucugucccaaguuga

SEQ ID NO: 210018 - RNA, 22 nt, Human
ugagucuuuccaaagccgucau

SEQ ID NO: 210019 - RNA, 22 nt, Human
gugaaacacccuccaaugcaca

SEQ ID NO: 210020 - RNA, 22 nt, Human
ggcuucuccccuuugagucuuc

SEQ ID NO: 210021 - RNA, 22 nt, Human
gaguuacacaaaauuucuauuu

SEQ ID NO: 210022 - RNA, 22 nt, Human
ucuuuauugcuacugguuuguc

SEQ ID NO: 210023 - RNA, 22 nt, Human
ucauggggugacagaagggagg

SEQ ID NO: 210024 - RNA, 22 nt, Human
ccugguuuaaugcucacuguug

SEQ ID NO: 210025 - RNA, 22 nt, Human
gaacuuuaccauuuagguaacu

SEQ ID NO: 210026 - RNA, 22 nt, Human
cuggagcuggcuuccuuccacu

SEQ ID NO: 210027 - RNA, 22 nt, Human
acugaauauauuccauugcaug

SEQ ID NO: 210028 - RNA, 22 nt, Human
ugucauuuccugaaugcugagu

SEQ ID NO: 210029 - RNA, 22 nt, Human
acccaggcuggaaugcaguggu

SEQ ID NO: 210030 - RNA, 22 nt, Human
ucuuuuauccuacauuuagcuc

SEQ ID NO: 210031 - RNA, 20 nt, Human
uaugauaauuacaaaauagu

SEQ ID NO: 210032 - RNA, 22 nt, Human
auauucacugagcauaaagcca

SEQ ID NO: 210033 - RNA, 22 nt, Human
aucuuuagagucaucugagugu

SEQ ID NO: 210034 - RNA, 22 nt, Human
auuucuuacauaacaaauuguu

SEQ ID NO: 210035 - RNA, 22 nt, Human
acaaauuguugcuucaugaaug

SEQ ID NO: 210036 - RNA, 22 nt, Human
uuauugagcaccuacuaugugu

SEQ ID NO: 210037 - RNA, 22 nt, Human
gcuguggcuuucuguuucuguu

SEQ ID NO: 210038 - RNA, 22 nt, Human
gccugggauucccagaggggca

SEQ ID NO: 210039 - RNA, 22 nt, Human
auucauuccaggucagucagac

SEQ ID NO: 210040 - RNA, 22 nt, Human
ccagggcacuuaggcccagccc

SEQ ID NO: 210041 - RNA, 22 nt, Human
gagcuacagaguuugguguuca

SEQ ID NO: 210042 - RNA, 22 nt, Human
aggcucaggugccucauucaca

SEQ ID NO: 210043 - RNA, 22 nt, Human
auuguauuuguacaagacaugu

SEQ ID NO: 210044 - RNA, 20 nt, Human
gaugaaaucacugggcagcc

SEQ ID NO: 210045 - RNA, 22 nt, Human
gagguaauuacuauguucagau

SEQ ID NO: 210046 - RNA, 22 nt, Human
uaggcuccaguguguggcgagu

SEQ ID NO: 210047 - RNA, 22 nt, Human
aaguaucugggagauuugcuuu

SEQ ID NO: 210048 - RNA, 22 nt, Human
uuguuuuuaaacaugugacuga

SEQ ID NO: 210049 - RNA, 22 nt, Human
cuaaaugucagaguagcuugca

SEQ ID NO: 210050 - RNA, 22 nt, Human
guggcauuuggaaagagcacua

SEQ ID NO: 210051 - RNA, 19 nt, Human
agggccugagcagauguug

SEQ ID NO: 210052 - RNA, 22 nt, Human
auaucaaacgaaguuauuuuaa

SEQ ID NO: 210053 - RNA, 22 nt, Human
cuacaguacuggaugcucagcc

SEQ ID NO: 210054 - RNA, 22 nt, Human
uagcagagcgggugcgaggcgg

SEQ ID NO: 210055 - RNA, 22 nt, Human
caggcugccgaggcugcagaau

SEQ ID NO: 210056 - RNA, 22 nt, Human
aauggcucugauguuguuguga

SEQ ID NO: 210057 - RNA, 22 nt, Human
uacagacagacuucccacccuc

SEQ ID NO: 210058 - RNA, 22 nt, Human
cugguucugauguucuuggcuu

SEQ ID NO: 210059 - RNA, 22 nt, Human
ugcuggagaggaaggugggguc

SEQ ID NO: 210060 - RNA, 22 nt, Human
uuauauuucugguagccuucag

SEQ ID NO: 210061 - RNA, 22 nt, Human
uuuuacaguuccaugcaaagcg

SEQ ID NO: 210062 - RNA, 22 nt, Human
ugcacccaugucuccacguaca

SEQ ID NO: 210063 - RNA, 22 nt, Human
ucagcugaaguggagaagcaga

SEQ ID NO: 210064 - RNA, 22 nt, Human
uaauuuuaacugugcuguuugg

SEQ ID NO: 210065 - RNA, 22 nt, Human
aagcaagacagaaguuacugcc

SEQ ID NO: 210066 - RNA, 20 nt, Human
guacacuucauguuucaccu

SEQ ID NO: 210067 - RNA, 22 nt, Human
ggcuccagggucucuccuugug

SEQ ID NO: 210068 - RNA, 19 nt, Human
uacauuccacacaaucucu

SEQ ID NO: 210069 - RNA, 22 nt, Human
uucagcaaacacgaugcuuguu

SEQ ID NO: 210070 - RNA, 22 nt, Human
gccagagccacuuuugggugau

SEQ ID NO: 210071 - RNA, 22 nt, Human
cacaauuagcagcucuuuauuu

SEQ ID NO: 210072 - RNA, 22 nt, Human
auauuaaugagcaaguaaguga

SEQ ID NO: 210073 - RNA, 22 nt, Human
gcacuucucgggggcgcugucu

SEQ ID NO: 210074 - RNA, 22 nt, Human
uucaggaugcagagguuguagu

SEQ ID NO: 210075 - RNA, 22 nt, Human
uggagaugggaaaaaggaggua

SEQ ID NO: 210076 - RNA, 22 nt, Human
ugggcagacuaaggucaaagcu

SEQ ID NO: 210077 - RNA, 22 nt, Human
cuucuugacuucugggugcccu

SEQ ID NO: 210078 - RNA, 22 nt, Human
uggcuggagcgcccuccucugc

SEQ ID NO: 210079 - RNA, 22 nt, Human
agcaagaugcauuauuucuuau

SEQ ID NO: 210080 - RNA, 22 nt, Human
agaugaagauaucugcaggggc

SEQ ID NO: 210081 - RNA, 22 nt, Human
aaucuugguugcaguauauccg

SEQ ID NO: 210082 - RNA, 22 nt, Human
uauauuuaaauccagguugaaa

SEQ ID NO: 210083 - RNA, 22 nt, Human
cggcuucuucgaggugucugcg

SEQ ID NO: 210084 - RNA, 22 nt, Human
cacaauuuggacuucacugguu

SEQ ID NO: 210085 - RNA, 22 nt, Human
agcugaaaauuagugauaguuu

SEQ ID NO: 210086 - RNA, 22 nt, Human
ugcacccauagcacacacuccu

SEQ ID NO: 210087 - RNA, 22 nt, Human
gugcugucguggaacugggcug

SEQ ID NO: 210088 - RNA, 22 nt, Human
uugccuuacugcauucaguaaa

SEQ ID NO: 210089 - RNA, 22 nt, Human
acaggcauauuucuagauuaca

SEQ ID NO: 210090 - RNA, 22 nt, Human
acaguuaauuguuguugggugu

SEQ ID NO: 210091 - RNA, 22 nt, Human
uggaaacuuggaacgucuucag

SEQ ID NO: 210092 - RNA, 22 nt, Human
ggcaaacagacuugaccaucuu

SEQ ID NO: 210093 - RNA, 22 nt, Human
cccagaggggucgucugagggg

SEQ ID NO: 210094 - RNA, 22 nt, Human
uuucucaguugugcgagcagca

SEQ ID NO: 210095 - RNA, 22 nt, Human
gggcagcaggcuccacguuccu

SEQ ID NO: 210096 - RNA, 22 nt, Human
gcagaggacagggauuuagauu

SEQ ID NO: 210097 - RNA, 22 nt, Human
ugcuucucagccugucuggaaa

SEQ ID NO: 210098 - RNA, 22 nt, Human
agcaaaauaagguaauuuauug

SEQ ID NO: 210099 - RNA, 22 nt, Human
ucuggguggugucuuccaagac

SEQ ID NO: 210100 - RNA, 22 nt, Human
agcuguggaguaggggguugga

SEQ ID NO: 210101 - RNA, 19 nt, Human
gggcaugcuggcucuagag

SEQ ID NO: 210102 - RNA, 22 nt, Human
aggcuggcuucccaagcguccu

SEQ ID NO: 210103 - RNA, 22 nt, Human
agcaggcaggaaggcagcacug

SEQ ID NO: 210104 - RNA, 19 nt, Human
ugagaugccuuccagcccu

SEQ ID NO: 210105 - RNA, 22 nt, Human
agugucuuacucccucaggcac

SEQ ID NO: 210106 - RNA, 22 nt, Human
cauuugaagacuuagaagagga

SEQ ID NO: 210107 - RNA, 22 nt, Human
uaugcaacagcauuauuacaau

SEQ ID NO: 210108 - RNA, 22 nt, Human
gauccuguuagaucccauuaga

SEQ ID NO: 210109 - RNA, 22 nt, Human
uauuaauaagugacuacuagcu

SEQ ID NO: 210110 - RNA, 22 nt, Human
ugaugauaugaaagaaucuuua

SEQ ID NO: 210111 - RNA, 22 nt, Human
uccagccugguugcgggcaucc

SEQ ID NO: 210112 - RNA, 22 nt, Human
cacacaugucucuccaugcucu

SEQ ID NO: 210113 - RNA, 22 nt, Human
uucccagaaugaauggauggag

SEQ ID NO: 210114 - RNA, 22 nt, Human
acaggacagucuaguaacagua

SEQ ID NO: 210115 - RNA, 22 nt, Human
acccaggggcgaagcuggccac

SEQ ID NO: 210116 - RNA, 22 nt, Human
ccugggucuggucacuaaguca

SEQ ID NO: 210117 - RNA, 22 nt, Human
guugcagauguggaacucgugc

SEQ ID NO: 210118 - RNA, 22 nt, Human
gcagggaccagggccagaucca

SEQ ID NO: 210119 - RNA, 22 nt, Human
ucuuuguuugccuuuaucaaga

SEQ ID NO: 210120 - RNA, 22 nt, Human
ccuuggcugaggagggagcuga

SEQ ID NO: 210121 - RNA, 22 nt, Human
gccaggcuggucuugaacuccu

SEQ ID NO: 210122 - RNA, 22 nt, Human
ccauccaggcugugggugagcu

SEQ ID NO: 210123 - RNA, 22 nt, Human
cggagcugcgccgggacacggg

SEQ ID NO: 210124 - RNA, 22 nt, Human
ggagcucagaagugagugaguu

SEQ ID NO: 210125 - RNA, 21 nt, Human
auggcuucucaggugcacuga

SEQ ID NO: 210126 - RNA, 22 nt, Human
ucauuucucccggccaaaaacu

SEQ ID NO: 210127 - RNA, 22 nt, Human
agaagcaaggucugucaguaua

SEQ ID NO: 210128 - RNA, 20 nt, Human
uacaaguacauuauaguuau

SEQ ID NO: 210129 - RNA, 22 nt, Human
uacagggacucccgcagagaua

SEQ ID NO: 210130 - RNA, 22 nt, Human
cagcccuguccaaugucugcuc

SEQ ID NO: 210131 - RNA, 22 nt, Human
uuacagugacucacauuaacaa

SEQ ID NO: 210132 - RNA, 22 nt, Human
caagauuuauauuuucacacaa

SEQ ID NO: 210133 - RNA, 22 nt, Human
gugcccugguccccagcauaua

SEQ ID NO: 210134 - RNA, 22 nt, Human
cuucugggagagcuuuugcuuc

SEQ ID NO: 210135 - RNA, 22 nt, Human
uucauucugcaguucucagcuc

SEQ ID NO: 210136 - RNA, 22 nt, Human
uauauuauaagcccuuucagaa

SEQ ID NO: 210137 - RNA, 22 nt, Human
caacagugauucugcaugagga

SEQ ID NO: 210138 - RNA, 22 nt, Human
gagcugagcuuaacuccuugaa

SEQ ID NO: 210139 - RNA, 22 nt, Human
acucagagauauggugguugau

SEQ ID NO: 210140 - RNA, 22 nt, Human
aucugagucucugacagcaugu

SEQ ID NO: 210141 - RNA, 22 nt, Human
uuguguccaaggcuauggugau

SEQ ID NO: 210142 - RNA, 22 nt, Human
uuccaggaagcucucggccucu

SEQ ID NO: 210143 - RNA, 22 nt, Human
guggcaguucugugucucuugu

SEQ ID NO: 210144 - RNA, 22 nt, Human
aacuucauuccuuuuuaugacu

SEQ ID NO: 210145 - RNA, 21 nt, Human
uucuccaggcaaccauuucag

SEQ ID NO: 210146 - RNA, 22 nt, Human
gcuguucaaaagccacaguuac

SEQ ID NO: 210147 - RNA, 22 nt, Human
ucuaugaaguucagagaucuau

SEQ ID NO: 210148 - RNA, 22 nt, Human
ucaggaagugcugaggcugcuu

SEQ ID NO: 210149 - RNA, 22 nt, Human
uuagcaauugauucucauaagc

SEQ ID NO: 210150 - RNA, 22 nt, Human
uccaggagauucauuaggucau

SEQ ID NO: 210151 - RNA, 22 nt, Human
gcuggcugguccagcaggggcu

SEQ ID NO: 210152 - RNA, 22 nt, Human
caaagcagaccuuuacccuuua

SEQ ID NO: 210153 - RNA, 22 nt, Human
gaguacuuaacuccaaauagga

SEQ ID NO: 210154 - RNA, 22 nt, Human
uguucuuuagcagaccauguug

SEQ ID NO: 210155 - RNA, 22 nt, Human
ggcugucuugggagcucccccg

SEQ ID NO: 210156 - RNA, 22 nt, Human
ugagcaccuacuguauuccagg

SEQ ID NO: 210157 - RNA, 22 nt, Human
cccaggcaguagaaagaagagg

SEQ ID NO: 210158 - RNA, 22 nt, Human
gcccugagcuagugugggcagg

SEQ ID NO: 210159 - RNA, 22 nt, Human
uggguccauggaacagaggugc

SEQ ID NO: 210160 - RNA, 22 nt, Human
uguaaacauauguauguaugua

SEQ ID NO: 210161 - RNA, 22 nt, Human
ucuuucccuguguuagccugua

SEQ ID NO: 210162 - RNA, 22 nt, Human
uccagccugaacuuuguccaga

SEQ ID NO: 210163 - RNA, 22 nt, Human
gguccucuccagcgccacagug

SEQ ID NO: 210164 - RNA, 22 nt, Human
uuacaaagauuauauucaguua

SEQ ID NO: 210165 - RNA, 22 nt, Human
guaaaacauguuuuaacuagga

SEQ ID NO: 210166 - RNA, 22 nt, Human
auacauguugagaaaauaucug

SEQ ID NO: 210167 - RNA, 22 nt, Human
ucucccucuuugucugcuuugg

SEQ ID NO: 210168 - RNA, 22 nt, Human
uggcaauguuagcaaagcauuu

SEQ ID NO: 210169 - RNA, 22 nt, Human
cagccaggauggagaacuguug

SEQ ID NO: 210170 - RNA, 22 nt, Human
aaaagguuuugaguacaaauau

SEQ ID NO: 210171 - RNA, 22 nt, Human
ugcuccuggcaucucugcgucc

SEQ ID NO: 210172 - RNA, 22 nt, Human
acuucccaacgugggccuccca

SEQ ID NO: 210173 - RNA, 22 nt, Human
cccaguggcccagcauguggug

SEQ ID NO: 210174 - RNA, 22 nt, Human
guuuuccacuggauuguuugga

SEQ ID NO: 210175 - RNA, 22 nt, Human
acccuggggucacccuucucug

SEQ ID NO: 210176 - RNA, 22 nt, Human
gcacagaagagcuuuggaauga

SEQ ID NO: 210177 - RNA, 22 nt, Human
aaggccaggccuagcacggagg

SEQ ID NO: 210178 - RNA, 22 nt, Human
cuggcuccaggucaugcacuca

SEQ ID NO: 210179 - RNA, 22 nt, Human
ucuucaaacugaaaauuuagaa

SEQ ID NO: 210180 - RNA, 22 nt, Human
agucaacauuugagaugcaaug

SEQ ID NO: 210181 - RNA, 22 nt, Human
uaguuuuuacugcgaguuauaa

SEQ ID NO: 210182 - RNA, 22 nt, Human
acuugcauuauauuuaucacaa

SEQ ID NO: 210183 - RNA, 22 nt, Human
cuuguauacaguguacacauug

SEQ ID NO: 210184 - RNA, 23 nt, Human
aaguucuuagguugauacuaaug

SEQ ID NO: 210185 - RNA, 22 nt, Human
ccagagagaaaauggagggcca

SEQ ID NO: 210186 - RNA, 22 nt, Human
guauacacugguaagauuuguc

SEQ ID NO: 210187 - RNA, 23 nt, Human
gccuggccaccccagggcugcuu

SEQ ID NO: 210188 - RNA, 22 nt, Human
aaugucagccugaaagcuauuc

SEQ ID NO: 210189 - RNA, 22 nt, Human
guccuggugcuggucauugucg

SEQ ID NO: 210190 - RNA, 18 nt, Human
ugacucacccugucagug

SEQ ID NO: 210191 - RNA, 22 nt, Human
cuaguugaagaggcugucauca

SEQ ID NO: 210192 - RNA, 22 nt, Human
ugguucaguugcacaggcuguu

SEQ ID NO: 210193 - RNA, 22 nt, Human
cuuuacaaagcaauuuugucuc

SEQ ID NO: 210194 - RNA, 22 nt, Human
gcagguguggguggcugccagg

SEQ ID NO: 210195 - RNA, 22 nt, Human
gccucccuggcccacagcagcg

SEQ ID NO: 210196 - RNA, 22 nt, Human
aauagcuuggacccauugcuuu

SEQ ID NO: 210197 - RNA, 22 nt, Human
agcagagcggggccuccggaag

SEQ ID NO: 210198 - RNA, 22 nt, Human
ugaguaaaagugaaucuuaugu

SEQ ID NO: 210199 - RNA, 22 nt, Human
auuuccauguccaaaaauuagu

SEQ ID NO: 210200 - RNA, 22 nt, Human
uggcagaguucgcugugccuuu

SEQ ID NO: 210201 - RNA, 22 nt, Human
gcugcagguuugucuagucugg

SEQ ID NO: 210202 - RNA, 22 nt, Human
agagugcucagaugcaugucuu

SEQ ID NO: 210203 - RNA, 22 nt, Human
cccaggcuccugcuguguugac

SEQ ID NO: 210204 - RNA, 22 nt, Human
uagaacuuauuagaaaggcuca

SEQ ID NO: 210205 - RNA, 22 nt, Human
cagcaugaugcucacacaaaac

SEQ ID NO: 210206 - RNA, 23 nt, Human
gcugugcacgagccacugccugu

SEQ ID NO: 210207 - RNA, 22 nt, Human
uguguacacagauaguaauggc

SEQ ID NO: 210208 - RNA, 21 nt, Human
aucugaaagguuaguguugag

SEQ ID NO: 210209 - RNA, 22 nt, Human
ugugucagcauccuuugggaca

SEQ ID NO: 210210 - RNA, 22 nt, Human
ggaaaagaaagggacugauugg

SEQ ID NO: 210211 - RNA, 22 nt, Human
uuagccauggacugaauugacu

SEQ ID NO: 210212 - RNA, 22 nt, Human
uaccagcucacacaaucuuugu

SEQ ID NO: 210213 - RNA, 22 nt, Human
gcucagagaauuuacugcugcc

SEQ ID NO: 210214 - RNA, 22 nt, Human
aaagaacuuaagaaauuaggcu

SEQ ID NO: 210215 - RNA, 22 nt, Human
cuagcuguguaaaccgagcugc

SEQ ID NO: 210216 - RNA, 22 nt, Human
uggcucagaaggcugccuucac

SEQ ID NO: 210217 - RNA, 22 nt, Human
ugguccugcaguaauagacauc

SEQ ID NO: 210218 - RNA, 22 nt, Human
acuacacugcccuggggaucaa

SEQ ID NO: 210219 - RNA, 20 nt, Human
gcucuuuguaagggaauuug

SEQ ID NO: 210220 - RNA, 22 nt, Human
cuuugcaaacugucacacuuuc

SEQ ID NO: 210221 - RNA, 22 nt, Human
acauaucuuucccucuccugaa

SEQ ID NO: 210222 - RNA, 22 nt, Human
aaagagucuggcacuguaccag

SEQ ID NO: 210223 - RNA, 21 nt, Human
cucuccagugguuccugauuc

SEQ ID NO: 210224 - RNA, 22 nt, Human
ugcuuugcaggaacccuaagca

SEQ ID NO: 210225 - RNA, 22 nt, Human
uccugggaggcugugccuggcu

SEQ ID NO: 210226 - RNA, 22 nt, Human
uacaauguugguaaaguaucau

SEQ ID NO: 210227 - RNA, 22 nt, Human
ggagagaaauugagguagcaag

SEQ ID NO: 210228 - RNA, 22 nt, Human
acaaaagcuuuuggaggguugu

SEQ ID NO: 210229 - RNA, 22 nt, Human
agagucugauauuuguaccaga

SEQ ID NO: 210230 - RNA, 22 nt, Human
caaauacugaguuuauuuucaa

SEQ ID NO: 210231 - RNA, 22 nt, Human
agggugugcuguugggucuuuc

SEQ ID NO: 210232 - RNA, 22 nt, Human
aucuuugguacuauucuuauca

SEQ ID NO: 210233 - RNA, 22 nt, Human
uaggaaauggcucaguuacugc

SEQ ID NO: 210234 - RNA, 22 nt, Human
uaggaaaugcugucuuauugua

SEQ ID NO: 210235 - RNA, 22 nt, Human
uggccuagagaagccaaaagau

SEQ ID NO: 210236 - RNA, 22 nt, Human
uggguaaacugggucuggagag

SEQ ID NO: 210237 - RNA, 22 nt, Human
aagacuugaccagguugaaggc

SEQ ID NO: 210238 - RNA, 22 nt, Human
acagaacaggcugagaaaaaca

SEQ ID NO: 210239 - RNA, 22 nt, Human
cuucuguguuaaaugagucuuu

SEQ ID NO: 210240 - RNA, 22 nt, Human
agcagcuggaacuaauaguggu

SEQ ID NO: 210241 - RNA, 22 nt, Human
gggccagugaacaaugagggaa

SEQ ID NO: 210242 - RNA, 22 nt, Human
gcuggaggcaguucagacacca

SEQ ID NO: 210243 - RNA, 22 nt, Human
augaaagcaagaagugaguuga

SEQ ID NO: 210244 - RNA, 22 nt, Human
cugugacuguguuggaugcaca

SEQ ID NO: 210245 - RNA, 22 nt, Human
auuuguucacaaucagggcagg

SEQ ID NO: 210246 - RNA, 22 nt, Human
ggacacagauaaucacacagau

SEQ ID NO: 210247 - RNA, 22 nt, Human
auuucacagcugcuguucaggu

SEQ ID NO: 210248 - RNA, 22 nt, Human
acagaauauuuuauuuagauca

SEQ ID NO: 210249 - RNA, 22 nt, Human
caggcaacguccuuagagaugc

SEQ ID NO: 210250 - RNA, 22 nt, Human
uccugcagagccgcccucaggu

SEQ ID NO: 210251 - RNA, 22 nt, Human
gggccagcucugugauguaggg

SEQ ID NO: 210252 - RNA, 22 nt, Human
gaggaggaggaaguggaaccca

SEQ ID NO: 210253 - RNA, 22 nt, Human
ucuauaaagggccagauaguag

SEQ ID NO: 210254 - RNA, 22 nt, Human
ugcuauuuuagacauacuuugu

SEQ ID NO: 210255 - RNA, 22 nt, Human
ucucccaggugggugccuggag

SEQ ID NO: 210256 - RNA, 22 nt, Human
cuggccuuucgugagagcuggg

SEQ ID NO: 210257 - RNA, 22 nt, Human
ucagaaguccaauuuucgcacc

SEQ ID NO: 210258 - RNA, 22 nt, Human
caucucaguguacagggagucu

SEQ ID NO: 210259 - RNA, 22 nt, Human
aguaaaauuaauggaucagaag

SEQ ID NO: 210260 - RNA, 22 nt, Human
guguucuuuugcuucacagaaa

SEQ ID NO: 210261 - RNA, 22 nt, Human
uuggaauugugaacuaagugau

SEQ ID NO: 210262 - RNA, 22 nt, Human
uuagaaacccagacucuuaggu

SEQ ID NO: 210263 - RNA, 22 nt, Human
cacagacccagaagggaugaag

SEQ ID NO: 210264 - RNA, 22 nt, Human
agcuuugaaguauuuggucucc

SEQ ID NO: 210265 - RNA, 22 nt, Human
auacuucucaugggcucugagc

SEQ ID NO: 210266 - RNA, 22 nt, Human
auucaacuuacaaaggagaaga

SEQ ID NO: 210267 - RNA, 22 nt, Human
ccugaggucaugguccaguguu

SEQ ID NO: 210268 - RNA, 22 nt, Human
uaacugugaaguaauuguggau

SEQ ID NO: 210269 - RNA, 22 nt, Human
uagaacuuagcacuagacuugu

SEQ ID NO: 210270 - RNA, 22 nt, Human
aggcaggcucuggguaugugca

SEQ ID NO: 210271 - RNA, 22 nt, Human
aucuacauaaaacgaauacaua

SEQ ID NO: 210272 - RNA, 22 nt, Human
gagguaucuuagagaguguaga

SEQ ID NO: 210273 - RNA, 22 nt, Human
agcggcugcuccgcaggcuggc

SEQ ID NO: 210274 - RNA, 22 nt, Human
caaaggcuucaucucagagcag

SEQ ID NO: 210275 - RNA, 20 nt, Human
uccagaggccacauccagug

SEQ ID NO: 210276 - RNA, 22 nt, Human
uauaaauuaaugugcccaugag

SEQ ID NO: 210277 - RNA, 22 nt, Human
cagggccugagggcugcucugc

SEQ ID NO: 210278 - RNA, 22 nt, Human
gcugggcuucacagagccuuua

SEQ ID NO: 210279 - RNA, 22 nt, Human
aguguagaugaaauuaaaccca

SEQ ID NO: 210280 - RNA, 22 nt, Human
agcccagcggagcgggcccggg

SEQ ID NO: 210281 - RNA, 22 nt, Human
aggagccaggaaaccugcucug

SEQ ID NO: 210282 - RNA, 22 nt, Human
cuugccugccacuacagcugaa

SEQ ID NO: 210283 - RNA, 22 nt, Human
ggucagaagugcaaaaucaguu

SEQ ID NO: 210284 - RNA, 22 nt, Human
acugggcuccaaggaccuggag

SEQ ID NO: 210285 - RNA, 22 nt, Human
accaggaagcaucccuuuguaa

SEQ ID NO: 210286 - RNA, 22 nt, Human
cauuuauugaguggccacagug

SEQ ID NO: 210287 - RNA, 22 nt, Human
augaacuaucaucaguuccacc

SEQ ID NO: 210288 - RNA, 22 nt, Human
augggcaguguauuggaaggaa

SEQ ID NO: 210289 - RNA, 20 nt, Human
uccagguaacaucucucugg

SEQ ID NO: 210290 - RNA, 22 nt, Human
agacacagcagugccugccuca

SEQ ID NO: 210291 - RNA, 22 nt, Human
uaggcuugcuucuccuccacag

SEQ ID NO: 210292 - RNA, 22 nt, Human
ucuggcuggcagugauggugug

SEQ ID NO: 210293 - RNA, 20 nt, Human
cugagcccccagccugcagg

SEQ ID NO: 210294 - RNA, 22 nt, Human
cugggcaguucgcuuucguuuu

SEQ ID NO: 210295 - RNA, 22 nt, Human
uguggcuggucuccgagcgucg

SEQ ID NO: 210296 - RNA, 22 nt, Human
aggcugugaguuuugucucaga

SEQ ID NO: 210297 - RNA, 20 nt, Human
gugcauuucaccuguacugu

SEQ ID NO: 210298 - RNA, 22 nt, Human
acccagggagugcuccuguucu

SEQ ID NO: 210299 - RNA, 22 nt, Human
uuucacauucagauauagacuu

SEQ ID NO: 210300 - RNA, 22 nt, Human
ucucugucccuaggagccuugc

SEQ ID NO: 210301 - RNA, 22 nt, Human
uucacacagaaucugaggagcu

SEQ ID NO: 210302 - RNA, 22 nt, Human
ucucucugccaacucacagcca

SEQ ID NO: 210303 - RNA, 22 nt, Human
augcaucuaugacuuagacauu

SEQ ID NO: 210304 - RNA, 22 nt, Human
agcugugccuugcugcacggug

SEQ ID NO: 210305 - RNA, 22 nt, Human
auccauugucuuguuggcuucu

SEQ ID NO: 210306 - RNA, 22 nt, Human
ugugaaaucaauuagcugcaga

SEQ ID NO: 210307 - RNA, 22 nt, Human
aaggguuggggaagagcaaauu

SEQ ID NO: 210308 - RNA, 22 nt, Human
cagcauuuucuuaauguaggug

SEQ ID NO: 210309 - RNA, 22 nt, Human
cugagccagagggagucggguc

SEQ ID NO: 210310 - RNA, 21 nt, Human
uguaaguuucaucugaauugg

SEQ ID NO: 210311 - RNA, 22 nt, Human
cggcagagugugugcgugcaug

SEQ ID NO: 210312 - RNA, 22 nt, Human
acuuuuaaggggccuugauuua

SEQ ID NO: 210313 - RNA, 22 nt, Human
acaggcagcccucucccugguu

SEQ ID NO: 210314 - RNA, 22 nt, Human
acccuggguauuucccaaacuu

SEQ ID NO: 210315 - RNA, 22 nt, Human
cacaauuccauggcauucuuug

SEQ ID NO: 210316 - RNA, 22 nt, Human
auuaacaugcagccagacacac

SEQ ID NO: 210317 - RNA, 22 nt, Human
augcuuuggccaaugagaagug

SEQ ID NO: 210318 - RNA, 22 nt, Human
gcaggguggauggcagggccag

SEQ ID NO: 210319 - RNA, 22 nt, Human
ucugggagguggcagggugcau

SEQ ID NO: 210320 - RNA, 22 nt, Human
ucuggggagugccuaaguggaa

SEQ ID NO: 210321 - RNA, 22 nt, Human
agcuggagcuucaagcagguaa

SEQ ID NO: 210322 - RNA, 22 nt, Human
gcucagagguuguucuuggguu

SEQ ID NO: 210323 - RNA, 22 nt, Human
ugaggggccgcccaagcacuuc

SEQ ID NO: 210324 - RNA, 22 nt, Human
gaggccugucgcuaggccucug

SEQ ID NO: 210325 - RNA, 22 nt, Human
gcugucuugcucacucuugcag

SEQ ID NO: 210326 - RNA, 18 nt, Human
cucaccauucugcccaau

SEQ ID NO: 210327 - RNA, 22 nt, Human
ccacugccagccgcccggaggc

SEQ ID NO: 210328 - RNA, 22 nt, Human
guuuccaaccccaccaaagugc

SEQ ID NO: 210329 - RNA, 22 nt, Human
aggagaggaaucauuauuacaa

SEQ ID NO: 210330 - RNA, 22 nt, Human
uaucuguugucuuuuacaugua

SEQ ID NO: 210331 - RNA, 19 nt, Human
ggcagcucuugucuucugc

SEQ ID NO: 210332 - RNA, 22 nt, Human
aaagggagcauggcugcaggga

SEQ ID NO: 210333 - RNA, 22 nt, Human
ccagcugggauuaagggaaaau

SEQ ID NO: 210334 - RNA, 22 nt, Human
gggagcucucccugaggccugg

SEQ ID NO: 210335 - RNA, 22 nt, Human
cuggauucaugccaggccaccc

SEQ ID NO: 210336 - RNA, 22 nt, Human
ccucacccacuacacucaaggg

SEQ ID NO: 210337 - RNA, 22 nt, Human
caacaguauugugggccaggua

SEQ ID NO: 210338 - RNA, 22 nt, Human
uaucacugaccuguaucaguug

SEQ ID NO: 210339 - RNA, 22 nt, Human
aaugauaugcaaauuaucauca

SEQ ID NO: 210340 - RNA, 22 nt, Human
gugaaauuguauuuggcauuga

SEQ ID NO: 210341 - RNA, 21 nt, Human
agaugcagugacccacugggg

SEQ ID NO: 210342 - RNA, 22 nt, Human
agcuggagaauaggaauuagug

SEQ ID NO: 210343 - RNA, 22 nt, Human
uuugcaaauaaauaagugcucg

SEQ ID NO: 210344 - RNA, 22 nt, Human
guagcacaugauuuugauaugu

SEQ ID NO: 210345 - RNA, 22 nt, Human
uaguuuugaggauuauauguga

SEQ ID NO: 210346 - RNA, 20 nt, Human
ucccuggggcccuacuuccu

SEQ ID NO: 210347 - RNA, 22 nt, Human
ucuacaagucaagucuaucaag

SEQ ID NO: 210348 - RNA, 22 nt, Human
aagggauguaaacaugaauaag

SEQ ID NO: 210349 - RNA, 22 nt, Human
cugagcagcaacccagagccuc

SEQ ID NO: 210350 - RNA, 22 nt, Human
aagaaaugugaauauugaauag

SEQ ID NO: 210351 - RNA, 18 nt, Human
ucuucaucuccugagcug

SEQ ID NO: 210352 - RNA, 22 nt, Human
aaucagacaguucuggauucaa

SEQ ID NO: 210353 - RNA, 22 nt, Human
cagcccuggcuagggcgagggc

SEQ ID NO: 210354 - RNA, 23 nt, Human
gaagucagcccuacagagagcag

SEQ ID NO: 210355 - RNA, 22 nt, Human
uagucuaagaaaucuuuacuuu

SEQ ID NO: 210356 - RNA, 22 nt, Human
aaacagugacugguacauaaua

SEQ ID NO: 210357 - RNA, 22 nt, Human
aguucccaaauuacaggccaca

SEQ ID NO: 210358 - RNA, 22 nt, Human
cgggaggaaaggcgaggcucug

SEQ ID NO: 210359 - RNA, 19 nt, Human
aggcuaguguuacaccugc

SEQ ID NO: 210360 - RNA, 22 nt, Human
aaauagaaaccaacaaggucag

SEQ ID NO: 210361 - RNA, 22 nt, Human
gcagccagcccuagucccacuu

SEQ ID NO: 210362 - RNA, 20 nt, Human
uucaggaauaagauagcagc

SEQ ID NO: 210363 - RNA, 22 nt, Human
acugggccgcgcugcagagggc

SEQ ID NO: 210364 - RNA, 22 nt, Human
aaccaccaccaucuaguuccaa

SEQ ID NO: 210365 - RNA, 22 nt, Human
ucagcagggcauacugagccua

SEQ ID NO: 210366 - RNA, 19 nt, Human
aggcugccucacccucccu

SEQ ID NO: 210367 - RNA, 22 nt, Human
ucagaguccaugguacuuaauu

SEQ ID NO: 210368 - RNA, 22 nt, Human
cucucugggaauauuuuauucu

SEQ ID NO: 210369 - RNA, 22 nt, Human
ugauagagcacuaaguagugua

SEQ ID NO: 210370 - RNA, 22 nt, Human
ugguccugagaauccuguccuc

SEQ ID NO: 210371 - RNA, 22 nt, Human
uagaguguuuuguuaggcagca

SEQ ID NO: 210372 - RNA, 22 nt, Human
cuuagagcuuaggcuagccauu

SEQ ID NO: 210373 - RNA, 23 nt, Human
cccagcagagaugaggagggguc

SEQ ID NO: 210374 - RNA, 22 nt, Human
aggagcugucagagugccagag

SEQ ID NO: 210375 - RNA, 22 nt, Human
ucucugaacuuccuggaaaggc

SEQ ID NO: 210376 - RNA, 23 nt, Human
uggaaacuuaagggggagauguc

SEQ ID NO: 210377 - RNA, 22 nt, Human
cucuccaggacuuuggcccaau

SEQ ID NO: 210378 - RNA, 21 nt, Human
agaagccaugugguggagaac

SEQ ID NO: 210379 - RNA, 22 nt, Human
ggcugccuagacuuggaauuuc

SEQ ID NO: 210380 - RNA, 22 nt, Human
aucuuucaaucaggaaaaaucu

SEQ ID NO: 210381 - RNA, 22 nt, Human
aauagacaagcacccugguaaa

SEQ ID NO: 210382 - RNA, 22 nt, Human
aggccagaaaugucagggagug

SEQ ID NO: 210383 - RNA, 21 nt, Human
agcuggcagugccuggaccuc

SEQ ID NO: 210384 - RNA, 22 nt, Human
agcugccuguccuaggccauca

SEQ ID NO: 210385 - RNA, 22 nt, Human
acaggugucugcaaguuacugg

SEQ ID NO: 210386 - RNA, 22 nt, Human
ugguccugagcaccagccugac

SEQ ID NO: 210387 - RNA, 22 nt, Human
uuuguguuuaugaaguuauucu

SEQ ID NO: 210388 - RNA, 22 nt, Human
cucuauuuauggcaucuuuaug

SEQ ID NO: 210389 - RNA, 22 nt, Human
gcaguguuuguguucucacaug

SEQ ID NO: 210390 - RNA, 22 nt, Human
ugccacuggggcuaggacuguu

SEQ ID NO: 210391 - RNA, 22 nt, Human
ugauuuaugcauuauacuguug

SEQ ID NO: 210392 - RNA, 22 nt, Human
uccuggcaguaauuugauguug

SEQ ID NO: 210393 - RNA, 22 nt, Human
aggcaggaacccugugugcgcc

SEQ ID NO: 210394 - RNA, 22 nt, Human
gcagagcugagcggcugcccgg

SEQ ID NO: 210395 - RNA, 22 nt, Human
ucuuugaauccuuuacaucuga

SEQ ID NO: 210396 - RNA, 22 nt, Human
ucagggcauccauugccuguug

SEQ ID NO: 210397 - RNA, 21 nt, Human
ccucuggcuugugcugugccc

SEQ ID NO: 210398 - RNA, 22 nt, Human
ccuuuguucauugccuucaguc

SEQ ID NO: 210399 - RNA, 22 nt, Human
acuuggcuucaagguuaagguc

SEQ ID NO: 210400 - RNA, 22 nt, Human
uaagucguggaugauucuucgg

SEQ ID NO: 210401 - RNA, 22 nt, Human
ggcagcucacugauuagcaauu

SEQ ID NO: 210402 - RNA, 22 nt, Human
gaaguuuagaguguuguaauuu

SEQ ID NO: 210403 - RNA, 22 nt, Human
gcuggcagguccaagauagagc

SEQ ID NO: 210404 - RNA, 22 nt, Human
cugagggccugaggaccuagau

SEQ ID NO: 210405 - RNA, 18 nt, Human
ggcugcucgcucuccccg

SEQ ID NO: 210406 - RNA, 22 nt, Human
auauuucagguuuugcaggccg

SEQ ID NO: 210407 - RNA, 22 nt, Human
uuucacauacaguguauaguag

SEQ ID NO: 210408 - RNA, 22 nt, Human
uacugugggauguugugauuag

SEQ ID NO: 210409 - RNA, 22 nt, Human
acaucucuucuuaaggcuccag

SEQ ID NO: 210410 - RNA, 22 nt, Human
ugucccuggacuccaggagcca

SEQ ID NO: 210411 - RNA, 22 nt, Human
agcagagcugcaguggccugcu

SEQ ID NO: 210412 - RNA, 22 nt, Human
cacaaggagguccugaggaagc

SEQ ID NO: 210413 - RNA, 22 nt, Human
gcucagagcacucagacucagc

SEQ ID NO: 210414 - RNA, 22 nt, Human
cuugaaaauaagaaagacuuuc

SEQ ID NO: 210415 - RNA, 22 nt, Human
caucugcucugucugccauguu

SEQ ID NO: 210416 - RNA, 22 nt, Human
ugagacagggucuugcucuguu

SEQ ID NO: 210417 - RNA, 22 nt, Human
gucuggccugccagcucuggug

SEQ ID NO: 210418 - RNA, 22 nt, Human
cucccuccaaauaagacucggg

SEQ ID NO: 210419 - RNA, 22 nt, Human
ugaaacaggaugcagaggagga

SEQ ID NO: 210420 - RNA, 22 nt, Human
auugaaucugcacuaguauuuu

SEQ ID NO: 210421 - RNA, 22 nt, Human
uagaacaugcucauguauaaau

SEQ ID NO: 210422 - RNA, 22 nt, Human
ggcugccugaggcugaggcccg

SEQ ID NO: 210423 - RNA, 20 nt, Human
agcaguccaaaagggcagac

SEQ ID NO: 210424 - RNA, 22 nt, Human
aacuugguaccaccuucugaag

SEQ ID NO: 210425 - RNA, 22 nt, Human
gccacuggcgcugugcagagug

SEQ ID NO: 210426 - RNA, 22 nt, Human
ucaaacaggacuacauucucau

SEQ ID NO: 210427 - RNA, 22 nt, Human
ucagugcagacuguaaguugga

SEQ ID NO: 210428 - RNA, 18 nt, Human
cccucuccugcuaguggg

SEQ ID NO: 210429 - RNA, 20 nt, Human
aggaggcaauguagauaagc

SEQ ID NO: 210430 - RNA, 22 nt, Human
ucuaaacaguuucacucuuaau

SEQ ID NO: 210431 - RNA, 22 nt, Human
aggcugaggagggauguugcuu

SEQ ID NO: 210432 - RNA, 22 nt, Human
cugggugucaggagacaugaug

SEQ ID NO: 210433 - RNA, 22 nt, Human
ucugaaagggcuaaauaauuug

SEQ ID NO: 210434 - RNA, 22 nt, Human
accucaagugauccacucaccu

SEQ ID NO: 210435 - RNA, 22 nt, Human
agccuggaguucccaggagaag

SEQ ID NO: 210436 - RNA, 22 nt, Human
acugggcuggggcucauucucc

SEQ ID NO: 210437 - RNA, 17 nt, Human
uuucuccuuccaucuca

SEQ ID NO: 210438 - RNA, 22 nt, Human
agcaguaagugaagacuaguuu

SEQ ID NO: 210439 - RNA, 21 nt, Human
ugaaugaucugguugccuuuu

SEQ ID NO: 210440 - RNA, 22 nt, Human
ugaggauggucccgaggacacu

SEQ ID NO: 210441 - RNA, 22 nt, Human
ugaaguuucacgcgucauucaa

SEQ ID NO: 210442 - RNA, 22 nt, Human
auucucuguacagaagguaccg

SEQ ID NO: 210443 - RNA, 22 nt, Human
auggaacagacagcugagacaa

SEQ ID NO: 210444 - RNA, 21 nt, Human
ggagaaggacaauguugagua

SEQ ID NO: 210445 - RNA, 22 nt, Human
ugcaacaaggccucauuucuug

SEQ ID NO: 210446 - RNA, 22 nt, Human
uuauguuugaguauaugacuca

SEQ ID NO: 210447 - RNA, 22 nt, Human
ucagccaguuuguuuauuccgg

SEQ ID NO: 210448 - RNA, 22 nt, Human
uucccagugauuaaggcagugg

SEQ ID NO: 210449 - RNA, 22 nt, Human
aauguggauccuuacagauacc

SEQ ID NO: 210450 - RNA, 22 nt, Human
acagcagaguggagaugagcac

SEQ ID NO: 210451 - RNA, 21 nt, Human
ucagcagcaucugccuagagu

SEQ ID NO: 210452 - RNA, 22 nt, Human
acccagagcugggcuuggcaaa

SEQ ID NO: 210453 - RNA, 22 nt, Human
uacaguaaccagucuacuuaga

SEQ ID NO: 210454 - RNA, 22 nt, Human
caggugguuguuuggauucuaa

SEQ ID NO: 210455 - RNA, 22 nt, Human
ucaaccagaguuuuucuuaaua

SEQ ID NO: 210456 - RNA, 23 nt, Human
aggcugccagaaauuggguaagg

SEQ ID NO: 210457 - RNA, 22 nt, Human
caggccaggcugcauuugcccc

SEQ ID NO: 210458 - RNA, 22 nt, Human
uacagauaacugaaugcagacu

SEQ ID NO: 210459 - RNA, 22 nt, Human
cccaggcucagacuggcuuguu

SEQ ID NO: 210460 - RNA, 22 nt, Human
uucuuagaagaaacaucuaaaa

SEQ ID NO: 210461 - RNA, 22 nt, Human
aaugagucaugaagauuagcaa

SEQ ID NO: 210462 - RNA, 22 nt, Human
cagaagcagaacacuagauuua

SEQ ID NO: 210463 - RNA, 22 nt, Human
uugauuuuaaaauagugacacu

SEQ ID NO: 210464 - RNA, 22 nt, Human
acaggcuguacuucuaaucauc

SEQ ID NO: 210465 - RNA, 22 nt, Human
uaacugugugaacgugaucauu

SEQ ID NO: 210466 - RNA, 22 nt, Human
uucuggcuacccuccuaauguu

SEQ ID NO: 210467 - RNA, 22 nt, Human
cuaauagagcuucggaacucug

SEQ ID NO: 210468 - RNA, 22 nt, Human
acugccuuauaauaugucaaca

SEQ ID NO: 210469 - RNA, 22 nt, Human
ccaugagcuuccuauauagggu

SEQ ID NO: 210470 - RNA, 22 nt, Human
cccaggaggaggaaaaagcucg

SEQ ID NO: 210471 - RNA, 22 nt, Human
uuccauaugaaaaagcuguugc

SEQ ID NO: 210472 - RNA, 22 nt, Human
gcucugggaacugacugccuuc

SEQ ID NO: 210473 - RNA, 22 nt, Human
ccugggcucacagccaaggcuc

SEQ ID NO: 210474 - RNA, 22 nt, Human
gauauauuuggaccagagcauu

SEQ ID NO: 210475 - RNA, 22 nt, Human
ugagaagcugcugacuuagccu

SEQ ID NO: 210476 - RNA, 22 nt, Human
ccuggcugagccuccaggaaga

SEQ ID NO: 210477 - RNA, 22 nt, Human
uccaggccuggcuccauucagu

SEQ ID NO: 210478 - RNA, 22 nt, Human
aaugugucccuuauuucacagg

SEQ ID NO: 210479 - RNA, 19 nt, Human
acuaaaaaugauguuugag

SEQ ID NO: 210480 - RNA, 22 nt, Human
cagugucuccagaugcuccaau

SEQ ID NO: 210481 - RNA, 22 nt, Human
gcaacacaauaucccaguacau

SEQ ID NO: 210482 - RNA, 22 nt, Human
uugucuguccaggcaccccaag

SEQ ID NO: 210483 - RNA, 19 nt, Human
uuuucucagcuucuagcgg

SEQ ID NO: 210484 - RNA, 22 nt, Human
uuuuccuacugauaaacaguua

SEQ ID NO: 210485 - RNA, 22 nt, Human
agcuucuuaaguuccugcagca

SEQ ID NO: 210486 - RNA, 22 nt, Human
agaggccggccgagcccauggg

SEQ ID NO: 210487 - RNA, 22 nt, Human
ggaggaagugcaguucuacuac

SEQ ID NO: 210488 - RNA, 22 nt, Human
gggagcugccaccaccccuggg

SEQ ID NO: 210489 - RNA, 22 nt, Human
gcagcugcuguggcaucaagcu

SEQ ID NO: 210490 - RNA, 22 nt, Human
cugagaggaugcugcaguggag

SEQ ID NO: 210491 - RNA, 22 nt, Human
agaaggcugaagaagauccguu

SEQ ID NO: 210492 - RNA, 22 nt, Human
agguuccaucaccugcagugga

SEQ ID NO: 210493 - RNA, 22 nt, Human
uagcugaugaauaauuauucuu

SEQ ID NO: 210494 - RNA, 22 nt, Human
agaaggcuggccauggugcccu

SEQ ID NO: 210495 - RNA, 22 nt, Human
uagcauuucacugaucuucacu

SEQ ID NO: 210496 - RNA, 23 nt, Human
gagugcagaauagacaugcagug

SEQ ID NO: 210497 - RNA, 22 nt, Human
gagcuggccucaggcacaggag

SEQ ID NO: 210498 - RNA, 22 nt, Human
ccucagccuuggccccaggcag

SEQ ID NO: 210499 - RNA, 22 nt, Human
uuauuucauauaauguuaucaa

SEQ ID NO: 210500 - RNA, 22 nt, Human
gugccaggcccagggagcgggg

SEQ ID NO: 210501 - RNA, 22 nt, Human
ucucugaagauauuuauuauua

SEQ ID NO: 210502 - RNA, 22 nt, Human
gcucucugaggugcuggcagag

SEQ ID NO: 210503 - RNA, 22 nt, Human
acaugacaccucuggcugggug

SEQ ID NO: 210504 - RNA, 22 nt, Human
gccuggagccucagcaaggagg

SEQ ID NO: 210505 - RNA, 22 nt, Human
uagaacuugaaugugaaaucag

SEQ ID NO: 210506 - RNA, 22 nt, Human
ucacauuuguguuuuauuagag

SEQ ID NO: 210507 - RNA, 23 nt, Human
uccugugaagccauguuuguugu

SEQ ID NO: 210508 - RNA, 22 nt, Human
uucauauaaauggaaucagaau

SEQ ID NO: 210509 - RNA, 21 nt, Human
cuuggaacggguagaacucac

SEQ ID NO: 210510 - RNA, 22 nt, Human
cagggaugagaaagcucucuaa

SEQ ID NO: 210511 - RNA, 21 nt, Human
ugguggaccagugcugggaga

SEQ ID NO: 210512 - RNA, 22 nt, Human
agugggggcuggcucugucugu

SEQ ID NO: 210513 - RNA, 22 nt, Human
uaauuucuucaucucugcagcu

SEQ ID NO: 210514 - RNA, 20 nt, Human
uauuuguauuugggaaaguu

SEQ ID NO: 210515 - RNA, 22 nt, Human
agugaggggcagcugagugggc

SEQ ID NO: 210516 - RNA, 19 nt, Human
aggcuaaagagucuugcgu

SEQ ID NO: 210517 - RNA, 22 nt, Human
auguauacgugcaggucacagg

SEQ ID NO: 210518 - RNA, 22 nt, Human
cugccuggugcggugcccaccc

SEQ ID NO: 210519 - RNA, 22 nt, Human
cccagcaugcacgcugacacuc

SEQ ID NO: 210520 - RNA, 22 nt, Human
ccugcccacugcccggucagcc

SEQ ID NO: 210521 - RNA, 21 nt, Human
uucucuggauaggccaguccu

SEQ ID NO: 210522 - RNA, 17 nt, Human
uagauuaaacacggcca

SEQ ID NO: 210523 - RNA, 22 nt, Human
gccugcagggccugggccuacc

SEQ ID NO: 210524 - RNA, 22 nt, Human
agcagaugggagauggagcugc

SEQ ID NO: 210525 - RNA, 22 nt, Human
gaaugcaugugaagcaaagaau

SEQ ID NO: 210526 - RNA, 22 nt, Human
gccuuacugagggcaauuuuga

SEQ ID NO: 210527 - RNA, 22 nt, Human
cugagccagcuggcaugugcua

SEQ ID NO: 210528 - RNA, 22 nt, Human
uccaggaggguuuucugccuuc

SEQ ID NO: 210529 - RNA, 22 nt, Human
uuccuccacgugacaggagcca

SEQ ID NO: 210530 - RNA, 22 nt, Human
uaaggccagcaugaaugcagca

SEQ ID NO: 210531 - RNA, 22 nt, Human
cucagcuaguaacguacauguc

SEQ ID NO: 210532 - RNA, 22 nt, Human
agugcuggauuacaggcgugag

SEQ ID NO: 210533 - RNA, 22 nt, Human
gagaagcaaucgugacaucucc

SEQ ID NO: 210534 - RNA, 22 nt, Human
uaaacauggauucugaucacag

SEQ ID NO: 210535 - RNA, 22 nt, Human
auacagugaauacuuacagugu

SEQ ID NO: 210536 - RNA, 22 nt, Human
aaggccagccugagagcuaaca

SEQ ID NO: 210537 - RNA, 21 nt, Human
aggugcuggcgccccaggaga

SEQ ID NO: 210538 - RNA, 22 nt, Human
uuccuccagaagcuguagggga

SEQ ID NO: 210539 - RNA, 22 nt, Human
cagauucugggcccagcuuguc

SEQ ID NO: 210540 - RNA, 21 nt, Human
aggcagaaagagcccaggcug

SEQ ID NO: 210541 - RNA, 22 nt, Human
uacagugagacuggcucaggga

SEQ ID NO: 210542 - RNA, 22 nt, Human
acccaggacucucuuccaguag

SEQ ID NO: 210543 - RNA, 22 nt, Human
gguggcagaggugcaucagccc

SEQ ID NO: 210544 - RNA, 22 nt, Human
uucaucuguagcaucuuccaau

SEQ ID NO: 210545 - RNA, 22 nt, Human
ucaggcugaccagguuuugcuc

SEQ ID NO: 210546 - RNA, 22 nt, Human
cccuucaggguuaaguagaggg

SEQ ID NO: 210547 - RNA, 22 nt, Human
ucugagagauacaaggaggcaa

SEQ ID NO: 210548 - RNA, 22 nt, Human
ucuugcaggcggcucagcaacc

SEQ ID NO: 210549 - RNA, 22 nt, Human
aggacaguguggaagagggugc

SEQ ID NO: 210550 - RNA, 22 nt, Human
gcauucuuuagacugagagaua

SEQ ID NO: 210551 - RNA, 22 nt, Human
agggagcugggccacacugauc

SEQ ID NO: 210552 - RNA, 22 nt, Human
gaggcagcugaagcuucaaaga

SEQ ID NO: 210553 - RNA, 19 nt, Human
uaacugguuaaaaagcuug

SEQ ID NO: 210554 - RNA, 22 nt, Human
ucuggcuucuccuagagcaaug

SEQ ID NO: 210555 - RNA, 22 nt, Human
uuuuauugguaaugauaaaagu

SEQ ID NO: 210556 - RNA, 22 nt, Human
uagacugugagcuccuugaggg

SEQ ID NO: 210557 - RNA, 22 nt, Human
gucuccugagccuugacugcaa

SEQ ID NO: 210558 - RNA, 22 nt, Human
caugccaagcauguucagaagu

SEQ ID NO: 210559 - RNA, 22 nt, Human
agcaggggcuccuccacagcca

SEQ ID NO: 210560 - RNA, 22 nt, Human
cagcagccacuagagggcucac

SEQ ID NO: 210561 - RNA, 22 nt, Human
uucuccaggccgcgcagggggc

SEQ ID NO: 210562 - RNA, 20 nt, Human
gcagagcuguucugugggga

SEQ ID NO: 210563 - RNA, 22 nt, Human
ucuccuccuuuuuucaacauag

SEQ ID NO: 210564 - RNA, 18 nt, Human
uucauguuggcuuaggga

SEQ ID NO: 210565 - RNA, 22 nt, Human
cauggccccaaaucccaugcau

SEQ ID NO: 210566 - RNA, 22 nt, Human
uggcagcaguggagguagaaag

SEQ ID NO: 210567 - RNA, 22 nt, Human
uuggaggacuaguuaagagacc

SEQ ID NO: 210568 - RNA, 22 nt, Human
caaagcaaggcucaguuugaac

SEQ ID NO: 210569 - RNA, 22 nt, Human
ccacaggauccaagggaaggca

SEQ ID NO: 210570 - RNA, 22 nt, Human
cugccaggccucaucccagcca

SEQ ID NO: 210571 - RNA, 22 nt, Human
gggcuuggcacaugggcucagc

SEQ ID NO: 210572 - RNA, 22 nt, Human
caggggccaggcugucugcugu

SEQ ID NO: 210573 - RNA, 22 nt, Human
ggccuccaggccuacucagggc

SEQ ID NO: 210574 - RNA, 22 nt, Human
cuuaaauuuucaucuacaagaa

SEQ ID NO: 210575 - RNA, 22 nt, Human
caaaauucugcauuucuaauaa

SEQ ID NO: 210576 - RNA, 22 nt, Human
uuuucuucggugcuggguugau

SEQ ID NO: 210577 - RNA, 22 nt, Human
ugcagucuguacauuuuaagaa

SEQ ID NO: 210578 - RNA, 22 nt, Human
uggaaucuuuaggaagcacaua

SEQ ID NO: 210579 - RNA, 22 nt, Human
ccacaggcggaguggcgggcag

SEQ ID NO: 210580 - RNA, 22 nt, Human
caggcuggaguuaccuuuaggg

SEQ ID NO: 210581 - RNA, 22 nt, Human
auguguccuuguucccauucca

SEQ ID NO: 210582 - RNA, 22 nt, Human
ggaaggcagaggugucgugggg

SEQ ID NO: 210583 - RNA, 22 nt, Human
gacccaggcucgugggacggcu

SEQ ID NO: 210584 - RNA, 22 nt, Human
uguuccucugaacuucuuccaa

SEQ ID NO: 210585 - RNA, 22 nt, Human
aguguuuauugugugccacaca

SEQ ID NO: 210586 - RNA, 21 nt, Human
aucugaaguuugagaggaaag

SEQ ID NO: 210587 - RNA, 22 nt, Human
uuuguacacugucuacuaugaa

SEQ ID NO: 210588 - RNA, 22 nt, Human
guucucaguggggagcaggguu

SEQ ID NO: 210589 - RNA, 22 nt, Human
uggguccuaaaugcagucacau

SEQ ID NO: 210590 - RNA, 22 nt, Human
aagagggaggugcgggugcaga

SEQ ID NO: 210591 - RNA, 22 nt, Human
cagggcugagucauauagccuu

SEQ ID NO: 210592 - RNA, 22 nt, Human
uuacaaugagacguucuuaucu

SEQ ID NO: 210593 - RNA, 22 nt, Human
ucuggcagaagugcugucagua

SEQ ID NO: 210594 - RNA, 22 nt, Human
ucccaagugucuuggaccaggg

SEQ ID NO: 210595 - RNA, 22 nt, Human
cuggaagacguuugaagccaug

SEQ ID NO: 210596 - RNA, 22 nt, Human
acccaggguuugagcucugcag

SEQ ID NO: 210597 - RNA, 22 nt, Human
ucagggcccagucugugcaucu

SEQ ID NO: 210598 - RNA, 22 nt, Human
cacugcccaccaaguggcuggu

SEQ ID NO: 210599 - RNA, 22 nt, Human
ccaggagagcaggcgugcagcu

SEQ ID NO: 210600 - RNA, 22 nt, Human
aacagauaaguauaucuaugua

SEQ ID NO: 210601 - RNA, 22 nt, Human
uaguauaauuguucuggaauca

SEQ ID NO: 210602 - RNA, 22 nt, Human
gucaggauuauaauccccaugg

SEQ ID NO: 210603 - RNA, 22 nt, Human
cguccucagaggccauccgaaa

SEQ ID NO: 210604 - RNA, 22 nt, Human
auuuuacauaaggaagguuuaa

SEQ ID NO: 210605 - RNA, 22 nt, Human
uaacauaacuuuuccuugaccc

SEQ ID NO: 210606 - RNA, 22 nt, Human
caggcccugcacagugguccug

SEQ ID NO: 210607 - RNA, 22 nt, Human
gcaguggcuaagcucgcaugca

SEQ ID NO: 210608 - RNA, 22 nt, Human
uggagguacauaaugagagggu

SEQ ID NO: 210609 - RNA, 22 nt, Human
aacuacagcaucuauacaaaua

SEQ ID NO: 210610 - RNA, 22 nt, Human
uuacugaaauaaugaaacacau

SEQ ID NO: 210611 - RNA, 22 nt, Human
gaccucaguauuguucaggaug

SEQ ID NO: 210612 - RNA, 22 nt, Human
uguagcuauagaggcuguaccu

SEQ ID NO: 210613 - RNA, 22 nt, Human
gcccucagcuugauguuguucu

SEQ ID NO: 210614 - RNA, 22 nt, Human
ugagucuuuuauccugggaaug

SEQ ID NO: 210615 - RNA, 22 nt, Human
auuauauaggacuugcccuucc

SEQ ID NO: 210616 - RNA, 22 nt, Human
uaucuacauucuuguaucuucu

SEQ ID NO: 210617 - RNA, 22 nt, Human
uaaaaccaggucuugggauuua

SEQ ID NO: 210618 - RNA, 22 nt, Human
aguggcuugcucugccucagcc

SEQ ID NO: 210619 - RNA, 22 nt, Human
uguccugggaaaucccuuaggc

SEQ ID NO: 210620 - RNA, 20 nt, Human
cagcuuuagaucuuugauua

SEQ ID NO: 210621 - RNA, 20 nt, Human
cagugaggaggugcuggggg

SEQ ID NO: 210622 - RNA, 22 nt, Human
ugacuuuagaauuuuauccaga

SEQ ID NO: 210623 - RNA, 22 nt, Human
ugguaugaccguggugcaagca

SEQ ID NO: 210624 - RNA, 22 nt, Human
ucucugcaacuacaucuuaggg

SEQ ID NO: 210625 - RNA, 22 nt, Human
ugaaagaagugucacauugcca

SEQ ID NO: 210626 - RNA, 18 nt, Human
uacaggaaaaguguuaca

SEQ ID NO: 210627 - RNA, 22 nt, Human
acacaugauaagaaaguuuaaa

SEQ ID NO: 210628 - RNA, 22 nt, Human
uuaguuagucccugguaccuuu

SEQ ID NO: 210629 - RNA, 22 nt, Human
ugagggaauauugauagauccg

SEQ ID NO: 210630 - RNA, 22 nt, Human
guuugucccacuucuggcagaa

SEQ ID NO: 210631 - RNA, 22 nt, Human
cuuccauaaucuuguuuauuua

SEQ ID NO: 210632 - RNA, 20 nt, Human
cugggucacuuggcugcucu

SEQ ID NO: 210633 - RNA, 22 nt, Human
aucuguaaagauaaucauaugu

SEQ ID NO: 210634 - RNA, 22 nt, Human
caaugcuucucauuagccaaug

SEQ ID NO: 210635 - RNA, 22 nt, Human
agggagcagggcuccuuugggu

SEQ ID NO: 210636 - RNA, 22 nt, Human
aagaggccacagcugacagcac

SEQ ID NO: 210637 - RNA, 22 nt, Human
gagaccaggaaguacagcagcc

SEQ ID NO: 210638 - RNA, 22 nt, Human
cauucauucuguaaguaacuau

SEQ ID NO: 210639 - RNA, 22 nt, Human
auuguacagaugaaccucacuc

SEQ ID NO: 210640 - RNA, 22 nt, Human
aaaguaguauaaaauucaugug

SEQ ID NO: 210641 - RNA, 22 nt, Human
accuguuuguguccauuaguga

SEQ ID NO: 210642 - RNA, 22 nt, Human
uugcuguaguguucugauguca

SEQ ID NO: 210643 - RNA, 22 nt, Human
gcccucagcauccucagggcca

SEQ ID NO: 210644 - RNA, 22 nt, Human
auggaaaucgaugucuaaguua

SEQ ID NO: 210645 - RNA, 22 nt, Human
ugaacauugucacauuccuagc

SEQ ID NO: 210646 - RNA, 22 nt, Human
uguuucuuuguagauauucuuu

SEQ ID NO: 210647 - RNA, 22 nt, Human
ugaagccacagagcaucugccu

SEQ ID NO: 210648 - RNA, 22 nt, Human
uaggggaagucucagaaugcag

SEQ ID NO: 210649 - RNA, 22 nt, Human
ugagcccagagaucugagcuau

SEQ ID NO: 210650 - RNA, 22 nt, Human
gugaaaaaugauuuguuaacug

SEQ ID NO: 210651 - RNA, 22 nt, Human
aauguguuacuguguaagagca

SEQ ID NO: 210652 - RNA, 22 nt, Human
aaucuuuugauucuagggcugu

SEQ ID NO: 210653 - RNA, 22 nt, Human
cacuggcccauaaaggccuggg

SEQ ID NO: 210654 - RNA, 22 nt, Human
aucaggaagccagucuaaugga

SEQ ID NO: 210655 - RNA, 22 nt, Human
cacagccuugagcgaggacaag

SEQ ID NO: 210656 - RNA, 22 nt, Human
ggguuccagucugaaacuacag

SEQ ID NO: 210657 - RNA, 22 nt, Human
ucgaggcagugcgcuggcuguu

SEQ ID NO: 210658 - RNA, 22 nt, Human
ccuggcucccugcacagggcuc

SEQ ID NO: 210659 - RNA, 22 nt, Human
augcucauuuuauugagaauga

SEQ ID NO: 210660 - RNA, 22 nt, Human
uaacugguauaucaguguacac

SEQ ID NO: 210661 - RNA, 21 nt, Human
gacacaaaggguaguaauggu

SEQ ID NO: 210662 - RNA, 17 nt, Human
gcuggcuucuccuugcu

SEQ ID NO: 210663 - RNA, 23 nt, Human
cuagggcaguauuucacagacac

SEQ ID NO: 210664 - RNA, 22 nt, Human
uuccagaacucaagaaaugccc

SEQ ID NO: 210665 - RNA, 17 nt, Human
ucugagaaugcuggagg

SEQ ID NO: 210666 - RNA, 22 nt, Human
gggcagguggcaaagccagagg

SEQ ID NO: 210667 - RNA, 22 nt, Human
agagcugggugguggugacuca

SEQ ID NO: 210668 - RNA, 22 nt, Human
ugccuggguugacucuuagcug

SEQ ID NO: 210669 - RNA, 22 nt, Human
uauauuugugugugauuuauga

SEQ ID NO: 210670 - RNA, 20 nt, Human
ggaaggcuguuuuuccacca

SEQ ID NO: 210671 - RNA, 22 nt, Human
uacaguaacauguuguacaagc

SEQ ID NO: 210672 - RNA, 20 nt, Human
gcuuggaccuucugcucugu

SEQ ID NO: 210673 - RNA, 22 nt, Human
ucaccaaguccauaugcaucau

SEQ ID NO: 210674 - RNA, 22 nt, Human
cagcaucuccugugcagaggga

SEQ ID NO: 210675 - RNA, 22 nt, Human
ugaaauagacacagugcuauac

SEQ ID NO: 210676 - RNA, 22 nt, Human
ucaggcagaccaccgugggcag

SEQ ID NO: 210677 - RNA, 22 nt, Human
cugcagcaucgccaccugccuc

SEQ ID NO: 210678 - RNA, 22 nt, Human
agaagcaggcagauuucagcuc

SEQ ID NO: 210679 - RNA, 22 nt, Human
uggacaggauagugcaguacgc

SEQ ID NO: 210680 - RNA, 22 nt, Human
agcuggcauuacaggagcaugc

SEQ ID NO: 210681 - RNA, 22 nt, Human
ucaucucagagagguauguuag

SEQ ID NO: 210682 - RNA, 22 nt, Human
cagcaagaggguaagguugaag

SEQ ID NO: 210683 - RNA, 22 nt, Human
ucccugggcaucacguugcuuc

SEQ ID NO: 210684 - RNA, 22 nt, Human
caagauuuuaucuccguuucug

SEQ ID NO: 210685 - RNA, 22 nt, Human
ggaggccaugggcagaaucuuu

SEQ ID NO: 210686 - RNA, 21 nt, Human
auaaacugcaucaaguuggug

SEQ ID NO: 210687 - RNA, 22 nt, Human
acagaggaagcauauagcacaa

SEQ ID NO: 210688 - RNA, 22 nt, Human
auguaacugaaggaaaugcaug

SEQ ID NO: 210689 - RNA, 22 nt, Human
ucuggcaggccuugucaaucug

SEQ ID NO: 210690 - RNA, 22 nt, Human
aaggaagauauaucaagcuuaa

SEQ ID NO: 210691 - RNA, 23 nt, Human
ugcuggcugaaacagccaaagga

SEQ ID NO: 210692 - RNA, 22 nt, Human
agacaaaugguaauuaugucua

SEQ ID NO: 210693 - RNA, 22 nt, Human
aggaaaggauuggcuucucugu

SEQ ID NO: 210694 - RNA, 22 nt, Human
gugcagguguuuuggcugccag

SEQ ID NO: 210695 - RNA, 22 nt, Human
aacuggauuuugaugagcaguu

SEQ ID NO: 210696 - RNA, 22 nt, Human
auuccuucuauucucugugggu

SEQ ID NO: 210697 - RNA, 22 nt, Human
cacccagagccugagagggaua

SEQ ID NO: 210698 - RNA, 21 nt, Human
cugcugcuggggucugggcag

SEQ ID NO: 210699 - RNA, 22 nt, Human
aacaaccaaaaagaugaaugua

SEQ ID NO: 210700 - RNA, 22 nt, Human
acuugaauaggugucaaggcca

SEQ ID NO: 210701 - RNA, 22 nt, Human
uguuuucuauuaccugagauug

SEQ ID NO: 210702 - RNA, 22 nt, Human
cagagcuuccugcugggcuucu

SEQ ID NO: 210703 - RNA, 21 nt, Human
ugaggccugccagucucagaa

SEQ ID NO: 210704 - RNA, 22 nt, Human
cccaggagguuggggcuacagu

SEQ ID NO: 210705 - RNA, 22 nt, Human
guuucaaagcacagcucacauu

SEQ ID NO: 210706 - RNA, 22 nt, Human
uccaggagucagacagauggug

SEQ ID NO: 210707 - RNA, 19 nt, Human
uuccugugcugcugugucc

SEQ ID NO: 210708 - RNA, 22 nt, Human
gaagccagauuuggggcauauc

SEQ ID NO: 210709 - RNA, 23 nt, Human
cuguggcugaguccuguuggagu

SEQ ID NO: 210710 - RNA, 23 nt, Human
ccugcagcugcuggggcuccacc

SEQ ID NO: 210711 - RNA, 22 nt, Human
ugggcuccucgucacucgcugu

SEQ ID NO: 210712 - RNA, 22 nt, Human
ugccauauuauugagcauauua

SEQ ID NO: 210713 - RNA, 22 nt, Human
aagaucagcucccgagucugag

SEQ ID NO: 210714 - RNA, 22 nt, Human
gagcagggcuuguccuccucau

SEQ ID NO: 210715 - RNA, 22 nt, Human
cagggagccugaauguuccagg

SEQ ID NO: 210716 - RNA, 22 nt, Human
ucucagcagggccauccugagc

SEQ ID NO: 210717 - RNA, 22 nt, Human
aggcaggugagucaaaacagac

SEQ ID NO: 210718 - RNA, 22 nt, Human
ugggccuccgcauggcccagcg

SEQ ID NO: 210719 - RNA, 17 nt, Human
cugucugcgcaugaggu

SEQ ID NO: 210720 - RNA, 22 nt, Human
augaacaguaugcaacaugauu

SEQ ID NO: 210721 - RNA, 22 nt, Human
agagauggccuuaggugggaau

SEQ ID NO: 210722 - RNA, 22 nt, Human
ccugcuggcugguagaguuccg

SEQ ID NO: 210723 - RNA, 22 nt, Human
ugggaggcagguaggugaugau

SEQ ID NO: 210724 - RNA, 22 nt, Human
caaggcuaagcuuuggcuuucu

SEQ ID NO: 210725 - RNA, 22 nt, Human
gccuagagaaaaagccucugca

SEQ ID NO: 210726 - RNA, 22 nt, Human
aaguacauauauuuaugauucu

SEQ ID NO: 210727 - RNA, 22 nt, Human
ccucugggagacugcuacugag

SEQ ID NO: 210728 - RNA, 22 nt, Human
uuccucaggcuucccuuugucc

SEQ ID NO: 210729 - RNA, 22 nt, Human
aagugaggccuaggcacugggu

SEQ ID NO: 210730 - RNA, 22 nt, Human
acagguguaauuugcccgaggu

SEQ ID NO: 210731 - RNA, 22 nt, Human
ggcaauuacguauuagucaugu

SEQ ID NO: 210732 - RNA, 21 nt, Human
uucuccuguuuugcaccacag

SEQ ID NO: 210733 - RNA, 22 nt, Human
uucucaggccccugccuggacu

SEQ ID NO: 210734 - RNA, 22 nt, Human
cccaggucccgccccagcucua

SEQ ID NO: 210735 - RNA, 22 nt, Human
aauggcagaggcaaagauggua

SEQ ID NO: 210736 - RNA, 22 nt, Human
agaaaucuuggagucuguggua

SEQ ID NO: 210737 - RNA, 22 nt, Human
uuagaacauagcaacagaauua

SEQ ID NO: 210738 - RNA, 22 nt, Human
agguccuggucuugagucuuaa

SEQ ID NO: 210739 - RNA, 22 nt, Human
auucucuggaagaagauaaaaa

SEQ ID NO: 210740 - RNA, 23 nt, Human
acuugauuauuguugauagauuc

SEQ ID NO: 210741 - RNA, 22 nt, Human
ccugaggacacacgcugcagga

SEQ ID NO: 210742 - RNA, 22 nt, Human
gauuuggcuuggaugauuaaac

SEQ ID NO: 210743 - RNA, 18 nt, Human
gaugggagcaagagaaga

SEQ ID NO: 210744 - RNA, 22 nt, Human
acaguuuggcgugauugauagu

SEQ ID NO: 210745 - RNA, 21 nt, Human
gggaucuuguacuggcgugga

SEQ ID NO: 210746 - RNA, 22 nt, Human
caaggcaggaagccugucuuau

SEQ ID NO: 210747 - RNA, 18 nt, Human
acuccccacaggcucugu

SEQ ID NO: 210748 - RNA, 22 nt, Human
uacuucauuauucuaguuuuga

SEQ ID NO: 210749 - RNA, 22 nt, Human
auuucuagauauggagaguggu

SEQ ID NO: 210750 - RNA, 22 nt, Human
aagaugcuuccacugcaguggc

SEQ ID NO: 210751 - RNA, 22 nt, Human
ggaagaugagaaguggggcucc

SEQ ID NO: 210752 - RNA, 22 nt, Human
caaagcaagggcugaagacucc

SEQ ID NO: 210753 - RNA, 22 nt, Human
gggcuguguaucaguuaucuau

SEQ ID NO: 210754 - RNA, 22 nt, Human
cggcugcuucugagccccggcg

SEQ ID NO: 210755 - RNA, 22 nt, Human
ccaggacacgauuuuuagucug

SEQ ID NO: 210756 - RNA, 18 nt, Human
agccucuggcagagagaa

SEQ ID NO: 210757 - RNA, 22 nt, Human
uccugggacaccccaauaugag

SEQ ID NO: 210758 - RNA, 22 nt, Human
aggucccugcagcagacugcca

SEQ ID NO: 210759 - RNA, 22 nt, Human
cuggcuccucuacacacccaaa

SEQ ID NO: 210760 - RNA, 22 nt, Human
ucuucacaugaccuucaugucu

SEQ ID NO: 210761 - RNA, 22 nt, Human
uccugggaugcauaaaauaugu

SEQ ID NO: 210762 - RNA, 22 nt, Human
agaggccagcaaccacaguaaa

SEQ ID NO: 210763 - RNA, 22 nt, Human
ggguucuuauaguaucagagcu

SEQ ID NO: 210764 - RNA, 22 nt, Human
cagagcucuauguucauggagg

SEQ ID NO: 210765 - RNA, 22 nt, Human
aaaggccucuguccuagugccu

SEQ ID NO: 210766 - RNA, 22 nt, Human
uucuggcucgauucucugaccg

SEQ ID NO: 210767 - RNA, 21 nt, Human
caucucaguggguugguggau

SEQ ID NO: 210768 - RNA, 22 nt, Human
acuccugggugcauuucugauu

SEQ ID NO: 210769 - RNA, 22 nt, Human
cuggaagcuuguuugccagucu

SEQ ID NO: 210770 - RNA, 22 nt, Human
uaggugucaggccuccuccagc

SEQ ID NO: 210771 - RNA, 22 nt, Human
uauccaauucaccauugauggg

SEQ ID NO: 210772 - RNA, 22 nt, Human
uagguggugugcgaagagcgug

SEQ ID NO: 210773 - RNA, 22 nt, Human
ggccagagagcagccaggauuc

SEQ ID NO: 210774 - RNA, 22 nt, Human
acuaaauagccucugguaguug

SEQ ID NO: 210775 - RNA, 22 nt, Human
guggggcaguggccugggagca

SEQ ID NO: 210776 - RNA, 22 nt, Human
gcaaggaagcagaguugcuauc

SEQ ID NO: 210777 - RNA, 22 nt, Human
ucaggaaggcacuugguguguu

SEQ ID NO: 210778 - RNA, 22 nt, Human
uugcaaucugcaaagcugugga

SEQ ID NO: 210779 - RNA, 22 nt, Human
uauauuaccugccugaucuaua

SEQ ID NO: 210780 - RNA, 22 nt, Human
ccuccuggugggcgcuucuggc

SEQ ID NO: 210781 - RNA, 22 nt, Human
uggaaaaucaggggacauugau

SEQ ID NO: 210782 - RNA, 22 nt, Human
acugggaggcaaagagcaagga

SEQ ID NO: 210783 - RNA, 22 nt, Human
gcuuccaguccucagaggcugg

SEQ ID NO: 210784 - RNA, 20 nt, Human
aguggggagucaggagugcc

SEQ ID NO: 210785 - RNA, 22 nt, Human
cuucacugugcuucaagcagcu

SEQ ID NO: 210786 - RNA, 22 nt, Human
auagaauccugcagcaagccuu

SEQ ID NO: 210787 - RNA, 22 nt, Human
ucagcuccucagagccucaguu

SEQ ID NO: 210788 - RNA, 22 nt, Human
accuuagaaaaucaaaauuaga

SEQ ID NO: 210789 - RNA, 22 nt, Human
ggccucagggucacucuguaga

SEQ ID NO: 210790 - RNA, 22 nt, Human
ccuucuccugccuuggguucau

SEQ ID NO: 210791 - RNA, 22 nt, Human
ucagaggagaccaaggggaaua

SEQ ID NO: 210792 - RNA, 22 nt, Human
ggacagcauaucagcagggcag

SEQ ID NO: 210793 - RNA, 22 nt, Human
cacccagcagcacuuaagacua

SEQ ID NO: 210794 - RNA, 22 nt, Human
cgugcccugcgcaagugcugcu

SEQ ID NO: 210795 - RNA, 22 nt, Human
gucuccagggacacacuagccg

SEQ ID NO: 210796 - RNA, 22 nt, Human
ucccuggccauuccucuaggcc

SEQ ID NO: 210797 - RNA, 22 nt, Human
uagaacuuucagaaauuccaaa

SEQ ID NO: 210798 - RNA, 22 nt, Human
auuuauugguuugcauggugaa

SEQ ID NO: 210799 - RNA, 22 nt, Human
caagaugaaauugugauauuuu

SEQ ID NO: 210800 - RNA, 18 nt, Human
gaggcagcuagcaauuuu

SEQ ID NO: 210801 - RNA, 23 nt, Human
ucagagagcuguugagagcugcc

SEQ ID NO: 210802 - RNA, 22 nt, Human
gaaaggcaucuucagucucuga

SEQ ID NO: 210803 - RNA, 22 nt, Human
ucuacgaagccaccauggagac

SEQ ID NO: 210804 - RNA, 22 nt, Human
cggggcaggagucccuguagag

SEQ ID NO: 210805 - RNA, 22 nt, Human
uccacaucuagguuugucaaca

SEQ ID NO: 210806 - RNA, 17 nt, Human
aggcuggccuucacagu

SEQ ID NO: 210807 - RNA, 21 nt, Human
ugggccugauucccaggguca

SEQ ID NO: 210808 - RNA, 22 nt, Human
cagaagcaagggccaaagucuu

SEQ ID NO: 210809 - RNA, 22 nt, Human
gcuucuauuauuuggagcugag

SEQ ID NO: 210810 - RNA, 22 nt, Human
uauggguguuaauggugagaga

SEQ ID NO: 210811 - RNA, 20 nt, Human
gcacaguuugggaaccaugg

SEQ ID NO: 210812 - RNA, 22 nt, Human
uccauauacaacuuaaucuuua

SEQ ID NO: 210813 - RNA, 22 nt, Human
uauugauaugcagaacugacuu

SEQ ID NO: 210814 - RNA, 22 nt, Human
ccagguguaagacaugguccua

SEQ ID NO: 210815 - RNA, 22 nt, Human
ugucaaaaugacuuuacuacag

SEQ ID NO: 210816 - RNA, 22 nt, Human
gcuucugcuguugaagccacca

SEQ ID NO: 210817 - RNA, 21 nt, Human
ugcuuuaugggaaaaauguca

SEQ ID NO: 210818 - RNA, 22 nt, Human
ucucaagcuaguguuuauagua

SEQ ID NO: 210819 - RNA, 22 nt, Human
agcugaggcauggacaggcugc

SEQ ID NO: 210820 - RNA, 22 nt, Human
caugacaaauaaaccuuugcca

SEQ ID NO: 210821 - RNA, 22 nt, Human
cugaggcaccggcaauguucug

SEQ ID NO: 210822 - RNA, 22 nt, Human
aucuguguaugugaccuuaucu

SEQ ID NO: 210823 - RNA, 22 nt, Human
cuuaggaguucacuugaauagu

SEQ ID NO: 210824 - RNA, 18 nt, Human
agagggaaucaguuggau

SEQ ID NO: 210825 - RNA, 21 nt, Human
aguuuugagaguggguagugu

SEQ ID NO: 210826 - RNA, 22 nt, Human
guccugagucaagugugggcag

SEQ ID NO: 210827 - RNA, 22 nt, Human
gagugucacuugaugcagggca

SEQ ID NO: 210828 - RNA, 22 nt, Human
gggggcuaccgucucuggagcu

SEQ ID NO: 210829 - RNA, 22 nt, Human
gaaauaguacagcauaguucuu

SEQ ID NO: 210830 - RNA, 22 nt, Human
aucauacacucacauaaacaga

SEQ ID NO: 210831 - RNA, 22 nt, Human
cugcugagguccuugcucagac

SEQ ID NO: 210832 - RNA, 22 nt, Human
gagaggcccugaagcccacaga

SEQ ID NO: 210833 - RNA, 22 nt, Human
aucagcaaggcaaucacugcag

SEQ ID NO: 210834 - RNA, 22 nt, Human
cacuuagagccagaugcauagu

SEQ ID NO: 210835 - RNA, 22 nt, Human
aaggccuuugccccgauacagg

SEQ ID NO: 210836 - RNA, 22 nt, Human
uccucagaaaccccugugaggu

SEQ ID NO: 210837 - RNA, 22 nt, Human
ccuguucacccuccaugcacag

SEQ ID NO: 210838 - RNA, 22 nt, Human
uacagcuaggcaaaaaugacau

SEQ ID NO: 210839 - RNA, 22 nt, Human
ugccugucagggggagugggaa

SEQ ID NO: 210840 - RNA, 22 nt, Human
agcagcuguuagaaacaggaag

SEQ ID NO: 210841 - RNA, 22 nt, Human
uguggcagaacugggacucaaa

SEQ ID NO: 210842 - RNA, 22 nt, Human
uaguuuacucaucuauaaaaug

SEQ ID NO: 210843 - RNA, 22 nt, Human
cgggcacacacuugacagguuc

SEQ ID NO: 210844 - RNA, 22 nt, Human
agugaugucacaaacuauggug

SEQ ID NO: 210845 - RNA, 22 nt, Human
cguagcucacgcccccucuccc

SEQ ID NO: 210846 - RNA, 22 nt, Human
cauauuuuaguugcugaacagc

SEQ ID NO: 210847 - RNA, 20 nt, Human
acucuguagguaaugagacu

SEQ ID NO: 210848 - RNA, 22 nt, Human
cccucucagucagagccagaua

SEQ ID NO: 210849 - RNA, 22 nt, Human
agccagucccuugagcgugccc

SEQ ID NO: 210850 - RNA, 22 nt, Human
uagaaaucuacuuagacuuucu

SEQ ID NO: 210851 - RNA, 22 nt, Human
agcaugaagacuucagagcuag

SEQ ID NO: 210852 - RNA, 22 nt, Human
ggaaggcuguucacuaacaugu

SEQ ID NO: 210853 - RNA, 22 nt, Human
uccaggccccugccugggccug

SEQ ID NO: 210854 - RNA, 22 nt, Human
uccugugucaauuccucauucu

SEQ ID NO: 210855 - RNA, 22 nt, Human
cugagccuguguuucucuggca

SEQ ID NO: 210856 - RNA, 22 nt, Human
uuauugaaggaacugaaauaaa

SEQ ID NO: 210857 - RNA, 22 nt, Human
uguagauguagacacaggucua

SEQ ID NO: 210858 - RNA, 22 nt, Human
augcaucuuaucaaaaauuaua

SEQ ID NO: 210859 - RNA, 20 nt, Human
uagaaucuggugauguaucg

SEQ ID NO: 210860 - RNA, 22 nt, Human
aaaugucuuucuucugcuacgu

SEQ ID NO: 210861 - RNA, 22 nt, Human
gaagauuaaaugaagugaccug

SEQ ID NO: 210862 - RNA, 22 nt, Human
uugaauaggacucagcagugau

SEQ ID NO: 210863 - RNA, 23 nt, Human
aaacaagucucucaauggcuugc

SEQ ID NO: 210864 - RNA, 22 nt, Human
ccagcuuucauaucaugaggua

SEQ ID NO: 210865 - RNA, 22 nt, Human
agggagcuucuggccucagccu

SEQ ID NO: 210866 - RNA, 23 nt, Human
uagacugcaggcuccuugagggc

SEQ ID NO: 210867 - RNA, 22 nt, Human
gaagcugcguguagccauacuu

SEQ ID NO: 210868 - RNA, 22 nt, Human
cugcccugacugaccuuuugaa

SEQ ID NO: 210869 - RNA, 22 nt, Human
ucuggaaggaacccuuagagga

SEQ ID NO: 210870 - RNA, 22 nt, Human
agccuucauaaucuugggcuuu

SEQ ID NO: 210871 - RNA, 21 nt, Human
uccuccuguagaggguccugg

SEQ ID NO: 210872 - RNA, 22 nt, Human
auuuaauuuacauuugacagag

SEQ ID NO: 210873 - RNA, 22 nt, Human
agcacagagaaacuaagacauu

SEQ ID NO: 210874 - RNA, 22 nt, Human
cuuuccuagaaauauauacuua

SEQ ID NO: 210875 - RNA, 22 nt, Human
ccucagagccuccagaaggaau

SEQ ID NO: 210876 - RNA, 22 nt, Human
ucuagaauagauucugcugauc

SEQ ID NO: 210877 - RNA, 22 nt, Human
ccguggaguugugcugaguaug

SEQ ID NO: 210878 - RNA, 22 nt, Human
aggcucugggaacagacgggug

SEQ ID NO: 210879 - RNA, 22 nt, Human
cacuuagucucaccaguucagu

SEQ ID NO: 210880 - RNA, 22 nt, Human
uucuuugaguuaguacagucca

SEQ ID NO: 210881 - RNA, 22 nt, Human
cacugccuccccaggcuccaca

SEQ ID NO: 210882 - RNA, 22 nt, Human
acaggcagggaccucuugaguu

SEQ ID NO: 210883 - RNA, 22 nt, Human
agcaccauuucucuaaagcacu

SEQ ID NO: 210884 - RNA, 22 nt, Human
ugcagcugaccagcaaguccug

SEQ ID NO: 210885 - RNA, 22 nt, Human
agucaaagaagaugguuccaaa

SEQ ID NO: 210886 - RNA, 22 nt, Human
uaugaauucucuuguguauagu

SEQ ID NO: 210887 - RNA, 22 nt, Human
uuuggaauuaugcuuaaaguuu

SEQ ID NO: 210888 - RNA, 19 nt, Human
ggguuguguggaagguauc

SEQ ID NO: 210889 - RNA, 22 nt, Human
aacauuucauaacuugacuuuu

SEQ ID NO: 210890 - RNA, 22 nt, Human
ccgaggcuccuccccgagucug

SEQ ID NO: 210891 - RNA, 22 nt, Human
caguucugagcuuucccagaag

SEQ ID NO: 210892 - RNA, 22 nt, Human
gucuucuuguuuugaaggaaau

SEQ ID NO: 210893 - RNA, 22 nt, Human
auucugauaugaacacacauau

SEQ ID NO: 210894 - RNA, 22 nt, Human
cagggguguuuuuggccaggag

SEQ ID NO: 210895 - RNA, 22 nt, Human
ugauuuucuccauuguaaauuc

SEQ ID NO: 210896 - RNA, 22 nt, Human
ggcagacuuuuucucugaaggg

SEQ ID NO: 210897 - RNA, 23 nt, Human
guggccuccccggaaugccucgc

SEQ ID NO: 210898 - RNA, 21 nt, Human
cuguccaaauuucauaacuuu

SEQ ID NO: 210899 - RNA, 22 nt, Human
gaucugaaauagcuacugcaga

SEQ ID NO: 210900 - RNA, 22 nt, Human
ucaguguuuccuagagcauaua

SEQ ID NO: 210901 - RNA, 22 nt, Human
cuggcuggcaaguagaacacaa

SEQ ID NO: 210902 - RNA, 22 nt, Human
uaauuauaaacugcaguaggua

SEQ ID NO: 210903 - RNA, 22 nt, Human
aguggagaccccacuucuacau

SEQ ID NO: 210904 - RNA, 22 nt, Human
uuaucuguugcuuaaugcgcau

SEQ ID NO: 210905 - RNA, 17 nt, Human
aagacaagacaaaugca

SEQ ID NO: 210906 - RNA, 17 nt, Human
auuuagcaaguagacag

SEQ ID NO: 210907 - RNA, 22 nt, Human
ccugccaggcgagucuaggcca

SEQ ID NO: 210908 - RNA, 22 nt, Human
acaaagauguuuaaagcauuua

SEQ ID NO: 210909 - RNA, 22 nt, Human
auuaacuguacuuucuaauuuu

SEQ ID NO: 210910 - RNA, 22 nt, Human
uucaaaugguuagacuguuagc

SEQ ID NO: 210911 - RNA, 15 nt, Human
ccaggcugggugagc

SEQ ID NO: 210912 - RNA, 22 nt, Human
aaugagauggcaaugacuuaaa

SEQ ID NO: 210913 - RNA, 22 nt, Human
auacuacacuaugcauggaugu

SEQ ID NO: 210914 - RNA, 22 nt, Human
gggcugagccauuugaaccuug

SEQ ID NO: 210915 - RNA, 22 nt, Human
ucauuucuccgaccugcugucc

SEQ ID NO: 210916 - RNA, 22 nt, Human
uggcaaggccacaggugcaguu

SEQ ID NO: 210917 - RNA, 22 nt, Human
acaucugauuacaugagaauau

SEQ ID NO: 210918 - RNA, 22 nt, Human
agcugagccagcagcaacagga

SEQ ID NO: 210919 - RNA, 22 nt, Human
augcauauguacccauguucug

SEQ ID NO: 210920 - RNA, 19 nt, Human
aaauaucagagagaugaua

SEQ ID NO: 210921 - RNA, 22 nt, Human
guacaaaaguuauugcgguuuu

SEQ ID NO: 210922 - RNA, 22 nt, Human
acaggcucaguucacuggauuu

SEQ ID NO: 210923 - RNA, 22 nt, Human
cagcagggaagcugugcuguuu

SEQ ID NO: 210924 - RNA, 22 nt, Human
cugcagguugagcagccagguu

SEQ ID NO: 210925 - RNA, 22 nt, Human
gcuuuauagcccuauuacauga

SEQ ID NO: 210926 - RNA, 22 nt, Human
ucaggugucuaucuaaccuggu

SEQ ID NO: 210927 - RNA, 22 nt, Human
gcacccagugggaugcuuagca

SEQ ID NO: 210928 - RNA, 22 nt, Human
gaccuggugcuagcuggugugu

SEQ ID NO: 210929 - RNA, 21 nt, Human
gcagaggaaugguauacauaa

SEQ ID NO: 210930 - RNA, 22 nt, Human
ugaauagagcugcaguggacau

SEQ ID NO: 210931 - RNA, 22 nt, Human
uacacaacugacaaccauucug

SEQ ID NO: 210932 - RNA, 22 nt, Human
gcagggauugucaaugcugcuc

SEQ ID NO: 210933 - RNA, 22 nt, Human
agcugggacucaacugucuggg

SEQ ID NO: 210934 - RNA, 22 nt, Human
gaggcucagagaagucauggua

SEQ ID NO: 210935 - RNA, 23 nt, Human
ggacacagagauaagugagacaa

SEQ ID NO: 210936 - RNA, 22 nt, Human
gacauuuguaugacacuuuaaa

SEQ ID NO: 210937 - RNA, 22 nt, Human
ucugaggcugaauggacuccgu

SEQ ID NO: 210938 - RNA, 21 nt, Human
aaugaugaaagaugacagagu

SEQ ID NO: 210939 - RNA, 22 nt, Human
gcacaugugagaguagaggccu

SEQ ID NO: 210940 - RNA, 22 nt, Human
cugaggccucuguucaccagaa

SEQ ID NO: 210941 - RNA, 22 nt, Human
uuagcuuucuuggagaauuaca

SEQ ID NO: 210942 - RNA, 22 nt, Human
aagcacagcagagccuugcuug

SEQ ID NO: 210943 - RNA, 22 nt, Human
aauccuuacugaaugagaaaaa

SEQ ID NO: 210944 - RNA, 20 nt, Human
aaaaauugauaucgcuuccu

SEQ ID NO: 210945 - RNA, 22 nt, Human
gacuuucugcuauacuuucugu

SEQ ID NO: 210946 - RNA, 22 nt, Human
cagcugggagcuccauuagaua

SEQ ID NO: 210947 - RNA, 22 nt, Human
ugaguccaccuuaguauauggg

SEQ ID NO: 210948 - RNA, 19 nt, Human
aggcugugagggaggacuc

SEQ ID NO: 210949 - RNA, 22 nt, Human
agucucuuaaugggcagaaagu

SEQ ID NO: 210950 - RNA, 22 nt, Human
cucagugguugagagccugggc

SEQ ID NO: 210951 - RNA, 22 nt, Human
cagcugagcucccaggccauca

SEQ ID NO: 210952 - RNA, 22 nt, Human
ucaccuaauugaagucaggagu

SEQ ID NO: 210953 - RNA, 22 nt, Human
ccaggcucugugugggcuagag

SEQ ID NO: 210954 - RNA, 22 nt, Human
cagagccaggucuaggagucuc

SEQ ID NO: 210955 - RNA, 22 nt, Human
cacugcccagcgucuuaggcac

SEQ ID NO: 210956 - RNA, 22 nt, Human
caggugagcucuaucuagggag

SEQ ID NO: 210957 - RNA, 22 nt, Human
uuugcagaagaaaacaugaaca

SEQ ID NO: 210958 - RNA, 22 nt, Human
gcagguggauuaucagaagugc

SEQ ID NO: 210959 - RNA, 22 nt, Human
cugcuguguuccuccugcaucu

SEQ ID NO: 210960 - RNA, 22 nt, Human
gaagcagucagcagcaccuuug

SEQ ID NO: 210961 - RNA, 22 nt, Human
ucguuaaaugcuaaaacugaca

SEQ ID NO: 210962 - RNA, 22 nt, Human
uaaggcauaaggccagaggcua

SEQ ID NO: 210963 - RNA, 22 nt, Human
aguuaacucugaaaagacauuu

SEQ ID NO: 210964 - RNA, 22 nt, Human
aaaugcuagggagaaacucucc

SEQ ID NO: 210965 - RNA, 22 nt, Human
gaagagguagcauuggcaggug

SEQ ID NO: 210966 - RNA, 22 nt, Human
auacaaagcuaaauaugguuuc

SEQ ID NO: 210967 - RNA, 22 nt, Human
uuguaauuaauggcagcaauua

SEQ ID NO: 210968 - RNA, 22 nt, Human
gagggccacguucagggcucuc

SEQ ID NO: 210969 - RNA, 22 nt, Human
uggaauguugauaaacauaggc

SEQ ID NO: 210970 - RNA, 22 nt, Human
cauuguuaauugguaucuuaca

SEQ ID NO: 210971 - RNA, 22 nt, Human
gccccagguugccugucccagg

SEQ ID NO: 210972 - RNA, 22 nt, Human
gucaggaugggcagccaaacua

SEQ ID NO: 210973 - RNA, 22 nt, Human
agaguuuguauuuuucagugaa

SEQ ID NO: 210974 - RNA, 17 nt, Human
cuuguuuuccacuggga

SEQ ID NO: 210975 - RNA, 22 nt, Human
acagggcagaaauguugcaucu

SEQ ID NO: 210976 - RNA, 22 nt, Human
uuuuggaacacagacauuagaa

SEQ ID NO: 210977 - RNA, 22 nt, Human
ucugaagaauaggauguugugu

SEQ ID NO: 210978 - RNA, 22 nt, Human
gcugugcaggggauuugguuau

SEQ ID NO: 210979 - RNA, 23 nt, Human
gcccaugcuguugggcccgagca

SEQ ID NO: 210980 - RNA, 22 nt, Human
caugcagggacuagagaacagg

SEQ ID NO: 210981 - RNA, 22 nt, Human
cagagcaggaauaggguguuga

SEQ ID NO: 210982 - RNA, 22 nt, Human
ucauuuggaagccugagagugu

SEQ ID NO: 210983 - RNA, 22 nt, Human
auuuaucaucagaccuuuuaaa

SEQ ID NO: 210984 - RNA, 22 nt, Human
cugcaggagggcuggggaagcc

SEQ ID NO: 210985 - RNA, 22 nt, Human
caugcagcggcguuugguuuaa

SEQ ID NO: 210986 - RNA, 22 nt, Human
aggccuccagccacaugccagu

SEQ ID NO: 210987 - RNA, 22 nt, Human
ccaggcucugcgcuggacaugg

SEQ ID NO: 210988 - RNA, 22 nt, Human
uaauguuaguauguaaucuuau

SEQ ID NO: 210989 - RNA, 22 nt, Human
gagacacacauucuggagagaa

SEQ ID NO: 210990 - RNA, 20 nt, Human
ucauccaggacaggaguggc

SEQ ID NO: 210991 - RNA, 22 nt, Human
gaaggccacaagagaaguuaag

SEQ ID NO: 210992 - RNA, 22 nt, Human
ugaaagaagccucccuuuggag

SEQ ID NO: 210993 - RNA, 22 nt, Human
gcucacuggccugaagaggacg

SEQ ID NO: 210994 - RNA, 22 nt, Human
uugauguaaagugauucauggg

SEQ ID NO: 210995 - RNA, 17 nt, Human
cugaggcccagggccca

SEQ ID NO: 210996 - RNA, 22 nt, Human
uauuuuaucugccagaguggag

SEQ ID NO: 210997 - RNA, 22 nt, Human
ugauggcucauguuuggggaug

SEQ ID NO: 210998 - RNA, 22 nt, Human
uugcaggguugacacugccugc

SEQ ID NO: 210999 - RNA, 22 nt, Human
agaaaauaauuucuuggcuggu

SEQ ID NO: 211000 - RNA, 22 nt, Human
uucuguuugugaacuggcugag

SEQ ID NO: 211001 - RNA, 22 nt, Human
guuacaauguucuucaguucug

SEQ ID NO: 211002 - RNA, 17 nt, Human
uaucaagaagucuggcc

SEQ ID NO: 211003 - RNA, 22 nt, Human
ucuucuuugaaucauagugacc

SEQ ID NO: 211004 - RNA, 21 nt, Human
cagaggccucaugcucugugc

SEQ ID NO: 211005 - RNA, 22 nt, Human
uugguaaaaucauagugguaac

SEQ ID NO: 211006 - RNA, 22 nt, Human
ccagccuucugagcugccugga

SEQ ID NO: 211007 - RNA, 22 nt, Human
aagccaguguggucugcccauu

SEQ ID NO: 211008 - RNA, 22 nt, Human
gcaggcuucucucuucccuacc

SEQ ID NO: 211009 - RNA, 22 nt, Human
uggcagagcccagacuccaguc

SEQ ID NO: 211010 - RNA, 22 nt, Human
cacaugaccacucuuuacuucu

SEQ ID NO: 211011 - RNA, 22 nt, Human
gaguggggucugggcaucaguc

SEQ ID NO: 211012 - RNA, 22 nt, Human
agucagagcaaacuggacagac

SEQ ID NO: 211013 - RNA, 22 nt, Human
acacagaguauuuagaaggggu

SEQ ID NO: 211014 - RNA, 18 nt, Human
cugcugugucgucugggc

SEQ ID NO: 211015 - RNA, 22 nt, Human
gagucuaaggaaaaauagagua

SEQ ID NO: 211016 - RNA, 22 nt, Human
agcagcagauuauggucuacau

SEQ ID NO: 211017 - RNA, 22 nt, Human
agcuugauaguggcuaucaagc

SEQ ID NO: 211018 - RNA, 22 nt, Human
acacagugccaaauugcaguua

SEQ ID NO: 211019 - RNA, 22 nt, Human
ucacaaauauuuuaacaguagg

SEQ ID NO: 211020 - RNA, 22 nt, Human
aggaaauaggaccagacaaagc

SEQ ID NO: 211021 - RNA, 22 nt, Human
uggcugaguaaguugugauaug

SEQ ID NO: 211022 - RNA, 22 nt, Human
acacaguucuuagcaggugucu

SEQ ID NO: 211023 - RNA, 22 nt, Human
gaaggcuacuucuccucagggc

SEQ ID NO: 211024 - RNA, 19 nt, Human
ugcccaggccucccaaaag

SEQ ID NO: 211025 - RNA, 19 nt, Human
uacaggaggccugcaaucu

SEQ ID NO: 211026 - RNA, 22 nt, Human
gcuccaggccacggcuucuugg

SEQ ID NO: 211027 - RNA, 22 nt, Human
ugccagaacagcucaucuggcc

SEQ ID NO: 211028 - RNA, 23 nt, Human
ggcacagaugcugagcaugugca

SEQ ID NO: 211029 - RNA, 22 nt, Human
guacuuuagaguaaaauagacc

SEQ ID NO: 211030 - RNA, 22 nt, Human
cccagcccugaccuauuggaaa

SEQ ID NO: 211031 - RNA, 22 nt, Human
aggcuguguuuaagugguaaug

SEQ ID NO: 211032 - RNA, 22 nt, Human
gagggcugaagauuguggcccc

SEQ ID NO: 211033 - RNA, 22 nt, Human
agggcagcagcuccuccuagcu

SEQ ID NO: 211034 - RNA, 22 nt, Human
uuuguuuagaaagagauuggug

SEQ ID NO: 211035 - RNA, 22 nt, Human
ccaccccugggugcagggagcg

SEQ ID NO: 211036 - RNA, 22 nt, Human
ugcauuuuacuuaccuguuagu

SEQ ID NO: 211037 - RNA, 22 nt, Human
uaggcaaguggaccagagguuu

SEQ ID NO: 211038 - RNA, 22 nt, Human
uaggaaaauaucucuuauuggg

SEQ ID NO: 211039 - RNA, 22 nt, Human
aucuccaguauccuaguauugu

SEQ ID NO: 211040 - RNA, 22 nt, Human
cagggcucagaagacagaccuc

SEQ ID NO: 211041 - RNA, 22 nt, Human
ugccaggcgugguggugcgcac

SEQ ID NO: 211042 - RNA, 22 nt, Human
acagggagaugggugaaagcgg

SEQ ID NO: 211043 - RNA, 22 nt, Human
ugugcccaucccucuggagugu

SEQ ID NO: 211044 - RNA, 22 nt, Human
acauuacagcaaguuuacguua

SEQ ID NO: 211045 - RNA, 22 nt, Human
aucuuuacaguguaagugcaga

SEQ ID NO: 211046 - RNA, 22 nt, Human
ugagaggagugauuguaaaauu

SEQ ID NO: 211047 - RNA, 22 nt, Human
cacaaaguguuagaugccacuc

SEQ ID NO: 211048 - RNA, 22 nt, Human
acuuucccucucagaacucuua

SEQ ID NO: 211049 - RNA, 22 nt, Human
cuguguccuuuuaguugcugug

SEQ ID NO: 211050 - RNA, 22 nt, Human
gucugggguacuuucaucugau

SEQ ID NO: 211051 - RNA, 22 nt, Human
ccaggagcauuaagagaacaua

SEQ ID NO: 211052 - RNA, 22 nt, Human
gagggagagugauggaccauug

SEQ ID NO: 211053 - RNA, 22 nt, Human
aggguccacuuggacauugauc

SEQ ID NO: 211054 - RNA, 22 nt, Human
uagaaaguagggaagguaggau

SEQ ID NO: 211055 - RNA, 22 nt, Human
ugagaucauugacuuguuccug

SEQ ID NO: 211056 - RNA, 22 nt, Human
gugacagagcugggauuugaag

SEQ ID NO: 211057 - RNA, 22 nt, Human
uucagaaaaagaccauugcaau

SEQ ID NO: 211058 - RNA, 22 nt, Human
uauuuagugauagaagcaagga

SEQ ID NO: 211059 - RNA, 22 nt, Human
cugccccuggugauggacgcca

SEQ ID NO: 211060 - RNA, 21 nt, Human
acagacaguccagagaaaaga

SEQ ID NO: 211061 - RNA, 22 nt, Human
gcuccccauugaucugcaggcu

SEQ ID NO: 211062 - RNA, 22 nt, Human
ccauggcuccuugcccuguagc

SEQ ID NO: 211063 - RNA, 22 nt, Human
uaaagugcaggcuacucagaag

SEQ ID NO: 211064 - RNA, 22 nt, Human
acagccuuuaaccauuucuucc

SEQ ID NO: 211065 - RNA, 21 nt, Human
aguguccuugaucuugccuug

SEQ ID NO: 211066 - RNA, 22 nt, Human
caaagugcuaggauuacaggcc

SEQ ID NO: 211067 - RNA, 20 nt, Human
uugauaggcagcuugucagg

SEQ ID NO: 211068 - RNA, 22 nt, Human
aaaaaugugaccacaggguguu

SEQ ID NO: 211069 - RNA, 22 nt, Human
uucagauguggcuuugucaggc

SEQ ID NO: 211070 - RNA, 22 nt, Human
aauucaaucuaagaaaugauca

SEQ ID NO: 211071 - RNA, 22 nt, Human
uuacaacagacacauauucuaa

SEQ ID NO: 211072 - RNA, 22 nt, Human
aaguaccucauaggguuauuuu

SEQ ID NO: 211073 - RNA, 20 nt, Human
cccagagguugcggcaggag

SEQ ID NO: 211074 - RNA, 22 nt, Human
ucuggcuguuuuagaugagcuc

SEQ ID NO: 211075 - RNA, 22 nt, Human
gggccugauuagcaggcuagcu

SEQ ID NO: 211076 - RNA, 22 nt, Human
guuagugugacugaggaaugca

SEQ ID NO: 211077 - RNA, 18 nt, Human
acaggcugugggaauggu

SEQ ID NO: 211078 - RNA, 22 nt, Human
ggagaagggccaauuccaugua

SEQ ID NO: 211079 - RNA, 22 nt, Human
gacagcagggaaaguccagacc

SEQ ID NO: 211080 - RNA, 22 nt, Human
augaggcagaaaaaagucggag

SEQ ID NO: 211081 - RNA, 22 nt, Human
gucaguaggaaccuagggucaa

SEQ ID NO: 211082 - RNA, 22 nt, Human
uguauguauguauguauuuggg

SEQ ID NO: 211083 - RNA, 22 nt, Human
uuauugacugaucagagaggga

SEQ ID NO: 211084 - RNA, 22 nt, Human
gcccaggaaauaaaagugggcu

SEQ ID NO: 211085 - RNA, 23 nt, Human
aggucuggacccuuggccccugc

SEQ ID NO: 211086 - RNA, 22 nt, Human
agggaagaagcugguaguaggu

SEQ ID NO: 211087 - RNA, 22 nt, Human
uucacagugccagggggcaggc

SEQ ID NO: 211088 - RNA, 22 nt, Human
ucucugagaagcugaggcuggg

SEQ ID NO: 211089 - RNA, 22 nt, Human
ugcugggcggugggcucauccc

SEQ ID NO: 211090 - RNA, 22 nt, Human
ccugggcuuucaaaaccagccu

SEQ ID NO: 211091 - RNA, 22 nt, Human
auggcagcagggcuugauuaug

SEQ ID NO: 211092 - RNA, 22 nt, Human
gccagccagaguggcugugugu

SEQ ID NO: 211093 - RNA, 22 nt, Human
ugcauuuaguuaugagaaaaac

SEQ ID NO: 211094 - RNA, 22 nt, Human
aaggugggcagaucacaagguc

SEQ ID NO: 211095 - RNA, 22 nt, Human
aaggccagccuuggaacccuga

SEQ ID NO: 211096 - RNA, 22 nt, Human
uggcugggagcuggaacugggc

SEQ ID NO: 211097 - RNA, 22 nt, Human
caggaagcaagugauuuucuug

SEQ ID NO: 211098 - RNA, 22 nt, Human
acaaauuuauugaagggcauau

SEQ ID NO: 211099 - RNA, 23 nt, Human
ucuggaugccaccacauacuaac

SEQ ID NO: 211100 - RNA, 22 nt, Human
cucuccagccacagaagcugcu

SEQ ID NO: 211101 - RNA, 22 nt, Human
gcagcuaccacccaggaaggac

SEQ ID NO: 211102 - RNA, 20 nt, Human
ggaaggcuugaaguuuacau

SEQ ID NO: 211103 - RNA, 22 nt, Human
gcagagcucuguucuuaucucc

SEQ ID NO: 211104 - RNA, 22 nt, Human
aacuuucuuucacagaaguauc

SEQ ID NO: 211105 - RNA, 22 nt, Human
cugaaaggcaguggguagugug

SEQ ID NO: 211106 - RNA, 22 nt, Human
gggagccagagucaccuagaga

SEQ ID NO: 211107 - RNA, 22 nt, Human
ucaggcugggcuccucucccca

SEQ ID NO: 211108 - RNA, 23 nt, Human
cacaccaggagccgucugggcca

SEQ ID NO: 211109 - RNA, 22 nt, Human
ccucagaccccacagggccugu

SEQ ID NO: 211110 - RNA, 22 nt, Human
gcccaggaaaugccccguggug

SEQ ID NO: 211111 - RNA, 22 nt, Human
ucugagcuuucuugugcucaag

SEQ ID NO: 211112 - RNA, 22 nt, Human
ucccaggcugggggccugaagu

SEQ ID NO: 211113 - RNA, 22 nt, Human
ggaugacaaggaaagcaaacca

SEQ ID NO: 211114 - RNA, 22 nt, Human
ccagggucucugcugccugaga

SEQ ID NO: 211115 - RNA, 22 nt, Human
agugcugaggaaggggcccauu

SEQ ID NO: 211116 - RNA, 22 nt, Human
ucucuuaauaaguaaauacuga

SEQ ID NO: 211117 - RNA, 22 nt, Human
aaggcaaugagggagauagagu

SEQ ID NO: 211118 - RNA, 22 nt, Human
gacaccaggaauaguucugucu

SEQ ID NO: 211119 - RNA, 22 nt, Human
ggucuuuucacagugguuugag

SEQ ID NO: 211120 - RNA, 22 nt, Human
uucaguguggugcacaguuuug

SEQ ID NO: 211121 - RNA, 22 nt, Human
augauucuuuuggauagaugau

SEQ ID NO: 211122 - RNA, 22 nt, Human
ccugccagauccccugagcuga

SEQ ID NO: 211123 - RNA, 22 nt, Human
gcagagcagcaaauggaaagga

SEQ ID NO: 211124 - RNA, 21 nt, Human
ccugugcuaucagcuuggguu

SEQ ID NO: 211125 - RNA, 22 nt, Human
cagagacagaaaauggaucuag

SEQ ID NO: 211126 - RNA, 22 nt, Human
auguucuuucagccagugcauc

SEQ ID NO: 211127 - RNA, 22 nt, Human
aguuuuugagaauuuacuaugu

SEQ ID NO: 211128 - RNA, 22 nt, Human
gccuuggagaucacugcucaug

SEQ ID NO: 211129 - RNA, 20 nt, Human
uggcccaguggggcagggug

SEQ ID NO: 211130 - RNA, 22 nt, Human
agccugggguuucaguuugcac

SEQ ID NO: 211131 - RNA, 22 nt, Human
ccggucccaggugccccgguga

SEQ ID NO: 211132 - RNA, 22 nt, Human
aguaaacaguuucuuagaagaa

SEQ ID NO: 211133 - RNA, 22 nt, Human
gaaaaggccuggggcaaagugu

SEQ ID NO: 211134 - RNA, 22 nt, Human
gugggugucaguaucuuuaacg

SEQ ID NO: 211135 - RNA, 22 nt, Human
aggccucauaguagaccugccc

SEQ ID NO: 211136 - RNA, 22 nt, Human
ucugaacagaaaagaugcacaa

SEQ ID NO: 211137 - RNA, 22 nt, Human
uuuauucagcagcagcaguggu

SEQ ID NO: 211138 - RNA, 22 nt, Human
ggaauguuuuagcuugacuuuu

SEQ ID NO: 211139 - RNA, 22 nt, Human
aauacagugaaagugagcaagg

SEQ ID NO: 211140 - RNA, 22 nt, Human
uggcagaguaggauggcccugu

SEQ ID NO: 211141 - RNA, 22 nt, Human
guuauucaacuugugucucuua

SEQ ID NO: 211142 - RNA, 22 nt, Human
acucuggcacuggguaccucag

SEQ ID NO: 211143 - RNA, 22 nt, Human
gccagagguucaacaacugucu

SEQ ID NO: 211144 - RNA, 22 nt, Human
uaguaacagcagcuucccugug

SEQ ID NO: 211145 - RNA, 22 nt, Human
gcucuguaaagaagagaaaugc

SEQ ID NO: 211146 - RNA, 22 nt, Human
uuuuggaaucugggaaaacagu

SEQ ID NO: 211147 - RNA, 22 nt, Human
auugcuugaauuaccauguaau

SEQ ID NO: 211148 - RNA, 22 nt, Human
agcagcaguguguggucauguu

SEQ ID NO: 211149 - RNA, 22 nt, Human
agaaagggagagccagcacacg

SEQ ID NO: 211150 - RNA, 21 nt, Human
ggccacaguuagggcucagga

SEQ ID NO: 211151 - RNA, 22 nt, Human
agucuucugcucugucacuaac

SEQ ID NO: 211152 - RNA, 22 nt, Human
ucauguuaucagacacagagua

SEQ ID NO: 211153 - RNA, 22 nt, Human
cuuauugaaagccccugugccu

SEQ ID NO: 211154 - RNA, 22 nt, Human
aaucuagagugcuaggucugug

SEQ ID NO: 211155 - RNA, 22 nt, Human
acuuuagaaaagcauccauaga

SEQ ID NO: 211156 - RNA, 22 nt, Human
gcacagugaugucagaauugga

SEQ ID NO: 211157 - RNA, 22 nt, Human
gggcucagacaucccuccugga

SEQ ID NO: 211158 - RNA, 22 nt, Human
ugaggaagaacaagaauuuaga

SEQ ID NO: 211159 - RNA, 22 nt, Human
ccagccccgggaaccuggccgu

SEQ ID NO: 211160 - RNA, 22 nt, Human
aaacacaagauggccucuucug

SEQ ID NO: 211161 - RNA, 20 nt, Human
uguuucuuuuaaugagcggc

SEQ ID NO: 211162 - RNA, 22 nt, Human
ggaaaaggccauuguuucucug

SEQ ID NO: 211163 - RNA, 22 nt, Human
uauuuauauucugccuucugcu

SEQ ID NO: 211164 - RNA, 22 nt, Human
aagcccuuuucaagauacaaca

SEQ ID NO: 211165 - RNA, 22 nt, Human
auaaacagaguaguugcuacug

SEQ ID NO: 211166 - RNA, 22 nt, Human
gguggcacacuggggagcucgg

SEQ ID NO: 211167 - RNA, 22 nt, Human
aauccaauccuacucagaaagu

SEQ ID NO: 211168 - RNA, 22 nt, Human
gccaccaggagcccaguccaaa

SEQ ID NO: 211169 - RNA, 22 nt, Human
aaaggacucagacugaagggag

SEQ ID NO: 211170 - RNA, 22 nt, Human
agggugagggucuggccuugag

SEQ ID NO: 211171 - RNA, 22 nt, Human
gcccacaguacgaggcucaggc

SEQ ID NO: 211172 - RNA, 21 nt, Human
ugaggaugugcagcagcagga

SEQ ID NO: 211173 - RNA, 22 nt, Human
uccuggcagcccgcaggugcug

SEQ ID NO: 211174 - RNA, 22 nt, Human
gaggcugcuuugaugacaggag

SEQ ID NO: 211175 - RNA, 22 nt, Human
uauuggaagugaacaccaggcu

SEQ ID NO: 211176 - RNA, 20 nt, Human
ucccagucagccagagugag

SEQ ID NO: 211177 - RNA, 22 nt, Human
cuugauuucagccuugugauau

SEQ ID NO: 211178 - RNA, 22 nt, Human
gugagucugugggugggaacug

SEQ ID NO: 211179 - RNA, 22 nt, Human
aagugaugcuacgacuuugaca

SEQ ID NO: 211180 - RNA, 21 nt, Human
uuacagcaauguuagcaggaa

SEQ ID NO: 211181 - RNA, 22 nt, Human
caagagcuacccugugccauau

SEQ ID NO: 211182 - RNA, 22 nt, Human
ugagugcuggcuaaauagaaaa

SEQ ID NO: 211183 - RNA, 22 nt, Human
ucagggccacgcggaggugacg

SEQ ID NO: 211184 - RNA, 22 nt, Human
uaugugucuuuaucuggcucuu

SEQ ID NO: 211185 - RNA, 22 nt, Human
ccugaggcuggcccuuccaucc

SEQ ID NO: 211186 - RNA, 22 nt, Human
guuuagaaugaaacuuuugagc

SEQ ID NO: 211187 - RNA, 22 nt, Human
agggaauggaugauggcagguu

SEQ ID NO: 211188 - RNA, 22 nt, Human
agugcaaaauucagaagcaauu

SEQ ID NO: 211189 - RNA, 22 nt, Human
ucaggcagagcuguggagcucu

SEQ ID NO: 211190 - RNA, 22 nt, Human
cauuuccagcuccugcaucaug

SEQ ID NO: 211191 - RNA, 22 nt, Human
accaggaguugggggugggacc

SEQ ID NO: 211192 - RNA, 22 nt, Human
uucuucagcuucuaccugcguc

SEQ ID NO: 211193 - RNA, 23 nt, Human
ugagucuacucaccacaacuggg

SEQ ID NO: 211194 - RNA, 22 nt, Human
ucuuucccgccagagcaugagu

SEQ ID NO: 211195 - RNA, 22 nt, Human
auuuaagaggcugcuagaguau

SEQ ID NO: 211196 - RNA, 22 nt, Human
aggcagaauguuggaaaggaag

SEQ ID NO: 211197 - RNA, 22 nt, Human
guauucuugguuaucaaaauac

SEQ ID NO: 211198 - RNA, 22 nt, Human
ucagagaaaugcugagcucaug

SEQ ID NO: 211199 - RNA, 22 nt, Human
aaguuauaucaucucauugacg

SEQ ID NO: 211200 - RNA, 22 nt, Human
agcccugcugccugaauuagcu

SEQ ID NO: 211201 - RNA, 22 nt, Human
acaguucaagucuuagacaaca

SEQ ID NO: 211202 - RNA, 22 nt, Human
gagcacaguaaagcagugucac

SEQ ID NO: 211203 - RNA, 22 nt, Human
gccagccccuuagggcucuccc

SEQ ID NO: 211204 - RNA, 22 nt, Human
cagcagccucuugugccugugg

SEQ ID NO: 211205 - RNA, 22 nt, Human
acugagcugugacaaugcuuaa

SEQ ID NO: 211206 - RNA, 22 nt, Human
uuugaaauguaucaguauaggu

SEQ ID NO: 211207 - RNA, 22 nt, Human
gcagcccaagccugagcauccu

SEQ ID NO: 211208 - RNA, 22 nt, Human
ggaagccaugagggacaguucu

SEQ ID NO: 211209 - RNA, 22 nt, Human
acacaagaauaaugaugaaggu

SEQ ID NO: 211210 - RNA, 22 nt, Human
uuacauguggagucugauugca

SEQ ID NO: 211211 - RNA, 22 nt, Human
ugggagcaguugugaagcucag

SEQ ID NO: 211212 - RNA, 22 nt, Human
auacacuuccaaauauugauua

SEQ ID NO: 211213 - RNA, 22 nt, Human
ccagaaagaaugaacugaaccc

SEQ ID NO: 211214 - RNA, 22 nt, Human
cuccucccaauugccaagugcu

SEQ ID NO: 211215 - RNA, 22 nt, Human
uccaggcagcccuuccugacuc

SEQ ID NO: 211216 - RNA, 22 nt, Human
guuauaaaugacugcaaaaguu

SEQ ID NO: 211217 - RNA, 22 nt, Human
ggcugcucaaggacucugaucg

SEQ ID NO: 211218 - RNA, 22 nt, Human
aagucacauucugagguauugg

SEQ ID NO: 211219 - RNA, 22 nt, Human
gggcagugacaaaggggaugaa

SEQ ID NO: 211220 - RNA, 22 nt, Human
gcugagaguccaggaaaacauc

SEQ ID NO: 211221 - RNA, 22 nt, Human
ucugccaguauucacggcccgu

SEQ ID NO: 211222 - RNA, 22 nt, Human
ugcaauacauacuuagacccag

SEQ ID NO: 211223 - RNA, 17 nt, Human
ccugagugggagaggaa

SEQ ID NO: 211224 - RNA, 22 nt, Human
uggaauuaauaggggauauaca

SEQ ID NO: 211225 - RNA, 22 nt, Human
uuccuggcauuaugggaggcug

SEQ ID NO: 211226 - RNA, 22 nt, Human
ccaggagcuauguacacacuau

SEQ ID NO: 211227 - RNA, 22 nt, Human
cagucuccaaaucagucugaau

SEQ ID NO: 211228 - RNA, 22 nt, Human
cauccagugggacagagaaacc

SEQ ID NO: 211229 - RNA, 22 nt, Human
uaugagaacaagaacaaucucc

SEQ ID NO: 211230 - RNA, 22 nt, Human
uuuacagucucuauagucaaaa

SEQ ID NO: 211231 - RNA, 22 nt, Human
agccaggauuggcugagccuua

SEQ ID NO: 211232 - RNA, 22 nt, Human
cgugacagggucuggcugguca

SEQ ID NO: 211233 - RNA, 22 nt, Human
agcagggacugagccaguggga

SEQ ID NO: 211234 - RNA, 21 nt, Human
acagcuggugcagggcgggga

SEQ ID NO: 211235 - RNA, 22 nt, Human
uuucauuggcucccugaugaau

SEQ ID NO: 211236 - RNA, 22 nt, Human
uagggcagauucgguggaguuu

SEQ ID NO: 211237 - RNA, 22 nt, Human
cucaggcucauaucccaucagc

SEQ ID NO: 211238 - RNA, 22 nt, Human
gcuaucuucauggaaauacagg

SEQ ID NO: 211239 - RNA, 22 nt, Human
ugacuugucucuuugggagaca

SEQ ID NO: 211240 - RNA, 22 nt, Human
aaaugguagguuuucuuaagaa

SEQ ID NO: 211241 - RNA, 22 nt, Human
agcaaguaguaccaaguagcuc

SEQ ID NO: 211242 - RNA, 22 nt, Human
cuuaggaacgcucugccuagug

SEQ ID NO: 211243 - RNA, 18 nt, Human
acauuucuaugcuucugg

SEQ ID NO: 211244 - RNA, 22 nt, Human
agaugccugccaguuauuuagc

SEQ ID NO: 211245 - RNA, 22 nt, Human
uuccuucugaagccuuuguguu

SEQ ID NO: 211246 - RNA, 22 nt, Human
cuuguuuaaauaagauagcagu

SEQ ID NO: 211247 - RNA, 22 nt, Human
gacagguguguguauauuaggg

SEQ ID NO: 211248 - RNA, 22 nt, Human
ccuggcucauuaugugccccca

SEQ ID NO: 211249 - RNA, 22 nt, Human
ggacagagggcaggagcccaga

SEQ ID NO: 211250 - RNA, 22 nt, Human
ccauucugccaugcuucaucua

SEQ ID NO: 211251 - RNA, 22 nt, Human
aagcccuggauuaaagaugcca

SEQ ID NO: 211252 - RNA, 22 nt, Human
guccagggaaauagcgacaggg

SEQ ID NO: 211253 - RNA, 22 nt, Human
gacagaguuguugauguaugcu

SEQ ID NO: 211254 - RNA, 22 nt, Human
caagauguuaaaaccacccuug

SEQ ID NO: 211255 - RNA, 22 nt, Human
caggcuccauuaaucauccugc

SEQ ID NO: 211256 - RNA, 22 nt, Human
ugugggaugguuuugccagaau

SEQ ID NO: 211257 - RNA, 22 nt, Human
ucucuggggccuuucuacauca

SEQ ID NO: 211258 - RNA, 22 nt, Human
gccuguuuuugcuucguuuaag

SEQ ID NO: 211259 - RNA, 22 nt, Human
uaaugucagcauaguuuauuuu

SEQ ID NO: 211260 - RNA, 22 nt, Human
agaauuagaggccauguacuug

SEQ ID NO: 211261 - RNA, 22 nt, Human
cuugcuucauuagugucuuagu

SEQ ID NO: 211262 - RNA, 22 nt, Human
augcccugcugcuggggcagug

SEQ ID NO: 211263 - RNA, 22 nt, Human
gacaagauuuagagucugcuaa

SEQ ID NO: 211264 - RNA, 22 nt, Human
aucuucugggcagugaaaauug

SEQ ID NO: 211265 - RNA, 22 nt, Human
uaauauauaccuuuguuaggaa

SEQ ID NO: 211266 - RNA, 22 nt, Human
ucaauucaauugaacaguuacu

SEQ ID NO: 211267 - RNA, 20 nt, Human
ucucaggccccaguuuucuu

SEQ ID NO: 211268 - RNA, 22 nt, Human
agaaggcagaugggacggagca

SEQ ID NO: 211269 - RNA, 22 nt, Human
ggugcugaauucuggaggaggc

SEQ ID NO: 211270 - RNA, 22 nt, Human
uggagaauucuauguugagggg

SEQ ID NO: 211271 - RNA, 22 nt, Human
uucauguagcuuagcagagagg

SEQ ID NO: 211272 - RNA, 22 nt, Human
ugccagucucacccuggguccu

SEQ ID NO: 211273 - RNA, 22 nt, Human
uugcaaaagccgaggcacucca

SEQ ID NO: 211274 - RNA, 22 nt, Human
auuucauagauuguaaaucccu

SEQ ID NO: 211275 - RNA, 22 nt, Human
gcagccaagaccccaagaacug

SEQ ID NO: 211276 - RNA, 22 nt, Human
cauaaucccaggcuugcauuca

SEQ ID NO: 211277 - RNA, 22 nt, Human
cugccagcuagcuccuaguuga

SEQ ID NO: 211278 - RNA, 22 nt, Human
ggccucugaggacagccuuggc

SEQ ID NO: 211279 - RNA, 22 nt, Human
agcacaggcuuuggugugaggg

SEQ ID NO: 211280 - RNA, 22 nt, Human
uggcugagaaugggaugaugcc

SEQ ID NO: 211281 - RNA, 22 nt, Human
agugugagcccuggaguggugc

SEQ ID NO: 211282 - RNA, 22 nt, Human
agucacaugagcacuaauuagg

SEQ ID NO: 211283 - RNA, 22 nt, Human
cucaggcugucuaauggauuag

SEQ ID NO: 211284 - RNA, 22 nt, Human
cucuggaguuagugaucugggc

SEQ ID NO: 211285 - RNA, 22 nt, Human
accacugucuacacauugacuc

SEQ ID NO: 211286 - RNA, 22 nt, Human
agggggugggaagucuagaauc

SEQ ID NO: 211287 - RNA, 22 nt, Human
cugcugugcuuguggccacccg

SEQ ID NO: 211288 - RNA, 22 nt, Human
uucuuugcccauguuuccuaag

SEQ ID NO: 211289 - RNA, 21 nt, Human
uucaucuggccguauuccagg

SEQ ID NO: 211290 - RNA, 18 nt, Human
acauuucuccuucugacc

SEQ ID NO: 211291 - RNA, 22 nt, Human
auccaaagaaugcuuagaccug

SEQ ID NO: 211292 - RNA, 22 nt, Human
gaagcuggcugaaguucagcua

SEQ ID NO: 211293 - RNA, 23 nt, Human
agggcugaugccauugcagcucu

SEQ ID NO: 211294 - RNA, 22 nt, Human
aauaguacaaucuacagacaua

SEQ ID NO: 211295 - RNA, 22 nt, Human
ggaagcuguuaucaucuguauc

SEQ ID NO: 211296 - RNA, 22 nt, Human
cuuggccugcaggcagcagcgc

SEQ ID NO: 211297 - RNA, 19 nt, Human
gccaggccuggaccugcag

SEQ ID NO: 211298 - RNA, 22 nt, Human
acucuggcagcagaaccagugu

SEQ ID NO: 211299 - RNA, 22 nt, Human
ucucugcaucccagggcucagc

SEQ ID NO: 211300 - RNA, 22 nt, Human
ucaggagggugacaggcccugg

SEQ ID NO: 211301 - RNA, 19 nt, Human
uagaaagaugauggguggg

SEQ ID NO: 211302 - RNA, 23 nt, Human
aaguacauauauuuagauaguga

SEQ ID NO: 211303 - RNA, 22 nt, Human
cugcaggacugaaagaugaggu

SEQ ID NO: 211304 - RNA, 22 nt, Human
gcaaggagcaccuuucuggaac

SEQ ID NO: 211305 - RNA, 22 nt, Human
acagaccucuagauuacauuug

SEQ ID NO: 211306 - RNA, 22 nt, Human
cagcagguggacacacucaccu

SEQ ID NO: 211307 - RNA, 22 nt, Human
ccuugagaggaaguuuguagaa

SEQ ID NO: 211308 - RNA, 22 nt, Human
gcucagaggcacgaccucuugg

SEQ ID NO: 211309 - RNA, 22 nt, Human
uuugugauuaauuuucaaccuc

SEQ ID NO: 211310 - RNA, 22 nt, Human
ggaaggcuuugaggggugcugg

SEQ ID NO: 211311 - RNA, 22 nt, Human
ugggaugucuuuaggggaagag

SEQ ID NO: 211312 - RNA, 22 nt, Human
agggcuccaggggcugggugac

SEQ ID NO: 211313 - RNA, 22 nt, Human
auguuucucacuguuucucuau

SEQ ID NO: 211314 - RNA, 22 nt, Human
cucuccaggagcucagagucua

SEQ ID NO: 211315 - RNA, 16 nt, Human
ucuuaguuguguggua

SEQ ID NO: 211316 - RNA, 22 nt, Human
uagguagaaauagauauuggua

SEQ ID NO: 211317 - RNA, 22 nt, Human
cugaggcuggggaagggaagug

SEQ ID NO: 211318 - RNA, 22 nt, Human
gugcaaaaguacuugcggauuu

SEQ ID NO: 211319 - RNA, 22 nt, Human
guuacaauguccuuacaugaaa

SEQ ID NO: 211320 - RNA, 22 nt, Human
aggguccauguuuccaguuaau

SEQ ID NO: 211321 - RNA, 22 nt, Human
acagguggagugguuagcaggc

SEQ ID NO: 211322 - RNA, 22 nt, Human
uggccuuccuggugacucauga

SEQ ID NO: 211323 - RNA, 20 nt, Human
cuccaaggcuugcaggaggc

SEQ ID NO: 211324 - RNA, 22 nt, Human
uauacauguuuuacauaaguga

SEQ ID NO: 211325 - RNA, 21 nt, Human
ugacuaauugugauaaagugc

SEQ ID NO: 211326 - RNA, 22 nt, Human
augcuuuuaacuccuuuauccc

SEQ ID NO: 211327 - RNA, 22 nt, Human
gcagagaaaguuuuguccucag

SEQ ID NO: 211328 - RNA, 22 nt, Human
cuuuagaauuucauguuugguc

SEQ ID NO: 211329 - RNA, 22 nt, Human
uucaggauggaguaccuuuuau

SEQ ID NO: 211330 - RNA, 22 nt, Human
aaggcuccgugacuggggcuga

SEQ ID NO: 211331 - RNA, 22 nt, Human
augaagauacaggcagggccau

SEQ ID NO: 211332 - RNA, 22 nt, Human
uuguacagggaaguaauacaag

SEQ ID NO: 211333 - RNA, 22 nt, Human
aaugauacauauguaucguuag

SEQ ID NO: 211334 - RNA, 22 nt, Human
gccugagaucagccaagccccu

SEQ ID NO: 211335 - RNA, 22 nt, Human
aggcaggauugcugacaacaau

SEQ ID NO: 211336 - RNA, 22 nt, Human
cugggccugguagggcuugaaa

SEQ ID NO: 211337 - RNA, 22 nt, Human
aaggcagcccuggcucagccug

SEQ ID NO: 211338 - RNA, 22 nt, Human
guuucuuagguaaauucuuuga

SEQ ID NO: 211339 - RNA, 22 nt, Human
acauggcaaaagggacuuuaca

SEQ ID NO: 211340 - RNA, 22 nt, Human
uuggaggaugucggcauauuua

SEQ ID NO: 211341 - RNA, 22 nt, Human
cugugcccagcucccugacugc

SEQ ID NO: 211342 - RNA, 22 nt, Human
aaaggcuucuauuggacguugc

SEQ ID NO: 211343 - RNA, 22 nt, Human
uuuuccuauaugcaaagaaugc

SEQ ID NO: 211344 - RNA, 22 nt, Human
gcucugagugaucagcugggaa

SEQ ID NO: 211345 - RNA, 22 nt, Human
caucaaaguugguauauuugca

SEQ ID NO: 211346 - RNA, 22 nt, Human
cucugagcuuugcagccccugg

SEQ ID NO: 211347 - RNA, 22 nt, Human
gcugcugggguggagaaacgcu

SEQ ID NO: 211348 - RNA, 22 nt, Human
ucuucuccaguucauccuacca

SEQ ID NO: 211349 - RNA, 22 nt, Human
cacaaggaccucagauggauga

SEQ ID NO: 211350 - RNA, 22 nt, Human
gguggauggacucucgggggcc

SEQ ID NO: 211351 - RNA, 22 nt, Human
aaggugaacugguaaugacaga

SEQ ID NO: 211352 - RNA, 22 nt, Human
caaaagcaguucuaucugaguu

SEQ ID NO: 211353 - RNA, 17 nt, Human
guccugggaggagagag

SEQ ID NO: 211354 - RNA, 22 nt, Human
ucuucccagaggaggugccagc

SEQ ID NO: 211355 - RNA, 22 nt, Human
aaagacacacagccagcaagug

SEQ ID NO: 211356 - RNA, 22 nt, Human
ugggcucuagacuuuagugugg

SEQ ID NO: 211357 - RNA, 22 nt, Human
ugcagggcagauaugacuguag

SEQ ID NO: 211358 - RNA, 22 nt, Human
uauguguuugacacccugcaag

SEQ ID NO: 211359 - RNA, 22 nt, Human
gugucccagcagcacauuggcu

SEQ ID NO: 211360 - RNA, 21 nt, Human
accuuagagagaaagccauca

SEQ ID NO: 211361 - RNA, 22 nt, Human
ucucaguguuguucugcagaug

SEQ ID NO: 211362 - RNA, 22 nt, Human
ggucagguagcucugacaggcc

SEQ ID NO: 211363 - RNA, 22 nt, Human
uugggcagggaaaggacaggca

SEQ ID NO: 211364 - RNA, 22 nt, Human
ugagaacuugugcuauugcaca

SEQ ID NO: 211365 - RNA, 22 nt, Human
uggcucuggagcuccugggccc

SEQ ID NO: 211366 - RNA, 22 nt, Human
ugcccagcgcccacauucuguc

SEQ ID NO: 211367 - RNA, 22 nt, Human
agacaaagacagcaucucaggu

SEQ ID NO: 211368 - RNA, 22 nt, Human
gucagcaaggugcaagcggcug

SEQ ID NO: 211369 - RNA, 22 nt, Human
uggcuucugucccugcuacauu

SEQ ID NO: 211370 - RNA, 22 nt, Human
aaacaugcauucaagaaaaucu

SEQ ID NO: 211371 - RNA, 22 nt, Human
ccaggcuccgcauagaccccac

SEQ ID NO: 211372 - RNA, 22 nt, Human
auagauguguguaaguacauaa

SEQ ID NO: 211373 - RNA, 22 nt, Human
uguguccucacuguaugcaagg

SEQ ID NO: 211374 - RNA, 22 nt, Human
uaccaugucuucaauaagucua

SEQ ID NO: 211375 - RNA, 22 nt, Human
uaauuauaacaguuacaucuua

SEQ ID NO: 211376 - RNA, 22 nt, Human
cuuagcuagugcucagcuguca

SEQ ID NO: 211377 - RNA, 22 nt, Human
aguaggcauuuaauaaacauga

SEQ ID NO: 211378 - RNA, 22 nt, Human
accugagaaugggggcaugugu

SEQ ID NO: 211379 - RNA, 22 nt, Human
aagcccuguaaauugcccuuaa

SEQ ID NO: 211380 - RNA, 22 nt, Human
gcagacucugagagugagugcc

SEQ ID NO: 211381 - RNA, 22 nt, Human
ccagagaaccaucugcuugagg

SEQ ID NO: 211382 - RNA, 22 nt, Human
gucugcccugagcucccagugc

SEQ ID NO: 211383 - RNA, 23 nt, Human
aagucagagccaagucaaugaga

SEQ ID NO: 211384 - RNA, 22 nt, Human
aaacugcaggucaugacccauu

SEQ ID NO: 211385 - RNA, 22 nt, Human
augagaaaguuaaucaucauga

SEQ ID NO: 211386 - RNA, 22 nt, Human
cuggaaaggguccucauucugu

SEQ ID NO: 211387 - RNA, 22 nt, Human
gagcugaacaucauggaaaggc

SEQ ID NO: 211388 - RNA, 22 nt, Human
aaguacaaucuuucuguaaagg

SEQ ID NO: 211389 - RNA, 22 nt, Human
cauuagaagguuuuaaaggaau

SEQ ID NO: 211390 - RNA, 22 nt, Human
ucucagagaaaugugucaccau

SEQ ID NO: 211391 - RNA, 22 nt, Human
gcaucuuucuguccauucagca

SEQ ID NO: 211392 - RNA, 22 nt, Human
uguuacuauuaguuugagcaua

SEQ ID NO: 211393 - RNA, 22 nt, Human
auugcaaagaaauacaugcuua

SEQ ID NO: 211394 - RNA, 22 nt, Human
gcccuucauuuauaguuggaau

SEQ ID NO: 211395 - RNA, 22 nt, Human
agaggaacccagacagggcuuu

SEQ ID NO: 211396 - RNA, 22 nt, Human
uuuucaagagaguguucuaugu

SEQ ID NO: 211397 - RNA, 22 nt, Human
acucacugcacuuugaaaugug

SEQ ID NO: 211398 - RNA, 22 nt, Human
gaaagugcagucagacaaggca

SEQ ID NO: 211399 - RNA, 22 nt, Human
gaaggucaccuccccucucugg

SEQ ID NO: 211400 - RNA, 23 nt, Human
ucucaggcaaaccaggacaaguu

SEQ ID NO: 211401 - RNA, 22 nt, Human
uguggaaaauuggaacguuccu

SEQ ID NO: 211402 - RNA, 22 nt, Human
uccaggaaugugugugggcuag

SEQ ID NO: 211403 - RNA, 22 nt, Human
cauggcaacaacucuuuauucc

SEQ ID NO: 211404 - RNA, 22 nt, Human
gcucuuugcacagcucugcccu

SEQ ID NO: 211405 - RNA, 22 nt, Human
ugcuuucaaaggcuuucuagau

SEQ ID NO: 211406 - RNA, 21 nt, Human
agcuguggcgaggggaacaug

SEQ ID NO: 211407 - RNA, 22 nt, Human
uagaaaucuuguuacuaugugu

SEQ ID NO: 211408 - RNA, 22 nt, Human
guuuacauauuuuaauugguga

SEQ ID NO: 211409 - RNA, 22 nt, Human
ggccucagaccggagcuggcca

SEQ ID NO: 211410 - RNA, 19 nt, Human
uguguccuagcagccaguc

SEQ ID NO: 211411 - RNA, 22 nt, Human
guugccuucuaugauucucagu

SEQ ID NO: 211412 - RNA, 22 nt, Human
gaggccagaaugagcugaaugc

SEQ ID NO: 211413 - RNA, 22 nt, Human
uacacuaauagccacacuaaug

SEQ ID NO: 211414 - RNA, 22 nt, Human
ucagggcacugucaccugauau

SEQ ID NO: 211415 - RNA, 22 nt, Human
ucucagagaugucaagagucua

SEQ ID NO: 211416 - RNA, 22 nt, Human
ugccucuuggagccuuuccucu

SEQ ID NO: 211417 - RNA, 20 nt, Human
aacacagauaccaaagguug

SEQ ID NO: 211418 - RNA, 20 nt, Human
cccagagccauagccagaca

SEQ ID NO: 211419 - RNA, 22 nt, Human
cuguaaaaugaaccuagucauc

SEQ ID NO: 211420 - RNA, 22 nt, Human
aguauacaguaaugacauaucu

SEQ ID NO: 211421 - RNA, 22 nt, Human
uggggugggcaugcgcuguccu

SEQ ID NO: 211422 - RNA, 22 nt, Human
ucacagagaaauguggcacaaa

SEQ ID NO: 211423 - RNA, 22 nt, Human
gagggguguggagccaucaguu

SEQ ID NO: 211424 - RNA, 22 nt, Human
auuaguguuguggcuucauggc

SEQ ID NO: 211425 - RNA, 22 nt, Human
acucaggcuagggaaaaagugg

SEQ ID NO: 211426 - RNA, 22 nt, Human
caggagcucacugucuaauggg

SEQ ID NO: 211427 - RNA, 22 nt, Human
cacaguuucugaacacuuugca

SEQ ID NO: 211428 - RNA, 22 nt, Human
agcuuuauucaugauuucaggg

SEQ ID NO: 211429 - RNA, 22 nt, Human
aagggcugcaauccaaaacacu

SEQ ID NO: 211430 - RNA, 22 nt, Human
ucugagcuucccucugaggcag

SEQ ID NO: 211431 - RNA, 23 nt, Human
ucugggccacuugucugcacuuc

SEQ ID NO: 211432 - RNA, 22 nt, Human
cuguucuaucauuaaaagcuau

SEQ ID NO: 211433 - RNA, 22 nt, Human
aguuucaguguugacagauggu

SEQ ID NO: 211434 - RNA, 18 nt, Human
acagaggcagacauguau

SEQ ID NO: 211435 - RNA, 22 nt, Human
agggcacagccuaaagccuaug

SEQ ID NO: 211436 - RNA, 21 nt, Human
cccaggaguccuauuuaaaug

SEQ ID NO: 211437 - RNA, 22 nt, Human
uggcccaaagcagcccagcagg

SEQ ID NO: 211438 - RNA, 18 nt, Human
uggcuucuauuuuacuca

SEQ ID NO: 211439 - RNA, 22 nt, Human
cugcugggggacacagguccgg

SEQ ID NO: 211440 - RNA, 22 nt, Human
acuuuguucuaauaguaucucu

SEQ ID NO: 211441 - RNA, 22 nt, Human
gcauuagauauccuugaaguua

SEQ ID NO: 211442 - RNA, 22 nt, Human
aggaaugucauagaauaaucau

SEQ ID NO: 211443 - RNA, 23 nt, Human
cugcuguguuggucucgauggga

SEQ ID NO: 211444 - RNA, 22 nt, Human
gacucugggcugagccagggcc

SEQ ID NO: 211445 - RNA, 22 nt, Human
uggacaggugagugacucaggg

SEQ ID NO: 211446 - RNA, 22 nt, Human
cagguucuggggcuccacugug

SEQ ID NO: 211447 - RNA, 22 nt, Human
aggcccugaccugggagaucua

SEQ ID NO: 211448 - RNA, 22 nt, Human
ucuuagaaacuguaucgauuag

SEQ ID NO: 211449 - RNA, 22 nt, Human
cugcagagaugaagaagguggc

SEQ ID NO: 211450 - RNA, 22 nt, Human
acucccugcaagauuuuccaug

SEQ ID NO: 211451 - RNA, 22 nt, Human
augcaaauuaacauauaguaga

SEQ ID NO: 211452 - RNA, 21 nt, Human
gcucuccagggccagcccagg

SEQ ID NO: 211453 - RNA, 22 nt, Human
aagcagaauuuaauagaaaggu

SEQ ID NO: 211454 - RNA, 22 nt, Human
uucuagaagaacuagccaggaa

SEQ ID NO: 211455 - RNA, 22 nt, Human
gggggcagaauguacucuuguc

SEQ ID NO: 211456 - RNA, 22 nt, Human
aucaggaaagaaaagcuuggcg

SEQ ID NO: 211457 - RNA, 22 nt, Human
aagcccuguuaggcacugggga

SEQ ID NO: 211458 - RNA, 22 nt, Human
aacagugcugcauucauugagc

SEQ ID NO: 211459 - RNA, 22 nt, Human
guuuaaguuucagaagcuaaga

SEQ ID NO: 211460 - RNA, 22 nt, Human
caugucuugcccugauuaguag

SEQ ID NO: 211461 - RNA, 22 nt, Human
acagcaggagccuucauaugcu

SEQ ID NO: 211462 - RNA, 22 nt, Human
ugaagcaaauuuuucucagagu

SEQ ID NO: 211463 - RNA, 22 nt, Human
uguccucacaugguggggagag

SEQ ID NO: 211464 - RNA, 22 nt, Human
acaauacucaugcucuuuuucu

SEQ ID NO: 211465 - RNA, 22 nt, Human
uaaacauuuguuauucuuguuu

SEQ ID NO: 211466 - RNA, 22 nt, Human
uaagacacauuggaguagauga

SEQ ID NO: 211467 - RNA, 22 nt, Human
gggccagcaguaucggaggcau

SEQ ID NO: 211468 - RNA, 22 nt, Human
ccugcccaucccguccuuggcc

SEQ ID NO: 211469 - RNA, 22 nt, Human
gaggcugcaggcaaugcugccc

SEQ ID NO: 211470 - RNA, 22 nt, Human
uguaugcacauauauagguaca

SEQ ID NO: 211471 - RNA, 22 nt, Human
ucaagaaggagacuccacugug

SEQ ID NO: 211472 - RNA, 22 nt, Human
acauucauggguuuuacauuau

SEQ ID NO: 211473 - RNA, 22 nt, Human
guuuccugcacacguguuauau

SEQ ID NO: 211474 - RNA, 22 nt, Human
acagacuggaggagaauaguuu

SEQ ID NO: 211475 - RNA, 22 nt, Human
auuauuaggacuacugggguug

SEQ ID NO: 211476 - RNA, 22 nt, Human
uggggccugaaagguucucgcc

SEQ ID NO: 211477 - RNA, 22 nt, Human
gcuccugucaucaaacaauccu

SEQ ID NO: 211478 - RNA, 22 nt, Human
cacaugaauucacauguauuuu

SEQ ID NO: 211479 - RNA, 22 nt, Human
ucugucauaagugcugaaguau

SEQ ID NO: 211480 - RNA, 22 nt, Human
gcaguggcaccgcuggcucugg

SEQ ID NO: 211481 - RNA, 20 nt, Human
aagucacuuaagaugggcag

SEQ ID NO: 211482 - RNA, 22 nt, Human
acugccuuccaccuauggauga

SEQ ID NO: 211483 - RNA, 22 nt, Human
cuacaugaauggguguauuacu

SEQ ID NO: 211484 - RNA, 22 nt, Human
acauguggguuuuauuuugcau

SEQ ID NO: 211485 - RNA, 22 nt, Human
ggaggccaugaggcucuaggug

SEQ ID NO: 211486 - RNA, 22 nt, Human
agaacagucguggugagagaaa

SEQ ID NO: 211487 - RNA, 22 nt, Human
ugaaggaaugagggaguggguc

SEQ ID NO: 211488 - RNA, 22 nt, Human
ugcaggaaguuuccugaacuuu

SEQ ID NO: 211489 - RNA, 22 nt, Human
cuacaggcucagggagcccucu

SEQ ID NO: 211490 - RNA, 22 nt, Human
auuagagcaguaauuguggcag

SEQ ID NO: 211491 - RNA, 22 nt, Human
guaacacuggcaccgucucaca

SEQ ID NO: 211492 - RNA, 22 nt, Human
acauucauugagcaacaacaau

SEQ ID NO: 211493 - RNA, 22 nt, Human
gggaggaaaugugcagcgaauu

SEQ ID NO: 211494 - RNA, 23 nt, Human
auccaugugagaauagacuagca

SEQ ID NO: 211495 - RNA, 20 nt, Human
acauaugaaugauagagcca

SEQ ID NO: 211496 - RNA, 22 nt, Human
ugggaucuuuugagauacugug

SEQ ID NO: 211497 - RNA, 22 nt, Human
gagggcugauaaaugcgcaugg

SEQ ID NO: 211498 - RNA, 22 nt, Human
cuaaagcucaacaggcacuauu

SEQ ID NO: 211499 - RNA, 22 nt, Human
uuauuagggugguuuauguucu

SEQ ID NO: 211500 - RNA, 20 nt, Human
caacagaggggucuggagua

SEQ ID NO: 211501 - RNA, 22 nt, Human
aaaauagaugaaaggaagucug

SEQ ID NO: 211502 - RNA, 22 nt, Human
ccuggcucagcagcucuuucuc

SEQ ID NO: 211503 - RNA, 18 nt, Human
uguuuauuuuucucuuac

SEQ ID NO: 211504 - RNA, 22 nt, Human
agagaaugcagggcuucggaca

SEQ ID NO: 211505 - RNA, 18 nt, Human
ugagaggcagguagagga

SEQ ID NO: 211506 - RNA, 22 nt, Human
gagcccuuuuccuagauacugu

SEQ ID NO: 211507 - RNA, 22 nt, Human
gcacagaaaugucuacacaugu

SEQ ID NO: 211508 - RNA, 22 nt, Human
cccugggcaccaggccugguaa

SEQ ID NO: 211509 - RNA, 21 nt, Human
ucuccagugcuucugccucuu

SEQ ID NO: 211510 - RNA, 22 nt, Human
aagccuuaaauguuucuaauau

SEQ ID NO: 211511 - RNA, 21 nt, Human
gcccuaggcuaccuggagcgc

SEQ ID NO: 211512 - RNA, 15 nt, Human
gcauguguaauaggc

SEQ ID NO: 211513 - RNA, 22 nt, Human
uucucaguuucauagcugagca

SEQ ID NO: 211514 - RNA, 22 nt, Human
guggcuuccaagacuaagucac

SEQ ID NO: 211515 - RNA, 22 nt, Human
gggaugagaguagggugugaaa

SEQ ID NO: 211516 - RNA, 20 nt, Human
uucuuaaagaccucacuuug

SEQ ID NO: 211517 - RNA, 22 nt, Human
ugcuucuccauugaugcuaagu

SEQ ID NO: 211518 - RNA, 22 nt, Human
caugauaacuucauuacacaau

SEQ ID NO: 211519 - RNA, 22 nt, Human
gguggcuggaggagcugaugga

SEQ ID NO: 211520 - RNA, 22 nt, Human
cacacauggcugccagggaggu

SEQ ID NO: 211521 - RNA, 19 nt, Human
agcuguggggccuagcacc

SEQ ID NO: 211522 - RNA, 22 nt, Human
cacuggugaguccagaagucau

SEQ ID NO: 211523 - RNA, 22 nt, Human
agaugggugccuucuuucuuua

SEQ ID NO: 211524 - RNA, 20 nt, Human
gaggcccagagaggugaagc

SEQ ID NO: 211525 - RNA, 18 nt, Human
cuccuggcugauggugag

SEQ ID NO: 211526 - RNA, 22 nt, Human
uauuuuacaaaugggaaugcug

SEQ ID NO: 211527 - RNA, 22 nt, Human
ccaggagacaaagaugacugcu

SEQ ID NO: 211528 - RNA, 22 nt, Human
gggcagcuccuguggaauccac

SEQ ID NO: 211529 - RNA, 22 nt, Human
agcaguuuuagggagacacauu

SEQ ID NO: 211530 - RNA, 22 nt, Human
acucuguacucuagaggaagug

SEQ ID NO: 211531 - RNA, 22 nt, Human
aaguaccaaguuuguuugacgc

SEQ ID NO: 211532 - RNA, 22 nt, Human
gugacccaggacacuguguauc

SEQ ID NO: 211533 - RNA, 22 nt, Human
guacaaaugagaguucuguuuu

SEQ ID NO: 211534 - RNA, 22 nt, Human
uagacacaagagaaggguauaa

SEQ ID NO: 211535 - RNA, 22 nt, Human
ucagagaguuuucacuagggug

SEQ ID NO: 211536 - RNA, 23 nt, Human
cauuucugggagauuuauaaaau

SEQ ID NO: 211537 - RNA, 22 nt, Human
agaggauucacugcagaagaca

SEQ ID NO: 211538 - RNA, 22 nt, Human
uucagaaugugaccuuauuugg

SEQ ID NO: 211539 - RNA, 22 nt, Human
ccugggcuuucggcggcuuccu

SEQ ID NO: 211540 - RNA, 22 nt, Human
uccugguaggcuaugucauguc

SEQ ID NO: 211541 - RNA, 22 nt, Human
acagaaaaugccagaagggugg

SEQ ID NO: 211542 - RNA, 22 nt, Human
ggagcuccuggcagugacagag

SEQ ID NO: 211543 - RNA, 22 nt, Human
gagucuuugguaaagucugcug

SEQ ID NO: 211544 - RNA, 22 nt, Human
uuagugcuucuguccaaauaua

SEQ ID NO: 211545 - RNA, 22 nt, Human
ggauggcaggacaaggacccag

SEQ ID NO: 211546 - RNA, 20 nt, Human
ugggugagaguguuugcucu

SEQ ID NO: 211547 - RNA, 22 nt, Human
gauaaacuggaaccauugccuc

SEQ ID NO: 211548 - RNA, 19 nt, Human
cacacccaugcuugccaag

SEQ ID NO: 211549 - RNA, 21 nt, Human
uaagacaguaugaauacuuuc

SEQ ID NO: 211550 - RNA, 22 nt, Human
aaggcugaggagggccugcagg

SEQ ID NO: 211551 - RNA, 22 nt, Human
cccagacauugcagggacuggu

SEQ ID NO: 211552 - RNA, 22 nt, Human
cucugcagaggcccaaggcuga

SEQ ID NO: 211553 - RNA, 22 nt, Human
ggcagugaugucaaacagugaa

SEQ ID NO: 211554 - RNA, 20 nt, Human
ugcugcugugagcgucccug

SEQ ID NO: 211555 - RNA, 22 nt, Human
cuucaagaagacagcagagcau

SEQ ID NO: 211556 - RNA, 22 nt, Human
aguguauucagaauguagcaaa

SEQ ID NO: 211557 - RNA, 22 nt, Human
ggccuugagcagggagaaacca

SEQ ID NO: 211558 - RNA, 22 nt, Human
caguucagcuagaagaaacaaa

SEQ ID NO: 211559 - RNA, 22 nt, Human
cacagggccuggggcagcugcu

SEQ ID NO: 211560 - RNA, 22 nt, Human
gagggccuacuggacaugucag

SEQ ID NO: 211561 - RNA, 22 nt, Human
augguacaauuuucauuugugg

SEQ ID NO: 211562 - RNA, 22 nt, Human
aacacuuuuuaguaaagauuga

SEQ ID NO: 211563 - RNA, 22 nt, Human
gauucugagcugguguuuuacg

SEQ ID NO: 211564 - RNA, 22 nt, Human
agcuccuccugugccaggccag

SEQ ID NO: 211565 - RNA, 22 nt, Human
uccaucauguucacagcuauau

SEQ ID NO: 211566 - RNA, 22 nt, Human
aggcugcuuccuuacguggcug

SEQ ID NO: 211567 - RNA, 22 nt, Human
ugaggccaggaucccaggcucu

SEQ ID NO: 211568 - RNA, 22 nt, Human
uccuggcaggguggcagcgggu

SEQ ID NO: 211569 - RNA, 22 nt, Human
agcaccugcacaguggaggaaa

SEQ ID NO: 211570 - RNA, 22 nt, Human
ucaggcaguagaauugcuugaa

SEQ ID NO: 211571 - RNA, 22 nt, Human
cagugagguggauggauggccu

SEQ ID NO: 211572 - RNA, 22 nt, Human
auuucuagguucacauguguuu

SEQ ID NO: 211573 - RNA, 22 nt, Human
ugaguucucacccauucuucuu

SEQ ID NO: 211574 - RNA, 22 nt, Human
uagggauguaaacauaguaauu

SEQ ID NO: 211575 - RNA, 22 nt, Human
ugcauguuaagaaaauauugag

SEQ ID NO: 211576 - RNA, 22 nt, Human
gcacaguuaaagggucauguga

SEQ ID NO: 211577 - RNA, 22 nt, Human
aggaaagaaguacauucucaug

SEQ ID NO: 211578 - RNA, 22 nt, Human
ccugagcucaagaaggugacca

SEQ ID NO: 211579 - RNA, 23 nt, Human
uggaggaaacacaucagaagacc

SEQ ID NO: 211580 - RNA, 23 nt, Human
cagucucuccccggacagcaaaa

SEQ ID NO: 211581 - RNA, 22 nt, Human
cuucauuggcuuccauagaugc

SEQ ID NO: 211582 - RNA, 22 nt, Human
uccuccugucuaccaguuccug

SEQ ID NO: 211583 - RNA, 22 nt, Human
ccagggaugcuuucccaggacu

SEQ ID NO: 211584 - RNA, 22 nt, Human
gggggcuggacuuucccacaca

SEQ ID NO: 211585 - RNA, 22 nt, Human
auuuguuccacacauauuuacu

SEQ ID NO: 211586 - RNA, 22 nt, Human
ucaguucuaacaguuuagaaca

SEQ ID NO: 211587 - RNA, 22 nt, Human
cuguuuaaugagguguaacaac

SEQ ID NO: 211588 - RNA, 18 nt, Human
ugggccugcauccuaguc

SEQ ID NO: 211589 - RNA, 20 nt, Human
uucuucucuaguuaucuuca

SEQ ID NO: 211590 - RNA, 22 nt, Human
ucugggcucacgagucuggaca

SEQ ID NO: 211591 - RNA, 22 nt, Human
gccuggcaggccugggccagca

SEQ ID NO: 211592 - RNA, 21 nt, Human
ugggcucuuuaacccaggcac

SEQ ID NO: 211593 - RNA, 22 nt, Human
cagacagaaggaaggccaacau

SEQ ID NO: 211594 - RNA, 22 nt, Human
cacuugaaaguaaugguugugc

SEQ ID NO: 211595 - RNA, 22 nt, Human
uuagagcuacggccuuuaaaaa

SEQ ID NO: 211596 - RNA, 22 nt, Human
ugggaccugaagcagguuggca

SEQ ID NO: 211597 - RNA, 22 nt, Human
cuggggaacaauuugccacacu

SEQ ID NO: 211598 - RNA, 22 nt, Human
ugcaguggaaagacucagacuu

SEQ ID NO: 211599 - RNA, 22 nt, Human
aggaaagcuuggcaaacuaaau

SEQ ID NO: 211600 - RNA, 22 nt, Human
aaaguauguuguggcuuuuaaa

SEQ ID NO: 211601 - RNA, 18 nt, Human
auggcagaugauaagugc

SEQ ID NO: 211602 - RNA, 22 nt, Human
aaagcacuucaggagcaguuug

SEQ ID NO: 211603 - RNA, 22 nt, Human
uccugagcugacacuuggggag

SEQ ID NO: 211604 - RNA, 22 nt, Human
aucuguggccaaaagacuguug

SEQ ID NO: 211605 - RNA, 22 nt, Human
aaaacacacuggaccaauuuaa

SEQ ID NO: 211606 - RNA, 22 nt, Human
aaagagcuuuagaaaucucaga

SEQ ID NO: 211607 - RNA, 22 nt, Human
gaggcuucuguaacccuguccu

SEQ ID NO: 211608 - RNA, 22 nt, Human
gaugaaggggcuggugcccucu

SEQ ID NO: 211609 - RNA, 22 nt, Human
uuucuguaauuggccaagucac

SEQ ID NO: 211610 - RNA, 22 nt, Human
uuuccaaauaaggucacauucu

SEQ ID NO: 211611 - RNA, 22 nt, Human
uaacacuguaaaccuagauguu

SEQ ID NO: 211612 - RNA, 22 nt, Human
uuggaaauugcaagugauuugc

SEQ ID NO: 211613 - RNA, 22 nt, Human
ggcacagagcccagcuuccuag

SEQ ID NO: 211614 - RNA, 22 nt, Human
uggcacaggaucucagcggcca

SEQ ID NO: 211615 - RNA, 16 nt, Human
uccuggccccuaugga

SEQ ID NO: 211616 - RNA, 22 nt, Human
ggcucuggagcacagacgucug

SEQ ID NO: 211617 - RNA, 22 nt, Human
ucugcccugcagggagcaguaa

SEQ ID NO: 211618 - RNA, 22 nt, Human
ugggccuggagcccuggagagu

SEQ ID NO: 211619 - RNA, 22 nt, Human
cuacagagaacucagcugcccu

SEQ ID NO: 211620 - RNA, 22 nt, Human
acauuuccuaacguauacacug

SEQ ID NO: 211621 - RNA, 22 nt, Human
uugcagcugugagcuuuacacg

SEQ ID NO: 211622 - RNA, 19 nt, Human
acagcagguguggggauaa

SEQ ID NO: 211623 - RNA, 22 nt, Human
agcaggcuaaucuugcugaaca

SEQ ID NO: 211624 - RNA, 22 nt, Human
cagugcaaugcagaugacacca

SEQ ID NO: 211625 - RNA, 22 nt, Human
gcaguguuaggaauaaaaauga

SEQ ID NO: 211626 - RNA, 22 nt, Human
acaguugagaugcaacuuuggg

SEQ ID NO: 211627 - RNA, 22 nt, Human
ugagagcaacacgcaguaguau

SEQ ID NO: 211628 - RNA, 22 nt, Human
ccagcuggcacuguggcugccc

SEQ ID NO: 211629 - RNA, 22 nt, Human
acagccagaucugagagaucuu

SEQ ID NO: 211630 - RNA, 22 nt, Human
auacaguauaacuaauaaaccc

SEQ ID NO: 211631 - RNA, 22 nt, Human
uaauagaauaguggaaacauug

SEQ ID NO: 211632 - RNA, 22 nt, Human
ucugcccugccauucacuggaa

SEQ ID NO: 211633 - RNA, 22 nt, Human
caggucucucccaagcuacaau

SEQ ID NO: 211634 - RNA, 22 nt, Human
cuagaaaaauacuuuauuguga

SEQ ID NO: 211635 - RNA, 22 nt, Human
gccaggcagagccccgugcagc

SEQ ID NO: 211636 - RNA, 22 nt, Human
uggccagaaccugcaguaggcc

SEQ ID NO: 211637 - RNA, 22 nt, Human
ucacagaauaaauugagaagac

SEQ ID NO: 211638 - RNA, 22 nt, Human
uggcacagaccuuaucuucucu

SEQ ID NO: 211639 - RNA, 17 nt, Human
aaacuggggucaggagc

SEQ ID NO: 211640 - RNA, 22 nt, Human
ucccacauaugcaauccugaau

SEQ ID NO: 211641 - RNA, 22 nt, Human
aucucauuuugguuucuacuua

SEQ ID NO: 211642 - RNA, 22 nt, Human
uuuggucaaauauuauccugag

SEQ ID NO: 211643 - RNA, 22 nt, Human
agagcaaagggacauggaagag

SEQ ID NO: 211644 - RNA, 22 nt, Human
uggagggcaucuguggucaggc

SEQ ID NO: 211645 - RNA, 22 nt, Human
cugguacaguguuacaaaaugg

SEQ ID NO: 211646 - RNA, 22 nt, Human
gaauacacgaauagagcauggu

SEQ ID NO: 211647 - RNA, 22 nt, Human
uccagguaauuuggaugcuagu

SEQ ID NO: 211648 - RNA, 22 nt, Human
cugcccugcccaggccuugggc

SEQ ID NO: 211649 - RNA, 22 nt, Human
ugcuuaaacccugaucaugugu

SEQ ID NO: 211650 - RNA, 22 nt, Human
cagguguauaaacucagugacu

SEQ ID NO: 211651 - RNA, 22 nt, Human
acagaagagcacauuuaguaug

SEQ ID NO: 211652 - RNA, 22 nt, Human
uggcuggcugucaaggaaagcc

SEQ ID NO: 211653 - RNA, 22 nt, Human
aggcuuucgaugaacgcuugcu

SEQ ID NO: 211654 - RNA, 22 nt, Human
cagagggcucuuggcugccugc

SEQ ID NO: 211655 - RNA, 22 nt, Human
cauugcaggagaguaaauaaaa

SEQ ID NO: 211656 - RNA, 22 nt, Human
uauucacaugaaaacaaauuuu

SEQ ID NO: 211657 - RNA, 19 nt, Human
aaaguguuuucuuuucugu

SEQ ID NO: 211658 - RNA, 22 nt, Human
auuuuccuucuaagaggaaggu

SEQ ID NO: 211659 - RNA, 22 nt, Human
cugaccaggguagaggugagag

SEQ ID NO: 211660 - RNA, 22 nt, Human
agagcugggacuuggacucaau

SEQ ID NO: 211661 - RNA, 22 nt, Human
uucaggagaaaguucaguacuu

SEQ ID NO: 211662 - RNA, 22 nt, Human
uggcgcaguuucucugcugccu

SEQ ID NO: 211663 - RNA, 23 nt, Human
uggcacagaggaccaugcuuugc

SEQ ID NO: 211664 - RNA, 22 nt, Human
ucuccugguacccuuccuagca

SEQ ID NO: 211665 - RNA, 23 nt, Human
uggccagguagaggagguaguga

SEQ ID NO: 211666 - RNA, 23 nt, Human
uaagugauuccaaguuucaggga

SEQ ID NO: 211667 - RNA, 22 nt, Human
cuggcaggcggagguugcagug

SEQ ID NO: 211668 - RNA, 22 nt, Human
uuauugcuauggugagagggau

SEQ ID NO: 211669 - RNA, 22 nt, Human
uuugagguuagcuagcagauca

SEQ ID NO: 211670 - RNA, 22 nt, Human
uccaggcccacucagcugaaau

SEQ ID NO: 211671 - RNA, 22 nt, Human
cccuggcugcuaccagguagcu

SEQ ID NO: 211672 - RNA, 22 nt, Human
uuuauuauucuguucucucuac

SEQ ID NO: 211673 - RNA, 22 nt, Human
uucacaauaggagcaugcaaau

SEQ ID NO: 211674 - RNA, 19 nt, Human
auucagugucucugacuuc

SEQ ID NO: 211675 - RNA, 22 nt, Human
agcuguguuauuagaaaccugc

SEQ ID NO: 211676 - RNA, 22 nt, Human
ucacagcauucgcaauggacag

SEQ ID NO: 211677 - RNA, 22 nt, Human
gaggggaguguccuccgggccc

SEQ ID NO: 211678 - RNA, 22 nt, Human
aggccagcauucucucuccagg

SEQ ID NO: 211679 - RNA, 22 nt, Human
cugccccugccaggcagcuguc

SEQ ID NO: 211680 - RNA, 22 nt, Human
cugaggggauguuuuugacgga

SEQ ID NO: 211681 - RNA, 22 nt, Human
uccucagacuucccuuugugua

SEQ ID NO: 211682 - RNA, 22 nt, Human
ggcccuguuagagcucccacaa

SEQ ID NO: 211683 - RNA, 22 nt, Human
uauuucuugagacucgucuucc

SEQ ID NO: 211684 - RNA, 22 nt, Human
agguuccagggauuaggaugug

SEQ ID NO: 211685 - RNA, 22 nt, Human
ggggcagggagguuaucgccga

SEQ ID NO: 211686 - RNA, 22 nt, Human
caaaaguaauuaugguuuuugc

SEQ ID NO: 211687 - RNA, 22 nt, Human
agggcccaugugggagcacuug

SEQ ID NO: 211688 - RNA, 22 nt, Human
aguuuuaaaugauggugguggu

SEQ ID NO: 211689 - RNA, 22 nt, Human
guucucuggagucccugggccc

SEQ ID NO: 211690 - RNA, 22 nt, Human
uuugcaaacuuuccucuggacc

SEQ ID NO: 211691 - RNA, 22 nt, Human
uggccuggggaagaccaugggc

SEQ ID NO: 211692 - RNA, 22 nt, Human
guccugugugagugcaccaccu

SEQ ID NO: 211693 - RNA, 22 nt, Human
cagggcaguaccgcccucuggc

SEQ ID NO: 211694 - RNA, 22 nt, Human
ugcaggugguccuuccucugcu

SEQ ID NO: 211695 - RNA, 22 nt, Human
augcuuuagugucaaguuuggg

SEQ ID NO: 211696 - RNA, 22 nt, Human
gaaacuuucaugaauauaagau

SEQ ID NO: 211697 - RNA, 22 nt, Human
cagcugagagacaaugagucau

SEQ ID NO: 211698 - RNA, 22 nt, Human
cagcagccugccuugggagcuu

SEQ ID NO: 211699 - RNA, 22 nt, Human
aaggcucuggguuucauaggug

SEQ ID NO: 211700 - RNA, 22 nt, Human
ggcucagacucccaggcccucu

SEQ ID NO: 211701 - RNA, 22 nt, Human
aggcucaggcaggaauggcgga

SEQ ID NO: 211702 - RNA, 22 nt, Human
acuaugaauagccagauaguga

SEQ ID NO: 211703 - RNA, 23 nt, Human
acagugucugcugcaagauaucu

SEQ ID NO: 211704 - RNA, 23 nt, Human
ccucagagaggcagagccacaug

SEQ ID NO: 211705 - RNA, 22 nt, Human
ugggacucacucuuuuggccag

SEQ ID NO: 211706 - RNA, 22 nt, Human
aaugccucuuggaagaagacuu

SEQ ID NO: 211707 - RNA, 22 nt, Human
uggcaggauuugcccggaagga

SEQ ID NO: 211708 - RNA, 22 nt, Human
ugucagggcuggacacagcugc

SEQ ID NO: 211709 - RNA, 22 nt, Human
acagagagaggcccgaggcugc

SEQ ID NO: 211710 - RNA, 23 nt, Human
acccaucucuccugucaugcaga

SEQ ID NO: 211711 - RNA, 22 nt, Human
ugaaagaagccuucgaggcucg

SEQ ID NO: 211712 - RNA, 22 nt, Human
gggaaacugaauucaggacucu

SEQ ID NO: 211713 - RNA, 22 nt, Human
gcuuuaaauggcuugcccaagu

SEQ ID NO: 211714 - RNA, 22 nt, Human
gguagaaauaaucuucaggcug

SEQ ID NO: 211715 - RNA, 22 nt, Human
ugguguuggagaugguugcauu

SEQ ID NO: 211716 - RNA, 22 nt, Human
gagcagcaaagggaggguaaau

SEQ ID NO: 211717 - RNA, 22 nt, Human
aagacagaccacgugacagggc

SEQ ID NO: 211718 - RNA, 22 nt, Human
agagguagagguugcagugagc

SEQ ID NO: 211719 - RNA, 22 nt, Human
auccucaguguuucugacaucu

SEQ ID NO: 211720 - RNA, 22 nt, Human
gugggccugaugcugccaugag

SEQ ID NO: 211721 - RNA, 22 nt, Human
ugucuuuuaccuaaugagcugg

SEQ ID NO: 211722 - RNA, 22 nt, Human
ggcgccagcgguaaguaagaca

SEQ ID NO: 211723 - RNA, 22 nt, Human
augauauuugcaaugugcuugc

SEQ ID NO: 211724 - RNA, 22 nt, Human
cagagcaguaaaucuggggcac

SEQ ID NO: 211725 - RNA, 18 nt, Human
uuuauauggauagagacc

SEQ ID NO: 211726 - RNA, 22 nt, Human
guuccugaagggacuggugcag

SEQ ID NO: 211727 - RNA, 22 nt, Human
auguucuucuaucuuuauuaaa

SEQ ID NO: 211728 - RNA, 22 nt, Human
uggggaugaaacccaggcaucu

SEQ ID NO: 211729 - RNA, 22 nt, Human
acagccugacuuuuguugucac

SEQ ID NO: 211730 - RNA, 22 nt, Human
uaacuuugaucacuugauaagg

SEQ ID NO: 211731 - RNA, 22 nt, Human
cuuacauacugagaaaauaucc

SEQ ID NO: 211732 - RNA, 21 nt, Human
cuacccucacucccauuccuc

SEQ ID NO: 211733 - RNA, 19 nt, Human
gagguggguccccgcagcc

SEQ ID NO: 211734 - RNA, 22 nt, Human
agguccuguccuuggucucuga

SEQ ID NO: 211735 - RNA, 22 nt, Human
agaccaagacuauaaugagagg

SEQ ID NO: 211736 - RNA, 22 nt, Human
gcugugcagguccccacugccu

SEQ ID NO: 211737 - RNA, 22 nt, Human
gauuaaguaacugaacacuuug

SEQ ID NO: 211738 - RNA, 22 nt, Human
acuaggaaggcauaugggcaga

SEQ ID NO: 211739 - RNA, 21 nt, Human
uauuuauuaauuuguaaggcu

SEQ ID NO: 211740 - RNA, 22 nt, Human
agggcuccuaugccccauggac

SEQ ID NO: 211741 - RNA, 21 nt, Human
ugcacuuugggggacaggcug

SEQ ID NO: 211742 - RNA, 22 nt, Human
guacacauuaugcuucucuaaa

SEQ ID NO: 211743 - RNA, 22 nt, Human
uucacaauagcuggcaucaucu

SEQ ID NO: 211744 - RNA, 22 nt, Human
acugugcaaugaguaauaaacu

SEQ ID NO: 211745 - RNA, 22 nt, Human
aagcaaaagguuacacuucugg

SEQ ID NO: 211746 - RNA, 22 nt, Human
aggcuucugauaccaugagaga

SEQ ID NO: 211747 - RNA, 22 nt, Human
aagagucuauuggaacuagaca

SEQ ID NO: 211748 - RNA, 22 nt, Human
aggugcugggcagcagucauug

SEQ ID NO: 211749 - RNA, 22 nt, Human
aaggucauuguugcauguucuc

SEQ ID NO: 211750 - RNA, 22 nt, Human
cuguguccauuuaucauuguca

SEQ ID NO: 211751 - RNA, 19 nt, Human
ugcuggagguugacagggu

SEQ ID NO: 211752 - RNA, 22 nt, Human
gccaggcaaauuaaggaaugca

SEQ ID NO: 211753 - RNA, 22 nt, Human
uuguucagaaauuuggacuccu

SEQ ID NO: 211754 - RNA, 22 nt, Human
uagcaaguaugauacuccauga

SEQ ID NO: 211755 - RNA, 22 nt, Human
aaugagauggaggacucuuaau

SEQ ID NO: 211756 - RNA, 22 nt, Human
aguuugauaaacaccagcuagu

SEQ ID NO: 211757 - RNA, 23 nt, Human
ugugaccccuaggaguggggacc

SEQ ID NO: 211758 - RNA, 22 nt, Human
agggcagcacaaggcauggacu

SEQ ID NO: 211759 - RNA, 22 nt, Human
ccaggucuggaaccaccagggc

SEQ ID NO: 211760 - RNA, 22 nt, Human
ugcugggcuggagcugccaggg

SEQ ID NO: 211761 - RNA, 22 nt, Human
auguggaggaaaugaguguaca

SEQ ID NO: 211762 - RNA, 22 nt, Human
ugcugaaaaguaaauaggccua

SEQ ID NO: 211763 - RNA, 22 nt, Human
ggaaaauacugauucaugccau

SEQ ID NO: 211764 - RNA, 22 nt, Human
auggcagcagcuuuagcugugg

SEQ ID NO: 211765 - RNA, 22 nt, Human
acacagauauuuugaauacaua

SEQ ID NO: 211766 - RNA, 22 nt, Human
ccacugagugagcagagcaggg

SEQ ID NO: 211767 - RNA, 22 nt, Human
aggacaguccgggguccuccac

SEQ ID NO: 211768 - RNA, 22 nt, Human
ugcugaaaacucaaccauugug

SEQ ID NO: 211769 - RNA, 22 nt, Human
gaggagcccagcaccaucacuu

SEQ ID NO: 211770 - RNA, 20 nt, Human
cagguauuacaucugcaccu

SEQ ID NO: 211771 - RNA, 22 nt, Human
gagcaggacgugggaaugggaa

SEQ ID NO: 211772 - RNA, 22 nt, Human
aaguauucuacaaagaaauuga

SEQ ID NO: 211773 - RNA, 22 nt, Human
ucugugcuagcacgcagcaagg

SEQ ID NO: 211774 - RNA, 22 nt, Human
cugggugcgugagcgcaugcgu

SEQ ID NO: 211775 - RNA, 22 nt, Human
uccugagguauaugcuuugcag

SEQ ID NO: 211776 - RNA, 21 nt, Human
aagggagauaggaaucaggcc

SEQ ID NO: 211777 - RNA, 22 nt, Human
agucacugucuugcaaagguca

SEQ ID NO: 211778 - RNA, 22 nt, Human
auggacagguacugcagugggu

SEQ ID NO: 211779 - RNA, 22 nt, Human
caggcuguggaucaggagccuu

SEQ ID NO: 211780 - RNA, 18 nt, Human
cagcugugcccuguuugg

SEQ ID NO: 211781 - RNA, 22 nt, Human
gaagcugaugaggaccagauug

SEQ ID NO: 211782 - RNA, 22 nt, Human
cagugccugucuuauucuuaca

SEQ ID NO: 211783 - RNA, 22 nt, Human
cuuuggaacuguaaggagaugg

SEQ ID NO: 211784 - RNA, 22 nt, Human
aguuuuauguucacagaaggau

SEQ ID NO: 211785 - RNA, 22 nt, Human
uggucuuugagagaaguugauu

SEQ ID NO: 211786 - RNA, 22 nt, Human
cugggcucagugucucacuccu

SEQ ID NO: 211787 - RNA, 22 nt, Human
uggcuccagauuuccugcugca

SEQ ID NO: 211788 - RNA, 22 nt, Human
uucugagauacaaaauuuacuu

SEQ ID NO: 211789 - RNA, 20 nt, Human
ucuggcaggugaacgagcug

SEQ ID NO: 211790 - RNA, 22 nt, Human
ccucuuugacaaguaccugccc

SEQ ID NO: 211791 - RNA, 22 nt, Human
ucugagugaguguaggccugac

SEQ ID NO: 211792 - RNA, 22 nt, Human
auuucucagugugaucaggccu

SEQ ID NO: 211793 - RNA, 22 nt, Human
caggccuggggcuggcuuccag

SEQ ID NO: 211794 - RNA, 21 nt, Human
uuccuccucuggagaagaaga

SEQ ID NO: 211795 - RNA, 22 nt, Human
ggcuuucugucugcgucugugu

SEQ ID NO: 211796 - RNA, 22 nt, Human
ccaggcuucugauuccaggcac

SEQ ID NO: 211797 - RNA, 22 nt, Human
aacacaaaaauucucaggggca

SEQ ID NO: 211798 - RNA, 22 nt, Human
uccuggaucagcgggggcaggc

SEQ ID NO: 211799 - RNA, 22 nt, Human
uguccucacacguagggaguaa

SEQ ID NO: 211800 - RNA, 23 nt, Human
uuguccugccgaucucugagaau

SEQ ID NO: 211801 - RNA, 22 nt, Human
uauucaaagugcgaggucaggg

SEQ ID NO: 211802 - RNA, 22 nt, Human
gucccccugaaagcagccgcag

SEQ ID NO: 211803 - RNA, 22 nt, Human
guuaaugugguagugcauaucu

SEQ ID NO: 211804 - RNA, 22 nt, Human
gggaccugccauugcucacagg

SEQ ID NO: 211805 - RNA, 22 nt, Human
gaggaguguauuccacaccacu

SEQ ID NO: 211806 - RNA, 22 nt, Human
acaauucuggguauuuauauag

SEQ ID NO: 211807 - RNA, 22 nt, Human
uccugggaugaggaaacaagga

SEQ ID NO: 211808 - RNA, 20 nt, Human
cuugguggcucugggaagug

SEQ ID NO: 211809 - RNA, 19 nt, Human
ccaaaagcaauuccaagua

SEQ ID NO: 211810 - RNA, 22 nt, Human
aggcgaagggaccagacgguag

SEQ ID NO: 211811 - RNA, 22 nt, Human
aaaggcuauucagggacuugcc

SEQ ID NO: 211812 - RNA, 22 nt, Human
aacaaugugaagugcuguucag

SEQ ID NO: 211813 - RNA, 22 nt, Human
cugcaggggcaguccacuuccu

SEQ ID NO: 211814 - RNA, 22 nt, Human
cucagaaguucagccuagagua

SEQ ID NO: 211815 - RNA, 22 nt, Human
ucagugcaucacagaacuuugu

SEQ ID NO: 211816 - RNA, 22 nt, Human
cagcuccugcagcugcugccgu

SEQ ID NO: 211817 - RNA, 22 nt, Human
agaagccacuggagguugagau

SEQ ID NO: 211818 - RNA, 22 nt, Human
gggaccagaggcugugcacaau

SEQ ID NO: 211819 - RNA, 22 nt, Human
uugcagcuguugcaaagucucu

SEQ ID NO: 211820 - RNA, 22 nt, Human
guuguacaggcagggaaacuga

SEQ ID NO: 211821 - RNA, 22 nt, Human
aagucucugacucacacaaugu

SEQ ID NO: 211822 - RNA, 22 nt, Human
uccaggaggugaggggaccaaa

SEQ ID NO: 211823 - RNA, 22 nt, Human
aagacccuauacucagugaccc

SEQ ID NO: 211824 - RNA, 22 nt, Human
ggcaggcauugcaacauguaca

SEQ ID NO: 211825 - RNA, 22 nt, Human
uaucucuguuccaagccuuauc

SEQ ID NO: 211826 - RNA, 22 nt, Human
ugauuaaaauuuaacuuaguua

SEQ ID NO: 211827 - RNA, 22 nt, Human
uuuguuaaaaugcagauucugu

SEQ ID NO: 211828 - RNA, 22 nt, Human
ucuuccagagccuccaucccua

SEQ ID NO: 211829 - RNA, 22 nt, Human
cauaacaguggcuucagcaagu

SEQ ID NO: 211830 - RNA, 22 nt, Human
aaaguucuggagaaaauaauga

SEQ ID NO: 211831 - RNA, 19 nt, Human
aggcagcauucuggggcuu

SEQ ID NO: 211832 - RNA, 20 nt, Human
agaucuuuucuauagaagug

SEQ ID NO: 211833 - RNA, 22 nt, Human
cagaagcauuccagcaaauagu

SEQ ID NO: 211834 - RNA, 22 nt, Human
aguacugucagcaggguguuga

SEQ ID NO: 211835 - RNA, 22 nt, Human
uacauguggccagaaauuugag

SEQ ID NO: 211836 - RNA, 22 nt, Human
uaggaggcuuaaagcugcucag

SEQ ID NO: 211837 - RNA, 22 nt, Human
uuuuuucagccugucugugcca

SEQ ID NO: 211838 - RNA, 22 nt, Human
ggugacgaauccauagcaucga

SEQ ID NO: 211839 - RNA, 22 nt, Human
uccuagagaguaauacaguuuu

SEQ ID NO: 211840 - RNA, 22 nt, Human
gauacauuccauuucuacuuaa

SEQ ID NO: 211841 - RNA, 22 nt, Human
uaucuacaguuaauaugucauc

SEQ ID NO: 211842 - RNA, 22 nt, Human
ugccuucacugagcuuauggga

SEQ ID NO: 211843 - RNA, 22 nt, Human
cuccuccuaaaugauucuuccu

SEQ ID NO: 211844 - RNA, 22 nt, Human
aaugacaauaaucauuaacuuu

SEQ ID NO: 211845 - RNA, 23 nt, Human
agacuggggcauaagaagauggc

SEQ ID NO: 211846 - RNA, 23 nt, Human
ucuggcuccauccuuggggaucc

SEQ ID NO: 211847 - RNA, 22 nt, Human
guggcuucugcggugugcgcag

SEQ ID NO: 211848 - RNA, 22 nt, Human
caucuugugaauuucugauucu

SEQ ID NO: 211849 - RNA, 23 nt, Human
cuacugccuugcacaggcuagau

SEQ ID NO: 211850 - RNA, 22 nt, Human
aagucagaaauuauucaggaau

SEQ ID NO: 211851 - RNA, 22 nt, Human
agccuuagagacuuaaaacagg

SEQ ID NO: 211852 - RNA, 22 nt, Human
ugguccuucuugaagagugagu

SEQ ID NO: 211853 - RNA, 22 nt, Human
ccucugaguccucccugguugc

SEQ ID NO: 211854 - RNA, 22 nt, Human
cucugggcacuguauggguucu

SEQ ID NO: 211855 - RNA, 22 nt, Human
gggcaugagagggcagcuggca

SEQ ID NO: 211856 - RNA, 22 nt, Human
agcugccccaugagaggcaggu

SEQ ID NO: 211857 - RNA, 22 nt, Human
gcaugcagaaaaugaacaacga

SEQ ID NO: 211858 - RNA, 22 nt, Human
uuacuaguauaugucaagcaac

SEQ ID NO: 211859 - RNA, 22 nt, Human
uuguuuaauccuuguacccaug

SEQ ID NO: 211860 - RNA, 22 nt, Human
gagaucuucaagguuuuagaua

SEQ ID NO: 211861 - RNA, 22 nt, Human
uagggaugcuuaguaggaccca

SEQ ID NO: 211862 - RNA, 22 nt, Human
aauuaacagagggcuuauuacu

SEQ ID NO: 211863 - RNA, 22 nt, Human
uugaaaaguuuugaaacacucu

SEQ ID NO: 211864 - RNA, 22 nt, Human
uucagugucaauuuuuaaauau

SEQ ID NO: 211865 - RNA, 22 nt, Human
cuguccccauuguuugaggguu

SEQ ID NO: 211866 - RNA, 21 nt, Human
auggaaaaacagguagagcau

SEQ ID NO: 211867 - RNA, 22 nt, Human
acaagagcauugcagguguguu

SEQ ID NO: 211868 - RNA, 22 nt, Human
ggaggccuugccugcaggcaca

SEQ ID NO: 211869 - RNA, 22 nt, Human
caggguccggcugccuggcugu

SEQ ID NO: 211870 - RNA, 22 nt, Human
aaaaaugaaacggcugguuggc

SEQ ID NO: 211871 - RNA, 22 nt, Human
cucagacccccagagcugcuaa

SEQ ID NO: 211872 - RNA, 22 nt, Human
ucuuaaaccacaaaauucagag

SEQ ID NO: 211873 - RNA, 22 nt, Human
agcuggagauucuggggacagu

SEQ ID NO: 211874 - RNA, 22 nt, Human
ucagacaguuugcagugugccu

SEQ ID NO: 211875 - RNA, 22 nt, Human
uuccuggugguggugacagcac

SEQ ID NO: 211876 - RNA, 22 nt, Human
uagcuauuuggaaaauuccaau

SEQ ID NO: 211877 - RNA, 22 nt, Human
ucaauuacuaaccaaauaaugu

SEQ ID NO: 211878 - RNA, 22 nt, Human
cuguacaucccgagagccagua

SEQ ID NO: 211879 - RNA, 22 nt, Human
uuacaaguauuuaagaugcugu

SEQ ID NO: 211880 - RNA, 22 nt, Human
uauuuguagaauggauuaaggg

SEQ ID NO: 211881 - RNA, 22 nt, Human
ugugggaagauguugcaggaga

SEQ ID NO: 211882 - RNA, 22 nt, Human
ucugucauuuuguaucuacaug

SEQ ID NO: 211883 - RNA, 22 nt, Human
agagcuggcugcugcggugcuu

SEQ ID NO: 211884 - RNA, 22 nt, Human
ccaaggagaaaugcugugcuuu

SEQ ID NO: 211885 - RNA, 22 nt, Human
cauuugugugggaacccaucag

SEQ ID NO: 211886 - RNA, 22 nt, Human
cagguccugccuugguuacccu

SEQ ID NO: 211887 - RNA, 22 nt, Human
gucaggauuauuuuauuaaaag

SEQ ID NO: 211888 - RNA, 22 nt, Human
uuggcuacaucgaggcuccagc

SEQ ID NO: 211889 - RNA, 22 nt, Human
ugauggcuaucccuggaagggc

SEQ ID NO: 211890 - RNA, 22 nt, Human
uuugacaaaggaaaaaugcaca

SEQ ID NO: 211891 - RNA, 22 nt, Human
cucuugggagugcucuggagaa

SEQ ID NO: 211892 - RNA, 22 nt, Human
cagcaacuggucauugcucucc

SEQ ID NO: 211893 - RNA, 23 nt, Human
ucuccagugucucuucauugagu

SEQ ID NO: 211894 - RNA, 22 nt, Human
uagaaagaacuucauguaaaac

SEQ ID NO: 211895 - RNA, 22 nt, Human
uuuaguucucccagucuugauu

SEQ ID NO: 211896 - RNA, 22 nt, Human
uggcagggaguugcaggauuuc

SEQ ID NO: 211897 - RNA, 22 nt, Human
uuacaguuuacauaagaauugu

SEQ ID NO: 211898 - RNA, 22 nt, Human
acauugaaagcauauuaucucc

SEQ ID NO: 211899 - RNA, 22 nt, Human
acauccagaucucagcauggcu

SEQ ID NO: 211900 - RNA, 22 nt, Human
cuuucagucaguuaacucagaa

SEQ ID NO: 211901 - RNA, 22 nt, Human
gccugcuucacggacaggccuc

SEQ ID NO: 211902 - RNA, 22 nt, Human
ggguccaguuucaucugagguu

SEQ ID NO: 211903 - RNA, 22 nt, Human
ucuuuauuuuaugcuugugcaa

SEQ ID NO: 211904 - RNA, 22 nt, Human
gcuguucauuagaaauagaaug

SEQ ID NO: 211905 - RNA, 22 nt, Human
ugcccucagccaccuccaaguu

SEQ ID NO: 211906 - RNA, 20 nt, Human
accagagcucucaguaugug

SEQ ID NO: 211907 - RNA, 22 nt, Human
cagaggcauacucccagucuug

SEQ ID NO: 211908 - RNA, 22 nt, Human
agugucaaugccaacaguauau

SEQ ID NO: 211909 - RNA, 22 nt, Human
uuuaauuguuguggguacauag

SEQ ID NO: 211910 - RNA, 22 nt, Human
agcacacaggacuugauucaug

SEQ ID NO: 211911 - RNA, 22 nt, Human
ggcgcucaguguugccccagag

SEQ ID NO: 211912 - RNA, 22 nt, Human
aggaauguguuucuaggcuguu

SEQ ID NO: 211913 - RNA, 22 nt, Human
auauuucagcuuuacuuaggaa

SEQ ID NO: 211914 - RNA, 21 nt, Human
uucuuucugaaucugaaguau

SEQ ID NO: 211915 - RNA, 22 nt, Human
ccagggugggaggcugaaggcg

SEQ ID NO: 211916 - RNA, 22 nt, Human
acuguguuaaauacagagaugg

SEQ ID NO: 211917 - RNA, 22 nt, Human
acuuaacagacauuauuuaccu

SEQ ID NO: 211918 - RNA, 22 nt, Human
gcccaguuucagcucugccuuu

SEQ ID NO: 211919 - RNA, 21 nt, Human
cuggagucauuuucugaguag

SEQ ID NO: 211920 - RNA, 22 nt, Human
gaauucugguccuguccaaggu

SEQ ID NO: 211921 - RNA, 22 nt, Human
uuucaggaaggugaggcacaug

SEQ ID NO: 211922 - RNA, 22 nt, Human
cggggcugcgcucuuccugccg

SEQ ID NO: 211923 - RNA, 22 nt, Human
uggcagguccacucacagaucu

SEQ ID NO: 211924 - RNA, 22 nt, Human
ucaacaaugggucuguaaugga

SEQ ID NO: 211925 - RNA, 22 nt, Human
guugacagaaaaauaacauagc

SEQ ID NO: 211926 - RNA, 22 nt, Human
uuuauuggauggauggauggau

SEQ ID NO: 211927 - RNA, 22 nt, Human
agaguggguuauaggcagacuu

SEQ ID NO: 211928 - RNA, 22 nt, Human
ucugcuguacuuuuggucuguu

SEQ ID NO: 211929 - RNA, 22 nt, Human
gggccccuuguaucucuggcuc

SEQ ID NO: 211930 - RNA, 22 nt, Human
uggaugagauuaaagugagguu

SEQ ID NO: 211931 - RNA, 22 nt, Human
cuagggaaggacaaccucuucc

SEQ ID NO: 211932 - RNA, 22 nt, Human
gaacucuugguggucauuagau

SEQ ID NO: 211933 - RNA, 22 nt, Human
auacagguggacuucaguuagu

SEQ ID NO: 211934 - RNA, 22 nt, Human
ccucagaggcaugguuagaaua

SEQ ID NO: 211935 - RNA, 22 nt, Human
acacagagcaaaucaugacaga

SEQ ID NO: 211936 - RNA, 22 nt, Human
cccagcucccauguucuccaau

SEQ ID NO: 211937 - RNA, 22 nt, Human
cuacacuuugguugacuuugug

SEQ ID NO: 211938 - RNA, 22 nt, Human
gggcuucucuuaugcuaacugg

SEQ ID NO: 211939 - RNA, 22 nt, Human
aguguugggucuuuagaauuua

SEQ ID NO: 211940 - RNA, 19 nt, Human
cagagccaggccuuuggcc

SEQ ID NO: 211941 - RNA, 22 nt, Human
cuguggugagcaacugacugaa

SEQ ID NO: 211942 - RNA, 20 nt, Human
gucaggauuaguaaacucug

SEQ ID NO: 211943 - RNA, 22 nt, Human
gccaggcagacaggucaucagg

SEQ ID NO: 211944 - RNA, 19 nt, Human
gccugggaugggcagaacu

SEQ ID NO: 211945 - RNA, 22 nt, Human
ugagguucaguucuuggccaca

SEQ ID NO: 211946 - RNA, 19 nt, Human
acccagggguuuaugugug

SEQ ID NO: 211947 - RNA, 22 nt, Human
uauuggucuuggaagguuuugu

SEQ ID NO: 211948 - RNA, 22 nt, Human
agauuacagcaugggaauggga

SEQ ID NO: 211949 - RNA, 22 nt, Human
cucucugugguggcugucccau

SEQ ID NO: 211950 - RNA, 22 nt, Human
uuuucuaacaucuaguaauuug

SEQ ID NO: 211951 - RNA, 22 nt, Human
ucuucucuguggccugguggug

SEQ ID NO: 211952 - RNA, 22 nt, Human
uagggcugaggcaacaagggag

SEQ ID NO: 211953 - RNA, 22 nt, Human
guccagaaagggcagugauuug

SEQ ID NO: 211954 - RNA, 22 nt, Human
aagugcuguacaguguguaaau

SEQ ID NO: 211955 - RNA, 22 nt, Human
agggguggagaguguugccagu

SEQ ID NO: 211956 - RNA, 22 nt, Human
uagccggguguugugucaugca

SEQ ID NO: 211957 - RNA, 22 nt, Human
ucuuggcucccuuguaggcccu

SEQ ID NO: 211958 - RNA, 22 nt, Human
aguggcaguggggcagggcccu

SEQ ID NO: 211959 - RNA, 22 nt, Human
ugucucagaguaucccugaacu

SEQ ID NO: 211960 - RNA, 18 nt, Human
ugaauagggguuugcaga

SEQ ID NO: 211961 - RNA, 22 nt, Human
gcagcaggagaguuuguccugc

SEQ ID NO: 211962 - RNA, 22 nt, Human
uuucucagccuccuugcuggag

SEQ ID NO: 211963 - RNA, 22 nt, Human
aaacugguagcaauuuaagggu

SEQ ID NO: 211964 - RNA, 22 nt, Human
gcuguggccgucagggaaaugg

SEQ ID NO: 211965 - RNA, 22 nt, Human
caagugucuucaaaggcuaaaa

SEQ ID NO: 211966 - RNA, 22 nt, Human
gagcucagcccaaagagcagug

SEQ ID NO: 211967 - RNA, 22 nt, Human
aaggcuauaucucaauacuauu

SEQ ID NO: 211968 - RNA, 22 nt, Human
gcagguguucucagaggaggcu

SEQ ID NO: 211969 - RNA, 23 nt, Human
uccaggagcaugcuggcuggcga

SEQ ID NO: 211970 - RNA, 22 nt, Human
uagcaagaggugaagguuucau

SEQ ID NO: 211971 - RNA, 17 nt, Human
ugacagacaucaugagc

SEQ ID NO: 211972 - RNA, 22 nt, Human
gaugugagugguagcugggauu

SEQ ID NO: 211973 - RNA, 22 nt, Human
auggcagcauaguggcaaguua

SEQ ID NO: 211974 - RNA, 22 nt, Human
uaggcuggggguaggaauugag

SEQ ID NO: 211975 - RNA, 22 nt, Human
uugauuucaaaauauaugcuug

SEQ ID NO: 211976 - RNA, 22 nt, Human
aaauucuaugucaauguuuauu

SEQ ID NO: 211977 - RNA, 22 nt, Human
cuuaauuuuuguaguagaugga

SEQ ID NO: 211978 - RNA, 22 nt, Human
uguuacaauauuaucaacugag

SEQ ID NO: 211979 - RNA, 22 nt, Human
aaagaucaaguaggcauggccu

SEQ ID NO: 211980 - RNA, 22 nt, Human
guugggguaccuugaggcuggg

SEQ ID NO: 211981 - RNA, 22 nt, Human
cucuccugguguggaggacagg

SEQ ID NO: 211982 - RNA, 22 nt, Human
aagugguugcuugugagucccc

SEQ ID NO: 211983 - RNA, 22 nt, Human
gcuugccuaucugguggucguu

SEQ ID NO: 211984 - RNA, 22 nt, Human
uuagauaauguagagauaugag

SEQ ID NO: 211985 - RNA, 22 nt, Human
aaauauaguaaaugcauaguuc

SEQ ID NO: 211986 - RNA, 19 nt, Human
guccuggcgccgccacacc

SEQ ID NO: 211987 - RNA, 22 nt, Human
ucagggcuggcuuuugcagagc

SEQ ID NO: 211988 - RNA, 22 nt, Human
gccacaggucggcuagaggguc

SEQ ID NO: 211989 - RNA, 22 nt, Human
ccagugccuaucuccucuggga

SEQ ID NO: 211990 - RNA, 18 nt, Human
aggucaggaaagcagagu

SEQ ID NO: 211991 - RNA, 22 nt, Human
uggcucagagagggagugugga

SEQ ID NO: 211992 - RNA, 22 nt, Human
gcaugcagagaauaccugugau

SEQ ID NO: 211993 - RNA, 22 nt, Human
auguggccagucauguaguaac

SEQ ID NO: 211994 - RNA, 20 nt, Human
agaaggcaggagacaaaagg

SEQ ID NO: 211995 - RNA, 22 nt, Human
ccuggcagucaggggaguccuu

SEQ ID NO: 211996 - RNA, 22 nt, Human
acagaaauuagcagugaguuua

SEQ ID NO: 211997 - RNA, 22 nt, Human
cuccaguggcaaguccgggcgg

SEQ ID NO: 211998 - RNA, 22 nt, Human
uguguaaaaucugauuaauacu

SEQ ID NO: 211999 - RNA, 22 nt, Human
uugaaugaauucuacuuccaga

SEQ ID NO: 212000 - RNA, 20 nt, Human
uggaagacacugaagggcca

SEQ ID NO: 212001 - RNA, 22 nt, Human
uagggcacagcuuagauaaaug

SEQ ID NO: 212002 - RNA, 18 nt, Human
cucuuucuuuggcacaaa

SEQ ID NO: 212003 - RNA, 22 nt, Human
ugcaugaacacaugugcaugua

SEQ ID NO: 212004 - RNA, 22 nt, Human
ccaggugugucaccauugccca

SEQ ID NO: 212005 - RNA, 22 nt, Human
aaauagcuucuaagccuuuuga

SEQ ID NO: 212006 - RNA, 22 nt, Human
guagggacaugccauuaucuca

SEQ ID NO: 212007 - RNA, 22 nt, Human
uuuuagaaucagguugucuggg

SEQ ID NO: 212008 - RNA, 23 nt, Human
ugggauagaauuucauggcugcu

SEQ ID NO: 212009 - RNA, 22 nt, Human
caugaauauacauccugauggc

SEQ ID NO: 212010 - RNA, 22 nt, Human
agggcccuccccgcucagggca

SEQ ID NO: 212011 - RNA, 22 nt, Human
gaagauugaaggcugggaauua

SEQ ID NO: 212012 - RNA, 22 nt, Human
gcacugguaucaccugagagcu

SEQ ID NO: 212013 - RNA, 22 nt, Human
aggcagcuuuaacugguaguag

SEQ ID NO: 212014 - RNA, 22 nt, Human
acagugcugucuaucucacuaa

SEQ ID NO: 212015 - RNA, 22 nt, Human
ccagcagagggucuuggccauu

SEQ ID NO: 212016 - RNA, 22 nt, Human
uguggccucuaagcucacgaag

SEQ ID NO: 212017 - RNA, 22 nt, Human
ucacuccucaggcuagcaucau

SEQ ID NO: 212018 - RNA, 22 nt, Human
uccaggccacauggauggcgau

SEQ ID NO: 212019 - RNA, 22 nt, Human
acuuccugcaaucguccacucc

SEQ ID NO: 212020 - RNA, 22 nt, Human
acaggacuagaugauaaaaugu

SEQ ID NO: 212021 - RNA, 22 nt, Human
uugaaacuaugaagacaaccau

SEQ ID NO: 212022 - RNA, 22 nt, Human
cacugggaaucugggaaagaga

SEQ ID NO: 212023 - RNA, 22 nt, Human
uccugggcagcgggacgcucag

SEQ ID NO: 212024 - RNA, 22 nt, Human
uuuacaaccucauauucugaug

SEQ ID NO: 212025 - RNA, 19 nt, Human
uccuggcauuuguaggaaa

SEQ ID NO: 212026 - RNA, 22 nt, Human
ccuucucucugaagaccccaaa

SEQ ID NO: 212027 - RNA, 22 nt, Human
guuaaacaauaacuggcacaca

SEQ ID NO: 212028 - RNA, 22 nt, Human
uucugucuguaaacuucucaau

SEQ ID NO: 212029 - RNA, 22 nt, Human
ucaggaaguauaaucagauuca

SEQ ID NO: 212030 - RNA, 22 nt, Human
ccugggcaauauagugaggccc

SEQ ID NO: 212031 - RNA, 22 nt, Human
uucaguuucccuaaagccaauu

SEQ ID NO: 212032 - RNA, 22 nt, Human
aaggaaguuuucuugguuccua

SEQ ID NO: 212033 - RNA, 22 nt, Human
auugauaucaguuugcugauug

SEQ ID NO: 212034 - RNA, 19 nt, Human
guccaguguuuuccaguca

SEQ ID NO: 212035 - RNA, 22 nt, Human
cauuccagaugaggccaggccc

SEQ ID NO: 212036 - RNA, 20 nt, Human
cugaggggucugacuuggac

SEQ ID NO: 212037 - RNA, 21 nt, Human
acuuuacaauuuacauaguga

SEQ ID NO: 212038 - RNA, 22 nt, Human
uuaacauuucuuuuccacucau

SEQ ID NO: 212039 - RNA, 22 nt, Human
gcugccuguggcccuucugggu

SEQ ID NO: 212040 - RNA, 22 nt, Human
gaaaugaugucugugcugccac

SEQ ID NO: 212041 - RNA, 22 nt, Human
ugucccagcugucucuguuuuu

SEQ ID NO: 212042 - RNA, 22 nt, Human
ccagugacuggcuuucuggugu

SEQ ID NO: 212043 - RNA, 22 nt, Human
guuagguagaaguuuacuuuga

SEQ ID NO: 212044 - RNA, 22 nt, Human
aaagacuuucaccuagcaaaga

SEQ ID NO: 212045 - RNA, 19 nt, Human
ggagaagcaucuagaaaua

SEQ ID NO: 212046 - RNA, 20 nt, Human
aaggaacucacccaugggcu

SEQ ID NO: 212047 - RNA, 22 nt, Human
gccuccaccgaacgcucucuug

SEQ ID NO: 212048 - RNA, 22 nt, Human
ggcccagacccaagaguggugg

SEQ ID NO: 212049 - RNA, 22 nt, Human
uuaaaaggguaagcagcaacuu

SEQ ID NO: 212050 - RNA, 22 nt, Human
gagagcugcagccgagaggggg

SEQ ID NO: 212051 - RNA, 22 nt, Human
uacacaguagaguauaaugcgu

SEQ ID NO: 212052 - RNA, 22 nt, Human
aagcaugggaaucccacagggu

SEQ ID NO: 212053 - RNA, 22 nt, Human
agucaguguucuggguuguaau

SEQ ID NO: 212054 - RNA, 22 nt, Human
uuucauugagacuauagacauc

SEQ ID NO: 212055 - RNA, 22 nt, Human
uuuauaguagcaugauuuauag

SEQ ID NO: 212056 - RNA, 22 nt, Human
uuuucucuacaaaauaaccagc

SEQ ID NO: 212057 - RNA, 22 nt, Human
uuaguguuagggccuguuaccu

SEQ ID NO: 212058 - RNA, 22 nt, Human
gugacccaugcagugguuuugg

SEQ ID NO: 212059 - RNA, 22 nt, Human
cacagcagaacuuaauuucaaa

SEQ ID NO: 212060 - RNA, 22 nt, Human
accuuagaaagugacaaacgaa

SEQ ID NO: 212061 - RNA, 22 nt, Human
uugcuuuauauucaagagagga

SEQ ID NO: 212062 - RNA, 22 nt, Human
cucuugcaugagauccaggagu

SEQ ID NO: 212063 - RNA, 22 nt, Human
ucucagggaguugaggcugccu

SEQ ID NO: 212064 - RNA, 22 nt, Human
cacaggcuuuuuuggcugaugu

SEQ ID NO: 212065 - RNA, 22 nt, Human
ucugagggauuugucccuuauc

SEQ ID NO: 212066 - RNA, 22 nt, Human
ucucuuccaguaagagucuuua

SEQ ID NO: 212067 - RNA, 21 nt, Human
cacuauuuauauaugccagcu

SEQ ID NO: 212068 - RNA, 22 nt, Human
ucccagggcuuuucucaugcuu

SEQ ID NO: 212069 - RNA, 22 nt, Human
uuuggcucuucccguaccauaa

SEQ ID NO: 212070 - RNA, 22 nt, Human
uccuguccugaggcuccaggcc

SEQ ID NO: 212071 - RNA, 22 nt, Human
ggcagaggaggggugaauuugc

SEQ ID NO: 212072 - RNA, 22 nt, Human
augaaacagaguacuuaauaua

SEQ ID NO: 212073 - RNA, 17 nt, Human
gcucagaguacacgugu

SEQ ID NO: 212074 - RNA, 18 nt, Human
uugauucauauuaaccau

SEQ ID NO: 212075 - RNA, 22 nt, Human
uugcaagaaauaaucgaauaga

SEQ ID NO: 212076 - RNA, 22 nt, Human
cauuuguaucauauguaucuua

SEQ ID NO: 212077 - RNA, 20 nt, Human
cauacacuauucuguauagu

SEQ ID NO: 212078 - RNA, 22 nt, Human
auccaggccugagucugguccu

SEQ ID NO: 212079 - RNA, 22 nt, Human
acaggcagguugagaaacauuu

SEQ ID NO: 212080 - RNA, 22 nt, Human
ucugggaaccagugcggcuggg

SEQ ID NO: 212081 - RNA, 22 nt, Human
cacccuggaaagaaggucuggg

SEQ ID NO: 212082 - RNA, 22 nt, Human
ucuuuuggaaaugaugugcagg

SEQ ID NO: 212083 - RNA, 22 nt, Human
ccaaggggccuuuagacacuau

SEQ ID NO: 212084 - RNA, 19 nt, Human
ggcaccuuucugcuguguc

SEQ ID NO: 212085 - RNA, 22 nt, Human
agcugggugcgguggcucaugc

SEQ ID NO: 212086 - RNA, 22 nt, Human
cccugugcugucaugcugggcg

SEQ ID NO: 212087 - RNA, 22 nt, Human
cuggcugucuuggaggaaggag

SEQ ID NO: 212088 - RNA, 22 nt, Human
cagggcucaccacugggauccu

SEQ ID NO: 212089 - RNA, 22 nt, Human
aaguggcucauguggcuucugc

SEQ ID NO: 212090 - RNA, 22 nt, Human
aaagcaauagguuaggucaaga

SEQ ID NO: 212091 - RNA, 22 nt, Human
ucacagaaguguguuucaggag

SEQ ID NO: 212092 - RNA, 22 nt, Human
gccuucucugugagcuccuagg

SEQ ID NO: 212093 - RNA, 22 nt, Human
auauaucuucauuaggucgaga

SEQ ID NO: 212094 - RNA, 22 nt, Human
ucucugugugccuucaucugcc

SEQ ID NO: 212095 - RNA, 22 nt, Human
acccugccaaggauggccccga

SEQ ID NO: 212096 - RNA, 22 nt, Human
uuuuuagauuacucagccacca

SEQ ID NO: 212097 - RNA, 18 nt, Human
ggcuccaggaccuaccca

SEQ ID NO: 212098 - RNA, 22 nt, Human
auuagggcuggaugcaaggaaa

SEQ ID NO: 212099 - RNA, 20 nt, Human
aggcucugccauugucccug

SEQ ID NO: 212100 - RNA, 22 nt, Human
uacaucuagccuuacaauuauu

SEQ ID NO: 212101 - RNA, 22 nt, Human
cccccagucugaacagcagcug

SEQ ID NO: 212102 - RNA, 22 nt, Human
ugugucugaacuaguugcucuc

SEQ ID NO: 212103 - RNA, 22 nt, Human
cagcugccuaugaccuagccuc

SEQ ID NO: 212104 - RNA, 22 nt, Human
ugggccucuggguuagucccua

SEQ ID NO: 212105 - RNA, 22 nt, Human
uuuucucuuguuaauguacuga

SEQ ID NO: 212106 - RNA, 22 nt, Human
auuuacagaaacuuaaucauag

SEQ ID NO: 212107 - RNA, 22 nt, Human
uuggugaauugagaccauuugu

SEQ ID NO: 212108 - RNA, 22 nt, Human
aucuccuaaaguuuccagaaga

SEQ ID NO: 212109 - RNA, 20 nt, Human
uccagcccucaugucgcuca

SEQ ID NO: 212110 - RNA, 22 nt, Human
uauauucacuuguguccaacca

SEQ ID NO: 212111 - RNA, 22 nt, Human
aguccauacauugagaauaaca

SEQ ID NO: 212112 - RNA, 22 nt, Human
ucucugaaggggagcuguuuaa

SEQ ID NO: 212113 - RNA, 22 nt, Human
ggcagcaaauauugucagcugu

SEQ ID NO: 212114 - RNA, 21 nt, Human
uagagcuuggcacagaguaga

SEQ ID NO: 212115 - RNA, 22 nt, Human
auucagacucuugagcaguccc

SEQ ID NO: 212116 - RNA, 21 nt, Human
cccaggucguggucuucccag

SEQ ID NO: 212117 - RNA, 22 nt, Human
cuguccccugugcuuucacuug

SEQ ID NO: 212118 - RNA, 22 nt, Human
acauauuuccaugcagcauguc

SEQ ID NO: 212119 - RNA, 17 nt, Human
uauacacagacagacug

SEQ ID NO: 212120 - RNA, 22 nt, Human
agcuucucaggagucugaggca

SEQ ID NO: 212121 - RNA, 20 nt, Human
guauauaaccauagugacua

SEQ ID NO: 212122 - RNA, 22 nt, Human
acagagacucaugaaagaugac

SEQ ID NO: 212123 - RNA, 22 nt, Human
uauacacaaggugugcauuugu

SEQ ID NO: 212124 - RNA, 22 nt, Human
aggaggugacagccugcaucug

SEQ ID NO: 212125 - RNA, 22 nt, Human
aauaaugagacagcuuauuuaa

SEQ ID NO: 212126 - RNA, 22 nt, Human
uuagcagcggucaguuuugaag

SEQ ID NO: 212127 - RNA, 22 nt, Human
auggcuuguucauugguaccug

SEQ ID NO: 212128 - RNA, 22 nt, Human
uucaacuagauuuauacaauuc

SEQ ID NO: 212129 - RNA, 22 nt, Human
uccaagaguaagaggacucuuu

SEQ ID NO: 212130 - RNA, 23 nt, Human
aaaggcuaucaaaguuuugcuga

SEQ ID NO: 212131 - RNA, 22 nt, Human
cugggcaggauacuucauggga

SEQ ID NO: 212132 - RNA, 22 nt, Human
agguccuguuucuucccugggg

SEQ ID NO: 212133 - RNA, 22 nt, Human
ggccagccuggggcucccagac

SEQ ID NO: 212134 - RNA, 21 nt, Human
cagaggccuaucacagacucc

SEQ ID NO: 212135 - RNA, 22 nt, Human
caugaauuuuaagacuguuuuu

SEQ ID NO: 212136 - RNA, 22 nt, Human
cauaauccauuugcacugcaga

SEQ ID NO: 212137 - RNA, 22 nt, Human
cuuuggaauaaucaagcucuga

SEQ ID NO: 212138 - RNA, 22 nt, Human
cagcucagacgcaggucgagca

SEQ ID NO: 212139 - RNA, 20 nt, Human
gcuguggccgugccagacuc

SEQ ID NO: 212140 - RNA, 22 nt, Human
ugcuuauuugaauuuauucuca

SEQ ID NO: 212141 - RNA, 22 nt, Human
gcuuuuacaagagccagagagg

SEQ ID NO: 212142 - RNA, 22 nt, Human
ggcugggcaggucugcacaggg

SEQ ID NO: 212143 - RNA, 22 nt, Human
caaggcaggccaguuucaaggc

SEQ ID NO: 212144 - RNA, 22 nt, Human
ggccaggagcaagccaggcucu

SEQ ID NO: 212145 - RNA, 22 nt, Human
ugggcacaggggaauggaugaa

SEQ ID NO: 212146 - RNA, 22 nt, Human
uuucuuaugugcagagugagua

SEQ ID NO: 212147 - RNA, 18 nt, Human
ccugagcccugcuuacuu

SEQ ID NO: 212148 - RNA, 22 nt, Human
ugucaagucucugaaugaaaug

SEQ ID NO: 212149 - RNA, 21 nt, Human
ucaaggaguuucucuuuucca

SEQ ID NO: 212150 - RNA, 23 nt, Human
uucauauguugcugaaaacagca

SEQ ID NO: 212151 - RNA, 22 nt, Human
ucaggcaggaagggaggacuug

SEQ ID NO: 212152 - RNA, 22 nt, Human
uucccaaaauauaacaguuaac

SEQ ID NO: 212153 - RNA, 22 nt, Human
ucuguuuugugucucucuggug

SEQ ID NO: 212154 - RNA, 22 nt, Human
cagcucuuugaguauuccauuu

SEQ ID NO: 212155 - RNA, 22 nt, Human
ugaggucugcagggcugugcau

SEQ ID NO: 212156 - RNA, 22 nt, Human
ucucaggcccacuguguugaaa

SEQ ID NO: 212157 - RNA, 22 nt, Human
cacauuuaauccuuuauaagua

SEQ ID NO: 212158 - RNA, 22 nt, Human
acaggcaagaggaaagcaagua

SEQ ID NO: 212159 - RNA, 22 nt, Human
uauuuuaaagugaagggucuug

SEQ ID NO: 212160 - RNA, 22 nt, Human
ccccacaguccgugaggagcca

SEQ ID NO: 212161 - RNA, 18 nt, Human
ccucuggguuuuguuccc

SEQ ID NO: 212162 - RNA, 22 nt, Human
uuccaggaggcacugacagagg

SEQ ID NO: 212163 - RNA, 22 nt, Human
aaagagcucuuacucuagugua

SEQ ID NO: 212164 - RNA, 22 nt, Human
ucucugugcaggaugcugaguu

SEQ ID NO: 212165 - RNA, 22 nt, Human
gccuuggcugccaagcugcuga

SEQ ID NO: 212166 - RNA, 22 nt, Human
ggaacaguagacgaucuccuuu

SEQ ID NO: 212167 - RNA, 22 nt, Human
guguuacugcuuuuaucuacca

SEQ ID NO: 212168 - RNA, 22 nt, Human
acaucucuccaaaggaaggugc

SEQ ID NO: 212169 - RNA, 22 nt, Human
gagccagagcuacaagugucug

SEQ ID NO: 212170 - RNA, 18 nt, Human
gccucuguugcuugccug

SEQ ID NO: 212171 - RNA, 22 nt, Human
aaguuacaagacuaaauggaag

SEQ ID NO: 212172 - RNA, 22 nt, Human
caggcuggagugcaauggcaca

SEQ ID NO: 212173 - RNA, 22 nt, Human
caggcuucagggaacgcagucu

SEQ ID NO: 212174 - RNA, 22 nt, Human
uguuuagcauaaagauuuucca

SEQ ID NO: 212175 - RNA, 22 nt, Human
ugggcuccagcaccugugcucu

SEQ ID NO: 212176 - RNA, 22 nt, Human
cuaaauguuuuaucuuccuggc

SEQ ID NO: 212177 - RNA, 22 nt, Human
augaaaacggaccagagcuauu

SEQ ID NO: 212178 - RNA, 22 nt, Human
ugacccauuggucccuagaucc

SEQ ID NO: 212179 - RNA, 22 nt, Human
ugaaggcuuucuccccucuggu

SEQ ID NO: 212180 - RNA, 22 nt, Human
agggccaccagggagucucagg

SEQ ID NO: 212181 - RNA, 22 nt, Human
guccugugggcccaccaugagc

SEQ ID NO: 212182 - RNA, 22 nt, Human
cucacccauaucuccaugacuc

SEQ ID NO: 212183 - RNA, 22 nt, Human
cccagcugaacuugcauuccaa

SEQ ID NO: 212184 - RNA, 22 nt, Human
caagcugaacacugucuucaag

SEQ ID NO: 212185 - RNA, 22 nt, Human
gucagcacuuuuccgaggcaga

SEQ ID NO: 212186 - RNA, 22 nt, Human
cuuccagguucugguugggaag

SEQ ID NO: 212187 - RNA, 22 nt, Human
ugucuucaucuccaugcacaga

SEQ ID NO: 212188 - RNA, 22 nt, Human
ugcauaaacuucucugguguga

SEQ ID NO: 212189 - RNA, 22 nt, Human
guggagcuggacccaggccucu

SEQ ID NO: 212190 - RNA, 22 nt, Human
ggccugacugaccugauucuaa

SEQ ID NO: 212191 - RNA, 22 nt, Human
uggcagagagacucuccuugau

SEQ ID NO: 212192 - RNA, 22 nt, Human
aagcuuuaaggaauuuuaugga

SEQ ID NO: 212193 - RNA, 20 nt, Human
accaauguuagcuuaguacu

SEQ ID NO: 212194 - RNA, 22 nt, Human
agcaauaugacauugcuacauc

SEQ ID NO: 212195 - RNA, 22 nt, Human
agaaaugaagcaggaguuauua

SEQ ID NO: 212196 - RNA, 23 nt, Human
uugagucuuauaggauugaggug

SEQ ID NO: 212197 - RNA, 22 nt, Human
aguggcuggacgacaaggguga

SEQ ID NO: 212198 - RNA, 22 nt, Human
cauagaaucauagcacauuuga

SEQ ID NO: 212199 - RNA, 22 nt, Human
uugaaugauccuaucuagcaca

SEQ ID NO: 212200 - RNA, 22 nt, Human
gcuggccugggcagaggcuaug

SEQ ID NO: 212201 - RNA, 22 nt, Human
acuggcaguagagggagcgcau

SEQ ID NO: 212202 - RNA, 22 nt, Human
gcagaauaauagaaaggcacac

SEQ ID NO: 212203 - RNA, 22 nt, Human
aggacaugaagaaagggcaagg

SEQ ID NO: 212204 - RNA, 22 nt, Human
cagaugaagaucauagaauagu

SEQ ID NO: 212205 - RNA, 22 nt, Human
gcugcccuucgucaucuauaaa

SEQ ID NO: 212206 - RNA, 22 nt, Human
uaauaguugugacuuuguaaag

SEQ ID NO: 212207 - RNA, 22 nt, Human
auugcaaaggucccauucaaga

SEQ ID NO: 212208 - RNA, 22 nt, Human
uccuggcagggaacuugucagc

SEQ ID NO: 212209 - RNA, 22 nt, Human
ccaggccaguguuugguccagg

SEQ ID NO: 212210 - RNA, 22 nt, Human
ugaaguuuucugguugauuaag

SEQ ID NO: 212211 - RNA, 22 nt, Human
uggaggcagucaaaugacugac

SEQ ID NO: 212212 - RNA, 22 nt, Human
uuuuauguaauccuuacugucg

SEQ ID NO: 212213 - RNA, 22 nt, Human
gucuuuggaaagacaaaguuca

SEQ ID NO: 212214 - RNA, 22 nt, Human
gaauacauaucagauguguuuc

SEQ ID NO: 212215 - RNA, 22 nt, Human
agaggggcucauauccugucau

SEQ ID NO: 212216 - RNA, 22 nt, Human
ugccaggcuaaguggaggacuu

SEQ ID NO: 212217 - RNA, 22 nt, Human
gcauucuuccugggcugggggc

SEQ ID NO: 212218 - RNA, 20 nt, Human
cugcccugcccuggguccug

SEQ ID NO: 212219 - RNA, 22 nt, Human
agaaucuuggaacucagaucac

SEQ ID NO: 212220 - RNA, 22 nt, Human
gcugccacgaucucugcuguag

SEQ ID NO: 212221 - RNA, 22 nt, Human
ugguggggauucccucccuggc

SEQ ID NO: 212222 - RNA, 22 nt, Human
gaaagguugggugaauggugga

SEQ ID NO: 212223 - RNA, 22 nt, Human
uucugggccaaucucuuaaucu

SEQ ID NO: 212224 - RNA, 22 nt, Human
uccugggucucuuccuuaguuc

SEQ ID NO: 212225 - RNA, 22 nt, Human
aaaguguuaugcaaaacucugu

SEQ ID NO: 212226 - RNA, 22 nt, Human
augagaaagaguuguaucuaga

SEQ ID NO: 212227 - RNA, 22 nt, Human
cugcaucacagcaggaggcaca

SEQ ID NO: 212228 - RNA, 22 nt, Human
acuuuuuacaggguguauacca

SEQ ID NO: 212229 - RNA, 22 nt, Human
ucugagguggacgauggagccu

SEQ ID NO: 212230 - RNA, 22 nt, Human
gucucagggcugagggcagugg

SEQ ID NO: 212231 - RNA, 22 nt, Human
uuguaauuugcaaauguauugu

SEQ ID NO: 212232 - RNA, 19 nt, Human
caguaucauugcacauagu

SEQ ID NO: 212233 - RNA, 22 nt, Human
uaacugguccugaacagcccag

SEQ ID NO: 212234 - RNA, 22 nt, Human
uguuuaauucaccaucauguuc

SEQ ID NO: 212235 - RNA, 22 nt, Human
gaguccuuuucucuguccacug

SEQ ID NO: 212236 - RNA, 22 nt, Human
ugcuugaacccaggaaguggag

SEQ ID NO: 212237 - RNA, 22 nt, Human
gagcuggcuccgccaugcugcu

SEQ ID NO: 212238 - RNA, 22 nt, Human
agcacuuuaagcaacagaucaa

SEQ ID NO: 212239 - RNA, 22 nt, Human
uuccugggggcagcagucuuga

SEQ ID NO: 212240 - RNA, 17 nt, Human
agugucagggcccuucc

SEQ ID NO: 212241 - RNA, 22 nt, Human
augaaaauguacauguguauaa

SEQ ID NO: 212242 - RNA, 22 nt, Human
cugagggagaagucacgggcag

SEQ ID NO: 212243 - RNA, 22 nt, Human
uacauguauguguacgugcaug

SEQ ID NO: 212244 - RNA, 22 nt, Human
uggcuggggccugaauccugca

SEQ ID NO: 212245 - RNA, 22 nt, Human
ggugucugcuucccuccagcug

SEQ ID NO: 212246 - RNA, 22 nt, Human
ugcaggcuggcagugcugaaau

SEQ ID NO: 212247 - RNA, 22 nt, Human
agucaguuaaccucacagcauc

SEQ ID NO: 212248 - RNA, 22 nt, Human
acagugugugcuuucccuuacg

SEQ ID NO: 212249 - RNA, 22 nt, Human
acagaugguuauugucauuucu

SEQ ID NO: 212250 - RNA, 22 nt, Human
uggcauuucaguauuuucauaa

SEQ ID NO: 212251 - RNA, 22 nt, Human
agccugauuuugauaauuauau

SEQ ID NO: 212252 - RNA, 22 nt, Human
ggcugcugcuguguaggccugu

SEQ ID NO: 212253 - RNA, 22 nt, Human
caagcugcuauagguugcuggg

SEQ ID NO: 212254 - RNA, 22 nt, Human
gugguaaucggauucuuaccgg

SEQ ID NO: 212255 - RNA, 22 nt, Human
cuggcugggagcucgccugcgg

SEQ ID NO: 212256 - RNA, 22 nt, Human
acuguucauccuuuuugaacaa

SEQ ID NO: 212257 - RNA, 22 nt, Human
aaagaguuggacuuucucaggc

SEQ ID NO: 212258 - RNA, 21 nt, Human
guucuauuuugcaaacuucug

SEQ ID NO: 212259 - RNA, 19 nt, Human
aggcuucuacccuguccag

SEQ ID NO: 212260 - RNA, 22 nt, Human
gagcucagcacuaaaaucaugu

SEQ ID NO: 212261 - RNA, 22 nt, Human
cuguccuguggugacagguaca

SEQ ID NO: 212262 - RNA, 22 nt, Human
ggcuuuauuauguggccaugug

SEQ ID NO: 212263 - RNA, 22 nt, Human
augugaaauauuaagccgagga

SEQ ID NO: 212264 - RNA, 22 nt, Human
ggaaagaacccuggauggcugg

SEQ ID NO: 212265 - RNA, 22 nt, Human
aauaggcagcuuagcaggggcu

SEQ ID NO: 212266 - RNA, 22 nt, Human
cagggaugugaugagcugagcc

SEQ ID NO: 212267 - RNA, 22 nt, Human
aguuacagugaccauuuauuua

SEQ ID NO: 212268 - RNA, 22 nt, Human
guuguaaguuuaaugucaauug

SEQ ID NO: 212269 - RNA, 22 nt, Human
gaaucucaaggcuugugaggau

SEQ ID NO: 212270 - RNA, 22 nt, Human
cacgguggcccacaggugcaag

SEQ ID NO: 212271 - RNA, 22 nt, Human
caggagaggcuguacguuucuc

SEQ ID NO: 212272 - RNA, 22 nt, Human
ucucugagcaugccauauugcu

SEQ ID NO: 212273 - RNA, 22 nt, Human
uggcuacucaacauguacucau

SEQ ID NO: 212274 - RNA, 20 nt, Human
agucacaguaucagucuuag

SEQ ID NO: 212275 - RNA, 22 nt, Human
uggaccugggguggccuccucu

SEQ ID NO: 212276 - RNA, 22 nt, Human
acuaaauaguuuugacagaaca

SEQ ID NO: 212277 - RNA, 22 nt, Human
uguguccucagggaagcagaga

SEQ ID NO: 212278 - RNA, 22 nt, Human
agcagggccaacaguaaacacc

SEQ ID NO: 212279 - RNA, 22 nt, Human
agccagacuuuaaaauagauga

SEQ ID NO: 212280 - RNA, 22 nt, Human
gccuccuccuucccgagggucu

SEQ ID NO: 212281 - RNA, 22 nt, Human
cagcccuggcgcccccagaucu

SEQ ID NO: 212282 - RNA, 22 nt, Human
aaaggauaagguuaucaauuuu

SEQ ID NO: 212283 - RNA, 22 nt, Human
ucacauguguuuucucaccaac

SEQ ID NO: 212284 - RNA, 22 nt, Human
ccugggcuuccacgagcagagg

SEQ ID NO: 212285 - RNA, 22 nt, Human
ucagaaguaggagacauucuug

SEQ ID NO: 212286 - RNA, 22 nt, Human
agaacaauguuaaauuauuaag

SEQ ID NO: 212287 - RNA, 22 nt, Human
aaguacuucuagauggauaauc

SEQ ID NO: 212288 - RNA, 22 nt, Human
uuaguugauguucuggagguag

SEQ ID NO: 212289 - RNA, 19 nt, Human
cucuggcuccugggcugcc

SEQ ID NO: 212290 - RNA, 22 nt, Human
aaaaaccuuucauugcaaaugu

SEQ ID NO: 212291 - RNA, 22 nt, Human
gcugcaccagcugcacccagua

SEQ ID NO: 212292 - RNA, 22 nt, Human
agcaacaggcauaauguguuga

SEQ ID NO: 212293 - RNA, 22 nt, Human
ucacauucucagcaucuauaca

SEQ ID NO: 212294 - RNA, 22 nt, Human
gacauggauacuugauaagggg

SEQ ID NO: 212295 - RNA, 22 nt, Human
ucaguuuaagaugacuaacaau

SEQ ID NO: 212296 - RNA, 22 nt, Human
uccugcacauuaguauuuuuua

SEQ ID NO: 212297 - RNA, 22 nt, Human
agaggguaacaagaggccugga

SEQ ID NO: 212298 - RNA, 22 nt, Human
ccugggagagucuguggucucc

SEQ ID NO: 212299 - RNA, 22 nt, Human
acacacagaaggaagccccacu

SEQ ID NO: 212300 - RNA, 22 nt, Human
aaggaaccauuugugugcaugg

SEQ ID NO: 212301 - RNA, 22 nt, Human
aauuauauuguggugugaaugu

SEQ ID NO: 212302 - RNA, 19 nt, Human
gcucaggcugugugugggg

SEQ ID NO: 212303 - RNA, 22 nt, Human
acaacagagcuggacugagagg

SEQ ID NO: 212304 - RNA, 22 nt, Human
ucagggaagaaaugggacuuua

SEQ ID NO: 212305 - RNA, 22 nt, Human
ccuucugauacugacaucauuu

SEQ ID NO: 212306 - RNA, 22 nt, Human
uagucuuucauuuggagcauuu

SEQ ID NO: 212307 - RNA, 19 nt, Human
gcaggucauuaggcuaggu

SEQ ID NO: 212308 - RNA, 22 nt, Human
aggcuucuucugccugucuuug

SEQ ID NO: 212309 - RNA, 22 nt, Human
aggcugggcaccguuuugaucc

SEQ ID NO: 212310 - RNA, 22 nt, Human
auuggucuccacuuguuuuaga

SEQ ID NO: 212311 - RNA, 19 nt, Human
ccaggagcaguggugagcu

SEQ ID NO: 212312 - RNA, 22 nt, Human
uacagaggggacauggaagaca

SEQ ID NO: 212313 - RNA, 20 nt, Human
gagcccaaguagggagaaau

SEQ ID NO: 212314 - RNA, 22 nt, Human
aucauaaaauugcaccauuucu

SEQ ID NO: 212315 - RNA, 23 nt, Human
aaguucuuuuagaugucuucgug

SEQ ID NO: 212316 - RNA, 22 nt, Human
cagagcugggcauggugaaagg

SEQ ID NO: 212317 - RNA, 21 nt, Human
ugcagauaauugaaagcugac

SEQ ID NO: 212318 - RNA, 22 nt, Human
guuucauuuacaucuguaggua

SEQ ID NO: 212319 - RNA, 22 nt, Human
uaccaaauguaaucauucuaau

SEQ ID NO: 212320 - RNA, 23 nt, Human
ugcugggguaguuuguggcacag

SEQ ID NO: 212321 - RNA, 22 nt, Human
auugucuuuaaaaauauacaac

SEQ ID NO: 212322 - RNA, 22 nt, Human
cucuccaguuauagcugauuug

SEQ ID NO: 212323 - RNA, 22 nt, Human
cagugaggaagcugucuggacc

SEQ ID NO: 212324 - RNA, 22 nt, Human
ucagacagggagucagaaaaua

SEQ ID NO: 212325 - RNA, 22 nt, Human
gcagaauuuaggaauuaggaaa

SEQ ID NO: 212326 - RNA, 22 nt, Human
agggauggaagacuugaagacc

SEQ ID NO: 212327 - RNA, 22 nt, Human
agguuucaugggagacaacuca

SEQ ID NO: 212328 - RNA, 22 nt, Human
uuucucuugcgauaugcuacac

SEQ ID NO: 212329 - RNA, 22 nt, Human
auuucucaguguacauuauguu

SEQ ID NO: 212330 - RNA, 22 nt, Human
ucuauuuacagaaagcagaauu

SEQ ID NO: 212331 - RNA, 22 nt, Human
auuuccugugucucuauuuaug

SEQ ID NO: 212332 - RNA, 22 nt, Human
gagccagcagccggcaccacca

SEQ ID NO: 212333 - RNA, 18 nt, Human
agugaguuguugaaagaa

SEQ ID NO: 212334 - RNA, 22 nt, Human
uuggccaguggaaagaggagga

SEQ ID NO: 212335 - RNA, 22 nt, Human
cagaaagcccuauguacagugg

SEQ ID NO: 212336 - RNA, 22 nt, Human
uugcaaaaacugcaauuacuuu

SEQ ID NO: 212337 - RNA, 22 nt, Human
uugccucccagcaugggcagcu

SEQ ID NO: 212338 - RNA, 22 nt, Human
gguggcugaaucaaaucaggcc

SEQ ID NO: 212339 - RNA, 22 nt, Human
acacauaugucauugaaaaauc

SEQ ID NO: 212340 - RNA, 22 nt, Human
caauaauauccugugcuguuug

SEQ ID NO: 212341 - RNA, 22 nt, Human
uacagaagcugagacacugaga

SEQ ID NO: 212342 - RNA, 22 nt, Human
acugggcucauaaugucauaga

SEQ ID NO: 212343 - RNA, 22 nt, Human
gcaccagagggggcucugcagg

SEQ ID NO: 212344 - RNA, 18 nt, Human
ggcacugcuguuccccuu

SEQ ID NO: 212345 - RNA, 22 nt, Human
cucuccagcagauguagucugu

SEQ ID NO: 212346 - RNA, 22 nt, Human
aggcugugggguucugcuuuca

SEQ ID NO: 212347 - RNA, 19 nt, Human
uccaugcccaggcaccaag

SEQ ID NO: 212348 - RNA, 22 nt, Human
gaacuguaguuaauacuacaca

SEQ ID NO: 212349 - RNA, 22 nt, Human
uuagcuuucagccuuucucacc

SEQ ID NO: 212350 - RNA, 22 nt, Human
ccaucagauuagcaaaauccag

SEQ ID NO: 212351 - RNA, 22 nt, Human
ccaggaagguaugggaagaaaa

SEQ ID NO: 212352 - RNA, 22 nt, Human
caggcuugcuagaggagccaaa

SEQ ID NO: 212353 - RNA, 22 nt, Human
aagcacagaaaaggagcaugga

SEQ ID NO: 212354 - RNA, 22 nt, Human
gucucagguauugaaugggaac

SEQ ID NO: 212355 - RNA, 22 nt, Human
ugggggugacuaucucgggaau

SEQ ID NO: 212356 - RNA, 22 nt, Human
accagcucagagcaggcuccug

SEQ ID NO: 212357 - RNA, 22 nt, Human
guccuggcuuaguucgcuguaa

SEQ ID NO: 212358 - RNA, 22 nt, Human
augcugagguuguuguccuauu

SEQ ID NO: 212359 - RNA, 22 nt, Human
cacagggaggcagccaugcucc

SEQ ID NO: 212360 - RNA, 22 nt, Human
uacaugcaugucacagaaugaa

SEQ ID NO: 212361 - RNA, 22 nt, Human
auauggaaugguaaucuacaau

SEQ ID NO: 212362 - RNA, 21 nt, Human
gacacaguaaucuuggggcuu

SEQ ID NO: 212363 - RNA, 22 nt, Human
cagaaguuuugcucucuugggu

SEQ ID NO: 212364 - RNA, 22 nt, Human
cccuccagagcuugaccugcug

SEQ ID NO: 212365 - RNA, 18 nt, Human
ccagcccugcagcaccug

SEQ ID NO: 212366 - RNA, 22 nt, Human
cacaauuuccuugcuucacuuu

SEQ ID NO: 212367 - RNA, 22 nt, Human
uuuaauuauaucugggcaguua

SEQ ID NO: 212368 - RNA, 22 nt, Human
ucccacugagccccugcuggug

SEQ ID NO: 212369 - RNA, 22 nt, Human
ggcagccuugagggaggccugg

SEQ ID NO: 212370 - RNA, 22 nt, Human
agggccagucguguauuacugu

SEQ ID NO: 212371 - RNA, 21 nt, Human
uacaaguugcuuuugaagucc

SEQ ID NO: 212372 - RNA, 22 nt, Human
uugauucagagaagauuggccc

SEQ ID NO: 212373 - RNA, 21 nt, Human
uugcacagaaaaccauagaga

SEQ ID NO: 212374 - RNA, 22 nt, Human
acagaugaaacccagcuaguug

SEQ ID NO: 212375 - RNA, 21 nt, Human
ggcaacagauauuuugcuuag

SEQ ID NO: 212376 - RNA, 22 nt, Human
acagagcuucccagccugagca

SEQ ID NO: 212377 - RNA, 22 nt, Human
augggacagguacuagaaaggg

SEQ ID NO: 212378 - RNA, 22 nt, Human
agaggaagcugagaugccucuu

SEQ ID NO: 212379 - RNA, 22 nt, Human
agaugaguaaauggagucuucc

SEQ ID NO: 212380 - RNA, 22 nt, Human
ucucuguaaggaagaauuagau

SEQ ID NO: 212381 - RNA, 22 nt, Human
caggcaagauuagagaugagca

SEQ ID NO: 212382 - RNA, 22 nt, Human
agagcagauggccagggggccu

SEQ ID NO: 212383 - RNA, 22 nt, Human
gaaaccagcuagaggcagaggg

SEQ ID NO: 212384 - RNA, 22 nt, Human
aagcaggcaucuuggaggucaa

SEQ ID NO: 212385 - RNA, 22 nt, Human
gagccuggauugaagugggugg

SEQ ID NO: 212386 - RNA, 22 nt, Human
gacaggcuuucucaggaugagc

SEQ ID NO: 212387 - RNA, 22 nt, Human
aagagcaucaaugacucgcagu

SEQ ID NO: 212388 - RNA, 22 nt, Human
gguuucaacuucaaccucucca

SEQ ID NO: 212389 - RNA, 22 nt, Human
caggaggaggguacaccaucag

SEQ ID NO: 212390 - RNA, 22 nt, Human
aaaagacaggugucugcggccc

SEQ ID NO: 212391 - RNA, 22 nt, Human
ugagccagguuaagacaggagc

SEQ ID NO: 212392 - RNA, 22 nt, Human
ucuccccaaccauggcacucac

SEQ ID NO: 212393 - RNA, 22 nt, Human
aaacaaauuucaagcugugaca

SEQ ID NO: 212394 - RNA, 22 nt, Human
acuguccuagaaccugcagcuc

SEQ ID NO: 212395 - RNA, 22 nt, Human
gguggaugcugacuguucugcu

SEQ ID NO: 212396 - RNA, 19 nt, Human
aucuagauuauugagaagg

SEQ ID NO: 212397 - RNA, 22 nt, Human
uggagcuguagccaccacccug

SEQ ID NO: 212398 - RNA, 22 nt, Human
uuucaugagauuccuccacauc

SEQ ID NO: 212399 - RNA, 22 nt, Human
uagcuuuaauaagcugcugaau

SEQ ID NO: 212400 - RNA, 19 nt, Human
uaaggccaaaaguaagugu

SEQ ID NO: 212401 - RNA, 22 nt, Human
aaggccugaacaugaggagaug

SEQ ID NO: 212402 - RNA, 22 nt, Human
aauguuuuguaugccucugagc

SEQ ID NO: 212403 - RNA, 22 nt, Human
caggagucccucuggccagcau

SEQ ID NO: 212404 - RNA, 21 nt, Human
agcugccuccacuucugaggc

SEQ ID NO: 212405 - RNA, 22 nt, Human
cucacauucacaggacagaagg

SEQ ID NO: 212406 - RNA, 19 nt, Human
caccccaguccucuuuccc

SEQ ID NO: 212407 - RNA, 19 nt, Human
cuggaccuggaggcccgga

SEQ ID NO: 212408 - RNA, 22 nt, Human
ggagagcugacaucaugauguu

SEQ ID NO: 212409 - RNA, 22 nt, Human
uuauuuuaccuuccucugagcu

SEQ ID NO: 212410 - RNA, 22 nt, Human
cacaggcucuucucacuugauu

SEQ ID NO: 212411 - RNA, 22 nt, Human
aaugucaauuaccagaacagaa

SEQ ID NO: 212412 - RNA, 22 nt, Human
cugaaggcauuuuugcugauuu

SEQ ID NO: 212413 - RNA, 22 nt, Human
cagcucccuauggugaggcgac

SEQ ID NO: 212414 - RNA, 22 nt, Human
cugccccagugccaggcaggug

SEQ ID NO: 212415 - RNA, 22 nt, Human
ucuuuucuccagaccugggauc

SEQ ID NO: 212416 - RNA, 22 nt, Human
ccuccugguccagcaucucuuu

SEQ ID NO: 212417 - RNA, 22 nt, Human
gccuuccuuacaccugcucagc

SEQ ID NO: 212418 - RNA, 19 nt, Human
uucuccagggacuuaggga

SEQ ID NO: 212419 - RNA, 22 nt, Human
ucacaucuguugauacagcauc

SEQ ID NO: 212420 - RNA, 22 nt, Human
gcaguggcaugaugugggcuca

SEQ ID NO: 212421 - RNA, 22 nt, Human
cugguuuugucagaagcuuuau

SEQ ID NO: 212422 - RNA, 22 nt, Human
acauuccaaaaacuagcagaua

SEQ ID NO: 212423 - RNA, 22 nt, Human
augugcccucuuagagucucug

SEQ ID NO: 212424 - RNA, 18 nt, Human
acccugggcaauucacuc

SEQ ID NO: 212425 - RNA, 22 nt, Human
gaggcagcugaaggagugacag

SEQ ID NO: 212426 - RNA, 21 nt, Human
uauacagaggggaacaggaga

SEQ ID NO: 212427 - RNA, 22 nt, Human
agucugugacucauuggaucuc

SEQ ID NO: 212428 - RNA, 22 nt, Human
auuuucagagacaucuggacuu

SEQ ID NO: 212429 - RNA, 22 nt, Human
agccaggaucacccggggcugu

SEQ ID NO: 212430 - RNA, 22 nt, Human
cuuuaagacucugcucuuggug

SEQ ID NO: 212431 - RNA, 22 nt, Human
ccagagcugagggagccugagc

SEQ ID NO: 212432 - RNA, 22 nt, Human
uugcuuccucuaguuucuugaa

SEQ ID NO: 212433 - RNA, 22 nt, Human
auaucacagguguuuaccugau

SEQ ID NO: 212434 - RNA, 19 nt, Human
ccagaguuggcagagcagg

SEQ ID NO: 212435 - RNA, 22 nt, Human
ugggaugagcuauauagaaagu

SEQ ID NO: 212436 - RNA, 22 nt, Human
aacuaguaaaagcaacaguaua

SEQ ID NO: 212437 - RNA, 22 nt, Human
auaacaugaccugugcuucaca

SEQ ID NO: 212438 - RNA, 22 nt, Human
ucauauaagagcuuuagaguca

SEQ ID NO: 212439 - RNA, 22 nt, Human
ccucaaaucuuuagaguuauuu

SEQ ID NO: 212440 - RNA, 22 nt, Human
ccagcucccgcaggcugcacag

SEQ ID NO: 212441 - RNA, 22 nt, Human
guuuagaaaauagugaagcaag

SEQ ID NO: 212442 - RNA, 22 nt, Human
cauguauaguuggaacuacauc

SEQ ID NO: 212443 - RNA, 22 nt, Human
ggaggcugagaaguccaagauc

SEQ ID NO: 212444 - RNA, 23 nt, Human
cacaggcagaaaucaagacggua

SEQ ID NO: 212445 - RNA, 22 nt, Human
uucuuucucaacaugaauguuu

SEQ ID NO: 212446 - RNA, 22 nt, Human
ucucugaggacuugggguugcc

SEQ ID NO: 212447 - RNA, 22 nt, Human
ccugagcuccaguagcagccag

SEQ ID NO: 212448 - RNA, 23 nt, Human
ggcucugaggauggagcuggugg

SEQ ID NO: 212449 - RNA, 22 nt, Human
acuaaauauuugagagguguag

SEQ ID NO: 212450 - RNA, 22 nt, Human
cacagaaauuauuaggaugcuu

SEQ ID NO: 212451 - RNA, 22 nt, Human
gcuuccuuccuuacauuggugg

SEQ ID NO: 212452 - RNA, 22 nt, Human
augcauugucugguuucauuuu

SEQ ID NO: 212453 - RNA, 22 nt, Human
aauguuaauucacagccaaaua

SEQ ID NO: 212454 - RNA, 22 nt, Human
auguuacacauaggcauaaaug

SEQ ID NO: 212455 - RNA, 22 nt, Human
uucauucuugggaucagagagu

SEQ ID NO: 212456 - RNA, 22 nt, Human
aggaaacucugagcggaccagc

SEQ ID NO: 212457 - RNA, 22 nt, Human
caucagaagaaagacaaaugau

SEQ ID NO: 212458 - RNA, 22 nt, Human
uccugcagguggaugauucucu

SEQ ID NO: 212459 - RNA, 22 nt, Human
uccaggucuggccugcuaggca

SEQ ID NO: 212460 - RNA, 22 nt, Human
acacaaguucuaaagauugcgc

SEQ ID NO: 212461 - RNA, 22 nt, Human
uuguuuuaguagguacacugag

SEQ ID NO: 212462 - RNA, 22 nt, Human
gagcugagggucuaggaggguu

SEQ ID NO: 212463 - RNA, 22 nt, Human
cuggaagggucuacuuagcaga

SEQ ID NO: 212464 - RNA, 20 nt, Human
uucacagaggacucagguca

SEQ ID NO: 212465 - RNA, 22 nt, Human
uugugucccuguaagacaaagc

SEQ ID NO: 212466 - RNA, 22 nt, Human
gaauauuuuuaaagggacuaau

SEQ ID NO: 212467 - RNA, 22 nt, Human
accugccucagugcagcuggau

SEQ ID NO: 212468 - RNA, 22 nt, Human
auggcuugauagaaagcuaguu

SEQ ID NO: 212469 - RNA, 22 nt, Human
ggaagagagggcugggccucaa

SEQ ID NO: 212470 - RNA, 17 nt, Human
aucuggaagcuagcuga

SEQ ID NO: 212471 - RNA, 22 nt, Human
ucaggauggagggaagcacaga

SEQ ID NO: 212472 - RNA, 22 nt, Human
agcugcugccucacuggucugu

SEQ ID NO: 212473 - RNA, 22 nt, Human
ggaggggagucucccaaagccg

SEQ ID NO: 212474 - RNA, 22 nt, Human
cucuguuacagcccccugccuc

SEQ ID NO: 212475 - RNA, 22 nt, Human
auaugaaaauguuuuagcugua

SEQ ID NO: 212476 - RNA, 22 nt, Human
ggcuuguccuucugguugucuu

SEQ ID NO: 212477 - RNA, 22 nt, Human
ugugggaggaacacagccagaa

SEQ ID NO: 212478 - RNA, 21 nt, Human
uuuucccacugaaagcuccca

SEQ ID NO: 212479 - RNA, 22 nt, Human
guaacacuuggcugcaaccugg

SEQ ID NO: 212480 - RNA, 17 nt, Human
aggcugcugggccaggg

SEQ ID NO: 212481 - RNA, 18 nt, Human
aggcaggugcuggaaguc

SEQ ID NO: 212482 - RNA, 22 nt, Human
acuguuaaaguaauuaauuguc

SEQ ID NO: 212483 - RNA, 22 nt, Human
cagcuugugucauucaucuugu

SEQ ID NO: 212484 - RNA, 22 nt, Human
ugaaggcauugaugaaggaauc

SEQ ID NO: 212485 - RNA, 22 nt, Human
aggaggcugcaacccugaggcc

SEQ ID NO: 212486 - RNA, 22 nt, Human
ggagccuguggccgucacgacu

SEQ ID NO: 212487 - RNA, 22 nt, Human
aaucaacauuguuuuaagucaa

SEQ ID NO: 212488 - RNA, 22 nt, Human
uguuaucugcacguagaguuuu

SEQ ID NO: 212489 - RNA, 23 nt, Human
ggguccagagacaggcaugggug

SEQ ID NO: 212490 - RNA, 21 nt, Human
uccuccuucaaguccuggccu

SEQ ID NO: 212491 - RNA, 18 nt, Human
uucuggguguuauguuua

SEQ ID NO: 212492 - RNA, 22 nt, Human
ucaagcaaauguccuuuuguuc

SEQ ID NO: 212493 - RNA, 22 nt, Human
auucuacaacccaauaauaauu

SEQ ID NO: 212494 - RNA, 22 nt, Human
gcuuccagacgaucauguaaga

SEQ ID NO: 212495 - RNA, 22 nt, Human
uguggcuguguccaccugcugc

SEQ ID NO: 212496 - RNA, 19 nt, Human
agccagaacuaguguuucu

SEQ ID NO: 212497 - RNA, 22 nt, Human
aaguccagacuccuuugcgugg

SEQ ID NO: 212498 - RNA, 22 nt, Human
ucucgacagccuggcacagugg

SEQ ID NO: 212499 - RNA, 22 nt, Human
aagggcaggugggcauuucugg

SEQ ID NO: 212500 - RNA, 22 nt, Human
ggagccagaguuuaauguggag

SEQ ID NO: 212501 - RNA, 22 nt, Human
ccagugcccagucucccugguc

SEQ ID NO: 212502 - RNA, 22 nt, Human
aagccaguguccagaaugggca

SEQ ID NO: 212503 - RNA, 22 nt, Human
ucuguugacuccuagcagccau

SEQ ID NO: 212504 - RNA, 22 nt, Human
gaauacaugauacaugaacugc

SEQ ID NO: 212505 - RNA, 22 nt, Human
ucucugaaugagauuacugccu

SEQ ID NO: 212506 - RNA, 22 nt, Human
gcugcaggagcuggagcugugg

SEQ ID NO: 212507 - RNA, 22 nt, Human
ucacgugagggaccugugucug

SEQ ID NO: 212508 - RNA, 22 nt, Human
uccauucuuuuuaccucucaga

SEQ ID NO: 212509 - RNA, 22 nt, Human
uuggaucuuaugaagguggcau

SEQ ID NO: 212510 - RNA, 21 nt, Human
agggagcugcgucuugaaaga

SEQ ID NO: 212511 - RNA, 22 nt, Human
gcagagaagaugcccaggcuuc

SEQ ID NO: 212512 - RNA, 22 nt, Human
gacagcagauacuuucauugaa

SEQ ID NO: 212513 - RNA, 22 nt, Human
uguaucauauggggaagcuuca

SEQ ID NO: 212514 - RNA, 22 nt, Human
uccaugccaggcagucgaugca

SEQ ID NO: 212515 - RNA, 22 nt, Human
uccuccaggucuaggguggcuu

SEQ ID NO: 212516 - RNA, 22 nt, Human
ugcucaaugucuuaugagacug

SEQ ID NO: 212517 - RNA, 22 nt, Human
caggauggugugagugugagga

SEQ ID NO: 212518 - RNA, 22 nt, Human
ggaacuugaaaaucaagguggu

SEQ ID NO: 212519 - RNA, 22 nt, Human
caagauaagaucauuuacacua

SEQ ID NO: 212520 - RNA, 22 nt, Human
uugauguacagaauuguucaca

SEQ ID NO: 212521 - RNA, 22 nt, Human
ugugggaaguuuggagggaaag

SEQ ID NO: 212522 - RNA, 22 nt, Human
ucauuuacauagaaacaauaua

SEQ ID NO: 212523 - RNA, 19 nt, Human
agcuuccauauucucuagu

SEQ ID NO: 212524 - RNA, 18 nt, Human
agcagguggauuuauugg

SEQ ID NO: 212525 - RNA, 22 nt, Human
cagcuguugugauuuccaggag

SEQ ID NO: 212526 - RNA, 19 nt, Human
gcucagagccaugggggcu

SEQ ID NO: 212527 - RNA, 22 nt, Human
aaguuuuauuggcuauagcacu

SEQ ID NO: 212528 - RNA, 22 nt, Human
aagggcagcugacagaugcuua

SEQ ID NO: 212529 - RNA, 22 nt, Human
acugagcucugaugagauuugg

SEQ ID NO: 212530 - RNA, 22 nt, Human
uuucgagggccuuaaguauucc

SEQ ID NO: 212531 - RNA, 22 nt, Human
aaugaaugaaccacauauaaca

SEQ ID NO: 212532 - RNA, 22 nt, Human
acucugaaugugcauguaaauc

SEQ ID NO: 212533 - RNA, 22 nt, Human
ucugaaagaaagauuuuguuuc

SEQ ID NO: 212534 - RNA, 22 nt, Human
cagcugcaggaacaaaaaugug

SEQ ID NO: 212535 - RNA, 22 nt, Human
ugaaagcagugccaugauuaug

SEQ ID NO: 212536 - RNA, 22 nt, Human
uucuuccucacacucucaccca

SEQ ID NO: 212537 - RNA, 18 nt, Human
ggccagcuccugaggcag

SEQ ID NO: 212538 - RNA, 22 nt, Human
ggccucucagggcagagacccu

SEQ ID NO: 212539 - RNA, 22 nt, Human
aacauguaaccagcauucaucu

SEQ ID NO: 212540 - RNA, 19 nt, Human
ggcucuggcggcuguagcc

SEQ ID NO: 212541 - RNA, 22 nt, Human
ggucuggccaauagacagcccc

SEQ ID NO: 212542 - RNA, 22 nt, Human
cuggcaggagcauucacagagg

SEQ ID NO: 212543 - RNA, 22 nt, Human
agauguggauccuaggguagaa

SEQ ID NO: 212544 - RNA, 22 nt, Human
ucugggucuuaguuuucuugau

SEQ ID NO: 212545 - RNA, 22 nt, Human
guugugcagucagacugccugg

SEQ ID NO: 212546 - RNA, 22 nt, Human
uuaguucuugggugaacuuuug

SEQ ID NO: 212547 - RNA, 22 nt, Human
caucagugcccuuggggaugcc

SEQ ID NO: 212548 - RNA, 22 nt, Human
gacagcuuagugaaaauguaaa

SEQ ID NO: 212549 - RNA, 22 nt, Human
guucaguuaugugaccucaaaa

SEQ ID NO: 212550 - RNA, 22 nt, Human
aggaacaggccucguuuucuau

SEQ ID NO: 212551 - RNA, 22 nt, Human
uauuucacucaguauaccauag

SEQ ID NO: 212552 - RNA, 22 nt, Human
ggcucuggugugaagcagccuc

SEQ ID NO: 212553 - RNA, 22 nt, Human
guccuggccucuggggguaugg

SEQ ID NO: 212554 - RNA, 20 nt, Human
cuuguacaugauaaagauuu

SEQ ID NO: 212555 - RNA, 22 nt, Human
aacuuucagaauccuaugcauu

SEQ ID NO: 212556 - RNA, 18 nt, Human
agaugaaagcaaaugaca

SEQ ID NO: 212557 - RNA, 22 nt, Human
ugaugaguaaauaagguugagu

SEQ ID NO: 212558 - RNA, 22 nt, Human
gcauggcauuaacaagauggaa

SEQ ID NO: 212559 - RNA, 22 nt, Human
auccucagcaucuagcaugaag

SEQ ID NO: 212560 - RNA, 18 nt, Human
gggaggccccagcaggag

SEQ ID NO: 212561 - RNA, 22 nt, Human
uagcuuggaauaaaaugagaau

SEQ ID NO: 212562 - RNA, 22 nt, Human
gccuggggaacuugauccuguc

SEQ ID NO: 212563 - RNA, 22 nt, Human
auuuaauaccacuuggugcuuu

SEQ ID NO: 212564 - RNA, 22 nt, Human
ggagccagaaaugcugugguug

SEQ ID NO: 212565 - RNA, 22 nt, Human
agucugucucugcuaaucacua

SEQ ID NO: 212566 - RNA, 23 nt, Human
ggcagccucugacucugcuuugc

SEQ ID NO: 212567 - RNA, 22 nt, Human
agagggcugccucagucagcua

SEQ ID NO: 212568 - RNA, 22 nt, Human
gaaaggccauuucugaggguuu

SEQ ID NO: 212569 - RNA, 19 nt, Human
ccccaggguaggcuagggg

SEQ ID NO: 212570 - RNA, 22 nt, Human
agacaggcagggcauggaaaaa

SEQ ID NO: 212571 - RNA, 22 nt, Human
uuuaguguagcauucagaguca

SEQ ID NO: 212572 - RNA, 22 nt, Human
uacuggcaauuucauauggugc

SEQ ID NO: 212573 - RNA, 22 nt, Human
auaaggcagucccuuaacaagg

SEQ ID NO: 212574 - RNA, 22 nt, Human
cccaggagccaucugucuuggc

SEQ ID NO: 212575 - RNA, 22 nt, Human
ugaggcacauccaggccagcuc

SEQ ID NO: 212576 - RNA, 22 nt, Human
auucaguguaguuauuaucuuu

SEQ ID NO: 212577 - RNA, 22 nt, Human
agcugccacauggugucacugu

SEQ ID NO: 212578 - RNA, 22 nt, Human
gcugccccagcugggggcugga

SEQ ID NO: 212579 - RNA, 22 nt, Human
uuuaaaaguuaucaucugucca

SEQ ID NO: 212580 - RNA, 22 nt, Human
ccugggaguggcacucacagca

SEQ ID NO: 212581 - RNA, 22 nt, Human
aucugggucacaguggcaucua

SEQ ID NO: 212582 - RNA, 22 nt, Human
cagaggggcugacacccuuggc

SEQ ID NO: 212583 - RNA, 22 nt, Human
gaggggaugcagagaggcuuau

SEQ ID NO: 212584 - RNA, 20 nt, Human
gcuuccaggagggcugauau

SEQ ID NO: 212585 - RNA, 22 nt, Human
aagcugcuggugacugggcuga

SEQ ID NO: 212586 - RNA, 22 nt, Human
gggaagggagggccuccaguca

SEQ ID NO: 212587 - RNA, 22 nt, Human
ccuggcagguuacaaccaguua

SEQ ID NO: 212588 - RNA, 22 nt, Human
uaacacugccaugcuggaguca

SEQ ID NO: 212589 - RNA, 22 nt, Human
gcucaaagaccagacagaggag

SEQ ID NO: 212590 - RNA, 22 nt, Human
caagauggacauaaggagagaa

SEQ ID NO: 212591 - RNA, 22 nt, Human
gccuguguggaugggccccugg

SEQ ID NO: 212592 - RNA, 22 nt, Human
ugcccagggauaagccuagaga

SEQ ID NO: 212593 - RNA, 22 nt, Human
gcaggcccagagucgcuggccu

SEQ ID NO: 212594 - RNA, 19 nt, Human
auuugcuugucugcucugc

SEQ ID NO: 212595 - RNA, 22 nt, Human
uuagcucuuuguagcuauuucu

SEQ ID NO: 212596 - RNA, 22 nt, Human
ucuguuuagacucaguugaaac

SEQ ID NO: 212597 - RNA, 22 nt, Human
acugccuucaaacagcgccacc

SEQ ID NO: 212598 - RNA, 22 nt, Human
aaugcuuugacuauaucuauaa

SEQ ID NO: 212599 - RNA, 22 nt, Human
gccuccugacuuacacugagcu

SEQ ID NO: 212600 - RNA, 22 nt, Human
uagaaucuccagcauugguugu

SEQ ID NO: 212601 - RNA, 23 nt, Human
agcaauaagaagggauacaugug

SEQ ID NO: 212602 - RNA, 22 nt, Human
gcuggcaggagaccauacccua

SEQ ID NO: 212603 - RNA, 21 nt, Human
acuguucauuugaugaacugg

SEQ ID NO: 212604 - RNA, 22 nt, Human
ucagggacgugagcucagaguc

SEQ ID NO: 212605 - RNA, 22 nt, Human
aucuggagcucugcacaccugg

SEQ ID NO: 212606 - RNA, 22 nt, Human
gaccuggguaaggggcugacaa

SEQ ID NO: 212607 - RNA, 22 nt, Human
cucuuaaauaacaucauugcuu

SEQ ID NO: 212608 - RNA, 22 nt, Human
acugagggcauaaaaguacugu

SEQ ID NO: 212609 - RNA, 18 nt, Human
ugguccaguucagauaua

SEQ ID NO: 212610 - RNA, 22 nt, Human
cagccacuggugccaggcuguu

SEQ ID NO: 212611 - RNA, 22 nt, Human
auuucuuucuggccacgguuuu

SEQ ID NO: 212612 - RNA, 22 nt, Human
gggagcagccugccucccaccu

SEQ ID NO: 212613 - RNA, 22 nt, Human
gguauuuauaugucugaagcug

SEQ ID NO: 212614 - RNA, 22 nt, Human
ugaguccauugauggauaguga

SEQ ID NO: 212615 - RNA, 22 nt, Human
agcagcagcucauucuuccugu

SEQ ID NO: 212616 - RNA, 22 nt, Human
uuacauaacgguaugaaaaaug

SEQ ID NO: 212617 - RNA, 19 nt, Human
aaccuuagcuucucaggcc

SEQ ID NO: 212618 - RNA, 22 nt, Human
cuccaugaauuugagcuuugug

SEQ ID NO: 212619 - RNA, 22 nt, Human
uccugccugcaaucccagcacu

SEQ ID NO: 212620 - RNA, 22 nt, Human
cugcagaacaauuccugcuguu

SEQ ID NO: 212621 - RNA, 22 nt, Human
caaggaaguuuuaggagaggaa

SEQ ID NO: 212622 - RNA, 22 nt, Human
aagggcucccugccugaggugg

SEQ ID NO: 212623 - RNA, 22 nt, Human
acuguggaugccaaaggggagg

SEQ ID NO: 212624 - RNA, 22 nt, Human
uuuggagagaugaaguucugug

SEQ ID NO: 212625 - RNA, 22 nt, Human
acaggaucgcccuguugcccag

SEQ ID NO: 212626 - RNA, 22 nt, Human
ugcuuuauguuaucagaagggu

SEQ ID NO: 212627 - RNA, 22 nt, Human
cucugccugugucgccaccaca

SEQ ID NO: 212628 - RNA, 22 nt, Human
cagaggcagaggucaucucugg

SEQ ID NO: 212629 - RNA, 22 nt, Human
acaauacaggcuucuggacuua

SEQ ID NO: 212630 - RNA, 22 nt, Human
gagaccuuaagagaugucagcu

SEQ ID NO: 212631 - RNA, 21 nt, Human
ucccacugccacagcuucagg

SEQ ID NO: 212632 - RNA, 22 nt, Human
agcuuuaucccuugcccaucga

SEQ ID NO: 212633 - RNA, 22 nt, Human
gugaauuaaauauagccagguc

SEQ ID NO: 212634 - RNA, 22 nt, Human
uguguucaaugacuucaucuuu

SEQ ID NO: 212635 - RNA, 22 nt, Human
caccaggaagugguggccuggg

SEQ ID NO: 212636 - RNA, 22 nt, Human
caggggcucccugggugccagu

SEQ ID NO: 212637 - RNA, 22 nt, Human
agauaagauaguccagcacaau

SEQ ID NO: 212638 - RNA, 22 nt, Human
cagcuucuccauucuucuggcu

SEQ ID NO: 212639 - RNA, 22 nt, Human
gguggcugaagcagucuucggg

SEQ ID NO: 212640 - RNA, 22 nt, Human
guggauggagcuggaagccauu

SEQ ID NO: 212641 - RNA, 22 nt, Human
gcugcaaaccugccaccuggug

SEQ ID NO: 212642 - RNA, 21 nt, Human
uuagcaagucuacccauuucu

SEQ ID NO: 212643 - RNA, 22 nt, Human
agcacaguuuucauugcagggu

SEQ ID NO: 212644 - RNA, 22 nt, Human
cagcuggcugcaugaugccaaa

SEQ ID NO: 212645 - RNA, 23 nt, Human
gacagagugagaccuugucuuac

SEQ ID NO: 212646 - RNA, 22 nt, Human
ugucacaucaggugguggcugu

SEQ ID NO: 212647 - RNA, 17 nt, Human
cucuguggagguguuua

SEQ ID NO: 212648 - RNA, 22 nt, Human
gcugcagggagcuggaaggcuc

SEQ ID NO: 212649 - RNA, 22 nt, Human
gugaauggggcaggaaggaugg

SEQ ID NO: 212650 - RNA, 22 nt, Human
cacauaaucaccaaguccuuuc

SEQ ID NO: 212651 - RNA, 22 nt, Human
gaauuacagaguuguuaaguca

SEQ ID NO: 212652 - RNA, 23 nt, Human
ggcaccaggccauggagcgggag

SEQ ID NO: 212653 - RNA, 22 nt, Human
uuccuacauuuguacaauaaga

SEQ ID NO: 212654 - RNA, 22 nt, Human
ugaaggcacuugccuaggggca

SEQ ID NO: 212655 - RNA, 22 nt, Human
uacuaaauaguuuaauuccuca

SEQ ID NO: 212656 - RNA, 22 nt, Human
ugaaaugcaacaguuauuuuug

SEQ ID NO: 212657 - RNA, 22 nt, Human
uuucacaacugcuuauuugaga

SEQ ID NO: 212658 - RNA, 23 nt, Human
cagugcugguucugccugugggg

SEQ ID NO: 212659 - RNA, 22 nt, Human
cagcccacgucagggccacuca

SEQ ID NO: 212660 - RNA, 22 nt, Human
aagugguuauuuugaucuagaa

SEQ ID NO: 212661 - RNA, 22 nt, Human
cagaagugauguugagcuaguc

SEQ ID NO: 212662 - RNA, 22 nt, Human
uccagcagccugacuucccucu

SEQ ID NO: 212663 - RNA, 22 nt, Human
uguuuccauggugacagcagcu

SEQ ID NO: 212664 - RNA, 22 nt, Human
uggcuucuuacuagggcucagu

SEQ ID NO: 212665 - RNA, 22 nt, Human
ugcuugaacaaggauaaauuug

SEQ ID NO: 212666 - RNA, 23 nt, Human
aaugauuucaugaugauagcagc

SEQ ID NO: 212667 - RNA, 22 nt, Human
uuuaagacuuagauuuauuggg

SEQ ID NO: 212668 - RNA, 22 nt, Human
cuguuagugaucaaagggagag

SEQ ID NO: 212669 - RNA, 22 nt, Human
gggaagagggagcuggaaugau

SEQ ID NO: 212670 - RNA, 22 nt, Human
guggaggaagggauucagacca

SEQ ID NO: 212671 - RNA, 22 nt, Human
ugaucuggaauucccuguggua

SEQ ID NO: 212672 - RNA, 22 nt, Human
ggcacagagcuccagccuuggc

SEQ ID NO: 212673 - RNA, 22 nt, Human
ccugagucuuucccauugcgcu

SEQ ID NO: 212674 - RNA, 22 nt, Human
gccacauuagcccucaccaucu

SEQ ID NO: 212675 - RNA, 18 nt, Human
cugcccagagcauuucau

SEQ ID NO: 212676 - RNA, 22 nt, Human
cugccuggaccggcagcccucc

SEQ ID NO: 212677 - RNA, 22 nt, Human
augaacaauaaaauagaucaca

SEQ ID NO: 212678 - RNA, 22 nt, Human
auacuucuagaaauacuaugca

SEQ ID NO: 212679 - RNA, 22 nt, Human
auaaaaugguaaacgaagcuga

SEQ ID NO: 212680 - RNA, 22 nt, Human
guuuacaguggcuucauuggau

SEQ ID NO: 212681 - RNA, 19 nt, Human
cugucccagacucugcucu

SEQ ID NO: 212682 - RNA, 22 nt, Human
uccuggggccagcacuggugga

SEQ ID NO: 212683 - RNA, 22 nt, Human
uccaggacagaguagaagcagc

SEQ ID NO: 212684 - RNA, 22 nt, Human
caauauauaggaacaacuuagg

SEQ ID NO: 212685 - RNA, 22 nt, Human
ucagguguagguuguucaguuu

SEQ ID NO: 212686 - RNA, 22 nt, Human
agcaugcuauauugauuguagu

SEQ ID NO: 212687 - RNA, 22 nt, Human
gaggggcacagcagcuguugca

SEQ ID NO: 212688 - RNA, 22 nt, Human
caugccagguuugaguaucuug

SEQ ID NO: 212689 - RNA, 22 nt, Human
acaaauggaagguguucucuuc

SEQ ID NO: 212690 - RNA, 22 nt, Human
uuucuaggcacagugucuuccc

SEQ ID NO: 212691 - RNA, 22 nt, Human
agauacauuaguaguuacuugu

SEQ ID NO: 212692 - RNA, 22 nt, Human
uucucuagcaaaaccagcuagu

SEQ ID NO: 212693 - RNA, 22 nt, Human
ugugccugucccgcauucuggu

SEQ ID NO: 212694 - RNA, 22 nt, Human
aggucaagggcaagagugaggu

SEQ ID NO: 212695 - RNA, 22 nt, Human
uuugaacugauaaucuucuguu

SEQ ID NO: 212696 - RNA, 22 nt, Human
uauuucugggaguucagaaauu

SEQ ID NO: 212697 - RNA, 21 nt, Human
aggcccagagucuugggggga

SEQ ID NO: 212698 - RNA, 23 nt, Human
agcugggaauuuucugaagcuuu

SEQ ID NO: 212699 - RNA, 16 nt, Human
aggcucagaggcugga

SEQ ID NO: 212700 - RNA, 22 nt, Human
aagcauguacucaagcaaaugu

SEQ ID NO: 212701 - RNA, 22 nt, Human
gggagcugcggucuugcgaaga

SEQ ID NO: 212702 - RNA, 22 nt, Human
acaauacuuaccaauguuuuug

SEQ ID NO: 212703 - RNA, 22 nt, Human
aaacccugcccuucccaagaug

SEQ ID NO: 212704 - RNA, 22 nt, Human
agcugcuugggaaccaucaauu

SEQ ID NO: 212705 - RNA, 22 nt, Human
cuuccaggugcuggccuggccu

SEQ ID NO: 212706 - RNA, 22 nt, Human
agcuuuaaaaauccaauaucca

SEQ ID NO: 212707 - RNA, 22 nt, Human
cucuuugguuaaucacacagau

SEQ ID NO: 212708 - RNA, 22 nt, Human
agaaguauaacuauuugcuuuc

SEQ ID NO: 212709 - RNA, 22 nt, Human
cccagaggugcuucagaggugc

SEQ ID NO: 212710 - RNA, 22 nt, Human
uuaggaaacaguagccuuugcu

SEQ ID NO: 212711 - RNA, 22 nt, Human
uguuuauaccugcaaccuguca

SEQ ID NO: 212712 - RNA, 22 nt, Human
aagaaaccaacccugccagcac

SEQ ID NO: 212713 - RNA, 22 nt, Human
ugaucuuuucuauuuaugguag

SEQ ID NO: 212714 - RNA, 22 nt, Human
aggagcucagcuaaguuggaga

SEQ ID NO: 212715 - RNA, 22 nt, Human
agucuguguacuggguuucugu

SEQ ID NO: 212716 - RNA, 22 nt, Human
uccuccccugcccaugaggagg

SEQ ID NO: 212717 - RNA, 22 nt, Human
ccagaggcuggcagccagcuga

SEQ ID NO: 212718 - RNA, 19 nt, Human
cugucugugcagagaugug

SEQ ID NO: 212719 - RNA, 22 nt, Human
uauugcugccauuuuccaaugu

SEQ ID NO: 212720 - RNA, 22 nt, Human
aagguggugaucaucuugaagg

SEQ ID NO: 212721 - RNA, 22 nt, Human
auacaacugcucucagauaagu

SEQ ID NO: 212722 - RNA, 22 nt, Human
uccccaggaguuuuacuuugca

SEQ ID NO: 212723 - RNA, 22 nt, Human
accucaagaauguauaacacag

SEQ ID NO: 212724 - RNA, 22 nt, Human
acacaccaugauuuauuuaccc

SEQ ID NO: 212725 - RNA, 22 nt, Human
aguugugcugugaugcaggaua

SEQ ID NO: 212726 - RNA, 22 nt, Human
uuuccuuugcccaauacauguc

SEQ ID NO: 212727 - RNA, 22 nt, Human
gaauuuucagguagcaauuuca

SEQ ID NO: 212728 - RNA, 22 nt, Human
aguuauuuacuccuuugucucu

SEQ ID NO: 212729 - RNA, 22 nt, Human
ggucuccauuccuucaucucac

SEQ ID NO: 212730 - RNA, 19 nt, Human
cccagagagaucucuugcc

SEQ ID NO: 212731 - RNA, 23 nt, Human
auagacccaagaguaaaggcauc

SEQ ID NO: 212732 - RNA, 22 nt, Human
uguacaaucugaugauguaugg

SEQ ID NO: 212733 - RNA, 22 nt, Human
agcaagaugcaaacauccgucc

SEQ ID NO: 212734 - RNA, 23 nt, Human
aaccuagacuacuuacuaugugg

SEQ ID NO: 212735 - RNA, 22 nt, Human
gcagcauccuuggccuccaccc

SEQ ID NO: 212736 - RNA, 22 nt, Human
cugggcuuuugagucacaaggg

SEQ ID NO: 212737 - RNA, 22 nt, Human
aacaacugaaaagcuuuuucug

SEQ ID NO: 212738 - RNA, 22 nt, Human
ccagaaguuccuaagcaucauu

SEQ ID NO: 212739 - RNA, 22 nt, Human
uuaggaaagcauuguguaaaag

SEQ ID NO: 212740 - RNA, 22 nt, Human
ucaggcuuugggaaugccacuu

SEQ ID NO: 212741 - RNA, 19 nt, Human
uccagccugcuguuucucu

SEQ ID NO: 212742 - RNA, 20 nt, Human
uuucaaaggcaccuaugaag

SEQ ID NO: 212743 - RNA, 23 nt, Human
aaauauucuuuuuuaguaagugc

SEQ ID NO: 212744 - RNA, 22 nt, Human
gauucaaaaauaagcuccuauu

SEQ ID NO: 212745 - RNA, 22 nt, Human
ccuucuucaccaguuuaccuga

SEQ ID NO: 212746 - RNA, 23 nt, Human
agauuuggaaagcugaguggcgu

SEQ ID NO: 212747 - RNA, 22 nt, Human
aaagcauuauucuguggaaaaa

SEQ ID NO: 212748 - RNA, 22 nt, Human
cucucgcgugugccuuuccgcu

SEQ ID NO: 212749 - RNA, 22 nt, Human
uuuagcuuuugugucagauaag

SEQ ID NO: 212750 - RNA, 22 nt, Human
ccauuaguaccucuggaaaauu

SEQ ID NO: 212751 - RNA, 22 nt, Human
ugguaaauauguccauucucuu

SEQ ID NO: 212752 - RNA, 22 nt, Human
ugaggccugcuuggaauugaau

SEQ ID NO: 212753 - RNA, 22 nt, Human
guccagaaggaggucaaguugg

SEQ ID NO: 212754 - RNA, 22 nt, Human
acagcagcugccuucaggcucu

SEQ ID NO: 212755 - RNA, 22 nt, Human
gaagauuucuuuaugaaagaug

SEQ ID NO: 212756 - RNA, 22 nt, Human
aaacaggcgcuuacuaagaaaa

SEQ ID NO: 212757 - RNA, 21 nt, Human
cugaauuaugugcuuaccuuu

SEQ ID NO: 212758 - RNA, 22 nt, Human
cagguucugaggauggugccug

SEQ ID NO: 212759 - RNA, 22 nt, Human
uaaggacauuagaaaugaugcu

SEQ ID NO: 212760 - RNA, 22 nt, Human
ggcccagcccgagucagccuuc

SEQ ID NO: 212761 - RNA, 22 nt, Human
agucuagggugggguccacagg

SEQ ID NO: 212762 - RNA, 22 nt, Human
uuacaguuacugguacuguuaa

SEQ ID NO: 212763 - RNA, 22 nt, Human
cuauuacauuucuggacauuca

SEQ ID NO: 212764 - RNA, 22 nt, Human
gggugaggagcugccagucaug

SEQ ID NO: 212765 - RNA, 20 nt, Human
aacagcacacauucgcauua

SEQ ID NO: 212766 - RNA, 22 nt, Human
aagacuacuuuuggcagugugu

SEQ ID NO: 212767 - RNA, 22 nt, Human
aggacaguggacacuagucccu

SEQ ID NO: 212768 - RNA, 22 nt, Human
uuugagaaaaccagaaagaucu

SEQ ID NO: 212769 - RNA, 19 nt, Human
uuucucugugcaccuuuuc

SEQ ID NO: 212770 - RNA, 20 nt, Human
uccagccccugcauguugcu

SEQ ID NO: 212771 - RNA, 22 nt, Human
ccuguggccugaauuugguaaa

SEQ ID NO: 212772 - RNA, 22 nt, Human
uuucugaagucuucuaacagau

SEQ ID NO: 212773 - RNA, 22 nt, Human
uuguaaaugaccuuuucuaauu

SEQ ID NO: 212774 - RNA, 22 nt, Human
gucugugggccaaauacagccc

SEQ ID NO: 212775 - RNA, 18 nt, Human
cuccagggaacucaguca

SEQ ID NO: 212776 - RNA, 22 nt, Human
ccaugccccaccaggacgcugc

SEQ ID NO: 212777 - RNA, 22 nt, Human
aucaggauagugguuaccuggg

SEQ ID NO: 212778 - RNA, 17 nt, Human
uccauuccuaaggcccu

SEQ ID NO: 212779 - RNA, 22 nt, Human
aggcugagaaagugggaagaug

SEQ ID NO: 212780 - RNA, 16 nt, Human
auuuccagauuaugca

SEQ ID NO: 212781 - RNA, 22 nt, Human
aggcugccuguuccaaucuccu

SEQ ID NO: 212782 - RNA, 21 nt, Human
gcugcaaauucuaacaauuau

SEQ ID NO: 212783 - RNA, 22 nt, Human
acagcugcucaccugugagccc

SEQ ID NO: 212784 - RNA, 22 nt, Human
aagggcaggcacccacccucac

SEQ ID NO: 212785 - RNA, 22 nt, Human
ucuuuccagaggaauuuuuaga

SEQ ID NO: 212786 - RNA, 19 nt, Human
aguccaugaauggaggaug

SEQ ID NO: 212787 - RNA, 22 nt, Human
uucugaaaauugggucauacuu

SEQ ID NO: 212788 - RNA, 22 nt, Human
auccaggcgaaugcagaaggcc

SEQ ID NO: 212789 - RNA, 22 nt, Human
uuaagauagaacccaguagucu

SEQ ID NO: 212790 - RNA, 22 nt, Human
auuuccaugaaguuuaguuaua

SEQ ID NO: 212791 - RNA, 22 nt, Human
ccaguauucgaucuggccaguu

SEQ ID NO: 212792 - RNA, 22 nt, Human
gcagggcuggguccugucucau

SEQ ID NO: 212793 - RNA, 22 nt, Human
ugacaggcguuuuucucuagua

SEQ ID NO: 212794 - RNA, 22 nt, Human
cagugaaauaguggacaucaaa

SEQ ID NO: 212795 - RNA, 22 nt, Human
caaaugaugcauggcuagugag

SEQ ID NO: 212796 - RNA, 22 nt, Human
ucaggugggcaguggguugagc

SEQ ID NO: 212797 - RNA, 22 nt, Human
ucugccuuuguggucgggagaa

SEQ ID NO: 212798 - RNA, 22 nt, Human
ccaccaagucccacuauaauuu

SEQ ID NO: 212799 - RNA, 22 nt, Human
ccacucccuuccgguccagggc

SEQ ID NO: 212800 - RNA, 22 nt, Human
ucugucucuuuguucugugagu

SEQ ID NO: 212801 - RNA, 22 nt, Human
aaaggcaggcuuucacaucuca

SEQ ID NO: 212802 - RNA, 22 nt, Human
aagaagcauucuuucauugguu

SEQ ID NO: 212803 - RNA, 22 nt, Human
agauggagaaugacaauuaagg

SEQ ID NO: 212804 - RNA, 22 nt, Human
acagaggccucguagguacaac

SEQ ID NO: 212805 - RNA, 22 nt, Human
ggugaguugggguucacagguc

SEQ ID NO: 212806 - RNA, 22 nt, Human
acagggcauuuccucuaugugu

SEQ ID NO: 212807 - RNA, 22 nt, Human
ccagauucauagaaacucauag

SEQ ID NO: 212808 - RNA, 22 nt, Human
aggagcuggccuagaaaggaga

SEQ ID NO: 212809 - RNA, 22 nt, Human
caugucuuauauccugucuuca

SEQ ID NO: 212810 - RNA, 22 nt, Human
uaucaauaucucagugugcuuc

SEQ ID NO: 212811 - RNA, 23 nt, Human
aacagcaggaugauagaggaggu

SEQ ID NO: 212812 - RNA, 22 nt, Human
gaggucaugcaaaauugaauca

SEQ ID NO: 212813 - RNA, 22 nt, Human
aagccauggcugcaucagccug

SEQ ID NO: 212814 - RNA, 22 nt, Human
aucuguucuucaaaauauuaca

SEQ ID NO: 212815 - RNA, 22 nt, Human
aucuaaacccuacuuucuuucu

SEQ ID NO: 212816 - RNA, 18 nt, Human
cugucaccgccaccacac

SEQ ID NO: 212817 - RNA, 22 nt, Human
uuauuguuuggguauaauuuga

SEQ ID NO: 212818 - RNA, 22 nt, Human
cuucuuaacuguauauacuaug

SEQ ID NO: 212819 - RNA, 22 nt, Human
agagcccaggcaggcauccagg

SEQ ID NO: 212820 - RNA, 22 nt, Human
guguuuguuuagugcagagaga

SEQ ID NO: 212821 - RNA, 22 nt, Human
ugagugcuuuaaauguuauuuu

SEQ ID NO: 212822 - RNA, 22 nt, Human
gucuggaaggaggagauggagc

SEQ ID NO: 212823 - RNA, 22 nt, Human
gcaaggcagcauccuuuugagg

SEQ ID NO: 212824 - RNA, 19 nt, Human
ccugggaggcggagguugc

SEQ ID NO: 212825 - RNA, 22 nt, Human
gagucuucugaguuauuggaua

SEQ ID NO: 212826 - RNA, 22 nt, Human
uguuacaagucuugagguacuu

SEQ ID NO: 212827 - RNA, 22 nt, Human
aggguaggaacugaguggaagg

SEQ ID NO: 212828 - RNA, 22 nt, Human
gagcacaggcuuugguggacac

SEQ ID NO: 212829 - RNA, 22 nt, Human
aagaaccuauaugcugaugaau

SEQ ID NO: 212830 - RNA, 22 nt, Human
aaggcugaguaaaacagagaac

SEQ ID NO: 212831 - RNA, 21 nt, Human
cuggaucugucaucgaguuuu

SEQ ID NO: 212832 - RNA, 22 nt, Human
ugucuggguuuugggucauauu

SEQ ID NO: 212833 - RNA, 17 nt, Human
uuccagcauguuacuaa

SEQ ID NO: 212834 - RNA, 21 nt, Human
cccuugccugcacuccucggc

SEQ ID NO: 212835 - RNA, 20 nt, Human
uuccuguauacaaagaguuc

SEQ ID NO: 212836 - RNA, 22 nt, Human
ugcagcccugugcacauccccu

SEQ ID NO: 212837 - RNA, 22 nt, Human
acuccuggggauccauuccuuu

SEQ ID NO: 212838 - RNA, 22 nt, Human
cugagcugcuuugcuuuugggg

SEQ ID NO: 212839 - RNA, 22 nt, Human
uuagcaauccuaggcuggauca

SEQ ID NO: 212840 - RNA, 22 nt, Human
acaguaacagucuauuucucag

SEQ ID NO: 212841 - RNA, 22 nt, Human
uuucacaaagcauagcacuuua

SEQ ID NO: 212842 - RNA, 22 nt, Human
acaagucuuuuucaugucuucu

SEQ ID NO: 212843 - RNA, 22 nt, Human
ggcccacacugacagcugagcu

SEQ ID NO: 212844 - RNA, 22 nt, Human
uugaucaaaucagcuacugagg

SEQ ID NO: 212845 - RNA, 22 nt, Human
cccagagguuccuuagggacca

SEQ ID NO: 212846 - RNA, 22 nt, Human
ucugggcacacaccaugcccac

SEQ ID NO: 212847 - RNA, 22 nt, Human
gccuguauuuauugagagugua

SEQ ID NO: 212848 - RNA, 22 nt, Human
agacaaauaacuuuuuaugucc

SEQ ID NO: 212849 - RNA, 22 nt, Human
ugagguggcuagggaggcacuc

SEQ ID NO: 212850 - RNA, 22 nt, Human
cuggcuccucaguauuccacuu

SEQ ID NO: 212851 - RNA, 22 nt, Human
gagugcuggaggugugaguggg

SEQ ID NO: 212852 - RNA, 22 nt, Human
ggaaggcuaauaaugcaagaaa

SEQ ID NO: 212853 - RNA, 22 nt, Human
cuggcacgcccacguaggcacu

SEQ ID NO: 212854 - RNA, 22 nt, Human
ggagguggccugaaaauguggc

SEQ ID NO: 212855 - RNA, 22 nt, Human
gucucagggacugcuucugggg

SEQ ID NO: 212856 - RNA, 21 nt, Human
acacacuacacauuccuaguu

SEQ ID NO: 212857 - RNA, 22 nt, Human
auggcuggcacuggccuggguu

SEQ ID NO: 212858 - RNA, 22 nt, Human
gaggcaacacauuuggaaagca

SEQ ID NO: 212859 - RNA, 22 nt, Human
ugcagguggacacgggagacgg

SEQ ID NO: 212860 - RNA, 22 nt, Human
acaaaggugagcagaagacaca

SEQ ID NO: 212861 - RNA, 22 nt, Human
ccagcuuuugcacuggacuggg

SEQ ID NO: 212862 - RNA, 22 nt, Human
agcuccaggugcaagucauggu

SEQ ID NO: 212863 - RNA, 22 nt, Human
auaagguaaggguauugucaga

SEQ ID NO: 212864 - RNA, 22 nt, Human
cacucugggggcugccgcugcc

SEQ ID NO: 212865 - RNA, 22 nt, Human
ucuccaggggcagggucuggag

SEQ ID NO: 212866 - RNA, 22 nt, Human
uuugaaagaauuuauguacuuu

SEQ ID NO: 212867 - RNA, 22 nt, Human
cuucagcaacuuuggaauguuu

SEQ ID NO: 212868 - RNA, 22 nt, Human
ugacauguguaaucagcuccgu

SEQ ID NO: 212869 - RNA, 22 nt, Human
agguggcugaagagugggugag

SEQ ID NO: 212870 - RNA, 22 nt, Human
agggcugagacuaaggccagau

SEQ ID NO: 212871 - RNA, 22 nt, Human
aagcuggccuguaccugcugag

SEQ ID NO: 212872 - RNA, 22 nt, Human
agaaggcacucacacuggcacg

SEQ ID NO: 212873 - RNA, 22 nt, Human
caggugguuccauguuucauga

SEQ ID NO: 212874 - RNA, 22 nt, Human
acaguaacaccuacucuguccc

SEQ ID NO: 212875 - RNA, 22 nt, Human
agcauuagaagaaaugauuaua

SEQ ID NO: 212876 - RNA, 22 nt, Human
aaucuagauucggaucaaaggg

SEQ ID NO: 212877 - RNA, 22 nt, Human
guuuagaacacggaaauacuga

SEQ ID NO: 212878 - RNA, 21 nt, Human
ucugggcccaugcugccucac

SEQ ID NO: 212879 - RNA, 22 nt, Human
agcccagcaaagggguuugaga

SEQ ID NO: 212880 - RNA, 22 nt, Human
ucccugccuccuggcagugcca

SEQ ID NO: 212881 - RNA, 22 nt, Human
accccaggaaguggaggucaug

SEQ ID NO: 212882 - RNA, 22 nt, Human
caguccuuauuccuauauuccu

SEQ ID NO: 212883 - RNA, 22 nt, Human
gauuaagagaaguuucuuaucg

SEQ ID NO: 212884 - RNA, 22 nt, Human
uguguucaagauuaguucuagu

SEQ ID NO: 212885 - RNA, 22 nt, Human
ccaaggccccuguggucuagcc

SEQ ID NO: 212886 - RNA, 22 nt, Human
gggacaugaggccauagugauu

SEQ ID NO: 212887 - RNA, 22 nt, Human
cuaaacauggcuuagaacacuc

SEQ ID NO: 212888 - RNA, 22 nt, Human
ucagcaggcagaaaucugcaga

SEQ ID NO: 212889 - RNA, 22 nt, Human
guccuggcuguguuugguuucu

SEQ ID NO: 212890 - RNA, 22 nt, Human
gucuguuagugauaacuguuuu

SEQ ID NO: 212891 - RNA, 22 nt, Human
gugagcugggugaaugguaggg

SEQ ID NO: 212892 - RNA, 22 nt, Human
aaaauucugucauuaaauugug

SEQ ID NO: 212893 - RNA, 19 nt, Human
aucauacauguuacacucu

SEQ ID NO: 212894 - RNA, 22 nt, Human
aaguaaaauguuuccuuuauua

SEQ ID NO: 212895 - RNA, 22 nt, Human
uauuuugagguauuuuugagcu

SEQ ID NO: 212896 - RNA, 18 nt, Human
uaucuuuuccagugguau

SEQ ID NO: 212897 - RNA, 22 nt, Human
guuggcuuugcucucuguccua

SEQ ID NO: 212898 - RNA, 22 nt, Human
uuuauuagugcuuguaucacug

SEQ ID NO: 212899 - RNA, 22 nt, Human
ugucucagaguguuguauuaga

SEQ ID NO: 212900 - RNA, 22 nt, Human
aggagccaggccccauggggcu

SEQ ID NO: 212901 - RNA, 22 nt, Human
caaaaguaauugugguuuuugc

SEQ ID NO: 212902 - RNA, 22 nt, Human
uguacagacuguauuuacaagu

SEQ ID NO: 212903 - RNA, 22 nt, Human
cagguggcuucucccuaggcca

SEQ ID NO: 212904 - RNA, 22 nt, Human
gaggugucguagauuauucuca

SEQ ID NO: 212905 - RNA, 22 nt, Human
ucuagagaaguuuccuuuugaa

SEQ ID NO: 212906 - RNA, 21 nt, Human
agguacaggucuugugagucu

SEQ ID NO: 212907 - RNA, 22 nt, Human
ucuaaaucccaacaugauauca

SEQ ID NO: 212908 - RNA, 22 nt, Human
gcagccagccccucugaccucu

SEQ ID NO: 212909 - RNA, 22 nt, Human
acacugaguuuuaccaggcaca

SEQ ID NO: 212910 - RNA, 22 nt, Human
ggcacagagcaggccacuaauc

SEQ ID NO: 212911 - RNA, 22 nt, Human
aaacaccagcacuguuuacaaa

SEQ ID NO: 212912 - RNA, 22 nt, Human
agguuucugcacugucacuggu

SEQ ID NO: 212913 - RNA, 22 nt, Human
ggagggcacaggaccagaaauc

SEQ ID NO: 212914 - RNA, 22 nt, Human
aagaugacccugagggcaauug

SEQ ID NO: 212915 - RNA, 22 nt, Human
caaguauauuugaacauguaaa

SEQ ID NO: 212916 - RNA, 22 nt, Human
cuggcuggccggaggcaucccu

SEQ ID NO: 212917 - RNA, 22 nt, Human
uggaauauacucagaacaggcu

SEQ ID NO: 212918 - RNA, 22 nt, Human
gagaaacugaauauuuaacggg

SEQ ID NO: 212919 - RNA, 22 nt, Human
aaauuauucaaaaagcuguguu

SEQ ID NO: 212920 - RNA, 22 nt, Human
aggcagagcuggguuuugaaau

SEQ ID NO: 212921 - RNA, 22 nt, Human
aggcaggaaaaucgcuugaacc

SEQ ID NO: 212922 - RNA, 22 nt, Human
caggagcaaauccaaaagaauu

SEQ ID NO: 212923 - RNA, 22 nt, Human
uaacaguuuugaguuuugcuuc

SEQ ID NO: 212924 - RNA, 22 nt, Human
ugcaggugugggcaggggagca

SEQ ID NO: 212925 - RNA, 22 nt, Human
cagggccugucacgacgcucau

SEQ ID NO: 212926 - RNA, 22 nt, Human
gccaggucaccucacucaucca

SEQ ID NO: 212927 - RNA, 22 nt, Human
uuaggaaaaucaugagagauga

SEQ ID NO: 212928 - RNA, 22 nt, Human
gcagggacagggcagggccuuu

SEQ ID NO: 212929 - RNA, 22 nt, Human
ucauggcagcccuuuacuagag

SEQ ID NO: 212930 - RNA, 22 nt, Human
cagacacagauaugcauauggc

SEQ ID NO: 212931 - RNA, 22 nt, Human
aaaucacuguuauugaucuuaa

SEQ ID NO: 212932 - RNA, 22 nt, Human
ccagaccuaaccagcuuuugua

SEQ ID NO: 212933 - RNA, 18 nt, Human
aacuguugaaauagcuug

SEQ ID NO: 212934 - RNA, 22 nt, Human
ggcuuuaugcacagcagauggu

SEQ ID NO: 212935 - RNA, 22 nt, Human
aucuuguuaaaaugcagauucu

SEQ ID NO: 212936 - RNA, 22 nt, Human
agagcauccaucggccaggacc

SEQ ID NO: 212937 - RNA, 22 nt, Human
guuacaaaggucauaaaagugu

SEQ ID NO: 212938 - RNA, 22 nt, Human
aacaguuugagcuuugaauuuc

SEQ ID NO: 212939 - RNA, 22 nt, Human
uuugacucccaaacugugauuu

SEQ ID NO: 212940 - RNA, 22 nt, Human
ucugggaugagaucagagacac

SEQ ID NO: 212941 - RNA, 23 nt, Human
agaggcugcaggguauugagaau

SEQ ID NO: 212942 - RNA, 22 nt, Human
uggcucccgcuugcaccuaaga

SEQ ID NO: 212943 - RNA, 19 nt, Human
cugaggcaaguggugguca

SEQ ID NO: 212944 - RNA, 22 nt, Human
acacaucucaggggacacucuc

SEQ ID NO: 212945 - RNA, 22 nt, Human
guucuucaucuuaaccaucugu

SEQ ID NO: 212946 - RNA, 22 nt, Human
agcagcucccuccucagccacc

SEQ ID NO: 212947 - RNA, 22 nt, Human
guaggggaugguucccuagaaa

SEQ ID NO: 212948 - RNA, 22 nt, Human
ggcagugagaggucuccugguc

SEQ ID NO: 212949 - RNA, 22 nt, Human
uagacaggagucaggcuagaau

SEQ ID NO: 212950 - RNA, 22 nt, Human
cuaaccuaguucaacaacuguc

SEQ ID NO: 212951 - RNA, 22 nt, Human
ggcucuggaaaguguccuugau

SEQ ID NO: 212952 - RNA, 23 nt, Human
ugcugugccuuugucugccucca

SEQ ID NO: 212953 - RNA, 22 nt, Human
agcagggcucacauuaguggau

SEQ ID NO: 212954 - RNA, 22 nt, Human
ggagaaaggcauagcagaaccu

SEQ ID NO: 212955 - RNA, 22 nt, Human
uucaguauacuucauaacauuu

SEQ ID NO: 212956 - RNA, 22 nt, Human
aggagagcaggccagccguccc

SEQ ID NO: 212957 - RNA, 22 nt, Human
ugagcaguaggucugaauagug

SEQ ID NO: 212958 - RNA, 22 nt, Human
ucccugggcuucuccagacuug

SEQ ID NO: 212959 - RNA, 22 nt, Human
ggugggcaacauuuggccugag

SEQ ID NO: 212960 - RNA, 22 nt, Human
uccagcucaaagugcuccuguc

SEQ ID NO: 212961 - RNA, 22 nt, Human
ccucugagccagcgucuucucu

SEQ ID NO: 212962 - RNA, 22 nt, Human
uaagauguacuuuuguccucac

SEQ ID NO: 212963 - RNA, 22 nt, Human
gcaaggcuuugugaauuuuaaa

SEQ ID NO: 212964 - RNA, 22 nt, Human
ccaggcucaggugcgagagaca

SEQ ID NO: 212965 - RNA, 22 nt, Human
uuagagauugucuaguauugug

SEQ ID NO: 212966 - RNA, 22 nt, Human
ggagucacacaggaagaaggac

SEQ ID NO: 212967 - RNA, 22 nt, Human
cacacuugcuucagagucaagu

SEQ ID NO: 212968 - RNA, 22 nt, Human
ccugggcagccugcucaaggac

SEQ ID NO: 212969 - RNA, 22 nt, Human
guauuagacugagaaauggagu

SEQ ID NO: 212970 - RNA, 22 nt, Human
agauacagccugccagguucuu

SEQ ID NO: 212971 - RNA, 22 nt, Human
aggcugaggggcgagggacccu

SEQ ID NO: 212972 - RNA, 22 nt, Human
uagggcugcuuuguauucugcu

SEQ ID NO: 212973 - RNA, 22 nt, Human
cacucugugauugcagcauucc

SEQ ID NO: 212974 - RNA, 22 nt, Human
gcaguagugucaguacagcaaa

SEQ ID NO: 212975 - RNA, 18 nt, Human
uccaaaaucauguauuuu

SEQ ID NO: 212976 - RNA, 22 nt, Human
auuugcugagcucaaagaaaag

SEQ ID NO: 212977 - RNA, 22 nt, Human
acagucuacaaagugaugugug

SEQ ID NO: 212978 - RNA, 22 nt, Human
ggcaaacaggagaguaaagaga

SEQ ID NO: 212979 - RNA, 22 nt, Human
cuaaacaaugaacaaagcacug

SEQ ID NO: 212980 - RNA, 22 nt, Human
aacucacacaaguauugccugc

SEQ ID NO: 212981 - RNA, 17 nt, Human
gaugaaaugaugcacac

SEQ ID NO: 212982 - RNA, 22 nt, Human
uccaggcaucuguauuuuuuaa

SEQ ID NO: 212983 - RNA, 22 nt, Human
acucagaguagaaaauagguuc

SEQ ID NO: 212984 - RNA, 20 nt, Human
uugaccugcaagucaucauu

SEQ ID NO: 212985 - RNA, 22 nt, Human
uuauuauuccccaagucauuau

SEQ ID NO: 212986 - RNA, 22 nt, Human
cccaggcagcccuucugacgca

SEQ ID NO: 212987 - RNA, 22 nt, Human
ucucuggcacucccuuauggcu

SEQ ID NO: 212988 - RNA, 22 nt, Human
uguguccucuuaccucugaccc

SEQ ID NO: 212989 - RNA, 22 nt, Human
caaaaugugagucccaccucaa

SEQ ID NO: 212990 - RNA, 22 nt, Human
uccuuccuggggucucugcugc

SEQ ID NO: 212991 - RNA, 22 nt, Human
cacaaaguuggacaacgcaccc

SEQ ID NO: 212992 - RNA, 22 nt, Human
uuuaguuauuguuacaguauga

SEQ ID NO: 212993 - RNA, 19 nt, Human
aggguuacccgcugccacc

SEQ ID NO: 212994 - RNA, 22 nt, Human
uucaggauggcggauguugggg

SEQ ID NO: 212995 - RNA, 22 nt, Human
auauuguuaguaauauuucgaa

SEQ ID NO: 212996 - RNA, 22 nt, Human
aggaagcucaaagccaugaugu

SEQ ID NO: 212997 - RNA, 22 nt, Human
aggccagguuccucaaucuuga

SEQ ID NO: 212998 - RNA, 23 nt, Human
uuggcaaagccuaugaaguccuc

SEQ ID NO: 212999 - RNA, 22 nt, Human
uaggaaguagauagguuguucu

SEQ ID NO: 213000 - RNA, 22 nt, Human
ugcagggcuacaggacuacaac

SEQ ID NO: 213001 - RNA, 22 nt, Human
cccaggcacagauuaucccaau

SEQ ID NO: 213002 - RNA, 22 nt, Human
cagcaagacaggauucccgugg

SEQ ID NO: 213003 - RNA, 22 nt, Human
caaaugcuggcccugcuacuua

SEQ ID NO: 213004 - RNA, 20 nt, Human
aggcugccuaaggcucugca

SEQ ID NO: 213005 - RNA, 22 nt, Human
uguuuuuuccuuaugcaaucug

SEQ ID NO: 213006 - RNA, 22 nt, Human
cagaccucaaagcugcagugcu

SEQ ID NO: 213007 - RNA, 22 nt, Human
ucacagaauaaauguacuggcc

SEQ ID NO: 213008 - RNA, 22 nt, Human
uucuguaguauucuuuugguca

SEQ ID NO: 213009 - RNA, 19 nt, Human
gguguccuagagauaagag

SEQ ID NO: 213010 - RNA, 23 nt, Human
uagaacaucggugucuuggagca

SEQ ID NO: 213011 - RNA, 21 nt, Human
ucugcccuccaggagcucaua

SEQ ID NO: 213012 - RNA, 22 nt, Human
caauuuuuaaacuaugaaguug

SEQ ID NO: 213013 - RNA, 22 nt, Human
uucacauuaagccuccuccuac

SEQ ID NO: 213014 - RNA, 22 nt, Human
gcuuuucuccuuagugucccug

SEQ ID NO: 213015 - RNA, 22 nt, Human
ucaggcccuucucccaggacuc

SEQ ID NO: 213016 - RNA, 20 nt, Human
cagaaagaagguagauuuuu

SEQ ID NO: 213017 - RNA, 22 nt, Human
cauuuguugguugcugucuuau

SEQ ID NO: 213018 - RNA, 22 nt, Human
ucagcaggggccguugggugga

SEQ ID NO: 213019 - RNA, 22 nt, Human
aacauagagacaggaagugcuu

SEQ ID NO: 213020 - RNA, 22 nt, Human
uuauuaagugcguacuguaugc

SEQ ID NO: 213021 - RNA, 22 nt, Human
agagaugcccuugaaaggauua

SEQ ID NO: 213022 - RNA, 22 nt, Human
ucaugauuuuucuuuacaguug

SEQ ID NO: 213023 - RNA, 22 nt, Human
cagugcucccgcugccgcugug

SEQ ID NO: 213024 - RNA, 22 nt, Human
ggccacagcagaugcuucagau

SEQ ID NO: 213025 - RNA, 22 nt, Human
uaagacacaguccgcacucucu

SEQ ID NO: 213026 - RNA, 21 nt, Human
caagccagaccaauagcagcc

SEQ ID NO: 213027 - RNA, 22 nt, Human
uuucucagucacaugaaccaau

SEQ ID NO: 213028 - RNA, 22 nt, Human
uuagugcucacguguuagaaag

SEQ ID NO: 213029 - RNA, 22 nt, Human
uaagaugguuguagauggacug

SEQ ID NO: 213030 - RNA, 22 nt, Human
agcccaggugagggguucgaaa

SEQ ID NO: 213031 - RNA, 22 nt, Human
ugucaaguuguggcaugucuaa

SEQ ID NO: 213032 - RNA, 22 nt, Human
aucuggauagguuguuuugcau

SEQ ID NO: 213033 - RNA, 22 nt, Human
caagauuuggcauucugaggag

SEQ ID NO: 213034 - RNA, 22 nt, Human
cagcagcugcaaauggaaacag

SEQ ID NO: 213035 - RNA, 22 nt, Human
cucugaggcuccaugcaggcuu

SEQ ID NO: 213036 - RNA, 22 nt, Human
cagucccagacauaguaaggga

SEQ ID NO: 213037 - RNA, 22 nt, Human
auucugcacuuccuuugcuucc

SEQ ID NO: 213038 - RNA, 22 nt, Human
ccugccagcccgcguucaugcc

SEQ ID NO: 213039 - RNA, 22 nt, Human
uuacuuuagaucauacugugug

SEQ ID NO: 213040 - RNA, 19 nt, Human
gcacacguugugcuugagc

SEQ ID NO: 213041 - RNA, 22 nt, Human
cagcugagcaucacuagucugg

SEQ ID NO: 213042 - RNA, 17 nt, Human
gccuucucugcccucac

SEQ ID NO: 213043 - RNA, 22 nt, Human
agcaaggcagcuuucacugcuu

SEQ ID NO: 213044 - RNA, 22 nt, Human
uuguccugugauuucagggccu

SEQ ID NO: 213045 - RNA, 22 nt, Human
ucagcagaccuguuauuuggau

SEQ ID NO: 213046 - RNA, 22 nt, Human
cuccagggaaaggggcguccgc

SEQ ID NO: 213047 - RNA, 22 nt, Human
gaaggcuggggcaucagugaaa

SEQ ID NO: 213048 - RNA, 22 nt, Human
aaauagcacagcagcugaggcu

SEQ ID NO: 213049 - RNA, 22 nt, Human
cuugagaaaggaacaggaagcu

SEQ ID NO: 213050 - RNA, 22 nt, Human
uguguacacaaguauauauaca

SEQ ID NO: 213051 - RNA, 22 nt, Human
aaggcucucugauggcagcagu

SEQ ID NO: 213052 - RNA, 22 nt, Human
uauguuauuuucauacaacaga

SEQ ID NO: 213053 - RNA, 22 nt, Human
ugcagagaucugggcgucggcu

SEQ ID NO: 213054 - RNA, 21 nt, Human
uccaggcugaugaugucaacu

SEQ ID NO: 213055 - RNA, 22 nt, Human
cugccagcaagcuacccuggca

SEQ ID NO: 213056 - RNA, 22 nt, Human
uuagugcuuggcacacaauaca

SEQ ID NO: 213057 - RNA, 22 nt, Human
ccagcuuuccaggguugacugg

SEQ ID NO: 213058 - RNA, 22 nt, Human
caggaucuuuuaaugucuccag

SEQ ID NO: 213059 - RNA, 22 nt, Human
uaccuagacaugaacacagaug

SEQ ID NO: 213060 - RNA, 22 nt, Human
acagcugugaagcaagcacucu

SEQ ID NO: 213061 - RNA, 23 nt, Human
uuagacaauccucaaaagguaau

SEQ ID NO: 213062 - RNA, 22 nt, Human
auuuuaucugcuuacuuucagg

SEQ ID NO: 213063 - RNA, 20 nt, Human
uuucuguaaggcauuaaucu

SEQ ID NO: 213064 - RNA, 23 nt, Human
ccuggggcacuugaguccucauc

SEQ ID NO: 213065 - RNA, 22 nt, Human
uccuggggcugcaaggccuguc

SEQ ID NO: 213066 - RNA, 22 nt, Human
gggcugaggcuaccacuggucu

SEQ ID NO: 213067 - RNA, 17 nt, Human
ccuuccucaucuccuuc

SEQ ID NO: 213068 - RNA, 22 nt, Human
cggcacagccgggcaaggcugg

SEQ ID NO: 213069 - RNA, 22 nt, Human
uuugaaagggacaaagucacug

SEQ ID NO: 213070 - RNA, 22 nt, Human
agucugugcuguuggugaggau

SEQ ID NO: 213071 - RNA, 22 nt, Human
uguagcucuccagccagcaagg

SEQ ID NO: 213072 - RNA, 22 nt, Human
aagcaacuaaggcaaggaaaug

SEQ ID NO: 213073 - RNA, 18 nt, Human
aagucuggcagcuuuccc

SEQ ID NO: 213074 - RNA, 22 nt, Human
agggaccuugauggguuuggga

SEQ ID NO: 213075 - RNA, 22 nt, Human
ccacccaugugacuaccucaug

SEQ ID NO: 213076 - RNA, 22 nt, Human
uuuaaucaggcaaagcauaaua

SEQ ID NO: 213077 - RNA, 23 nt, Human
cuguuaaauuccuuaagagcagg

SEQ ID NO: 213078 - RNA, 22 nt, Human
ucuguucaucucaugggagaau

SEQ ID NO: 213079 - RNA, 22 nt, Human
uggccagugggguugagcagga

SEQ ID NO: 213080 - RNA, 22 nt, Human
uaccagcaacuggaagucagau

SEQ ID NO: 213081 - RNA, 22 nt, Human
ccuguccccucacaaugccacu

SEQ ID NO: 213082 - RNA, 22 nt, Human
acaaugcaauuguaaggugugu

SEQ ID NO: 213083 - RNA, 22 nt, Human
cacagcuggggaagcugaggcc

SEQ ID NO: 213084 - RNA, 22 nt, Human
uuuccuccuagccuccagccgc

SEQ ID NO: 213085 - RNA, 22 nt, Human
cuguuacuggacgcacgcagcu

SEQ ID NO: 213086 - RNA, 22 nt, Human
ugggguccucucacuuggaggg

SEQ ID NO: 213087 - RNA, 22 nt, Human
caaaugaagggagcugaagucu

SEQ ID NO: 213088 - RNA, 21 nt, Human
agcuggcagauauggugucug

SEQ ID NO: 213089 - RNA, 22 nt, Human
aggaguccucaugucugugcga

SEQ ID NO: 213090 - RNA, 22 nt, Human
auucuuguuuaauuugcauccc

SEQ ID NO: 213091 - RNA, 22 nt, Human
ugcauacacaugugcacauacg

SEQ ID NO: 213092 - RNA, 22 nt, Human
gcagccuuuggaauuagagacu

SEQ ID NO: 213093 - RNA, 22 nt, Human
aaagucuuucucauuggccaug

SEQ ID NO: 213094 - RNA, 17 nt, Human
auccuucuguucuuucu

SEQ ID NO: 213095 - RNA, 22 nt, Human
ccugucacgaugacugcacucu

SEQ ID NO: 213096 - RNA, 22 nt, Human
auaacauuuugacaacugguga

SEQ ID NO: 213097 - RNA, 22 nt, Human
auagaaccacccagagccuuuu

SEQ ID NO: 213098 - RNA, 22 nt, Human
cuggcccaggcuccuggggcac

SEQ ID NO: 213099 - RNA, 22 nt, Human
aggaaucugggcccaacugugc

SEQ ID NO: 213100 - RNA, 22 nt, Human
agugucugcuuaucaguucuug

SEQ ID NO: 213101 - RNA, 22 nt, Human
gccuagguaccagcagagagcc

SEQ ID NO: 213102 - RNA, 22 nt, Human
uccccacacuuucacuccuggc

SEQ ID NO: 213103 - RNA, 22 nt, Human
ccuguggccgcgucgggcggcg

SEQ ID NO: 213104 - RNA, 22 nt, Human
augcuacaggaagacgucaggc

SEQ ID NO: 213105 - RNA, 22 nt, Human
auucuucaaagagugucaaagu

SEQ ID NO: 213106 - RNA, 19 nt, Human
gggagcaggaaagcugugg

SEQ ID NO: 213107 - RNA, 18 nt, Human
ucucuccaucuauuuguu

SEQ ID NO: 213108 - RNA, 22 nt, Human
acuccagguuuuuucacugaag

SEQ ID NO: 213109 - RNA, 22 nt, Human
uccaggcacgaggcccugugca

SEQ ID NO: 213110 - RNA, 22 nt, Human
caggcagcucugcuuuuccuaa

SEQ ID NO: 213111 - RNA, 22 nt, Human
agucugaagacucaugucugaa

SEQ ID NO: 213112 - RNA, 22 nt, Human
ggaaccuugcuagaugcugagg

SEQ ID NO: 213113 - RNA, 22 nt, Human
ucugucuuuagaggccugugcu

SEQ ID NO: 213114 - RNA, 23 nt, Human
ugcuguggauggcagguccuugc

SEQ ID NO: 213115 - RNA, 22 nt, Human
ucagggcaaaagggaaaccauu

SEQ ID NO: 213116 - RNA, 22 nt, Human
aguacaaaaugcagcaucauca

SEQ ID NO: 213117 - RNA, 22 nt, Human
guaaaauagaauaacguggcua

SEQ ID NO: 213118 - RNA, 22 nt, Human
caacauaugauuuuguauauaa

SEQ ID NO: 213119 - RNA, 22 nt, Human
aaaucucauuauuuauaccaua

SEQ ID NO: 213120 - RNA, 21 nt, Human
guccagagagccggcuccuga

SEQ ID NO: 213121 - RNA, 22 nt, Human
ccagagcugcagguaaaaugcu

SEQ ID NO: 213122 - RNA, 22 nt, Human
agguaaaaugagucuccauuau

SEQ ID NO: 213123 - RNA, 22 nt, Human
cuucacagccaacaugggcaca

SEQ ID NO: 213124 - RNA, 22 nt, Human
uacaggcugcagggcuagaggg

SEQ ID NO: 213125 - RNA, 22 nt, Human
aaggaagaagacucuuuacucc

SEQ ID NO: 213126 - RNA, 22 nt, Human
uggcagguuaugcgggccacau

SEQ ID NO: 213127 - RNA, 21 nt, Human
agucuuaggcacagcuguguc

SEQ ID NO: 213128 - RNA, 22 nt, Human
acuuggugaagucaggugauua

SEQ ID NO: 213129 - RNA, 22 nt, Human
uuugcugacuggaugcaguugg

SEQ ID NO: 213130 - RNA, 23 nt, Human
uugggcucaguggcaggaagagu

SEQ ID NO: 213131 - RNA, 22 nt, Human
ggagcucaguggggggacugug

SEQ ID NO: 213132 - RNA, 22 nt, Human
ucuccugcucagaacagccuca

SEQ ID NO: 213133 - RNA, 22 nt, Human
cugggagcccgcguccuggugg

SEQ ID NO: 213134 - RNA, 22 nt, Human
caccugaagauuuagagauuga

SEQ ID NO: 213135 - RNA, 18 nt, Human
ucuguguucugucauugc

SEQ ID NO: 213136 - RNA, 22 nt, Human
acccucagcuucuuggauuaau

SEQ ID NO: 213137 - RNA, 22 nt, Human
ggcugggcucgcugauuggcug

SEQ ID NO: 213138 - RNA, 22 nt, Human
auguuuaugcaaacaugugagu

SEQ ID NO: 213139 - RNA, 22 nt, Human
agaaagaggaugcagaucucau

SEQ ID NO: 213140 - RNA, 18 nt, Human
uuccuucugauguauaug

SEQ ID NO: 213141 - RNA, 22 nt, Human
caccagaguuguccaaaugauu

SEQ ID NO: 213142 - RNA, 22 nt, Human
uuucuacaacacuucugaaucu

SEQ ID NO: 213143 - RNA, 22 nt, Human
cuucuccgacaaccgacgccgg

SEQ ID NO: 213144 - RNA, 22 nt, Human
cuguggcuggcucaucauaggu

SEQ ID NO: 213145 - RNA, 22 nt, Human
uagcugaaggcuacagcagaac

SEQ ID NO: 213146 - RNA, 22 nt, Human
ucucugggguagggcccaggac

SEQ ID NO: 213147 - RNA, 22 nt, Human
augguacauaguuuaaauaagg

SEQ ID NO: 213148 - RNA, 20 nt, Human
ucucagcauaagaacccuuc

SEQ ID NO: 213149 - RNA, 22 nt, Human
ugggaaccaggacuggcugagg

SEQ ID NO: 213150 - RNA, 22 nt, Human
auuagaagaggcugacgaaugu

SEQ ID NO: 213151 - RNA, 22 nt, Human
acuggcagaggauagcacuaau

SEQ ID NO: 213152 - RNA, 22 nt, Human
agcagagacaugaaauaugcuu

SEQ ID NO: 213153 - RNA, 22 nt, Human
ucaggcagaauuaucaaaagau

SEQ ID NO: 213154 - RNA, 22 nt, Human
uucacauugguucuugauagcu

SEQ ID NO: 213155 - RNA, 22 nt, Human
agcacaggugaaacagucaggu

SEQ ID NO: 213156 - RNA, 22 nt, Human
gcuccaggagagggaagcagau

SEQ ID NO: 213157 - RNA, 20 nt, Human
ccugggcuccaggagccccg

SEQ ID NO: 213158 - RNA, 20 nt, Human
gccugcagagaaggucagag

SEQ ID NO: 213159 - RNA, 22 nt, Human
uucucuuuucaccaguugcuaa

SEQ ID NO: 213160 - RNA, 22 nt, Human
gggaacagggccugagcugggg

SEQ ID NO: 213161 - RNA, 22 nt, Human
uucuucugauugccuucugcaa

SEQ ID NO: 213162 - RNA, 22 nt, Human
uccuggcugaguucccaagucg

SEQ ID NO: 213163 - RNA, 22 nt, Human
gaggagacaguggagccgcuac

SEQ ID NO: 213164 - RNA, 22 nt, Human
ugucuucaugccugaaagaaga

SEQ ID NO: 213165 - RNA, 22 nt, Human
ugauucacagacuucacaaggc

SEQ ID NO: 213166 - RNA, 22 nt, Human
cacagcauucacagaaagacau

SEQ ID NO: 213167 - RNA, 22 nt, Human
aggaggaacucagaaagaaggu

SEQ ID NO: 213168 - RNA, 22 nt, Human
ucugggcugugguuccacuccg

SEQ ID NO: 213169 - RNA, 19 nt, Human
augagcaggcaagacaagc

SEQ ID NO: 213170 - RNA, 22 nt, Human
guucauguuugagaacaaggag

SEQ ID NO: 213171 - RNA, 22 nt, Human
aguguacauaguuaggaacauc

SEQ ID NO: 213172 - RNA, 21 nt, Human
uuugaaagcccuauguuuuca

SEQ ID NO: 213173 - RNA, 22 nt, Human
uuugucaaagaucagaugcuuu

SEQ ID NO: 213174 - RNA, 23 nt, Human
cugguaaaucacuaaaauuacaa

SEQ ID NO: 213175 - RNA, 22 nt, Human
aaguuucuguucauaucucuga

SEQ ID NO: 213176 - RNA, 22 nt, Human
agccuuagauuugggcaagaac

SEQ ID NO: 213177 - RNA, 22 nt, Human
agcugugaccuucaagagcuac

SEQ ID NO: 213178 - RNA, 23 nt, Human
ucagaauaauaaccuaguaacug

SEQ ID NO: 213179 - RNA, 22 nt, Human
aaagugcauuguuuguguuccu

SEQ ID NO: 213180 - RNA, 22 nt, Human
guuuauaagguaaaggagagag

SEQ ID NO: 213181 - RNA, 22 nt, Human
uuguccugcaaccucacauggc

SEQ ID NO: 213182 - RNA, 22 nt, Human
ggcuggaggagaauggguguga

SEQ ID NO: 213183 - RNA, 22 nt, Human
auaaacugguaggaaaacagua

SEQ ID NO: 213184 - RNA, 22 nt, Human
gcacaguaccugucacagaggc

SEQ ID NO: 213185 - RNA, 22 nt, Human
gaacauuuggcaugagaauuug

SEQ ID NO: 213186 - RNA, 22 nt, Human
ccugauuagggucuuucaaaug

SEQ ID NO: 213187 - RNA, 22 nt, Human
auguugaacuaggaucucuuga

SEQ ID NO: 213188 - RNA, 22 nt, Human
ccugagcuuuaaaagccaugua

SEQ ID NO: 213189 - RNA, 22 nt, Human
acggaaaacccugagcaaacuu

SEQ ID NO: 213190 - RNA, 20 nt, Human
caucuugaaggucuuccaca

SEQ ID NO: 213191 - RNA, 22 nt, Human
aaggccagagcguguccugccu

SEQ ID NO: 213192 - RNA, 22 nt, Human
aggcagggaccaguuguuuucu

SEQ ID NO: 213193 - RNA, 17 nt, Human
aguguggcccugguuaa

SEQ ID NO: 213194 - RNA, 22 nt, Human
aguaaguuccaguuucauuaug

SEQ ID NO: 213195 - RNA, 22 nt, Human
ugggaguccaagguuuuuauag

SEQ ID NO: 213196 - RNA, 22 nt, Human
ugcauuaaaaccaucgaccauc

SEQ ID NO: 213197 - RNA, 22 nt, Human
ggggagaccaucugaaggugau

SEQ ID NO: 213198 - RNA, 22 nt, Human
cccugagaagaucauugccacg

SEQ ID NO: 213199 - RNA, 22 nt, Human
ugagggaguuggguguauagga

SEQ ID NO: 213200 - RNA, 22 nt, Human
agccuugccugggaaacugggu

SEQ ID NO: 213201 - RNA, 22 nt, Human
uaacaagguaagccuggccaug

SEQ ID NO: 213202 - RNA, 22 nt, Human
caggcuccacuguaggcagcuc

SEQ ID NO: 213203 - RNA, 22 nt, Human
uucugccauugccaugagggcu

SEQ ID NO: 213204 - RNA, 22 nt, Human
ggaaagcuuuguuuuccucacc

SEQ ID NO: 213205 - RNA, 22 nt, Human
uuauuaguguugauauuaggau

SEQ ID NO: 213206 - RNA, 22 nt, Human
ucaggccacggcucacugagac

SEQ ID NO: 213207 - RNA, 22 nt, Human
aggagagagguuuuaaaugggg

SEQ ID NO: 213208 - RNA, 22 nt, Human
uggcuccuucauucuccugcca

SEQ ID NO: 213209 - RNA, 22 nt, Human
gaggcuucuguucacucacgcu

SEQ ID NO: 213210 - RNA, 19 nt, Human
ugagucacucuuacaguca

SEQ ID NO: 213211 - RNA, 21 nt, Human
caucacauuacucaaaguccu

SEQ ID NO: 213212 - RNA, 23 nt, Human
uauuacaauuggucuuauuaaga

SEQ ID NO: 213213 - RNA, 22 nt, Human
gucuccuggcugcagcuaagac

SEQ ID NO: 213214 - RNA, 22 nt, Human
ucucaaaguagcucccacagau

SEQ ID NO: 213215 - RNA, 22 nt, Human
cuauuuugccugccuagaaauc

SEQ ID NO: 213216 - RNA, 22 nt, Human
aaugcuuuaaauccuaguguaa

SEQ ID NO: 213217 - RNA, 22 nt, Human
agccucugggggagcugggagc

SEQ ID NO: 213218 - RNA, 22 nt, Human
aggccucuggagguggcagugu

SEQ ID NO: 213219 - RNA, 22 nt, Human
aggucugacucuuugccacaua

SEQ ID NO: 213220 - RNA, 22 nt, Human
uaggccacaaauaagauccugu

SEQ ID NO: 213221 - RNA, 22 nt, Human
aagccaugcaagccacaaggug

SEQ ID NO: 213222 - RNA, 22 nt, Human
agucuccacacuggcagaugcc

SEQ ID NO: 213223 - RNA, 22 nt, Human
ggcucagcuuggugcgcagaaa

SEQ ID NO: 213224 - RNA, 22 nt, Human
uugcaaauuaaagaggauagca

SEQ ID NO: 213225 - RNA, 22 nt, Human
uucaguguggaaugugaacugc

SEQ ID NO: 213226 - RNA, 22 nt, Human
gaggccagcuaguccaggaagu

SEQ ID NO: 213227 - RNA, 22 nt, Human
agcaggugaauuccuggaugug

SEQ ID NO: 213228 - RNA, 21 nt, Human
uuagcaaagcaaacacaugcu

SEQ ID NO: 213229 - RNA, 22 nt, Human
auggcccaaacugcaauuacuu

SEQ ID NO: 213230 - RNA, 19 nt, Human
caguuacaggcacuguggg

SEQ ID NO: 213231 - RNA, 22 nt, Human
cagaaacacuuguagagaaguu

SEQ ID NO: 213232 - RNA, 22 nt, Human
ucuagggaaccuauccuaugau

SEQ ID NO: 213233 - RNA, 22 nt, Human
ccugagauuucauugucuggcc

SEQ ID NO: 213234 - RNA, 22 nt, Human
uccugggagguaaaccagcauc

SEQ ID NO: 213235 - RNA, 22 nt, Human
acauguguggccgcuguagaca

SEQ ID NO: 213236 - RNA, 22 nt, Human
cagcugguacucaguucuuguc

SEQ ID NO: 213237 - RNA, 22 nt, Human
caugagauuugggaggggccag

SEQ ID NO: 213238 - RNA, 22 nt, Human
gcauggcugguguccugaggga

SEQ ID NO: 213239 - RNA, 22 nt, Human
gugcaggagguaacauagcaaa

SEQ ID NO: 213240 - RNA, 18 nt, Human
aauguccaguguucauau

SEQ ID NO: 213241 - RNA, 22 nt, Human
gguguugcaguugaagacuggu

SEQ ID NO: 213242 - RNA, 22 nt, Human
gcucaggagcucuugguggcgc

SEQ ID NO: 213243 - RNA, 22 nt, Human
aguauugugacucaaguauucu

SEQ ID NO: 213244 - RNA, 22 nt, Human
ugcauacauaaagugcuaucau

SEQ ID NO: 213245 - RNA, 22 nt, Human
gcugccuuagagggagugguuc

SEQ ID NO: 213246 - RNA, 22 nt, Human
uuugaaacaggugauucagcua

SEQ ID NO: 213247 - RNA, 22 nt, Human
cagagccacagccuccagauuu

SEQ ID NO: 213248 - RNA, 22 nt, Human
uccugugcuuuggaggauguuc

SEQ ID NO: 213249 - RNA, 22 nt, Human
uuccugguaaauuauguccagg

SEQ ID NO: 213250 - RNA, 19 nt, Human
aggcuggagacaccaggcc

SEQ ID NO: 213251 - RNA, 22 nt, Human
accaggcagcaccaaagccggu

SEQ ID NO: 213252 - RNA, 22 nt, Human
agagccagagaccuggguucac

SEQ ID NO: 213253 - RNA, 22 nt, Human
auaaagcauuuccccugugugg

SEQ ID NO: 213254 - RNA, 22 nt, Human
gagaagcaaucaguggccaccc

SEQ ID NO: 213255 - RNA, 22 nt, Human
uaaggcuuuauuuuuacaaugc

SEQ ID NO: 213256 - RNA, 19 nt, Human
uccucugaagguucuuuua

SEQ ID NO: 213257 - RNA, 22 nt, Human
gacaggcuucauccucagaguu

SEQ ID NO: 213258 - RNA, 22 nt, Human
cagagacccuucucaguggcca

SEQ ID NO: 213259 - RNA, 22 nt, Human
gugaggccgcacgccccggagu

SEQ ID NO: 213260 - RNA, 22 nt, Human
uccagcuguugauauucuaggu

SEQ ID NO: 213261 - RNA, 22 nt, Human
gcugucccgcugacuuccagcu

SEQ ID NO: 213262 - RNA, 22 nt, Human
gaggcagugaacaauuccugug

SEQ ID NO: 213263 - RNA, 20 nt, Human
ucuguagucuaugaggcuua

SEQ ID NO: 213264 - RNA, 22 nt, Human
acgagucugcucuugaaaaagu

SEQ ID NO: 213265 - RNA, 22 nt, Human
ucugucuuugucaggaccagag

SEQ ID NO: 213266 - RNA, 20 nt, Human
gcuaccagaacaaggccauu

SEQ ID NO: 213267 - RNA, 22 nt, Human
guccaucuagaauuuauuucua

SEQ ID NO: 213268 - RNA, 22 nt, Human
cucuggcugucccgaugagcag

SEQ ID NO: 213269 - RNA, 21 nt, Human
ugggcaccaaaaccuaggagu

SEQ ID NO: 213270 - RNA, 22 nt, Human
gaacauuuaugaugcaauaccu

SEQ ID NO: 213271 - RNA, 22 nt, Human
agcugcuacugcucugccagag

SEQ ID NO: 213272 - RNA, 22 nt, Human
ucucagagggaaaggccaauuu

SEQ ID NO: 213273 - RNA, 22 nt, Human
agcugugguucugggcagcgac

SEQ ID NO: 213274 - RNA, 22 nt, Human
aauucuugguccuaguguauaa

SEQ ID NO: 213275 - RNA, 22 nt, Human
ucucagguaaaaggguaucuac

SEQ ID NO: 213276 - RNA, 22 nt, Human
ggugggaaggggccagugugcg

SEQ ID NO: 213277 - RNA, 22 nt, Human
cccaggcagccccagaagcuug

SEQ ID NO: 213278 - RNA, 22 nt, Human
ugagucucauuaauuaugaaug

SEQ ID NO: 213279 - RNA, 22 nt, Human
cugggggcaauggucagagugu

SEQ ID NO: 213280 - RNA, 22 nt, Human
guuuacaugcagaaaaucaaug

SEQ ID NO: 213281 - RNA, 22 nt, Human
augcuuuuaugucacaugguca

SEQ ID NO: 213282 - RNA, 22 nt, Human
agcucccaauugacuugaacua

SEQ ID NO: 213283 - RNA, 22 nt, Human
cuagagcuguucugugcacuca

SEQ ID NO: 213284 - RNA, 22 nt, Human
cugggccaucucucugcaagug

SEQ ID NO: 213285 - RNA, 22 nt, Human
cagcuuuaccuuuaggaguaac

SEQ ID NO: 213286 - RNA, 21 nt, Human
aucuuuauuacgcagagaaga

SEQ ID NO: 213287 - RNA, 22 nt, Human
aaggcuucuuugcaggcuuuag

SEQ ID NO: 213288 - RNA, 22 nt, Human
ggguccagacuaugaagaacuu

SEQ ID NO: 213289 - RNA, 22 nt, Human
ucaggaagggcucagucugugc

SEQ ID NO: 213290 - RNA, 22 nt, Human
agaaguuaccacauacuucucu

SEQ ID NO: 213291 - RNA, 22 nt, Human
ugcccuugggauuuagguaagg

SEQ ID NO: 213292 - RNA, 22 nt, Human
cuggcucccaugagcucucacg

SEQ ID NO: 213293 - RNA, 22 nt, Human
gcccaggaaguugaggcugccg

SEQ ID NO: 213294 - RNA, 22 nt, Human
uacuccagacauucuguccucg

SEQ ID NO: 213295 - RNA, 22 nt, Human
gcuagaaaaugaaagauaauuu

SEQ ID NO: 213296 - RNA, 22 nt, Human
uagaaucugauuacccuaugaa

SEQ ID NO: 213297 - RNA, 22 nt, Human
guucuguacuccaagcucuucc

SEQ ID NO: 213298 - RNA, 22 nt, Human
ccccaccagcacccucucuauc

SEQ ID NO: 213299 - RNA, 22 nt, Human
uguuacucugggguugugguga

SEQ ID NO: 213300 - RNA, 22 nt, Human
cucaccccuguaauuccagcac

SEQ ID NO: 213301 - RNA, 22 nt, Human
uuugacucaguggacguacuag

SEQ ID NO: 213302 - RNA, 21 nt, Human
aggcuuggguaaaaaggucau

SEQ ID NO: 213303 - RNA, 22 nt, Human
agccauccuacuaccucagcau

SEQ ID NO: 213304 - RNA, 22 nt, Human
ucuggguggcagugauggcgug

SEQ ID NO: 213305 - RNA, 22 nt, Human
acaagucucaacagcagccagc

SEQ ID NO: 213306 - RNA, 17 nt, Human
ggcuucagggagcuggg

SEQ ID NO: 213307 - RNA, 22 nt, Human
gucuuuaugguaugaaaacuga

SEQ ID NO: 213308 - RNA, 22 nt, Human
gcuuagaagauugacccugguu

SEQ ID NO: 213309 - RNA, 22 nt, Human
agugcacaacaugcagguuugu

SEQ ID NO: 213310 - RNA, 22 nt, Human
aggcucugcagugcuggaggac

SEQ ID NO: 213311 - RNA, 22 nt, Human
guuagagcacauacuuugcaug

SEQ ID NO: 213312 - RNA, 22 nt, Human
uacagguaaaauuaucagaaac

SEQ ID NO: 213313 - RNA, 22 nt, Human
ucacuuuccucaucacgacuag

SEQ ID NO: 213314 - RNA, 22 nt, Human
ggcccaguguggguggauguug

SEQ ID NO: 213315 - RNA, 22 nt, Human
uaaggcaaagugauuucuuaaa

SEQ ID NO: 213316 - RNA, 22 nt, Human
aucuuuuuaucuguuuggaaca

SEQ ID NO: 213317 - RNA, 22 nt, Human
aaggaguuuggguagucauaca

SEQ ID NO: 213318 - RNA, 23 nt, Human
aauuacaaccaagaacuggaagg

SEQ ID NO: 213319 - RNA, 22 nt, Human
uccagagggcgauggcuggggg

SEQ ID NO: 213320 - RNA, 22 nt, Human
gcucagggaacuuuuugcaggc

SEQ ID NO: 213321 - RNA, 22 nt, Human
acagccaggcccagcacgcagg

SEQ ID NO: 213322 - RNA, 22 nt, Human
uugauucacaauuaccaagacu

SEQ ID NO: 213323 - RNA, 22 nt, Human
ugaguacucggagugcuuugga

SEQ ID NO: 213324 - RNA, 22 nt, Human
ccuggagaccugauggcagcgg

SEQ ID NO: 213325 - RNA, 22 nt, Human
gugcuugggggaaguaacagac

SEQ ID NO: 213326 - RNA, 22 nt, Human
agcaguuuuuauaacacuggaa

SEQ ID NO: 213327 - RNA, 22 nt, Human
uacccagcccaugccuaccuca

SEQ ID NO: 213328 - RNA, 22 nt, Human
aaugugucauuucccacaggug

SEQ ID NO: 213329 - RNA, 22 nt, Human
cuggggggcuacugacagagga

SEQ ID NO: 213330 - RNA, 22 nt, Human
aaucucagaaacugguggauuu

SEQ ID NO: 213331 - RNA, 22 nt, Human
ucucauuguagaaagacugauu

SEQ ID NO: 213332 - RNA, 22 nt, Human
caggacacuacagaugggaggg

SEQ ID NO: 213333 - RNA, 22 nt, Human
ugagucuccagcgaaguaggau

SEQ ID NO: 213334 - RNA, 23 nt, Human
agucugugcuuggugggagggcc

SEQ ID NO: 213335 - RNA, 22 nt, Human
gauuacugucuacuugggauag

SEQ ID NO: 213336 - RNA, 22 nt, Human
acacauguauggcacuuacauu

SEQ ID NO: 213337 - RNA, 19 nt, Human
aguuauuucuaaauuuacc

SEQ ID NO: 213338 - RNA, 22 nt, Human
acuguccuggagcucacacucu

SEQ ID NO: 213339 - RNA, 22 nt, Human
agacaaaccuuguuuuaugaug

SEQ ID NO: 213340 - RNA, 18 nt, Human
gcaacaguaucagcaggc

SEQ ID NO: 213341 - RNA, 22 nt, Human
cucucugaguggcuguacuuuc

SEQ ID NO: 213342 - RNA, 22 nt, Human
uggcugagguuaugcugguugu

SEQ ID NO: 213343 - RNA, 22 nt, Human
cagaguggcagucccaggccca

SEQ ID NO: 213344 - RNA, 22 nt, Human
ugggacacaaaccagaccagga

SEQ ID NO: 213345 - RNA, 22 nt, Human
aucugccuggcuccaggugagc

SEQ ID NO: 213346 - RNA, 22 nt, Human
uuugcugucagccgcuauuuuc

SEQ ID NO: 213347 - RNA, 17 nt, Human
cagugcagagcccuuuc

SEQ ID NO: 213348 - RNA, 22 nt, Human
cuguaggugauugcuauguuau

SEQ ID NO: 213349 - RNA, 22 nt, Human
aaguuucuuuauuagcuugucc

SEQ ID NO: 213350 - RNA, 22 nt, Human
ugauucaagauugguuagcugu

SEQ ID NO: 213351 - RNA, 22 nt, Human
aaggcugcuuuuaacaugcaua

SEQ ID NO: 213352 - RNA, 22 nt, Human
accagcaguuaugaggccagga

SEQ ID NO: 213353 - RNA, 22 nt, Human
ugcugggucagugagagcaggg

SEQ ID NO: 213354 - RNA, 22 nt, Human
uauguauucugaguacaaguuc

SEQ ID NO: 213355 - RNA, 22 nt, Human
aaagaagacagacauuucuuuc

SEQ ID NO: 213356 - RNA, 22 nt, Human
cucuuugggaugggcucugcug

SEQ ID NO: 213357 - RNA, 22 nt, Human
gaagcuuugucuugucuccugg

SEQ ID NO: 213358 - RNA, 22 nt, Human
agaucugaguggcugcauguaa

SEQ ID NO: 213359 - RNA, 22 nt, Human
gaaaacauccagagauagaccu

SEQ ID NO: 213360 - RNA, 20 nt, Human
gcugccuuguccugcuuggu

SEQ ID NO: 213361 - RNA, 22 nt, Human
gcauguguggaggagaugugcu

SEQ ID NO: 213362 - RNA, 18 nt, Human
cacaggaaggggaauauc

SEQ ID NO: 213363 - RNA, 22 nt, Human
aguugaauaauuagacauaucu

SEQ ID NO: 213364 - RNA, 22 nt, Human
aguggcagagguugacugcagu

SEQ ID NO: 213365 - RNA, 22 nt, Human
cccaggaggcagagcuugcagu

SEQ ID NO: 213366 - RNA, 22 nt, Human
aacaugcauauagguaaaugga

SEQ ID NO: 213367 - RNA, 22 nt, Human
gacacuuucucagguaaagcau

SEQ ID NO: 213368 - RNA, 22 nt, Human
gcucaggaucccaggggugugc

SEQ ID NO: 213369 - RNA, 22 nt, Human
augcaccacaucacuucugcuc

SEQ ID NO: 213370 - RNA, 22 nt, Human
agacugaauaacaagcaaauaa

SEQ ID NO: 213371 - RNA, 22 nt, Human
caucuuugcacccucaaaaccu

SEQ ID NO: 213372 - RNA, 22 nt, Human
uggccccauuuuacagaugaaa

SEQ ID NO: 213373 - RNA, 22 nt, Human
cagaggcugggaccucaggcau

SEQ ID NO: 213374 - RNA, 22 nt, Human
ucaccacugaacagaccuuugg

SEQ ID NO: 213375 - RNA, 22 nt, Human
aagcaucuccucaucauuuggg

SEQ ID NO: 213376 - RNA, 22 nt, Human
gucucugugcccccauuuccgu

SEQ ID NO: 213377 - RNA, 22 nt, Human
uuuugucuaagaacuuugcaaa

SEQ ID NO: 213378 - RNA, 22 nt, Human
gaggagaagcuauuggaaggac

SEQ ID NO: 213379 - RNA, 22 nt, Human
agaaaacauaggagacaggaaa

SEQ ID NO: 213380 - RNA, 22 nt, Human
uucagagaagcaaaggcagauu

SEQ ID NO: 213381 - RNA, 22 nt, Human
ucuggcaguuccuuguugauau

SEQ ID NO: 213382 - RNA, 22 nt, Human
ucuuuacaaucuaagcauaguu

SEQ ID NO: 213383 - RNA, 22 nt, Human
uuuguguuggaagaaaugcuac

SEQ ID NO: 213384 - RNA, 20 nt, Human
ccucaggaugagggugagca

SEQ ID NO: 213385 - RNA, 20 nt, Human
ggagaugccucucaguccau

SEQ ID NO: 213386 - RNA, 22 nt, Human
acaugaaaccugagucuaacuc

SEQ ID NO: 213387 - RNA, 22 nt, Human
cuuugaaauucuucagcugaag

SEQ ID NO: 213388 - RNA, 22 nt, Human
auuuugaagggaauugaaguuc

SEQ ID NO: 213389 - RNA, 22 nt, Human
aagaauauagauuuuuugaagu

SEQ ID NO: 213390 - RNA, 22 nt, Human
cagaauggcuuuuauggcucag

SEQ ID NO: 213391 - RNA, 22 nt, Human
gacacaggauuccuggcucugc

SEQ ID NO: 213392 - RNA, 22 nt, Human
aaggcagucugguuucaaagca

SEQ ID NO: 213393 - RNA, 22 nt, Human
cagggcucccugcagccucugu

SEQ ID NO: 213394 - RNA, 22 nt, Human
ugcuggcuuuuugugucaaaga

SEQ ID NO: 213395 - RNA, 22 nt, Human
auucauuuagagggauuaagca

SEQ ID NO: 213396 - RNA, 22 nt, Human
ucuguuggacauucaucugcag

SEQ ID NO: 213397 - RNA, 22 nt, Human
agacagacggcuuuauacacag

SEQ ID NO: 213398 - RNA, 22 nt, Human
uacaugaagaaaauuaagcagu

SEQ ID NO: 213399 - RNA, 22 nt, Human
gagcagagcuucucaaaguaaa

SEQ ID NO: 213400 - RNA, 22 nt, Human
gggcgcagccaauccuggcccu

SEQ ID NO: 213401 - RNA, 22 nt, Human
ugggagaacccagggucaggcu

SEQ ID NO: 213402 - RNA, 22 nt, Human
aucugguaugagguuuugcuuu

SEQ ID NO: 213403 - RNA, 22 nt, Human
uucuuucucuccacaaggcuug

SEQ ID NO: 213404 - RNA, 22 nt, Human
gagggggaaagucccuggaguc

SEQ ID NO: 213405 - RNA, 22 nt, Human
agggcugaugcaccauguagcc

SEQ ID NO: 213406 - RNA, 22 nt, Human
aucaugcauuguauugaguuga

SEQ ID NO: 213407 - RNA, 22 nt, Human
gagccucguggcggccacugcg

SEQ ID NO: 213408 - RNA, 22 nt, Human
aacauacagugagcaguggacu

SEQ ID NO: 213409 - RNA, 22 nt, Human
guguaaguaucuuuguaucuuu

SEQ ID NO: 213410 - RNA, 22 nt, Human
ugccuuaggguaccuggugcuu

SEQ ID NO: 213411 - RNA, 22 nt, Human
aggcuggagcaagggggcauau

SEQ ID NO: 213412 - RNA, 22 nt, Human
uuggcugccgagcgcaucccgg

SEQ ID NO: 213413 - RNA, 18 nt, Human
ucuguggcagcagugcac

SEQ ID NO: 213414 - RNA, 22 nt, Human
aauacuugucagaugaauaaga

SEQ ID NO: 213415 - RNA, 22 nt, Human
acaaagggggacugcagagggu

SEQ ID NO: 213416 - RNA, 22 nt, Human
acacugugacggaaauaaagaa

SEQ ID NO: 213417 - RNA, 18 nt, Human
guccacagcccucacagc

SEQ ID NO: 213418 - RNA, 22 nt, Human
aagaaucuuaauccagaaaccu

SEQ ID NO: 213419 - RNA, 22 nt, Human
aaagccuuuucuguuuaacaca

SEQ ID NO: 213420 - RNA, 22 nt, Human
ccaggcucugacauagauggga

SEQ ID NO: 213421 - RNA, 22 nt, Human
gcauuagagcccaucaccugua

SEQ ID NO: 213422 - RNA, 21 nt, Human
accaaaaccuauacuuucugu

SEQ ID NO: 213423 - RNA, 22 nt, Human
gccuucagcggccgcucgcugc

SEQ ID NO: 213424 - RNA, 22 nt, Human
ccuguggcuuccacgaccuaau

SEQ ID NO: 213425 - RNA, 22 nt, Human
aaacuagauuaccacugcuaga

SEQ ID NO: 213426 - RNA, 21 nt, Human
uggcuucugccaauguuaaga

SEQ ID NO: 213427 - RNA, 23 nt, Human
acagggcuggcagcugcaagacc

SEQ ID NO: 213428 - RNA, 22 nt, Human
aaaaguaauugcaauuuuguag

SEQ ID NO: 213429 - RNA, 22 nt, Human
uaggcugagcuuguagaucgua

SEQ ID NO: 213430 - RNA, 22 nt, Human
agaggcugugcagagggagugc

SEQ ID NO: 213431 - RNA, 22 nt, Human
cagagcaugaauaaaaguuaca

SEQ ID NO: 213432 - RNA, 22 nt, Human
gcaggcuguagacaccaaacua

SEQ ID NO: 213433 - RNA, 22 nt, Human
auacaucucuuugaagugcuuu

SEQ ID NO: 213434 - RNA, 22 nt, Human
uuuuauacacaugaacaugcag

SEQ ID NO: 213435 - RNA, 22 nt, Human
ggcccaggaugcaagaacugaa

SEQ ID NO: 213436 - RNA, 22 nt, Human
cagggcucaucugugugaccag

SEQ ID NO: 213437 - RNA, 18 nt, Human
uauauagagaaacccauu

SEQ ID NO: 213438 - RNA, 22 nt, Human
gggccagguggaccccagccuc

SEQ ID NO: 213439 - RNA, 19 nt, Human
ggcuggaguggccaucugu

SEQ ID NO: 213440 - RNA, 22 nt, Human
gagaaucuggguuuuggcuauc

SEQ ID NO: 213441 - RNA, 22 nt, Human
acaguuugagaaccacuagccu

SEQ ID NO: 213442 - RNA, 22 nt, Human
ucuacauuuucacaaggucucc

SEQ ID NO: 213443 - RNA, 20 nt, Human
acugccuugguucaguaggu

SEQ ID NO: 213444 - RNA, 22 nt, Human
cuggggcauugggagaggccug

SEQ ID NO: 213445 - RNA, 22 nt, Human
gggaccugcgccacucacuguc

SEQ ID NO: 213446 - RNA, 17 nt, Human
ccacagcugggugccuu

SEQ ID NO: 213447 - RNA, 22 nt, Human
aagaguggagcuggaaaguggg

SEQ ID NO: 213448 - RNA, 22 nt, Human
ugccagcacuucuggcugucug

SEQ ID NO: 213449 - RNA, 22 nt, Human
uauuauugacuauucagaaugu

SEQ ID NO: 213450 - RNA, 22 nt, Human
cuccugcaugguugugcuauug

SEQ ID NO: 213451 - RNA, 21 nt, Human
gccuggcuucacaggcacuga

SEQ ID NO: 213452 - RNA, 22 nt, Human
ugcauacacacauagguauggg

SEQ ID NO: 213453 - RNA, 22 nt, Human
agagcccagugacaucagcaca

SEQ ID NO: 213454 - RNA, 22 nt, Human
uggagcugagaaguggagcucu

SEQ ID NO: 213455 - RNA, 22 nt, Human
uuaacaugucuugacuucaucu

SEQ ID NO: 213456 - RNA, 22 nt, Human
augcaucaggcacuaggaauag

SEQ ID NO: 213457 - RNA, 21 nt, Human
aggcagcaggauccagggaca

SEQ ID NO: 213458 - RNA, 22 nt, Human
ugcugggcuguuccuguccaug

SEQ ID NO: 213459 - RNA, 18 nt, Human
caggccucuugaucuucc

SEQ ID NO: 213460 - RNA, 16 nt, Human
uucucuguuccuugug

SEQ ID NO: 213461 - RNA, 22 nt, Human
gucacagaucucuugagucaag

SEQ ID NO: 213462 - RNA, 22 nt, Human
cagugcccaagaugugccaugc

SEQ ID NO: 213463 - RNA, 22 nt, Human
uuuagcaagaugcccuggcuuu

SEQ ID NO: 213464 - RNA, 20 nt, Human
aaguuacauuguauuguacc

SEQ ID NO: 213465 - RNA, 22 nt, Human
aagacaauuuugaguaugcaca

SEQ ID NO: 213466 - RNA, 22 nt, Human
ucugagugauguugagucagaa

SEQ ID NO: 213467 - RNA, 22 nt, Human
uucaaauacauucuuugccacu

SEQ ID NO: 213468 - RNA, 22 nt, Human
uuucgucaauuguaacaaaugu

SEQ ID NO: 213469 - RNA, 22 nt, Human
ggcugggcuccgggagcaugcg

SEQ ID NO: 213470 - RNA, 23 nt, Human
ucccugagcuggagagacugcac

SEQ ID NO: 213471 - RNA, 22 nt, Human
uucauguaguguaaugucuuca

SEQ ID NO: 213472 - RNA, 22 nt, Human
ucaugcaaggcugaaacauggu

SEQ ID NO: 213473 - RNA, 22 nt, Human
uugggacagaaaaggagaagau

SEQ ID NO: 213474 - RNA, 22 nt, Human
caggaggcagcgcucucaggac

SEQ ID NO: 213475 - RNA, 22 nt, Human
gggccuggugcuucugacuccu

SEQ ID NO: 213476 - RNA, 22 nt, Human
uuguuuacaaguuacucagucu

SEQ ID NO: 213477 - RNA, 21 nt, Human
cugggcuuucucucaaagaca

SEQ ID NO: 213478 - RNA, 22 nt, Human
cagggauggcugucaggaugua

SEQ ID NO: 213479 - RNA, 22 nt, Human
gaggcugaacagguucucauga

SEQ ID NO: 213480 - RNA, 22 nt, Human
cugcagcugucucuacugggca

SEQ ID NO: 213481 - RNA, 22 nt, Human
uauuauuaaauggcagaauuuu

SEQ ID NO: 213482 - RNA, 22 nt, Human
uguaucuucaguuugucuuucc

SEQ ID NO: 213483 - RNA, 22 nt, Human
ggaggggcagccauggaacucc

SEQ ID NO: 213484 - RNA, 22 nt, Human
aggaggaggugggacacaguga

SEQ ID NO: 213485 - RNA, 22 nt, Human
gaacaaaucccuuccugucucc

SEQ ID NO: 213486 - RNA, 22 nt, Human
gugugcaggggcuugguggagc

SEQ ID NO: 213487 - RNA, 22 nt, Human
cauauccaauaugacuaguguu

SEQ ID NO: 213488 - RNA, 22 nt, Human
guccaugguugcuuucauguaa

SEQ ID NO: 213489 - RNA, 22 nt, Human
ugggcugaaaugcuguggacua

SEQ ID NO: 213490 - RNA, 20 nt, Human
uccaggagaacugggagccg

SEQ ID NO: 213491 - RNA, 22 nt, Human
cugagccagggccacacaugga

SEQ ID NO: 213492 - RNA, 23 nt, Human
ugauucagcaaguccacuucugg

SEQ ID NO: 213493 - RNA, 22 nt, Human
cagugagguggaguaguuccca

SEQ ID NO: 213494 - RNA, 22 nt, Human
ucccaggguuacagccagggca

SEQ ID NO: 213495 - RNA, 22 nt, Human
ucuauuuuguuuccagcucuac

SEQ ID NO: 213496 - RNA, 22 nt, Human
acacuuuagaaaaaagaauggu

SEQ ID NO: 213497 - RNA, 22 nt, Human
cugaacuuauugagugcuugcu

SEQ ID NO: 213498 - RNA, 22 nt, Human
aguuuacauauuugucggaguc

SEQ ID NO: 213499 - RNA, 22 nt, Human
augacaugaccugguagagaca

SEQ ID NO: 213500 - RNA, 22 nt, Human
agcaucagcagacucucagcua

SEQ ID NO: 213501 - RNA, 22 nt, Human
aacuuaaacccacucauguaga

SEQ ID NO: 213502 - RNA, 22 nt, Human
aaaaccacuuccuugcuauugg

SEQ ID NO: 213503 - RNA, 22 nt, Human
uagcaggcaucucagagauaau

SEQ ID NO: 213504 - RNA, 22 nt, Human
ugaaugugaugcuaaacauaug

SEQ ID NO: 213505 - RNA, 22 nt, Human
cuggugcacuacagccuggaac

SEQ ID NO: 213506 - RNA, 22 nt, Human
auuauucaacacuugagaaauu

SEQ ID NO: 213507 - RNA, 22 nt, Human
gcauggcaaauaucgagggcag

SEQ ID NO: 213508 - RNA, 21 nt, Human
uagggggcagugggaugcuua

SEQ ID NO: 213509 - RNA, 22 nt, Human
uucucaggucaccagggugcca

SEQ ID NO: 213510 - RNA, 22 nt, Human
aggaggcugaacuagggucugg

SEQ ID NO: 213511 - RNA, 22 nt, Human
gacaggauauuaugauagauuc

SEQ ID NO: 213512 - RNA, 19 nt, Human
ugcaaauguaggaagaaua

SEQ ID NO: 213513 - RNA, 22 nt, Human
gacuuucuuaggcccccuaaua

SEQ ID NO: 213514 - RNA, 22 nt, Human
acagauuuaggacuguagcgau

SEQ ID NO: 213515 - RNA, 22 nt, Human
uauguucaugucaaacaaaugc

SEQ ID NO: 213516 - RNA, 22 nt, Human
gugugggaggaaggugaacaga

SEQ ID NO: 213517 - RNA, 22 nt, Human
caggaagagguaucaccgagca

SEQ ID NO: 213518 - RNA, 22 nt, Human
agggagaguuugauguuuccuc

SEQ ID NO: 213519 - RNA, 22 nt, Human
aaaguucuuuuucuauaaaucc

SEQ ID NO: 213520 - RNA, 22 nt, Human
ggaggccaaagugugggcggcu

SEQ ID NO: 213521 - RNA, 21 nt, Human
uccaggagcacgggacuagga

SEQ ID NO: 213522 - RNA, 21 nt, Human
cugaggcaugcaggccugggc

SEQ ID NO: 213523 - RNA, 22 nt, Human
uuucucauggaacauagcuccu

SEQ ID NO: 213524 - RNA, 22 nt, Human
cugagcagaagggugcacgugc

SEQ ID NO: 213525 - RNA, 23 nt, Human
agggaaauacugcaauuuuugga

SEQ ID NO: 213526 - RNA, 22 nt, Human
cagaaauacccagcauuuggag

SEQ ID NO: 213527 - RNA, 22 nt, Human
aucuagaagccugagccaagau

SEQ ID NO: 213528 - RNA, 22 nt, Human
caggaagaaggguggugagucc

SEQ ID NO: 213529 - RNA, 22 nt, Human
uggcaaaguaauuggguuucuc

SEQ ID NO: 213530 - RNA, 22 nt, Human
ggacuggguaggagcccagggc

SEQ ID NO: 213531 - RNA, 20 nt, Human
aacaguaccauuuaucucag

SEQ ID NO: 213532 - RNA, 22 nt, Human
ucagaaguugaaggcucuuuuu

SEQ ID NO: 213533 - RNA, 22 nt, Human
gacagcaguccuggaguuccca

SEQ ID NO: 213534 - RNA, 22 nt, Human
uuauguacucugcaauguuuga

SEQ ID NO: 213535 - RNA, 22 nt, Human
uuucaguguaucuuccaaaagc

SEQ ID NO: 213536 - RNA, 22 nt, Human
ccuggcauucucuccagagaga

SEQ ID NO: 213537 - RNA, 22 nt, Human
cagggccucucaucccacgggc

SEQ ID NO: 213538 - RNA, 22 nt, Human
cagcccagagaaggggcccgug

SEQ ID NO: 213539 - RNA, 22 nt, Human
agaaaaagaaaguggauuuguc

SEQ ID NO: 213540 - RNA, 20 nt, Human
ucaggcuggugggcuuuccc

SEQ ID NO: 213541 - RNA, 22 nt, Human
aggcuaagugggugucagggcc

SEQ ID NO: 213542 - RNA, 22 nt, Human
cacagcccugcgccccaguuug

SEQ ID NO: 213543 - RNA, 22 nt, Human
agguucaaauuguugcaguuuc

SEQ ID NO: 213544 - RNA, 22 nt, Human
aaggaacuaacuauguagagau

SEQ ID NO: 213545 - RNA, 22 nt, Human
cugggcuuugaagccaggcugc

SEQ ID NO: 213546 - RNA, 22 nt, Human
cagauguaguagcuuuauugca

SEQ ID NO: 213547 - RNA, 22 nt, Human
acauuugaggauguuaagaaug

SEQ ID NO: 213548 - RNA, 22 nt, Human
uagaacaucagguugaauuugg

SEQ ID NO: 213549 - RNA, 22 nt, Human
augcugagaaacagacguguug

SEQ ID NO: 213550 - RNA, 22 nt, Human
uagcagggauacaaggucgccu

SEQ ID NO: 213551 - RNA, 18 nt, Human
ucugaaagcaccggugaa

SEQ ID NO: 213552 - RNA, 22 nt, Human
cagucacagugacaggaugugg

SEQ ID NO: 213553 - RNA, 22 nt, Human
ucagggaacaauguuauggcuu

SEQ ID NO: 213554 - RNA, 22 nt, Human
ugccaggcgauugcuaucagca

SEQ ID NO: 213555 - RNA, 22 nt, Human
gucaggaaaaauugauaauuuu

SEQ ID NO: 213556 - RNA, 22 nt, Human
gacuuucugaaggucucgcagu

SEQ ID NO: 213557 - RNA, 22 nt, Human
ucaaucaaagccagauguccuu

SEQ ID NO: 213558 - RNA, 22 nt, Human
ugcccuccuccugagcccaugu

SEQ ID NO: 213559 - RNA, 22 nt, Human
acacaaugcauauuuuuccaga

SEQ ID NO: 213560 - RNA, 22 nt, Human
cccaggcugccacgauuacugc

SEQ ID NO: 213561 - RNA, 22 nt, Human
gacagcaggugcuugggaaagg

SEQ ID NO: 213562 - RNA, 22 nt, Human
agauggcugggagcucuguuug

SEQ ID NO: 213563 - RNA, 22 nt, Human
aauuuggagagaaacaaguagg

SEQ ID NO: 213564 - RNA, 22 nt, Human
uaguuuuagcagcaaugggaug

SEQ ID NO: 213565 - RNA, 17 nt, Human
cucuguacaggaaagag

SEQ ID NO: 213566 - RNA, 17 nt, Human
cgggcauggagggcagg

SEQ ID NO: 213567 - RNA, 22 nt, Human
auuugcaaagguuaacagcagu

SEQ ID NO: 213568 - RNA, 22 nt, Human
auguaggauugagugauagagg

SEQ ID NO: 213569 - RNA, 22 nt, Human
ugccugccaugcagaaagcuga

SEQ ID NO: 213570 - RNA, 22 nt, Human
ucagacccugcgguguuuggau

SEQ ID NO: 213571 - RNA, 22 nt, Human
gagggcucugucuggaagggaa

SEQ ID NO: 213572 - RNA, 22 nt, Human
auugcuggcugccaucuugccc

SEQ ID NO: 213573 - RNA, 22 nt, Human
agguggcuaugaggaugcaguc

SEQ ID NO: 213574 - RNA, 22 nt, Human
ccugggagaacugcuggguugg

SEQ ID NO: 213575 - RNA, 22 nt, Human
auuauuuagaaaucgauugaaa

SEQ ID NO: 213576 - RNA, 22 nt, Human
gcacaauggaccgugugcucug

SEQ ID NO: 213577 - RNA, 22 nt, Human
auguccaguuucuacacacaua

SEQ ID NO: 213578 - RNA, 22 nt, Human
aggaaauaagggacaagacaaa

SEQ ID NO: 213579 - RNA, 22 nt, Human
acaucuagaagaucugggagau

SEQ ID NO: 213580 - RNA, 22 nt, Human
cuggagcuaggaaguccaagau

SEQ ID NO: 213581 - RNA, 22 nt, Human
aagagcuggcccaaucugagca

SEQ ID NO: 213582 - RNA, 22 nt, Human
gcaaacaagcugccugaagauu

SEQ ID NO: 213583 - RNA, 22 nt, Human
cugguuuagcuguaagguuccc

SEQ ID NO: 213584 - RNA, 22 nt, Human
uacuagaagcuguaauuuuuca

SEQ ID NO: 213585 - RNA, 22 nt, Human
uuaccugugucaguauaugaga

SEQ ID NO: 213586 - RNA, 20 nt, Human
uccugaggcuucgccagugu

SEQ ID NO: 213587 - RNA, 21 nt, Human
uucaacaaagggaauaaguuu

SEQ ID NO: 213588 - RNA, 22 nt, Human
ccugcuccugcuauucuucugg

SEQ ID NO: 213589 - RNA, 22 nt, Human
cagaacuggccuuucaucaguc

SEQ ID NO: 213590 - RNA, 22 nt, Human
uccuacaucagcucucaguagc

SEQ ID NO: 213591 - RNA, 22 nt, Human
uaaaucuuguggcaaugcuucu

SEQ ID NO: 213592 - RNA, 22 nt, Human
ggacaggccauauggaauacau

SEQ ID NO: 213593 - RNA, 22 nt, Human
uauacaguuaaguuucuucagu

SEQ ID NO: 213594 - RNA, 21 nt, Human
aggugcaggccucaagcccca

SEQ ID NO: 213595 - RNA, 22 nt, Human
ucucugaagagcucagacuagu

SEQ ID NO: 213596 - RNA, 22 nt, Human
uuccuggcuuuugggcuaauuc

SEQ ID NO: 213597 - RNA, 15 nt, Human
ggcagguggaucacu

SEQ ID NO: 213598 - RNA, 22 nt, Human
aggcuucugcuguauuaacacu

SEQ ID NO: 213599 - RNA, 22 nt, Human
ugggccacugcugcggaaggcg

SEQ ID NO: 213600 - RNA, 22 nt, Human
aaggugucauuguuuauggaga

SEQ ID NO: 213601 - RNA, 22 nt, Human
ucccucagacagauguguuccu

SEQ ID NO: 213602 - RNA, 22 nt, Human
ucuuguauguguauuuugcugu

SEQ ID NO: 213603 - RNA, 22 nt, Human
aggagccagcguuccucaggau

SEQ ID NO: 213604 - RNA, 22 nt, Human
agcugguggagccuuucuguuu

SEQ ID NO: 213605 - RNA, 22 nt, Human
ugcccugcggcuaucuagauga

SEQ ID NO: 213606 - RNA, 22 nt, Human
agggucucuacgcacuagaggg

SEQ ID NO: 213607 - RNA, 22 nt, Human
cuacuguaguggccuauuuacc

SEQ ID NO: 213608 - RNA, 22 nt, Human
caggcagauuugcugcccucca

SEQ ID NO: 213609 - RNA, 18 nt, Human
gcucugcagcugaggcuu

SEQ ID NO: 213610 - RNA, 22 nt, Human
agccaagggucagcugcacaga

SEQ ID NO: 213611 - RNA, 22 nt, Human
cagagacauccauuuuauaugc

SEQ ID NO: 213612 - RNA, 18 nt, Human
caggucugucugccuccc

SEQ ID NO: 213613 - RNA, 22 nt, Human
uaaucucuagcccaugcaaaga

SEQ ID NO: 213614 - RNA, 22 nt, Human
gccuggaguagcauggcaagcc

SEQ ID NO: 213615 - RNA, 19 nt, Human
ugacaagauaauagccuug

SEQ ID NO: 213616 - RNA, 22 nt, Human
ugucaucuuguccagccaggca

SEQ ID NO: 213617 - RNA, 22 nt, Human
agccaggcgggucuuugcuccu

SEQ ID NO: 213618 - RNA, 22 nt, Human
aagaaagcauuagacaggcauu

SEQ ID NO: 213619 - RNA, 22 nt, Human
uguuucuugagaguauuacccu

SEQ ID NO: 213620 - RNA, 22 nt, Human
aaagugcagaacuguucucacu

SEQ ID NO: 213621 - RNA, 20 nt, Human
acacacagagacaugcgcau

SEQ ID NO: 213622 - RNA, 20 nt, Human
ucugccuuagggggagccuc

SEQ ID NO: 213623 - RNA, 22 nt, Human
cagggcagaacauauagauagu

SEQ ID NO: 213624 - RNA, 22 nt, Human
gguuucaaugagaagugcuugu

SEQ ID NO: 213625 - RNA, 22 nt, Human
uuuauugaacacuugcacuggc

SEQ ID NO: 213626 - RNA, 22 nt, Human
ugugugcaggcacugugccaga

SEQ ID NO: 213627 - RNA, 22 nt, Human
uaaaggcuuuuacaggagugca

SEQ ID NO: 213628 - RNA, 22 nt, Human
gcugagcuagaaaaggaccaca

SEQ ID NO: 213629 - RNA, 22 nt, Human
auguacauacugcauuuucaaa

SEQ ID NO: 213630 - RNA, 22 nt, Human
uuugacuccagagcccauuuuu

SEQ ID NO: 213631 - RNA, 22 nt, Human
aucucuucuagcucugaaauua

SEQ ID NO: 213632 - RNA, 22 nt, Human
cugggucuggaggccaagggug

SEQ ID NO: 213633 - RNA, 22 nt, Human
aaaugucagaagcuuuacuucu

SEQ ID NO: 213634 - RNA, 22 nt, Human
caggcucacuguaaggucagcu

SEQ ID NO: 213635 - RNA, 22 nt, Human
cccagcaggugccaucacucug

SEQ ID NO: 213636 - RNA, 23 nt, Human
gcccugcugggaccuccugcuac

SEQ ID NO: 213637 - RNA, 22 nt, Human
accagagcccaucugcuccuag

SEQ ID NO: 213638 - RNA, 22 nt, Human
cucuaggggcuggucagcgucu

SEQ ID NO: 213639 - RNA, 18 nt, Human
agcaccagucacuaacag

SEQ ID NO: 213640 - RNA, 19 nt, Human
uagaaccuggauuucagga

SEQ ID NO: 213641 - RNA, 22 nt, Human
aguacaacauuagaguaucuua

SEQ ID NO: 213642 - RNA, 22 nt, Human
augaauauugaaugucuuauga

SEQ ID NO: 213643 - RNA, 22 nt, Human
uuacagcauuuaaugagaucug

SEQ ID NO: 213644 - RNA, 22 nt, Human
cacuagaaccaaugacauuucu

SEQ ID NO: 213645 - RNA, 22 nt, Human
gcuccaggaggaugaccuuccu

SEQ ID NO: 213646 - RNA, 22 nt, Human
gagcccuguaggaaucucucaa

SEQ ID NO: 213647 - RNA, 22 nt, Human
uuucuguuguuggugucuggcu

SEQ ID NO: 213648 - RNA, 22 nt, Human
ugagagccuaguagguggaaaa

SEQ ID NO: 213649 - RNA, 22 nt, Human
agaagccaaucagcucucugcu

SEQ ID NO: 213650 - RNA, 18 nt, Human
cagccucugauugguugc

SEQ ID NO: 213651 - RNA, 22 nt, Human
gggguccuggaggccagcugga

SEQ ID NO: 213652 - RNA, 22 nt, Human
aaagccagcaaggugaguuuca

SEQ ID NO: 213653 - RNA, 20 nt, Human
agugcuguggcugaauaaga

SEQ ID NO: 213654 - RNA, 22 nt, Human
gugcagcugcccaagccugagc

SEQ ID NO: 213655 - RNA, 22 nt, Human
ucccaaggugcucggcaacagg

SEQ ID NO: 213656 - RNA, 22 nt, Human
caguccugucuuuaugacuuca

SEQ ID NO: 213657 - RNA, 22 nt, Human
uagcacauaacuuagaauaguu

SEQ ID NO: 213658 - RNA, 22 nt, Human
uuagaacugaagaagauuaagg

SEQ ID NO: 213659 - RNA, 22 nt, Human
acauguguuuuccuacuuauga

SEQ ID NO: 213660 - RNA, 19 nt, Human
gcagccaggugcucuaccu

SEQ ID NO: 213661 - RNA, 22 nt, Human
uagauacauuuuucuuuccugu

SEQ ID NO: 213662 - RNA, 22 nt, Human
ugagaggugaggcaugaggcau

SEQ ID NO: 213663 - RNA, 22 nt, Human
uguuuuguccuuuucuauauac

SEQ ID NO: 213664 - RNA, 22 nt, Human
ugcuggguagaaguauuagucu

SEQ ID NO: 213665 - RNA, 22 nt, Human
gcugccucaggcaccuccuggc

SEQ ID NO: 213666 - RNA, 22 nt, Human
uagaaguugcucaauaaauguu

SEQ ID NO: 213667 - RNA, 22 nt, Human
uuccuagaaugguuagaaaaua

SEQ ID NO: 213668 - RNA, 22 nt, Human
gcagguaagagaggcuggcuuc

SEQ ID NO: 213669 - RNA, 22 nt, Human
uuucacauuggcuucuauuucu

SEQ ID NO: 213670 - RNA, 20 nt, Human
ccucucugcccugcaaggcc

SEQ ID NO: 213671 - RNA, 22 nt, Human
caggccaaagaucccauugaca

SEQ ID NO: 213672 - RNA, 22 nt, Human
ucugccugcaguguggcagggc

SEQ ID NO: 213673 - RNA, 22 nt, Human
uccacgugagcuucgugugcag

SEQ ID NO: 213674 - RNA, 22 nt, Human
gcagggaugcugaggcucagug

SEQ ID NO: 213675 - RNA, 22 nt, Human
aaacuuuguucgucugaugugg

SEQ ID NO: 213676 - RNA, 22 nt, Human
gcugugcugcgggaggauuccg

SEQ ID NO: 213677 - RNA, 22 nt, Human
aaguuugucgaaauuaucagca

SEQ ID NO: 213678 - RNA, 22 nt, Human
uguguucuuaaaagcagugaua

SEQ ID NO: 213679 - RNA, 22 nt, Human
agagagcaggacuucacugagc

SEQ ID NO: 213680 - RNA, 22 nt, Human
ucacagacucuugauugucuaa

SEQ ID NO: 213681 - RNA, 22 nt, Human
cuucuuugaaaaaggcagucag

SEQ ID NO: 213682 - RNA, 22 nt, Human
uguuucuugggugcucacauca

SEQ ID NO: 213683 - RNA, 22 nt, Human
ccuuuagagcaaacgccaccua

SEQ ID NO: 213684 - RNA, 22 nt, Human
aaacugcacaugaggcuggugc

SEQ ID NO: 213685 - RNA, 18 nt, Human
ucaugaggaaggagaaga

SEQ ID NO: 213686 - RNA, 23 nt, Human
aggacagcaaaccccgccucccc

SEQ ID NO: 213687 - RNA, 22 nt, Human
agcaccaggauauuguuggaga

SEQ ID NO: 213688 - RNA, 22 nt, Human
agucucagggccacccggggaa

SEQ ID NO: 213689 - RNA, 22 nt, Human
cuccugagaauuuucaguugga

SEQ ID NO: 213690 - RNA, 22 nt, Human
acacuguaggagaaaggaguuu

SEQ ID NO: 213691 - RNA, 22 nt, Human
ugcagguucugaccagccaacu

SEQ ID NO: 213692 - RNA, 19 nt, Human
acauauguggauauacaug

SEQ ID NO: 213693 - RNA, 22 nt, Human
cacacauuagagccaaugucag

SEQ ID NO: 213694 - RNA, 22 nt, Human
cagagccacuuggagaugagaa

SEQ ID NO: 213695 - RNA, 22 nt, Human
ucaaauuauuuaggauagugcu

SEQ ID NO: 213696 - RNA, 22 nt, Human
gggaagagugucgguugaagug

SEQ ID NO: 213697 - RNA, 22 nt, Human
aguggcaaugggaguggagaca

SEQ ID NO: 213698 - RNA, 22 nt, Human
cuguuuauggagguaaggcauc

SEQ ID NO: 213699 - RNA, 22 nt, Human
auuuaauuuucucaacagugcu

SEQ ID NO: 213700 - RNA, 22 nt, Human
augcagaaagcggcaaacaggu

SEQ ID NO: 213701 - RNA, 22 nt, Human
aucuccagugaggcagauucug

SEQ ID NO: 213702 - RNA, 22 nt, Human
acagccagaggagccaggcugg

SEQ ID NO: 213703 - RNA, 22 nt, Human
agcagggcuugccgcuuguccu

SEQ ID NO: 213704 - RNA, 22 nt, Human
cuagaacuacaucuuuuaauag

SEQ ID NO: 213705 - RNA, 22 nt, Human
cuggauguuuaugaaggaccca

SEQ ID NO: 213706 - RNA, 22 nt, Human
uaauguaaacacagagacagaa

SEQ ID NO: 213707 - RNA, 22 nt, Human
uuuucauuguaaaucaggaaac

SEQ ID NO: 213708 - RNA, 21 nt, Human
aggcugcuggcucaggguccu

SEQ ID NO: 213709 - RNA, 22 nt, Human
uuccuggccccauccaucuuca

SEQ ID NO: 213710 - RNA, 22 nt, Human
ucaauaaauagcuuggcucagc

SEQ ID NO: 213711 - RNA, 22 nt, Human
ucuggaugggaugaggcaacaa

SEQ ID NO: 213712 - RNA, 22 nt, Human
uuagaaguucaggucuguaauc

SEQ ID NO: 213713 - RNA, 22 nt, Human
uggccugguaccacauagauuu

SEQ ID NO: 213714 - RNA, 22 nt, Human
agggaccacauccccucugugg

SEQ ID NO: 213715 - RNA, 22 nt, Human
uacaaacuguccagcccagagg

SEQ ID NO: 213716 - RNA, 22 nt, Human
aagcagagccaccagcuuugga

SEQ ID NO: 213717 - RNA, 22 nt, Human
acauuuuaauaugcuuagugug

SEQ ID NO: 213718 - RNA, 22 nt, Human
agcuggguugacaagauggaaa

SEQ ID NO: 213719 - RNA, 22 nt, Human
uuauuuucuccucagaaagugg

SEQ ID NO: 213720 - RNA, 22 nt, Human
augccucugcucuugguccuca

SEQ ID NO: 213721 - RNA, 22 nt, Human
ugucuccugggucccuuccacc

SEQ ID NO: 213722 - RNA, 22 nt, Human
gcuaggcucggaagcagcaggg

SEQ ID NO: 213723 - RNA, 22 nt, Human
agaggccucuuugcaaguaggu

SEQ ID NO: 213724 - RNA, 22 nt, Human
gggagugguccuuuccuaucug

SEQ ID NO: 213725 - RNA, 22 nt, Human
uacacaucuggagaagcccugu

SEQ ID NO: 213726 - RNA, 22 nt, Human
gcucaguguuucugguagaaaa

SEQ ID NO: 213727 - RNA, 22 nt, Human
cugaagaggacgcagcagcaag

SEQ ID NO: 213728 - RNA, 22 nt, Human
cucugggcggcccaggccaacc

SEQ ID NO: 213729 - RNA, 22 nt, Human
cuccagugcacuggucuuuuca

SEQ ID NO: 213730 - RNA, 22 nt, Human
gcucaggcuucuucuauaaaga

SEQ ID NO: 213731 - RNA, 22 nt, Human
ugcucuucaccauuacaucaug

SEQ ID NO: 213732 - RNA, 21 nt, Human
cuguggacaggcuggggcaug

SEQ ID NO: 213733 - RNA, 22 nt, Human
cugcaccaucuggagcaccucc

SEQ ID NO: 213734 - RNA, 22 nt, Human
ucacaucugcaaaaucccuuuu

SEQ ID NO: 213735 - RNA, 23 nt, Human
aucugggcaucuggagugguccu

SEQ ID NO: 213736 - RNA, 22 nt, Human
gggcugagaauucagcuuuccu

SEQ ID NO: 213737 - RNA, 22 nt, Human
auuuccaguccuaaugaucugg

SEQ ID NO: 213738 - RNA, 22 nt, Human
caguggaaacuaugcugcugga

SEQ ID NO: 213739 - RNA, 18 nt, Human
ugagaaccauguucauuc

SEQ ID NO: 213740 - RNA, 22 nt, Human
ugugagcagagccugacaugag

SEQ ID NO: 213741 - RNA, 20 nt, Human
aaagcaguaugcaaguagag

SEQ ID NO: 213742 - RNA, 22 nt, Human
ggggacugaggcacugaaggug

SEQ ID NO: 213743 - RNA, 22 nt, Human
gccuggugaaaggcagagagcg

SEQ ID NO: 213744 - RNA, 22 nt, Human
ggcccaugacccuagccaacug

SEQ ID NO: 213745 - RNA, 22 nt, Human
agccacagagcaggagaccuuu

SEQ ID NO: 213746 - RNA, 22 nt, Human
ccuggggcucugcacagagcag

SEQ ID NO: 213747 - RNA, 22 nt, Human
acacagcaacuugcaguaugga

SEQ ID NO: 213748 - RNA, 22 nt, Human
acacagagcuggaacugcuuca

SEQ ID NO: 213749 - RNA, 20 nt, Human
cuuucucuaauuuauaagua

SEQ ID NO: 213750 - RNA, 22 nt, Human
aguuaaaugucaguagcuuaac

SEQ ID NO: 213751 - RNA, 22 nt, Human
uucuggaauccucaaaacauga

SEQ ID NO: 213752 - RNA, 22 nt, Human
ucucagagcaucauuuucuuag

SEQ ID NO: 213753 - RNA, 22 nt, Human
uaagauuauacuuaaagagaaa

SEQ ID NO: 213754 - RNA, 22 nt, Human
auaugcagagagcaugaauagg

SEQ ID NO: 213755 - RNA, 20 nt, Human
ucagcacagcugacaagguu

SEQ ID NO: 213756 - RNA, 22 nt, Human
ccucuggccuaggccgggagag

SEQ ID NO: 213757 - RNA, 22 nt, Human
ugucuccagaaagcaccaggag

SEQ ID NO: 213758 - RNA, 22 nt, Human
uuacaaagcguugagacaagua

SEQ ID NO: 213759 - RNA, 22 nt, Human
aauuaguucacguccugugcuu

SEQ ID NO: 213760 - RNA, 22 nt, Human
ucaagcaaguguuugguguaaa

SEQ ID NO: 213761 - RNA, 20 nt, Human
ucugggcuucccccagcucc

SEQ ID NO: 213762 - RNA, 22 nt, Human
gcccaagggcaucaaguucuac

SEQ ID NO: 213763 - RNA, 22 nt, Human
gagagcaggcucucgggggcca

SEQ ID NO: 213764 - RNA, 22 nt, Human
gagagcccugcuccuaucccag

SEQ ID NO: 213765 - RNA, 22 nt, Human
aagcaacuccuaggaggaaagg

SEQ ID NO: 213766 - RNA, 22 nt, Human
aagauuuagggccaguuuacau

SEQ ID NO: 213767 - RNA, 22 nt, Human
cacagguguaugaauaugucca

SEQ ID NO: 213768 - RNA, 22 nt, Human
ugcacauuuguuauuuugaggu

SEQ ID NO: 213769 - RNA, 22 nt, Human
cuugagaaugugagccacagau

SEQ ID NO: 213770 - RNA, 22 nt, Human
gugaggcagggaaagaggauaa

SEQ ID NO: 213771 - RNA, 22 nt, Human
uucccacauucuuuacauucau

SEQ ID NO: 213772 - RNA, 22 nt, Human
agcaggcacuaugccaggaucu

SEQ ID NO: 213773 - RNA, 22 nt, Human
ugccaggccacguagcuucaag

SEQ ID NO: 213774 - RNA, 22 nt, Human
cuauuucuaaaccuauaaguga

SEQ ID NO: 213775 - RNA, 23 nt, Human
uggcucucucagugcugcagagg

SEQ ID NO: 213776 - RNA, 22 nt, Human
uugggucuuauggcuggaguag

SEQ ID NO: 213777 - RNA, 22 nt, Human
gccuguuucccugacgcuuaca

SEQ ID NO: 213778 - RNA, 16 nt, Human
ucagggcagaauggca

SEQ ID NO: 213779 - RNA, 22 nt, Human
ggcaggugccuucugugcuagc

SEQ ID NO: 213780 - RNA, 22 nt, Human
aauaauuagugggacagagaac

SEQ ID NO: 213781 - RNA, 22 nt, Human
cagaaugcagaauguucauuuu

SEQ ID NO: 213782 - RNA, 17 nt, Human
ucugagaaaggagaauc

SEQ ID NO: 213783 - RNA, 22 nt, Human
uugccagggaacagggagaggc

SEQ ID NO: 213784 - RNA, 18 nt, Human
ugaggccagagugggcau

SEQ ID NO: 213785 - RNA, 22 nt, Human
uaauacugagccaccagguagg

SEQ ID NO: 213786 - RNA, 22 nt, Human
uuugcuuguucaagauuucugu

SEQ ID NO: 213787 - RNA, 22 nt, Human
augaaacugaaggacaaccaga

SEQ ID NO: 213788 - RNA, 22 nt, Human
agaugagggguagaaaggacuu

SEQ ID NO: 213789 - RNA, 22 nt, Human
auggcccaggccaggauccagc

SEQ ID NO: 213790 - RNA, 22 nt, Human
aaauuauucucauguguuucuu

SEQ ID NO: 213791 - RNA, 22 nt, Human
uccagcccagcuguccccuuca

SEQ ID NO: 213792 - RNA, 22 nt, Human
agaaggcagaaaguccagguau

SEQ ID NO: 213793 - RNA, 22 nt, Human
ugcccugcuguggcucugccca

SEQ ID NO: 213794 - RNA, 22 nt, Human
ugcugcucaaugagaugccauc

SEQ ID NO: 213795 - RNA, 22 nt, Human
uuugaacagggaauguuccaca

SEQ ID NO: 213796 - RNA, 22 nt, Human
auggagggugguaagacagaga

SEQ ID NO: 213797 - RNA, 22 nt, Human
gaagauuaaugagaaaccugcu

SEQ ID NO: 213798 - RNA, 22 nt, Human
aguuaacuaaauuaagagacaa

SEQ ID NO: 213799 - RNA, 22 nt, Human
gcaagcugugauuuaugugaau

SEQ ID NO: 213800 - RNA, 22 nt, Human
auucuucacauaagugcuguac

SEQ ID NO: 213801 - RNA, 22 nt, Human
acagcugggaaucagcugggga

SEQ ID NO: 213802 - RNA, 22 nt, Human
cagaaaccaaaugggaugggga

SEQ ID NO: 213803 - RNA, 22 nt, Human
agcugaaacuucccauuaauug

SEQ ID NO: 213804 - RNA, 22 nt, Human
accucacaagucucugucagcu

SEQ ID NO: 213805 - RNA, 21 nt, Human
gcuuccaagauggcaccuuga

SEQ ID NO: 213806 - RNA, 20 nt, Human
ggcagcucuagucgaggccc

SEQ ID NO: 213807 - RNA, 22 nt, Human
uucucaguauuacaugcuaaug

SEQ ID NO: 213808 - RNA, 22 nt, Human
gcaaggaggcugguggaggaag

SEQ ID NO: 213809 - RNA, 22 nt, Human
ugcuggagugagugguuucuua

SEQ ID NO: 213810 - RNA, 22 nt, Human
aauugcuucccaagggaggucu

SEQ ID NO: 213811 - RNA, 22 nt, Human
ucuuguuuggauuuugggcagu

SEQ ID NO: 213812 - RNA, 22 nt, Human
aacauuucagcaaauaagaaca

SEQ ID NO: 213813 - RNA, 22 nt, Human
caaggcuuucucauuauccuuu

SEQ ID NO: 213814 - RNA, 22 nt, Human
ucagaaaggccacauggugcag

SEQ ID NO: 213815 - RNA, 22 nt, Human
cuggcuucagcugccaucaaug

SEQ ID NO: 213816 - RNA, 21 nt, Human
cugaggcagcacagcuaguca

SEQ ID NO: 213817 - RNA, 22 nt, Human
aucuguacaagauuuuaugcgu

SEQ ID NO: 213818 - RNA, 22 nt, Human
ugccaggcaacugcccagccau

SEQ ID NO: 213819 - RNA, 19 nt, Human
aucugagauuauaaacaga

SEQ ID NO: 213820 - RNA, 22 nt, Human
acagguagugggcuagaucugg

SEQ ID NO: 213821 - RNA, 22 nt, Human
aagcucagugaugccuccaggg

SEQ ID NO: 213822 - RNA, 22 nt, Human
gcugcagggcucucacaggggg

SEQ ID NO: 213823 - RNA, 22 nt, Human
cucugagguuuccucacaagcu

SEQ ID NO: 213824 - RNA, 17 nt, Human
aggccucccuccaggcc

SEQ ID NO: 213825 - RNA, 22 nt, Human
acagcucuguugccagaucugc

SEQ ID NO: 213826 - RNA, 22 nt, Human
uggcacagcccggauucuauga

SEQ ID NO: 213827 - RNA, 21 nt, Human
ugggggugaggccuaggaauc

SEQ ID NO: 213828 - RNA, 22 nt, Human
guucuucagaggggaaagaacc

SEQ ID NO: 213829 - RNA, 22 nt, Human
agggccaggaacaccugaaggg

SEQ ID NO: 213830 - RNA, 22 nt, Human
cugaaggaagcagguggccugu

SEQ ID NO: 213831 - RNA, 22 nt, Human
caggcugccaaggcuggggagg

SEQ ID NO: 213832 - RNA, 22 nt, Human
gggaggcgccgaggguagcuaa

SEQ ID NO: 213833 - RNA, 22 nt, Human
uauaauuuggggaaaguggugu

SEQ ID NO: 213834 - RNA, 22 nt, Human
acguaauauaagaaaguguggu

SEQ ID NO: 213835 - RNA, 22 nt, Human
ccaggagcagauauggacauaa

SEQ ID NO: 213836 - RNA, 22 nt, Human
gcaggcugauagaggauuccau

SEQ ID NO: 213837 - RNA, 22 nt, Human
ggaucuguuuugccucugaggg

SEQ ID NO: 213838 - RNA, 22 nt, Human
ggcuggcagaagugugcuggcu

SEQ ID NO: 213839 - RNA, 22 nt, Human
cuucucucugcauaggcauggg

SEQ ID NO: 213840 - RNA, 22 nt, Human
aauaaaucaauccuauugguag

SEQ ID NO: 213841 - RNA, 22 nt, Human
gcagggcagcugaagcuaggug

SEQ ID NO: 213842 - RNA, 22 nt, Human
cccaggaggguggccucugccc

SEQ ID NO: 213843 - RNA, 22 nt, Human
uagacaggaaacauuaggaugg

SEQ ID NO: 213844 - RNA, 22 nt, Human
gaggccagcuacccaaggguca

SEQ ID NO: 213845 - RNA, 17 nt, Human
auacaguuuauuuuaca

SEQ ID NO: 213846 - RNA, 22 nt, Human
gaggccaaguuggagaccaggu

SEQ ID NO: 213847 - RNA, 17 nt, Human
cccugcacccuacucuc

SEQ ID NO: 213848 - RNA, 20 nt, Human
ugagauuuguauuauaaguc

SEQ ID NO: 213849 - RNA, 22 nt, Human
gcuggcuguaucaccuggccag

SEQ ID NO: 213850 - RNA, 22 nt, Human
ugcugugcaaaggugaugugag

SEQ ID NO: 213851 - RNA, 22 nt, Human
acagcuuuuuacuaauagauug

SEQ ID NO: 213852 - RNA, 22 nt, Human
gucaaacagccuccuguucuaa

SEQ ID NO: 213853 - RNA, 22 nt, Human
uggaaggaagccaaggaagguu

SEQ ID NO: 213854 - RNA, 22 nt, Human
guuaaagugaucuugucagguu

SEQ ID NO: 213855 - RNA, 22 nt, Human
agagccaggacugugucucacu

SEQ ID NO: 213856 - RNA, 22 nt, Human
ucaggagggcuaagacuguagc

SEQ ID NO: 213857 - RNA, 21 nt, Human
aaagauguuucuuuuccucac

SEQ ID NO: 213858 - RNA, 22 nt, Human
gucaggaucaaauugaaguuau

SEQ ID NO: 213859 - RNA, 22 nt, Human
aauguuauuucugcauaguagu

SEQ ID NO: 213860 - RNA, 22 nt, Human
uuuaauuuuccucuuccuggag

SEQ ID NO: 213861 - RNA, 22 nt, Human
uacagacaaagagcaugcggua

SEQ ID NO: 213862 - RNA, 22 nt, Human
uggcugcugcucacucagccuc

SEQ ID NO: 213863 - RNA, 22 nt, Human
uuucuuuaaaggaacucuguuu

SEQ ID NO: 213864 - RNA, 22 nt, Human
uugcucuccagaggcucacagc

SEQ ID NO: 213865 - RNA, 22 nt, Human
uuacuacagagagagcuccagu

SEQ ID NO: 213866 - RNA, 22 nt, Human
uuccuugagaugacugucuugu

SEQ ID NO: 213867 - RNA, 22 nt, Human
aagcugaaauaauaucuauguu

SEQ ID NO: 213868 - RNA, 22 nt, Human
auaagcauuucacagguguguu

SEQ ID NO: 213869 - RNA, 22 nt, Human
auaaagcuaagacuuacaugaa

SEQ ID NO: 213870 - RNA, 22 nt, Human
aguaugaauacagauuuucucu

SEQ ID NO: 213871 - RNA, 22 nt, Human
gcugccucccccauggcuggaa

SEQ ID NO: 213872 - RNA, 22 nt, Human
cuuccagaguugcguucucggu

SEQ ID NO: 213873 - RNA, 22 nt, Human
cugcagagcuugucuggaugug

SEQ ID NO: 213874 - RNA, 22 nt, Human
acauuuaaauaugccuuauauu

SEQ ID NO: 213875 - RNA, 22 nt, Human
aaacagugauguugaguguaaa

SEQ ID NO: 213876 - RNA, 22 nt, Human
gccaggcucucagugacugccc

SEQ ID NO: 213877 - RNA, 22 nt, Human
gcaggagguugagccaggacug

SEQ ID NO: 213878 - RNA, 22 nt, Human
uaccauuuacuugaaaauaaaa

SEQ ID NO: 213879 - RNA, 22 nt, Human
cugcugaaccuuugcuagauaa

SEQ ID NO: 213880 - RNA, 22 nt, Human
acuuucccacuuaauguauuua

SEQ ID NO: 213881 - RNA, 22 nt, Human
gcagggcaaacccagguguuca

SEQ ID NO: 213882 - RNA, 22 nt, Human
uccugagaaggcacagcuugca

SEQ ID NO: 213883 - RNA, 22 nt, Human
agggacuuguguccuauguaug

SEQ ID NO: 213884 - RNA, 22 nt, Human
guguccauguuguucaggguga

SEQ ID NO: 213885 - RNA, 22 nt, Human
gcauggcuauuaugaggcagaa

SEQ ID NO: 213886 - RNA, 22 nt, Human
gugagaguguuuggaaauagaa

SEQ ID NO: 213887 - RNA, 22 nt, Human
aaugauuuccccuacacagaag

SEQ ID NO: 213888 - RNA, 22 nt, Human
agauccacuauggugcugauga

SEQ ID NO: 213889 - RNA, 22 nt, Human
uuugcaauaguccuggccugua

SEQ ID NO: 213890 - RNA, 20 nt, Human
agccucugcccuucccacug

SEQ ID NO: 213891 - RNA, 22 nt, Human
cuuguccagauguuuguuaggu

SEQ ID NO: 213892 - RNA, 22 nt, Human
uaggcagcuuagguuagaagug

SEQ ID NO: 213893 - RNA, 22 nt, Human
aauauauagaaguacccguugu

SEQ ID NO: 213894 - RNA, 22 nt, Human
uucagcuugcugacugcggcag

SEQ ID NO: 213895 - RNA, 22 nt, Human
gcagucuauaaaucagcuuugc

SEQ ID NO: 213896 - RNA, 21 nt, Human
uguggcagagacaaugcuagu

SEQ ID NO: 213897 - RNA, 18 nt, Human
gggcucacacaggucauc

SEQ ID NO: 213898 - RNA, 22 nt, Human
cugugggaacacugaggacuuc

SEQ ID NO: 213899 - RNA, 22 nt, Human
uuuccaaguuguuaccuucuac

SEQ ID NO: 213900 - RNA, 23 nt, Human
agggguggucaguacccgcagug

SEQ ID NO: 213901 - RNA, 22 nt, Human
ccuccugguugcaaugaaaugg

SEQ ID NO: 213902 - RNA, 22 nt, Human
ugagcaggcucccacuucagug

SEQ ID NO: 213903 - RNA, 22 nt, Human
cugugggagcacuggggaccga

SEQ ID NO: 213904 - RNA, 22 nt, Human
ucuggcagugagcaacuugaca

SEQ ID NO: 213905 - RNA, 22 nt, Human
guggguggagacugggugcaag

SEQ ID NO: 213906 - RNA, 22 nt, Human
caaggcugagaaauucugcccu

SEQ ID NO: 213907 - RNA, 22 nt, Human
gaaggcuugauugaggaaugcc

SEQ ID NO: 213908 - RNA, 22 nt, Human
uggggaagacagcagacacugu

SEQ ID NO: 213909 - RNA, 22 nt, Human
uccaggagaaaacugacggugg

SEQ ID NO: 213910 - RNA, 22 nt, Human
acaggugugggcugggcucuga

SEQ ID NO: 213911 - RNA, 22 nt, Human
aaggucucuguugagaacauuu

SEQ ID NO: 213912 - RNA, 22 nt, Human
acacuaauuaagcugcuuuacu

SEQ ID NO: 213913 - RNA, 22 nt, Human
caggaaagguagucacaaugua

SEQ ID NO: 213914 - RNA, 22 nt, Human
ggcuucccuaaaccuuuccacu

SEQ ID NO: 213915 - RNA, 22 nt, Human
ugcuacagagccaggaagagug

SEQ ID NO: 213916 - RNA, 22 nt, Human
aaaaugacauuccagugauauu

SEQ ID NO: 213917 - RNA, 22 nt, Human
gagucaggaugcaaggggaugg

SEQ ID NO: 213918 - RNA, 22 nt, Human
gaggcaggcccugaaugaguca

SEQ ID NO: 213919 - RNA, 22 nt, Human
uguccaggaauugacccugcaa

SEQ ID NO: 213920 - RNA, 22 nt, Human
auagcacugguuuuucuugguu

SEQ ID NO: 213921 - RNA, 22 nt, Human
ccagagguccugcucacuggug

SEQ ID NO: 213922 - RNA, 22 nt, Human
agccugccucagacucaggaua

SEQ ID NO: 213923 - RNA, 22 nt, Human
augguuuauaggacagcucugu

SEQ ID NO: 213924 - RNA, 22 nt, Human
ugccugaugcaggaguaucaga

SEQ ID NO: 213925 - RNA, 22 nt, Human
ucauguacauguaagucagaaa

SEQ ID NO: 213926 - RNA, 22 nt, Human
aggcacuugcauugaugagguc

SEQ ID NO: 213927 - RNA, 22 nt, Human
ggguuaaacaugcuauaugagu

SEQ ID NO: 213928 - RNA, 22 nt, Human
auugaaaaugacauuugugccc

SEQ ID NO: 213929 - RNA, 22 nt, Human
aagcacaugaaaaugugaagcu

SEQ ID NO: 213930 - RNA, 21 nt, Human
gcagccagccgagaccaugcc

SEQ ID NO: 213931 - RNA, 22 nt, Human
uggcagaggcucugugauguug

SEQ ID NO: 213932 - RNA, 22 nt, Human
agggagguccaucccugcagag

SEQ ID NO: 213933 - RNA, 22 nt, Human
ugaacagugaucuacauguggc

SEQ ID NO: 213934 - RNA, 22 nt, Human
gagacagagaucuugcugaguc

SEQ ID NO: 213935 - RNA, 22 nt, Human
auaauaacaccugaauaggaaa

SEQ ID NO: 213936 - RNA, 21 nt, Human
uuggaacaagcagcaguuugc

SEQ ID NO: 213937 - RNA, 22 nt, Human
agaaggggagaagcuaccagga

SEQ ID NO: 213938 - RNA, 22 nt, Human
uugaaaacauuuauauuagaau

SEQ ID NO: 213939 - RNA, 22 nt, Human
cugcugugaguuuggaggucua

SEQ ID NO: 213940 - RNA, 22 nt, Human
ucugugcauuguaacaacuaaa

SEQ ID NO: 213941 - RNA, 22 nt, Human
cccagcagggucucugugucua

SEQ ID NO: 213942 - RNA, 22 nt, Human
gcagcagcucccuauccaggcu

SEQ ID NO: 213943 - RNA, 22 nt, Human
gcuguggccuggcgcagagcug

SEQ ID NO: 213944 - RNA, 22 nt, Human
auuagaagcgugaauccuuuca

SEQ ID NO: 213945 - RNA, 20 nt, Human
ucacuggccagaguagcccu

SEQ ID NO: 213946 - RNA, 22 nt, Human
ggcucugggaaauggucuuccu

SEQ ID NO: 213947 - RNA, 22 nt, Human
cuccccugagcauagacucugu

SEQ ID NO: 213948 - RNA, 22 nt, Human
ccagccccuauccucgcuccac

SEQ ID NO: 213949 - RNA, 22 nt, Human
auacaaguuaaugagaaugaca

SEQ ID NO: 213950 - RNA, 22 nt, Human
ugcauguggaccccuggugccu

SEQ ID NO: 213951 - RNA, 22 nt, Human
cuauuucaaggcccagauauga

SEQ ID NO: 213952 - RNA, 22 nt, Human
uuguauuuuuuccuggcggugg

SEQ ID NO: 213953 - RNA, 22 nt, Human
cagagcugcuucccaguuugug

SEQ ID NO: 213954 - RNA, 19 nt, Human
cugggaguucacugcugcc

SEQ ID NO: 213955 - RNA, 22 nt, Human
uggcccagggcacagcagggag

SEQ ID NO: 213956 - RNA, 22 nt, Human
agcagcagaggucagaaaggua

SEQ ID NO: 213957 - RNA, 22 nt, Human
uugggaaagccacaaauuggag

SEQ ID NO: 213958 - RNA, 22 nt, Human
ucuucauuccguagauauuuau

SEQ ID NO: 213959 - RNA, 22 nt, Human
cagcagcagauucagcgucugg

SEQ ID NO: 213960 - RNA, 22 nt, Human
cacaggaaucgucacuuagcgc

SEQ ID NO: 213961 - RNA, 22 nt, Human
aagcacagggacucaggaccgg

SEQ ID NO: 213962 - RNA, 22 nt, Human
aaauagcuuuucauaauucuca

SEQ ID NO: 213963 - RNA, 22 nt, Human
guggacagcuucuaggugccag

SEQ ID NO: 213964 - RNA, 22 nt, Human
acagaaauucaaacuggaauuu

SEQ ID NO: 213965 - RNA, 22 nt, Human
gcuccugucuuggggcacuggc

SEQ ID NO: 213966 - RNA, 22 nt, Human
aaagcauggcaugaagaacaug

SEQ ID NO: 213967 - RNA, 22 nt, Human
guuagggagucagguggcucuu

SEQ ID NO: 213968 - RNA, 22 nt, Human
cacgggcagugagcacagccug

SEQ ID NO: 213969 - RNA, 22 nt, Human
cucagagcccaggguacacccg

SEQ ID NO: 213970 - RNA, 22 nt, Human
cucuggcuucuaccuugcaguu

SEQ ID NO: 213971 - RNA, 22 nt, Human
gaagcuggggugcugagggcaa

SEQ ID NO: 213972 - RNA, 22 nt, Human
cacaugcauaccuauguguaua

SEQ ID NO: 213973 - RNA, 22 nt, Human
uggauugauaagagacaaguga

SEQ ID NO: 213974 - RNA, 22 nt, Human
uuccuggcauagagagggcaca

SEQ ID NO: 213975 - RNA, 18 nt, Human
augagaggugucagaaga

SEQ ID NO: 213976 - RNA, 22 nt, Human
cggcuucugcccauucaguccu

SEQ ID NO: 213977 - RNA, 22 nt, Human
gaaaggccacgugccaagauua

SEQ ID NO: 213978 - RNA, 22 nt, Human
cugugugugucugcagcauacu

SEQ ID NO: 213979 - RNA, 22 nt, Human
gccacagcggggccgcuagagc

SEQ ID NO: 213980 - RNA, 19 nt, Human
gggcacagccuccccccag

SEQ ID NO: 213981 - RNA, 22 nt, Human
auacacuugaccuggagugaag

SEQ ID NO: 213982 - RNA, 22 nt, Human
auuuauuggaugcuuacuuggg

SEQ ID NO: 213983 - RNA, 22 nt, Human
auuagauauuugcuguuggauu

SEQ ID NO: 213984 - RNA, 22 nt, Human
uagaaaccucagggaaaucuuu

SEQ ID NO: 213985 - RNA, 20 nt, Human
cuguggcaucugucauggug

SEQ ID NO: 213986 - RNA, 22 nt, Human
augggaggaagagaagaugucu

SEQ ID NO: 213987 - RNA, 22 nt, Human
acaguggagcucagaugaaaau

SEQ ID NO: 213988 - RNA, 22 nt, Human
uaccauuauucacaugaucuuu

SEQ ID NO: 213989 - RNA, 22 nt, Human
gaugcuggccuggccaucuggg

SEQ ID NO: 213990 - RNA, 22 nt, Human
uacauuuacagagccuucucug

SEQ ID NO: 213991 - RNA, 22 nt, Human
uuagaaacaaaauaguuauuug

SEQ ID NO: 213992 - RNA, 22 nt, Human
cucaggcugugccaccugugug

SEQ ID NO: 213993 - RNA, 22 nt, Human
ccagccacagcuuccagcuccu

SEQ ID NO: 213994 - RNA, 22 nt, Human
guugcacaguuccucaagcagg

SEQ ID NO: 213995 - RNA, 23 nt, Human
acacuuucaaauaugcacagagc

SEQ ID NO: 213996 - RNA, 22 nt, Human
aggcuuuaaguggccuacagcu

SEQ ID NO: 213997 - RNA, 22 nt, Human
auucucaaagccagagucaacg

SEQ ID NO: 213998 - RNA, 22 nt, Human
agcuucuuguagaacucaaaag

SEQ ID NO: 213999 - RNA, 22 nt, Human
uccuggcuuagguuuccagaac

SEQ ID NO: 214000 - RNA, 22 nt, Human
caaaggcugccacuguggcugu

SEQ ID NO: 214001 - RNA, 22 nt, Human
gggccaaggggagcuggaaggg

SEQ ID NO: 214002 - RNA, 22 nt, Human
uauugcauacuuaaauuuccgg

SEQ ID NO: 214003 - RNA, 22 nt, Human
auucucugugcagauuuaagac

SEQ ID NO: 214004 - RNA, 22 nt, Human
ucccuucacagaugcgauguuu

SEQ ID NO: 214005 - RNA, 22 nt, Human
gagcccugcgugucugggggca

SEQ ID NO: 214006 - RNA, 22 nt, Human
cagccacucggccauaaaggcu

SEQ ID NO: 214007 - RNA, 19 nt, Human
acccucugccacaagccuc

SEQ ID NO: 214008 - RNA, 22 nt, Human
uagcuuuuaguacuuaauggcu

SEQ ID NO: 214009 - RNA, 19 nt, Human
ugguacaaaccaagagaga

SEQ ID NO: 214010 - RNA, 22 nt, Human
ccaaggcaggggaucaaaguuu

SEQ ID NO: 214011 - RNA, 19 nt, Human
uagcccagagccuggcuac

SEQ ID NO: 214012 - RNA, 22 nt, Human
ccaucccuccuccaccagcuag

SEQ ID NO: 214013 - RNA, 22 nt, Human
cuguccuguggaccugaggacg

SEQ ID NO: 214014 - RNA, 22 nt, Human
gaaugaauucagcacauggaau

SEQ ID NO: 214015 - RNA, 19 nt, Human
gggagcugaggucuuuggu

SEQ ID NO: 214016 - RNA, 22 nt, Human
aggccauguggccccagagucu

SEQ ID NO: 214017 - RNA, 20 nt, Human
agccagccacuuccugcucc

SEQ ID NO: 214018 - RNA, 22 nt, Human
gguggcaggcuggcauuggcaa

SEQ ID NO: 214019 - RNA, 22 nt, Human
uggccugacuguccagccaggg

SEQ ID NO: 214020 - RNA, 22 nt, Human
aggcugagucaaguuaggguga

SEQ ID NO: 214021 - RNA, 22 nt, Human
uccaggccugccugguguuugc

SEQ ID NO: 214022 - RNA, 22 nt, Human
gauguacuuuaaaauacuucag

SEQ ID NO: 214023 - RNA, 22 nt, Human
ggcagggguucauuuugucuua

SEQ ID NO: 214024 - RNA, 22 nt, Human
cauggcagcaauuuuccugacu

SEQ ID NO: 214025 - RNA, 22 nt, Human
ucaguggauugacaugaaaaag

SEQ ID NO: 214026 - RNA, 22 nt, Human
acuuggcugggagaguugaaga

SEQ ID NO: 214027 - RNA, 22 nt, Human
agguggcagcaggagaugugga

SEQ ID NO: 214028 - RNA, 22 nt, Human
gcauccagucuuggcuccugga

SEQ ID NO: 214029 - RNA, 22 nt, Human
uccugaugauauugcucuuucu

SEQ ID NO: 214030 - RNA, 22 nt, Human
uugaccacugaaugguucugaa

SEQ ID NO: 214031 - RNA, 22 nt, Human
caggacagcugggccaccacca

SEQ ID NO: 214032 - RNA, 20 nt, Human
ugugccuggcuuuguccuga

SEQ ID NO: 214033 - RNA, 22 nt, Human
uuuccuuccuaaggugaagcaa

SEQ ID NO: 214034 - RNA, 22 nt, Human
aggcugaggcaagaggaucacu

SEQ ID NO: 214035 - RNA, 22 nt, Human
aggcuccugagaggcagaggcu

SEQ ID NO: 214036 - RNA, 22 nt, Human
cugcagaguggagccucggcug

SEQ ID NO: 214037 - RNA, 22 nt, Human
aggccaaauguguauaaaacau

SEQ ID NO: 214038 - RNA, 21 nt, Human
gcucagcaaaggugaggugca

SEQ ID NO: 214039 - RNA, 22 nt, Human
ccacaucuaucuuuaguaugaa

SEQ ID NO: 214040 - RNA, 22 nt, Human
augcaucuguaguguuauauga

SEQ ID NO: 214041 - RNA, 22 nt, Human
aagggcuccacuugaaucacac

SEQ ID NO: 214042 - RNA, 22 nt, Human
aaauggaagcuauuuaugauuc

SEQ ID NO: 214043 - RNA, 22 nt, Human
agcuguguuuccagaugguagc

SEQ ID NO: 214044 - RNA, 21 nt, Human
acuuggccaggcccccaccug

SEQ ID NO: 214045 - RNA, 21 nt, Human
ccuguggauuuuaaaauugga

SEQ ID NO: 214046 - RNA, 22 nt, Human
ucuuucugguuauguauagaga

SEQ ID NO: 214047 - RNA, 22 nt, Human
guggaacauguccauauacauu

SEQ ID NO: 214048 - RNA, 22 nt, Human
aguggcaguggcugggcagagc

SEQ ID NO: 214049 - RNA, 22 nt, Human
agaaggcagguuuuaaaauguc

SEQ ID NO: 214050 - RNA, 22 nt, Human
caggcuggaguacaauugugug

SEQ ID NO: 214051 - RNA, 22 nt, Human
gucuagagugcuuccuagucau

SEQ ID NO: 214052 - RNA, 22 nt, Human
uaugugaagagauuaaaaaaua

SEQ ID NO: 214053 - RNA, 22 nt, Human
uucucaggccuuugggauggga

SEQ ID NO: 214054 - RNA, 22 nt, Human
aacaauaggaccuuuauguucu

SEQ ID NO: 214055 - RNA, 22 nt, Human
uaguacaacucacuugauuuua

SEQ ID NO: 214056 - RNA, 22 nt, Human
uggcagcugaggggaggcuuug

SEQ ID NO: 214057 - RNA, 22 nt, Human
aagaaucauccugcaagagucu

SEQ ID NO: 214058 - RNA, 22 nt, Human
cuguggcuuuuccggggagccu

SEQ ID NO: 214059 - RNA, 23 nt, Human
ucuaaaauucaucauuuacguuc

SEQ ID NO: 214060 - RNA, 22 nt, Human
augcugaauugaugcgagggag

SEQ ID NO: 214061 - RNA, 22 nt, Human
aaggcuuuuguuccuauuuagu

SEQ ID NO: 214062 - RNA, 22 nt, Human
cuuuucaugagucuguuauggg

SEQ ID NO: 214063 - RNA, 22 nt, Human
gauguguccuaguacggguggg

SEQ ID NO: 214064 - RNA, 22 nt, Human
aaguuacaguuaggggugauga

SEQ ID NO: 214065 - RNA, 22 nt, Human
guucucugcgcucccggcccgg

SEQ ID NO: 214066 - RNA, 22 nt, Human
uauuucuguaugcauaaaagga

SEQ ID NO: 214067 - RNA, 22 nt, Human
caggagaggaggcuacuucuua

SEQ ID NO: 214068 - RNA, 22 nt, Human
uuuaugucccuucaaauguuua

SEQ ID NO: 214069 - RNA, 22 nt, Human
cagacucugaugcagccuugug

SEQ ID NO: 214070 - RNA, 22 nt, Human
gccgaggcucugcccagcugcu

SEQ ID NO: 214071 - RNA, 17 nt, Human
agccugccccaugcugc

SEQ ID NO: 214072 - RNA, 22 nt, Human
agaagucagccacagugggaga

SEQ ID NO: 214073 - RNA, 16 nt, Human
gacaaguggaggggcc

SEQ ID NO: 214074 - RNA, 21 nt, Human
guagggacagagaguugguga

SEQ ID NO: 214075 - RNA, 22 nt, Human
ccaggcugccgaggaaagaaag

SEQ ID NO: 214076 - RNA, 20 nt, Human
uuucaagucagcaauucuca

SEQ ID NO: 214077 - RNA, 23 nt, Human
aucuaaaguguuaaauagcuggg

SEQ ID NO: 214078 - RNA, 22 nt, Human
uggcccagcaguucugccccag

SEQ ID NO: 214079 - RNA, 22 nt, Human
auuccuugcacaucagauaguu

SEQ ID NO: 214080 - RNA, 22 nt, Human
cugagguaccuggagcaggucc

SEQ ID NO: 214081 - RNA, 22 nt, Human
ucaggaagcuacugccagcagc

SEQ ID NO: 214082 - RNA, 22 nt, Human
cccaggaacagggcucagaccc

SEQ ID NO: 214083 - RNA, 22 nt, Human
cugcagugaaaucaggaagcaa

SEQ ID NO: 214084 - RNA, 22 nt, Human
auuucuauaggaggacaguauu

SEQ ID NO: 214085 - RNA, 22 nt, Human
uggcucagcauucacuggucuu

SEQ ID NO: 214086 - RNA, 22 nt, Human
aacuuucuguuacguccccaga

SEQ ID NO: 214087 - RNA, 22 nt, Human
ugccaaauuagaguucccaggc

SEQ ID NO: 214088 - RNA, 22 nt, Human
aguuauaugugaaaacacguau

SEQ ID NO: 214089 - RNA, 22 nt, Human
uuggagaguuaauugacaguua

SEQ ID NO: 214090 - RNA, 22 nt, Human
ccucccagaugugcccaaugga

SEQ ID NO: 214091 - RNA, 22 nt, Human
uuggccuugucuggucuucucc

SEQ ID NO: 214092 - RNA, 22 nt, Human
ggcccagccggcgagucucgcg

SEQ ID NO: 214093 - RNA, 22 nt, Human
ucuagggaggcaauagcaaugu

SEQ ID NO: 214094 - RNA, 22 nt, Human
ccagcccuugaggucuguccau

SEQ ID NO: 214095 - RNA, 22 nt, Human
gcuggcuggcgggugcguccuc

SEQ ID NO: 214096 - RNA, 22 nt, Human
acagagcacugcccugugccgc

SEQ ID NO: 214097 - RNA, 22 nt, Human
cuccugugggucaccaauaggc

SEQ ID NO: 214098 - RNA, 22 nt, Human
ucaacaaauacuuaaagcagag

SEQ ID NO: 214099 - RNA, 22 nt, Human
uucugucaaauuugccauaugg

SEQ ID NO: 214100 - RNA, 22 nt, Human
cugacaagguugaauuguccca

SEQ ID NO: 214101 - RNA, 20 nt, Human
caauagaauguggagauaag

SEQ ID NO: 214102 - RNA, 22 nt, Human
ccucucaguauugaacuuuaua

SEQ ID NO: 214103 - RNA, 22 nt, Human
gaaacugaauauaagaaaggua

SEQ ID NO: 214104 - RNA, 17 nt, Human
cagggcugucugccuag

SEQ ID NO: 214105 - RNA, 22 nt, Human
auguggcacagcacaguaagag

SEQ ID NO: 214106 - RNA, 22 nt, Human
ggugagaggcagaggacagcuu

SEQ ID NO: 214107 - RNA, 22 nt, Human
caggaagcugccggugagcgag

SEQ ID NO: 214108 - RNA, 22 nt, Human
ccugugucagccccugccucca

SEQ ID NO: 214109 - RNA, 22 nt, Human
ccucaguuuucucaucuguaaa

SEQ ID NO: 214110 - RNA, 22 nt, Human
ucugaauuaaucaugccucuuu

SEQ ID NO: 214111 - RNA, 22 nt, Human
aaaggccauuacuugcuuuuag

SEQ ID NO: 214112 - RNA, 22 nt, Human
cagcacagugaccagacccacu

SEQ ID NO: 214113 - RNA, 22 nt, Human
ggcugaucaggugcaaaugcau

SEQ ID NO: 214114 - RNA, 22 nt, Human
ccucuguaguaagagaacauau

SEQ ID NO: 214115 - RNA, 22 nt, Human
uuccuggcuugucacaucuacg

SEQ ID NO: 214116 - RNA, 22 nt, Human
accaggaggccuggagcacaaa

SEQ ID NO: 214117 - RNA, 22 nt, Human
aggcucugcagaccccagcugu

SEQ ID NO: 214118 - RNA, 22 nt, Human
uagaaacauauaggauggcagg

SEQ ID NO: 214119 - RNA, 22 nt, Human
uggggcuggggaucuugagccu

SEQ ID NO: 214120 - RNA, 22 nt, Human
cagaagcugcagugaucuggga

SEQ ID NO: 214121 - RNA, 22 nt, Human
acaacauuauacauagaaagcu

SEQ ID NO: 214122 - RNA, 22 nt, Human
gaaaugcauggaucuuggcaga

SEQ ID NO: 214123 - RNA, 22 nt, Human
ucugggagccugaaagugaaug

SEQ ID NO: 214124 - RNA, 22 nt, Human
cuagagaaaaugauagcaggaa

SEQ ID NO: 214125 - RNA, 22 nt, Human
ucugggaacauuuugagggcaa

SEQ ID NO: 214126 - RNA, 19 nt, Human
agcagcagcuaccacuugu

SEQ ID NO: 214127 - RNA, 22 nt, Human
agcuccagcccuaguacagcug

SEQ ID NO: 214128 - RNA, 22 nt, Human
aguuucaauucuuuucacaaag

SEQ ID NO: 214129 - RNA, 20 nt, Human
cuguagagcacaaguggagg

SEQ ID NO: 214130 - RNA, 22 nt, Human
acuuuacaauauccugugacuu

SEQ ID NO: 214131 - RNA, 18 nt, Human
uacaucuauauaguguuu

SEQ ID NO: 214132 - RNA, 22 nt, Human
agggcuggcuaggugcguuccc

SEQ ID NO: 214133 - RNA, 18 nt, Human
ggagaagaacagaugugg

SEQ ID NO: 214134 - RNA, 22 nt, Human
ucuuugguauucacuugugaag

SEQ ID NO: 214135 - RNA, 15 nt, Human
uguggcuggcuccug

SEQ ID NO: 214136 - RNA, 22 nt, Human
acccaggcuggagugcaguagc

SEQ ID NO: 214137 - RNA, 22 nt, Human
uucuuggaaacugauuccuugu

SEQ ID NO: 214138 - RNA, 22 nt, Human
uucucuuagcacuuuguguuac

SEQ ID NO: 214139 - RNA, 22 nt, Human
acagaugaugugcacagauaga

SEQ ID NO: 214140 - RNA, 22 nt, Human
ucucugagcgcauuccuccggc

SEQ ID NO: 214141 - RNA, 22 nt, Human
auuuggcaacauuaauugaauc

SEQ ID NO: 214142 - RNA, 22 nt, Human
ugcuggcuggaucagagauugg

SEQ ID NO: 214143 - RNA, 22 nt, Human
guuauauugccaaguauauugu

SEQ ID NO: 214144 - RNA, 22 nt, Human
ucaucugagguuugaggcaguu

SEQ ID NO: 214145 - RNA, 22 nt, Human
agaugaguacagagcuguacuc

SEQ ID NO: 214146 - RNA, 22 nt, Human
cagagcaccagugggagacaag

SEQ ID NO: 214147 - RNA, 22 nt, Human
ugagcccauguagcacuuccau

SEQ ID NO: 214148 - RNA, 22 nt, Human
cagaaguugauccugcguuucc

SEQ ID NO: 214149 - RNA, 22 nt, Human
ggcagugaacagaaaugcagaa

SEQ ID NO: 214150 - RNA, 23 nt, Human
auuuacagcugugugagcaaguu

SEQ ID NO: 214151 - RNA, 22 nt, Human
gcacagaaguaaaauacaaguc

SEQ ID NO: 214152 - RNA, 22 nt, Human
caugcaaacacguaaacauuca

SEQ ID NO: 214153 - RNA, 22 nt, Human
acagggagugcaauucauauug

SEQ ID NO: 214154 - RNA, 22 nt, Human
cuggcuguguccacagaguaag

SEQ ID NO: 214155 - RNA, 22 nt, Human
uuuuuauaugaaggauagugcg

SEQ ID NO: 214156 - RNA, 22 nt, Human
gggaacuucagaaagucgcugc

SEQ ID NO: 214157 - RNA, 22 nt, Human
ucacaggcuugugaacauugca

SEQ ID NO: 214158 - RNA, 22 nt, Human
gccugcuggaggagccucaggg

SEQ ID NO: 214159 - RNA, 22 nt, Human
uuacaguaauguauuauuuaac

SEQ ID NO: 214160 - RNA, 22 nt, Human
gcaggucuagaagcugccucug

SEQ ID NO: 214161 - RNA, 22 nt, Human
ugccugugggugccaccacccu

SEQ ID NO: 214162 - RNA, 22 nt, Human
caggagcuuucuucccaaacuu

SEQ ID NO: 214163 - RNA, 22 nt, Human
caggcagcugacugucagauau

SEQ ID NO: 214164 - RNA, 22 nt, Human
ccugggaacagcagaguccugg

SEQ ID NO: 214165 - RNA, 22 nt, Human
agcugugcacacugugaaguag

SEQ ID NO: 214166 - RNA, 22 nt, Human
aggccagguggucaugcuugcu

SEQ ID NO: 214167 - RNA, 22 nt, Human
ucugccuuguugcaggcgcuau

SEQ ID NO: 214168 - RNA, 22 nt, Human
uuuuagaagugccuauccuaug

SEQ ID NO: 214169 - RNA, 22 nt, Human
ucauagaugugcugugcacaaa

SEQ ID NO: 214170 - RNA, 22 nt, Human
agugugagaacggacuaauaaa

SEQ ID NO: 214171 - RNA, 22 nt, Human
uuucuuaugggguaguccuuua

SEQ ID NO: 214172 - RNA, 22 nt, Human
auugggaugccggcugauaaga

SEQ ID NO: 214173 - RNA, 22 nt, Human
accuccccauuaggucacccac

SEQ ID NO: 214174 - RNA, 22 nt, Human
aucauaaagugcuaucugauug

SEQ ID NO: 214175 - RNA, 22 nt, Human
uaggugucuguccugggcugug

SEQ ID NO: 214176 - RNA, 22 nt, Human
cagcacuuggugccauugagug

SEQ ID NO: 214177 - RNA, 22 nt, Human
aaauuccagaaacucaguauau

SEQ ID NO: 214178 - RNA, 22 nt, Human
ucccagugggugacuggaggcu

SEQ ID NO: 214179 - RNA, 22 nt, Human
uugaaauauggauugaccuuga

SEQ ID NO: 214180 - RNA, 22 nt, Human
agaaguuuguuauguaaacaaa

SEQ ID NO: 214181 - RNA, 22 nt, Human
gcccccacaggcgggcucgggu

SEQ ID NO: 214182 - RNA, 22 nt, Human
ugcaugaacggaggguaagcug

SEQ ID NO: 214183 - RNA, 22 nt, Human
acacaaacagucuauagcacca

SEQ ID NO: 214184 - RNA, 22 nt, Human
acaguguggaaagucaacuuga

SEQ ID NO: 214185 - RNA, 23 nt, Human
ggagccuccggugugugagaggc

SEQ ID NO: 214186 - RNA, 22 nt, Human
uuugcaaaguccauugaaguua

SEQ ID NO: 214187 - RNA, 22 nt, Human
gaggaagcugcguggcauuuca

SEQ ID NO: 214188 - RNA, 22 nt, Human
caucaucugugcuggagagccu

SEQ ID NO: 214189 - RNA, 22 nt, Human
aagccagaucaaaguguccagg

SEQ ID NO: 214190 - RNA, 22 nt, Human
uuacuguagaagagaaugauuc

SEQ ID NO: 214191 - RNA, 22 nt, Human
cauggcuucuaagugauaacgu

SEQ ID NO: 214192 - RNA, 23 nt, Human
uuauugaggguguagauuggugu

SEQ ID NO: 214193 - RNA, 22 nt, Human
acuucauauggacagcaaacua

SEQ ID NO: 214194 - RNA, 22 nt, Human
uuauacacguuuauggagcuac

SEQ ID NO: 214195 - RNA, 22 nt, Human
uuuagaaugugacuguauuuga

SEQ ID NO: 214196 - RNA, 22 nt, Human
uguguucauuucucucugcugu

SEQ ID NO: 214197 - RNA, 22 nt, Human
agacagguagcaggacagauau

SEQ ID NO: 214198 - RNA, 22 nt, Human
ggggaagaggcgugauggaucc

SEQ ID NO: 214199 - RNA, 22 nt, Human
gugugcagucugcuaggcaggg

SEQ ID NO: 214200 - RNA, 20 nt, Human
cugcuuccaggcucaccccc

SEQ ID NO: 214201 - RNA, 22 nt, Human
ucaguauuccuggaaauacaag

SEQ ID NO: 214202 - RNA, 19 nt, Human
agcauccagucaugggauc

SEQ ID NO: 214203 - RNA, 22 nt, Human
aucuaagauguauugagcacuu

SEQ ID NO: 214204 - RNA, 22 nt, Human
agagaugcugcccgcagacgug

SEQ ID NO: 214205 - RNA, 22 nt, Human
uucuuucugucaugguguacug

SEQ ID NO: 214206 - RNA, 22 nt, Human
gaacuguucccucacaggcugg

SEQ ID NO: 214207 - RNA, 22 nt, Human
aaagcagaggugauaugacuua

SEQ ID NO: 214208 - RNA, 22 nt, Human
uaaaguguuuguaugcagauaa

SEQ ID NO: 214209 - RNA, 22 nt, Human
cucaaguaagaaacagaauugg

SEQ ID NO: 214210 - RNA, 22 nt, Human
cauucucaauaguagaugagua

SEQ ID NO: 214211 - RNA, 22 nt, Human
augcacaucacucugaagaaaa

SEQ ID NO: 214212 - RNA, 22 nt, Human
aggcugagccugggcguggugg

SEQ ID NO: 214213 - RNA, 22 nt, Human
uugcuuuauucacaucuauauu

SEQ ID NO: 214214 - RNA, 22 nt, Human
uuaaauagcucuuguagaagaa

SEQ ID NO: 214215 - RNA, 22 nt, Human
acucugggcuguuaggagcugu

SEQ ID NO: 214216 - RNA, 22 nt, Human
cuugccaaugguacaaacgauu

SEQ ID NO: 214217 - RNA, 22 nt, Human
uguacacaaugugcagguuugu

SEQ ID NO: 214218 - RNA, 22 nt, Human
ugcucagcuggugccagggucc

SEQ ID NO: 214219 - RNA, 22 nt, Human
cuccagcuuuagcucuccaggg

SEQ ID NO: 214220 - RNA, 22 nt, Human
cuucaaguugucugaggguggg

SEQ ID NO: 214221 - RNA, 19 nt, Human
agggaguuuauauuugcac

SEQ ID NO: 214222 - RNA, 22 nt, Human
cagggaugagagauggcacaga

SEQ ID NO: 214223 - RNA, 22 nt, Human
gagaacuucaggauuauucaag

SEQ ID NO: 214224 - RNA, 19 nt, Human
ugauucaucuaacugccuc

SEQ ID NO: 214225 - RNA, 22 nt, Human
uuacauuuuaguuaaccuguga

SEQ ID NO: 214226 - RNA, 22 nt, Human
uggggugccgacagggagggca

SEQ ID NO: 214227 - RNA, 22 nt, Human
ggccaguccccuaauccagggc

SEQ ID NO: 214228 - RNA, 22 nt, Human
gcucucuggguggugggcaaca

SEQ ID NO: 214229 - RNA, 22 nt, Human
ggguaccaagcugcuugggggc

SEQ ID NO: 214230 - RNA, 22 nt, Human
caacagagcaguugaucaggaa

SEQ ID NO: 214231 - RNA, 22 nt, Human
ggauuucuuccuuccucagaag

SEQ ID NO: 214232 - RNA, 22 nt, Human
aaggccaggaaauuaucccuau

SEQ ID NO: 214233 - RNA, 22 nt, Human
uggguagaaacaaggcuggacu

SEQ ID NO: 214234 - RNA, 16 nt, Human
cuguuacuugacuguu

SEQ ID NO: 214235 - RNA, 22 nt, Human
guagggacuuguuuuacuagua

SEQ ID NO: 214236 - RNA, 22 nt, Human
ugagcugauaggcugugagccu

SEQ ID NO: 214237 - RNA, 22 nt, Human
cugaggagucaguuccacucag

SEQ ID NO: 214238 - RNA, 22 nt, Human
aagagcagccuccaggggugga

SEQ ID NO: 214239 - RNA, 22 nt, Human
uggcacagaaaaaugcuccauu

SEQ ID NO: 214240 - RNA, 23 nt, Human
gggggccguccuggggauuauag

SEQ ID NO: 214241 - RNA, 22 nt, Human
caugcugaugaacuucuacuug

SEQ ID NO: 214242 - RNA, 20 nt, Human
ucaaagcacugccugucauc

SEQ ID NO: 214243 - RNA, 21 nt, Human
uggaucugugaucuggggcac

SEQ ID NO: 214244 - RNA, 22 nt, Human
guccagcccuugcagcuucuuu

SEQ ID NO: 214245 - RNA, 22 nt, Human
agucacaugggauuagaaccca

SEQ ID NO: 214246 - RNA, 22 nt, Human
cauuugaucuccugaauaaaca

SEQ ID NO: 214247 - RNA, 19 nt, Human
ucucagaauuggcaaucau

SEQ ID NO: 214248 - RNA, 22 nt, Human
augcaacaccccuauggaugga

SEQ ID NO: 214249 - RNA, 22 nt, Human
cuccaggacugaggacagagcu

SEQ ID NO: 214250 - RNA, 22 nt, Human
uccaaauauacagaaucuccuc

SEQ ID NO: 214251 - RNA, 22 nt, Human
accacugggcgggcagccugcu

SEQ ID NO: 214252 - RNA, 23 nt, Human
cucagcagccugcugcagauaag

SEQ ID NO: 214253 - RNA, 22 nt, Human
uaggggcagaagcggcggucca

SEQ ID NO: 214254 - RNA, 22 nt, Human
uuaaggcauucuccuacuaaua

SEQ ID NO: 214255 - RNA, 22 nt, Human
ucucagagaccugaacucccug

SEQ ID NO: 214256 - RNA, 22 nt, Human
ugauuucccucaucauaacaga

SEQ ID NO: 214257 - RNA, 22 nt, Human
gcuucaggcugaauuccuccua

SEQ ID NO: 214258 - RNA, 22 nt, Human
aagacauuccaaaguggcuaau

SEQ ID NO: 214259 - RNA, 22 nt, Human
cagcaggcguugggagaaagac

SEQ ID NO: 214260 - RNA, 22 nt, Human
ugcucuagcucauaggacucau

SEQ ID NO: 214261 - RNA, 22 nt, Human
gauucugaucuauaguguuaua

SEQ ID NO: 214262 - RNA, 22 nt, Human
aggugcuggcgccccaggagac

SEQ ID NO: 214263 - RNA, 22 nt, Human
agggccugugaauucucccugc

SEQ ID NO: 214264 - RNA, 22 nt, Human
auacagauguuaaagcaauuuc

SEQ ID NO: 214265 - RNA, 22 nt, Human
ucaggaugguccuuuaugagaa

SEQ ID NO: 214266 - RNA, 22 nt, Human
agaggccuuucuguugagugaa

SEQ ID NO: 214267 - RNA, 22 nt, Human
ugaggcucagaagugccaagug

SEQ ID NO: 214268 - RNA, 22 nt, Human
cagagcugguguuacaagucca

SEQ ID NO: 214269 - RNA, 23 nt, Human
agcuccagaacauagcacaggaa

SEQ ID NO: 214270 - RNA, 22 nt, Human
cugccugugccaaugcuccuuu

SEQ ID NO: 214271 - RNA, 22 nt, Human
gugcaggcaaaagggccaggcc

SEQ ID NO: 214272 - RNA, 22 nt, Human
aaugucaaagugcuuugcaaac

SEQ ID NO: 214273 - RNA, 22 nt, Human
uaguacaguggcauucaaacuu

SEQ ID NO: 214274 - RNA, 22 nt, Human
cucuggaaaaccacuagcagga

SEQ ID NO: 214275 - RNA, 21 nt, Human
cagagcucuuucugcuugcug

SEQ ID NO: 214276 - RNA, 22 nt, Human
guauaaaggcacagguuuucug

SEQ ID NO: 214277 - RNA, 22 nt, Human
ugccugggccuucccaccucug

SEQ ID NO: 214278 - RNA, 22 nt, Human
agugacuggugugaaguuaaau

SEQ ID NO: 214279 - RNA, 22 nt, Human
ggagcccuugcugaccuuccaa

SEQ ID NO: 214280 - RNA, 22 nt, Human
cauuguuucuggagggaucugu

SEQ ID NO: 214281 - RNA, 22 nt, Human
ccuucucuaccaugugaggaaa

SEQ ID NO: 214282 - RNA, 22 nt, Human
aagauucagccaaauuguucau

SEQ ID NO: 214283 - RNA, 22 nt, Human
cuuucaaagaccuuggcauggg

SEQ ID NO: 214284 - RNA, 22 nt, Human
ucacaugucagucuuaaacaga

SEQ ID NO: 214285 - RNA, 22 nt, Human
agaugcagaguugcuuaagcau

SEQ ID NO: 214286 - RNA, 22 nt, Human
cuauuuuaacuugauuaccucu

SEQ ID NO: 214287 - RNA, 22 nt, Human
ucuuugucugaacagggacauu

SEQ ID NO: 214288 - RNA, 22 nt, Human
uuggaacauccaggacagauau

SEQ ID NO: 214289 - RNA, 22 nt, Human
aggaagccaugguggacgucua

SEQ ID NO: 214290 - RNA, 22 nt, Human
uacaaugagcuguacaucucca

SEQ ID NO: 214291 - RNA, 20 nt, Human
cugcugcccugucagccucu

SEQ ID NO: 214292 - RNA, 23 nt, Human
ucaucuguaaguaucuguggagu

SEQ ID NO: 214293 - RNA, 22 nt, Human
cuucauuucaggcugaagaaua

SEQ ID NO: 214294 - RNA, 22 nt, Human
acuguucauauucuuagaaauu

SEQ ID NO: 214295 - RNA, 22 nt, Human
acacuaaugagaaaggaauuaa

SEQ ID NO: 214296 - RNA, 22 nt, Human
acauguuuacauuaggugauau

SEQ ID NO: 214297 - RNA, 22 nt, Human
auuagcaauugcccugugcaau

SEQ ID NO: 214298 - RNA, 22 nt, Human
guacaacaggauugauguacca

SEQ ID NO: 214299 - RNA, 22 nt, Human
cuuuuuguuguauaagcccuuu

SEQ ID NO: 214300 - RNA, 22 nt, Human
cagggcagccaggccccguggg

SEQ ID NO: 214301 - RNA, 22 nt, Human
auacacauguuauuguggaagc

SEQ ID NO: 214302 - RNA, 22 nt, Human
cccagagcugagucugauauau

SEQ ID NO: 214303 - RNA, 22 nt, Human
ucuucucucauguaggagggaa

SEQ ID NO: 214304 - RNA, 22 nt, Human
uccaggccccacugaagccccu

SEQ ID NO: 214305 - RNA, 22 nt, Human
ccaggggcucucagggugugug

SEQ ID NO: 214306 - RNA, 22 nt, Human
uuucuuuaauucucacagcaau

SEQ ID NO: 214307 - RNA, 22 nt, Human
cugguuuacccaagauuugcug

SEQ ID NO: 214308 - RNA, 22 nt, Human
uaaaagacauauaacuguagga

SEQ ID NO: 214309 - RNA, 22 nt, Human
gauggaagaaaaaugcaugucu

SEQ ID NO: 214310 - RNA, 22 nt, Human
gaacccaggcuuuugaggcugu

SEQ ID NO: 214311 - RNA, 22 nt, Human
ggagccugcgggagcucccauu

SEQ ID NO: 214312 - RNA, 22 nt, Human
ucugcagggucccagccucagc

SEQ ID NO: 214313 - RNA, 22 nt, Human
aaagacauauuucuaaguuuau

SEQ ID NO: 214314 - RNA, 22 nt, Human
aggcaccuugcgguccagugaa

SEQ ID NO: 214315 - RNA, 22 nt, Human
uguccaggugugucuaaagaga

SEQ ID NO: 214316 - RNA, 22 nt, Human
acuuuacaaacuccucacuguu

SEQ ID NO: 214317 - RNA, 19 nt, Human
aaugcauggaaguuggaga

SEQ ID NO: 214318 - RNA, 22 nt, Human
ugguggagccuaggcuaagucu

SEQ ID NO: 214319 - RNA, 22 nt, Human
gugaccagccagugcugucugu

SEQ ID NO: 214320 - RNA, 22 nt, Human
gcuuuggaaggggcugguggag

SEQ ID NO: 214321 - RNA, 22 nt, Human
auguguccaaggccacaauagc

SEQ ID NO: 214322 - RNA, 22 nt, Human
gcugagggcauguguggcgacu

SEQ ID NO: 214323 - RNA, 22 nt, Human
guccacagagggcugggcaggc

SEQ ID NO: 214324 - RNA, 20 nt, Human
aacuuguucuaccuguuuca

SEQ ID NO: 214325 - RNA, 22 nt, Human
uaacuuugauaagaaucaggga

SEQ ID NO: 214326 - RNA, 22 nt, Human
ugccuggguccaggccaagccu

SEQ ID NO: 214327 - RNA, 22 nt, Human
ggucucagcuggaguccuuggu

SEQ ID NO: 214328 - RNA, 22 nt, Human
gagaguccuuaguuugcaggua

SEQ ID NO: 214329 - RNA, 22 nt, Human
ugggcucagggaagcuuggccu

SEQ ID NO: 214330 - RNA, 23 nt, Human
uccuccaaucucauggcccuuaa

SEQ ID NO: 214331 - RNA, 22 nt, Human
cugggguggagauuggcaaucu

SEQ ID NO: 214332 - RNA, 22 nt, Human
ggguccagggccaguggcugag

SEQ ID NO: 214333 - RNA, 22 nt, Human
aauguacaaaccuucuuuguag

SEQ ID NO: 214334 - RNA, 22 nt, Human
uggcugccgacuggcucuuggc

SEQ ID NO: 214335 - RNA, 22 nt, Human
ugaggcucaagaaucugcauuu

SEQ ID NO: 214336 - RNA, 22 nt, Human
ugaaaggugacauuucuuggau

SEQ ID NO: 214337 - RNA, 22 nt, Human
ccuggcucaggcacgcauggcu

SEQ ID NO: 214338 - RNA, 22 nt, Human
aagucuuacagacaagcugaag

SEQ ID NO: 214339 - RNA, 22 nt, Human
gaagacaccuacugucauuucu

SEQ ID NO: 214340 - RNA, 23 nt, Human
uuguuucuuuguauugucucuau

SEQ ID NO: 214341 - RNA, 22 nt, Human
ugaugaauaaacuugagaguca

SEQ ID NO: 214342 - RNA, 22 nt, Human
caagauuuggcaacuuugucau

SEQ ID NO: 214343 - RNA, 22 nt, Human
ucuuuuauuaggcugaaauggg

SEQ ID NO: 214344 - RNA, 22 nt, Human
gcagcuuuaaucugaauaagua

SEQ ID NO: 214345 - RNA, 22 nt, Human
agggugcaaaagcaaggacagu

SEQ ID NO: 214346 - RNA, 21 nt, Human
acaugucucuaaucucaguga

SEQ ID NO: 214347 - RNA, 22 nt, Human
cacagguagaugccaugcagca

SEQ ID NO: 214348 - RNA, 22 nt, Human
aaguuuuccuguguccaagaug

SEQ ID NO: 214349 - RNA, 22 nt, Human
ggaaucagaugaggggcagagc

SEQ ID NO: 214350 - RNA, 22 nt, Human
uuguacaaguauuaugugaaca

SEQ ID NO: 214351 - RNA, 22 nt, Human
gcacagccagcaucugagggau

SEQ ID NO: 214352 - RNA, 22 nt, Human
aguauaauuagauaucaaaagu

SEQ ID NO: 214353 - RNA, 22 nt, Human
agauguggaaagaaguuagaag

SEQ ID NO: 214354 - RNA, 22 nt, Human
agagcccaucaguggcagugga

SEQ ID NO: 214355 - RNA, 22 nt, Human
ucucaggacuuugggaagcuca

SEQ ID NO: 214356 - RNA, 22 nt, Human
aaagugguuuuucagacuuuga

SEQ ID NO: 214357 - RNA, 22 nt, Human
cuuuacagcuuagugguaugga

SEQ ID NO: 214358 - RNA, 22 nt, Human
ucugcccuaauucagugcuuag

SEQ ID NO: 214359 - RNA, 22 nt, Human
caggaagcugagcugcacugca

SEQ ID NO: 214360 - RNA, 22 nt, Human
caucaaagggccuguggugcag

SEQ ID NO: 214361 - RNA, 22 nt, Human
ggucuccaaagcugcauugaug

SEQ ID NO: 214362 - RNA, 22 nt, Human
aucagagacaaaaccagcacuu

SEQ ID NO: 214363 - RNA, 22 nt, Human
ucugggauuuuauagacaugcu

SEQ ID NO: 214364 - RNA, 16 nt, Human
uccaggcauaucugag

SEQ ID NO: 214365 - RNA, 22 nt, Human
ccagcuggagccaagguggacu

SEQ ID NO: 214366 - RNA, 23 nt, Human
gaauacaaagcagaugguccagc

SEQ ID NO: 214367 - RNA, 22 nt, Human
aaacugccaaaagaccuuggau

SEQ ID NO: 214368 - RNA, 22 nt, Human
gcuacagacugagcauggcucu

SEQ ID NO: 214369 - RNA, 21 nt, Human
uaggagcugauggggaaguag

SEQ ID NO: 214370 - RNA, 22 nt, Human
uaggcagauguuaacaggaaaa

SEQ ID NO: 214371 - RNA, 22 nt, Human
aggccaggcgagacacccggcu

SEQ ID NO: 214372 - RNA, 22 nt, Human
uuuggcuagccaagaaacaaaa

SEQ ID NO: 214373 - RNA, 22 nt, Human
augaggucaucuugaaguaggg

SEQ ID NO: 214374 - RNA, 22 nt, Human
cugauaggauuuaguuucuguu

SEQ ID NO: 214375 - RNA, 22 nt, Human
ccaggcugugcuuuucauaaau

SEQ ID NO: 214376 - RNA, 22 nt, Human
gggugcugggaggcugacaucu

SEQ ID NO: 214377 - RNA, 23 nt, Human
uggagcugggcagcugggaaagu

SEQ ID NO: 214378 - RNA, 22 nt, Human
cagagucucugggaggcugggu

SEQ ID NO: 214379 - RNA, 22 nt, Human
cucugaagaugguaccagcuuu

SEQ ID NO: 214380 - RNA, 19 nt, Human
aggcaugggaagagaaguc

SEQ ID NO: 214381 - RNA, 22 nt, Human
guggcccucagcaguugccaag

SEQ ID NO: 214382 - RNA, 22 nt, Human
cugugccacugcccugccacgc

SEQ ID NO: 214383 - RNA, 22 nt, Human
cccuggugguacggcacuggca

SEQ ID NO: 214384 - RNA, 22 nt, Human
gguguccucacuauagcaaguc

SEQ ID NO: 214385 - RNA, 22 nt, Human
acugggccuggauuggcguguc

SEQ ID NO: 214386 - RNA, 17 nt, Human
ugaguggccgggggaca

SEQ ID NO: 214387 - RNA, 22 nt, Human
acaacaguagccuuuacaaggc

SEQ ID NO: 214388 - RNA, 22 nt, Human
aagcacaggaucuugaggagcg

SEQ ID NO: 214389 - RNA, 22 nt, Human
ucagggaagagagaucuccuag

SEQ ID NO: 214390 - RNA, 22 nt, Human
uuacugcaacauaauguagucu

SEQ ID NO: 214391 - RNA, 22 nt, Human
gcuggcugccugguuaugccuu

SEQ ID NO: 214392 - RNA, 22 nt, Human
ucugccuuucucaagggcaaaa

SEQ ID NO: 214393 - RNA, 22 nt, Human
aaggucuguauuagaguuucau

SEQ ID NO: 214394 - RNA, 22 nt, Human
cagucagaggucuucuaaaaca

SEQ ID NO: 214395 - RNA, 22 nt, Human
gccagugggacccgcugugggc

SEQ ID NO: 214396 - RNA, 22 nt, Human
acugccuggccuggccucacug

SEQ ID NO: 214397 - RNA, 22 nt, Human
aguggugaugacagcaguuucu

SEQ ID NO: 214398 - RNA, 22 nt, Human
aacagcaauagcacuauucauu

SEQ ID NO: 214399 - RNA, 16 nt, Human
acuuccaggggagccc

SEQ ID NO: 214400 - RNA, 22 nt, Human
aaagccauaucuauucuauucu

SEQ ID NO: 214401 - RNA, 22 nt, Human
gaacauuuauauuagauagcua

SEQ ID NO: 214402 - RNA, 22 nt, Human
aaacaguggccaauucuggaga

SEQ ID NO: 214403 - RNA, 22 nt, Human
ucaaggcuauuaauucugugag

SEQ ID NO: 214404 - RNA, 22 nt, Human
gcauccaggcugccccucugcg

SEQ ID NO: 214405 - RNA, 22 nt, Human
ugggcucucacacauguucuga

SEQ ID NO: 214406 - RNA, 22 nt, Human
agccucugcuggcccuggcacu

SEQ ID NO: 214407 - RNA, 22 nt, Human
cugggccugagcucugaagagu

SEQ ID NO: 214408 - RNA, 22 nt, Human
auaaaaguaggaccaacuuaca

SEQ ID NO: 214409 - RNA, 22 nt, Human
uuaaauauuuucagcaggguca

SEQ ID NO: 214410 - RNA, 22 nt, Human
aaguggcagaauaguggcagga

SEQ ID NO: 214411 - RNA, 22 nt, Human
ggcuccuguccuccuggagcuc

SEQ ID NO: 214412 - RNA, 22 nt, Human
aaaugauugucaaaguucuguu

SEQ ID NO: 214413 - RNA, 22 nt, Human
aaaagucugcucucauuucaga

SEQ ID NO: 214414 - RNA, 22 nt, Human
aaagacauggcaagagaugggg

SEQ ID NO: 214415 - RNA, 22 nt, Human
uucucuggcgcgcugugcuaug

SEQ ID NO: 214416 - RNA, 22 nt, Human
gcaggaguggagaccaugggga

SEQ ID NO: 214417 - RNA, 22 nt, Human
gcauucuugagguguggacuca

SEQ ID NO: 214418 - RNA, 22 nt, Human
cuccuggggcacuuagaagcaa

SEQ ID NO: 214419 - RNA, 23 nt, Human
ugugaagguggguccaagggcug

SEQ ID NO: 214420 - RNA, 22 nt, Human
cugagcagauguugcccagaag

SEQ ID NO: 214421 - RNA, 22 nt, Human
acagucaaucagaacagcaugu

SEQ ID NO: 214422 - RNA, 22 nt, Human
acaggccuagcuaaugcuuucc

SEQ ID NO: 214423 - RNA, 22 nt, Human
ugggccaguucuuuacucgucc

SEQ ID NO: 214424 - RNA, 18 nt, Human
cuucagugacagucuggc

SEQ ID NO: 214425 - RNA, 22 nt, Human
guacauuuugagguuaaaacaa

SEQ ID NO: 214426 - RNA, 22 nt, Human
aggccuguuccuuccugggcac

SEQ ID NO: 214427 - RNA, 22 nt, Human
cccagaggugacaucccauucu

SEQ ID NO: 214428 - RNA, 22 nt, Human
uuuauauagagauuugugcaug

SEQ ID NO: 214429 - RNA, 22 nt, Human
uucuuaaagaggcaaaacacag

SEQ ID NO: 214430 - RNA, 22 nt, Human
cucugcccucgcacaucugcca

SEQ ID NO: 214431 - RNA, 22 nt, Human
ugucuuuaaaauuaaacacauc

SEQ ID NO: 214432 - RNA, 22 nt, Human
ucacauuuguucuugaaucuaa

SEQ ID NO: 214433 - RNA, 21 nt, Human
ugacagguauuuaucuggaaa

SEQ ID NO: 214434 - RNA, 22 nt, Human
cugcaggagcaagccugggaga

SEQ ID NO: 214435 - RNA, 19 nt, Human
ucaaaugccaaugucacag

SEQ ID NO: 214436 - RNA, 22 nt, Human
gcuucacagaaucaauaguugg

SEQ ID NO: 214437 - RNA, 22 nt, Human
cauucucuugacaggacagccc

SEQ ID NO: 214438 - RNA, 22 nt, Human
gcucagaggguuuuggccaagu

SEQ ID NO: 214439 - RNA, 22 nt, Human
accaaucuccuauuuuguuuca

SEQ ID NO: 214440 - RNA, 22 nt, Human
agcuggaggauaacucacuucu

SEQ ID NO: 214441 - RNA, 22 nt, Human
aggcugaaaacgagauggcaau

SEQ ID NO: 214442 - RNA, 22 nt, Human
gcugaccauuaggaggacgaua

SEQ ID NO: 214443 - RNA, 19 nt, Human
aagcaagcuuugagugggu

SEQ ID NO: 214444 - RNA, 22 nt, Human
aauuacagucggagcagcacug

SEQ ID NO: 214445 - RNA, 22 nt, Human
uuugacaugcaaagcacuuuag

SEQ ID NO: 214446 - RNA, 22 nt, Human
uaauauauuucugcuaagcuca

SEQ ID NO: 214447 - RNA, 22 nt, Human
ccagcugucacucagaaaggcc

SEQ ID NO: 214448 - RNA, 22 nt, Human
uuuauuauccaguguugucaug

SEQ ID NO: 214449 - RNA, 22 nt, Human
agggccugacacccuugccagc

SEQ ID NO: 214450 - RNA, 22 nt, Human
cuccaggaaagucaggcuuaga

SEQ ID NO: 214451 - RNA, 22 nt, Human
acaguuuguguuggccaugggc

SEQ ID NO: 214452 - RNA, 22 nt, Human
auggccaagaucacagacuuca

SEQ ID NO: 214453 - RNA, 22 nt, Human
agcuggcuucucugcagacauu

SEQ ID NO: 214454 - RNA, 19 nt, Human
aggcaggugcagagguccc

SEQ ID NO: 214455 - RNA, 23 nt, Human
uuccugagugcuggagagagugc

SEQ ID NO: 214456 - RNA, 22 nt, Human
ucugccuuccccauaaucugau

SEQ ID NO: 214457 - RNA, 20 nt, Human
uuggaacaguggaucagcag

SEQ ID NO: 214458 - RNA, 22 nt, Human
gccauugggcuguaguuuuuug

SEQ ID NO: 214459 - RNA, 20 nt, Human
auuguuucauuuaauguaca

SEQ ID NO: 214460 - RNA, 22 nt, Human
agcagggcagugcuucagcucu

SEQ ID NO: 214461 - RNA, 18 nt, Human
ugucauaauauaucaccu

SEQ ID NO: 214462 - RNA, 22 nt, Human
cacaaggacuggauggaguggg

SEQ ID NO: 214463 - RNA, 22 nt, Human
uuauacaguuuauacuuagaau

SEQ ID NO: 214464 - RNA, 23 nt, Human
agucuuacugucccagaacaggg

SEQ ID NO: 214465 - RNA, 22 nt, Human
agggaggauaguagucaguuua

SEQ ID NO: 214466 - RNA, 22 nt, Human
gcguggcuccuaacagaucuga

SEQ ID NO: 214467 - RNA, 22 nt, Human
acccagggcucaagcguaggca

SEQ ID NO: 214468 - RNA, 22 nt, Human
gcucagcuugggagcgcccggu

SEQ ID NO: 214469 - RNA, 22 nt, Human
uucaguuccauuucaggugggu

SEQ ID NO: 214470 - RNA, 22 nt, Human
gcacacaguacuauaugcuaca

SEQ ID NO: 214471 - RNA, 22 nt, Human
gggaucugaguugucaggaagg

SEQ ID NO: 214472 - RNA, 22 nt, Human
ccagugcaccaagaggccuaga

SEQ ID NO: 214473 - RNA, 22 nt, Human
cacuuagauacuagaucacaaa

SEQ ID NO: 214474 - RNA, 22 nt, Human
cuguaaaacugcuuaaguaugc

SEQ ID NO: 214475 - RNA, 22 nt, Human
uacagaaauugccaccagcucu

SEQ ID NO: 214476 - RNA, 22 nt, Human
caguuaaauucuccaguuacca

SEQ ID NO: 214477 - RNA, 22 nt, Human
ggcuauuucauuuaguacuagg

SEQ ID NO: 214478 - RNA, 20 nt, Human
ucugcaccuccuuccaauca

SEQ ID NO: 214479 - RNA, 22 nt, Human
acaguaacucuuuuacccuccu

SEQ ID NO: 214480 - RNA, 19 nt, Human
gagguucacgcgcuggaug

SEQ ID NO: 214481 - RNA, 22 nt, Human
ugugcauguauugauuuguacc

SEQ ID NO: 214482 - RNA, 22 nt, Human
uagauaaauuagaaaguuuacu

SEQ ID NO: 214483 - RNA, 14 nt, Human
agcugcaagcaucc

SEQ ID NO: 214484 - RNA, 22 nt, Human
uucaguguuuguagagauaacu

SEQ ID NO: 214485 - RNA, 22 nt, Human
agaagucaaugaugagagugcu

SEQ ID NO: 214486 - RNA, 22 nt, Human
ccugcugucugcuguguuaagc

SEQ ID NO: 214487 - RNA, 22 nt, Human
gaguaggguuuccagguuagag

SEQ ID NO: 214488 - RNA, 22 nt, Human
cucuguccuaugcuugauagaa

SEQ ID NO: 214489 - RNA, 22 nt, Human
ucuguucauguugggcuuuucc

SEQ ID NO: 214490 - RNA, 22 nt, Human
aguccaggcaaguuguugugua

SEQ ID NO: 214491 - RNA, 22 nt, Human
ucaggaugaccacgagccucua

SEQ ID NO: 214492 - RNA, 22 nt, Human
agggcaguucagccacaggcuc

SEQ ID NO: 214493 - RNA, 22 nt, Human
agcucaggucucaggagguguc

SEQ ID NO: 214494 - RNA, 22 nt, Human
uguagaaagaauauguuucaua

SEQ ID NO: 214495 - RNA, 22 nt, Human
cugugugcuguuagggagcugc

SEQ ID NO: 214496 - RNA, 22 nt, Human
gcagugggaagguuggcacaug

SEQ ID NO: 214497 - RNA, 22 nt, Human
caaugauugcuauuuacauaaa

SEQ ID NO: 214498 - RNA, 19 nt, Human
ugucuggaagagcugcagg

SEQ ID NO: 214499 - RNA, 22 nt, Human
uguuuauagggucugucacuug

SEQ ID NO: 214500 - RNA, 21 nt, Human
uuuagggaggauauuuaacuu

SEQ ID NO: 214501 - RNA, 23 nt, Human
uggcugagguccagguaguuuca

SEQ ID NO: 214502 - RNA, 22 nt, Human
uucagacaguaagaaagagguu

SEQ ID NO: 214503 - RNA, 22 nt, Human
cuagggcaaugacucaaagcgg

SEQ ID NO: 214504 - RNA, 22 nt, Human
uuuaucuguuguacauuuaugc

SEQ ID NO: 214505 - RNA, 22 nt, Human
caggcagcucuaauggaaagug

SEQ ID NO: 214506 - RNA, 22 nt, Human
aggcagccuauggggagcucag

SEQ ID NO: 214507 - RNA, 22 nt, Human
cucagagcacuuuugaaagcuc

SEQ ID NO: 214508 - RNA, 22 nt, Human
aacagcuucaucacauggcaua

SEQ ID NO: 214509 - RNA, 22 nt, Human
augguauacaauuauggacugu

SEQ ID NO: 214510 - RNA, 22 nt, Human
agagccagcaagugaauaguga

SEQ ID NO: 214511 - RNA, 22 nt, Human
aacaggcucacucugacuucua

SEQ ID NO: 214512 - RNA, 22 nt, Human
cauaagaaauuuaacagaacuu

SEQ ID NO: 214513 - RNA, 22 nt, Human
gcccaggcuggagugcaguagc

SEQ ID NO: 214514 - RNA, 22 nt, Human
ccugcccugucacuggcuaggg

SEQ ID NO: 214515 - RNA, 22 nt, Human
ugagccaggcacugcuccugga

SEQ ID NO: 214516 - RNA, 22 nt, Human
augcaacagcugggaauaugua

SEQ ID NO: 214517 - RNA, 22 nt, Human
ccaguccauggauucccaaggu

SEQ ID NO: 214518 - RNA, 20 nt, Human
aggccaggaaauguaguucu

SEQ ID NO: 214519 - RNA, 22 nt, Human
uggcugagagucauccugugug

SEQ ID NO: 214520 - RNA, 22 nt, Human
uauacugaucacugaggucauc

SEQ ID NO: 214521 - RNA, 22 nt, Human
auuguggugucaguuauaggca

SEQ ID NO: 214522 - RNA, 22 nt, Human
auuagcagugccuugccugucu

SEQ ID NO: 214523 - RNA, 22 nt, Human
aaagugcaaggauuacaggcau

SEQ ID NO: 214524 - RNA, 22 nt, Human
gagcaguggugguguguuagag

SEQ ID NO: 214525 - RNA, 22 nt, Human
cugcccuguggcucugagucau

SEQ ID NO: 214526 - RNA, 19 nt, Human
ucccaagauuucuguauca

SEQ ID NO: 214527 - RNA, 22 nt, Human
uggaagaauguuugccuuauaa

SEQ ID NO: 214528 - RNA, 22 nt, Human
cagggagcggagucccaugccu

SEQ ID NO: 214529 - RNA, 22 nt, Human
cacagguguuuguuauacucag

SEQ ID NO: 214530 - RNA, 22 nt, Human
cagcagcaguggcugcagaaca

SEQ ID NO: 214531 - RNA, 22 nt, Human
gcugcuggaacaaaucacccca

SEQ ID NO: 214532 - RNA, 22 nt, Human
gcccaagcuccgccuccugucg

SEQ ID NO: 214533 - RNA, 22 nt, Human
gauucuuuagcccagaaaguua

SEQ ID NO: 214534 - RNA, 19 nt, Human
uuggggugaaugccagaca

SEQ ID NO: 214535 - RNA, 22 nt, Human
uggagcagugguccuggagaug

SEQ ID NO: 214536 - RNA, 19 nt, Human
ugcuggaacaucaguagcu

SEQ ID NO: 214537 - RNA, 22 nt, Human
aguacauacuucaaauguacuu

SEQ ID NO: 214538 - RNA, 22 nt, Human
agggcccucuggcaggccaggc

SEQ ID NO: 214539 - RNA, 22 nt, Human
auguggcugccaccugccugaa

SEQ ID NO: 214540 - RNA, 22 nt, Human
cuuccucucuugcccauaagag

SEQ ID NO: 214541 - RNA, 22 nt, Human
agcuacaguugcccucagcagg

SEQ ID NO: 214542 - RNA, 22 nt, Human
uauuugaaaguguacaaaaacu

SEQ ID NO: 214543 - RNA, 22 nt, Human
cauucccugucucuucaauccu

SEQ ID NO: 214544 - RNA, 22 nt, Human
ugacagggacaguggagaugga

SEQ ID NO: 214545 - RNA, 22 nt, Human
cugaccaacauggugaaaccuu

SEQ ID NO: 214546 - RNA, 22 nt, Human
cugagcacagaaauaagauauu

SEQ ID NO: 214547 - RNA, 21 nt, Human
gugcucugggcagcagagggc

SEQ ID NO: 214548 - RNA, 22 nt, Human
cucccaagcugugcugaacugu

SEQ ID NO: 214549 - RNA, 22 nt, Human
guaacagaaagucaugcucauu

SEQ ID NO: 214550 - RNA, 22 nt, Human
acuucaaacaauuaacagagaa

SEQ ID NO: 214551 - RNA, 22 nt, Human
acaucagagggcucacaugauc

SEQ ID NO: 214552 - RNA, 22 nt, Human
aggcucuuugagacuaccugga

SEQ ID NO: 214553 - RNA, 22 nt, Human
ggcaagauccaaggggcuagga

SEQ ID NO: 214554 - RNA, 22 nt, Human
cucccuggugacucccaaagcu

SEQ ID NO: 214555 - RNA, 22 nt, Human
ucugcuguucucaugcugauuu

SEQ ID NO: 214556 - RNA, 22 nt, Human
auccucagaccucagcaaagcc

SEQ ID NO: 214557 - RNA, 22 nt, Human
ggggaggcugaugugggcaaag

SEQ ID NO: 214558 - RNA, 22 nt, Human
cucccagaaaauucucagacaa

SEQ ID NO: 214559 - RNA, 22 nt, Human
cugggucuccggcagccucggg

SEQ ID NO: 214560 - RNA, 22 nt, Human
cuuccuggaugagcaggcugau

SEQ ID NO: 214561 - RNA, 22 nt, Human
uuuacuucugcauuuccccuag

SEQ ID NO: 214562 - RNA, 22 nt, Human
uagagcuagcuucaaaaugcga

SEQ ID NO: 214563 - RNA, 22 nt, Human
ugguuccaagauggcugccaca

SEQ ID NO: 214564 - RNA, 22 nt, Human
uagguauacagagauuucuggg

SEQ ID NO: 214565 - RNA, 23 nt, Human
aagaacugcgaauggagaaagua

SEQ ID NO: 214566 - RNA, 22 nt, Human
uucaacaaggcugucaaaaguu

SEQ ID NO: 214567 - RNA, 22 nt, Human
cuucugagauguuguuuuacag

SEQ ID NO: 214568 - RNA, 22 nt, Human
acucuggagauggaugucagga

SEQ ID NO: 214569 - RNA, 22 nt, Human
cugcugagaugccaggagcucu

SEQ ID NO: 214570 - RNA, 22 nt, Human
ucacaugucacaaaacacugcc

SEQ ID NO: 214571 - RNA, 22 nt, Human
gacccaggguggucaccugaaa

SEQ ID NO: 214572 - RNA, 22 nt, Human
gccccagccuaguuuucuuuca

SEQ ID NO: 214573 - RNA, 23 nt, Human
ccuggcuggauucucugcauuca

SEQ ID NO: 214574 - RNA, 22 nt, Human
gcccaggaguugguggcugcag

SEQ ID NO: 214575 - RNA, 22 nt, Human
cuguuacuucaaucuucucccg

SEQ ID NO: 214576 - RNA, 22 nt, Human
caggcugaggcaguaggguuug

SEQ ID NO: 214577 - RNA, 22 nt, Human
ugggucuccaguucagggcagg

SEQ ID NO: 214578 - RNA, 20 nt, Human
gagccugggaagucuaaggu

SEQ ID NO: 214579 - RNA, 17 nt, Human
ucuaggagagcagagcu

SEQ ID NO: 214580 - RNA, 22 nt, Human
auguguuuaccaggggaacaug

SEQ ID NO: 214581 - RNA, 22 nt, Human
auccauucuaugugaaaugucc

SEQ ID NO: 214582 - RNA, 22 nt, Human
auuuggaagaaaucugucacag

SEQ ID NO: 214583 - RNA, 22 nt, Human
aacuuucugaaaagcuugauca

SEQ ID NO: 214584 - RNA, 22 nt, Human
cugaaaagugucuguugaguua

SEQ ID NO: 214585 - RNA, 22 nt, Human
caucuuuguuuuggauauaauc

SEQ ID NO: 214586 - RNA, 22 nt, Human
cagagcccauccuauacucucc

SEQ ID NO: 214587 - RNA, 22 nt, Human
ucucagcaaggaaagaggcagg

SEQ ID NO: 214588 - RNA, 23 nt, Human
uugcagggauggaguucaaaaug

SEQ ID NO: 214589 - RNA, 22 nt, Human
ggccacgugaccucuggcuccu

SEQ ID NO: 214590 - RNA, 22 nt, Human
caugucccaaaugcaggcaaag

SEQ ID NO: 214591 - RNA, 22 nt, Human
caugaaaaauuuacuguuaaca

SEQ ID NO: 214592 - RNA, 22 nt, Human
ggggagaauaaaucagauuuua

SEQ ID NO: 214593 - RNA, 22 nt, Human
uacagaaagaccucucgggaaa

SEQ ID NO: 214594 - RNA, 22 nt, Human
cuggcaccaggcaugcugggag

SEQ ID NO: 214595 - RNA, 22 nt, Human
acagaagugucuuuuucauuca

SEQ ID NO: 214596 - RNA, 22 nt, Human
auggccuggccagagcucugcu

SEQ ID NO: 214597 - RNA, 22 nt, Human
ucugaggaauucugcagugaga

SEQ ID NO: 214598 - RNA, 22 nt, Human
acaugaaugcagccauaacacu

SEQ ID NO: 214599 - RNA, 22 nt, Human
augcaaaauuaccauucuguuc

SEQ ID NO: 214600 - RNA, 22 nt, Human
cagcccugaguuagcccacgga

SEQ ID NO: 214601 - RNA, 22 nt, Human
auaaaagucugcuuauuugggc

SEQ ID NO: 214602 - RNA, 22 nt, Human
agauuucaaugugagcauuagu

SEQ ID NO: 214603 - RNA, 22 nt, Human
cagccucucuguaucucaggau

SEQ ID NO: 214604 - RNA, 22 nt, Human
auauacuuccccauuauggggg

SEQ ID NO: 214605 - RNA, 22 nt, Human
uguggcagggauacugaggcag

SEQ ID NO: 214606 - RNA, 22 nt, Human
cccagaggguggagguugcagu

SEQ ID NO: 214607 - RNA, 22 nt, Human
cuauuguuauaauuguugacau

SEQ ID NO: 214608 - RNA, 22 nt, Human
ggagggaaugucuagcauucuu

SEQ ID NO: 214609 - RNA, 22 nt, Human
agcagcuugggucucuccugcu

SEQ ID NO: 214610 - RNA, 22 nt, Human
gggaccuggggacuccuuguuc

SEQ ID NO: 214611 - RNA, 22 nt, Human
ugggcugcugcggugcucuugg

SEQ ID NO: 214612 - RNA, 22 nt, Human
agucuggugguauuuuguagug

SEQ ID NO: 214613 - RNA, 22 nt, Human
ggugggagagcuugcuuugaug

SEQ ID NO: 214614 - RNA, 22 nt, Human
uggguccucuggagcagcagca

SEQ ID NO: 214615 - RNA, 22 nt, Human
cucuguguucagccuagcagaa

SEQ ID NO: 214616 - RNA, 22 nt, Human
gagcugugcuuauaccaauuca

SEQ ID NO: 214617 - RNA, 22 nt, Human
ucagccuggugauuccucuguc

SEQ ID NO: 214618 - RNA, 22 nt, Human
gcuggcuccucuguccucacgg

SEQ ID NO: 214619 - RNA, 22 nt, Human
gcagggcuuagaaaugguggcu

SEQ ID NO: 214620 - RNA, 19 nt, Human
ugcagccacgugagagacu

SEQ ID NO: 214621 - RNA, 21 nt, Human
ccaggaaggacugagcucccu

SEQ ID NO: 214622 - RNA, 22 nt, Human
cuggcuuccaccauggccccug

SEQ ID NO: 214623 - RNA, 22 nt, Human
gaggcagaaguugcagugagca

SEQ ID NO: 214624 - RNA, 22 nt, Human
gcagaggcucuuuaaugcuuag

SEQ ID NO: 214625 - RNA, 22 nt, Human
acagguggaggcuuuaggaggu

SEQ ID NO: 214626 - RNA, 22 nt, Human
cuggucccuguagguauuugac

SEQ ID NO: 214627 - RNA, 22 nt, Human
cugaggcacagugaacuucucc

SEQ ID NO: 214628 - RNA, 22 nt, Human
acaggcagcaaaaucagccuca

SEQ ID NO: 214629 - RNA, 22 nt, Human
ugugcaacaugagacagaacag

SEQ ID NO: 214630 - RNA, 22 nt, Human
guuauugagacauagaguuaug

SEQ ID NO: 214631 - RNA, 22 nt, Human
gaaagaagcuuuagauggcuau

SEQ ID NO: 214632 - RNA, 22 nt, Human
ucacaucuuggauuacaauuuu

SEQ ID NO: 214633 - RNA, 22 nt, Human
ccucgagcagcgaccccuccac

SEQ ID NO: 214634 - RNA, 22 nt, Human
gccucugcucucagguagccuc

SEQ ID NO: 214635 - RNA, 22 nt, Human
ugagauguaagguaugcuuacu

SEQ ID NO: 214636 - RNA, 22 nt, Human
cacuugaaugaaagagacuccu

SEQ ID NO: 214637 - RNA, 22 nt, Human
ccugguugagggagguguggac

SEQ ID NO: 214638 - RNA, 21 nt, Human
caaaaggauaggaaauuaggg

SEQ ID NO: 214639 - RNA, 22 nt, Human
uuauugagcacauaguaugugg

SEQ ID NO: 214640 - RNA, 22 nt, Human
agugugggcccccagguuagcc

SEQ ID NO: 214641 - RNA, 22 nt, Human
cuggagaccucuccugagagug

SEQ ID NO: 214642 - RNA, 22 nt, Human
augauauacuuccuagaacagu

SEQ ID NO: 214643 - RNA, 22 nt, Human
cagggaugaccagagggaugug

SEQ ID NO: 214644 - RNA, 22 nt, Human
aacuugaaaaccucaugaauug

SEQ ID NO: 214645 - RNA, 22 nt, Human
ggcuuuauuucacuguaccaua

SEQ ID NO: 214646 - RNA, 17 nt, Human
aaguccagccugcagcu

SEQ ID NO: 214647 - RNA, 22 nt, Human
aggcuuggaaaauuuacagugu

SEQ ID NO: 214648 - RNA, 22 nt, Human
uucugaauucaugagauuuggg

SEQ ID NO: 214649 - RNA, 22 nt, Human
ccaggagacccagggaaggagc

SEQ ID NO: 214650 - RNA, 22 nt, Human
caguccugugucccuugguggg

SEQ ID NO: 214651 - RNA, 22 nt, Human
gacaucauggagaggacaaaca

SEQ ID NO: 214652 - RNA, 22 nt, Human
aauaucacaggaggagaccaag

SEQ ID NO: 214653 - RNA, 19 nt, Human
gcuugggagagggagcuaa

SEQ ID NO: 214654 - RNA, 22 nt, Human
uguaaucauuacaguacaugga

SEQ ID NO: 214655 - RNA, 22 nt, Human
auggaaagugcauggaagucau

SEQ ID NO: 214656 - RNA, 22 nt, Human
uaccagccuuuuaacaugggcc

SEQ ID NO: 214657 - RNA, 22 nt, Human
uuagugcuaaauacucccacag

SEQ ID NO: 214658 - RNA, 22 nt, Human
aaguaucaaaugguagcauaug

SEQ ID NO: 214659 - RNA, 22 nt, Human
gccacucaugggaggugugcaa

SEQ ID NO: 214660 - RNA, 22 nt, Human
uuggcuuccugcacuugaguuu

SEQ ID NO: 214661 - RNA, 22 nt, Human
ccucaaauugcucagcgucuag

SEQ ID NO: 214662 - RNA, 22 nt, Human
cugugggcgccugucagccuca

SEQ ID NO: 214663 - RNA, 22 nt, Human
cuggaagggucagagugaugag

SEQ ID NO: 214664 - RNA, 22 nt, Human
uuuguuuagagaauugaagcag

SEQ ID NO: 214665 - RNA, 22 nt, Human
acagaauauuguaagugccacu

SEQ ID NO: 214666 - RNA, 22 nt, Human
gggugggguucaggaaucuuca

SEQ ID NO: 214667 - RNA, 22 nt, Human
ccuucugcucccuggccagggc

SEQ ID NO: 214668 - RNA, 22 nt, Human
augcacuacuagaugcaaaagu

SEQ ID NO: 214669 - RNA, 22 nt, Human
aacauuuguuucguuaugugaa

SEQ ID NO: 214670 - RNA, 22 nt, Human
cuccuccagcuuccaguggcuc

SEQ ID NO: 214671 - RNA, 22 nt, Human
ggcagggcagcgcugauuaggg

SEQ ID NO: 214672 - RNA, 22 nt, Human
gccauugaugugaaaguaagac

SEQ ID NO: 214673 - RNA, 22 nt, Human
uguauauaagcauuuacuuguu

SEQ ID NO: 214674 - RNA, 22 nt, Human
ggacauuucuauugagcuaaga

SEQ ID NO: 214675 - RNA, 22 nt, Human
uggaagccaaggucagaaggag

SEQ ID NO: 214676 - RNA, 22 nt, Human
gaauuacagccagaagaaugaa

SEQ ID NO: 214677 - RNA, 22 nt, Human
aggaggcuuuugcaggugccac

SEQ ID NO: 214678 - RNA, 22 nt, Human
uggugaggucauagagaacugu

SEQ ID NO: 214679 - RNA, 19 nt, Human
cagcaagaaugaaggcaua

SEQ ID NO: 214680 - RNA, 22 nt, Human
ugucauuaguuucagccauucu

SEQ ID NO: 214681 - RNA, 20 nt, Human
uauuaugaccuguguucugg

SEQ ID NO: 214682 - RNA, 22 nt, Human
aggcucugacgucacacguggc

SEQ ID NO: 214683 - RNA, 22 nt, Human
ugcucccaggcauucucuguug

SEQ ID NO: 214684 - RNA, 22 nt, Human
augucacaugguucuggggccu

SEQ ID NO: 214685 - RNA, 22 nt, Human
aggcucagccugggccuagagc

SEQ ID NO: 214686 - RNA, 22 nt, Human
auggcuauuuuagagaucaagg

SEQ ID NO: 214687 - RNA, 16 nt, Human
gcugggagggagaggu

SEQ ID NO: 214688 - RNA, 22 nt, Human
gggaaaggaucagugggaggcu

SEQ ID NO: 214689 - RNA, 22 nt, Human
uguccuggugcuucuugggauu

SEQ ID NO: 214690 - RNA, 21 nt, Human
cugcaucucauagaacauguc

SEQ ID NO: 214691 - RNA, 22 nt, Human
cagggcuccccgcaccgcagcc

SEQ ID NO: 214692 - RNA, 22 nt, Human
augauguugauaaauuacuuua

SEQ ID NO: 214693 - RNA, 22 nt, Human
ggcuucugucucaagcaccagc

SEQ ID NO: 214694 - RNA, 22 nt, Human
guacaugugcacaacaugcaug

SEQ ID NO: 214695 - RNA, 22 nt, Human
uucaucugcugguuuuuggcau

SEQ ID NO: 214696 - RNA, 22 nt, Human
ugucucugauaaguaguucagu

SEQ ID NO: 214697 - RNA, 21 nt, Human
cuguccaguaauuccuggcac

SEQ ID NO: 214698 - RNA, 20 nt, Human
gccucagccaacccaugggg

SEQ ID NO: 214699 - RNA, 22 nt, Human
aggaaacuggguaugguuauac

SEQ ID NO: 214700 - RNA, 19 nt, Human
auaaauaaaaagugggaga

SEQ ID NO: 214701 - RNA, 22 nt, Human
uaaguauguuagaaaaucaagu

SEQ ID NO: 214702 - RNA, 22 nt, Human
guugagaguuaagcgggcuaau

SEQ ID NO: 214703 - RNA, 20 nt, Human
uggcaggaggcagcagugga

SEQ ID NO: 214704 - RNA, 22 nt, Human
agcccugggucccaguccuggc

SEQ ID NO: 214705 - RNA, 22 nt, Human
aggcucccaugguguggcagga

SEQ ID NO: 214706 - RNA, 22 nt, Human
agcugggccugagcuggaagcu

SEQ ID NO: 214707 - RNA, 22 nt, Human
uaggccagauuguuauccaugg

SEQ ID NO: 214708 - RNA, 22 nt, Human
aagggcagcuauuaucgucauc

SEQ ID NO: 214709 - RNA, 22 nt, Human
cuagggagggauguuggcauga

SEQ ID NO: 214710 - RNA, 23 nt, Human
cuguggagcccuuuguugggaga

SEQ ID NO: 214711 - RNA, 22 nt, Human
guucuuuaaacugcugcucugu

SEQ ID NO: 214712 - RNA, 22 nt, Human
gacugguaaggaaauucacuaa

SEQ ID NO: 214713 - RNA, 18 nt, Human
gagaggcccggcugugcc

SEQ ID NO: 214714 - RNA, 22 nt, Human
acccucagacauauuccaucau

SEQ ID NO: 214715 - RNA, 22 nt, Human
aaaaccaggcuugcugugcucg

SEQ ID NO: 214716 - RNA, 22 nt, Human
uggcaggcaaguucagcuccac

SEQ ID NO: 214717 - RNA, 22 nt, Human
cauuugaaugagauugcuguaa

SEQ ID NO: 214718 - RNA, 22 nt, Human
caggagugcagguggugaggca

SEQ ID NO: 214719 - RNA, 22 nt, Human
uucuggcugaaaguuuauuuga

SEQ ID NO: 214720 - RNA, 22 nt, Human
ccaggcccaggguacugaccaa

SEQ ID NO: 214721 - RNA, 22 nt, Human
guccuucucaaauccuguguuu

SEQ ID NO: 214722 - RNA, 22 nt, Human
cuuucaaugugccugccuuggg

SEQ ID NO: 214723 - RNA, 22 nt, Human
ccugugggucacaugggugacu

SEQ ID NO: 214724 - RNA, 22 nt, Human
ugcauuaagguaauuguauaau

SEQ ID NO: 214725 - RNA, 22 nt, Human
acagggcagguggcuacugguc

SEQ ID NO: 214726 - RNA, 22 nt, Human
uaaggcuucuuggaauacugca

SEQ ID NO: 214727 - RNA, 22 nt, Human
gugccagggggcacugaacaga

SEQ ID NO: 214728 - RNA, 21 nt, Human
ccagugcuacagcugccugac

SEQ ID NO: 214729 - RNA, 22 nt, Human
uaugaacacuuauuggggaagg

SEQ ID NO: 214730 - RNA, 22 nt, Human
gucaacaauuccaguuuuuacu

SEQ ID NO: 214731 - RNA, 22 nt, Human
ggggccagcacugugccuuugu

SEQ ID NO: 214732 - RNA, 22 nt, Human
augagugugaaguuagcucagu

SEQ ID NO: 214733 - RNA, 22 nt, Human
cuggccugaucucaugcugucc

SEQ ID NO: 214734 - RNA, 22 nt, Human
uuagaacaucucucuucugcca

SEQ ID NO: 214735 - RNA, 22 nt, Human
ccuggcucugaaguccacauca

SEQ ID NO: 214736 - RNA, 22 nt, Human
uugacauuuugucauauugaca

SEQ ID NO: 214737 - RNA, 22 nt, Human
auggcagacgaggcagcagggg

SEQ ID NO: 214738 - RNA, 22 nt, Human
gaucggguggguucugccauca

SEQ ID NO: 214739 - RNA, 18 nt, Human
ugcuccaggcccaugggc

SEQ ID NO: 214740 - RNA, 22 nt, Human
ggacagacuuuacagccccggg

SEQ ID NO: 214741 - RNA, 22 nt, Human
aucuagaagucauggcuuucuu

SEQ ID NO: 214742 - RNA, 22 nt, Human
ucaauuacagugucaccuuaag

SEQ ID NO: 214743 - RNA, 21 nt, Human
uggccaaaaccauauuauuaa

SEQ ID NO: 214744 - RNA, 22 nt, Human
gcacaggaaaugacucauguua

SEQ ID NO: 214745 - RNA, 22 nt, Human
uaacaguauauuuaccaaaccu

SEQ ID NO: 214746 - RNA, 22 nt, Human
gagggcuccauuccccgugccc

SEQ ID NO: 214747 - RNA, 22 nt, Human
auuucuaguccuuguguaguca

SEQ ID NO: 214748 - RNA, 20 nt, Human
ucugagaagcaaacaauguu

SEQ ID NO: 214749 - RNA, 22 nt, Human
ucuuucuuuaucaccugauaug

SEQ ID NO: 214750 - RNA, 22 nt, Human
ucuagagauacauuggucauuu

SEQ ID NO: 214751 - RNA, 22 nt, Human
gaucugagaucuaaaccagagg

SEQ ID NO: 214752 - RNA, 22 nt, Human
cuggcaugaaauggcaucucau

SEQ ID NO: 214753 - RNA, 22 nt, Human
gagauggccagugccaggacaa

SEQ ID NO: 214754 - RNA, 22 nt, Human
aggcucugaugcaagcccaggg

SEQ ID NO: 214755 - RNA, 22 nt, Human
gaagacauuuguaacacuugca

SEQ ID NO: 214756 - RNA, 20 nt, Human
gcugccuguuucuguaagua

SEQ ID NO: 214757 - RNA, 22 nt, Human
aggcucucaauaugauccaguc

SEQ ID NO: 214758 - RNA, 21 nt, Human
aggcaugagcccugcauggac

SEQ ID NO: 214759 - RNA, 22 nt, Human
agcugagguugaagagugaacg

SEQ ID NO: 214760 - RNA, 22 nt, Human
acuggcaguuugagaaugcauu

SEQ ID NO: 214761 - RNA, 22 nt, Human
cuggcuuccugaguccauuacc

SEQ ID NO: 214762 - RNA, 22 nt, Human
agaagcuacugggauauuaauu

SEQ ID NO: 214763 - RNA, 22 nt, Human
uucacauuugaaaggaaagaua

SEQ ID NO: 214764 - RNA, 22 nt, Human
cugcuguggccagccaggucaa

SEQ ID NO: 214765 - RNA, 22 nt, Human
ggcacagcucaggucccagcuc

SEQ ID NO: 214766 - RNA, 23 nt, Human
ugcaggugauuaauccaguuuca

SEQ ID NO: 214767 - RNA, 22 nt, Human
cagcuuugcaggcuggucagug

SEQ ID NO: 214768 - RNA, 22 nt, Human
uguuuaaugaagaugguuuuuc

SEQ ID NO: 214769 - RNA, 22 nt, Human
aagagauguggaaucauuuaca

SEQ ID NO: 214770 - RNA, 22 nt, Human
gauaauuugauaccucaaucag

SEQ ID NO: 214771 - RNA, 19 nt, Human
gcccuccucacugagcucu

SEQ ID NO: 214772 - RNA, 22 nt, Human
aaggacagagagccauuccaga

SEQ ID NO: 214773 - RNA, 22 nt, Human
aagccaguauucaauggggcua

SEQ ID NO: 214774 - RNA, 22 nt, Human
caggaagcaucuggcuagcuaa

SEQ ID NO: 214775 - RNA, 22 nt, Human
ggcuucuggugggagcaugacu

SEQ ID NO: 214776 - RNA, 22 nt, Human
acucugggaucuugaaaagagu

SEQ ID NO: 214777 - RNA, 22 nt, Human
agaaaauuuaaagagacacaca

SEQ ID NO: 214778 - RNA, 22 nt, Human
ggugaccucaccuggucccacc

SEQ ID NO: 214779 - RNA, 22 nt, Human
cagcugugcuagaagccacgaa

SEQ ID NO: 214780 - RNA, 22 nt, Human
gggagcugccuuagaccggagg

SEQ ID NO: 214781 - RNA, 22 nt, Human
aaaaacacaaguggcuuggucu

SEQ ID NO: 214782 - RNA, 22 nt, Human
gaagaaucugaggacagucauu

SEQ ID NO: 214783 - RNA, 22 nt, Human
cacugguauuugaaaauagaug

SEQ ID NO: 214784 - RNA, 18 nt, Human
cuucaguggcugcucugc

SEQ ID NO: 214785 - RNA, 22 nt, Human
agacagcuccaagugucucugu

SEQ ID NO: 214786 - RNA, 22 nt, Human
cauucauuuaugaaauaucuau

SEQ ID NO: 214787 - RNA, 22 nt, Human
ggaagaaaguagaaaaccgugg

SEQ ID NO: 214788 - RNA, 22 nt, Human
cccuggagaucgggagaggaag

SEQ ID NO: 214789 - RNA, 22 nt, Human
uuuagcaucgaaguaaauuuag

SEQ ID NO: 214790 - RNA, 22 nt, Human
ucaggagugauaccauuuguca

SEQ ID NO: 214791 - RNA, 20 nt, Human
acacaaagcaauggaguaca

SEQ ID NO: 214792 - RNA, 22 nt, Human
ugaaggaaugaguauacuguuu

SEQ ID NO: 214793 - RNA, 22 nt, Human
uugagaagguggucauuugcaa

SEQ ID NO: 214794 - RNA, 22 nt, Human
ggguccagggacguuucugcag

SEQ ID NO: 214795 - RNA, 22 nt, Human
ggccugagcucuggggaggcaa

SEQ ID NO: 214796 - RNA, 22 nt, Human
uauuuuugccucucagauaaaa

SEQ ID NO: 214797 - RNA, 22 nt, Human
uguucacuuauguucucccauu

SEQ ID NO: 214798 - RNA, 22 nt, Human
aaauuuuaaggcuggaacuuaa

SEQ ID NO: 214799 - RNA, 22 nt, Human
caaagcaggaagaauauugaaa

SEQ ID NO: 214800 - RNA, 22 nt, Human
uccucagagcagcccuccgcau

SEQ ID NO: 214801 - RNA, 22 nt, Human
gcaagacaugucuaagguuuaa

SEQ ID NO: 214802 - RNA, 21 nt, Human
acccaggggaagcagaaacug

SEQ ID NO: 214803 - RNA, 18 nt, Human
uccgaggcaccauaaaaa

SEQ ID NO: 214804 - RNA, 22 nt, Human
agauuuauguggucacacucag

SEQ ID NO: 214805 - RNA, 22 nt, Human
aacuuucuggcuuuggggagag

SEQ ID NO: 214806 - RNA, 22 nt, Human
agugggagccagcagcuugggg

SEQ ID NO: 214807 - RNA, 22 nt, Human
ggguggagcuuggacaccagua

SEQ ID NO: 214808 - RNA, 22 nt, Human
gguuacucaagccugccuucuc

SEQ ID NO: 214809 - RNA, 22 nt, Human
ggugacggggcccagguuuccu

SEQ ID NO: 214810 - RNA, 22 nt, Human
gucucuggguuaagcagugcau

SEQ ID NO: 214811 - RNA, 22 nt, Human
uccugaagaugaaaagagaggu

SEQ ID NO: 214812 - RNA, 22 nt, Human
ugugucagaauuuuuguggcaa

SEQ ID NO: 214813 - RNA, 22 nt, Human
gagugaaaaaggaagggccaua

SEQ ID NO: 214814 - RNA, 22 nt, Human
ccuuccaagugcugcuuuuucc

SEQ ID NO: 214815 - RNA, 21 nt, Human
gacaggcaaggagucacuuag

SEQ ID NO: 214816 - RNA, 22 nt, Human
acauguguggacaugaaucuac

SEQ ID NO: 214817 - RNA, 22 nt, Human
ugucccagucaaggcugucauc

SEQ ID NO: 214818 - RNA, 22 nt, Human
cauucugcauuuggaaggggca

SEQ ID NO: 214819 - RNA, 22 nt, Human
ugcucagcgccaaagcugaugg

SEQ ID NO: 214820 - RNA, 22 nt, Human
ucuugcagaggcacugugucag

SEQ ID NO: 214821 - RNA, 22 nt, Human
cggcaggguugguuuucucuga

SEQ ID NO: 214822 - RNA, 20 nt, Human
agaaauauugaguucagagg

SEQ ID NO: 214823 - RNA, 22 nt, Human
acucuguagaguauaccaaugu

SEQ ID NO: 214824 - RNA, 22 nt, Human
ccugggucacucaggcaggcgg

SEQ ID NO: 214825 - RNA, 22 nt, Human
gaauugcuaauccaagugacug

SEQ ID NO: 214826 - RNA, 22 nt, Human
cuaauuguaagcuccuugaggg

SEQ ID NO: 214827 - RNA, 22 nt, Human
gagcaguuuuauuucaugagac

SEQ ID NO: 214828 - RNA, 22 nt, Human
cugugggagaaguugcuggagu

SEQ ID NO: 214829 - RNA, 22 nt, Human
aagcuguacuuagcauugacuc

SEQ ID NO: 214830 - RNA, 22 nt, Human
ugagcaggucaagacuccagcu

SEQ ID NO: 214831 - RNA, 18 nt, Human
aggcuugggcccagcagc

SEQ ID NO: 214832 - RNA, 22 nt, Human
uagcaaguagauacucauuuag

SEQ ID NO: 214833 - RNA, 22 nt, Human
aagucucuaagacugugccauc

SEQ ID NO: 214834 - RNA, 22 nt, Human
ugagccaggcuccaugccaccu

SEQ ID NO: 214835 - RNA, 22 nt, Human
cacagcuggugcacuagcucug

SEQ ID NO: 214836 - RNA, 18 nt, Human
ccccaaaagucacccugg

SEQ ID NO: 214837 - RNA, 23 nt, Human
uguggcugagaaauugacaacuu

SEQ ID NO: 214838 - RNA, 22 nt, Human
aauagacaauucuagccaacau

SEQ ID NO: 214839 - RNA, 22 nt, Human
uccuggggccaggcaccucugg

SEQ ID NO: 214840 - RNA, 22 nt, Human
uguuaggguccugugcaggggc

SEQ ID NO: 214841 - RNA, 22 nt, Human
acugucuucauaucugugucuc

SEQ ID NO: 214842 - RNA, 22 nt, Human
gggcagcuguaucugagcuuau

SEQ ID NO: 214843 - RNA, 20 nt, Human
aggcaguguagagaugagua

SEQ ID NO: 214844 - RNA, 22 nt, Human
agcaagaagggcaaggaaguuu

SEQ ID NO: 214845 - RNA, 22 nt, Human
aggggagcuugccuggucaccc

SEQ ID NO: 214846 - RNA, 22 nt, Human
gcaugugucuccccaguggagg

SEQ ID NO: 214847 - RNA, 22 nt, Human
caguggaaaucagagugagagu

SEQ ID NO: 214848 - RNA, 22 nt, Human
gcccuggaaucucuccauggga

SEQ ID NO: 214849 - RNA, 22 nt, Human
uucuauguguugacaagccuga

SEQ ID NO: 214850 - RNA, 22 nt, Human
gaaaacuuggaucucuagaaug

SEQ ID NO: 214851 - RNA, 22 nt, Human
caugcagccugugaacaguguc

SEQ ID NO: 214852 - RNA, 22 nt, Human
gcugcaggcgccugcggucucu

SEQ ID NO: 214853 - RNA, 22 nt, Human
acaacacagcaaaaccccaucu

SEQ ID NO: 214854 - RNA, 22 nt, Human
cuggagccggcgagccccagcc

SEQ ID NO: 214855 - RNA, 22 nt, Human
ggugaagguggaacgcagagca

SEQ ID NO: 214856 - RNA, 22 nt, Human
guggcugcagagggcacagcau

SEQ ID NO: 214857 - RNA, 18 nt, Human
ucuuggcagcaucuggca

SEQ ID NO: 214858 - RNA, 22 nt, Human
acagguggaaacaugguguugg

SEQ ID NO: 214859 - RNA, 22 nt, Human
gagguccagccaagcggcaagg

SEQ ID NO: 214860 - RNA, 22 nt, Human
gggggacaggaugaauaucugu

SEQ ID NO: 214861 - RNA, 22 nt, Human
ggcaggcauuagagauucccag

SEQ ID NO: 214862 - RNA, 22 nt, Human
ccucugggugacagacucuugg

SEQ ID NO: 214863 - RNA, 22 nt, Human
ggagggggaaacuuuggcugcc

SEQ ID NO: 214864 - RNA, 23 nt, Human
augaggcauuaaacaggcuuuuu

SEQ ID NO: 214865 - RNA, 22 nt, Human
agggagaagguccaugccuguc

SEQ ID NO: 214866 - RNA, 22 nt, Human
gaggucuuagaagaaaaaucau

SEQ ID NO: 214867 - RNA, 22 nt, Human
auguguccucuggcagguuuag

SEQ ID NO: 214868 - RNA, 22 nt, Human
agcugcaaagaugauuuguugu

SEQ ID NO: 214869 - RNA, 22 nt, Human
acugaggaacauauauaagaug

SEQ ID NO: 214870 - RNA, 22 nt, Human
cagagucagagcuccauggagu

SEQ ID NO: 214871 - RNA, 22 nt, Human
ccaguggaguuuuuauacccag

SEQ ID NO: 214872 - RNA, 22 nt, Human
ucuggacuugaaucagaguaga

SEQ ID NO: 214873 - RNA, 22 nt, Human
ucccaggguccucuucuggaau

SEQ ID NO: 214874 - RNA, 22 nt, Human
aaggagaguacaggaguuggua

SEQ ID NO: 214875 - RNA, 18 nt, Human
gagcagaggcucaacugg

SEQ ID NO: 214876 - RNA, 22 nt, Human
caaaugauccuugcaagcugug

SEQ ID NO: 214877 - RNA, 22 nt, Human
aguggccacuagaagcucagcu

SEQ ID NO: 214878 - RNA, 22 nt, Human
agacagcuguuccuucauguuu

SEQ ID NO: 214879 - RNA, 22 nt, Human
agcacauuuaaguaugaaauau

SEQ ID NO: 214880 - RNA, 22 nt, Human
aggcuggcugacuucugaagca

SEQ ID NO: 214881 - RNA, 22 nt, Human
aaagcauguucugggaauagua

SEQ ID NO: 214882 - RNA, 20 nt, Human
agaggaggauuauuuuauuc

SEQ ID NO: 214883 - RNA, 22 nt, Human
gaaggcugccaguggcccucuu

SEQ ID NO: 214884 - RNA, 17 nt, Human
ccugaaggcacuuccag

SEQ ID NO: 214885 - RNA, 22 nt, Human
aggcuccuucacagcacucgcc

SEQ ID NO: 214886 - RNA, 22 nt, Human
auggggaagcaauuggauuucc

SEQ ID NO: 214887 - RNA, 22 nt, Human
gguggccuuuuaugagcagggu

SEQ ID NO: 214888 - RNA, 22 nt, Human
cuuucgaucaagggucccuuca

SEQ ID NO: 214889 - RNA, 22 nt, Human
ucaggccccaucccagacuuau

SEQ ID NO: 214890 - RNA, 22 nt, Human
cuauuagacacaauuagugauu

SEQ ID NO: 214891 - RNA, 22 nt, Human
uuauuuauaucucugcaguuua

SEQ ID NO: 214892 - RNA, 22 nt, Human
aaggcagaaagggaugugagug

SEQ ID NO: 214893 - RNA, 22 nt, Human
agcucccauuaucuucugaaac

SEQ ID NO: 214894 - RNA, 22 nt, Human
accuccuggugcccaaguguuu

SEQ ID NO: 214895 - RNA, 23 nt, Human
aggcuuccuaucuuagagcuggg

SEQ ID NO: 214896 - RNA, 22 nt, Human
gcccagggugcuuagaacccau

SEQ ID NO: 214897 - RNA, 22 nt, Human
ugcucauugcugauuuacaugu

SEQ ID NO: 214898 - RNA, 22 nt, Human
agguggagaagagaugggcagu

SEQ ID NO: 214899 - RNA, 22 nt, Human
ggccagagaagucagacccuug

SEQ ID NO: 214900 - RNA, 22 nt, Human
ccugugugcugaugacgacaga

SEQ ID NO: 214901 - RNA, 22 nt, Human
ugagggcagagcacuggggagc

SEQ ID NO: 214902 - RNA, 22 nt, Human
uugaaaucuuccacagcccaag

SEQ ID NO: 214903 - RNA, 22 nt, Human
ucaggcugagaaaaucuggacc

SEQ ID NO: 214904 - RNA, 21 nt, Human
cauuucuauugaugagaaaag

SEQ ID NO: 214905 - RNA, 22 nt, Human
gacugggguaaggugaggaggu

SEQ ID NO: 214906 - RNA, 22 nt, Human
agcuuuauuaacucuccaggug

SEQ ID NO: 214907 - RNA, 22 nt, Human
gagaggcagaggccugaaaccg

SEQ ID NO: 214908 - RNA, 22 nt, Human
aagaacaugaguuaugaugauu

SEQ ID NO: 214909 - RNA, 22 nt, Human
gagggcucaacuacuacuaggc

SEQ ID NO: 214910 - RNA, 22 nt, Human
ggcauggcuggguucuggugag

SEQ ID NO: 214911 - RNA, 22 nt, Human
acuagaaccagaggaggcaggu

SEQ ID NO: 214912 - RNA, 22 nt, Human
ugcucuggaguggcuugugcac

SEQ ID NO: 214913 - RNA, 22 nt, Human
ucacaggcucuccaccaugagg

SEQ ID NO: 214914 - RNA, 22 nt, Human
ucugaaggcauccucacugcaa

SEQ ID NO: 214915 - RNA, 22 nt, Human
aauguugaggauaucagaaaau

SEQ ID NO: 214916 - RNA, 22 nt, Human
uagagacagaaaguagaauggu

SEQ ID NO: 214917 - RNA, 22 nt, Human
cucagucugucuugucuguguu

SEQ ID NO: 214918 - RNA, 23 nt, Human
agggccacugggaaggauuacug

SEQ ID NO: 214919 - RNA, 22 nt, Human
uuuagagaguguaaaaauauau

SEQ ID NO: 214920 - RNA, 22 nt, Human
gaauuuaagaggaugaaucugu

SEQ ID NO: 214921 - RNA, 19 nt, Human
cugaaaaacauucucagga

SEQ ID NO: 214922 - RNA, 22 nt, Human
ucugccuggaugauggcagggc

SEQ ID NO: 214923 - RNA, 22 nt, Human
ucuggcuuuauuuucaucaucu

SEQ ID NO: 214924 - RNA, 22 nt, Human
caggcauugugacgaguguucu

SEQ ID NO: 214925 - RNA, 20 nt, Human
acacuguucuucacacauuu

SEQ ID NO: 214926 - RNA, 22 nt, Human
agaaggcuccaaguagaguuug

SEQ ID NO: 214927 - RNA, 22 nt, Human
uucucagaugauucagauaaac

SEQ ID NO: 214928 - RNA, 22 nt, Human
uaugaaggauacaccucugauu

SEQ ID NO: 214929 - RNA, 22 nt, Human
agugcauuugggguaguggaag

SEQ ID NO: 214930 - RNA, 23 nt, Human
ucaguaccacagcugcaugaccu

SEQ ID NO: 214931 - RNA, 22 nt, Human
uagcaagaugaugaauuauuca

SEQ ID NO: 214932 - RNA, 22 nt, Human
guuuauuauacaacaaaagcua

SEQ ID NO: 214933 - RNA, 22 nt, Human
aagcugaaucugaaauagaauu

SEQ ID NO: 214934 - RNA, 22 nt, Human
uugugcaauuuaaaaucuuccu

SEQ ID NO: 214935 - RNA, 22 nt, Human
ccagaaguggcuuucucaggga

SEQ ID NO: 214936 - RNA, 22 nt, Human
gccaguuuccaccuaggcaauu

SEQ ID NO: 214937 - RNA, 22 nt, Human
aaaugucuguaggggcugcagg

SEQ ID NO: 214938 - RNA, 22 nt, Human
ugcaucuggccuuugcuggcua

SEQ ID NO: 214939 - RNA, 22 nt, Human
ucagcccugggacccagggaug

SEQ ID NO: 214940 - RNA, 22 nt, Human
augaggcuauuucauagauuuu

SEQ ID NO: 214941 - RNA, 22 nt, Human
ucuagagccaaagucuuggggg

SEQ ID NO: 214942 - RNA, 22 nt, Human
ucaacguuuguuaaaugaguau

SEQ ID NO: 214943 - RNA, 22 nt, Human
uuggagagaggcugcucaggcu

SEQ ID NO: 214944 - RNA, 22 nt, Human
uuccucagggcggaugggcagg

SEQ ID NO: 214945 - RNA, 22 nt, Human
gcagcuguacuggcagcauugu

SEQ ID NO: 214946 - RNA, 23 nt, Human
gguuccaggaacacagccugaug

SEQ ID NO: 214947 - RNA, 20 nt, Human
aggcccagugaauauauugc

SEQ ID NO: 214948 - RNA, 17 nt, Human
cucagagcaggacagaa

SEQ ID NO: 214949 - RNA, 22 nt, Human
ggucucagacuggcaggcagug

SEQ ID NO: 214950 - RNA, 22 nt, Human
ggcccucuguggcugccaugga

SEQ ID NO: 214951 - RNA, 22 nt, Human
ggggaggaagcucucaguucca

SEQ ID NO: 214952 - RNA, 22 nt, Human
uaggcugggaagaaagauucuc

SEQ ID NO: 214953 - RNA, 22 nt, Human
uaggaaagaaaugaguagugau

SEQ ID NO: 214954 - RNA, 22 nt, Human
aaagauuuaagaauaauuugug

SEQ ID NO: 214955 - RNA, 22 nt, Human
uuggcugcuauuuccauauuua

SEQ ID NO: 214956 - RNA, 22 nt, Human
ucugccucgcuaacagcagcca

SEQ ID NO: 214957 - RNA, 22 nt, Human
gcaagcagacauucagguaggu

SEQ ID NO: 214958 - RNA, 22 nt, Human
cagcugaguaugcauucaagca

SEQ ID NO: 214959 - RNA, 22 nt, Human
gacauuaauggcaaauuaauua

SEQ ID NO: 214960 - RNA, 22 nt, Human
cuucuucacacuggucugaagc

SEQ ID NO: 214961 - RNA, 22 nt, Human
gugcagcagggggaagacagug

SEQ ID NO: 214962 - RNA, 22 nt, Human
gaugcaaagaggaccuucagua

SEQ ID NO: 214963 - RNA, 22 nt, Human
caggaugaagggcaaaggcaag

SEQ ID NO: 214964 - RNA, 22 nt, Human
acuuagauuuccuuacugggug

SEQ ID NO: 214965 - RNA, 21 nt, Human
uggaccuguccuucucgcugu

SEQ ID NO: 214966 - RNA, 22 nt, Human
ccagaggugagggggauucuug

SEQ ID NO: 214967 - RNA, 22 nt, Human
uagcagcaauuucagaaguuug

SEQ ID NO: 214968 - RNA, 22 nt, Human
ugaagaaacagaccaagaggau

SEQ ID NO: 214969 - RNA, 20 nt, Human
ucaaaauaggugugggcgga

SEQ ID NO: 214970 - RNA, 22 nt, Human
uccucaguuuucuaguauggca

SEQ ID NO: 214971 - RNA, 22 nt, Human
uauaaaugcacuuuugaaauau

SEQ ID NO: 214972 - RNA, 22 nt, Human
uggccagugccugccagugcag

SEQ ID NO: 214973 - RNA, 22 nt, Human
uccugagcccuggggucagugu

SEQ ID NO: 214974 - RNA, 22 nt, Human
gcucagagagauuaaauaauuu

SEQ ID NO: 214975 - RNA, 22 nt, Human
aaguggcauguauaagaaagaa

SEQ ID NO: 214976 - RNA, 22 nt, Human
cuaaaauuaucaagauaauucc

SEQ ID NO: 214977 - RNA, 22 nt, Human
ggagggccaucuugggugugau

SEQ ID NO: 214978 - RNA, 23 nt, Human
uugaggagugcuuuuucuaucca

SEQ ID NO: 214979 - RNA, 22 nt, Human
aaggcuggaccuggaugaaucu

SEQ ID NO: 214980 - RNA, 22 nt, Human
ucuugagaaauaauuaaacaug

SEQ ID NO: 214981 - RNA, 22 nt, Human
accuuauuaaaaugaugaugua

SEQ ID NO: 214982 - RNA, 22 nt, Human
agugggugauaagaccaaggag

SEQ ID NO: 214983 - RNA, 22 nt, Human
gggcuacugagcuggaacuggg

SEQ ID NO: 214984 - RNA, 20 nt, Human
agaagccaagugacauguuu

SEQ ID NO: 214985 - RNA, 20 nt, Human
caggcaguuugugguuaggg

SEQ ID NO: 214986 - RNA, 22 nt, Human
aaacuuuuuuagguucauaggc

SEQ ID NO: 214987 - RNA, 23 nt, Human
ugcagcaggguggucuacuucuc

SEQ ID NO: 214988 - RNA, 22 nt, Human
gaaaauacaaauagccuugaaa

SEQ ID NO: 214989 - RNA, 22 nt, Human
aaacaguauuaucaauauauuu

SEQ ID NO: 214990 - RNA, 22 nt, Human
uucucagggucuggauggccug

SEQ ID NO: 214991 - RNA, 22 nt, Human
acagcagaguugaguaguugca

SEQ ID NO: 214992 - RNA, 22 nt, Human
ucugggaaguccucugucaugc

SEQ ID NO: 214993 - RNA, 22 nt, Human
aagggcugcauuugauguguca

SEQ ID NO: 214994 - RNA, 22 nt, Human
cuuguugcugaauucaggauuc

SEQ ID NO: 214995 - RNA, 22 nt, Human
accuuggaacugaaguguuuuu

SEQ ID NO: 214996 - RNA, 22 nt, Human
ccagggcagaaaaagagggaau

SEQ ID NO: 214997 - RNA, 22 nt, Human
uccuucaagugcaguaccugag

SEQ ID NO: 214998 - RNA, 22 nt, Human
aguaacaugaguuuuucuaaug

SEQ ID NO: 214999 - RNA, 22 nt, Human
aaaaaccauugucuucagucuc

SEQ ID NO: 215000 - RNA, 22 nt, Human
cugguccucuccagcaggcauu

SEQ ID NO: 215001 - RNA, 22 nt, Human
gcagaggauagcauaugaaccu

SEQ ID NO: 215002 - RNA, 22 nt, Human
gaggccuggagccgccuaggcg

SEQ ID NO: 215003 - RNA, 22 nt, Human
uggcacagugcuggauggugcu

SEQ ID NO: 215004 - RNA, 22 nt, Human
ggagaaggguauguguggcgga

SEQ ID NO: 215005 - RNA, 19 nt, Human
acuucuuuucaacacagga

SEQ ID NO: 215006 - RNA, 22 nt, Human
auuaguagcuguaauaacuggg

SEQ ID NO: 215007 - RNA, 22 nt, Human
ccuugccucauugugcuucucc

SEQ ID NO: 215008 - RNA, 22 nt, Human
uggaccugcguaggugcugggc

SEQ ID NO: 215009 - RNA, 22 nt, Human
agugaauuuaaaacacugagga

SEQ ID NO: 215010 - RNA, 21 nt, Human
gguugguguguccaguggcca

SEQ ID NO: 215011 - RNA, 22 nt, Human
uguaaaggguguuaaauuacuc

SEQ ID NO: 215012 - RNA, 22 nt, Human
gcugccuguccugaggaguccg

SEQ ID NO: 215013 - RNA, 21 nt, Human
cagcuccacuaaagcagcugu

SEQ ID NO: 215014 - RNA, 22 nt, Human
ucaggaagacaaucuuuggcuc

SEQ ID NO: 215015 - RNA, 22 nt, Human
caggcagugugacgcuaggguu

SEQ ID NO: 215016 - RNA, 22 nt, Human
ggcuuuauauuguuugagcaga

SEQ ID NO: 215017 - RNA, 22 nt, Human
aacauuuuuaagaccaagugcu

SEQ ID NO: 215018 - RNA, 17 nt, Human
ggccacagagcuugggg

SEQ ID NO: 215019 - RNA, 22 nt, Human
ucccucagucccuggacaggca

SEQ ID NO: 215020 - RNA, 20 nt, Human
auguuuuauaaaagaacggg

SEQ ID NO: 215021 - RNA, 22 nt, Human
aaaguccuguuugaaggaccug

SEQ ID NO: 215022 - RNA, 21 nt, Human
ucucacaauaugaugccagau

SEQ ID NO: 215023 - RNA, 22 nt, Human
guuucuuuuaaaauauguagac

SEQ ID NO: 215024 - RNA, 22 nt, Human
ugcccagccaguuuaugguaau

SEQ ID NO: 215025 - RNA, 17 nt, Human
cagcucuuccucccucu

SEQ ID NO: 215026 - RNA, 22 nt, Human
auaauaacuccuguugaagaac

SEQ ID NO: 215027 - RNA, 22 nt, Human
uggcauguuuaauguacuguau

SEQ ID NO: 215028 - RNA, 22 nt, Human
uugaauuagacuuugcuacagg

SEQ ID NO: 215029 - RNA, 22 nt, Human
acugugagugauuuccuucugg

SEQ ID NO: 215030 - RNA, 22 nt, Human
cacucugauuccacaaggcucc

SEQ ID NO: 215031 - RNA, 22 nt, Human
guuugcauguauuaagucaaua

SEQ ID NO: 215032 - RNA, 22 nt, Human
ucccugcacccuugcugggccc

SEQ ID NO: 215033 - RNA, 20 nt, Human
uuuauuggccuuucaggaac

SEQ ID NO: 215034 - RNA, 20 nt, Human
ccuguguggccagcugaggc

SEQ ID NO: 215035 - RNA, 19 nt, Human
cagaacagaggucauggcc

SEQ ID NO: 215036 - RNA, 22 nt, Human
uaccugcagcgggaauccauua

SEQ ID NO: 215037 - RNA, 22 nt, Human
cuccugugcaugcaucucccua

SEQ ID NO: 215038 - RNA, 22 nt, Human
aucaggauucaguaucuccagc

SEQ ID NO: 215039 - RNA, 22 nt, Human
agucuagauccccagugcuguc

SEQ ID NO: 215040 - RNA, 22 nt, Human
agcagguuguuuuguggccagg

SEQ ID NO: 215041 - RNA, 22 nt, Human
uuuaauuugaaaugaguaaccc

SEQ ID NO: 215042 - RNA, 22 nt, Human
uuccuggcucucuguugcacag

SEQ ID NO: 215043 - RNA, 22 nt, Human
gcuguggcugaagaugcaggga

SEQ ID NO: 215044 - RNA, 22 nt, Human
uccuuggcacacucggaucuga

SEQ ID NO: 215045 - RNA, 22 nt, Human
aaguauuucguucugaaaaagu

SEQ ID NO: 215046 - RNA, 22 nt, Human
gagucagaccgacugggcucau

SEQ ID NO: 215047 - RNA, 22 nt, Human
cuggucuggcuacccagcgaau

SEQ ID NO: 215048 - RNA, 22 nt, Human
acacauauauacauauuugugc

SEQ ID NO: 215049 - RNA, 22 nt, Human
ccugaaaugaguucugcucacu

SEQ ID NO: 215050 - RNA, 22 nt, Human
aggccuggugaaugaaguaucu

SEQ ID NO: 215051 - RNA, 21 nt, Human
uuuaauuugcauguaugacgc

SEQ ID NO: 215052 - RNA, 22 nt, Human
cuggacacacuggagucuggca

SEQ ID NO: 215053 - RNA, 22 nt, Human
ugcaggucucugcaaggccuau

SEQ ID NO: 215054 - RNA, 22 nt, Human
agcuccuugaagggcucuggga

SEQ ID NO: 215055 - RNA, 21 nt, Human
cagacccucuagaggccaccu

SEQ ID NO: 215056 - RNA, 22 nt, Human
auaagcucuggacagccacauu

SEQ ID NO: 215057 - RNA, 22 nt, Human
auggcccaaaaccuccucccuc

SEQ ID NO: 215058 - RNA, 22 nt, Human
ugacacaugcaccagucuuuaa

SEQ ID NO: 215059 - RNA, 22 nt, Human
aaggauucaagaaaugguguag

SEQ ID NO: 215060 - RNA, 22 nt, Human
uuacccagugaagccgaggcag

SEQ ID NO: 215061 - RNA, 22 nt, Human
aguaaacaggcaugauaguguu

SEQ ID NO: 215062 - RNA, 22 nt, Human
uucugaggcauagaggaugaga

SEQ ID NO: 215063 - RNA, 22 nt, Human
guauaucaccccaagcagcuga

SEQ ID NO: 215064 - RNA, 22 nt, Human
agacuacauaugccacaugaag

SEQ ID NO: 215065 - RNA, 22 nt, Human
ggaaaaacagucuuuauuauuu

SEQ ID NO: 215066 - RNA, 22 nt, Human
aagcagcaugcuaugcuggugg

SEQ ID NO: 215067 - RNA, 22 nt, Human
cagggaggcugucuuaugccug

SEQ ID NO: 215068 - RNA, 22 nt, Human
agaggacacaucuuuccucaaa

SEQ ID NO: 215069 - RNA, 22 nt, Human
uagauguuaagcuucuagaagg

SEQ ID NO: 215070 - RNA, 22 nt, Human
ccagacuggggcuccuugaggg

SEQ ID NO: 215071 - RNA, 22 nt, Human
aagacauucaugaagaagggau

SEQ ID NO: 215072 - RNA, 19 nt, Human
agcaaauacaucaaaauug

SEQ ID NO: 215073 - RNA, 22 nt, Human
ugucaguuaaaugagguacaag

SEQ ID NO: 215074 - RNA, 22 nt, Human
gcccuggauggcaggagccauc

SEQ ID NO: 215075 - RNA, 22 nt, Human
gagaggcugugugccauuguug

SEQ ID NO: 215076 - RNA, 22 nt, Human
gccagcaguauguccuggcagu

SEQ ID NO: 215077 - RNA, 22 nt, Human
acugagaagcucgcagugaugc

SEQ ID NO: 215078 - RNA, 22 nt, Human
auucuggacaaugagaaacugg

SEQ ID NO: 215079 - RNA, 22 nt, Human
aacuggaaugaaauuuacgaug

SEQ ID NO: 215080 - RNA, 22 nt, Human
caauagugucugcuuguuucua

SEQ ID NO: 215081 - RNA, 22 nt, Human
uuacaaagagugccagagugug

SEQ ID NO: 215082 - RNA, 22 nt, Human
uuuugccuaggguugacccguu

SEQ ID NO: 215083 - RNA, 22 nt, Human
acuuagaauuaguguagaauga

SEQ ID NO: 215084 - RNA, 22 nt, Human
ugcagagaagaggacaguucua

SEQ ID NO: 215085 - RNA, 22 nt, Human
ucuggaauaggacaaaaccaaa

SEQ ID NO: 215086 - RNA, 22 nt, Human
cuuccugggucagccuggaggu

SEQ ID NO: 215087 - RNA, 22 nt, Human
ggcugaaagguaguaguaggcu

SEQ ID NO: 215088 - RNA, 22 nt, Human
acccaggcuagagugcaguggu

SEQ ID NO: 215089 - RNA, 22 nt, Human
uggucuggggaccgaggguuac

SEQ ID NO: 215090 - RNA, 22 nt, Human
uguggggccaaagcccagccac

SEQ ID NO: 215091 - RNA, 22 nt, Human
gcaguggcuaggagucuggcgu

SEQ ID NO: 215092 - RNA, 22 nt, Human
gcuauuuuugagccauuuauaa

SEQ ID NO: 215093 - RNA, 22 nt, Human
cugaaauauuuuaaucucagga

SEQ ID NO: 215094 - RNA, 22 nt, Human
uugcugauucaugauuugagaa

SEQ ID NO: 215095 - RNA, 22 nt, Human
gcaccagggugcuguguucugg

SEQ ID NO: 215096 - RNA, 22 nt, Human
gguggggcucagcaaucugugu

SEQ ID NO: 215097 - RNA, 22 nt, Human
auguuauaguuauaaaaugagg

SEQ ID NO: 215098 - RNA, 22 nt, Human
gagcccucaaugaaucugcauu

SEQ ID NO: 215099 - RNA, 22 nt, Human
aagacccuaccccuggagagga

SEQ ID NO: 215100 - RNA, 22 nt, Human
uugcacagugguuuagagccug

SEQ ID NO: 215101 - RNA, 22 nt, Human
auguagaguagaauaguacaac

SEQ ID NO: 215102 - RNA, 22 nt, Human
cugaggccucacuguagucccu

SEQ ID NO: 215103 - RNA, 22 nt, Human
cugugcaaauaaagagcaacau

SEQ ID NO: 215104 - RNA, 22 nt, Human
uuucaugucauuccauuucaga

SEQ ID NO: 215105 - RNA, 21 nt, Human
cacaggugggucagugaggcc

SEQ ID NO: 215106 - RNA, 22 nt, Human
auuugucauauauaauacucuu

SEQ ID NO: 215107 - RNA, 22 nt, Human
aaauguguguauguacauauau

SEQ ID NO: 215108 - RNA, 22 nt, Human
gugguaaaaugugaaauggauu

SEQ ID NO: 215109 - RNA, 22 nt, Human
ugguccagcuugauucucuucu

SEQ ID NO: 215110 - RNA, 22 nt, Human
cagucugauguucgcaggugaa

SEQ ID NO: 215111 - RNA, 22 nt, Human
accaggcuccccuuggauccug

SEQ ID NO: 215112 - RNA, 21 nt, Human
ccacaauucuaguuacauaug

SEQ ID NO: 215113 - RNA, 22 nt, Human
cuccuucccuaccaucaauguu

SEQ ID NO: 215114 - RNA, 22 nt, Human
agcuucucagauggacuguuag

SEQ ID NO: 215115 - RNA, 22 nt, Human
uggcugcaggggugucugacau

SEQ ID NO: 215116 - RNA, 22 nt, Human
cugcacccaggccuggucccag

SEQ ID NO: 215117 - RNA, 22 nt, Human
gcacugccaucaaugcaugaca

SEQ ID NO: 215118 - RNA, 22 nt, Human
ucacacauguaagggcuuugga

SEQ ID NO: 215119 - RNA, 22 nt, Human
augagcaguuuuuaaguagcaa

SEQ ID NO: 215120 - RNA, 22 nt, Human
cacaggccugucucuuucuaac

SEQ ID NO: 215121 - RNA, 22 nt, Human
caggcuccuucccagggauggu

SEQ ID NO: 215122 - RNA, 20 nt, Human
guauuagguguuccucuuuc

SEQ ID NO: 215123 - RNA, 22 nt, Human
ggacccagguagggaggaagau

SEQ ID NO: 215124 - RNA, 22 nt, Human
uucuuuccuugccucagugaag

SEQ ID NO: 215125 - RNA, 22 nt, Human
acauuuaaugauccuacuguga

SEQ ID NO: 215126 - RNA, 23 nt, Human
gggaucuguaaaccuggagaacc

SEQ ID NO: 215127 - RNA, 22 nt, Human
ggcucccaggagggccuggagg

SEQ ID NO: 215128 - RNA, 22 nt, Human
ugggagagaauaaucaauaggu

SEQ ID NO: 215129 - RNA, 22 nt, Human
gaagauuaaauggcucccauau

SEQ ID NO: 215130 - RNA, 20 nt, Human
uggcaggaauagggccagag

SEQ ID NO: 215131 - RNA, 22 nt, Human
accugauguauagauucuagau

SEQ ID NO: 215132 - RNA, 22 nt, Human
aggagcucuugaugcuugaggg

SEQ ID NO: 215133 - RNA, 22 nt, Human
uggcucaguggcagccgcagcu

SEQ ID NO: 215134 - RNA, 22 nt, Human
acacacuguugcucauccaggc

SEQ ID NO: 215135 - RNA, 20 nt, Human
ccugucaucccagcauuuug

SEQ ID NO: 215136 - RNA, 22 nt, Human
ggcagguggaaguuggcagagc

SEQ ID NO: 215137 - RNA, 22 nt, Human
aucugccucuucuucauugcga

SEQ ID NO: 215138 - RNA, 19 nt, Human
gucucuggauuucaggucc

SEQ ID NO: 215139 - RNA, 22 nt, Human
uaagcauuaugguaaagaagua

SEQ ID NO: 215140 - RNA, 22 nt, Human
uagguagauacauguguuggcu

SEQ ID NO: 215141 - RNA, 20 nt, Human
uacaacaaguagagacauac

SEQ ID NO: 215142 - RNA, 22 nt, Human
agcagggcagcugaugcgcacg

SEQ ID NO: 215143 - RNA, 22 nt, Human
cagcacuugagcuuucauguaa

SEQ ID NO: 215144 - RNA, 19 nt, Human
aaagcagaggagcaucuga

SEQ ID NO: 215145 - RNA, 22 nt, Human
gggugggaaggcuaagggauug

SEQ ID NO: 215146 - RNA, 22 nt, Human
ccagggugggguccaggaacca

SEQ ID NO: 215147 - RNA, 22 nt, Human
agcuuagaauguguuaggaaag

SEQ ID NO: 215148 - RNA, 22 nt, Human
uuagguuuaagugacuggaauc

SEQ ID NO: 215149 - RNA, 22 nt, Human
ucagaguguuuuacuaaacaag

SEQ ID NO: 215150 - RNA, 22 nt, Human
aacuugaaccacagaagcugcc

SEQ ID NO: 215151 - RNA, 23 nt, Human
aggaaguuaaggcagacagacag

SEQ ID NO: 215152 - RNA, 22 nt, Human
uagugucagggagugauaaaug

SEQ ID NO: 215153 - RNA, 22 nt, Human
uagaaagcaugcaaguuugaug

SEQ ID NO: 215154 - RNA, 22 nt, Human
uccuuggaaauuucaucagaca

SEQ ID NO: 215155 - RNA, 19 nt, Human
cccuggcaggcaagccugg

SEQ ID NO: 215156 - RNA, 22 nt, Human
ucagugucaucacuuaauauaa

SEQ ID NO: 215157 - RNA, 22 nt, Human
ggaggccuggacuuccugaugg

SEQ ID NO: 215158 - RNA, 22 nt, Human
aggcuagggccauggcugguga

SEQ ID NO: 215159 - RNA, 22 nt, Human
auucugauaucuuauucuagcu

SEQ ID NO: 215160 - RNA, 22 nt, Human
gagcucuuccccaucuuacauc

SEQ ID NO: 215161 - RNA, 22 nt, Human
uaucuagauggauuuuagugaa

SEQ ID NO: 215162 - RNA, 22 nt, Human
uaggaaaugcuccauugcauaa

SEQ ID NO: 215163 - RNA, 20 nt, Human
caucuuuggcaggacuccuu

SEQ ID NO: 215164 - RNA, 22 nt, Human
ggucccagcugcucaagaggcu

SEQ ID NO: 215165 - RNA, 22 nt, Human
uagaauguagugcuucaagauu

SEQ ID NO: 215166 - RNA, 22 nt, Human
gaaauaacagcucuggaagagu

SEQ ID NO: 215167 - RNA, 22 nt, Human
auucacaugcccaagcagcacc

SEQ ID NO: 215168 - RNA, 21 nt, Human
ccagcccagccuccuucucuu

SEQ ID NO: 215169 - RNA, 22 nt, Human
uucuggcucuccccugcugggu

SEQ ID NO: 215170 - RNA, 22 nt, Human
ugagagaguaauugagugguaa

SEQ ID NO: 215171 - RNA, 22 nt, Human
cuguuauuuuauaauucaagaa

SEQ ID NO: 215172 - RNA, 18 nt, Human
gcagguguggagaagggg

SEQ ID NO: 215173 - RNA, 22 nt, Human
caagcauuuauuauaauuauca

SEQ ID NO: 215174 - RNA, 22 nt, Human
agggccugggauguccuccuag

SEQ ID NO: 215175 - RNA, 22 nt, Human
uuaguagaauguuauagcaauu

SEQ ID NO: 215176 - RNA, 22 nt, Human
acagcagcuuccugacuguacu

SEQ ID NO: 215177 - RNA, 22 nt, Human
uuggaucacucugaagccuuac

SEQ ID NO: 215178 - RNA, 22 nt, Human
uggcaaagcuagacauucccuc

SEQ ID NO: 215179 - RNA, 22 nt, Human
acaaaauuaugaagaggccuug

SEQ ID NO: 215180 - RNA, 22 nt, Human
uccuggagcuggugucuuuccc

SEQ ID NO: 215181 - RNA, 22 nt, Human
cuggggaacgcagcgagcagcg

SEQ ID NO: 215182 - RNA, 22 nt, Human
gcccugagugccuguguaagaa

SEQ ID NO: 215183 - RNA, 22 nt, Human
gccuguuuaaguauucugacau

SEQ ID NO: 215184 - RNA, 22 nt, Human
guugggaaggcaagaaguagaa

SEQ ID NO: 215185 - RNA, 22 nt, Human
uucaguuucuaaagauguuccu

SEQ ID NO: 215186 - RNA, 22 nt, Human
cagguauuaauaaauggagagu

SEQ ID NO: 215187 - RNA, 22 nt, Human
ucuucugugagaauucaagcaa

SEQ ID NO: 215188 - RNA, 22 nt, Human
cagccagaaagucuguuaggga

SEQ ID NO: 215189 - RNA, 22 nt, Human
caggagcugggucuggaagcag

SEQ ID NO: 215190 - RNA, 21 nt, Human
aaacugaccuugccugagaca

SEQ ID NO: 215191 - RNA, 22 nt, Human
aaaagacauaugugggcauucu

SEQ ID NO: 215192 - RNA, 22 nt, Human
uuauuucuacuauuuugccuga

SEQ ID NO: 215193 - RNA, 22 nt, Human
ggaccaguuucaaacuguacca

SEQ ID NO: 215194 - RNA, 22 nt, Human
aacaggcuuuuggaaaguuaca

SEQ ID NO: 215195 - RNA, 23 nt, Human
cagugcagggcaacucagacucc

SEQ ID NO: 215196 - RNA, 20 nt, Human
gccauccagccucccaggag

SEQ ID NO: 215197 - RNA, 22 nt, Human
ucaggcugccuaucagacugug

SEQ ID NO: 215198 - RNA, 22 nt, Human
aaauacauaaagguuguaccag

SEQ ID NO: 215199 - RNA, 22 nt, Human
acaggaagaaagugcaguagau

SEQ ID NO: 215200 - RNA, 22 nt, Human
gagcuacacugauucauuuguu

SEQ ID NO: 215201 - RNA, 22 nt, Human
uuacaagcuaauuguuucagcu

SEQ ID NO: 215202 - RNA, 22 nt, Human
gggccugucucacucccugguu

SEQ ID NO: 215203 - RNA, 22 nt, Human
gcuuuacugagaugacacaggg

SEQ ID NO: 215204 - RNA, 22 nt, Human
aguuugaagauuaugccagagu

SEQ ID NO: 215205 - RNA, 22 nt, Human
gugauaggcauuuaacucuaag

SEQ ID NO: 215206 - RNA, 22 nt, Human
aggaaugugacuauuuuuucag

SEQ ID NO: 215207 - RNA, 21 nt, Human
cuguggaagggaacuagaggg

SEQ ID NO: 215208 - RNA, 22 nt, Human
aggagggacaccaauauauguu

SEQ ID NO: 215209 - RNA, 22 nt, Human
uuacacagugcacaagcagagu

SEQ ID NO: 215210 - RNA, 23 nt, Human
acacguguguguacauagauagu

SEQ ID NO: 215211 - RNA, 22 nt, Human
gggcggggggagcuggaaugaa

SEQ ID NO: 215212 - RNA, 22 nt, Human
acuagaaacuaauggauuauua

SEQ ID NO: 215213 - RNA, 22 nt, Human
caaguccaagaucaagaagcca

SEQ ID NO: 215214 - RNA, 22 nt, Human
ccugccagggccuuggaagaaa

SEQ ID NO: 215215 - RNA, 20 nt, Human
cccaggaguuugcucuuacu

SEQ ID NO: 215216 - RNA, 22 nt, Human
uacaaagugaaauaauucugag

SEQ ID NO: 215217 - RNA, 22 nt, Human
gcucucuugguggcuguccugg

SEQ ID NO: 215218 - RNA, 22 nt, Human
aggagccugugccuggcacucc

SEQ ID NO: 215219 - RNA, 22 nt, Human
acuccagguuuucucucaaguu

SEQ ID NO: 215220 - RNA, 22 nt, Human
caguuacauauuuaguagguua

SEQ ID NO: 215221 - RNA, 22 nt, Human
cuuuacagccuccagaaggaac

SEQ ID NO: 215222 - RNA, 22 nt, Human
gcuuacaagaucgugcuccagu

SEQ ID NO: 215223 - RNA, 17 nt, Human
cagcccugccguuccca

SEQ ID NO: 215224 - RNA, 17 nt, Human
acagugucuaugaaaug

SEQ ID NO: 215225 - RNA, 22 nt, Human
ggcuuuaugcagggauagaaau

SEQ ID NO: 215226 - RNA, 22 nt, Human
aggccugccuggaucacacaga

SEQ ID NO: 215227 - RNA, 22 nt, Human
ucugugucugguugggccagua

SEQ ID NO: 215228 - RNA, 22 nt, Human
aaucaaagaaugggcuaguugg

SEQ ID NO: 215229 - RNA, 22 nt, Human
cuccugggcuucgaaggcuccc

SEQ ID NO: 215230 - RNA, 22 nt, Human
ucagaauaaacaugggcauggg

SEQ ID NO: 215231 - RNA, 20 nt, Human
cugucuugugggcuuccccu

SEQ ID NO: 215232 - RNA, 22 nt, Human
caggccuugggacccagacugg

SEQ ID NO: 215233 - RNA, 22 nt, Human
uuucugaggaauuaauacagaa

SEQ ID NO: 215234 - RNA, 22 nt, Human
uuugaaagacagaauauuuuug

SEQ ID NO: 215235 - RNA, 22 nt, Human
uugaagaggacuuugcagcugu

SEQ ID NO: 215236 - RNA, 22 nt, Human
ggccaagguguucugauaugcc

SEQ ID NO: 215237 - RNA, 22 nt, Human
cacaggaaucagcauuaauggc

SEQ ID NO: 215238 - RNA, 19 nt, Human
cucugccucuggcuguggc

SEQ ID NO: 215239 - RNA, 22 nt, Human
guucuucaggcugugcucuaga

SEQ ID NO: 215240 - RNA, 23 nt, Human
aggguccagggaucaccaggugu

SEQ ID NO: 215241 - RNA, 22 nt, Human
gccaggcugacucccccggccu

SEQ ID NO: 215242 - RNA, 16 nt, Human
cucuuugggcuuccag

SEQ ID NO: 215243 - RNA, 22 nt, Human
uauccaaaguggcauauuauag

SEQ ID NO: 215244 - RNA, 22 nt, Human
ucagaacagaagaaggaacacg

SEQ ID NO: 215245 - RNA, 22 nt, Human
agaaggcuggcccuggguggcc

SEQ ID NO: 215246 - RNA, 22 nt, Human
ucaacugguucuugaauguaua

SEQ ID NO: 215247 - RNA, 22 nt, Human
augcugagacuggagcagcugg

SEQ ID NO: 215248 - RNA, 22 nt, Human
guggggcuggaagauggguacu

SEQ ID NO: 215249 - RNA, 22 nt, Human
ucccaaguacuaccaaucuaau

SEQ ID NO: 215250 - RNA, 22 nt, Human
ucccugaugccuugauccgugg

SEQ ID NO: 215251 - RNA, 22 nt, Human
uuggcagaggggccaccugccc

SEQ ID NO: 215252 - RNA, 22 nt, Human
ccuggcucagaccccaguucug

SEQ ID NO: 215253 - RNA, 22 nt, Human
agugaauucuccacccaguagg

SEQ ID NO: 215254 - RNA, 21 nt, Human
uucaauacuauuucaauaguc

SEQ ID NO: 215255 - RNA, 22 nt, Human
auucacaauuagaaguagauaa

SEQ ID NO: 215256 - RNA, 22 nt, Human
ucucuguacaguacaugccgug

SEQ ID NO: 215257 - RNA, 22 nt, Human
gaaggccugugguagugagacg

SEQ ID NO: 215258 - RNA, 22 nt, Human
gaucuuugcaaacuuugucacu

SEQ ID NO: 215259 - RNA, 22 nt, Human
auguucauuagucaacauuucu

SEQ ID NO: 215260 - RNA, 22 nt, Human
uuagggcaaaguuucaacaguu

SEQ ID NO: 215261 - RNA, 22 nt, Human
uaggugcaggucacaagggaug

SEQ ID NO: 215262 - RNA, 22 nt, Human
acccaggaggcagagguugcag

SEQ ID NO: 215263 - RNA, 22 nt, Human
aggcccaguuauccuacuuguu

SEQ ID NO: 215264 - RNA, 22 nt, Human
caagggcauugcuugggaccuu

SEQ ID NO: 215265 - RNA, 22 nt, Human
ugauccauauguguuacuucuc

SEQ ID NO: 215266 - RNA, 22 nt, Human
ucacaucuaauucgguuagguu

SEQ ID NO: 215267 - RNA, 22 nt, Human
uagcuauuuagcccagauaagu

SEQ ID NO: 215268 - RNA, 22 nt, Human
acaagauuuugucugguagggu

SEQ ID NO: 215269 - RNA, 22 nt, Human
auggcagauggcuggagcaggu

SEQ ID NO: 215270 - RNA, 22 nt, Human
cagcauggagacaaagugggca

SEQ ID NO: 215271 - RNA, 22 nt, Human
cagguucuuaacuuguucuucc

SEQ ID NO: 215272 - RNA, 22 nt, Human
cugucuggaaugcaguacauag

SEQ ID NO: 215273 - RNA, 22 nt, Human
uacucaguuuaugauuucaagu

SEQ ID NO: 215274 - RNA, 22 nt, Human
uuucacagguacaaacacuccu

SEQ ID NO: 215275 - RNA, 22 nt, Human
gcagggccagugcagagaggaa

SEQ ID NO: 215276 - RNA, 22 nt, Human
uuuuaaacuccccuaguuggug

SEQ ID NO: 215277 - RNA, 22 nt, Human
ugaaauguagauuaggcauucu

SEQ ID NO: 215278 - RNA, 22 nt, Human
uuuuccucuguaugcgugagau

SEQ ID NO: 215279 - RNA, 22 nt, Human
ucagaugcuagggcugagcuau

SEQ ID NO: 215280 - RNA, 22 nt, Human
agcgugaauuaguugguacaca

SEQ ID NO: 215281 - RNA, 22 nt, Human
ugggagcagccaacauggccuu

SEQ ID NO: 215282 - RNA, 22 nt, Human
ugaaacaguagucuguggguuu

SEQ ID NO: 215283 - RNA, 22 nt, Human
acccagccuacaaagcucaccu

SEQ ID NO: 215284 - RNA, 22 nt, Human
uuacagaauguucuuccaacag

SEQ ID NO: 215285 - RNA, 22 nt, Human
uggcagagucucuccuuuccag

SEQ ID NO: 215286 - RNA, 22 nt, Human
gcccuggccuucaucucagaca

SEQ ID NO: 215287 - RNA, 22 nt, Human
aggcucagugauguaaaauaua

SEQ ID NO: 215288 - RNA, 22 nt, Human
cagaaaucuccaugucagacau

SEQ ID NO: 215289 - RNA, 22 nt, Human
uuguugccaaauguaaaauaug

SEQ ID NO: 215290 - RNA, 22 nt, Human
uucugaaauaggagauagcugu

SEQ ID NO: 215291 - RNA, 22 nt, Human
gggaacagcauaucugaagggu

SEQ ID NO: 215292 - RNA, 22 nt, Human
uccuccaaggcagggggagaga

SEQ ID NO: 215293 - RNA, 22 nt, Human
caaaagcagcaaguuuauaugu

SEQ ID NO: 215294 - RNA, 22 nt, Human
uugcaacuucucccaucacucu

SEQ ID NO: 215295 - RNA, 22 nt, Human
ucugugcuagaggaguuggcca

SEQ ID NO: 215296 - RNA, 17 nt, Human
agcuggguucucaggaa

SEQ ID NO: 215297 - RNA, 22 nt, Human
accugccuaucagcugccugcu

SEQ ID NO: 215298 - RNA, 22 nt, Human
acuaaaacaguggcuaguagac

SEQ ID NO: 215299 - RNA, 22 nt, Human
cugaggcaugaaugugggcuuu

SEQ ID NO: 215300 - RNA, 21 nt, Human
acagcagacaggcuuaggacc

SEQ ID NO: 215301 - RNA, 22 nt, Human
gggcuccaguuuggccaggaag

SEQ ID NO: 215302 - RNA, 22 nt, Human
agaauuuagcuccuuggucaua

SEQ ID NO: 215303 - RNA, 21 nt, Human
ggagggcagcccagacuggcu

SEQ ID NO: 215304 - RNA, 22 nt, Human
gacagcaaagcagagccaaggc

SEQ ID NO: 215305 - RNA, 18 nt, Human
cuuguucuucucuuggcg

SEQ ID NO: 215306 - RNA, 22 nt, Human
acacauguuuccaaaagcaccc

SEQ ID NO: 215307 - RNA, 22 nt, Human
gagcuacaggcagcugagcccu

SEQ ID NO: 215308 - RNA, 22 nt, Human
gcagcaggcacggucucgacau

SEQ ID NO: 215309 - RNA, 22 nt, Human
gauguacuugccuuaucuaucc

SEQ ID NO: 215310 - RNA, 21 nt, Human
gcugugcaggauugaaagcag

SEQ ID NO: 215311 - RNA, 22 nt, Human
gcaggcagguggcaucuuguga

SEQ ID NO: 215312 - RNA, 22 nt, Human
agguccagugcucuuggugguu

SEQ ID NO: 215313 - RNA, 22 nt, Human
aagucagaauaauguuucuuuu

SEQ ID NO: 215314 - RNA, 22 nt, Human
accaggcaugauguggagcaca

SEQ ID NO: 215315 - RNA, 22 nt, Human
uaaaggauuuuguauaauauaa

SEQ ID NO: 215316 - RNA, 16 nt, Human
cacauauauuuauaug

SEQ ID NO: 215317 - RNA, 18 nt, Human
ucaugucucacaggugau

SEQ ID NO: 215318 - RNA, 22 nt, Human
gggugcugaggaagacagcagg

SEQ ID NO: 215319 - RNA, 22 nt, Human
guacauuuacugaugaaaagua

SEQ ID NO: 215320 - RNA, 23 nt, Human
agcaccauuacaguuugauuggg

SEQ ID NO: 215321 - RNA, 22 nt, Human
cccugaugacacgggcaucagg

SEQ ID NO: 215322 - RNA, 22 nt, Human
uucaaagcaagacacaauuccu

SEQ ID NO: 215323 - RNA, 21 nt, Human
agugugugauaggcaggaaga

SEQ ID NO: 215324 - RNA, 18 nt, Human
ucaggagacacagacgca

SEQ ID NO: 215325 - RNA, 22 nt, Human
gggcaggugccagcucccuguc

SEQ ID NO: 215326 - RNA, 22 nt, Human
gagcaggccuggggugaggccu

SEQ ID NO: 215327 - RNA, 22 nt, Human
agguggcaugagacuguaccag

SEQ ID NO: 215328 - RNA, 17 nt, Human
ugaggccugcaucagug

SEQ ID NO: 215329 - RNA, 22 nt, Human
uguccagagucacagagcucaa

SEQ ID NO: 215330 - RNA, 22 nt, Human
uggcaagaaacugaggccugcu

SEQ ID NO: 215331 - RNA, 22 nt, Human
guggcuucaucaacugugcuua

SEQ ID NO: 215332 - RNA, 22 nt, Human
aguccuagcccuggauccauca

SEQ ID NO: 215333 - RNA, 22 nt, Human
uucugacauauccagucucagu

SEQ ID NO: 215334 - RNA, 22 nt, Human
gaaugauaaauggaagcagcau

SEQ ID NO: 215335 - RNA, 22 nt, Human
aagaugauaggacuugcuuaag

SEQ ID NO: 215336 - RNA, 22 nt, Human
ugcuugaagccuacauucguca

SEQ ID NO: 215337 - RNA, 22 nt, Human
aaaaugaugcuguaauuuggca

SEQ ID NO: 215338 - RNA, 22 nt, Human
acaaggcucuaauuucauugaa

SEQ ID NO: 215339 - RNA, 22 nt, Human
accaaggagccacauacaaccu

SEQ ID NO: 215340 - RNA, 22 nt, Human
uaaguguuguuuucaagagaua

SEQ ID NO: 215341 - RNA, 22 nt, Human
aaggcuuuugggaauuuucaac

SEQ ID NO: 215342 - RNA, 22 nt, Human
cuguucauggaaaaauaguugg

SEQ ID NO: 215343 - RNA, 22 nt, Human
uucccagagaaggaugaaaaag

SEQ ID NO: 215344 - RNA, 22 nt, Human
uaagaauuaucucauggauaau

SEQ ID NO: 215345 - RNA, 22 nt, Human
uauauaauuuguaaaagcaccu

SEQ ID NO: 215346 - RNA, 22 nt, Human
auugcuggcccagaugcuuuag

SEQ ID NO: 215347 - RNA, 22 nt, Human
ugucauuuucuaaucuguuguc

SEQ ID NO: 215348 - RNA, 22 nt, Human
uuaaaugacuuuuauuauucuc

SEQ ID NO: 215349 - RNA, 22 nt, Human
gcuuucugauugcgaaaacaaa

SEQ ID NO: 215350 - RNA, 22 nt, Human
ucucaaauuuauacagaguuca

SEQ ID NO: 215351 - RNA, 21 nt, Human
aggaaguggccagauugggaa

SEQ ID NO: 215352 - RNA, 22 nt, Human
cauccagaguccaaggcugggc

SEQ ID NO: 215353 - RNA, 20 nt, Human
acucaaaucaccugccucaa

SEQ ID NO: 215354 - RNA, 22 nt, Human
uucucuuuuugcaucucaaccu

SEQ ID NO: 215355 - RNA, 22 nt, Human
uagcaagacaacuuuucucagu

SEQ ID NO: 215356 - RNA, 22 nt, Human
gcagucuaucuugugauuuaac

SEQ ID NO: 215357 - RNA, 22 nt, Human
gcugcccucugugacccggccc

SEQ ID NO: 215358 - RNA, 22 nt, Human
cuuucuuccauagggcccaguc

SEQ ID NO: 215359 - RNA, 16 nt, Human
agagguuuacagccug

SEQ ID NO: 215360 - RNA, 22 nt, Human
ucuucagagauguaacauaugg

SEQ ID NO: 215361 - RNA, 22 nt, Human
guucagagugggaaugaucacu

SEQ ID NO: 215362 - RNA, 22 nt, Human
ugaaacacugcgauaaaauccu

SEQ ID NO: 215363 - RNA, 21 nt, Human
uucuccccagcgaauccucgg

SEQ ID NO: 215364 - RNA, 22 nt, Human
gaaagcagcuaagucuuaugau

SEQ ID NO: 215365 - RNA, 22 nt, Human
cugagcccaggcgggagcugag

SEQ ID NO: 215366 - RNA, 22 nt, Human
uauuucuuguuauucucguuga

SEQ ID NO: 215367 - RNA, 22 nt, Human
gggucagggcuggcugucguca

SEQ ID NO: 215368 - RNA, 19 nt, Human
gaggugucuuuccugagua

SEQ ID NO: 215369 - RNA, 22 nt, Human
ucagacaggcuggacagcuugc

SEQ ID NO: 215370 - RNA, 22 nt, Human
acacaggaagcaauuucagagc

SEQ ID NO: 215371 - RNA, 21 nt, Human
gcagcagaggcuugacagaca

SEQ ID NO: 215372 - RNA, 22 nt, Human
guccugugaugaguaccaggug

SEQ ID NO: 215373 - RNA, 22 nt, Human
aguuauguccucagcaaaucaa

SEQ ID NO: 215374 - RNA, 22 nt, Human
aggaagaaaugugacuucaaac

SEQ ID NO: 215375 - RNA, 22 nt, Human
ccuggcugcaguuuuugcagaa

SEQ ID NO: 215376 - RNA, 22 nt, Human
uagaguguuguaauugaaaagg

SEQ ID NO: 215377 - RNA, 20 nt, Human
ggagcuggcauccagccucu

SEQ ID NO: 215378 - RNA, 22 nt, Human
gucucugugguacguuucaucc

SEQ ID NO: 215379 - RNA, 18 nt, Human
uugaggaguucacugucu

SEQ ID NO: 215380 - RNA, 22 nt, Human
agucagagaauguuuucaugga

SEQ ID NO: 215381 - RNA, 22 nt, Human
aaagauuucagaagccugugcc

SEQ ID NO: 215382 - RNA, 22 nt, Human
guccagccaggccugucucugg

SEQ ID NO: 215383 - RNA, 22 nt, Human
ucuuaaaugacugauaagagga

SEQ ID NO: 215384 - RNA, 22 nt, Human
uacuuguggcaguuugaauuua

SEQ ID NO: 215385 - RNA, 22 nt, Human
uaauuauucuagucacauagca

SEQ ID NO: 215386 - RNA, 22 nt, Human
gugcuggcaccccucuccaguu

SEQ ID NO: 215387 - RNA, 22 nt, Human
cacagcccccuugacacucugg

SEQ ID NO: 215388 - RNA, 22 nt, Human
agccaugcucaguuccuggagc

SEQ ID NO: 215389 - RNA, 22 nt, Human
aaagccaggaggagggcgcucg

SEQ ID NO: 215390 - RNA, 23 nt, Human
ccucaaauguagccuuuuuccca

SEQ ID NO: 215391 - RNA, 22 nt, Human
ugucaaagacagaaggaaaugg

SEQ ID NO: 215392 - RNA, 22 nt, Human
ugcagggcuuccucuuggaguu

SEQ ID NO: 215393 - RNA, 22 nt, Human
caucaucuggcuuuuagaaaaa

SEQ ID NO: 215394 - RNA, 22 nt, Human
ucuguucuugcuuuucuccaac

SEQ ID NO: 215395 - RNA, 22 nt, Human
caaaauaccacgacuuguuuua

SEQ ID NO: 215396 - RNA, 22 nt, Human
gagcuuggaugucuuuuguuca

SEQ ID NO: 215397 - RNA, 22 nt, Human
aggaccugagaguuggaaaucc

SEQ ID NO: 215398 - RNA, 22 nt, Human
uggauucuaaugcacuucaaau

SEQ ID NO: 215399 - RNA, 22 nt, Human
ggcucugcccgcggcugcccac

SEQ ID NO: 215400 - RNA, 22 nt, Human
gauaaauugcacuuuuucuuac

SEQ ID NO: 215401 - RNA, 23 nt, Human
uaggaagacagcaaaagaaugga

SEQ ID NO: 215402 - RNA, 22 nt, Human
ucugccuuggcaaccacagcuu

SEQ ID NO: 215403 - RNA, 22 nt, Human
ugccuggggauugcucugggcc

SEQ ID NO: 215404 - RNA, 20 nt, Human
aauaaacuacugagagaugu

SEQ ID NO: 215405 - RNA, 22 nt, Human
ugucucugggugauucaguccu

SEQ ID NO: 215406 - RNA, 21 nt, Human
agggaaaaggcugagugaggg

SEQ ID NO: 215407 - RNA, 22 nt, Human
ucuggcucagggcucugaggga

SEQ ID NO: 215408 - RNA, 22 nt, Human
agagcccugacggggacagaug

SEQ ID NO: 215409 - RNA, 22 nt, Human
cagaaaaccugacucuagaacu

SEQ ID NO: 215410 - RNA, 22 nt, Human
uuaucuugguguuuuaguaauu

SEQ ID NO: 215411 - RNA, 22 nt, Human
augucagucuuucugucucaga

SEQ ID NO: 215412 - RNA, 22 nt, Human
agcccagccugauucuacaccc

SEQ ID NO: 215413 - RNA, 22 nt, Human
gaacuacaggugcagcaaguga

SEQ ID NO: 215414 - RNA, 22 nt, Human
acacuugaggaauguggugauu

SEQ ID NO: 215415 - RNA, 22 nt, Human
ugcaaaggggacagaguccacu

SEQ ID NO: 215416 - RNA, 22 nt, Human
gcuuucugguucucaaagcacu

SEQ ID NO: 215417 - RNA, 22 nt, Human
uccaggguugugggcuucagca

SEQ ID NO: 215418 - RNA, 22 nt, Human
caugguuugaugacuggaagga

SEQ ID NO: 215419 - RNA, 22 nt, Human
ugguaccauuucccaggagugu

SEQ ID NO: 215420 - RNA, 22 nt, Human
ucuuuagauguuuagaggaaga

SEQ ID NO: 215421 - RNA, 22 nt, Human
gcaggucuggagggcacugggg

SEQ ID NO: 215422 - RNA, 22 nt, Human
gguccaggaucaaggcaucacc

SEQ ID NO: 215423 - RNA, 22 nt, Human
acagcagaccccagugccaugg

SEQ ID NO: 215424 - RNA, 22 nt, Human
augcagggaccuuugcuuuggu

SEQ ID NO: 215425 - RNA, 21 nt, Human
acaaaggaagucucuuuuaag

SEQ ID NO: 215426 - RNA, 22 nt, Human
ugggcaaaggcuguaacccauc

SEQ ID NO: 215427 - RNA, 22 nt, Human
gggagcuggagcuggaagacuc

SEQ ID NO: 215428 - RNA, 22 nt, Human
gcaggcaggagcccaacugccu

SEQ ID NO: 215429 - RNA, 22 nt, Human
uggagcugagagccaggcuggc

SEQ ID NO: 215430 - RNA, 22 nt, Human
uggacacaucacugcagccacu

SEQ ID NO: 215431 - RNA, 22 nt, Human
ucaaaggguagcccagggaaga

SEQ ID NO: 215432 - RNA, 23 nt, Human
ggcagcucucaucugaugacuga

SEQ ID NO: 215433 - RNA, 22 nt, Human
gaggccugaggcugccuggagc

SEQ ID NO: 215434 - RNA, 18 nt, Human
uggcagugagguaggcau

SEQ ID NO: 215435 - RNA, 22 nt, Human
uuugggaauuguagcugucuug

SEQ ID NO: 215436 - RNA, 22 nt, Human
agcuuguuaaggaugcauauua

SEQ ID NO: 215437 - RNA, 22 nt, Human
cagcugugggccugacguggca

SEQ ID NO: 215438 - RNA, 20 nt, Human
gggcuagaccagggcagagg

SEQ ID NO: 215439 - RNA, 22 nt, Human
ucacauucuagaauguuaucgu

SEQ ID NO: 215440 - RNA, 22 nt, Human
cuucagaaauaacaacaauuac

SEQ ID NO: 215441 - RNA, 22 nt, Human
ucaucugucauccacaaagcug

SEQ ID NO: 215442 - RNA, 22 nt, Human
uggaggagaccgcauuuuauuu

SEQ ID NO: 215443 - RNA, 22 nt, Human
acaagagcccuuucagauugac

SEQ ID NO: 215444 - RNA, 22 nt, Human
cugagcauggccgguccauggu

SEQ ID NO: 215445 - RNA, 22 nt, Human
acccucagcuggagauugaauu

SEQ ID NO: 215446 - RNA, 22 nt, Human
gcacagaacccuaucuuucgga

SEQ ID NO: 215447 - RNA, 22 nt, Human
cucucuguauguguauauuuau

SEQ ID NO: 215448 - RNA, 22 nt, Human
ucagggggaggagacugccagu

SEQ ID NO: 215449 - RNA, 22 nt, Human
caaggcuuggagagaaugccau

SEQ ID NO: 215450 - RNA, 22 nt, Human
aguggcugccaagauauaauuc

SEQ ID NO: 215451 - RNA, 23 nt, Human
cugcauauggagguuagcaacuc

SEQ ID NO: 215452 - RNA, 22 nt, Human
uaccuggcuggggaauagccag

SEQ ID NO: 215453 - RNA, 22 nt, Human
caggcugcagugcaguggcuau

SEQ ID NO: 215454 - RNA, 22 nt, Human
ucacacauaaaaagaagacuag

SEQ ID NO: 215455 - RNA, 22 nt, Human
ucuggagccuuggaugggaaag

SEQ ID NO: 215456 - RNA, 22 nt, Human
cuggcuuucauuucaagcacgu

SEQ ID NO: 215457 - RNA, 18 nt, Human
cuccaaggucucuggcuu

SEQ ID NO: 215458 - RNA, 22 nt, Human
gacaggugcuaagggaccuggc

SEQ ID NO: 215459 - RNA, 22 nt, Human
uuuguuacauuaaaaaguaggu

SEQ ID NO: 215460 - RNA, 22 nt, Human
gaguucaguguuucuaguagug

SEQ ID NO: 215461 - RNA, 22 nt, Human
agcuccugauacaugcaggaau

SEQ ID NO: 215462 - RNA, 22 nt, Human
uaggugucuuucuguccuuguu

SEQ ID NO: 215463 - RNA, 22 nt, Human
gucaggaugagggaugaggagu

SEQ ID NO: 215464 - RNA, 22 nt, Human
ugagaaaacucaaagacagauc

SEQ ID NO: 215465 - RNA, 20 nt, Human
agguccuguuccuugucucc

SEQ ID NO: 215466 - RNA, 22 nt, Human
cuggagcuccagggucuccucu

SEQ ID NO: 215467 - RNA, 22 nt, Human
agcaaacauucagcagauuggc

SEQ ID NO: 215468 - RNA, 20 nt, Human
uccuggaggcuucauccaua

SEQ ID NO: 215469 - RNA, 22 nt, Human
aggagggaauaagaaagaguca

SEQ ID NO: 215470 - RNA, 17 nt, Human
aaaauucuguaaagagg

SEQ ID NO: 215471 - RNA, 22 nt, Human
aggcucagggacggggccccuu

SEQ ID NO: 215472 - RNA, 22 nt, Human
guccagccccugacucccaggc

SEQ ID NO: 215473 - RNA, 22 nt, Human
gaggagaggcuggacgcgguga

SEQ ID NO: 215474 - RNA, 22 nt, Human
aucauaagacccagccaguauu

SEQ ID NO: 215475 - RNA, 22 nt, Human
ugugugcacaaagaguacaugg

SEQ ID NO: 215476 - RNA, 22 nt, Human
augaggcaauagaauauugaau

SEQ ID NO: 215477 - RNA, 22 nt, Human
ucccaggcucuucaaggaagac

SEQ ID NO: 215478 - RNA, 22 nt, Human
acauauuaacugcacuacacua

SEQ ID NO: 215479 - RNA, 22 nt, Human
acacauauguggcaacuguaga

SEQ ID NO: 215480 - RNA, 22 nt, Human
ugaguggagacuguguguagag

SEQ ID NO: 215481 - RNA, 22 nt, Human
ucuuacgaauucuuagaggaca

SEQ ID NO: 215482 - RNA, 22 nt, Human
aggaugagauugcuguguugua

SEQ ID NO: 215483 - RNA, 22 nt, Human
uauaucuggauggacugcagaa

SEQ ID NO: 215484 - RNA, 22 nt, Human
cugcagaggucuugcugauggu

SEQ ID NO: 215485 - RNA, 22 nt, Human
ugcaaaaacagccuugaggccu

SEQ ID NO: 215486 - RNA, 22 nt, Human
auggcaggauacccaguccggc

SEQ ID NO: 215487 - RNA, 22 nt, Human
uggcccagugcuuaugcucuga

SEQ ID NO: 215488 - RNA, 22 nt, Human
gugggaagagccaauuggggua

SEQ ID NO: 215489 - RNA, 21 nt, Human
gccaagaacaagacagacaug

SEQ ID NO: 215490 - RNA, 22 nt, Human
uccaggaggcucugguugacgu

SEQ ID NO: 215491 - RNA, 22 nt, Human
ucauaaaaugcuccugauauug

SEQ ID NO: 215492 - RNA, 22 nt, Human
uggcucagagcagggacucugg

SEQ ID NO: 215493 - RNA, 22 nt, Human
acagccaaggaauuaggaaggg

SEQ ID NO: 215494 - RNA, 22 nt, Human
ucacugcgcugacugcuacgau

SEQ ID NO: 215495 - RNA, 22 nt, Human
uggggcagcagaccuuucuugg

SEQ ID NO: 215496 - RNA, 18 nt, Human
uuucacagauucaugacu

SEQ ID NO: 215497 - RNA, 22 nt, Human
ugggcaggcaagugaauaccuu

SEQ ID NO: 215498 - RNA, 22 nt, Human
uaguuacauaaaguggacuguu

SEQ ID NO: 215499 - RNA, 22 nt, Human
agggggcaucagguccuggcuc

SEQ ID NO: 215500 - RNA, 22 nt, Human
cagcaggauaugguggagagag

SEQ ID NO: 215501 - RNA, 22 nt, Human
uccuggcagguguauuggcugu

SEQ ID NO: 215502 - RNA, 22 nt, Human
uccuggcuaaugcugcugaugg

SEQ ID NO: 215503 - RNA, 18 nt, Human
acauacauucugucugca

SEQ ID NO: 215504 - RNA, 22 nt, Human
agaaggccaugucuugguacuu

SEQ ID NO: 215505 - RNA, 21 nt, Human
ggacagaggagaaggcacccu

SEQ ID NO: 215506 - RNA, 22 nt, Human
uccuggccuccguucucugcau

SEQ ID NO: 215507 - RNA, 22 nt, Human
ucucaaucaaacaugucugacu

SEQ ID NO: 215508 - RNA, 22 nt, Human
ucuuugaaguaucuuaaauggu

SEQ ID NO: 215509 - RNA, 22 nt, Human
cagaagucuuucuguuucaccu

SEQ ID NO: 215510 - RNA, 22 nt, Human
uacccucacgagacuucaaguc

SEQ ID NO: 215511 - RNA, 22 nt, Human
auggcugcagccggcccugcgc

SEQ ID NO: 215512 - RNA, 22 nt, Human
aagucagacagcugagcugccu

SEQ ID NO: 215513 - RNA, 22 nt, Human
cuccagggaugagacagaguag

SEQ ID NO: 215514 - RNA, 22 nt, Human
gaagaggcaauugaauaagcua

SEQ ID NO: 215515 - RNA, 22 nt, Human
gcaugugugucacuuuccugcc

SEQ ID NO: 215516 - RNA, 22 nt, Human
uauaacugagaagauacauagu

SEQ ID NO: 215517 - RNA, 22 nt, Human
gcucuaggaggugugcuuagaa

SEQ ID NO: 215518 - RNA, 22 nt, Human
aggccucuugucuuccucacau

SEQ ID NO: 215519 - RNA, 22 nt, Human
aaggcaguagguguuucaaacu

SEQ ID NO: 215520 - RNA, 22 nt, Human
agggcuccugaggcccuucugg

SEQ ID NO: 215521 - RNA, 22 nt, Human
cccacaggcccugcugccuuga

SEQ ID NO: 215522 - RNA, 22 nt, Human
aacacacgccuccuccaugggg

SEQ ID NO: 215523 - RNA, 23 nt, Human
uucaaaacuggaaaaucagaugc

SEQ ID NO: 215524 - RNA, 22 nt, Human
acuguuuucuuagcucccugcu

SEQ ID NO: 215525 - RNA, 22 nt, Human
ccaggagcaggagcuggacaga

SEQ ID NO: 215526 - RNA, 22 nt, Human
uucugucuucucgguuguuuac

SEQ ID NO: 215527 - RNA, 22 nt, Human
cauuggaaugcauuugaagaga

SEQ ID NO: 215528 - RNA, 22 nt, Human
augaaacagugaauuagucaag

SEQ ID NO: 215529 - RNA, 22 nt, Human
caggucuuuguugcagcaugga

SEQ ID NO: 215530 - RNA, 22 nt, Human
cccccucugccgggguccuuca

SEQ ID NO: 215531 - RNA, 22 nt, Human
ccucaaauaaguuuuauuuauc

SEQ ID NO: 215532 - RNA, 22 nt, Human
ugaggcucagugagcccugcag

SEQ ID NO: 215533 - RNA, 20 nt, Human
ccugccugccucggcucauu

SEQ ID NO: 215534 - RNA, 22 nt, Human
uagcgagguguuucuaggacug

SEQ ID NO: 215535 - RNA, 22 nt, Human
cccucucugacuucugaacuug

SEQ ID NO: 215536 - RNA, 22 nt, Human
ccucugggccuggaagggcagu

SEQ ID NO: 215537 - RNA, 22 nt, Human
uugaggagguaugacuagguac

SEQ ID NO: 215538 - RNA, 22 nt, Human
aggaagaaacugagcucugaca

SEQ ID NO: 215539 - RNA, 22 nt, Human
cagcugucucagggaggugauc

SEQ ID NO: 215540 - RNA, 22 nt, Human
gcccuaccucaguccagaucug

SEQ ID NO: 215541 - RNA, 19 nt, Human
ugcaagugucuuggacaag

SEQ ID NO: 215542 - RNA, 22 nt, Human
uuccaggaaaacaguuggaagu

SEQ ID NO: 215543 - RNA, 22 nt, Human
uuauuccaguaaucucuguaau

SEQ ID NO: 215544 - RNA, 22 nt, Human
aggcccauguucacuugcucag

SEQ ID NO: 215545 - RNA, 22 nt, Human
ucagaggauuggacuuuuaugu

SEQ ID NO: 215546 - RNA, 22 nt, Human
ggccagcagucacagggucaga

SEQ ID NO: 215547 - RNA, 16 nt, Human
gcacacacaucaauga

SEQ ID NO: 215548 - RNA, 22 nt, Human
gguguccucaugauuuucuaga

SEQ ID NO: 215549 - RNA, 22 nt, Human
gcccagcaggacagagugguuu

SEQ ID NO: 215550 - RNA, 22 nt, Human
uacccagaagauugucagcaaa

SEQ ID NO: 215551 - RNA, 22 nt, Human
aaacacaccuuuggaacuguga

SEQ ID NO: 215552 - RNA, 22 nt, Human
agucacagaaacccaggugugg

SEQ ID NO: 215553 - RNA, 22 nt, Human
gcucagaguuaaauauagugcu

SEQ ID NO: 215554 - RNA, 22 nt, Human
ggcuucucccuucuucugauug

SEQ ID NO: 215555 - RNA, 22 nt, Human
uaggagaggugaauggcacacu

SEQ ID NO: 215556 - RNA, 22 nt, Human
gacaggggucccucugggcugu

SEQ ID NO: 215557 - RNA, 22 nt, Human
ccaugcagugcuggagcugauu

SEQ ID NO: 215558 - RNA, 22 nt, Human
ucugaaucacagucauucagcu

SEQ ID NO: 215559 - RNA, 22 nt, Human
ucagggagggaccugaggcugg

SEQ ID NO: 215560 - RNA, 22 nt, Human
cuuauauuugucaacuuuacaa

SEQ ID NO: 215561 - RNA, 22 nt, Human
auauguuacucuuucaagcaga

SEQ ID NO: 215562 - RNA, 22 nt, Human
cgccugcucuguuuccaugugg

SEQ ID NO: 215563 - RNA, 22 nt, Human
uggcuucuuucuuuccaugugu

SEQ ID NO: 215564 - RNA, 22 nt, Human
gugagggcagaacccccaggcc

SEQ ID NO: 215565 - RNA, 22 nt, Human
caguggagagacuuuuacucuu

SEQ ID NO: 215566 - RNA, 22 nt, Human
ugguauguaauaaguguucuaa

SEQ ID NO: 215567 - RNA, 22 nt, Human
gcugggugucacggggcucgug

SEQ ID NO: 215568 - RNA, 22 nt, Human
caggcaggagccagggauucca

SEQ ID NO: 215569 - RNA, 22 nt, Human
ucaucuuaggugaugagacagu

SEQ ID NO: 215570 - RNA, 22 nt, Human
cacuuuauuauaaauuugagag

SEQ ID NO: 215571 - RNA, 19 nt, Human
gcagugucaugguaggagc

SEQ ID NO: 215572 - RNA, 22 nt, Human
auugucuucuggucuuaucuuu

SEQ ID NO: 215573 - RNA, 22 nt, Human
gcacccaggcuugggcagcaac

SEQ ID NO: 215574 - RNA, 22 nt, Human
ugaauccagagcuauuucgucc

SEQ ID NO: 215575 - RNA, 19 nt, Human
cccaggcuacauggagagg

SEQ ID NO: 215576 - RNA, 22 nt, Human
cucagcagcagggaagagguca

SEQ ID NO: 215577 - RNA, 22 nt, Human
uggcaggucaugaguggccacc

SEQ ID NO: 215578 - RNA, 22 nt, Human
gaacaguacuaagagcuuuaca

SEQ ID NO: 215579 - RNA, 23 nt, Human
acugagggccacuuccaucguga

SEQ ID NO: 215580 - RNA, 22 nt, Human
ucuuucugcacuuaguggggcu

SEQ ID NO: 215581 - RNA, 22 nt, Human
agcccugucucucacuccaggu

SEQ ID NO: 215582 - RNA, 22 nt, Human
caguuauaagacuaagcuauuc

SEQ ID NO: 215583 - RNA, 22 nt, Human
auaguacagauccauuaauuau

SEQ ID NO: 215584 - RNA, 22 nt, Human
gcaaacaugugcucauuuugug

SEQ ID NO: 215585 - RNA, 22 nt, Human
uaggcagauuccauauuuuggc

SEQ ID NO: 215586 - RNA, 22 nt, Human
ugggagcaggugugcuagggaa

SEQ ID NO: 215587 - RNA, 22 nt, Human
aguaaaauuguauuggaaaaca

SEQ ID NO: 215588 - RNA, 22 nt, Human
ggguccagcgacagcaggcuca

SEQ ID NO: 215589 - RNA, 22 nt, Human
agcccuugaguguaucucaaau

SEQ ID NO: 215590 - RNA, 22 nt, Human
gcccuccuuugcuucuccuagu

SEQ ID NO: 215591 - RNA, 22 nt, Human
gagcucaggagcaucagaagaa

SEQ ID NO: 215592 - RNA, 22 nt, Human
auauuaggaguuaaauguauua

SEQ ID NO: 215593 - RNA, 20 nt, Human
gaggcugcggacugcuggac

SEQ ID NO: 215594 - RNA, 22 nt, Human
uucuucaguuugguaaauguaa

SEQ ID NO: 215595 - RNA, 22 nt, Human
uuugcagcaaggagagagcauu

SEQ ID NO: 215596 - RNA, 22 nt, Human
cagugagggcccccuuccaggu

SEQ ID NO: 215597 - RNA, 22 nt, Human
uaggaaacuaauacagucugga

SEQ ID NO: 215598 - RNA, 22 nt, Human
aaguugaaucaguaacacaguu

SEQ ID NO: 215599 - RNA, 22 nt, Human
uacagcugcaaggguuucuggg

SEQ ID NO: 215600 - RNA, 22 nt, Human
agagcuggcugguagcccugau

SEQ ID NO: 215601 - RNA, 22 nt, Human
aacaguuuauguaaauguccag

SEQ ID NO: 215602 - RNA, 22 nt, Human
gcugcugucagcaggccuuguu

SEQ ID NO: 215603 - RNA, 22 nt, Human
uaugauguguaccuaagucacc

SEQ ID NO: 215604 - RNA, 22 nt, Human
gcaaauagaagauucuguugac

SEQ ID NO: 215605 - RNA, 19 nt, Human
ccuggguccacucagacua

SEQ ID NO: 215606 - RNA, 19 nt, Human
aggugcuggugaggguguu

SEQ ID NO: 215607 - RNA, 22 nt, Human
aaguggagccagggaaacugaa

SEQ ID NO: 215608 - RNA, 22 nt, Human
aacuguucacacugaugugacg

SEQ ID NO: 215609 - RNA, 22 nt, Human
ccuaauuaucucccaaagaucc

SEQ ID NO: 215610 - RNA, 22 nt, Human
cauguuucugagaaaaguagga

SEQ ID NO: 215611 - RNA, 23 nt, Human
ugccagaggcagucacaguggug

SEQ ID NO: 215612 - RNA, 22 nt, Human
uguagaaagcucuucugaaauc

SEQ ID NO: 215613 - RNA, 22 nt, Human
uucuaaacuucaauucuaaauu

SEQ ID NO: 215614 - RNA, 22 nt, Human
auuuggaaauguaagaaugcaa

SEQ ID NO: 215615 - RNA, 22 nt, Human
acugggagggucuugaagaggg

SEQ ID NO: 215616 - RNA, 22 nt, Human
gcagggccuuagcagcggcugc

SEQ ID NO: 215617 - RNA, 22 nt, Human
uugcaaaucacaagagcagagc

SEQ ID NO: 215618 - RNA, 22 nt, Human
acagcagggaauaugggaauug

SEQ ID NO: 215619 - RNA, 22 nt, Human
ucccucaucucacaugugugug

SEQ ID NO: 215620 - RNA, 22 nt, Human
cacuguacagcauuaacaaggc

SEQ ID NO: 215621 - RNA, 22 nt, Human
ucucucuugucaccccaucugc

SEQ ID NO: 215622 - RNA, 22 nt, Human
uuguuacuaagccuuuaaauag

SEQ ID NO: 215623 - RNA, 23 nt, Human
acuuugcagagccccuugaaaca

SEQ ID NO: 215624 - RNA, 22 nt, Human
aucauuccacauguaccacuag

SEQ ID NO: 215625 - RNA, 20 nt, Human
cugcccagccacugagggau

SEQ ID NO: 215626 - RNA, 21 nt, Human
ccuccaggagcagagcccuga

SEQ ID NO: 215627 - RNA, 20 nt, Human
ucagugcagauuguccaagu

SEQ ID NO: 215628 - RNA, 22 nt, Human
caugucacuuuaacaaauuagu

SEQ ID NO: 215629 - RNA, 22 nt, Human
aagcaggugugagccagugggc

SEQ ID NO: 215630 - RNA, 22 nt, Human
ucugcaggaugcaaaguguaca

SEQ ID NO: 215631 - RNA, 22 nt, Human
uccauauaccugcagccugguu

SEQ ID NO: 215632 - RNA, 22 nt, Human
uuccuaacaaacuucagugaau

SEQ ID NO: 215633 - RNA, 23 nt, Human
uguaaaagcauuugucagccugg

SEQ ID NO: 215634 - RNA, 22 nt, Human
acccaggguagagugcaguggc

SEQ ID NO: 215635 - RNA, 22 nt, Human
ccuggcaggccccuccuggauu

SEQ ID NO: 215636 - RNA, 22 nt, Human
uuagcuuuuaagugugcuacau

SEQ ID NO: 215637 - RNA, 22 nt, Human
caccagccagagugacagcucc

SEQ ID NO: 215638 - RNA, 22 nt, Human
aaaugcuucaccucauuaaacu

SEQ ID NO: 215639 - RNA, 22 nt, Human
ugcagcugggucugcccuggcu

SEQ ID NO: 215640 - RNA, 22 nt, Human
augaggcaugugaggagaaggg

SEQ ID NO: 215641 - RNA, 22 nt, Human
uggucugguuauuucuuaauga

SEQ ID NO: 215642 - RNA, 22 nt, Human
gcuucccauuauggaaacucuu

SEQ ID NO: 215643 - RNA, 22 nt, Human
gcugucugcugggucgcucagg

SEQ ID NO: 215644 - RNA, 22 nt, Human
ucagcaggguuugacuucuaau

SEQ ID NO: 215645 - RNA, 22 nt, Human
uggcccagagcacugcugggca

SEQ ID NO: 215646 - RNA, 22 nt, Human
auauuauucuaguaacagugau

SEQ ID NO: 215647 - RNA, 22 nt, Human
ugggaaagccagcagugucacc

SEQ ID NO: 215648 - RNA, 21 nt, Human
uggcuuugcccugcuugcccc

SEQ ID NO: 215649 - RNA, 22 nt, Human
ugacagacagcuucucauuuua

SEQ ID NO: 215650 - RNA, 22 nt, Human
uagcuauuguugguaguuaccc

SEQ ID NO: 215651 - RNA, 22 nt, Human
auaaauuuucuugcuguacuua

SEQ ID NO: 215652 - RNA, 22 nt, Human
gagcugaaauaugaagccaauu

SEQ ID NO: 215653 - RNA, 22 nt, Human
ucuuccagcuccccacgguguc

SEQ ID NO: 215654 - RNA, 22 nt, Human
acacauuaggcagugcuuaaau

SEQ ID NO: 215655 - RNA, 22 nt, Human
cuggcugggcagacagaaugcu

SEQ ID NO: 215656 - RNA, 22 nt, Human
ggagaagcaggugcuuuggguc

SEQ ID NO: 215657 - RNA, 22 nt, Human
cuacugaguccuucagcugcca

SEQ ID NO: 215658 - RNA, 22 nt, Human
uguuuucauggagaugguggcg

SEQ ID NO: 215659 - RNA, 22 nt, Human
gccaccccaaccucccuaaguu

SEQ ID NO: 215660 - RNA, 22 nt, Human
uuguagcuuuuuaaugugcugc

SEQ ID NO: 215661 - RNA, 22 nt, Human
uuggccuaccugggaaugcugg

SEQ ID NO: 215662 - RNA, 19 nt, Human
uugcuucaugucuuuugcu

SEQ ID NO: 215663 - RNA, 22 nt, Human
auguuucauuuagauaucaggc

SEQ ID NO: 215664 - RNA, 22 nt, Human
cccaggaaugagcaggcagggg

SEQ ID NO: 215665 - RNA, 22 nt, Human
cuacuucugugaugaaacuaca

SEQ ID NO: 215666 - RNA, 22 nt, Human
cagggacuacagccagcccucc

SEQ ID NO: 215667 - RNA, 22 nt, Human
uuacauucaaggaacucauucu

SEQ ID NO: 215668 - RNA, 22 nt, Human
aggcucuguaugaagguuuggg

SEQ ID NO: 215669 - RNA, 22 nt, Human
gcuggguccaugguccucgggu

SEQ ID NO: 215670 - RNA, 20 nt, Human
cuguuaaaagguaugaauuc

SEQ ID NO: 215671 - RNA, 22 nt, Human
aaggcuagagagguauucaagu

SEQ ID NO: 215672 - RNA, 20 nt, Human
uguguccaucaucugggcac

SEQ ID NO: 215673 - RNA, 17 nt, Human
gagcucuguggcacaag

SEQ ID NO: 215674 - RNA, 22 nt, Human
gagccugggacugggggucaug

SEQ ID NO: 215675 - RNA, 22 nt, Human
gaugauggguugaugugaaggg

SEQ ID NO: 215676 - RNA, 22 nt, Human
cugggccuggagcccacgagcc

SEQ ID NO: 215677 - RNA, 22 nt, Human
uuccugaggcucaucggagucg

SEQ ID NO: 215678 - RNA, 22 nt, Human
ugaugaggcauaugcuacacau

SEQ ID NO: 215679 - RNA, 22 nt, Human
cauuuguaggaugcuucuuguu

SEQ ID NO: 215680 - RNA, 22 nt, Human
gggcuucugggcaccacucccu

SEQ ID NO: 215681 - RNA, 22 nt, Human
guuguacagcauccagugcaga

SEQ ID NO: 215682 - RNA, 19 nt, Human
ugcuguccucagaguaagu

SEQ ID NO: 215683 - RNA, 22 nt, Human
aguuauuuaaaaugauuguccu

SEQ ID NO: 215684 - RNA, 22 nt, Human
cucugucccagacccaccucuc

SEQ ID NO: 215685 - RNA, 22 nt, Human
agaaggaguguacaggucaugc

SEQ ID NO: 215686 - RNA, 22 nt, Human
ucucagagaagugaugagcaau

SEQ ID NO: 215687 - RNA, 22 nt, Human
uacacaugugcacgcguguccu

SEQ ID NO: 215688 - RNA, 22 nt, Human
uuguauuucgaugcacguguag

SEQ ID NO: 215689 - RNA, 22 nt, Human
uuacagugaaguaccauuaaaa

SEQ ID NO: 215690 - RNA, 22 nt, Human
uauacaaugaguacauucuggg

SEQ ID NO: 215691 - RNA, 22 nt, Human
gaaauauucuugucuuguuuuc

SEQ ID NO: 215692 - RNA, 22 nt, Human
ucacucuguuagaggaaagugc

SEQ ID NO: 215693 - RNA, 22 nt, Human
uaguauuuuagaaaaccaugaa

SEQ ID NO: 215694 - RNA, 22 nt, Human
agacacaggauucugcauuucu

SEQ ID NO: 215695 - RNA, 22 nt, Human
acagcaugagaguagcaaaagg

SEQ ID NO: 215696 - RNA, 22 nt, Human
gccuacaugcuuuuaguguuuc

SEQ ID NO: 215697 - RNA, 22 nt, Human
ggcugcugcccaccccugcaug

SEQ ID NO: 215698 - RNA, 22 nt, Human
uggguuaacaguuuauaccaga

SEQ ID NO: 215699 - RNA, 22 nt, Human
accugcagccacuucucuccuu

SEQ ID NO: 215700 - RNA, 22 nt, Human
aagcuguucugaaucaguaagu

SEQ ID NO: 215701 - RNA, 22 nt, Human
uuucuguagggauuucacaguu

SEQ ID NO: 215702 - RNA, 22 nt, Human
gucaggcauuuaggaugaguuc

SEQ ID NO: 215703 - RNA, 20 nt, Human
gcaaggcacagugaggaggg

SEQ ID NO: 215704 - RNA, 22 nt, Human
cugcugaaguuguuggucuuuu

SEQ ID NO: 215705 - RNA, 22 nt, Human
aggcugaggcuggcagcuccag

SEQ ID NO: 215706 - RNA, 22 nt, Human
agucucucuccucgugguaacc

SEQ ID NO: 215707 - RNA, 22 nt, Human
gcccugcccugagccguagacc

SEQ ID NO: 215708 - RNA, 22 nt, Human
gccugguggacacugggcauca

SEQ ID NO: 215709 - RNA, 22 nt, Human
agucugguugauuccuuugcac

SEQ ID NO: 215710 - RNA, 22 nt, Human
uacuuucuguccuucuguuaaa

SEQ ID NO: 215711 - RNA, 22 nt, Human
caauggauauuuuaugugagaa

SEQ ID NO: 215712 - RNA, 22 nt, Human
aguaaaaauugaggugcaaaau

SEQ ID NO: 215713 - RNA, 22 nt, Human
ccagaggugaacaggaggcugu

SEQ ID NO: 215714 - RNA, 22 nt, Human
cacauucagguggcauguuaga

SEQ ID NO: 215715 - RNA, 22 nt, Human
augcaucuauucccaagggcag

SEQ ID NO: 215716 - RNA, 22 nt, Human
ccauccuaucugaccuacuugu

SEQ ID NO: 215717 - RNA, 22 nt, Human
caaggccuugcugucuccuccu

SEQ ID NO: 215718 - RNA, 20 nt, Human
agcaaaaugcaagauuuuca

SEQ ID NO: 215719 - RNA, 22 nt, Human
ucacaggguuuggaagccuccu

SEQ ID NO: 215720 - RNA, 20 nt, Human
uucuacaaaacugauucuga

SEQ ID NO: 215721 - RNA, 22 nt, Human
aaagugguugcugucagccucu

SEQ ID NO: 215722 - RNA, 22 nt, Human
ucaggcuuugggucaggcucug

SEQ ID NO: 215723 - RNA, 20 nt, Human
aauaaaagaagccuucaccc

SEQ ID NO: 215724 - RNA, 22 nt, Human
ggccucucaugcccagagccaa

SEQ ID NO: 215725 - RNA, 22 nt, Human
cuguggaauugaugcuuagugu

SEQ ID NO: 215726 - RNA, 22 nt, Human
gaggcuggagauauuccaaucu

SEQ ID NO: 215727 - RNA, 23 nt, Human
accaugaugggagugcaaauaag

SEQ ID NO: 215728 - RNA, 22 nt, Human
aagucuaaguuuguaacuugga

SEQ ID NO: 215729 - RNA, 22 nt, Human
cacaugcaccagaaaucaacau

SEQ ID NO: 215730 - RNA, 22 nt, Human
uagcaggguuuugaagaggguu

SEQ ID NO: 215731 - RNA, 20 nt, Human
ugcuuuuauaccuauaauga

SEQ ID NO: 215732 - RNA, 22 nt, Human
ugaaggcuuggauuggucauuu

SEQ ID NO: 215733 - RNA, 22 nt, Human
cugggcucugcaguugauguuu

SEQ ID NO: 215734 - RNA, 22 nt, Human
uugagucugcccaaauuaagaa

SEQ ID NO: 215735 - RNA, 23 nt, Human
ggaggcacuuaggcagagcagag

SEQ ID NO: 215736 - RNA, 22 nt, Human
aucccaccucaaucugaagcuc

SEQ ID NO: 215737 - RNA, 22 nt, Human
aguuuauagcccagauucaugg

SEQ ID NO: 215738 - RNA, 22 nt, Human
ucaggaaauggacaucuuugcu

SEQ ID NO: 215739 - RNA, 22 nt, Human
cuggaaagauuucuuuggaguc

SEQ ID NO: 215740 - RNA, 22 nt, Human
gccugcaggcuguaguuuguga

SEQ ID NO: 215741 - RNA, 22 nt, Human
uugaggagaagacuuugcuucc

SEQ ID NO: 215742 - RNA, 22 nt, Human
gggacaucuuucuagucagggu

SEQ ID NO: 215743 - RNA, 22 nt, Human
uuccagagcaguuuucagauca

SEQ ID NO: 215744 - RNA, 22 nt, Human
caaggacacugagcuuuguaaa

SEQ ID NO: 215745 - RNA, 22 nt, Human
gacuuuauuuccuuauuuguga

SEQ ID NO: 215746 - RNA, 22 nt, Human
cugcugagaaaagacugaggga

SEQ ID NO: 215747 - RNA, 22 nt, Human
caaaguauauuggauugaaugg

SEQ ID NO: 215748 - RNA, 22 nt, Human
gaaaugaaacaggcuuuuaagg

SEQ ID NO: 215749 - RNA, 22 nt, Human
uguuccuucacagcaguggaca

SEQ ID NO: 215750 - RNA, 17 nt, Human
uugagucuggggucuac

SEQ ID NO: 215751 - RNA, 22 nt, Human
uucuuuggggucuccagcauag

SEQ ID NO: 215752 - RNA, 22 nt, Human
cagcugaacauguagagcaucu

SEQ ID NO: 215753 - RNA, 22 nt, Human
gauccugugguuuuccugugca

SEQ ID NO: 215754 - RNA, 22 nt, Human
ucacagaaggagggaagcuagu

SEQ ID NO: 215755 - RNA, 22 nt, Human
uauuuguuucuaguggcagcaa

SEQ ID NO: 215756 - RNA, 22 nt, Human
caucauuuuauuaaccaagaaa

SEQ ID NO: 215757 - RNA, 22 nt, Human
ucuggcccagccccugagguca

SEQ ID NO: 215758 - RNA, 22 nt, Human
uaaauguuuagucuuauuuggg

SEQ ID NO: 215759 - RNA, 22 nt, Human
aggagcucucccaugcugcaga

SEQ ID NO: 215760 - RNA, 22 nt, Human
ugcacccucaucagucaaaugg

SEQ ID NO: 215761 - RNA, 21 nt, Human
uauuucuuugacucucucccu

SEQ ID NO: 215762 - RNA, 22 nt, Human
uuguccuggagguuaauagagu

SEQ ID NO: 215763 - RNA, 22 nt, Human
cuggcuggccauguagagauga

SEQ ID NO: 215764 - RNA, 22 nt, Human
aauagcauagaguuaaaaugca

SEQ ID NO: 215765 - RNA, 23 nt, Human
ucuuuccuaaugaaacagugaaa

SEQ ID NO: 215766 - RNA, 22 nt, Human
ggcuccucucuggccgcucccg

SEQ ID NO: 215767 - RNA, 22 nt, Human
uucaggaauaauuaucauauga

SEQ ID NO: 215768 - RNA, 22 nt, Human
acauagaaccuggcacauagua

SEQ ID NO: 215769 - RNA, 22 nt, Human
uagcuugaguguuucauaaaua

SEQ ID NO: 215770 - RNA, 22 nt, Human
aagcuguuggcagauagcucug

SEQ ID NO: 215771 - RNA, 22 nt, Human
caagaacauugugaucacuuca

SEQ ID NO: 215772 - RNA, 22 nt, Human
acaggcacugucaagucaugaa

SEQ ID NO: 215773 - RNA, 22 nt, Human
uguacaguauauuucaaagcca

SEQ ID NO: 215774 - RNA, 22 nt, Human
aggaaaugcaggcaaauacucu

SEQ ID NO: 215775 - RNA, 22 nt, Human
acacaggaagucagcacugaug

SEQ ID NO: 215776 - RNA, 22 nt, Human
gccucagugauaugugggacaa

SEQ ID NO: 215777 - RNA, 22 nt, Human
cagcugagaagugauagcugca

SEQ ID NO: 215778 - RNA, 22 nt, Human
cucaggcacgggucagugagcg

SEQ ID NO: 215779 - RNA, 21 nt, Human
acagcagggcuggcaugacag

SEQ ID NO: 215780 - RNA, 22 nt, Human
ggguacagagagaugagguaac

SEQ ID NO: 215781 - RNA, 22 nt, Human
aagcccuuggcgcacaccgggc

SEQ ID NO: 215782 - RNA, 22 nt, Human
cauguguccacccuugaacaca

SEQ ID NO: 215783 - RNA, 22 nt, Human
aagaugcuugagaacuguuuga

SEQ ID NO: 215784 - RNA, 22 nt, Human
ucuggcuccacucugugcaugc

SEQ ID NO: 215785 - RNA, 22 nt, Human
ucaggaacccuggucuccugcu

SEQ ID NO: 215786 - RNA, 22 nt, Human
aaggagaaaugguagaugugca

SEQ ID NO: 215787 - RNA, 22 nt, Human
uucugggcucucuuucugugug

SEQ ID NO: 215788 - RNA, 21 nt, Human
ucacacacguuuccaagggca

SEQ ID NO: 215789 - RNA, 22 nt, Human
uuucucugccaguuauuuuccu

SEQ ID NO: 215790 - RNA, 20 nt, Human
ugaucaugugaaagucaugu

SEQ ID NO: 215791 - RNA, 22 nt, Human
acuggcagagacccugauggcc

SEQ ID NO: 215792 - RNA, 22 nt, Human
ucaggcuguuccuguccaaaau

SEQ ID NO: 215793 - RNA, 22 nt, Human
ucaggcagaugcagggauggau

SEQ ID NO: 215794 - RNA, 22 nt, Human
ucccugagaaagcccaggaggu

SEQ ID NO: 215795 - RNA, 22 nt, Human
ccuggcaguggugaagaagagg

SEQ ID NO: 215796 - RNA, 22 nt, Human
uuaguuauacuacugaauggag

SEQ ID NO: 215797 - RNA, 16 nt, Human
gaugagucuuaguggu

SEQ ID NO: 215798 - RNA, 22 nt, Human
uucugacacauuacuacaugga

SEQ ID NO: 215799 - RNA, 22 nt, Human
ccuguccuccggagcgggcugu

SEQ ID NO: 215800 - RNA, 22 nt, Human
uagggcaggugaagaaaagcua

SEQ ID NO: 215801 - RNA, 22 nt, Human
agagcaccccgggaagagcaag

SEQ ID NO: 215802 - RNA, 22 nt, Human
gugcucagguucccaugagugc

SEQ ID NO: 215803 - RNA, 22 nt, Human
ggcagugccugaugcugcagga

SEQ ID NO: 215804 - RNA, 22 nt, Human
ugaggccucuugguauggugug

SEQ ID NO: 215805 - RNA, 22 nt, Human
cccuccccacaaagcuucacac

SEQ ID NO: 215806 - RNA, 18 nt, Human
ugcuggcaacuacuauug

SEQ ID NO: 215807 - RNA, 22 nt, Human
cauccaggcaccacaaccagcu

SEQ ID NO: 215808 - RNA, 22 nt, Human
cucugugggccugugcuuuagu

SEQ ID NO: 215809 - RNA, 22 nt, Human
augcacaguauguagggucuau

SEQ ID NO: 215810 - RNA, 20 nt, Human
cugccuggaggccucuaccu

SEQ ID NO: 215811 - RNA, 22 nt, Human
ggcccagcucuauugaauuaca

SEQ ID NO: 215812 - RNA, 22 nt, Human
uucucugagucuugguuucuua

SEQ ID NO: 215813 - RNA, 22 nt, Human
ucaugccugauuauguuacuca

SEQ ID NO: 215814 - RNA, 22 nt, Human
ugaaagaaggguggaaaaugua

SEQ ID NO: 215815 - RNA, 22 nt, Human
ggguuggauuacuuagggagaa

SEQ ID NO: 215816 - RNA, 22 nt, Human
caauacaucaggucaaaaugug

SEQ ID NO: 215817 - RNA, 22 nt, Human
gagguucaggaaaugggcaaag

SEQ ID NO: 215818 - RNA, 22 nt, Human
cacaggccugggguugagcggg

SEQ ID NO: 215819 - RNA, 22 nt, Human
cuuggcugcuuuugugcacauu

SEQ ID NO: 215820 - RNA, 22 nt, Human
auuugcuugugcuaugaaaguu

SEQ ID NO: 215821 - RNA, 22 nt, Human
cagggaugggauggagucaguu

SEQ ID NO: 215822 - RNA, 22 nt, Human
caaaguauaguguaggauggca

SEQ ID NO: 215823 - RNA, 22 nt, Human
acacagaggcaugacaguggcu

SEQ ID NO: 215824 - RNA, 22 nt, Human
gaggccuggcucugcccuccug

SEQ ID NO: 215825 - RNA, 22 nt, Human
uuauuucaaaagagcuuggggu

SEQ ID NO: 215826 - RNA, 21 nt, Human
gccuugccacaugugccacag

SEQ ID NO: 215827 - RNA, 22 nt, Human
ucuccagggugagcuaggccag

SEQ ID NO: 215828 - RNA, 22 nt, Human
uggcuugggagauucucgaacu

SEQ ID NO: 215829 - RNA, 21 nt, Human
agggucaggaaccaggguacc

SEQ ID NO: 215830 - RNA, 20 nt, Human
ucuguccuuucugcuaaggc

SEQ ID NO: 215831 - RNA, 22 nt, Human
cagaaacagacaugacgcagua

SEQ ID NO: 215832 - RNA, 18 nt, Human
uguggcugguccacacug

SEQ ID NO: 215833 - RNA, 22 nt, Human
aucagagauuguaguaugugca

SEQ ID NO: 215834 - RNA, 22 nt, Human
aaggcuccuuuguaguucuuuu

SEQ ID NO: 215835 - RNA, 22 nt, Human
cagccaggggcuggcguguuga

SEQ ID NO: 215836 - RNA, 22 nt, Human
ucaauuuauguggcuauucauu

SEQ ID NO: 215837 - RNA, 22 nt, Human
ccuguggcugccccgcuguugg

SEQ ID NO: 215838 - RNA, 22 nt, Human
gagggcaggggucuugcacggu

SEQ ID NO: 215839 - RNA, 22 nt, Human
cauucaaacauuaauuuauuca

SEQ ID NO: 215840 - RNA, 18 nt, Human
uggcuggcagugggcagc

SEQ ID NO: 215841 - RNA, 22 nt, Human
ugggcucaaucugcuucuguuu

SEQ ID NO: 215842 - RNA, 22 nt, Human
aggagcucagccauucauuuga

SEQ ID NO: 215843 - RNA, 22 nt, Human
caaaaguaauggcgguuuuuac

SEQ ID NO: 215844 - RNA, 22 nt, Human
uuuggaauaaucagauccuagu

SEQ ID NO: 215845 - RNA, 22 nt, Human
uauaugaugccaaauaaccugu

SEQ ID NO: 215846 - RNA, 22 nt, Human
uucuuuucggccugugagaagg

SEQ ID NO: 215847 - RNA, 22 nt, Human
caaugguugaacccugucauga

SEQ ID NO: 215848 - RNA, 22 nt, Human
aucagaaaggugggcaagcaga

SEQ ID NO: 215849 - RNA, 22 nt, Human
cugggucuggcuacugcuuccu

SEQ ID NO: 215850 - RNA, 22 nt, Human
uccacccugcuuucuuaucucc

SEQ ID NO: 215851 - RNA, 22 nt, Human
gcugccugcucacccggccugg

SEQ ID NO: 215852 - RNA, 22 nt, Human
uccaggagguaugaguggcccc

SEQ ID NO: 215853 - RNA, 22 nt, Human
acuucacuuguaaaugcagccu

SEQ ID NO: 215854 - RNA, 22 nt, Human
cccaggcuccuagaggcccaga

SEQ ID NO: 215855 - RNA, 22 nt, Human
ccccuggguccaggcuucucug

SEQ ID NO: 215856 - RNA, 22 nt, Human
gaaagggucuuugauuucccuc

SEQ ID NO: 215857 - RNA, 23 nt, Human
ucucaggacacacaugucuauca

SEQ ID NO: 215858 - RNA, 18 nt, Human
uggagcugagggcaaugc

SEQ ID NO: 215859 - RNA, 22 nt, Human
aggaccaacauagcagcagugg

SEQ ID NO: 215860 - RNA, 22 nt, Human
uagguaguuuccuguuguuggg

SEQ ID NO: 215861 - RNA, 22 nt, Human
uccucagucguuugagccaaaa

SEQ ID NO: 215862 - RNA, 20 nt, Human
ggcuccuucuuucauggccc

SEQ ID NO: 215863 - RNA, 22 nt, Human
aauagcaaaugcucauuugaaa

SEQ ID NO: 215864 - RNA, 22 nt, Human
acuguggcgucaggaagaaauu

SEQ ID NO: 215865 - RNA, 22 nt, Human
cucugccaucucacuggguccu

SEQ ID NO: 215866 - RNA, 19 nt, Human
ccagagagcuagguacaga

SEQ ID NO: 215867 - RNA, 22 nt, Human
aggucacccguuugacuaucca

SEQ ID NO: 215868 - RNA, 22 nt, Human
caggaaagucuguaaaggaacc

SEQ ID NO: 215869 - RNA, 22 nt, Human
ugaggaugguuaaagaacauug

SEQ ID NO: 215870 - RNA, 22 nt, Human
ucucugagcaccuaagauauau

SEQ ID NO: 215871 - RNA, 22 nt, Human
guuuauucuucagcaacaucug

SEQ ID NO: 215872 - RNA, 22 nt, Human
uugguguacaucuccccuucau

SEQ ID NO: 215873 - RNA, 22 nt, Human
ugggaagcauuaaugauagggg

SEQ ID NO: 215874 - RNA, 22 nt, Human
aagaacugugcuccaggcucca

SEQ ID NO: 215875 - RNA, 23 nt, Human
agcccuugauaauaaagcaccag

SEQ ID NO: 215876 - RNA, 22 nt, Human
agaaucaaagagaaauacuuug

SEQ ID NO: 215877 - RNA, 22 nt, Human
uuggaaaagugaaacuagaugc

SEQ ID NO: 215878 - RNA, 22 nt, Human
gcucugggaauucagaaagccu

SEQ ID NO: 215879 - RNA, 19 nt, Human
ucaaugcaugaaaucagcc

SEQ ID NO: 215880 - RNA, 22 nt, Human
uauugcuggugcuguucugaau

SEQ ID NO: 215881 - RNA, 22 nt, Human
uguuuugguuuaaguauaugaa

SEQ ID NO: 215882 - RNA, 22 nt, Human
gcugagaugucguuagauaucu

SEQ ID NO: 215883 - RNA, 22 nt, Human
ggugagagucuuguggucccag

SEQ ID NO: 215884 - RNA, 22 nt, Human
agaguuuguaguggugaaugua

SEQ ID NO: 215885 - RNA, 22 nt, Human
gacagacaugggacuucauacu

SEQ ID NO: 215886 - RNA, 19 nt, Human
uguggucucuguucucagg

SEQ ID NO: 215887 - RNA, 22 nt, Human
uggcuucugagucuccugacau

SEQ ID NO: 215888 - RNA, 22 nt, Human
cugggcagagcuaacaccugag

SEQ ID NO: 215889 - RNA, 22 nt, Human
uaauuccuagaaauuauucuca

SEQ ID NO: 215890 - RNA, 22 nt, Human
ccuggcugaggggccaaggacc

SEQ ID NO: 215891 - RNA, 22 nt, Human
guccccagcugugacgagagcc

SEQ ID NO: 215892 - RNA, 22 nt, Human
aaucuucacagaaaaaugucug

SEQ ID NO: 215893 - RNA, 22 nt, Human
uaguacaguggagagcaaagaa

SEQ ID NO: 215894 - RNA, 22 nt, Human
gagugcuuugucuuguaauucu

SEQ ID NO: 215895 - RNA, 22 nt, Human
ugggccagcacugggugcucau

SEQ ID NO: 215896 - RNA, 22 nt, Human
agcugguccuaauugagccauu

SEQ ID NO: 215897 - RNA, 21 nt, Human
gaguggaacgcucuucacacc

SEQ ID NO: 215898 - RNA, 22 nt, Human
agccuggcuaaauucucccaug

SEQ ID NO: 215899 - RNA, 22 nt, Human
gagacaggauuuaaccaaagcu

SEQ ID NO: 215900 - RNA, 22 nt, Human
gggguguggacggcugugccag

SEQ ID NO: 215901 - RNA, 22 nt, Human
uccugguguaaugguaagcaug

SEQ ID NO: 215902 - RNA, 22 nt, Human
uuggcagagccccagccuugga

SEQ ID NO: 215903 - RNA, 19 nt, Human
uggcaucuguaaaauggug

SEQ ID NO: 215904 - RNA, 22 nt, Human
cugggccuagaggaagcugaca

SEQ ID NO: 215905 - RNA, 20 nt, Human
ugcuggggacauacagggug

SEQ ID NO: 215906 - RNA, 22 nt, Human
ugccuggguucccaccccaaag

SEQ ID NO: 215907 - RNA, 22 nt, Human
aaacaauguuccuauauuagag

SEQ ID NO: 215908 - RNA, 22 nt, Human
gcugguuucacccaaccgaugu

SEQ ID NO: 215909 - RNA, 22 nt, Human
uucaggauucugugucugacaa

SEQ ID NO: 215910 - RNA, 22 nt, Human
agcagagugccccaucacaagg

SEQ ID NO: 215911 - RNA, 22 nt, Human
ucuggguacuugcaagauuuuc

SEQ ID NO: 215912 - RNA, 22 nt, Human
cagguucuuaaguaacagcaca

SEQ ID NO: 215913 - RNA, 22 nt, Human
cugcccaccacaccugcuccug

SEQ ID NO: 215914 - RNA, 22 nt, Human
ccugccugauuccaggauggcu

SEQ ID NO: 215915 - RNA, 22 nt, Human
cucugugggaggaggaguaggc

SEQ ID NO: 215916 - RNA, 17 nt, Human
gaauccuucucuguucu

SEQ ID NO: 215917 - RNA, 22 nt, Human
acacuuuacucuuacaccauug

SEQ ID NO: 215918 - RNA, 22 nt, Human
aauagaauguaaucuaauacau

SEQ ID NO: 215919 - RNA, 18 nt, Human
ggcuucccuacucacuuc

SEQ ID NO: 215920 - RNA, 22 nt, Human
ugggacagauuauaagucugca

SEQ ID NO: 215921 - RNA, 22 nt, Human
uggagagaagaggcagugugcu

SEQ ID NO: 215922 - RNA, 22 nt, Human
aagauacauauuuguucuagug

SEQ ID NO: 215923 - RNA, 22 nt, Human
auggcuucuagcauugucacaa

SEQ ID NO: 215924 - RNA, 22 nt, Human
agguggaaauggcuuuccuagg

SEQ ID NO: 215925 - RNA, 22 nt, Human
uuaguuuucucaucuaucucac

SEQ ID NO: 215926 - RNA, 23 nt, Human
uauacacauguggcaguauagug

SEQ ID NO: 215927 - RNA, 22 nt, Human
acuuugggaagcugcaauugcc

SEQ ID NO: 215928 - RNA, 22 nt, Human
auggacaaugugaaacuacaag

SEQ ID NO: 215929 - RNA, 23 nt, Human
aggcugagcucucccagcuucag

SEQ ID NO: 215930 - RNA, 22 nt, Human
cccugcagacgucuugaugccu

SEQ ID NO: 215931 - RNA, 22 nt, Human
caggcccugggcaggcacagag

SEQ ID NO: 215932 - RNA, 22 nt, Human
guauuuuaagugacuacuaggu

SEQ ID NO: 215933 - RNA, 22 nt, Human
ugcuggcuccucgaggcuucgu

SEQ ID NO: 215934 - RNA, 22 nt, Human
uaacaugauuugcuauuuagau

SEQ ID NO: 215935 - RNA, 22 nt, Human
gaaguggaauuacugggucaua

SEQ ID NO: 215936 - RNA, 22 nt, Human
gaaggagccgagcucuucccca

SEQ ID NO: 215937 - RNA, 22 nt, Human
ggagguggagcuggaaguucca

SEQ ID NO: 215938 - RNA, 22 nt, Human
uguauucagugauuucacaaua

SEQ ID NO: 215939 - RNA, 22 nt, Human
auugcuuaucuaucuuuaaguc

SEQ ID NO: 215940 - RNA, 22 nt, Human
auauauaugcugauggcugcca

SEQ ID NO: 215941 - RNA, 22 nt, Human
uacaaagccugguagauaucug

SEQ ID NO: 215942 - RNA, 22 nt, Human
aacuucauggguucaaagcugg

SEQ ID NO: 215943 - RNA, 18 nt, Human
gacacauccccaggccuc

SEQ ID NO: 215944 - RNA, 22 nt, Human
ucagaauggcccauaaauaguc

SEQ ID NO: 215945 - RNA, 22 nt, Human
agggucuguggaugcaucuggg

SEQ ID NO: 215946 - RNA, 20 nt, Human
aauuagcuuaagucaaucag

SEQ ID NO: 215947 - RNA, 23 nt, Human
gcucagccucagcaggcccagga

SEQ ID NO: 215948 - RNA, 22 nt, Human
uuuucucaagauccaaugcacu

SEQ ID NO: 215949 - RNA, 22 nt, Human
uccagagcagguggucagaagg

SEQ ID NO: 215950 - RNA, 22 nt, Human
auucaaacuguguuaggcagca

SEQ ID NO: 215951 - RNA, 22 nt, Human
gggaccuggcaccuuugcucug

SEQ ID NO: 215952 - RNA, 22 nt, Human
agagaauuaacauuccauggcu

SEQ ID NO: 215953 - RNA, 18 nt, Human
aaaauaacaaaguuggcu

SEQ ID NO: 215954 - RNA, 22 nt, Human
augguguuuauaggcaaagauc

SEQ ID NO: 215955 - RNA, 22 nt, Human
guucucucugcuuccaagaugg

SEQ ID NO: 215956 - RNA, 22 nt, Human
gcuccagcuccggcuccgaagc

SEQ ID NO: 215957 - RNA, 19 nt, Human
cuuccuggaggagagccuc

SEQ ID NO: 215958 - RNA, 22 nt, Human
ugcugucuguuuacuggcuaua

SEQ ID NO: 215959 - RNA, 22 nt, Human
uuuggcaugggcuauuugcuuu

SEQ ID NO: 215960 - RNA, 21 nt, Human
agcagaggcugccuggugacu

SEQ ID NO: 215961 - RNA, 22 nt, Human
gcuggggagggcgucaaggcca

SEQ ID NO: 215962 - RNA, 22 nt, Human
uuagaagucaucuagucuaaaa

SEQ ID NO: 215963 - RNA, 22 nt, Human
uccugaggcccuguuagggucu

SEQ ID NO: 215964 - RNA, 22 nt, Human
ucaggaaagccuagaagagaac

SEQ ID NO: 215965 - RNA, 22 nt, Human
ugcacacauuaaggauacacag

SEQ ID NO: 215966 - RNA, 22 nt, Human
gacccaggguauccagagcugc

SEQ ID NO: 215967 - RNA, 23 nt, Human
ccucccaccuauuucacuuucuu

SEQ ID NO: 215968 - RNA, 20 nt, Human
auggaggaagggcaagagaa

SEQ ID NO: 215969 - RNA, 22 nt, Human
auguuacuuagaauaauucugg

SEQ ID NO: 215970 - RNA, 22 nt, Human
agggaacuccaugaggccagag

SEQ ID NO: 215971 - RNA, 22 nt, Human
gagucagaaaguagugugccua

SEQ ID NO: 215972 - RNA, 22 nt, Human
cucaaaauccauaaaaucaggu

SEQ ID NO: 215973 - RNA, 22 nt, Human
augcuauacauaugacaucaca

SEQ ID NO: 215974 - RNA, 22 nt, Human
gcaggcuugggacgagcuggag

SEQ ID NO: 215975 - RNA, 22 nt, Human
uccaggcaguuuuccagguugu

SEQ ID NO: 215976 - RNA, 21 nt, Human
auauuucagauuuccguaauc

SEQ ID NO: 215977 - RNA, 22 nt, Human
agcucaagugcaagcauucuau

SEQ ID NO: 215978 - RNA, 22 nt, Human
augguacagauaauacaugcug

SEQ ID NO: 215979 - RNA, 22 nt, Human
uggaaagacauguccuucauua

SEQ ID NO: 215980 - RNA, 22 nt, Human
aggcuugggacugcuuaggagc

SEQ ID NO: 215981 - RNA, 22 nt, Human
ggcuuggcuugggcucagaggc

SEQ ID NO: 215982 - RNA, 22 nt, Human
agguaacuguggcuagguaacu

SEQ ID NO: 215983 - RNA, 22 nt, Human
gucagaggggacaagacacaga

SEQ ID NO: 215984 - RNA, 22 nt, Human
guucucuggaaacuaugauuca

SEQ ID NO: 215985 - RNA, 22 nt, Human
gucucagagagcuacucucuua

SEQ ID NO: 215986 - RNA, 22 nt, Human
gagaggccugagaggcugcgga

SEQ ID NO: 215987 - RNA, 22 nt, Human
gcugagguccagcauucgccua

SEQ ID NO: 215988 - RNA, 22 nt, Human
uaaaagacccucuagaguccca

SEQ ID NO: 215989 - RNA, 22 nt, Human
cugucuccgcccucuugguagg

SEQ ID NO: 215990 - RNA, 22 nt, Human
ucucuguggcauccacucaacu

SEQ ID NO: 215991 - RNA, 21 nt, Human
ucuuuaugacuugcccauuug

SEQ ID NO: 215992 - RNA, 22 nt, Human
cgguggucauaaguggcuggcg

SEQ ID NO: 215993 - RNA, 21 nt, Human
auggagucaggggaaugggcc

SEQ ID NO: 215994 - RNA, 22 nt, Human
accuagaauccaucugcuuauu

SEQ ID NO: 215995 - RNA, 22 nt, Human
aaagcagagcagggcacuuaug

SEQ ID NO: 215996 - RNA, 22 nt, Human
ucacugggagaugugggaaggg

SEQ ID NO: 215997 - RNA, 22 nt, Human
uggccacaugcgucugugaggc

SEQ ID NO: 215998 - RNA, 22 nt, Human
acagacagacagagaacuauuc

SEQ ID NO: 215999 - RNA, 22 nt, Human
ucaccauacauaaauuacauug

SEQ ID NO: 216000 - RNA, 21 nt, Human
ugggaccuauuucaacuggau

SEQ ID NO: 216001 - RNA, 22 nt, Human
ugcaggucuccauuggcagacu

SEQ ID NO: 216002 - RNA, 22 nt, Human
aaggaacugcugauguggugac

SEQ ID NO: 216003 - RNA, 20 nt, Human
agcccaggccugugugaguc

SEQ ID NO: 216004 - RNA, 22 nt, Human
agcugcaagauuucuuuuguau

SEQ ID NO: 216005 - RNA, 22 nt, Human
ucccugggagaugaugaugagg

SEQ ID NO: 216006 - RNA, 22 nt, Human
uagaagaaaagcacuuagagau

SEQ ID NO: 216007 - RNA, 22 nt, Human
auucugggaacuuugucucuca

SEQ ID NO: 216008 - RNA, 22 nt, Human
caggcacaaaaggaccccagca

SEQ ID NO: 216009 - RNA, 22 nt, Human
uuguuuauguguugucuauggc

SEQ ID NO: 216010 - RNA, 22 nt, Human
ucugggugugguaucuuagcca

SEQ ID NO: 216011 - RNA, 22 nt, Human
uccaugagggacacuggaugcu

SEQ ID NO: 216012 - RNA, 22 nt, Human
gagaagggauaugccacucucg

SEQ ID NO: 216013 - RNA, 22 nt, Human
ucacaucuuauuagaguaucuc

SEQ ID NO: 216014 - RNA, 19 nt, Human
ucaugcauuucuaagugca

SEQ ID NO: 216015 - RNA, 22 nt, Human
aaagugguucuuacauccgugg

SEQ ID NO: 216016 - RNA, 22 nt, Human
auaaguaggaaaauuugaauau

SEQ ID NO: 216017 - RNA, 22 nt, Human
gcccacauuuuuggcuuagagg

SEQ ID NO: 216018 - RNA, 22 nt, Human
auaaauuaugaauggcccuuuu

SEQ ID NO: 216019 - RNA, 22 nt, Human
gcccucaggcagggagucuuuc

SEQ ID NO: 216020 - RNA, 22 nt, Human
gagcaggucuuucauggugcau

SEQ ID NO: 216021 - RNA, 23 nt, Human
acuuugcauacccaaauuguuuu

SEQ ID NO: 216022 - RNA, 22 nt, Human
uaacaaaguaccauagacugga

SEQ ID NO: 216023 - RNA, 22 nt, Human
aguguucuagcgcugugcuugu

SEQ ID NO: 216024 - RNA, 18 nt, Human
gcucuggcucaccuccag

SEQ ID NO: 216025 - RNA, 22 nt, Human
uggaguucucaggugagggcuu

SEQ ID NO: 216026 - RNA, 22 nt, Human
gaggccaggguaccaucaacau

SEQ ID NO: 216027 - RNA, 22 nt, Human
agcuccugggccaucacaacca

SEQ ID NO: 216028 - RNA, 22 nt, Human
uugcugaaguuaaugcuugcaa

SEQ ID NO: 216029 - RNA, 22 nt, Human
uccaucuggugagugaggagcc

SEQ ID NO: 216030 - RNA, 22 nt, Human
aaacuaaaccuggcuuaguaag

SEQ ID NO: 216031 - RNA, 22 nt, Human
gcuguggccuaguuuguuauau

SEQ ID NO: 216032 - RNA, 16 nt, Human
agcagggcgggaagga

SEQ ID NO: 216033 - RNA, 22 nt, Human
uaguuuuauaauguuaacaucu

SEQ ID NO: 216034 - RNA, 22 nt, Human
uucugucaaacucacaggccga

SEQ ID NO: 216035 - RNA, 22 nt, Human
agcucugcaggcacagcugagg

SEQ ID NO: 216036 - RNA, 22 nt, Human
acuuuacaggcacuucaaguau

SEQ ID NO: 216037 - RNA, 22 nt, Human
ugaggcuuggaggcuccagugg

SEQ ID NO: 216038 - RNA, 22 nt, Human
agcaggugacagggcuguggug

SEQ ID NO: 216039 - RNA, 22 nt, Human
uuuuuccuagugcuuucuggua

SEQ ID NO: 216040 - RNA, 22 nt, Human
uaacuuagaaguuuaauuguau

SEQ ID NO: 216041 - RNA, 22 nt, Human
gcugugugaccugggcaagucu

SEQ ID NO: 216042 - RNA, 22 nt, Human
cccaagagguggagguugcagu

SEQ ID NO: 216043 - RNA, 22 nt, Human
cauggccuugagugacugcacu

SEQ ID NO: 216044 - RNA, 22 nt, Human
ccaggcagggagcuguuuggcc

SEQ ID NO: 216045 - RNA, 22 nt, Human
agggccaggcucccaugucagg

SEQ ID NO: 216046 - RNA, 22 nt, Human
caggcacagugggguccucucu

SEQ ID NO: 216047 - RNA, 22 nt, Human
cuggagugauacucagaaugug

SEQ ID NO: 216048 - RNA, 22 nt, Human
uagaucaggcugcuuagauaga

SEQ ID NO: 216049 - RNA, 22 nt, Human
caggacacauuucuuguucagg

SEQ ID NO: 216050 - RNA, 22 nt, Human
ugccaggccucaggagucucca

SEQ ID NO: 216051 - RNA, 22 nt, Human
uguuugaguucuagcgcauuua

SEQ ID NO: 216052 - RNA, 22 nt, Human
gacuuugguucagggcucagag

SEQ ID NO: 216053 - RNA, 22 nt, Human
gcugccaguguggcaugaugca

SEQ ID NO: 216054 - RNA, 22 nt, Human
aggaaagacuggggccccagaa

SEQ ID NO: 216055 - RNA, 23 nt, Human
agaggccagccuuuggagacacc

SEQ ID NO: 216056 - RNA, 22 nt, Human
gccucagaaagcuuuuauucau

SEQ ID NO: 216057 - RNA, 22 nt, Human
uaacaguagccuuauguggucu

SEQ ID NO: 216058 - RNA, 22 nt, Human
uuuacuuucucaaguauauagg

SEQ ID NO: 216059 - RNA, 22 nt, Human
aagcauuuuucacagcaacagc

SEQ ID NO: 216060 - RNA, 22 nt, Human
uccugggaguggccauguaaug

SEQ ID NO: 216061 - RNA, 22 nt, Human
ucccugagcucacauggcagga

SEQ ID NO: 216062 - RNA, 22 nt, Human
uguggaaggggccccaugacca

SEQ ID NO: 216063 - RNA, 22 nt, Human
cagaggcuggauggacuugccu

SEQ ID NO: 216064 - RNA, 21 nt, Human
aggcucagagagaaacucuug

SEQ ID NO: 216065 - RNA, 22 nt, Human
acauuagagaagcuuggagaug

SEQ ID NO: 216066 - RNA, 21 nt, Human
uuuauuuauauaggacacaug

SEQ ID NO: 216067 - RNA, 22 nt, Human
gcagauggaucaccugaggucg

SEQ ID NO: 216068 - RNA, 22 nt, Human
cacacauuucagaugcuacaau

SEQ ID NO: 216069 - RNA, 22 nt, Human
agugacagggaaggauaggauu

SEQ ID NO: 216070 - RNA, 22 nt, Human
cacucuccagcacaccccauuu

SEQ ID NO: 216071 - RNA, 22 nt, Human
aagcucuuuucaccauuaaagu

SEQ ID NO: 216072 - RNA, 22 nt, Human
aagggcuggagacugggucuuc

SEQ ID NO: 216073 - RNA, 22 nt, Human
gagggggcgugcaaggcuccgc

SEQ ID NO: 216074 - RNA, 22 nt, Human
gagggcuguggggcaugaccag

SEQ ID NO: 216075 - RNA, 22 nt, Human
ccuugguuuccaggaugaggcu

SEQ ID NO: 216076 - RNA, 17 nt, Human
cugagccccgggcagcu

SEQ ID NO: 216077 - RNA, 22 nt, Human
uucaacaacuugguucaaaugg

SEQ ID NO: 216078 - RNA, 22 nt, Human
uagcuauuuugcuuggaaauac

SEQ ID NO: 216079 - RNA, 22 nt, Human
aauacauguuuucuacuauucu

SEQ ID NO: 216080 - RNA, 22 nt, Human
ugcugagaggaaagaaugcaca

SEQ ID NO: 216081 - RNA, 20 nt, Human
uacaaauuuuccauguuucc

SEQ ID NO: 216082 - RNA, 23 nt, Human
aaaugugagggaaaaucuuucug

SEQ ID NO: 216083 - RNA, 22 nt, Human
agcugccucagucacucauggc

SEQ ID NO: 216084 - RNA, 22 nt, Human
gaggcugaauggccagaagcca

SEQ ID NO: 216085 - RNA, 22 nt, Human
cugaggcugaagagggccuacg

SEQ ID NO: 216086 - RNA, 22 nt, Human
aucuacccacugaacacaauau

SEQ ID NO: 216087 - RNA, 22 nt, Human
cagggcaggaauuugacauugc

SEQ ID NO: 216088 - RNA, 21 nt, Human
agaggccaagucaucauuucc

SEQ ID NO: 216089 - RNA, 22 nt, Human
uucucuggccugaggcgaggcc

SEQ ID NO: 216090 - RNA, 22 nt, Human
ugaguggacgugaggcugagua

SEQ ID NO: 216091 - RNA, 22 nt, Human
guuuuugucgaguuccuugacc

SEQ ID NO: 216092 - RNA, 22 nt, Human
cagcuggaucccugcagaacuu

SEQ ID NO: 216093 - RNA, 22 nt, Human
ggacaaaacuucuugcauuucu

SEQ ID NO: 216094 - RNA, 19 nt, Human
ugaggcaagcuuuuucuug

SEQ ID NO: 216095 - RNA, 16 nt, Human
uggcuucccagagaua

SEQ ID NO: 216096 - RNA, 22 nt, Human
cagcuuugccaaguaaggucuu

SEQ ID NO: 216097 - RNA, 22 nt, Human
aucaguuuggaacauucaggcc

SEQ ID NO: 216098 - RNA, 22 nt, Human
aaguuacacagaguuggaggcu

SEQ ID NO: 216099 - RNA, 22 nt, Human
guggcagagaacaaggagaggu

SEQ ID NO: 216100 - RNA, 22 nt, Human
agcagggcuccugaaagccgcg

SEQ ID NO: 216101 - RNA, 22 nt, Human
uguucagaacaaagguaaauga

SEQ ID NO: 216102 - RNA, 22 nt, Human
ugggggugcccuaugaggaagc

SEQ ID NO: 216103 - RNA, 22 nt, Human
uucauguaauuccauaagguaa

SEQ ID NO: 216104 - RNA, 22 nt, Human
ucccugggacggccuuuuggag

SEQ ID NO: 216105 - RNA, 22 nt, Human
uggcuucuauugcuguggcauu

SEQ ID NO: 216106 - RNA, 22 nt, Human
uccagcagacucaucagcaagg

SEQ ID NO: 216107 - RNA, 20 nt, Human
ugcuuuaugcuauacuuugu

SEQ ID NO: 216108 - RNA, 22 nt, Human
ucaucauaauauggaaucuugu

SEQ ID NO: 216109 - RNA, 22 nt, Human
aggaaagccaaucucucuugac

SEQ ID NO: 216110 - RNA, 22 nt, Human
uucugaggcuuucccguccccu

SEQ ID NO: 216111 - RNA, 22 nt, Human
ucuguacaccaggggccauucu

SEQ ID NO: 216112 - RNA, 22 nt, Human
ggucugagcuugagcccaugcu

SEQ ID NO: 216113 - RNA, 22 nt, Human
gcucugagauugagccuuuggu

SEQ ID NO: 216114 - RNA, 22 nt, Human
ucuggaugauaugugaacuuga

SEQ ID NO: 216115 - RNA, 22 nt, Human
gcaggucccagaaaguuaauuc

SEQ ID NO: 216116 - RNA, 22 nt, Human
ugaggccaacuagggagaugga

SEQ ID NO: 216117 - RNA, 22 nt, Human
gggagcaggacauaauagcaau

SEQ ID NO: 216118 - RNA, 22 nt, Human
guaaaauugcaauuacuuuugc

SEQ ID NO: 216119 - RNA, 22 nt, Human
ccacagcaccgcugccaguccc

SEQ ID NO: 216120 - RNA, 22 nt, Human
uguuggaauuaggauacagagg

SEQ ID NO: 216121 - RNA, 22 nt, Human
uggagguguggagucaaaggga

SEQ ID NO: 216122 - RNA, 23 nt, Human
acauucuugauucaggccuuagc

SEQ ID NO: 216123 - RNA, 19 nt, Human
uuugugaagaaaaugaugc

SEQ ID NO: 216124 - RNA, 22 nt, Human
uucaguuuucuuuagaauguag

SEQ ID NO: 216125 - RNA, 22 nt, Human
cucugaaaguuagagaaaauag

SEQ ID NO: 216126 - RNA, 22 nt, Human
auaguguuacccuucuuaaagu

SEQ ID NO: 216127 - RNA, 22 nt, Human
gcucagcuggaccaucguguuu

SEQ ID NO: 216128 - RNA, 22 nt, Human
gggucucucaugcaguugcugu

SEQ ID NO: 216129 - RNA, 22 nt, Human
ucagagcacuuggcucauggca

SEQ ID NO: 216130 - RNA, 22 nt, Human
cugaggagacagaagccaaaua

SEQ ID NO: 216131 - RNA, 22 nt, Human
aggcagcagagguugaggaaag

SEQ ID NO: 216132 - RNA, 22 nt, Human
gcaccagcugcaggguggcuga

SEQ ID NO: 216133 - RNA, 22 nt, Human
gccuguuggguaacagaguuca

SEQ ID NO: 216134 - RNA, 22 nt, Human
gcacugugacccagagcaggug

SEQ ID NO: 216135 - RNA, 22 nt, Human
gaacugaagacuuuuacuguac

SEQ ID NO: 216136 - RNA, 22 nt, Human
agggaaggaaaagcugucgcuu

SEQ ID NO: 216137 - RNA, 22 nt, Human
gccacagacagagagucuagug

SEQ ID NO: 216138 - RNA, 22 nt, Human
gaagucuugaaacacaaacuag

SEQ ID NO: 216139 - RNA, 22 nt, Human
agcuuuggcccuggagguuacu

SEQ ID NO: 216140 - RNA, 22 nt, Human
gccuccugguugcuucuccaac

SEQ ID NO: 216141 - RNA, 22 nt, Human
uaaggccauuauggugggcccg

SEQ ID NO: 216142 - RNA, 22 nt, Human
ugguaagauaagagccaggccu

SEQ ID NO: 216143 - RNA, 22 nt, Human
cagguggugccuccaggcuggu

SEQ ID NO: 216144 - RNA, 22 nt, Human
uuugaaaguguuuacuugggaa

SEQ ID NO: 216145 - RNA, 22 nt, Human
acaacaaagacacuugaaauga

SEQ ID NO: 216146 - RNA, 21 nt, Human
uccucagggccccagagcacu

SEQ ID NO: 216147 - RNA, 22 nt, Human
aaaaccauguaucuauuuccuu

SEQ ID NO: 216148 - RNA, 22 nt, Human
aaggacaggcuaaccugacauu

SEQ ID NO: 216149 - RNA, 22 nt, Human
uuagcagguuucuggcucuugg

SEQ ID NO: 216150 - RNA, 22 nt, Human
ccuggcuuucucauuuacaggc

SEQ ID NO: 216151 - RNA, 22 nt, Human
ccuggagcuuuuccauccugga

SEQ ID NO: 216152 - RNA, 22 nt, Human
uucuucuugaaacuuuagguug

SEQ ID NO: 216153 - RNA, 22 nt, Human
gaaggcuguuucugguagugau

SEQ ID NO: 216154 - RNA, 22 nt, Human
guucaaggaagggaggaaagcc

SEQ ID NO: 216155 - RNA, 22 nt, Human
aaccauucacaguguagccaaa

SEQ ID NO: 216156 - RNA, 22 nt, Human
ugccaggcauguaguagacuug

SEQ ID NO: 216157 - RNA, 22 nt, Human
uugaccuauguuucuucaucug

SEQ ID NO: 216158 - RNA, 22 nt, Human
agccuguccagaggacagggcu

SEQ ID NO: 216159 - RNA, 22 nt, Human
uggaaggagcuaaggaccuggg

SEQ ID NO: 216160 - RNA, 22 nt, Human
uacagaauguguaucauuacca

SEQ ID NO: 216161 - RNA, 22 nt, Human
cugagcagucuagccagguguu

SEQ ID NO: 216162 - RNA, 22 nt, Human
uggcauuucaccuuucauuucc

SEQ ID NO: 216163 - RNA, 22 nt, Human
ucugaaauaggaaagcaaaugg

SEQ ID NO: 216164 - RNA, 22 nt, Human
cagaaaccucccugaauauuuu

SEQ ID NO: 216165 - RNA, 22 nt, Human
acagcacaaucugagucccaga

SEQ ID NO: 216166 - RNA, 22 nt, Human
ccagagccucuuaugaagaucg

SEQ ID NO: 216167 - RNA, 22 nt, Human
uaggacaugcuacauaaauagg

SEQ ID NO: 216168 - RNA, 22 nt, Human
uagaaacaaagaccugggugcu

SEQ ID NO: 216169 - RNA, 17 nt, Human
ugcaggcuguuauagcc

SEQ ID NO: 216170 - RNA, 22 nt, Human
aggucuggaggcggagucagga

SEQ ID NO: 216171 - RNA, 22 nt, Human
ccuugagaugagcuaauuuuuu

SEQ ID NO: 216172 - RNA, 22 nt, Human
uugcacaugauagaugauuucu

SEQ ID NO: 216173 - RNA, 22 nt, Human
acacuuuaugucuagaucuggg

SEQ ID NO: 216174 - RNA, 17 nt, Human
gaaagcaucacaugcuc

SEQ ID NO: 216175 - RNA, 22 nt, Human
uggagucugugaugcucugggu

SEQ ID NO: 216176 - RNA, 22 nt, Human
guugugcagggcgaggaccuga

SEQ ID NO: 216177 - RNA, 21 nt, Human
uagaacugacgauuucagagu

SEQ ID NO: 216178 - RNA, 22 nt, Human
uggcuuccacugugugcccccu

SEQ ID NO: 216179 - RNA, 22 nt, Human
uaaaguuuggcagacaauaaca

SEQ ID NO: 216180 - RNA, 22 nt, Human
gugaagcaguugcguggguucc

SEQ ID NO: 216181 - RNA, 22 nt, Human
ucacagaagaugcuggauguug

SEQ ID NO: 216182 - RNA, 21 nt, Human
ugacauuuaguagcauuguca

SEQ ID NO: 216183 - RNA, 22 nt, Human
gugggacagcggggugggacag

SEQ ID NO: 216184 - RNA, 22 nt, Human
ccagcugagguugaagaaagag

SEQ ID NO: 216185 - RNA, 22 nt, Human
uccaggaaagcacugggcuggg

SEQ ID NO: 216186 - RNA, 22 nt, Human
uacauucauggugacuuguaug

SEQ ID NO: 216187 - RNA, 22 nt, Human
auguuuccagguucuuccuaug

SEQ ID NO: 216188 - RNA, 22 nt, Human
uugggaaauauggauuguuauu

SEQ ID NO: 216189 - RNA, 22 nt, Human
agcuugacagacagaugguagc

SEQ ID NO: 216190 - RNA, 18 nt, Human
uaacauguuuucauuaag

SEQ ID NO: 216191 - RNA, 22 nt, Human
cugggagaggcugcuccgcucu

SEQ ID NO: 216192 - RNA, 22 nt, Human
ucucagggagggcgagucagcg

SEQ ID NO: 216193 - RNA, 22 nt, Human
agacauuuuagacauaaaagau

SEQ ID NO: 216194 - RNA, 22 nt, Human
ucuggaauucucaaguccugga

SEQ ID NO: 216195 - RNA, 22 nt, Human
auguuuccgugagcauccuuga

SEQ ID NO: 216196 - RNA, 22 nt, Human
gcuggagaugcuaugcagaggg

SEQ ID NO: 216197 - RNA, 22 nt, Human
ugcaaauauugggacagucuag

SEQ ID NO: 216198 - RNA, 22 nt, Human
uccaaaguaauuucacuucugu

SEQ ID NO: 216199 - RNA, 19 nt, Human
agaaucuaaauuauuucug

SEQ ID NO: 216200 - RNA, 22 nt, Human
aggcccugagaaaaucccugca

SEQ ID NO: 216201 - RNA, 22 nt, Human
ucccaggcuaccagugagguca

SEQ ID NO: 216202 - RNA, 22 nt, Human
gcugcucacugaaggacccugu

SEQ ID NO: 216203 - RNA, 21 nt, Human
agagcuggccugccaggcccu

SEQ ID NO: 216204 - RNA, 22 nt, Human
uccaucauggcagcagcaguga

SEQ ID NO: 216205 - RNA, 22 nt, Human
caggucucggguucagcaguga

SEQ ID NO: 216206 - RNA, 22 nt, Human
gcuuccugucccucagccauga

SEQ ID NO: 216207 - RNA, 22 nt, Human
uccaugauuggucaucauagaa

SEQ ID NO: 216208 - RNA, 22 nt, Human
aaacugaaacaucaucauguug

SEQ ID NO: 216209 - RNA, 22 nt, Human
cacacaucaaccuagacauugu

SEQ ID NO: 216210 - RNA, 22 nt, Human
cuucuuaaucccuuauauauuu

SEQ ID NO: 216211 - RNA, 22 nt, Human
cugcagagcuaggcugagugaa

SEQ ID NO: 216212 - RNA, 22 nt, Human
acaauucucucauaucuuauua

SEQ ID NO: 216213 - RNA, 22 nt, Human
cucuccuccaacagcccugccg

SEQ ID NO: 216214 - RNA, 22 nt, Human
gcugaggccucagaaggcugag

SEQ ID NO: 216215 - RNA, 22 nt, Human
ugcuggggucauggggcgcccg

SEQ ID NO: 216216 - RNA, 22 nt, Human
gacagguggggaaacuaaggua

SEQ ID NO: 216217 - RNA, 23 nt, Human
aggggcagcaaguuuugguguua

SEQ ID NO: 216218 - RNA, 20 nt, Human
cagagaccaggccagguguc

SEQ ID NO: 216219 - RNA, 21 nt, Human
agcugcaggccucccagggau

SEQ ID NO: 216220 - RNA, 22 nt, Human
cuggaucugucuuuuggauccc

SEQ ID NO: 216221 - RNA, 22 nt, Human
acauaugugcuuauauccauga

SEQ ID NO: 216222 - RNA, 22 nt, Human
caaauuuaagugaggucuuugu

SEQ ID NO: 216223 - RNA, 22 nt, Human
uaacacaaaagaauaugugugu

SEQ ID NO: 216224 - RNA, 22 nt, Human
ucccucagagggcaagcgcaga

SEQ ID NO: 216225 - RNA, 22 nt, Human
aggcugugggaauggcugcuug

SEQ ID NO: 216226 - RNA, 22 nt, Human
ccagaggaucaguacuggcugg

SEQ ID NO: 216227 - RNA, 22 nt, Human
caagcuggagguuggagcuacu

SEQ ID NO: 216228 - RNA, 22 nt, Human
uaaggcuuuuaaagguucacca

SEQ ID NO: 216229 - RNA, 22 nt, Human
aagcaggcuugguguggccgcu

SEQ ID NO: 216230 - RNA, 22 nt, Human
uuuuaacacucagcacuaucuc

SEQ ID NO: 216231 - RNA, 22 nt, Human
agucaguuucccuggaaagcag

SEQ ID NO: 216232 - RNA, 22 nt, Human
uccagcauucuuagaccucuau

SEQ ID NO: 216233 - RNA, 18 nt, Human
acugaagaugcaagaccu

SEQ ID NO: 216234 - RNA, 22 nt, Human
gugagcuguuuuggacccaucu

SEQ ID NO: 216235 - RNA, 22 nt, Human
gcugggaguuugauuugacugg

SEQ ID NO: 216236 - RNA, 22 nt, Human
auuggccauuugcauguauuau

SEQ ID NO: 216237 - RNA, 19 nt, Human
ucucuggcuugucugccug

SEQ ID NO: 216238 - RNA, 22 nt, Human
aaauguuuaaguguaggagcaa

SEQ ID NO: 216239 - RNA, 22 nt, Human
guccugugcucagacauggggg

SEQ ID NO: 216240 - RNA, 19 nt, Human
agccagugagccucugggu

SEQ ID NO: 216241 - RNA, 22 nt, Human
gucugggaguuuggugcugccg

SEQ ID NO: 216242 - RNA, 22 nt, Human
gcaggagccaggccgagcuggu

SEQ ID NO: 216243 - RNA, 22 nt, Human
aauacagcagauggagacaaau

SEQ ID NO: 216244 - RNA, 22 nt, Human
aggaagugcagggggaaguacu

SEQ ID NO: 216245 - RNA, 17 nt, Human
uggcagcugaaagcucu

SEQ ID NO: 216246 - RNA, 22 nt, Human
uaguaguaauuguuaucuuauu

SEQ ID NO: 216247 - RNA, 22 nt, Human
agagcagauuucaaauauuggc

SEQ ID NO: 216248 - RNA, 22 nt, Human
agucaguugcaguuuauggaug

SEQ ID NO: 216249 - RNA, 22 nt, Human
aggaagcacuggaagggguugg

SEQ ID NO: 216250 - RNA, 22 nt, Human
ucuguucagaagaggugaaagu

SEQ ID NO: 216251 - RNA, 22 nt, Human
cugcucugagaggcucuuccua

SEQ ID NO: 216252 - RNA, 22 nt, Human
gcauucuuagggccuggggugu

SEQ ID NO: 216253 - RNA, 22 nt, Human
cugagccaaccacagcaggagc

SEQ ID NO: 216254 - RNA, 22 nt, Human
caggcagcucgaugccuuguug

SEQ ID NO: 216255 - RNA, 22 nt, Human
ucuauuuuauacucaaaucuuc

SEQ ID NO: 216256 - RNA, 19 nt, Human
ugagacagagaccaguucu

SEQ ID NO: 216257 - RNA, 22 nt, Human
aggagcugcauggauaccuggu

SEQ ID NO: 216258 - RNA, 22 nt, Human
uucuagaugauaaaccagcagc

SEQ ID NO: 216259 - RNA, 23 nt, Human
acagugaaacacgcaguaagagu

SEQ ID NO: 216260 - RNA, 22 nt, Human
cugcuuuaaguauucaacaaag

SEQ ID NO: 216261 - RNA, 22 nt, Human
gggagagguuacccgagcaacu

SEQ ID NO: 216262 - RNA, 20 nt, Human
aggaaaaauggaaacuggag

SEQ ID NO: 216263 - RNA, 22 nt, Human
ucugccugagaaguggggugcc

SEQ ID NO: 216264 - RNA, 22 nt, Human
gugagggguggcugagcaguuu

SEQ ID NO: 216265 - RNA, 22 nt, Human
gaaagugcucucucuauacaca

SEQ ID NO: 216266 - RNA, 22 nt, Human
uuuguguuuuagcuggugaggc

SEQ ID NO: 216267 - RNA, 22 nt, Human
ucuuauuugcaacuggcucaga

SEQ ID NO: 216268 - RNA, 22 nt, Human
gggcugagagugacuguucugu

SEQ ID NO: 216269 - RNA, 22 nt, Human
aucagcaagcauuuauugagug

SEQ ID NO: 216270 - RNA, 22 nt, Human
uggcugaggcuggagugcagug

SEQ ID NO: 216271 - RNA, 22 nt, Human
ggcaggcuuucagcaucaaguc

SEQ ID NO: 216272 - RNA, 22 nt, Human
ugagaggaacaggcaguagguu

SEQ ID NO: 216273 - RNA, 22 nt, Human
uggccucuccuggcagcaucca

SEQ ID NO: 216274 - RNA, 22 nt, Human
cuggaggucauguaauauggaa

SEQ ID NO: 216275 - RNA, 22 nt, Human
aauuaugguauguucaacaacu

SEQ ID NO: 216276 - RNA, 22 nt, Human
auuauaaauauuuucuaggggu

SEQ ID NO: 216277 - RNA, 22 nt, Human
ucuguggcgcauaguugucucu

SEQ ID NO: 216278 - RNA, 22 nt, Human
uugaauaguguuuucaguauac

SEQ ID NO: 216279 - RNA, 22 nt, Human
gcaguaggggcuggagggcugu

SEQ ID NO: 216280 - RNA, 22 nt, Human
agagaaacaggucagcugggag

SEQ ID NO: 216281 - RNA, 22 nt, Human
augcuuuuccaggagaaauaua

SEQ ID NO: 216282 - RNA, 18 nt, Human
uggcuucugcuagcugga

SEQ ID NO: 216283 - RNA, 22 nt, Human
uuacauuagacccacuuucaug

SEQ ID NO: 216284 - RNA, 22 nt, Human
agacucuuggucauuggcauua

SEQ ID NO: 216285 - RNA, 22 nt, Human
cuuucucuucagcacccagccc

SEQ ID NO: 216286 - RNA, 22 nt, Human
acuguacugaaaaguaagcaag

SEQ ID NO: 216287 - RNA, 22 nt, Human
ugcuuucauauugccuaugacu

SEQ ID NO: 216288 - RNA, 22 nt, Human
ucagcuuuuuacaugugaaaua

SEQ ID NO: 216289 - RNA, 23 nt, Human
ugugaauugaggacaucaaaagc

SEQ ID NO: 216290 - RNA, 22 nt, Human
ucugguaacucagaagaaagga

SEQ ID NO: 216291 - RNA, 22 nt, Human
cagaagcagauucuaaagcaag

SEQ ID NO: 216292 - RNA, 22 nt, Human
ccagguguguacagaacagcac

SEQ ID NO: 216293 - RNA, 22 nt, Human
gugagcagcucaggguggucuc

SEQ ID NO: 216294 - RNA, 22 nt, Human
cugagccuccauuucaucaggu

SEQ ID NO: 216295 - RNA, 22 nt, Human
gcuagggaucugauuugcuguu

SEQ ID NO: 216296 - RNA, 21 nt, Human
cagcagaguaaugcauucgua

SEQ ID NO: 216297 - RNA, 22 nt, Human
cuacaggaaggaucuugcucaa

SEQ ID NO: 216298 - RNA, 22 nt, Human
cagcaagagacuguucucuaag

SEQ ID NO: 216299 - RNA, 22 nt, Human
ucccaaauauaaugcaagagac

SEQ ID NO: 216300 - RNA, 22 nt, Human
ugauauuugcugacugcauugu

SEQ ID NO: 216301 - RNA, 19 nt, Human
augaguacacuuguacauu

SEQ ID NO: 216302 - RNA, 22 nt, Human
uacaacauaacgggcauucagu

SEQ ID NO: 216303 - RNA, 22 nt, Human
aucuuuuacuacaaaucaggug

SEQ ID NO: 216304 - RNA, 22 nt, Human
ggcucucagggaaaggccuccc

SEQ ID NO: 216305 - RNA, 22 nt, Human
uggcuucuuagaccaguggccu

SEQ ID NO: 216306 - RNA, 22 nt, Human
ccagggcugagcugugaccaug

SEQ ID NO: 216307 - RNA, 22 nt, Human
ucacagccuggacaguugccug

SEQ ID NO: 216308 - RNA, 22 nt, Human
augcuuggaugcugccauggga

SEQ ID NO: 216309 - RNA, 22 nt, Human
uuuccucugagugagcugggag

SEQ ID NO: 216310 - RNA, 22 nt, Human
uggcugagccuuuggggcuuuc

SEQ ID NO: 216311 - RNA, 22 nt, Human
gaaggauuugagauuauccuag

SEQ ID NO: 216312 - RNA, 22 nt, Human
cacaggcaccccugacugcuca

SEQ ID NO: 216313 - RNA, 22 nt, Human
aauucucaggaauuucaucugu

SEQ ID NO: 216314 - RNA, 21 nt, Human
ucccucagacagggugccuau

SEQ ID NO: 216315 - RNA, 22 nt, Human
agaaggcucaucccucacccca

SEQ ID NO: 216316 - RNA, 22 nt, Human
ugcagcucauugguguccuggu

SEQ ID NO: 216317 - RNA, 22 nt, Human
uggagagcagggcuggaguuca

SEQ ID NO: 216318 - RNA, 22 nt, Human
acaaggcuguuggucacaaacc

SEQ ID NO: 216319 - RNA, 22 nt, Human
ucaggcugcuggccagcaggcu

SEQ ID NO: 216320 - RNA, 22 nt, Human
uaagugaugaagaccuguuugg

SEQ ID NO: 216321 - RNA, 22 nt, Human
acagggcagagugaaaugcuau

SEQ ID NO: 216322 - RNA, 22 nt, Human
agaaaguuuggggcugggcacg

SEQ ID NO: 216323 - RNA, 22 nt, Human
guacaugagcauaaacacacau

SEQ ID NO: 216324 - RNA, 22 nt, Human
uuggcccacucucagaaugugg

SEQ ID NO: 216325 - RNA, 22 nt, Human
aagcaagcaguguggaauuuua

SEQ ID NO: 216326 - RNA, 22 nt, Human
ugcaggaauagcuacagagcug

SEQ ID NO: 216327 - RNA, 22 nt, Human
aggucuggagugggaucugaga

SEQ ID NO: 216328 - RNA, 22 nt, Human
cuguggcucucugcaggguccc

SEQ ID NO: 216329 - RNA, 22 nt, Human
cggcugugucuucacaggagcc

SEQ ID NO: 216330 - RNA, 22 nt, Human
uacauacacaaauauacuguuu

SEQ ID NO: 216331 - RNA, 22 nt, Human
uggcaggcagugugggagcugg

SEQ ID NO: 216332 - RNA, 22 nt, Human
ggcugcaggcuucccuccagca

SEQ ID NO: 216333 - RNA, 22 nt, Human
ucuggcucucauacucgccagu

SEQ ID NO: 216334 - RNA, 22 nt, Human
cacagaacugguuaauagcaga

SEQ ID NO: 216335 - RNA, 22 nt, Human
agcuccaggaucugaaaguucg

SEQ ID NO: 216336 - RNA, 22 nt, Human
uacacauucuagggcacaguua

SEQ ID NO: 216337 - RNA, 22 nt, Human
gcuggcucccagaggccccagc

SEQ ID NO: 216338 - RNA, 22 nt, Human
gcgcaccaccuccagguggccg

SEQ ID NO: 216339 - RNA, 22 nt, Human
aguguacacuaaaugaauacaa

SEQ ID NO: 216340 - RNA, 22 nt, Human
ccucacagcuuuucaaagugga

SEQ ID NO: 216341 - RNA, 22 nt, Human
aagaacuuccuaauauauuuuc

SEQ ID NO: 216342 - RNA, 21 nt, Human
uaaggccaagucuauuucugu

SEQ ID NO: 216343 - RNA, 22 nt, Human
ugcucagggacaauggagaggg

SEQ ID NO: 216344 - RNA, 22 nt, Human
accugaauugauuugaccugua

SEQ ID NO: 216345 - RNA, 22 nt, Human
ugguggcaucaauugacuucuc

SEQ ID NO: 216346 - RNA, 22 nt, Human
aggaccuguaccucagcaucua

SEQ ID NO: 216347 - RNA, 22 nt, Human
ccuggcagcaggugggcccgug

SEQ ID NO: 216348 - RNA, 22 nt, Human
guguggucgaaguucucccgga

SEQ ID NO: 216349 - RNA, 23 nt, Human
cuccccaguguccucaugcaucu

SEQ ID NO: 216350 - RNA, 18 nt, Human
acuguggcucagaguugc

SEQ ID NO: 216351 - RNA, 22 nt, Human
aguggacuuuuaguauccuuau

SEQ ID NO: 216352 - RNA, 22 nt, Human
aucuagaacaauuauugucaca

SEQ ID NO: 216353 - RNA, 21 nt, Human
uagaaagucaaagcuaucagc

SEQ ID NO: 216354 - RNA, 22 nt, Human
aacaaugccaacagcaugcugg

SEQ ID NO: 216355 - RNA, 22 nt, Human
gaaauaauucugugucugaaca

SEQ ID NO: 216356 - RNA, 22 nt, Human
acuacauuaugaggaaagagug

SEQ ID NO: 216357 - RNA, 22 nt, Human
agcaagcauugcugguuagguc

SEQ ID NO: 216358 - RNA, 21 nt, Human
aggagccauguggucugaugg

SEQ ID NO: 216359 - RNA, 22 nt, Human
gagagggguuugccauccuaug

SEQ ID NO: 216360 - RNA, 22 nt, Human
gagagggagccagccaggaacc

SEQ ID NO: 216361 - RNA, 22 nt, Human
ucccacagugguacagcccuga

SEQ ID NO: 216362 - RNA, 22 nt, Human
gcacggcaagacggggccuccu

SEQ ID NO: 216363 - RNA, 22 nt, Human
cucuuuggcuuugacucccauu

SEQ ID NO: 216364 - RNA, 22 nt, Human
gcugcugggucccucugugcca

SEQ ID NO: 216365 - RNA, 22 nt, Human
cuguccauggcaaugaugcaga

SEQ ID NO: 216366 - RNA, 23 nt, Human
auguauuuaaauuucagugauga

SEQ ID NO: 216367 - RNA, 22 nt, Human
uccagcccgacugggccugccg

SEQ ID NO: 216368 - RNA, 22 nt, Human
ucccagcagcauagcucagaau

SEQ ID NO: 216369 - RNA, 22 nt, Human
uauugaugcuuggauugggcca

SEQ ID NO: 216370 - RNA, 22 nt, Human
aacuuuagcuauuuaaucugau

SEQ ID NO: 216371 - RNA, 22 nt, Human
gagcucuuugaaccugggcagu

SEQ ID NO: 216372 - RNA, 22 nt, Human
ucagagaacacagaggugaugu

SEQ ID NO: 216373 - RNA, 22 nt, Human
aagcccuggcucagcucaccag

SEQ ID NO: 216374 - RNA, 22 nt, Human
caaagccauagaguagauaaga

SEQ ID NO: 216375 - RNA, 22 nt, Human
ugggagcaguucagguguggcu

SEQ ID NO: 216376 - RNA, 22 nt, Human
agacacagcuaccauaauacca

SEQ ID NO: 216377 - RNA, 20 nt, Human
aggaggcaugaggggauuua

SEQ ID NO: 216378 - RNA, 22 nt, Human
gagggagcuugauggauguuug

SEQ ID NO: 216379 - RNA, 23 nt, Human
cacugggggcugcuacagagagg

SEQ ID NO: 216380 - RNA, 22 nt, Human
gagugagggccaacauccagcu

SEQ ID NO: 216381 - RNA, 22 nt, Human
uugaaucauuacaauagauaag

SEQ ID NO: 216382 - RNA, 22 nt, Human
ccuguggcugguaguaucguuu

SEQ ID NO: 216383 - RNA, 22 nt, Human
uccugagugagagcugggaggu

SEQ ID NO: 216384 - RNA, 22 nt, Human
uuaaauuaggacucuaguucug

SEQ ID NO: 216385 - RNA, 21 nt, Human
uuagaaagcucacuacaguua

SEQ ID NO: 216386 - RNA, 21 nt, Human
agguacuaaugaaaagugauu

SEQ ID NO: 216387 - RNA, 22 nt, Human
agaaagcuuaugaaugggcaag

SEQ ID NO: 216388 - RNA, 22 nt, Human
cucaggauagcugcgcagccug

SEQ ID NO: 216389 - RNA, 22 nt, Human
auuuagaagcuaauuuuucaga

SEQ ID NO: 216390 - RNA, 22 nt, Human
gugugcucuggaggcuagauuu

SEQ ID NO: 216391 - RNA, 22 nt, Human
uugcaagguuucucucugccua

SEQ ID NO: 216392 - RNA, 22 nt, Human
uuaaaagaauccuguuauccuc

SEQ ID NO: 216393 - RNA, 20 nt, Human
ggaaggggcaaaguguguga

SEQ ID NO: 216394 - RNA, 22 nt, Human
uuaaggaacuugucuuucucuu

SEQ ID NO: 216395 - RNA, 22 nt, Human
gcagaaacuuggagaagccagg

SEQ ID NO: 216396 - RNA, 22 nt, Human
cauaaucccccauuugugacau

SEQ ID NO: 216397 - RNA, 22 nt, Human
ccccagcugcauacuugccaag

SEQ ID NO: 216398 - RNA, 22 nt, Human
caauuucaauacaaaauacauu

SEQ ID NO: 216399 - RNA, 22 nt, Human
gagucuuucugggcuuguucuu

SEQ ID NO: 216400 - RNA, 22 nt, Human
ucauucuugcguaugccauggu

SEQ ID NO: 216401 - RNA, 22 nt, Human
auugcugggaauauuuagccca

SEQ ID NO: 216402 - RNA, 22 nt, Human
uggcagaguuggagguggaaga

SEQ ID NO: 216403 - RNA, 18 nt, Human
gugagcagagagcaucac

SEQ ID NO: 216404 - RNA, 22 nt, Human
uauuucagcccuacuacuuggc

SEQ ID NO: 216405 - RNA, 22 nt, Human
uaacacuugaagccauuuuugc

SEQ ID NO: 216406 - RNA, 22 nt, Human
aaggccagcgcagaccauuguc

SEQ ID NO: 216407 - RNA, 22 nt, Human
auuuucauuuugcagggugaga

SEQ ID NO: 216408 - RNA, 22 nt, Human
ggcccugaagugauugugaguu

SEQ ID NO: 216409 - RNA, 20 nt, Human
aggcucagagcaguaguaca

SEQ ID NO: 216410 - RNA, 22 nt, Human
gcaaggauguacugcaauagga

SEQ ID NO: 216411 - RNA, 22 nt, Human
ugaaagcauaugcuaaagacca

SEQ ID NO: 216412 - RNA, 22 nt, Human
caucuuuaguuauugaauauag

SEQ ID NO: 216413 - RNA, 22 nt, Human
ccaggagaugggagcaucuaaa

SEQ ID NO: 216414 - RNA, 22 nt, Human
uggcucagaugcucuuccagug

SEQ ID NO: 216415 - RNA, 18 nt, Human
cugggucuccaggcugcc

SEQ ID NO: 216416 - RNA, 18 nt, Human
cuucucccaucuuggcca

SEQ ID NO: 216417 - RNA, 22 nt, Human
acuuagaaagggauucuagauu

SEQ ID NO: 216418 - RNA, 22 nt, Human
uggcagugggaagcuggaaguc

SEQ ID NO: 216419 - RNA, 22 nt, Human
agugaugguuuccagucacuga

SEQ ID NO: 216420 - RNA, 22 nt, Human
uuacuaguggagaaacugaggc

SEQ ID NO: 216421 - RNA, 22 nt, Human
uuuguauaagaacauucuagca

SEQ ID NO: 216422 - RNA, 22 nt, Human
uauugcugaaaugcugaguuca

SEQ ID NO: 216423 - RNA, 22 nt, Human
aucuuugugcuaauguaguucu

SEQ ID NO: 216424 - RNA, 20 nt, Human
cccaggugucugaagcucug

SEQ ID NO: 216425 - RNA, 22 nt, Human
ugucugucuguccuucucauua

SEQ ID NO: 216426 - RNA, 22 nt, Human
guguguccucauaagauggagg

SEQ ID NO: 216427 - RNA, 22 nt, Human
gaggcugugucuugggguggaa

SEQ ID NO: 216428 - RNA, 21 nt, Human
ccugccaggaaacugaguguc

SEQ ID NO: 216429 - RNA, 22 nt, Human
uuccugugcuuauucuucucug

SEQ ID NO: 216430 - RNA, 22 nt, Human
uccaggauggugacgguggcca

SEQ ID NO: 216431 - RNA, 20 nt, Human
ugcuccaggaacacuggccg

SEQ ID NO: 216432 - RNA, 22 nt, Human
uuuacaacuuucuguucuguau

SEQ ID NO: 216433 - RNA, 22 nt, Human
ggaaguuguaugaucggggaau

SEQ ID NO: 216434 - RNA, 22 nt, Human
uccccagaggugaggcagcuuu

SEQ ID NO: 216435 - RNA, 22 nt, Human
cuuauuuuaagucaguuugggu

SEQ ID NO: 216436 - RNA, 22 nt, Human
gcagaguugaugcaaguacuga

SEQ ID NO: 216437 - RNA, 22 nt, Human
ugucuccaccaucaucuuacca

SEQ ID NO: 216438 - RNA, 22 nt, Human
ggcgcacaaugugcagguuugu

SEQ ID NO: 216439 - RNA, 22 nt, Human
aguccaugguucugacucaucu

SEQ ID NO: 216440 - RNA, 22 nt, Human
uuugucagucaugucugcuuuu

SEQ ID NO: 216441 - RNA, 22 nt, Human
ggcaaagagacaugcaucgggg

SEQ ID NO: 216442 - RNA, 22 nt, Human
cuauuuaucuauuucugaauga

SEQ ID NO: 216443 - RNA, 22 nt, Human
aaaauugguuccuuucugaggc

SEQ ID NO: 216444 - RNA, 22 nt, Human
aucuguggaaagguaaccagua

SEQ ID NO: 216445 - RNA, 22 nt, Human
ucuuaaguaccuccuuuaucac

SEQ ID NO: 216446 - RNA, 22 nt, Human
uagggcagaguccaggaugggc

SEQ ID NO: 216447 - RNA, 22 nt, Human
acuucucugcuaccugcaaaga

SEQ ID NO: 216448 - RNA, 20 nt, Human
uagaaucuguucugauucau

SEQ ID NO: 216449 - RNA, 22 nt, Human
uauuuucaucuuguccuuggau

SEQ ID NO: 216450 - RNA, 22 nt, Human
cagaaccugagagcacaauccu

SEQ ID NO: 216451 - RNA, 22 nt, Human
cuagaaucccaaauggacuggg

SEQ ID NO: 216452 - RNA, 22 nt, Human
ugagcagagacgggggccucca

SEQ ID NO: 216453 - RNA, 22 nt, Human
ugagcuggaggacaggagggua

SEQ ID NO: 216454 - RNA, 22 nt, Human
aguggcaucaacuuuaucugua

SEQ ID NO: 216455 - RNA, 22 nt, Human
uuguccaaggucccacaguuag

SEQ ID NO: 216456 - RNA, 22 nt, Human
caggucuguuuccaucagugcu

SEQ ID NO: 216457 - RNA, 22 nt, Human
gucucagguucgagccuccuua

SEQ ID NO: 216458 - RNA, 22 nt, Human
ucauuguagggcauuuagagag

SEQ ID NO: 216459 - RNA, 21 nt, Human
uaaagaagaugaaugugauca

SEQ ID NO: 216460 - RNA, 22 nt, Human
uuaggaagaaggaggcaguauu

SEQ ID NO: 216461 - RNA, 22 nt, Human
acaccaaaguagaauuaaugua

SEQ ID NO: 216462 - RNA, 22 nt, Human
aagugccugaccuagccuggag

SEQ ID NO: 216463 - RNA, 22 nt, Human
gcaccugggacccagaggcacc

SEQ ID NO: 216464 - RNA, 18 nt, Human
acagggagggcgcugggg

SEQ ID NO: 216465 - RNA, 21 nt, Human
auuuccacauaaucauaagac

SEQ ID NO: 216466 - RNA, 22 nt, Human
ccugggaaggggaagagaauuc

SEQ ID NO: 216467 - RNA, 22 nt, Human
ggagccugggccuccugcccuu

SEQ ID NO: 216468 - RNA, 22 nt, Human
gcuugggaagggcccuguguac

SEQ ID NO: 216469 - RNA, 22 nt, Human
guggccuggauagacuccaucu

SEQ ID NO: 216470 - RNA, 22 nt, Human
cuacuuccagggguggggcuca

SEQ ID NO: 216471 - RNA, 22 nt, Human
gagagcuccuucaggaagcuuc

SEQ ID NO: 216472 - RNA, 18 nt, Human
cggcuucugucaccuugc

SEQ ID NO: 216473 - RNA, 22 nt, Human
uugaggcacagauuuuaguggc

SEQ ID NO: 216474 - RNA, 22 nt, Human
cuguccagucuuuagcaagcug

SEQ ID NO: 216475 - RNA, 23 nt, Human
ucccucaggccuuaucuccaucu

SEQ ID NO: 216476 - RNA, 22 nt, Human
auauuccauugguuucccuucu

SEQ ID NO: 216477 - RNA, 22 nt, Human
cccuggcaugcaugucccuggc

SEQ ID NO: 216478 - RNA, 22 nt, Human
ucuucuucccaucccucaaaug

SEQ ID NO: 216479 - RNA, 22 nt, Human
ucuguggccuguguccaagugc

SEQ ID NO: 216480 - RNA, 22 nt, Human
aaugucugccagaacugaucau

SEQ ID NO: 216481 - RNA, 22 nt, Human
aauggcuuuuaaaaauagcauu

SEQ ID NO: 216482 - RNA, 22 nt, Human
uaauuagaguuugguaaacaau

SEQ ID NO: 216483 - RNA, 22 nt, Human
ucaggacaacauguugcuaauc

SEQ ID NO: 216484 - RNA, 22 nt, Human
cugggucugucacuagauaaau

SEQ ID NO: 216485 - RNA, 22 nt, Human
agggagccagaguugggagcuc

SEQ ID NO: 216486 - RNA, 21 nt, Human
cuuggcugcagugacaggcau

SEQ ID NO: 216487 - RNA, 22 nt, Human
acagguuugcugcuguuuuagg

SEQ ID NO: 216488 - RNA, 22 nt, Human
aggcagccaguucagguuucuu

SEQ ID NO: 216489 - RNA, 22 nt, Human
uucuuacauuacuuuacaugug

SEQ ID NO: 216490 - RNA, 22 nt, Human
uggugggaguccgcugugcugc

SEQ ID NO: 216491 - RNA, 22 nt, Human
gccaggcugcuggcugcugucc

SEQ ID NO: 216492 - RNA, 22 nt, Human
gcugggaagugcaagaucaagg

SEQ ID NO: 216493 - RNA, 22 nt, Human
cuccugggaggaugcggacccg

SEQ ID NO: 216494 - RNA, 22 nt, Human
aagaagaugguuaacuuucagu

SEQ ID NO: 216495 - RNA, 22 nt, Human
gcccagaguggccacuuggcuc

SEQ ID NO: 216496 - RNA, 21 nt, Human
gcauucuucaugugauucaga

SEQ ID NO: 216497 - RNA, 22 nt, Human
augaauacgcggucauacacau

SEQ ID NO: 216498 - RNA, 22 nt, Human
cuccagcucgcgagcucugcuc

SEQ ID NO: 216499 - RNA, 22 nt, Human
uucucagagugaccaagucuuu

SEQ ID NO: 216500 - RNA, 21 nt, Human
caauuacuuuugcaccgacuu

SEQ ID NO: 216501 - RNA, 17 nt, Human
gauuuccugaaguucuu

SEQ ID NO: 216502 - RNA, 22 nt, Human
uccaggaggccucauuuccugu

SEQ ID NO: 216503 - RNA, 20 nt, Human
cagcccuuuauccuccuaug

SEQ ID NO: 216504 - RNA, 22 nt, Human
uugauucagaaaaagauggaga

SEQ ID NO: 216505 - RNA, 22 nt, Human
accuucaaugaaaauaauaguc

SEQ ID NO: 216506 - RNA, 22 nt, Human
ucugccuuguuugagcuuugac

SEQ ID NO: 216507 - RNA, 22 nt, Human
acaauuucuaauauagaucuua

SEQ ID NO: 216508 - RNA, 22 nt, Human
guucugcuuaaauuauugaucc

SEQ ID NO: 216509 - RNA, 22 nt, Human
acagggagucugaggggauagu

SEQ ID NO: 216510 - RNA, 18 nt, Human
uucaccagugugaugggu

SEQ ID NO: 216511 - RNA, 22 nt, Human
gcagaguuggagccagcccagg

SEQ ID NO: 216512 - RNA, 23 nt, Human
aaggccagaauuucaauggugcc

SEQ ID NO: 216513 - RNA, 18 nt, Human
agaauuaccaaagugcuu

SEQ ID NO: 216514 - RNA, 22 nt, Human
aguuacaaccaugacacaagca

SEQ ID NO: 216515 - RNA, 22 nt, Human
agaugcugcuccacaggccagg

SEQ ID NO: 216516 - RNA, 22 nt, Human
gaagaggcuuuccuagggcaag

SEQ ID NO: 216517 - RNA, 22 nt, Human
ggagucuguuuuacaugcagga

SEQ ID NO: 216518 - RNA, 22 nt, Human
aucuuuaggaaccuaaccuauu

SEQ ID NO: 216519 - RNA, 22 nt, Human
uucucuggcgguguguuuuccu

SEQ ID NO: 216520 - RNA, 19 nt, Human
ucaggaaguugaugaggug

SEQ ID NO: 216521 - RNA, 22 nt, Human
aguggcuuuuuaguggcagaug

SEQ ID NO: 216522 - RNA, 22 nt, Human
ugacaagaagaccugguaauga

SEQ ID NO: 216523 - RNA, 22 nt, Human
uuagagcugggauggauuuucc

SEQ ID NO: 216524 - RNA, 22 nt, Human
agucucugcaugaugcagcaca

SEQ ID NO: 216525 - RNA, 22 nt, Human
cccucccaagcacucugacaua

SEQ ID NO: 216526 - RNA, 22 nt, Human
ucuggcagcgaagcguguacuu

SEQ ID NO: 216527 - RNA, 22 nt, Human
caagcugggucccaacaauuac

SEQ ID NO: 216528 - RNA, 18 nt, Human
cuccugggcugcagaugc

SEQ ID NO: 216529 - RNA, 22 nt, Human
cugagaagaggguauguggcgc

SEQ ID NO: 216530 - RNA, 22 nt, Human
aaggugucacuguuucuggccu

SEQ ID NO: 216531 - RNA, 22 nt, Human
acauaagugcacaauaaauauu

SEQ ID NO: 216532 - RNA, 22 nt, Human
ccaggagccacucaggcccaca

SEQ ID NO: 216533 - RNA, 22 nt, Human
gcuuccggagccaaaaggcccc

SEQ ID NO: 216534 - RNA, 22 nt, Human
gcuccccagcuuagcccuggcu

SEQ ID NO: 216535 - RNA, 22 nt, Human
gcaggcugcugagauccuuagg

SEQ ID NO: 216536 - RNA, 22 nt, Human
ugcucaggagcuuagagcacag

SEQ ID NO: 216537 - RNA, 22 nt, Human
aagcuugaaucaauggauaucc

SEQ ID NO: 216538 - RNA, 22 nt, Human
augaaauggugguuuuccauuu

SEQ ID NO: 216539 - RNA, 22 nt, Human
ucagggcacauucugcaguggc

SEQ ID NO: 216540 - RNA, 22 nt, Human
auugacaagaaagauauuuuua

SEQ ID NO: 216541 - RNA, 22 nt, Human
ugagcccagagcccuuguaggg

SEQ ID NO: 216542 - RNA, 22 nt, Human
gcaggcugaguugggaaaccaa

SEQ ID NO: 216543 - RNA, 19 nt, Human
aggccugggguuuugcacu

SEQ ID NO: 216544 - RNA, 22 nt, Human
agugaaaaccuaaucaugcagu

SEQ ID NO: 216545 - RNA, 17 nt, Human
gacaggcucagugacga

SEQ ID NO: 216546 - RNA, 22 nt, Human
cagcccugcugacacugucuga

SEQ ID NO: 216547 - RNA, 17 nt, Human
ugggccaguagaaggga

SEQ ID NO: 216548 - RNA, 22 nt, Human
cccacccucaagggugucuaua

SEQ ID NO: 216549 - RNA, 22 nt, Human
ucuccaaauaguuauauuuaga

SEQ ID NO: 216550 - RNA, 22 nt, Human
ugauggaaaauaaaucuuauuc

SEQ ID NO: 216551 - RNA, 22 nt, Human
cugccaggccuggggugcuguc

SEQ ID NO: 216552 - RNA, 21 nt, Human
agugacagaggaaggugcaua

SEQ ID NO: 216553 - RNA, 22 nt, Human
uccuggcugccgucguccugcg

SEQ ID NO: 216554 - RNA, 22 nt, Human
augcaggggcagcagagccugg

SEQ ID NO: 216555 - RNA, 22 nt, Human
uuauauaucuugauuuguucca

SEQ ID NO: 216556 - RNA, 22 nt, Human
uggacccaggcaggucuguccu

SEQ ID NO: 216557 - RNA, 22 nt, Human
augcacaguaaugagcugguug

SEQ ID NO: 216558 - RNA, 22 nt, Human
agagcccuaaacccugccuugg

SEQ ID NO: 216559 - RNA, 22 nt, Human
ugaaugauuaaaacccggacua

SEQ ID NO: 216560 - RNA, 22 nt, Human
ggcucugcugcacccuuggcuc

SEQ ID NO: 216561 - RNA, 23 nt, Human
ugggccuggccucccaguccagc

SEQ ID NO: 216562 - RNA, 22 nt, Human
uugagcuugaggaguuauuuga

SEQ ID NO: 216563 - RNA, 22 nt, Human
caaaagucuuccuauucucuua

SEQ ID NO: 216564 - RNA, 22 nt, Human
aaaucaugaggacauuaugcca

SEQ ID NO: 216565 - RNA, 22 nt, Human
ggcucugccauuuccuagcugc

SEQ ID NO: 216566 - RNA, 22 nt, Human
ccaaggcuggagugcaguggcg

SEQ ID NO: 216567 - RNA, 22 nt, Human
agucuccacccaugacaguaca

SEQ ID NO: 216568 - RNA, 22 nt, Human
uuaguuaguggggcugucaguc

SEQ ID NO: 216569 - RNA, 22 nt, Human
aacacuuucuuccuugcucagg

SEQ ID NO: 216570 - RNA, 22 nt, Human
aaaggucuucucaaacauccca

SEQ ID NO: 216571 - RNA, 22 nt, Human
gccuguuuaucuaucaugaacu

SEQ ID NO: 216572 - RNA, 22 nt, Human
agacuuagugaguucuaaguuu

SEQ ID NO: 216573 - RNA, 19 nt, Human
aagggcugggcaccucacu

SEQ ID NO: 216574 - RNA, 22 nt, Human
gcucugggcugaaucauuuauc

SEQ ID NO: 216575 - RNA, 19 nt, Human
auuuauuguaugauuccau

SEQ ID NO: 216576 - RNA, 22 nt, Human
caaaugcaggucagcagguguc

SEQ ID NO: 216577 - RNA, 23 nt, Human
augccaggcugccuggccagccu

SEQ ID NO: 216578 - RNA, 22 nt, Human
gaaggccauuagagccugugcc

SEQ ID NO: 216579 - RNA, 22 nt, Human
gcagggcauagaggcacggagg

SEQ ID NO: 216580 - RNA, 22 nt, Human
cguccagggcgggcuccccuca

SEQ ID NO: 216581 - RNA, 22 nt, Human
cugggcaaauugugccagcuau

SEQ ID NO: 216582 - RNA, 22 nt, Human
cucuagaacugauugggaagaa

SEQ ID NO: 216583 - RNA, 22 nt, Human
aagggggcacagucacuguaau

SEQ ID NO: 216584 - RNA, 22 nt, Human
ccaggccuccugugaguggacc

SEQ ID NO: 216585 - RNA, 22 nt, Human
uaagcaagggucucuguaucag

SEQ ID NO: 216586 - RNA, 19 nt, Human
uagggcuggccgggcggug

SEQ ID NO: 216587 - RNA, 21 nt, Human
uugaaaguaaauucagcagcu

SEQ ID NO: 216588 - RNA, 22 nt, Human
cagaggcauauaauugcugggg

SEQ ID NO: 216589 - RNA, 19 nt, Human
cucuccagcuccaguagcu

SEQ ID NO: 216590 - RNA, 22 nt, Human
uggcagcauguuauguaaggaa

SEQ ID NO: 216591 - RNA, 22 nt, Human
uuucccaguucccugcucuaua

SEQ ID NO: 216592 - RNA, 22 nt, Human
ugcuuuaucaaagcuauaguga

SEQ ID NO: 216593 - RNA, 22 nt, Human
uuucacagcuggguggcagagu

SEQ ID NO: 216594 - RNA, 22 nt, Human
gucaggcuggggcugcugccag

SEQ ID NO: 216595 - RNA, 22 nt, Human
ccugccugcaccuucucugggg

SEQ ID NO: 216596 - RNA, 22 nt, Human
acaaaauuaccuaguuauuuuc

SEQ ID NO: 216597 - RNA, 22 nt, Human
cagcccugcugguuuugggcaa

SEQ ID NO: 216598 - RNA, 20 nt, Human
gcuguggcaagugcucacug

SEQ ID NO: 216599 - RNA, 22 nt, Human
uacauguauguguuaauaucug

SEQ ID NO: 216600 - RNA, 19 nt, Human
ucaugucucucaucuguga

SEQ ID NO: 216601 - RNA, 23 nt, Human
uguguccuuaacuguauauacua

SEQ ID NO: 216602 - RNA, 22 nt, Human
gagacaggccaggugguacuua

SEQ ID NO: 216603 - RNA, 22 nt, Human
guagcuauuuaugauacucaug

SEQ ID NO: 216604 - RNA, 22 nt, Human
agcaggugcauggcgagcgcgg

SEQ ID NO: 216605 - RNA, 22 nt, Human
agaggcacaacagucccauugu

SEQ ID NO: 216606 - RNA, 22 nt, Human
ucaaugaggugauugcuguccu

SEQ ID NO: 216607 - RNA, 22 nt, Human
cucacaggcaucucaucaggcu

SEQ ID NO: 216608 - RNA, 22 nt, Human
gcaaaauuuacacuccuucuuc

SEQ ID NO: 216609 - RNA, 22 nt, Human
acacaucugcaagagccagacc

SEQ ID NO: 216610 - RNA, 22 nt, Human
acaggucuccagagugagagga

SEQ ID NO: 216611 - RNA, 22 nt, Human
cauuucauuccuuugaaagugg

SEQ ID NO: 216612 - RNA, 22 nt, Human
acacagagcuucucaacuggga

SEQ ID NO: 216613 - RNA, 22 nt, Human
gggaagagaccguacccuggcc

SEQ ID NO: 216614 - RNA, 22 nt, Human
uggaggcaccacuggcugcccg

SEQ ID NO: 216615 - RNA, 22 nt, Human
cccaguggggaaauagcuagcu

SEQ ID NO: 216616 - RNA, 22 nt, Human
cugaggagaccaucaacuaauu

SEQ ID NO: 216617 - RNA, 22 nt, Human
aaggggaaaaaguguuaggagu

SEQ ID NO: 216618 - RNA, 22 nt, Human
uugcuuuaagguaucuggagaa

SEQ ID NO: 216619 - RNA, 22 nt, Human
gagguccagagcagguucagug

SEQ ID NO: 216620 - RNA, 22 nt, Human
agucucugggcaugguugugac

SEQ ID NO: 216621 - RNA, 22 nt, Human
uacacacaugcauuugccuuau

SEQ ID NO: 216622 - RNA, 22 nt, Human
auuuuccucugguuuccccaga

SEQ ID NO: 216623 - RNA, 22 nt, Human
gcucaaaugucauggggagccu

SEQ ID NO: 216624 - RNA, 22 nt, Human
aggccugucccagcugaggacg

SEQ ID NO: 216625 - RNA, 22 nt, Human
accaggccuagcaaguacauua

SEQ ID NO: 216626 - RNA, 22 nt, Human
uacaaaugaaccaacuuugaug

SEQ ID NO: 216627 - RNA, 19 nt, Human
ucagucuaggaaugagcua

SEQ ID NO: 216628 - RNA, 22 nt, Human
auuguacauaugauguauguaa

SEQ ID NO: 216629 - RNA, 22 nt, Human
gaccagcucucugaagaaagag

SEQ ID NO: 216630 - RNA, 22 nt, Human
ucucugagaaguuccuuuguga

SEQ ID NO: 216631 - RNA, 22 nt, Human
aucucuguuuuaggagauagug

SEQ ID NO: 216632 - RNA, 22 nt, Human
caggagcaguuagaagcccacu

SEQ ID NO: 216633 - RNA, 19 nt, Human
acccaggguugauguccag

SEQ ID NO: 216634 - RNA, 22 nt, Human
ugcugccaagcccgugcuccug

SEQ ID NO: 216635 - RNA, 22 nt, Human
gcugggagugggcaagaugaga

SEQ ID NO: 216636 - RNA, 22 nt, Human
cucagagagugaauuccugccu

SEQ ID NO: 216637 - RNA, 21 nt, Human
ucaggaagagccaguucaugc

SEQ ID NO: 216638 - RNA, 22 nt, Human
aaggcuucuuaugcaauuguuu

SEQ ID NO: 216639 - RNA, 22 nt, Human
agucucuuuugcgaagaguguu

SEQ ID NO: 216640 - RNA, 22 nt, Human
cagggacugagauccagacugu

SEQ ID NO: 216641 - RNA, 22 nt, Human
auccuguggggcggcugcaggg

SEQ ID NO: 216642 - RNA, 22 nt, Human
guccucugagggggcugcacgc

SEQ ID NO: 216643 - RNA, 22 nt, Human
cagaagaaaucauuaucuggac

SEQ ID NO: 216644 - RNA, 22 nt, Human
uuccagaauuuuguucugcuug

SEQ ID NO: 216645 - RNA, 22 nt, Human
ccuggggagaagagcuuccccc

SEQ ID NO: 216646 - RNA, 22 nt, Human
ugcuagggauauaguggcgagu

SEQ ID NO: 216647 - RNA, 22 nt, Human
acagguguugacucacaggccc

SEQ ID NO: 216648 - RNA, 23 nt, Human
ggcuggugcccuuggccagucgg

SEQ ID NO: 216649 - RNA, 22 nt, Human
aaaaucuaaguagcgaguaagg

SEQ ID NO: 216650 - RNA, 22 nt, Human
gccuggcuugccagcccuggcg

SEQ ID NO: 216651 - RNA, 22 nt, Human
aaacaaugaaauauuuuuaugg

SEQ ID NO: 216652 - RNA, 22 nt, Human
auggcuuccaaggcccuccgug

SEQ ID NO: 216653 - RNA, 19 nt, Human
uauuuacuucuugauugca

SEQ ID NO: 216654 - RNA, 22 nt, Human
aaaguugaguuuuauguguuac

SEQ ID NO: 216655 - RNA, 22 nt, Human
uuucaagucauucuauaauauc

SEQ ID NO: 216656 - RNA, 22 nt, Human
caaguuuuagaaauaucuggau

SEQ ID NO: 216657 - RNA, 22 nt, Human
agaggggaguccuaaucugauu

SEQ ID NO: 216658 - RNA, 22 nt, Human
gagcccucucuguaggcaagua

SEQ ID NO: 216659 - RNA, 23 nt, Human
uggggagggaagucauuucugua

SEQ ID NO: 216660 - RNA, 22 nt, Human
agggaaggcuuuugacauuucc

SEQ ID NO: 216661 - RNA, 22 nt, Human
uucaacuauuaugaauaaaauu

SEQ ID NO: 216662 - RNA, 22 nt, Human
aaagugcugggauuacaagugu

SEQ ID NO: 216663 - RNA, 22 nt, Human
ucucagagcuucagaaagcacc

SEQ ID NO: 216664 - RNA, 22 nt, Human
caggguggccagguagauaaua

SEQ ID NO: 216665 - RNA, 19 nt, Human
acuggcaguuucugcaugg

SEQ ID NO: 216666 - RNA, 22 nt, Human
gcugaaauuagacugcagaagu

SEQ ID NO: 216667 - RNA, 22 nt, Human
ugccucccucucugccacugga

SEQ ID NO: 216668 - RNA, 22 nt, Human
agucugucuuuggcuucaccac

SEQ ID NO: 216669 - RNA, 22 nt, Human
ggcccugcucaggcugcgauga

SEQ ID NO: 216670 - RNA, 22 nt, Human
agcugaggcucugagagggaag

SEQ ID NO: 216671 - RNA, 22 nt, Human
cucuuucugauucgcugggacc

SEQ ID NO: 216672 - RNA, 22 nt, Human
cagugaggugcccagccugccc

SEQ ID NO: 216673 - RNA, 22 nt, Human
gggggaugcucaggaggcugcu

SEQ ID NO: 216674 - RNA, 22 nt, Human
acagaacugcagacagugccaa

SEQ ID NO: 216675 - RNA, 22 nt, Human
ucauauuuauauguuggcacag

SEQ ID NO: 216676 - RNA, 22 nt, Human
agagccaggaucuguuuugggg

SEQ ID NO: 216677 - RNA, 20 nt, Human
agguuuauauuuagaggugu

SEQ ID NO: 216678 - RNA, 22 nt, Human
cagguggcagaggucucuggaa

SEQ ID NO: 216679 - RNA, 22 nt, Human
uacauuccugggcuccacccua

SEQ ID NO: 216680 - RNA, 22 nt, Human
uauaaagaaguguaaacaggaa

SEQ ID NO: 216681 - RNA, 22 nt, Human
cgcauacauagaaacacacaga

SEQ ID NO: 216682 - RNA, 22 nt, Human
auggucaguugcagcuaauguu

SEQ ID NO: 216683 - RNA, 22 nt, Human
ggcugagcccccucugcguagg

SEQ ID NO: 216684 - RNA, 22 nt, Human
aaaguaacaauaagguucuauu

SEQ ID NO: 216685 - RNA, 22 nt, Human
gcucaggccucacuccauuugg

SEQ ID NO: 216686 - RNA, 22 nt, Human
ucacaucauggagaauuauggg

SEQ ID NO: 216687 - RNA, 22 nt, Human
gucuggcucuggaaggcaaagg

SEQ ID NO: 216688 - RNA, 22 nt, Human
cccaggaugaucgagaguggga

SEQ ID NO: 216689 - RNA, 22 nt, Human
ucauuauccuaguaucuugaau

SEQ ID NO: 216690 - RNA, 22 nt, Human
agugcuuugguauagaacuauu

SEQ ID NO: 216691 - RNA, 22 nt, Human
ggcaugcucuuuguccacagua

SEQ ID NO: 216692 - RNA, 22 nt, Human
auuugauaguaugacagggcag

SEQ ID NO: 216693 - RNA, 22 nt, Human
aggcaggugggagugauuccuu

SEQ ID NO: 216694 - RNA, 20 nt, Human
augccucuaauuuugcaaac

SEQ ID NO: 216695 - RNA, 22 nt, Human
uggaugagaaacucuggugacu

SEQ ID NO: 216696 - RNA, 22 nt, Human
cuuauucauaagucagacacac

SEQ ID NO: 216697 - RNA, 22 nt, Human
augcugaagaaucacagggacu

SEQ ID NO: 216698 - RNA, 17 nt, Human
cugggccucugcccuuu

SEQ ID NO: 216699 - RNA, 22 nt, Human
caggcuggagugcaguugugca

SEQ ID NO: 216700 - RNA, 22 nt, Human
ugcucaggcccugggccauccu

SEQ ID NO: 216701 - RNA, 20 nt, Human
agcugcaacagacuguaugg

SEQ ID NO: 216702 - RNA, 22 nt, Human
auguuuacugaaaagauuucaa

SEQ ID NO: 216703 - RNA, 22 nt, Human
uaagcaaaggauuuugaucuuu

SEQ ID NO: 216704 - RNA, 22 nt, Human
cccuuggcuucuauggguuuuc

SEQ ID NO: 216705 - RNA, 22 nt, Human
ggcucccuagggagagugggag

SEQ ID NO: 216706 - RNA, 18 nt, Human
ucuagaaacuucucuccu

SEQ ID NO: 216707 - RNA, 22 nt, Human
aacuccaggcagggaggccacu

SEQ ID NO: 216708 - RNA, 22 nt, Human
gcucagagauggggaaugaaaa

SEQ ID NO: 216709 - RNA, 22 nt, Human
gcauucagccuaaagagaaaag

SEQ ID NO: 216710 - RNA, 22 nt, Human
ggcugugcgucauccggcugca

SEQ ID NO: 216711 - RNA, 22 nt, Human
auugcuggaugagcucuuggau

SEQ ID NO: 216712 - RNA, 22 nt, Human
aucuguggcuggugagaggcag

SEQ ID NO: 216713 - RNA, 22 nt, Human
ggccacauguggcugcucguau

SEQ ID NO: 216714 - RNA, 22 nt, Human
aaacagagagauguauguggag

SEQ ID NO: 216715 - RNA, 22 nt, Human
gcuggcaguuuccucaccgagg

SEQ ID NO: 216716 - RNA, 22 nt, Human
agaguuaaggccacugucagua

SEQ ID NO: 216717 - RNA, 22 nt, Human
ccaggucuucacuuuacugaag

SEQ ID NO: 216718 - RNA, 22 nt, Human
uucuggcaucugggggaggccu

SEQ ID NO: 216719 - RNA, 21 nt, Human
ccagcagcucaaggaucucuu

SEQ ID NO: 216720 - RNA, 22 nt, Human
caaguauuuccugauggccugu

SEQ ID NO: 216721 - RNA, 22 nt, Human
acuccuggugcugaugaagaga

SEQ ID NO: 216722 - RNA, 22 nt, Human
ugagcccaggaguuggagaccg

SEQ ID NO: 216723 - RNA, 22 nt, Human
uuucauugcagagucugugugc

SEQ ID NO: 216724 - RNA, 22 nt, Human
uugcaucuaccauaucaaagau

SEQ ID NO: 216725 - RNA, 22 nt, Human
ugaaggcauaaaucuugggaac

SEQ ID NO: 216726 - RNA, 22 nt, Human
gagguucacuuccugaaauagc

SEQ ID NO: 216727 - RNA, 22 nt, Human
uucacaguggcccucucugagu

SEQ ID NO: 216728 - RNA, 20 nt, Human
ggcauggguggggcucccag

SEQ ID NO: 216729 - RNA, 22 nt, Human
cuauuauuauguuaacuggacu

SEQ ID NO: 216730 - RNA, 22 nt, Human
cuuggcuguugggcauugagaa

SEQ ID NO: 216731 - RNA, 22 nt, Human
ccugggcaacauagugagaccu

SEQ ID NO: 216732 - RNA, 22 nt, Human
cagguggcuaacggccucauag

SEQ ID NO: 216733 - RNA, 20 nt, Human
aggcucagcugagcucuugg

SEQ ID NO: 216734 - RNA, 22 nt, Human
agacacagucugucuggaggag

SEQ ID NO: 216735 - RNA, 22 nt, Human
gcaggcagccacgauucccuug

SEQ ID NO: 216736 - RNA, 23 nt, Human
gccuccaaaccucuaggcuggug

SEQ ID NO: 216737 - RNA, 23 nt, Human
ucagaacaaugccuuaggggcau

SEQ ID NO: 216738 - RNA, 22 nt, Human
ucucacaagcucaaggauuagu

SEQ ID NO: 216739 - RNA, 23 nt, Human
cccugagcugguccaggcucaac

SEQ ID NO: 216740 - RNA, 19 nt, Human
gaaggggaagguggguacc

SEQ ID NO: 216741 - RNA, 22 nt, Human
aguuagaguuaauuuccuaaca

SEQ ID NO: 216742 - RNA, 22 nt, Human
ucuggaauuuucuagggcauca

SEQ ID NO: 216743 - RNA, 19 nt, Human
ggugugaagugaggaguua

SEQ ID NO: 216744 - RNA, 22 nt, Human
gaauagcuuagauuccuuagug

SEQ ID NO: 216745 - RNA, 22 nt, Human
aauaguaaaagauacagcuaau

SEQ ID NO: 216746 - RNA, 22 nt, Human
uggcucucaauggcuguacuau

SEQ ID NO: 216747 - RNA, 22 nt, Human
agcugaagcaacaacaggaugg

SEQ ID NO: 216748 - RNA, 22 nt, Human
uuacaguuuaccaagaauauug

SEQ ID NO: 216749 - RNA, 22 nt, Human
ccuggcagcgugccgagcugcg

SEQ ID NO: 216750 - RNA, 22 nt, Human
uccugggaagagaccugagcau

SEQ ID NO: 216751 - RNA, 22 nt, Human
ccugcucuccauacacuuucua

SEQ ID NO: 216752 - RNA, 22 nt, Human
aacaaaugaccugauuucuucc

SEQ ID NO: 216753 - RNA, 22 nt, Human
cugccugugauuuuucucuagu

SEQ ID NO: 216754 - RNA, 22 nt, Human
cgagagccggaaggggcggugc

SEQ ID NO: 216755 - RNA, 22 nt, Human
ggcugugcugagggggaagccc

SEQ ID NO: 216756 - RNA, 22 nt, Human
gggggaggugaaugcaauaagg

SEQ ID NO: 216757 - RNA, 22 nt, Human
caguguuuguauagaauaugca

SEQ ID NO: 216758 - RNA, 22 nt, Human
cauuuguuaagaaggaaaaagg

SEQ ID NO: 216759 - RNA, 22 nt, Human
uccagccaggauggcccaggga

SEQ ID NO: 216760 - RNA, 22 nt, Human
uccagcccaggcuggaguguag

SEQ ID NO: 216761 - RNA, 22 nt, Human
agcucuuacauuuaggucuaug

SEQ ID NO: 216762 - RNA, 22 nt, Human
auuggucuaaaguuaagaagau

SEQ ID NO: 216763 - RNA, 22 nt, Human
agcuuccugucuucugcacaaa

SEQ ID NO: 216764 - RNA, 22 nt, Human
ucugauuuacuggaaaaaagga

SEQ ID NO: 216765 - RNA, 22 nt, Human
cagagguuugaucgaguagguc

SEQ ID NO: 216766 - RNA, 22 nt, Human
uuagagcuagaugaggucauga

SEQ ID NO: 216767 - RNA, 22 nt, Human
ugucacauguguggcauuuuuc

SEQ ID NO: 216768 - RNA, 22 nt, Human
gaggcucagagugguuaaauaa

SEQ ID NO: 216769 - RNA, 22 nt, Human
uccaggcagggcagccaucaag

SEQ ID NO: 216770 - RNA, 22 nt, Human
cuuucauuugauaagaaugcca

SEQ ID NO: 216771 - RNA, 22 nt, Human
gccugcucagaccuagcaggcc

SEQ ID NO: 216772 - RNA, 22 nt, Human
cacaggcuugucagcaugaggc

SEQ ID NO: 216773 - RNA, 22 nt, Human
gcagggcaaauguggaaaggag

SEQ ID NO: 216774 - RNA, 22 nt, Human
ugagaugcugggaacaaggaag

SEQ ID NO: 216775 - RNA, 22 nt, Human
gccaggcucaguagcgauuccu

SEQ ID NO: 216776 - RNA, 22 nt, Human
cccaggagacagaaacagaggu

SEQ ID NO: 216777 - RNA, 22 nt, Human
ugaaggagcugauguaaggggu

SEQ ID NO: 216778 - RNA, 22 nt, Human
gugugcagggggccagcgcagc

SEQ ID NO: 216779 - RNA, 22 nt, Human
uaggugucagguauagaauuua

SEQ ID NO: 216780 - RNA, 22 nt, Human
gaggcucaguuauuuuagccug

SEQ ID NO: 216781 - RNA, 22 nt, Human
ggcugguguugagugccuguag

SEQ ID NO: 216782 - RNA, 22 nt, Human
aacuuuaucggaacagguacuc

SEQ ID NO: 216783 - RNA, 22 nt, Human
ggaccugccagaacucaggcua

SEQ ID NO: 216784 - RNA, 22 nt, Human
aguuagaauagucagauuguag

SEQ ID NO: 216785 - RNA, 22 nt, Human
cccugggauugccuuggccuug

SEQ ID NO: 216786 - RNA, 22 nt, Human
ggcuuggaaaugguaaugagcu

SEQ ID NO: 216787 - RNA, 22 nt, Human
uaggaacaaagagccucacauu

SEQ ID NO: 216788 - RNA, 22 nt, Human
agcaggcugggcaauaugggca

SEQ ID NO: 216789 - RNA, 22 nt, Human
gccuguuuacuuugccgcagga

SEQ ID NO: 216790 - RNA, 22 nt, Human
guugaaaguggagaaccugguu

SEQ ID NO: 216791 - RNA, 22 nt, Human
uugggcuggcccuugucucugg

SEQ ID NO: 216792 - RNA, 22 nt, Human
gagugggcaaaagaaaguaggc

SEQ ID NO: 216793 - RNA, 22 nt, Human
gauacacaaguggaaggagacg

SEQ ID NO: 216794 - RNA, 22 nt, Human
gucccaggcaggccacuggcag

SEQ ID NO: 216795 - RNA, 22 nt, Human
acacauuaugagcaguugucuu

SEQ ID NO: 216796 - RNA, 22 nt, Human
cugugaaaugcuuugcgauggu

SEQ ID NO: 216797 - RNA, 22 nt, Human
ccagagaggggaagggcuugcc

SEQ ID NO: 216798 - RNA, 23 nt, Human
aaggugucauugaugggauucua

SEQ ID NO: 216799 - RNA, 22 nt, Human
aacugucuuaauaacaaaagcu

SEQ ID NO: 216800 - RNA, 22 nt, Human
gagaggcucugaggacuggggu

SEQ ID NO: 216801 - RNA, 22 nt, Human
cuccuugguguaguacugagca

SEQ ID NO: 216802 - RNA, 22 nt, Human
ggacagcccauacacaugucug

SEQ ID NO: 216803 - RNA, 20 nt, Human
ggcaggugcuguccccuccu

SEQ ID NO: 216804 - RNA, 22 nt, Human
ucccagggcagcuguccagaag

SEQ ID NO: 216805 - RNA, 18 nt, Human
ugguuugucaugagaauu

SEQ ID NO: 216806 - RNA, 22 nt, Human
ugaggcucagaaauguaaguuu

SEQ ID NO: 216807 - RNA, 22 nt, Human
cauuugcuguauuuucagauuc

SEQ ID NO: 216808 - RNA, 22 nt, Human
cccugggauggauuggcaggaa

SEQ ID NO: 216809 - RNA, 22 nt, Human
augauacauugcaaaauuuuaa

SEQ ID NO: 216810 - RNA, 22 nt, Human
gagcuuuagcugagaccugcuu

SEQ ID NO: 216811 - RNA, 22 nt, Human
uccauuuggccucuguauugua

SEQ ID NO: 216812 - RNA, 22 nt, Human
gucugggcuccuggcaggcagc

SEQ ID NO: 216813 - RNA, 22 nt, Human
aaacagcagcuguuuaauuugc

SEQ ID NO: 216814 - RNA, 22 nt, Human
acugucacuugcaacugugagg

SEQ ID NO: 216815 - RNA, 22 nt, Human
ggagggagcauccccuugcuga

SEQ ID NO: 216816 - RNA, 22 nt, Human
ugagucuguauguccagauuua

SEQ ID NO: 216817 - RNA, 19 nt, Human
agcaggcuaggcugccucu

SEQ ID NO: 216818 - RNA, 22 nt, Human
uucugugguugaaaggagagau

SEQ ID NO: 216819 - RNA, 22 nt, Human
guacauguaugagauaugugua

SEQ ID NO: 216820 - RNA, 23 nt, Human
cugaaauaccagaaaaucagugu

SEQ ID NO: 216821 - RNA, 22 nt, Human
uuaaaugugauuucauuuaugu

SEQ ID NO: 216822 - RNA, 22 nt, Human
gcagccugaggcccuuucuggc

SEQ ID NO: 216823 - RNA, 22 nt, Human
ucaaugagaaagacacagucuu

SEQ ID NO: 216824 - RNA, 22 nt, Human
gagaaacuaacaucugaaggug

SEQ ID NO: 216825 - RNA, 22 nt, Human
augggcagaguggggacaggaa

SEQ ID NO: 216826 - RNA, 22 nt, Human
caagcagccccaacaugaggau

SEQ ID NO: 216827 - RNA, 21 nt, Human
aacuuguauuucuccuuauuc

SEQ ID NO: 216828 - RNA, 22 nt, Human
gucaaacaaauuaacauaucca

SEQ ID NO: 216829 - RNA, 22 nt, Human
aaacauuguaauuuuagcaugg

SEQ ID NO: 216830 - RNA, 22 nt, Human
uuccagucuaguaccuggaugc

SEQ ID NO: 216831 - RNA, 22 nt, Human
gaggugagaagggggucagaug

SEQ ID NO: 216832 - RNA, 22 nt, Human
aggagauagucaaagcuucuug

SEQ ID NO: 216833 - RNA, 22 nt, Human
aggcucugacccaugggaccca

SEQ ID NO: 216834 - RNA, 22 nt, Human
cccugggaggcuuccaggcaga

SEQ ID NO: 216835 - RNA, 22 nt, Human
ucaaggaauuuaguuuaguaaa

SEQ ID NO: 216836 - RNA, 22 nt, Human
ggaacacagugccuuacaaacu

SEQ ID NO: 216837 - RNA, 19 nt, Human
gaauacagauaauaagcag

SEQ ID NO: 216838 - RNA, 22 nt, Human
gcuuugaagacuuuuccagggu

SEQ ID NO: 216839 - RNA, 22 nt, Human
agcuggccuucggugucacugg

SEQ ID NO: 216840 - RNA, 22 nt, Human
ugaaaaacuuuaauccauaaag

SEQ ID NO: 216841 - RNA, 22 nt, Human
acaguugacagggagaggguua

SEQ ID NO: 216842 - RNA, 22 nt, Human
uucuuuuacauuaagauuucag

SEQ ID NO: 216843 - RNA, 22 nt, Human
acuucccaacacuuuugagaug

SEQ ID NO: 216844 - RNA, 22 nt, Human
ucagagaauuguuuaauggaau

SEQ ID NO: 216845 - RNA, 22 nt, Human
gucugggcuuagggacauggca

SEQ ID NO: 216846 - RNA, 22 nt, Human
ugaaagaguuugacaugauucu

SEQ ID NO: 216847 - RNA, 23 nt, Human
uggcaaagcauucuuauaacagu

SEQ ID NO: 216848 - RNA, 22 nt, Human
aguaauaauagcuguaaagugc

SEQ ID NO: 216849 - RNA, 22 nt, Human
uuucugaacuugguacuggagc

SEQ ID NO: 216850 - RNA, 22 nt, Human
agugugagauuaaaccgaauca

SEQ ID NO: 216851 - RNA, 22 nt, Human
auccacagaaggaacuugaaag

SEQ ID NO: 216852 - RNA, 22 nt, Human
acaagaaagguaggauucaggu

SEQ ID NO: 216853 - RNA, 22 nt, Human
ugcagagagccagcucucucgg

SEQ ID NO: 216854 - RNA, 17 nt, Human
agugaaauuuacauugc

SEQ ID NO: 216855 - RNA, 22 nt, Human
ucaaaauuaaaccaacguccag

SEQ ID NO: 216856 - RNA, 22 nt, Human
cugagaauuacucugaugagua

SEQ ID NO: 216857 - RNA, 22 nt, Human
uaucaauacauguuaucagugu

SEQ ID NO: 216858 - RNA, 22 nt, Human
gccuggaguucagccaaguccc

SEQ ID NO: 216859 - RNA, 22 nt, Human
guggcagaaacuggcagaggag

SEQ ID NO: 216860 - RNA, 22 nt, Human
aaacagcuaauggccaggaaua

SEQ ID NO: 216861 - RNA, 22 nt, Human
aaaggaagauugagcuuuucca

SEQ ID NO: 216862 - RNA, 21 nt, Human
agaagccugaugaggucugcu

SEQ ID NO: 216863 - RNA, 22 nt, Human
gcuuaggaugaaugcuguagaa

SEQ ID NO: 216864 - RNA, 19 nt, Human
auuugaaagcugugcuugc

SEQ ID NO: 216865 - RNA, 22 nt, Human
uuuuucaugagacuagaaguca

SEQ ID NO: 216866 - RNA, 22 nt, Human
gaaggcugucagagaggagggc

SEQ ID NO: 216867 - RNA, 22 nt, Human
ugaaaugcuuaggaccagaagg

SEQ ID NO: 216868 - RNA, 22 nt, Human
auuugccuguaagacaaggccu

SEQ ID NO: 216869 - RNA, 22 nt, Human
ucuucagaggaagucagucuuu

SEQ ID NO: 216870 - RNA, 22 nt, Human
ucauuguugcguuaaugucuuc

SEQ ID NO: 216871 - RNA, 22 nt, Human
uggguaaacaauguuugccuaa

SEQ ID NO: 216872 - RNA, 20 nt, Human
aaaggaauauaugaaguaua

SEQ ID NO: 216873 - RNA, 22 nt, Human
uggcuuccuaaacugauuucca

SEQ ID NO: 216874 - RNA, 22 nt, Human
uuguggcaugugagaacuagaa

SEQ ID NO: 216875 - RNA, 22 nt, Human
aucugggcauggaggaaagaga

SEQ ID NO: 216876 - RNA, 22 nt, Human
augguaaauuuuaccuuaugua

SEQ ID NO: 216877 - RNA, 19 nt, Human
cacaugagggcugagggac

SEQ ID NO: 216878 - RNA, 22 nt, Human
agaagaauacuugauguucaug

SEQ ID NO: 216879 - RNA, 22 nt, Human
ugggccuguuucccuucagggc

SEQ ID NO: 216880 - RNA, 22 nt, Human
ugagcaggcaaacaaugguuau

SEQ ID NO: 216881 - RNA, 22 nt, Human
ccccagggacugguuucaugga

SEQ ID NO: 216882 - RNA, 22 nt, Human
caauuugacaaguugcauguuu

SEQ ID NO: 216883 - RNA, 22 nt, Human
augucuuuuaugauuacgggau

SEQ ID NO: 216884 - RNA, 23 nt, Human
gugagcagcaccaugaggcuaga

SEQ ID NO: 216885 - RNA, 18 nt, Human
auccuagaccauacacag

SEQ ID NO: 216886 - RNA, 22 nt, Human
uggacaggggcugcuguuguca

SEQ ID NO: 216887 - RNA, 22 nt, Human
ugagcaggagauaaacagguag

SEQ ID NO: 216888 - RNA, 22 nt, Human
aggagccaugagcaggaggcaa

SEQ ID NO: 216889 - RNA, 22 nt, Human
gagaaugggaaugaaaguagca

SEQ ID NO: 216890 - RNA, 19 nt, Human
aucuuuagcaacuuucaaa

SEQ ID NO: 216891 - RNA, 17 nt, Human
ucccaggaacagggaau

SEQ ID NO: 216892 - RNA, 22 nt, Human
acagugcagggugggaagaagg

SEQ ID NO: 216893 - RNA, 22 nt, Human
caguccuuggcaaguucucagu

SEQ ID NO: 216894 - RNA, 22 nt, Human
gaggagcucugcuccauccuuc

SEQ ID NO: 216895 - RNA, 22 nt, Human
accaggaagcugugagaccuuu

SEQ ID NO: 216896 - RNA, 22 nt, Human
ucacuacaaaagucucccuuuc

SEQ ID NO: 216897 - RNA, 21 nt, Human
gcccagaguccucccacucca

SEQ ID NO: 216898 - RNA, 22 nt, Human
cauuuacauaacaguaacgcug

SEQ ID NO: 216899 - RNA, 22 nt, Human
cugagacuuucaugugcuuuua

SEQ ID NO: 216900 - RNA, 22 nt, Human
cuguggcuaggaagcuguggga

SEQ ID NO: 216901 - RNA, 22 nt, Human
uccaggugagugcaggugcaga

SEQ ID NO: 216902 - RNA, 21 nt, Human
auuuagaaggaaauuuugcaa

SEQ ID NO: 216903 - RNA, 22 nt, Human
acagcuuuuaugggaccagcca

SEQ ID NO: 216904 - RNA, 22 nt, Human
ugcuguccuguuuuggaguaau

SEQ ID NO: 216905 - RNA, 22 nt, Human
uacacaucccagacucccagga

SEQ ID NO: 216906 - RNA, 22 nt, Human
uuucuauucuggaucuguggca

SEQ ID NO: 216907 - RNA, 22 nt, Human
ccucaggcaagucacuuaacau

SEQ ID NO: 216908 - RNA, 20 nt, Human
agaaccuaaguuaaaacaca

SEQ ID NO: 216909 - RNA, 22 nt, Human
ccugcuggcggggacccaguga

SEQ ID NO: 216910 - RNA, 22 nt, Human
uaauuaguguccagcuucugcu

SEQ ID NO: 216911 - RNA, 22 nt, Human
uuauugcuuuggaaaacacuca

SEQ ID NO: 216912 - RNA, 22 nt, Human
aaacauguaaguucagaucacc

SEQ ID NO: 216913 - RNA, 22 nt, Human
ggcaggaagcucauguggacug

SEQ ID NO: 216914 - RNA, 22 nt, Human
gugcugggugcugcagacaggu

SEQ ID NO: 216915 - RNA, 22 nt, Human
uaucuuuguaucaaucuccauu

SEQ ID NO: 216916 - RNA, 22 nt, Human
aucaccaggcaaaaugucagag

SEQ ID NO: 216917 - RNA, 22 nt, Human
gcugaggcuccucgggaggaca

SEQ ID NO: 216918 - RNA, 22 nt, Human
ccaggugcucuugccagggcug

SEQ ID NO: 216919 - RNA, 22 nt, Human
ucugggcugggagcguguggac

SEQ ID NO: 216920 - RNA, 22 nt, Human
aaaagcagguacucagcuuggg

SEQ ID NO: 216921 - RNA, 22 nt, Human
uggcaggguggcaacuuuuggu

SEQ ID NO: 216922 - RNA, 22 nt, Human
aagccaaggagaauggccucag

SEQ ID NO: 216923 - RNA, 20 nt, Human
cucucacagcucccucagcc

SEQ ID NO: 216924 - RNA, 22 nt, Human
ccagggcucugcuucugccaug

SEQ ID NO: 216925 - RNA, 22 nt, Human
cuggccucuguguucaccauag

SEQ ID NO: 216926 - RNA, 22 nt, Human
acagccugcagccccaggucgc

SEQ ID NO: 216927 - RNA, 22 nt, Human
ccacugucugugacaucagaaa

SEQ ID NO: 216928 - RNA, 22 nt, Human
guccuucuuuucaucccugguu

SEQ ID NO: 216929 - RNA, 22 nt, Human
aacaauguguucagcacugugg

SEQ ID NO: 216930 - RNA, 22 nt, Human
acagggccauuggaggauuaua

SEQ ID NO: 216931 - RNA, 22 nt, Human
gacaggccaggggcugaggugg

SEQ ID NO: 216932 - RNA, 22 nt, Human
ggccaugcuguugccugcuggu

SEQ ID NO: 216933 - RNA, 22 nt, Human
aaaguguugggauuauaggcgu

SEQ ID NO: 216934 - RNA, 22 nt, Human
cuuuauuccuacaagauuuucu

SEQ ID NO: 216935 - RNA, 22 nt, Human
cauuguuauagcauuacacacc

SEQ ID NO: 216936 - RNA, 22 nt, Human
ccaggacacugcuucacagcag

SEQ ID NO: 216937 - RNA, 20 nt, Human
cacucugagggaguccaugu

SEQ ID NO: 216938 - RNA, 22 nt, Human
agcauccaacuuugauuagaga

SEQ ID NO: 216939 - RNA, 22 nt, Human
auuaguguucuuaucuucuagg

SEQ ID NO: 216940 - RNA, 22 nt, Human
ggcugagcuuuucaugaugguu

SEQ ID NO: 216941 - RNA, 22 nt, Human
cuggcugggguaccaguugaac

SEQ ID NO: 216942 - RNA, 22 nt, Human
cucgggcaggagggcccucucc

SEQ ID NO: 216943 - RNA, 20 nt, Human
gaaggaagggggcaagguga

SEQ ID NO: 216944 - RNA, 22 nt, Human
agaaacuucagcuauucuuuug

SEQ ID NO: 216945 - RNA, 20 nt, Human
gccuagggucacuucaguga

SEQ ID NO: 216946 - RNA, 22 nt, Human
uuuuuaguagagguggguuuca

SEQ ID NO: 216947 - RNA, 22 nt, Human
agcagacauggcuuggaugugg

SEQ ID NO: 216948 - RNA, 22 nt, Human
uuagauguggacuuauguuauu

SEQ ID NO: 216949 - RNA, 22 nt, Human
gcaggcuaugucagggccgcuc

SEQ ID NO: 216950 - RNA, 22 nt, Human
gacacuguuauggugagguaag

SEQ ID NO: 216951 - RNA, 22 nt, Human
uuucauaaacaguagaagacua

SEQ ID NO: 216952 - RNA, 22 nt, Human
ugugaagguaaggaggggcaag

SEQ ID NO: 216953 - RNA, 22 nt, Human
gauuguaaaacagaucauuauc

SEQ ID NO: 216954 - RNA, 22 nt, Human
uacugucucugcccuggccagg

SEQ ID NO: 216955 - RNA, 22 nt, Human
uagaaacauucaguugcagucc

SEQ ID NO: 216956 - RNA, 22 nt, Human
gacuucugaauuccuaucaggu

SEQ ID NO: 216957 - RNA, 22 nt, Human
auugcuuuguacaugccuagca

SEQ ID NO: 216958 - RNA, 22 nt, Human
uguauugaauuguguuauaucu

SEQ ID NO: 216959 - RNA, 22 nt, Human
gagccaggcccguacuugcugu

SEQ ID NO: 216960 - RNA, 19 nt, Human
agggagaauuccaagagga

SEQ ID NO: 216961 - RNA, 22 nt, Human
ucagagcugcccaugcaagggg

SEQ ID NO: 216962 - RNA, 22 nt, Human
uagccaggucacacuguguguu

SEQ ID NO: 216963 - RNA, 22 nt, Human
uccauacucagaaaguauugca

SEQ ID NO: 216964 - RNA, 22 nt, Human
gaggagagaacauuccuccaua

SEQ ID NO: 216965 - RNA, 20 nt, Human
gcuucccaauucuugaucug

SEQ ID NO: 216966 - RNA, 22 nt, Human
cuuggggaugcaaagccagugu

SEQ ID NO: 216967 - RNA, 18 nt, Human
ccaggcuacuucuuggcc

SEQ ID NO: 216968 - RNA, 21 nt, Human
caugugucuuguguuacugcu

SEQ ID NO: 216969 - RNA, 22 nt, Human
ccaugagccaggcugaggaagc

SEQ ID NO: 216970 - RNA, 22 nt, Human
cauugaaaccuaacauaggcug

SEQ ID NO: 216971 - RNA, 22 nt, Human
acagugaugagggaauuuugug

SEQ ID NO: 216972 - RNA, 22 nt, Human
ccccagcccacaagcauauuaa

SEQ ID NO: 216973 - RNA, 22 nt, Human
gucaaaacaaaguuaagaauuc

SEQ ID NO: 216974 - RNA, 22 nt, Human
cagaaggcuuuguggaguagac

SEQ ID NO: 216975 - RNA, 22 nt, Human
ugaauuguggcuuuuuccaauu

SEQ ID NO: 216976 - RNA, 22 nt, Human
agaggcggagguugcagugagc

SEQ ID NO: 216977 - RNA, 19 nt, Human
ucucuacacuacauuucua

SEQ ID NO: 216978 - RNA, 22 nt, Human
ucauuuuuugcauaccuguguc

SEQ ID NO: 216979 - RNA, 22 nt, Human
gaggugucccgcaguccccaag

SEQ ID NO: 216980 - RNA, 22 nt, Human
gcagcagugcgggcagcuacag

SEQ ID NO: 216981 - RNA, 22 nt, Human
gcaggacuugaauccaggcagu

SEQ ID NO: 216982 - RNA, 22 nt, Human
cacgggagacgugaucuuggac

SEQ ID NO: 216983 - RNA, 22 nt, Human
aaguauuauuuaacaaauuugu

SEQ ID NO: 216984 - RNA, 18 nt, Human
cuaaacugcaccuaauga

SEQ ID NO: 216985 - RNA, 22 nt, Human
aagcacuggagaugccagagug

SEQ ID NO: 216986 - RNA, 22 nt, Human
uccaggcauuccagccauucca

SEQ ID NO: 216987 - RNA, 22 nt, Human
gcuggcuggaggugaggaagaa

SEQ ID NO: 216988 - RNA, 22 nt, Human
ccuuccuggagcccaugcagau

SEQ ID NO: 216989 - RNA, 22 nt, Human
cacuugaaauauuaggggugau

SEQ ID NO: 216990 - RNA, 22 nt, Human
auccuguggcuccagggagccg

SEQ ID NO: 216991 - RNA, 22 nt, Human
ucuggguccgggacuguggaug

SEQ ID NO: 216992 - RNA, 22 nt, Human
aaacugaaguagauucugaaau

SEQ ID NO: 216993 - RNA, 22 nt, Human
caagacuucaccgcucugugcu

SEQ ID NO: 216994 - RNA, 22 nt, Human
ucuggcaccacugagucugcag

SEQ ID NO: 216995 - RNA, 22 nt, Human
cuuucuuaauuuuuaaggacac

SEQ ID NO: 216996 - RNA, 22 nt, Human
caggucuguauuaacagagggu

SEQ ID NO: 216997 - RNA, 22 nt, Human
acuguggccuuguggguucagg

SEQ ID NO: 216998 - RNA, 22 nt, Human
augagcaaggcuuugugauagu

SEQ ID NO: 216999 - RNA, 22 nt, Human
ugcaaggguagaagugauggca

SEQ ID NO: 217000 - RNA, 22 nt, Human
ucugagagcaggaggagcugcu

SEQ ID NO: 217001 - RNA, 22 nt, Human
uuuacagaaugucaauuucuau

SEQ ID NO: 217002 - RNA, 22 nt, Human
ggggcaggagcccuucuucagc

SEQ ID NO: 217003 - RNA, 22 nt, Human
cagcaugaauguguucguaggg

SEQ ID NO: 217004 - RNA, 22 nt, Human
uggagcaggacugcugcccuca

SEQ ID NO: 217005 - RNA, 22 nt, Human
aggaaugugccuagccucccug

SEQ ID NO: 217006 - RNA, 22 nt, Human
cuggaacuccuggggagcuggu

SEQ ID NO: 217007 - RNA, 22 nt, Human
gugaacaguucauuuuaucaug

SEQ ID NO: 217008 - RNA, 22 nt, Human
cacuugauggaagagcagaaga

SEQ ID NO: 217009 - RNA, 22 nt, Human
agucacaugcauuuucuucaau

SEQ ID NO: 217010 - RNA, 22 nt, Human
uuccauauuggaaggcacaggc

SEQ ID NO: 217011 - RNA, 22 nt, Human
auuuguaauuucuuaucugugu

SEQ ID NO: 217012 - RNA, 22 nt, Human
uugcccagagcugccuguuaca

SEQ ID NO: 217013 - RNA, 23 nt, Human
agaguuuucuguuuucuguaggg

SEQ ID NO: 217014 - RNA, 22 nt, Human
ugaaucauggauaaauagcuua

SEQ ID NO: 217015 - RNA, 22 nt, Human
cccagcagugacccagugauac

SEQ ID NO: 217016 - RNA, 22 nt, Human
gacuggagucaaugagcagcac

SEQ ID NO: 217017 - RNA, 22 nt, Human
ucuuuaucaagucuguucuuug

SEQ ID NO: 217018 - RNA, 22 nt, Human
agucuucucauuucacaugcuu

SEQ ID NO: 217019 - RNA, 22 nt, Human
uucuguaggacuucugccaacu

SEQ ID NO: 217020 - RNA, 20 nt, Human
ugcagcagaagcccaugcuc

SEQ ID NO: 217021 - RNA, 22 nt, Human
cagcuauuggcaagaaguggug

SEQ ID NO: 217022 - RNA, 22 nt, Human
aauuaacuaauuugguacaaga

SEQ ID NO: 217023 - RNA, 22 nt, Human
uuagaaaaaacgucuucuagug

SEQ ID NO: 217024 - RNA, 22 nt, Human
ucccaggguauccuguaguaaa

SEQ ID NO: 217025 - RNA, 22 nt, Human
uuugacauggaauaacucauuu

SEQ ID NO: 217026 - RNA, 23 nt, Human
ucucuggccuuugaucagguuga

SEQ ID NO: 217027 - RNA, 22 nt, Human
ugcccuccacaguggcuccacc

SEQ ID NO: 217028 - RNA, 22 nt, Human
uuuauguuugcauuuucaaaga

SEQ ID NO: 217029 - RNA, 22 nt, Human
augaggcaucugcagucacuag

SEQ ID NO: 217030 - RNA, 22 nt, Human
uuacaacaccaggcaguauccu

SEQ ID NO: 217031 - RNA, 22 nt, Human
cugccuggguucaaguccuguu

SEQ ID NO: 217032 - RNA, 22 nt, Human
auggagacgcaagggaccuagg

SEQ ID NO: 217033 - RNA, 22 nt, Human
gcuggcagagagcuggugagga

SEQ ID NO: 217034 - RNA, 22 nt, Human
uccacacacauuucuaugugca

SEQ ID NO: 217035 - RNA, 22 nt, Human
agaugaagaugccacuaagacc

SEQ ID NO: 217036 - RNA, 22 nt, Human
agcagaagugccuuagcaauca

SEQ ID NO: 217037 - RNA, 20 nt, Human
accaauuucagaggugcaga

SEQ ID NO: 217038 - RNA, 22 nt, Human
uuuacugaauuugguauauucc

SEQ ID NO: 217039 - RNA, 22 nt, Human
uuucuguaaguggcaaauaaug

SEQ ID NO: 217040 - RNA, 22 nt, Human
ucugcuguguccccugugcggg

SEQ ID NO: 217041 - RNA, 22 nt, Human
ccuucugagcuucaauuucagu

SEQ ID NO: 217042 - RNA, 22 nt, Human
ggcugagcacuuuaggcaggag

SEQ ID NO: 217043 - RNA, 22 nt, Human
agauuugcggcuuuacuuugca

SEQ ID NO: 217044 - RNA, 22 nt, Human
aucagagaaauggagggcgcuu

SEQ ID NO: 217045 - RNA, 22 nt, Human
agugcuuuuauaucauuaaucc

SEQ ID NO: 217046 - RNA, 22 nt, Human
auuauaggcuugagccaccgug

SEQ ID NO: 217047 - RNA, 22 nt, Human
ccagggcaugggaagaacugaa

SEQ ID NO: 217048 - RNA, 22 nt, Human
ccuggccaggcauggagucaca

SEQ ID NO: 217049 - RNA, 22 nt, Human
ggucaagacgggcucugcccuu

SEQ ID NO: 217050 - RNA, 22 nt, Human
gauaacauuauaaguucacugu

SEQ ID NO: 217051 - RNA, 22 nt, Human
auguuugucaggauuguaauua

SEQ ID NO: 217052 - RNA, 22 nt, Human
cccucagggaccacugacuuca

SEQ ID NO: 217053 - RNA, 22 nt, Human
uauggcaguuacccuugaugau

SEQ ID NO: 217054 - RNA, 18 nt, Human
ugaccugcgcuucacggu

SEQ ID NO: 217055 - RNA, 22 nt, Human
gccucagaaaguggcagguagg

SEQ ID NO: 217056 - RNA, 20 nt, Human
agauggugaaggccagggag

SEQ ID NO: 217057 - RNA, 22 nt, Human
ccagugcauugccgugucuagg

SEQ ID NO: 217058 - RNA, 22 nt, Human
gaauucuagucacacacauuca

SEQ ID NO: 217059 - RNA, 19 nt, Human
cuccucagucccagagguc

SEQ ID NO: 217060 - RNA, 22 nt, Human
augaacaagagagggaagauuc

SEQ ID NO: 217061 - RNA, 22 nt, Human
gagcuacugaaauauugauuuu

SEQ ID NO: 217062 - RNA, 22 nt, Human
ucugugcagaacucacagaagg

SEQ ID NO: 217063 - RNA, 22 nt, Human
uaaaguuuauuugaacaucucu

SEQ ID NO: 217064 - RNA, 22 nt, Human
cccaggugggcaccucgaggaa

SEQ ID NO: 217065 - RNA, 22 nt, Human
uauucaaaguaccuucauugcc

SEQ ID NO: 217066 - RNA, 16 nt, Human
ccucugggauguuugc

SEQ ID NO: 217067 - RNA, 22 nt, Human
uggcccugccacucacugcuga

SEQ ID NO: 217068 - RNA, 22 nt, Human
uagaauguuaagaauauguaua

SEQ ID NO: 217069 - RNA, 22 nt, Human
ugagccagguuuuccaucauuc

SEQ ID NO: 217070 - RNA, 22 nt, Human
gccacagggcgagcggaggcca

SEQ ID NO: 217071 - RNA, 22 nt, Human
ugacguuuuagguguuaaaucg

SEQ ID NO: 217072 - RNA, 22 nt, Human
uuaacagacuugggauuuucua

SEQ ID NO: 217073 - RNA, 22 nt, Human
aagggcagccugacucacgguc

SEQ ID NO: 217074 - RNA, 22 nt, Human
uugcuuugccaccagaagucua

SEQ ID NO: 217075 - RNA, 22 nt, Human
gcaggccuuggcaaugagccug

SEQ ID NO: 217076 - RNA, 22 nt, Human
gacauaauccuccucaccuacu

SEQ ID NO: 217077 - RNA, 22 nt, Human
uggaagaauaggauagaagaac

SEQ ID NO: 217078 - RNA, 22 nt, Human
caaggcugugcaggguccauau

SEQ ID NO: 217079 - RNA, 22 nt, Human
ucagaaguccaauaccauggga

SEQ ID NO: 217080 - RNA, 22 nt, Human
aaggcugaggcagugaggcaga

SEQ ID NO: 217081 - RNA, 22 nt, Human
gaggaagaagggauuagaacuc

SEQ ID NO: 217082 - RNA, 22 nt, Human
aaccuaugaacucuuggugugc

SEQ ID NO: 217083 - RNA, 20 nt, Human
gcuccaggucagagaggacg

SEQ ID NO: 217084 - RNA, 22 nt, Human
uaguggaguagaaaccaaagaa

SEQ ID NO: 217085 - RNA, 19 nt, Human
ugcauauaucuaugaaaga

SEQ ID NO: 217086 - RNA, 22 nt, Human
aaacuucauggauaauauaaag

SEQ ID NO: 217087 - RNA, 22 nt, Human
ccagggaaggcucugccugcuu

SEQ ID NO: 217088 - RNA, 22 nt, Human
uuccaugaagggcagccucuca

SEQ ID NO: 217089 - RNA, 22 nt, Human
uacauguggagauaacugaagc

SEQ ID NO: 217090 - RNA, 22 nt, Human
gauauuuacaaauuugccaaua

SEQ ID NO: 217091 - RNA, 19 nt, Human
gcuucuguuugggcuuaga

SEQ ID NO: 217092 - RNA, 22 nt, Human
uaauacuuaccuugcagagucu

SEQ ID NO: 217093 - RNA, 21 nt, Human
aggaauguguauauauacaau

SEQ ID NO: 217094 - RNA, 22 nt, Human
ucaggcagguggcuggcuaugg

SEQ ID NO: 217095 - RNA, 22 nt, Human
ugcuccaggcaagcugagaguu

SEQ ID NO: 217096 - RNA, 22 nt, Human
cguuaguggaguuugaagcugu

SEQ ID NO: 217097 - RNA, 22 nt, Human
guauuuuauggccuggggccua

SEQ ID NO: 217098 - RNA, 22 nt, Human
uugaggaguguuuagggugagg

SEQ ID NO: 217099 - RNA, 18 nt, Human
cucucuggucuggauccc

SEQ ID NO: 217100 - RNA, 22 nt, Human
uagagguguucauucucuccau

SEQ ID NO: 217101 - RNA, 22 nt, Human
ucauaaaaauagacucuaaagu

SEQ ID NO: 217102 - RNA, 22 nt, Human
gcugcaggggggucuggacuug

SEQ ID NO: 217103 - RNA, 22 nt, Human
gaauguuacuuugauuuugucc

SEQ ID NO: 217104 - RNA, 18 nt, Human
aaauuagauggaccugug

SEQ ID NO: 217105 - RNA, 22 nt, Human
ggugcugaugaagauguagccu

SEQ ID NO: 217106 - RNA, 22 nt, Human
gucauagaggccuauauaauuu

SEQ ID NO: 217107 - RNA, 22 nt, Human
uuucugagaaauuaaacacuuu

SEQ ID NO: 217108 - RNA, 22 nt, Human
guggcgcagaggguggcagaga

SEQ ID NO: 217109 - RNA, 22 nt, Human
ggcacugcccacccucacaggg

SEQ ID NO: 217110 - RNA, 22 nt, Human
guuuuucucugaaauaguugac

SEQ ID NO: 217111 - RNA, 22 nt, Human
caugacaauaagccagcagaaa

SEQ ID NO: 217112 - RNA, 22 nt, Human
aagucucucauggcugacagca

SEQ ID NO: 217113 - RNA, 19 nt, Human
ugugugcaaauggaagcca

SEQ ID NO: 217114 - RNA, 22 nt, Human
gagagucuagugcaccuaguuu

SEQ ID NO: 217115 - RNA, 22 nt, Human
aggggagcaacauagucacucu

SEQ ID NO: 217116 - RNA, 22 nt, Human
agccagagggaucuuucuaaga

SEQ ID NO: 217117 - RNA, 22 nt, Human
cugaggcaggagaauugcugga

SEQ ID NO: 217118 - RNA, 22 nt, Human
cuggcucaggaaaguugcugcu

SEQ ID NO: 217119 - RNA, 22 nt, Human
gguuuacucguaguggcgguuu

SEQ ID NO: 217120 - RNA, 22 nt, Human
gagcuucccucugcagucccug

SEQ ID NO: 217121 - RNA, 20 nt, Human
ucccucaggucauugggcug

SEQ ID NO: 217122 - RNA, 22 nt, Human
ugcagagauagaacuacuuucu

SEQ ID NO: 217123 - RNA, 22 nt, Human
cugggccagaccuuguggucuu

SEQ ID NO: 217124 - RNA, 22 nt, Human
ucagaggccuugguuaugguau

SEQ ID NO: 217125 - RNA, 22 nt, Human
cuugaaucuucugaguauuugc

SEQ ID NO: 217126 - RNA, 22 nt, Human
agugucagcuaauuauucauga

SEQ ID NO: 217127 - RNA, 22 nt, Human
agcugaggacgugaagggcggc

SEQ ID NO: 217128 - RNA, 22 nt, Human
ggcucugcagugacuugagggg

SEQ ID NO: 217129 - RNA, 22 nt, Human
ugcugugggauauauguucaaa

SEQ ID NO: 217130 - RNA, 20 nt, Human
acuguuggaaguggagaaug

SEQ ID NO: 217131 - RNA, 22 nt, Human
ugcucuggcuggagcaaugacu

SEQ ID NO: 217132 - RNA, 23 nt, Human
uccucccaaauuucagccucauu

SEQ ID NO: 217133 - RNA, 22 nt, Human
ccacaucucuugauguaccuac

SEQ ID NO: 217134 - RNA, 22 nt, Human
uccacauuauguuucuccuuuc

SEQ ID NO: 217135 - RNA, 22 nt, Human
ugaguauugaccagaaaauuua

SEQ ID NO: 217136 - RNA, 22 nt, Human
cauauccagguuucuuugguuu

SEQ ID NO: 217137 - RNA, 22 nt, Human
ucuuauaaaaggacucccauuu

SEQ ID NO: 217138 - RNA, 22 nt, Human
uucugucugauggugccagaac

SEQ ID NO: 217139 - RNA, 22 nt, Human
agcagcugcagggagggucugc

SEQ ID NO: 217140 - RNA, 22 nt, Human
uugacacagaucaauauucaac

SEQ ID NO: 217141 - RNA, 22 nt, Human
caggguuucaccauguuagcag

SEQ ID NO: 217142 - RNA, 22 nt, Human
ugcauuaaauauaaucuguuga

SEQ ID NO: 217143 - RNA, 20 nt, Human
gaaggcuuggacagugacag

SEQ ID NO: 217144 - RNA, 22 nt, Human
ugcacaggaggcuguggagaag

SEQ ID NO: 217145 - RNA, 21 nt, Human
cuuggaguugguugaggaugc

SEQ ID NO: 217146 - RNA, 22 nt, Human
aagccagguguugugguaagag

SEQ ID NO: 217147 - RNA, 22 nt, Human
uaggagggggaacaaggcauac

SEQ ID NO: 217148 - RNA, 22 nt, Human
auuaaagacagcagauggaugg

SEQ ID NO: 217149 - RNA, 22 nt, Human
accaggccaacagcuaaguuaa

SEQ ID NO: 217150 - RNA, 22 nt, Human
ucuucccuaaucaccaucuuca

SEQ ID NO: 217151 - RNA, 22 nt, Human
agugccaggagcaaggagcucc

SEQ ID NO: 217152 - RNA, 22 nt, Human
agcuuacaguucaaugacaaag

SEQ ID NO: 217153 - RNA, 22 nt, Human
cagauucugaagucuagcugcu

SEQ ID NO: 217154 - RNA, 22 nt, Human
uguaaacuguagaaaauacuuu

SEQ ID NO: 217155 - RNA, 22 nt, Human
agccuccuggaguuucugggau

SEQ ID NO: 217156 - RNA, 22 nt, Human
cagaguggugcaagggcagugu

SEQ ID NO: 217157 - RNA, 22 nt, Human
cuggagugaggucugggagccu

SEQ ID NO: 217158 - RNA, 22 nt, Human
ccaggaucuguacaccucugag

SEQ ID NO: 217159 - RNA, 22 nt, Human
guggcccucugauagggucagg

SEQ ID NO: 217160 - RNA, 22 nt, Human
ucuaagaucuacuauacaugug

SEQ ID NO: 217161 - RNA, 19 nt, Human
aggcuggaugcccaucuua

SEQ ID NO: 217162 - RNA, 22 nt, Human
caguggaagcuggcugugaaga

SEQ ID NO: 217163 - RNA, 22 nt, Human
uagggcucugagaguucagccu

SEQ ID NO: 217164 - RNA, 20 nt, Human
uuuggagagaaagaaguagu

SEQ ID NO: 217165 - RNA, 22 nt, Human
gcauggcagccaguacauggug

SEQ ID NO: 217166 - RNA, 22 nt, Human
ggaggaagggcccaggcuuuau

SEQ ID NO: 217167 - RNA, 21 nt, Human
uuggcugccugagauuagaau

SEQ ID NO: 217168 - RNA, 22 nt, Human
ucagcacaggucuugcaaaaca

SEQ ID NO: 217169 - RNA, 22 nt, Human
accuuagaccagcaagauauuu

SEQ ID NO: 217170 - RNA, 22 nt, Human
gugcccaguaaaugaaagcuuu

SEQ ID NO: 217171 - RNA, 22 nt, Human
uuggaaaacuuacacagagcug

SEQ ID NO: 217172 - RNA, 22 nt, Human
uaggaaacagugcauauauagu

SEQ ID NO: 217173 - RNA, 22 nt, Human
guacaggaaggagggaguuuca

SEQ ID NO: 217174 - RNA, 22 nt, Human
cagcccucagguccucagcagc

SEQ ID NO: 217175 - RNA, 22 nt, Human
gaggccucaugaggugagcauu

SEQ ID NO: 217176 - RNA, 22 nt, Human
aagagcccugguugaaaauaac

SEQ ID NO: 217177 - RNA, 22 nt, Human
uggcucuguggucuuagcaugc

SEQ ID NO: 217178 - RNA, 22 nt, Human
cuagugaaauuugcaaguaauu

SEQ ID NO: 217179 - RNA, 22 nt, Human
auuagaacuaggcuaaguaaaa

SEQ ID NO: 217180 - RNA, 22 nt, Human
auggucuugugagaguaacagu

SEQ ID NO: 217181 - RNA, 22 nt, Human
ucuccauaggcaguucauaaca

SEQ ID NO: 217182 - RNA, 22 nt, Human
gcagaauauauuacugagccuc

SEQ ID NO: 217183 - RNA, 22 nt, Human
caguaccagucaccacauugau

SEQ ID NO: 217184 - RNA, 21 nt, Human
agcuguuugaagcuauauugg

SEQ ID NO: 217185 - RNA, 22 nt, Human
gaauguuauguauccagucaca

SEQ ID NO: 217186 - RNA, 22 nt, Human
cagcugaggaauacuagaugua

SEQ ID NO: 217187 - RNA, 22 nt, Human
auacaaucaucauuauauuccc

SEQ ID NO: 217188 - RNA, 17 nt, Human
ccucuuccucucagcug

SEQ ID NO: 217189 - RNA, 22 nt, Human
ggucagccuuggauuugguagc

SEQ ID NO: 217190 - RNA, 22 nt, Human
cccaggugcugaaggaggccgc

SEQ ID NO: 217191 - RNA, 22 nt, Human
uccaggaacgagaggcugggca

SEQ ID NO: 217192 - RNA, 22 nt, Human
aaugucugaggcucaucugagg

SEQ ID NO: 217193 - RNA, 22 nt, Human
gaauguaagugggcagaagaca

SEQ ID NO: 217194 - RNA, 22 nt, Human
ugagcuggucacuccuucugaa

SEQ ID NO: 217195 - RNA, 22 nt, Human
gacuaaauuccuguucgcgaug

SEQ ID NO: 217196 - RNA, 22 nt, Human
ugaaggugaaugucuaugggga

SEQ ID NO: 217197 - RNA, 22 nt, Human
aguggcugugaaauacauggga

SEQ ID NO: 217198 - RNA, 22 nt, Human
aguaccaugcuuccugacuggu

SEQ ID NO: 217199 - RNA, 22 nt, Human
aagagcaucgguggagccccca

SEQ ID NO: 217200 - RNA, 22 nt, Human
gacaggaagucugaaggaggga

SEQ ID NO: 217201 - RNA, 22 nt, Human
uguggcaggcaagauguacaga

SEQ ID NO: 217202 - RNA, 22 nt, Human
cuaaaugacagguaccauagug

SEQ ID NO: 217203 - RNA, 22 nt, Human
ccacugucagaggggcugugcc

SEQ ID NO: 217204 - RNA, 22 nt, Human
ggaaaggagauauuggagagug

SEQ ID NO: 217205 - RNA, 22 nt, Human
aacaagucauuccauuugacag

SEQ ID NO: 217206 - RNA, 22 nt, Human
gucaguuauuuugagcaauugg

SEQ ID NO: 217207 - RNA, 22 nt, Human
uuaguucucaugaauuuuaagu

SEQ ID NO: 217208 - RNA, 23 nt, Human
cugaggucugcaauucuaguagu

SEQ ID NO: 217209 - RNA, 23 nt, Human
agauuguuauucccaguucaugu

SEQ ID NO: 217210 - RNA, 22 nt, Human
uuagugcaaaccucagagacac

SEQ ID NO: 217211 - RNA, 18 nt, Human
ugcuuuaugcuuauauaa

SEQ ID NO: 217212 - RNA, 22 nt, Human
uaagacauuugaaaugugaucc

SEQ ID NO: 217213 - RNA, 22 nt, Human
aaaaggcuaauuaaguuuugga

SEQ ID NO: 217214 - RNA, 22 nt, Human
ugccaccaggagaaccagugca

SEQ ID NO: 217215 - RNA, 22 nt, Human
gaggugucauuuaguuaaucag

SEQ ID NO: 217216 - RNA, 22 nt, Human
aaaaggcuaauccagagcaacu

SEQ ID NO: 217217 - RNA, 22 nt, Human
cuuucucaaugccggaaggcac

SEQ ID NO: 217218 - RNA, 22 nt, Human
ucacagcauugaguguacuaga

SEQ ID NO: 217219 - RNA, 22 nt, Human
gagucagaagaaacuauuuaca

SEQ ID NO: 217220 - RNA, 18 nt, Human
ggcucaggcuauccuaac

SEQ ID NO: 217221 - RNA, 22 nt, Human
uuccagcuaacucacaucccuu

SEQ ID NO: 217222 - RNA, 19 nt, Human
aguucuuguccugucuguu

SEQ ID NO: 217223 - RNA, 22 nt, Human
gcagugggcaacaagagcugga

SEQ ID NO: 217224 - RNA, 22 nt, Human
agugauugaguguuagcagucu

SEQ ID NO: 217225 - RNA, 22 nt, Human
acaggcagauguuuuaguugua

SEQ ID NO: 217226 - RNA, 22 nt, Human
ccaggagggaggaguuccugag

SEQ ID NO: 217227 - RNA, 22 nt, Human
ugacagggcuagaggcaaugca

SEQ ID NO: 217228 - RNA, 22 nt, Human
cccauauacuuuuucuggucca

SEQ ID NO: 217229 - RNA, 19 nt, Human
uuagggacaugaauucuag

SEQ ID NO: 217230 - RNA, 22 nt, Human
uccacagggccuuucuggugug

SEQ ID NO: 217231 - RNA, 22 nt, Human
uggacagguugaguaggaggag

SEQ ID NO: 217232 - RNA, 22 nt, Human
uaauuuacuugcaaauaacaau

SEQ ID NO: 217233 - RNA, 22 nt, Human
aggcaugacuuuggcugaagaa

SEQ ID NO: 217234 - RNA, 22 nt, Human
gaaaaaugagcugaugucaggg

SEQ ID NO: 217235 - RNA, 22 nt, Human
uagaggcauaagagggaagcag

SEQ ID NO: 217236 - RNA, 22 nt, Human
ugaccaguuaagucauccuguc

SEQ ID NO: 217237 - RNA, 22 nt, Human
uaacucuagucccaggcaugaa

SEQ ID NO: 217238 - RNA, 22 nt, Human
guggauggagcagugacccagg

SEQ ID NO: 217239 - RNA, 22 nt, Human
uuccuucuagagcuuguuuagg

SEQ ID NO: 217240 - RNA, 22 nt, Human
ggcuggacugccucccagaguc

SEQ ID NO: 217241 - RNA, 22 nt, Human
cgcagagggcaggcagugcugg

SEQ ID NO: 217242 - RNA, 22 nt, Human
aggaaacuaaggcucagugaag

SEQ ID NO: 217243 - RNA, 22 nt, Human
uaucuagaacuccagaauguag

SEQ ID NO: 217244 - RNA, 22 nt, Human
uucaugugauaaaugugugacu

SEQ ID NO: 217245 - RNA, 22 nt, Human
caguguggcugagacagaggcu

SEQ ID NO: 217246 - RNA, 22 nt, Human
aucuuucagggccauuuguauu

SEQ ID NO: 217247 - RNA, 22 nt, Human
gaaagugcaugugcccaccauu

SEQ ID NO: 217248 - RNA, 22 nt, Human
ucuccuggauggaccuucucuu

SEQ ID NO: 217249 - RNA, 22 nt, Human
gauaaauuaucagggguuuaaa

SEQ ID NO: 217250 - RNA, 22 nt, Human
uccaaacgggagccaaaugagc

SEQ ID NO: 217251 - RNA, 22 nt, Human
uugccaggagacaucuggagcc

SEQ ID NO: 217252 - RNA, 22 nt, Human
gagaggcuaugagguucugugu

SEQ ID NO: 217253 - RNA, 22 nt, Human
aaguuuaagguggaaguggugg

SEQ ID NO: 217254 - RNA, 22 nt, Human
uggccucugugggagcugagca

SEQ ID NO: 217255 - RNA, 22 nt, Human
ggcccaguguaccccaggcagu

SEQ ID NO: 217256 - RNA, 22 nt, Human
gaaaccuuugccgauggggucc

SEQ ID NO: 217257 - RNA, 22 nt, Human
aggacaagcuaaaggacuuccu

SEQ ID NO: 217258 - RNA, 22 nt, Human
uaaaagagaauggauaacagag

SEQ ID NO: 217259 - RNA, 22 nt, Human
cugggggcagcaagaagccaug

SEQ ID NO: 217260 - RNA, 22 nt, Human
agaaggccaauagggugcacug

SEQ ID NO: 217261 - RNA, 22 nt, Human
cggcugagcagugcugauggaa

SEQ ID NO: 217262 - RNA, 22 nt, Human
cuuccugggcaauguucugcuu

SEQ ID NO: 217263 - RNA, 22 nt, Human
cucuggcuuuaaggaugccaca

SEQ ID NO: 217264 - RNA, 22 nt, Human
gggcacuggaaggcucucaggc

SEQ ID NO: 217265 - RNA, 22 nt, Human
uuggaggaugcaaugagggagu

SEQ ID NO: 217266 - RNA, 20 nt, Human
aggccccagguggacacuag

SEQ ID NO: 217267 - RNA, 22 nt, Human
guuaucaugcuucaucaucacu

SEQ ID NO: 217268 - RNA, 22 nt, Human
acaauucauuaaugugagguag

SEQ ID NO: 217269 - RNA, 22 nt, Human
uuuuagacuuguauguaaagcc

SEQ ID NO: 217270 - RNA, 22 nt, Human
cagcccagcagacuguuaccac

SEQ ID NO: 217271 - RNA, 22 nt, Human
cuuguauucagaguggacauga

SEQ ID NO: 217272 - RNA, 22 nt, Human
aucuuuggugcaugauacuuug

SEQ ID NO: 217273 - RNA, 22 nt, Human
uuuuauugcaauaaagugugua

SEQ ID NO: 217274 - RNA, 22 nt, Human
gugccagcucuccccacaucug

SEQ ID NO: 217275 - RNA, 22 nt, Human
cuucuuccugcugcagccucca

SEQ ID NO: 217276 - RNA, 22 nt, Human
gugggucccuaaacacauccca

SEQ ID NO: 217277 - RNA, 22 nt, Human
caauucuuuguagaagcucucc

SEQ ID NO: 217278 - RNA, 22 nt, Human
gugugcaggccacaggccaggg

SEQ ID NO: 217279 - RNA, 22 nt, Human
gcaagcuguccuuuugcauggc

SEQ ID NO: 217280 - RNA, 23 nt, Human
ccauggccaaugucaagcuacua

SEQ ID NO: 217281 - RNA, 22 nt, Human
cuuuggaaucauugcuuauuca

SEQ ID NO: 217282 - RNA, 22 nt, Human
ggaggugggcuaaggacucucu

SEQ ID NO: 217283 - RNA, 22 nt, Human
gaaugauuugguuguuuagauu

SEQ ID NO: 217284 - RNA, 22 nt, Human
aauguugagcuugaaaguaggu

SEQ ID NO: 217285 - RNA, 22 nt, Human
acccacgaagaugagcggcaug

SEQ ID NO: 217286 - RNA, 22 nt, Human
ucuuccagccaauagcguccuu

SEQ ID NO: 217287 - RNA, 22 nt, Human
ugcuguuaguaaggaacaugac

SEQ ID NO: 217288 - RNA, 22 nt, Human
ugcuggagaagcuccugggacu

SEQ ID NO: 217289 - RNA, 22 nt, Human
ugcaaauaaauuucuguucauu

SEQ ID NO: 217290 - RNA, 22 nt, Human
uuauuucauugauuucuaagac

SEQ ID NO: 217291 - RNA, 22 nt, Human
uggacaugucuucuccaagaaa

SEQ ID NO: 217292 - RNA, 17 nt, Human
cacuugcuggucuaccu

SEQ ID NO: 217293 - RNA, 22 nt, Human
auucuacacaacaugaugaugg

SEQ ID NO: 217294 - RNA, 22 nt, Human
aauguaaagcucaggucaggag

SEQ ID NO: 217295 - RNA, 19 nt, Human
uccugaaaacuucuggaau

SEQ ID NO: 217296 - RNA, 22 nt, Human
uggagacagagauagccaauug

SEQ ID NO: 217297 - RNA, 22 nt, Human
guggcugcugguacucugggaa

SEQ ID NO: 217298 - RNA, 22 nt, Human
ucagaacagguuguacuauguc

SEQ ID NO: 217299 - RNA, 22 nt, Human
gcugaagacaauggaauugacu

SEQ ID NO: 217300 - RNA, 22 nt, Human
uguuuucugauucucguguggu

SEQ ID NO: 217301 - RNA, 22 nt, Human
ggugcucaaggugacaggacau

SEQ ID NO: 217302 - RNA, 22 nt, Human
ugggaacaccugcugcccagug

SEQ ID NO: 217303 - RNA, 20 nt, Human
aggcagagcgcacuuuuaga

SEQ ID NO: 217304 - RNA, 22 nt, Human
ucuguaaaucuacuaagagcuc

SEQ ID NO: 217305 - RNA, 22 nt, Human
uggaagugcucuucugaccaac

SEQ ID NO: 217306 - RNA, 19 nt, Human
gccucugcuggggacaggc

SEQ ID NO: 217307 - RNA, 22 nt, Human
ccaggugugguggcauacaccu

SEQ ID NO: 217308 - RNA, 22 nt, Human
ggcuuccuggggccuccugcaa

SEQ ID NO: 217309 - RNA, 22 nt, Human
uacuguuuucuauaauggcugu

SEQ ID NO: 217310 - RNA, 22 nt, Human
cugcaggcaucuaacugugggc

SEQ ID NO: 217311 - RNA, 22 nt, Human
gggugggaacaggaugccagga

SEQ ID NO: 217312 - RNA, 19 nt, Human
ggcaggugugcuuaugcuu

SEQ ID NO: 217313 - RNA, 22 nt, Human
aggcagcuuaagcccuggccca

SEQ ID NO: 217314 - RNA, 22 nt, Human
ggcucaggcuggagugcagugg

SEQ ID NO: 217315 - RNA, 22 nt, Human
uggcuccugcauuugugcuaac

SEQ ID NO: 217316 - RNA, 22 nt, Human
cugcagagaauuguggggcuuc

SEQ ID NO: 217317 - RNA, 22 nt, Human
uuucucuggcauuagguauaaa

SEQ ID NO: 217318 - RNA, 22 nt, Human
aacaguuuaugauaaauucuua

SEQ ID NO: 217319 - RNA, 22 nt, Human
aaggcugguuccaucccuggug

SEQ ID NO: 217320 - RNA, 19 nt, Human
cuuauuagagugagagcuu

SEQ ID NO: 217321 - RNA, 22 nt, Human
gagcgggaggaacggcucgggc

SEQ ID NO: 217322 - RNA, 22 nt, Human
ccuccuggguucaagcgauucu

SEQ ID NO: 217323 - RNA, 22 nt, Human
cuuuucuggccaggaacuugcc

SEQ ID NO: 217324 - RNA, 22 nt, Human
aaagugcaaucaguuagaccau

SEQ ID NO: 217325 - RNA, 22 nt, Human
uugguuuagagagugugguuac

SEQ ID NO: 217326 - RNA, 22 nt, Human
ccaggcugagcaugauuggagc

SEQ ID NO: 217327 - RNA, 22 nt, Human
uuugucuuggccucaguuuucu

SEQ ID NO: 217328 - RNA, 22 nt, Human
aaguccagugauacuggcagga

SEQ ID NO: 217329 - RNA, 22 nt, Human
caggcaagcaaggggucuugaa

SEQ ID NO: 217330 - RNA, 19 nt, Human
auucauuggccaggguggu

SEQ ID NO: 217331 - RNA, 22 nt, Human
gguggcugugagcauuauguga

SEQ ID NO: 217332 - RNA, 22 nt, Human
ccuggcaccuucacagacuacu

SEQ ID NO: 217333 - RNA, 22 nt, Human
cuugaguuacagcucuccaaga

SEQ ID NO: 217334 - RNA, 22 nt, Human
cugggagaucuccugagggcag

SEQ ID NO: 217335 - RNA, 19 nt, Human
ucaggagcagcuucugaac

SEQ ID NO: 217336 - RNA, 22 nt, Human
aggaggccugcagcugccauuc

SEQ ID NO: 217337 - RNA, 22 nt, Human
aggaguuauggcagaaucaaau

SEQ ID NO: 217338 - RNA, 22 nt, Human
uauaaagagucucaaagaaguu

SEQ ID NO: 217339 - RNA, 22 nt, Human
gaugggguuuugccaggcuggu

SEQ ID NO: 217340 - RNA, 22 nt, Human
uuucucgcguuugagcucucag

SEQ ID NO: 217341 - RNA, 19 nt, Human
gugucaggaugugcagggg

SEQ ID NO: 217342 - RNA, 22 nt, Human
agcugccaaguuggaguagcaa

SEQ ID NO: 217343 - RNA, 22 nt, Human
ggcugugaacccuggcagugug

SEQ ID NO: 217344 - RNA, 20 nt, Human
agguguccuguagcuugagu

SEQ ID NO: 217345 - RNA, 20 nt, Human
uccugaauuuccuuucugcu

SEQ ID NO: 217346 - RNA, 22 nt, Human
gcuggcaggagccuuucccuuu

SEQ ID NO: 217347 - RNA, 22 nt, Human
uagccauguguggaacacagcc

SEQ ID NO: 217348 - RNA, 22 nt, Human
gagcugaagaugucagaaccgu

SEQ ID NO: 217349 - RNA, 22 nt, Human
agcaguguucuaaucuggcuag

SEQ ID NO: 217350 - RNA, 21 nt, Human
ucagugacaggugcugaccuc

SEQ ID NO: 217351 - RNA, 22 nt, Human
uuuaaauuuagaagaaacacug

SEQ ID NO: 217352 - RNA, 22 nt, Human
cuaaaugauauuuugguuuccu

SEQ ID NO: 217353 - RNA, 22 nt, Human
acauuugagcaucuacuaagug

SEQ ID NO: 217354 - RNA, 21 nt, Human
aggaggaacccguggcugggc

SEQ ID NO: 217355 - RNA, 22 nt, Human
gaguuacauucauuguuacgcu

SEQ ID NO: 217356 - RNA, 22 nt, Human
aggagcucaaagaugccaggag

SEQ ID NO: 217357 - RNA, 22 nt, Human
ccucugugccucguguccucug

SEQ ID NO: 217358 - RNA, 22 nt, Human
agaccccauaccucagcaggua

SEQ ID NO: 217359 - RNA, 22 nt, Human
uacaugugcuggguucuuggcc

SEQ ID NO: 217360 - RNA, 17 nt, Human
uacaaugugauucaauc

SEQ ID NO: 217361 - RNA, 22 nt, Human
aucagagcccugaugacagacu

SEQ ID NO: 217362 - RNA, 22 nt, Human
caucuggguucucagauggaua

SEQ ID NO: 217363 - RNA, 20 nt, Human
uaggcagcuugacccuuggu

SEQ ID NO: 217364 - RNA, 22 nt, Human
ccugcugugaccggggagcagg

SEQ ID NO: 217365 - RNA, 22 nt, Human
ccaggcucugccaggcccuuga

SEQ ID NO: 217366 - RNA, 22 nt, Human
ccuggcaguuuugcccaggauu

SEQ ID NO: 217367 - RNA, 22 nt, Human
aagcuacaguuuacccaugguu

SEQ ID NO: 217368 - RNA, 22 nt, Human
uccauucauucauugaugaaca

SEQ ID NO: 217369 - RNA, 22 nt, Human
agucacaguuccuacccaguaa

SEQ ID NO: 217370 - RNA, 22 nt, Human
augcaaaugcagccauugcaga

SEQ ID NO: 217371 - RNA, 22 nt, Human
ucuggcugggugagagcuucuc

SEQ ID NO: 217372 - RNA, 22 nt, Human
uauguauucucagauuuacuaa

SEQ ID NO: 217373 - RNA, 18 nt, Human
agagaaagaccaaagcau

SEQ ID NO: 217374 - RNA, 22 nt, Human
ggccuuccugcugcuccgggcc

SEQ ID NO: 217375 - RNA, 22 nt, Human
uuucuagcuguaggaagcugag

SEQ ID NO: 217376 - RNA, 19 nt, Human
agcugugcagacacuucgc

SEQ ID NO: 217377 - RNA, 22 nt, Human
cccuuccucaaggagcuguguu

SEQ ID NO: 217378 - RNA, 22 nt, Human
uauguauagagucuuuuaaauu

SEQ ID NO: 217379 - RNA, 22 nt, Human
augucugucuuuguacuccaca

SEQ ID NO: 217380 - RNA, 22 nt, Human
agaugugacugggcaaguuacu

SEQ ID NO: 217381 - RNA, 22 nt, Human
gguggcucucuuaagggcagcg

SEQ ID NO: 217382 - RNA, 22 nt, Human
uccagcccagcuccucucagaa

SEQ ID NO: 217383 - RNA, 22 nt, Human
agcagcagagcucuggucugca

SEQ ID NO: 217384 - RNA, 22 nt, Human
cagagaaagaagcccauucauu

SEQ ID NO: 217385 - RNA, 22 nt, Human
caucucauuuauuccaacucag

SEQ ID NO: 217386 - RNA, 22 nt, Human
caaagggcucuagacucagcag

SEQ ID NO: 217387 - RNA, 22 nt, Human
cuggcagguuuggugucuggug

SEQ ID NO: 217388 - RNA, 22 nt, Human
uagcaaccagaacagcacucua

SEQ ID NO: 217389 - RNA, 22 nt, Human
agcauuagguguguuucagagg

SEQ ID NO: 217390 - RNA, 22 nt, Human
uuucucagaggagccagacggu

SEQ ID NO: 217391 - RNA, 22 nt, Human
uccaggcuggcucuucaaaauu

SEQ ID NO: 217392 - RNA, 21 nt, Human
ugaaagaaggugcagucugaa

SEQ ID NO: 217393 - RNA, 22 nt, Human
aguaugcaaaugucauaagcau

SEQ ID NO: 217394 - RNA, 22 nt, Human
ucugaaauuguuaguaaaaaug

SEQ ID NO: 217395 - RNA, 22 nt, Human
agcauuuaguuaguaaauguuu

SEQ ID NO: 217396 - RNA, 22 nt, Human
aaauuagaucaguggauuuucu

SEQ ID NO: 217397 - RNA, 22 nt, Human
ucagugaucuaaggguauggcc

SEQ ID NO: 217398 - RNA, 22 nt, Human
agcaaaguagcugcuguucuua

SEQ ID NO: 217399 - RNA, 22 nt, Human
gaaggccacaaaaaaugucaua

SEQ ID NO: 217400 - RNA, 22 nt, Human
gcugcugugugggagacaggcg

SEQ ID NO: 217401 - RNA, 22 nt, Human
uuggccagcagcucuggcuuag

SEQ ID NO: 217402 - RNA, 22 nt, Human
ugagucuuuagaauucuaacuu

SEQ ID NO: 217403 - RNA, 22 nt, Human
caggcauuguucuagguucuca

SEQ ID NO: 217404 - RNA, 22 nt, Human
gcugagauuacgggcaugagcc

SEQ ID NO: 217405 - RNA, 22 nt, Human
uucaggaugcucagaguagucu

SEQ ID NO: 217406 - RNA, 22 nt, Human
aacuguagggaucugucuuagu

SEQ ID NO: 217407 - RNA, 22 nt, Human
uacauguucaaauuugucuuuc

SEQ ID NO: 217408 - RNA, 22 nt, Human
ucuagaaaaccaauauuacaug

SEQ ID NO: 217409 - RNA, 22 nt, Human
uacaucaaaucaauguuccagu

SEQ ID NO: 217410 - RNA, 22 nt, Human
cauagagugauguaagguaugu

SEQ ID NO: 217411 - RNA, 22 nt, Human
cccagcucaucaggagccgccc

SEQ ID NO: 217412 - RNA, 22 nt, Human
cccaguggggagcuucugccuu

SEQ ID NO: 217413 - RNA, 22 nt, Human
cucagcaacccuagaacauuug

SEQ ID NO: 217414 - RNA, 22 nt, Human
gcucacagucugcugagugcag

SEQ ID NO: 217415 - RNA, 22 nt, Human
gggcagugggaccaggcaccag

SEQ ID NO: 217416 - RNA, 21 nt, Human
augcaggcugcucagaagcaa

SEQ ID NO: 217417 - RNA, 22 nt, Human
ggugcugagagccuaggagggc

SEQ ID NO: 217418 - RNA, 22 nt, Human
cuggagccccagacagggagag

SEQ ID NO: 217419 - RNA, 22 nt, Human
cagguggggagaguguggagca

SEQ ID NO: 217420 - RNA, 22 nt, Human
aggcuggcucggcuuuucuguc

SEQ ID NO: 217421 - RNA, 19 nt, Human
aggcagucauuggaauaua

SEQ ID NO: 217422 - RNA, 18 nt, Human
ucauggcuuuagucccuc

SEQ ID NO: 217423 - RNA, 19 nt, Human
ggggagaacuagagacagc

SEQ ID NO: 217424 - RNA, 22 nt, Human
cuuguucugugcuucuuacauu

SEQ ID NO: 217425 - RNA, 22 nt, Human
guauucagaaggaugaucuagu

SEQ ID NO: 217426 - RNA, 22 nt, Human
agauuucucuuucccuggcuga

SEQ ID NO: 217427 - RNA, 22 nt, Human
cccaggcuggauuucgguggca

SEQ ID NO: 217428 - RNA, 22 nt, Human
gggucuggcaugcugagaugga

SEQ ID NO: 217429 - RNA, 23 nt, Human
aucugaaaagcauuugcaguuug

SEQ ID NO: 217430 - RNA, 22 nt, Human
uaaagacacugguuuuaaucau

SEQ ID NO: 217431 - RNA, 22 nt, Human
cagugcugagagccuggccagg

SEQ ID NO: 217432 - RNA, 22 nt, Human
acguuuuauucccaugcagcau

SEQ ID NO: 217433 - RNA, 22 nt, Human
cagaugcuuguuggcuggucuc

SEQ ID NO: 217434 - RNA, 22 nt, Human
uuauucuuuucuccagaauccc

SEQ ID NO: 217435 - RNA, 22 nt, Human
augaggcagcccuucccuucuc

SEQ ID NO: 217436 - RNA, 22 nt, Human
caggauggucucgaucuccuga

SEQ ID NO: 217437 - RNA, 22 nt, Human
uuucuucucacccaggacagag

SEQ ID NO: 217438 - RNA, 22 nt, Human
acaguaauauugaugcucguca

SEQ ID NO: 217439 - RNA, 22 nt, Human
ccaggcucacugacuaccacau

SEQ ID NO: 217440 - RNA, 22 nt, Human
ggcugaaauuggauccuugggc

SEQ ID NO: 217441 - RNA, 18 nt, Human
ugcugggguagaauccac

SEQ ID NO: 217442 - RNA, 23 nt, Human
cccagaccuugugcugcccuugg

SEQ ID NO: 217443 - RNA, 22 nt, Human
agagccccugguggagugagaa

SEQ ID NO: 217444 - RNA, 22 nt, Human
cuucaguguccucucuaguaga

SEQ ID NO: 217445 - RNA, 22 nt, Human
cacucaggguacaauggagggc

SEQ ID NO: 217446 - RNA, 22 nt, Human
uagagaaaagcagggaucagga

SEQ ID NO: 217447 - RNA, 22 nt, Human
uuauuuauguuaacagucgaga

SEQ ID NO: 217448 - RNA, 22 nt, Human
agacagacaugcuaguuuucuu

SEQ ID NO: 217449 - RNA, 22 nt, Human
ugggcccugacuucaagcaucc

SEQ ID NO: 217450 - RNA, 22 nt, Human
cugcaauaguuuagaauaauug

SEQ ID NO: 217451 - RNA, 22 nt, Human
acagagaaaguuccucucaggc

SEQ ID NO: 217452 - RNA, 22 nt, Human
uuugcuuuugugcucuaguggu

SEQ ID NO: 217453 - RNA, 22 nt, Human
gcauguguugguuuaugcaugu

SEQ ID NO: 217454 - RNA, 22 nt, Human
ucaacuuugaaaccauagugaa

SEQ ID NO: 217455 - RNA, 22 nt, Human
caugcagucaauaaacaugugu

SEQ ID NO: 217456 - RNA, 22 nt, Human
uccugcagcauccgucgucugu

SEQ ID NO: 217457 - RNA, 22 nt, Human
aaggccagacucuggaaugaca

SEQ ID NO: 217458 - RNA, 22 nt, Human
uguacaugaauaaaagaucuug

SEQ ID NO: 217459 - RNA, 18 nt, Human
gcugcaggcgccugcggu

SEQ ID NO: 217460 - RNA, 22 nt, Human
ucauuguauuaaaauauugguu

SEQ ID NO: 217461 - RNA, 22 nt, Human
auguuguuuuuucauaaaguau

SEQ ID NO: 217462 - RNA, 22 nt, Human
ggaaggcuccauacacaaagca

SEQ ID NO: 217463 - RNA, 22 nt, Human
uaugacuuuggaaaaauuacuu

SEQ ID NO: 217464 - RNA, 22 nt, Human
uaugacaagguggaguaugagu

SEQ ID NO: 217465 - RNA, 18 nt, Human
agaagccugccucaaugc

SEQ ID NO: 217466 - RNA, 22 nt, Human
augcaacaggguugggaggcgg

SEQ ID NO: 217467 - RNA, 21 nt, Human
ugcaaagcugcugaaguggua

SEQ ID NO: 217468 - RNA, 22 nt, Human
ggaugcccacuaucugcuggcu

SEQ ID NO: 217469 - RNA, 22 nt, Human
aguccaguguguucuggcagca

SEQ ID NO: 217470 - RNA, 22 nt, Human
uacaaacuaacaugucucaucc

SEQ ID NO: 217471 - RNA, 22 nt, Human
ccuggccaggcucucagcacug

SEQ ID NO: 217472 - RNA, 22 nt, Human
gucaacaaagaaaauuguuaau

SEQ ID NO: 217473 - RNA, 22 nt, Human
uaucaaaguuguccugugaagu

SEQ ID NO: 217474 - RNA, 22 nt, Human
agcagcagaucaaacaggcuug

SEQ ID NO: 217475 - RNA, 22 nt, Human
ucucuucauagugacacccauc

SEQ ID NO: 217476 - RNA, 22 nt, Human
ugacaaaacugcaauuacuuuu

SEQ ID NO: 217477 - RNA, 22 nt, Human
gcucagagagaggauauguuau

SEQ ID NO: 217478 - RNA, 22 nt, Human
gaggcuguguuucagugaggcc

SEQ ID NO: 217479 - RNA, 22 nt, Human
agcugcaggccucuccugggga

SEQ ID NO: 217480 - RNA, 22 nt, Human
cuugccucccucagcucacagc

SEQ ID NO: 217481 - RNA, 22 nt, Human
cuugccuguggcuaguuggcuc

SEQ ID NO: 217482 - RNA, 22 nt, Human
ugaaugaugcaguauaaugaua

SEQ ID NO: 217483 - RNA, 22 nt, Human
agacuucuugagcuggcacuuc

SEQ ID NO: 217484 - RNA, 22 nt, Human
agcauuccacacugaagucugc

SEQ ID NO: 217485 - RNA, 22 nt, Human
aacaaauguguuuuguaauuaa

SEQ ID NO: 217486 - RNA, 22 nt, Human
aaugauugcaaacauugagaac

SEQ ID NO: 217487 - RNA, 22 nt, Human
cuggcugggaaguagaguaggu

SEQ ID NO: 217488 - RNA, 22 nt, Human
auaugacauaaaaucauuuuug

SEQ ID NO: 217489 - RNA, 19 nt, Human
cagaggcaccagguauaga

SEQ ID NO: 217490 - RNA, 22 nt, Human
auugcuggcagcuggaucugca

SEQ ID NO: 217491 - RNA, 22 nt, Human
acucuggggugaugucucugag

SEQ ID NO: 217492 - RNA, 22 nt, Human
ggagcagagcugggcuuggcug

SEQ ID NO: 217493 - RNA, 22 nt, Human
uuacaauugagucuauuguaug

SEQ ID NO: 217494 - RNA, 22 nt, Human
aaauuucuaagcagccacuucc

SEQ ID NO: 217495 - RNA, 22 nt, Human
cccugagcucaggcccuugggg

SEQ ID NO: 217496 - RNA, 22 nt, Human
uuuuuugucuugaagaaauggu

SEQ ID NO: 217497 - RNA, 22 nt, Human
gacaagugcugauuuaucuccc

SEQ ID NO: 217498 - RNA, 22 nt, Human
aggcugcuucuuguccuuggca

SEQ ID NO: 217499 - RNA, 22 nt, Human
ucauggcucuaaagacauagau

SEQ ID NO: 217500 - RNA, 22 nt, Human
cagucucucuuguagugcagcu

SEQ ID NO: 217501 - RNA, 22 nt, Human
gcagggacaacugugcaccuga

SEQ ID NO: 217502 - RNA, 22 nt, Human
auuccaaacagugcugcagacu

SEQ ID NO: 217503 - RNA, 22 nt, Human
uagauggaggcuagaugcaggg

SEQ ID NO: 217504 - RNA, 22 nt, Human
ugaaggccagcagagugaaggc

SEQ ID NO: 217505 - RNA, 22 nt, Human
ugcugaggcuagaccuggaagu

SEQ ID NO: 217506 - RNA, 22 nt, Human
ccucuggggcaucagacaaagg

SEQ ID NO: 217507 - RNA, 22 nt, Human
aggcugcagaacagucaggugc

SEQ ID NO: 217508 - RNA, 22 nt, Human
ccugggcugcaugauggcauuu

SEQ ID NO: 217509 - RNA, 22 nt, Human
cuucccagaccuuagagugcag

SEQ ID NO: 217510 - RNA, 22 nt, Human
cuguccagcuuggcuccugggg

SEQ ID NO: 217511 - RNA, 22 nt, Human
ggacaggcgcagggccaaggaa

SEQ ID NO: 217512 - RNA, 22 nt, Human
gugcaggcuagauccuuccuac

SEQ ID NO: 217513 - RNA, 22 nt, Human
cacuguucaucaaaacugcucu

SEQ ID NO: 217514 - RNA, 22 nt, Human
ccagggccucguguucugagug

SEQ ID NO: 217515 - RNA, 22 nt, Human
guuauuagaagugaaggauugu

SEQ ID NO: 217516 - RNA, 22 nt, Human
aagagucauagagacauugauu

SEQ ID NO: 217517 - RNA, 22 nt, Human
ggcagaguugguggagucaguu

SEQ ID NO: 217518 - RNA, 22 nt, Human
ggggccacuggcaggaccuugg

SEQ ID NO: 217519 - RNA, 22 nt, Human
gaggcggcggccgagccuggcu

SEQ ID NO: 217520 - RNA, 22 nt, Human
auucaaguucuucugucuuugc

SEQ ID NO: 217521 - RNA, 22 nt, Human
cuccuucccuucaaguguuccu

SEQ ID NO: 217522 - RNA, 22 nt, Human
aacugcaaucacuuuugcacca

SEQ ID NO: 217523 - RNA, 22 nt, Human
agaguuaagacguacaugagug

SEQ ID NO: 217524 - RNA, 22 nt, Human
agggccagaguacaucagggcu

SEQ ID NO: 217525 - RNA, 23 nt, Human
uaacaauggacuccucuuagcua

SEQ ID NO: 217526 - RNA, 22 nt, Human
cagggcucccuugcaaggaggg

SEQ ID NO: 217527 - RNA, 22 nt, Human
uggcacacagagaagacacuug

SEQ ID NO: 217528 - RNA, 22 nt, Human
ugacagggaaagguccucuuuu

SEQ ID NO: 217529 - RNA, 22 nt, Human
aggggcuggaguucgagguuac

SEQ ID NO: 217530 - RNA, 22 nt, Human
ccaggcuagagagcaguggcac

SEQ ID NO: 217531 - RNA, 22 nt, Human
gggucaggcucagcagggcagc

SEQ ID NO: 217532 - RNA, 22 nt, Human
aaagugcauagaguagugccua

SEQ ID NO: 217533 - RNA, 22 nt, Human
ggugcagagcagugucagagca

SEQ ID NO: 217534 - RNA, 22 nt, Human
ucugucauuagccuugacugua

SEQ ID NO: 217535 - RNA, 20 nt, Human
uuuuagcacuuguuauggug

SEQ ID NO: 217536 - RNA, 22 nt, Human
gggagcugaugauguaaguccc

SEQ ID NO: 217537 - RNA, 22 nt, Human
acaacacauguguauaugugug

SEQ ID NO: 217538 - RNA, 22 nt, Human
aguccaagauuagggugacagc

SEQ ID NO: 217539 - RNA, 22 nt, Human
agcagguguaucggucaccuac

SEQ ID NO: 217540 - RNA, 22 nt, Human
cccagcuugcccaggacugagg

SEQ ID NO: 217541 - RNA, 22 nt, Human
aguuaucagguguuuucaugga

SEQ ID NO: 217542 - RNA, 22 nt, Human
guuucauacagauuauucaugg

SEQ ID NO: 217543 - RNA, 22 nt, Human
ugaaauagucuaaaaaaccaga

SEQ ID NO: 217544 - RNA, 22 nt, Human
gaugagcauuguuucauguguu

SEQ ID NO: 217545 - RNA, 22 nt, Human
ugcccaggcuccucgcagccuu

SEQ ID NO: 217546 - RNA, 22 nt, Human
agaagccagaauauucauggau

SEQ ID NO: 217547 - RNA, 22 nt, Human
uagaugaagcaacauguguaau

SEQ ID NO: 217548 - RNA, 22 nt, Human
acggcuucuugacuguggguug

SEQ ID NO: 217549 - RNA, 22 nt, Human
ucuucucccaucggccgcaggg

SEQ ID NO: 217550 - RNA, 22 nt, Human
cuggaaucuuuggagaaugugg

SEQ ID NO: 217551 - RNA, 22 nt, Human
cuggccugagcacagcggcugc

SEQ ID NO: 217552 - RNA, 22 nt, Human
uuaaauaguaggucuauuuugg

SEQ ID NO: 217553 - RNA, 22 nt, Human
gaguuauaaccuaguuuaacug

SEQ ID NO: 217554 - RNA, 19 nt, Human
ucaaagcaagcauguucug

SEQ ID NO: 217555 - RNA, 22 nt, Human
gaggagguggagucaugcagag

SEQ ID NO: 217556 - RNA, 22 nt, Human
uugagcccaggaggccugggug

SEQ ID NO: 217557 - RNA, 22 nt, Human
uggcagagucaucacaucugga

SEQ ID NO: 217558 - RNA, 20 nt, Human
acugcuguagaccaucugca

SEQ ID NO: 217559 - RNA, 22 nt, Human
cugccuggcuaaacucaagucg

SEQ ID NO: 217560 - RNA, 22 nt, Human
gcagcccaauggacugagacag

SEQ ID NO: 217561 - RNA, 22 nt, Human
gggcuuggaguaggcugaugaa

SEQ ID NO: 217562 - RNA, 23 nt, Human
cuuauucauucauguagcccauu

SEQ ID NO: 217563 - RNA, 22 nt, Human
uccuccagaaacugaggcagaa

SEQ ID NO: 217564 - RNA, 22 nt, Human
uucacugccaacuaacauggaa

SEQ ID NO: 217565 - RNA, 19 nt, Human
agguuacaggugucacaga

SEQ ID NO: 217566 - RNA, 22 nt, Human
gaagcuucguggcucuucaaau

SEQ ID NO: 217567 - RNA, 22 nt, Human
cagagucagcuagucuugggau

SEQ ID NO: 217568 - RNA, 22 nt, Human
agccuucaguaaauccacugug

SEQ ID NO: 217569 - RNA, 20 nt, Human
uguaaauaggcauuguaguu

SEQ ID NO: 217570 - RNA, 22 nt, Human
ucagacagaaagaugaguaugg

SEQ ID NO: 217571 - RNA, 20 nt, Human
uguuucugacgguaggagag

SEQ ID NO: 217572 - RNA, 22 nt, Human
gggccagguaucgucuuuagua

SEQ ID NO: 217573 - RNA, 22 nt, Human
gugaggggccaagaguagggca

SEQ ID NO: 217574 - RNA, 22 nt, Human
gcaggccugucuugcucgcccu

SEQ ID NO: 217575 - RNA, 22 nt, Human
ccugggcugggcgucucauggg

SEQ ID NO: 217576 - RNA, 22 nt, Human
gagcuuggugcacagugguuaa

SEQ ID NO: 217577 - RNA, 22 nt, Human
cucagagguggaugccuugugg

SEQ ID NO: 217578 - RNA, 22 nt, Human
aguagcaccagggaagcagggc

SEQ ID NO: 217579 - RNA, 22 nt, Human
ugacaugcuaagauuauguuau

SEQ ID NO: 217580 - RNA, 22 nt, Human
ggcucugcuccuggugccagug

SEQ ID NO: 217581 - RNA, 20 nt, Human
ugucuucauuauggugcccu

SEQ ID NO: 217582 - RNA, 22 nt, Human
ugggaggaagugcuaaugggag

SEQ ID NO: 217583 - RNA, 22 nt, Human
acacauucuuuaaaugucuguu

SEQ ID NO: 217584 - RNA, 22 nt, Human
gccugagcccaggugugcagag

SEQ ID NO: 217585 - RNA, 21 nt, Human
ucagcaggcaccagaaggcug

SEQ ID NO: 217586 - RNA, 22 nt, Human
gccucagcucccagcccaggcu

SEQ ID NO: 217587 - RNA, 22 nt, Human
gagggcaaaacagagaagaugu

SEQ ID NO: 217588 - RNA, 19 nt, Human
gcagagugggguggagggu

SEQ ID NO: 217589 - RNA, 18 nt, Human
cagcugccagcucaugga

SEQ ID NO: 217590 - RNA, 22 nt, Human
uagcugaagaggguauuguagg

SEQ ID NO: 217591 - RNA, 22 nt, Human
uuguuuaauaucgugaaguacu

SEQ ID NO: 217592 - RNA, 22 nt, Human
cccuuccugggugucccggagu

SEQ ID NO: 217593 - RNA, 22 nt, Human
ucugccuuucacacagacggcc

SEQ ID NO: 217594 - RNA, 22 nt, Human
gagccagggcugugagcugagc

SEQ ID NO: 217595 - RNA, 22 nt, Human
cucugggcuuguugaccugcac

SEQ ID NO: 217596 - RNA, 21 nt, Human
cuacacagcuuucuauaggaa

SEQ ID NO: 217597 - RNA, 22 nt, Human
ggcagugagucccggagaggcc

SEQ ID NO: 217598 - RNA, 22 nt, Human
cuugacacugucacucaggcca

SEQ ID NO: 217599 - RNA, 22 nt, Human
aguucucagcuuaguaugcugu

SEQ ID NO: 217600 - RNA, 22 nt, Human
aacaggcuaguuuuaaagcaua

SEQ ID NO: 217601 - RNA, 22 nt, Human
aauuaguaaccuaauuccaucu

SEQ ID NO: 217602 - RNA, 22 nt, Human
agggggugcccagaugaaggau

SEQ ID NO: 217603 - RNA, 22 nt, Human
ucucacugcaaauauuauguau

SEQ ID NO: 217604 - RNA, 22 nt, Human
agagcaucuaacacauaagccu

SEQ ID NO: 217605 - RNA, 22 nt, Human
uggcuucugcucccagaaugau

SEQ ID NO: 217606 - RNA, 22 nt, Human
aguguuagugaaagguguuuau

SEQ ID NO: 217607 - RNA, 22 nt, Human
caaaucuauauguugauauucu

SEQ ID NO: 217608 - RNA, 19 nt, Human
cuggcagccugucuguguc

SEQ ID NO: 217609 - RNA, 22 nt, Human
uuugugaucuccucccucuaga

SEQ ID NO: 217610 - RNA, 22 nt, Human
gacugaggagguaagguuugaa

SEQ ID NO: 217611 - RNA, 20 nt, Human
uuguuucugcuauuuucuaa

SEQ ID NO: 217612 - RNA, 22 nt, Human
aaagcugcugugaaugguuugg

SEQ ID NO: 217613 - RNA, 22 nt, Human
cuccauugaacauccucucaga

SEQ ID NO: 217614 - RNA, 22 nt, Human
uccuagaauaaucuuugacugc

SEQ ID NO: 217615 - RNA, 22 nt, Human
ucaguuagggccucagaagaca

SEQ ID NO: 217616 - RNA, 21 nt, Human
ccaggggcaaauugucguuuc

SEQ ID NO: 217617 - RNA, 22 nt, Human
uucuguguggguagcuccuguu

SEQ ID NO: 217618 - RNA, 20 nt, Human
agacaggagcccccauucag

SEQ ID NO: 217619 - RNA, 22 nt, Human
ucuagauuuggggcaugaaguu

SEQ ID NO: 217620 - RNA, 22 nt, Human
agcuucuugggcuuuacacaaa

SEQ ID NO: 217621 - RNA, 22 nt, Human
auguauuugcuuguuauggauu

SEQ ID NO: 217622 - RNA, 22 nt, Human
ucagucuuuuucucuuaaguac

SEQ ID NO: 217623 - RNA, 22 nt, Human
aaacaacuucugcacuaugggu

SEQ ID NO: 217624 - RNA, 22 nt, Human
gguggcagugcuugcgggucua

SEQ ID NO: 217625 - RNA, 22 nt, Human
aggaagccugggagguuuggga

SEQ ID NO: 217626 - RNA, 18 nt, Human
uaggcugggggcuguagu

SEQ ID NO: 217627 - RNA, 22 nt, Human
augcagaauugcuaaguaucug

SEQ ID NO: 217628 - RNA, 22 nt, Human
uucccugcaaccuuucccuggg

SEQ ID NO: 217629 - RNA, 22 nt, Human
cuggaggugggggcaagagugu

SEQ ID NO: 217630 - RNA, 22 nt, Human
gggggcuggaauauccaucaac

SEQ ID NO: 217631 - RNA, 22 nt, Human
uauuuaauuagugauuguagag

SEQ ID NO: 217632 - RNA, 21 nt, Human
acuccaaacaaguuaagcugu

SEQ ID NO: 217633 - RNA, 22 nt, Human
cuucuggagcucaccaacuucc

SEQ ID NO: 217634 - RNA, 22 nt, Human
aggaaggacuccaugguccguc

SEQ ID NO: 217635 - RNA, 22 nt, Human
cagucaccaccagguggcagua

SEQ ID NO: 217636 - RNA, 22 nt, Human
aaauacaauuucaggcuguaau

SEQ ID NO: 217637 - RNA, 22 nt, Human
uggguccuugcuaacuucuaug

SEQ ID NO: 217638 - RNA, 22 nt, Human
augcaaacaugaagagaaagag

SEQ ID NO: 217639 - RNA, 22 nt, Human
ucaaaugcugccuuugugugcc

SEQ ID NO: 217640 - RNA, 22 nt, Human
uuagagaauuccaaaugacuac

SEQ ID NO: 217641 - RNA, 22 nt, Human
aagcugcaugaaguugaguaga

SEQ ID NO: 217642 - RNA, 22 nt, Human
caauucaaaugcauaguucaca

SEQ ID NO: 217643 - RNA, 22 nt, Human
ccaggcuagcccagaccacagg

SEQ ID NO: 217644 - RNA, 22 nt, Human
uugauacauuuuuaggauaaac

SEQ ID NO: 217645 - RNA, 22 nt, Human
ccacagcaugcaggccugacac

SEQ ID NO: 217646 - RNA, 22 nt, Human
ggacaguugguugggcucuugu

SEQ ID NO: 217647 - RNA, 22 nt, Human
accugguuccuccucacugcug

SEQ ID NO: 217648 - RNA, 22 nt, Human
ucuccccaaaggacucacucuc

SEQ ID NO: 217649 - RNA, 19 nt, Human
ggcauccagaacuaccagu

SEQ ID NO: 217650 - RNA, 22 nt, Human
uccuccagcuguauccugccug

SEQ ID NO: 217651 - RNA, 22 nt, Human
ccacagaaucgcuaguggagca

SEQ ID NO: 217652 - RNA, 22 nt, Human
uguaauucauucaacugaagaa

SEQ ID NO: 217653 - RNA, 22 nt, Human
auaacuuaaugggucaugcucu

SEQ ID NO: 217654 - RNA, 22 nt, Human
ggucaguguauguauugauaag

SEQ ID NO: 217655 - RNA, 22 nt, Human
ccugggucuguauugguaggua

SEQ ID NO: 217656 - RNA, 22 nt, Human
aggcaguuuaggcagcgauuua

SEQ ID NO: 217657 - RNA, 22 nt, Human
uuugcaaugugaaauuaaagaa

SEQ ID NO: 217658 - RNA, 22 nt, Human
cacaaaaucuuucucgauuauu

SEQ ID NO: 217659 - RNA, 22 nt, Human
cucuuuggagaagcacguauua

SEQ ID NO: 217660 - RNA, 22 nt, Human
acagaaugcguagugcauguug

SEQ ID NO: 217661 - RNA, 22 nt, Human
ccacuguuggcccgaagggguc

SEQ ID NO: 217662 - RNA, 22 nt, Human
gaaagacauaguugcaagaugg

SEQ ID NO: 217663 - RNA, 22 nt, Human
caaggccaguucaccaagggca

SEQ ID NO: 217664 - RNA, 22 nt, Human
uuuuuagaauuggcugagaauu

SEQ ID NO: 217665 - RNA, 22 nt, Human
aaaucucaggccucuauuuacu

SEQ ID NO: 217666 - RNA, 22 nt, Human
gucucugucacaacuacucauc

SEQ ID NO: 217667 - RNA, 22 nt, Human
cugguggcaucuugagaugguu

SEQ ID NO: 217668 - RNA, 22 nt, Human
aagccacuauggugauucucaa

SEQ ID NO: 217669 - RNA, 22 nt, Human
uggggcaguggcuuuucacccu

SEQ ID NO: 217670 - RNA, 22 nt, Human
guggguccgcuugguuccggug

SEQ ID NO: 217671 - RNA, 22 nt, Human
uucccaguauuaccuucaggaa

SEQ ID NO: 217672 - RNA, 22 nt, Human
uauuucauucuuuaucaggagc

SEQ ID NO: 217673 - RNA, 18 nt, Human
ucaagacaucaugaaaua

SEQ ID NO: 217674 - RNA, 22 nt, Human
ggucuggaagcgcaguaggcug

SEQ ID NO: 217675 - RNA, 22 nt, Human
cuauacuacuauacagauguaa

SEQ ID NO: 217676 - RNA, 22 nt, Human
gcagggcagcuuagucccuguc

SEQ ID NO: 217677 - RNA, 22 nt, Human
gccugaggaauugaggggguaa

SEQ ID NO: 217678 - RNA, 22 nt, Human
uuagucuccagcuuaggguuug

SEQ ID NO: 217679 - RNA, 22 nt, Human
gcacacagacuaaccauauuuc

SEQ ID NO: 217680 - RNA, 22 nt, Human
gcagagcuaucuucuggauuug

SEQ ID NO: 217681 - RNA, 22 nt, Human
uagugucaucguugcagcugag

SEQ ID NO: 217682 - RNA, 23 nt, Human
uuaaguggucaguuuuagacaac

SEQ ID NO: 217683 - RNA, 22 nt, Human
uagcuggcuuauauaaaagggc

SEQ ID NO: 217684 - RNA, 22 nt, Human
gguccuuugccaucucuccacc

SEQ ID NO: 217685 - RNA, 22 nt, Human
caggcaccccaggugagcacug

SEQ ID NO: 217686 - RNA, 22 nt, Human
gcugcccugacaagcuacuccc

SEQ ID NO: 217687 - RNA, 22 nt, Human
agggaggaccaaugugugguua

SEQ ID NO: 217688 - RNA, 22 nt, Human
uggcaaaguaucugucccagcu

SEQ ID NO: 217689 - RNA, 19 nt, Human
auguucugaauuacuguaa

SEQ ID NO: 217690 - RNA, 23 nt, Human
gccugcugucacagcgggcccag

SEQ ID NO: 217691 - RNA, 22 nt, Human
uauaauaugaggcaggagugau

SEQ ID NO: 217692 - RNA, 22 nt, Human
uuccuuucccuugcuucugugc

SEQ ID NO: 217693 - RNA, 20 nt, Human
gaaaauaggccagccaggua

SEQ ID NO: 217694 - RNA, 22 nt, Human
uucagagaguccaguaugcagu

SEQ ID NO: 217695 - RNA, 22 nt, Human
uuacugauggaacagagauaga

SEQ ID NO: 217696 - RNA, 22 nt, Human
caaaguaucaacucccacacug

SEQ ID NO: 217697 - RNA, 22 nt, Human
agaggcaggagguugacuugag

SEQ ID NO: 217698 - RNA, 23 nt, Human
uuguaaaacagugugacgguucc

SEQ ID NO: 217699 - RNA, 22 nt, Human
uucuuucuuuguaguccugaac

SEQ ID NO: 217700 - RNA, 22 nt, Human
uauacugaguguguuaaugaug

SEQ ID NO: 217701 - RNA, 22 nt, Human
augcaggaguucgaggcuguau

SEQ ID NO: 217702 - RNA, 22 nt, Human
ugcucaggacaguggaaccuaa

SEQ ID NO: 217703 - RNA, 22 nt, Human
gggccacuggguccugcuggcc

SEQ ID NO: 217704 - RNA, 22 nt, Human
uccucaguuauaaauaggaaac

SEQ ID NO: 217705 - RNA, 22 nt, Human
gcgucuuuuagauuuuacaucu

SEQ ID NO: 217706 - RNA, 22 nt, Human
uaaucguauguguaucaaauca

SEQ ID NO: 217707 - RNA, 19 nt, Human
agggucaggacaaggacuu

SEQ ID NO: 217708 - RNA, 22 nt, Human
gcugugcuugcaugagugucug

SEQ ID NO: 217709 - RNA, 22 nt, Human
ccagcccuacaguaucaccugu

SEQ ID NO: 217710 - RNA, 22 nt, Human
auggcccuggaaagagcuugag

SEQ ID NO: 217711 - RNA, 22 nt, Human
agauauuaggaggauucauaau

SEQ ID NO: 217712 - RNA, 22 nt, Human
gcaaagcacacccucagaguuu

SEQ ID NO: 217713 - RNA, 22 nt, Human
auggcagaauuaggauuucaag

SEQ ID NO: 217714 - RNA, 22 nt, Human
aaguguuauguaggauuucaga

SEQ ID NO: 217715 - RNA, 22 nt, Human
agggacagaugaaugacugagu

SEQ ID NO: 217716 - RNA, 22 nt, Human
uucuacacuuuucauuagcuag

SEQ ID NO: 217717 - RNA, 22 nt, Human
aguguucuaacaacugcuuuca

SEQ ID NO: 217718 - RNA, 22 nt, Human
gaaguacaaaggacauggaaac

SEQ ID NO: 217719 - RNA, 22 nt, Human
aggcuggcccaccucuugucuu

SEQ ID NO: 217720 - RNA, 22 nt, Human
guauuuuacugcucaaagcucu

SEQ ID NO: 217721 - RNA, 22 nt, Human
uaugaucucugggucuggagcu

SEQ ID NO: 217722 - RNA, 22 nt, Human
aggaccuguguuuuccuugaau

SEQ ID NO: 217723 - RNA, 22 nt, Human
uggugcagguguugaugcagga

SEQ ID NO: 217724 - RNA, 22 nt, Human
cugcaggcuuccagggcugugg

SEQ ID NO: 217725 - RNA, 22 nt, Human
ugaggacauuuaucuuggcgca

SEQ ID NO: 217726 - RNA, 22 nt, Human
cccugacccuaucagagggcca

SEQ ID NO: 217727 - RNA, 22 nt, Human
aacaccagucccaagagaggcu

SEQ ID NO: 217728 - RNA, 22 nt, Human
cuauuagguuggugcaaaagua

SEQ ID NO: 217729 - RNA, 22 nt, Human
gcaagcugaugugauagugaaa

SEQ ID NO: 217730 - RNA, 23 nt, Human
uggcauagugaggggcacagaga

SEQ ID NO: 217731 - RNA, 22 nt, Human
gacagcagaugaagccugcaga

SEQ ID NO: 217732 - RNA, 22 nt, Human
agcuggugcucaggggcaugga

SEQ ID NO: 217733 - RNA, 22 nt, Human
uuuguuacaaagaaagaagagc

SEQ ID NO: 217734 - RNA, 19 nt, Human
uacaggcaguuucuacaau

SEQ ID NO: 217735 - RNA, 21 nt, Human
ucccacagcgccagcuccugu

SEQ ID NO: 217736 - RNA, 22 nt, Human
ggcugcugaaguguggcaaucu

SEQ ID NO: 217737 - RNA, 22 nt, Human
caggccuuaguaggugcucccu

SEQ ID NO: 217738 - RNA, 22 nt, Human
agcuccagauuaauuguaggag

SEQ ID NO: 217739 - RNA, 22 nt, Human
agcgccugcggugugagccugc

SEQ ID NO: 217740 - RNA, 20 nt, Human
ugcucccuugcgagucgcug

SEQ ID NO: 217741 - RNA, 22 nt, Human
ccagagggagccaccagggugu

SEQ ID NO: 217742 - RNA, 22 nt, Human
uccaaggaagucauuuaaacug

SEQ ID NO: 217743 - RNA, 22 nt, Human
uguggcugucuguucuccuagg

SEQ ID NO: 217744 - RNA, 22 nt, Human
auuacaugagagaauguaaaua

SEQ ID NO: 217745 - RNA, 22 nt, Human
uaaugaaugagaauauaacaga

SEQ ID NO: 217746 - RNA, 22 nt, Human
caccuucagaaugcuccaggca

SEQ ID NO: 217747 - RNA, 22 nt, Human
ucuuugaucagccuuucacuga

SEQ ID NO: 217748 - RNA, 22 nt, Human
augcuaaauccagaagcaguca

SEQ ID NO: 217749 - RNA, 17 nt, Human
cagaggagcuuuggggg

SEQ ID NO: 217750 - RNA, 22 nt, Human
uuaguguguccaguucugaaaa

SEQ ID NO: 217751 - RNA, 22 nt, Human
cagucccaugagcccagaacau

SEQ ID NO: 217752 - RNA, 22 nt, Human
cugaagagcaaaccaacuggac

SEQ ID NO: 217753 - RNA, 22 nt, Human
caugcaaagcguuuugaccagc

SEQ ID NO: 217754 - RNA, 22 nt, Human
aagucucuggugaugcaggaaa

SEQ ID NO: 217755 - RNA, 22 nt, Human
cugcugugugcuuacuuggguu

SEQ ID NO: 217756 - RNA, 22 nt, Human
uuuguuuauuaggggagaguug

SEQ ID NO: 217757 - RNA, 22 nt, Human
aaauuaagggugagaagaguug

SEQ ID NO: 217758 - RNA, 19 nt, Human
acagugcuucugagugagg

SEQ ID NO: 217759 - RNA, 22 nt, Human
ccugugcccucagccuggcucu

SEQ ID NO: 217760 - RNA, 22 nt, Human
cuggcucauuuuagcaucaggu

SEQ ID NO: 217761 - RNA, 22 nt, Human
aaggccaggacaccaggggacu

SEQ ID NO: 217762 - RNA, 22 nt, Human
aguguucauuuauucauucacu

SEQ ID NO: 217763 - RNA, 22 nt, Human
acagauggccauauuacuauau

SEQ ID NO: 217764 - RNA, 22 nt, Human
aaucaagaaaaugaggauucuu

SEQ ID NO: 217765 - RNA, 22 nt, Human
ucccugggcacaaucugcuggc

SEQ ID NO: 217766 - RNA, 22 nt, Human
cacuugaagugaauugcucacc

SEQ ID NO: 217767 - RNA, 21 nt, Human
ugcaggaaguauggugccuau

SEQ ID NO: 217768 - RNA, 22 nt, Human
ucagcucuacacacaccugugu

SEQ ID NO: 217769 - RNA, 22 nt, Human
cucugugauuuugugagccaga

SEQ ID NO: 217770 - RNA, 22 nt, Human
auccaauuacguuuuuugucau

SEQ ID NO: 217771 - RNA, 22 nt, Human
uggccucagauuauugcacagu

SEQ ID NO: 217772 - RNA, 22 nt, Human
ucucuggaagcgcagaucuguu

SEQ ID NO: 217773 - RNA, 22 nt, Human
ccugggcucugaggagggaguc

SEQ ID NO: 217774 - RNA, 22 nt, Human
gcagguggagcaguagucuggu

SEQ ID NO: 217775 - RNA, 22 nt, Human
ggcccagcuuucauuccuugcu

SEQ ID NO: 217776 - RNA, 22 nt, Human
cccuaggcugggcucuuggcuu

SEQ ID NO: 217777 - RNA, 22 nt, Human
uugcuuuagaaucugcuucugg

SEQ ID NO: 217778 - RNA, 22 nt, Human
ucccagccggugccuggguccc

SEQ ID NO: 217779 - RNA, 22 nt, Human
cuauuuggccaagcugcccaca

SEQ ID NO: 217780 - RNA, 22 nt, Human
agccugguuuaagcauuuuaua

SEQ ID NO: 217781 - RNA, 22 nt, Human
ccugagcauuagacauccauca

SEQ ID NO: 217782 - RNA, 22 nt, Human
guaaacaucagccacucuauuu

SEQ ID NO: 217783 - RNA, 22 nt, Human
uucuauaaugcaagccacugca

SEQ ID NO: 217784 - RNA, 22 nt, Human
cauuuauucauuugcuagggcu

SEQ ID NO: 217785 - RNA, 22 nt, Human
agcuggucuuaaauguguccag

SEQ ID NO: 217786 - RNA, 22 nt, Human
ugcucccugacccaggucuucu

SEQ ID NO: 217787 - RNA, 19 nt, Human
guguacagcucagugaauu

SEQ ID NO: 217788 - RNA, 21 nt, Human
gccugcuguucacccugccac

SEQ ID NO: 217789 - RNA, 22 nt, Human
gaagguccagcguggccaaguc

SEQ ID NO: 217790 - RNA, 22 nt, Human
gcucuagguuccuagccaaguc

SEQ ID NO: 217791 - RNA, 22 nt, Human
aggcauggggcugcagucaggu

SEQ ID NO: 217792 - RNA, 22 nt, Human
cagguggugccuccucccuucc

SEQ ID NO: 217793 - RNA, 18 nt, Human
gacaaaaguacagacaga

SEQ ID NO: 217794 - RNA, 22 nt, Human
agcaaagcacuuugcauacaua

SEQ ID NO: 217795 - RNA, 22 nt, Human
cugucauuuaagacauucugga

SEQ ID NO: 217796 - RNA, 22 nt, Human
gggcuucuugccauggggacgg

SEQ ID NO: 217797 - RNA, 22 nt, Human
ggagaugcaauguagaaucugg

SEQ ID NO: 217798 - RNA, 22 nt, Human
cagguuuagguggacgugcagg

SEQ ID NO: 217799 - RNA, 22 nt, Human
gcugggaaguggcagagcugga

SEQ ID NO: 217800 - RNA, 22 nt, Human
gccuguccacuaaacagccaag

SEQ ID NO: 217801 - RNA, 22 nt, Human
gaugcaaaccuuacauggaccu

SEQ ID NO: 217802 - RNA, 22 nt, Human
gcucaaagaggccuccaaaucc

SEQ ID NO: 217803 - RNA, 22 nt, Human
agcccccucccuagugacugga

SEQ ID NO: 217804 - RNA, 22 nt, Human
auaguacacauccuacaauguu

SEQ ID NO: 217805 - RNA, 22 nt, Human
aacaugaaaaccuccacagcaa

SEQ ID NO: 217806 - RNA, 22 nt, Human
aauuuucuaaggugaugaucug

SEQ ID NO: 217807 - RNA, 22 nt, Human
auggcuucaucuuuuaguccuu

SEQ ID NO: 217808 - RNA, 22 nt, Human
ugccaggcucaggaugucccug

SEQ ID NO: 217809 - RNA, 19 nt, Human
ucacaggcaucuccccaga

SEQ ID NO: 217810 - RNA, 22 nt, Human
caccauuuaguagcaagagcuc

SEQ ID NO: 217811 - RNA, 22 nt, Human
cccuggcagagggggcaggugc

SEQ ID NO: 217812 - RNA, 22 nt, Human
gaacaguagaugagaugcuaga

SEQ ID NO: 217813 - RNA, 17 nt, Human
gaggacagggaaguagg

SEQ ID NO: 217814 - RNA, 22 nt, Human
agguauuucaaagcccacuucc

SEQ ID NO: 217815 - RNA, 22 nt, Human
ccuuuuucccuggagggacagc

SEQ ID NO: 217816 - RNA, 22 nt, Human
cucuccuggggagcacacacac

SEQ ID NO: 217817 - RNA, 22 nt, Human
ccuuggauuuugugcccacgcc

SEQ ID NO: 217818 - RNA, 22 nt, Human
guguccugcauuggcucugccc

SEQ ID NO: 217819 - RNA, 22 nt, Human
ugggucuguagggcuguccaau

SEQ ID NO: 217820 - RNA, 22 nt, Human
caggccaggguugagaagagaa

SEQ ID NO: 217821 - RNA, 22 nt, Human
cagggaaaguucuuguccacuc

SEQ ID NO: 217822 - RNA, 22 nt, Human
ggugccaggcuguagucagggu

SEQ ID NO: 217823 - RNA, 22 nt, Human
agcuuuguauuugagcauacga

SEQ ID NO: 217824 - RNA, 22 nt, Human
cagcuuggcuucacauucugua

SEQ ID NO: 217825 - RNA, 22 nt, Human
auugcugguagucagugucccu

SEQ ID NO: 217826 - RNA, 22 nt, Human
ccagaggagaugccuccucugu

SEQ ID NO: 217827 - RNA, 22 nt, Human
gauggucuguauuaaacagaug

SEQ ID NO: 217828 - RNA, 22 nt, Human
ccagggcaauaggaacacuuuu

SEQ ID NO: 217829 - RNA, 22 nt, Human
ucaaaggcccauugucccguug

SEQ ID NO: 217830 - RNA, 22 nt, Human
ugggccugaguuugggaacugg

SEQ ID NO: 217831 - RNA, 22 nt, Human
agaagggagagaaaguugguua

SEQ ID NO: 217832 - RNA, 22 nt, Human
acuuuggaauaagcuauauaac

SEQ ID NO: 217833 - RNA, 22 nt, Human
acagguguugaaugaugucaca

SEQ ID NO: 217834 - RNA, 22 nt, Human
uccucuccauauuuucugauuu

SEQ ID NO: 217835 - RNA, 22 nt, Human
ggaauguuugcucccuucaggg

SEQ ID NO: 217836 - RNA, 22 nt, Human
ucacagaaacagaauggcacag

SEQ ID NO: 217837 - RNA, 22 nt, Human
ucucugaauaaugcuauucuuu

SEQ ID NO: 217838 - RNA, 16 nt, Human
ggcuccagaauagcga

SEQ ID NO: 217839 - RNA, 22 nt, Human
cagaguucaaagccugcuggga

SEQ ID NO: 217840 - RNA, 22 nt, Human
accauucugguccauacuguuc

SEQ ID NO: 217841 - RNA, 22 nt, Human
uaguuuuacaucagccauuguu

SEQ ID NO: 217842 - RNA, 22 nt, Human
acugcugauuauugaaguagag

SEQ ID NO: 217843 - RNA, 22 nt, Human
ggccuugggauguggcugcagc

SEQ ID NO: 217844 - RNA, 22 nt, Human
ugauuuucaugggugaucuuug

SEQ ID NO: 217845 - RNA, 22 nt, Human
caggaugggugucggccagcac

SEQ ID NO: 217846 - RNA, 22 nt, Human
guauuaggaaauaugaagaaag

SEQ ID NO: 217847 - RNA, 22 nt, Human
uucacauuuacugguuuguccg

SEQ ID NO: 217848 - RNA, 22 nt, Human
ucauaugauuguaaugagaaua

SEQ ID NO: 217849 - RNA, 22 nt, Human
aggcccuggguuagggcccacu

SEQ ID NO: 217850 - RNA, 23 nt, Human
gagcuuagucuacucagacaucc

SEQ ID NO: 217851 - RNA, 23 nt, Human
gcugccuccuacaaaagcccagc

SEQ ID NO: 217852 - RNA, 22 nt, Human
ucugaggaaagagagugggaug

SEQ ID NO: 217853 - RNA, 22 nt, Human
gauuuucauuauagcuaguuuc

SEQ ID NO: 217854 - RNA, 22 nt, Human
agcauccaacaggagggaaggg

SEQ ID NO: 217855 - RNA, 22 nt, Human
ugauucuauggaaggcauaagg

SEQ ID NO: 217856 - RNA, 22 nt, Human
cacagguucaccucagguaggu

SEQ ID NO: 217857 - RNA, 22 nt, Human
aggaccuuuggcaaggcugcuc

SEQ ID NO: 217858 - RNA, 22 nt, Human
uuuaucugcauucugaccaucu

SEQ ID NO: 217859 - RNA, 22 nt, Human
ugguuucucugaacucuacgac

SEQ ID NO: 217860 - RNA, 22 nt, Human
auccuacaaagcagggcuaugg

SEQ ID NO: 217861 - RNA, 22 nt, Human
ucacaggcaaagaagauuggug

SEQ ID NO: 217862 - RNA, 22 nt, Human
uuauuauagauuaugcaagauu

SEQ ID NO: 217863 - RNA, 20 nt, Human
uccagccacuuccgcugguc

SEQ ID NO: 217864 - RNA, 22 nt, Human
ugcuuuauucgacaucugguag

SEQ ID NO: 217865 - RNA, 22 nt, Human
uuuaauuuuccugguaggccug

SEQ ID NO: 217866 - RNA, 22 nt, Human
cugaggcugggcauggggucca

SEQ ID NO: 217867 - RNA, 22 nt, Human
uuucucagggaggagucaagcc

SEQ ID NO: 217868 - RNA, 22 nt, Human
acacacaugccuuuccuaagua

SEQ ID NO: 217869 - RNA, 22 nt, Human
uacaguuacccuggaaagaaau

SEQ ID NO: 217870 - RNA, 23 nt, Human
uuucaacuccugccauuauuucu

SEQ ID NO: 217871 - RNA, 22 nt, Human
ucagagaaguaggcuaauggug

SEQ ID NO: 217872 - RNA, 22 nt, Human
guguuacauauucuaaaaugcu

SEQ ID NO: 217873 - RNA, 22 nt, Human
cugaggaggggccugagugaga

SEQ ID NO: 217874 - RNA, 22 nt, Human
acaguguuuucuuaaggagaaa

SEQ ID NO: 217875 - RNA, 22 nt, Human
ugcauuuuugagguuaacucaa

SEQ ID NO: 217876 - RNA, 22 nt, Human
caaguguccaugauagucuuag

SEQ ID NO: 217877 - RNA, 22 nt, Human
gcagcaggaauaggauaagcaa

SEQ ID NO: 217878 - RNA, 22 nt, Human
ugcagaagaccuuccagggcug

SEQ ID NO: 217879 - RNA, 22 nt, Human
aggucugaguagagaaaaggca

SEQ ID NO: 217880 - RNA, 22 nt, Human
aaacugcaaugacagguaggag

SEQ ID NO: 217881 - RNA, 21 nt, Human
uacaagaccggauucgggccc

SEQ ID NO: 217882 - RNA, 22 nt, Human
aaagcaucagaucugacacuuc

SEQ ID NO: 217883 - RNA, 22 nt, Human
gcuggcaggauaacuucuaagc

SEQ ID NO: 217884 - RNA, 22 nt, Human
cagcagaaacccagcaaagcca

SEQ ID NO: 217885 - RNA, 22 nt, Human
ggccugagucccaccuggcugu

SEQ ID NO: 217886 - RNA, 22 nt, Human
ccagaagugucuaucaagaugu

SEQ ID NO: 217887 - RNA, 22 nt, Human
ucuccugucuucucagcacccc

SEQ ID NO: 217888 - RNA, 19 nt, Human
acugggcuuguccucgugg

SEQ ID NO: 217889 - RNA, 22 nt, Human
agaggaguuugcuggugugugc

SEQ ID NO: 217890 - RNA, 20 nt, Human
ucagaacaguagaggagcua

SEQ ID NO: 217891 - RNA, 22 nt, Human
uuucagaaagcaucaucaaagu

SEQ ID NO: 217892 - RNA, 22 nt, Human
uguuuuaagggucaacugucac

SEQ ID NO: 217893 - RNA, 22 nt, Human
ggcucugcugguaagaugccuc

SEQ ID NO: 217894 - RNA, 22 nt, Human
agcagggcagugaucagaaagg

SEQ ID NO: 217895 - RNA, 22 nt, Human
uuucacacuagucagaauacca

SEQ ID NO: 217896 - RNA, 22 nt, Human
agaccaagaaaggaugaggauc

SEQ ID NO: 217897 - RNA, 22 nt, Human
agcaaacaguuucuggggaucu

SEQ ID NO: 217898 - RNA, 22 nt, Human
cagcuggcugcggugaggggac

SEQ ID NO: 217899 - RNA, 22 nt, Human
cucugugugguccucuguauug

SEQ ID NO: 217900 - RNA, 22 nt, Human
acuccagggcuccaccccagau

SEQ ID NO: 217901 - RNA, 20 nt, Human
ccagcuuucccugcagcauc

SEQ ID NO: 217902 - RNA, 22 nt, Human
caguacauuucauaugauucua

SEQ ID NO: 217903 - RNA, 22 nt, Human
ggccagagguguccucaguucu

SEQ ID NO: 217904 - RNA, 22 nt, Human
ucccacuggacgucugugcugg

SEQ ID NO: 217905 - RNA, 22 nt, Human
agaagcacaccugaccucuagc

SEQ ID NO: 217906 - RNA, 22 nt, Human
gccaucuggcauugcagcaccu

SEQ ID NO: 217907 - RNA, 22 nt, Human
cucugaggucuaggaccauggc

SEQ ID NO: 217908 - RNA, 22 nt, Human
gagaacuugaacuuuuccucug

SEQ ID NO: 217909 - RNA, 22 nt, Human
ugcugcaguucacccugccguc

SEQ ID NO: 217910 - RNA, 22 nt, Human
ucacaugucaaaaacuacauaa

SEQ ID NO: 217911 - RNA, 22 nt, Human
ugaggcucaagaaagauuuguu

SEQ ID NO: 217912 - RNA, 22 nt, Human
uccugggaugacuuuugaaaug

SEQ ID NO: 217913 - RNA, 22 nt, Human
ugcacaggccuugaagggagag

SEQ ID NO: 217914 - RNA, 22 nt, Human
uccagggagauacuggcugcca

SEQ ID NO: 217915 - RNA, 22 nt, Human
uuccagcaggcagacaggagau

SEQ ID NO: 217916 - RNA, 22 nt, Human
uccucaggaucuaggagugcuu

SEQ ID NO: 217917 - RNA, 22 nt, Human
gagcucagccugaggccuggcu

SEQ ID NO: 217918 - RNA, 22 nt, Human
guguauguucuacuuaauauua

SEQ ID NO: 217919 - RNA, 22 nt, Human
cuauuucauguuccuauggccg

SEQ ID NO: 217920 - RNA, 22 nt, Human
ggcugggaggccgugcugaccu

SEQ ID NO: 217921 - RNA, 22 nt, Human
ucuguggccuccuuccacuuac

SEQ ID NO: 217922 - RNA, 22 nt, Human
uuuaaucuauucccuaaacacc

SEQ ID NO: 217923 - RNA, 22 nt, Human
uuccuuuagugucauauacuuu

SEQ ID NO: 217924 - RNA, 19 nt, Human
aagagggaaagugcuaugc

SEQ ID NO: 217925 - RNA, 22 nt, Human
guaucacuuuugagagugagaa

SEQ ID NO: 217926 - RNA, 22 nt, Human
ucuccuggguaaaaggguugau

SEQ ID NO: 217927 - RNA, 22 nt, Human
acugcacuucacccugggugac

SEQ ID NO: 217928 - RNA, 22 nt, Human
caguuuugguccuuucuaggua

SEQ ID NO: 217929 - RNA, 22 nt, Human
cuucagcuuucagcuucccuga

SEQ ID NO: 217930 - RNA, 22 nt, Human
acaguguguucugggaccucca

SEQ ID NO: 217931 - RNA, 22 nt, Human
aggcuucugggauucccuuggu

SEQ ID NO: 217932 - RNA, 22 nt, Human
uucucuuugacauuauucaggu

SEQ ID NO: 217933 - RNA, 22 nt, Human
gcauggcugcucccuggcugca

SEQ ID NO: 217934 - RNA, 22 nt, Human
agcccagcaguaagauuagaga

SEQ ID NO: 217935 - RNA, 22 nt, Human
uucugggcuugaaaguuuaaua

SEQ ID NO: 217936 - RNA, 22 nt, Human
gaaauaauuuagaagguauucc

SEQ ID NO: 217937 - RNA, 22 nt, Human
uguuucauguggacauaguugu

SEQ ID NO: 217938 - RNA, 22 nt, Human
ccaccauucaaggucuucacag

SEQ ID NO: 217939 - RNA, 22 nt, Human
gcauccagagguagccacugug

SEQ ID NO: 217940 - RNA, 22 nt, Human
agggaccugcucacugccuggc

SEQ ID NO: 217941 - RNA, 22 nt, Human
aggaaaugcugaugcuccugga

SEQ ID NO: 217942 - RNA, 19 nt, Human
gggcaaagugaucguccug

SEQ ID NO: 217943 - RNA, 22 nt, Human
cagggcuggguuaaaagcaggg

SEQ ID NO: 217944 - RNA, 22 nt, Human
acaggcucucuauugagugcag

SEQ ID NO: 217945 - RNA, 22 nt, Human
cuccaggacucaggccccuggg

SEQ ID NO: 217946 - RNA, 22 nt, Human
augacucaaaauuauuguuuug

SEQ ID NO: 217947 - RNA, 22 nt, Human
ccagcacugcucucagacugag

SEQ ID NO: 217948 - RNA, 22 nt, Human
gucaccagcaccaaugccacau

SEQ ID NO: 217949 - RNA, 22 nt, Human
agaccuguuggguucauuggcu

SEQ ID NO: 217950 - RNA, 22 nt, Human
augugugguuuguaaaugauuu

SEQ ID NO: 217951 - RNA, 22 nt, Human
gcugaguugaaagcagaggaua

SEQ ID NO: 217952 - RNA, 22 nt, Human
gcagugucuuugaccuccaccc

SEQ ID NO: 217953 - RNA, 22 nt, Human
cagaugaaguaggugacgagca

SEQ ID NO: 217954 - RNA, 22 nt, Human
uggcccagcccugcucuagggc

SEQ ID NO: 217955 - RNA, 22 nt, Human
uuagaaucuaacauucuuaucu

SEQ ID NO: 217956 - RNA, 22 nt, Human
ucugcugcacaaauucaucucu

SEQ ID NO: 217957 - RNA, 22 nt, Human
gaggaggaaguucucuguaggc

SEQ ID NO: 217958 - RNA, 22 nt, Human
aagucagugaaaaggcaucauc

SEQ ID NO: 217959 - RNA, 22 nt, Human
uaaggcuaucugaguuuaugug

SEQ ID NO: 217960 - RNA, 22 nt, Human
gcccaggaucugcucagaucau

SEQ ID NO: 217961 - RNA, 22 nt, Human
gagcccuccauggagccaggca

SEQ ID NO: 217962 - RNA, 22 nt, Human
ugcaguggugguaaagaugcuc

SEQ ID NO: 217963 - RNA, 22 nt, Human
ggucuagaguggggccuggaaa

SEQ ID NO: 217964 - RNA, 22 nt, Human
ugcuggcauuucaggacucacc

SEQ ID NO: 217965 - RNA, 22 nt, Human
ggugggucuugcggggcagcuu

SEQ ID NO: 217966 - RNA, 22 nt, Human
aggcucagaggugagcaucugc

SEQ ID NO: 217967 - RNA, 22 nt, Human
aaaaaagauugaugguggaugc

SEQ ID NO: 217968 - RNA, 22 nt, Human
cagcugagaguagaaauggagg

SEQ ID NO: 217969 - RNA, 22 nt, Human
gagaggggcccaagccacauag

SEQ ID NO: 217970 - RNA, 22 nt, Human
uggcugcagaucaagggcaggc

SEQ ID NO: 217971 - RNA, 21 nt, Human
ugcagcagauuugggggaaga

SEQ ID NO: 217972 - RNA, 19 nt, Human
agacuuuuguaaguugaga

SEQ ID NO: 217973 - RNA, 22 nt, Human
aacaugaugacauuguaagcuu

SEQ ID NO: 217974 - RNA, 22 nt, Human
accaucugaguagagagaagua

SEQ ID NO: 217975 - RNA, 22 nt, Human
agucaguuguggagauuuaacu

SEQ ID NO: 217976 - RNA, 22 nt, Human
cagaaaauagaguuucucugag

SEQ ID NO: 217977 - RNA, 23 nt, Human
gccucagagaaacagcugcacac

SEQ ID NO: 217978 - RNA, 22 nt, Human
cugcagggagcagauggcgugu

SEQ ID NO: 217979 - RNA, 20 nt, Human
gucugcaguaagagggaaua

SEQ ID NO: 217980 - RNA, 22 nt, Human
aguuggugggugugagcuggac

SEQ ID NO: 217981 - RNA, 22 nt, Human
gcacaguguaccacagucccua

SEQ ID NO: 217982 - RNA, 22 nt, Human
uagaaucugaauauucuuauuu

SEQ ID NO: 217983 - RNA, 22 nt, Human
acagcuggaggggcugcagagg

SEQ ID NO: 217984 - RNA, 22 nt, Human
aaaguagcuuaguugauauuuc

SEQ ID NO: 217985 - RNA, 22 nt, Human
cuucagaaccagccagaagagg

SEQ ID NO: 217986 - RNA, 22 nt, Human
uagcaggcauggagaugacugu

SEQ ID NO: 217987 - RNA, 22 nt, Human
aaggucuggaugaugggugugc

SEQ ID NO: 217988 - RNA, 22 nt, Human
acuauaaaaggauaaaccagaa

SEQ ID NO: 217989 - RNA, 22 nt, Human
ccucaggcuuaacuugucuuga

SEQ ID NO: 217990 - RNA, 22 nt, Human
aagugcugggauuacaagcgug

SEQ ID NO: 217991 - RNA, 22 nt, Human
aguuuccaaauauuguuuuagc

SEQ ID NO: 217992 - RNA, 22 nt, Human
gaucauuuugaugcccuuuuag

SEQ ID NO: 217993 - RNA, 22 nt, Human
cauguacauucuguagauggag

SEQ ID NO: 217994 - RNA, 22 nt, Human
cacacaugacccacuuuuaccg

SEQ ID NO: 217995 - RNA, 22 nt, Human
cagugucaccaggcgagucucc

SEQ ID NO: 217996 - RNA, 22 nt, Human
ucagaacagcaggguguggcug

SEQ ID NO: 217997 - RNA, 22 nt, Human
gucccuggagcugagcagugcu

SEQ ID NO: 217998 - RNA, 22 nt, Human
gcuguggccaacaaaccacuuu

SEQ ID NO: 217999 - RNA, 20 nt, Human
aggcugggguguuuugccca

SEQ ID NO: 218000 - RNA, 22 nt, Human
aucuuuagauuagaaacucuaa

SEQ ID NO: 218001 - RNA, 22 nt, Human
auuugcauaucugauagacuaa

SEQ ID NO: 218002 - RNA, 19 nt, Human
agcauuuggaauucuacac

SEQ ID NO: 218003 - RNA, 22 nt, Human
cagcccugcagccauggccugu

SEQ ID NO: 218004 - RNA, 22 nt, Human
ucucugugugugugacagcauu

SEQ ID NO: 218005 - RNA, 22 nt, Human
guaaacaggaauguggucaugg

SEQ ID NO: 218006 - RNA, 22 nt, Human
cugcaggacgaccgccucaucu

SEQ ID NO: 218007 - RNA, 23 nt, Human
ugugggcgcauuguaaggguagc

SEQ ID NO: 218008 - RNA, 22 nt, Human
cuuccagaggaacucugcagug

SEQ ID NO: 218009 - RNA, 22 nt, Human
gagcuuggaagcagauccucac

SEQ ID NO: 218010 - RNA, 22 nt, Human
cuggcuccaccccaggaggaug

SEQ ID NO: 218011 - RNA, 22 nt, Human
uggcuccugcagaccaucugga

SEQ ID NO: 218012 - RNA, 22 nt, Human
ucuguggcccaagugauggcug

SEQ ID NO: 218013 - RNA, 22 nt, Human
uuccaugacaccgagggaaguc

SEQ ID NO: 218014 - RNA, 22 nt, Human
cauccagggcagccauggccug

SEQ ID NO: 218015 - RNA, 22 nt, Human
cacagcugcccccucucuaacu

SEQ ID NO: 218016 - RNA, 22 nt, Human
uuucuacaguacugauuucaua

SEQ ID NO: 218017 - RNA, 22 nt, Human
acuuuguuuggcuauuagaguc

SEQ ID NO: 218018 - RNA, 22 nt, Human
uccugggacaagccguggaagu

SEQ ID NO: 218019 - RNA, 20 nt, Human
aaaugcuguaauguuuggga

SEQ ID NO: 218020 - RNA, 22 nt, Human
uguauaugugauguacauguac

SEQ ID NO: 218021 - RNA, 22 nt, Human
ucaaaggcauugccaauaagua

SEQ ID NO: 218022 - RNA, 22 nt, Human
gaauuaguguugaaaucagggc

SEQ ID NO: 218023 - RNA, 22 nt, Human
uuacauguuuaugugguacaug

SEQ ID NO: 218024 - RNA, 22 nt, Human
aggggagaggugagcaacuucu

SEQ ID NO: 218025 - RNA, 22 nt, Human
ugucagcagaaguggugcacuc

SEQ ID NO: 218026 - RNA, 22 nt, Human
uuggccaacauggugaaacccc

SEQ ID NO: 218027 - RNA, 22 nt, Human
gaggccagccccucuugaaggc

SEQ ID NO: 218028 - RNA, 23 nt, Human
uagugucaagagggaguguaauu

SEQ ID NO: 218029 - RNA, 22 nt, Human
aagcagcuggaagaguaagaug

SEQ ID NO: 218030 - RNA, 22 nt, Human
aaauuauaggugccaccuugga

SEQ ID NO: 218031 - RNA, 22 nt, Human
cuuuuacauuuguugaagagua

SEQ ID NO: 218032 - RNA, 22 nt, Human
ggagcacuauaauagagauuuu

SEQ ID NO: 218033 - RNA, 22 nt, Human
uuggaaaguuuuuacugaagac

SEQ ID NO: 218034 - RNA, 22 nt, Human
aagaggagggcagauucaaggc

SEQ ID NO: 218035 - RNA, 20 nt, Human
aaugucuugagacauuucag

SEQ ID NO: 218036 - RNA, 22 nt, Human
uccugccuugccugggacauca

SEQ ID NO: 218037 - RNA, 22 nt, Human
aggcacaguuucauccccgggc

SEQ ID NO: 218038 - RNA, 22 nt, Human
auccccagacuuuagauuucuc

SEQ ID NO: 218039 - RNA, 22 nt, Human
uuuacaggguucaagaaugaaa

SEQ ID NO: 218040 - RNA, 22 nt, Human
ucccaguggcuucauaaggcag

SEQ ID NO: 218041 - RNA, 20 nt, Human
ucagugucaguagccacuac

SEQ ID NO: 218042 - RNA, 22 nt, Human
auaaaacuuauuagaauugugu

SEQ ID NO: 218043 - RNA, 22 nt, Human
agcugagcugcagaugacugua

SEQ ID NO: 218044 - RNA, 22 nt, Human
ccugaaauuugaagaccugaau

SEQ ID NO: 218045 - RNA, 22 nt, Human
ucagggcugcagaagaggcagg

SEQ ID NO: 218046 - RNA, 22 nt, Human
gcugucugcugugcacugagca

SEQ ID NO: 218047 - RNA, 22 nt, Human
acauuucucccugcaugccugc

SEQ ID NO: 218048 - RNA, 22 nt, Human
gaccugggguaagcuuggcaac

SEQ ID NO: 218049 - RNA, 22 nt, Human
ccccugaagacaauggagaggu

SEQ ID NO: 218050 - RNA, 22 nt, Human
ggagcccuuggcaccuaguagg

SEQ ID NO: 218051 - RNA, 22 nt, Human
uccugggaagcgccggccugcg

SEQ ID NO: 218052 - RNA, 22 nt, Human
ucuccagucccuucucuguuag

SEQ ID NO: 218053 - RNA, 22 nt, Human
agcuccuugaauuaaugcugcu

SEQ ID NO: 218054 - RNA, 22 nt, Human
caugauguuaucuaaaucuggu

SEQ ID NO: 218055 - RNA, 22 nt, Human
cugguaaaugaugagaagcacc

SEQ ID NO: 218056 - RNA, 20 nt, Human
aucagcaacugccacucagu

SEQ ID NO: 218057 - RNA, 22 nt, Human
augcaaaucuuaaguaugugug

SEQ ID NO: 218058 - RNA, 22 nt, Human
uuucaaagaccauuaacuauca

SEQ ID NO: 218059 - RNA, 19 nt, Human
ucuugcagccccagcaggc

SEQ ID NO: 218060 - RNA, 22 nt, Human
aauaagaucuuaaagguuauau

SEQ ID NO: 218061 - RNA, 22 nt, Human
uccagggacagcgcuggagcua

SEQ ID NO: 218062 - RNA, 22 nt, Human
uaagccacuagucuguuaugaa

SEQ ID NO: 218063 - RNA, 22 nt, Human
caauuagacauuuauuggccag

SEQ ID NO: 218064 - RNA, 22 nt, Human
cgcaacagcguggcgcccagcu

SEQ ID NO: 218065 - RNA, 22 nt, Human
agcugagagccccugcccugug

SEQ ID NO: 218066 - RNA, 22 nt, Human
gccagagagagucccugggccu

SEQ ID NO: 218067 - RNA, 22 nt, Human
agcuagaauguuccuuuucauu

SEQ ID NO: 218068 - RNA, 22 nt, Human
uucuuagagaugguuaaaaaua

SEQ ID NO: 218069 - RNA, 22 nt, Human
acagcauucaauaaauaauaac

SEQ ID NO: 218070 - RNA, 22 nt, Human
cagaccagcucuaugaacccaa

SEQ ID NO: 218071 - RNA, 22 nt, Human
aaaauguaaagcuugaguguag

SEQ ID NO: 218072 - RNA, 22 nt, Human
ggccuuagcggucauagcaaag

SEQ ID NO: 218073 - RNA, 22 nt, Human
uuccuggcacccuuguuagccu

SEQ ID NO: 218074 - RNA, 22 nt, Human
caugcugugugguuagaacugu

SEQ ID NO: 218075 - RNA, 22 nt, Human
ucuucucuacaccagcagcccc

SEQ ID NO: 218076 - RNA, 19 nt, Human
ggaugagggucaggcauag

SEQ ID NO: 218077 - RNA, 22 nt, Human
agggccagaggcaccuugcagc

SEQ ID NO: 218078 - RNA, 22 nt, Human
ugggaccugcccuggccccauc

SEQ ID NO: 218079 - RNA, 22 nt, Human
aagucuuucauaagucucuuau

SEQ ID NO: 218080 - RNA, 18 nt, Human
aggagccuuugcacugga

SEQ ID NO: 218081 - RNA, 22 nt, Human
agcucaggccggagcuacaggc

SEQ ID NO: 218082 - RNA, 22 nt, Human
aagggcaggagaagacggauau

SEQ ID NO: 218083 - RNA, 22 nt, Human
gaauuugggguguguuauuuca

SEQ ID NO: 218084 - RNA, 22 nt, Human
ucccagaggcuccagucucuau

SEQ ID NO: 218085 - RNA, 20 nt, Human
ccugggcucaaagcauccuc

SEQ ID NO: 218086 - RNA, 22 nt, Human
ugggcacagaauagauggccca

SEQ ID NO: 218087 - RNA, 22 nt, Human
aaauacuguuuuauuccaugau

SEQ ID NO: 218088 - RNA, 22 nt, Human
aagguauuggucuggucuuccu

SEQ ID NO: 218089 - RNA, 22 nt, Human
gagaggcauggaacagauucuu

SEQ ID NO: 218090 - RNA, 22 nt, Human
ggacacaaaagugaauaaaaua

SEQ ID NO: 218091 - RNA, 21 nt, Human
cacuccacuuagaacaggguu

SEQ ID NO: 218092 - RNA, 21 nt, Human
ucaggaggcucagacuccugc

SEQ ID NO: 218093 - RNA, 22 nt, Human
gcugucugucuucacaucucgc

SEQ ID NO: 218094 - RNA, 22 nt, Human
gaauuacauuguuagccuuccu

SEQ ID NO: 218095 - RNA, 22 nt, Human
ucuucagaggagcugaauauau

SEQ ID NO: 218096 - RNA, 22 nt, Human
uuuucaguuccaucucugcucu

SEQ ID NO: 218097 - RNA, 22 nt, Human
cugcagagaguaacugaaauau

SEQ ID NO: 218098 - RNA, 22 nt, Human
uucacacuuguuaggauggcuu

SEQ ID NO: 218099 - RNA, 22 nt, Human
cggacccacucggaucccagcc

SEQ ID NO: 218100 - RNA, 22 nt, Human
ugagaacauugggaaagcuaug

SEQ ID NO: 218101 - RNA, 22 nt, Human
aaagugguuuaugauauuccaa

SEQ ID NO: 218102 - RNA, 22 nt, Human
uucugucaugcucauguaauug

SEQ ID NO: 218103 - RNA, 22 nt, Human
cuauguuuaucuguauuucugu

SEQ ID NO: 218104 - RNA, 22 nt, Human
gacuggaaagccuguccucaga

SEQ ID NO: 218105 - RNA, 20 nt, Human
gaggaaaagcugccaggccu

SEQ ID NO: 218106 - RNA, 22 nt, Human
acacugagauuuuccugacacc

SEQ ID NO: 218107 - RNA, 22 nt, Human
ucagggcaggcgagcagcugcu

SEQ ID NO: 218108 - RNA, 22 nt, Human
ugcagccccccagauggccgua

SEQ ID NO: 218109 - RNA, 20 nt, Human
aggaagccaaaggcugucuu

SEQ ID NO: 218110 - RNA, 22 nt, Human
cagcucuuggagccuccaguaa

SEQ ID NO: 218111 - RNA, 22 nt, Human
ugaaagguuaaaaguaguauug

SEQ ID NO: 218112 - RNA, 22 nt, Human
cugggcaggagaggugguugga

SEQ ID NO: 218113 - RNA, 22 nt, Human
cacagugcucaaacacaagugc

SEQ ID NO: 218114 - RNA, 22 nt, Human
uuaaacugcagacucaguguuc

SEQ ID NO: 218115 - RNA, 22 nt, Human
guagcugauauuagcaaugagu

SEQ ID NO: 218116 - RNA, 22 nt, Human
uccuuaaaggacuagaagucaa

SEQ ID NO: 218117 - RNA, 22 nt, Human
acaguggcucaugccugucauc

SEQ ID NO: 218118 - RNA, 22 nt, Human
uuacaggguugcagcauugacg

SEQ ID NO: 218119 - RNA, 22 nt, Human
augcugaagagagaacuacuca

SEQ ID NO: 218120 - RNA, 22 nt, Human
ggcaggcacaguaauacauguu

SEQ ID NO: 218121 - RNA, 22 nt, Human
uauuuagaacagacaauagaaa

SEQ ID NO: 218122 - RNA, 22 nt, Human
agguggggcccaccaauuugca

SEQ ID NO: 218123 - RNA, 22 nt, Human
aaucucagagauaucugugucc

SEQ ID NO: 218124 - RNA, 22 nt, Human
ccagacugagggucccugagcu

SEQ ID NO: 218125 - RNA, 22 nt, Human
uggcacucacucucagagucug

SEQ ID NO: 218126 - RNA, 22 nt, Human
gggaggcauguguuauccacuu

SEQ ID NO: 218127 - RNA, 22 nt, Human
cagcugaaagaaggaaguguca

SEQ ID NO: 218128 - RNA, 22 nt, Human
ucugggucuaugaucucacuuc

SEQ ID NO: 218129 - RNA, 22 nt, Human
gccaugaguaaacuggaaagcc

SEQ ID NO: 218130 - RNA, 22 nt, Human
uucuagaaauccguaagugaau

SEQ ID NO: 218131 - RNA, 22 nt, Human
aaacccagagacuagaaagacc

SEQ ID NO: 218132 - RNA, 22 nt, Human
aaugcacagcuaaagugguucc

SEQ ID NO: 218133 - RNA, 22 nt, Human
agaaugcuccagagcugaaaga

SEQ ID NO: 218134 - RNA, 22 nt, Human
cuuuggcagccucugcuauuga

SEQ ID NO: 218135 - RNA, 22 nt, Human
gaggcugcuuuccuccuauccu

SEQ ID NO: 218136 - RNA, 19 nt, Human
augcaaauagauuuggaau

SEQ ID NO: 218137 - RNA, 22 nt, Human
aguccaggcggguauagaggcu

SEQ ID NO: 218138 - RNA, 22 nt, Human
cugagggagagaauggggcaaa

SEQ ID NO: 218139 - RNA, 22 nt, Human
aaaaguuaacuguguucaugca

SEQ ID NO: 218140 - RNA, 22 nt, Human
aaaugaguuuccucaauguccu

SEQ ID NO: 218141 - RNA, 22 nt, Human
uauuugaugguucuaaaacagc

SEQ ID NO: 218142 - RNA, 22 nt, Human
gcuuggcuguguucaagggcgg

SEQ ID NO: 218143 - RNA, 22 nt, Human
cuaucuuucgauucuagcuuaa

SEQ ID NO: 218144 - RNA, 22 nt, Human
ugcagggccgcuggaggucaug

SEQ ID NO: 218145 - RNA, 22 nt, Human
ccuguauuugcaacuuuucuua

SEQ ID NO: 218146 - RNA, 22 nt, Human
acacauaucuaagauagaugac

SEQ ID NO: 218147 - RNA, 22 nt, Human
ggcuccuguggcaagacagcuu

SEQ ID NO: 218148 - RNA, 22 nt, Human
ggucuuguuuauauaagguggu

SEQ ID NO: 218149 - RNA, 22 nt, Human
accugaggcuguuagucuaggu

SEQ ID NO: 218150 - RNA, 22 nt, Human
cagucuccgccagcuccucaca

SEQ ID NO: 218151 - RNA, 22 nt, Human
cucugcaggcacccaggguggg

SEQ ID NO: 218152 - RNA, 22 nt, Human
ucugccaggccacacagggcac

SEQ ID NO: 218153 - RNA, 22 nt, Human
caugccaguuuugagaugcacc

SEQ ID NO: 218154 - RNA, 22 nt, Human
ugaguccugcucugggcagggu

SEQ ID NO: 218155 - RNA, 22 nt, Human
uaguuaaagcccuaaauugaua

SEQ ID NO: 218156 - RNA, 22 nt, Human
cuacaguagagguugucaggga

SEQ ID NO: 218157 - RNA, 22 nt, Human
cacagagaacugugggagugug

SEQ ID NO: 218158 - RNA, 22 nt, Human
caggagacucagcauccaggau

SEQ ID NO: 218159 - RNA, 22 nt, Human
cuguggcucuccaauggaggga

SEQ ID NO: 218160 - RNA, 22 nt, Human
ugccucuggccuuuggugccca

SEQ ID NO: 218161 - RNA, 19 nt, Human
agccaguccaaguucuguc

SEQ ID NO: 218162 - RNA, 22 nt, Human
cagcugagaccagaaugcaggu

SEQ ID NO: 218163 - RNA, 22 nt, Human
uuuacucuugcuacacaacugu

SEQ ID NO: 218164 - RNA, 22 nt, Human
acagugucugacacguaggaag

SEQ ID NO: 218165 - RNA, 21 nt, Human
aggcauuauaaauuucaccug

SEQ ID NO: 218166 - RNA, 22 nt, Human
cuguccugggggugguccuugc

SEQ ID NO: 218167 - RNA, 22 nt, Human
gggcccuggcuuuccuguucuu

SEQ ID NO: 218168 - RNA, 20 nt, Human
uagauccuggggauuuauug

SEQ ID NO: 218169 - RNA, 22 nt, Human
agcucagggccaucggcccuuu

SEQ ID NO: 218170 - RNA, 22 nt, Human
uuauucacucugaagccauccu

SEQ ID NO: 218171 - RNA, 21 nt, Human
uuagaacaauauuugguauag

SEQ ID NO: 218172 - RNA, 16 nt, Human
uaggaaacugcaugug

SEQ ID NO: 218173 - RNA, 22 nt, Human
cagcagcugauggggaagugau

SEQ ID NO: 218174 - RNA, 22 nt, Human
uuugaugaguuuaauaacagcc

SEQ ID NO: 218175 - RNA, 22 nt, Human
aggucauuaaaguuaaaugagg

SEQ ID NO: 218176 - RNA, 22 nt, Human
aaaguuacuaucacaaugaaau

SEQ ID NO: 218177 - RNA, 22 nt, Human
gccagcagcugugggguggcca

SEQ ID NO: 218178 - RNA, 22 nt, Human
gcagugggagcuuaggcagugc

SEQ ID NO: 218179 - RNA, 20 nt, Human
uguccccuagaucccagcuc

SEQ ID NO: 218180 - RNA, 22 nt, Human
auuagcuuaucacacaagcugc

SEQ ID NO: 218181 - RNA, 22 nt, Human
uguggcugaucaaagcgcucag

SEQ ID NO: 218182 - RNA, 19 nt, Human
ugucugcugaugacucuau

SEQ ID NO: 218183 - RNA, 22 nt, Human
agugagggacuagugcugggga

SEQ ID NO: 218184 - RNA, 22 nt, Human
uguuuauugagugccuacuaua

SEQ ID NO: 218185 - RNA, 19 nt, Human
gcuggcagaauuuugaacc

SEQ ID NO: 218186 - RNA, 22 nt, Human
ccugccuuucucaguaaucuuu

SEQ ID NO: 218187 - RNA, 22 nt, Human
aaagaucaauagauaaagcuac

SEQ ID NO: 218188 - RNA, 22 nt, Human
uuguguacuacaguaugccaca

SEQ ID NO: 218189 - RNA, 22 nt, Human
gcccaggauggcuggaggugcu

SEQ ID NO: 218190 - RNA, 22 nt, Human
agagucugaaugcucagaguug

SEQ ID NO: 218191 - RNA, 22 nt, Human
uguagaggaggaaacugaggcu

SEQ ID NO: 218192 - RNA, 22 nt, Human
ugguaaaaaccgcaauuacauu

SEQ ID NO: 218193 - RNA, 21 nt, Human
aacauuaguaauuugacuuuu

SEQ ID NO: 218194 - RNA, 22 nt, Human
acucaaauagcaacggugagaa

SEQ ID NO: 218195 - RNA, 22 nt, Human
uugguacaaaaccaugaaagaa

SEQ ID NO: 218196 - RNA, 22 nt, Human
ggcacagcaccuuuucacauug

SEQ ID NO: 218197 - RNA, 22 nt, Human
agagcaauuagcuuagguaaaa

SEQ ID NO: 218198 - RNA, 22 nt, Human
auaaacugugcuggaugaugag

SEQ ID NO: 218199 - RNA, 19 nt, Human
caggcccuggacccaucug

SEQ ID NO: 218200 - RNA, 22 nt, Human
auguuuccauuuucuuguauca

SEQ ID NO: 218201 - RNA, 22 nt, Human
gcugcccuaauaucacauguua

SEQ ID NO: 218202 - RNA, 22 nt, Human
gccuggcugcuagccagaggca

SEQ ID NO: 218203 - RNA, 22 nt, Human
ccuguggcuggucaggccagca

SEQ ID NO: 218204 - RNA, 22 nt, Human
guugaaagcuuuucauuuaguu

SEQ ID NO: 218205 - RNA, 20 nt, Human
aguggccacugcagagaugc

SEQ ID NO: 218206 - RNA, 22 nt, Human
auuaagugugacaugcugcucu

SEQ ID NO: 218207 - RNA, 20 nt, Human
aggagaccaagccaagugga

SEQ ID NO: 218208 - RNA, 22 nt, Human
aaaaguuagcuauuaguaggug

SEQ ID NO: 218209 - RNA, 22 nt, Human
guaacucuggguagaacucaug

SEQ ID NO: 218210 - RNA, 22 nt, Human
aggacuggcagugugagggguc

SEQ ID NO: 218211 - RNA, 22 nt, Human
uugcugagcuuuggcaaggaag

SEQ ID NO: 218212 - RNA, 22 nt, Human
aauucuucaagugcuuuggaga

SEQ ID NO: 218213 - RNA, 22 nt, Human
aagcccagaugagaucccugga

SEQ ID NO: 218214 - RNA, 21 nt, Human
cauuaaguaccagggcacugu

SEQ ID NO: 218215 - RNA, 22 nt, Human
gcaugagggggguuaggaaguu

SEQ ID NO: 218216 - RNA, 18 nt, Human
agugcaugcuaggggaag

SEQ ID NO: 218217 - RNA, 22 nt, Human
uucuagaauguuuugaaaggga

SEQ ID NO: 218218 - RNA, 20 nt, Human
aggcugucauuucuggcagg

SEQ ID NO: 218219 - RNA, 22 nt, Human
auugagcuguuuuguaggauaa

SEQ ID NO: 218220 - RNA, 22 nt, Human
uuccuucuuccaaacccaucau

SEQ ID NO: 218221 - RNA, 23 nt, Human
ucuuugguaaauaaaguggggau

SEQ ID NO: 218222 - RNA, 22 nt, Human
aggaaacaugaaucugccuuga

SEQ ID NO: 218223 - RNA, 22 nt, Human
cugcuuuaucugagacaaguca

SEQ ID NO: 218224 - RNA, 20 nt, Human
gcaaaauaggcucuguuggu

SEQ ID NO: 218225 - RNA, 22 nt, Human
ccagcccuccuccaucagagga

SEQ ID NO: 218226 - RNA, 22 nt, Human
cugaggagcaaccccgugcccu

SEQ ID NO: 218227 - RNA, 22 nt, Human
ugggguggauagaaagugaugu

SEQ ID NO: 218228 - RNA, 22 nt, Human
ugcccaggauugugaggucagg

SEQ ID NO: 218229 - RNA, 22 nt, Human
ggcuuuagggcaggcaguguua

SEQ ID NO: 218230 - RNA, 22 nt, Human
ggcccagaagccagaagccucc

SEQ ID NO: 218231 - RNA, 20 nt, Human
ugcagcacgggcccuuucca

SEQ ID NO: 218232 - RNA, 21 nt, Human
acagagaaagagcagccuccu

SEQ ID NO: 218233 - RNA, 22 nt, Human
cagcuccucuggccagcccugc

SEQ ID NO: 218234 - RNA, 22 nt, Human
caguuuaaccuauccauuaugu

SEQ ID NO: 218235 - RNA, 22 nt, Human
agccaggccuuagggagaggca

SEQ ID NO: 218236 - RNA, 22 nt, Human
ccagucccagcucugccaugcu

SEQ ID NO: 218237 - RNA, 22 nt, Human
uugagucucugccaaaacacaa

SEQ ID NO: 218238 - RNA, 22 nt, Human
uauuccuauggccacugcuacu

SEQ ID NO: 218239 - RNA, 22 nt, Human
agcccuggaagccacaguccua

SEQ ID NO: 218240 - RNA, 22 nt, Human
ccugaggucagccauucuugcc

SEQ ID NO: 218241 - RNA, 21 nt, Human
aaaaggaaggucuguuugggg

SEQ ID NO: 218242 - RNA, 23 nt, Human
cuccuggaggguccggcccugcc

SEQ ID NO: 218243 - RNA, 23 nt, Human
agacagaggcugaggcuggccgc

SEQ ID NO: 218244 - RNA, 22 nt, Human
cuuuccucuggcacugucuggu

SEQ ID NO: 218245 - RNA, 22 nt, Human
uucuuuggggaauauucugguu

SEQ ID NO: 218246 - RNA, 22 nt, Human
uggagaguggauaugggagcaa

SEQ ID NO: 218247 - RNA, 22 nt, Human
cagagccagcuguccuuggcau

SEQ ID NO: 218248 - RNA, 22 nt, Human
ucugaggaucugaagggaacag

SEQ ID NO: 218249 - RNA, 22 nt, Human
ccugguggccuucagcccacaa

SEQ ID NO: 218250 - RNA, 21 nt, Human
cacaggcuucuauacacaaug

SEQ ID NO: 218251 - RNA, 22 nt, Human
gcagcaggcuuuucauaccuug

SEQ ID NO: 218252 - RNA, 22 nt, Human
aucucccagccacagcauucuu

SEQ ID NO: 218253 - RNA, 22 nt, Human
ggaagagaaaugagucaagacu

SEQ ID NO: 218254 - RNA, 22 nt, Human
guccuuaguuacuuuucauguc

SEQ ID NO: 218255 - RNA, 22 nt, Human
ugucaauaguuuugaguucucu

SEQ ID NO: 218256 - RNA, 22 nt, Human
ccaggguuuaaauucugacuau

SEQ ID NO: 218257 - RNA, 22 nt, Human
uuuggaauagcauagaagcuca

SEQ ID NO: 218258 - RNA, 22 nt, Human
cuggagggcugcagcgaggcug

SEQ ID NO: 218259 - RNA, 22 nt, Human
gacaggcuuccuaagugccaga

SEQ ID NO: 218260 - RNA, 22 nt, Human
gugcaggagcaggagccauguc

SEQ ID NO: 218261 - RNA, 22 nt, Human
agcuucucuggucuucugccaa

SEQ ID NO: 218262 - RNA, 20 nt, Human
ggcuuccccgccaucuuccg

SEQ ID NO: 218263 - RNA, 22 nt, Human
uaaggccaccguuauagaacca

SEQ ID NO: 218264 - RNA, 22 nt, Human
gaaggagggugcggaucugagc

SEQ ID NO: 218265 - RNA, 22 nt, Human
cacuuuauaugcauuaccucau

SEQ ID NO: 218266 - RNA, 16 nt, Human
agcccugccguguacu

SEQ ID NO: 218267 - RNA, 22 nt, Human
aagaguuuccaugcucugugcu

SEQ ID NO: 218268 - RNA, 22 nt, Human
aucuggcucgcuaggcucuggg

SEQ ID NO: 218269 - RNA, 22 nt, Human
ccacccagaccagggaucuggg

SEQ ID NO: 218270 - RNA, 22 nt, Human
uaugagcaagaguuugugaagg

SEQ ID NO: 218271 - RNA, 22 nt, Human
agguauuaugcugcugaaugcu

SEQ ID NO: 218272 - RNA, 22 nt, Human
cuggcuccauuacucagcaucu

SEQ ID NO: 218273 - RNA, 22 nt, Human
gccaggcacugcucuaagcccu

SEQ ID NO: 218274 - RNA, 22 nt, Human
uuauugaguaucugcuuggugu

SEQ ID NO: 218275 - RNA, 22 nt, Human
uggcuucucagaauacucugga

SEQ ID NO: 218276 - RNA, 22 nt, Human
acugcccuggagacagcagagu

SEQ ID NO: 218277 - RNA, 22 nt, Human
guauauaucggcacuauuuuaa

SEQ ID NO: 218278 - RNA, 22 nt, Human
aagcugugaaauagauuacaca

SEQ ID NO: 218279 - RNA, 22 nt, Human
uugugcagaguugccuuuauuu

SEQ ID NO: 218280 - RNA, 22 nt, Human
caggcccuccugugaucugccu

SEQ ID NO: 218281 - RNA, 22 nt, Human
gggagcugagggaccucugugg

SEQ ID NO: 218282 - RNA, 22 nt, Human
ucagaaucugaaaagcgcuugg

SEQ ID NO: 218283 - RNA, 22 nt, Human
uggcucugagacacaggcucuc

SEQ ID NO: 218284 - RNA, 22 nt, Human
aaggaacugaugcucaaagaau

SEQ ID NO: 218285 - RNA, 22 nt, Human
ugcccuggaggggcuuacaguc

SEQ ID NO: 218286 - RNA, 22 nt, Human
auaaaauuugcuacuguuaaau

SEQ ID NO: 218287 - RNA, 22 nt, Human
ucuggggugcagccuggacaua

SEQ ID NO: 218288 - RNA, 22 nt, Human
caauacacuaaacuucucugaa

SEQ ID NO: 218289 - RNA, 18 nt, Human
acagugcugucacugcuu

SEQ ID NO: 218290 - RNA, 23 nt, Human
ugaaugauggugcuccucaucuu

SEQ ID NO: 218291 - RNA, 22 nt, Human
caggcugcagaggccuuucaug

SEQ ID NO: 218292 - RNA, 22 nt, Human
aaucugaauauuuauguguauu

SEQ ID NO: 218293 - RNA, 22 nt, Human
gaggcagcaggcugaggaggau

SEQ ID NO: 218294 - RNA, 22 nt, Human
ugccuuagagcacucaagagug

SEQ ID NO: 218295 - RNA, 22 nt, Human
aggcugcagaggugcugccaga

SEQ ID NO: 218296 - RNA, 22 nt, Human
gaugaggggucauuggcuggga

SEQ ID NO: 218297 - RNA, 22 nt, Human
gccuguuuuccugcugugguug

SEQ ID NO: 218298 - RNA, 22 nt, Human
ucugagaagcaccuucuggaca

SEQ ID NO: 218299 - RNA, 22 nt, Human
ugaggggagaagcagcagccug

SEQ ID NO: 218300 - RNA, 22 nt, Human
ggguguccugugccaagcuggg

SEQ ID NO: 218301 - RNA, 22 nt, Human
cuggcugccuggagugagggag

SEQ ID NO: 218302 - RNA, 22 nt, Human
accaggcagcugggggugaugu

SEQ ID NO: 218303 - RNA, 22 nt, Human
guacaggaccgcggcccccugg

SEQ ID NO: 218304 - RNA, 22 nt, Human
uaggccaguggcagguugugug

SEQ ID NO: 218305 - RNA, 22 nt, Human
agugaagguuuacagggccccu

SEQ ID NO: 218306 - RNA, 22 nt, Human
guccauaugucaggugugaauu

SEQ ID NO: 218307 - RNA, 22 nt, Human
cccacaggugugagcuugcugg

SEQ ID NO: 218308 - RNA, 22 nt, Human
ggaauguuuuucauugcucucu

SEQ ID NO: 218309 - RNA, 22 nt, Human
aaggugguuguaggcuggucug

SEQ ID NO: 218310 - RNA, 22 nt, Human
gaacuauaugucuuaaagcuuu

SEQ ID NO: 218311 - RNA, 22 nt, Human
ccugggcuugguuguugagaac

SEQ ID NO: 218312 - RNA, 22 nt, Human
ugugcagggaagggcaugcuau

SEQ ID NO: 218313 - RNA, 22 nt, Human
gugagucuuaagcaccaccuuu

SEQ ID NO: 218314 - RNA, 21 nt, Human
gcagaauagucucugucuuca

SEQ ID NO: 218315 - RNA, 22 nt, Human
uccuguguuacugccuggagcg

SEQ ID NO: 218316 - RNA, 22 nt, Human
ugcauaaaauaugagaaaugua

SEQ ID NO: 218317 - RNA, 22 nt, Human
aaauuuuagaccaggcaaaacu

SEQ ID NO: 218318 - RNA, 22 nt, Human
gcacaggaugauggguugaggg

SEQ ID NO: 218319 - RNA, 17 nt, Human
acaugggcugagacucc

SEQ ID NO: 218320 - RNA, 22 nt, Human
cagucuggaggucagcuggcuu

SEQ ID NO: 218321 - RNA, 23 nt, Human
uuuggacuugugacucuucuccu

SEQ ID NO: 218322 - RNA, 22 nt, Human
ucuccacagucccaccucgcuu

SEQ ID NO: 218323 - RNA, 22 nt, Human
gcacugaaugcuuuuacuguaa

SEQ ID NO: 218324 - RNA, 22 nt, Human
uuggcuucucuuaacccuaaag

SEQ ID NO: 218325 - RNA, 22 nt, Human
gcccagagagaugcuguagacc

SEQ ID NO: 218326 - RNA, 22 nt, Human
agcagcagcucaguucucagcu

SEQ ID NO: 218327 - RNA, 22 nt, Human
cuuuaugaaccuguucagcuug

SEQ ID NO: 218328 - RNA, 22 nt, Human
ucccagucuguguccuuuacag

SEQ ID NO: 218329 - RNA, 21 nt, Human
gcaaauguucaggaaaaaaga

SEQ ID NO: 218330 - RNA, 22 nt, Human
auuucagacuguguuggaaaau

SEQ ID NO: 218331 - RNA, 22 nt, Human
auucucuggguuccaguaaaug

SEQ ID NO: 218332 - RNA, 18 nt, Human
caaagcaggugacagugu

SEQ ID NO: 218333 - RNA, 22 nt, Human
gugcucuguguauuaggauguc

SEQ ID NO: 218334 - RNA, 22 nt, Human
cccaggcuggagggcaguguca

SEQ ID NO: 218335 - RNA, 22 nt, Human
ugcccugcagugagugcgucug

SEQ ID NO: 218336 - RNA, 22 nt, Human
uaucuagauuucuuucucugug

SEQ ID NO: 218337 - RNA, 22 nt, Human
aagggggcgaagacgugauuga

SEQ ID NO: 218338 - RNA, 22 nt, Human
aggcagugcagaguccucuucu

SEQ ID NO: 218339 - RNA, 22 nt, Human
uaacugaacaucucaaaucaag

SEQ ID NO: 218340 - RNA, 22 nt, Human
cauuacaaacauguuaagauuu

SEQ ID NO: 218341 - RNA, 22 nt, Human
ucuuuaaucauaaccaagaugg

SEQ ID NO: 218342 - RNA, 22 nt, Human
gcaggugggggagaaguuguga

SEQ ID NO: 218343 - RNA, 22 nt, Human
cagcugagcugccagacuacug

SEQ ID NO: 218344 - RNA, 22 nt, Human
aucaguuuggugcuuucaguga

SEQ ID NO: 218345 - RNA, 22 nt, Human
uauuucagucacuucuucucug

SEQ ID NO: 218346 - RNA, 22 nt, Human
ccugggccugaaaacauuucuc

SEQ ID NO: 218347 - RNA, 22 nt, Human
gaaagcugugaaauagugcucu

SEQ ID NO: 218348 - RNA, 20 nt, Human
cacaggcuuacaguuuagau

SEQ ID NO: 218349 - RNA, 22 nt, Human
ccagggcucuaugaggguggag

SEQ ID NO: 218350 - RNA, 22 nt, Human
aggucugagcuccuuccucuga

SEQ ID NO: 218351 - RNA, 22 nt, Human
cuuugggauuucaugagagcua

SEQ ID NO: 218352 - RNA, 22 nt, Human
gcaggcuugagagaucagaugg

SEQ ID NO: 218353 - RNA, 22 nt, Human
ucuuuacuuguguauuguauau

SEQ ID NO: 218354 - RNA, 22 nt, Human
aucaggauccaccuugagccug

SEQ ID NO: 218355 - RNA, 22 nt, Human
ucccuggcugggggcugccuug

SEQ ID NO: 218356 - RNA, 22 nt, Human
caaauacugagcacgcaaucaa

SEQ ID NO: 218357 - RNA, 20 nt, Human
agagagaccuaggccuaguc

SEQ ID NO: 218358 - RNA, 22 nt, Human
agugugagugcucauguccauc

SEQ ID NO: 218359 - RNA, 22 nt, Human
ggcucuggcaaggggaggcuac

SEQ ID NO: 218360 - RNA, 22 nt, Human
uuucagaaacgauuaugaacac

SEQ ID NO: 218361 - RNA, 23 nt, Human
aggauguaggauguauggcagag

SEQ ID NO: 218362 - RNA, 22 nt, Human
caccuagggcaucccugcccca

SEQ ID NO: 218363 - RNA, 22 nt, Human
gacuguguccaugugcuggauu

SEQ ID NO: 218364 - RNA, 22 nt, Human
uuguuaaaauuggagccgagag

SEQ ID NO: 218365 - RNA, 22 nt, Human
ugaggcaguucuuacuuguauu

SEQ ID NO: 218366 - RNA, 22 nt, Human
aagcacaggggaaauaaguugu

SEQ ID NO: 218367 - RNA, 22 nt, Human
gcugggcugagcuagacuuggc

SEQ ID NO: 218368 - RNA, 22 nt, Human
ucugcagggcccuuggcuccug

SEQ ID NO: 218369 - RNA, 22 nt, Human
gaggccugguuuccagcauccu

SEQ ID NO: 218370 - RNA, 22 nt, Human
agcugcaaguccaaaggaauua

SEQ ID NO: 218371 - RNA, 22 nt, Human
uacuucaugaguuaauaugcag

SEQ ID NO: 218372 - RNA, 19 nt, Human
caggacagacuucaaagcc

SEQ ID NO: 218373 - RNA, 22 nt, Human
uaaguguuucuccagugucuuu

SEQ ID NO: 218374 - RNA, 22 nt, Human
aaaauugucgaacaguaguaac

SEQ ID NO: 218375 - RNA, 22 nt, Human
agcguaugaauauuugaagaga

SEQ ID NO: 218376 - RNA, 21 nt, Human
ccugggagaucagcugccuuc

SEQ ID NO: 218377 - RNA, 22 nt, Human
uagggauggaugaugccuggca

SEQ ID NO: 218378 - RNA, 22 nt, Human
augcacaggaccacacauaaug

SEQ ID NO: 218379 - RNA, 22 nt, Human
cccaugagauucugaauuuggc

SEQ ID NO: 218380 - RNA, 22 nt, Human
guauuagggccaaaggcaggaa

SEQ ID NO: 218381 - RNA, 22 nt, Human
uauuucuuucagguauguguug

SEQ ID NO: 218382 - RNA, 22 nt, Human
ccugccacuucuugcuauggag

SEQ ID NO: 218383 - RNA, 22 nt, Human
gucacuuuacacuccuacuaaa

SEQ ID NO: 218384 - RNA, 22 nt, Human
ugauguccucaugucaagcucc

SEQ ID NO: 218385 - RNA, 22 nt, Human
auccccuuaucccaggcugagc

SEQ ID NO: 218386 - RNA, 22 nt, Human
acuguauuuuguacuuucgugu

SEQ ID NO: 218387 - RNA, 22 nt, Human
uucuacaucacuuaacaugcua

SEQ ID NO: 218388 - RNA, 22 nt, Human
aaccagcuaaacuuugcucgaa

SEQ ID NO: 218389 - RNA, 22 nt, Human
aaauguguauaugaaacaugau

SEQ ID NO: 218390 - RNA, 22 nt, Human
aagauucacagagugaaugaaa

SEQ ID NO: 218391 - RNA, 22 nt, Human
ucugucuucuucauugccuaua

SEQ ID NO: 218392 - RNA, 22 nt, Human
gaaggccaagaggcuccaagau

SEQ ID NO: 218393 - RNA, 22 nt, Human
auuaaauuggaucugcauaguu

SEQ ID NO: 218394 - RNA, 22 nt, Human
gaaugcagauggcugguguaug

SEQ ID NO: 218395 - RNA, 22 nt, Human
uagggcaguuauaacauuagug

SEQ ID NO: 218396 - RNA, 22 nt, Human
cauuuuaaaugauuuaagccaa

SEQ ID NO: 218397 - RNA, 23 nt, Human
aggagaagagauuuccacaugca

SEQ ID NO: 218398 - RNA, 22 nt, Human
aucagugcugggagaugucaga

SEQ ID NO: 218399 - RNA, 19 nt, Human
guugaaaguaggugagggu

SEQ ID NO: 218400 - RNA, 22 nt, Human
acaaugcaauaggagcuagaaa

SEQ ID NO: 218401 - RNA, 22 nt, Human
cagggugggcacccagccucca

SEQ ID NO: 218402 - RNA, 19 nt, Human
uggaggaaguauauuucau

SEQ ID NO: 218403 - RNA, 22 nt, Human
uacagaggcacaugcaauuuuc

SEQ ID NO: 218404 - RNA, 22 nt, Human
cuuaauuucaaacugcuaguga

SEQ ID NO: 218405 - RNA, 22 nt, Human
cagguucccuugcagcuaagug

SEQ ID NO: 218406 - RNA, 22 nt, Human
uccugggagcccuugcuccacc

SEQ ID NO: 218407 - RNA, 22 nt, Human
uggcugagggggcaguucagga

SEQ ID NO: 218408 - RNA, 22 nt, Human
uuccaggagaggaaaccugauu

SEQ ID NO: 218409 - RNA, 23 nt, Human
acauguggagagaacagauaucu

SEQ ID NO: 218410 - RNA, 22 nt, Human
cagcaaaguaagcugacaugua

SEQ ID NO: 218411 - RNA, 22 nt, Human
ucccucaggacccaacuuguaa

SEQ ID NO: 218412 - RNA, 23 nt, Human
aaacaagcccuaaugaagagucc

SEQ ID NO: 218413 - RNA, 22 nt, Human
cauaauccugguguagcccucu

SEQ ID NO: 218414 - RNA, 23 nt, Human
acuuccaguuauaggaacucuuc

SEQ ID NO: 218415 - RNA, 22 nt, Human
ucuguuuucucuguauuuugac

SEQ ID NO: 218416 - RNA, 22 nt, Human
uagaaagucaaaacacuguguu

SEQ ID NO: 218417 - RNA, 22 nt, Human
aggccagcuguuacuagagcca

SEQ ID NO: 218418 - RNA, 22 nt, Human
ucuggaugaagacccagaggcu

SEQ ID NO: 218419 - RNA, 22 nt, Human
ucaggaugagcucauaacuaug

SEQ ID NO: 218420 - RNA, 22 nt, Human
agggcugcaucugccuggugaa

SEQ ID NO: 218421 - RNA, 22 nt, Human
ucagggcacguuucugcaaugc

SEQ ID NO: 218422 - RNA, 21 nt, Human
ucuggagcccuaagcugagaa

SEQ ID NO: 218423 - RNA, 22 nt, Human
gagagacagcacacaguguggg

SEQ ID NO: 218424 - RNA, 22 nt, Human
agagauauauauuuguuuacca

SEQ ID NO: 218425 - RNA, 22 nt, Human
uuuuuauaacucuuuugugaca

SEQ ID NO: 218426 - RNA, 22 nt, Human
uaucagcaacucagagcagucu

SEQ ID NO: 218427 - RNA, 22 nt, Human
guggccagugggaaugggcuca

SEQ ID NO: 218428 - RNA, 20 nt, Human
uaugaguauuacuuucagga

SEQ ID NO: 218429 - RNA, 22 nt, Human
gcugggcuggccgccgagaucg

SEQ ID NO: 218430 - RNA, 22 nt, Human
aagauauauuuuggugauuuca

SEQ ID NO: 218431 - RNA, 22 nt, Human
gcuggaagaaugagugccucgu

SEQ ID NO: 218432 - RNA, 22 nt, Human
uuuaaaaucagaugggaguugg

SEQ ID NO: 218433 - RNA, 22 nt, Human
gggcaugccugcgcagugcaug

SEQ ID NO: 218434 - RNA, 22 nt, Human
ggcucuggggaagcucucuuca

SEQ ID NO: 218435 - RNA, 22 nt, Human
aaagcugcaagcuccugaggaa

SEQ ID NO: 218436 - RNA, 22 nt, Human
cuacauaaucuggauuugucug

SEQ ID NO: 218437 - RNA, 23 nt, Human
cacaggcugcgcauaagcuucuc

SEQ ID NO: 218438 - RNA, 22 nt, Human
aauauguuuauaagauaucuuc

SEQ ID NO: 218439 - RNA, 22 nt, Human
cuguguccauguucuaauuugg

SEQ ID NO: 218440 - RNA, 22 nt, Human
uuacuucuugucucaugccuau

SEQ ID NO: 218441 - RNA, 18 nt, Human
caggugggucuccugccc

SEQ ID NO: 218442 - RNA, 22 nt, Human
ugcccuggcauuggguuggaua

SEQ ID NO: 218443 - RNA, 22 nt, Human
cugccagccaggccagguaggc

SEQ ID NO: 218444 - RNA, 22 nt, Human
aucuuagaaguuugauaaaauc

SEQ ID NO: 218445 - RNA, 22 nt, Human
gggcugcuugcuggagacagac

SEQ ID NO: 218446 - RNA, 21 nt, Human
gggaaacucugcuuaacagag

SEQ ID NO: 218447 - RNA, 22 nt, Human
caaauucucacccuguuugauu

SEQ ID NO: 218448 - RNA, 22 nt, Human
cacaugugggaaauggugcuua

SEQ ID NO: 218449 - RNA, 22 nt, Human
gggcugggauugcuugcuguga

SEQ ID NO: 218450 - RNA, 22 nt, Human
acugggaaucucaggaacaugg

SEQ ID NO: 218451 - RNA, 22 nt, Human
acccuggagcaauaaucccugg

SEQ ID NO: 218452 - RNA, 22 nt, Human
accaaggaagagauucucaguu

SEQ ID NO: 218453 - RNA, 22 nt, Human
uaaaguauauuuuuucucaaua

SEQ ID NO: 218454 - RNA, 22 nt, Human
guccaugauucuguguaguaga

SEQ ID NO: 218455 - RNA, 22 nt, Human
caagcaggguuuaugcauggag

SEQ ID NO: 218456 - RNA, 22 nt, Human
uucuuaagucaguaagaugcaa

SEQ ID NO: 218457 - RNA, 22 nt, Human
cuuagggagaaugccucugcag

SEQ ID NO: 218458 - RNA, 22 nt, Human
guggcaguuuugacaucacaaa

SEQ ID NO: 218459 - RNA, 22 nt, Human
gaugaagaggcacugacauauu

SEQ ID NO: 218460 - RNA, 22 nt, Human
agcaugaaaggcgugccaacuu

SEQ ID NO: 218461 - RNA, 22 nt, Human
gcuccaaaguacagugacuuac

SEQ ID NO: 218462 - RNA, 22 nt, Human
ucuggugguauacaucuaggag

SEQ ID NO: 218463 - RNA, 22 nt, Human
ugguauguaaauuguaacucaa

SEQ ID NO: 218464 - RNA, 22 nt, Human
cacaugagacaauuaaagacuu

SEQ ID NO: 218465 - RNA, 22 nt, Human
aaacaugagcacuugcuucaua

SEQ ID NO: 218466 - RNA, 22 nt, Human
cagauuaacacggagcuuaaca

SEQ ID NO: 218467 - RNA, 22 nt, Human
uagacacaucuucauccacaau

SEQ ID NO: 218468 - RNA, 22 nt, Human
aguguuuuuacaagcacucugg

SEQ ID NO: 218469 - RNA, 22 nt, Human
uccugccucaggcucuggagua

SEQ ID NO: 218470 - RNA, 20 nt, Human
ucagaaguuuccuggagcau

SEQ ID NO: 218471 - RNA, 22 nt, Human
agcuuuacaucgaaguucaguc

SEQ ID NO: 218472 - RNA, 22 nt, Human
gaguucucaagcaaucaaagag

SEQ ID NO: 218473 - RNA, 22 nt, Human
aggcacugggaauaugcugagg

SEQ ID NO: 218474 - RNA, 22 nt, Human
ugggcucuuccuauaguuuaua

SEQ ID NO: 218475 - RNA, 23 nt, Human
gacacaggagcacccagcugagc

SEQ ID NO: 218476 - RNA, 21 nt, Human
acuuggcagaacgcagaaggc

SEQ ID NO: 218477 - RNA, 22 nt, Human
agcugugugugcuugggauuau

SEQ ID NO: 218478 - RNA, 22 nt, Human
cuccuggcacucaguguggaag

SEQ ID NO: 218479 - RNA, 22 nt, Human
agagaguuguaccacacucaua

SEQ ID NO: 218480 - RNA, 22 nt, Human
ucagggcccuggacaacccucc

SEQ ID NO: 218481 - RNA, 22 nt, Human
uguggggaagaguaugacuugg

SEQ ID NO: 218482 - RNA, 22 nt, Human
ccccaggccuguuggauggcgc

SEQ ID NO: 218483 - RNA, 22 nt, Human
cugggccucauccccagaguuu

SEQ ID NO: 218484 - RNA, 22 nt, Human
augccuuuuuaucauggaugau

SEQ ID NO: 218485 - RNA, 22 nt, Human
uucuaaauguaaauaguaugau

SEQ ID NO: 218486 - RNA, 22 nt, Human
acugaaaaugaauuagaaacag

SEQ ID NO: 218487 - RNA, 22 nt, Human
agacuccucggaccaaucagcg

SEQ ID NO: 218488 - RNA, 22 nt, Human
uugugcuccuaugagaaucuaa

SEQ ID NO: 218489 - RNA, 22 nt, Human
guucuucagucacaucacagaa

SEQ ID NO: 218490 - RNA, 18 nt, Human
acagggaugggguaagug

SEQ ID NO: 218491 - RNA, 22 nt, Human
auccugggaaguggccuccucc

SEQ ID NO: 218492 - RNA, 22 nt, Human
uaacuagaagaaugcaccaaga

SEQ ID NO: 218493 - RNA, 22 nt, Human
uucccagugauugaacaucccu

SEQ ID NO: 218494 - RNA, 22 nt, Human
uguaucagaucaaauacuggcu

SEQ ID NO: 218495 - RNA, 22 nt, Human
aaauguacaacauccauauaua

SEQ ID NO: 218496 - RNA, 22 nt, Human
gacacaguucuguucuaguagg

SEQ ID NO: 218497 - RNA, 22 nt, Human
aauagcuuuuguaugaugaaau

SEQ ID NO: 218498 - RNA, 22 nt, Human
uuggcugaaugaggucaccuuu

SEQ ID NO: 218499 - RNA, 23 nt, Human
uagaucuucaucuaauucuguag

SEQ ID NO: 218500 - RNA, 22 nt, Human
cucugggcuuaccugcuuccug

SEQ ID NO: 218501 - RNA, 23 nt, Human
aacuuugccaggagacagcacag

SEQ ID NO: 218502 - RNA, 22 nt, Human
gucauuuaggucugucagaaau

SEQ ID NO: 218503 - RNA, 22 nt, Human
cuguccucaucugccccaaggg

SEQ ID NO: 218504 - RNA, 22 nt, Human
agccccaguucccuggaagucu

SEQ ID NO: 218505 - RNA, 22 nt, Human
acagcagcauccuauuucacuc

SEQ ID NO: 218506 - RNA, 22 nt, Human
ugaaagguagcuggccucauag

SEQ ID NO: 218507 - RNA, 22 nt, Human
gggcugcugccaccagguggau

SEQ ID NO: 218508 - RNA, 22 nt, Human
cugagggaugggcugggccgcc

SEQ ID NO: 218509 - RNA, 22 nt, Human
cugaggagggaaguccccaaag

SEQ ID NO: 218510 - RNA, 22 nt, Human
ccucugggugggaggccgggcg

SEQ ID NO: 218511 - RNA, 19 nt, Human
acacuguagauauagcuau

SEQ ID NO: 218512 - RNA, 18 nt, Human
ccuggaggucuucggggu

SEQ ID NO: 218513 - RNA, 22 nt, Human
acugcagagcuuuucaguugag

SEQ ID NO: 218514 - RNA, 22 nt, Human
ugggacuugccucgagggcugc

SEQ ID NO: 218515 - RNA, 22 nt, Human
acugccucuuggugcugagaga

SEQ ID NO: 218516 - RNA, 22 nt, Human
acuuccaggguagaggggaaga

SEQ ID NO: 218517 - RNA, 22 nt, Human
aaacugggauucuucacaaggu

SEQ ID NO: 218518 - RNA, 22 nt, Human
ggaguggcacucugaggcgggg

SEQ ID NO: 218519 - RNA, 22 nt, Human
uguggcagagagagcuuccuug

SEQ ID NO: 218520 - RNA, 22 nt, Human
cacuuagaaaacuugagcaagu

SEQ ID NO: 218521 - RNA, 21 nt, Human
ucuuucugaaaucucagucug

SEQ ID NO: 218522 - RNA, 22 nt, Human
cagaggggauaacagguguaga

SEQ ID NO: 218523 - RNA, 22 nt, Human
ucuucuccagugcuucugcaca

SEQ ID NO: 218524 - RNA, 22 nt, Human
cuacauuaaauuggcuuacuua

SEQ ID NO: 218525 - RNA, 22 nt, Human
ggaggcauuauggggaagacuu

SEQ ID NO: 218526 - RNA, 22 nt, Human
caugcuaagucauaaaagagua

SEQ ID NO: 218527 - RNA, 22 nt, Human
cagggcaaagagagcacaugcu

SEQ ID NO: 218528 - RNA, 22 nt, Human
aggccacaaccacccugugccc

SEQ ID NO: 218529 - RNA, 22 nt, Human
agcccaggcagagggaugcuug

SEQ ID NO: 218530 - RNA, 22 nt, Human
cagcccuggugagguuggcuau

SEQ ID NO: 218531 - RNA, 22 nt, Human
uccccaggaaauucugauucuu

SEQ ID NO: 218532 - RNA, 22 nt, Human
gagaaacaacacuugaugccuu

SEQ ID NO: 218533 - RNA, 22 nt, Human
gaagucuugaagagcacuguaa

SEQ ID NO: 218534 - RNA, 19 nt, Human
ugguggcaaugucagcuaa

SEQ ID NO: 218535 - RNA, 22 nt, Human
gaagggaaggaaagaaccagca

SEQ ID NO: 218536 - RNA, 18 nt, Human
gcagagcagaagcucaag

SEQ ID NO: 218537 - RNA, 22 nt, Human
uuggcagaugaacacaacugga

SEQ ID NO: 218538 - RNA, 22 nt, Human
uucucugagauagacuaagugg

SEQ ID NO: 218539 - RNA, 22 nt, Human
auuuacauuccauggugguuac

SEQ ID NO: 218540 - RNA, 22 nt, Human
gaagucagaaaagaauuaggga

SEQ ID NO: 218541 - RNA, 17 nt, Human
cccaggccgccgggagc

SEQ ID NO: 218542 - RNA, 21 nt, Human
uuagaguagagaacaugaucc

SEQ ID NO: 218543 - RNA, 22 nt, Human
gcugccuuugugagccaagggg

SEQ ID NO: 218544 - RNA, 22 nt, Human
gaacaucaugaagaaaacauau

SEQ ID NO: 218545 - RNA, 22 nt, Human
agccuggccacucagggccuga

SEQ ID NO: 218546 - RNA, 22 nt, Human
uggaggaguagauuuucagagg

SEQ ID NO: 218547 - RNA, 22 nt, Human
agaugguguuuccccaggugga

SEQ ID NO: 218548 - RNA, 22 nt, Human
guguggggccaggaucagggcu

SEQ ID NO: 218549 - RNA, 22 nt, Human
uggcaaagaugaagcauuucgu

SEQ ID NO: 218550 - RNA, 22 nt, Human
caauucuuggagaagaagcaua

SEQ ID NO: 218551 - RNA, 22 nt, Human
uuuucuguuacaaaguacagcg

SEQ ID NO: 218552 - RNA, 18 nt, Human
uugagucuagccauggaa

SEQ ID NO: 218553 - RNA, 22 nt, Human
ucaaagcaugguuuugaaagac

SEQ ID NO: 218554 - RNA, 22 nt, Human
ccagcccucacugaggccucuc

SEQ ID NO: 218555 - RNA, 22 nt, Human
aggugcaguggcucaugccugu

SEQ ID NO: 218556 - RNA, 22 nt, Human
acauuucuauagugcaucuguu

SEQ ID NO: 218557 - RNA, 22 nt, Human
guaaacaugcuguguacucagc

SEQ ID NO: 218558 - RNA, 22 nt, Human
aguguggguuuuauggagcccu

SEQ ID NO: 218559 - RNA, 22 nt, Human
cugggacagagcagcagugggg

SEQ ID NO: 218560 - RNA, 22 nt, Human
gacagggacacagccagugagg

SEQ ID NO: 218561 - RNA, 22 nt, Human
uauguaaaggauugagaugaau

SEQ ID NO: 218562 - RNA, 22 nt, Human
cugcuguuccaccucugaaugc

SEQ ID NO: 218563 - RNA, 22 nt, Human
ucuucaguagguccucagaauc

SEQ ID NO: 218564 - RNA, 22 nt, Human
agggcacccucucugcaguacc

SEQ ID NO: 218565 - RNA, 19 nt, Human
agcagcagcaccagggauu

SEQ ID NO: 218566 - RNA, 22 nt, Human
cuccuggaccaccuuguggcca

SEQ ID NO: 218567 - RNA, 22 nt, Human
aagguuuauuaaaaguugaugg

SEQ ID NO: 218568 - RNA, 22 nt, Human
acagcugauaguuaccucuguc

SEQ ID NO: 218569 - RNA, 22 nt, Human
agcacuuugugcauuucugaag

SEQ ID NO: 218570 - RNA, 22 nt, Human
ucuauguaaagccauauugaua

SEQ ID NO: 218571 - RNA, 22 nt, Human
auugauaaauugcaauggggcu

SEQ ID NO: 218572 - RNA, 20 nt, Human
cugggucuccuucugcuuaa

SEQ ID NO: 218573 - RNA, 22 nt, Human
aggugcaggagcugugcaggga

SEQ ID NO: 218574 - RNA, 22 nt, Human
guagaaccuucuuuacuagagu

SEQ ID NO: 218575 - RNA, 22 nt, Human
uacaacaugugguccuuuauga

SEQ ID NO: 218576 - RNA, 22 nt, Human
uaguuauauccagucuuuaaaa

SEQ ID NO: 218577 - RNA, 22 nt, Human
ggcagccucagguuuucuuuga

SEQ ID NO: 218578 - RNA, 22 nt, Human
ccauggcuuacagauggagcau

SEQ ID NO: 218579 - RNA, 22 nt, Human
gacuuucuuguagugucugaug

SEQ ID NO: 218580 - RNA, 21 nt, Human
uuucauugaaugagauaaggu

SEQ ID NO: 218581 - RNA, 22 nt, Human
cccuccagccauggacccaggu

SEQ ID NO: 218582 - RNA, 22 nt, Human
uuaccaaaugaaauagagauuu

SEQ ID NO: 218583 - RNA, 22 nt, Human
ucauuguaauuaucugugguau

SEQ ID NO: 218584 - RNA, 22 nt, Human
ucucugggccuguuuucucauc

SEQ ID NO: 218585 - RNA, 17 nt, Human
ucucaggggcuagcccu

SEQ ID NO: 218586 - RNA, 22 nt, Human
uucucuuagcuguaaagucaau

SEQ ID NO: 218587 - RNA, 22 nt, Human
uucuuuggcauuuccuguaugu

SEQ ID NO: 218588 - RNA, 22 nt, Human
cuuagaagaaugccuaggacag

SEQ ID NO: 218589 - RNA, 22 nt, Human
uggagaaggacagccugagaaa

SEQ ID NO: 218590 - RNA, 22 nt, Human
uaacugauauugaaaaacauca

SEQ ID NO: 218591 - RNA, 22 nt, Human
auaaacuggguaucaagaggcc

SEQ ID NO: 218592 - RNA, 22 nt, Human
agcugcugcggaaagaugccac

SEQ ID NO: 218593 - RNA, 22 nt, Human
ucuuuagacauccaguuucucu

SEQ ID NO: 218594 - RNA, 22 nt, Human
gaaguauuacucugaauguauu

SEQ ID NO: 218595 - RNA, 22 nt, Human
uauguuuuaggaauuaauuguu

SEQ ID NO: 218596 - RNA, 22 nt, Human
ggaagccaggccaaugagaaca

SEQ ID NO: 218597 - RNA, 22 nt, Human
aggguggcugaguagauggaag

SEQ ID NO: 218598 - RNA, 22 nt, Human
uuucaaaguugggaauuguaau

SEQ ID NO: 218599 - RNA, 22 nt, Human
agccuaaugcuuuucccaaagu

SEQ ID NO: 218600 - RNA, 22 nt, Human
guccuggggauacagaagugaa

SEQ ID NO: 218601 - RNA, 22 nt, Human
acaggcugggcgcuuccugcgg

SEQ ID NO: 218602 - RNA, 22 nt, Human
uuccaggaauucagcucucagu

SEQ ID NO: 218603 - RNA, 22 nt, Human
cucggaauggaacaacagcggu

SEQ ID NO: 218604 - RNA, 22 nt, Human
accugaggccuccccagcagac

SEQ ID NO: 218605 - RNA, 22 nt, Human
ccagagaggccuuggcaagaca

SEQ ID NO: 218606 - RNA, 22 nt, Human
guuauaaauaccuaauaggauu

SEQ ID NO: 218607 - RNA, 22 nt, Human
accauagacuggaggaucuccu

SEQ ID NO: 218608 - RNA, 22 nt, Human
uggggccugagguggagcugca

SEQ ID NO: 218609 - RNA, 22 nt, Human
uucaucuggucuaguuuuuagu

SEQ ID NO: 218610 - RNA, 22 nt, Human
cucuuugaaauccaucacugcu

SEQ ID NO: 218611 - RNA, 22 nt, Human
auuacaguaaaugcuacaggca

SEQ ID NO: 218612 - RNA, 22 nt, Human
acaguggaagaagcacugaacu

SEQ ID NO: 218613 - RNA, 22 nt, Human
caggaucccuggccuccgccca

SEQ ID NO: 218614 - RNA, 22 nt, Human
auuccaaagguuaaugcccauu

SEQ ID NO: 218615 - RNA, 22 nt, Human
agcacauuaagugaguucaugu

SEQ ID NO: 218616 - RNA, 18 nt, Human
aaggucugucugguaggu

SEQ ID NO: 218617 - RNA, 22 nt, Human
uuaagagguggucgugucugug

SEQ ID NO: 218618 - RNA, 18 nt, Human
cagaggagagacauucag

SEQ ID NO: 218619 - RNA, 22 nt, Human
aaguggugguaugaaccgaggg

SEQ ID NO: 218620 - RNA, 21 nt, Human
aggcaauucgaaguugcagac

SEQ ID NO: 218621 - RNA, 22 nt, Human
gcugugcuuuugguagauccca

SEQ ID NO: 218622 - RNA, 22 nt, Human
caggcccugccuugagggaccu

SEQ ID NO: 218623 - RNA, 22 nt, Human
gaccacagcuacaagggcaagg

SEQ ID NO: 218624 - RNA, 22 nt, Human
auucuucauacagacaaguccu

SEQ ID NO: 218625 - RNA, 22 nt, Human
ugagccagugugguaaagcuga

SEQ ID NO: 218626 - RNA, 22 nt, Human
uaaccuacuaugauucugggaa

SEQ ID NO: 218627 - RNA, 22 nt, Human
agaggcaacauggggaacagau

SEQ ID NO: 218628 - RNA, 20 nt, Human
uaagaugagcuauaagaagu

SEQ ID NO: 218629 - RNA, 22 nt, Human
gccuugguuggccagcaggucc

SEQ ID NO: 218630 - RNA, 20 nt, Human
ggagcugcccugggcuggag

SEQ ID NO: 218631 - RNA, 22 nt, Human
gcaaacauucaggaguacagga

SEQ ID NO: 218632 - RNA, 22 nt, Human
ccugagcaaaggaaggaugacu

SEQ ID NO: 218633 - RNA, 22 nt, Human
uucaucuggaaguucccaaggc

SEQ ID NO: 218634 - RNA, 22 nt, Human
gcagcuuucuacuuccuacagc

SEQ ID NO: 218635 - RNA, 22 nt, Human
gacuugccugcacugagccuau

SEQ ID NO: 218636 - RNA, 22 nt, Human
uuuauucaagaugagguucaug

SEQ ID NO: 218637 - RNA, 22 nt, Human
ugggacuuguguggcaguauuu

SEQ ID NO: 218638 - RNA, 22 nt, Human
aucugggcagggcagcaaggcg

SEQ ID NO: 218639 - RNA, 22 nt, Human
cuacauuuguucaaauaagcug

SEQ ID NO: 218640 - RNA, 22 nt, Human
accuguuuaccugcaccuguuu

SEQ ID NO: 218641 - RNA, 22 nt, Human
ugucaugguauuugugagcugc

SEQ ID NO: 218642 - RNA, 20 nt, Human
uguauuacuuggucuuacaa

SEQ ID NO: 218643 - RNA, 22 nt, Human
uuuaaauguuuauagagaguac

SEQ ID NO: 218644 - RNA, 22 nt, Human
uuagcaaauaucuugaaacagg

SEQ ID NO: 218645 - RNA, 19 nt, Human
ucugggcagggccagcacc

SEQ ID NO: 218646 - RNA, 22 nt, Human
caugcuguccugccagggaugg

SEQ ID NO: 218647 - RNA, 23 nt, Human
aguucucauucaucacggccuau

SEQ ID NO: 218648 - RNA, 22 nt, Human
acaaaagugagugugucucaga

SEQ ID NO: 218649 - RNA, 18 nt, Human
auguacauuugcuaaagc

SEQ ID NO: 218650 - RNA, 22 nt, Human
uucuuggccaccagaucucacu

SEQ ID NO: 218651 - RNA, 22 nt, Human
aaauugcagaugcuaaaugacu

SEQ ID NO: 218652 - RNA, 22 nt, Human
cugggaggcacuauucaggagg

SEQ ID NO: 218653 - RNA, 22 nt, Human
ccugcaccugagcagccugacu

SEQ ID NO: 218654 - RNA, 22 nt, Human
gaggauggaggugugagcuaug

SEQ ID NO: 218655 - RNA, 22 nt, Human
gucccagggaugcagacaugag

SEQ ID NO: 218656 - RNA, 22 nt, Human
gcggggcacagugauggagcac

SEQ ID NO: 218657 - RNA, 22 nt, Human
uuccuucuggagcccggggagc

SEQ ID NO: 218658 - RNA, 22 nt, Human
ccagcugguuaaaauagagaaa

SEQ ID NO: 218659 - RNA, 22 nt, Human
agcuggggguagugagaaauaa

SEQ ID NO: 218660 - RNA, 22 nt, Human
ggcaggggugaggccacucuga

SEQ ID NO: 218661 - RNA, 22 nt, Human
uggccaguuugcucaggcaguc

SEQ ID NO: 218662 - RNA, 22 nt, Human
aggaaugugaggcaaguuguga

SEQ ID NO: 218663 - RNA, 22 nt, Human
ccucaagaacaauccaccauua

SEQ ID NO: 218664 - RNA, 22 nt, Human
uucauucccaagaguaaacaua

SEQ ID NO: 218665 - RNA, 20 nt, Human
aucuuuggcucagaagccuu

SEQ ID NO: 218666 - RNA, 22 nt, Human
uagaaauucaaugcucugagua

SEQ ID NO: 218667 - RNA, 22 nt, Human
ugagcagaguuguuucuccuga

SEQ ID NO: 218668 - RNA, 22 nt, Human
aaagacuaaacaaccaauaucu

SEQ ID NO: 218669 - RNA, 22 nt, Human
ggccuguguccuccuugcccug

SEQ ID NO: 218670 - RNA, 22 nt, Human
acagaauauuuggcaugcgucu

SEQ ID NO: 218671 - RNA, 22 nt, Human
gcacagccacguaaugugguca

SEQ ID NO: 218672 - RNA, 22 nt, Human
cauuuguuaauuacuauuaucu

SEQ ID NO: 218673 - RNA, 22 nt, Human
auuugcaagcaugcacaaaagc

SEQ ID NO: 218674 - RNA, 22 nt, Human
accuguuuagaaagcuuaugag

SEQ ID NO: 218675 - RNA, 22 nt, Human
cugaauuauuuaaggugaaggg

SEQ ID NO: 218676 - RNA, 22 nt, Human
agcccugcgugccaggggacug

SEQ ID NO: 218677 - RNA, 22 nt, Human
uaagcuggagcuucccccgucc

SEQ ID NO: 218678 - RNA, 22 nt, Human
cagagugaacagugggaugugc

SEQ ID NO: 218679 - RNA, 22 nt, Human
uaugacaaaugauauauuuggc

SEQ ID NO: 218680 - RNA, 22 nt, Human
cuggccugaggccgccuucaga

SEQ ID NO: 218681 - RNA, 22 nt, Human
uccagcccucuggcccgcggug

SEQ ID NO: 218682 - RNA, 21 nt, Human
uacacaaagcgugguccagag

SEQ ID NO: 218683 - RNA, 22 nt, Human
acuggcagcagcagcccuuggg

SEQ ID NO: 218684 - RNA, 22 nt, Human
uuuacuuguucugcugaauucu

SEQ ID NO: 218685 - RNA, 22 nt, Human
uuuccuacugcccuauacacac

SEQ ID NO: 218686 - RNA, 22 nt, Human
ucacuuuacuuuguuaaucugg

SEQ ID NO: 218687 - RNA, 22 nt, Human
acaggcacucucauuaaaauag

SEQ ID NO: 218688 - RNA, 22 nt, Human
ugggccaggcaugugaucagca

SEQ ID NO: 218689 - RNA, 22 nt, Human
ugggaggacuugugggcuucau

SEQ ID NO: 218690 - RNA, 22 nt, Human
gccagcuggagacuggcagggg

SEQ ID NO: 218691 - RNA, 22 nt, Human
cuggaggcuggcuuccccuggc

SEQ ID NO: 218692 - RNA, 21 nt, Human
gcugcagggcccagggcaccc

SEQ ID NO: 218693 - RNA, 22 nt, Human
uaaaguauaagcauuggaguau

SEQ ID NO: 218694 - RNA, 22 nt, Human
uagggcugcagaacaauggccu

SEQ ID NO: 218695 - RNA, 22 nt, Human
gcaccaggagaaucacguuaga

SEQ ID NO: 218696 - RNA, 22 nt, Human
gugcagcugagggccucuucua

SEQ ID NO: 218697 - RNA, 20 nt, Human
auucucugcucaaguggcac

SEQ ID NO: 218698 - RNA, 22 nt, Human
agguucucacacgucuacaccc

SEQ ID NO: 218699 - RNA, 22 nt, Human
gcuugggagaggcuuccucuuu

SEQ ID NO: 218700 - RNA, 22 nt, Human
agcugcuguccuaggcacugua

SEQ ID NO: 218701 - RNA, 22 nt, Human
agacacagaaguugcuguuggg

SEQ ID NO: 218702 - RNA, 20 nt, Human
uugggccugucagcacuccc

SEQ ID NO: 218703 - RNA, 22 nt, Human
aaaugagguuaauacagugcuu

SEQ ID NO: 218704 - RNA, 22 nt, Human
augucugcuuuccuuuuaauca

SEQ ID NO: 218705 - RNA, 22 nt, Human
cucaggcucuggccauccaagg

SEQ ID NO: 218706 - RNA, 22 nt, Human
ucacccuucccagcuguccgcc

SEQ ID NO: 218707 - RNA, 22 nt, Human
agggcacuggcuugcaaacuca

SEQ ID NO: 218708 - RNA, 22 nt, Human
acccugagucagacagccugac

SEQ ID NO: 218709 - RNA, 22 nt, Human
ucuuccuucgcccuugcuguuu

SEQ ID NO: 218710 - RNA, 22 nt, Human
ggagaagccaggugauaagcaa

SEQ ID NO: 218711 - RNA, 22 nt, Human
ccugggagccaagccucugugu

SEQ ID NO: 218712 - RNA, 22 nt, Human
uuaccacacuuauuuacauugg

SEQ ID NO: 218713 - RNA, 22 nt, Human
gcagcucaagagaggugcuaug

SEQ ID NO: 218714 - RNA, 22 nt, Human
auccaggguguggagagagcuc

SEQ ID NO: 218715 - RNA, 22 nt, Human
uugaaugaggaagagcacuggc

SEQ ID NO: 218716 - RNA, 22 nt, Human
uuucuucagccuucacaaccug

SEQ ID NO: 218717 - RNA, 22 nt, Human
uuugaaaauuuaagugcuacac

SEQ ID NO: 218718 - RNA, 22 nt, Human
cacagccuuuaggguacacaca

SEQ ID NO: 218719 - RNA, 22 nt, Human
auuucucacucacaguccaugu

SEQ ID NO: 218720 - RNA, 19 nt, Human
cuugaaacuacuguugaga

SEQ ID NO: 218721 - RNA, 22 nt, Human
agcaaagcaguggcuaagcuga

SEQ ID NO: 218722 - RNA, 22 nt, Human
cccaggguugccugccucugcu

SEQ ID NO: 218723 - RNA, 22 nt, Human
guucuggguucuggguuauugg

SEQ ID NO: 218724 - RNA, 22 nt, Human
aguaacaucuuugacauuuguu

SEQ ID NO: 218725 - RNA, 22 nt, Human
aaauauaauuucugccucaaua

SEQ ID NO: 218726 - RNA, 22 nt, Human
acucaggcuacaacgcguggcu

SEQ ID NO: 218727 - RNA, 22 nt, Human
ugccugccaaugaugcuugugu

SEQ ID NO: 218728 - RNA, 22 nt, Human
cugggcaguaugaauauucaaa

SEQ ID NO: 218729 - RNA, 22 nt, Human
guccugaaugccuuuaggcaga

SEQ ID NO: 218730 - RNA, 22 nt, Human
auacaugugugugcauacaugu

SEQ ID NO: 218731 - RNA, 22 nt, Human
gguaacaaggccgauagaaaca

SEQ ID NO: 218732 - RNA, 22 nt, Human
caaguggggcagauucucuucc

SEQ ID NO: 218733 - RNA, 22 nt, Human
gaacagagaagcuuuacuaaag

SEQ ID NO: 218734 - RNA, 18 nt, Human
gacagcuguccugagccc

SEQ ID NO: 218735 - RNA, 22 nt, Human
gagggcaguagccucguacccu

SEQ ID NO: 218736 - RNA, 22 nt, Human
ucuccuggccgggcuguccccu

SEQ ID NO: 218737 - RNA, 22 nt, Human
ccugguggacagcagccagcag

SEQ ID NO: 218738 - RNA, 22 nt, Human
ccagacaggaacacacaucucc

SEQ ID NO: 218739 - RNA, 22 nt, Human
acaacaguccaguauagacugu

SEQ ID NO: 218740 - RNA, 22 nt, Human
ucugugcagggaccccaagagu

SEQ ID NO: 218741 - RNA, 22 nt, Human
ccucuccuugcacccgucccgc

SEQ ID NO: 218742 - RNA, 22 nt, Human
cuuuggaaggaacaggauucuc

SEQ ID NO: 218743 - RNA, 22 nt, Human
auauaauuuuugguuagcucaa

SEQ ID NO: 218744 - RNA, 22 nt, Human
ccugggucccaucccagaguga

SEQ ID NO: 218745 - RNA, 22 nt, Human
aguccugaugcucuggcaggag

SEQ ID NO: 218746 - RNA, 22 nt, Human
aaggggauuuaagguaagaaga

SEQ ID NO: 218747 - RNA, 22 nt, Human
gcucccagggcagcgcagaaga

SEQ ID NO: 218748 - RNA, 22 nt, Human
cacauacaaugguguuauuugg

SEQ ID NO: 218749 - RNA, 22 nt, Human
caguuaaaggcccaauaucugg

SEQ ID NO: 218750 - RNA, 22 nt, Human
uuccuccagccuggagcacuuc

SEQ ID NO: 218751 - RNA, 22 nt, Human
uuacaaacaagaucuuauucuu

SEQ ID NO: 218752 - RNA, 22 nt, Human
cugcccugcagcuccacggacu

SEQ ID NO: 218753 - RNA, 22 nt, Human
uauuaaagagagaaucaucauc

SEQ ID NO: 218754 - RNA, 22 nt, Human
auuuacagaagcauguaauagc

SEQ ID NO: 218755 - RNA, 22 nt, Human
uauuucugauugcucaugaggc

SEQ ID NO: 218756 - RNA, 22 nt, Human
agggaagccccgaggaggcacc

SEQ ID NO: 218757 - RNA, 22 nt, Human
accgaaggaaacuggaaccguu

SEQ ID NO: 218758 - RNA, 22 nt, Human
ucaguuaagcacuauacccuaa

SEQ ID NO: 218759 - RNA, 22 nt, Human
uucuaauugaccuuaggcugug

SEQ ID NO: 218760 - RNA, 22 nt, Human
ugcacacauguuuacaagcauc

SEQ ID NO: 218761 - RNA, 22 nt, Human
cagacagagcucacaagucuuu

SEQ ID NO: 218762 - RNA, 22 nt, Human
auauuaggcaaggagauuauuu

SEQ ID NO: 218763 - RNA, 22 nt, Human
guguggccguguauccauggcu

SEQ ID NO: 218764 - RNA, 21 nt, Human
acugugcagccugaggaugug

SEQ ID NO: 218765 - RNA, 22 nt, Human
gaggccuggcugucagucccca

SEQ ID NO: 218766 - RNA, 22 nt, Human
acauuuguuucucuagaguagg

SEQ ID NO: 218767 - RNA, 22 nt, Human
gcagugaacauaacacagaagg

SEQ ID NO: 218768 - RNA, 22 nt, Human
uucaaacaaaacuguucccaua

SEQ ID NO: 218769 - RNA, 22 nt, Human
cuguccugaggcagguggccug

SEQ ID NO: 218770 - RNA, 22 nt, Human
ucagaaucugcauuuaacaaaa

SEQ ID NO: 218771 - RNA, 22 nt, Human
uagaaucuggaucugggcgcau

SEQ ID NO: 218772 - RNA, 22 nt, Human
gagcaagauuaaaaggcugggu

SEQ ID NO: 218773 - RNA, 22 nt, Human
ucagagucuaugcaacagaauu

SEQ ID NO: 218774 - RNA, 22 nt, Human
auucagcaaugagcuuggauuu

SEQ ID NO: 218775 - RNA, 22 nt, Human
agguauauugaaugcuuacuua

SEQ ID NO: 218776 - RNA, 22 nt, Human
ccuuuauucaauuaguccuaau

SEQ ID NO: 218777 - RNA, 22 nt, Human
ggccucucugagagcagacguu

SEQ ID NO: 218778 - RNA, 22 nt, Human
aaggugugaagagaugggaaga

SEQ ID NO: 218779 - RNA, 22 nt, Human
uguguucauguauguauacaua

SEQ ID NO: 218780 - RNA, 21 nt, Human
uuguuacaaugcaagaguaug

SEQ ID NO: 218781 - RNA, 22 nt, Human
uuccaggcuauccggugaaggg

SEQ ID NO: 218782 - RNA, 22 nt, Human
uuggaaagaccgaauuccuguu

SEQ ID NO: 218783 - RNA, 22 nt, Human
ucuggcuuucucagcauggcau

SEQ ID NO: 218784 - RNA, 22 nt, Human
ccaggaucugauauugggcucc

SEQ ID NO: 218785 - RNA, 22 nt, Human
accagaggcaguuucggcuggu

SEQ ID NO: 218786 - RNA, 22 nt, Human
ucagcagaguuucaucuuggga

SEQ ID NO: 218787 - RNA, 22 nt, Human
gagaagggauauggcuucuuga

SEQ ID NO: 218788 - RNA, 17 nt, Human
uuuacauugcucgcagu

SEQ ID NO: 218789 - RNA, 22 nt, Human
uuuacagaagagaaggaugcuu

SEQ ID NO: 218790 - RNA, 22 nt, Human
cauggccaggcacgcgcauagc

SEQ ID NO: 218791 - RNA, 22 nt, Human
aagagagggguugcauggaaau

SEQ ID NO: 218792 - RNA, 23 nt, Human
uggcucugagagguucagaugcu

SEQ ID NO: 218793 - RNA, 20 nt, Human
accagguggcugaugacacc

SEQ ID NO: 218794 - RNA, 22 nt, Human
ccucacaguuuggcuaacugug

SEQ ID NO: 218795 - RNA, 22 nt, Human
auuauucagucuuguaaggagu

SEQ ID NO: 218796 - RNA, 22 nt, Human
gaucuucucuuuaguagaaaca

SEQ ID NO: 218797 - RNA, 21 nt, Human
ucuguacaucauugagucccc

SEQ ID NO: 218798 - RNA, 22 nt, Human
ugacaagauagauugaguuuua

SEQ ID NO: 218799 - RNA, 22 nt, Human
agcccuugcagacugucagcau

SEQ ID NO: 218800 - RNA, 22 nt, Human
cagaagagaugaaauaguauua

SEQ ID NO: 218801 - RNA, 22 nt, Human
aauacaguaauuuugaugaguu

SEQ ID NO: 218802 - RNA, 22 nt, Human
auagaaacagggaagcaaagca

SEQ ID NO: 218803 - RNA, 22 nt, Human
aauggcaguaguugcaugagag

SEQ ID NO: 218804 - RNA, 22 nt, Human
uugccaucccuuaccucaguca

SEQ ID NO: 218805 - RNA, 22 nt, Human
uccauccauguaggaagauggu

SEQ ID NO: 218806 - RNA, 22 nt, Human
gccuguuuggcugcugacauug

SEQ ID NO: 218807 - RNA, 22 nt, Human
agcuuuauuugucauucacggc

SEQ ID NO: 218808 - RNA, 22 nt, Human
gguggggcugcaagcaguucgg

SEQ ID NO: 218809 - RNA, 22 nt, Human
cugagagaaacaugacucagga

SEQ ID NO: 218810 - RNA, 22 nt, Human
gaugaauucuggcuuggacaga

SEQ ID NO: 218811 - RNA, 22 nt, Human
ccaggaggggucucugucuccc

SEQ ID NO: 218812 - RNA, 22 nt, Human
acuguguugccuucccccagcc

SEQ ID NO: 218813 - RNA, 20 nt, Human
ccagagaguagguuagugau

SEQ ID NO: 218814 - RNA, 23 nt, Human
agagugcagagauaugcuugugu

SEQ ID NO: 218815 - RNA, 22 nt, Human
agucaguuuucuccagggggcu

SEQ ID NO: 218816 - RNA, 22 nt, Human
agauauacacccauaucacaua

SEQ ID NO: 218817 - RNA, 22 nt, Human
guaauagaugaaacaaugugga

SEQ ID NO: 218818 - RNA, 22 nt, Human
ccucgugugcuaggauccaggu

SEQ ID NO: 218819 - RNA, 22 nt, Human
ggcucuguggcuggccaugaug

SEQ ID NO: 218820 - RNA, 22 nt, Human
ucaaauacagaagauccuuucc

SEQ ID NO: 218821 - RNA, 22 nt, Human
caacuucuuggcuuccuaaugg

SEQ ID NO: 218822 - RNA, 22 nt, Human
aggcugagauagguggaucauu

SEQ ID NO: 218823 - RNA, 22 nt, Human
ccuucaggucauauaugucaga

SEQ ID NO: 218824 - RNA, 22 nt, Human
auggcccagacucagacuggug

SEQ ID NO: 218825 - RNA, 21 nt, Human
gggguuggcaagagcagagac

SEQ ID NO: 218826 - RNA, 22 nt, Human
agggcucagcaucucauucugu

SEQ ID NO: 218827 - RNA, 22 nt, Human
ggccaccaaaguccuguggcuu

SEQ ID NO: 218828 - RNA, 22 nt, Human
ccccagggaagcuuugcuuacu

SEQ ID NO: 218829 - RNA, 22 nt, Human
ucaggcucaaagggccggauga

SEQ ID NO: 218830 - RNA, 21 nt, Human
agacaggucagggagagguga

SEQ ID NO: 218831 - RNA, 22 nt, Human
ccuguucauuuguauuugucuu

SEQ ID NO: 218832 - RNA, 22 nt, Human
ggcuccugggcagcugcucccu

SEQ ID NO: 218833 - RNA, 22 nt, Human
uccuggccucgcuguccaccuu

SEQ ID NO: 218834 - RNA, 22 nt, Human
cucugggaaagauugugcaggc

SEQ ID NO: 218835 - RNA, 22 nt, Human
uugauucuacuuaaaacauaug

SEQ ID NO: 218836 - RNA, 22 nt, Human
cugucccauccuuacucuaccc

SEQ ID NO: 218837 - RNA, 22 nt, Human
cuccucccucuuugccacacau

SEQ ID NO: 218838 - RNA, 22 nt, Human
agauauuuguaucuugcuauug

SEQ ID NO: 218839 - RNA, 19 nt, Human
agggauauuuaaaaagcuc

SEQ ID NO: 218840 - RNA, 19 nt, Human
gcuuccagcacugcaggag

SEQ ID NO: 218841 - RNA, 21 nt, Human
auauuuuuguuuggacuguca

SEQ ID NO: 218842 - RNA, 22 nt, Human
guuccguuuauaugcuggauua

SEQ ID NO: 218843 - RNA, 22 nt, Human
uucuuguuuauuaagauauaaa

SEQ ID NO: 218844 - RNA, 20 nt, Human
ucaaccuacugugcucaagu

SEQ ID NO: 218845 - RNA, 22 nt, Human
auccauuucaguguuccacuug

SEQ ID NO: 218846 - RNA, 22 nt, Human
caccaggcugagccucucaucu

SEQ ID NO: 218847 - RNA, 22 nt, Human
ugucaaauuuuuauugcaguau

SEQ ID NO: 218848 - RNA, 23 nt, Human
gcagccaagagaccagggcaggc

SEQ ID NO: 218849 - RNA, 22 nt, Human
acacacuucacccuugagcuaa

SEQ ID NO: 218850 - RNA, 22 nt, Human
agggaugauuucagugucugcc

SEQ ID NO: 218851 - RNA, 20 nt, Human
gggagucuggaugaaagaug

SEQ ID NO: 218852 - RNA, 22 nt, Human
uggaagggguuacgcagcagga

SEQ ID NO: 218853 - RNA, 22 nt, Human
agaauaauacugaaaugcugaa

SEQ ID NO: 218854 - RNA, 22 nt, Human
cugcaucugcauaaucaacuuc

SEQ ID NO: 218855 - RNA, 22 nt, Human
uggagaugaacauggugauguu

SEQ ID NO: 218856 - RNA, 23 nt, Human
gccaggcacaugguggacacgca

SEQ ID NO: 218857 - RNA, 22 nt, Human
aggcucagagagcuguguccau

SEQ ID NO: 218858 - RNA, 22 nt, Human
cucuagaagcugaggggcccaa

SEQ ID NO: 218859 - RNA, 22 nt, Human
agcaccugugcccugauggaga

SEQ ID NO: 218860 - RNA, 22 nt, Human
ggucugagauauuuguucagcu

SEQ ID NO: 218861 - RNA, 22 nt, Human
ucucuggcugauauuccucugc

SEQ ID NO: 218862 - RNA, 22 nt, Human
cgggguccgggcaguaggcugc

SEQ ID NO: 218863 - RNA, 22 nt, Human
acaugcuuuucccacaauuaua

SEQ ID NO: 218864 - RNA, 22 nt, Human
uuacagaggcuuccagggccca

SEQ ID NO: 218865 - RNA, 22 nt, Human
ucuucagagugaaagucuguga

SEQ ID NO: 218866 - RNA, 22 nt, Human
uagguacauuauuagaugcaug

SEQ ID NO: 218867 - RNA, 22 nt, Human
agaauccuggccaggucagagc

SEQ ID NO: 218868 - RNA, 22 nt, Human
guugggccccagagguccaggc

SEQ ID NO: 218869 - RNA, 22 nt, Human
acuuuagaaguaaggaugaguu

SEQ ID NO: 218870 - RNA, 22 nt, Human
ucuaggguguauaaggaagccu

SEQ ID NO: 218871 - RNA, 22 nt, Human
uacacaucaaccuggcuuuggc

SEQ ID NO: 218872 - RNA, 22 nt, Human
ucucagagauucagggagaagu

SEQ ID NO: 218873 - RNA, 22 nt, Human
aaggaaacacugaacuuuguag

SEQ ID NO: 218874 - RNA, 22 nt, Human
uagcccagagucccaauuccag

SEQ ID NO: 218875 - RNA, 22 nt, Human
aucuaggauuugaaugcacagu

SEQ ID NO: 218876 - RNA, 22 nt, Human
uuugcagagugcagaagcaucu

SEQ ID NO: 218877 - RNA, 22 nt, Human
aaacagaaauuuccucaugcuc

SEQ ID NO: 218878 - RNA, 22 nt, Human
guccaggagcucagggcuuauu

SEQ ID NO: 218879 - RNA, 22 nt, Human
ccuggcaggcuggggacagugc

SEQ ID NO: 218880 - RNA, 20 nt, Human
agcaccuguguagaagcauc

SEQ ID NO: 218881 - RNA, 22 nt, Human
acaguucacuuuuuauaucaaa

SEQ ID NO: 218882 - RNA, 22 nt, Human
gaagaacgucuuauaaauucac

SEQ ID NO: 218883 - RNA, 21 nt, Human
ggcaggauggcaguggacccc

SEQ ID NO: 218884 - RNA, 22 nt, Human
aaggaagacuugagaagguucc

SEQ ID NO: 218885 - RNA, 22 nt, Human
caaagcagagaacugucucauu

SEQ ID NO: 218886 - RNA, 23 nt, Human
ggagaggggugugggcaucuuua

SEQ ID NO: 218887 - RNA, 22 nt, Human
aauuucaaagcucacuggcaua

SEQ ID NO: 218888 - RNA, 22 nt, Human
agagaugcuguggguagaggca

SEQ ID NO: 218889 - RNA, 22 nt, Human
augaaagaugauuuaaaguacu

SEQ ID NO: 218890 - RNA, 22 nt, Human
ugaagccagucaauguuaaguu

SEQ ID NO: 218891 - RNA, 22 nt, Human
caucuuuaauuugugacaacua

SEQ ID NO: 218892 - RNA, 22 nt, Human
ucacagaauugacaugggaauc

SEQ ID NO: 218893 - RNA, 22 nt, Human
uccaggccacgaccuccuggau

SEQ ID NO: 218894 - RNA, 22 nt, Human
gggcuuggcuggggccaccaga

SEQ ID NO: 218895 - RNA, 22 nt, Human
cagagggcacaugguuuccuca

SEQ ID NO: 218896 - RNA, 22 nt, Human
cucaggauguacuacagaaggc

SEQ ID NO: 218897 - RNA, 22 nt, Human
agaggugacauaggagaggcuc

SEQ ID NO: 218898 - RNA, 21 nt, Human
agggcagauuagcuguaagag

SEQ ID NO: 218899 - RNA, 17 nt, Human
ggaaggucaaggggagg

SEQ ID NO: 218900 - RNA, 22 nt, Human
agguccaggccucaugauggcc

SEQ ID NO: 218901 - RNA, 22 nt, Human
ggaggggucucuagcgaggaga

SEQ ID NO: 218902 - RNA, 22 nt, Human
agccagaggaagccuggcccuc

SEQ ID NO: 218903 - RNA, 22 nt, Human
agucuuuccuuuuggaagaaaa

SEQ ID NO: 218904 - RNA, 22 nt, Human
uuaaauugucauuugagcaaug

SEQ ID NO: 218905 - RNA, 22 nt, Human
ccagaagcagagccugaggcag

SEQ ID NO: 218906 - RNA, 20 nt, Human
ugcagguguguccaagcacu

SEQ ID NO: 218907 - RNA, 22 nt, Human
ugccugucuuggaguccuggcc

SEQ ID NO: 218908 - RNA, 22 nt, Human
caggaagcaccagcccggcccc

SEQ ID NO: 218909 - RNA, 22 nt, Human
ugccagagaagacccagucacu

SEQ ID NO: 218910 - RNA, 22 nt, Human
gggcuucucagagaggcuuuag

SEQ ID NO: 218911 - RNA, 22 nt, Human
ucagugcaggaauuuccuuaga

SEQ ID NO: 218912 - RNA, 22 nt, Human
uggcucuguucgccaucaggag

SEQ ID NO: 218913 - RNA, 21 nt, Human
uuugaaagugggugauucuuu

SEQ ID NO: 218914 - RNA, 22 nt, Human
aggaauguuaagaaggucuacc

SEQ ID NO: 218915 - RNA, 22 nt, Human
gacaaggaaauuacuagcugga

SEQ ID NO: 218916 - RNA, 22 nt, Human
gccugcugccacccuggcuccg

SEQ ID NO: 218917 - RNA, 22 nt, Human
acugccuucaugcagaccccug

SEQ ID NO: 218918 - RNA, 22 nt, Human
ugagcuuacgugggaacagacu

SEQ ID NO: 218919 - RNA, 21 nt, Human
ugcagaaaugguuuuucuaag

SEQ ID NO: 218920 - RNA, 22 nt, Human
uuggcaaaauuuaaagaaguga

SEQ ID NO: 218921 - RNA, 22 nt, Human
cagguggucaggcaaggacacg

SEQ ID NO: 218922 - RNA, 22 nt, Human
uggaccagcagccccagugccu

SEQ ID NO: 218923 - RNA, 22 nt, Human
ucucaggcaucuguguggcaca

SEQ ID NO: 218924 - RNA, 22 nt, Human
gcaugcaguaaaauucagcaac

SEQ ID NO: 218925 - RNA, 22 nt, Human
ucugggugucacuccugccugc

SEQ ID NO: 218926 - RNA, 20 nt, Human
ugcuuccuggccacugcggg

SEQ ID NO: 218927 - RNA, 22 nt, Human
aauguucagaggacaauauaaa

SEQ ID NO: 218928 - RNA, 22 nt, Human
cugcccaggggagugcugucgg

SEQ ID NO: 218929 - RNA, 22 nt, Human
acuucuauuggucaugauaaaa

SEQ ID NO: 218930 - RNA, 23 nt, Human
agggaaaguaguaauggccuuug

SEQ ID NO: 218931 - RNA, 22 nt, Human
agguaggauggguggagaugau

SEQ ID NO: 218932 - RNA, 22 nt, Human
cugccuggccacaacccagggu

SEQ ID NO: 218933 - RNA, 22 nt, Human
auuagggaaacugacuugucuc

SEQ ID NO: 218934 - RNA, 22 nt, Human
cacagacagugucccuuuguug

SEQ ID NO: 218935 - RNA, 22 nt, Human
acacugaaugcuguuuagaaau

SEQ ID NO: 218936 - RNA, 22 nt, Human
aguacaauuuaaugaagauagc

SEQ ID NO: 218937 - RNA, 21 nt, Human
ccuaggaggcuuaauuaggcu

SEQ ID NO: 218938 - RNA, 22 nt, Human
uuuauauauggcuggucuggau

SEQ ID NO: 218939 - RNA, 22 nt, Human
ugacacauaccgaaaauauuug

SEQ ID NO: 218940 - RNA, 22 nt, Human
gugcuuuaaaccacugugcugu

SEQ ID NO: 218941 - RNA, 22 nt, Human
gaguccuugacacauaguaggu

SEQ ID NO: 218942 - RNA, 22 nt, Human
uggcagaggaggcucagauuga

SEQ ID NO: 218943 - RNA, 22 nt, Human
gccagguugcugacgacgaucu

SEQ ID NO: 218944 - RNA, 22 nt, Human
agaccacuaaaacuuucucuau

SEQ ID NO: 218945 - RNA, 22 nt, Human
aggcaccuugagagcaggagcu

SEQ ID NO: 218946 - RNA, 22 nt, Human
ggcuuugggcccucaagucucc

SEQ ID NO: 218947 - RNA, 22 nt, Human
gcuucauuuugcccucuggugg

SEQ ID NO: 218948 - RNA, 22 nt, Human
uggguucuagagggaccagaac

SEQ ID NO: 218949 - RNA, 22 nt, Human
cucaggcugugaugugauggca

SEQ ID NO: 218950 - RNA, 22 nt, Human
ucccuucaagauuuggggaaau

SEQ ID NO: 218951 - RNA, 22 nt, Human
ccccagcacaggcuccucagau

SEQ ID NO: 218952 - RNA, 22 nt, Human
ugagguggaaggauccuuugaa

SEQ ID NO: 218953 - RNA, 22 nt, Human
ucuuauugguaaugauggcauu

SEQ ID NO: 218954 - RNA, 20 nt, Human
ggcagccaaucagcgugccg

SEQ ID NO: 218955 - RNA, 22 nt, Human
gcaaagcagucuucugugccua

SEQ ID NO: 218956 - RNA, 22 nt, Human
ccucuuugagauucaguuuucc

SEQ ID NO: 218957 - RNA, 22 nt, Human
gggaaacuuucacaauguccag

SEQ ID NO: 218958 - RNA, 22 nt, Human
cauuuaaucuggcucaugagca

SEQ ID NO: 218959 - RNA, 22 nt, Human
gccugagaaggacacagcaggu

SEQ ID NO: 218960 - RNA, 18 nt, Human
ugaacuggcaucagaauc

SEQ ID NO: 218961 - RNA, 22 nt, Human
ccucuucucaacuccagccaga

SEQ ID NO: 218962 - RNA, 22 nt, Human
uaaugaugcaguuacugucuca

SEQ ID NO: 218963 - RNA, 22 nt, Human
agggccuguccgcucccgcccg

SEQ ID NO: 218964 - RNA, 22 nt, Human
ugcccucagcagcagcuccugc

SEQ ID NO: 218965 - RNA, 22 nt, Human
gggcucagaggaguggccuggg

SEQ ID NO: 218966 - RNA, 22 nt, Human
aacugucugaaacugggguuuc

SEQ ID NO: 218967 - RNA, 22 nt, Human
uguuugaacugaauaacauagu

SEQ ID NO: 218968 - RNA, 22 nt, Human
aagacaagcaucaaaucaggca

SEQ ID NO: 218969 - RNA, 22 nt, Human
aggcuucccagcugagcucagc

SEQ ID NO: 218970 - RNA, 22 nt, Human
uggguccagugcagcugcgcgu

SEQ ID NO: 218971 - RNA, 22 nt, Human
ucagaggugguaaaggacagca

SEQ ID NO: 218972 - RNA, 22 nt, Human
aaggcagcacagcaacugcuca

SEQ ID NO: 218973 - RNA, 21 nt, Human
ggaagcaguggcggcaacucc

SEQ ID NO: 218974 - RNA, 22 nt, Human
gagaggccugggcccgugagcu

SEQ ID NO: 218975 - RNA, 22 nt, Human
guuuacaacaugccaacugggc

SEQ ID NO: 218976 - RNA, 22 nt, Human
cuguuguauuauucaauauuau

SEQ ID NO: 218977 - RNA, 22 nt, Human
gaggcuccgguaguagccuuga

SEQ ID NO: 218978 - RNA, 22 nt, Human
cagauggauuuuguaggcugau

SEQ ID NO: 218979 - RNA, 22 nt, Human
aucuguggauaugcacagagca

SEQ ID NO: 218980 - RNA, 22 nt, Human
ucucauuggaaaagaguuuaau

SEQ ID NO: 218981 - RNA, 22 nt, Human
aagucuaguauccuucuugacu

SEQ ID NO: 218982 - RNA, 22 nt, Human
aguggcagagaccccagccagc

SEQ ID NO: 218983 - RNA, 22 nt, Human
ucuaaacacuaagucuugaugc

SEQ ID NO: 218984 - RNA, 23 nt, Human
cugggcugcuugagucccuggcu

SEQ ID NO: 218985 - RNA, 22 nt, Human
ugcagcccaggcgucagguggu

SEQ ID NO: 218986 - RNA, 22 nt, Human
gagcuggggcggauacucagcu

SEQ ID NO: 218987 - RNA, 22 nt, Human
ccuggcugacagcuuaauucca

SEQ ID NO: 218988 - RNA, 22 nt, Human
agaggauguucuaggcacucau

SEQ ID NO: 218989 - RNA, 22 nt, Human
gcaggugaugugaugugagcau

SEQ ID NO: 218990 - RNA, 22 nt, Human
guucuucagcccucagguccua

SEQ ID NO: 218991 - RNA, 22 nt, Human
guccugugcccuggguggcgcu

SEQ ID NO: 218992 - RNA, 22 nt, Human
uggaggaaaauuacuggggucu

SEQ ID NO: 218993 - RNA, 22 nt, Human
caucuugaagguuucuuuagcu

SEQ ID NO: 218994 - RNA, 22 nt, Human
ucaggugucaagcagggagcug

SEQ ID NO: 218995 - RNA, 22 nt, Human
agugcauguaucuacagucaca

SEQ ID NO: 218996 - RNA, 22 nt, Human
guggcuucuucugccagaagga

SEQ ID NO: 218997 - RNA, 22 nt, Human
ggcuuccagcugggccuuggag

SEQ ID NO: 218998 - RNA, 22 nt, Human
cuccagugcccuccuugggggc

SEQ ID NO: 218999 - RNA, 22 nt, Human
auaagcugaauagucaacacaa

SEQ ID NO: 219000 - RNA, 22 nt, Human
gagucaggcaugaagguaauua

SEQ ID NO: 219001 - RNA, 22 nt, Human
uggcacagcccagagcucuuga

SEQ ID NO: 219002 - RNA, 22 nt, Human
uggaugagucugagauugggca

SEQ ID NO: 219003 - RNA, 22 nt, Human
uaggacauguguuuuauauaug

SEQ ID NO: 219004 - RNA, 22 nt, Human
ugggggacugcacuggcgucag

SEQ ID NO: 219005 - RNA, 22 nt, Human
uucugggcaggacuggggaccc

SEQ ID NO: 219006 - RNA, 22 nt, Human
gcacagacauauccauauuuac

SEQ ID NO: 219007 - RNA, 22 nt, Human
agccaggccagacucacacccu

SEQ ID NO: 219008 - RNA, 22 nt, Human
ugauggcuuauggagagagcaa

SEQ ID NO: 219009 - RNA, 23 nt, Human
agcagcagcaauuaaguggauau

SEQ ID NO: 219010 - RNA, 22 nt, Human
gacauuuacugaauacugauua

SEQ ID NO: 219011 - RNA, 22 nt, Human
gcugccuccaaucugugccccg

SEQ ID NO: 219012 - RNA, 22 nt, Human
uugcuuuaccugugguauauuu

SEQ ID NO: 219013 - RNA, 22 nt, Human
caacacauugaagcuaugauga

SEQ ID NO: 219014 - RNA, 22 nt, Human
aggugacaucccggcagcagag

SEQ ID NO: 219015 - RNA, 22 nt, Human
aagacagugugucaggcaggug

SEQ ID NO: 219016 - RNA, 22 nt, Human
cugcuccagacaccugcagggg

SEQ ID NO: 219017 - RNA, 22 nt, Human
ugcugggcacugucuagguacu

SEQ ID NO: 219018 - RNA, 22 nt, Human
ugaggccugcccuggggaaguu

SEQ ID NO: 219019 - RNA, 22 nt, Human
aggcacaagaaacugcucccca

SEQ ID NO: 219020 - RNA, 22 nt, Human
agcaugcaguaaguacccugug

SEQ ID NO: 219021 - RNA, 22 nt, Human
aucagugcugagagacuaucaa

SEQ ID NO: 219022 - RNA, 22 nt, Human
aguguuuaccccaaucaguuua

SEQ ID NO: 219023 - RNA, 22 nt, Human
aagaggcagcccgcugaggcug

SEQ ID NO: 219024 - RNA, 22 nt, Human
caaggccaguccauuuuggaag

SEQ ID NO: 219025 - RNA, 22 nt, Human
aaaugucaaagacguguuuuug

SEQ ID NO: 219026 - RNA, 22 nt, Human
cugaagggucuggggcugugcc

SEQ ID NO: 219027 - RNA, 22 nt, Human
aggacagcccccaacagcaaca

SEQ ID NO: 219028 - RNA, 22 nt, Human
aaaagcaguuuauagucaguug

SEQ ID NO: 219029 - RNA, 22 nt, Human
ucuuccugaaacccuguuccag

SEQ ID NO: 219030 - RNA, 22 nt, Human
uucuacaugagaaaauguauuu

SEQ ID NO: 219031 - RNA, 22 nt, Human
agagaggucucaggagaaacca

SEQ ID NO: 219032 - RNA, 22 nt, Human
uauuccuauuucuaaacauaug

SEQ ID NO: 219033 - RNA, 19 nt, Human
uccauaaugaagauagagg

SEQ ID NO: 219034 - RNA, 22 nt, Human
aggcagguguuaacccucugag

SEQ ID NO: 219035 - RNA, 22 nt, Human
agggcacaucugcugggaaugg

SEQ ID NO: 219036 - RNA, 21 nt, Human
ucccagggccaggugccauca

SEQ ID NO: 219037 - RNA, 22 nt, Human
cacugagaggucucauuuccaa

SEQ ID NO: 219038 - RNA, 22 nt, Human
uaacacagacagccacuaguaa

SEQ ID NO: 219039 - RNA, 22 nt, Human
acaguauauauagucuaaaagc

SEQ ID NO: 219040 - RNA, 22 nt, Human
cugugaccuuagcaagggaaau

SEQ ID NO: 219041 - RNA, 22 nt, Human
gccaaaguaccuagcccucugc

SEQ ID NO: 219042 - RNA, 22 nt, Human
caaaugcaggucauaaccugag

SEQ ID NO: 219043 - RNA, 22 nt, Human
gagcccugaacaacagcaggaa

SEQ ID NO: 219044 - RNA, 22 nt, Human
agagggaaugugauugcaccau

SEQ ID NO: 219045 - RNA, 22 nt, Human
ugcuggggcucugaccacucca

SEQ ID NO: 219046 - RNA, 22 nt, Human
gcacuauagcugcagcacagag

SEQ ID NO: 219047 - RNA, 18 nt, Human
uccugggaaaggcauaca

SEQ ID NO: 219048 - RNA, 19 nt, Human
gcccucaggcagcuccauc

SEQ ID NO: 219049 - RNA, 20 nt, Human
uuggucagugguucaguuug

SEQ ID NO: 219050 - RNA, 22 nt, Human
aaauaaguaguuuaguguugug

SEQ ID NO: 219051 - RNA, 22 nt, Human
gagcccugagaguugugaggcc

SEQ ID NO: 219052 - RNA, 22 nt, Human
cugggagauaugaggaucugga

SEQ ID NO: 219053 - RNA, 22 nt, Human
uaaggaaugcuugaauguuccu

SEQ ID NO: 219054 - RNA, 22 nt, Human
uaaaauguguuucuguaugguu

SEQ ID NO: 219055 - RNA, 22 nt, Human
uugacaggagccaaaauaggau

SEQ ID NO: 219056 - RNA, 22 nt, Human
agagcagccucagcucccugug

SEQ ID NO: 219057 - RNA, 23 nt, Human
cucuggguccgauguccugacag

SEQ ID NO: 219058 - RNA, 22 nt, Human
cagggcugagaauuuagagaca

SEQ ID NO: 219059 - RNA, 22 nt, Human
gcacuuuaaauguucacggaaa

SEQ ID NO: 219060 - RNA, 22 nt, Human
gauggcagucaaccaggugagg

SEQ ID NO: 219061 - RNA, 22 nt, Human
gucaggccaauacucuccagca

SEQ ID NO: 219062 - RNA, 22 nt, Human
cauguacaaggaugcucagagu

SEQ ID NO: 219063 - RNA, 22 nt, Human
cugccugcuuaccaugcaucag

SEQ ID NO: 219064 - RNA, 22 nt, Human
uucugagaugcguuagaaauuu

SEQ ID NO: 219065 - RNA, 22 nt, Human
ugggagcaagcuacuuagggaa

SEQ ID NO: 219066 - RNA, 22 nt, Human
cagcuuuuuagaaucuagggca

SEQ ID NO: 219067 - RNA, 22 nt, Human
ucucagggcagcaaggaagcau

SEQ ID NO: 219068 - RNA, 22 nt, Human
cccagugucugggccugcaggg

SEQ ID NO: 219069 - RNA, 22 nt, Human
gcacaguugugacaaccaucgc

SEQ ID NO: 219070 - RNA, 22 nt, Human
acacugugacaaaggcuguucu

SEQ ID NO: 219071 - RNA, 22 nt, Human
agcuggucugcugcauggagug

SEQ ID NO: 219072 - RNA, 22 nt, Human
acuccugguuuguguccuggcu

SEQ ID NO: 219073 - RNA, 22 nt, Human
gcaagcaguuguggcuucugag

SEQ ID NO: 219074 - RNA, 20 nt, Human
ucuguuauugcauguacaua

SEQ ID NO: 219075 - RNA, 22 nt, Human
gaggcucacuuucauccucuuc

SEQ ID NO: 219076 - RNA, 22 nt, Human
ggccuuccaucugccucuguuu

SEQ ID NO: 219077 - RNA, 19 nt, Human
ugggaaaguaacauacaaa

SEQ ID NO: 219078 - RNA, 22 nt, Human
ccaggugucauggauaaugggu

SEQ ID NO: 219079 - RNA, 22 nt, Human
uagaacugcucucauacuugcu

SEQ ID NO: 219080 - RNA, 22 nt, Human
ggcagcugagaucaugcuguug

SEQ ID NO: 219081 - RNA, 22 nt, Human
uugccuggauucuaccacagaa

SEQ ID NO: 219082 - RNA, 22 nt, Human
ugaguauuuucccuaucaaugu

SEQ ID NO: 219083 - RNA, 23 nt, Human
agcugaaagcuugcaacgaggca

SEQ ID NO: 219084 - RNA, 22 nt, Human
agcaugcacaugacuggcuuaa

SEQ ID NO: 219085 - RNA, 22 nt, Human
cagagggagcccuccaggagca

SEQ ID NO: 219086 - RNA, 22 nt, Human
acagaauaacucuugcuugagu

SEQ ID NO: 219087 - RNA, 22 nt, Human
agaagaauuucucucaugauuu

SEQ ID NO: 219088 - RNA, 19 nt, Human
uuucuuuuccccucagcac

SEQ ID NO: 219089 - RNA, 21 nt, Human
cccaccccauaaggcagaacc

SEQ ID NO: 219090 - RNA, 22 nt, Human
agcuggcccacuguguggucca

SEQ ID NO: 219091 - RNA, 22 nt, Human
acuggcagggggagccccgaga

SEQ ID NO: 219092 - RNA, 22 nt, Human
auuuugcacacuaugcagcuuu

SEQ ID NO: 219093 - RNA, 22 nt, Human
aguggcugguaguuacugagca

SEQ ID NO: 219094 - RNA, 22 nt, Human
gcucagggagagagggcagccg

SEQ ID NO: 219095 - RNA, 22 nt, Human
ucuuagaaaugaaguucuuucu

SEQ ID NO: 219096 - RNA, 22 nt, Human
ggcuggguuugacuccuggcuu

SEQ ID NO: 219097 - RNA, 22 nt, Human
gaugagugauguugaagaaggu

SEQ ID NO: 219098 - RNA, 22 nt, Human
ugcauaacuagaguaauuacag

SEQ ID NO: 219099 - RNA, 22 nt, Human
ucagagcaugugggcugcaguu

SEQ ID NO: 219100 - RNA, 22 nt, Human
uuugcugugggauauccaugug

SEQ ID NO: 219101 - RNA, 22 nt, Human
ucccaggcaggugacaggggga

SEQ ID NO: 219102 - RNA, 22 nt, Human
auuucuuaugaauauugacugu

SEQ ID NO: 219103 - RNA, 22 nt, Human
auuuaugauuagccuauuguug

SEQ ID NO: 219104 - RNA, 22 nt, Human
cuggaaguauaggggagaugau

SEQ ID NO: 219105 - RNA, 22 nt, Human
gcaggggaguggcaggcccgga

SEQ ID NO: 219106 - RNA, 22 nt, Human
caguuuuaaauuuugaaugucu

SEQ ID NO: 219107 - RNA, 22 nt, Human
aggcagagaaaaaccagauaug

SEQ ID NO: 219108 - RNA, 22 nt, Human
gccuggagcucuccacuugggg

SEQ ID NO: 219109 - RNA, 22 nt, Human
ccagcugugccggggaccuggg

SEQ ID NO: 219110 - RNA, 22 nt, Human
gaaaagaacugcaugggauuaa

SEQ ID NO: 219111 - RNA, 22 nt, Human
aaauaguuagcccugcauauau

SEQ ID NO: 219112 - RNA, 22 nt, Human
aaacaggcuuauauuuugcucu

SEQ ID NO: 219113 - RNA, 22 nt, Human
cugcuggcccccauuucagggu

SEQ ID NO: 219114 - RNA, 22 nt, Human
uaaggcagugagaagaaacagg

SEQ ID NO: 219115 - RNA, 22 nt, Human
uugaaagaacucuucagagaua

SEQ ID NO: 219116 - RNA, 22 nt, Human
cccagagcugagggggcacguu

SEQ ID NO: 219117 - RNA, 22 nt, Human
gggaucuuucugaugcuguggc

SEQ ID NO: 219118 - RNA, 22 nt, Human
augaggcagagggcugugccag

SEQ ID NO: 219119 - RNA, 22 nt, Human
caucaucucuggcccuugaagu

SEQ ID NO: 219120 - RNA, 22 nt, Human
uuuauauccaucuuugaaguaa

SEQ ID NO: 219121 - RNA, 22 nt, Human
cuuuucaugccagcccaucaca

SEQ ID NO: 219122 - RNA, 22 nt, Human
cuuuggaaugcacagaggugua

SEQ ID NO: 219123 - RNA, 22 nt, Human
cacuugaaguuugggggacucu

SEQ ID NO: 219124 - RNA, 23 nt, Human
aguacauucgaaaaauucuguga

SEQ ID NO: 219125 - RNA, 22 nt, Human
uggcuucugggguggccugcau

SEQ ID NO: 219126 - RNA, 18 nt, Human
agcaacagaaacauaugg

SEQ ID NO: 219127 - RNA, 22 nt, Human
acagucuacuaaacaucaucag

SEQ ID NO: 219128 - RNA, 22 nt, Human
uucauguucauauguguauauc

SEQ ID NO: 219129 - RNA, 22 nt, Human
ggagagucugccgagccagccc

SEQ ID NO: 219130 - RNA, 22 nt, Human
ccuggcucugcgugcagcuccg

SEQ ID NO: 219131 - RNA, 22 nt, Human
cuggugcacguggcugcagucg

SEQ ID NO: 219132 - RNA, 22 nt, Human
aauucaacagucaguuaucuca

SEQ ID NO: 219133 - RNA, 22 nt, Human
cuuuggcuugcacuauuacacu

SEQ ID NO: 219134 - RNA, 22 nt, Human
cacacaggaaaauuggaauuaa

SEQ ID NO: 219135 - RNA, 22 nt, Human
augugcauaaacauauuguugg

SEQ ID NO: 219136 - RNA, 22 nt, Human
cacugucuugauuacuaugggu

SEQ ID NO: 219137 - RNA, 22 nt, Human
agggccaguauuaagguaauua

SEQ ID NO: 219138 - RNA, 22 nt, Human
uacaggugcucuacagacagga

SEQ ID NO: 219139 - RNA, 22 nt, Human
ccagcuccacugucagaugaga

SEQ ID NO: 219140 - RNA, 22 nt, Human
augcacaucuuacagaugcaga

SEQ ID NO: 219141 - RNA, 19 nt, Human
auuucaagagguuuauugg

SEQ ID NO: 219142 - RNA, 19 nt, Human
cucaccuggaggugcugau

SEQ ID NO: 219143 - RNA, 20 nt, Human
acuuuacagagaagacugac

SEQ ID NO: 219144 - RNA, 21 nt, Human
ucugucuuccucagccuaagg

SEQ ID NO: 219145 - RNA, 22 nt, Human
cuguuuaucuaggaguugcagg

SEQ ID NO: 219146 - RNA, 22 nt, Human
ucuuugauuuuguuacuaagac

SEQ ID NO: 219147 - RNA, 22 nt, Human
guccaggaaucaaaagauggaa

SEQ ID NO: 219148 - RNA, 22 nt, Human
uggcuggaggguuagugagaua

SEQ ID NO: 219149 - RNA, 19 nt, Human
agccagaguggcccagggg

SEQ ID NO: 219150 - RNA, 22 nt, Human
guuauacauauguguuaacaaa

SEQ ID NO: 219151 - RNA, 22 nt, Human
auacaaagacaaaucucaaucu

SEQ ID NO: 219152 - RNA, 22 nt, Human
accagccuccuagcugcuccug

SEQ ID NO: 219153 - RNA, 22 nt, Human
gccugccuagaauugcagcuuu

SEQ ID NO: 219154 - RNA, 22 nt, Human
aggaugaggcuggcaggucuug

SEQ ID NO: 219155 - RNA, 22 nt, Human
uggcucagaacuacuucuaguu

SEQ ID NO: 219156 - RNA, 22 nt, Human
cuuccuuccacaccuucagaau

SEQ ID NO: 219157 - RNA, 22 nt, Human
uuguacaguuuaagugggugaa

SEQ ID NO: 219158 - RNA, 22 nt, Human
uaccugcacagccagccaugug

SEQ ID NO: 219159 - RNA, 22 nt, Human
guucauucugaaaagcagcuug

SEQ ID NO: 219160 - RNA, 22 nt, Human
ucuaaacauugguauggagcag

SEQ ID NO: 219161 - RNA, 22 nt, Human
uuucaacaucaccuagcaguuc

SEQ ID NO: 219162 - RNA, 22 nt, Human
ucaaaugcaccucucauuuguu

SEQ ID NO: 219163 - RNA, 22 nt, Human
guuaauuugcagcuuucgagcu

SEQ ID NO: 219164 - RNA, 19 nt, Human
auugcagcuauagacugcc

SEQ ID NO: 219165 - RNA, 23 nt, Human
agugcucccaggaccuggggcag

SEQ ID NO: 219166 - RNA, 23 nt, Human
uggcuucugccccauucucucca

SEQ ID NO: 219167 - RNA, 22 nt, Human
gcuguacauucuguggguuugg

SEQ ID NO: 219168 - RNA, 20 nt, Human
augaguuuaaacauucagag

SEQ ID NO: 219169 - RNA, 22 nt, Human
uccuucaacuuuuuacuugccc

SEQ ID NO: 219170 - RNA, 22 nt, Human
gaggagagccugcacuuugacc

SEQ ID NO: 219171 - RNA, 22 nt, Human
gacaaugcagaaguacuuguuc

SEQ ID NO: 219172 - RNA, 21 nt, Human
ucugggcugcugcugcccauc

SEQ ID NO: 219173 - RNA, 22 nt, Human
guacccuguggccagccagcca

SEQ ID NO: 219174 - RNA, 22 nt, Human
augcacauaggccaaaucauuu

SEQ ID NO: 219175 - RNA, 22 nt, Human
auggcuucugucuuggaaacuu

SEQ ID NO: 219176 - RNA, 22 nt, Human
guucuauuccccuuaucuguga

SEQ ID NO: 219177 - RNA, 22 nt, Human
auuacaaguagacuaacuuuca

SEQ ID NO: 219178 - RNA, 22 nt, Human
gcacuggagauacagagaugaa

SEQ ID NO: 219179 - RNA, 22 nt, Human
agagugcuagccugagggaggu

SEQ ID NO: 219180 - RNA, 22 nt, Human
acccuggagcuuuucuggcccu

SEQ ID NO: 219181 - RNA, 22 nt, Human
cucaggaugcaggucacaggac

SEQ ID NO: 219182 - RNA, 22 nt, Human
uaucaucuuguugucaugcagc

SEQ ID NO: 219183 - RNA, 22 nt, Human
ggccugaggcgucccagcugug

SEQ ID NO: 219184 - RNA, 22 nt, Human
augcacccauguacauacacau

SEQ ID NO: 219185 - RNA, 22 nt, Human
aaauaguuuagcucucauuuca

SEQ ID NO: 219186 - RNA, 20 nt, Human
aaacucuaccucaaucguca

SEQ ID NO: 219187 - RNA, 22 nt, Human
uucagaaagugaaucuuguuau

SEQ ID NO: 219188 - RNA, 22 nt, Human
gcuucugugguugucacgacua

SEQ ID NO: 219189 - RNA, 17 nt, Human
augaggucauuaagaua

SEQ ID NO: 219190 - RNA, 22 nt, Human
uuuuucaagacaaccugcaugu

SEQ ID NO: 219191 - RNA, 22 nt, Human
gcaguggggcgcugggaguugg

SEQ ID NO: 219192 - RNA, 21 nt, Human
caguuacacaaguguuaccag

SEQ ID NO: 219193 - RNA, 23 nt, Human
ggcagagagcauggcuggggccc

SEQ ID NO: 219194 - RNA, 22 nt, Human
cagguucuuguuucaaacagac

SEQ ID NO: 219195 - RNA, 22 nt, Human
agguuuaugauucugcacgugg

SEQ ID NO: 219196 - RNA, 22 nt, Human
augcaucuuuucaagguauuuc

SEQ ID NO: 219197 - RNA, 22 nt, Human
gagcaguaggagaacccugagc

SEQ ID NO: 219198 - RNA, 22 nt, Human
uuagucuucuuccuuauauguu

SEQ ID NO: 219199 - RNA, 22 nt, Human
acaugccaugaagguauuuuug

SEQ ID NO: 219200 - RNA, 21 nt, Human
agaauccauucagaccuucuc

SEQ ID NO: 219201 - RNA, 22 nt, Human
uucucacaggcuggaaugauga

SEQ ID NO: 219202 - RNA, 22 nt, Human
uagaucugauacaauucaucug

SEQ ID NO: 219203 - RNA, 22 nt, Human
acaauuuauccauuguauaguu

SEQ ID NO: 219204 - RNA, 22 nt, Human
aguggaggcacuaauuggauuu

SEQ ID NO: 219205 - RNA, 22 nt, Human
ugagcccuggcucuuucacuua

SEQ ID NO: 219206 - RNA, 22 nt, Human
ugugacuggaguccagcccacu

SEQ ID NO: 219207 - RNA, 22 nt, Human
auauuauuuucccuggaguugu

SEQ ID NO: 219208 - RNA, 22 nt, Human
cugcucagcggaaggaagagcg

SEQ ID NO: 219209 - RNA, 22 nt, Human
cagugcaggaagugagaugccu

SEQ ID NO: 219210 - RNA, 21 nt, Human
ggcagccugacccccagagag

SEQ ID NO: 219211 - RNA, 22 nt, Human
acugggcuguggacacccagcg

SEQ ID NO: 219212 - RNA, 22 nt, Human
cuccaccacacaucuguccacc

SEQ ID NO: 219213 - RNA, 22 nt, Human
uggaggaaaaaaccaggcagag

SEQ ID NO: 219214 - RNA, 22 nt, Human
ggccuuagagaccaccuagucu

SEQ ID NO: 219215 - RNA, 22 nt, Human
caauuucaucuugugcuucaau

SEQ ID NO: 219216 - RNA, 22 nt, Human
cuuacagagaagaaaauguagu

SEQ ID NO: 219217 - RNA, 22 nt, Human
cugugccuaagaugcaugucuc

SEQ ID NO: 219218 - RNA, 22 nt, Human
ugauaucuaccauaaccauucg

SEQ ID NO: 219219 - RNA, 22 nt, Human
uccaaauucuauguucuuucca

SEQ ID NO: 219220 - RNA, 22 nt, Human
ccugccaggcuuugggcuucug

SEQ ID NO: 219221 - RNA, 22 nt, Human
uaggccauucuuggagcuuacu

SEQ ID NO: 219222 - RNA, 22 nt, Human
cugggucccacagccugcuggg

SEQ ID NO: 219223 - RNA, 22 nt, Human
ugucauggcacugguaggagug

SEQ ID NO: 219224 - RNA, 22 nt, Human
aagucuuaaccaaauaaauguu

SEQ ID NO: 219225 - RNA, 22 nt, Human
auucagucaaaaaugauggaga

SEQ ID NO: 219226 - RNA, 22 nt, Human
cuguacagcaaguucaccuugg

SEQ ID NO: 219227 - RNA, 22 nt, Human
caaagucagggaagaguggcug

SEQ ID NO: 219228 - RNA, 22 nt, Human
ugccugggacaugcuguggacu

SEQ ID NO: 219229 - RNA, 22 nt, Human
caauuucuaacauuccauggau

SEQ ID NO: 219230 - RNA, 22 nt, Human
caaaaaacaccugugugaguau

SEQ ID NO: 219231 - RNA, 22 nt, Human
gccugcagggcccuuguggguc

SEQ ID NO: 219232 - RNA, 20 nt, Human
ucaugcagguguucuagguu

SEQ ID NO: 219233 - RNA, 22 nt, Human
acaaugaaagguauucugaacu

SEQ ID NO: 219234 - RNA, 22 nt, Human
acccaggguuccugggucccag

SEQ ID NO: 219235 - RNA, 22 nt, Human
ugagaaaagguugagaugauaa

SEQ ID NO: 219236 - RNA, 22 nt, Human
cuugaaguugcaaaacauuaau

SEQ ID NO: 219237 - RNA, 22 nt, Human
aauuaacaaauguagcugugau

SEQ ID NO: 219238 - RNA, 22 nt, Human
gggauggggucaacauguaccu

SEQ ID NO: 219239 - RNA, 22 nt, Human
ggauaguucuggauauuuuaag

SEQ ID NO: 219240 - RNA, 22 nt, Human
gcuccuggccagcacagggccc

SEQ ID NO: 219241 - RNA, 22 nt, Human
cagagccauccaggugccuguu

SEQ ID NO: 219242 - RNA, 22 nt, Human
uucuuguacuggagauacauga

SEQ ID NO: 219243 - RNA, 22 nt, Human
uacaucauggugagcaggaggc

SEQ ID NO: 219244 - RNA, 22 nt, Human
acaggagcucuagggacagcac

SEQ ID NO: 219245 - RNA, 22 nt, Human
ccuggcaguucaucaaauggca

SEQ ID NO: 219246 - RNA, 22 nt, Human
augcacuacuuggcuuuacuga

SEQ ID NO: 219247 - RNA, 22 nt, Human
caaauacaaauacgggcagcuu

SEQ ID NO: 219248 - RNA, 22 nt, Human
agccaggcagggcucucgcucu

SEQ ID NO: 219249 - RNA, 22 nt, Human
aggaccugaaauucuugcuuuu

SEQ ID NO: 219250 - RNA, 22 nt, Human
gggcugugcugaguaggaggug

SEQ ID NO: 219251 - RNA, 22 nt, Human
gaggugucacuauuuugcuuau

SEQ ID NO: 219252 - RNA, 22 nt, Human
auauguauguacgcacauauuc

SEQ ID NO: 219253 - RNA, 22 nt, Human
cugauucuuugaagaugcaccc

SEQ ID NO: 219254 - RNA, 22 nt, Human
aggcugaguuucucauucucgc

SEQ ID NO: 219255 - RNA, 22 nt, Human
aggacagcagugcuggcacuug

SEQ ID NO: 219256 - RNA, 22 nt, Human
aagaacugaguacguuaauaaa

SEQ ID NO: 219257 - RNA, 22 nt, Human
gcuuuugccuacaucuuggucu

SEQ ID NO: 219258 - RNA, 22 nt, Human
agcugccauccgaggugucaga

SEQ ID NO: 219259 - RNA, 22 nt, Human
ccaggcagaugggccggcuuca

SEQ ID NO: 219260 - RNA, 22 nt, Human
aggcuggcuuugguagcauggu

SEQ ID NO: 219261 - RNA, 21 nt, Human
accaggccaggaggcuggcac

SEQ ID NO: 219262 - RNA, 22 nt, Human
ccuugcucaucccccagugccu

SEQ ID NO: 219263 - RNA, 22 nt, Human
agagaaaagaguucaggcuuug

SEQ ID NO: 219264 - RNA, 22 nt, Human
aucuuucuuauuugaagaaaga

SEQ ID NO: 219265 - RNA, 22 nt, Human
uuugucauauagacuauuguga

SEQ ID NO: 219266 - RNA, 22 nt, Human
cagcagagcuuauuaacuaaaa

SEQ ID NO: 219267 - RNA, 22 nt, Human
guggaaugaauagauuugcauu

SEQ ID NO: 219268 - RNA, 19 nt, Human
uccuucuccggccaccccg

SEQ ID NO: 219269 - RNA, 22 nt, Human
uucacagaauggcaaguuaugg

SEQ ID NO: 219270 - RNA, 22 nt, Human
cacaggaggaggccagagcgua

SEQ ID NO: 219271 - RNA, 21 nt, Human
acaguucaugauaacuccauc

SEQ ID NO: 219272 - RNA, 22 nt, Human
gauguaaauggucuuuggcaga

SEQ ID NO: 219273 - RNA, 22 nt, Human
aagacagagacucugcaacagg

SEQ ID NO: 219274 - RNA, 22 nt, Human
ucauacaggcucaagcuauacg

SEQ ID NO: 219275 - RNA, 22 nt, Human
gagcagguuucaaugcugaugc

SEQ ID NO: 219276 - RNA, 17 nt, Human
ugaacuuuagguggagc

SEQ ID NO: 219277 - RNA, 22 nt, Human
ucccugccucucagacuuccuu

SEQ ID NO: 219278 - RNA, 22 nt, Human
cuuauucagcaaguuuggguac

SEQ ID NO: 219279 - RNA, 22 nt, Human
cucugaauggacacuccagugu

SEQ ID NO: 219280 - RNA, 22 nt, Human
guacauuucaguuuccuuaaga

SEQ ID NO: 219281 - RNA, 22 nt, Human
ggcucugcggcgugugcgcagg

SEQ ID NO: 219282 - RNA, 22 nt, Human
gaggccagaagugccucgggcu

SEQ ID NO: 219283 - RNA, 20 nt, Human
ugucaauagcacugaggcug

SEQ ID NO: 219284 - RNA, 22 nt, Human
ccuagacuagaggcagggagcc

SEQ ID NO: 219285 - RNA, 22 nt, Human
cuauuaggcuuccauuucaugc

SEQ ID NO: 219286 - RNA, 22 nt, Human
uaacaggguaggagggcaugaa

SEQ ID NO: 219287 - RNA, 21 nt, Human
acuggcugccaugauccaggg

SEQ ID NO: 219288 - RNA, 22 nt, Human
auauguauugagugccaacugu

SEQ ID NO: 219289 - RNA, 22 nt, Human
ugguccuugcuauagagugaua

SEQ ID NO: 219290 - RNA, 22 nt, Human
gcaguaguccauaaguacucug

SEQ ID NO: 219291 - RNA, 22 nt, Human
uucugggcccacuguagcaucc

SEQ ID NO: 219292 - RNA, 22 nt, Human
ucuuagaauugaagucagaggg

SEQ ID NO: 219293 - RNA, 22 nt, Human
guuuaucacaauaaauaauucu

SEQ ID NO: 219294 - RNA, 22 nt, Human
gagccagcuauguagcaagagg

SEQ ID NO: 219295 - RNA, 22 nt, Human
gcacagccuugcccugugcccu

SEQ ID NO: 219296 - RNA, 22 nt, Human
gucaccugaggggaggugacag

SEQ ID NO: 219297 - RNA, 22 nt, Human
uuaugauuuagaaagauucacu

SEQ ID NO: 219298 - RNA, 22 nt, Human
uuaaagcuggcguuacaguuug

SEQ ID NO: 219299 - RNA, 22 nt, Human
ccugccagaaaagagggaguuc

SEQ ID NO: 219300 - RNA, 22 nt, Human
caggcucagcucuggccagugc

SEQ ID NO: 219301 - RNA, 22 nt, Human
ucauuugucuggcacagggaau

SEQ ID NO: 219302 - RNA, 22 nt, Human
ucaggcuugggaggcccagggc

SEQ ID NO: 219303 - RNA, 22 nt, Human
acaggccuuggcaggcauguga

SEQ ID NO: 219304 - RNA, 22 nt, Human
ccuguauucaauuuugugugau

SEQ ID NO: 219305 - RNA, 22 nt, Human
gaugcaaagauaaaacagacgc

SEQ ID NO: 219306 - RNA, 22 nt, Human
cuggguguucacccgaggcgcu

SEQ ID NO: 219307 - RNA, 22 nt, Human
caggagcuggauaggaccacaa

SEQ ID NO: 219308 - RNA, 22 nt, Human
acagaauugaagcugaguaaau

SEQ ID NO: 219309 - RNA, 22 nt, Human
aaugaguucugguucauuuuau

SEQ ID NO: 219310 - RNA, 23 nt, Human
aaaggcaggccuaggacauauug

SEQ ID NO: 219311 - RNA, 22 nt, Human
gccagguguccucacagugagg

SEQ ID NO: 219312 - RNA, 22 nt, Human
uuuucuauucauugucuauggu

SEQ ID NO: 219313 - RNA, 22 nt, Human
uuguuauaaagacuaaauaugu

SEQ ID NO: 219314 - RNA, 22 nt, Human
cugggaagcuucgagcaggaaa

SEQ ID NO: 219315 - RNA, 22 nt, Human
acuauuuacucaaaugagguug

SEQ ID NO: 219316 - RNA, 22 nt, Human
auuguuccuggaaaagaacagg

SEQ ID NO: 219317 - RNA, 22 nt, Human
ucuuauuauuguuguaaaagca

SEQ ID NO: 219318 - RNA, 22 nt, Human
uuaggaaaggaacauugaaacg

SEQ ID NO: 219319 - RNA, 21 nt, Human
gaacauuuggguuguuucuac

SEQ ID NO: 219320 - RNA, 22 nt, Human
ccauucuuucagugucucaugu

SEQ ID NO: 219321 - RNA, 22 nt, Human
cccagccaaaagcaaguuuacc

SEQ ID NO: 219322 - RNA, 16 nt, Human
uccaguuuucagcacu

SEQ ID NO: 219323 - RNA, 22 nt, Human
guggggaaaggaguggggcuca

SEQ ID NO: 219324 - RNA, 22 nt, Human
cacacauugguuuuacuccuuu

SEQ ID NO: 219325 - RNA, 22 nt, Human
ggcaggugcugggagcaucuca

SEQ ID NO: 219326 - RNA, 22 nt, Human
cauggcucggggacaggaggua

SEQ ID NO: 219327 - RNA, 22 nt, Human
uccaugcaaacaguggcuagcu

SEQ ID NO: 219328 - RNA, 22 nt, Human
cggcuuccaacaagcuuugcug

SEQ ID NO: 219329 - RNA, 22 nt, Human
auauaauucucagguuugacua

SEQ ID NO: 219330 - RNA, 22 nt, Human
gaaaacacuuugaucugaaagu

SEQ ID NO: 219331 - RNA, 18 nt, Human
aggcaggcuggagugacu

SEQ ID NO: 219332 - RNA, 22 nt, Human
uauaagcacauccuugacugau

SEQ ID NO: 219333 - RNA, 22 nt, Human
ugcccuggggagcccagccagg

SEQ ID NO: 219334 - RNA, 22 nt, Human
gcugugcauugagccugagagu

SEQ ID NO: 219335 - RNA, 22 nt, Human
acuuauuucauggaucauaaug

SEQ ID NO: 219336 - RNA, 22 nt, Human
ggcagccaguagggccagccug

SEQ ID NO: 219337 - RNA, 22 nt, Human
gagaaaugcuagcuuaggaauc

SEQ ID NO: 219338 - RNA, 22 nt, Human
cuggccuuuuguuucuggagaa

SEQ ID NO: 219339 - RNA, 22 nt, Human
gggcagguguugucaaucuaau

SEQ ID NO: 219340 - RNA, 22 nt, Human
uggaaucuguauguauguauaa

SEQ ID NO: 219341 - RNA, 22 nt, Human
uccugaagaacgaagucaugua

SEQ ID NO: 219342 - RNA, 22 nt, Human
caguggggaggccaggauagaa

SEQ ID NO: 219343 - RNA, 20 nt, Human
uauaugcagccaacacuccc

SEQ ID NO: 219344 - RNA, 22 nt, Human
uuugcacuagcauuuguccaug

SEQ ID NO: 219345 - RNA, 22 nt, Human
cugcccugucuuuuucugauga

SEQ ID NO: 219346 - RNA, 21 nt, Human
ggcaggugggucucuguugcu

SEQ ID NO: 219347 - RNA, 22 nt, Human
cugguuugucuugggaggaugu

SEQ ID NO: 219348 - RNA, 23 nt, Human
uuaaggagcuugcacucugggug

SEQ ID NO: 219349 - RNA, 22 nt, Human
ugugaaggagcaugcagagggg

SEQ ID NO: 219350 - RNA, 23 nt, Human
cauguacacacagcuguacagug

SEQ ID NO: 219351 - RNA, 22 nt, Human
cugcccugugaggguccuuggg

SEQ ID NO: 219352 - RNA, 22 nt, Human
guuuacaaauauuuuaaauggu

SEQ ID NO: 219353 - RNA, 22 nt, Human
ccaccuccucggccaugugacg

SEQ ID NO: 219354 - RNA, 22 nt, Human
aacagacauauuuuuaauaugc

SEQ ID NO: 219355 - RNA, 22 nt, Human
auagaaaacagauguccuuaaa

SEQ ID NO: 219356 - RNA, 22 nt, Human
gacagcagcauaauacaugaac

SEQ ID NO: 219357 - RNA, 18 nt, Human
cccccagccaaauucucu

SEQ ID NO: 219358 - RNA, 22 nt, Human
uaagagcuuagcuaaggaugug

SEQ ID NO: 219359 - RNA, 22 nt, Human
ggcuuucuagaucuagcucugu

SEQ ID NO: 219360 - RNA, 22 nt, Human
cagagggugugaaggggaugaa

SEQ ID NO: 219361 - RNA, 22 nt, Human
cugagacacggagaggcugugu

SEQ ID NO: 219362 - RNA, 22 nt, Human
cagguucuggagaugcagagau

SEQ ID NO: 219363 - RNA, 22 nt, Human
auguaaaguaaucugucgauca

SEQ ID NO: 219364 - RNA, 22 nt, Human
cuuaggauuuaauuucagacuc

SEQ ID NO: 219365 - RNA, 22 nt, Human
ggaaggcuacaggaauccagcg

SEQ ID NO: 219366 - RNA, 22 nt, Human
guauauauuggauaaaccagag

SEQ ID NO: 219367 - RNA, 18 nt, Human
uucuccagaaaacauagc

SEQ ID NO: 219368 - RNA, 23 nt, Human
ggcucagaaaaaguccuggccuc

SEQ ID NO: 219369 - RNA, 22 nt, Human
ugcuauuuaacuuuuaugugua

SEQ ID NO: 219370 - RNA, 19 nt, Human
cuacuuuauaauaugccuc

SEQ ID NO: 219371 - RNA, 22 nt, Human
agcagaguuucucaacaucagc

SEQ ID NO: 219372 - RNA, 22 nt, Human
uuucacaucaugggauggaagc

SEQ ID NO: 219373 - RNA, 22 nt, Human
acaguuugcccugacauucucc

SEQ ID NO: 219374 - RNA, 22 nt, Human
cagauauguggauucuauuagc

SEQ ID NO: 219375 - RNA, 22 nt, Human
cucagagcucgugggaccuugg

SEQ ID NO: 219376 - RNA, 23 nt, Human
aguggcuggacagacuuuccugg

SEQ ID NO: 219377 - RNA, 22 nt, Human
acaguucuuuggauggaagaau

SEQ ID NO: 219378 - RNA, 22 nt, Human
aucugagacugaguuuggauuu

SEQ ID NO: 219379 - RNA, 22 nt, Human
caaggcugcugcgggucgcacc

SEQ ID NO: 219380 - RNA, 22 nt, Human
acucuuauaguauugguuauua

SEQ ID NO: 219381 - RNA, 22 nt, Human
aauugacaaaucauacuuguau

SEQ ID NO: 219382 - RNA, 22 nt, Human
gguaaaaaucacaaauacuuua

SEQ ID NO: 219383 - RNA, 22 nt, Human
gcaaaggcuucuuuuauucucc

SEQ ID NO: 219384 - RNA, 22 nt, Human
gagucugagucuaauggcccca

SEQ ID NO: 219385 - RNA, 21 nt, Human
agcagcugggcaacauggagg

SEQ ID NO: 219386 - RNA, 22 nt, Human
cucacuguccaacaggcuuuac

SEQ ID NO: 219387 - RNA, 22 nt, Human
aggucagcccucucugggcagg

SEQ ID NO: 219388 - RNA, 22 nt, Human
gagcccagcugcggcccucagc

SEQ ID NO: 219389 - RNA, 22 nt, Human
aguggccaccaugccagcucuc

SEQ ID NO: 219390 - RNA, 22 nt, Human
cugcugccccugagcucagccu

SEQ ID NO: 219391 - RNA, 22 nt, Human
ccaguccauauuuauacugccg

SEQ ID NO: 219392 - RNA, 22 nt, Human
ccugaguuaguugcugugucuc

SEQ ID NO: 219393 - RNA, 22 nt, Human
cugccuguggucugugaucuaa

SEQ ID NO: 219394 - RNA, 22 nt, Human
augcaggagaccaauuggaugg

SEQ ID NO: 219395 - RNA, 22 nt, Human
gcaggugugcugaauuacguga

SEQ ID NO: 219396 - RNA, 22 nt, Human
ugacugccgauuguccuucucu

SEQ ID NO: 219397 - RNA, 22 nt, Human
acauguguacauauauaugugc

SEQ ID NO: 219398 - RNA, 22 nt, Human
gcuuccuggagggagagagcug

SEQ ID NO: 219399 - RNA, 22 nt, Human
uuuauuggauauuuacaagaua

SEQ ID NO: 219400 - RNA, 22 nt, Human
uuuguguuguuuuaagccacua

SEQ ID NO: 219401 - RNA, 22 nt, Human
guauuagguuggugcaaaagua

SEQ ID NO: 219402 - RNA, 22 nt, Human
uugcuuuaucuaagcauggcca

SEQ ID NO: 219403 - RNA, 22 nt, Human
gcagcucugacaaugccuggaa

SEQ ID NO: 219404 - RNA, 22 nt, Human
gaucacauaauuuggaaacagc

SEQ ID NO: 219405 - RNA, 22 nt, Human
ugaaguuuuacuaggugaauuu

SEQ ID NO: 219406 - RNA, 22 nt, Human
cagcagcuccaaagaauagcca

SEQ ID NO: 219407 - RNA, 22 nt, Human
aaagcagguugcaauuacagug

SEQ ID NO: 219408 - RNA, 22 nt, Human
gcuucucucucagacugcaagc

SEQ ID NO: 219409 - RNA, 22 nt, Human
acuccccagacugccaugcugg

SEQ ID NO: 219410 - RNA, 22 nt, Human
uacacuguguaaaaugcacuuu

SEQ ID NO: 219411 - RNA, 22 nt, Human
aggugccauugcuugccaguuu

SEQ ID NO: 219412 - RNA, 22 nt, Human
gggaccuggacaugugugugcu

SEQ ID NO: 219413 - RNA, 22 nt, Human
ucuggcagcaagucuguuucuc

SEQ ID NO: 219414 - RNA, 22 nt, Human
ugagccagaguggagugugccu

SEQ ID NO: 219415 - RNA, 23 nt, Human
uggaaugagcugggaagcugagc

SEQ ID NO: 219416 - RNA, 22 nt, Human
gagggagaaggacuaucaggcu

SEQ ID NO: 219417 - RNA, 19 nt, Human
uuucagacauuucaaauuu

SEQ ID NO: 219418 - RNA, 22 nt, Human
ccaggcagagugcuccagaaag

SEQ ID NO: 219419 - RNA, 22 nt, Human
uguggucuuggaagaaguugcu

SEQ ID NO: 219420 - RNA, 23 nt, Human
cugcagagaacugagggacagcc

SEQ ID NO: 219421 - RNA, 18 nt, Human
uuccaugauuccuuucac

SEQ ID NO: 219422 - RNA, 22 nt, Human
aaagcaguauaaguaacggaag

SEQ ID NO: 219423 - RNA, 18 nt, Human
ucuuuggacaacuacugg

SEQ ID NO: 219424 - RNA, 22 nt, Human
ucucccagaaguccucaguaca

SEQ ID NO: 219425 - RNA, 20 nt, Human
aucuuugucucuguaguugu

SEQ ID NO: 219426 - RNA, 22 nt, Human
agcagcaauaauaaaguaauac

SEQ ID NO: 219427 - RNA, 22 nt, Human
acagcuggcaggggggcaugaa

SEQ ID NO: 219428 - RNA, 22 nt, Human
ccauagcaagaggagcagaaau

SEQ ID NO: 219429 - RNA, 20 nt, Human
uauuccaaggguagagaaaa

SEQ ID NO: 219430 - RNA, 22 nt, Human
guacaauaacuagucuuauagu

SEQ ID NO: 219431 - RNA, 22 nt, Human
ucagauggauucauuacaugac

SEQ ID NO: 219432 - RNA, 22 nt, Human
acuccuggggcugccaucacag

SEQ ID NO: 219433 - RNA, 22 nt, Human
agaucaaaucugggauuucuaa

SEQ ID NO: 219434 - RNA, 22 nt, Human
agaguggcuugcucagcuagca

SEQ ID NO: 219435 - RNA, 22 nt, Human
ucaguuaaugguaagggugaaa

SEQ ID NO: 219436 - RNA, 22 nt, Human
aaagcugcuuuaaacaucuaug

SEQ ID NO: 219437 - RNA, 22 nt, Human
ugucugugugagcaaaugacuu

SEQ ID NO: 219438 - RNA, 22 nt, Human
aguuuuauuccaaugugcagca

SEQ ID NO: 219439 - RNA, 22 nt, Human
aggguaggguaaaugaugcauc

SEQ ID NO: 219440 - RNA, 22 nt, Human
cagguuggucggcaaguacaca

SEQ ID NO: 219441 - RNA, 22 nt, Human
ccugccuggggacaaaggaggg

SEQ ID NO: 219442 - RNA, 22 nt, Human
gggggugguucuaaguccuaua

SEQ ID NO: 219443 - RNA, 23 nt, Human
aggaagcccauuuuagucuaccu

SEQ ID NO: 219444 - RNA, 22 nt, Human
ugguccuggccuugaccccagg

SEQ ID NO: 219445 - RNA, 22 nt, Human
ggcugccucuauuuaggaucaa

SEQ ID NO: 219446 - RNA, 22 nt, Human
aggucugguauuuuucuauacu

SEQ ID NO: 219447 - RNA, 22 nt, Human
aggagaccuucaccacuuccac

SEQ ID NO: 219448 - RNA, 22 nt, Human
ugccgugucccauugugcucug

SEQ ID NO: 219449 - RNA, 22 nt, Human
caggagcuacucagguuggguu

SEQ ID NO: 219450 - RNA, 22 nt, Human
aagaaguuggaaaugauugaga

SEQ ID NO: 219451 - RNA, 22 nt, Human
agcaguuauguucuauaaaguc

SEQ ID NO: 219452 - RNA, 22 nt, Human
aggagucagauuguuugaaugu

SEQ ID NO: 219453 - RNA, 22 nt, Human
guacauuucauuuaaaugaugu

SEQ ID NO: 219454 - RNA, 22 nt, Human
agcaacaggaauauuauggcaa

SEQ ID NO: 219455 - RNA, 22 nt, Human
caggaugguggcaugaucagaa

SEQ ID NO: 219456 - RNA, 22 nt, Human
ugaggcuuagauuugguaacuc

SEQ ID NO: 219457 - RNA, 22 nt, Human
ggcagcucugcuccuuggcucc

SEQ ID NO: 219458 - RNA, 22 nt, Human
acccagcaaagauaaacuuaug

SEQ ID NO: 219459 - RNA, 22 nt, Human
uacagaaaaacaucuggagccg

SEQ ID NO: 219460 - RNA, 22 nt, Human
ucucagagccuaacuaaccuaa

SEQ ID NO: 219461 - RNA, 22 nt, Human
ggccucugggguccugagccca

SEQ ID NO: 219462 - RNA, 22 nt, Human
uuuaacuugaucaguagagcau

SEQ ID NO: 219463 - RNA, 22 nt, Human
uccuggcccacuaugccagcau

SEQ ID NO: 219464 - RNA, 22 nt, Human
ucccaaggccaggcaucuagaa

SEQ ID NO: 219465 - RNA, 19 nt, Human
gagggcucauuugaacaau

SEQ ID NO: 219466 - RNA, 22 nt, Human
ugagaggcuagaucagcucugu

SEQ ID NO: 219467 - RNA, 22 nt, Human
acaaacaucuugaccucagauu

SEQ ID NO: 219468 - RNA, 22 nt, Human
auguguuuauaauuacucaauc

SEQ ID NO: 219469 - RNA, 22 nt, Human
ggcagcucacgggcauggggug

SEQ ID NO: 219470 - RNA, 22 nt, Human
ucagugucuauagauaagguuu

SEQ ID NO: 219471 - RNA, 22 nt, Human
agugacuucuccuaaugucaua

SEQ ID NO: 219472 - RNA, 22 nt, Human
agcaggaacucagggaguucuc

SEQ ID NO: 219473 - RNA, 19 nt, Human
ucuuuguacaagucucugc

SEQ ID NO: 219474 - RNA, 22 nt, Human
cucaggaguaguucagcagcug

SEQ ID NO: 219475 - RNA, 22 nt, Human
cacucaggcugugucaggagga

SEQ ID NO: 219476 - RNA, 22 nt, Human
caggcuugauuauucagacaau

SEQ ID NO: 219477 - RNA, 22 nt, Human
caggaggcagagguugcagcga

SEQ ID NO: 219478 - RNA, 22 nt, Human
ggcugaaauucagaguaaauuc

SEQ ID NO: 219479 - RNA, 22 nt, Human
agccagucggggccaugcuggg

SEQ ID NO: 219480 - RNA, 22 nt, Human
auccagagagguuaggugacau

SEQ ID NO: 219481 - RNA, 22 nt, Human
gagccuucaucgcagccuuguu

SEQ ID NO: 219482 - RNA, 22 nt, Human
uauaaauuauuaggcugcuaaa

SEQ ID NO: 219483 - RNA, 22 nt, Human
cccagaggaggcaaagcucugu

SEQ ID NO: 219484 - RNA, 22 nt, Human
uccagagagaaaaacaagcuuu

SEQ ID NO: 219485 - RNA, 22 nt, Human
ugcugaaagucccaaaucucau

SEQ ID NO: 219486 - RNA, 22 nt, Human
gggcugaccaaugccuugcuuu

SEQ ID NO: 219487 - RNA, 22 nt, Human
aaggagagagcuuugcuggaac

SEQ ID NO: 219488 - RNA, 22 nt, Human
aauagaacaauaauuguaaacu

SEQ ID NO: 219489 - RNA, 22 nt, Human
gaucuuuauacuguaauaauga

SEQ ID NO: 219490 - RNA, 22 nt, Human
gcagaugccagaucaugcaggg

SEQ ID NO: 219491 - RNA, 22 nt, Human
ccugcagagccacgugccagcg

SEQ ID NO: 219492 - RNA, 22 nt, Human
acaugcaaagggaugcaauuau

SEQ ID NO: 219493 - RNA, 21 nt, Human
uccugcagggcagcagagugg

SEQ ID NO: 219494 - RNA, 22 nt, Human
cucaugucggcaggacucgccc

SEQ ID NO: 219495 - RNA, 22 nt, Human
uggcugagaaaaugguuuuagg

SEQ ID NO: 219496 - RNA, 22 nt, Human
ggagccugaaaagucugcauuu

SEQ ID NO: 219497 - RNA, 22 nt, Human
ggccucugguucacagggagga

SEQ ID NO: 219498 - RNA, 22 nt, Human
gcucaggccuccagaggggcaa

SEQ ID NO: 219499 - RNA, 22 nt, Human
auagaagaggaaacugagguug

SEQ ID NO: 219500 - RNA, 22 nt, Human
ugccagggugucaggagagcua

SEQ ID NO: 219501 - RNA, 22 nt, Human
gcugccauguugugaggacacu

SEQ ID NO: 219502 - RNA, 22 nt, Human
agcccugcacaggucuguggcu

SEQ ID NO: 219503 - RNA, 22 nt, Human
cuuucaaaacgcucuguaugca

SEQ ID NO: 219504 - RNA, 22 nt, Human
uucacuguacugacugucuuau

SEQ ID NO: 219505 - RNA, 22 nt, Human
gaaccauuucugaauaguuugu

SEQ ID NO: 219506 - RNA, 22 nt, Human
cgcaggcacagaguggacagcg

SEQ ID NO: 219507 - RNA, 22 nt, Human
cuccaggccccuggccuucugc

SEQ ID NO: 219508 - RNA, 22 nt, Human
aaggcugguuuccuugauguuu

SEQ ID NO: 219509 - RNA, 22 nt, Human
acuuucugugguuaccagggag

SEQ ID NO: 219510 - RNA, 22 nt, Human
cgcaggcuggcgcggaguggca

SEQ ID NO: 219511 - RNA, 22 nt, Human
uuuaauagggcccaaugagacu

SEQ ID NO: 219512 - RNA, 22 nt, Human
ggguaagcugcuuuaucucucu

SEQ ID NO: 219513 - RNA, 22 nt, Human
aaaugcaugagaaaguauucug

SEQ ID NO: 219514 - RNA, 22 nt, Human
caguuucuauggcugggcucug

SEQ ID NO: 219515 - RNA, 22 nt, Human
uucaaugccuagaacuuagcau

SEQ ID NO: 219516 - RNA, 22 nt, Human
ucugccuggguguggagcagag

SEQ ID NO: 219517 - RNA, 22 nt, Human
ugugugugcaggagagcaggug

SEQ ID NO: 219518 - RNA, 22 nt, Human
gcagagcucaugccugcaccuc

SEQ ID NO: 219519 - RNA, 22 nt, Human
auucuucaguauguguggauug

SEQ ID NO: 219520 - RNA, 22 nt, Human
aggcaggcaaccaccugggaag

SEQ ID NO: 219521 - RNA, 22 nt, Human
uuccuuucacguuuuaaugcac

SEQ ID NO: 219522 - RNA, 22 nt, Human
auuuauuaugggauuuggcaca

SEQ ID NO: 219523 - RNA, 22 nt, Human
agguccuggugaccauggaguu

SEQ ID NO: 219524 - RNA, 21 nt, Human
gcacuucugcagggcugcugg

SEQ ID NO: 219525 - RNA, 22 nt, Human
gagagaaaggcuugcaggcugu

SEQ ID NO: 219526 - RNA, 22 nt, Human
gcuccugggcucuaccuugcua

SEQ ID NO: 219527 - RNA, 22 nt, Human
ucugugaaaggaaagaacugac

SEQ ID NO: 219528 - RNA, 22 nt, Human
cauauaucuaccugcaauugca

SEQ ID NO: 219529 - RNA, 22 nt, Human
acagcucuucuucaagccuggc

SEQ ID NO: 219530 - RNA, 22 nt, Human
uacuuuuuaugauaagaacuga

SEQ ID NO: 219531 - RNA, 22 nt, Human
uuagaaaauggaggugggaggg

SEQ ID NO: 219532 - RNA, 22 nt, Human
acugcaauuauuuguucaccaa

SEQ ID NO: 219533 - RNA, 22 nt, Human
uggaaacuaagacuagagagac

SEQ ID NO: 219534 - RNA, 22 nt, Human
ggguuucaugguucucacaaug

SEQ ID NO: 219535 - RNA, 22 nt, Human
uauuguauuaaggauucaagua

SEQ ID NO: 219536 - RNA, 22 nt, Human
caggcacacauccgugagagau

SEQ ID NO: 219537 - RNA, 22 nt, Human
cacacuuuuggcauguuugguu

SEQ ID NO: 219538 - RNA, 22 nt, Human
cacagcagagggagccauugaa

SEQ ID NO: 219539 - RNA, 20 nt, Human
cucugcagcaaggccugggu

SEQ ID NO: 219540 - RNA, 22 nt, Human
aagcaauauacugauaugauua

SEQ ID NO: 219541 - RNA, 22 nt, Human
aaggaacucacagucuguuggg

SEQ ID NO: 219542 - RNA, 22 nt, Human
gcagggcagggcaagaacuggg

SEQ ID NO: 219543 - RNA, 22 nt, Human
gggugaagcuccugcaggggcc

SEQ ID NO: 219544 - RNA, 22 nt, Human
uuguacuaucaccaugucaugu

SEQ ID NO: 219545 - RNA, 22 nt, Human
acaaugaugcagaugaguaaga

SEQ ID NO: 219546 - RNA, 22 nt, Human
guguccuuaugcauaccagagu

SEQ ID NO: 219547 - RNA, 19 nt, Human
caugugucaauacuguacc

SEQ ID NO: 219548 - RNA, 22 nt, Human
cagcugguuggaagggagcuga

SEQ ID NO: 219549 - RNA, 22 nt, Human
agucauuuugcuaaaugagggu

SEQ ID NO: 219550 - RNA, 22 nt, Human
uacagccugauuuggagccacu

SEQ ID NO: 219551 - RNA, 22 nt, Human
cagaagcuuugucuagucuuga

SEQ ID NO: 219552 - RNA, 22 nt, Human
ugugcccuguuaaaugcacagu

SEQ ID NO: 219553 - RNA, 17 nt, Human
ggaggcaacagacaggg

SEQ ID NO: 219554 - RNA, 22 nt, Human
uaguggagaaguggagucugug

SEQ ID NO: 219555 - RNA, 22 nt, Human
cgcaacagagcagguuugauga

SEQ ID NO: 219556 - RNA, 22 nt, Human
ccacucagcacaguggaugcag

SEQ ID NO: 219557 - RNA, 23 nt, Human
uggcccugugcaugcugcuuccc

SEQ ID NO: 219558 - RNA, 22 nt, Human
ucugccuucuuuuagucaucuu

SEQ ID NO: 219559 - RNA, 21 nt, Human
ccugugccagucuauguguuc

SEQ ID NO: 219560 - RNA, 22 nt, Human
ucuccaggaagcccucccugac

SEQ ID NO: 219561 - RNA, 22 nt, Human
acccugggcuuggccugcucag

SEQ ID NO: 219562 - RNA, 22 nt, Human
caauaacuuugauauuuugcgg

SEQ ID NO: 219563 - RNA, 22 nt, Human
gaccauuucuaggaaucagacu

SEQ ID NO: 219564 - RNA, 22 nt, Human
gagugaguuggaaaacagacac

SEQ ID NO: 219565 - RNA, 22 nt, Human
aggcuggcugaaaaacacccuu

SEQ ID NO: 219566 - RNA, 22 nt, Human
ucacagacuggucagucaacuu

SEQ ID NO: 219567 - RNA, 22 nt, Human
gcacuuaggguauguacugggc

SEQ ID NO: 219568 - RNA, 22 nt, Human
ucacagacacagggagaagcau

SEQ ID NO: 219569 - RNA, 22 nt, Human
aaggcugugucagaagcucccu

SEQ ID NO: 219570 - RNA, 22 nt, Human
uuuauaguuauauacagauguu

SEQ ID NO: 219571 - RNA, 22 nt, Human
aauucuuguuguuaguauauuu

SEQ ID NO: 219572 - RNA, 22 nt, Human
gucagacacauuucuuucagug

SEQ ID NO: 219573 - RNA, 22 nt, Human
aucucaaaugauuacaccaagc

SEQ ID NO: 219574 - RNA, 22 nt, Human
uaguucuucaugaauucagcuu

SEQ ID NO: 219575 - RNA, 22 nt, Human
cuccucuggguccugguggcca

SEQ ID NO: 219576 - RNA, 22 nt, Human
acugggaagacaagaaagauag

SEQ ID NO: 219577 - RNA, 22 nt, Human
ucauggcuaaugcaguauauuc

SEQ ID NO: 219578 - RNA, 22 nt, Human
aucuaaaaugugguuaguuggu

SEQ ID NO: 219579 - RNA, 22 nt, Human
ccagaagggcuauugcagugac

SEQ ID NO: 219580 - RNA, 22 nt, Human
gcugguccacucccuggaggcu

SEQ ID NO: 219581 - RNA, 22 nt, Human
auggcuggucucccauggaaaa

SEQ ID NO: 219582 - RNA, 22 nt, Human
gaggcccaggguacaggccgcu

SEQ ID NO: 219583 - RNA, 22 nt, Human
ugaggcagauauuuauuggguu

SEQ ID NO: 219584 - RNA, 22 nt, Human
aaaaccacaauuacuuuugcac

SEQ ID NO: 219585 - RNA, 22 nt, Human
uuccugugugacucaagugguu

SEQ ID NO: 219586 - RNA, 19 nt, Human
aagcuccagcagauccuuu

SEQ ID NO: 219587 - RNA, 22 nt, Human
ccugcucuagacucugggaagg

SEQ ID NO: 219588 - RNA, 22 nt, Human
agcccugguagccugcugccau

SEQ ID NO: 219589 - RNA, 19 nt, Human
gggcccagcauggaggguu

SEQ ID NO: 219590 - RNA, 22 nt, Human
uacaguuacuguuauaugugcu

SEQ ID NO: 219591 - RNA, 22 nt, Human
uaauuucaauagcuugcauaau

SEQ ID NO: 219592 - RNA, 22 nt, Human
cggggcugaggcaacgcggaga

SEQ ID NO: 219593 - RNA, 22 nt, Human
uccaggcuggccucgcgugaca

SEQ ID NO: 219594 - RNA, 22 nt, Human
caaacuuucaguuauaacauga

SEQ ID NO: 219595 - RNA, 19 nt, Human
ccucccacggauuccuucc

SEQ ID NO: 219596 - RNA, 22 nt, Human
ugcuggagagccuuggccaagg

SEQ ID NO: 219597 - RNA, 22 nt, Human
agaagccaauucugugugaguc

SEQ ID NO: 219598 - RNA, 22 nt, Human
uucuuacagaguuuacagagcc

SEQ ID NO: 219599 - RNA, 22 nt, Human
cugagguguuuaguaggggcgg

SEQ ID NO: 219600 - RNA, 22 nt, Human
aaucauucuuauuucacagcaa

SEQ ID NO: 219601 - RNA, 22 nt, Human
caguauuuguucccuaucaaug

SEQ ID NO: 219602 - RNA, 17 nt, Human
aagaacacucaauagca

SEQ ID NO: 219603 - RNA, 22 nt, Human
cucagggcuugaguguccagga

SEQ ID NO: 219604 - RNA, 22 nt, Human
aaagcuaugaggcaugcauuuc

SEQ ID NO: 219605 - RNA, 22 nt, Human
ggccaugccaggcugccuggga

SEQ ID NO: 219606 - RNA, 22 nt, Human
aguacaugcagaacuaacagau

SEQ ID NO: 219607 - RNA, 22 nt, Human
uuacaagugucagguacuggca

SEQ ID NO: 219608 - RNA, 22 nt, Human
uagaaacuacuagaauaagaga

SEQ ID NO: 219609 - RNA, 17 nt, Human
ugagcuucaaucaggug

SEQ ID NO: 219610 - RNA, 23 nt, Human
caggacaugggaggaaguauggc

SEQ ID NO: 219611 - RNA, 22 nt, Human
aguguauugucucacaguucuu

SEQ ID NO: 219612 - RNA, 22 nt, Human
aucacaaaggguuuucucugag

SEQ ID NO: 219613 - RNA, 22 nt, Human
accacagcuuugcaccaggugu

SEQ ID NO: 219614 - RNA, 22 nt, Human
gcucuggcuacuccacccuguu

SEQ ID NO: 219615 - RNA, 22 nt, Human
gauggcagcagcagccagggau

SEQ ID NO: 219616 - RNA, 22 nt, Human
uaucuaaauggaauauuccaga

SEQ ID NO: 219617 - RNA, 21 nt, Human
uuuaaagaauaggaagggagg

SEQ ID NO: 219618 - RNA, 22 nt, Human
ggagcugaguucuucagccggg

SEQ ID NO: 219619 - RNA, 22 nt, Human
acuuucuuggucccauguuuga

SEQ ID NO: 219620 - RNA, 22 nt, Human
auguaguugaagugcuauaaag

SEQ ID NO: 219621 - RNA, 23 nt, Human
acacauuuuucccguucugaggu

SEQ ID NO: 219622 - RNA, 22 nt, Human
acagaaaaguuuacuuuugcuc

SEQ ID NO: 219623 - RNA, 22 nt, Human
ucucagagcuucaguuauuuuc

SEQ ID NO: 219624 - RNA, 22 nt, Human
agcacugugagcaccagcacgc

SEQ ID NO: 219625 - RNA, 22 nt, Human
uacagagaggugacccuugggc

SEQ ID NO: 219626 - RNA, 23 nt, Human
uaaucucuucaagagaaggggaa

SEQ ID NO: 219627 - RNA, 22 nt, Human
aggaugagauuccagggucaau

SEQ ID NO: 219628 - RNA, 22 nt, Human
uggcuucugguuuauccuuaua

SEQ ID NO: 219629 - RNA, 22 nt, Human
agcaggcugaugggcaugcuug

SEQ ID NO: 219630 - RNA, 22 nt, Human
uggcagagaacacacaugauuc

SEQ ID NO: 219631 - RNA, 22 nt, Human
caggccuugucaagaaaaugcc

SEQ ID NO: 219632 - RNA, 20 nt, Human
acauccuggugacuagaacu

SEQ ID NO: 219633 - RNA, 22 nt, Human
aagaacauaacagaagcugugu

SEQ ID NO: 219634 - RNA, 22 nt, Human
ugccaggcauuugacagacacu

SEQ ID NO: 219635 - RNA, 22 nt, Human
ccccuccuggccacacugucag

SEQ ID NO: 219636 - RNA, 22 nt, Human
accuccuggcugcucauggaac

SEQ ID NO: 219637 - RNA, 22 nt, Human
ccuuagaaauguaccaaaggaa

SEQ ID NO: 219638 - RNA, 22 nt, Human
cacaagacuuauuuguguagaa

SEQ ID NO: 219639 - RNA, 19 nt, Human
uguguucauucaucagagg

SEQ ID NO: 219640 - RNA, 22 nt, Human
cuggccugccugccgguugucg

SEQ ID NO: 219641 - RNA, 22 nt, Human
uucccuuuguuaaauuggaaga

SEQ ID NO: 219642 - RNA, 22 nt, Human
auuccacagcuacaucaaucua

SEQ ID NO: 219643 - RNA, 22 nt, Human
cuaaagcaacugagacacauag

SEQ ID NO: 219644 - RNA, 22 nt, Human
cucucuggguccucuuuuauag

SEQ ID NO: 219645 - RNA, 22 nt, Human
ucaagcaaucucugugucccug

SEQ ID NO: 219646 - RNA, 22 nt, Human
gauccacaggaaccaaaacgca

SEQ ID NO: 219647 - RNA, 22 nt, Human
gcacacauauauaugagcaugu

SEQ ID NO: 219648 - RNA, 22 nt, Human
acuggcagaacuggugauuguc

SEQ ID NO: 219649 - RNA, 22 nt, Human
uaacaauaguguuugcuaguca

SEQ ID NO: 219650 - RNA, 22 nt, Human
cacaaauguaguagcuuaaaac

SEQ ID NO: 219651 - RNA, 22 nt, Human
gccaggacuagagggaggugag

SEQ ID NO: 219652 - RNA, 22 nt, Human
cucucaugagcauuccuaaggg

SEQ ID NO: 219653 - RNA, 22 nt, Human
cuuacaaaggagaggagauagg

SEQ ID NO: 219654 - RNA, 22 nt, Human
aggcuuagacuaccuggucugu

SEQ ID NO: 219655 - RNA, 20 nt, Human
aaugaggucccacugaggag

SEQ ID NO: 219656 - RNA, 20 nt, Human
aaacuaaagguguuugguuu

SEQ ID NO: 219657 - RNA, 22 nt, Human
ucaaucacguguuccauguucu

SEQ ID NO: 219658 - RNA, 22 nt, Human
aggcuucccaagcagcugcaaa

SEQ ID NO: 219659 - RNA, 18 nt, Human
uacaggaagggguucucg

SEQ ID NO: 219660 - RNA, 22 nt, Human
cagcggaggacagaugggagcu

SEQ ID NO: 219661 - RNA, 22 nt, Human
aaaaucuugugacuuaggaagg

SEQ ID NO: 219662 - RNA, 21 nt, Human
cuggagcuuggugagaagugu

SEQ ID NO: 219663 - RNA, 22 nt, Human
cacacaugaaucccuaguaccu

SEQ ID NO: 219664 - RNA, 22 nt, Human
cuuuguuaggggcucagggugg

SEQ ID NO: 219665 - RNA, 22 nt, Human
gcagaauagggcauaacuuugc

SEQ ID NO: 219666 - RNA, 22 nt, Human
guccuucaagguccuuggugug

SEQ ID NO: 219667 - RNA, 22 nt, Human
cuaagaaauguugugaaugcca

SEQ ID NO: 219668 - RNA, 22 nt, Human
uagaacaugugaaaauauagcc

SEQ ID NO: 219669 - RNA, 22 nt, Human
gcccaggggcagcgcauagugg

SEQ ID NO: 219670 - RNA, 22 nt, Human
accuguuuguuaagaaagcuuc

SEQ ID NO: 219671 - RNA, 22 nt, Human
uuccaagugcccauauuucauc

SEQ ID NO: 219672 - RNA, 22 nt, Human
cuguauaugugcauacacacac

SEQ ID NO: 219673 - RNA, 22 nt, Human
uuuaaauguuuaaaacucguga

SEQ ID NO: 219674 - RNA, 21 nt, Human
ggcccugguuacgccuccucu

SEQ ID NO: 219675 - RNA, 22 nt, Human
ucagcaggugccucagauucuu

SEQ ID NO: 219676 - RNA, 22 nt, Human
agccuguguugcucuggcgaua

SEQ ID NO: 219677 - RNA, 22 nt, Human
aggcugcuggaggauuuaugcc

SEQ ID NO: 219678 - RNA, 22 nt, Human
gugcugcucaagggacaggaca

SEQ ID NO: 219679 - RNA, 22 nt, Human
cugccuccugccgugcagcuuc

SEQ ID NO: 219680 - RNA, 22 nt, Human
caagcauacugugagaguuuua

SEQ ID NO: 219681 - RNA, 22 nt, Human
cucauuuauccaaaagccaguu

SEQ ID NO: 219682 - RNA, 22 nt, Human
ucuuuucuggacucugcaugga

SEQ ID NO: 219683 - RNA, 22 nt, Human
uagaaguucaugcgaauuauuu

SEQ ID NO: 219684 - RNA, 22 nt, Human
uucauacauuuuuacuaacagc

SEQ ID NO: 219685 - RNA, 22 nt, Human
uggccugggcaugaagcaucgu

SEQ ID NO: 219686 - RNA, 21 nt, Human
ugacauuuccaauauaaagcc

SEQ ID NO: 219687 - RNA, 22 nt, Human
aguuuuucugggaggcacugcu

SEQ ID NO: 219688 - RNA, 19 nt, Human
gaggaggaaaacuagugua

SEQ ID NO: 219689 - RNA, 23 nt, Human
ucagggcucacacguuuucuggc

SEQ ID NO: 219690 - RNA, 22 nt, Human
ccagugccugugggcauggugc

SEQ ID NO: 219691 - RNA, 22 nt, Human
caggccucuccuuagucuggca

SEQ ID NO: 219692 - RNA, 22 nt, Human
gcgguccaggagcgcagguccu

SEQ ID NO: 219693 - RNA, 22 nt, Human
ucagagaauucgauuaaaugca

SEQ ID NO: 219694 - RNA, 22 nt, Human
uugcaaaaucauuucucaggau

SEQ ID NO: 219695 - RNA, 22 nt, Human
gaggcuggugguuaguuccauu

SEQ ID NO: 219696 - RNA, 22 nt, Human
aggccugggucucgugccuacc

SEQ ID NO: 219697 - RNA, 22 nt, Human
uguucauuuggcccuuuuguau

SEQ ID NO: 219698 - RNA, 22 nt, Human
ucccucucuugggcguggcuca

SEQ ID NO: 219699 - RNA, 22 nt, Human
gauggaggaaaaguuggaaugc

SEQ ID NO: 219700 - RNA, 22 nt, Human
augugcuggcuaacuggauggg

SEQ ID NO: 219701 - RNA, 22 nt, Human
uacaguaaaugugguagaaacu

SEQ ID NO: 219702 - RNA, 22 nt, Human
uauuaagauacguaguuguaaa

SEQ ID NO: 219703 - RNA, 22 nt, Human
cccagagagcauuuggacaaag

SEQ ID NO: 219704 - RNA, 22 nt, Human
ucugagcuauguaagacuugga

SEQ ID NO: 219705 - RNA, 22 nt, Human
auuaaauuuucacuaggcuccc

SEQ ID NO: 219706 - RNA, 22 nt, Human
ucuuccagcaaugugaaaucac

SEQ ID NO: 219707 - RNA, 22 nt, Human
gcugugcauggagggccguuca

SEQ ID NO: 219708 - RNA, 22 nt, Human
caaagcagagccagagcuuguc

SEQ ID NO: 219709 - RNA, 22 nt, Human
ccuucccuaaagcgucgcuuag

SEQ ID NO: 219710 - RNA, 22 nt, Human
aauugcuuaucuuguugaauag

SEQ ID NO: 219711 - RNA, 22 nt, Human
uauuuuacaugauccagaguug

SEQ ID NO: 219712 - RNA, 22 nt, Human
gcugggcuugguuucccugcuu

SEQ ID NO: 219713 - RNA, 22 nt, Human
cucucugggcccaguuggcacc

SEQ ID NO: 219714 - RNA, 20 nt, Human
auguaaaauuauaaggcuga

SEQ ID NO: 219715 - RNA, 22 nt, Human
agucagaauucgaucccagguc

SEQ ID NO: 219716 - RNA, 22 nt, Human
uacuuacagaaggaagcaauug

SEQ ID NO: 219717 - RNA, 22 nt, Human
guguccugggggacuucagguu

SEQ ID NO: 219718 - RNA, 22 nt, Human
aaagugcaguaacuugcccaag

SEQ ID NO: 219719 - RNA, 22 nt, Human
gagccuuugaagcccucagaga

SEQ ID NO: 219720 - RNA, 22 nt, Human
uccaggccaauguagcaggccc

SEQ ID NO: 219721 - RNA, 22 nt, Human
gaccuuuagugucauguuauau

SEQ ID NO: 219722 - RNA, 22 nt, Human
cucuguacaggagacaucucua

SEQ ID NO: 219723 - RNA, 22 nt, Human
agaggggaggcgaaccagaguc

SEQ ID NO: 219724 - RNA, 22 nt, Human
cagggcugucuccaaaggcccc

SEQ ID NO: 219725 - RNA, 22 nt, Human
augaaguucucaauaaucaugu

SEQ ID NO: 219726 - RNA, 22 nt, Human
aggcagauuuucuuuacucagu

SEQ ID NO: 219727 - RNA, 23 nt, Human
aaaaucuucugccuaugaagaaa

SEQ ID NO: 219728 - RNA, 22 nt, Human
cugggcucuggggucccggugc

SEQ ID NO: 219729 - RNA, 19 nt, Human
cagagccucagagcuagaa

SEQ ID NO: 219730 - RNA, 22 nt, Human
ccuggcacacgguggcauucaa

SEQ ID NO: 219731 - RNA, 22 nt, Human
ucauguuucucuuacagcagcu

SEQ ID NO: 219732 - RNA, 22 nt, Human
acaggcugacuuccugccaugu

SEQ ID NO: 219733 - RNA, 23 nt, Human
uacugucuucuauuaaguaagga

SEQ ID NO: 219734 - RNA, 22 nt, Human
cuucuguggauguuggaugcau

SEQ ID NO: 219735 - RNA, 22 nt, Human
auggagacugcgucugccaucc

SEQ ID NO: 219736 - RNA, 22 nt, Human
ggcuguggggaccaacaggacu

SEQ ID NO: 219737 - RNA, 22 nt, Human
ggccaaggcucuugagggcuga

SEQ ID NO: 219738 - RNA, 22 nt, Human
agaagcagggcagggaaaagca

SEQ ID NO: 219739 - RNA, 22 nt, Human
aagaauuaucugaaagcugugu

SEQ ID NO: 219740 - RNA, 22 nt, Human
acaggccuuaggagagaugggg

SEQ ID NO: 219741 - RNA, 22 nt, Human
ggccuugaucucucuaacugcu

SEQ ID NO: 219742 - RNA, 22 nt, Human
guguuugugagcuaggugacau

SEQ ID NO: 219743 - RNA, 22 nt, Human
ugacccauggucugaucauagg

SEQ ID NO: 219744 - RNA, 22 nt, Human
uuccuucucagcccucgaggau

SEQ ID NO: 219745 - RNA, 22 nt, Human
uguguccuaugaaagaggguua

SEQ ID NO: 219746 - RNA, 22 nt, Human
uuccucagcacaaagccaagau

SEQ ID NO: 219747 - RNA, 22 nt, Human
gaguguggugaacaggagcacc

SEQ ID NO: 219748 - RNA, 22 nt, Human
uguguucagaauuugcugcuuu

SEQ ID NO: 219749 - RNA, 22 nt, Human
gggcuucugcucuuuuggugcu

SEQ ID NO: 219750 - RNA, 22 nt, Human
aaaucucaaaggcuuagcaucu

SEQ ID NO: 219751 - RNA, 22 nt, Human
uaaaaguauacuuucaaaggag

SEQ ID NO: 219752 - RNA, 18 nt, Human
acauuuaggagagucaau

SEQ ID NO: 219753 - RNA, 18 nt, Human
uggguggcuagggaguuu

SEQ ID NO: 219754 - RNA, 22 nt, Human
uugggaagaggccccuggauuc

SEQ ID NO: 219755 - RNA, 22 nt, Human
ugcaaacaccacagagacaauu

SEQ ID NO: 219756 - RNA, 22 nt, Human
cacuuuauaaaauuggugugag

SEQ ID NO: 219757 - RNA, 22 nt, Human
acguucaaugucagucaacuuu

SEQ ID NO: 219758 - RNA, 22 nt, Human
ggccuucacgugaccuggcgug

SEQ ID NO: 219759 - RNA, 22 nt, Human
aaggugucaaacuagaagaugu

SEQ ID NO: 219760 - RNA, 22 nt, Human
aaacaacaugguggguguguag

SEQ ID NO: 219761 - RNA, 22 nt, Human
uaacaguacauccuuuucucuu

SEQ ID NO: 219762 - RNA, 22 nt, Human
gagcugaaggagaaagcagggg

SEQ ID NO: 219763 - RNA, 22 nt, Human
aacuggauuuaggaacagagaa

SEQ ID NO: 219764 - RNA, 22 nt, Human
uagccaguuucuuuaacagcaa

SEQ ID NO: 219765 - RNA, 22 nt, Human
ucugcacccugugguccucuag

SEQ ID NO: 219766 - RNA, 22 nt, Human
uaggcugggagccugaggcuag

SEQ ID NO: 219767 - RNA, 18 nt, Human
uggugaaggguggaggag

SEQ ID NO: 219768 - RNA, 20 nt, Human
agcugaggcaccugagguua

SEQ ID NO: 219769 - RNA, 19 nt, Human
ucccaguggggagaggugu

SEQ ID NO: 219770 - RNA, 22 nt, Human
aaaguguugggaagaaagugca

SEQ ID NO: 219771 - RNA, 22 nt, Human
acagugcugaucuagacugacc

SEQ ID NO: 219772 - RNA, 21 nt, Human
ccuucucuugcuucagcuuca

SEQ ID NO: 219773 - RNA, 22 nt, Human
gugucccaggccucuggaauua

SEQ ID NO: 219774 - RNA, 22 nt, Human
aacuucuaaucuguacaguuuu

SEQ ID NO: 219775 - RNA, 22 nt, Human
uuccaucugcuagguaaaugaa

SEQ ID NO: 219776 - RNA, 22 nt, Human
uccaggaggaggaaggcugcca

SEQ ID NO: 219777 - RNA, 22 nt, Human
auagucuuacuuuucucugcua

SEQ ID NO: 219778 - RNA, 22 nt, Human
ccaaggccacaaacagccuggc

SEQ ID NO: 219779 - RNA, 22 nt, Human
uggaaacugggaguuaaaugua

SEQ ID NO: 219780 - RNA, 22 nt, Human
acucuggcgggcgggcgagcca

SEQ ID NO: 219781 - RNA, 22 nt, Human
acaggcuugcacuaggguggca

SEQ ID NO: 219782 - RNA, 22 nt, Human
ucaggcagucugacuccggagg

SEQ ID NO: 219783 - RNA, 22 nt, Human
ggccugugcugucagcccuagu

SEQ ID NO: 219784 - RNA, 17 nt, Human
gcuaggagagggaggag

SEQ ID NO: 219785 - RNA, 22 nt, Human
ccuggcucugccguaaccacca

SEQ ID NO: 219786 - RNA, 23 nt, Human
guaaugaugggaauuuacuuaga

SEQ ID NO: 219787 - RNA, 22 nt, Human
agaaagggaugagguagcugcu

SEQ ID NO: 219788 - RNA, 22 nt, Human
auuguauuauaauuaggccaaa

SEQ ID NO: 219789 - RNA, 22 nt, Human
gcaguuuuauuaugauggaaau

SEQ ID NO: 219790 - RNA, 23 nt, Human
uuaugcaagcuuccuggucucag

SEQ ID NO: 219791 - RNA, 22 nt, Human
acagcugcacacugaacuuggu

SEQ ID NO: 219792 - RNA, 22 nt, Human
gcagcuggauuucaagagggag

SEQ ID NO: 219793 - RNA, 22 nt, Human
cugugcucugagcgugggguug

SEQ ID NO: 219794 - RNA, 20 nt, Human
gcacagagaugagcaaagua

SEQ ID NO: 219795 - RNA, 22 nt, Human
acagagcuuaggaugacuccca

SEQ ID NO: 219796 - RNA, 22 nt, Human
ccagcaccuugaucuuggaguu

SEQ ID NO: 219797 - RNA, 21 nt, Human
aguguuaauggaaauuauauu

SEQ ID NO: 219798 - RNA, 22 nt, Human
ucugggcugucuacagguuggc

SEQ ID NO: 219799 - RNA, 19 nt, Human
uacaagcuuuuuuggcagg

SEQ ID NO: 219800 - RNA, 22 nt, Human
ccugggcaacauagugagaccc

SEQ ID NO: 219801 - RNA, 22 nt, Human
caguuaccaucuucagugauga

SEQ ID NO: 219802 - RNA, 22 nt, Human
cccaccucucagagagccuugc

SEQ ID NO: 219803 - RNA, 22 nt, Human
aaucuaagggaaauuggagaug

SEQ ID NO: 219804 - RNA, 18 nt, Human
gcucagcuaugggagguu

SEQ ID NO: 219805 - RNA, 22 nt, Human
uugcaaaugugaauaauuacac

SEQ ID NO: 219806 - RNA, 22 nt, Human
aagggcagcuuaaauugguagc

SEQ ID NO: 219807 - RNA, 22 nt, Human
ugcugagacaacaggaaacaag

SEQ ID NO: 219808 - RNA, 22 nt, Human
ucugcugcugaccaacacugug

SEQ ID NO: 219809 - RNA, 22 nt, Human
gcagggcaucccugagcgggug

SEQ ID NO: 219810 - RNA, 23 nt, Human
gagcagagcgggcggggguccug

SEQ ID NO: 219811 - RNA, 22 nt, Human
ccucuggccagagaaaggccag

SEQ ID NO: 219812 - RNA, 22 nt, Human
cagagagagcaggaaaccuccg

SEQ ID NO: 219813 - RNA, 22 nt, Human
ucacacagcagccccggguguu

SEQ ID NO: 219814 - RNA, 22 nt, Human
agccagcacggauuucccagga

SEQ ID NO: 219815 - RNA, 22 nt, Human
uuucacagugcucuguaaguau

SEQ ID NO: 219816 - RNA, 22 nt, Human
auccacuuggcugguuguucua

SEQ ID NO: 219817 - RNA, 22 nt, Human
acugucaagagauucaaauuca

SEQ ID NO: 219818 - RNA, 22 nt, Human
aagacgcacccuuugagggcac

SEQ ID NO: 219819 - RNA, 22 nt, Human
cugucuucccgaggcccuggag

SEQ ID NO: 219820 - RNA, 22 nt, Human
ucccagaguauuagcaauugcu

SEQ ID NO: 219821 - RNA, 22 nt, Human
uccugagcacagagacaaggaa

SEQ ID NO: 219822 - RNA, 23 nt, Human
uaauucacauauacauugcuuca

SEQ ID NO: 219823 - RNA, 22 nt, Human
agcugcaaagaucugucaguca

SEQ ID NO: 219824 - RNA, 22 nt, Human
acuuccuguauuuauccauagc

SEQ ID NO: 219825 - RNA, 22 nt, Human
ucagcuuuggucacauugaguu

SEQ ID NO: 219826 - RNA, 22 nt, Human
auuacaagaugcauccauauuu

SEQ ID NO: 219827 - RNA, 22 nt, Human
auuucuguuauaccuuucucag

SEQ ID NO: 219828 - RNA, 22 nt, Human
cugggagcuagcucugagcuga

SEQ ID NO: 219829 - RNA, 22 nt, Human
cuacauguagguuuccuuaauu

SEQ ID NO: 219830 - RNA, 21 nt, Human
agcauucaaaagaugccauaa

SEQ ID NO: 219831 - RNA, 22 nt, Human
aagagaaggauucugagccugg

SEQ ID NO: 219832 - RNA, 22 nt, Human
gagaaaggcauuccuaugcaaa

SEQ ID NO: 219833 - RNA, 22 nt, Human
aggaagaaccuaagaaagucuc

SEQ ID NO: 219834 - RNA, 23 nt, Human
ggcacucggccgugaacucgugc

SEQ ID NO: 219835 - RNA, 22 nt, Human
cagcucuuuuuugcagcagcug

SEQ ID NO: 219836 - RNA, 22 nt, Human
ugcugagguuguggagugcauu

SEQ ID NO: 219837 - RNA, 21 nt, Human
ggcacugcugggccaucugcu

SEQ ID NO: 219838 - RNA, 21 nt, Human
aauucccagaaacagcacaag

SEQ ID NO: 219839 - RNA, 22 nt, Human
auuccucauuauuuacugagga

SEQ ID NO: 219840 - RNA, 22 nt, Human
ccucaaauugucaaauaagaau

SEQ ID NO: 219841 - RNA, 22 nt, Human
uauauuaaaugaccaguuuuaa

SEQ ID NO: 219842 - RNA, 22 nt, Human
ggaaggcuccacccaaggcgag

SEQ ID NO: 219843 - RNA, 22 nt, Human
uuucagacugcugugugaaacu

SEQ ID NO: 219844 - RNA, 22 nt, Human
uaaauguaccuucugccuuacu

SEQ ID NO: 219845 - RNA, 22 nt, Human
ucagaagucacuuaggaaaggg

SEQ ID NO: 219846 - RNA, 22 nt, Human
ucagguagugguuaaguucugu

SEQ ID NO: 219847 - RNA, 22 nt, Human
gcccucaguggauucuuauugu

SEQ ID NO: 219848 - RNA, 22 nt, Human
cacaaaugguuguagacauuaa

SEQ ID NO: 219849 - RNA, 22 nt, Human
uuguuaaaaauagauuuccagg

SEQ ID NO: 219850 - RNA, 22 nt, Human
agauggcaggcccugugggggu

SEQ ID NO: 219851 - RNA, 22 nt, Human
cucuugggugggcagugggccu

SEQ ID NO: 219852 - RNA, 22 nt, Human
aggcugccagaagccuucagga

SEQ ID NO: 219853 - RNA, 22 nt, Human
cagaggcccagugagagggcug

SEQ ID NO: 219854 - RNA, 22 nt, Human
uagcugggagugucugaugggu

SEQ ID NO: 219855 - RNA, 22 nt, Human
auuaguguggacccuaauuuaa

SEQ ID NO: 219856 - RNA, 18 nt, Human
acacacacaccuguguau

SEQ ID NO: 219857 - RNA, 21 nt, Human
aggaaaggaaguccccagggu

SEQ ID NO: 219858 - RNA, 19 nt, Human
ccuagagcaguaccuggua

SEQ ID NO: 219859 - RNA, 22 nt, Human
ucuggaagacagugagcccgcu

SEQ ID NO: 219860 - RNA, 22 nt, Human
ugagacuuaagaggucauguug

SEQ ID NO: 219861 - RNA, 22 nt, Human
aaguaguuaggaacauucucuc

SEQ ID NO: 219862 - RNA, 22 nt, Human
agaggcaagauuaucagggcau

SEQ ID NO: 219863 - RNA, 22 nt, Human
aaauuagaccaguucaggucca

SEQ ID NO: 219864 - RNA, 22 nt, Human
uuuauaugguugacuaugaguu

SEQ ID NO: 219865 - RNA, 22 nt, Human
uauuugcaacauaaaacucuga

SEQ ID NO: 219866 - RNA, 22 nt, Human
gucugggcaccuggccugggaa

SEQ ID NO: 219867 - RNA, 22 nt, Human
auguuacagagaaaguggaagc

SEQ ID NO: 219868 - RNA, 22 nt, Human
uucucucugagagcaucuggaa

SEQ ID NO: 219869 - RNA, 22 nt, Human
cucuccagaauuauuacuauua

SEQ ID NO: 219870 - RNA, 23 nt, Human
uccuccugagugagagugccagc

SEQ ID NO: 219871 - RNA, 22 nt, Human
gacugagaaacaguacauuacc

SEQ ID NO: 219872 - RNA, 22 nt, Human
uagcuguguagacacucagagc

SEQ ID NO: 219873 - RNA, 21 nt, Human
gauccacugaccuggggaucc

SEQ ID NO: 219874 - RNA, 22 nt, Human
aggaauguggccuagggaggag

SEQ ID NO: 219875 - RNA, 23 nt, Human
ucaggauauugugugccaaggug

SEQ ID NO: 219876 - RNA, 22 nt, Human
auuguuaugaaaauaagauguu

SEQ ID NO: 219877 - RNA, 22 nt, Human
ugucuuuaguugcuuagauuug

SEQ ID NO: 219878 - RNA, 22 nt, Human
ugcccuggcuccucccacgcug

SEQ ID NO: 219879 - RNA, 23 nt, Human
ugucacauuuaguuggcauuguu

SEQ ID NO: 219880 - RNA, 22 nt, Human
agacauagaaaaucauuaggaa

SEQ ID NO: 219881 - RNA, 22 nt, Human
gcuucucucaggagcaucagcc

SEQ ID NO: 219882 - RNA, 22 nt, Human
agagaauacaaagaagauaugu

SEQ ID NO: 219883 - RNA, 22 nt, Human
gagcacagaacuaaaugcuggu

SEQ ID NO: 219884 - RNA, 22 nt, Human
uggcacaggaauuuagaugcag

SEQ ID NO: 219885 - RNA, 22 nt, Human
ucaggagacuggcagugcccac

SEQ ID NO: 219886 - RNA, 22 nt, Human
cauuaaaauaucucaugguguu

SEQ ID NO: 219887 - RNA, 22 nt, Human
agcugggagcugaaggcugauu

SEQ ID NO: 219888 - RNA, 22 nt, Human
uggguccuugcugauugcugag

SEQ ID NO: 219889 - RNA, 22 nt, Human
caggagaagucucuagggggug

SEQ ID NO: 219890 - RNA, 21 nt, Human
ggcacagccugaaaugccuca

SEQ ID NO: 219891 - RNA, 22 nt, Human
cagcucaguuucaauaccaggu

SEQ ID NO: 219892 - RNA, 22 nt, Human
uuugaucagcaagauaaauaga

SEQ ID NO: 219893 - RNA, 21 nt, Human
agauuacaggugugauccacc

SEQ ID NO: 219894 - RNA, 22 nt, Human
acuguauugguuuucuauugcu

SEQ ID NO: 219895 - RNA, 22 nt, Human
caguuggugaugaggcuaguag

SEQ ID NO: 219896 - RNA, 22 nt, Human
gaggcuggaggucaaagaugaa

SEQ ID NO: 219897 - RNA, 22 nt, Human
ucgggcucgcucuccuagcgga

SEQ ID NO: 219898 - RNA, 22 nt, Human
agcugcaaaggcacacuugggc

SEQ ID NO: 219899 - RNA, 22 nt, Human
agcaggcuccaggcuggccauc

SEQ ID NO: 219900 - RNA, 22 nt, Human
gcagagcuccccaagacaccaa

SEQ ID NO: 219901 - RNA, 22 nt, Human
acuguacacagugguguacugu

SEQ ID NO: 219902 - RNA, 22 nt, Human
gguguccuugcuccuucagcuu

SEQ ID NO: 219903 - RNA, 22 nt, Human
gaaggaggucugauacaauaug

SEQ ID NO: 219904 - RNA, 22 nt, Human
agcuguuuguacuuagauagua

SEQ ID NO: 219905 - RNA, 22 nt, Human
cacaguuauauguucacaagga

SEQ ID NO: 219906 - RNA, 22 nt, Human
aguggcagacagagacaguacc

SEQ ID NO: 219907 - RNA, 22 nt, Human
cuuuggaacacaugggcauggu

SEQ ID NO: 219908 - RNA, 22 nt, Human
auuaagacuauugauauuuaca

SEQ ID NO: 219909 - RNA, 22 nt, Human
ccuuagaaggcugaauaauucu

SEQ ID NO: 219910 - RNA, 22 nt, Human
acucuguagauguggaaaugcg

SEQ ID NO: 219911 - RNA, 22 nt, Human
aauugcaacagguagacuuuuc

SEQ ID NO: 219912 - RNA, 22 nt, Human
cacugagcaugagugggcugug

SEQ ID NO: 219913 - RNA, 22 nt, Human
uugcucuguccagccagcaggu

SEQ ID NO: 219914 - RNA, 21 nt, Human
agugaaauugcaucagaggga

SEQ ID NO: 219915 - RNA, 16 nt, Human
gugcaaaagugaggag

SEQ ID NO: 219916 - RNA, 22 nt, Human
caugagcugcugggagccuguc

SEQ ID NO: 219917 - RNA, 22 nt, Human
ggcauccaguucugaucaacaa

SEQ ID NO: 219918 - RNA, 22 nt, Human
uuauauacugugguaguacugu

SEQ ID NO: 219919 - RNA, 22 nt, Human
acaacaggguaaggcaggccau

SEQ ID NO: 219920 - RNA, 22 nt, Human
ucccucagaugagcuccuagca

SEQ ID NO: 219921 - RNA, 22 nt, Human
ccauuuggaggucauuaggaca

SEQ ID NO: 219922 - RNA, 23 nt, Human
uguuccagauacgccuuuuccuc

SEQ ID NO: 219923 - RNA, 22 nt, Human
ucaaaauuuuauuucucaagga

SEQ ID NO: 219924 - RNA, 22 nt, Human
ucuggcucuccagugcucuuag

SEQ ID NO: 219925 - RNA, 22 nt, Human
ccagcugcccaagaggcauccu

SEQ ID NO: 219926 - RNA, 22 nt, Human
uuugaaagcaggugugggaggg

SEQ ID NO: 219927 - RNA, 22 nt, Human
cagaauuuagaaaacaacauaa

SEQ ID NO: 219928 - RNA, 22 nt, Human
auauugagauaagaacugacau

SEQ ID NO: 219929 - RNA, 22 nt, Human
gaggugaguggggucuccaggg

SEQ ID NO: 219930 - RNA, 22 nt, Human
agaaggccuaacuugggggcaa

SEQ ID NO: 219931 - RNA, 22 nt, Human
uuggcacacaguaagcccuaag

SEQ ID NO: 219932 - RNA, 22 nt, Human
cuggggcuggugaggcaggcuc

SEQ ID NO: 219933 - RNA, 22 nt, Human
cauuccaaguauauacaugaua

SEQ ID NO: 219934 - RNA, 22 nt, Human
cuuuaugguaaguauagaugac

SEQ ID NO: 219935 - RNA, 22 nt, Human
ccaggcagaaugaaaccccugu

SEQ ID NO: 219936 - RNA, 19 nt, Human
aggaaagguggccuuagca

SEQ ID NO: 219937 - RNA, 22 nt, Human
gaagguuuucaggagccuaguc

SEQ ID NO: 219938 - RNA, 22 nt, Human
uguucauuccggggagggcuaa

SEQ ID NO: 219939 - RNA, 22 nt, Human
uguccuuuuccccaaauucacu

SEQ ID NO: 219940 - RNA, 22 nt, Human
ggcaaaaaccauaauuacuuuu

SEQ ID NO: 219941 - RNA, 22 nt, Human
aaugucaaucucagagaacaca

SEQ ID NO: 219942 - RNA, 22 nt, Human
aaugcaaauucuagggcccuau

SEQ ID NO: 219943 - RNA, 22 nt, Human
uggaagggagugacagucagag

SEQ ID NO: 219944 - RNA, 22 nt, Human
ucugccagcccugugagucuug

SEQ ID NO: 219945 - RNA, 22 nt, Human
gggcaguugauggaggucugga

SEQ ID NO: 219946 - RNA, 22 nt, Human
caggcagcucaaccuugggagc

SEQ ID NO: 219947 - RNA, 22 nt, Human
caccucaugucaucaguaaaau

SEQ ID NO: 219948 - RNA, 22 nt, Human
ugcauuaagugucugcauaugg

SEQ ID NO: 219949 - RNA, 22 nt, Human
cagaaauucccauuucagauuc

SEQ ID NO: 219950 - RNA, 22 nt, Human
cuuuguaucuaaauaucuugaa

SEQ ID NO: 219951 - RNA, 22 nt, Human
guuauuuuaucucugagagguu

SEQ ID NO: 219952 - RNA, 20 nt, Human
uaaacaguauuuacuaggag

SEQ ID NO: 219953 - RNA, 22 nt, Human
agcuccugccaacacugauggg

SEQ ID NO: 219954 - RNA, 22 nt, Human
guaauuacauuaggguaaauaa

SEQ ID NO: 219955 - RNA, 22 nt, Human
aguaggguguugcuauaacaag

SEQ ID NO: 219956 - RNA, 22 nt, Human
cauuugcugaggccuucagagg

SEQ ID NO: 219957 - RNA, 22 nt, Human
aguugcugauucugucugugau

SEQ ID NO: 219958 - RNA, 22 nt, Human
gucugcccugcagacaugccuc

SEQ ID NO: 219959 - RNA, 22 nt, Human
augaggcagauguugcaugagg

SEQ ID NO: 219960 - RNA, 22 nt, Human
aauugcuuguuucuuuaacuga

SEQ ID NO: 219961 - RNA, 22 nt, Human
acuuucuccagaaaaccaagga

SEQ ID NO: 219962 - RNA, 22 nt, Human
ccaagcaaauaaucacccacua

SEQ ID NO: 219963 - RNA, 21 nt, Human
uuacaugguuuaucauaugga

SEQ ID NO: 219964 - RNA, 22 nt, Human
uuccuggggugaagauauuuuu

SEQ ID NO: 219965 - RNA, 22 nt, Human
uacgugcaaggucccugccccu

SEQ ID NO: 219966 - RNA, 22 nt, Human
aucugguuuuggcugugucccu

SEQ ID NO: 219967 - RNA, 22 nt, Human
gucuggcuuugcucagaugcug

SEQ ID NO: 219968 - RNA, 22 nt, Human
aagugcaugguauggucuccau

SEQ ID NO: 219969 - RNA, 22 nt, Human
cagggcugcuggccgugcccuc

SEQ ID NO: 219970 - RNA, 22 nt, Human
gaugcugauuuuacuguuuucu

SEQ ID NO: 219971 - RNA, 22 nt, Human
gcccugggcucccugcuccaca

SEQ ID NO: 219972 - RNA, 22 nt, Human
ggccagcuccuuggcagugccu

SEQ ID NO: 219973 - RNA, 22 nt, Human
ucugaaggugcuagagaaagcu

SEQ ID NO: 219974 - RNA, 22 nt, Human
uuugcaaaccggagcucugcaa

SEQ ID NO: 219975 - RNA, 22 nt, Human
cucaggauucucgacacucaca

SEQ ID NO: 219976 - RNA, 22 nt, Human
uuuagcuauggauaacaaccac

SEQ ID NO: 219977 - RNA, 22 nt, Human
acacccagauuaugcacacaaa

SEQ ID NO: 219978 - RNA, 22 nt, Human
cuggcuuccucaggagcagugg

SEQ ID NO: 219979 - RNA, 22 nt, Human
ugcuagggauacaguggugaau

SEQ ID NO: 219980 - RNA, 22 nt, Human
gaaggaggucugcauucuacag

SEQ ID NO: 219981 - RNA, 23 nt, Human
acuagaaaaugacuuucucccug

SEQ ID NO: 219982 - RNA, 22 nt, Human
cuagagaagagguuaagcauga

SEQ ID NO: 219983 - RNA, 22 nt, Human
cagcuuggcgaauguagguaug

SEQ ID NO: 219984 - RNA, 22 nt, Human
gucacuguauccagguuccagc

SEQ ID NO: 219985 - RNA, 22 nt, Human
auguccagccaaccacuggauu

SEQ ID NO: 219986 - RNA, 18 nt, Human
aggucuguggucaccagg

SEQ ID NO: 219987 - RNA, 22 nt, Human
ucuucauuuuacaggcagaccu

SEQ ID NO: 219988 - RNA, 22 nt, Human
agcuggguacagccugugccua

SEQ ID NO: 219989 - RNA, 22 nt, Human
uccauucuuuugcugucuuccu

SEQ ID NO: 219990 - RNA, 22 nt, Human
auuucuagguagagaagcuuag

SEQ ID NO: 219991 - RNA, 22 nt, Human
aaaguuaguaaaaugggauaua

SEQ ID NO: 219992 - RNA, 19 nt, Human
ugagaggcuuaaggcagcu

SEQ ID NO: 219993 - RNA, 20 nt, Human
cccuggacuccugagcaaac

SEQ ID NO: 219994 - RNA, 22 nt, Human
gaaauauuacaguggaggggau

SEQ ID NO: 219995 - RNA, 22 nt, Human
ccugcagguugcagaggcggaa

SEQ ID NO: 219996 - RNA, 22 nt, Human
cugggcugauuuagucacguuu

SEQ ID NO: 219997 - RNA, 22 nt, Human
cucaggaggccauucucaaggu

SEQ ID NO: 219998 - RNA, 22 nt, Human
agucacauuugggggugucaaa

SEQ ID NO: 219999 - RNA, 22 nt, Human
aggcuccagccaaugggucugu

SEQ ID NO: 220000 - RNA, 22 nt, Human
gccaggaaagggaauucccuga

SEQ ID NO: 220001 - RNA, 22 nt, Human
acauuucucagguaagucauuu

SEQ ID NO: 220002 - RNA, 22 nt, Human
ggagccagagucugcaguguaa

SEQ ID NO: 220003 - RNA, 19 nt, Human
gacaauuagagaucacuca

SEQ ID NO: 220004 - RNA, 22 nt, Human
aagcacagauaaaacaggauuc

SEQ ID NO: 220005 - RNA, 22 nt, Human
agguggcuguggcuucccuugu

SEQ ID NO: 220006 - RNA, 19 nt, Human
uggcugggcgugccuccgu

SEQ ID NO: 220007 - RNA, 22 nt, Human
gagcaguguuuguggaccugga

SEQ ID NO: 220008 - RNA, 22 nt, Human
ugaaagguuauuuaggucugcu

SEQ ID NO: 220009 - RNA, 22 nt, Human
uuuggaaugcccauggacuggu

SEQ ID NO: 220010 - RNA, 22 nt, Human
ucugacaugagggcuguggaga

SEQ ID NO: 220011 - RNA, 22 nt, Human
uuuuugcugauaagcagaauuc

SEQ ID NO: 220012 - RNA, 22 nt, Human
aagcagaguuagcuugucaccu

SEQ ID NO: 220013 - RNA, 22 nt, Human
gugcugaguagaaugaaugccu

SEQ ID NO: 220014 - RNA, 22 nt, Human
cugccuguuccugaucauucua

SEQ ID NO: 220015 - RNA, 21 nt, Human
cucugguccugucuggcaggc

SEQ ID NO: 220016 - RNA, 22 nt, Human
gcaaggcagcgcggaguagcua

SEQ ID NO: 220017 - RNA, 22 nt, Human
gauguaaaaacuccuuucgaaa

SEQ ID NO: 220018 - RNA, 22 nt, Human
agccaugggcucccaguccuuu

SEQ ID NO: 220019 - RNA, 22 nt, Human
cugggaggcggagguuguagug

SEQ ID NO: 220020 - RNA, 22 nt, Human
cagcucugccacuuccuagcua

SEQ ID NO: 220021 - RNA, 18 nt, Human
aggccucugugugcccag

SEQ ID NO: 220022 - RNA, 22 nt, Human
uuaaaaucgcuguugcuucugu

SEQ ID NO: 220023 - RNA, 22 nt, Human
augaugaaaugauagguuuguu

SEQ ID NO: 220024 - RNA, 22 nt, Human
aagaguaaaugucuaauuagga

SEQ ID NO: 220025 - RNA, 22 nt, Human
auguaauuuauguuauccauaa

SEQ ID NO: 220026 - RNA, 22 nt, Human
cucugcccagugcccacaggag

SEQ ID NO: 220027 - RNA, 22 nt, Human
uucagagcaucucuaaagccag

SEQ ID NO: 220028 - RNA, 22 nt, Human
cugccaggcagggagauggcug

SEQ ID NO: 220029 - RNA, 22 nt, Human
cacaccagauggcagcguggga

SEQ ID NO: 220030 - RNA, 22 nt, Human
auuugcuuaucuccacaguugu

SEQ ID NO: 220031 - RNA, 22 nt, Human
ucugggagagucacaggcauug

SEQ ID NO: 220032 - RNA, 22 nt, Human
aggccagggccagauuagccac

SEQ ID NO: 220033 - RNA, 22 nt, Human
gacagaugagggaguauucuca

SEQ ID NO: 220034 - RNA, 22 nt, Human
caggcagaugcugacaagaguu

SEQ ID NO: 220035 - RNA, 22 nt, Human
uaggcuccugaggacuccaugc

SEQ ID NO: 220036 - RNA, 22 nt, Human
ugcugaggcccaggagcacuuu

SEQ ID NO: 220037 - RNA, 22 nt, Human
aaagcuggcuuuuacaggggcu

SEQ ID NO: 220038 - RNA, 22 nt, Human
augaacagcauugaaauccagc

SEQ ID NO: 220039 - RNA, 22 nt, Human
uggcagugucuuaucaggagug

SEQ ID NO: 220040 - RNA, 22 nt, Human
aauuauacaugaaggcauuaua

SEQ ID NO: 220041 - RNA, 22 nt, Human
gccagagugccaucagugccau

SEQ ID NO: 220042 - RNA, 22 nt, Human
uuuauagucgucucaguaauaa

SEQ ID NO: 220043 - RNA, 22 nt, Human
acacuuuaagcauuucacacug

SEQ ID NO: 220044 - RNA, 22 nt, Human
ugagccguggucucugagggug

SEQ ID NO: 220045 - RNA, 22 nt, Human
cuggcuccaucuuugcuuccug

SEQ ID NO: 220046 - RNA, 22 nt, Human
cucuagcugaggucacugcuau

SEQ ID NO: 220047 - RNA, 22 nt, Human
ggccagcugcucagugucucug

SEQ ID NO: 220048 - RNA, 22 nt, Human
aacaguuuaugagauaugcuau

SEQ ID NO: 220049 - RNA, 22 nt, Human
ugagucagugacaugaacuugu

SEQ ID NO: 220050 - RNA, 22 nt, Human
aacugcaauuacuuuugcgcca

SEQ ID NO: 220051 - RNA, 22 nt, Human
gcagggaagaucuuggagcugc

SEQ ID NO: 220052 - RNA, 22 nt, Human
cagcucuacguuucuaugaauc

SEQ ID NO: 220053 - RNA, 20 nt, Human
agugaguuaucagcuacagu

SEQ ID NO: 220054 - RNA, 22 nt, Human
aggcugucucaccucaggaggg

SEQ ID NO: 220055 - RNA, 20 nt, Human
caguggcuucuguggaauau

SEQ ID NO: 220056 - RNA, 22 nt, Human
ccuagggauacagcagaguaca

SEQ ID NO: 220057 - RNA, 22 nt, Human
cagugagguagacagcuuuuuc

SEQ ID NO: 220058 - RNA, 19 nt, Human
cagaaauagcgaaguguaa

SEQ ID NO: 220059 - RNA, 22 nt, Human
auuuuguuuccuuuggaguaga

SEQ ID NO: 220060 - RNA, 22 nt, Human
guacaugugcacaaugugcagg

SEQ ID NO: 220061 - RNA, 22 nt, Human
uccacagacuauuaagugaucu

SEQ ID NO: 220062 - RNA, 22 nt, Human
cugcccugggaguaccuguccu

SEQ ID NO: 220063 - RNA, 22 nt, Human
cagcuggaggagcagcuuccag

SEQ ID NO: 220064 - RNA, 22 nt, Human
aagaguuagcucaauaacuuga

SEQ ID NO: 220065 - RNA, 22 nt, Human
gagggcagugaauuuugaagcu

SEQ ID NO: 220066 - RNA, 22 nt, Human
aggucauuuuugccuucuauuu

SEQ ID NO: 220067 - RNA, 21 nt, Human
cccaagggaggcaggauaagg

SEQ ID NO: 220068 - RNA, 21 nt, Human
ugcuaagugucacaugucugc

SEQ ID NO: 220069 - RNA, 22 nt, Human
aaaauguucaagcaugcugguu

SEQ ID NO: 220070 - RNA, 22 nt, Human
aggcucagccccugggaggaga

SEQ ID NO: 220071 - RNA, 22 nt, Human
gaggcagcgggucaggaccgug

SEQ ID NO: 220072 - RNA, 22 nt, Human
agaagggccagcuggacaccug

SEQ ID NO: 220073 - RNA, 22 nt, Human
gaaggcugaguggguacggagg

SEQ ID NO: 220074 - RNA, 20 nt, Human
agagugcuggacugaggagc

SEQ ID NO: 220075 - RNA, 22 nt, Human
uccaggcagucauuaaucucua

SEQ ID NO: 220076 - RNA, 22 nt, Human
agcugauacauuucuuguagcc

SEQ ID NO: 220077 - RNA, 22 nt, Human
ugagaucucugccuauauggau

SEQ ID NO: 220078 - RNA, 22 nt, Human
acaaauagagauucaaauaaag

SEQ ID NO: 220079 - RNA, 22 nt, Human
caggggcugagaaggaacgucc

SEQ ID NO: 220080 - RNA, 22 nt, Human
auuuugaugcuaucuaaugaau

SEQ ID NO: 220081 - RNA, 22 nt, Human
aggaauguauugaccuguugca

SEQ ID NO: 220082 - RNA, 22 nt, Human
gguguccuuagaaagcagaccu

SEQ ID NO: 220083 - RNA, 22 nt, Human
gcugcaggcauuuuccugggca

SEQ ID NO: 220084 - RNA, 23 nt, Human
ugcuggcuuuuaucuggucccua

SEQ ID NO: 220085 - RNA, 22 nt, Human
gugcaccccggggcccugcucc

SEQ ID NO: 220086 - RNA, 22 nt, Human
cucugcccccagcuggugcuug

SEQ ID NO: 220087 - RNA, 22 nt, Human
cucccaguguuguuuucugaug

SEQ ID NO: 220088 - RNA, 22 nt, Human
acuuucaugguaguuguauucu

SEQ ID NO: 220089 - RNA, 22 nt, Human
ucaaguauuuauuucugcuggc

SEQ ID NO: 220090 - RNA, 22 nt, Human
aagcacagugggcagagcagcc

SEQ ID NO: 220091 - RNA, 22 nt, Human
auuuugaaauacuugaaggaaa

SEQ ID NO: 220092 - RNA, 18 nt, Human
uccaaagcugcugguuuu

SEQ ID NO: 220093 - RNA, 22 nt, Human
agugcugacucugggcacagug

SEQ ID NO: 220094 - RNA, 22 nt, Human
agccacaggaaacagagacagc

SEQ ID NO: 220095 - RNA, 22 nt, Human
ugcacacacgcggcacaucugu

SEQ ID NO: 220096 - RNA, 22 nt, Human
uuugggcaauucagugggaccu

SEQ ID NO: 220097 - RNA, 22 nt, Human
uuaauuaagagauacugcagua

SEQ ID NO: 220098 - RNA, 20 nt, Human
uuuuuccuucucuacaggca

SEQ ID NO: 220099 - RNA, 22 nt, Human
aggcaggaggaucauggaugca

SEQ ID NO: 220100 - RNA, 22 nt, Human
agggucagggagugaguauuua

SEQ ID NO: 220101 - RNA, 22 nt, Human
aggugccaccucuggugcuguc

SEQ ID NO: 220102 - RNA, 22 nt, Human
cuggcagggugggcuuugcuuu

SEQ ID NO: 220103 - RNA, 20 nt, Human
ugggccuguggcagaagucu

SEQ ID NO: 220104 - RNA, 22 nt, Human
ucugaaagcuagaaaaugcucu

SEQ ID NO: 220105 - RNA, 22 nt, Human
gaugaggcauaaacacagucac

SEQ ID NO: 220106 - RNA, 22 nt, Human
ugcaaagaagccuuugccuucu

SEQ ID NO: 220107 - RNA, 23 nt, Human
aggaaacugaaggggcccucuau

SEQ ID NO: 220108 - RNA, 22 nt, Human
cagaaacugcuuguggucaucu

SEQ ID NO: 220109 - RNA, 22 nt, Human
uccuccaagcagaggcccugaa

SEQ ID NO: 220110 - RNA, 23 nt, Human
agcuccuguaagguggucgucac

SEQ ID NO: 220111 - RNA, 22 nt, Human
auuaucuugauaaaauggcagu

SEQ ID NO: 220112 - RNA, 22 nt, Human
cuuucuagacuguccagaugau

SEQ ID NO: 220113 - RNA, 20 nt, Human
ggccugagcauggcuggcag

SEQ ID NO: 220114 - RNA, 22 nt, Human
agcaugcaguaaagcccauguc

SEQ ID NO: 220115 - RNA, 22 nt, Human
agcugugugaccuagggcaagc

SEQ ID NO: 220116 - RNA, 22 nt, Human
caaggcuucacguccccagugc

SEQ ID NO: 220117 - RNA, 22 nt, Human
augucuguucauuauuaacugc

SEQ ID NO: 220118 - RNA, 22 nt, Human
gggagcugagcucugagccacg

SEQ ID NO: 220119 - RNA, 22 nt, Human
aauuccacagaugucuaucugu

SEQ ID NO: 220120 - RNA, 22 nt, Human
uugaaugaagucccuuuuuacu

SEQ ID NO: 220121 - RNA, 22 nt, Human
uguaaagauccuuagcaacauc

SEQ ID NO: 220122 - RNA, 21 nt, Human
cgcagagcgaacuugcggcgc

SEQ ID NO: 220123 - RNA, 22 nt, Human
ccugugucuuugccucaggguc

SEQ ID NO: 220124 - RNA, 22 nt, Human
guccugugugacuucccaaaug

SEQ ID NO: 220125 - RNA, 22 nt, Human
ugugcugcucucagugacagcc

SEQ ID NO: 220126 - RNA, 18 nt, Human
cuaucccuggagcuuggg

SEQ ID NO: 220127 - RNA, 22 nt, Human
uuuggaauggaauagagauugc

SEQ ID NO: 220128 - RNA, 22 nt, Human
aaagcagaacugagagagcugg

SEQ ID NO: 220129 - RNA, 22 nt, Human
uuuauuuggcaucucugccaag

SEQ ID NO: 220130 - RNA, 22 nt, Human
gcugcucuuuucagagaugaga

SEQ ID NO: 220131 - RNA, 22 nt, Human
ucugggaaaguaaauguaaagg

SEQ ID NO: 220132 - RNA, 17 nt, Human
uguuuucugcuaccuuu

SEQ ID NO: 220133 - RNA, 22 nt, Human
aaaucccagauaguaauguauu

SEQ ID NO: 220134 - RNA, 19 nt, Human
gaggaggcuucagcuuucu

SEQ ID NO: 220135 - RNA, 22 nt, Human
uuuuuagaguguuaccaguaua

SEQ ID NO: 220136 - RNA, 22 nt, Human
uuuauucuauaggcauuaagca

SEQ ID NO: 220137 - RNA, 22 nt, Human
agggagcugacuggcugccauu

SEQ ID NO: 220138 - RNA, 22 nt, Human
ggagcacaccgggagcuugccu

SEQ ID NO: 220139 - RNA, 22 nt, Human
guggaaaugcccccaaauagug

SEQ ID NO: 220140 - RNA, 22 nt, Human
gcuugucugcugagccaccugu

SEQ ID NO: 220141 - RNA, 21 nt, Human
ccaggucuugguccuuggacu

SEQ ID NO: 220142 - RNA, 22 nt, Human
aaagugcacuagaauccagauu

SEQ ID NO: 220143 - RNA, 22 nt, Human
uccaucuggaugguauguguaa

SEQ ID NO: 220144 - RNA, 22 nt, Human
ggcuccaggaaccuccucuccu

SEQ ID NO: 220145 - RNA, 22 nt, Human
aucuccagaggagucauggucu

SEQ ID NO: 220146 - RNA, 22 nt, Human
ggaaaagacagaauucuagaau

SEQ ID NO: 220147 - RNA, 22 nt, Human
ggaacagacugacuucuugaau

SEQ ID NO: 220148 - RNA, 22 nt, Human
aacuguugucauauggucuuaa

SEQ ID NO: 220149 - RNA, 22 nt, Human
ucgccauggaaguccuugcgga

SEQ ID NO: 220150 - RNA, 22 nt, Human
gcaggcuccaacuggaggaguu

SEQ ID NO: 220151 - RNA, 22 nt, Human
ccacugccaugggcuaggcaug

SEQ ID NO: 220152 - RNA, 20 nt, Human
acauuuuggcauacucucaa

SEQ ID NO: 220153 - RNA, 22 nt, Human
uagcuuuaccauagaagaguau

SEQ ID NO: 220154 - RNA, 20 nt, Human
accugggauuagauacccaa

SEQ ID NO: 220155 - RNA, 22 nt, Human
ucucugcucaggcaccagcccu

SEQ ID NO: 220156 - RNA, 22 nt, Human
aaggaccugauuuugagcaucu

SEQ ID NO: 220157 - RNA, 22 nt, Human
uucuuuggcugccagucuggag

SEQ ID NO: 220158 - RNA, 22 nt, Human
ucugugcagaaucaaggagcuu

SEQ ID NO: 220159 - RNA, 22 nt, Human
aaauuucuggaagugucagagu

SEQ ID NO: 220160 - RNA, 22 nt, Human
uuggcuucaaugucagagacag

SEQ ID NO: 220161 - RNA, 22 nt, Human
uggcuucaaagguagcauacaa

SEQ ID NO: 220162 - RNA, 22 nt, Human
cuccuacauaacccagcgaacu

SEQ ID NO: 220163 - RNA, 22 nt, Human
gcuuggcuugggcucagaggcc

SEQ ID NO: 220164 - RNA, 21 nt, Human
ucuggguguaaaucuuauuug

SEQ ID NO: 220165 - RNA, 22 nt, Human
aagagagggacuuauuaaaguc

SEQ ID NO: 220166 - RNA, 22 nt, Human
uauacacauguguguauucaua

SEQ ID NO: 220167 - RNA, 22 nt, Human
auuuugauguaucuuuguagcu

SEQ ID NO: 220168 - RNA, 22 nt, Human
ggaggagcacuucugagcucag

SEQ ID NO: 220169 - RNA, 22 nt, Human
aagaaaaucaguucuggucagu

SEQ ID NO: 220170 - RNA, 22 nt, Human
caggcucccacuuggcuuaaag

SEQ ID NO: 220171 - RNA, 22 nt, Human
uccuggagcuuccuucauggua

SEQ ID NO: 220172 - RNA, 22 nt, Human
gcaccugcuggaaucagucugu

SEQ ID NO: 220173 - RNA, 22 nt, Human
cugauguucauuucuuuuguac

SEQ ID NO: 220174 - RNA, 22 nt, Human
uagcagcacauggugguuuuau

SEQ ID NO: 220175 - RNA, 22 nt, Human
aaucuguaacauucaauaaaga

SEQ ID NO: 220176 - RNA, 22 nt, Human
uggcagagacuccuccugggag

SEQ ID NO: 220177 - RNA, 22 nt, Human
uccaggcaucccccaggacaga

SEQ ID NO: 220178 - RNA, 22 nt, Human
uacaagcuggcgcaguuaagau

SEQ ID NO: 220179 - RNA, 22 nt, Human
aagugaguucagcauucacucg

SEQ ID NO: 220180 - RNA, 22 nt, Human
gcacaugguaggcauuugaugu

SEQ ID NO: 220181 - RNA, 22 nt, Human
caggugcugcagggcuggcguc

SEQ ID NO: 220182 - RNA, 22 nt, Human
gguguugggcucacugguccuu

SEQ ID NO: 220183 - RNA, 22 nt, Human
acagugucaucaguuucucaac

SEQ ID NO: 220184 - RNA, 22 nt, Human
auguaucacagcaauguaguca

SEQ ID NO: 220185 - RNA, 22 nt, Human
uaguauuuauaaucaugcuuaa

SEQ ID NO: 220186 - RNA, 22 nt, Human
uauucagugacaggguauuaug

SEQ ID NO: 220187 - RNA, 22 nt, Human
gugagcaaagguuaaacauuua

SEQ ID NO: 220188 - RNA, 22 nt, Human
auuagaaaccaagaggcaggcu

SEQ ID NO: 220189 - RNA, 22 nt, Human
ucugcaacauuccucuccccac

SEQ ID NO: 220190 - RNA, 22 nt, Human
auguguccuuauaagaagaaga

SEQ ID NO: 220191 - RNA, 22 nt, Human
agaggcugucucauauuuugua

SEQ ID NO: 220192 - RNA, 22 nt, Human
gggcucugccuggcugggagua

SEQ ID NO: 220193 - RNA, 22 nt, Human
uacaaacuguuauuauuauugu

SEQ ID NO: 220194 - RNA, 22 nt, Human
gcugggcucaccaggccacuag

SEQ ID NO: 220195 - RNA, 22 nt, Human
gggaaggacauucugggcucag

SEQ ID NO: 220196 - RNA, 22 nt, Human
gaucaauacuauuaagaucaua

SEQ ID NO: 220197 - RNA, 22 nt, Human
caugucuuuguuaugcucacca

SEQ ID NO: 220198 - RNA, 17 nt, Human
ccaggagagaugcuugu

SEQ ID NO: 220199 - RNA, 22 nt, Human
ugcauuggucuuaaucuucagg

SEQ ID NO: 220200 - RNA, 22 nt, Human
aaaauagauucuaggaugucuu

SEQ ID NO: 220201 - RNA, 22 nt, Human
ucucuguaaaauguggaugaua

SEQ ID NO: 220202 - RNA, 22 nt, Human
ucauggcuuuuauuauguugag

SEQ ID NO: 220203 - RNA, 22 nt, Human
ucuccucuauuucuguauguau

SEQ ID NO: 220204 - RNA, 22 nt, Human
caauguuuucaacugacaagua

SEQ ID NO: 220205 - RNA, 22 nt, Human
uuccugagaacauggcagcuua

SEQ ID NO: 220206 - RNA, 17 nt, Human
agggggaaccugggagg

SEQ ID NO: 220207 - RNA, 22 nt, Human
aaagaacagauguguggugcau

SEQ ID NO: 220208 - RNA, 22 nt, Human
uguguauagaugcaugcauaua

SEQ ID NO: 220209 - RNA, 22 nt, Human
cugggggucgcgccucugggca

SEQ ID NO: 220210 - RNA, 22 nt, Human
uugaaucuggguacuuguaaua

SEQ ID NO: 220211 - RNA, 22 nt, Human
auacauguaacugcauuguaau

SEQ ID NO: 220212 - RNA, 22 nt, Human
uuacacuuaggguuugucagag

SEQ ID NO: 220213 - RNA, 22 nt, Human
ccucaggcuugugagccuucag

SEQ ID NO: 220214 - RNA, 22 nt, Human
cccuggccuacaggcccagaga

SEQ ID NO: 220215 - RNA, 22 nt, Human
ccagagguccccugccaggagg

SEQ ID NO: 220216 - RNA, 22 nt, Human
acagauuuuaaauuuguaguug

SEQ ID NO: 220217 - RNA, 22 nt, Human
aggucaccauggcaugcuccac

SEQ ID NO: 220218 - RNA, 22 nt, Human
ugggaagcugcauuuuaacaag

SEQ ID NO: 220219 - RNA, 22 nt, Human
ccagagccggcucccucagcuu

SEQ ID NO: 220220 - RNA, 22 nt, Human
uuuuaucugcuucauuaguuga

SEQ ID NO: 220221 - RNA, 22 nt, Human
uguuucuuauccaaguggucug

SEQ ID NO: 220222 - RNA, 22 nt, Human
cagcuucuguuuauugugugcc

SEQ ID NO: 220223 - RNA, 20 nt, Human
acaguggguggggagcacug

SEQ ID NO: 220224 - RNA, 22 nt, Human
ugaaacaggaaguaaacagaca

SEQ ID NO: 220225 - RNA, 22 nt, Human
gauuaaaaauaacccaugcuga

SEQ ID NO: 220226 - RNA, 22 nt, Human
ugucccucauugacgcugugcc

SEQ ID NO: 220227 - RNA, 22 nt, Human
uuccucuguaugcuuugcugcu

SEQ ID NO: 220228 - RNA, 22 nt, Human
uuugucaucccuuuugaaacug

SEQ ID NO: 220229 - RNA, 22 nt, Human
cugaggaggcuaauuugaggau

SEQ ID NO: 220230 - RNA, 22 nt, Human
aggcagaaaauagucauccaaa

SEQ ID NO: 220231 - RNA, 22 nt, Human
aggacauguuuguaucuuccuu

SEQ ID NO: 220232 - RNA, 22 nt, Human
auaaucuuucuuuuccagauag

SEQ ID NO: 220233 - RNA, 22 nt, Human
ggcucugcagagggcccagcuu

SEQ ID NO: 220234 - RNA, 22 nt, Human
aagcccuggaacuuuccuagcc

SEQ ID NO: 220235 - RNA, 22 nt, Human
ggcacagcaggagcuaugugaa

SEQ ID NO: 220236 - RNA, 22 nt, Human
gcugggcuccacccucaacugu

SEQ ID NO: 220237 - RNA, 22 nt, Human
ucagagcccugcuccuccccaa

SEQ ID NO: 220238 - RNA, 22 nt, Human
uuguuacuguucuacauacagu

SEQ ID NO: 220239 - RNA, 22 nt, Human
aagggcugcuguagaagcagag

SEQ ID NO: 220240 - RNA, 22 nt, Human
cagcucugugcaggccugggga

SEQ ID NO: 220241 - RNA, 22 nt, Human
cugccucuugacagaucguggc

SEQ ID NO: 220242 - RNA, 22 nt, Human
ucuuuacaucacaauuguaugg

SEQ ID NO: 220243 - RNA, 22 nt, Human
uacugagcugguccacugaggu

SEQ ID NO: 220244 - RNA, 22 nt, Human
ucaggcucccugcugggcucug

SEQ ID NO: 220245 - RNA, 22 nt, Human
uggaccucacugucugcuggua

SEQ ID NO: 220246 - RNA, 22 nt, Human
cagagcagggguuucccagguu

SEQ ID NO: 220247 - RNA, 22 nt, Human
aggcagagagcaguggccgucu

SEQ ID NO: 220248 - RNA, 22 nt, Human
cagggacaugacuggucucugu

SEQ ID NO: 220249 - RNA, 22 nt, Human
ggguguccagggcgugucugga

SEQ ID NO: 220250 - RNA, 22 nt, Human
aaagcuuuucaguauguucaug

SEQ ID NO: 220251 - RNA, 22 nt, Human
agugugaguuacaaagugugaa

SEQ ID NO: 220252 - RNA, 22 nt, Human
gagagggcucuguguggguacu

SEQ ID NO: 220253 - RNA, 20 nt, Human
gcugcucgcugcagucacuc

SEQ ID NO: 220254 - RNA, 22 nt, Human
cagaaucuacacccucagaaau

SEQ ID NO: 220255 - RNA, 22 nt, Human
uaaguuuuaagcaaucugauaa

SEQ ID NO: 220256 - RNA, 18 nt, Human
cugacuccuuugcugcca

SEQ ID NO: 220257 - RNA, 22 nt, Human
auauuuaacuggucccaauaua

SEQ ID NO: 220258 - RNA, 22 nt, Human
gaugaugggauccagcaaugua

SEQ ID NO: 220259 - RNA, 22 nt, Human
agugcgugggcaggcauggaag

SEQ ID NO: 220260 - RNA, 23 nt, Human
aacaccaaggcucagagagauaa

SEQ ID NO: 220261 - RNA, 22 nt, Human
uggucuggaacuccuggcuuca

SEQ ID NO: 220262 - RNA, 19 nt, Human
aaacacagauuucuuacca

SEQ ID NO: 220263 - RNA, 22 nt, Human
caggaaagagcugccaggcagg

SEQ ID NO: 220264 - RNA, 22 nt, Human
ucccagccuuccagucugguuu

SEQ ID NO: 220265 - RNA, 22 nt, Human
ugcaggugcuacaagaacucac

SEQ ID NO: 220266 - RNA, 22 nt, Human
uucuuuggugggagauugaggu

SEQ ID NO: 220267 - RNA, 22 nt, Human
gaugauuuuugccagugugaug

SEQ ID NO: 220268 - RNA, 22 nt, Human
augaaaguaccuguaauauguu

SEQ ID NO: 220269 - RNA, 22 nt, Human
cccuuccuugauuuuaacugga

SEQ ID NO: 220270 - RNA, 17 nt, Human
agguggguggaucaccu

SEQ ID NO: 220271 - RNA, 22 nt, Human
gcucucccgcagccuggugggc

SEQ ID NO: 220272 - RNA, 22 nt, Human
auuucuagacuuagaacucuua

SEQ ID NO: 220273 - RNA, 22 nt, Human
caaauguuugguggcauuuugu

SEQ ID NO: 220274 - RNA, 22 nt, Human
auuguacauaaaauguaugucu

SEQ ID NO: 220275 - RNA, 22 nt, Human
caggcucccugccagggccggc

SEQ ID NO: 220276 - RNA, 22 nt, Human
acuguacacauucgucaagacu

SEQ ID NO: 220277 - RNA, 22 nt, Human
cagcaggagcagucagacuccu

SEQ ID NO: 220278 - RNA, 23 nt, Human
uggccugcagaguuucugcuggg

SEQ ID NO: 220279 - RNA, 22 nt, Human
uugcuuuaaaauggcuaagucu

SEQ ID NO: 220280 - RNA, 22 nt, Human
ucaggcuuugaagucuagcugg

SEQ ID NO: 220281 - RNA, 22 nt, Human
caggcuuuuucugcuguccucu

SEQ ID NO: 220282 - RNA, 22 nt, Human
aaggugguuugauuaucccacu

SEQ ID NO: 220283 - RNA, 22 nt, Human
cugggcagguauacaaaaaaug

SEQ ID NO: 220284 - RNA, 22 nt, Human
acugcccuguaacugccaggua

SEQ ID NO: 220285 - RNA, 22 nt, Human
ccacaucuuuuuuccugaacag

SEQ ID NO: 220286 - RNA, 22 nt, Human
ucugaaaauguugacuuuguuu

SEQ ID NO: 220287 - RNA, 22 nt, Human
uuucucucugacugggagcuga

SEQ ID NO: 220288 - RNA, 22 nt, Human
gagacauucuuaggaacaaugu

SEQ ID NO: 220289 - RNA, 22 nt, Human
caggucuggcaucagcugugug

SEQ ID NO: 220290 - RNA, 22 nt, Human
cagaaagcaguugucaaugggc

SEQ ID NO: 220291 - RNA, 22 nt, Human
caucagaauuacuuggggagcu

SEQ ID NO: 220292 - RNA, 22 nt, Human
gguuucucuagggcugaccagu

SEQ ID NO: 220293 - RNA, 22 nt, Human
ccaggccuucugaggacacucu

SEQ ID NO: 220294 - RNA, 22 nt, Human
auggaaaucagguucauccaag

SEQ ID NO: 220295 - RNA, 22 nt, Human
ucucuggguccuggcaagcuca

SEQ ID NO: 220296 - RNA, 22 nt, Human
agcagucaguccugaaugaagg

SEQ ID NO: 220297 - RNA, 22 nt, Human
augaggcagcugacagcuguuc

SEQ ID NO: 220298 - RNA, 22 nt, Human
ggaaggggagcuggaaagggua

SEQ ID NO: 220299 - RNA, 22 nt, Human
gucucagaccacccucuuuggc

SEQ ID NO: 220300 - RNA, 22 nt, Human
uauucaugggaggucacaacuu

SEQ ID NO: 220301 - RNA, 22 nt, Human
ucuguucauuugccucggcucu

SEQ ID NO: 220302 - RNA, 22 nt, Human
cugggcucaccuguggcuggca

SEQ ID NO: 220303 - RNA, 22 nt, Human
gcucugagcugucuugcagguc

SEQ ID NO: 220304 - RNA, 22 nt, Human
aggcagggugaugauaaugauu

SEQ ID NO: 220305 - RNA, 22 nt, Human
cagugacguaaacugcaugugc

SEQ ID NO: 220306 - RNA, 22 nt, Human
cacaggagauugaucuauuggu

SEQ ID NO: 220307 - RNA, 22 nt, Human
guuacacagcuaagcuucuccu

SEQ ID NO: 220308 - RNA, 22 nt, Human
aguaggcagaaguggcauucgg

SEQ ID NO: 220309 - RNA, 22 nt, Human
cuucaggauuaauuuggggccu

SEQ ID NO: 220310 - RNA, 22 nt, Human
uuuauauuucccaggauuggcc

SEQ ID NO: 220311 - RNA, 22 nt, Human
agaugaguagguagcauuagua

SEQ ID NO: 220312 - RNA, 22 nt, Human
aguguggaccuucacacagaga

SEQ ID NO: 220313 - RNA, 22 nt, Human
aacuuuguguguuuaauauggc

SEQ ID NO: 220314 - RNA, 22 nt, Human
aaaggcuucggaucagaaggua

SEQ ID NO: 220315 - RNA, 22 nt, Human
gcuccaggccccagcguuccgc

SEQ ID NO: 220316 - RNA, 22 nt, Human
ugagcuggcacuuuuccuggga

SEQ ID NO: 220317 - RNA, 22 nt, Human
uguaacaguagauaaggucuug

SEQ ID NO: 220318 - RNA, 22 nt, Human
agaggaggcagcuuaacucagu

SEQ ID NO: 220319 - RNA, 22 nt, Human
uuccaggcucccuuggaggugu

SEQ ID NO: 220320 - RNA, 22 nt, Human
guguccuuuuaugugacugguu

SEQ ID NO: 220321 - RNA, 22 nt, Human
uucccagaccuguaggaucaga

SEQ ID NO: 220322 - RNA, 22 nt, Human
uuacuuuccagcucuagcuuca

SEQ ID NO: 220323 - RNA, 22 nt, Human
caacaaguggguacuuuacagg

SEQ ID NO: 220324 - RNA, 22 nt, Human
aggcucucucugccagccgugc

SEQ ID NO: 220325 - RNA, 22 nt, Human
uaaucucuuuaugagaagaagg

SEQ ID NO: 220326 - RNA, 18 nt, Human
aacaugcauuagaacugc

SEQ ID NO: 220327 - RNA, 22 nt, Human
cagacccugggccacagaggag

SEQ ID NO: 220328 - RNA, 22 nt, Human
cuggccagaagcaccuuuggcg

SEQ ID NO: 220329 - RNA, 22 nt, Human
cacagccuccuucagagagcau

SEQ ID NO: 220330 - RNA, 22 nt, Human
uuuguaaaagcccaagcuguag

SEQ ID NO: 220331 - RNA, 22 nt, Human
ugcuucucucuaggaagacgcu

SEQ ID NO: 220332 - RNA, 20 nt, Human
ucguuuauuugaaauugcuc

SEQ ID NO: 220333 - RNA, 22 nt, Human
gaagccagcaguggagaaagga

SEQ ID NO: 220334 - RNA, 18 nt, Human
augaucuuagcaaauauu

SEQ ID NO: 220335 - RNA, 22 nt, Human
aggggagacuggaaucuaacau

SEQ ID NO: 220336 - RNA, 22 nt, Human
guuauaaaggugauaaugguca

SEQ ID NO: 220337 - RNA, 22 nt, Human
uguaaaauaauucuccauguuu

SEQ ID NO: 220338 - RNA, 22 nt, Human
uuggcucauuaaagaugauaau

SEQ ID NO: 220339 - RNA, 22 nt, Human
agguagggcuaggcugcgucug

SEQ ID NO: 220340 - RNA, 22 nt, Human
ugcuggaguggcacuguguggc

SEQ ID NO: 220341 - RNA, 22 nt, Human
cagucucucuccuugcaggcgu

SEQ ID NO: 220342 - RNA, 21 nt, Human
ggaugccacgaagcaccagga

SEQ ID NO: 220343 - RNA, 22 nt, Human
cugugcccucuuugcuggccuu

SEQ ID NO: 220344 - RNA, 22 nt, Human
uacuuagagcgauaauuuauac

SEQ ID NO: 220345 - RNA, 22 nt, Human
agccucugcuuaugcaaaggua

SEQ ID NO: 220346 - RNA, 20 nt, Human
cagaugggacguggaggagu

SEQ ID NO: 220347 - RNA, 22 nt, Human
ccugccagcaucuucagccccu

SEQ ID NO: 220348 - RNA, 22 nt, Human
accccagcucugagccacacca

SEQ ID NO: 220349 - RNA, 22 nt, Human
aaaugcuuauuagugucacaaa

SEQ ID NO: 220350 - RNA, 22 nt, Human
acccaggcagcaggagcuaaag

SEQ ID NO: 220351 - RNA, 22 nt, Human
auauacacauguguauacauuu

SEQ ID NO: 220352 - RNA, 22 nt, Human
uaaauuagggacuuuaguuaau

SEQ ID NO: 220353 - RNA, 22 nt, Human
uccccacaucucugcaucaggc

SEQ ID NO: 220354 - RNA, 22 nt, Human
uuuuaauccucuugguaucuua

SEQ ID NO: 220355 - RNA, 22 nt, Human
gaugcauuacaaaagugauuau

SEQ ID NO: 220356 - RNA, 22 nt, Human
ucaggaaacuacaguugaacua

SEQ ID NO: 220357 - RNA, 20 nt, Human
gagauggacagaugaagggg

SEQ ID NO: 220358 - RNA, 22 nt, Human
augcuuuauguucuggcauuuu

SEQ ID NO: 220359 - RNA, 20 nt, Human
cugcuguguuauuguagaac

SEQ ID NO: 220360 - RNA, 22 nt, Human
aauaagauugacacaaguaccu

SEQ ID NO: 220361 - RNA, 22 nt, Human
gggaccuggucuagcacugagc

SEQ ID NO: 220362 - RNA, 22 nt, Human
uaugagcagacagugguuuuac

SEQ ID NO: 220363 - RNA, 22 nt, Human
agaagaaacugucggggauauu

SEQ ID NO: 220364 - RNA, 22 nt, Human
auugcuuuagaaagaaaaauau

SEQ ID NO: 220365 - RNA, 22 nt, Human
aggacagaaucuauauucaguu

SEQ ID NO: 220366 - RNA, 22 nt, Human
aaugggaaaagaguaugauuua

SEQ ID NO: 220367 - RNA, 22 nt, Human
agcaaggccgagaggaugcuau

SEQ ID NO: 220368 - RNA, 18 nt, Human
gaauaucuagcacauagu

SEQ ID NO: 220369 - RNA, 22 nt, Human
aauauguucaaaauagaucacu

SEQ ID NO: 220370 - RNA, 20 nt, Human
ugcauuaaguggcauugagc

SEQ ID NO: 220371 - RNA, 22 nt, Human
gaggagcugcagggggagucua

SEQ ID NO: 220372 - RNA, 22 nt, Human
ggccugugcaagacagcacccc

SEQ ID NO: 220373 - RNA, 22 nt, Human
cagcuaauccucucuauccaag

SEQ ID NO: 220374 - RNA, 22 nt, Human
uaacugaacagccuaauucuuu

SEQ ID NO: 220375 - RNA, 22 nt, Human
gcuuucugaagcaguguuucuc

SEQ ID NO: 220376 - RNA, 22 nt, Human
aauauaugugguauugaccagc

SEQ ID NO: 220377 - RNA, 22 nt, Human
uguacuugaacuugacuguaga

SEQ ID NO: 220378 - RNA, 22 nt, Human
caggccugagacaucugagaua

SEQ ID NO: 220379 - RNA, 22 nt, Human
aggagguguugauagaagguuu

SEQ ID NO: 220380 - RNA, 22 nt, Human
aaacacugaaaauuuuggucau

SEQ ID NO: 220381 - RNA, 22 nt, Human
uacagucagagugccuuucuaa

SEQ ID NO: 220382 - RNA, 22 nt, Human
ugugugcaugcuuggggcagca

SEQ ID NO: 220383 - RNA, 22 nt, Human
acucugccuuggugucacaaga

SEQ ID NO: 220384 - RNA, 22 nt, Human
uuagaaccaggaacucuaauau

SEQ ID NO: 220385 - RNA, 22 nt, Human
uccaggcaugucugaguccuuc

SEQ ID NO: 220386 - RNA, 22 nt, Human
ggaauugguuucaagggaaagu

SEQ ID NO: 220387 - RNA, 22 nt, Human
gacagcaggaugugaggggaug

SEQ ID NO: 220388 - RNA, 22 nt, Human
acagcuguggccacuugcaucc

SEQ ID NO: 220389 - RNA, 22 nt, Human
ugcacaguucgccuucuccaag

SEQ ID NO: 220390 - RNA, 22 nt, Human
ugaugaaaauaugauucugagg

SEQ ID NO: 220391 - RNA, 22 nt, Human
caaaguuaugaaugauaagauu

SEQ ID NO: 220392 - RNA, 22 nt, Human
ugcacagagggaggcauaaaau

SEQ ID NO: 220393 - RNA, 22 nt, Human
cugaaggauuagagagcacuua

SEQ ID NO: 220394 - RNA, 22 nt, Human
agaauacaauuguucaguaaua

SEQ ID NO: 220395 - RNA, 22 nt, Human
caggugucaaaauacuaagugg

SEQ ID NO: 220396 - RNA, 22 nt, Human
uggguggcacuucuggggucca

SEQ ID NO: 220397 - RNA, 22 nt, Human
uuuuacauugggaaaugccucu

SEQ ID NO: 220398 - RNA, 22 nt, Human
ggcaggcauggggucugccauu

SEQ ID NO: 220399 - RNA, 22 nt, Human
ucaggugugugguggaaggcag

SEQ ID NO: 220400 - RNA, 22 nt, Human
agaggauuguuacugauuagcu

SEQ ID NO: 220401 - RNA, 22 nt, Human
ucccuccugcaugaggcucggc

SEQ ID NO: 220402 - RNA, 22 nt, Human
cccagcuugcaaauggguugcu

SEQ ID NO: 220403 - RNA, 22 nt, Human
aggccagggucccacacucgca

SEQ ID NO: 220404 - RNA, 22 nt, Human
gcagccagguuugaggaccacu

SEQ ID NO: 220405 - RNA, 22 nt, Human
gguggcucguuuuucuugaaag

SEQ ID NO: 220406 - RNA, 21 nt, Human
aguaguuuagcacaggguuug

SEQ ID NO: 220407 - RNA, 21 nt, Human
cucuugucuuugcucaguagc

SEQ ID NO: 220408 - RNA, 22 nt, Human
gucugguccucuucacaguggc

SEQ ID NO: 220409 - RNA, 22 nt, Human
uccugggauacuaagaaauuuu

SEQ ID NO: 220410 - RNA, 22 nt, Human
uucuaucauacuugaauacauu

SEQ ID NO: 220411 - RNA, 22 nt, Human
ggcaggcugggugucauggagu

SEQ ID NO: 220412 - RNA, 22 nt, Human
agggcugacacaccuuauccuc

SEQ ID NO: 220413 - RNA, 22 nt, Human
gacccaggagagaggguugcau

SEQ ID NO: 220414 - RNA, 22 nt, Human
aguacaaaugcagccagaguag

SEQ ID NO: 220415 - RNA, 22 nt, Human
acagccuguguaccagcuggga

SEQ ID NO: 220416 - RNA, 22 nt, Human
cagggagggaggaaaauuugcu

SEQ ID NO: 220417 - RNA, 22 nt, Human
uuggauacagaugaaaggaagg

SEQ ID NO: 220418 - RNA, 22 nt, Human
uggcaguuauuaaucaagucuu

SEQ ID NO: 220419 - RNA, 22 nt, Human
ugucuuuugccaaagaucaguu

SEQ ID NO: 220420 - RNA, 22 nt, Human
cuggcauuuagacccacagcaa

SEQ ID NO: 220421 - RNA, 22 nt, Human
gcagggcaaugaucccgagagg

SEQ ID NO: 220422 - RNA, 22 nt, Human
acagacaguaaauaguguggcu

SEQ ID NO: 220423 - RNA, 22 nt, Human
gccugggagaugcguuguggcc

SEQ ID NO: 220424 - RNA, 19 nt, Human
auagggcacccuaaggagu

SEQ ID NO: 220425 - RNA, 22 nt, Human
ccugcuuugcugguaccaucag

SEQ ID NO: 220426 - RNA, 22 nt, Human
auucaaguacaguuuucuucuu

SEQ ID NO: 220427 - RNA, 18 nt, Human
ggaaaccacaggguucug

SEQ ID NO: 220428 - RNA, 19 nt, Human
uaaaaggauguggaaggau

SEQ ID NO: 220429 - RNA, 22 nt, Human
caggccuuugcagggagagaga

SEQ ID NO: 220430 - RNA, 22 nt, Human
cacaggccaguaagacuguguu

SEQ ID NO: 220431 - RNA, 22 nt, Human
gcagggcuguggacacuuuggu

SEQ ID NO: 220432 - RNA, 22 nt, Human
ucuuucggccauagcgaugauu

SEQ ID NO: 220433 - RNA, 22 nt, Human
gcuguagggcugagcuggaccg

SEQ ID NO: 220434 - RNA, 20 nt, Human
ucaggcaguggggaaaggca

SEQ ID NO: 220435 - RNA, 22 nt, Human
auuaugcauauacauuugacua

SEQ ID NO: 220436 - RNA, 22 nt, Human
gaggugucugaguggggaccug

SEQ ID NO: 220437 - RNA, 22 nt, Human
uggcagcagggaggccaguguu

SEQ ID NO: 220438 - RNA, 23 nt, Human
gcucaggcaucauucuuccuggc

SEQ ID NO: 220439 - RNA, 22 nt, Human
ccugagcuugauccuucugucu

SEQ ID NO: 220440 - RNA, 22 nt, Human
gccaggcccugggcacuucgug

SEQ ID NO: 220441 - RNA, 22 nt, Human
guuaucuucccuuugaugauuu

SEQ ID NO: 220442 - RNA, 22 nt, Human
gggacaugaagcaucggaggca

SEQ ID NO: 220443 - RNA, 22 nt, Human
gagaaaagcgaaggaccuggag

SEQ ID NO: 220444 - RNA, 22 nt, Human
cuggccagugacugcucacccg

SEQ ID NO: 220445 - RNA, 22 nt, Human
acagcaggcacacaaggauaga

SEQ ID NO: 220446 - RNA, 22 nt, Human
cuggacagaaaccaguccuggg

SEQ ID NO: 220447 - RNA, 22 nt, Human
cugcacacauauggcuucucuc

SEQ ID NO: 220448 - RNA, 22 nt, Human
uacacauccauguuuugacuuu

SEQ ID NO: 220449 - RNA, 22 nt, Human
aguccaggucucugagucacaa

SEQ ID NO: 220450 - RNA, 22 nt, Human
ugcagaagcugcaggucagugg

SEQ ID NO: 220451 - RNA, 22 nt, Human
uguggggcucccuggcagccug

SEQ ID NO: 220452 - RNA, 22 nt, Human
cugggccugccaccaucuuagg

SEQ ID NO: 220453 - RNA, 22 nt, Human
cacucccucuaguugcauucug

SEQ ID NO: 220454 - RNA, 22 nt, Human
aagcuguugcccugcucuuucu

SEQ ID NO: 220455 - RNA, 22 nt, Human
gggcugaguuccugccucacuc

SEQ ID NO: 220456 - RNA, 22 nt, Human
uugaaugaauaaaagaguaagg

SEQ ID NO: 220457 - RNA, 22 nt, Human
ucagcuuuccugcagcuaaggg

SEQ ID NO: 220458 - RNA, 22 nt, Human
gugagcuucugacagaugcacc

SEQ ID NO: 220459 - RNA, 23 nt, Human
cgcccagccucagugaccugggc

SEQ ID NO: 220460 - RNA, 22 nt, Human
uaugaaauugccauuuuuaugg

SEQ ID NO: 220461 - RNA, 22 nt, Human
acugagcaguagauuuucuguu

SEQ ID NO: 220462 - RNA, 22 nt, Human
uauacacugauauaaggaguaa

SEQ ID NO: 220463 - RNA, 22 nt, Human
gcagucagacaggaggagcucc

SEQ ID NO: 220464 - RNA, 22 nt, Human
ggaagaggaggagccaggcuuu

SEQ ID NO: 220465 - RNA, 22 nt, Human
acucaggagggaucagcuauca

SEQ ID NO: 220466 - RNA, 22 nt, Human
caaggcuagcaagcaguaguca

SEQ ID NO: 220467 - RNA, 21 nt, Human
auggugagauacugggugugg

SEQ ID NO: 220468 - RNA, 22 nt, Human
agcuggguggccucuccucggg

SEQ ID NO: 220469 - RNA, 22 nt, Human
aggcugggcuccgcccaacucc

SEQ ID NO: 220470 - RNA, 22 nt, Human
acagcagccagccacugugagc

SEQ ID NO: 220471 - RNA, 22 nt, Human
aguggcugcuaugaucaggaca

SEQ ID NO: 220472 - RNA, 22 nt, Human
augccaagcucuaucccugacc

SEQ ID NO: 220473 - RNA, 22 nt, Human
ugucccugguggaggcuggcag

SEQ ID NO: 220474 - RNA, 22 nt, Human
ucacaucuuuaggcuuacaggu

SEQ ID NO: 220475 - RNA, 22 nt, Human
ugauucaauuaucugaugcuuu

SEQ ID NO: 220476 - RNA, 22 nt, Human
acagauuuugguauuugcaaug

SEQ ID NO: 220477 - RNA, 22 nt, Human
cagggagaggccucuguugccc

SEQ ID NO: 220478 - RNA, 22 nt, Human
auacaaguugugauaauguaaa

SEQ ID NO: 220479 - RNA, 22 nt, Human
gaaaaggccacuccuaggagcu

SEQ ID NO: 220480 - RNA, 22 nt, Human
aguuuuaagaugcgcuucuguu

SEQ ID NO: 220481 - RNA, 22 nt, Human
ggcucugggcauagaaggaagc

SEQ ID NO: 220482 - RNA, 19 nt, Human
aaaagucuauucaauuaca

SEQ ID NO: 220483 - RNA, 22 nt, Human
ucaggcagcauuaaacuucagc

SEQ ID NO: 220484 - RNA, 22 nt, Human
ucuuguccuaagagcuggauuc

SEQ ID NO: 220485 - RNA, 22 nt, Human
cagcacucuggcuucguuaagu

SEQ ID NO: 220486 - RNA, 22 nt, Human
gggaauguaaucauggaaugcu

SEQ ID NO: 220487 - RNA, 22 nt, Human
agcagguggaaaauucuuauca

SEQ ID NO: 220488 - RNA, 22 nt, Human
agacuguagggauagaggucuu

SEQ ID NO: 220489 - RNA, 22 nt, Human
gcgcaggcccgggucagggccg

SEQ ID NO: 220490 - RNA, 18 nt, Human
gccagcccuccaaccucc

SEQ ID NO: 220491 - RNA, 22 nt, Human
auuuaacaagacagagaacugg

SEQ ID NO: 220492 - RNA, 22 nt, Human
ugaacaacugcaaaaaucucca

SEQ ID NO: 220493 - RNA, 22 nt, Human
agccuuagaggaaaacauuagu

SEQ ID NO: 220494 - RNA, 22 nt, Human
ucuuuaauauaaaggaaugaau

SEQ ID NO: 220495 - RNA, 22 nt, Human
agagaaaagccaucccagccaa

SEQ ID NO: 220496 - RNA, 22 nt, Human
aagaugauguuguguuuucacu

SEQ ID NO: 220497 - RNA, 22 nt, Human
cagggggcuguggcuguccagu

SEQ ID NO: 220498 - RNA, 22 nt, Human
ucugucauuucauucauaugaa

SEQ ID NO: 220499 - RNA, 22 nt, Human
uggggaaagacauucauacagu

SEQ ID NO: 220500 - RNA, 22 nt, Human
gaggccagaaugagucucuggg

SEQ ID NO: 220501 - RNA, 20 nt, Human
ggcugugcccuuccguggcc

SEQ ID NO: 220502 - RNA, 22 nt, Human
agcaggccucaugcaccagcua

SEQ ID NO: 220503 - RNA, 22 nt, Human
uaaucuaucaagcaacaaagug

SEQ ID NO: 220504 - RNA, 22 nt, Human
uagcaccuuagcauuucuagug

SEQ ID NO: 220505 - RNA, 22 nt, Human
uggccagugauuaaugacgcuu

SEQ ID NO: 220506 - RNA, 21 nt, Human
agcuggcuauaguuagugaug

SEQ ID NO: 220507 - RNA, 22 nt, Human
ggucccaggauugguugcgcag

SEQ ID NO: 220508 - RNA, 22 nt, Human
gaggacucugggcguguauggg

SEQ ID NO: 220509 - RNA, 22 nt, Human
gucuagaauggaugagcauuuu

SEQ ID NO: 220510 - RNA, 22 nt, Human
augcuuagguuaaauuuguaau

SEQ ID NO: 220511 - RNA, 22 nt, Human
gcuggaaggcuaggcucaguug

SEQ ID NO: 220512 - RNA, 22 nt, Human
uucagaauauuuguuuuacaug

SEQ ID NO: 220513 - RNA, 22 nt, Human
caggccagagcgcgugguuggg

SEQ ID NO: 220514 - RNA, 22 nt, Human
gggaggaggaauguuuugugua

SEQ ID NO: 220515 - RNA, 22 nt, Human
uggcuuggugagcagaguguag

SEQ ID NO: 220516 - RNA, 18 nt, Human
cagcagguagaguuuggu

SEQ ID NO: 220517 - RNA, 22 nt, Human
agucacagggggccccugcaac

SEQ ID NO: 220518 - RNA, 22 nt, Human
uguacaaagaguauagcuuuga

SEQ ID NO: 220519 - RNA, 22 nt, Human
cugcagaaauauggaugugaua

SEQ ID NO: 220520 - RNA, 22 nt, Human
aaagcugggcuggccaacccag

SEQ ID NO: 220521 - RNA, 22 nt, Human
ucuucuaguaggccaagaagcu

SEQ ID NO: 220522 - RNA, 22 nt, Human
ucaaucaaugguuuccaaauuu

SEQ ID NO: 220523 - RNA, 22 nt, Human
aacuuuggcaagucagacuucu

SEQ ID NO: 220524 - RNA, 22 nt, Human
acugugcagcugagugcuaauu

SEQ ID NO: 220525 - RNA, 22 nt, Human
agcaggugccagguguacccgc

SEQ ID NO: 220526 - RNA, 22 nt, Human
ugaggcagaaaauagcaguuca

SEQ ID NO: 220527 - RNA, 22 nt, Human
gguuauauaauucagugcuuuc

SEQ ID NO: 220528 - RNA, 22 nt, Human
uuagggacaaauuugcagaacc

SEQ ID NO: 220529 - RNA, 22 nt, Human
gccuuaggggucagacagagcu

SEQ ID NO: 220530 - RNA, 19 nt, Human
cuggguccuguucuuuuac

SEQ ID NO: 220531 - RNA, 22 nt, Human
auuucauacuaaggcucaaaaa

SEQ ID NO: 220532 - RNA, 22 nt, Human
gcugggcaggccucgugagggc

SEQ ID NO: 220533 - RNA, 23 nt, Human
guucauuuuauugucugauugcu

SEQ ID NO: 220534 - RNA, 22 nt, Human
gccugagggcuccuagcaggcu

SEQ ID NO: 220535 - RNA, 22 nt, Human
ucugggcuugguuagggcuguu

SEQ ID NO: 220536 - RNA, 22 nt, Human
uacuuuaaaaacugauaauuca

SEQ ID NO: 220537 - RNA, 18 nt, Human
uccagucccaaggccagc

SEQ ID NO: 220538 - RNA, 22 nt, Human
cagagccccccuucugaucaca

SEQ ID NO: 220539 - RNA, 22 nt, Human
accacccccuuggguguggaag

SEQ ID NO: 220540 - RNA, 22 nt, Human
uucaaauuaccacauuugcuua

SEQ ID NO: 220541 - RNA, 22 nt, Human
ccaggaagcauaauguaguggg

SEQ ID NO: 220542 - RNA, 22 nt, Human
uacacaccugccugcagacucu

SEQ ID NO: 220543 - RNA, 22 nt, Human
cauuacaaaguuauaaacaguu

SEQ ID NO: 220544 - RNA, 22 nt, Human
agcaggcccaagcuggggggaa

SEQ ID NO: 220545 - RNA, 22 nt, Human
gaaauaauacagugcucuucuc

SEQ ID NO: 220546 - RNA, 22 nt, Human
uugaaugaaauugcuguguuau

SEQ ID NO: 220547 - RNA, 22 nt, Human
aagucacugugaaaggugaagc

SEQ ID NO: 220548 - RNA, 23 nt, Human
cacugcagcguggucuggcagga

SEQ ID NO: 220549 - RNA, 22 nt, Human
uucuugcucaaugucuguuuaa

SEQ ID NO: 220550 - RNA, 22 nt, Human
ugagcaggggagagcgaaugug

SEQ ID NO: 220551 - RNA, 22 nt, Human
acugucacugacagaaucaaca

SEQ ID NO: 220552 - RNA, 22 nt, Human
uuauccaacaugacuuaugucc

SEQ ID NO: 220553 - RNA, 22 nt, Human
uuucuggguuuaugucacagcu

SEQ ID NO: 220554 - RNA, 22 nt, Human
acugagggugcacaggcaggca

SEQ ID NO: 220555 - RNA, 22 nt, Human
acucuggcccuccugcugccag

SEQ ID NO: 220556 - RNA, 22 nt, Human
gacccagcuuaagucacauguu

SEQ ID NO: 220557 - RNA, 22 nt, Human
uggcuggagagggucccaugag

SEQ ID NO: 220558 - RNA, 22 nt, Human
cuucugugaccaccagcagccc

SEQ ID NO: 220559 - RNA, 22 nt, Human
gacacagcuaauggcuuaggac

SEQ ID NO: 220560 - RNA, 22 nt, Human
agaggguagaagacaggguugc

SEQ ID NO: 220561 - RNA, 22 nt, Human
uuugcauuuguucaaguauuga

SEQ ID NO: 220562 - RNA, 22 nt, Human
gauaagcagcagccguuauagg

SEQ ID NO: 220563 - RNA, 22 nt, Human
ccagugcccagcugcccaggca

SEQ ID NO: 220564 - RNA, 22 nt, Human
agccagcugugggcucaggcgg

SEQ ID NO: 220565 - RNA, 22 nt, Human
cagggagcagcgcuggggccuc

SEQ ID NO: 220566 - RNA, 22 nt, Human
aaacaaacaauuaguugugugg

SEQ ID NO: 220567 - RNA, 22 nt, Human
aagggcuggccacauucugggu

SEQ ID NO: 220568 - RNA, 22 nt, Human
gaaucucauucuaacuaguagg

SEQ ID NO: 220569 - RNA, 22 nt, Human
uucuguaucuuucuucaagauu

SEQ ID NO: 220570 - RNA, 22 nt, Human
uccugugacggagcgccagagg

SEQ ID NO: 220571 - RNA, 22 nt, Human
acuguucaaguuuuaugcugga

SEQ ID NO: 220572 - RNA, 21 nt, Human
cuguccuggucuagaggcaca

SEQ ID NO: 220573 - RNA, 20 nt, Human
uggaccugucucuuuaggga

SEQ ID NO: 220574 - RNA, 19 nt, Human
ugcugcuguccuugcaggg

SEQ ID NO: 220575 - RNA, 22 nt, Human
uauuuacuuuuaaauugagaac

SEQ ID NO: 220576 - RNA, 22 nt, Human
aacagugaguugaugacugaau

SEQ ID NO: 220577 - RNA, 22 nt, Human
cuauuuuccgcagcaggaagua

SEQ ID NO: 220578 - RNA, 22 nt, Human
augcugaaccuuaacuuggagc

SEQ ID NO: 220579 - RNA, 22 nt, Human
acaauuucuuauaguucaauuc

SEQ ID NO: 220580 - RNA, 22 nt, Human
uuugagcagcagaugcacuuag

SEQ ID NO: 220581 - RNA, 22 nt, Human
ucaugugucugccaguguuuau

SEQ ID NO: 220582 - RNA, 21 nt, Human
agagaaagucauggcuguggc

SEQ ID NO: 220583 - RNA, 22 nt, Human
gagggcagagacagugauucac

SEQ ID NO: 220584 - RNA, 22 nt, Human
ugcagggcacacgcacgggugu

SEQ ID NO: 220585 - RNA, 22 nt, Human
uaggauaugugaaaucauauua

SEQ ID NO: 220586 - RNA, 22 nt, Human
acaggucagauaaaggcuggug

SEQ ID NO: 220587 - RNA, 22 nt, Human
gguccugggaagaugcucauga

SEQ ID NO: 220588 - RNA, 22 nt, Human
gcagggugugucucauacaguu

SEQ ID NO: 220589 - RNA, 22 nt, Human
gggcaaguccggugcccagagc

SEQ ID NO: 220590 - RNA, 22 nt, Human
gagagccaugguggagaugggg

SEQ ID NO: 220591 - RNA, 22 nt, Human
aaguucuuagacaagcuugugg

SEQ ID NO: 220592 - RNA, 22 nt, Human
gccuggagaggaagccggugga

SEQ ID NO: 220593 - RNA, 22 nt, Human
uuucaaaccuacuuguauguuu

SEQ ID NO: 220594 - RNA, 22 nt, Human
aggaaauguacaaaugaagaug

SEQ ID NO: 220595 - RNA, 22 nt, Human
ggucacuggucucugcuuccau

SEQ ID NO: 220596 - RNA, 22 nt, Human
ggucaaaguugaagaagggcau

SEQ ID NO: 220597 - RNA, 22 nt, Human
uggcucugucacugugagcuau

SEQ ID NO: 220598 - RNA, 22 nt, Human
gagcaguggucacagggaggga

SEQ ID NO: 220599 - RNA, 22 nt, Human
ugauuucucuuggcaauauguu

SEQ ID NO: 220600 - RNA, 22 nt, Human
cugagccaccggcagggacauc

SEQ ID NO: 220601 - RNA, 22 nt, Human
gagggcaagaguuggaaacggu

SEQ ID NO: 220602 - RNA, 22 nt, Human
uagcaucuguuucucuuuguga

SEQ ID NO: 220603 - RNA, 22 nt, Human
agcaguccuccaguguguuuua

SEQ ID NO: 220604 - RNA, 22 nt, Human
ucguccugugcaccugccugca

SEQ ID NO: 220605 - RNA, 22 nt, Human
uuauucuuggaucugagucucu

SEQ ID NO: 220606 - RNA, 22 nt, Human
ggagaggaaaugccagcacuuc

SEQ ID NO: 220607 - RNA, 22 nt, Human
ucauuuuuuuccgguaggaaua

SEQ ID NO: 220608 - RNA, 22 nt, Human
agcauacaggucugaaacagcu

SEQ ID NO: 220609 - RNA, 22 nt, Human
ccacagcugaaagcagaggcuc

SEQ ID NO: 220610 - RNA, 22 nt, Human
ugcuucaaguugaaauauucuu

SEQ ID NO: 220611 - RNA, 22 nt, Human
ggagcagggaauuacagcgcag

SEQ ID NO: 220612 - RNA, 22 nt, Human
uuucugaagggcagcagacucu

SEQ ID NO: 220613 - RNA, 22 nt, Human
ugcuggcaucuuaauguucugu

SEQ ID NO: 220614 - RNA, 22 nt, Human
caggauagaaaggccauggagu

SEQ ID NO: 220615 - RNA, 22 nt, Human
ggcuuccccuccagugcucugu

SEQ ID NO: 220616 - RNA, 22 nt, Human
guaaauauaaaugcuagcugcc

SEQ ID NO: 220617 - RNA, 22 nt, Human
aauguugacaguggugaucuca

SEQ ID NO: 220618 - RNA, 22 nt, Human
aggcucugggaagcagugaguu

SEQ ID NO: 220619 - RNA, 22 nt, Human
ggccucucuagcauccagccug

SEQ ID NO: 220620 - RNA, 22 nt, Human
ccaggagcaacuugaaggcaag

SEQ ID NO: 220621 - RNA, 22 nt, Human
cagugccaugucugagccccua

SEQ ID NO: 220622 - RNA, 22 nt, Human
uaaaacacauaaacucucuauu

SEQ ID NO: 220623 - RNA, 22 nt, Human
gcucucagaagagccaggcuac

SEQ ID NO: 220624 - RNA, 20 nt, Human
aggaagcugagauguagagg

SEQ ID NO: 220625 - RNA, 22 nt, Human
ggcagacuguaauaggagaauu

SEQ ID NO: 220626 - RNA, 23 nt, Human
ggcugugcagccugcggcaaaag

SEQ ID NO: 220627 - RNA, 22 nt, Human
gagcucagagccuauaguuggu

SEQ ID NO: 220628 - RNA, 22 nt, Human
cuccagcugaguaagaacacua

SEQ ID NO: 220629 - RNA, 22 nt, Human
ucagcuuucuauguugcuaaac

SEQ ID NO: 220630 - RNA, 22 nt, Human
gcugagaaucaagauggagagg

SEQ ID NO: 220631 - RNA, 22 nt, Human
uccaggaugcccgcuuuugcuu

SEQ ID NO: 220632 - RNA, 22 nt, Human
gaaaggugccccauaggcagga

SEQ ID NO: 220633 - RNA, 22 nt, Human
uggcccugcugggucagagcug

SEQ ID NO: 220634 - RNA, 22 nt, Human
caguggcugagaguggacacug

SEQ ID NO: 220635 - RNA, 22 nt, Human
acuugaaaccuuggcaaacaau

SEQ ID NO: 220636 - RNA, 20 nt, Human
ucaggagccuaggacaugau

SEQ ID NO: 220637 - RNA, 22 nt, Human
caagcagucagccugaagacug

SEQ ID NO: 220638 - RNA, 22 nt, Human
ccuccucuggugcugccaaccc

SEQ ID NO: 220639 - RNA, 22 nt, Human
aaggaagagucuagaacaggca

SEQ ID NO: 220640 - RNA, 22 nt, Human
aaacugacaaucucaguccuau

SEQ ID NO: 220641 - RNA, 22 nt, Human
acaccugggucagugugacagu

SEQ ID NO: 220642 - RNA, 22 nt, Human
acaauuuuaagccagagugggu

SEQ ID NO: 220643 - RNA, 22 nt, Human
uggguccacuucugcacugugg

SEQ ID NO: 220644 - RNA, 22 nt, Human
cagggcacaguuauggaggugg

SEQ ID NO: 220645 - RNA, 22 nt, Human
gggcucucuuuuuggccugccc

SEQ ID NO: 220646 - RNA, 22 nt, Human
cuccagugcgcaggacagcccc

SEQ ID NO: 220647 - RNA, 22 nt, Human
gccaguggguaguuggagcugg

SEQ ID NO: 220648 - RNA, 22 nt, Human
gaggcuguaaguguggagccua

SEQ ID NO: 220649 - RNA, 22 nt, Human
cagagcauugagggucugccaa

SEQ ID NO: 220650 - RNA, 22 nt, Human
cagcaugcuugggggagggagc

SEQ ID NO: 220651 - RNA, 22 nt, Human
gucagcaccucuuuggggagcu

SEQ ID NO: 220652 - RNA, 22 nt, Human
gcuccugugaaggcauuaggug

SEQ ID NO: 220653 - RNA, 22 nt, Human
uaacagagauagaaauguaaag

SEQ ID NO: 220654 - RNA, 22 nt, Human
gaaauagaucucugggaugcaa

SEQ ID NO: 220655 - RNA, 22 nt, Human
acaaaacaguguuccugccccu

SEQ ID NO: 220656 - RNA, 22 nt, Human
caugugcauccuuaaucucccu

SEQ ID NO: 220657 - RNA, 22 nt, Human
uagcuggguugaggucaucuac

SEQ ID NO: 220658 - RNA, 19 nt, Human
uguuuucaagugggauuau

SEQ ID NO: 220659 - RNA, 20 nt, Human
cuggcuggaaacuuagccuu

SEQ ID NO: 220660 - RNA, 22 nt, Human
gaaaauguuagcuucauaguca

SEQ ID NO: 220661 - RNA, 22 nt, Human
accuggcacagaguaugcucuc

SEQ ID NO: 220662 - RNA, 22 nt, Human
acacauuuuguuaaacccugug

SEQ ID NO: 220663 - RNA, 22 nt, Human
aacugucuuauuuauauuucug

SEQ ID NO: 220664 - RNA, 22 nt, Human
cugaggaaggaguuaggcaguu

SEQ ID NO: 220665 - RNA, 22 nt, Human
gggucuggacggcugcaggaag

SEQ ID NO: 220666 - RNA, 20 nt, Human
ccagcucugugguuagauac

SEQ ID NO: 220667 - RNA, 22 nt, Human
aggagggagcacuauaugggga

SEQ ID NO: 220668 - RNA, 22 nt, Human
uuuaacauguucaagaaacaua

SEQ ID NO: 220669 - RNA, 22 nt, Human
uagaaaagaauuuuauuugaua

SEQ ID NO: 220670 - RNA, 22 nt, Human
auacacagcuacauugaacaau

SEQ ID NO: 220671 - RNA, 22 nt, Human
cugggaaaacugugaccccugu

SEQ ID NO: 220672 - RNA, 22 nt, Human
cugcuuuauagggcuuccaugu

SEQ ID NO: 220673 - RNA, 22 nt, Human
cagucccacaagaucuccacaa

SEQ ID NO: 220674 - RNA, 22 nt, Human
gucagggcacagugacagcucc

SEQ ID NO: 220675 - RNA, 22 nt, Human
aguauaauuuacauuugguauu

SEQ ID NO: 220676 - RNA, 22 nt, Human
agacaacaugaucagcaguccu

SEQ ID NO: 220677 - RNA, 20 nt, Human
ucuucuguugccuuguucug

SEQ ID NO: 220678 - RNA, 19 nt, Human
ugagacagaagaugagccu

SEQ ID NO: 220679 - RNA, 22 nt, Human
agcagggcagguaaggaucaga

SEQ ID NO: 220680 - RNA, 22 nt, Human
uuuaaauguucaugauacugaa

SEQ ID NO: 220681 - RNA, 22 nt, Human
guuuacaacaucuuguccuuca

SEQ ID NO: 220682 - RNA, 22 nt, Human
agcagggcucuguggagggugg

SEQ ID NO: 220683 - RNA, 22 nt, Human
auacaucuuccuuuuaaaaugc

SEQ ID NO: 220684 - RNA, 17 nt, Human
auggcuuccauugacca

SEQ ID NO: 220685 - RNA, 22 nt, Human
cugagaaaggaccucaaacagg

SEQ ID NO: 220686 - RNA, 22 nt, Human
gcuccagggaacagaauguacu

SEQ ID NO: 220687 - RNA, 23 nt, Human
cagugugacgaggugaggcaggc

SEQ ID NO: 220688 - RNA, 22 nt, Human
cacaagcugggcaaguguauau

SEQ ID NO: 220689 - RNA, 22 nt, Human
uccagaggugaacacccaggca

SEQ ID NO: 220690 - RNA, 22 nt, Human
gcucaggccucggacacacaau

SEQ ID NO: 220691 - RNA, 22 nt, Human
gggguggauuccuacaggucca

SEQ ID NO: 220692 - RNA, 22 nt, Human
uugagggagcacagauucuuau

SEQ ID NO: 220693 - RNA, 22 nt, Human
accuccagcuuuuuagagacau

SEQ ID NO: 220694 - RNA, 23 nt, Human
aggaaugugcccacccaucuccu

SEQ ID NO: 220695 - RNA, 21 nt, Human
acagcaagccuuccuuucagg

SEQ ID NO: 220696 - RNA, 22 nt, Human
uguuccaauaaggaguugaaau

SEQ ID NO: 220697 - RNA, 22 nt, Human
aaagauuaaaucaaauugguca

SEQ ID NO: 220698 - RNA, 22 nt, Human
gcuaggagccgcugcacuaggu

SEQ ID NO: 220699 - RNA, 22 nt, Human
gcuaggagauugagcucugaag

SEQ ID NO: 220700 - RNA, 22 nt, Human
ucucccaguccucugugcuuac

SEQ ID NO: 220701 - RNA, 22 nt, Human
gcugcagagggucuuagagagg

SEQ ID NO: 220702 - RNA, 22 nt, Human
gaagaugggaaugaugaguggg

SEQ ID NO: 220703 - RNA, 22 nt, Human
aguguccuuguuauuacugcuc

SEQ ID NO: 220704 - RNA, 22 nt, Human
ccuuuuaagggagacuagagau

SEQ ID NO: 220705 - RNA, 22 nt, Human
agaagucuggaauuccugcagg

SEQ ID NO: 220706 - RNA, 22 nt, Human
uguuuucagucauauagcaggu

SEQ ID NO: 220707 - RNA, 22 nt, Human
accaaggagaaggugcaagcuu

SEQ ID NO: 220708 - RNA, 22 nt, Human
aggcauggauggauccagggcu

SEQ ID NO: 220709 - RNA, 19 nt, Human
ucccugaguuccagcccag

SEQ ID NO: 220710 - RNA, 22 nt, Human
uaagcucacuguaagaacugau

SEQ ID NO: 220711 - RNA, 22 nt, Human
gaaugaaucuguaagugacaag

SEQ ID NO: 220712 - RNA, 20 nt, Human
agaggccaguuaggagucua

SEQ ID NO: 220713 - RNA, 22 nt, Human
agaccaugggcucugaagagca

SEQ ID NO: 220714 - RNA, 22 nt, Human
agcaauuauuguauaagaacaa

SEQ ID NO: 220715 - RNA, 22 nt, Human
guggcaggaucacggcucacug

SEQ ID NO: 220716 - RNA, 22 nt, Human
uugcuuuauguguaugacuuga

SEQ ID NO: 220717 - RNA, 22 nt, Human
uacaaagugcuuuagaaaugaa

SEQ ID NO: 220718 - RNA, 22 nt, Human
uagaaaguacuaaauuuaacug

SEQ ID NO: 220719 - RNA, 22 nt, Human
cagagccaggucuugaacucag

SEQ ID NO: 220720 - RNA, 22 nt, Human
aguuaacucauuuuauaaugcc

SEQ ID NO: 220721 - RNA, 22 nt, Human
aggcuugccacuuguuagucua

SEQ ID NO: 220722 - RNA, 22 nt, Human
caccugguucuagugaaagucu

SEQ ID NO: 220723 - RNA, 22 nt, Human
agcacugugguggaagcaucaa

SEQ ID NO: 220724 - RNA, 22 nt, Human
aguaugcauauuucaaaguaag

SEQ ID NO: 220725 - RNA, 22 nt, Human
acauguguuaaaauucucacca

SEQ ID NO: 220726 - RNA, 22 nt, Human
uuuuggcuguagcuggaaaucu

SEQ ID NO: 220727 - RNA, 22 nt, Human
caguggaggccuugggaccuuu

SEQ ID NO: 220728 - RNA, 22 nt, Human
ccaggcacuggcuggguucuuu

SEQ ID NO: 220729 - RNA, 21 nt, Human
gcugcaucaaucuacccaggg

SEQ ID NO: 220730 - RNA, 22 nt, Human
auccuucuccagucguauuuuu

SEQ ID NO: 220731 - RNA, 22 nt, Human
agggcagccaugagccuucagg

SEQ ID NO: 220732 - RNA, 22 nt, Human
uccugugagacuuguccauuau

SEQ ID NO: 220733 - RNA, 22 nt, Human
agugaagaggaaguggggcaca

SEQ ID NO: 220734 - RNA, 22 nt, Human
gauaggaccagguaaccucuaa

SEQ ID NO: 220735 - RNA, 22 nt, Human
gcccugagacugagcauggguu

SEQ ID NO: 220736 - RNA, 22 nt, Human
uguuauugucgcugcacuggga

SEQ ID NO: 220737 - RNA, 22 nt, Human
ggagcugcacgcucugaagccu

SEQ ID NO: 220738 - RNA, 22 nt, Human
ucuuggcuuucuccuagggaug

SEQ ID NO: 220739 - RNA, 22 nt, Human
ugccagauuguggcauggcacu

SEQ ID NO: 220740 - RNA, 22 nt, Human
aagcagcagcaggauuaaagag

SEQ ID NO: 220741 - RNA, 23 nt, Human
uugcuugagcccaggaaguggag

SEQ ID NO: 220742 - RNA, 22 nt, Human
ugaaggcaacugagaaaaagca

SEQ ID NO: 220743 - RNA, 22 nt, Human
guguacagauaucucacguucu

SEQ ID NO: 220744 - RNA, 22 nt, Human
ggcucugcaaaaguagauacuu

SEQ ID NO: 220745 - RNA, 21 nt, Human
acaguuuauuagaguaagugc

SEQ ID NO: 220746 - RNA, 22 nt, Human
gcacccagcccagggcgugaug

SEQ ID NO: 220747 - RNA, 22 nt, Human
ggcuggcuccaccuagguagcu

SEQ ID NO: 220748 - RNA, 22 nt, Human
guaaaucauggucagaauaaau

SEQ ID NO: 220749 - RNA, 22 nt, Human
ccaaagucagugcucagucguc

SEQ ID NO: 220750 - RNA, 22 nt, Human
uggaaauacuugccauaaaacu

SEQ ID NO: 220751 - RNA, 23 nt, Human
acacagaagaagacccaaggaag

SEQ ID NO: 220752 - RNA, 20 nt, Human
aaagauacuuuuuguaaugg

SEQ ID NO: 220753 - RNA, 22 nt, Human
aaagccaguucuuuuauauugg

SEQ ID NO: 220754 - RNA, 22 nt, Human
cagucucugccacuucuaagcu

SEQ ID NO: 220755 - RNA, 22 nt, Human
acugcaggagacacagcugcug

SEQ ID NO: 220756 - RNA, 22 nt, Human
cagacagaaggcuccuugaggu

SEQ ID NO: 220757 - RNA, 22 nt, Human
ugaggcucagagaagugcuguu

SEQ ID NO: 220758 - RNA, 22 nt, Human
cagcacccucggaggcugccgu

SEQ ID NO: 220759 - RNA, 22 nt, Human
auacugaugaugugaagaaaca

SEQ ID NO: 220760 - RNA, 22 nt, Human
guuuauauucaacggaguaucu

SEQ ID NO: 220761 - RNA, 22 nt, Human
cuggcugguucccugcuccagg

SEQ ID NO: 220762 - RNA, 22 nt, Human
cucuggaagaugaccuggguaa

SEQ ID NO: 220763 - RNA, 22 nt, Human
ugccaggcccugcgggguccca

SEQ ID NO: 220764 - RNA, 22 nt, Human
uguccuuuacugauugcuucug

SEQ ID NO: 220765 - RNA, 22 nt, Human
uggcacagggcuuggucgcuca

SEQ ID NO: 220766 - RNA, 22 nt, Human
cagcaggaagguuuccccugca

SEQ ID NO: 220767 - RNA, 22 nt, Human
aggauuuaggagcuggcuaacg

SEQ ID NO: 220768 - RNA, 22 nt, Human
auuuacagccuugaaaacagca

SEQ ID NO: 220769 - RNA, 22 nt, Human
aaaaagagaaaugcucuagucc

SEQ ID NO: 220770 - RNA, 22 nt, Human
uucacugugaacucauauucag

SEQ ID NO: 220771 - RNA, 21 nt, Human
agcagguguaaaggaggaaau

SEQ ID NO: 220772 - RNA, 22 nt, Human
caucuuuguaacuuccacauaa

SEQ ID NO: 220773 - RNA, 22 nt, Human
uccugugcuguuaauagugaua

SEQ ID NO: 220774 - RNA, 22 nt, Human
ucauguuugcccuaagaaaaag

SEQ ID NO: 220775 - RNA, 22 nt, Human
ugcaaaacuucucagagccuuu

SEQ ID NO: 220776 - RNA, 20 nt, Human
aaaaugaugggcagggcagg

SEQ ID NO: 220777 - RNA, 18 nt, Human
ucugucuguacaaguauc

SEQ ID NO: 220778 - RNA, 22 nt, Human
cucccugguguccccuccagga

SEQ ID NO: 220779 - RNA, 22 nt, Human
auuccagauggcuucaaguaag

SEQ ID NO: 220780 - RNA, 22 nt, Human
gccugugaugcccccauaagua

SEQ ID NO: 220781 - RNA, 18 nt, Human
cccagcccaccauuucuc

SEQ ID NO: 220782 - RNA, 22 nt, Human
aggaggccuguguuugucugua

SEQ ID NO: 220783 - RNA, 23 nt, Human
ucucagaggauuccugggccuug

SEQ ID NO: 220784 - RNA, 22 nt, Human
cugaaacuccaugagaaauugc

SEQ ID NO: 220785 - RNA, 22 nt, Human
uauuuccagcaguaagaagaca

SEQ ID NO: 220786 - RNA, 22 nt, Human
aguggcuguccuggcucuaacu

SEQ ID NO: 220787 - RNA, 22 nt, Human
ggguggcacaggugcagagggu

SEQ ID NO: 220788 - RNA, 22 nt, Human
agagcuuuugggaauucaggua

SEQ ID NO: 220789 - RNA, 22 nt, Human
gucuuauuuaaggacaagaaga

SEQ ID NO: 220790 - RNA, 22 nt, Human
cuuagaacagugucugccagag

SEQ ID NO: 220791 - RNA, 22 nt, Human
gaaggcuggcuuucugagagca

SEQ ID NO: 220792 - RNA, 19 nt, Human
cugggcugaggucugccuu

SEQ ID NO: 220793 - RNA, 22 nt, Human
cuguccagaaagggggcaacaa

SEQ ID NO: 220794 - RNA, 22 nt, Human
gacccaggcccaaggcugccag

SEQ ID NO: 220795 - RNA, 22 nt, Human
gcugagguuuucugccugcuca

SEQ ID NO: 220796 - RNA, 22 nt, Human
auucucaauggcuacuuucaua

SEQ ID NO: 220797 - RNA, 22 nt, Human
acuuccaaagaagugauuacag

SEQ ID NO: 220798 - RNA, 22 nt, Human
auaccuguguauccacaagcgu

SEQ ID NO: 220799 - RNA, 22 nt, Human
aacaaaagccgaaguagguguc

SEQ ID NO: 220800 - RNA, 22 nt, Human
gguggcagucuuaagagaucuu

SEQ ID NO: 220801 - RNA, 22 nt, Human
aaagcugcugccaaucaggcuu

SEQ ID NO: 220802 - RNA, 22 nt, Human
agccuugcaugauuucauucau

SEQ ID NO: 220803 - RNA, 22 nt, Human
aaauauagugacacuuauaguc

SEQ ID NO: 220804 - RNA, 22 nt, Human
agcccagaggguagcagaagaa

SEQ ID NO: 220805 - RNA, 22 nt, Human
gucuguuaccuccaagaccauu

SEQ ID NO: 220806 - RNA, 17 nt, Human
aaggaaugucagaaguu

SEQ ID NO: 220807 - RNA, 22 nt, Human
cagcaagagaggcagggcaaau

SEQ ID NO: 220808 - RNA, 22 nt, Human
aaaagcaucucaaaggagcuuc

SEQ ID NO: 220809 - RNA, 22 nt, Human
ggcuguugacagacauagguuu

SEQ ID NO: 220810 - RNA, 22 nt, Human
ggucccagaauugguuagcaca

SEQ ID NO: 220811 - RNA, 22 nt, Human
uuucucugcugccugugucgau

SEQ ID NO: 220812 - RNA, 22 nt, Human
uccauugugauuauauacaaaa

SEQ ID NO: 220813 - RNA, 19 nt, Human
gcgaggaagucacuguggu

SEQ ID NO: 220814 - RNA, 22 nt, Human
ggcugaguugagaggauuacuu

SEQ ID NO: 220815 - RNA, 22 nt, Human
uagauauaagguccuuagaaca

SEQ ID NO: 220816 - RNA, 22 nt, Human
uaagaaacuaaugcaauaagag

SEQ ID NO: 220817 - RNA, 22 nt, Human
aaguuuuugguagagaaaagua

SEQ ID NO: 220818 - RNA, 22 nt, Human
aucuaaaguguuucaugaaaga

SEQ ID NO: 220819 - RNA, 22 nt, Human
cucagagggucuccuccagaau

SEQ ID NO: 220820 - RNA, 22 nt, Human
uucccuucuaguuuugagagac

SEQ ID NO: 220821 - RNA, 22 nt, Human
ugccuggccagacccuauagag

SEQ ID NO: 220822 - RNA, 22 nt, Human
cauaaaagccaccuauuuaaag

SEQ ID NO: 220823 - RNA, 22 nt, Human
aaacugucauuuuauauaguua

SEQ ID NO: 220824 - RNA, 22 nt, Human
uuccauaaucaccuuauucuuu

SEQ ID NO: 220825 - RNA, 22 nt, Human
aaaguuuuagaacuaggaagca

SEQ ID NO: 220826 - RNA, 22 nt, Human
aggaaagauggaaggaggauaa

SEQ ID NO: 220827 - RNA, 22 nt, Human
aggggauggagcuggaaggcag

SEQ ID NO: 220828 - RNA, 22 nt, Human
cagggucaggaggaucuggcuu

SEQ ID NO: 220829 - RNA, 22 nt, Human
aacaugugucuggcuagauugu

SEQ ID NO: 220830 - RNA, 22 nt, Human
uuggcuuccaggaucucagcag

SEQ ID NO: 220831 - RNA, 22 nt, Human
agaggccagguccagaguuugu

SEQ ID NO: 220832 - RNA, 18 nt, Human
ugcaaauggcuguuugau

SEQ ID NO: 220833 - RNA, 22 nt, Human
guguacauauugagucugcuga

SEQ ID NO: 220834 - RNA, 22 nt, Human
ccugaagaaaauuccacgagaa

SEQ ID NO: 220835 - RNA, 22 nt, Human
uggcccuguggcuucagaacag

SEQ ID NO: 220836 - RNA, 22 nt, Human
augguacagugcacugaaugga

SEQ ID NO: 220837 - RNA, 22 nt, Human
acaacauucuuaaauacacuga

SEQ ID NO: 220838 - RNA, 22 nt, Human
uccaaggagcagucuucaaccu

SEQ ID NO: 220839 - RNA, 22 nt, Human
gaaggcuucuccagggcuuacu

SEQ ID NO: 220840 - RNA, 22 nt, Human
ucccuccuggccgucaccgcug

SEQ ID NO: 220841 - RNA, 21 nt, Human
ucuggcaggaagacggauggg

SEQ ID NO: 220842 - RNA, 22 nt, Human
ucagagguggagauaguuggga

SEQ ID NO: 220843 - RNA, 22 nt, Human
agcuggcacagaccaggagauc

SEQ ID NO: 220844 - RNA, 22 nt, Human
ggcccagccuggcaacaaugac

SEQ ID NO: 220845 - RNA, 22 nt, Human
cucacauuccacuugugccaac

SEQ ID NO: 220846 - RNA, 22 nt, Human
ugacaauagcgauuuaucuugc

SEQ ID NO: 220847 - RNA, 22 nt, Human
ggcuuuuguuucagcucugcua

SEQ ID NO: 220848 - RNA, 22 nt, Human
agcugucucugguauuauguga

SEQ ID NO: 220849 - RNA, 22 nt, Human
aggugcuguuugucagcaguuu

SEQ ID NO: 220850 - RNA, 19 nt, Human
agggccugcagcucaagcu

SEQ ID NO: 220851 - RNA, 21 nt, Human
ugaaaucugaugggacaaaug

SEQ ID NO: 220852 - RNA, 22 nt, Human
aaugcacaaaggugucuauugc

SEQ ID NO: 220853 - RNA, 22 nt, Human
ggugcaggcgguggggcaagua

SEQ ID NO: 220854 - RNA, 22 nt, Human
cuucccuuuuuaugucuucagc

SEQ ID NO: 220855 - RNA, 22 nt, Human
gggcuccagcccgggaccaggu

SEQ ID NO: 220856 - RNA, 22 nt, Human
acuguaaagaaguaaguauggg

SEQ ID NO: 220857 - RNA, 22 nt, Human
auuauuggacacuucuucugca

SEQ ID NO: 220858 - RNA, 22 nt, Human
aggcaggcucaggcccaugcuu

SEQ ID NO: 220859 - RNA, 22 nt, Human
acuuugauaguuuaaucuagga

SEQ ID NO: 220860 - RNA, 22 nt, Human
cauuuguagcuauuuacuguau

SEQ ID NO: 220861 - RNA, 22 nt, Human
uucccucuccuacucaggaaag

SEQ ID NO: 220862 - RNA, 22 nt, Human
aaacugcaauuacuuuugcagc

SEQ ID NO: 220863 - RNA, 22 nt, Human
cucuuuuaauugucauaacaac

SEQ ID NO: 220864 - RNA, 19 nt, Human
cucagucuggcucugccug

SEQ ID NO: 220865 - RNA, 22 nt, Human
aggaaagggguagguguggacg

SEQ ID NO: 220866 - RNA, 22 nt, Human
ugucacagagcaacuauuucuu

SEQ ID NO: 220867 - RNA, 22 nt, Human
uacagugacagauagggauaga

SEQ ID NO: 220868 - RNA, 22 nt, Human
caguuucuucuauuuugaacua

SEQ ID NO: 220869 - RNA, 22 nt, Human
cugggucuaaaaauucucagau

SEQ ID NO: 220870 - RNA, 22 nt, Human
uuggauccaucucaggcauagg

SEQ ID NO: 220871 - RNA, 22 nt, Human
guguuacugggaggacggaggu

SEQ ID NO: 220872 - RNA, 22 nt, Human
caugcucugcagcagaccugug

SEQ ID NO: 220873 - RNA, 22 nt, Human
cugcagcuccugagcucagaga

SEQ ID NO: 220874 - RNA, 22 nt, Human
cuucuggaggacacuggcccca

SEQ ID NO: 220875 - RNA, 22 nt, Human
augaauguaaguggauuucuuu

SEQ ID NO: 220876 - RNA, 22 nt, Human
cuuuacugaagugaagaccugg

SEQ ID NO: 220877 - RNA, 22 nt, Human
aggagaaguaaggcuagaugau

SEQ ID NO: 220878 - RNA, 19 nt, Human
ccucaucuuggugugugca

SEQ ID NO: 220879 - RNA, 22 nt, Human
caccagcuuugcccacugccca

SEQ ID NO: 220880 - RNA, 19 nt, Human
caacugcccccucaaacau

SEQ ID NO: 220881 - RNA, 22 nt, Human
cacaugcuagaauaaaucucca

SEQ ID NO: 220882 - RNA, 20 nt, Human
acuuggaacucauuuuucuu

SEQ ID NO: 220883 - RNA, 22 nt, Human
uaaugguuuuuuggagacugcu

SEQ ID NO: 220884 - RNA, 22 nt, Human
agagcccugccaauggaugagg

SEQ ID NO: 220885 - RNA, 22 nt, Human
agguggcagagcuggcccagcg

SEQ ID NO: 220886 - RNA, 22 nt, Human
aguccugugcaaaugcaucuga

SEQ ID NO: 220887 - RNA, 22 nt, Human
uucaugugaauauauuugucuu

SEQ ID NO: 220888 - RNA, 22 nt, Human
cuggccaggccccuugcagggc

SEQ ID NO: 220889 - RNA, 21 nt, Human
aaaugaaugugguagugcaag

SEQ ID NO: 220890 - RNA, 22 nt, Human
gugagcagagaucgcgugauug

SEQ ID NO: 220891 - RNA, 21 nt, Human
agagaagggacucuuccaguc

SEQ ID NO: 220892 - RNA, 22 nt, Human
aguuauuacucuuuaacauauu

SEQ ID NO: 220893 - RNA, 21 nt, Human
uaauaauuccacuacagagua

SEQ ID NO: 220894 - RNA, 22 nt, Human
uaacucacuccaaaaaggcauu

SEQ ID NO: 220895 - RNA, 22 nt, Human
uggcagugaugcggcaggacau

SEQ ID NO: 220896 - RNA, 22 nt, Human
ugcuccaggugugccucucaug

SEQ ID NO: 220897 - RNA, 22 nt, Human
cugccaggacugacgucuucag

SEQ ID NO: 220898 - RNA, 22 nt, Human
ugagugaggcugggcagucccu

SEQ ID NO: 220899 - RNA, 19 nt, Human
gccuuggcauucucugcuu

SEQ ID NO: 220900 - RNA, 22 nt, Human
gccuccugaaaggaagagcucc

SEQ ID NO: 220901 - RNA, 22 nt, Human
aagggcaggaaaagauggaugu

SEQ ID NO: 220902 - RNA, 22 nt, Human
aggcaacugacagcauauccug

SEQ ID NO: 220903 - RNA, 22 nt, Human
cgcugggugcagugauuggcau

SEQ ID NO: 220904 - RNA, 22 nt, Human
gcccagagggaagaggugucau

SEQ ID NO: 220905 - RNA, 22 nt, Human
aaggggaauagaguggguugug

SEQ ID NO: 220906 - RNA, 22 nt, Human
agaagccucauccucucuagug

SEQ ID NO: 220907 - RNA, 22 nt, Human
uuacacuuuugacaaaccugag

SEQ ID NO: 220908 - RNA, 22 nt, Human
cccaggaggcagagguuggagc

SEQ ID NO: 220909 - RNA, 22 nt, Human
gucucagggcagcuggaggagg

SEQ ID NO: 220910 - RNA, 21 nt, Human
ucucuggcgguguuuggcucc

SEQ ID NO: 220911 - RNA, 22 nt, Human
agaggccaccagagguggugcc

SEQ ID NO: 220912 - RNA, 22 nt, Human
cccucacuucacgcucugcaga

SEQ ID NO: 220913 - RNA, 22 nt, Human
auccuucuaagagggacguaug

SEQ ID NO: 220914 - RNA, 22 nt, Human
ugacuucugggugagccagcau

SEQ ID NO: 220915 - RNA, 22 nt, Human
uguuaacagaggucauuuuggg

SEQ ID NO: 220916 - RNA, 22 nt, Human
acaggccuggugcugcugacag

SEQ ID NO: 220917 - RNA, 20 nt, Human
accaggcccggugucuccuc

SEQ ID NO: 220918 - RNA, 22 nt, Human
auuuaugacaaccaaagaguga

SEQ ID NO: 220919 - RNA, 22 nt, Human
uucaguauacauuaucuaauug

SEQ ID NO: 220920 - RNA, 22 nt, Human
ccaggaggcucugcccauccca

SEQ ID NO: 220921 - RNA, 22 nt, Human
gcugcuguuccuccaguggauc

SEQ ID NO: 220922 - RNA, 22 nt, Human
gaaguuccucguaggagucucu

SEQ ID NO: 220923 - RNA, 22 nt, Human
uugaaauaucaaguuauuagug

SEQ ID NO: 220924 - RNA, 22 nt, Human
aggcugggaaauguagucuucc

SEQ ID NO: 220925 - RNA, 22 nt, Human
ccuggggcucaagauggcgccg

SEQ ID NO: 220926 - RNA, 22 nt, Human
ucuuauuuuuuaaugacagaga

SEQ ID NO: 220927 - RNA, 22 nt, Human
ccagccucacuggcaucaccua

SEQ ID NO: 220928 - RNA, 22 nt, Human
gagagcaggaggcagcgggacg

SEQ ID NO: 220929 - RNA, 22 nt, Human
uuauagcagcaugauuuacaau

SEQ ID NO: 220930 - RNA, 22 nt, Human
auggacuuaagagucagaagcu

SEQ ID NO: 220931 - RNA, 22 nt, Human
uugcauggaggaacauggccca

SEQ ID NO: 220932 - RNA, 22 nt, Human
cugugaauuaaguauuguuauc

SEQ ID NO: 220933 - RNA, 22 nt, Human
uggccagcccuucagccaugcc

SEQ ID NO: 220934 - RNA, 22 nt, Human
cugguccuaaagcccuacucca

SEQ ID NO: 220935 - RNA, 22 nt, Human
uaucauaaguuaauuaaacagu

SEQ ID NO: 220936 - RNA, 22 nt, Human
caguuucuuuccauuguuaccu

SEQ ID NO: 220937 - RNA, 18 nt, Human
aagagcuucgcauauaca

SEQ ID NO: 220938 - RNA, 22 nt, Human
gaaaggagugcuuuccaggucu

SEQ ID NO: 220939 - RNA, 22 nt, Human
uuaggaauauuuucugaguagu

SEQ ID NO: 220940 - RNA, 20 nt, Human
ugguccucacaugccaucuu

SEQ ID NO: 220941 - RNA, 22 nt, Human
gccuggcucccucugcagcucc

SEQ ID NO: 220942 - RNA, 22 nt, Human
acaggcagguaauuuacauauu

SEQ ID NO: 220943 - RNA, 22 nt, Human
ugcaccaguuucucagagaauc

SEQ ID NO: 220944 - RNA, 22 nt, Human
ggucucugaacuuccacugcgc

SEQ ID NO: 220945 - RNA, 18 nt, Human
uucuuuaauucaguuuga

SEQ ID NO: 220946 - RNA, 22 nt, Human
aggcugcguuagccucacuccc

SEQ ID NO: 220947 - RNA, 22 nt, Human
cugggcucagcccaugcugucc

SEQ ID NO: 220948 - RNA, 22 nt, Human
agcaucuuuaggaagagaaaga

SEQ ID NO: 220949 - RNA, 22 nt, Human
ucagcccugaggacagaggcag

SEQ ID NO: 220950 - RNA, 22 nt, Human
uuauuuucagcuaggaaagcca

SEQ ID NO: 220951 - RNA, 18 nt, Human
uccagggcuuccuccucu

SEQ ID NO: 220952 - RNA, 17 nt, Human
cacaggugugguuugag

SEQ ID NO: 220953 - RNA, 22 nt, Human
uugcaaaagcaauugcaguuuu

SEQ ID NO: 220954 - RNA, 22 nt, Human
uuauugaaauggaagcuauaac

SEQ ID NO: 220955 - RNA, 22 nt, Human
uuacagagcucauuucuaaggg

SEQ ID NO: 220956 - RNA, 22 nt, Human
uuugcaaaugaagcucugagga

SEQ ID NO: 220957 - RNA, 21 nt, Human
aaagagcccgcugagagguuc

SEQ ID NO: 220958 - RNA, 22 nt, Human
uagcagcuuaaguaauuagaau

SEQ ID NO: 220959 - RNA, 22 nt, Human
caggucuccagcucagggucca

SEQ ID NO: 220960 - RNA, 22 nt, Human
uugcugaucugugaaucagcca

SEQ ID NO: 220961 - RNA, 19 nt, Human
agucugguggcgugcaugu

SEQ ID NO: 220962 - RNA, 22 nt, Human
agcuucccaggagaaucaggga

SEQ ID NO: 220963 - RNA, 22 nt, Human
gacaaaaguguuuugaacaagg

SEQ ID NO: 220964 - RNA, 22 nt, Human
agggagcucgaugccugagugu

SEQ ID NO: 220965 - RNA, 22 nt, Human
uagaacucuggucuucucaucc

SEQ ID NO: 220966 - RNA, 22 nt, Human
cagccccuggcgcacgccgagc

SEQ ID NO: 220967 - RNA, 22 nt, Human
aguuaaagaaagauaauucgcc

SEQ ID NO: 220968 - RNA, 22 nt, Human
uuuauuggaugggucagcucua

SEQ ID NO: 220969 - RNA, 22 nt, Human
uucucuggguuaggggaacuau

SEQ ID NO: 220970 - RNA, 22 nt, Human
acugccuugauucaugcugaug

SEQ ID NO: 220971 - RNA, 22 nt, Human
gguguccacucagcccguccug

SEQ ID NO: 220972 - RNA, 22 nt, Human
ugucuugacuuuagagccagga

SEQ ID NO: 220973 - RNA, 22 nt, Human
uucuucuucaagugcugcauuc

SEQ ID NO: 220974 - RNA, 19 nt, Human
aaggacacaacagagauag

SEQ ID NO: 220975 - RNA, 22 nt, Human
uguuagaaguuaaucacuaauu

SEQ ID NO: 220976 - RNA, 22 nt, Human
cucugggcaggacgccaggccu

SEQ ID NO: 220977 - RNA, 17 nt, Human
uggcccuagacuccagc

SEQ ID NO: 220978 - RNA, 22 nt, Human
gcugcuuuauaaucucggcaga

SEQ ID NO: 220979 - RNA, 22 nt, Human
uuaagaagguacucaaagaucu

SEQ ID NO: 220980 - RNA, 22 nt, Human
ugguccagacuuugaccucuca

SEQ ID NO: 220981 - RNA, 22 nt, Human
agaauuguaauaauaauagcau

SEQ ID NO: 220982 - RNA, 22 nt, Human
aggcaggcuagucgcuugagcc

SEQ ID NO: 220983 - RNA, 22 nt, Human
gcagagaaggauugaaaccaga

SEQ ID NO: 220984 - RNA, 20 nt, Human
gaagauggguagaggcacag

SEQ ID NO: 220985 - RNA, 22 nt, Human
gacccaggaagcuacuucuggu

SEQ ID NO: 220986 - RNA, 22 nt, Human
uugaaaacuuucuagaccaaga

SEQ ID NO: 220987 - RNA, 22 nt, Human
aagugagugguaaggagcaugg

SEQ ID NO: 220988 - RNA, 22 nt, Human
aguccuuugcugaacugucaca

SEQ ID NO: 220989 - RNA, 22 nt, Human
cugccuguggacacccuggagg

SEQ ID NO: 220990 - RNA, 22 nt, Human
ucugccagguggggagaggcca

SEQ ID NO: 220991 - RNA, 22 nt, Human
cuuguuaaauuauauaagcaga

SEQ ID NO: 220992 - RNA, 21 nt, Human
ggaaggcuaugguguauuuuu

SEQ ID NO: 220993 - RNA, 20 nt, Human
aaagagcccuuggagcaggc

SEQ ID NO: 220994 - RNA, 22 nt, Human
uuuccuaggagauugaucacau

SEQ ID NO: 220995 - RNA, 22 nt, Human
auucuaaagcuuguggagcuua

SEQ ID NO: 220996 - RNA, 22 nt, Human
cuguuacuguauuuaaucaucu

SEQ ID NO: 220997 - RNA, 22 nt, Human
ucaaaggguccuuaacaugaga

SEQ ID NO: 220998 - RNA, 22 nt, Human
uaccaccuccauccuccuuuca

SEQ ID NO: 220999 - RNA, 22 nt, Human
aggucugagcucagggccuggc

SEQ ID NO: 221000 - RNA, 17 nt, Human
gaagguuucucuuaggu

SEQ ID NO: 221001 - RNA, 22 nt, Human
uuagagaagaugaaccaucguu

SEQ ID NO: 221002 - RNA, 22 nt, Human
ugcucaguuaagcagaggaaau

SEQ ID NO: 221003 - RNA, 22 nt, Human
uucuguuuugcacagacuugaa

SEQ ID NO: 221004 - RNA, 22 nt, Human
aggccucaggaagguaaagaag

SEQ ID NO: 221005 - RNA, 22 nt, Human
ggugggugcagggggcuucuua

SEQ ID NO: 221006 - RNA, 22 nt, Human
cauuuuguaagucucucuuguu

SEQ ID NO: 221007 - RNA, 22 nt, Human
ugucuguggcaauuguggguaa

SEQ ID NO: 221008 - RNA, 18 nt, Human
aagccaggucaagauaag

SEQ ID NO: 221009 - RNA, 18 nt, Human
ucauuuguuuugcaugaa

SEQ ID NO: 221010 - RNA, 22 nt, Human
cuguccuccggccaccuacagu

SEQ ID NO: 221011 - RNA, 16 nt, Human
ugaggucuuauuagca

SEQ ID NO: 221012 - RNA, 22 nt, Human
uacagagugguuguccaacucu

SEQ ID NO: 221013 - RNA, 22 nt, Human
uaaggccaaacuauuauaguuc

SEQ ID NO: 221014 - RNA, 19 nt, Human
ggcaggcuggauagagagg

SEQ ID NO: 221015 - RNA, 22 nt, Human
ucaguuaagaggccacggcagu

SEQ ID NO: 221016 - RNA, 20 nt, Human
uugagcuuccaagucuuugu

SEQ ID NO: 221017 - RNA, 22 nt, Human
aacaugcucuuccuggcuaguc

SEQ ID NO: 221018 - RNA, 22 nt, Human
ccccagagagcaccaugaagcc

SEQ ID NO: 221019 - RNA, 22 nt, Human
acauuuaaccaaacuguuuaau

SEQ ID NO: 221020 - RNA, 22 nt, Human
ggccaggagaggagggcacuga

SEQ ID NO: 221021 - RNA, 22 nt, Human
gcagaugcagagauggcugggg

SEQ ID NO: 221022 - RNA, 22 nt, Human
agcugugguuagauagaguccu

SEQ ID NO: 221023 - RNA, 22 nt, Human
ccagcagguguagggcucaugg

SEQ ID NO: 221024 - RNA, 22 nt, Human
ccagccaugggccaccuagcug

SEQ ID NO: 221025 - RNA, 22 nt, Human
gaaucccuugcaaguuguugua

SEQ ID NO: 221026 - RNA, 22 nt, Human
cuggccacugguggucauaggc

SEQ ID NO: 221027 - RNA, 22 nt, Human
aggaagccuggaguccugccca

SEQ ID NO: 221028 - RNA, 22 nt, Human
uuagcuucuuacauuucauccu

SEQ ID NO: 221029 - RNA, 22 nt, Human
uucuuuauccuauuuguaggug

SEQ ID NO: 221030 - RNA, 22 nt, Human
uggcucagccuggcccuuucau

SEQ ID NO: 221031 - RNA, 22 nt, Human
gaggaaccacucugagaagcca

SEQ ID NO: 221032 - RNA, 22 nt, Human
uuuaaugugacaucuuuuagag

SEQ ID NO: 221033 - RNA, 22 nt, Human
ccucugggccagccuggacccu

SEQ ID NO: 221034 - RNA, 22 nt, Human
aagcaggaaggagcccagggca

SEQ ID NO: 221035 - RNA, 22 nt, Human
cagggccucauugucaguccug

SEQ ID NO: 221036 - RNA, 22 nt, Human
agucuucuguuuuucagcagcu

SEQ ID NO: 221037 - RNA, 22 nt, Human
ugugugggcgaagacagccuuu

SEQ ID NO: 221038 - RNA, 22 nt, Human
caggacauugauccauuggcac

SEQ ID NO: 221039 - RNA, 22 nt, Human
gaguccugcuuucaauucuuuu

SEQ ID NO: 221040 - RNA, 22 nt, Human
aggaacacaacuuccugagagc

SEQ ID NO: 221041 - RNA, 22 nt, Human
acaggauggagauaauagaaaa

SEQ ID NO: 221042 - RNA, 20 nt, Human
aacuagaaagcacccaugga

SEQ ID NO: 221043 - RNA, 22 nt, Human
ucaugcuuuguuaauguggcac

SEQ ID NO: 221044 - RNA, 22 nt, Human
gaugaaaaaagacgagcauaua

SEQ ID NO: 221045 - RNA, 22 nt, Human
uaaaguguggauaugauuagua

SEQ ID NO: 221046 - RNA, 22 nt, Human
gaggcagcagaacauggaagag

SEQ ID NO: 221047 - RNA, 22 nt, Human
gaaaggcugcaucucgccucag

SEQ ID NO: 221048 - RNA, 22 nt, Human
cccaaggacacgggcagggaca

SEQ ID NO: 221049 - RNA, 22 nt, Human
agaaacaucauuggaacacaag

SEQ ID NO: 221050 - RNA, 23 nt, Human
acagaugaaaguguggcucagag

SEQ ID NO: 221051 - RNA, 22 nt, Human
ccaggccugcauucccucucag

SEQ ID NO: 221052 - RNA, 22 nt, Human
ucuguucagaauuguaacacuc

SEQ ID NO: 221053 - RNA, 22 nt, Human
guagucugaacaguaauuuugu

SEQ ID NO: 221054 - RNA, 22 nt, Human
agauuuuaguuuggggaggugc

SEQ ID NO: 221055 - RNA, 22 nt, Human
accauucugucucuuuacaaau

SEQ ID NO: 221056 - RNA, 22 nt, Human
aaaaaauuaucauaguuccuga

SEQ ID NO: 221057 - RNA, 22 nt, Human
agucacacugguuguuuacagu

SEQ ID NO: 221058 - RNA, 22 nt, Human
uguuuacuccugauauauuuuu

SEQ ID NO: 221059 - RNA, 22 nt, Human
aucuagauuagguauaagagcu

SEQ ID NO: 221060 - RNA, 22 nt, Human
ugucagagcaaugagguucagc

SEQ ID NO: 221061 - RNA, 22 nt, Human
gacagucugggcacacaugaaa

SEQ ID NO: 221062 - RNA, 22 nt, Human
cccagagauguccugagugaua

SEQ ID NO: 221063 - RNA, 19 nt, Human
agcucaggcccaucguccc

SEQ ID NO: 221064 - RNA, 22 nt, Human
uggguccuggcuuugucagggu

SEQ ID NO: 221065 - RNA, 22 nt, Human
ggucuggauuucugcuucuuuc

SEQ ID NO: 221066 - RNA, 22 nt, Human
uuacacuucugaaagccuaggu

SEQ ID NO: 221067 - RNA, 22 nt, Human
caaaagcaaagucccugaaugu

SEQ ID NO: 221068 - RNA, 22 nt, Human
gauugagucugaggaugcugca

SEQ ID NO: 221069 - RNA, 22 nt, Human
ucaggaagcugaauuacaaaaa

SEQ ID NO: 221070 - RNA, 22 nt, Human
auugcugaaaguauuuuaugac

SEQ ID NO: 221071 - RNA, 22 nt, Human
ggcccucuuuuauccaucauaa

SEQ ID NO: 221072 - RNA, 22 nt, Human
cuggcagauaguaagugaucaa

SEQ ID NO: 221073 - RNA, 22 nt, Human
gaagccccaaacccucgccauc

SEQ ID NO: 221074 - RNA, 22 nt, Human
gagugcaggccugagcaccauc

SEQ ID NO: 221075 - RNA, 22 nt, Human
ucagcagagcgagaccaaguca

SEQ ID NO: 221076 - RNA, 22 nt, Human
cagcagaacaggcagggaagcu

SEQ ID NO: 221077 - RNA, 22 nt, Human
ugcccuggcucuccacuaguuu

SEQ ID NO: 221078 - RNA, 17 nt, Human
acagcaggcccggaggg

SEQ ID NO: 221079 - RNA, 22 nt, Human
uucugcaggagcccuaguguau

SEQ ID NO: 221080 - RNA, 22 nt, Human
gagggggcgaacagaagcaagg

SEQ ID NO: 221081 - RNA, 22 nt, Human
ccagagucaggagcucauguga

SEQ ID NO: 221082 - RNA, 22 nt, Human
gcuuggcuccuggcucacaggu

SEQ ID NO: 221083 - RNA, 22 nt, Human
uaucuagagccuggaagucuug

SEQ ID NO: 221084 - RNA, 22 nt, Human
acagcagcuaaccccugggcca

SEQ ID NO: 221085 - RNA, 23 nt, Human
gcccagggacugggaaucagugg

SEQ ID NO: 221086 - RNA, 22 nt, Human
ucaccagggcuccagccagccu

SEQ ID NO: 221087 - RNA, 22 nt, Human
gcauaguaggcugucaaaaaug

SEQ ID NO: 221088 - RNA, 22 nt, Human
uauucaugucggcugaaaaagc

SEQ ID NO: 221089 - RNA, 22 nt, Human
aggaaggguucuuugugaaaga

SEQ ID NO: 221090 - RNA, 22 nt, Human
uccauaaauuuuaugaacauau

SEQ ID NO: 221091 - RNA, 19 nt, Human
gcugcuggcucuggcugga

SEQ ID NO: 221092 - RNA, 22 nt, Human
uagcaccaauaugugcuuuuca

SEQ ID NO: 221093 - RNA, 22 nt, Human
caggagcagaggguggucagca

SEQ ID NO: 221094 - RNA, 22 nt, Human
uuaaugauuuggaacccuuuaa

SEQ ID NO: 221095 - RNA, 22 nt, Human
guggcauucucggcaccaucug

SEQ ID NO: 221096 - RNA, 20 nt, Human
aguuauaguaucuagccaug

SEQ ID NO: 221097 - RNA, 22 nt, Human
gagcagcagcugggccagguuc

SEQ ID NO: 221098 - RNA, 18 nt, Human
auaaagugcuaauaaugg

SEQ ID NO: 221099 - RNA, 22 nt, Human
aguguggacuuuuccuaggagg

SEQ ID NO: 221100 - RNA, 22 nt, Human
uggagagcaagucgcagacaug

SEQ ID NO: 221101 - RNA, 22 nt, Human
ugcaggcauuggugagagaagc

SEQ ID NO: 221102 - RNA, 22 nt, Human
ucagaggcucaucugccuugca

SEQ ID NO: 221103 - RNA, 22 nt, Human
gucugcugcagagcauggcuuu

SEQ ID NO: 221104 - RNA, 22 nt, Human
uucugcuuauucaaaugaucuu

SEQ ID NO: 221105 - RNA, 21 nt, Human
aguguccuuuuacugugaaua

SEQ ID NO: 221106 - RNA, 22 nt, Human
aggcaagcccccagugaggcuc

SEQ ID NO: 221107 - RNA, 22 nt, Human
uggcccaggggcucuugguguu

SEQ ID NO: 221108 - RNA, 22 nt, Human
auguguccugcugugucacaca

SEQ ID NO: 221109 - RNA, 22 nt, Human
uuacauguaaucuaaaauaauu

SEQ ID NO: 221110 - RNA, 22 nt, Human
ccucuggguaucuguggaagua

SEQ ID NO: 221111 - RNA, 19 nt, Human
uucucugugcuagacucug

SEQ ID NO: 221112 - RNA, 22 nt, Human
uuuacagucuauguugaauuaa

SEQ ID NO: 221113 - RNA, 22 nt, Human
ucuggcuugucucagggucuga

SEQ ID NO: 221114 - RNA, 22 nt, Human
gcacagagccugguaccgagaa

SEQ ID NO: 221115 - RNA, 22 nt, Human
ggccagcuucucugcugccugu

SEQ ID NO: 221116 - RNA, 22 nt, Human
ucauccaguaccauggaaggca

SEQ ID NO: 221117 - RNA, 22 nt, Human
aguggcuuauguuuagaaucau

SEQ ID NO: 221118 - RNA, 22 nt, Human
caggaggggguggaguuucgcc

SEQ ID NO: 221119 - RNA, 20 nt, Human
uaggcaauuaguagauaaca

SEQ ID NO: 221120 - RNA, 22 nt, Human
gcucaggccuggcuauccauug

SEQ ID NO: 221121 - RNA, 22 nt, Human
uuucauguacuuuuuugauaga

SEQ ID NO: 221122 - RNA, 21 nt, Human
ugucuuuaggaccuguuaaau

SEQ ID NO: 221123 - RNA, 22 nt, Human
aggcuuagaaaggguaagugac

SEQ ID NO: 221124 - RNA, 19 nt, Human
uucaggauugacccuacug

SEQ ID NO: 221125 - RNA, 23 nt, Human
uccaugagaugugggcuucuagu

SEQ ID NO: 221126 - RNA, 22 nt, Human
caucucuguguccccagagcuu

SEQ ID NO: 221127 - RNA, 22 nt, Human
gcagggcuugcagcagcuagac

SEQ ID NO: 221128 - RNA, 22 nt, Human
caugaacauuuguuuacaucug

SEQ ID NO: 221129 - RNA, 17 nt, Human
gcuggcugacccaugcc

SEQ ID NO: 221130 - RNA, 18 nt, Human
agaguccagggugaggug

SEQ ID NO: 221131 - RNA, 22 nt, Human
uagacauuuuaagacauauacc

SEQ ID NO: 221132 - RNA, 22 nt, Human
agugucugaugcacaguugucc

SEQ ID NO: 221133 - RNA, 22 nt, Human
aguggcuguucauuuuacacaa

SEQ ID NO: 221134 - RNA, 22 nt, Human
augaggaugggaagggagccaa

SEQ ID NO: 221135 - RNA, 22 nt, Human
caaagugcugagauuacaggua

SEQ ID NO: 221136 - RNA, 22 nt, Human
uuucagacaggacuucauaugu

SEQ ID NO: 221137 - RNA, 22 nt, Human
gccacaggaaagcacccuggag

SEQ ID NO: 221138 - RNA, 22 nt, Human
uggggccagagcugcagggagc

SEQ ID NO: 221139 - RNA, 22 nt, Human
uacuucugccuuagagaacacu

SEQ ID NO: 221140 - RNA, 22 nt, Human
aggagcugugaaugggaggggu

SEQ ID NO: 221141 - RNA, 22 nt, Human
uauuggucugcuuaaguggauu

SEQ ID NO: 221142 - RNA, 22 nt, Human
ggggcuguugaaguuaguugag

SEQ ID NO: 221143 - RNA, 22 nt, Human
gcugugcccagcuccagcucug

SEQ ID NO: 221144 - RNA, 22 nt, Human
auucaaauuaaguuaauucagc

SEQ ID NO: 221145 - RNA, 22 nt, Human
ucaggagcucaggcugauggaa

SEQ ID NO: 221146 - RNA, 19 nt, Human
caggaaugagguaauggcu

SEQ ID NO: 221147 - RNA, 22 nt, Human
acuuuugaggacuuuauuguau

SEQ ID NO: 221148 - RNA, 22 nt, Human
aagcaauuguccugucucuaca

SEQ ID NO: 221149 - RNA, 22 nt, Human
aggggcucaguuacuuuggcag

SEQ ID NO: 221150 - RNA, 22 nt, Human
uauauuguagcugaugacaaau

SEQ ID NO: 221151 - RNA, 22 nt, Human
ucauuuaucgcugccuuuuaaa

SEQ ID NO: 221152 - RNA, 22 nt, Human
cucaccccacuaccccuuggug

SEQ ID NO: 221153 - RNA, 22 nt, Human
aagaggagacuucagcaacuug

SEQ ID NO: 221154 - RNA, 22 nt, Human
gacacagagauaggccuguguu

SEQ ID NO: 221155 - RNA, 22 nt, Human
augauacaucuucaugucagug

SEQ ID NO: 221156 - RNA, 22 nt, Human
caugaaaauaacauuguuguga

SEQ ID NO: 221157 - RNA, 22 nt, Human
aagcaaaacgugcucuaggagg

SEQ ID NO: 221158 - RNA, 22 nt, Human
cauucauucacauuuugucuau

SEQ ID NO: 221159 - RNA, 22 nt, Human
cccaggcuccuacuguauucug

SEQ ID NO: 221160 - RNA, 22 nt, Human
accauuacaugauccuuaccca

SEQ ID NO: 221161 - RNA, 23 nt, Human
agcacagacuagaaaggucuuuc

SEQ ID NO: 221162 - RNA, 22 nt, Human
aaaugaguuugccucuagauag

SEQ ID NO: 221163 - RNA, 22 nt, Human
ccagcucuuuuggcugagugag

SEQ ID NO: 221164 - RNA, 22 nt, Human
uaggcagaaaggaaggcaaguu

SEQ ID NO: 221165 - RNA, 22 nt, Human
caguccugagccaaucaugaug

SEQ ID NO: 221166 - RNA, 22 nt, Human
uccugagcucccaugaacaggc

SEQ ID NO: 221167 - RNA, 22 nt, Human
ucauuuauaaggaugcaauuaa

SEQ ID NO: 221168 - RNA, 22 nt, Human
uaccaggaguuacaggcagcag

SEQ ID NO: 221169 - RNA, 22 nt, Human
ccuccaagcuucaucucaacca

SEQ ID NO: 221170 - RNA, 22 nt, Human
ugacaggcuaggaggcugaagg

SEQ ID NO: 221171 - RNA, 22 nt, Human
agcuuaucuuguuaguuucauu

SEQ ID NO: 221172 - RNA, 22 nt, Human
ccugcccacuccaggagcaacu

SEQ ID NO: 221173 - RNA, 22 nt, Human
auacacauuugcuagagauggg

SEQ ID NO: 221174 - RNA, 22 nt, Human
acucagagaaacagcagggugu

SEQ ID NO: 221175 - RNA, 22 nt, Human
gucccaggugggcuccaccucu

SEQ ID NO: 221176 - RNA, 22 nt, Human
acacgcauaaauacacagucua

SEQ ID NO: 221177 - RNA, 22 nt, Human
uaguauucagcuucucaggcaa

SEQ ID NO: 221178 - RNA, 22 nt, Human
aaucuucauuuugacaagauuc

SEQ ID NO: 221179 - RNA, 22 nt, Human
cccacuguguugcagucuagug

SEQ ID NO: 221180 - RNA, 22 nt, Human
auuugccuuacugaagaaggag

SEQ ID NO: 221181 - RNA, 22 nt, Human
gugcauuuauauuugccuuugg

SEQ ID NO: 221182 - RNA, 22 nt, Human
acacauuuauggaucgcagaaa

SEQ ID NO: 221183 - RNA, 22 nt, Human
augucaggacccuacugcauug

SEQ ID NO: 221184 - RNA, 22 nt, Human
ccagcacuccugucucaagucu

SEQ ID NO: 221185 - RNA, 22 nt, Human
aacauuuguguuugcuaaaaau

SEQ ID NO: 221186 - RNA, 22 nt, Human
ucuaaagaagaggguucugcgg

SEQ ID NO: 221187 - RNA, 22 nt, Human
gacauaaaauucaauaauuugu

SEQ ID NO: 221188 - RNA, 22 nt, Human
ggggggcagcuguccuggccau

SEQ ID NO: 221189 - RNA, 22 nt, Human
caucauuguuagggacucuaac

SEQ ID NO: 221190 - RNA, 22 nt, Human
ggcuuuauuuugcaugaaugcu

SEQ ID NO: 221191 - RNA, 22 nt, Human
uggauaaauagauacacuugca

SEQ ID NO: 221192 - RNA, 22 nt, Human
gucuucaauagagccucaauuu

SEQ ID NO: 221193 - RNA, 22 nt, Human
ccagugucuucagaguaaaucu

SEQ ID NO: 221194 - RNA, 22 nt, Human
gucaggcagccuggagauucag

SEQ ID NO: 221195 - RNA, 22 nt, Human
uuugcauuucuaaugagcuccg

SEQ ID NO: 221196 - RNA, 22 nt, Human
gccuccccaaagugcugacagc

SEQ ID NO: 221197 - RNA, 22 nt, Human
ccuggccacccagccuuggcca

SEQ ID NO: 221198 - RNA, 22 nt, Human
uuucuuauacuauauugucauc

SEQ ID NO: 221199 - RNA, 22 nt, Human
uucuguccacugcuggggccuc

SEQ ID NO: 221200 - RNA, 22 nt, Human
cagcagcagacauuugaucuuc

SEQ ID NO: 221201 - RNA, 22 nt, Human
uacagugcacauuucuuaggaa

SEQ ID NO: 221202 - RNA, 22 nt, Human
ucacacaucucagguguuuaau

SEQ ID NO: 221203 - RNA, 22 nt, Human
ggcugcuguuucagagacuguu

SEQ ID NO: 221204 - RNA, 22 nt, Human
auuuugugaacccucaagcaau

SEQ ID NO: 221205 - RNA, 22 nt, Human
gaggccaggggccuggagauga

SEQ ID NO: 221206 - RNA, 22 nt, Human
uucagcagugcagacacccagu

SEQ ID NO: 221207 - RNA, 22 nt, Human
uucuccaggggaggguucucca

SEQ ID NO: 221208 - RNA, 20 nt, Human
auucugcuuucugauagagc

SEQ ID NO: 221209 - RNA, 22 nt, Human
uggggcugugagacuacaggau

SEQ ID NO: 221210 - RNA, 22 nt, Human
ucuccucucuuaccugguacaa

SEQ ID NO: 221211 - RNA, 19 nt, Human
ccuggcugcugugggaugc

SEQ ID NO: 221212 - RNA, 22 nt, Human
aagccaguuagcacaucauugc

SEQ ID NO: 221213 - RNA, 22 nt, Human
gcaaagaaaugucagugagagg

SEQ ID NO: 221214 - RNA, 22 nt, Human
ucauuuacacuucacaaaugga

SEQ ID NO: 221215 - RNA, 22 nt, Human
aacauguaccuacaaucagaau

SEQ ID NO: 221216 - RNA, 22 nt, Human
aaagacagacggaaaccugagg

SEQ ID NO: 221217 - RNA, 22 nt, Human
ccuccacucuggccucucaggu

SEQ ID NO: 221218 - RNA, 22 nt, Human
ccugcugucucugggcaggcag

SEQ ID NO: 221219 - RNA, 22 nt, Human
acucagaguuuuacccagagac

SEQ ID NO: 221220 - RNA, 17 nt, Human
uguuuuuucccuguucu

SEQ ID NO: 221221 - RNA, 22 nt, Human
gcugaagguguguggagagagg

SEQ ID NO: 221222 - RNA, 22 nt, Human
ugucaaaaagcugggacaagca

SEQ ID NO: 221223 - RNA, 20 nt, Human
aggucucagagcaagagccc

SEQ ID NO: 221224 - RNA, 22 nt, Human
acuguauuuuggguguauuuuc

SEQ ID NO: 221225 - RNA, 18 nt, Human
uggagggcuugcugcagc

SEQ ID NO: 221226 - RNA, 22 nt, Human
ugggaacauuuugagcugagag

SEQ ID NO: 221227 - RNA, 22 nt, Human
auagaaucuuuguaaaacacuu

SEQ ID NO: 221228 - RNA, 22 nt, Human
ucaaaucaccaaacucacuggc

SEQ ID NO: 221229 - RNA, 22 nt, Human
uggaccugcuggaugggcaggu

SEQ ID NO: 221230 - RNA, 22 nt, Human
uucugaaagccaauucauugaa

SEQ ID NO: 221231 - RNA, 19 nt, Human
aggcucugagcuccuggag

SEQ ID NO: 221232 - RNA, 22 nt, Human
cacaaaguggguggaaaacuaa

SEQ ID NO: 221233 - RNA, 22 nt, Human
augauugaaaaugacauugcca

SEQ ID NO: 221234 - RNA, 22 nt, Human
aggcuucuugagccccacaggc

SEQ ID NO: 221235 - RNA, 22 nt, Human
agggagcccugaaccagagggu

SEQ ID NO: 221236 - RNA, 22 nt, Human
aggcacugguccauuuucugca

SEQ ID NO: 221237 - RNA, 22 nt, Human
acaugacagugcuuagcaaacu

SEQ ID NO: 221238 - RNA, 22 nt, Human
ggccucaggguugggcccauua

SEQ ID NO: 221239 - RNA, 22 nt, Human
agcaaacagugugcuaagaaau

SEQ ID NO: 221240 - RNA, 22 nt, Human
ccuccugggagagcacggaggg

SEQ ID NO: 221241 - RNA, 19 nt, Human
agacacacuuacguggaau

SEQ ID NO: 221242 - RNA, 22 nt, Human
cucuuuggggcuggaagccuag

SEQ ID NO: 221243 - RNA, 22 nt, Human
gcagcccaggagcaggcgaccc

SEQ ID NO: 221244 - RNA, 22 nt, Human
ccagugcacagccaggcaggug

SEQ ID NO: 221245 - RNA, 22 nt, Human
gggcugagcuaagcuggguuga

SEQ ID NO: 221246 - RNA, 22 nt, Human
aaguuuuaugggaagaugugca

SEQ ID NO: 221247 - RNA, 22 nt, Human
aaaguccuagcgauccacagaa

SEQ ID NO: 221248 - RNA, 19 nt, Human
ggcucagggcgcugccgcc

SEQ ID NO: 221249 - RNA, 22 nt, Human
aguccuuuuguuuugagaugag

SEQ ID NO: 221250 - RNA, 17 nt, Human
guguucacaaugacugu

SEQ ID NO: 221251 - RNA, 22 nt, Human
ccuccagccuuccugaagagcc

SEQ ID NO: 221252 - RNA, 22 nt, Human
uugaaacuuuucuuggagaaac

SEQ ID NO: 221253 - RNA, 22 nt, Human
aguguuugucccguuagaaaug

SEQ ID NO: 221254 - RNA, 22 nt, Human
agcagccagagaaugaugcagu

SEQ ID NO: 221255 - RNA, 22 nt, Human
cuaggcuggagugcaguggcau

SEQ ID NO: 221256 - RNA, 22 nt, Human
gcacacaugugaguguccuuuc

SEQ ID NO: 221257 - RNA, 22 nt, Human
gggagacaaaggugagguucuu

SEQ ID NO: 221258 - RNA, 22 nt, Human
aggaagagcccgggugacauaa

SEQ ID NO: 221259 - RNA, 22 nt, Human
uauguuauauuuugucaauugu

SEQ ID NO: 221260 - RNA, 22 nt, Human
ggcagcacugcagcuuguuggg

SEQ ID NO: 221261 - RNA, 22 nt, Human
ccugugccuuccuuaggcaccu

SEQ ID NO: 221262 - RNA, 22 nt, Human
aaagguuuugguaaggcuuuaa

SEQ ID NO: 221263 - RNA, 22 nt, Human
agccagagagccccagguucua

SEQ ID NO: 221264 - RNA, 22 nt, Human
caaagccaggcuuucuaaugua

SEQ ID NO: 221265 - RNA, 22 nt, Human
uccugggguuuuggccgcagcu

SEQ ID NO: 221266 - RNA, 20 nt, Human
cccuggccuguuucaugccc

SEQ ID NO: 221267 - RNA, 22 nt, Human
aguuuuauggcucaaccuaaua

SEQ ID NO: 221268 - RNA, 22 nt, Human
auguacaucuuuauaacaagcu

SEQ ID NO: 221269 - RNA, 22 nt, Human
augaguugaagcuacaagaggc

SEQ ID NO: 221270 - RNA, 22 nt, Human
uccauacuaacagcauuuauca

SEQ ID NO: 221271 - RNA, 22 nt, Human
aagauauagauggugguauaaa

SEQ ID NO: 221272 - RNA, 22 nt, Human
augagcucaggugugcaaaaua

SEQ ID NO: 221273 - RNA, 22 nt, Human
guugcucaggcaggaguacagu

SEQ ID NO: 221274 - RNA, 22 nt, Human
uaguagaauccaaaccaacagu

SEQ ID NO: 221275 - RNA, 22 nt, Human
gaggcaaggccgcacgucucag

SEQ ID NO: 221276 - RNA, 22 nt, Human
cuggaaagugcuuuucugagag

SEQ ID NO: 221277 - RNA, 22 nt, Human
ugcacagcugccuccucucugc

SEQ ID NO: 221278 - RNA, 23 nt, Human
ggcucacacggagugccuccacc

SEQ ID NO: 221279 - RNA, 22 nt, Human
uggcucagcgcggccuggucuu

SEQ ID NO: 221280 - RNA, 22 nt, Human
gcucagaguggccuggcuaggg

SEQ ID NO: 221281 - RNA, 22 nt, Human
ucccagccacagguguagcccu

SEQ ID NO: 221282 - RNA, 22 nt, Human
caaaggaaauacuaaucuggaa

SEQ ID NO: 221283 - RNA, 22 nt, Human
gccaggugagaggacugaggcu

SEQ ID NO: 221284 - RNA, 22 nt, Human
ucugucaugccacaggacuugg

SEQ ID NO: 221285 - RNA, 22 nt, Human
cacgcuuggcuuauacagagaa

SEQ ID NO: 221286 - RNA, 22 nt, Human
ucuccacagaagguuccaggcc

SEQ ID NO: 221287 - RNA, 22 nt, Human
ccagggcucaggcucccagugg

SEQ ID NO: 221288 - RNA, 21 nt, Human
ggacuuggaugguggcaguag

SEQ ID NO: 221289 - RNA, 22 nt, Human
caggguagggcaagggaaccug

SEQ ID NO: 221290 - RNA, 22 nt, Human
uuaaucacagcucugccaugag

SEQ ID NO: 221291 - RNA, 22 nt, Human
gugcauuaggcuggaauguuga

SEQ ID NO: 221292 - RNA, 22 nt, Human
acaggagcaacagacuaagaca

SEQ ID NO: 221293 - RNA, 22 nt, Human
auuuccugggucucacuccaga

SEQ ID NO: 221294 - RNA, 22 nt, Human
ucaggucuauagaagaggaggg

SEQ ID NO: 221295 - RNA, 23 nt, Human
gaaaucuagucauuuuuagucug

SEQ ID NO: 221296 - RNA, 17 nt, Human
ucauuuguugugacuag

SEQ ID NO: 221297 - RNA, 22 nt, Human
agacaugugguauaaucagggg

SEQ ID NO: 221298 - RNA, 22 nt, Human
cuagggaguggcagagcuggga

SEQ ID NO: 221299 - RNA, 22 nt, Human
uuccaggaggcauucuuaguuu

SEQ ID NO: 221300 - RNA, 19 nt, Human
ccugggccuccaucacccc

SEQ ID NO: 221301 - RNA, 22 nt, Human
ugcuccugcuggcccucgugcc

SEQ ID NO: 221302 - RNA, 22 nt, Human
acccaugaguguaucuuuaaaa

SEQ ID NO: 221303 - RNA, 22 nt, Human
agggccugucagcgguguccug

SEQ ID NO: 221304 - RNA, 20 nt, Human
cacaggaaagcuacucaguu

SEQ ID NO: 221305 - RNA, 22 nt, Human
agaagaacuuagcuuucuaucu

SEQ ID NO: 221306 - RNA, 22 nt, Human
ucaggcucaggaauguguuuau

SEQ ID NO: 221307 - RNA, 22 nt, Human
cuauucagccucuaagacaagu

SEQ ID NO: 221308 - RNA, 18 nt, Human
cacaggagaugaccugac

SEQ ID NO: 221309 - RNA, 22 nt, Human
aggguggccaccaaguauguca

SEQ ID NO: 221310 - RNA, 22 nt, Human
cuuucauccgcagaugagccuc

SEQ ID NO: 221311 - RNA, 22 nt, Human
cacaaaauaucaagcacuuuua

SEQ ID NO: 221312 - RNA, 22 nt, Human
cagauggccagaggcagcugca

SEQ ID NO: 221313 - RNA, 22 nt, Human
uuucucugggcacucuccaaac

SEQ ID NO: 221314 - RNA, 22 nt, Human
ccaggcucugucuggucagaag

SEQ ID NO: 221315 - RNA, 22 nt, Human
uggcacugccaaccugcuaggu

SEQ ID NO: 221316 - RNA, 22 nt, Human
gucuggaguaccauaaaaagga

SEQ ID NO: 221317 - RNA, 22 nt, Human
ucucagacauguaaucucuacc

SEQ ID NO: 221318 - RNA, 22 nt, Human
caaugugguggcagaugucagu

SEQ ID NO: 221319 - RNA, 22 nt, Human
aacugagggcccugcugaagca

SEQ ID NO: 221320 - RNA, 22 nt, Human
uaauuccaaguugagacaugca

SEQ ID NO: 221321 - RNA, 18 nt, Human
ggcugagguugacuagaa

SEQ ID NO: 221322 - RNA, 22 nt, Human
uucuucuuucccccugugguac

SEQ ID NO: 221323 - RNA, 22 nt, Human
gugccuggggguaauguaggau

SEQ ID NO: 221324 - RNA, 22 nt, Human
ccaggcucuguuccccgaggag

SEQ ID NO: 221325 - RNA, 22 nt, Human
uagcaagaggaaacaaggggcc

SEQ ID NO: 221326 - RNA, 22 nt, Human
uggcucagcgguggcagcagac

SEQ ID NO: 221327 - RNA, 22 nt, Human
ccucccugcuccucaacuggca

SEQ ID NO: 221328 - RNA, 22 nt, Human
gaucuuuucagaauuuaucagu

SEQ ID NO: 221329 - RNA, 22 nt, Human
gagagaagaaagccaugguccu

SEQ ID NO: 221330 - RNA, 22 nt, Human
ggcaggugcuugucgaaggccu

SEQ ID NO: 221331 - RNA, 22 nt, Human
gaggugucuagaucuaccagua

SEQ ID NO: 221332 - RNA, 21 nt, Human
ugaucauuuguguaaaggaga

SEQ ID NO: 221333 - RNA, 19 nt, Human
ccaggccucuggggccugu

SEQ ID NO: 221334 - RNA, 22 nt, Human
agucucaggcagaggaaggcua

SEQ ID NO: 221335 - RNA, 22 nt, Human
uucuucuucauuucugacgaug

SEQ ID NO: 221336 - RNA, 22 nt, Human
ugacccuuagugaacauuagaa

SEQ ID NO: 221337 - RNA, 22 nt, Human
caucacaucagugugaacaguu

SEQ ID NO: 221338 - RNA, 22 nt, Human
uauuuagaugcauuuggauugc

SEQ ID NO: 221339 - RNA, 22 nt, Human
uggcagagccuugccaaacucc

SEQ ID NO: 221340 - RNA, 22 nt, Human
ucaguguuuuuaaagcaauaua

SEQ ID NO: 221341 - RNA, 22 nt, Human
aacucagaauagggugcagggc

SEQ ID NO: 221342 - RNA, 22 nt, Human
aaggugcuguggacuugggagc

SEQ ID NO: 221343 - RNA, 19 nt, Human
agucacagaccuugucucc

SEQ ID NO: 221344 - RNA, 22 nt, Human
ugaggggcgcuggcagguuccu

SEQ ID NO: 221345 - RNA, 22 nt, Human
aacaggcacuaagcaugugggg

SEQ ID NO: 221346 - RNA, 22 nt, Human
agagauguagcaaagaaccaca

SEQ ID NO: 221347 - RNA, 21 nt, Human
aaaguguucagaccaguucug

SEQ ID NO: 221348 - RNA, 19 nt, Human
ucucugcagcgcgcccggc

SEQ ID NO: 221349 - RNA, 22 nt, Human
caagccaguuuguaguucucuc

SEQ ID NO: 221350 - RNA, 22 nt, Human
guguccugaucaauugagcugg

SEQ ID NO: 221351 - RNA, 22 nt, Human
ucugggaaugaauaagaccugu

SEQ ID NO: 221352 - RNA, 22 nt, Human
acaaucacacaugcaauuauac

SEQ ID NO: 221353 - RNA, 22 nt, Human
ugcuacuacuugucaacgguca

SEQ ID NO: 221354 - RNA, 22 nt, Human
ucccagaagugaaauuucuaga

SEQ ID NO: 221355 - RNA, 22 nt, Human
cuucugaggcagcuauucaguu

SEQ ID NO: 221356 - RNA, 22 nt, Human
uuuggugagcugcgagugagga

SEQ ID NO: 221357 - RNA, 22 nt, Human
cugccauguuaccugcacaggu

SEQ ID NO: 221358 - RNA, 18 nt, Human
aggccacacuccagaaca

SEQ ID NO: 221359 - RNA, 22 nt, Human
caugaauuauuuuucacaagau

SEQ ID NO: 221360 - RNA, 22 nt, Human
cugugggagggugagagaacca

SEQ ID NO: 221361 - RNA, 22 nt, Human
agccuaggucugggucuagcag

SEQ ID NO: 221362 - RNA, 22 nt, Human
cauuuauuaguuaguucgaugu

SEQ ID NO: 221363 - RNA, 23 nt, Human
acugagcauuaguauuuuuauaa

SEQ ID NO: 221364 - RNA, 22 nt, Human
aggcuguguucugguucuuagc

SEQ ID NO: 221365 - RNA, 22 nt, Human
augaggcauucacagaaggcac

SEQ ID NO: 221366 - RNA, 22 nt, Human
aggcugagugcuccccuagaug

SEQ ID NO: 221367 - RNA, 22 nt, Human
cagaggugcauacaggucauua

SEQ ID NO: 221368 - RNA, 22 nt, Human
ggaucaggcgccaugggaagug

SEQ ID NO: 221369 - RNA, 22 nt, Human
uugaaguuguaguucagugaag

SEQ ID NO: 221370 - RNA, 22 nt, Human
gugucuuuauuccucuauguuu

SEQ ID NO: 221371 - RNA, 22 nt, Human
ccuuccucauccauuucucuug

SEQ ID NO: 221372 - RNA, 22 nt, Human
cacuuucuguguugugcaaaaa

SEQ ID NO: 221373 - RNA, 17 nt, Human
ggaacaaauacuaugca

SEQ ID NO: 221374 - RNA, 22 nt, Human
caggcugggacugaccccugcu

SEQ ID NO: 221375 - RNA, 22 nt, Human
aucuuuaaagacaugugaacuu

SEQ ID NO: 221376 - RNA, 22 nt, Human
acaucccucagucagacuguaa

SEQ ID NO: 221377 - RNA, 22 nt, Human
ccagugcagucccccugaacug

SEQ ID NO: 221378 - RNA, 22 nt, Human
uugaggagucaggggcacggaa

SEQ ID NO: 221379 - RNA, 22 nt, Human
gagacucuugcuuuaauagccc

SEQ ID NO: 221380 - RNA, 22 nt, Human
cucaaauguuuccacuucugcu

SEQ ID NO: 221381 - RNA, 22 nt, Human
aaagguuuauuuaaucagggag

SEQ ID NO: 221382 - RNA, 22 nt, Human
ggcugcucugagaguggguuuu

SEQ ID NO: 221383 - RNA, 22 nt, Human
gacuccugccuccucuguuugc

SEQ ID NO: 221384 - RNA, 22 nt, Human
ucuucaaaaauacagguuuuca

SEQ ID NO: 221385 - RNA, 22 nt, Human
agaauccucuucaguaaauucu

SEQ ID NO: 221386 - RNA, 22 nt, Human
auauuaauuauuuacacaugag

SEQ ID NO: 221387 - RNA, 21 nt, Human
uacagaugaggagaccaaggc

SEQ ID NO: 221388 - RNA, 22 nt, Human
gcucuguaucuguggggcuucc

SEQ ID NO: 221389 - RNA, 22 nt, Human
gccuucccuggcuaggcaagca

SEQ ID NO: 221390 - RNA, 22 nt, Human
uucaggcauggaaacuggauua

SEQ ID NO: 221391 - RNA, 22 nt, Human
uaggagagcugaacuauugucu

SEQ ID NO: 221392 - RNA, 22 nt, Human
ugcucugggcucaauggcagcu

SEQ ID NO: 221393 - RNA, 23 nt, Human
aacugucuugcaagugugauacc

SEQ ID NO: 221394 - RNA, 20 nt, Human
cagcaacuuuggacugaguu

SEQ ID NO: 221395 - RNA, 22 nt, Human
agcaacuuuauuccacugggca

SEQ ID NO: 221396 - RNA, 22 nt, Human
agccucccuaugcaccuucagg

SEQ ID NO: 221397 - RNA, 22 nt, Human
gggagcugagcuggaagagaau

SEQ ID NO: 221398 - RNA, 22 nt, Human
ugccugacugcugccaccacua

SEQ ID NO: 221399 - RNA, 22 nt, Human
aggcucugugcagccugcaucu

SEQ ID NO: 221400 - RNA, 22 nt, Human
aaaagcaauugcaguucuugcc

SEQ ID NO: 221401 - RNA, 22 nt, Human
gaguccagugauguuccugguc

SEQ ID NO: 221402 - RNA, 22 nt, Human
cugacagguugguagcuuugga

SEQ ID NO: 221403 - RNA, 22 nt, Human
gaaaucaaacccuuuucugaua

SEQ ID NO: 221404 - RNA, 22 nt, Human
guggcaggagacuggaagaugg

SEQ ID NO: 221405 - RNA, 22 nt, Human
uggguggagaaguggaccugcu

SEQ ID NO: 221406 - RNA, 22 nt, Human
gcccagcaggggauggcagcuc

SEQ ID NO: 221407 - RNA, 22 nt, Human
uucuuucugggguccuucggcu

SEQ ID NO: 221408 - RNA, 22 nt, Human
aguccuggguccagcagguccu

SEQ ID NO: 221409 - RNA, 22 nt, Human
aggcacaggaacaggaaaagag

SEQ ID NO: 221410 - RNA, 22 nt, Human
ccagggaggguccuguggcuuc

SEQ ID NO: 221411 - RNA, 22 nt, Human
gaggagggagaauuaggcuuaa

SEQ ID NO: 221412 - RNA, 22 nt, Human
acaugugcagacagcaagcagg

SEQ ID NO: 221413 - RNA, 22 nt, Human
ucagaggagaugguuaccaggg

SEQ ID NO: 221414 - RNA, 22 nt, Human
ccuggaggggaccaggaccagg

SEQ ID NO: 221415 - RNA, 22 nt, Human
uuucuuguaagauguuuauuaa

SEQ ID NO: 221416 - RNA, 22 nt, Human
uuuguuagagugugggaggcug

SEQ ID NO: 221417 - RNA, 22 nt, Human
agaguggcccguuggccugaac

SEQ ID NO: 221418 - RNA, 22 nt, Human
gagggcagagucuaaugaugca

SEQ ID NO: 221419 - RNA, 22 nt, Human
uggccuugauaacuggggagag

SEQ ID NO: 221420 - RNA, 18 nt, Human
agggccagcugugaguag

SEQ ID NO: 221421 - RNA, 22 nt, Human
ccugagaggcccucucacuguc

SEQ ID NO: 221422 - RNA, 22 nt, Human
uggaagaaugcuccacagggaa

SEQ ID NO: 221423 - RNA, 22 nt, Human
cuggaggaaaacaacugcagac

SEQ ID NO: 221424 - RNA, 19 nt, Human
agaaguuagacauugcaau

SEQ ID NO: 221425 - RNA, 22 nt, Human
uuuuacagucagucaaacucag

SEQ ID NO: 221426 - RNA, 22 nt, Human
acagcauucccuuuggcugcuu

SEQ ID NO: 221427 - RNA, 22 nt, Human
uguuuaaucuucaggacagucu

SEQ ID NO: 221428 - RNA, 22 nt, Human
cuguacagauugcacacgggga

SEQ ID NO: 221429 - RNA, 17 nt, Human
gcacaaaucaauuacua

SEQ ID NO: 221430 - RNA, 22 nt, Human
uccuaggcaguuggugcuccau

SEQ ID NO: 221431 - RNA, 22 nt, Human
cucaggaggaggaaguucauug

SEQ ID NO: 221432 - RNA, 22 nt, Human
gcucaaaggccagguagcagca

SEQ ID NO: 221433 - RNA, 22 nt, Human
aaggcuggguuugggaugugau

SEQ ID NO: 221434 - RNA, 22 nt, Human
ugggugagccacaggaguuguc

SEQ ID NO: 221435 - RNA, 22 nt, Human
guggucagcagcagugggagug

SEQ ID NO: 221436 - RNA, 22 nt, Human
uuucuuguuucauggugucuca

SEQ ID NO: 221437 - RNA, 22 nt, Human
uggcugaggcacagcugccgcc

SEQ ID NO: 221438 - RNA, 22 nt, Human
guccccagaaaggugaggcagg

SEQ ID NO: 221439 - RNA, 22 nt, Human
aggacagcccuugagagcacau

SEQ ID NO: 221440 - RNA, 22 nt, Human
aguucuguggcugugcccugua

SEQ ID NO: 221441 - RNA, 22 nt, Human
aggggcagccucacaauccucu

SEQ ID NO: 221442 - RNA, 22 nt, Human
gcagagugaagcaguauggaaa

SEQ ID NO: 221443 - RNA, 22 nt, Human
uuguuuacuaagaaccugguca

SEQ ID NO: 221444 - RNA, 22 nt, Human
uguggcaggaagagcuucugag

SEQ ID NO: 221445 - RNA, 22 nt, Human
augccuuauuccaacaaucuag

SEQ ID NO: 221446 - RNA, 22 nt, Human
agugaaauggaugcugcuacug

SEQ ID NO: 221447 - RNA, 18 nt, Human
ugucucugaauuccagug

SEQ ID NO: 221448 - RNA, 22 nt, Human
aaugaccugggugucauuucau

SEQ ID NO: 221449 - RNA, 22 nt, Human
ugacccauuaaccacuuucccu

SEQ ID NO: 221450 - RNA, 22 nt, Human
ucaccgccuugcccggccgggc

SEQ ID NO: 221451 - RNA, 22 nt, Human
agaggcaaaaaucuauggcaac

SEQ ID NO: 221452 - RNA, 22 nt, Human
ggcaggugcgcauguugcauua

SEQ ID NO: 221453 - RNA, 22 nt, Human
ucagaggugcaagaaguucuga

SEQ ID NO: 221454 - RNA, 19 nt, Human
ggaagagaggaaaggugga

SEQ ID NO: 221455 - RNA, 22 nt, Human
acaucuuuuuucucuaauugug

SEQ ID NO: 221456 - RNA, 22 nt, Human
ggagccagagcacuggggagcc

SEQ ID NO: 221457 - RNA, 21 nt, Human
auggcucaggccaucaaugga

SEQ ID NO: 221458 - RNA, 22 nt, Human
uccaggcauaagccuugagugu

SEQ ID NO: 221459 - RNA, 22 nt, Human
caaguaacuugauuaagguaag

SEQ ID NO: 221460 - RNA, 22 nt, Human
agggccugugcugaguagacga

SEQ ID NO: 221461 - RNA, 22 nt, Human
uuuggacaaguuacugguuucc

SEQ ID NO: 221462 - RNA, 22 nt, Human
agaauuacauaaauacaugaau

SEQ ID NO: 221463 - RNA, 22 nt, Human
uacaacagacaggaauaagauu

SEQ ID NO: 221464 - RNA, 22 nt, Human
uccaggcucagucaagcacuuc

SEQ ID NO: 221465 - RNA, 19 nt, Human
auacacuaauauaaaccac

SEQ ID NO: 221466 - RNA, 22 nt, Human
ccugguuuguauuuuuaacacc

SEQ ID NO: 221467 - RNA, 22 nt, Human
uuguguggauaauauuacuuga

SEQ ID NO: 221468 - RNA, 22 nt, Human
uggcuccagcguccacguccug

SEQ ID NO: 221469 - RNA, 22 nt, Human
agucaguuaaacuuuguaaagu

SEQ ID NO: 221470 - RNA, 22 nt, Human
acagcagaggaaaagucugaua

SEQ ID NO: 221471 - RNA, 22 nt, Human
ugaagaaacgcagagagguagg

SEQ ID NO: 221472 - RNA, 22 nt, Human
cuggcacaguuaacauaugcua

SEQ ID NO: 221473 - RNA, 22 nt, Human
cacagggaggacaucaacagug

SEQ ID NO: 221474 - RNA, 22 nt, Human
uaggugucuaacaauaagugua

SEQ ID NO: 221475 - RNA, 22 nt, Human
aagggagaaagaaugaguuuag

SEQ ID NO: 221476 - RNA, 22 nt, Human
uucuguauuucaaugucuuuau

SEQ ID NO: 221477 - RNA, 22 nt, Human
ggcuucccaaggagccaggaug

SEQ ID NO: 221478 - RNA, 23 nt, Human
agcccagcagagaaccuaggucc

SEQ ID NO: 221479 - RNA, 20 nt, Human
ucccucaguccuggcuuugu

SEQ ID NO: 221480 - RNA, 22 nt, Human
uguauugaggauucauuuuugu

SEQ ID NO: 221481 - RNA, 22 nt, Human
uggacaugaccucgagcgagau

SEQ ID NO: 221482 - RNA, 21 nt, Human
uggcucugagccucauggcug

SEQ ID NO: 221483 - RNA, 22 nt, Human
agggcaugaagcaguggacagc

SEQ ID NO: 221484 - RNA, 21 nt, Human
ucaggcaggcgcagagggaag

SEQ ID NO: 221485 - RNA, 22 nt, Human
auuuccugaucuguaaaauagc

SEQ ID NO: 221486 - RNA, 22 nt, Human
auuucacaaagaacagaugcag

SEQ ID NO: 221487 - RNA, 22 nt, Human
ucucccuggagcccugaagcau

SEQ ID NO: 221488 - RNA, 22 nt, Human
auuacagaaagcaauauugagu

SEQ ID NO: 221489 - RNA, 18 nt, Human
ugaugcaagagugagcua

SEQ ID NO: 221490 - RNA, 22 nt, Human
acaguuuaugccucugagccug

SEQ ID NO: 221491 - RNA, 22 nt, Human
gaaggcuuaugugugacuuucg

SEQ ID NO: 221492 - RNA, 22 nt, Human
aggcaaauagauaguccauaca

SEQ ID NO: 221493 - RNA, 22 nt, Human
gagaaagcuucagaaauggccu

SEQ ID NO: 221494 - RNA, 22 nt, Human
gccuugccaaggggcagcagag

SEQ ID NO: 221495 - RNA, 22 nt, Human
caugaauuagcaauggugugca

SEQ ID NO: 221496 - RNA, 22 nt, Human
auuuccuaggguagaugucaca

SEQ ID NO: 221497 - RNA, 22 nt, Human
aacuaaaacugguuuguucucu

SEQ ID NO: 221498 - RNA, 20 nt, Human
uucucuagccuuccccuggg

SEQ ID NO: 221499 - RNA, 22 nt, Human
uguugacuugaaccaaaguguu

SEQ ID NO: 221500 - RNA, 22 nt, Human
gugcaaccucgucagagcaccu

SEQ ID NO: 221501 - RNA, 22 nt, Human
agaaagugccucccuugggagc

SEQ ID NO: 221502 - RNA, 22 nt, Human
ccauccugucuguggccucagg

SEQ ID NO: 221503 - RNA, 22 nt, Human
guacacagaugcuugagaaucu

SEQ ID NO: 221504 - RNA, 22 nt, Human
uaaagacaauaggaaaguuguu

SEQ ID NO: 221505 - RNA, 22 nt, Human
aaaaaugucauuauggaacuga

SEQ ID NO: 221506 - RNA, 22 nt, Human
acauguauacaauguguaauga

SEQ ID NO: 221507 - RNA, 22 nt, Human
caacuuuaauuugggugucaga

SEQ ID NO: 221508 - RNA, 22 nt, Human
uacugaaauacuaagaaguuaa

SEQ ID NO: 221509 - RNA, 22 nt, Human
gcugggcucuuaucaccuguac

SEQ ID NO: 221510 - RNA, 22 nt, Human
caaagagguuuugagggcagcu

SEQ ID NO: 221511 - RNA, 22 nt, Human
caggcacuggccagucagcaca

SEQ ID NO: 221512 - RNA, 20 nt, Human
gagcacaguaaugacugcua

SEQ ID NO: 221513 - RNA, 21 nt, Human
uggguggaagcgggaggccgc

SEQ ID NO: 221514 - RNA, 22 nt, Human
agaaagugaccuugaaaacugg

SEQ ID NO: 221515 - RNA, 22 nt, Human
gcauguaaucacucuaggaagg

SEQ ID NO: 221516 - RNA, 22 nt, Human
gccagccacaagggaggcuugu

SEQ ID NO: 221517 - RNA, 22 nt, Human
aucuuggacuacagaagagagg

SEQ ID NO: 221518 - RNA, 22 nt, Human
auauauuuugcggucacguggc

SEQ ID NO: 221519 - RNA, 22 nt, Human
cuggccugaggucggcuguagg

SEQ ID NO: 221520 - RNA, 22 nt, Human
ucuugaagucuuaugguuuaaa

SEQ ID NO: 221521 - RNA, 21 nt, Human
agcagcagggaagccucaucc

SEQ ID NO: 221522 - RNA, 22 nt, Human
guauaucagacacucauaugua

SEQ ID NO: 221523 - RNA, 22 nt, Human
gcuguguaucagaugccacggg

SEQ ID NO: 221524 - RNA, 22 nt, Human
cuguugucccugggagcucagc

SEQ ID NO: 221525 - RNA, 22 nt, Human
augcaggggcuguguuuugggu

SEQ ID NO: 221526 - RNA, 22 nt, Human
ccaugccuggacuccacucuca

SEQ ID NO: 221527 - RNA, 23 nt, Human
ccugacccugucucccucacaug

SEQ ID NO: 221528 - RNA, 22 nt, Human
gugccugguauguagguagcgg

SEQ ID NO: 221529 - RNA, 22 nt, Human
cuguaggcuuagcuagaaguga

SEQ ID NO: 221530 - RNA, 22 nt, Human
ucugaagagaaugcugcugaac

SEQ ID NO: 221531 - RNA, 22 nt, Human
guucucauaguggaaaauaggu

SEQ ID NO: 221532 - RNA, 22 nt, Human
gaugagguaagaauguaacacc

SEQ ID NO: 221533 - RNA, 20 nt, Human
ugacuucugggauuuguggu

SEQ ID NO: 221534 - RNA, 22 nt, Human
ggaaggcuugaguucccagguc

SEQ ID NO: 221535 - RNA, 22 nt, Human
auaaguuugucuuuguaaagau

SEQ ID NO: 221536 - RNA, 18 nt, Human
cugaggcuuagagagguu

SEQ ID NO: 221537 - RNA, 22 nt, Human
ucugugcaguucuugucuugac

SEQ ID NO: 221538 - RNA, 22 nt, Human
gucaggacucugacccgucccg

SEQ ID NO: 221539 - RNA, 22 nt, Human
uccuuaaauauuuacuguuaac

SEQ ID NO: 221540 - RNA, 22 nt, Human
gggcugacucaaccuugcaaag

SEQ ID NO: 221541 - RNA, 23 nt, Human
auuuuuagccucucugagcugag

SEQ ID NO: 221542 - RNA, 22 nt, Human
agcccagggaaccaggaagugg

SEQ ID NO: 221543 - RNA, 22 nt, Human
cauggaaugguugaaugacgaa

SEQ ID NO: 221544 - RNA, 22 nt, Human
gcagugacagacaacuguuuga

SEQ ID NO: 221545 - RNA, 22 nt, Human
aggcuuggagguucuguagcca

SEQ ID NO: 221546 - RNA, 22 nt, Human
aagagcauauuaauaguggaga

SEQ ID NO: 221547 - RNA, 22 nt, Human
aggcugccucugcaggaucccu

SEQ ID NO: 221548 - RNA, 22 nt, Human
uuuagagacacacuggcauuug

SEQ ID NO: 221549 - RNA, 22 nt, Human
cauuaagauuuuuuucuacugg

SEQ ID NO: 221550 - RNA, 22 nt, Human
ugagcagugaugcguuuuguuu

SEQ ID NO: 221551 - RNA, 22 nt, Human
aggccaguguggcuggagcaca

SEQ ID NO: 221552 - RNA, 22 nt, Human
ccuggaguuuuuugguugacuc

SEQ ID NO: 221553 - RNA, 22 nt, Human
uggaaagucucuuuugacugua

SEQ ID NO: 221554 - RNA, 22 nt, Human
acccugggucucaaucauccua

SEQ ID NO: 221555 - RNA, 22 nt, Human
ggagucugcucccagacaugau

SEQ ID NO: 221556 - RNA, 19 nt, Human
uuugggaagcccagagugu

SEQ ID NO: 221557 - RNA, 22 nt, Human
gcucacugccauucucuagaug

SEQ ID NO: 221558 - RNA, 22 nt, Human
gggugcagugguucacgccugu

SEQ ID NO: 221559 - RNA, 22 nt, Human
ugguagggacacuaugcagaaa

SEQ ID NO: 221560 - RNA, 22 nt, Human
uacugucuggcaauuaagaauc

SEQ ID NO: 221561 - RNA, 22 nt, Human
agaagcccagcauggaaccagc

SEQ ID NO: 221562 - RNA, 22 nt, Human
caaggccacguucugcaugcgg

SEQ ID NO: 221563 - RNA, 22 nt, Human
gcauggcaagaucaggagacca

SEQ ID NO: 221564 - RNA, 22 nt, Human
gaggccucaggaaugucgugug

SEQ ID NO: 221565 - RNA, 22 nt, Human
augaaggcuguguagauggaug

SEQ ID NO: 221566 - RNA, 22 nt, Human
gauuuucugagccuucaaauuu

SEQ ID NO: 221567 - RNA, 22 nt, Human
gaguggggaaagccaggacaga

SEQ ID NO: 221568 - RNA, 22 nt, Human
ucccagcagagccagcaagccg

SEQ ID NO: 221569 - RNA, 22 nt, Human
cugccugugucuauuccuuuuu

SEQ ID NO: 221570 - RNA, 22 nt, Human
cuggaagguucuuugugugccu

SEQ ID NO: 221571 - RNA, 22 nt, Human
guccuuggcauucugagucuug

SEQ ID NO: 221572 - RNA, 19 nt, Human
agauuuaccucauauaguu

SEQ ID NO: 221573 - RNA, 22 nt, Human
auggcuuugaaguucagcuuuu

SEQ ID NO: 221574 - RNA, 22 nt, Human
ugauuacacaccacagugcucc

SEQ ID NO: 221575 - RNA, 22 nt, Human
uuuaacauguaauugcugcuuu

SEQ ID NO: 221576 - RNA, 22 nt, Human
agcagguguauauaaggcugag

SEQ ID NO: 221577 - RNA, 22 nt, Human
caguagccuuauuuggaucauu

SEQ ID NO: 221578 - RNA, 22 nt, Human
aagggcauugaggcugagagac

SEQ ID NO: 221579 - RNA, 19 nt, Human
ugcuucagaaauagaaagc

SEQ ID NO: 221580 - RNA, 22 nt, Human
ugagugggaugaguuagaggug

SEQ ID NO: 221581 - RNA, 22 nt, Human
aagggcucuucuauuuauggcc

SEQ ID NO: 221582 - RNA, 22 nt, Human
gccacaggcuuaggagggaggu

SEQ ID NO: 221583 - RNA, 22 nt, Human
ggcuucauggaguucuacacca

SEQ ID NO: 221584 - RNA, 22 nt, Human
aggacacacccagcucacgggg

SEQ ID NO: 221585 - RNA, 22 nt, Human
ccuggcuuugaccuugcuguuu

SEQ ID NO: 221586 - RNA, 22 nt, Human
aaagagaaaaugaucuguacau

SEQ ID NO: 221587 - RNA, 22 nt, Human
cugggccucauccucagaguuu

SEQ ID NO: 221588 - RNA, 23 nt, Human
agcugagaauaaggagccguuug

SEQ ID NO: 221589 - RNA, 17 nt, Human
uggcaagaauggaaaug

SEQ ID NO: 221590 - RNA, 23 nt, Human
agguuaugauuauagagcgagga

SEQ ID NO: 221591 - RNA, 22 nt, Human
uuccauuuauucuuguccagau

SEQ ID NO: 221592 - RNA, 22 nt, Human
agcucaggcaacucugggcccc

SEQ ID NO: 221593 - RNA, 17 nt, Human
gaaaggaggcaacacug

SEQ ID NO: 221594 - RNA, 22 nt, Human
guuuuggagucaggcuuagaug

SEQ ID NO: 221595 - RNA, 22 nt, Human
guggccucugugcuccugccua

SEQ ID NO: 221596 - RNA, 22 nt, Human
aucagaaaaacauaauguuauu

SEQ ID NO: 221597 - RNA, 22 nt, Human
guaggcagugcuugauuuucca

SEQ ID NO: 221598 - RNA, 22 nt, Human
aauguacaaggguuccaguuuu

SEQ ID NO: 221599 - RNA, 22 nt, Human
gccagguucuggggagguacaa

SEQ ID NO: 221600 - RNA, 22 nt, Human
uggccagguugggcuuugcagc

SEQ ID NO: 221601 - RNA, 22 nt, Human
gaucauuuacuuguucuggacu

SEQ ID NO: 221602 - RNA, 23 nt, Human
uugaauuucucuugcaauauuua

SEQ ID NO: 221603 - RNA, 22 nt, Human
caaggcaggcaguucacuugag

SEQ ID NO: 221604 - RNA, 22 nt, Human
uacuauuuugacaugaaauuga

SEQ ID NO: 221605 - RNA, 22 nt, Human
ccuccuucuggggccuucugcu

SEQ ID NO: 221606 - RNA, 22 nt, Human
aggcucucacuauccuccuagc

SEQ ID NO: 221607 - RNA, 22 nt, Human
agaggacagguuuuccaugggc

SEQ ID NO: 221608 - RNA, 22 nt, Human
gguccucaaucccaacaaggca

SEQ ID NO: 221609 - RNA, 22 nt, Human
cccugaggcaaaggcuagaguu

SEQ ID NO: 221610 - RNA, 22 nt, Human
ugucuagacauuagcuucagcu

SEQ ID NO: 221611 - RNA, 22 nt, Human
ccuugaaaccacaucuuagaaa

SEQ ID NO: 221612 - RNA, 22 nt, Human
aggucacacaacugucagaggc

SEQ ID NO: 221613 - RNA, 22 nt, Human
ggccugugucugugccuguccu

SEQ ID NO: 221614 - RNA, 19 nt, Human
uccugcagguggcuugcag

SEQ ID NO: 221615 - RNA, 22 nt, Human
aacauuuguuuggcuucaauua

SEQ ID NO: 221616 - RNA, 22 nt, Human
ucuucagauaaagggagaguau

SEQ ID NO: 221617 - RNA, 22 nt, Human
ucagagagccucaggcacugcc

SEQ ID NO: 221618 - RNA, 22 nt, Human
gcugaggauugaagaguugcca

SEQ ID NO: 221619 - RNA, 22 nt, Human
cagcuauucucugaaaugaaua

SEQ ID NO: 221620 - RNA, 22 nt, Human
ugcaugugucgggccugugcua

SEQ ID NO: 221621 - RNA, 20 nt, Human
gcaggcagggaaugggggug

SEQ ID NO: 221622 - RNA, 22 nt, Human
ggcucugguugaccaugauggc

SEQ ID NO: 221623 - RNA, 22 nt, Human
auagacaaucccccauccuacc

SEQ ID NO: 221624 - RNA, 21 nt, Human
agauuugucccuucccauuua

SEQ ID NO: 221625 - RNA, 22 nt, Human
aaaugcuuuggugcugguacag

SEQ ID NO: 221626 - RNA, 22 nt, Human
gagggggcucugccaaccuguc

SEQ ID NO: 221627 - RNA, 20 nt, Human
uccagcccagguccugccug

SEQ ID NO: 221628 - RNA, 21 nt, Human
ccagcugucuguccuuaggca

SEQ ID NO: 221629 - RNA, 22 nt, Human
cugggcucccucaugugucugc

SEQ ID NO: 221630 - RNA, 22 nt, Human
uugagcaauuaggaaauaaaga

SEQ ID NO: 221631 - RNA, 17 nt, Human
gacagcugguuccuggc

SEQ ID NO: 221632 - RNA, 22 nt, Human
uauggaaacuaauucauuuuuc

SEQ ID NO: 221633 - RNA, 22 nt, Human
gcaagacaauggagcauaaacg

SEQ ID NO: 221634 - RNA, 22 nt, Human
cagcagccuggccccuccucgg

SEQ ID NO: 221635 - RNA, 22 nt, Human
uuuucuagggugcuaaaugaac

SEQ ID NO: 221636 - RNA, 22 nt, Human
agugcccuucaugaagcaagag

SEQ ID NO: 221637 - RNA, 22 nt, Human
uugugcaugacugugaauagcu

SEQ ID NO: 221638 - RNA, 22 nt, Human
auacagauguugaauguuauau

SEQ ID NO: 221639 - RNA, 22 nt, Human
aaaugcaaggccaugugaagga

SEQ ID NO: 221640 - RNA, 21 nt, Human
auucuagacaacacugaaauc

SEQ ID NO: 221641 - RNA, 22 nt, Human
caaugaaaaugaggacuccugu

SEQ ID NO: 221642 - RNA, 22 nt, Human
aggcacaguggcccuguuuggg

SEQ ID NO: 221643 - RNA, 22 nt, Human
uuugaaacucugaacauguuuc

SEQ ID NO: 221644 - RNA, 22 nt, Human
ccuuccagguuuuggcuccauu

SEQ ID NO: 221645 - RNA, 22 nt, Human
gagcaggaaggccagaaggguc

SEQ ID NO: 221646 - RNA, 22 nt, Human
ugucagugucuaugaagaauuu

SEQ ID NO: 221647 - RNA, 22 nt, Human
acugaggacagugaggagggcu

SEQ ID NO: 221648 - RNA, 22 nt, Human
uuuaagcaaguugacauagcau

SEQ ID NO: 221649 - RNA, 22 nt, Human
ugaauacaggaaaauauacuga

SEQ ID NO: 221650 - RNA, 22 nt, Human
gacuuuauuacuaacccuguga

SEQ ID NO: 221651 - RNA, 22 nt, Human
aaguuccucuucucugcaggga

SEQ ID NO: 221652 - RNA, 22 nt, Human
uucaugaaagacagcaacugug

SEQ ID NO: 221653 - RNA, 22 nt, Human
ugaaagcaugcuugccaagcuu

SEQ ID NO: 221654 - RNA, 22 nt, Human
uaaagacacccagggagggacu

SEQ ID NO: 221655 - RNA, 22 nt, Human
caucuuuaguagguucuggaga

SEQ ID NO: 221656 - RNA, 22 nt, Human
gagccaaggguugccauggaga

SEQ ID NO: 221657 - RNA, 22 nt, Human
aaaugcuacauacacaucaggg

SEQ ID NO: 221658 - RNA, 22 nt, Human
acaggcucuggggcaggauggc

SEQ ID NO: 221659 - RNA, 22 nt, Human
ggagauggcuggcagguagaug

SEQ ID NO: 221660 - RNA, 22 nt, Human
aggcaggagugacccugacagg

SEQ ID NO: 221661 - RNA, 20 nt, Human
auacaguaggugcucaauau

SEQ ID NO: 221662 - RNA, 22 nt, Human
ucuuuggaguguuaucaguaau

SEQ ID NO: 221663 - RNA, 20 nt, Human
aggcuggcacuccuggccag

SEQ ID NO: 221664 - RNA, 22 nt, Human
ugcagagucacccagauaauua

SEQ ID NO: 221665 - RNA, 22 nt, Human
uucaacuagaggugauuuugcc

SEQ ID NO: 221666 - RNA, 22 nt, Human
agagaccugaagagcuuccuca

SEQ ID NO: 221667 - RNA, 22 nt, Human
gcacugaaauuauaugcauuug

SEQ ID NO: 221668 - RNA, 22 nt, Human
ugaugaggagacuguggcuugg

SEQ ID NO: 221669 - RNA, 22 nt, Human
aaaggcuuguacagcagccuuc

SEQ ID NO: 221670 - RNA, 22 nt, Human
uccucggcugggccccaggcuu

SEQ ID NO: 221671 - RNA, 23 nt, Human
ugaaguucauucucacugaugua

SEQ ID NO: 221672 - RNA, 22 nt, Human
accaaggaagaaucuauuugag

SEQ ID NO: 221673 - RNA, 22 nt, Human
ugggaagguuagcaguuuguca

SEQ ID NO: 221674 - RNA, 22 nt, Human
augucauuuaaauguuuguaua

SEQ ID NO: 221675 - RNA, 22 nt, Human
ugcccaggcuggagugcagagg

SEQ ID NO: 221676 - RNA, 22 nt, Human
ucuuucugaugggaagggucaa

SEQ ID NO: 221677 - RNA, 22 nt, Human
uaguaaauuaaaauauugacuu

SEQ ID NO: 221678 - RNA, 22 nt, Human
acugucaugaucgaagauguca

SEQ ID NO: 221679 - RNA, 22 nt, Human
caggcauaucuacauuauccaa

SEQ ID NO: 221680 - RNA, 22 nt, Human
cagcaagacuucagggcuuggu

SEQ ID NO: 221681 - RNA, 22 nt, Human
gggggcaguaaggauauggaaa

SEQ ID NO: 221682 - RNA, 22 nt, Human
uggcaggguacaccuuaacacc

SEQ ID NO: 221683 - RNA, 23 nt, Human
cccaggaguuucacugcaaaggu

SEQ ID NO: 221684 - RNA, 17 nt, Human
agguuuaugguauuuga

SEQ ID NO: 221685 - RNA, 22 nt, Human
aagcagcacagcaaugacucua

SEQ ID NO: 221686 - RNA, 22 nt, Human
auuauccagcaccaaugucaga

SEQ ID NO: 221687 - RNA, 22 nt, Human
ugcuuauuaacauguauaucuc

SEQ ID NO: 221688 - RNA, 22 nt, Human
aggcuggagugcuggagugcug

SEQ ID NO: 221689 - RNA, 22 nt, Human
gcugcuaagcguuucuguucca

SEQ ID NO: 221690 - RNA, 22 nt, Human
ucugaaaugcaaauuugacuga

SEQ ID NO: 221691 - RNA, 22 nt, Human
gacauucuaaaaaauauggaag

SEQ ID NO: 221692 - RNA, 22 nt, Human
gagcagugccaaagaauuugcg

SEQ ID NO: 221693 - RNA, 22 nt, Human
aggcaggcacacuuccuccagg

SEQ ID NO: 221694 - RNA, 22 nt, Human
gggcaggggucaguggccccaa

SEQ ID NO: 221695 - RNA, 22 nt, Human
gaauacauccagagcagggcug

SEQ ID NO: 221696 - RNA, 22 nt, Human
uuuauuguuguuagucauaagu

SEQ ID NO: 221697 - RNA, 22 nt, Human
gcagagcauguccucaggacag

SEQ ID NO: 221698 - RNA, 22 nt, Human
gcuguucuguccccauggguaa

SEQ ID NO: 221699 - RNA, 22 nt, Human
uuucagaauagcaaagcaagcu

SEQ ID NO: 221700 - RNA, 22 nt, Human
agcaagaugaaggauucaagac

SEQ ID NO: 221701 - RNA, 22 nt, Human
uggcccgccggaagaagauguc

SEQ ID NO: 221702 - RNA, 22 nt, Human
agcaguggugugaggagggcuc

SEQ ID NO: 221703 - RNA, 22 nt, Human
uucugcugguaacuauguuuca

SEQ ID NO: 221704 - RNA, 22 nt, Human
caucuuuucagaagccauucug

SEQ ID NO: 221705 - RNA, 22 nt, Human
uagaucauggaguaaaauggaa

SEQ ID NO: 221706 - RNA, 22 nt, Human
uucucuagguuuuagaugaaga

SEQ ID NO: 221707 - RNA, 20 nt, Human
caggagggacauuucagcau

SEQ ID NO: 221708 - RNA, 22 nt, Human
aucagaagcuuguagucucucu

SEQ ID NO: 221709 - RNA, 22 nt, Human
ggcuccuucaaagcaccuggcu

SEQ ID NO: 221710 - RNA, 22 nt, Human
ggcaggugcucugugggccugg

SEQ ID NO: 221711 - RNA, 22 nt, Human
accacaggaauugcucuguggu

SEQ ID NO: 221712 - RNA, 22 nt, Human
cuggggugucucgucugccauu

SEQ ID NO: 221713 - RNA, 17 nt, Human
ugcucaaauacuuuuga

SEQ ID NO: 221714 - RNA, 22 nt, Human
aaggucugugaggcuguuuguc

SEQ ID NO: 221715 - RNA, 22 nt, Human
cucccagguuccgacgccucuu

SEQ ID NO: 221716 - RNA, 22 nt, Human
cucaaauagaacugaucuauaa

SEQ ID NO: 221717 - RNA, 22 nt, Human
uuccaggaacagaugaagguug

SEQ ID NO: 221718 - RNA, 22 nt, Human
gugccagagaugacaggccugc

SEQ ID NO: 221719 - RNA, 22 nt, Human
ugcauuaagaauuucugaggau

SEQ ID NO: 221720 - RNA, 22 nt, Human
ugguuccaguuuucaauagagc

SEQ ID NO: 221721 - RNA, 18 nt, Human
agaaggagcuaugggcag

SEQ ID NO: 221722 - RNA, 22 nt, Human
aagcaauagcaacaacuuuaca

SEQ ID NO: 221723 - RNA, 22 nt, Human
gagcuuuaagggauaaaaugau

SEQ ID NO: 221724 - RNA, 22 nt, Human
uugauauucugagaagcugaag

SEQ ID NO: 221725 - RNA, 22 nt, Human
agggcuccaaggaaguguagcu

SEQ ID NO: 221726 - RNA, 22 nt, Human
cagggcuccaugcagggacucc

SEQ ID NO: 221727 - RNA, 22 nt, Human
auguuuuauguuccacucaagg

SEQ ID NO: 221728 - RNA, 23 nt, Human
gggcagguuuuuauaggcuucag

SEQ ID NO: 221729 - RNA, 22 nt, Human
uucagcaacucaaaccuauuag

SEQ ID NO: 221730 - RNA, 22 nt, Human
aaggugguaauagugcaggauu

SEQ ID NO: 221731 - RNA, 22 nt, Human
ugcagagaaaacuccuggguac

SEQ ID NO: 221732 - RNA, 22 nt, Human
agcaggugucacuuucacucca

SEQ ID NO: 221733 - RNA, 22 nt, Human
cagagagggcggcccuggcuuc

SEQ ID NO: 221734 - RNA, 22 nt, Human
ggcaaacacaccucggugagaa

SEQ ID NO: 221735 - RNA, 22 nt, Human
uguugcuguaugaauaggaagg

SEQ ID NO: 221736 - RNA, 18 nt, Human
uuggcuucuuuccuuccu

SEQ ID NO: 221737 - RNA, 23 nt, Human
gccuggguuguaacuagugcauc

SEQ ID NO: 221738 - RNA, 22 nt, Human
ccaggagcuggagggugcagug

SEQ ID NO: 221739 - RNA, 22 nt, Human
uuacagaucaucaagguauaau

SEQ ID NO: 221740 - RNA, 22 nt, Human
acucuggccaggugcgguaugu

SEQ ID NO: 221741 - RNA, 22 nt, Human
gaggcccaaggacucugucccg

SEQ ID NO: 221742 - RNA, 22 nt, Human
caaugcaagcaagauggucaca

SEQ ID NO: 221743 - RNA, 22 nt, Human
cauggggagacaccuagggaaa

SEQ ID NO: 221744 - RNA, 22 nt, Human
acagaugagaagcugcauucaa

SEQ ID NO: 221745 - RNA, 22 nt, Human
auguggauuguaggaaacugau

SEQ ID NO: 221746 - RNA, 22 nt, Human
acauuugacauuuaguaucagc

SEQ ID NO: 221747 - RNA, 22 nt, Human
ucacuaaguuacauuuaguauu

SEQ ID NO: 221748 - RNA, 22 nt, Human
ccaaggagcucauauucuuguu

SEQ ID NO: 221749 - RNA, 18 nt, Human
gacaggugggugagacca

SEQ ID NO: 221750 - RNA, 20 nt, Human
uuuuaugucaccuuccuguc

SEQ ID NO: 221751 - RNA, 22 nt, Human
aacacugagaggggaguggcac

SEQ ID NO: 221752 - RNA, 22 nt, Human
acccucagaguaggcacugcug

SEQ ID NO: 221753 - RNA, 19 nt, Human
ucaaaggcuuuuaggagac

SEQ ID NO: 221754 - RNA, 22 nt, Human
ggguccugcgugggcccaggac

SEQ ID NO: 221755 - RNA, 22 nt, Human
aguacacacaguagaauagagu

SEQ ID NO: 221756 - RNA, 22 nt, Human
gccucugcaauuacauugugcc

SEQ ID NO: 221757 - RNA, 20 nt, Human
ugcagggcucugcuucucuc

SEQ ID NO: 221758 - RNA, 18 nt, Human
gugcaaugaauagcagag

SEQ ID NO: 221759 - RNA, 23 nt, Human
ccuggaguacuaaggggauggaa

SEQ ID NO: 221760 - RNA, 22 nt, Human
augaggcuaugaauggggagau

SEQ ID NO: 221761 - RNA, 22 nt, Human
cuuagaauaaaagggggcuaua

SEQ ID NO: 221762 - RNA, 22 nt, Human
auacaugacagcauagcauccu

SEQ ID NO: 221763 - RNA, 22 nt, Human
ucccucagaaauucucucugaa

SEQ ID NO: 221764 - RNA, 22 nt, Human
gcuucucggggagguuagccag

SEQ ID NO: 221765 - RNA, 22 nt, Human
guucugggucuggacacacaga

SEQ ID NO: 221766 - RNA, 22 nt, Human
gucuggcucccacucuuacaaa

SEQ ID NO: 221767 - RNA, 22 nt, Human
uuuccagggcucuguagaagaa

SEQ ID NO: 221768 - RNA, 22 nt, Human
cagacaggaaguucagaagaaa

SEQ ID NO: 221769 - RNA, 20 nt, Human
augugucuguaaacaacucu

SEQ ID NO: 221770 - RNA, 22 nt, Human
aaccauuugccauuaucuuaag

SEQ ID NO: 221771 - RNA, 22 nt, Human
cuguuuaucauguacauuucca

SEQ ID NO: 221772 - RNA, 22 nt, Human
ggggaggaguguacagguuuau

SEQ ID NO: 221773 - RNA, 22 nt, Human
cacugggagucguaagacacgg

SEQ ID NO: 221774 - RNA, 22 nt, Human
agcuccagccucuucuggaggu

SEQ ID NO: 221775 - RNA, 22 nt, Human
cucagauguagaaagauuguga

SEQ ID NO: 221776 - RNA, 22 nt, Human
cccagcagccagaaugaggagc

SEQ ID NO: 221777 - RNA, 22 nt, Human
aggacacacaaagagugagaac

SEQ ID NO: 221778 - RNA, 22 nt, Human
uagcaaaguuuuguggugauua

SEQ ID NO: 221779 - RNA, 22 nt, Human
uuuuauauugagugagaguucc

SEQ ID NO: 221780 - RNA, 22 nt, Human
ucuacuuuauaaguauauaagu

SEQ ID NO: 221781 - RNA, 22 nt, Human
augaggagaccaaggccugaug

SEQ ID NO: 221782 - RNA, 22 nt, Human
cugggcucuguguuucaguuuc

SEQ ID NO: 221783 - RNA, 22 nt, Human
ggaaggagggcggcaaugauga

SEQ ID NO: 221784 - RNA, 22 nt, Human
auccaugaagguacuucucagg

SEQ ID NO: 221785 - RNA, 22 nt, Human
gggagacccccaaugccagguc

SEQ ID NO: 221786 - RNA, 22 nt, Human
cccacucccugcacgccugccg

SEQ ID NO: 221787 - RNA, 20 nt, Human
cucugggcugcguugcaaac

SEQ ID NO: 221788 - RNA, 19 nt, Human
aggugcaggucacagggga

SEQ ID NO: 221789 - RNA, 22 nt, Human
uggaggcaguuuaagucugaga

SEQ ID NO: 221790 - RNA, 22 nt, Human
aaauacuggcaagugcuaauuc

SEQ ID NO: 221791 - RNA, 22 nt, Human
aucaggaugacaacugcugggu

SEQ ID NO: 221792 - RNA, 22 nt, Human
uccuuggaacauugauccaaac

SEQ ID NO: 221793 - RNA, 20 nt, Human
cacaggcuauaugagagcca

SEQ ID NO: 221794 - RNA, 18 nt, Human
cagagugggccaagagac

SEQ ID NO: 221795 - RNA, 22 nt, Human
caggccugugacaccgugucug

SEQ ID NO: 221796 - RNA, 22 nt, Human
ucaaaagaaacaccauguuccu

SEQ ID NO: 221797 - RNA, 22 nt, Human
auacaaauuuauagaugcauuu

SEQ ID NO: 221798 - RNA, 22 nt, Human
uggagcucuggaaguucuaagc

SEQ ID NO: 221799 - RNA, 22 nt, Human
gggagggguugcauguuugagu

SEQ ID NO: 221800 - RNA, 22 nt, Human
ugaggcucuuccuccccugcuc

SEQ ID NO: 221801 - RNA, 22 nt, Human
gaauguuuuucauuggugacuc

SEQ ID NO: 221802 - RNA, 22 nt, Human
ucccugggguuccuccagccac

SEQ ID NO: 221803 - RNA, 22 nt, Human
guauaucuucagaaauuauagg

SEQ ID NO: 221804 - RNA, 22 nt, Human
ccaggccagagugcaguggcac

SEQ ID NO: 221805 - RNA, 22 nt, Human
cugagggccuuggcuccugccc

SEQ ID NO: 221806 - RNA, 22 nt, Human
ugagaugcaggagaugggacug

SEQ ID NO: 221807 - RNA, 22 nt, Human
cccugccaggguccugacagac

SEQ ID NO: 221808 - RNA, 22 nt, Human
gauccacagcugcgguaggaga

SEQ ID NO: 221809 - RNA, 22 nt, Human
aucaggauucaccccagagcug

SEQ ID NO: 221810 - RNA, 18 nt, Human
aggggcagcuugugugga

SEQ ID NO: 221811 - RNA, 22 nt, Human
agucugcuuccuggagaacuca

SEQ ID NO: 221812 - RNA, 22 nt, Human
uaguccagaaacugagcuuaua

SEQ ID NO: 221813 - RNA, 22 nt, Human
ucagaaggaagaagucauggga

SEQ ID NO: 221814 - RNA, 21 nt, Human
aagcaggcuguaaucaugugg

SEQ ID NO: 221815 - RNA, 22 nt, Human
ucuccucccaggcucuuccagg

SEQ ID NO: 221816 - RNA, 22 nt, Human
ucaguaaauaacucagaugcuc

SEQ ID NO: 221817 - RNA, 22 nt, Human
aaagaaggaccuggaggaggau

SEQ ID NO: 221818 - RNA, 22 nt, Human
uguauacaggauuacucauagc

SEQ ID NO: 221819 - RNA, 22 nt, Human
uagagguguugacgccaaggua

SEQ ID NO: 221820 - RNA, 22 nt, Human
gccaggcuaagaaaggugugau

SEQ ID NO: 221821 - RNA, 22 nt, Human
gccagagccggcuucacaggau

SEQ ID NO: 221822 - RNA, 22 nt, Human
ucaggcugcaucuguaagggug

SEQ ID NO: 221823 - RNA, 22 nt, Human
acuguaaagagguguaucuuua

SEQ ID NO: 221824 - RNA, 22 nt, Human
aagucucuggcaaaugaucuug

SEQ ID NO: 221825 - RNA, 22 nt, Human
ucagggcaagucucagaagguu

SEQ ID NO: 221826 - RNA, 22 nt, Human
ggaccugcccuggcucagaugc

SEQ ID NO: 221827 - RNA, 22 nt, Human
cugugcaguggcagcguguggg

SEQ ID NO: 221828 - RNA, 22 nt, Human
uggaagggaaaguuuggggucc

SEQ ID NO: 221829 - RNA, 22 nt, Human
uggcaauuggcaauuucguaug

SEQ ID NO: 221830 - RNA, 22 nt, Human
gcucccagcaauugaggcagcc

SEQ ID NO: 221831 - RNA, 22 nt, Human
ugguaacuuucagcauggugac

SEQ ID NO: 221832 - RNA, 22 nt, Human
ccugccagugaagcugacgggc

SEQ ID NO: 221833 - RNA, 18 nt, Human
guucccagauggugcuga

SEQ ID NO: 221834 - RNA, 22 nt, Human
agucugucuaauauuauucagg

SEQ ID NO: 221835 - RNA, 22 nt, Human
auaugcuuccccuucuuuuugg

SEQ ID NO: 221836 - RNA, 22 nt, Human
cauuuuauccucugggaagcua

SEQ ID NO: 221837 - RNA, 22 nt, Human
ggcauauguagcguguguucug

SEQ ID NO: 221838 - RNA, 22 nt, Human
agcagcauuuaaggauccaagu

SEQ ID NO: 221839 - RNA, 21 nt, Human
gguguccugagggauagguag

SEQ ID NO: 221840 - RNA, 22 nt, Human
uauucauggggguccagguacc

SEQ ID NO: 221841 - RNA, 20 nt, Human
ggcaggaccccaguggcauc

SEQ ID NO: 221842 - RNA, 22 nt, Human
ugcagguggcagcggggcacca

SEQ ID NO: 221843 - RNA, 19 nt, Human
uuuggcucuggucagagag

SEQ ID NO: 221844 - RNA, 22 nt, Human
cacaggcuccggccuugcagcc

SEQ ID NO: 221845 - RNA, 22 nt, Human
acagagagcugugauugaguua

SEQ ID NO: 221846 - RNA, 22 nt, Human
gguaauaagaucuguuacaugg

SEQ ID NO: 221847 - RNA, 20 nt, Human
aggguggggacguucugacu

SEQ ID NO: 221848 - RNA, 21 nt, Human
ugcauaaagaaauacaaauac

SEQ ID NO: 221849 - RNA, 22 nt, Human
cacuguucuuuuuguaguccaa

SEQ ID NO: 221850 - RNA, 22 nt, Human
aaacuagagauggcagguggaa

SEQ ID NO: 221851 - RNA, 22 nt, Human
ugcagagaguuagggcccguau

SEQ ID NO: 221852 - RNA, 22 nt, Human
gggcaggagagggccaccugga

SEQ ID NO: 221853 - RNA, 22 nt, Human
ccugaggaccagcacccaucug

SEQ ID NO: 221854 - RNA, 22 nt, Human
gacaacaggcagacgucagaaa

SEQ ID NO: 221855 - RNA, 22 nt, Human
aggcagcuuucuggugcaccau

SEQ ID NO: 221856 - RNA, 22 nt, Human
agguccucugugccugcuggcg

SEQ ID NO: 221857 - RNA, 22 nt, Human
ggagggugcauuuuacccugug

SEQ ID NO: 221858 - RNA, 22 nt, Human
ugagaacaguuggaagcaguca

SEQ ID NO: 221859 - RNA, 22 nt, Human
augccaggccccacgcugggca

SEQ ID NO: 221860 - RNA, 20 nt, Human
ggguccaggacucugaauuu

SEQ ID NO: 221861 - RNA, 22 nt, Human
acugggccuugccauggcagcc

SEQ ID NO: 221862 - RNA, 22 nt, Human
gugcccugaugcaauugucuca

SEQ ID NO: 221863 - RNA, 22 nt, Human
ucagggcugcauacaggagaua

SEQ ID NO: 221864 - RNA, 22 nt, Human
ccacaucugguggccagugcua

SEQ ID NO: 221865 - RNA, 22 nt, Human
agcaacaguguauaucauaggc

SEQ ID NO: 221866 - RNA, 22 nt, Human
ucaucugaagauugcuguucaa

SEQ ID NO: 221867 - RNA, 21 nt, Human
gcuggcuuccugagggcugag

SEQ ID NO: 221868 - RNA, 22 nt, Human
uagaucuuguuacagauuuccu

SEQ ID NO: 221869 - RNA, 22 nt, Human
acccugggaacuggaaacugga

SEQ ID NO: 221870 - RNA, 22 nt, Human
uggaggcaguaacugagcaaca

SEQ ID NO: 221871 - RNA, 22 nt, Human
ccacagagcauuagauuucaga

SEQ ID NO: 221872 - RNA, 22 nt, Human
ugagcacauuucacaugacagg

SEQ ID NO: 221873 - RNA, 22 nt, Human
acuuuauuuccuauugcaucca

SEQ ID NO: 221874 - RNA, 22 nt, Human
cugugcaguccagcccuggaca

SEQ ID NO: 221875 - RNA, 23 nt, Human
cagucugcagcccacuugggcag

SEQ ID NO: 221876 - RNA, 22 nt, Human
ucugccugagggagcugaggaa

SEQ ID NO: 221877 - RNA, 22 nt, Human
ccagaauagaaugaaagaaggg

SEQ ID NO: 221878 - RNA, 22 nt, Human
uuccugaaugcuguugugcugu

SEQ ID NO: 221879 - RNA, 22 nt, Human
uggucaggauucucagcccuuc

SEQ ID NO: 221880 - RNA, 22 nt, Human
cacaugagugagaacaugcagu

SEQ ID NO: 221881 - RNA, 22 nt, Human
aaauaauuauagcgagucuauc

SEQ ID NO: 221882 - RNA, 22 nt, Human
gcuuuuggaccucugauguuuc

SEQ ID NO: 221883 - RNA, 22 nt, Human
guggggaguguucugugauugg

SEQ ID NO: 221884 - RNA, 22 nt, Human
uggcaggaaaaagggccagagg

SEQ ID NO: 221885 - RNA, 22 nt, Human
uggccuggcccugaggcccugu

SEQ ID NO: 221886 - RNA, 22 nt, Human
uuagaaguacauuuagaacaua

SEQ ID NO: 221887 - RNA, 20 nt, Human
uggaaguucuguugcauugg

SEQ ID NO: 221888 - RNA, 22 nt, Human
aggggaaggccagccuguagag

SEQ ID NO: 221889 - RNA, 22 nt, Human
uuuacuucauuuccagugagga

SEQ ID NO: 221890 - RNA, 22 nt, Human
aacagcagcaaguaagcagguc

SEQ ID NO: 221891 - RNA, 22 nt, Human
uggguccuugcuggcuucaaag

SEQ ID NO: 221892 - RNA, 22 nt, Human
gaggagcugagccacguccugg

SEQ ID NO: 221893 - RNA, 20 nt, Human
cuccugggacugcugguuau

SEQ ID NO: 221894 - RNA, 22 nt, Human
acauguuuggcucuaugcuaua

SEQ ID NO: 221895 - RNA, 22 nt, Human
cagagcagaaaccugggugauu

SEQ ID NO: 221896 - RNA, 22 nt, Human
agcucaggcucugcagggacua

SEQ ID NO: 221897 - RNA, 22 nt, Human
uacagcuuuagcaaauuaccua

SEQ ID NO: 221898 - RNA, 22 nt, Human
cucuggguggucucacugagug

SEQ ID NO: 221899 - RNA, 22 nt, Human
uguucauucgcuauugucuaug

SEQ ID NO: 221900 - RNA, 21 nt, Human
gauuugcagaaacuagacagg

SEQ ID NO: 221901 - RNA, 21 nt, Human
acagcugucuuagcuugggcu

SEQ ID NO: 221902 - RNA, 22 nt, Human
auaacuuauuagauuggagcug

SEQ ID NO: 221903 - RNA, 22 nt, Human
cacaggaagcugacugcuggca

SEQ ID NO: 221904 - RNA, 21 nt, Human
uuacuucugcuuguuauuguc

SEQ ID NO: 221905 - RNA, 22 nt, Human
uccuggaguugugcagugcaca

SEQ ID NO: 221906 - RNA, 22 nt, Human
gacagccaucagcacacgcugc

SEQ ID NO: 221907 - RNA, 22 nt, Human
uggcuucucugugugagggaga

SEQ ID NO: 221908 - RNA, 19 nt, Human
uuucccagucccaggagug

SEQ ID NO: 221909 - RNA, 22 nt, Human
cucugggugggcagcagaugga

SEQ ID NO: 221910 - RNA, 22 nt, Human
cccuggcucugccucagagccc

SEQ ID NO: 221911 - RNA, 22 nt, Human
ugcgcccagccaagucuggcac

SEQ ID NO: 221912 - RNA, 22 nt, Human
uagagcuugauuggauucaggg

SEQ ID NO: 221913 - RNA, 22 nt, Human
caacauucuuaucacuauaagc

SEQ ID NO: 221914 - RNA, 22 nt, Human
aucacgugguuugagaguacgc

SEQ ID NO: 221915 - RNA, 21 nt, Human
ggccuuccccugcagucuccg

SEQ ID NO: 221916 - RNA, 22 nt, Human
ggggacaguuaaagaccaagac

SEQ ID NO: 221917 - RNA, 22 nt, Human
aaaguuuggauccagcaaaaga

SEQ ID NO: 221918 - RNA, 22 nt, Human
cagggacccgcacagguagcau

SEQ ID NO: 221919 - RNA, 22 nt, Human
agccauuuugguaaugauaaca

SEQ ID NO: 221920 - RNA, 22 nt, Human
uuuuacaggugugagccaccau

SEQ ID NO: 221921 - RNA, 22 nt, Human
ugaggauggcagugugcucagc

SEQ ID NO: 221922 - RNA, 22 nt, Human
gcuggcugaggucuagcucuuu

SEQ ID NO: 221923 - RNA, 22 nt, Human
ugagggagcacacacugaagug

SEQ ID NO: 221924 - RNA, 22 nt, Human
agagggaacggaucccagcgcg

SEQ ID NO: 221925 - RNA, 22 nt, Human
gggcccuggacguggcggcaga

SEQ ID NO: 221926 - RNA, 22 nt, Human
acugaaggcuuaacucuuucau

SEQ ID NO: 221927 - RNA, 22 nt, Human
gccuggggggcaugucauaaua

SEQ ID NO: 221928 - RNA, 22 nt, Human
augcaaaagacuauuuguugcu

SEQ ID NO: 221929 - RNA, 22 nt, Human
aaaggccagguuggcugguauu

SEQ ID NO: 221930 - RNA, 22 nt, Human
ccagcccucgguagucccauag

SEQ ID NO: 221931 - RNA, 22 nt, Human
acugugcacccuggacaguguc

SEQ ID NO: 221932 - RNA, 22 nt, Human
caugcagugacucagacacagg

SEQ ID NO: 221933 - RNA, 22 nt, Human
gcagacagcauguugggcuauu

SEQ ID NO: 221934 - RNA, 22 nt, Human
agacaauuucaaaguaauauua

SEQ ID NO: 221935 - RNA, 23 nt, Human
uuagagaugauuaaaaaaucuug

SEQ ID NO: 221936 - RNA, 22 nt, Human
gcucagagaaagauuagucccu

SEQ ID NO: 221937 - RNA, 22 nt, Human
augaggcaggauuaagcuauca

SEQ ID NO: 221938 - RNA, 22 nt, Human
cagcaggcuguggaaauccugg

SEQ ID NO: 221939 - RNA, 22 nt, Human
cagagccaaaccucagggcccg

SEQ ID NO: 221940 - RNA, 22 nt, Human
cacacaucuuaucccaguuauu

SEQ ID NO: 221941 - RNA, 22 nt, Human
cauucggagguaguugagguua

SEQ ID NO: 221942 - RNA, 22 nt, Human
ccucugcacuucaccuuagcuc

SEQ ID NO: 221943 - RNA, 17 nt, Human
cugaggggagugcugug

SEQ ID NO: 221944 - RNA, 21 nt, Human
uuugcugaagauuuuaggcug

SEQ ID NO: 221945 - RNA, 22 nt, Human
ugcucccaaacgaccuacugug

SEQ ID NO: 221946 - RNA, 22 nt, Human
uauagaggccaccaacaugaaa

SEQ ID NO: 221947 - RNA, 20 nt, Human
agagugggugucacaggcug

SEQ ID NO: 221948 - RNA, 22 nt, Human
uacaguuaaaaaguucaauggu

SEQ ID NO: 221949 - RNA, 22 nt, Human
cucuuauuuuauggcauuugug

SEQ ID NO: 221950 - RNA, 22 nt, Human
acacauaugccauuacagcaaa

SEQ ID NO: 221951 - RNA, 20 nt, Human
aguuuagaggccaacaagcc

SEQ ID NO: 221952 - RNA, 22 nt, Human
ucucagaguaauucuuuaaggu

SEQ ID NO: 221953 - RNA, 22 nt, Human
agaguggcucugcugggcacag

SEQ ID NO: 221954 - RNA, 22 nt, Human
uagacuuugauauuguacaccc

SEQ ID NO: 221955 - RNA, 22 nt, Human
acauucuuggacuccacucuag

SEQ ID NO: 221956 - RNA, 22 nt, Human
uguuaaaaaugcagauuccuau

SEQ ID NO: 221957 - RNA, 22 nt, Human
agguuaaaaaggauucaguuaa

SEQ ID NO: 221958 - RNA, 22 nt, Human
uugcaaagagauaauccuaggc

SEQ ID NO: 221959 - RNA, 22 nt, Human
gagcaguucuccuugguagggg

SEQ ID NO: 221960 - RNA, 22 nt, Human
uuuaguguuugcguguacuccu

SEQ ID NO: 221961 - RNA, 22 nt, Human
ugcuggcucccaggagccgcug

SEQ ID NO: 221962 - RNA, 22 nt, Human
uuagugguaaggaugaaauuuc

SEQ ID NO: 221963 - RNA, 22 nt, Human
ggaccaggagcucagagcccuc

SEQ ID NO: 221964 - RNA, 22 nt, Human
ggaaucuuuuucauaagccuca

SEQ ID NO: 221965 - RNA, 22 nt, Human
cuccagugagugagcaggcgac

SEQ ID NO: 221966 - RNA, 22 nt, Human
gacacuuuauuaagcuguuguu

SEQ ID NO: 221967 - RNA, 22 nt, Human
gccacccccaaguagguggucu

SEQ ID NO: 221968 - RNA, 22 nt, Human
caguucucugugccucgcuggg

SEQ ID NO: 221969 - RNA, 19 nt, Human
aguggcugggcagaagcaa

SEQ ID NO: 221970 - RNA, 22 nt, Human
acauucaagaugcauucacuua

SEQ ID NO: 221971 - RNA, 22 nt, Human
accugcaguggccacuccuaau

SEQ ID NO: 221972 - RNA, 22 nt, Human
agcaaaguuaagguuucucuuu

SEQ ID NO: 221973 - RNA, 22 nt, Human
auuguauuagcacaauacaauu

SEQ ID NO: 221974 - RNA, 22 nt, Human
ugcagggauccuagcugaagag

SEQ ID NO: 221975 - RNA, 22 nt, Human
acacccagcugggccaccucca

SEQ ID NO: 221976 - RNA, 22 nt, Human
cacagcuggaaugggguaccug

SEQ ID NO: 221977 - RNA, 22 nt, Human
ugccuugaacauaguggacagu

SEQ ID NO: 221978 - RNA, 22 nt, Human
uccuggcagggucuaggucuag

SEQ ID NO: 221979 - RNA, 22 nt, Human
gaggagcaugggaaggcucugg

SEQ ID NO: 221980 - RNA, 22 nt, Human
cacacaguggaguauuacucag

SEQ ID NO: 221981 - RNA, 22 nt, Human
aagcuuuagagaugaguuccuu

SEQ ID NO: 221982 - RNA, 22 nt, Human
ucagacccaggugccaagcugu

SEQ ID NO: 221983 - RNA, 22 nt, Human
caggcucugcugcuacagcugu

SEQ ID NO: 221984 - RNA, 22 nt, Human
uggcagguggcacagccuggga

SEQ ID NO: 221985 - RNA, 22 nt, Human
cucagugugagugagaagugca

SEQ ID NO: 221986 - RNA, 22 nt, Human
gucuguacccacguccugcuag

SEQ ID NO: 221987 - RNA, 22 nt, Human
acccaggcuggcagaggcuccu

SEQ ID NO: 221988 - RNA, 22 nt, Human
ggcuuugcauuuugauggaggu

SEQ ID NO: 221989 - RNA, 21 nt, Human
ccuagccucuuacccagcuuu

SEQ ID NO: 221990 - RNA, 22 nt, Human
uuugaaaggaauuaggaugaca

SEQ ID NO: 221991 - RNA, 22 nt, Human
ggcuguggggccggguacagug

SEQ ID NO: 221992 - RNA, 22 nt, Human
gcacagaacagagaaauagcca

SEQ ID NO: 221993 - RNA, 22 nt, Human
auaucugguugguaauauaaca

SEQ ID NO: 221994 - RNA, 22 nt, Human
uaggagcuauaaugugaagucu

SEQ ID NO: 221995 - RNA, 22 nt, Human
cugcagggugacguugcccacc

SEQ ID NO: 221996 - RNA, 22 nt, Human
ucaguuaauggauucugucaga
